United States Patent Application Publication US 2017/0009304 A1 - sequence listing, part 21

SEQ ID NO: 431544 - DNA, 88 bp, Homo sapiens
gagacgctcgcgctcaagttcgagaacgcggccgccggcgagtaaccagctcataaatcacatcgaacagtttttggatactaatgaa

SEQ ID NO: 431545 - DNA, 50 bp, Homo sapiens
ccgggcgccacgccgcgaacggtttgttgataagccggggcccttcgtgg

SEQ ID NO: 431546 - DNA, 50 bp, Homo sapiens
gaggaactcagccctgattgcggagtggaagctggacacactatgtgact

SEQ ID NO: 431547 - DNA, 100 bp, Homo sapiens
tgtgtgacctcctctggtctgacccagaagggtttgccgctgtctctgctattccatcctccccataggggctctctcccctctcccatctcaagatggc

SEQ ID NO: 431548 - DNA, 115 bp, Homo sapiens
gctgccgcagatcgccgtggtgggcggccagagcgccggcaagagctcggtgctcgagaacttcgtgggcagtataagccatgtagaactgaatgttatgatgcattttatatat

SEQ ID NO: 431549 - DNA, 99 bp, Homo sapiens
taacgaggaactggagaagctgtgtgaggaactgcaggccaccttggatgggttgttgaatggatcgcagcagttaccattgctgctgggacagctgca

SEQ ID NO: 431550 - DNA, 95 bp, Homo sapiens
gttgctctgcatcctcaccagcatttggtgtggtcagtattttggattttcaccattctaataggagagtccatcccgatccggctcttcctggc

SEQ ID NO: 431551 - DNA, 83 bp, Homo sapiens
atttcttcggcattctgcaacagatcggatcaacatcaagaggaagggagcgtggccctccaccctcctgtccgtgcagaacg

SEQ ID NO: 431552 - DNA, 82 bp, Homo sapiens
gtgccacctcccgggacgctgcccacggcgtccccggtcgcgaataccctctaccatctgctttggtcagggtgccgctcga

SEQ ID NO: 431553 - DNA, 87 bp, Homo sapiens
aaacagaagttcacctgcacatcttgttttccctaacatcaagaatgtaccttccactggaagaatctcaaacagcgctacttactc

SEQ ID NO: 431554 - DNA, 100 bp, Homo sapiens
ttcagccagtataaaaacacagctcgacagtacgcctacttctataaagtcatccagactgctcactagaagctcagcccaaatatgttagaggtgggaa

SEQ ID NO: 431555 - DNA, 74 bp, Homo sapiens
agctgagtattggagccaggagcctgccatgagccttatgtttgatcatcggccaaggtcctggcgagaactgc

SEQ ID NO: 431556 - DNA, 82 bp, Homo sapiens
ggccgcgccgcgcctcagctctgacctgcctagagctggaacgttacctccagagcgagccctgctatgtttcagcctcaga

SEQ ID NO: 431557 - DNA, 90 bp, Homo sapiens
agctccagcaggcgctggctcctgctcaggatttgcctcaaagggcactgcaaaaattgaacagaggaatcccaaggaagctgcctgaat

SEQ ID NO: 431558 - DNA, 97 bp, Homo sapiens
tcagaagacagagggttttcttttgagcctgcctagggtagttaaaagacgagtgaatgctctcaaaaacctgcaagttaaatgtgcacagatagaa

SEQ ID NO: 431559 - DNA, 83 bp, Homo sapiens
accttctgatcagtgacacgggggagttaaagctggcagatttcggtgacttaagagattaaaattaatttggttgctgttgg

SEQ ID NO: 431560 - DNA, 75 bp, Homo sapiens
ggattttcagcttcagcaagcagattctggacaatcaggaagtccaagccacaatgatcctgccaagaatcctcc

SEQ ID NO: 431561 - DNA, 82 bp, Homo sapiens
ctggaagacgcgctcctgcgccggtttacatgtattattaagcaaaagtgaagtggcatataaatttccagagctcctacct

SEQ ID NO: 431562 - DNA, 100 bp, Homo sapiens
cagccggcagcccaccgccgccttcttggcgcgaccccaacccagccccagatgaagatgggaaggcattgtcagatgaggatataagagcagaggctga

SEQ ID NO: 431563 - DNA, 75 bp, Homo sapiens
ctccgagcggcgcgtgaagcgggagaagcgcgatgacggctacgaggccgatgtggacgagtgctcactagcaga

SEQ ID NO: 431564 - DNA, 100 bp, Homo sapiens
agctgccggagcccgagtggatcggggacggagagaacacgagcccatcaggaaatactacaagtacatcctcactcgaaattttgaagcactcaatgcc

SEQ ID NO: 431565 - DNA, 82 bp, Homo sapiens
ccaggtgtaagcgcagaaagcaggcgaacccgcggcgcaataacgtacctggagtagaacagaaaaattattatgtctgtgt

SEQ ID NO: 431566 - DNA, 83 bp, Homo sapiens
ttatgatttactggatgaactgataaaacccaccagtctaggtggcaccttgacgaggtctttttagagctcaaggatggtca

SEQ ID NO: 431567 - DNA, 82 bp, Homo sapiens
ggattcatttagagctgcggaacaggacgccctctgatgtggaagttaaacgagctgagcctcgggacagcaagagccaagc

SEQ ID NO: 431568 - DNA, 80 bp, Homo sapiens
tcatcgggcagattagcgacatccgagtgcagaacctgcaagaagccaagtacaagaagctggagaagcgatgagaaact

SEQ ID NO: 431569 - DNA, 80 bp, Homo sapiens
cggagggtcttcctgaaacccgcagaggaaaattcaggcaacgcctcgcgttgtgaggctgaagattgtcactcagaccc

SEQ ID NO: 431570 - DNA, 82 bp, Homo sapiens
tggtctactattttacaggcacctataccacactctatgagagaaaccgcggcagtggtcgagtcccagacaccagaagtct

SEQ ID NO: 431571 - DNA, 50 bp, Homo sapiens
cagtggagagagtggtgctggaaagcccctggatgaaacactgaagaaag

SEQ ID NO: 431572 - DNA, 98 bp, Homo sapiens
tgcctttaaccctcagcctcagagtcagatgcagggttaccttgaggatagttttgtaaaatctggagtcttcaatgtatcagaacttgtaagagtat

SEQ ID NO: 431573 - DNA, 50 bp, Homo sapiens
cctcactctctctgtcagaaaaatgttaattatagaaaatgccaagtagg

SEQ ID NO: 431574 - DNA, 100 bp, Homo sapiens
ttgctgctcatcttcagctgttgggagagtccctaagcctcattggacaccgtctgcaggaaactgagcacccagtcagcttgaagagtttcaaatggac

SEQ ID NO: 431575 - DNA, 98 bp, Homo sapiens
cgtaagttggtgatcattgaaggagacttggaacgcacagaggaacgagctgagctggcagagtctgatcccagggcaccgccgtgtgaatataaaga

SEQ ID NO: 431576 - DNA, 100 bp, Homo sapiens
tcaagcttgaatgtgtcaaaaccaaacaccctcagctccacattgagagcaaaatctacaagatgatgcagggaggagtccagggaccttgacccagccc

SEQ ID NO: 431577 - DNA, 98 bp, Homo sapiens
gtgaatttttccctgatttgtaagaatgcctggactgtcacttgcactgctgccttttggaccaggttgtaccgaagaactgataaatttcaaacgga

SEQ ID NO: 431578 - DNA, 98 bp, Homo sapiens
actggcaagggtcaggtcattgatgcaaatatggcagatgtaattgttaattctgtaaacccacatgatattacagttggacctgtggcaaagtcaat

SEQ ID NO: 431579 - DNA, 100 bp, Homo sapiens
tcaaaggcctcaagctgctctgcagagacaagatccgcctgaacaacgccatctggagggcctggtatatccagtacttcccaagtaagaagcggaagag

SEQ ID NO: 431580 - DNA, 116 bp, Homo sapiens
ctgctgtcgccgctgctgggagatgggcctactcgcccgccaccctgcgctgccgccgctctgaggagttaaagtgaagtacatgcgagaagccacgccctatgtgaagaaaggat

SEQ ID NO: 431581 - DNA, 100 bp, Homo sapiens
ggcagcgttcctgggagccgagggccagagactaagtaaagatcatacatggaagcgaatcaatggactctggaatatccctggacaacagttataaaat

SEQ ID NO: 431582 - DNA, 100 bp, Homo sapiens
cgaccgagggaatgatccttactaaccacgaccatcaaatccgtgtcggagtccttacagtttgcagttaacatgtttcgaacattaccaccttcctcca

SEQ ID NO: 431583 - DNA, 75 bp, Homo sapiens
actatgcatgtaaacaaatgaagcagcgctttgaaagtccgggaccatgtctggagaactaccaccaaacattaa

SEQ ID NO: 431584 - DNA, 74 bp, Homo sapiens
ttgggtgaaaaatatatccgcagggttcggatgagaccaggtttctgacaaagcgggagcaaaaattaatgcaa

SEQ ID NO: 431585 - DNA, 73 bp, Homo sapiens
ggaccgggagcggctggtggccacggtgctgtgacatgtatatggatgaatgaacagtgtagcagtatcatca

SEQ ID NO: 431586 - DNA, 75 bp, Homo sapiens
cccaacctggtgcccggcccgcagaaggacagaataacgggctcccagattcacaagccccaccaagaggatcac

SEQ ID NO: 431587 - DNA, 105 bp, Homo sapiens
ctgaacattggtctaaagtctttccaaaaggtcaaggttcacaagaagaagctcattcacacagaagacccatttaatgatgaacatcaggagaggcaagaggtg

SEQ ID NO: 431588 - DNA, 75 bp, Homo sapiens
gaaatgctttgtactaccgcagcaacatggctgacatgctttataatttgctgaactcacgggaatcaaatggcg

SEQ ID NO: 431589 - DNA, 88 bp, Homo sapiens
taaaacccacaagtttcggttgcacgtcacagctctggattaccttgcaccttatgccaagaaatcttaaagaaactctccacctttt

SEQ ID NO: 431590 - DNA, 100 bp, Homo sapiens
tgagatggctgccctgatggcccagggatctggacaactctcctctgtccccaccttcaccaaggaccaaaagcagaacgcatactcgggcactcaagaa

SEQ ID NO: 431591 - DNA, 112 bp, Homo sapiens
tcaaggtcttcatagaccagaaccttagtcccgggaaagaaatcaagatgactaccagctggttcgaaaattaggccgaggtaaatacagtgaagtatttgaagccatcaac

SEQ ID NO: 431592 - DNA, 90 bp, Homo sapiens
gccgtcgccgccgccaccatgcccaagagaaaggtgctgaagcgccagggctacgatgaaggctgcgacatctggagcctgggcattctg

SEQ ID NO: 431593 - DNA, 100 bp, Homo sapiens
gccaaaagatgcagtgaaagctttgaagaaaaggatttccaaaaactacaatcataaagaaatccaacttaccttgtcacctttgaagaagatggtggag

SEQ ID NO: 431594 - DNA, 98 bp, Homo sapiens
actgaggaaggctaccaggtgcaccccaggctggtggtgattgtgctgaacaaagaccgggaatgggaaaagatggaaaaagtggaggcagatctaac

SEQ ID NO: 431595 - DNA, 100 bp, Homo sapiens
gacatttctggctctgaaggcgaacgcttcgctggccatttaggagctctgctcaaagccagacgcatgcatatgcgctagaacttctatttgatcagtt

SEQ ID NO: 431596 - DNA, 75 bp, Homo sapiens
cggaaatgtccggcaagatcgagaaagcagatcctgaggtgcagaggcaattcccggaggactacagtgaccagg

SEQ ID NO: 431597 - DNA, 98 bp, Homo sapiens
ggaaatcctgccaacagtgcaaggaagcctggttcagcaggtggccctaaggttggagcaatacgagaattggagacccaaccagccagacagcttct

SEQ ID NO: 431598 - DNA, 83 bp, Homo sapiens
agacgggccggcccagagctcccgggtcgtctttcgtgtggccgcgaggctctgaagggctccaagaagctggtgctgtctgt

SEQ ID NO: 431599 - DNA, 51 bp, Homo sapiens
tgagaggctgctgttctaactcgctcccagttaattggccttggtcctcac

SEQ ID NO: 431600 - DNA, 75 bp, Homo sapiens
ctcgactcttggcgccaccgcctcatgcactgtgtagataccatgtttgtgtggaagtgccccgtgtttgctatg

SEQ ID NO: 431601 - DNA, 74 bp, Homo sapiens
cggagccgccgccggggaggagcagccgctgccgcccaggactgggcccttagactccatcaagaatgctggag

SEQ ID NO: 431602 - DNA, 100 bp, Homo sapiens
ggcagacctggccagcaagagagccgtggaattccagatcacattccagttcatagcaacattttctactctggtgcctttagtagattgttcatctgta

SEQ ID NO: 431603 - DNA, 100 bp, Homo sapiens
ggacgtgcggcccagcgagttggtcggtcccggggtcacccgctacgggaagcaggcctcgccacagggttacttgattagctgtgtttggaactgctac

SEQ ID NO: 431604 - DNA, 75 bp, Homo sapiens
gacctacgtcatggacagccggatcgtgctggctgaagatgcaatcaaggccgccctggctgattacaaattgaa

SEQ ID NO: 431605 - DNA, 83 bp, Homo sapiens
gaactctttcagcagacattagaactggatgcctcaacctctgctgttcttgatcataggtcccgttcaagaagttcttccag

SEQ ID NO: 431606 - DNA, 100 bp, Homo sapiens
tgcgggagaggtttggaattgatgatcaagatttccaggtatttataacagcaatgatgtagcagtatcgtttccaaatgtagtatctggctcgggatct

SEQ ID NO: 431607 - DNA, 75 bp, Homo sapiens
ggtgagaagggccggcggattcgggaactgactgctgtagttcagaagaggatcccttggctggtataattccac

SEQ ID NO: 431608 - DNA, 100 bp, Homo sapiens
caggatgtgggagggcatttgccagtgcaacaaattataaaaaccatgtgaggatacacacagctggttcctatgtagctctcactgttcagggacgccc

SEQ ID NO: 431609 - DNA, 75 bp, Homo sapiens
aaggaccccaagctccgagaagaccggcggccaatcacagtccactttggacagagagtttcattctgtcgccca

SEQ ID NO: 431610 - DNA, 75 bp, Homo sapiens
ccgagaagtccccgaccgactggcaatcttgctgccaatgatctctccccgtcccgaatagccagactacagaag

SEQ ID NO: 431611 - DNA, 82 bp, Homo sapiens
gcaccagcaagatcggcaggcgagattgcctgacccaggcctgctcggccctcacagggctgaccaactgactgaagagcag

SEQ ID NO: 431612 - DNA, 75 bp, Homo sapiens
ttggatatcatcgaccctcgcacactctttgtcactgagtgagaaagatcagtctaaagaaaaggagaagaaagt

SEQ ID NO: 431613 - DNA, 78 bp, Homo sapiens
aaaggtcccggaccccccggatctgacggggcgggacctggcgccaccttgcagataactggagtgccaaggctaaaa

SEQ ID NO: 431614 - DNA, 98 bp, Homo sapiens
ctgttcaaaatcatgcgagtggggacagcttcttcctagccgtgctggtatagaggactctaagaagtggggcatgctgtttctggtgaaccagctgt

SEQ ID NO: 431615 - DNA, 90 bp, Homo sapiens
attaacattcttcttggagttttctacactgtttgtcgagatttgaaagagctcagacatctggatgaagccccacccgcccttcaggat

SEQ ID NO: 431616 - DNA, 98 bp, Homo sapiens
ccttccagaggctttgtggtgcgggacgcaccctggaccgccagcagcagtgagaaggctcccacatcaggacgagaaggagccctcgagttaccgtg

SEQ ID NO: 431617 - DNA, 87 bp, Homo sapiens
tactgcggtcaacgtgaccagtgcatcccatgctgtggctccccttcaggaaataaagcagtgagacggtttaagcggaagcatctt

SEQ ID NO: 431618 - DNA, 88 bp, Homo sapiens
tctgcctgctcagttccagttgtcacacaatgtggagctcatactgaaaaccatcaataaccagcacagcgttgagagtcaagacaac

SEQ ID NO: 431619 - DNA, 77 bp, Homo sapiens
cacgattcttctaatggatgggaacatgggtctgctatgtcaaaaaactgcatcaagcttttgtgtgaagatcctgt

SEQ ID NO: 431620 - DNA, 98 bp, Homo sapiens
ttatggccgtcaacacctttgtgaagtacgagctcaactggaggcagtcctgtgcggaaatctgaagaaaaaacagatacaaagcgaactgtgattaa

SEQ ID NO: 431621 - DNA, 75 bp, Homo sapiens
aacacactacagaattcttttcaggggtgcaagaggcgaggaggatggccgagaccagtccaggttggagaccca

SEQ ID NO: 431622 - DNA, 115 bp, Homo sapiens
ctgagctcagacctgccaatttaccagagataattgataacaccctgtaacagctgaactgctctggcccatttagagtctcttgcagtggatgttgaggtggccaatccaccag

SEQ ID NO: 431623 - DNA, 100 bp, Homo sapiens
gtcctgagatcaaatggcacttcattggccacctacagaaacaaaatgtcaacaaattgatgggtatattcagcatgcagctttactttttcaaagattc

SEQ ID NO: 431624 - DNA, 50 bp, Homo sapiens
ccggcagcaatcgatttgccaagaacccagcaagcgtagtcgaggagccc

SEQ ID NO: 431625 - DNA, 75 bp, Homo sapiens
ctccaaggaagccacgtgcagacatctacaaccttcgatctcctgacgacatcagaagagctaacaattgctgga

SEQ ID NO: 431626 - DNA, 100 bp, Homo sapiens
agaaaattttccttgacctttaggtgcttttatattcatctcaaaaacaaaattctgaactcaggacttggcaacagttctcagccctgacagaggtgct

SEQ ID NO: 431627 - DNA, 75 bp, Homo sapiens
gcaaggaagaccataaaccagtgggtcaaaggacagacagaaggaacaagagtttgttcagaaacaacagcaaga

SEQ ID NO: 431628 - DNA, 90 bp, Homo sapiens
ctgaccggtctgtctggcttcagaacccttaggagaaatcttgagagtggacagcaattgtgaagatcgccagagagttctgtgtttcat

SEQ ID NO: 431629 - DNA, 96 bp, Homo sapiens
atccctcaagactggtccacggagtgtatgaccacaaacagccatcaaggtgaactgcgccaggccactgtggccatgatgaacaggaaggatgag

SEQ ID NO: 431630 - DNA, 100 bp, Homo sapiens
tcgcgcgggatgccccacgtcatccggatcggttatttggaaatagcggtgcttgcagcgcttgcggacagtcgattcctgcgagtgaactcgtcatgag

SEQ ID NO: 431631 - DNA, 100 bp, Homo sapiens
atatgttccagttgcacatttcctgcaaggactccaaagtggtgagattagtgacaagagctggggttaggatccggttggactctgacatcggatgccc

SEQ ID NO: 431632 - DNA, 90 bp, Homo sapiens
cgccaacgtgagaggaaacccgtgcgcggctgcgctttcctgtccccaagccgttctagacgcggctcccaagcctgtgagcaagatgcg

SEQ ID NO: 431633 - DNA, 75 bp, Homo sapiens
gcatcagccgcttggccaactttgggggtcggctcctgtggtttcaacagccgcatcctgccccacgtgtacccc

SEQ ID NO: 431634 - DNA, 96 bp, Homo sapiens
cctgagacgtgacactgaaaatcagtagaagaaatacgccacatttattctaccggggaagacagtggggcaaactctttgattctacaatagctg

SEQ ID NO: 431635 - DNA, 92 bp, Homo sapiens
aagcatttacagtacctaaaaacaggtccctggcgagccccttgcagggccgttgctccagggagaactgcaaatatcttcatccaccccca

SEQ ID NO: 431636 - DNA, 75 bp, Homo sapiens
aatacagaagttaagatttattgtcaaccaaggacttggctctgttactaaggcttgatgaaaaagaactgctta

SEQ ID NO: 431637 - DNA, 88 bp, Homo sapiens
cctctgggttacgtggaatgtgtttgttatctgcttctatttggaggctggggacctctcaaaggtatctgaaaactgaagagtggag

SEQ ID NO: 431638 - DNA, 74 bp, Homo sapiens
ttgaaagcacttttttcggaacacgagaatctcacaaactatgatctctgcagcatttttcttggaacctctac

SEQ ID NO: 431639 - DNA, 99 bp, Homo sapiens
caatatcaaacgagaacagggaaacattgaagaggcagttcgcttgtatcgtaaagcattagaaggattacaattctgctccccaagaggccccctaag

SEQ ID NO: 431640 - DNA, 90 bp, Homo sapiens
cacgctgggagctgtagaccggagctgttcctattgggccatcttggctccaccaccctgccctgtatgatgagattcgtcagtttcgca

SEQ ID NO: 431641 - DNA, 76 bp, Homo sapiens
ctcacagtttgctctgctcttccaacaccagtggaagatgatcacatcccagaagctccaccatgaggcgaggtgg

SEQ ID NO: 431642 - DNA, 75 bp, Homo sapiens
gggagcggcgttggaggccaccgtttccagaaatgggacgtcggtcatcagatactgaagaagaaagcagaagca

SEQ ID NO: 431643 - DNA, 100 bp, Homo sapiens
ggggaaccatggctgccccgagaggtcttcaaagcttcacctttctccaaaggcagatgtgaagaacttgatgtcttatgtggtaaccaagacaaaagcg

SEQ ID NO: 431644 - DNA, 74 bp, Homo sapiens
aagaagcattcttcatctaaagataaggagaaggagtcggtcctgggtaatctggccaaaaaagcaaagctgac

SEQ ID NO: 431645 - DNA, 100 bp, Homo sapiens
ctctgctgctgcggagcccccgcctgcccgcccgggagctgtcggccccggcccgactctatcacaagaagggcttcaagatgggctgcgctccagttcc

SEQ ID NO: 431646 - DNA, 100 bp, Homo sapiens
ttcagcaaatcctgcagctgttgaaggagtcccagtccccagacaccaccatccagagaaccgtgcaacaaagcagattttgaagcagtgggaagaatat

SEQ ID NO: 431647 - DNA, 100 bp, Homo sapiens
ggatctcacagctgcagtctaatagtaacacagaggtactccaaagattcaggtttactcacgtcatccagcagagaatggaaagtcaaatttcctgaat

SEQ ID NO: 431648 - DNA, 82 bp, Homo sapiens
gggagctgcagctcaagggcgccgggcccacgcccttctccagggtgtccgcaatgttgccagtgtctgtctgcagattggc

SEQ ID NO: 431649 - DNA, 75 bp, Homo sapiens
tgcccccaggggcatcggctggtgggtggcaggaaatgccaagctcgagggaccaatgtgggccgggagtgctgc

SEQ ID NO: 431650 - DNA, 50 bp, Homo sapiens
acgcctacttctataaagtcatccagctcttcagagaagtaagaataatg

SEQ ID NO: 431651 - DNA, 74 bp, Homo sapiens
gcaagcagttttggaagaggagcgctaagctgccggggaggtgactgtaggacgaggatttggtgtcacatacc

SEQ ID NO: 431652 - DNA, 130 bp, Homo sapiens
cgagatgtctcgctccgtggccttagctgtgctcgcgctactctctctttctggcctggaggctatccagcgaaaaccaattctgtgtcctcggaggaccacagcccagttgggccccaggcgaaaccca

SEQ ID NO: 431653 - DNA, 78 bp, Homo sapiens
ggcttctcttccagtgctctgcctggcccagaccatccacacgcaggaggttgtcaaaatctcttgaacatcgttttt

SEQ ID NO: 431654 - DNA, 100 bp, Homo sapiens
gatcgcggcggctggacggggctggagctgtcgggagggcggaggccacggcgtatgcctccaaggacggggtcctgaccgaggccatgatggacgcctg

SEQ ID NO: 431655 - DNA, 98 bp, Homo sapiens
aagctggcagctctctgtaagaaatatgctgatcttatggtgtctgagctaaaagaccattttttgagacacctacagggtgtagaaaagaagaaaat

SEQ ID NO: 431656 - DNA, 98 bp, Homo sapiens
tgttgtgagaatcaaacgagataatgtatgctgaggcatgctgtgaacactacgtgctgggtacaggaggaaagaccacagcaagattctttcattcg

SEQ ID NO: 431657 - DNA, 75 bp, Homo sapiens
ctaaaactctttcgtcatcctcatattatcaaactctcgatcaagtcatccgccaaagaagcctgtccagtttgg

SEQ ID NO: 431658 - DNA, 98 bp, Homo sapiens
gggcctgaggagcgggcacagggcaaggcggcggacggctgcgtcgcccgaggcgaggaggagcgctggcgctaggtcttgactccactaacggggac

SEQ ID NO: 431659 - DNA, 110 bp, Homo sapiens
ttggattggctgcggggcccacctctctaagcctatggaaaagcttctgggttcctccccgggcagaagaaatcaccattccagctgatgtcaccccagagagagttcca

SEQ ID NO: 431660 - DNA, 100 bp, Homo sapiens
cttaggtggggaagactttgaccaggccttgctacggcacattgtgaaggagttcaagagagagctgcctgacaagttgattcccagcctggtgaaatac

SEQ ID NO: 431661 - DNA, 96 bp, Homo sapiens
tggatgattaagattggaaggggacttgattattttaagaaaccacaggtggagtctttcattttggatcaggatgatttggaaaatccaatgctg

SEQ ID NO: 431662 - DNA, 101 bp, Homo sapiens
tgcttcacgacagaaaagctttatggaaactgcaatggatgttgaatttgttgttcgtggatagaattatttatattattactgtaatggttgattgcatt

SEQ ID NO: 431663 - DNA, 82 bp, Homo sapiens
agctagtggacatcacggacatccagaagacttcccaagtaagaagcggaagaggagccgctggaaccaagacacaatggaa

SEQ ID NO: 431664 - DNA, 75 bp, Homo sapiens
tccaggcctcattggacagcattcgagggctgccacacttgtgtatcccttcttccttgaatttaaccaggagtg

SEQ ID NO: 431665 - DNA, 100 bp, Homo sapiens
ccacgacctgaccgccatttgcgacgcctcggaagcatgtgtttctgccttgctgggaaacgaggatgttcacggaagaccagggtgtagatgacaggct

SEQ ID NO: 431666 - DNA, 82 bp, Homo sapiens
tcacaggaggtgtagagaggaccccgggacatctgaaagccaggaaatggtcaaaatgcagatcttcgtgaaaacccttacc

SEQ ID NO: 431667 - DNA, 107 bp, Homo sapiens
atggaacccaagcagtggcgaagggaatcgcaaggctcttccctgaccattttctactgtccctgcgcgaggtgctggagaatctggtaaaagcaccattgtgaagc

SEQ ID NO: 431668 - DNA, 88 bp, Homo sapiens
ttggagtggggcctcccaaaggatcaggctaccggctctctgaccagttccacgacatcctcattcgaaagtttgacaggcagggacg

SEQ ID NO: 431669 - DNA, 100 bp, Homo sapiens
gagcgcaatggcgtccaaccccgaacggggggagattctgctcacggaactgcaggaagtttgtgtttttcaacatacctcagattcaatacaaaaaccc

SEQ ID NO: 431670 - DNA, 99 bp, Homo sapiens
atgggtctccgtacaccaaaaactcaggcttcgccacctgcgtgcaaagttatgaagacagtatggagtttccagaccatagtagacatttgctacagt

SEQ ID NO: 431671 - DNA, 101 bp, Homo sapiens
cgggccgcgaggacgaggcggcgccgccgggctgtggaggaagcttgctgtcttcgatacgtggagctccttggcggtccacattgcaatggacaacactg

SEQ ID NO: 431672 - DNA, 121 bp, Homo sapiens
tgggagagaaagggaaggaaattatgaccaagtacctcaccccaaagatctttaatctcatgaagtacgacagctacagccgcttcttaaagtctgacttgtttttaaaacacaagcgaac

SEQ ID NO: 431673 - DNA, 75 bp, Homo sapiens
agcatacctggatggaggatgctgacagtggcctgggtcccttgtgagggtcgctgatggcagaacagaagcccc

SEQ ID NO: 431674 - DNA, 100 bp, Homo sapiens
cgccgccatgggctcctcgcaaagcgtcgagatcccgggcgggggcaccgagggctaccacgttctgcgggatttggtgctatggagaaatttttggtag

SEQ ID NO: 431675 - DNA, 100 bp, Homo sapiens
cggacattccaggccacagtcctgggaagtcagatgggattgaaaggatcaaaatacttgctggatggtggactcagagaccaataaaaataaactgctt

SEQ ID NO: 431676 - DNA, 100 bp, Homo sapiens
ggaggaagcaggagcagcccaagcgccttccctcacaccatggtgaatccgggcagcagctcgcagccgcccccggtgacggccggctccctctcctgga

SEQ ID NO: 431677 - DNA, 75 bp, Homo sapiens
tataaatccaggaccaagagatcctctaccaccaaactctatcttgctaagcagaatggctgcagtctgtccagg

SEQ ID NO: 431678 - DNA, 75 bp, Homo sapiens
ggatggtggagggagcgaatccacacgagagctctccaggttttggagatcatattcattggaggacactggaag

SEQ ID NO: 431679 - DNA, 74 bp, Homo sapiens
gccatccgggagaagctggcctgggccaagtctcgctctgtcgtccaggctggagtccaatgctgcgatcttgg

SEQ ID NO: 431680 - DNA, 75 bp, Homo sapiens
ctaacaacaagacagagagaagcacagcgcctctggtgaaagtcatgcttcgcatctgttccaccttggctcgag

SEQ ID NO: 431681 - DNA, 82 bp, Homo sapiens
ggggatcgcccccgagcgctgcgtcctgcgggtggccgctgccatggcccagacactgcagatggagatcccgaacttcggc

SEQ ID NO: 431682 - DNA, 100 bp, Homo sapiens
ccgcctgccctgaggagtccccgctgcttgggaggttatattcaaaagaaaaaggaactgtggggaatctgtatctttattgcagcagttgacctagatg

SEQ ID NO: 431683 - DNA, 75 bp, Homo sapiens
aggagcgccagatggtggaggaatacacttatttatgaagttagctttatacgtctacgaatatttactgcacgt

SEQ ID NO: 431684 - DNA, 83 bp, Homo sapiens
cagagatctgtaattacagctactccagcaacatcttgtccataaggctgaaccggcaagtttgtggatttccatgcagctgc

SEQ ID NO: 431685 - DNA, 100 bp, Homo sapiens
ggaaaagtgaacttttcgaggcatttgacttgtttgatgttcgtgactttggaaagtgatggaatggggagaagatattaaagcagtttcaaaagatgaa

SEQ ID NO: 431686 - DNA, 75 bp, Homo sapiens
acaagaggtttcagccagtgcatgaccttactattgattgcagcaattctccggaaacggaaattagactattat

SEQ ID NO: 431687 - DNA, 75 bp, Homo sapiens
tcaggacggacaagcacagtcttcggaaggagtacttctttgattccagagtattaacagatggagaactggctc

SEQ ID NO: 431688 - DNA, 75 bp, Homo sapiens
gaaggtagccaaggatggagtgaaatacagggttgtcacagctcatgcagttcgggtccctgtcaccagcaacct

SEQ ID NO: 431689 - DNA, 75 bp, Homo sapiens
ttcctggaaatcatacccaccagcttccagctcttctgatgagctcagttggatcattgagctgctggagaagga

SEQ ID NO: 431690 - DNA, 97 bp, Homo sapiens
tctgatcatgtagacataatatcagatggcaccaagaaagactctgggatgggaaaaatgaggaagctgtgagtaccagtggaaggaacgagccagg

SEQ ID NO: 431691 - DNA, 50 bp, Homo sapiens
cgacgacgaggaagaggaggtttctgagatgacctcttggtacttcatct

SEQ ID NO: 431692 - DNA, 133 bp, Homo sapiens
acccccgccgtcgcagcccccgcgctggtgcagccaccctcgctccctctgctcttcctcccttcgctcgcaccatgggggatatgagactttctactcggaatatcctgagtgttgcgtggatgtaaaaccc

SEQ ID NO: 431693 - DNA, 100 bp, Homo sapiens
aatttcagtgactgaattaaaaggtgtcaagaagctcagaatggtagcaatgtacagataaagagtactttaacgcccatgcgtgttcaagactgttcaa

SEQ ID NO: 431694 - DNA, 101 bp, Homo sapiens
acatcgcgacgctgctcaaaacctcgctccggaaaggggacacctgagtgactcctctttcttcccagagtgtggtgattcaccatggccagacccaggaa

SEQ ID NO: 431695 - DNA, 100 bp, Homo sapiens
cgacaagatggcagcagcgtgtcggagcgtgaaggtcctggtgaacgccatcatcaacagtggtccccgggaggactccacacgcattgggcgcgccggg

SEQ ID NO: 431696 - DNA, 50 bp, Homo sapiens
cagctgcctcagttcttagcgcaggcagcccttctggacactgcatgatc

SEQ ID NO: 431697 - DNA, 75 bp, Homo sapiens
ttttcctgtatgaagcggttggcaccactgaagtgaccgaatgaggttgaatttagtattagtgacaaacagagg

SEQ ID NO: 431698 - DNA, 104 bp, Homo sapiens
ggcggtggcgacggccgcggggactcggagctgagaggagctgctgctcggaccagcgcggagggtgcatctgcccggaagactcagactcctgcagcccagcc

SEQ ID NO: 431699 - DNA, 98 bp, Homo sapiens
agcaattaaacacagaaggaaatacccagactgttactacaacctcgggcgtctgcagcaagcatctaaagttgagaaggtgttttttaccactgcag

SEQ ID NO: 431700 - DNA, 128 bp, Homo sapiens
ccttcacccatctgaagggaggaaatagtggcaggtgacagtctgcatgtgcagttttcaggtggatccataaagaacccagccaacccgcagagggaggggaggggctgagctgtgaggagagcggg

SEQ ID NO: 431701 - DNA, 51 bp, Homo sapiens
agtcaagtcagacttcattacagaaagatgtggaagatgtgaaatttgtca

SEQ ID NO: 431702 - DNA, 74 bp, Homo sapiens
tgggcggtgccggcgccggagacgatgccgttgtgaaaggtgtagcagtcactcggcctacacccacagcatcg

SEQ ID NO: 431703 - DNA, 74 bp, Homo sapiens
gttagcagtcacgacctccagcacagctgatcactggagattccatcgttagtgctgaggcagtatgggatcac

SEQ ID NO: 431704 - DNA, 100 bp, Homo sapiens
cgcgttcctgctgctctgcctgctccacaagcggcgccgcgccctcggcctgcacggctgagctgcccctcctggacctgatgaagctgtacgaaggcgc

SEQ ID NO: 431705 - DNA, 50 bp, Homo sapiens
acatctacaaccttcgatctcctgacgatgagctggagattggatcacag

SEQ ID NO: 431706 - DNA, 83 bp, Homo sapiens
ccagtccccagtgagggtgtacaaatacccctttgaattaattatggctatacctcggatctgcattttcaagtgagcaaaga

SEQ ID NO: 431707 - DNA, 100 bp, Homo sapiens
cgtcggagacatgggagacccggggtcggaggtactaggttttgacaagcttgcatcatgcgtgagtataagctagtcgttcttggctcaggaggcgttg

SEQ ID NO: 431708 - DNA, 75 bp, Homo sapiens
atttaatggaaaatcgcttggttaaaacctgacacttttaacagatatgaagagaaggctactaaagacttggaa

SEQ ID NO: 431709 - DNA, 82 bp, Homo sapiens
gcgacaagccgctggcagccgcggatctcaccgccgctcaggtagcctctagttcgttagtcaaaacgtgaaaaaaaagacc

SEQ ID NO: 431710 - DNA, 98 bp, Homo sapiens
aaggctaatgtgtgctgtgttaaattcagcccctcttccagataccatttggctttcggctgtgcagctgcaagtgtccactgcttgggaaagtgtgg

SEQ ID NO: 431711 - DNA, 51 bp, Homo sapiens
tgtggacttctggggtattctggctgagagctggattgaaagatgtctcaa

SEQ ID NO: 431712 - DNA, 75 bp, Homo sapiens
cgggagagggggagtgcgcggcggccgcagctgccacaaaccaggtactaatttggtcgaagcagataaccaagc

SEQ ID NO: 431713 - DNA, 100 bp, Homo sapiens
ccgggagccgcggcccggaatcggggcgcttcgccccgggccccccagcatgaagaccccggcggacacagaattttgtagccaccttggctaatgggat

SEQ ID NO: 431714 - DNA, 90 bp, Homo sapiens
atatctgttaacagactgcttttacacctacgtgttggagcgggccggagagaagtagagtgggctgcgaggagaaggaaacaggccttt

SEQ ID NO: 431715 - DNA, 76 bp, Homo sapiens
gatttacaggaaagctcgagccaggctgtgggcagctttggaagaagtagaaggtgatgtggcagaattggaacta

SEQ ID NO: 431716 - DNA, 100 bp, Homo sapiens
agaagagaacacgcctctcaatggtgccgacaaggtcttcccttctttggacgaggaggtccccccggccgaggtttcggagggcaatgcttgccatgtt

SEQ ID NO: 431717 - DNA, 74 bp, Homo sapiens
tcaaacgtggagatcaactcctctctgttaatggagtgtactatactggcaattgctggagaagattttgcaat

SEQ ID NO: 431718 - DNA, 85 bp, Homo sapiens
catcctttcaaactcctgtgaatacaggacagtcattttgtttactcattcagccctgttgcaggtcccaataaactcttcataa

SEQ ID NO: 431719 - DNA, 97 bp, Homo sapiens
gatgtatcgtcagacatgagaataataaaaacggagttgatcaagaaattatctttcctccaataaagacagtattgttgtccagacatgataaata

SEQ ID NO: 431720 - DNA, 89 bp, Homo sapiens
ggcctactgcgaccagatcttccaggacgagacgggcaagaaccggtacaccaggggttggaaaaaccacactaggcaaagaacttgcg

SEQ ID NO: 431721 - DNA, 75 bp, Homo sapiens
gccaagaagatggacaagcccatgctgaagcaggccggctctggcgtccacgggtgaggtggctttgaccccggg

SEQ ID NO: 431722 - DNA, 82 bp, Homo sapiens
ttccttttgcgggtggcggcgaacgcggagagcacgccatgaaggcctcgggcacggacccggtcagcccaaggagcagggg

SEQ ID NO: 431723 - DNA, 100 bp, Homo sapiens
ttatttctatggagatttcttcaaagcggattatacagatgaacgggaaaactatgcactacatctttcctcacgcaaggataaaaataacaagagactc

SEQ ID NO: 431724 - DNA, 82 bp, Homo sapiens
gaaatgaggaggagtagtggtttgcgagcaggttctcggagggaccgggatagatgaataatacggcagctagtccaatgtc

SEQ ID NO: 431725 - DNA, 87 bp, Homo sapiens
gccagggtcgtgccgccggcgggtcgggccgggcaatgcctcgcgggcgcaatgaatccgcggcagatctgactgcagccatgagca

SEQ ID NO: 431726 - DNA, 74 bp, Homo sapiens
aaatgtacccagttagtaagagtcccctgcagagcaaaaaaacttgtcggattcgggagaggagcctcgggggg

SEQ ID NO: 431727 - DNA, 98 bp, Homo sapiens
gtctgggaggataattgggatgatgacaatgtagaggatgacttctctaatcagttacgatgttcctcctgctgatcaagagaagctttttatccaga

SEQ ID NO: 431728 - DNA, 100 bp, Homo sapiens
ctcttaagagaagaaggagcgagacgcaggtcagaatggaaatgggctgcagaccgggcagctattgtcagccgctggaactggcttcaggctcatgttt

SEQ ID NO: 431729 - DNA, 90 bp, Homo sapiens
gcggagggaaagctgggaacgagaggtgtagtattgagtcctgtttgagctattgttctctttttcctgaaaaatggcactgtcaaagag

SEQ ID NO: 431730 - DNA, 75 bp, Homo sapiens
tcatgagcgacagcggcgagcagaactacggcgagcggggaataccttggcaagcagctccagtccgagcagccc

SEQ ID NO: 431731 - DNA, 50 bp, Homo sapiens
cctaatgttatcgcggaatgatgttaatgttggagactacattcaggctg

SEQ ID NO: 431732 - DNA, 90 bp, Homo sapiens
caaggaagaaattgttcagttcttctcagtctgtccagccctgggagcggcggaccttccccctggcgcacagtccccaggcggagtgtg

SEQ ID NO: 431733 - DNA, 100 bp, Homo sapiens
ctgcagtagcggcagcagccccagcctcaaggccagagctattaagaatggcaaaggattgcatagcaagaaggaagtgcctatccaccgtgttgcagat

SEQ ID NO: 431734 - DNA, 101 bp, Homo sapiens
cgccgggaagcctcagctcgcctgaaggcatggaagaggagatggttcgtgttacgcagtggccgtttaactggagatccagatgttttggaatattacaa

SEQ ID NO: 431735 - DNA, 76 bp, Homo sapiens
caagaatctcgtgctcaccggtttctcccacatcgacctggtgaagtattacagacacttagcacctgatcacttg

SEQ ID NO: 431736 - DNA, 75 bp, Homo sapiens
tcctgagtggctgggactacagattccagatgagatgatccagtgcgtagtctgtgaagactggttccatggaag

SEQ ID NO: 431737 - DNA, 100 bp, Homo sapiens
tttgtaccagactatcaggctgaaagttgttgcagatatcaagaaagtcaacaacttcatcagagaacaagacttatatgctttgaaatctgttaagatt

SEQ ID NO: 431738 - DNA, 100 bp, Homo sapiens
atctctccaaagaaattcctcaaacagaatttcacacagggtattccatggagaatgaggctggaggcaaagctggaaaggacagtgggaaggccaaggc

SEQ ID NO: 431739 - DNA, 50 bp, Homo sapiens
tggatcaagcaaggaagcggggaatggaagttggatacactttgtgactt

SEQ ID NO: 431740 - DNA, 100 bp, Homo sapiens
gaggatgcagtggaggccatcaggggccttgataacacagagtttcaaggcctatgaaaggaggttccctacatgtcctttgattccgatgttcgtgggc

SEQ ID NO: 431741 - DNA, 51 bp, Homo sapiens
gatgttgatcagcttcgtgatatcaaagacaaaatgatgcttcaacaccca

SEQ ID NO: 431742 - DNA, 75 bp, Homo sapiens
gtgaagaacctgaaggacacactagatatcaacaagtttctttggatggtccggattggagggagcacagataca

SEQ ID NO: 431743 - DNA, 112 bp, Homo sapiens
ggaggggcgctgtgtgtacatcacccccatggaggccctggcagagcagtctcggccacctgtgaccacctccaatgccatccctcctgctgtggtagcaactgtctcagcc

SEQ ID NO: 431744 - DNA, 82 bp, Homo sapiens
agatcaagaggtggagctggttgtagattatttggttgaatctggcgatgtggaacccatggatatggagggctgactatat

SEQ ID NO: 431745 - DNA, 75 bp, Homo sapiens
ctggaagacttgcttcgagaaaggaaacctgtgagcccaggccagacccgatcgtctatggtccagtggcttaac

SEQ ID NO: 431746 - DNA, 75 bp, Homo sapiens
ggtagcgctcgtctggcggagctggctggaatgcttgctgattcctctgcacacttctaaggctgagaacctgag

SEQ ID NO: 431747 - DNA, 100 bp, Homo sapiens
agcaccaaatccaagatggcggccagcaggaggctgatgaaggagacagaagaaattctggcagatgtgctcaaggtggaagtcttcagacagacagtgg

SEQ ID NO: 431748 - DNA, 100 bp, Homo sapiens
tcctttaaaagagaaatggattcctattgcaaacatgattaaaggttgaaccgtctaacaacagactttaatgtaattgtggaagcattgagcaaatcca

SEQ ID NO: 431749 - DNA, 154 bp, Homo sapiens
cttcatgggaacagaggtgtttaccatgacgataagcaaccagcatttagagctgtttatgaagcactgagaaatgtcccatccatgggggggcggaagcgggagcgcaaggctgccgtcgaggaggacacctccctgtcggagagtgaggggc

SEQ ID NO: 431750 - DNA, 98 bp, Homo sapiens
agcaaagagacaagtcctaaatgccgactcagtggaacaatcttttgttggattgaaacagctaatccagggtaccaccatcttaaggacagaaaagc

SEQ ID NO: 431751 - DNA, 82 bp, Homo sapiens
cttccaggtctccttccagcatccacacaagacaatgcagatcttcgtgaagactctgactggtaagaccatcaccctcgag

SEQ ID NO: 431752 - DNA, 98 bp, Homo sapiens
gctggtggtccacgactgtcccgtctggattctgtttctggcgtctgcatacgcaagtccccaactcgctgaggagagctgttcagctatggctgctg

SEQ ID NO: 431753 - DNA, 101 bp, Homo sapiens
aggcctcttgaaagtccacctccttacaggcctgatgaattgagtgtttttgggcctaggcctgagtggaatcattcctaccttgcactatgtcatctcgg

SEQ ID NO: 431754 - DNA, 97 bp, Homo sapiens
gttcgctgcccagaagaagggaaggcgcgagtgaggaaaggaggtactgtagttttcggctttgtgagaaaccttaccatcaaacacgatggccagc

SEQ ID NO: 431755 - DNA, 91 bp, Homo sapiens
caacccggactggatcaacaccggggagtctgcggcccacggccgccaatcccactctcgctcctgctgacagaagaggaagcagccctct

SEQ ID NO: 431756 - DNA, 100 bp, Homo sapiens
ttgtctgctggcagctaggggcgacgaggcgggacgtcatggaagtgtttacccaaggtccagcctagcccctaggcaccatgtcggacagtgatctagg

SEQ ID NO: 431757 - DNA, 75 bp, Homo sapiens
gtcggagtaggcaaagttatcagaggagcacgcggaataaaagatgctacagaaatcatctttgagatgtcaaaa

SEQ ID NO: 431758 - DNA, 74 bp, Homo sapiens
gaagggaaaagatgcttctgggaacaaggttatcagtgagctgaatggaaaaaacattgaagacgtcattgccc

SEQ ID NO: 431759 - DNA, 99 bp, Homo sapiens
catgcacgagccaggaactgcgcagcctcttcgagcgccgcggacgcgtcatcgagtgtgacgtggtgaaaggcccgcgatgctcccagcccggtgaga

SEQ ID NO: 431760 - DNA, 90 bp, Homo sapiens
gttatccctcgaactcctagctcatttcgacagccttgtactaggttttgacaagcttgcatcatgcgtgagtataagctagtcgttctt

SEQ ID NO: 431761 - DNA, 75 bp, Homo sapiens
ggacaacgtccagttcctgccctttctcaccacggaagtcaagctgttatcaaagaacagcttcaagagactcag

SEQ ID NO: 431762 - DNA, 101 bp, Homo sapiens
aaagatatggactccagttatgcaaaaagagaaaggcctaaagaatgtatttgacgaagcaatattggctgccctggagcctccagaaccgaagaagagcc

SEQ ID NO: 431763 - DNA, 83 bp, Homo sapiens
ggagcttggtttcgggatctcggtgctgcagacggcgagacctcctgcacagctggtcagtgagaaggtcggaggggccgagg

SEQ ID NO: 431764 - DNA, 74 bp, Homo sapiens
agacttgactggtcttacattgctgcatcaagaaacccaagctgctgaggttactcactataaacaatatccac

SEQ ID NO: 431765 - DNA, 83 bp, Homo sapiens
gtaacagcagcgccgtcccgtccgacagccaggcccgggagaagcataatcaccagcaacacccgggacaataatacgggggc

SEQ ID NO: 431766 - DNA, 80 bp, Homo sapiens
gaagagttgtcccagctcggcccgcgggggagccccgggagccgcacgctatacacagaatgggattttacatatgctgg

SEQ ID NO: 431767 - DNA, 100 bp, Homo sapiens
gcggatggccccaggtgtaagcgcagaaagcaggcgaacccgcggcgcaataacggacaagaacttgggactcactgaatggcgggagtgaaaggagctg

SEQ ID NO: 431768 - DNA, 100 bp, Homo sapiens
ggaacagaatcaacccagaacggatagctccctcctggaaaaggagaagctaaaacttacttatgaggaaaagtgtgaaattgaggaatcccaattgaag

SEQ ID NO: 431769 - DNA, 75 bp, Homo sapiens
gcaagaccatcatgctgcgcggccttcccatcaccatcacagagagcgatcagtggaagacaggaagctgtttat

SEQ ID NO: 431770 - DNA, 100 bp, Homo sapiens
cgaactacatatggaggagtgtctgccatgaatcatcttaatggacagaaaatgtatggaaaaattattcgtgttactctgtctaaacatcagactgtac

SEQ ID NO: 431771 - DNA, 101 bp, Homo sapiens
ccctcagccctgtggctgggggcagagctcaggtgctggagaatctggtaaaagcaccattgtgaagcagatgaggatcctgcatgttaatgggtttaatg

SEQ ID NO: 431772 - DNA, 98 bp, Homo sapiens
ggcagctgaggagactccggcgctcgccatggccgacgaaaagcccaagactgtgccctgtccacggtgcctcctgcatgtcctgctgccctgagctg

SEQ ID NO: 431773 - DNA, 83 bp, Homo sapiens
gcaacagtgaacatctcaagcgggagcattcgctcattaagccctaccaagacaatgcagatcttcgtgaagactctgactgg

SEQ ID NO: 431774 - DNA, 101 bp, Homo sapiens
atgatttctacttggtggtgtgtaacgactgtaatcaggttgtcaaaccgcaggcatttcaatcacattatgattgaaaaggaagatcaggccaaccccaa

SEQ ID NO: 431775 - DNA, 82 bp, Homo sapiens
gttggcaacatttccgagaaagcttcagacatgcttataagacaactcttagctgttggatggcaagcatgtggtgtttggc

SEQ ID NO: 431776 - DNA, 82 bp, Homo sapiens
gaagaatcagacgtgctccaggaggccagaaggaaatactgccctgaggtacggctgaacatcatctctaacctggactgtg

SEQ ID NO: 431777 - DNA, 51 bp, Homo sapiens
tcttttggatagtgatgggaaaaggacgaccatctggacccaccgcgtccg

SEQ ID NO: 431778 - DNA, 90 bp, Homo sapiens
acaaactacccattttcttttttggaactcatgagacaaccccagctcaaagggattgtgacaaggttattcagccagcagggatacttc

SEQ ID NO: 431779 - DNA, 98 bp, Homo sapiens
agcgattgtaaggagaggcggtcccggtgtcctcgggtcccagaaaaacacaccttgactttagtcagatacatcactgtctgttaaaggaaaccaag

SEQ ID NO: 431780 - DNA, 96 bp, Homo sapiens
tgacacatgattggagctctttttgaaatgtttcttgcccttcctggagcagaggagccattatttatgcaggtgaatgttggagacacagtcgcg

SEQ ID NO: 431781 - DNA, 82 bp, Homo sapiens
tccccggccggtccctcgcctcccggccgagctgacggactgatcctttgaaatactccagccatgactaaaagagaagcag

SEQ ID NO: 431782 - DNA, 87 bp, Homo sapiens
ctgggagccttttccttcggagcagcagccctgtccggcatctgtcttgagctcccagcaagttggatatgtcaagtgaccagatag

SEQ ID NO: 431783 - DNA, 100 bp, Homo sapiens
tgattgatcgaatgaaggaatcctctccatctggttcgaagtctcagcggtattctggtgcttatggtgcctcaggtgtcagcagttgagtctttggagg

SEQ ID NO: 431784 - DNA, 100 bp, Homo sapiens
tgggcagacccaagcatttgacttttactcaagatattttgcaccgtgggttggtgtggctgaagacccagtgacagatggagtgttgctctgtcaccca

SEQ ID NO: 431785 - DNA, 100 bp, Homo sapiens
caggaaagttgtagaagtcttcaagccaggaaaatttgtgaccaccttgtttgttaatcaggatttttttcccaggaagccatcccgtcagaggggttca

SEQ ID NO: 431786 - DNA, 101 bp, Homo sapiens
ggcagaacaaggatttgaagctggcagtctggttccagattagaagagtttgaaaggttgaataccctttctaagaaagtaaacgttcctccagaaaaagc

SEQ ID NO: 431787 - DNA, 100 bp, Homo sapiens
taaggtgcgcggagggactgcaccttctccatcaggtgcagaaggtatgagaaagtgccagtcatcttggttgggaacaaagtggacctggaaagtgaga

SEQ ID NO: 431788 - DNA, 87 bp, Homo sapiens
gggaggatcgcaagctggatgagcttctaggcaaggaccacacgcaggtggccttcgtcaagatggttggacaccacgtcgccttcc

SEQ ID NO: 431789 - DNA, 75 bp, Homo sapiens
cgatttcctggggggcatggagtgcaccctggggcaggatggccaggccatgttatgggatctcaacgaaggcaa

SEQ ID NO: 431790 - DNA, 158 bp, Homo sapiens
cccaaggcgcgccactcctcccggaggcgacatggggcacccggtgtaccgcggcgagaagccccagctgcactacgcgacctgtggatgaagagccagagtcctctgaggtcgatgctgctggtcggtggcctggtgtctgtgttagcagaacatct

SEQ ID NO: 431791 - DNA, 96 bp, Homo sapiens
tcacccaggtattcatgctggcttcctggaccctttgtgtctttttctgcctggaaaagtaggaatccatggtggaagtgagctcacaatgactca

SEQ ID NO: 431792 - DNA, 75 bp, Homo sapiens
aagttccagagctacaaaagtttttccagtttcagtcattcagtcagtaccgctgtaagactgccaagaagtcag

SEQ ID NO: 431793 - DNA, 80 bp, Homo sapiens
cactcctggtgaccagcattcaaggaatcttttgggtgagttgtgaggctggcacctacattcggacattatgtgtgcac

SEQ ID NO: 431794 - DNA, 100 bp, Homo sapiens
ctgcactgggtgattcacgtgtgcccaggccctgaggtgggccggacctgggagtggcaggcgcagacggggaagcggagccaacatgccagtggcccgg

SEQ ID NO: 431795 - DNA, 101 bp, Homo sapiens
gtgcgtctgccgcagagtcggcacctgaaggacatggaggagtgtttctcaggagctatcagaaactatcctcaccatggtagccaattgcagtaatgtta

SEQ ID NO: 431796 - DNA, 51 bp, Homo sapiens
agtcactggtttgcagagtccaggtgctgctagctgaggaggggatagctc

SEQ ID NO: 431797 - DNA, 83 bp, Homo sapiens
catttagattggattctgaatatcaggctcatgagaggctagaagattccaaactagaagctgtcagtgacaataacttggaa

SEQ ID NO: 431798 - DNA, 82 bp, Homo sapiens
tggtctacatgctagagggcttgggcattcacacggtcatcatcagatttgaaatatttaaagtggatacaaaactatttca

SEQ ID NO: 431799 - DNA, 74 bp, Homo sapiens
taaacctgtcgggtagaaacctcagtgaaggccacagtgatgttgtaatgggcctggtgtctgttaattgtgaa

SEQ ID NO: 431800 - DNA, 100 bp, Homo sapiens
aagaacctgaacccccactggaacgagaccttcctctttgaaggatcatccagcagctcgtcaacggcatcatcacgcccgccaccatccccagcctggg

SEQ ID NO: 431801 - DNA, 100 bp, Homo sapiens
ttttctggcggcggtagatttgaagcgcttcaaaggaccggacccagagaagaggaaaactctaccggtgcaggctccatctactctttgaagcttctgc

SEQ ID NO: 431802 - DNA, 100 bp, Homo sapiens
ccaagagggatccttcacccgtgtctggttgctatcaagatcatagataagacccagctggatgaagaaaacttgaagaagattttccgggaagttcaaa

SEQ ID NO: 431803 - DNA, 75 bp, Homo sapiens
gcagcctcacctcaccatttctagcttgttgaaacccaaaactaatgcagaggccaggatgtgggcccagccctg

SEQ ID NO: 431804 - DNA, 75 bp, Homo sapiens
ccatcagtgaatttaagcccacatatcaggaccgagtggccccgccaggtgcccttgctcgtgtgaatgaacaga

SEQ ID NO: 431805 - DNA, 75 bp, Homo sapiens
agcaggctaccaaggacagagtcagtgatttccataaattgaagcaaagtgtttctgcccagttttccttcatag

SEQ ID NO: 431806 - DNA, 74 bp, Homo sapiens
gaaactgggtttgcagattttgaagatagtcatggtcaccacacaggaagacaactgttagttttgtggcttac

SEQ ID NO: 431807 - DNA, 97 bp, Homo sapiens
gatcgggacccggtcccaggggaggcccccacctccccttctattgttctgtggcccagggtgagaactctgtctcagtcgacgggaagtgcagtga

SEQ ID NO: 431808 - DNA, 83 bp, Homo sapiens
ccctggggcggcagcgcggacccgcccggagatgagaccctctttcccagctgcccgctcctcagcacccgaagattcgcctg

SEQ ID NO: 431809 - DNA, 83 bp, Homo sapiens
gtcggcgccggggttcggtggcctctagtgagatctggagggctgaaatctctttaatgatggagggaagcaggcagacgcga

SEQ ID NO: 431810 - DNA, 51 bp, Homo sapiens
gacgagcccattcccaggaaaagaaaggtgtcatggagaaactccagctgg

SEQ ID NO: 431811 - DNA, 147 bp, Homo sapiens
acagaccggctggtgcactggtgccacggcgccccgggggtcatccacatgctcatgcaggcgtacaaggatctggatcgaaatctgagcagactcacggcttcatttgaaaaagcaacagctgagaaagtccggtgtcaagaagag

SEQ ID NO: 431812 - DNA, 96 bp, Homo sapiens
gaaaagctgtgcgggccattggacggtgtgccatcaaggtggaggtatgtatattaggttaggctgggaagttttttttaaaaacagaaaaacgtg

SEQ ID NO: 431813 - DNA, 73 bp, Homo sapiens
agacctcgccattgagtatgagtttcttaaacaattaggtctacatcctaactggcaattcgttgatgtatat

SEQ ID NO: 431814 - DNA, 75 bp, Homo sapiens
ccaaggtccagggggcaaggtcgtggcctactgaacttgacgcactggtatttggccatctatacaccattctta

SEQ ID NO: 431815 - DNA, 98 bp, Homo sapiens
tgtgcaggacaccgacatggaacagggactcactggggatttggtgcttccagatgtgagttatcaggtggaatccagtgaggaggatcagtctcaga

SEQ ID NO: 431816 - DNA, 75 bp, Homo sapiens
ggccgctgcctaagctggaaagtgagcacctgcggatctgtccccagggctacacctgctgcaccagcgagatgg

SEQ ID NO: 431817 - DNA, 90 bp, Homo sapiens
ggaagatacagaaatctctgggaacactattataagtttggcatagaaatggtaccccttgttcaaaatgaacaagaagccttagatttg

SEQ ID NO: 431818 - DNA, 76 bp, Homo sapiens
gtacgctggttggcatttgctctgagcatcagtcacggtgggatgaagctctcttgactatgagtaaaggagaaaa

SEQ ID NO: 431819 - DNA, 94 bp, Homo sapiens
ggtgcggcagaaccggcagagggctgacgaggatgtggagtgttgtacagtgttttgggcatgcacgtgatactcacacagtggcttctgctca

SEQ ID NO: 431820 - DNA, 100 bp, Homo sapiens
ccgggttcaagcgattcttctgcctcagcctcccaagtagctggggttaaagatgtctgctccaatgaggatctccctgaagttgagctggtgagtctgc

SEQ ID NO: 431821 - DNA, 101 bp, Homo sapiens
aaagtgattaagcagagaatggagaagaaggttgattccaggtaacttgggtttttactcctgtaacaactgaaataacaagtcttgatacagagaatata

SEQ ID NO: 431822 - DNA, 100 bp, Homo sapiens
ttacccttcatattggagactacaatatggatggctatccagacgctctggtcatactaaagaacacatctggaagagtcttctgaagaggagtctgatg

SEQ ID NO: 431823 - DNA, 76 bp, Homo sapiens
aaagactttcacagagactttcttcatgagattgaaacaggaagccctcctatgacactgaaacagatcctagtga

SEQ ID NO: 431824 - DNA, 75 bp, Homo sapiens
gccgggagttcaagaagaacactccagagatgatgattattctccaccgtctaagagaccaaaggccaatgagct

SEQ ID NO: 431825 - DNA, 105 bp, Homo sapiens
ctgggcttcggggccaagctgcccccggatggcagagtgtcccacgagttcccactggattttttatcaagcagaaatgcatcgaacaacgagaatcaagatcac

SEQ ID NO: 431826 - DNA, 98 bp, Homo sapiens
cgttcacagatgctgagagtgaaggggggtcgccactgggacactgtgaaccaggagtgagtcggagctgccgcgctgcccaggccatggactgtgag

SEQ ID NO: 431827 - DNA, 100 bp, Homo sapiens
caggaatatccatgtcggcttgtagagagattgcattgcccagcaggaggctgaaatgttcaaacgctacaatggaacatttccattacctggaatacac

SEQ ID NO: 431828 - DNA, 118 bp, Homo sapiens
ccggcgtctcctcccgcccagcagttcctccacgcaggggctccggaatcgcccgaccgcacacgttgccaccctgagctccttcgagaactcatagaacggaagaccagctccttgg

SEQ ID NO: 431829 - DNA, 99 bp, Homo sapiens
ctctgctggacaatcagtattacctgggagctgactgagcctatcaagactcttccacctgctacttctaccgagccatctgtaatcttatcaaaaagt

SEQ ID NO: 431830 - DNA, 148 bp, Homo sapiens
agcaggtagagatcctgagggaaaagctctgtgccagtgaactgttcaagggcaagaaggcttcatatccccagaggaaagaccacagcaagattctttcattcgtctcctcctagcctgggggaccaggctcgaactgaccctggac

SEQ ID NO: 431831 - DNA, 93 bp, Homo sapiens
cagggctgtccccgggctctcaggtcgactctaaacaacacaggcagttctacataccggccaccccctcggacccgggaggtgctgatcaac

SEQ ID NO: 431832 - DNA, 98 bp, Homo sapiens
cggggaggacgcgccgcggccaggcagggaggagaccggcacccagacaggtggcgaaggcagaggactgccttcctatttcaaggaaagacgccaag

SEQ ID NO: 431833 - DNA, 100 bp, Homo sapiens
cctgccgaaatctcatcgccttcaccatggacctgcgcagcgatgaccagggttacgggcaggacttgagtggcttcggacagggcttctcagaccccag

SEQ ID NO: 431834 - DNA, 89 bp, Homo sapiens
gaatgtgtaaccagtgctctatgtatcccactagcaagccaaaagaggtgattttacaacgagatgctgctctccatagggatgctcat

SEQ ID NO: 431835 - DNA, 100 bp, Homo sapiens
tttgctatgtctctgagctgcgaggaagggaaaaggccgaggcatcagcgtgtgaagaccgcaaagacgatcccgagtacagttgtgaacagcattgctg

SEQ ID NO: 431836 - DNA, 75 bp, Homo sapiens
tgcttcggagtgcttatgccaagaggaacagcagtgtaaatgactcagatctcccttgagtttagaaatctggct

SEQ ID NO: 431837 - DNA, 73 bp, Homo sapiens
gaaatcagctcgagacatgtgggctgattacatcctggtactgggcctaatcgctacgtgcctctttggctat

SEQ ID NO: 431838 - DNA, 83 bp, Homo sapiens
atctcgggctcggaacgagactgcacggttccatcataatgaatggatccaatatggcaaatacatcaccgagtgtaaaatcc

SEQ ID NO: 431839 - DNA, 58 bp, Homo sapiens
cagctgcggggcaagatggaggcgctgattttgaaagatggatactatgatgctgaat

SEQ ID NO: 431840 - DNA, 139 bp, Homo sapiens
agacaatctaaaaaagagatgaagaagaaagatacagtgccttggtggataactgaagatgattttaaagatgatggtttgtactacagaaagtgccagttaatttccaaggaagatgttactcatgatacgaggcttt

SEQ ID NO: 431841 - DNA, 101 bp, Homo sapiens
cttctttgtaggagagtttcatccgccctgaaatcttcccgatcgttaataactcctcaggtccctgcctgcacaggtctgccagtgaagcaactgtgaag

SEQ ID NO: 431842 - DNA, 75 bp, Homo sapiens
tcatgatggtcatggtgattggaaatctagtgagttttccgtctgatgaaggttggccatttgcaaagtatcttg

SEQ ID NO: 431843 - DNA, 97 bp, Homo sapiens
ctttgacttggtgttgaaagtgaaatgtcatgcctctgaaaatgaaggtgaagcatatatgcgtttaagcaaactccccgaagcagagcattggtat

SEQ ID NO: 431844 - DNA, 90 bp, Homo sapiens
aggcctccgggccgcgaagtcgcagcgccagacccaaggcccccgagtgagcgcgggcgccgaggtggtttcctagaaacatgattgttt

SEQ ID NO: 431845 - DNA, 75 bp, Homo sapiens
ctccaacgattgagatcatttaaagatgattccttagcaaaatcaccttctgtaaaaaatgatcctctgtcttca

SEQ ID NO: 431846 - DNA, 82 bp, Homo sapiens
tgaccgtgtgtcagaacaatcttgaatcatgaagctactaaccagagccggctctttctcgtaaagatgacggcgccttgag

SEQ ID NO: 431847 - DNA, 98 bp, Homo sapiens
agtaactgaacattggtctaaagtctttccaaaaggtcaaggttcacaagtgggtaattccagaattgattggccataccattgtcactgtattactg

SEQ ID NO: 431848 - DNA, 100 bp, Homo sapiens
gtcaggacacagcatggacatgagggtccccgctcagctcctggggctcctgctactctggctccgaggttatatgcagaggaacccccagatgccccag

SEQ ID NO: 431849 - DNA, 100 bp, Homo sapiens
gaattaagaggatccggctggtcacttgcctggagaggatcctgcatgctgatagtgctgaggcacctgccagctaagattgttctctggggccggactg

SEQ ID NO: 431850 - DNA, 96 bp, Homo sapiens
gccgactctgggatgaactgatgaagacaaggccttccagtttggaaatcctgtattaaaagtaactctagcagtgtctgatcttcaaaagtcctt

SEQ ID NO: 431851 - DNA, 98 bp, Homo sapiens
gctggtcgtgttcgtcctcggcggccccggcgccggcaaggggacccagtgcgcccgcatcgtcgagggggcaatggcggcttcctgtgttctactgc

SEQ ID NO: 431852 - DNA, 98 bp, Homo sapiens
gcagctccacagacagccccagctcggtgttcctcagatgtgtatatctcatgattgatatggagaaactagtcatgggccaaaggtcaagatacttc

SEQ ID NO: 431853 - DNA, 129 bp, Homo sapiens
tggctcagctcactcagcgctcagtgcacatatgtcacgtggcacggaaggaggaggtgtttgtcccagagatggcagcgcggaggcaacgcgtccaactcctgcaccgttctctccctgctcggagcc

SEQ ID NO: 431854 - DNA, 101 bp, Homo sapiens
tttagtgcactcttctccttcacagtaaagtggctggcaagaaaactgatcagtgattttgccattatcttgtccattctcatcttttgtgtaatagatgc

SEQ ID NO: 431855 - DNA, 80 bp, Homo sapiens
caggccatggaggccatgctgctgtacctggagccggtgccatctgtgggggctttgggccaggggtctccggacagcat

SEQ ID NO: 431856 - DNA, 76 bp, Homo sapiens
ttgacaacgaacagctcttcaccatgaaatggatagatgaggaaggtgacattaattaccaagaatttgctaaaag

SEQ ID NO: 431857 - DNA, 100 bp, Homo sapiens
ggaaaggggagatggcccaatcagctcccagctcctccagcagccgacaggaggcccgtcaagatgcaggcaggcattgccaccccagggatgaagacag

SEQ ID NO: 431858 - DNA, 74 bp, Homo sapiens
gaaaggactgttcttgaggtattcagagttcttcgtaagtacatcttaaagctgtcaagatggttctagcagac

SEQ ID NO: 431859 - DNA, 82 bp, Homo sapiens
ctaccgtcaccagcagaagataaaggaaactttgagggaaattttgagtcactggaccttgcggaatttgctaagaagcagc

SEQ ID NO: 431860 - DNA, 74 bp, Homo sapiens
cgtccgtccgccgccaccacccactccggacacagctctctgatgtaaaggatggagtaaatcaagcagcacct

SEQ ID NO: 431861 - DNA, 83 bp, Homo sapiens
actggaaacaatggcatttacagaaagagtcaacagcagtggcaacagagtaaagacaagattgcatcctacagcaaaactcc

SEQ ID NO: 431862 - DNA, 100 bp, Homo sapiens
gaagagcaagaggaggacatggagatgaagaagaagattaacctggagttaaggaacagatccccggaggagagacaggatctcactgtgttgtgcaggc

SEQ ID NO: 431863 - DNA, 95 bp, Homo sapiens
cagcgctaacgttgtcaaggacccgccctccaagtacgtgtcgttgaagaaagttggaaaagattctactgtcttactaatctgcatcaccgtgt

SEQ ID NO: 431864 - DNA, 100 bp, Homo sapiens
ccctgtgatccctcaagactggtccacggagtgtatgaccacaaacagccatcaaggtcctggcattgatgtgcctgctccagacatgagcacaggtgag

SEQ ID NO: 431865 - DNA, 96 bp, Homo sapiens
cacggacagcatcctggaggaccagtcagaccagcgcgtcatcatcaagattcagggcaggatcctgctcctgaccatctgcgctgccggcattgg

SEQ ID NO: 431866 - DNA, 82 bp, Homo sapiens
aaaagaagcgtatggactactatgactctgaacatttgcagaaaaaacttcagcatgtgccaggaacacaacctcaccttga

SEQ ID NO: 431867 - DNA, 100 bp, Homo sapiens
tgcgccctctcagcttcccaagaaagatgattcctgccctcaaacatcggactccaagttcttgagttttgggactcagactggctttcttgctcctcag

SEQ ID NO: 431868 - DNA, 75 bp, Homo sapiens
cacgaattcagttcccacgccaaaccagaccccatggcctgctcagcctcagcgaggagaggggccactgaaaac

SEQ ID NO: 431869 - DNA, 100 bp, Homo sapiens
ttcgaggtacctgtgtccgtacacaccagaccgatcagtcgcatcgaatacattcattcaaagaacttcatccaccgggatgtgaagccagacaacttcc

SEQ ID NO: 431870 - DNA, 133 bp, Homo sapiens
attgtggcttttgaatgtatgtttacaaacaaaaccttcactcttgagaaggggctgatagattcacagtctgagaatgaggcttcaccagtaaaacggccacgactacttgagaatacggaacggtccgagg

SEQ ID NO: 431871 - DNA, 82 bp, Homo sapiens
cttcccggtctcctttcccggccgcacagggatcgaatcatcaatttagttgttggcagcttaacatccttattgattctag

SEQ ID NO: 431872 - DNA, 90 bp, Homo sapiens
ttctgcggcacgggatggcggaggcgcctcctgtctcaggttgcttatcaagtgtcccacaaatgaaaaaaatttctacatcttacgagg

SEQ ID NO: 431873 - DNA, 75 bp, Homo sapiens
gcagttcagaagagccaaggaataaacatgcaatgaacccaaaagggctggaatatttcaggagtttaaagttca

SEQ ID NO: 431874 - DNA, 82 bp, Homo sapiens
gcagccaagctcgtggcctgcctctgcgtgcggcacagactccatcaagatggagaacgggcagagcacagccgccaagctg

SEQ ID NO: 431875 - DNA, 75 bp, Homo sapiens
agagaaggggaataagactgcatctgttcatatgaggaacctcgagccggttactcagctgtatgtcagtgtgga

SEQ ID NO: 431876 - DNA, 100 bp, Homo sapiens
cttcgtacacatggagcgggcagaggatgcagtggaggccatcaggggccttgacaacacagagtttcaaggttttataggatcacattgacaaaagtac

SEQ ID NO: 431877 - DNA, 100 bp, Homo sapiens
aggtaagaggtttgggactgccccggcaactccagggtgtctggtccacgacctatcctaggcgccatgggaacgggtatggcaatccccgaaactcacc

SEQ ID NO: 431878 - DNA, 138 bp, Homo sapiens
acctgcgtcctttttcgtttttcggatgatgccttcaatactacctttatttccaccatagtggttggttactcgcactatgcagacgtgttgcggtgctgaatacaacatttattactaaagccagacactggatca

SEQ ID NO: 431879 - DNA, 100 bp, Homo sapiens
aagctccccacctctaccctggcccatcaccaatgtacccaatccccacccaggactcagcaggatacaatcgcccagcaaacagtgagtttttccagat

SEQ ID NO: 431880 - DNA, 100 bp, Homo sapiens
ctttattcatcgactcagtcagtctcttggtttggtctctaaaagtaaaggattctgaacacaaactcgagacgagttcaggaagagtactgggaagatt

SEQ ID NO: 431881 - DNA, 98 bp, Homo sapiens
agaattagacctttcacatgggaaaaaagatgcttttgttttggagctcttcacagatggaatcacaaataaacttattggctgttacgtgggaaaca

SEQ ID NO: 431882 - DNA, 90 bp, Homo sapiens
cttgggccgcgtctcctttgaggttgactatagtcaatggggccaatggagccaagtgtatggaaacccacaacagtatggacagtatat

SEQ ID NO: 431883 - DNA, 75 bp, Homo sapiens
aagagttcagcatcacagagttctccgagggagcgaagcagactttgccttcaaaagaaacagcatttttaaaca

SEQ ID NO: 431884 - DNA, 75 bp, Homo sapiens
agtacccgtccatcatagtcaactgcgtggaagagaaggtggaggcaatgcccagagctgtggcagccaccttgc

SEQ ID NO: 431885 - DNA, 89 bp, Homo sapiens
gagaatgtgtctcttgccaaagcgaagatgcttgctctgtcaaggcacagcctattgtctcctttgctcagtgtgacatcattcagacg

SEQ ID NO: 431886 - DNA, 82 bp, Homo sapiens
cggcctgcagcacccgccaccgtcgccggccgcccgcacgtccgtccggcaactcatgcagcaattccagaaccccgacttc

SEQ ID NO: 431887 - DNA, 50 bp, Homo sapiens
tgtgttgatacctataccaaccgtttaagcaactttttacagatgtggca

SEQ ID NO: 431888 - DNA, 76 bp, Homo sapiens
gctgtctgtggtcactactgtgtggggagttggcaacgcgacacagagccaggatctcagaccgtggtggaggaat

SEQ ID NO: 431889 - DNA, 90 bp, Homo sapiens
gcccggatgagtacgataccgaagcgggctgtgtgccccttctccacccagaggactacttccagcaacccagtctcctgccatgtccga

SEQ ID NO: 431890 - DNA, 74 bp, Homo sapiens
cggcagccggctgtacgcacacaccatcgcagacgcaggaggagggagacgcactgatgacatcgggccgctcc

SEQ ID NO: 431891 - DNA, 83 bp, Homo sapiens
ccagagcctagggctagcggccatgttggctgattgcaattctggcccaactcaaccctctctttggaccgcaattgaaaaat

SEQ ID NO: 431892 - DNA, 100 bp, Homo sapiens
cgcaccttcaggattgagacccggaaggcttcaaaggctgtcgcaaggaggaagctcctgcccctcctaaagctgaagccaaagcgaaggctttaaaggc

SEQ ID NO: 431893 - DNA, 100 bp, Homo sapiens
ccttagcacaggaggctctgaagtggagaacgaagcagccaactcttcctgccaaataaatagagtcatcagtcatcctactcttccgatcagcatcact

SEQ ID NO: 431894 - DNA, 100 bp, Homo sapiens
tgcacgtgatactcacacagtggcttctgctcaccaacagatgaagacagatgcaccaacgaggaaaccactgttgctgcgattgccccggatatgccag

SEQ ID NO: 431895 - DNA, 115 bp, Homo sapiens
ggaaactgaagaggaggttggtgcatgggtccaatatacaagcatcttctgtcctgaatacagtatctccttaagggggaacacacctgaaactagaggaacagcttatgtggtc

SEQ ID NO: 431896 - DNA, 98 bp, Homo sapiens
ccagaccagctcggctacctggtactgagtgaaggtgcagtgctggcggtgaagagaaggactataccatatggctggcacactccacagaccctgaa

SEQ ID NO: 431897 - DNA, 83 bp, Homo sapiens
catacacgtttgaggactatgatgtctcctttggggtggaatatgtgatcaagtgtgacatgtcagctctgcagaagattctg

SEQ ID NO: 431898 - DNA, 82 bp, Homo sapiens
tcatcatgatggacttggagctgccgccgccgggactcccgtcccagcaggtgcgcgcggagccatggttatcatgtcggag

SEQ ID NO: 431899 - DNA, 90 bp, Homo sapiens
gtaggctccgccaagaggcgccgcaggaggtgcagattcactttataggaacagcttcagcttcagtgatgaaaaactgaattctccaac

SEQ ID NO: 431900 - DNA, 85 bp, Homo sapiens
cgtgctactgtgcgctcgatccagcaccatggggaagcgggacaatcgggtgagggccactgccaaggcgacaagtcaatattct

SEQ ID NO: 431901 - DNA, 84 bp, Homo sapiens
cgtgaagatgatgaggatgaagacctttatgatgatccacttctacttattaaataaggagaggagacgccgtgagcgggacga

SEQ ID NO: 431902 - DNA, 100 bp, Homo sapiens
ggaaaaaatcccaaggtctgcaaagttcccagtgacctgacagcagaggagcgtcaagaactggagaacatccgacggagaaaacaggagctgctggctg

SEQ ID NO: 431903 - DNA, 83 bp, Homo sapiens
gaagtagcaaaggcaagaaggcaacgacgttccatctgtggaaggacctaccaaccaggatgcctaaatcaaaggaacttgtt

SEQ ID NO: 431904 - DNA, 75 bp, Homo sapiens
ttacagttcattttttgcttggtttggaaaaatttcattagaggtaaatggtatccctgaagaaagaaaactgac

SEQ ID NO: 431905 - DNA, 75 bp, Homo sapiens
ccgggtcctgtcaatgtcacgccaagatagccaggttaaccaaacgctttgaagcagccaaagaagatcttaaga

SEQ ID NO: 431906 - DNA, 51 bp, Homo sapiens
ctcagaattcatgattgaagaaatgcagatcacaagatttctgttgtgaag

SEQ ID NO: 431907 - DNA, 98 bp, Homo sapiens
gatatgttccagttgcacatttcctgcaaggactccaaagtggtgagggggcagtacccaaaggaaacgctacgaaagaatacatggagagcttgcag

SEQ ID NO: 431908 - DNA, 103 bp, Homo sapiens
cgctccaggtgctgacagcgcgagagagcgcggccctcaggagcaaggcggttacattagttatacactctggaggtgacttgacctgtcattgtgaacaatt

SEQ ID NO: 431909 - DNA, 101 bp, Homo sapiens
ttatggacaaacctgaagagtttatatctgaaatggacgagtccttcaataatgttaaacagtggctgcaggaaatagatcgttatgccagtgaaaatgtc

SEQ ID NO: 431910 - DNA, 100 bp, Homo sapiens
gcgctcgtcctccacccctggaatccctgtctgggtgcggactcggagaagccctcgagcatccccacagccaatgttttcagttgcaccaagcttagcc

SEQ ID NO: 431911 - DNA, 80 bp, Homo sapiens
tcctactaccgcctcacacgcttcctctccagagtgatcaagtgtgacccggtcaaaatgcagatcttcgtgaaaaccct

SEQ ID NO: 431912 - DNA, 83 bp, Homo sapiens
cggcttccaagcaaccaacttcgggcgcgctgtacagcaagtcaatgccatggttcaaggtgtttgcagactatgaagcctac

SEQ ID NO: 431913 - DNA, 100 bp, Homo sapiens
tttgcaaccagatttcttcttagatgaatacccagaagcagttagcaagaaagtggaatcaactggttcatcatgcctagtggcgtataagaagaccccg

SEQ ID NO: 431914 - DNA, 102 bp, Homo sapiens
atatatccttcatatgatccatcttagtgaagaattaggatacagttggctggggaacagaccagggaattggtggatttggagaagagccgggaattaaat

SEQ ID NO: 431915 - DNA, 50 bp, Homo sapiens
gcccttatacaaagacctttcggggcctgtcctcccaaagccaactctaa

SEQ ID NO: 431916 - DNA, 100 bp, Homo sapiens
tggccaaggacttcattcgccggctgctcgtcaaagatcccaagttctccatggtggtacaggatggcatagtgaaggccctgaatgtggaaccagatgg

SEQ ID NO: 431917 - DNA, 75 bp, Homo sapiens
cctgcgtaaatactgctgtaatactgtcatgcaaagtgtatcctttcttgtcatgtgcttgcgatgactgcagtc

SEQ ID NO: 431918 - DNA, 100 bp, Homo sapiens
cgctgcttcacctcttcgccggcggcaggggacctcctcgcccacgacctgccccagcagttggagaggctgaagataaagaaaatcagcaagccaccag

SEQ ID NO: 431919 - DNA, 80 bp, Homo sapiens
ggtggaggccgggaggacgaagggaacccagtttggccagtgggatactgctggttttgagaacgaggaccaaaaactga

SEQ ID NO: 431920 - DNA, 90 bp, Homo sapiens
tacgagctgcaggaggtgatcggctcagtttatgaacctcttaaaagcattaatcttccaagacctgataatgaaactctctgggataag

SEQ ID NO: 431921 - DNA, 90 bp, Homo sapiens
aatggtggatgaagttgttcattgtttgtcaccacaaaaaggacagcaaaggtggacttctgagtcatggacaaaccagaattcttgccc

SEQ ID NO: 431922 - DNA, 74 bp, Homo sapiens
tcaagacgatcatagtcactgggcttcgtgggacacatatgcaacatgcctatgatttttacaagcctgatatg

SEQ ID NO: 431923 - DNA, 74 bp, Homo sapiens
gacgagcatttgcttcccgagtatttcctccagagattgtggagcagatggaggcagaggaggtggacacggtg

SEQ ID NO: 431924 - DNA, 100 bp, Homo sapiens
gctcatcagagggaagatctttttcctcaattgcctcgtcacgtgttcaatatgctaaagaagtatgtccgcgcagaacagaaggacagacagcacaccc

SEQ ID NO: 431925 - DNA, 100 bp, Homo sapiens
tgcagcccagacactgagagccgctttcatcaagaagacacgggcatatcataggctgaaggatgatgtcccggaagaggtaaaattaaggcgtttggag

SEQ ID NO: 431926 - DNA, 83 bp, Homo sapiens
ctggagaatgacaagagcttccgcggtgtcattctgacctcgtgctgctcacggccgtgaactgctacagcgtgaaggccgcc

SEQ ID NO: 431927 - DNA, 75 bp, Homo sapiens
gttcggactatttgtagtcatgtacagaacatgatcaagggtgttacactggtggatagatacttctcaagacat

SEQ ID NO: 431928 - DNA, 75 bp, Homo sapiens
caactcagccccacaacagattgaactccctctcactggcagcaccttccatgaccagatagccatgctgagcca

SEQ ID NO: 431929 - DNA, 100 bp, Homo sapiens
ggaaaggaaacaaaattcgatttgcaaatcattcagtgaatcccaactgttatgccaaagtgttgggtggtgaattcctcaagtacatggaggcctttaa

SEQ ID NO: 431930 - DNA, 90 bp, Homo sapiens
aattttctcaccctgatgaaaagattcaatgaaaacttcaggattctgaactccccatggatccagataaaagtggaaccagtcgctctg

SEQ ID NO: 431931 - DNA, 88 bp, Homo sapiens
ccagaggaaatttggccagttatccaattgatgaactagtagatagagccaaacaatcttttcaagcatgatggaagtggttcattgc

SEQ ID NO: 431932 - DNA, 76 bp, Homo sapiens
tacaatcttgcgtgtcctgggctctaatgtcagagaatttctacaggtaaaataccatgaagattttgaaaaaaca

SEQ ID NO: 431933 - DNA, 74 bp, Homo sapiens
cagcgccagcagctggactatggcatctatgttatcaaccagccgaaggagtaaaggtgctgcaatgatgttag

SEQ ID NO: 431934 - DNA, 75 bp, Homo sapiens
gtctgcgtgagaatagagaccaccgagtcaactgcttggaccagcatgttcggaagtcccccgagagcgttgctt

SEQ ID NO: 431935 - DNA, 83 bp, Homo sapiens
atcacctatgtttacagcgacaggacttctgcacggacctggccgtctccagtgccaacttcattcccacggtcactgccatc

SEQ ID NO: 431936 - DNA, 75 bp, Homo sapiens
tttttacttcactggtgtgcaagacatcaatgacaagaggttccaggaactgagagagagagtattaagagggaa

SEQ ID NO: 431937 - DNA, 100 bp, Homo sapiens
tcgaacagagccgggagttcaagaagaacactccagagatctcctgggaggcccccgtggagaagaagactgagtgtatccagaaagggaagaacaacca

SEQ ID NO: 431938 - DNA, 74 bp, Homo sapiens
tgacgatgacgatgaggaagatgcggagtttaagagagctgtgaaagtagcaacaggacaagaactctcaaaca

SEQ ID NO: 431939 - DNA, 83 bp, Homo sapiens
ctcgcccagctcgcccagcgtccgccgcgcctcggccaagagactgacttgcataccaaatgtgtggtggatgtggatgcaaa

SEQ ID NO: 431940 - DNA, 75 bp, Homo sapiens
aacagatgtgagcgagaaagccgttgcctccagcaccacttctaatgagtggagactgctgcacggactctggaa

SEQ ID NO: 431941 - DNA, 103 bp, Homo sapiens
atactttggttacctatgtacctgttaccactttcaaaagttctaagctggtctatgtccatcaccttcttggagaaggagcctttgcccaggtgtacgaagc

SEQ ID NO: 431942 - DNA, 80 bp, Homo sapiens
agtgcagaaccccggcgcggcccttgaggatgtactgagtaaagatgctggggaatgtgcaatatgccttgaagaattgc

SEQ ID NO: 431943 - DNA, 74 bp, Homo sapiens
cggccttcccatcaccatcacagagagcgatattgcccgtgaggcagaggctgccatctaccacttgcaattat

SEQ ID NO: 431944 - DNA, 100 bp, Homo sapiens
cccaccctcccaggagatccccatggaggtcttcgaccccagcccgcagtgtgaaatatgagttggcgaggaagatcgacctatcggcctagaccaagac

SEQ ID NO: 431945 - DNA, 74 bp, Homo sapiens
gcctcatttgcgccttgcagcactgctggaccagctgagctgactgctgcccactttggaggaggcggtgggct

SEQ ID NO: 431946 - DNA, 90 bp, Homo sapiens
tcagagttctctaaaaaaactggctgtgaataatatagctggtattgaagagattggttcgagtgagtaaaaactaccgatcagtcatca

SEQ ID NO: 431947 - DNA, 98 bp, Homo sapiens
catggcagctatgccccagactgtgtatggggtccagccagctcagcagctgcaatggaaccttactcagagcctggagaaagttcttgtggaattca

SEQ ID NO: 431948 - DNA, 98 bp, Homo sapiens
catgatggctcagtttcccacagctatgaatgaaatctcctgcaaagaagctgagccatgcaattagtaaatctttggggtgtgtacccacgagagaa

SEQ ID NO: 431949 - DNA, 74 bp, Homo sapiens
ggcgctgtacaccgcggccgtcgcggcttttgtgctgtacaagtgtttgcaggccaaacgtaccaagaaagtcg

SEQ ID NO: 431950 - DNA, 51 bp, Homo sapiens
ccaaggtcaacaccctgattcggcctggttgcagtatgcctgaaatttggg

SEQ ID NO: 431951 - DNA, 100 bp, Homo sapiens
gaagtttgggcctcagcagacttgcatatatttgactgcaaactttgagaatcactacaagaaaaactccttgtggtgaaggttctaagacgtgggatcg

SEQ ID NO: 431952 - DNA, 83 bp, Homo sapiens
cgaacttttgacacggctttggaaacgacgtcatgtgttagcccgacggccatggaggctgaagagacgatggaatgccttca

SEQ ID NO: 431953 - DNA, 98 bp, Homo sapiens
ggtgaagcgattcctgcaggcgttggttcccctctttgacctggtaaatgcaggcttttatgcgagaggtgatgatgaacagtctacacagatggctg

SEQ ID NO: 431954 - DNA, 82 bp, Homo sapiens
gtagcaacagaaaccagtcctgctcgcctccgtgtgcagagcagagcgggcggaggaccccgggcgcgggcgcggacggcac

SEQ ID NO: 431955 - DNA, 100 bp, Homo sapiens
ggcctgggccgcttcctgcaagaaaacaagcagcttctgcacgacgcactggcccaggacctgcacaagatatgagggaaggcaccattggagatatggc

SEQ ID NO: 431956 - DNA, 100 bp, Homo sapiens
ggggccctcttgataaaaagagatgtggggggattctcgacctgctaacagaactggaccttttcgattagctttatttgctcaccgtgaagatggacct

SEQ ID NO: 431957 - DNA, 100 bp, Homo sapiens
tgcagcagtcacccaaacctggggagaagggctcattgtcatccccaagccaggccagttctccaggtggaactgtagtgtagcgacctcactgctgcgc

SEQ ID NO: 431958 - DNA, 98 bp, Homo sapiens
ttccttgcttctttggagaatgatatcaaaccagttgccatggctgctgttgacagtttctacctcttgtacagggaaatcgccaggtcttgcaattg

SEQ ID NO: 431959 - DNA, 106 bp, Homo sapiens
cggagctgggcgcggattcgccgaggcaccgaggcactcagaggagatcatggaagggaagtggttgctgtgtatgttactggtgcttggaactgctattgttgag

SEQ ID NO: 431960 - DNA, 75 bp, Homo sapiens
gaaccctaataaggagccatggagaaaaatggatcttaggaggctccaggaagaaaagcgccagcgagacctgga

SEQ ID NO: 431961 - DNA, 100 bp, Homo sapiens
ctgagacggcggcagcagcggcattcaggatcccaggagggcactcatggtggtttatgggactctggactcctgagaagcggccttgagtctacaggat

SEQ ID NO: 431962 - DNA, 51 bp, Homo sapiens
cgcacacagcagatccaagaggagctgaacacactgttgcagcagctagga

SEQ ID NO: 431963 - DNA, 51 bp, Homo sapiens
tgatgtggatgatgccaaagttttattaggtgagcgagtgctgtgctttca

SEQ ID NO: 431964 - DNA, 100 bp, Homo sapiens
ccacagtggctgccgccacctggtggtttgtgtatgacgccgagggacctcacatcaacttctaccagctgggtcttgacaatgttcacaaacagagggt

SEQ ID NO: 431965 - DNA, 50 bp, Homo sapiens
cgtcaatcagagcgtcctgtgcggtcgcgtggggcaggcagtggcgctgc

SEQ ID NO: 431966 - DNA, 74 bp, Homo sapiens
cgtggagatatggcgcaactgcggcgctacggcaagaagaagctgaaatacctgccctacaatcaccagcacga

SEQ ID NO: 431967 - DNA, 100 bp, Homo sapiens
tggaagctcttcatctacaacccgaccaccggagaattcctggggcgcaccgccaagagctgggacggttgatgatgaagcgccggccgtgtaaatgaag

SEQ ID NO: 431968 - DNA, 83 bp, Homo sapiens
atctacggggctgacatcagcggctctttgtatgatgacgagcaggccgggctctcgccatgggtcactgtcgcctctgccac

SEQ ID NO: 431969 - DNA, 74 bp, Homo sapiens
tctggatgaagcaacattaaaggctgaaggtgatgtggccgccctcaaccgacgcatccagctcgttgaggagg

SEQ ID NO: 431970 - DNA, 75 bp, Homo sapiens
ctcactgtggtggacgttcggccaagggaccaaggtggaaatcaaacgcagaagaaatccttagacaagagctgg

SEQ ID NO: 431971 - DNA, 98 bp, Homo sapiens
ctggtagcccccacccctctccgtccatggccccagatgacacttcagacatcaactagtcaggcagtcttccgtctccagtctggcatctgccatct

SEQ ID NO: 431972 - DNA, 75 bp, Homo sapiens
ctgggcgcgtcagaacaggcgctgcggctgatcatctccatcttcctggacctgcctagagctggaacgttacct

SEQ ID NO: 431973 - DNA, 100 bp, Homo sapiens
agagcaagacaaagaatcagagaaacaacttctactccaggaagtggagaatcacaaaaagcagatgctcagagttatcattaccatgttggtgacctgt

SEQ ID NO: 431974 - DNA, 90 bp, Homo sapiens
caaaggaggattctaagatgatgattacgaaatgagccgtcagactgctacagcattacctaccggtacctcgaagtgtccaccatccca

SEQ ID NO: 431975 - DNA, 100 bp, Homo sapiens
cagatggcggatgccctgcagtacctgcagaaggtctctggagacatcttcagcagaaaccagcctggacaccaagtctgtgtcagaaggccacctcaag

SEQ ID NO: 431976 - DNA, 75 bp, Homo sapiens
ctccgaggcgcagaagtggattgaggaagagaagttaaacttctagagaaacctaacagacaatatccacaacag

SEQ ID NO: 431977 - DNA, 100 bp, Homo sapiens
gtcctgggtgggcgctgcggggcgctgctggcgtgtctcctcctagtgcttcccgtctcagaggcaaactgtgtcatggagaaactccagctgggcccag

SEQ ID NO: 431978 - DNA, 98 bp, Homo sapiens
ttttggacgtttttttactggtcagatcacagctgctggaaaagttcctccagctaagccgttggacataccagatggtcgaagagctccacttcctg

SEQ ID NO: 431979 - DNA, 74 bp, Homo sapiens
gcgtacgccctcatggggaaaatctccccggtgactttcagggcaattgaaggaacagactaaaaatcgtgtcc

SEQ ID NO: 431980 - DNA, 100 bp, Homo sapiens
tgatagacatgggggcctcaaacgtggagatcaactcctctctgttaatggagtggatgggaaggccattgtgactatgtggtgattacagttgtcttac

SEQ ID NO: 431981 - DNA, 100 bp, Homo sapiens
ttgactttctgtgtggctggagcctgtccgaacgctttgggctgttagggactctatgtttgggaatgggaaaggataccggggcaagaaggcaaccact

SEQ ID NO: 431982 - DNA, 75 bp, Homo sapiens
atcatgctgcgcggccttcccatcaccatcacagagagcgatgatcttggcctcactactgtttgggaagaccag

SEQ ID NO: 431983 - DNA, 87 bp, Homo sapiens
attgaagacaatcccttagggtctctttgcagaggaatattggacctcaatacctataacgtcggatgatgtcagatccacctccca

SEQ ID NO: 431984 - DNA, 100 bp, Homo sapiens
cacatctaaacttaagtggaaataaactgaaagatatcagcaccttggaacctttgaccaaacctggaccacccaaaaagccgaagaccccttcaagacc

SEQ ID NO: 431985 - DNA, 75 bp, Homo sapiens
aagcatgctaagaacaacagtcaggccaagccttctgcctgtgatgagattttaagcagcaccatcaagccttac

SEQ ID NO: 431986 - DNA, 100 bp, Homo sapiens
cggcaatggcggcgctgacgagaggaaacccctcctggagtttccccaaagccatggacagccctagtcttcgtgagcttcaacagcctctgctggaggg

SEQ ID NO: 431987 - DNA, 101 bp, Homo sapiens
gcattttagatctaattcaagaaactaaatatattttgccaactttggaaaaagaattattcttggcagagcacagtgaccttgaagaaggtggactggac

SEQ ID NO: 431988 - DNA, 100 bp, Homo sapiens
taggagtgaatataaaaggacttcatctcctcaacatggaaactaagactgggacagggagaaattacttgaagcttggatgtccaacccggagaactgc

SEQ ID NO: 431989 - DNA, 88 bp, Homo sapiens
ttttcttcagcgcccaggatgcagccggctaagcacgagtacacgagacaggattgagaaaggagagattcaaattgtgacttcagat

SEQ ID NO: 431990 - DNA, 49 bp, Homo sapiens
ccgttcctggagattctgattgagtttgggatatgagattgaaaatgac

SEQ ID NO: 431991 - DNA, 96 bp, Homo sapiens
tgcattcggctgcaaggtgtactgtacgtacacagactttgagaatcactacaagaaaaactccttgtggtgaaggttctaagacgtgggatcgtt

SEQ ID NO: 431992 - DNA, 100 bp, Homo sapiens
ggggccggacaccctcgactccctgcagaggctcttcctcatcatctcagccacgaagtacagccggagagacaagtaccaggtatttgactcagctccg

SEQ ID NO: 431993 - DNA, 100 bp, Homo sapiens
gctgcctcggcccggacgcgcccgcgcccccgcggctggagggtggaggtcgttcagctacctttagagtttgtgaaacagctttgtttaaagatacaat

SEQ ID NO: 431994 - DNA, 83 bp, Homo sapiens
cctcagtagattcagcccaagcctcagatatgggaggagaatcaccagacccaacatgagtgaagtttcctgcaagaaacggg

SEQ ID NO: 431995 - DNA, 82 bp, Homo sapiens
tacacttacttctacatggtttatgaaatctgaaatcagatgcttgtttgctactgatgggtgtgagcaagttagatattct

SEQ ID NO: 431996 - DNA, 83 bp, Homo sapiens
gttaaggtatacactgaaaatgtagacaaaaggcaaattattttggaccttcagattaggttgtttttgagcacgttcactct

SEQ ID NO: 431997 - DNA, 74 bp, Homo sapiens
cggagtcttccaggccatcaagggtttccgcaatgcccctgttgagccagagaagaagatcgtccaggagctgc

SEQ ID NO: 431998 - DNA, 50 bp, Homo sapiens
agaaaatcttcgaagacttttcaacagagtttcactcctgttacccaggc

SEQ ID NO: 431999 - DNA, 83 bp, Homo sapiens
agatggtggcggctactcctcctggtgcacattcaggttcccgagcacaaacatcaagataacgttcactgccctgtccagcg

SEQ ID NO: 432000 - DNA, 89 bp, Homo sapiens
cgggactaaactggcgggctccgtggaagcgtggccggcagcgtcccggacgaggagaatcgttgcagtgtgccagtagatcaggcctc

SEQ ID NO: 432001 - DNA, 100 bp, Homo sapiens
agttatgacaccatggatctcttcaggcacactacagaactaaatatgcatccccatgttatagtacattgtgcagcagagagaagaccagatgttgtag

SEQ ID NO: 432002 - DNA, 75 bp, Homo sapiens
caggcgagattgcctgacccaggcctgctcggccctcacaggggtggttctcttcccaaagtggaagccaaattc

SEQ ID NO: 432003 - DNA, 98 bp, Homo sapiens
caagaccagcgcgagggccctgggcaaggcccgacagggaactctaatgatccaggacaaagaagttaccctggagtatgtatcaagcctggattttt

SEQ ID NO: 432004 - DNA, 96 bp, Homo sapiens
cagaagctgagcagtgacgagaacagcaatccagacctctctggagacgagaataagctccaccatgaggcgaggtggatggaggaagcgagctga

SEQ ID NO: 432005 - DNA, 87 bp, Homo sapiens
ccattctatgctgtggaaaagaaagcatactgcgagccctgctacattggccgttgctccagggagaactgcaaatatcttcatcca

SEQ ID NO: 432006 - DNA, 90 bp, Homo sapiens
tgcggaggctgcctcggcggagcagaggaaccacacgctgatcatggtggttgaagatggatatgaattttttgcaaagaggcagttggt

SEQ ID NO: 432007 - DNA, 100 bp, Homo sapiens
agatcttcacagcacagttcctgggaaggtggagccaccagcctctccctggtgtcagagtgatatcgacgagtgctctggaaacccttgcctgcacggg

SEQ ID NO: 432008 - DNA, 80 bp, Homo sapiens
caggatcaacttgaacgaatatttctgcaattctggggtcagaagccatggagtcagcattatcaccaaggatattattg

SEQ ID NO: 432009 - DNA, 82 bp, Homo sapiens
caagctctgggggatcgaccgggacagctaccggcgcatccttatggtactccaaagattcaggtttactcacgtcatccag

SEQ ID NO: 432010 - DNA, 85 bp, Homo sapiens
gcccccgtggatctagagctgaagaaggcatttggctttatgtcccgagttgccctacaagcagagaagatgaatcatcacccag

SEQ ID NO: 432011 - DNA, 100 bp, Homo sapiens
gctgagaaggtggtcagtggcagaaagagcggatgacggatggggaccagcagttatctaaaacagttcatgctgctgaaaacctccttcctggcagatg

SEQ ID NO: 432012 - DNA, 82 bp, Homo sapiens
tgtgctgaactacctgagacacggcaagctggtgattaacaaagacctcgcggaggaagccgccaccggcacggccaggcca

SEQ ID NO: 432013 - DNA, 100 bp, Homo sapiens
gggggtcgctggctctgctgctgccgccggcgaaggaggaggcgttgccgggtattgccatcagagagtcagcaaaggtagttgaccaagctcaaaggag

SEQ ID NO: 432014 - DNA, 90 bp, Homo sapiens
agatggacttcaaatgctgtttgtattccagagactaggacgcaaagtaccacatgcagcgctgcattgactctggcctctgggtcccca

SEQ ID NO: 432015 - DNA, 80 bp, Homo sapiens
cccaacctagtgggtgtaatacatcatgaactgcagggagaggcagatgcgaaccagaacaatgggacctcctctcagga

SEQ ID NO: 432016 - DNA, 100 bp, Homo sapiens
gaaaaacgtctgacctgcggagtgtcgtgtgggagccaatgggagatgggaagaaaatcatttccttggctgataaccatatcctgctgtgggatttaca

SEQ ID NO: 432017 - DNA, 78 bp, Homo sapiens
aaaaacgctttttgcatacaagcaggaaaatgagatgttatccaggtggagtcttgctctgtcgcccaggctggagtg

SEQ ID NO: 432018 - DNA, 75 bp, Homo sapiens
agatacgttagccagtttacttagtggagccgccaccaaaatgcagattttcgtgaaaacccttacggggaagac

SEQ ID NO: 432019 - DNA, 82 bp, Homo sapiens
acggagctgcgctggggccggaggcgggcgaggaagacaatgcagatcttcgtgaagactctgactggtaagaccatcaccc

SEQ ID NO: 432020 - DNA, 100 bp, Homo sapiens
ccaagctctcagctgacacctacgaagatctgaaggtacggacattgctgcaggagaagaggttgccatcaagcttgaatgtgtcaaaaccaaacaccct

SEQ ID NO: 432021 - DNA, 74 bp, Homo sapiens
ggcacccgatatatgttctctaggccttttagaaaacatgagtcagtgtgcggtttgggagaaaatgtgtcgga

SEQ ID NO: 432022 - DNA, 50 bp, Homo sapiens
tcatgctctacatccccatagagattgacttgatgcacaacatcacaaag

SEQ ID NO: 432023 - DNA, 75 bp, Homo sapiens
ctgaagcatctcaccaagaagctgctaaaccgggatatccaggatatagaaaatcaacttgcaattaaatccaaa

SEQ ID NO: 432024 - DNA, 90 bp, Homo sapiens
cctgtctctcctcgaagtcttcagcgctcaaggctgcttctgatgcttggaagatatcctctcagccacaaagatggtaataaatctttg

SEQ ID NO: 432025 - DNA, 90 bp, Homo sapiens
gctcgcgcttcagcgtcccggcgccgtcgcgccactcctccgagtgtgtttccattgtagaaaacctggtcatggaattgcagattgccc

SEQ ID NO: 432026 - DNA, 90 bp, Homo sapiens
gacagcacttccggtcacgccatcgttgctgccttcttcgtcaaggacttgatagacgacctgaagtcagaactgagtggcaacttcgag

SEQ ID NO: 432027 - DNA, 100 bp, Homo sapiens
cggggacctgcatgtgtgtgcgcgcgaaggagcggaagaatggcagtgctcaaactcaccgaccagggatcatggcccaagttgcaatgtccaccctccc

SEQ ID NO: 432028 - DNA, 75 bp, Homo sapiens
ctccttacacatcccctgataaactaaaggaactcgctttgaacgcttgcttatgagaataggacatcaatcaaa

SEQ ID NO: 432029 - DNA, 97 bp, Homo sapiens
aaggcgagcagggtgcgggagagccccttgcagaagacgccgtacgagatgttcctcctgctgatcaagagaagctttttatccagaagttacgtca

SEQ ID NO: 432030 - DNA, 83 bp, Homo sapiens
gcagatctgggacacagcggggcaggagcgcttccgcaccatcacctccacggatgtttcagcagcccctgagaaggaagagg

SEQ ID NO: 432031 - DNA, 100 bp, Homo sapiens
agacccaggactctgcgactttacgtgatgatgaacagtctacacagatggctgcaagttgggaagatgataaagttacagaagcatcttcaaacagttt

SEQ ID NO: 432032 - DNA, 100 bp, Homo sapiens
ctccgcgtccccggctgctcctcctcgtgctggcggcggcggcggcggcggcggcggcgctgctcccgggggcgacggatcgacccatctgagcaaaaga

SEQ ID NO: 432033 - DNA, 75 bp, Homo sapiens
tttgtggcccgagtggagagcctggaaatggaaaggtggtttgtgatgaaaatggttccaagggctatggatttg

SEQ ID NO: 432034 - DNA, 75 bp, Homo sapiens
aggagggagctacagcgttgaacaaccacagctctattcccatggacccaggccgggttctgagcttgttccgcc

SEQ ID NO: 432035 - DNA, 88 bp, Homo sapiens
acgaagacatgacacttacaagatggacagggatgataattgggcctccaagagaagctgaatatggtgggcatgatcagatagattt

SEQ ID NO: 432036 - DNA, 95 bp, Homo sapiens
acgcggagtcctgaagccggcggacggttttcgtacgggcggccgtgcgcgaggcgagcctcgccgctcctgctatttgccaaccgccgggacgt

SEQ ID NO: 432037 - DNA, 75 bp, Homo sapiens
cacacttcgagcgtacagcaagtaaacgggcgtcccggagcctcgatggagactattatgtggctgtttacttac

SEQ ID NO: 432038 - DNA, 98 bp, Homo sapiens
ctagcagtgagcaccttttggcccaatgaatatcagatgatgaaacatgcttggaataattataaaggttatgcctggggattaaatgaactcaaacc

SEQ ID NO: 432039 - DNA, 74 bp, Homo sapiens
gtgtcaaaagagcttctctccagagtagaaagactaaagcagcttatgtgctattttaccaacgtcgagatgat

SEQ ID NO: 432040 - DNA, 74 bp, Homo sapiens
gtccatgcggaagatcgtcgccacctggatgctggagggtggcccagttgaaatccttcccttcctctaccttg

SEQ ID NO: 432041 - DNA, 75 bp, Homo sapiens
accaaagattacaaggaccacggctatagaaacgggcctgaatttgaagctaggatccgacagaacgagatcaac

SEQ ID NO: 432042 - DNA, 100 bp, Homo sapiens
cagttagtggtgctcaacgtgtacgacatggtttgctggttggctcccgagcagacagcaggaaagaagaagcccttcgtgtacacccagggccaggctg

SEQ ID NO: 432043 - DNA, 99 bp, Homo sapiens
gacttcccagcattcctacagatataaataggatccatcagttacacaagtgacaagaaatgttccaccaggacttgatgaatataatccattctcgga

SEQ ID NO: 432044 - DNA, 101 bp, Homo sapiens
cgtcctggaattacttcaatcaagacgggctccccgctcctagttggggcagataatgtcctggagctgcagatggacgcagccaacgagggcgagggggc

SEQ ID NO: 432045 - DNA, 75 bp, Homo sapiens
catcaaggaggaaggcctggttcttcaaggaagctccgtgtgcccagctggggcacagccccagctgatgcccca

SEQ ID NO: 432046 - DNA, 50 bp, Homo sapiens
gatgggaaacccggagaccaaatccttggggatgccaacagacagatcag

SEQ ID NO: 432047 - DNA, 100 bp, Homo sapiens
agaaaggattcgttacagccagagattggtctttactcacctggagacctgtggcccactccgccagtgtgtgtgacaagcagcttaaactgcaccctgg

SEQ ID NO: 432048 - DNA, 100 bp, Homo sapiens
tgcctctcggcctgggcaatggtcccggctgccggtcgacgaccgccccgcgtcatgcggctcctcggctggtggtgctggagaatctggtaaaagcacc

SEQ ID NO: 432049 - DNA, 75 bp, Homo sapiens
ttatctacaatcatatcacagaaaccacccctactcctaatcccccgactacagaagaggagaaaacggaatcta

SEQ ID NO: 432050 - DNA, 75 bp, Homo sapiens
gttcggacttccccgttagaactcgcgtttccacttcagagatctggtttcagatcgggtggagcggcggcttca

SEQ ID NO: 432051 - DNA, 83 bp, Homo sapiens
aatcaacctatcctccttcaggaccaacgacaacagtagtagcagcagctgccttcttggacgcctttcagaaagtggctgac

SEQ ID NO: 432052 - DNA, 50 bp, Homo sapiens
ccagcatcctgaagccaagaaagaagttacagtcccaccccacagtcatg

SEQ ID NO: 432053 - DNA, 52 bp, Homo sapiens
ccaactgttacaatcaaggtctatgaagatcccaccaaatattttggttgtg

SEQ ID NO: 432054 - DNA, 96 bp, Homo sapiens
gaaaaaaccaaaattatcgccaagattcagcaatgattaagactggagaaagtggcatgatagttttccggcttcttacaaaaaacaaccgatgga

SEQ ID NO: 432055 - DNA, 73 bp, Homo sapiens
gttttggggattccactctccagtgtaatgattattgacaacagtccaaaagaaactcttccttcaaaacctg

SEQ ID NO: 432056 - DNA, 100 bp, Homo sapiens
ggcagctaggtgaagtagcagcttttggaggcagtaatattgagcctagtgttcgcagctgcttccaacagagcaaagatggtcgacctttgccagcaag

SEQ ID NO: 432057 - DNA, 110 bp, Homo sapiens
cacgcgcagccccggcctctcggcctctgccggagaaacagtagccacgatggaggtgatgaacctgatggagcagcctatcaaggtgactgagtggcagcagacataca

SEQ ID NO: 432058 - DNA, 75 bp, Homo sapiens
accgagagcgcgaatatcgtcatcgttagaagaggccgagacggtgctctgcgtgtggccgggacgcctgacgct

SEQ ID NO: 432059 - DNA, 100 bp, Homo sapiens
gcaagggggaagtagagagataacaaaagctgctcagagtctcaatgaacttgacatatctgaagagatggattaagaatgctttggattaaggattgtg

SEQ ID NO: 432060 - DNA, 80 bp, Homo sapiens
gaagaaatccggaatttaacagtggctgattcaccccaagagtggccgttcctaccacgaggagttcaaccctccaaaag

SEQ ID NO: 432061 - DNA, 75 bp, Homo sapiens
aagaattctccttccacaattttaatcaggttcttgatagtccacaatgggtgaaccacagcaagtgagtgcact

SEQ ID NO: 432062 - DNA, 100 bp, Homo sapiens
acgtttcaaaaattttagaaaatggacctgctgacagagcagatggcctggagattcatgacaaaatcatggagaacactactgagcctgtggcggccac

SEQ ID NO: 432063 - DNA, 83 bp, Homo sapiens
ctggagagcctgcaggacggcgcggcagagtccccgtacgcctacagtaacggtctcggcgcggaagatggccggcggcgtgg

SEQ ID NO: 432064 - DNA, 75 bp, Homo sapiens
ggatgagcctcggggacactgtgccgaatgaaggtccctgatgggcctgggtgacattatctcacagcagctggt

SEQ ID NO: 432065 - DNA, 118 bp, Homo sapiens
gccagaagccgaccaggacgggtactaccagaccacactccctgccattgtcttccaggaactcgtaacattcagggatgtggccatagaattctcccctgaagagtggaaatgtctg

SEQ ID NO: 432066 - DNA, 73 bp, Homo sapiens
aagttggcacaaccttacaaggccacactcgtgtcatcagtgttttccaagcagtgaagcacttgccgtgttg

SEQ ID NO: 432067 - DNA, 82 bp, Homo sapiens
agcggggtccgggtccggagcgccacagaaagagcatctacggtgagcgcttccccgatgagaacttcaaactgaagcacta

SEQ ID NO: 432068 - DNA, 51 bp, Homo sapiens
cctcctgagggctgggattacaggccaagaagacgctggagggaggctgtt

SEQ ID NO: 432069 - DNA, 82 bp, Homo sapiens
tggaaaatgcgctcgggctggaccagcagactcggtgaaatacctggagtgctcagctctcacccagagaggcctgaaaacc

SEQ ID NO: 432070 - DNA, 104 bp, Homo sapiens
cgcaacccgataccatcggacaggatttctccgcctcagcccaacggggagcttcggaaccaaaaagaagcttcccagagccggggccaggagccccaagcgcc

SEQ ID NO: 432071 - DNA, 101 bp, Homo sapiens
aggatgcccgtgagcctgttgtcggggccaggaaccctaaggactctgcaatatgaataattccctagagaacaccatctcctttgaagagtacatccgag

SEQ ID NO: 432072 - DNA, 98 bp, Homo sapiens
tgaaagagaaggcagaattaaatcctgagctagatgctttactaggccatgctttacaagaaatctcctgcaaagaagctgagccatgcaattagtaa

SEQ ID NO: 432073 - DNA, 101 bp, Homo sapiens
ggggccgtcaggcggggatacagcctggaagtgctatatgggtcatggtttgaccacattcatggctggatgcccatgagagaggagaaaaacttcctgtt

SEQ ID NO: 432074 - DNA, 98 bp, Homo sapiens
accctacagaagatgctgaagctgaggacacacccaggaaaagactcaggacggacaagcacagtcttcggaaggtccctggaggagtctgtaggaaa

SEQ ID NO: 432075 - DNA, 75 bp, Homo sapiens
ggaacatctcttcccagcggctcagggctgttttgctgcagcttctgaagtgttaaagcacttgaaggaacgatt

SEQ ID NO: 432076 - DNA, 51 bp, Homo sapiens
catcaaatgtggaacctatggaaaagtgtttacaggcattggagtttttac

SEQ ID NO: 432077 - DNA, 100 bp, Homo sapiens
ccaagaagcacaacaaaaagggcctaaagaagatgcagggcctggaggcgcacaaataccggaacacgtgggactgcggcttgcagatcctgaagaagga

SEQ ID NO: 432078 - DNA, 82 bp, Homo sapiens
tgtgctccaagatgaggaggacggaagtgtggtgaaggtggacacagaagccgcaggttaatttggagtggcccctggagtc

SEQ ID NO: 432079 - DNA, 82 bp, Homo sapiens
ctcctgccccttcatgcatgcgcggaggccgcctgctagcaagctcaccatggatgatgatatcgccgcgctcgtcgtcgac

SEQ ID NO: 432080 - DNA, 75 bp, Homo sapiens
gagatcaccgccctggcgcccagcaccatgaagatcaagatcatcgcagcacaggaagaaatgcttcggaaggaa

SEQ ID NO: 432081 - DNA, 98 bp, Homo sapiens
ggtatatagatacttgcaagagtcaggagtcggatggtcagggctgccctttctgtcgttgtgaaataaaaggaactgagcccataatcgtggacccc

SEQ ID NO: 432082 - DNA, 99 bp, Homo sapiens
aatggcaactatgtttggatgttggatctacactttctcaagcactgtgatcttcaaatcatgttcagctcttgacacaaatccaccttcttgccacct

SEQ ID NO: 432083 - DNA, 75 bp, Homo sapiens
aagatgagatttacctgtgagatgtttcatcccaacaaatcaaaaagaccctctggctgtggacaaaataatgaa

SEQ ID NO: 432084 - DNA, 98 bp, Homo sapiens
caggcccacagctgcctacagaaccgtcccaaaatatggcaaagaaacctattctgagcattggcatcaacaaaagtcagaattcccgggaacttgaa

SEQ ID NO: 432085 - DNA, 98 bp, Homo sapiens
ctacacctacatccttcccaagaatgtgcttaagaagttcatctgcatatctgaccttcgggcccaactggtgtcctcagataatccccaacccgaga

SEQ ID NO: 432086 - DNA, 75 bp, Homo sapiens
gaccaccatagtcttcatctacgactgcctcatgggcttccctgtgctggtggggaacgccaagcacaacgtgca

SEQ ID NO: 432087 - DNA, 75 bp, Homo sapiens
gaaagacattacaccatctgaattgcctgcaaacccagaaataaactatcaatcttgcccagactggagaaagga

SEQ ID NO: 432088 - DNA, 82 bp, Homo sapiens
taagagctctatgcctcagaaatttcttgtttggtgccctggttgtcagatgttggaaagcagtaggacggaacatactctt

SEQ ID NO: 432089 - DNA, 100 bp, Homo sapiens
ggccgggcgacctgggcaccagcaggacccgaggccaggagccaggggcccagaagactcttccagctggagttggaggctgacgccctagtgaatttcc

SEQ ID NO: 432090 - DNA, 83 bp, Homo sapiens
ggctggttccccaacatgcctcaccctcatctatatcctttggcagctcacaggtaacgctgataagtgcttttgttttccct

SEQ ID NO: 432091 - DNA, 80 bp, Homo sapiens
actcaccttttggattttccacatagcaatcagagtgaccaacctcgcataaccaaagatgtgatttgttttcatgctga

SEQ ID NO: 432092 - DNA, 88 bp, Homo sapiens
cactttcttggcaattagatgaaccagaggtttatttcactcaggtcggcactcttcaccctcccgagccctgcccgtctcggcccca

SEQ ID NO: 432093 - DNA, 83 bp, Homo sapiens
cacaggccatgctctggcaaaaacgcattgggatcccgtggcagttgcagcactgaagtggagaaggagacccaggagaagat

SEQ ID NO: 432094 - DNA, 90 bp, Homo sapiens
ggttagaagccatgctaaaagagagggagagtgatctttctagcaaaacacagctgttacaggcttcacaggctgctcaagaagccgaga

SEQ ID NO: 432095 - DNA, 50 bp, Homo sapiens
tgagctgcagcgaagcacctctttacgttgtccttctattcaggccactc

SEQ ID NO: 432096 - DNA, 80 bp, Homo sapiens
gcaccgcagatgttgtcaaggtggcctaccaggaggccaggggtgtcgccatggtcctacaacgtgactttaaaaagaca

SEQ ID NO: 432097 - DNA, 87 bp, Homo sapiens
gcggggcccggtatggaggtgggctagaggccgacgccagccagagagcgagtgtgaacatggctacgcctcttcattcccgtccat

SEQ ID NO: 432098 - DNA, 122 bp, Homo sapiens
aaaacaaggtgatgatggtggccttgggtcggagcccatctgatgaatacaaagacaacctgcaccaggcagtttgaagagaacacatgaagaagaggatgattttggaaccatgcaagtgg

SEQ ID NO: 432099 - DNA, 98 bp, Homo sapiens
ggagatctctctcatctcgctcggctgcgggaaatcgggctgaagcgactgagtccgcgatggagattcaaggacttcagtgagctagaacctgacaa

SEQ ID NO: 432100 - DNA, 100 bp, Homo sapiens
ggcggatctggaggagcagttgtctgatgaagagaagtgtgaagccccaggaggcccccaaggaactcgtcatccctttgatccagaatggccatcgcag

SEQ ID NO: 432101 - DNA, 100 bp, Homo sapiens
gcgcttccagcttaccatgcggctgcgctccataaaggcagacgacaagtgttctaagaacggaagcatctgggctggatggaatttagcatcaagcaga

SEQ ID NO: 432102 - DNA, 88 bp, Homo sapiens
attggctgcggggcccacctctctaagcctatggaaaagcttctggacagctacagacagttcttctaattcctctcagaagagagag

SEQ ID NO: 432103 - DNA, 99 bp, Homo sapiens
agcgcgaccctgagccggcgcccgtggtccggccatggacgacctcgggcaccctcatccagcatctgaaggagcacctgctgcacggcaacatgacca

SEQ ID NO: 432104 - DNA, 76 bp, Homo sapiens
attagcctcaaaaaggtgcttcaggtagatcatgccactaatcgtacccagtttggggagaaaattcacaactttg

SEQ ID NO: 432105 - DNA, 82 bp, Homo sapiens
ccagtcagctcaaaccactagttatacagagctccttaataagcatttatagtcagtttttggcagcaatagaatcactaaa

SEQ ID NO: 432106 - DNA, 83 bp, Homo sapiens
ctgatgccaacagtgtaccagcagggcgttggctatgtgcccatcacaggcctctggctgtacctggcagggagcagcctgcc

SEQ ID NO: 432107 - DNA, 100 bp, Homo sapiens
ccagctcagaaagggagcctctgcgactcattcatcgccctccagaacattaaccaggtggtatttgttggaaatttcttgagaattaatacgatcgcca

SEQ ID NO: 432108 - DNA, 78 bp, Homo sapiens
atgccagcccagaacagagaatcagattgcagagggaatggcatacatcgagcggaagaactacattcaccgggacct

SEQ ID NO: 432109 - DNA, 50 bp, Homo sapiens
accggatgaccgggatgcctcagcctgactggctcatggagaaagcctac

SEQ ID NO: 432110 - DNA, 97 bp, Homo sapiens
ctgaaggaagatggcggacggcgtggaccacatagacatttacgcggatgtcggcgaagagttcaaccagaaatcatcctcatcctttgataactgt

SEQ ID NO: 432111 - DNA, 98 bp, Homo sapiens
ccgccctctctcggagttggcaggaagccaggttgcagggtgtccgcttcctcagacatcgctattgcggttccgaggcagtgggaagagatgcggcc

SEQ ID NO: 432112 - DNA, 100 bp, Homo sapiens
caagggacggctccgccttctaccggggatccgtgtacccctcgcagccagccgggggtccactggacggggcctgagctacaacttcacccacctggac

SEQ ID NO: 432113 - DNA, 98 bp, Homo sapiens
gagagcgaggcggggccgccggggccgccatggagcccgactcggtgattgaggacaagaccatcgagctcatggtctctggggaacaagactcatgg

SEQ ID NO: 432114 - DNA, 98 bp, Homo sapiens
tgaaaatggggcggaagaaaatacaaatcacacgcataatggatgaaaggaaccgacagttaaagccttccatctgaagtatgatgaagttcgtctgg

SEQ ID NO: 432115 - DNA, 75 bp, Homo sapiens
caggactccaaaatggcgtcagttgaatagcctaacatggcagaccagagacagcgctcactgtctacctctggg

SEQ ID NO: 432116 - DNA, 75 bp, Homo sapiens
cgccgtccacgccgctcttgacaggggccaccttatcttagttccagaatttagtcttcctttggaatactacct

SEQ ID NO: 432117 - DNA, 100 bp, Homo sapiens
gtggccctcgatgtgctctgcgtgttgctggctgagatctgtatctgtggacctgaatgttgatccctcgcttcagattgacatacctgatgcgctcagt

SEQ ID NO: 432118 - DNA, 75 bp, Homo sapiens
tgtatccacagccccgacctttgatgagaactcagctgtccaggttgcacaagcaaaggcctcgtcctgcccgcc

SEQ ID NO: 432119 - DNA, 100 bp, Homo sapiens
gacaacaataacaagactgtccttcggacaagttttaggtgtttgtggcttgatcgtcccccaggaagacatgccattttgtgattctggcatctgtccg

SEQ ID NO: 432120 - DNA, 75 bp, Homo sapiens
atccagacggctgcccttcaagtaccattttggccaaacggattcgtgttctcgagctgctgcggcggccacaag

SEQ ID NO: 432121 - DNA, 95 bp, Homo sapiens
tcctggtgaaggcagagctggaaaaataccaacagtataaagacatctacaccgccttgaaaaaaggaaaggtatctcttgggtcacagattgat

SEQ ID NO: 432122 - DNA, 75 bp, Homo sapiens
aaacacatcaccttgatttttaatcccacgctgctacaggagctgagagaccctaccctcactttccgtctgctt

SEQ ID NO: 432123 - DNA, 75 bp, Homo sapiens
gctggtgtggattgttcatcaattggcggggttccatttttccagagtccctcagagctttcagaatctgaagga

SEQ ID NO: 432124 - DNA, 82 bp, Homo sapiens
aacaagaggcatcactcagtccttctgggacagcttccctgacagctaacccccgcatcggtgacgtgatccagaagctggc

SEQ ID NO: 432125 - DNA, 75 bp, Homo sapiens
cgcgcacaggctgtagcaggttccggcggacggcgttgcgaagcacctggctgcagtggaagaaagaaagatcaa

SEQ ID NO: 432126 - DNA, 100 bp, Homo sapiens
aggaggaagatgcaagcggtttgggaccttgaacaaggcaaatatggttttgtggatgattcaacagccacacaaagcagcaacattttttggatgcatt

SEQ ID NO: 432127 - DNA, 147 bp, Homo sapiens
tgctgtctcggcacaagcagctgctgcacagaaaaataaactcaaggagcctgggggaggttcgtttcggtatgcagatgcattatttaagtcatccgatatcagatcagccagtttagaggacctgtgggaaaatctgagtttaaa

SEQ ID NO: 432128 - DNA, 100 bp, Homo sapiens
tgctgggaacgggacttctaaaaggaactatgtctggaagaacattgatgatggcacctcagatcgcccctacagccatgctctggtggctggaattgac

SEQ ID NO: 432129 - DNA, 75 bp, Homo sapiens
ggcaagtcctccctcatcaactccctccggaggcagcacctcaggaaagggtgtccgcaatgttgccagtgtctg

SEQ ID NO: 432130 - DNA, 82 bp, Homo sapiens
aagatggtgcagaagaaaccagccgaacttcagggtttccaccgttcgttcaaggagaacgtatttaccgggcagtcaaaga

SEQ ID NO: 432131 - DNA, 73 bp, Homo sapiens
agaatttcgttgttttcaccgacgagactggagatatcagttttagagaatgtggcgtggagaaattctcaag

SEQ ID NO: 432132 - DNA, 76 bp, Homo sapiens
cagaagaaggctgctattgaaagagagtatgcacagtggaagatagatgataagcctgtaaaaattgacaagtggg

SEQ ID NO: 432133 - DNA, 100 bp, Homo sapiens
agcggctccaccgaggccatttaccggcgctacagcaagttttttgacctccagtgggatggagtaggacctcttccagactgtgctgaaccaccaaaag

SEQ ID NO: 432134 - DNA, 83 bp, Homo sapiens
cttcaccctgccgtcatgtctaagtcagagtaatagttatgcacgagtgcgagctgtggtgatgacccgagatgactcaagtg

SEQ ID NO: 432135 - DNA, 97 bp, Homo sapiens
caaaggatggtgagattgttggcctttcaggaagagtgcttaagattccacctgctcctacgaagcccgactttgatggtcctcgagagaagatgca

SEQ ID NO: 432136 - DNA, 50 bp, Homo sapiens
caaagatgcagccagtgtggagaagttggagaatattggcaactttatta

SEQ ID NO: 432137 - DNA, 97 bp, Homo sapiens
ggctcaccatcagggacgtgctggccgtgatcaaacactgcaaggaccccctccggctcaagtgtgtcaagcaaggcgtgcaatggaattgagtttt

SEQ ID NO: 432138 - DNA, 74 bp, Homo sapiens
cccccagagcacttccctctgcgcaagacagtgtacaccatctttgccatcctggagtacactgttgtcttaac

SEQ ID NO: 432139 - DNA, 100 bp, Homo sapiens
cagacagtgctacagagccaactcctgacaggagttaaagttcctcgtaattttcgcttgttggaagaacttgaagaaggacaaaaaggagtaggcgacg

SEQ ID NO: 432140 - DNA, 100 bp, Homo sapiens
gaaatccatgcccgattcagaagaggagccagatcttaccaaggtactcatttgcaattgtgggcatcaatataactgacctggcatataatctactggt

SEQ ID NO: 432141 - DNA, 100 bp, Homo sapiens
gcctactcaaatcctttctgagggttccagcaacaaattatatatatacacccctgaatcaacttaagggtggtacaattgtcaatgtctatggtgttgt

SEQ ID NO: 432142 - DNA, 100 bp, Homo sapiens
ggaagagattgtatacccccaaaaaccttttgtggagatctgcatgaaacaacataacaaatacgaagccaagaagtatgcttcccgcgtgggtcccgag

SEQ ID NO: 432143 - DNA, 96 bp, Homo sapiens
ctgccatctcctgcatcgtcatagggtgacagtatgttgactgctgtctctgtggccagagattgtggaatgattctacctcaggataaagtgatt

SEQ ID NO: 432144 - DNA, 100 bp, Homo sapiens
cgacatggggcttaagatgtcctgcctgaaaggacgagcctgtggagtgggagacacctgacctttctcaagctgagattgagcagaagatcaaggagta

SEQ ID NO: 432145 - DNA, 75 bp, Homo sapiens
ggggaggaagaatgccggtcacagcccaggagttaattggccttggtcctcacagctccaaaaagaaacaggatc

SEQ ID NO: 432146 - DNA, 75 bp, Homo sapiens
gccaaggaccctgagtgcaagacagagctccctcgtgaaagatgcttctgttcctctgattgatgttacaaacct

SEQ ID NO: 432147 - DNA, 100 bp, Homo sapiens
ttgaaggcgagtaaagacgtaggagaccgaggaaagtgtgtgggaggcgttgacctgccccttgtcctggccccggaagctcttcgtgggcggtcttgac

SEQ ID NO: 432148 - DNA, 75 bp, Homo sapiens
gttaaggattccaagtaactcttatttgctgctggagccagttctgcttctcggcaaggagcgatttgctggtgt

SEQ ID NO: 432149 - DNA, 75 bp, Homo sapiens
gaaggagccctgccaggttcagagctgccagtgtcagctgacaggggctctggccacagcttgtggggatgacgc

SEQ ID NO: 432150 - DNA, 74 bp, Homo sapiens
acagcctccgcggctccggggagaagggcaattgaaggaacagactaaaaatcgtgtcctggaaggaaactaca

SEQ ID NO: 432151 - DNA, 74 bp, Homo sapiens
tataccgaaatgtttttgataaggacttaaacaggcacaatcaaaaccatctcagtcagaagtcagagcgtggt

SEQ ID NO: 432152 - DNA, 101 bp, Homo sapiens
ccgcttttctacatcgcggtggtctttacctgcttcatcgtgaccaccggcctggtattgggatggatatgttcaaggaatgagtgatttactttcccctc

SEQ ID NO: 432153 - DNA, 100 bp, Homo sapiens
acctggatatcagcccccagcggcccaggcccaacaaagaaccggcgctgcaaactgctgcccctggtgatggctgcccccctgagcatggagcatggca

SEQ ID NO: 432154 - DNA, 100 bp, Homo sapiens
ccgtcttcatgtttgctttcgcttccctctacacgcaaatcccaggttttgattcccaccatggccatcacccagtttcggttatttaaattttgtacct

SEQ ID NO: 432155 - DNA, 90 bp, Homo sapiens
ggcctcgccatgtcctgctgcccgatttgtagccaaaccgtgcgccatagccctcaacattcaggccaatggaccacaaattgctccgcc

SEQ ID NO: 432156 - DNA, 51 bp, Homo sapiens
cactgcagaggtgctggagctggcagacaggaacacagaggacgatcgccc

SEQ ID NO: 432157 - DNA, 50 bp, Homo sapiens
gcgtggccggcagcgtcccggacgaggagcaggggaaatgctgtctgtag

SEQ ID NO: 432158 - DNA, 98 bp, Homo sapiens
tctctcagatgacttcgtctcccaccgactgcctgtttaagctcctgggcaacgtgctggtctgtgtgctggcccatcactttggcaaagaattcacc

SEQ ID NO: 432159 - DNA, 101 bp, Homo sapiens
ccacgccagccgcaccatgccgctcctaagcctgcacagccgcggcggcagcagcagtgagaggtgccgaggtaaacagagcatccacggaaggggaaagc

SEQ ID NO: 432160 - DNA, 82 bp, Homo sapiens
cgactcaacgtgagacgcaccgcccggactcaccatgaatgccgaactggggaggaggcaagaaatgtggggtgtgtcagaa

SEQ ID NO: 432161 - DNA, 50 bp, Homo sapiens
gctcttcctcccttcgctcgcaccatggccctggccaacgtcaacattgg

SEQ ID NO: 432162 - DNA, 104 bp, Homo sapiens
ttgttgagcagagggaaagggataggagaaggatgtggactgcagtgctgcagtgccaggtgttggagcgggccggagagaagtagagtgggctgcgaggagaa

SEQ ID NO: 432163 - DNA, 140 bp, Homo sapiens
cagcctctgtgtccctgtgacctgcagatattgggagatccacagctaagacgccgggactccctggaaacctagaaatgtactatactggcaattgctggagaagattttgcaattgttgcttctgatactcgattgag

SEQ ID NO: 432164 - DNA, 75 bp, Homo sapiens
tgcctgacaacaccgatcacagaccaacaactacaaggctttggcccaccaagtgtgtaccatgctgctattgtc

SEQ ID NO: 432165 - DNA, 114 bp, Homo sapiens
gttaattctgaaatatggaatgcatcagaatacacttcgtatcaaagagattcatgttggaaatgcagaaatcacctgtcttctgcgtcgatcaggctgggagctgcagaccgg

SEQ ID NO: 432166 - DNA, 103 bp, Homo sapiens
tcttcgccgttaccttcttgctggcgttggtgggagccgtgctctacctctatccggtgagaagccctaccactgcaactgggacggctgcggctggaagttt

SEQ ID NO: 432167 - DNA, 98 bp, Homo sapiens
ttaaaggccatggatgaagatgaatttgaattgcagccacaagagccaaactcattttttgatggaatagcagtgattccagcagtagttcaagtgat

SEQ ID NO: 432168 - DNA, 75 bp, Homo sapiens
cttcattggccacctacagaaacaaaatgtcaacaaattgatgggtaactccctgctcctgaattctgccatgca

SEQ ID NO: 432169 - DNA, 90 bp, Homo sapiens
gcagaaaatagcagccaggaaccaagaaaacttgggtatcatagcaacgatttatatcatccctggtgacataaactcgttagtcaatta

SEQ ID NO: 432170 - DNA, 50 bp, Homo sapiens
gtcgggacaccccggaagctgggaaatgggcctggattccttctgaaaac

SEQ ID NO: 432171 - DNA, 90 bp, Homo sapiens
cacctccaggatcaggatgcagagtaacaaatgtggcaattattttggatctatcacctgtcatcataactggcttctgcttgtcatcca

SEQ ID NO: 432172 - DNA, 96 bp, Homo sapiens
ggaacccacaggagtcgctggatagactgcacaaggtgaagactgtctgcagcaaggcaccactggatcataccagtgacaagtcacttctcgacg

SEQ ID NO: 432173 - DNA, 87 bp, Homo sapiens
tcaccagtcctgtcactccagaggagctactgtatacagatattcatccgttctatgctgatttgatgaatattctctacgacaagg

SEQ ID NO: 432174 - DNA, 74 bp, Homo sapiens
acagtctcgttgctgcctctgtgtacgctgaggggggagatacaaaagttttgcagtactatttcaatctagga

SEQ ID NO: 432175 - DNA, 82 bp, Homo sapiens
tcagcgtggcagagctggaggaaggagctaccctcatcgcccataaagtggatgagcaggcataatcaccagcaacacccgg

SEQ ID NO: 432176 - DNA, 100 bp, Homo sapiens
agatgatccagcttttggctggaagtggaaactcacagatgatgaggagtctgatgaggaagctgtgaagaaaaccaacaaatgtgtactagtctgggag

SEQ ID NO: 432177 - DNA, 75 bp, Homo sapiens
tggtttctagaccatctacctcatctagaaggagagcaattagtgagacaggctgcccttttcttgggcctgggg

SEQ ID NO: 432178 - DNA, 83 bp, Homo sapiens
aaagagagagcactttaggcaacttctggatgaaacttctgcatctcaggatgcaggaatcaagaccatcactatgctggatg

SEQ ID NO: 432179 - DNA, 97 bp, Homo sapiens
gctggcggagcaggaggatgggcgatctgactgcagccatgagcagcaatgagtgcttcaagtgtggacgatctggccactgggcccgggaatgtcc

SEQ ID NO: 432180 - DNA, 117 bp, Homo sapiens
gtccaaagcagtcgtaagaagaggtcccaatcccccactctttccgccctaatggaggtctccagtttcggatgacgtagctttgccaaagacttagaagctaagcagaaaatgagc

SEQ ID NO: 432181 - DNA, 98 bp, Homo sapiens
gaaacgcacgcctttccccactgttacatcgtgcgccgtggaccaggagaaccaagatccaagggtaatcttcagcaagtactgcaactccagcgaca

SEQ ID NO: 432182 - DNA, 83 bp, Homo sapiens
caaaggctttgccgcagttcatcttcctccctgtgtactttccatttgccttcctgggaataatcaagctgggaaggtggaac

SEQ ID NO: 432183 - DNA, 75 bp, Homo sapiens
gaaaaaaggttttgagttcacactgatggtggtcggtgtagtattgagtcctgtttgagctattgttctcttttt

SEQ ID NO: 432184 - DNA, 89 bp, Homo sapiens
agtctctcgccacagcggcctcggcctccccttggattcagacgccgattcgcccagattggccatcgggactttgatgtggagaagcg

SEQ ID NO: 432185 - DNA, 83 bp, Homo sapiens
cgtcaacctgttccaccttctccagtctggtagcaaaaaggggtgtctcagacttcccaagtaagaagcggaagaggagccgc

SEQ ID NO: 432186 - DNA, 50 bp, Homo sapiens
tccgaagtggaagttgagaacgaaggggctatctgatgggttagagtgcc

SEQ ID NO: 432187 - DNA, 98 bp, Homo sapiens
cgtcttaaagttacgttgttagaatgtagcagcactagaaagtttgggatttggctcttacatcagtgaagtaaaagaagtcttgcaagagtgtaaaa

SEQ ID NO: 432188 - DNA, 89 bp, Homo sapiens
ccttccgaggaagctaaggccgcgttggggtgagaccctcacttcatccgaggctgggaggcggcagaatgcagccagaggagggcaca

SEQ ID NO: 432189 - DNA, 73 bp, Homo sapiens
gcagaggctggcgggcattccggaactgctcaacaaacttcgccaggaatcagagatcattgatttcttcctg

SEQ ID NO: 432190 - DNA, 90 bp, Homo sapiens
ctggaatggtgcaggctgccataccaacttcagcaccaaggccatgcgggaggagaatggtctgaagtggtgtataaggaggccgagaag

SEQ ID NO: 432191 - DNA, 74 bp, Homo sapiens
aaatggaacatacgggcaagtttataaggacgtggctttatttctccaagaatttaatgctcctgatatattca

SEQ ID NO: 432192 - DNA, 100 bp, Homo sapiens
gtgtctggtgccggcgtttgggctacggttgttgttggcgactgtgcttcaagcgaaaatgtcactgaaattcacaaatgcaaaacggattgaaggactt

SEQ ID NO: 432193 - DNA, 97 bp, Homo sapiens
gtcaccgcggcggcgccgggtggtggttaaaccatgttaaggaggattttacagagggtgacagattgactgggatcccctcgcacatcctcaacag

SEQ ID NO: 432194 - DNA, 97 bp, Homo sapiens
cttacctgtttttccagctcacccactgccagcagagaccaagatcactccatggatgaaatgacagctgtggtgaaaattgaaaaaggagttggtg

SEQ ID NO: 432195 - DNA, 100 bp, Homo sapiens
ctggaggctggcggacaggcgacagcgacctgcggcagaattaaacaaccaccatgtcgagcaaaaaggcaaagaccaagaccaccaagaagcgccctca

SEQ ID NO: 432196 - DNA, 101 bp, Homo sapiens
ccagtcgcctccaggccaagagggatccttcacccgtgtctgcccttagagatttgtttgattccatggataaaacttcttccagtattccacctattatt

SEQ ID NO: 432197 - DNA, 75 bp, Homo sapiens
ctacctcactcccaactctcctgcagaaatggttttcctttggaatatggataaatacaccatgatacggaaact

SEQ ID NO: 432198 - DNA, 74 bp, Homo sapiens
agcatgaggaagagtcaggggcacagagagatggagagagacctagttagatctccagatcacactaagtttgt

SEQ ID NO: 432199 - DNA, 75 bp, Homo sapiens
gaggccccccaacacctccctgttcatcaggaacgtcgcggacgccaccaggacgtagacaagtttggcaacgag

SEQ ID NO: 432200 - DNA, 100 bp, Homo sapiens
cacggggcaacaacctcaccgtgcaccttcgcaagaagcaccagttcaagtggccctcagggcatccccgttttcggtttctctactcggacgaggtgca

SEQ ID NO: 432201 - DNA, 96 bp, Homo sapiens
ggagatcatttgggagatccaagagattcagtatcactcgctcccttgatgatcttgagggcgtctctggccgagcctctttttgtggaaaacgac

SEQ ID NO: 432202 - DNA, 101 bp, Homo sapiens
cggggaggacgcgccgcggccaggcagggaggagaccggcacccagacaggtggcgaaggcagaggaggaggacatgtatgcccaggactctatagagcta

SEQ ID NO: 432203 - DNA, 75 bp, Homo sapiens
cgccgccgacgccgctgctgtggccgctgctgctgctgctgctcctggaaaccgatggtgtcctactcttctgtc

SEQ ID NO: 432204 - DNA, 75 bp, Homo sapiens
cacccaccctgggcttcagcactggcagcccccagtaagactttgaccccgacgcaggcttcagtgattgccgcg

SEQ ID NO: 432205 - DNA, 100 bp, Homo sapiens
gaggacattgagggtgctttccctaacgagctgtcccttcagcaggcgacacatccgtcctccacctggggcatgtggaccacctggtggcaggccaagg

SEQ ID NO: 432206 - DNA, 100 bp, Homo sapiens
cgtaggaagaagggcaggacctgggcggaggccgccaagacggtgcagaccatgaattacgtggggcagttagccggccaggtgtttgtcaccgtgaagg

SEQ ID NO: 432207 - DNA, 88 bp, Homo sapiens
gagtgcgggcgcgccccaccaccgccctcaccatgaaataacatctgctttgctgccgagctcagaggagaccccagacccctcccgc

SEQ ID NO: 432208 - DNA, 75 bp, Homo sapiens
accaacatcgatgggcggcggaaaatagcctttgccatcactgccattaaggtggccaagtttattgggtctcca

SEQ ID NO: 432209 - DNA, 100 bp, Homo sapiens
caagatcatgcgttttctcttgttcttaaccacctggatttccatctggatgttgctgtgatcagtctgaaatacatctctgctttctatccgtcaagat

SEQ ID NO: 432210 - DNA, 100 bp, Homo sapiens
ttcacagtgctcctgcagtctctctgtgtggctgtaacttacgtgtactttaccaacgagctgaagcaggagcttgcagagctagaaagtgccctccaag

SEQ ID NO: 432211 - DNA, 100 bp, Homo sapiens
gctcagcatggtcagtgccgtttaacctttattgtggtggagtccaccccgctgtgttggtcgaattgtcttagaattgtttgcagatatcgtacccaaa

SEQ ID NO: 432212 - DNA, 82 bp, Homo sapiens
cgcgcccggccggacccgggcccgaggccacggcgtatgcctccgaggacggggtcctgaccgaggccatgatggacacccg

SEQ ID NO: 432213 - DNA, 121 bp, Homo sapiens
tgcgcaaaaacaacagacagccctatgctgtcagtgaattagcaggacagaccagagatttgttttatgaaaggtgcttacgaacaagtaattaagtactgtactacataccagagcaaag

SEQ ID NO: 432214 - DNA, 82 bp, Homo sapiens
cattactacttcctaggcagaatgcttggaaagaattgtcgagaacggtcaagaaagagtagaagttgaagaagatggccag

SEQ ID NO: 432215 - DNA, 83 bp, Homo sapiens
gctcgttctggtctgcctagtcctggaaaaatagtagtctagtcattcaagtgaaaggtccaagaaaggaagaaagaaaaatt

SEQ ID NO: 432216 - DNA, 102 bp, Homo sapiens
tgttaatgcttgatgggatgccggcagtcagagtcaaaacagagcttttggaatctgaacaagggaatataacaccagcaatcctgacttgttgctagtcat

SEQ ID NO: 432217 - DNA, 96 bp, Homo sapiens
tgacaactgtacagatgtcactgcatacttccacaggctgcactcgaggagatccacaaattctcaggaacctacacctgcatgaacactttcaaa

SEQ ID NO: 432218 - DNA, 90 bp, Homo sapiens
gtgggcatgtgtccccagctttcgtgtgccttgacttttatgtacttacagcagggcagagcggcttgggtaaatccaccttaatcaaca

SEQ ID NO: 432219 - DNA, 100 bp, Homo sapiens
acctaaccgccgaatgcgttcggaggtctctggcctatcaggaggacaactggtgctgcaatagaagccagtggctaagtctcgtgtatggcgtggttaa

SEQ ID NO: 432220 - DNA, 101 bp, Homo sapiens
ctgtccatcctgatgtgcagttaaaaaatctgcccttttatgatgtccttgatgttctcatcaagcccacgagtttaggtgctggagaatctggtaaaagc

SEQ ID NO: 432221 - DNA, 97 bp, Homo sapiens
ctgtagacatttctttgtggtttatctaaaaaccaaagaatgtggcagatcagattgcatttcaagctgctggtggattaacagcccttgaacacat

SEQ ID NO: 432222 - DNA, 99 bp, Homo sapiens
ttttgttccagaggatgatgatgatgatgactaacagctaaagatgtgattaaagagattgaagactttgacagcttggaggctctgcgtctggaaggc

SEQ ID NO: 432223 - DNA, 98 bp, Homo sapiens
gcagatcctgagacccggacagtggcagtgaaacaggagatgctgaaggacgaggtgcgcaccctcacttaccgcaactccatgtttcataaccggca

SEQ ID NO: 432224 - DNA, 100 bp, Homo sapiens
gccagggtccctgaagagggaagacacgcggaaacagcccatggacacagaggctgatttacagttccgtccccgcacgggaaaagctgcgtcgacaccc

SEQ ID NO: 432225 - DNA, 100 bp, Homo sapiens
caccaaagtagttctagatgacaagacccctgggcatactccttccttaagatgggatgagacaccaggtcgtgcaaagggaagcgagactcctggagca

SEQ ID NO: 432226 - DNA, 100 bp, Homo sapiens
ttcacaataaaggtgctaagaaagagaatgtaagacaggaaaataattaaatattcttaccgagagttgatctctctaatgtattagatcttcatgcctt

SEQ ID NO: 432227 - DNA, 74 bp, Homo sapiens
tgtgcagacacaactacgaggtggcgttccgcgggatcttgcagaggagagatgactttcacacgacctgccaa

SEQ ID NO: 432228 - DNA, 75 bp, Homo sapiens
gaccaactgattgtcgacatgcctactgataatcctggaagccctcaatctagaagagtagaggtccaaaggtgc

SEQ ID NO: 432229 - DNA, 100 bp, Homo sapiens
atggcgtcctacgtagataacagcttccgccaggcggtgatgaagaatccccccgaaaggaccccccaggaagaatgttggtgaaaagcacagaaaccag

SEQ ID NO: 432230 - DNA, 75 bp, Homo sapiens
cttcaagcttaggaccacccaccatgcctatccagtggctgctgaaacaaaaatctcaggccccagaaaagcctc

SEQ ID NO: 432231 - DNA, 100 bp, Homo sapiens
cccttatagagtgtgtggtctcattgaagagcaagaacaaaatgtgcatatgtgaagagagatgtatgggaagagcctaggttccaggtgccttttcagt

SEQ ID NO: 432232 - DNA, 100 bp, Homo sapiens
tgggctgcgaaatttaataaacctggggaaaaattatgagaaagctgtaaacgtgctgtgctgtggctttcattgagaagctagacgcccagtctttgaa

SEQ ID NO: 432233 - DNA, 75 bp, Homo sapiens
ccccagcttttcagaactgcagggaaacagccatcatgaggactcagaattcatgattgaagaaatgcaggttag

SEQ ID NO: 432234 - DNA, 49 bp, Homo sapiens
ctcagatccaagtcaacagtggttttggtgcctttgaacgctcaatctt

SEQ ID NO: 432235 - DNA, 75 bp, Homo sapiens
ggctttcaacacctacgtccacttccaaggatacttatccgctttttccccttggagtcctggcagattggcaag

SEQ ID NO: 432236 - DNA, 100 bp, Homo sapiens
ccgcgttggggtgagaccctcacttcatccggctgaaggtgatgtggccgccctcaaccgacgcatccagctcgttgaggaggagttggacagggctcag

SEQ ID NO: 432237 - DNA, 101 bp, Homo sapiens
gctgcagcccgggcggctgccgagaaggagggaggggaaacacaaagccggctacgcgctgcgagacatccacgacagcgatggcagttccagcagcagcc

SEQ ID NO: 432238 - DNA, 83 bp, Homo sapiens
tccttggaactgtggtccatggtaaagttttacagccgaaggtggtctggatgaagaacaagatggaaatccgtgaagatccc

SEQ ID NO: 432239 - DNA, 75 bp, Homo sapiens
ctcagttggaagcagccgatccagcctgcggagcctgtggggcagcaaaacaagggttcctccagttttggtggt

SEQ ID NO: 432240 - DNA, 74 bp, Homo sapiens
tggaagtgttaaaaaaacatctcaagcctcattggaatgatggagcggacctggcgtggggtgcagatcccact

SEQ ID NO: 432241 - DNA, 88 bp, Homo sapiens
tgttcaccactcatttgcaacttatatcgccagtccagcagctaaggatattttgtgcagatcctatagcaatggaactcagcgatgc

SEQ ID NO: 432242 - DNA, 75 bp, Homo sapiens
acagacgggagactgaacttgaggggctgtggggtcaccttctcttcctctcttctgccaccccaagtcgtctgt

SEQ ID NO: 432243 - DNA, 74 bp, Homo sapiens
ggagctgtacttctatatctacaagggggtccgcaagggcgtctctggccgagcctctttttgtggaaaacgac

SEQ ID NO: 432244 - DNA, 75 bp, Homo sapiens
tgctgatgaactatagcaatgagaatgattcatgttacatgtaaagctgtcctcatttgtgactatggacctatg

SEQ ID NO: 432245 - DNA, 50 bp, Homo sapiens
gaggatttgctgagctcatggggagcaatggaccacagaaattctgcatt

SEQ ID NO: 432246 - DNA, 98 bp, Homo sapiens
ttccctcctcaaactgactttgcagccacggagaggccaccaggaacacacctgtagcccagcaaagttgaggccatcgactggctcatcacaacaag

SEQ ID NO: 432247 - DNA, 57 bp, Homo sapiens
ccccaacggggaggccaacgtgaagaaggagccatttgtgcaggccaagctgcggcc

SEQ ID NO: 432248 - DNA, 74 bp, Homo sapiens
gcgtgaccgagagcgcgaatatcgtcatcgttagaagacatctttccaggaacagcgtgaggaggacagaagca

SEQ ID NO: 432249 - DNA, 90 bp, Homo sapiens
acgacttctacgaggtggcctgcaaagatcgcctgcaccttcaaggccaaactatgcagagctccctctttgcccactagcagggcatta

SEQ ID NO: 432250 - DNA, 82 bp, Homo sapiens
gaagcgtctttgctcaaggatcccagttttctctggatgacgtgttacagaatgtctgaaggggacagtgtgggagaatccg

SEQ ID NO: 432251 - DNA, 136 bp, Homo sapiens
acagcacccggtgctgcggctgttgccatgtccgcaccgggacgatcatcctggggacctggtacatgcccgctgaatatggactccaacggtgccctaggggatggtggagccaccagatggaaggagcctggtg

SEQ ID NO: 432252 - DNA, 90 bp, Homo sapiens
ttcatgatattccaatttatgcagataaggttttaccaattcttgagattctgtatcatgttgaagaaaggaattcacaccatgtgtata

SEQ ID NO: 432253 - DNA, 74 bp, Homo sapiens
taaagtttcctagatcccagcttgcattgaatgccccagaggagcccgaaacctcccaggcttggtgcaggaag

SEQ ID NO: 432254 - DNA, 101 bp, Homo sapiens
ttattcattattacatgaagtatcatgtttctgtctctaattaacagaagatggcaaagcccagccacagcagctatgtccttcagcagctaaacaaccaa

SEQ ID NO: 432255 - DNA, 89 bp, Homo sapiens
gtacaggcccacgccagacacgacgtctggcaggaacctcggcctcagagaaatggtggagtcaatgaagaaagtagcagggatggatg

SEQ ID NO: 432256 - DNA, 88 bp, Homo sapiens
ggaaaatgacagccttcatttctctgaacatactgccttatgggacagatcaaacccaacatgagtgaagtttcctgcaagaaacggg

SEQ ID NO: 432257 - DNA, 75 bp, Homo sapiens
actcctttataagtgtcagctgtgagggcaggctttctattttaaaagtctgtacaaaaaccatgccaatagggc

SEQ ID NO: 432258 - DNA, 90 bp, Homo sapiens
gccttttactccatatttggcctaatagaacttcagcttattcaggacaaaaggaggaggttcggctttccagtttggcagcagcactac

SEQ ID NO: 432259 - DNA, 101 bp, Homo sapiens
gagaggaccaacggagcgctgaggcgggcgttttcttggatgaattgcttgctttggaggaatatgtgtgtcttctgatcaaaatcatttccgaggagaaa

SEQ ID NO: 432260 - DNA, 98 bp, Homo sapiens
tccgcgctcccgcccaggcggcggccgacgcgacgccccgagcgcccggccccgccgccgcggcccggcaggttgagaacttgttgcttagtaaccaa

SEQ ID NO: 432261 - DNA, 100 bp, Homo sapiens
tcacggggcctcctccaccgaggaggtgaatacacctctgattttaatcagttctgcgtttgaaaggaaacccgaacactggaactattttggggctgat

SEQ ID NO: 432262 - DNA, 87 bp, Homo sapiens
ggtgcgggacccctcctcaccgtgcggtcacggtaagaacaagagagttggaaagcagttagcctcacagaagatccttcagctgct

SEQ ID NO: 432263 - DNA, 98 bp, Homo sapiens
agcaggtggcgagaatcctcctccaggagaacggccatatttatgtgtgtggagccaaactttgtgtcatcttatgacatcggaaattttacctactt

SEQ ID NO: 432264 - DNA, 85 bp, Homo sapiens
cgggaagagccggggccgtggctgacatggagcaggacctggtgtcaaagatgcttcatgtagaccctcatcagagactgactgc

SEQ ID NO: 432265 - DNA, 85 bp, Homo sapiens
accatgattgtgaggcctccccagccatgtggaactggtagatacaacaagaattgaatactccattcctttaagagaaaactgg

SEQ ID NO: 432266 - DNA, 101 bp, Homo sapiens
atgtgtggtccaatgtagtgatgaagaatgatgaagttgcggagaataatgaacatgatgtcacttctactgaattagatccctttctgacaaacttatct

SEQ ID NO: 432267 - DNA, 100 bp, Homo sapiens
aagctcctgggcaaggggacgtctgcagctgaacctagaggatcaagacataatgggagcatttttagacaagccaaagatggaaaagcataatgcccag

SEQ ID NO: 432268 - DNA, 74 bp, Homo sapiens
tttccacatcggtcagaaaaagatatatgattctataacagactcttccagaaatgatatgaagaggaaatttg

SEQ ID NO: 432269 - DNA, 100 bp, Homo sapiens
tcagaaagcctccggaatctaaaaagccctcagtaccagagacagaagcagatggattcgtccttttagcactgctcagcacgcaggcatgtgaggaagc

SEQ ID NO: 432270 - DNA, 76 bp, Homo sapiens
aaaccattgcctggaaagctaccaaaagactgttggtgatatttcgcgtgttttagctacaaacgtttatctaagg

SEQ ID NO: 432271 - DNA, 51 bp, Homo sapiens
agtacatgtttgctacaaaggtggtggatatcggggctggcaaaggcaagt

SEQ ID NO: 432272 - DNA, 106 bp, Homo sapiens
cagctctttccccgtcagcatcccagccgtgctcacgccttgaaaagatcttttgaggtcgaggaggtcgagacacccaactccaccccaccccggagggtccaga

SEQ ID NO: 432273 - DNA, 96 bp, Homo sapiens
ctgatattcttaatcaggatgcaaagaattatcatgcctggcagcatcgacaatgggttattcagcttgaagaagtcatggaaaaagaaacttaca

SEQ ID NO: 432274 - DNA, 100 bp, Homo sapiens
cggaatttggccatagcaggtggtgtaacgttgtctgtaatcgtgtctccagtagtagctgcagtgactgtaggtgctgtacttctttgcagtatacaag

SEQ ID NO: 432275 - DNA, 100 bp, Homo sapiens
gagatggtagccaacccctcaggcaaaggggctgatttgagtaagcctccatgtcgaaaagcaaaggaaatccggaaagaaaggaaaaggttaaaactaa

SEQ ID NO: 432276 - DNA, 75 bp, Homo sapiens
tcctgggccccgggcggcggtcgccaggtctcagggccgggggtacccgagggcgcaccctacgacgcgcacacc

SEQ ID NO: 432277 - DNA, 83 bp, Homo sapiens
gcaggtggagctccggcagccgccctggtaatttcatctgtgccaaagcctccagaggacaagccagaagatgtacatacaag

SEQ ID NO: 432278 - DNA, 82 bp, Homo sapiens
cctatttaggttttaaacagaaaatactcggagatcaattaaactagatggaaaaggagaacccaaaggggcgaagagagcg

SEQ ID NO: 432279 - DNA, 100 bp, Homo sapiens
agtcaaagaagttagagtgcccttctcctgcggaacaaggaagtgttcgccagttactacatgaaaagataagagatgcttatactcacccacaatttgt

SEQ ID NO: 432280 - DNA, 90 bp, Homo sapiens
gaacaaacggagacatgtgactttaccctcttcccctcgaagcaacactccaatggtgtggcgccatgttgacaagggcacggcagaagg

SEQ ID NO: 432281 - DNA, 100 bp, Homo sapiens
gtgagactttcacaataagagcagaggatggaacacttcagtgcattcaagtgagggtcgctgtctgcccattgatagaggccagattgtcttggaagtt

SEQ ID NO: 432282 - DNA, 75 bp, Homo sapiens
tggaaaatgttgatgccatgggtgttcacacagactataatgtaactgcaaactccaagctggtcattatcacgg

SEQ ID NO: 432283 - DNA, 75 bp, Homo sapiens
ccctgtcccatcgcaaacccaaagatccccgttcctggagattctgattgagagacaagaggagcagcagcggca

SEQ ID NO: 432284 - DNA, 80 bp, Homo sapiens
gtactacgtgtacttcggcaccgtccgcgactgctatgaggcttcacggtgatgatatggcatctgccagctctagccgg

SEQ ID NO: 432285 - DNA, 100 bp, Homo sapiens
ggtgttgaaagaggaagatgttcacgatagcagtgagattcacttcaaagtgaaaatgacaacacatctcaagaaactcaaagaatcatactgtcaaaga

SEQ ID NO: 432286 - DNA, 100 bp, Homo sapiens
ttgactggaaacaatggcatttacagaaagagtcaacagcagtggcaacaggaagtttatctcgacaatgctagttgcagtctgtgtgaccctgaccaag

SEQ ID NO: 432287 - DNA, 101 bp, Homo sapiens
cattgatgaattgttggagttagagagtgaagaggagagaagccggaaaatccagggtcctggtcctggacaaaggagtagtagctgaatttgattctcca

SEQ ID NO: 432288 - DNA, 124 bp, Homo sapiens
acttgagatccatttgtaaggaaagaaaaggaagcaacaacataatgcccagagttggagccaattaaaccagggggcagctggcattttatgctatgtgggagcctatgtcttcatcacttat

SEQ ID NO: 432289 - DNA, 75 bp, Homo sapiens
agaggcagctgagatcagaagagaccagctggaggtgctgggtaggccaggtttcagcatcgcagacaagaagcg

SEQ ID NO: 432290 - DNA, 95 bp, Homo sapiens
aacataggatgttttggcgagagatgtattcagtggaggaagctgatttcgatggggtcctctatcatatttcaaatcctaatggagacaaaaca

SEQ ID NO: 432291 - DNA, 82 bp, Homo sapiens
gcgggaagagaagatcatcgagcatttcaaacgctgttccaaagacctaatgcgcttgctgtccagcagttgacagctgctc

SEQ ID NO: 432292 - DNA, 75 bp, Homo sapiens
caggaatccggtcaataatgagggacccccatcaaccgaatccccatcatggccaaacagatcctggacctgtac

SEQ ID NO: 432293 - DNA, 96 bp, Homo sapiens
agaagacttcatcctcccagacactacagaggcaatgtctatgctgcttcaaggaatataagcatttggagatttttaatcaagtagtgtgtgcac

SEQ ID NO: 432294 - DNA, 75 bp, Homo sapiens
tgtacctgatgccgatattcaacgctttcgctagacttcgggctccttgaggatattcagttttgtatgtttgaa

SEQ ID NO: 432295 - DNA, 99 bp, Homo sapiens
ctggataccagcattcctgagacaatcctggtggccaccacatcgaagaatgccaatgcctccctggtgtactccttcctgtataagacaatagaggta

SEQ ID NO: 432296 - DNA, 74 bp, Homo sapiens
cagctgcttagacgctggatttttttcgggtagtggaaaaccaggagtccaaaactacttacctggaagacctt

SEQ ID NO: 432297 - DNA, 75 bp, Homo sapiens
cttccctgccgtcctttagtatgtgcagtactgggagttcatgatcaagtgttgcccacaccaaatgcttcatcc

SEQ ID NO: 432298 - DNA, 100 bp, Homo sapiens
aggggctaacttcagcggtggcaccgggatcggttgccttgagcctgtatccaagatgaatgacagcctgtttgtcagtttggacagacttttgctagaa

SEQ ID NO: 432299 - DNA, 100 bp, Homo sapiens
aggttggtgctttcacaaagataatagaagccatgggattcacgggacctttgaaatacagtaaatggattgagaaaatcatgagttctattggagaagg

SEQ ID NO: 432300 - DNA, 75 bp, Homo sapiens
gaacacaggaccagtttgccatcccaaggccgaagtatgagcccagaggacctggtcggcccttgtaccaaagaa

SEQ ID NO: 432301 - DNA, 90 bp, Homo sapiens
gaaagccgtggccccgagggcggatccgaggtactaggttttgacaagcttgcatcatgcgtgagtataagctagtcgttcttggctcag

SEQ ID NO: 432302 - DNA, 75 bp, Homo sapiens
aggtctctggagacatcttcagcagttgcagagtgggcaggatcttaagacccgataggtgcagaacccatctgg

SEQ ID NO: 432303 - DNA, 74 bp, Homo sapiens
ccatgaggggatgcagttatgggctctgtcgccgtgggactgtttgcaacctctaagcatgcaggctctcccag

SEQ ID NO: 432304 - DNA, 75 bp, Homo sapiens
ttcactcccgctgtctcagcagtctacagcacgatacttggcatatcgaaattttatgattgacacgtatcgtct

SEQ ID NO: 432305 - DNA, 100 bp, Homo sapiens
ggaccgggagatggaagggaggctgctggagtccctggggcagctttatcggaacctaaataccgccagttttgtgcaccgagggcggcctgagcctctg

SEQ ID NO: 432306 - DNA, 75 bp, Homo sapiens
agctctacgcctcctacgtttacctgtccatggactccctggcactggggaaaacagaggaggaggcactgaagc

SEQ ID NO: 432307 - DNA, 100 bp, Homo sapiens
gcctccccagccatgtggaactgtgccagatgtgacatccagatgacccagtctccatcctccctgtctgcatctgtaggagacagagtcaccatcactt

SEQ ID NO: 432308 - DNA, 100 bp, Homo sapiens
aggtcgtccagaatgagccctttgaggaccctcaccatggcaatgggcagttcaccgagaagcgggtgtatctcaacagacggagtctcgctctgttgcc

SEQ ID NO: 432309 - DNA, 98 bp, Homo sapiens
agaaagccgcctcttggtttgcgtcctgcactgaaaggaaatgacggattttgatgccaaagaagaccatgaaagaacacatcaaatggtcttactga

SEQ ID NO: 432310 - DNA, 100 bp, Homo sapiens
tttgatgagaacactgctctggatgatgcagaagaggagtcctttaggaaggatctgaccgcactggccaaagagcttcgagcagtggaagatgtacggc

SEQ ID NO: 432311 - DNA, 75 bp, Homo sapiens
agtaagttgatccatccagatgaggatatatccctggagaactgtgtttatgaaactgtagttttgcctttggat

SEQ ID NO: 432312 - DNA, 115 bp, Homo sapiens
ggatgtcagaccagagaagagcacagaatgtaccagagagcacttcagaatccagaggtggtggcccttcgaggtggactaaacaccatcttgaaaaatgtgatcgattgccaat

SEQ ID NO: 432313 - DNA, 74 bp, Homo sapiens
ttccgtgtctctggattcaagtcccaggagtcctgaccagagagcagtgacaaccatgagtggaaaaaactaat

SEQ ID NO: 432314 - DNA, 74 bp, Homo sapiens
gaacgagtccctcttcactttcctcggcaagaaatgtgtggctcctgtgacgtttgatgacatcactgtgtact

SEQ ID NO: 432315 - DNA, 83 bp, Homo sapiens
caaacagcaagcactgacaagcagcacattctcaagagcacacaggttacaggaaatacaggaggcagaggaacaaataaaag

SEQ ID NO: 432316 - DNA, 100 bp, Homo sapiens
ctaggacgcggaacatcccagaggccagcatcaacatgtattaatctctggagaagacacatccacagttagcactttcttcagatgctgacgctcggtg

SEQ ID NO: 432317 - DNA, 82 bp, Homo sapiens
tgaagagcgacaagccgctggcagccgcggatctcaccgccgctcaggatacagaattcgttgttgggaaggactggggaaa

SEQ ID NO: 432318 - DNA, 100 bp, Homo sapiens
aacaactaaatgactcctctgtcatcatcagcgccctcaagacctacctggtgtcgggagttaaacatgaagtttctggagagacagtggtatttcaagg

SEQ ID NO: 432319 - DNA, 101 bp, Homo sapiens
aagaaagctgctgttatcatcatggctgtagagcaacagccaactcagtttataaatccagaaacacctggctatgttggatttgcaaacctccccaatca

SEQ ID NO: 432320 - DNA, 88 bp, Homo sapiens
aaagaaagctgcgttaatgtttgcaaatgcagaggaagaatttttctatgaggaaaattgcctaagaattatgacccaaaagttaccc

SEQ ID NO: 432321 - DNA, 83 bp, Homo sapiens
cagaaatacatgcaacatggtgactgggctgtcacatggtgactgaagaacttcattccataacgtttgaaacacagatctgc

SEQ ID NO: 432322 - DNA, 100 bp, Homo sapiens
ccagggctctaattgaaaagagaatccaattacaccttccaaaggtgcaatggatgagcttcatagtctggatccaagaaggcaagagttattggaagct

SEQ ID NO: 432323 - DNA, 89 bp, Homo sapiens
ggcaggtgacagtctgcatgtgcagttttcaggcagatcgggagcggtgccgagaaaaatttccttactagatgacatttcatcgcaat

SEQ ID NO: 432324 - DNA, 74 bp, Homo sapiens
gcttattatcggcgagtgaagagactgtacagcaattggcggaactgataaatttcaaacggaagagagtggca

SEQ ID NO: 432325 - DNA, 97 bp, Homo sapiens
cctcccgagtagctaggattacagggtactgccagggggatggttaccgcatcggctttggccagtgtgctggaaaagtgctgcctgctctcctgcc

SEQ ID NO: 432326 - DNA, 100 bp, Homo sapiens
gcgtcccgctcgctgggagagaggtacctctccttttccctctccctttccctaaggcaaaagaatggaccccagcaggaaaagcaaagcaagagaattc

SEQ ID NO: 432327 - DNA, 99 bp, Homo sapiens
gaagtattggactccctctctcagagtgttcatgtgaagcctgagaacctgcgtttggcggaggtggagccgccaccaaaatgcagattttcgtgaaaa

SEQ ID NO: 432328 - DNA, 100 bp, Homo sapiens
ccagaggaaactgacggagacgcagatgtggacttgaaagaagctgcagcggaggaaggcgaggtcacgagaagagaatgccttctagatgcaaaatcac

SEQ ID NO: 432329 - DNA, 80 bp, Homo sapiens
gcctctctcctgatacagcaggcgctcaccatgttccctggaggtatcttggagatggccgcttccatctggagtctgtc

SEQ ID NO: 432330 - DNA, 75 bp, Homo sapiens
aactcatcttgacagcctctgctgatagaacagttattcctcccacatgtcatcagcaggatgggcaagctggag

SEQ ID NO: 432331 - DNA, 98 bp, Homo sapiens
cctggtgtcacctatcagtaaaaggtctgtacaacccaccctacagtgctcagtcacaccctgctgcaaagacccaaacctacagacctctttccaaa

SEQ ID NO: 432332 - DNA, 80 bp, Homo sapiens
caattacatcgcagaacagccctgaggcaagagaagaaagtttaatggatcgagaagtggcgttgcttgctgaaatggac

SEQ ID NO: 432333 - DNA, 100 bp, Homo sapiens
ctctccctcgagaagctccagatggcgtcttccgtgggcaacgtggccgacagcacagattgaggagcatgccatacaagatttattggttttctatgag

SEQ ID NO: 432334 - DNA, 75 bp, Homo sapiens
tggcacttcattggccacctacagaaacaaaatgtcaacaaattgatgggtgggaccattcagttgcaggaaaac

SEQ ID NO: 432335 - DNA, 99 bp, Homo sapiens
gcgggccccgctccgcttcgaatggttgcaggaaccttccctctacaccatcaaggctgttttcatcctagataatgacgggcgccggctgctggccaa

SEQ ID NO: 432336 - DNA, 97 bp, Homo sapiens
agccaagaggaggacagttcgctacacagcaatgcatcgaggaagcaagatttccagatgtagcaaatgggtttattgaggaaataattcattttaa

SEQ ID NO: 432337 - DNA, 51 bp, Homo sapiens
cgtaagcgcacgtttaaacatctcaaggtggtcttcaagctgacagagaag

SEQ ID NO: 432338 - DNA, 82 bp, Homo sapiens
ggacgaggggctccgggtcttccagagcgtgaagatcaagatcggcttgggcactgtttaaaggaaagttccgagaaggcat

SEQ ID NO: 432339 - DNA, 83 bp, Homo sapiens
gaaagaaaggatacagaccatctgggccattctggacatggcaagacatgtgccactctatcgggcactgctggaattgcttc

SEQ ID NO: 432340 - DNA, 82 bp, Homo sapiens
cccaccactgccacaaacgccgcaccaggtcttgtagcagcgcctcctcggttggatcgtcaaacgcaggctactaccttgg

SEQ ID NO: 432341 - DNA, 112 bp, Homo sapiens
cacctactattacccccagtatctgcaagccaaggagcttcagtttcagcgactcacccgagaactggaagtggaaaggcagattgttgccagtcagctagaaagatgtagg

SEQ ID NO: 432342 - DNA, 100 bp, Homo sapiens
cattggcctccggcaggcgccccccgggggcgggaagctgattccagcaagattatggaagagcatagctacatacaaaaggagctagatttacaaaatg

SEQ ID NO: 432343 - DNA, 95 bp, Homo sapiens
ttgtaatcttgaaggaatggacctcaaaggtgtgggccgaagatatgctcatgtggtgttgaggaaagcagacattgacctcaccaagagggcgg

SEQ ID NO: 432344 - DNA, 82 bp, Homo sapiens
cggaggagccgcgggcggcgcggcccagctcgttccaggccagctgcgggccgtccagcggctgtgccacttctacagcgcc

SEQ ID NO: 432345 - DNA, 98 bp, Homo sapiens
ccaaactcagctcgcccggtttctcggcgaatgacagcacagatgatgattattccccaccttctaagagacaaagaccaacgagccaccacagccac

SEQ ID NO: 432346 - DNA, 81 bp, Homo sapiens
cttcgcgagcgtctgggcgggtggtaggttttaaaatcaaagatgggaaaatcggagaaaattgcccttccccatggccag

SEQ ID NO: 432347 - DNA, 100 bp, Homo sapiens
ccgcagtccaagtcccggaagatcgcgatcctgggctaccggtctgtgggaagggaaaaggccgaggcatcagcgtgtgaagaccgcaaagacgatcccg

SEQ ID NO: 432348 - DNA, 90 bp, Homo sapiens
cggtcccagaccaccctcctccaccgtcgcctcccactgcaaaaaggcctggttgcaggagaaataacaaggcattgaagaatggcagat

SEQ ID NO: 432349 - DNA, 76 bp, Homo sapiens
caaagttagacgtgaccatatcatagatgatgcacttgtccgggccctgtctctgcccctggtggtcatcgtccat

SEQ ID NO: 432350 - DNA, 101 bp, Homo sapiens
agttcgtcatgttctacgacagcgagtatgaaagtgaagtcactgcttttgctgtcttggatcaagaccagaaagaaattattgataccaatggagctgga

SEQ ID NO: 432351 - DNA, 89 bp, Homo sapiens
tcaggaacagggacagcacctcatcccctggatgggggaccacaagatcctcatcgacaggcaagccgattttttcagttgatattcac

SEQ ID NO: 432352 - DNA, 75 bp, Homo sapiens
cggccaagaggcaaaggggaggttacgcagcaaaccatccagaaggtcagttcaccgggacctggaggcccagat

SEQ ID NO: 432353 - DNA, 51 bp, Homo sapiens
tggggcgcccagctgccaacaccaaggaatgtatcctgtcaggtataatgt

SEQ ID NO: 432354 - DNA, 100 bp, Homo sapiens
gcagcgttgtggaggggcgggccggacgctgagcggagcagctgcgccacgcaatctgcagagcgctgtgtaagcacattgcttgatctaatccagacca

SEQ ID NO: 432355 - DNA, 90 bp, Homo sapiens
gcgtctcattttcctacaacactggtgataacacaacatttcctgatgctgaagataaagatgtggaagatgtcaagtttgtgatcaact

SEQ ID NO: 432356 - DNA, 74 bp, Homo sapiens
cgagccgggatctcaggtcctcgggggcggcggccacgccaaggacggatttgaacatggaattcaatccttca

SEQ ID NO: 432357 - DNA, 50 bp, Homo sapiens
ggacgcgcccgccaccgacatctactttgacctcagcagccatgtcgaag

SEQ ID NO: 432358 - DNA, 100 bp, Homo sapiens
ccaccttagtcgtttatttcttccgagttagaaatcctacaaaggaccttgagaagctaaaacttacttatgaggaaaagtgtgaaattgaggaatccca

SEQ ID NO: 432359 - DNA, 100 bp, Homo sapiens
taaacatcatattactcctcttctgtctgctgtctatgagggtcatgtttcctgtgtgaaattgcttctgtcaaagtaacaaatgtggcaattattttgg

SEQ ID NO: 432360 - DNA, 75 bp, Homo sapiens
cgggcccctcacgcgctggtcatgacctttctcttccggaatggcagagagagcaggagattcggatgggtcaga

SEQ ID NO: 432361 - DNA, 75 bp, Homo sapiens
cagccttcaggggacgtggcgcagtcgagttctagagccttctttccgccaggcctttcccaataccaaccgctg

SEQ ID NO: 432362 - DNA, 98 bp, Homo sapiens
tgggatgttggctctggacaacatgctgtactttgccaagcaccaccaagatgcctacatccggtcatcagtgagttctgcctcagtcagctcccaag

SEQ ID NO: 432363 - DNA, 100 bp, Homo sapiens
gccagctcggggccagcgcatggggctgctgagaccgctccggacgtgcgaagcgttcgcggtgcgggaaatgaggcaagttatcctttggaaatgtgct

SEQ ID NO: 432364 - DNA, 98 bp, Homo sapiens
gcactgtggacactctttgtcatctcaatggctggggaaggtgctcaattcccatacatgcactagagagtgatcagcagctggactgtgccttggac

SEQ ID NO: 432365 - DNA, 107 bp, Homo sapiens
tgaaagtgagcagtccagaaagcggcttatcgaacagagccgggagttcaagaagaacactccagaggtactccaaagattcaggtttactcacgtcatccagcaga

SEQ ID NO: 432366 - DNA, 90 bp, Homo sapiens
aagtgccagatgcaggcggggaagatccatcatgttacacaaaatggaggactatataaaagaccgtttaatgaagcttttgaagaaaca

SEQ ID NO: 432367 - DNA, 76 bp, Homo sapiens
gcggaggtcgataagctggaactgatggtcacaaggcacttaaagcattgttgaggtcattggtaggtcttcagga

SEQ ID NO: 432368 - DNA, 83 bp, Homo sapiens
agggagaggagctgtggataacgggaggtgaatttccatgtcaacatagtcctgaggcaccaagtctgaaggaggcagaaggg

SEQ ID NO: 432369 - DNA, 76 bp, Homo sapiens
aaatcgttacactacaccctcaaaaggaattacatgaatgacagtcttcgaaccaatgtgtttgttcgatttcaac

SEQ ID NO: 432370 - DNA, 97 bp, Homo sapiens
ccttgcatggtgtttcaaagggtggtgaagaactaagggcaggtgtttgtttgccagtggcagtccatttgggccagtgaaacttacagatgggcga

SEQ ID NO: 432371 - DNA, 83 bp, Homo sapiens
attgacatctatcattatgaattggatatcaagccagagaagtgcccgaggagagttaacagacaatgcagatcttcgtgaag

SEQ ID NO: 432372 - DNA, 95 bp, Homo sapiens
cgccgggctcggggcctccgcagcgacaacatggaggccgtgaagaccttcaatagcgaggagttttgagagcaaaatgacaacacccagaaatt

SEQ ID NO: 432373 - DNA, 83 bp, Homo sapiens
gcagagcccgcctgcccggctacaatgcagatcttcgtgaagactctgactggtaagaccatcaccctcgaggttgagcccag

SEQ ID NO: 432374 - DNA, 99 bp, Homo sapiens
gctggtagaagacattgtgcgagatggccggctctatgcctctgaaaaccaccaggagattttaaaggacagagcgggatgccaccagcttgtccaaag

SEQ ID NO: 432375 - DNA, 99 bp, Homo sapiens
gagcggcgggcggcgagcagaggagctaacagattatgtttgagaccttcaacaccccggccatgtacgtggccatccaggccgtgctgtccctctacg

SEQ ID NO: 432376 - DNA, 101 bp, Homo sapiens
ggtggatatggtggcagtggggatggctataatggatttggtaatgatggtgaggaagaggatggagatgaagatgaggaagctgagtcagctacgggcaa

SEQ ID NO: 432377 - DNA, 75 bp, Homo sapiens
cctgtggtggaggagaaggaaagcggagctccctgggtcctcagcagtgaggctggcctccctgcgtgacctgcc

SEQ ID NO: 432378 - DNA, 74 bp, Homo sapiens
cctggaagaggactgaagaagcagctgcaggacataggatgcaacacttgagcgaaggaaccaagggccggcag

SEQ ID NO: 432379 - DNA, 90 bp, Homo sapiens
cagtagcatcgtttttccacttattctttcgagtcagtgcaatcatcgtctatcttctctttacttcctccactgaagtcttgaaccccc

SEQ ID NO: 432380 - DNA, 100 bp, Homo sapiens
ccacggggatccagccaaggtcgtcgatctgcgctcctcagaccaccggcaggtgaacagcctgatgcagaccgaggagtgcccacctatgctagacgcc

SEQ ID NO: 432381 - DNA, 100 bp, Homo sapiens
agggaagaaaactcaacaaagcaactgagagctttgcttggaacattacagtattgaaggctctagaccaagatagaacagcccttcagaaagtgaagaa

SEQ ID NO: 432382 - DNA, 83 bp, Homo sapiens
atcgtttcttgggtcgtcatttcccccgcttctatgtcctgtacacaatcttcatgaaaggtgcgtctaatgctagtgttggc

SEQ ID NO: 432383 - DNA, 100 bp, Homo sapiens
agaggggctggagcccacctgctttgagaagagcaatgacattgggggcctgtggaaattttcagtggtgaaggcatttgtgatcctggcctcgcagttc

SEQ ID NO: 432384 - DNA, 82 bp, Homo sapiens
cagcttggtattttcagtctccttcccaccacaactatctgtaagagaggtgatgatgaacagtctacacagatggctgcaa

SEQ ID NO: 432385 - DNA, 100 bp, Homo sapiens
cggctgccgtacgtggccctcgatgtgctctgcgtgttgctgggcatggagggatttttgaaatcagatgagaggcagagattggccaaagaaagacgag

SEQ ID NO: 432386 - DNA, 75 bp, Homo sapiens
gtcggctcagccgggcagtttgaggagctgctgcgcctcaaagccaacccttaatgaaccaaccatagattacgg

SEQ ID NO: 432387 - DNA, 83 bp, Homo sapiens
catccacggggtgctgcagatcctgttccaggtgtccctggccagtgtccttccacctgtccacaagcatggggaacatcttc

SEQ ID NO: 432388 - DNA, 98 bp, Homo sapiens
agggcctcgcctcactatggcagcagcacggcacagcacgctcgacttcatgctcggcgccaaagtcctattttgtaacggattatgatccaaccatt

SEQ ID NO: 432389 - DNA, 96 bp, Homo sapiens
gtcgtggctcggatctcgcagtgggcagacgaccacctgcgcctagtccggggcaatttggttttgatgctgtgccagaaatcttctgacaatgag

SEQ ID NO: 432390 - DNA, 100 bp, Homo sapiens
gaacctctatatccgaggactgcctccccacaccaccgaccaggacctggtgaagctctgtcaacctgcctttgttccattgaatgttcccaataacaaa

SEQ ID NO: 432391 - DNA, 90 bp, Homo sapiens
caagttcaggagaactcgaccgctgaggaggatgaggacaaggaagatgatttccgagctcccctttacaaaacagtggagataaagggc

SEQ ID NO: 432392 - DNA, 82 bp, Homo sapiens
gcgcaaggtcgccctcaaggccatgatcaaaacatccggcactccacccagagcctctttgagtacatgaagggcattcaga

SEQ ID NO: 432393 - DNA, 97 bp, Homo sapiens
taaagggagattacacagaagcaaaagccttgatagcatggatttctgtgagctcactgcgctgacaattgctagcaaacaccatcagattgtgaaa

SEQ ID NO: 432394 - DNA, 50 bp, Homo sapiens
ttgaattactttgttatgcagaaagtgggtagtaaaaagaatcattcctg

SEQ ID NO: 432395 - DNA, 51 bp, Homo sapiens
cggccggcgcttacctctgctacagggagtcagagtcagaagcaaaggtag

SEQ ID NO: 432396 - DNA, 78 bp, Homo sapiens
gacaagaacagatagacgcttttcttaagacgctgcgcagaggtcaccacgtacttgaactggctggttcggatgtca

SEQ ID NO: 432397 - DNA, 100 bp, Homo sapiens
ggggaagggacgtgggggcggccacggcagatatgcacccaatgtccagggagcgtgcaaaatttgtcaaaagtggccttttattgtaaaacgacacgag

SEQ ID NO: 432398 - DNA, 74 bp, Homo sapiens
gaagaattcccaagccaaagctttccaggtgattcctggggctgccagctaaggtcccttatgatttctgctct

SEQ ID NO: 432399 - DNA, 100 bp, Homo sapiens
tgagcgtcactctgcaccaggaccaggtcattgattacaacggggaacgcacgctggatggttttaagaaattcctggagagcggtggccaggatggggc

SEQ ID NO: 432400 - DNA, 76 bp, Homo sapiens
ggagcacgcgggctgctcatcgtcagcagggagaggctgtttaacccagaactggtgctggtctcagctggctttg

SEQ ID NO: 432401 - DNA, 74 bp, Homo sapiens
cggtgcaactattcgcagtccgagcgaaacattgctgaggctcttgtcagcaaaggtctagccacagtgatcag

SEQ ID NO: 432402 - DNA, 49 bp, Homo sapiens
ctggacaggaaggtgcaggccctgaaggatctatctggttcaatagatg

SEQ ID NO: 432403 - DNA, 98 bp, Homo sapiens
ggaacatggcggatcggctcacgcagcttcaggacgctgtgaattcgaggccagtaatagtagccatgagtctcgtattggtctagctgaggggttgg

SEQ ID NO: 432404 - DNA, 75 bp, Homo sapiens
ccatttggagatcttgacaaagcctcttctgtttccaatgggaactcccccactggaaaggattctgaaagaaat

SEQ ID NO: 432405 - DNA, 95 bp, Homo sapiens
gacgaagagctcgaggagatcaagaaggagaccggctctgaaccttagccggccgatcgaggagcagggccccctggacgtcatcatccacaagc

SEQ ID NO: 432406 - DNA, 100 bp, Homo sapiens
ctctcgaaattatggatggaaagtcgaggagacaggacgtactcatagatcaaaccaagttactgctcctgagtatgtctttctgatatctgaactggca

SEQ ID NO: 432407 - DNA, 95 bp, Homo sapiens
agtgaagggagagaagtggatttgggagacatttaggagaaatcaagatgactaccagctggttcgaaaattaggccgaggtaaatacagtgaag

SEQ ID NO: 432408 - DNA, 101 bp, Homo sapiens
aatcataaaatactgtctttgatccaggaggcttgtgtcatctgccagcatttatgaaactgtgctccaagtaggcagcctcgtcttacagcgtgactgca

SEQ ID NO: 432409 - DNA, 74 bp, Homo sapiens
atggacgtactttgtctgactacaatattcaaaaggctctaatcaatcgtggggttaacctggatcccctgggc

SEQ ID NO: 432410 - DNA, 50 bp, Homo sapiens
aggcttcctccttccaggaatcattgagaaacatccatgatagcagtctt

SEQ ID NO: 432411 - DNA, 100 bp, Homo sapiens
tcagagaattccattaacactgaagaagtgatcaatgctattgcacccgagaaggatgtggatgggtctctttaatgtggggaacaagctgctggtaagc

SEQ ID NO: 432412 - DNA, 95 bp, Homo sapiens
cgtctctgaagagcccttgcttttgcctggacccccagcatcatggtttcccatttcatggggtctctcaggatgaaaactttcggaagagaaag

SEQ ID NO: 432413 - DNA, 100 bp, Homo sapiens
aaagctgctacttatggaagatacaaaggacaagttggatggcttgaggactggtactaaaaggaaacgtgactgggaggccattgccagcagaatggag

SEQ ID NO: 432414 - DNA, 50 bp, Homo sapiens
cggcagagagcggggcggcggcagcttcggaaccaaaaagaagcttccca

SEQ ID NO: 432415 - DNA, 97 bp, Homo sapiens
tttcaaattccctaaacattttagatgatgattataatggacaagccaagataacagcgacttgattgcatgtacagtgatcaccaaggatggcggc

SEQ ID NO: 432416 - DNA, 82 bp, Homo sapiens
acttgaacttaatacagcaagaaagaccatcaagtttaccaacccttggcttctgcgttcgaagagtcctgtaggtaacccc

SEQ ID NO: 432417 - DNA, 98 bp, Homo sapiens
tcatccggaggcaggaccagctgcagctgctgtgtacatgaagctctcggttcccaagggcatccagtttgttgggcatcctggcaaacgccatgtga

SEQ ID NO: 432418 - DNA, 124 bp, Homo sapiens
gcatgctgctgttcagagactgtgaagaggccaccgacttcctcacctgccacggcctcaccgtttccgacgggaggtggtgcctcattctgtgtgctacatgcggatcccacggaacccacag

SEQ ID NO: 432419 - DNA, 100 bp, Homo sapiens
atcatgagcgatgttaccattgtgaaagaaggttgggttcagaagaggggaatgggatgtttctggggagctgaaaggaaattctgggtcttgaaaggag

SEQ ID NO: 432420 - DNA, 83 bp, Homo sapiens
tgcacagccgcggcggcagcagcagtgagagacctgcctagagctggaacgttacctccagagcgagccctgctatgtttcag

SEQ ID NO: 432421 - DNA, 48 bp, Homo sapiens
caaaggcattcaggagccacatccaaaatgtaggtttgaatacaaacg

SEQ ID NO: 432422 - DNA, 96 bp, Homo sapiens
gttttgctactgtttacggaactgtcactctcaaacttcacagcacctgttcttcccggagcctatcagcaaagccattcccaaggctatggctac

SEQ ID NO: 432423 - DNA, 74 bp, Homo sapiens
ggagcggcgttggaggccaccgtttccaggaaataatgcaaaaggtgtcccaaggctcctgaccagtgaacaaa

SEQ ID NO: 432424 - DNA, 90 bp, Homo sapiens
ccgggccctctgcgacctggggccctgggtgaagtgctccgccgcccttgcctccaggcaaaaactgattattccaagtggaagttgccc

SEQ ID NO: 432425 - DNA, 75 bp, Homo sapiens
gcagtgaagaaggaggcagagttggacaagtacctggaatgcagagtagaaggttcgtcacaaggcatcgcagaa

SEQ ID NO: 432426 - DNA, 49 bp, Homo sapiens
atgggccgggatcacattctgattatgggcttaggtcacgagcaaggat

SEQ ID NO: 432427 - DNA, 87 bp, Homo sapiens
agaaaatcaaatggcatccggggatttctgctcacctggagaagggatggaaatacttcaacaagcaaagctctgcaggaatattct

SEQ ID NO: 432428 - DNA, 75 bp, Homo sapiens
ggaagatggcgaaggtctcagagctttacgatgtcacttgggaaggaccttaaaggctttgatccaggagagaaa

SEQ ID NO: 432429 - DNA, 83 bp, Homo sapiens
accatgtcatctcccagtccgggcaagaggcggatggacacggacgtggtcaagctatgtggcccggccagataagatttcag

SEQ ID NO: 432430 - DNA, 108 bp, Homo sapiens
taacggggttcgggtgtctcgtgtgtgaacatcacaggagcagatgtctcaagtattagatgccatgtttgaaaaattggtcaaagatggggagcatgtaattgatca

SEQ ID NO: 432431 - DNA, 125 bp, Homo sapiens
gtgagacgtttgtacaagccgtgtctaaggagctggttggagagtttttgcaatttgttcaacttgatacaatgagttacaaggcactaatagttctggatccttgggtggtcttgatgttcgca

SEQ ID NO: 432432 - DNA, 74 bp, Homo sapiens
gattattttccaccaggggatttcccaggtccaccacctgctccatttgcaagaataagacgagttggaagaag

SEQ ID NO: 432433 - DNA, 100 bp, Homo sapiens
tttgtccagcgactccggggcctgatgaatgacatcgatggagatggcgatggagatggagcaactggaaagaagaagaaaaagaagaagaagaagagag

SEQ ID NO: 432434 - DNA, 100 bp, Homo sapiens
aggactttacgataaaacgtgtcaattccttagcattggccgaagagttaaggtcctgagaagtatttctcgttttcattggagatcacagcatacaaaa

SEQ ID NO: 432435 - DNA, 90 bp, Homo sapiens
gttgtcgggtacattgatatatgtaaattacggaagatcatttatatacacatgcttaacaaacaacagttgcagttactgaaagaacgg

SEQ ID NO: 432436 - DNA, 96 bp, Homo sapiens
atgggtatagcactgttacattaaattatggactttctgtcagattttgagatgatgttgcagcgaaaaaagagcatgagtggcaagcgcagacgg

SEQ ID NO: 432437 - DNA, 100 bp, Homo sapiens
acaagattgaccacattgatcacagtgatgatgaacagtctacacagatggctgcaagttgggaagatgataaagttacagaagcatcttcaaacagttt

SEQ ID NO: 432438 - DNA, 100 bp, Homo sapiens
tttctacgctgctgaacaagacaaaggtgccctacgagacgctgaacaaacgctttcgcgccgctcagaagaacattgaccgggagaccagccacgtcac

SEQ ID NO: 432439 - DNA, 75 bp, Homo sapiens
gcccttccagatacagctaccagattatgaagcaattgtgaagctttcggatggctttaatggagcagatctgag

SEQ ID NO: 432440 - DNA, 75 bp, Homo sapiens
ggagaggacatgatgcatccactcaacctatcaagactcttccacctgctacttctaccgagccatctgtaatct

SEQ ID NO: 432441 - DNA, 87 bp, Homo sapiens
ggaacagcgtctgctgctcatgtttcacagtcttgaccggaaccaggatggactgcacttctctggacgagcatggcattgcggcgg

SEQ ID NO: 432442 - DNA, 74 bp, Homo sapiens
ctggacaccaaatacccgtacggtgaaaggtgtagcagtcactcggcctacacccacagcatcgaccttgtgaa

SEQ ID NO: 432443 - DNA, 100 bp, Homo sapiens
ggtctcgtcggcttgggattatcaatgcttgggagggttttctagtcttgaactactggctacgtggctaccaaatgcctaagggagttcgttcacagct

SEQ ID NO: 432444 - DNA, 100 bp, Homo sapiens
aaagactcaactgagcaggtgatgcagctagaacattcagaagattctcggccttgccccttcacgagccgccaccaagcaggcaggtggatttcttggc

SEQ ID NO: 432445 - DNA, 94 bp, Homo sapiens
caaaatcttcgtacccattttgcagtagtgatctctgctgagtcatcactagagagtgggaagggcagcagcagcagagaatccaaaccctaaa

SEQ ID NO: 432446 - DNA, 80 bp, Homo sapiens
ggtgcccgaggaggcagccaagctcgtggcctgcctctgcgtgctccagaatgacagggtccagaaactggcgagccacg

SEQ ID NO: 432447 - DNA, 51 bp, Homo sapiens
ggtggagtgtaggtcatatcgccgcgacttggagtccaggtgtgagaaatt

SEQ ID NO: 432448 - DNA, 100 bp, Homo sapiens
tcgggtccgaggagcctcgcgcggcgctggagagagacaagatgtccgccagagctgcggccgccaaggtgtcatggagaaactccagctgggcccagag

SEQ ID NO: 432449 - DNA, 83 bp, Homo sapiens
cggggccttccacaccccctccgtgggtgtgtggtacgacaccgagcttctggtcaggtgatggctcttaagatgaacacatt

SEQ ID NO: 432450 - DNA, 100 bp, Homo sapiens
ctcatttggacacattgagtcgggcacaactgacccaacttttcttagcctcagtcctggaatgccctttctataaggaatcattgcaatttagagatgt

SEQ ID NO: 432451 - DNA, 75 bp, Homo sapiens
ccgctgcagagagtgctttcttccagagggccatttctgagcagtggaggtttcaagtaatccactaacaaccag

SEQ ID NO: 432452 - DNA, 100 bp, Homo sapiens
aagtggtgagcctttttgtcactgaatcaggaaacccaggcccaacggcaggtggatgcaagaagaaatgttccccaaaacgacccagtgacagtggtgg

SEQ ID NO: 432453 - DNA, 97 bp, Homo sapiens
gagaagacgctttacccgactctttgggccgttatctcaccgtctgttcctcacacaccccgcccaaggacgtgcctggcagcggcctggtgctccc

SEQ ID NO: 432454 - DNA, 84 bp, Homo sapiens
ctgttgccaaattaaatgccctgaggaaaagtggccagttctgtgatgttcgacttcagtactgccaaatctgtcgaaagggag

SEQ ID NO: 432455 - DNA, 100 bp, Homo sapiens
aacttgtaccgggatgtgatgctggagaactataggaacctggtctcactggttattcctagacatggcttacagagtcttgggaaagttgctgcagccc

SEQ ID NO: 432456 - DNA, 100 bp, Homo sapiens
ggcaacatcaggtgactgtcccagaagtgaatcgcaggggcaagctctgtgtgattgattggaagacatcagagaaaccaaagccttttattcaaagtac

SEQ ID NO: 432457 - DNA, 100 bp, Homo sapiens
accccagttaagctgcgctccgggagatgtaaaaaaagattggtctgaccatgctctctggtgggaaaagaagagaacttggcttctgaagacacattgg

SEQ ID NO: 432458 - DNA, 82 bp, Homo sapiens
caggaagctgctggaaggcgaggagagcagaacatccagtcatggataaaaatgagctggttcagaaggccaaactggccga

SEQ ID NO: 432459 - DNA, 88 bp, Homo sapiens
agccccgagccgcccgcagagcaagcgcggggaaccaaggagacgctcctggcactgcaggtcgttgaggacttccacatggagattg

SEQ ID NO: 432460 - DNA, 100 bp, Homo sapiens
aactgatcagacgaactacgaacccctggacgggagagtctgccggcggagaatataagctactggtcagaagttatatgtaaggctctttcaacgtaaa

SEQ ID NO: 432461 - DNA, 100 bp, Homo sapiens
cggccttcgggctgacgctgctgctcgccgcgctgcgcccttcggccgcctacttcggtcctcaaccactgaagaagaagcttgatgcttggctgtcaga

SEQ ID NO: 432462 - DNA, 100 bp, Homo sapiens
gatgccttgagagtgaaagtcgccatgtctgtgaccttactttcaggaatcattcagacctggaatcatttttctgataatgaggcagagcgggttaaaa

SEQ ID NO: 432463 - DNA, 76 bp, Homo sapiens
agatgtactgtgcttggctggaaaaccccaaaagtgtacataagtatttggaaaccatgttcacactactttttca

SEQ ID NO: 432464 - DNA, 83 bp, Homo sapiens
gcctcggaactactacatccagtggctcaacggctccctcatccatgggttccgagtctgaggaagacataaccttgtgcctg

SEQ ID NO: 432465 - DNA, 49 bp, Homo sapiens
gtggcagccatctccttctcgtattctttgaaactggagaaaggagatt

SEQ ID NO: 432466 - DNA, 90 bp, Homo sapiens
ggctttaggctggaagcgccttagaggagccatttttccagcatttctgctgtgcagtggctctgtaatgctaacaagaagtctgaaaac

SEQ ID NO: 432467 - DNA, 96 bp, Homo sapiens
accgaacttaccaagcatcctctgcggctttcactctttcgacgtgtagcagcagctttgccgggaatggaaagcacacaggacagaagcagagaa

SEQ ID NO: 432468 - DNA, 75 bp, Homo sapiens
aaacaaaattcgatttgcaaatcattcagtgaatcccaactgttatgccaaagtgctatacgtattggtcacgtt

SEQ ID NO: 432469 - DNA, 100 bp, Homo sapiens
cgctgagggagctcggtacgccgccgcctcgcacccgcagcctcgcgcccgccgccgcccgtccccagatgttcctcctgctgatcaagagaagcttttt

SEQ ID NO: 432470 - DNA, 98 bp, Homo sapiens
ccaggagctgaacgtggactggcgagatgagccagaggtaaaatcccagaggaatccaaagccctctctttattggctcctgctccaaccatgacaag

SEQ ID NO: 432471 - DNA, 75 bp, Homo sapiens
gcccctgccactagtgagatgaccacggaaggcagcaacaactcatctccagtggattttgtaaataacaagagg

SEQ ID NO: 432472 - DNA, 113 bp, Homo sapiens
gggggacaaagacaataagtatgttccctactcggagagcttcagccaagttttagagaaaagcagcatctgttatagcaaaatacccacacaaaataaagagtggagctgaa

SEQ ID NO: 432473 - DNA, 113 bp, Homo sapiens
tgatgtgcaacaagtgtctttggttataaattatgatctacctaccaatcgtgaaaactatattcacaggtggacccaagtggagagattgtggaactggcgaaaggtgcatg

SEQ ID NO: 432474 - DNA, 83 bp, Homo sapiens
cagctgctttcacacattgccgatcagcagcagcagcagtgaaggagaacttaagtggtaaatatggacagctgggccacgag

SEQ ID NO: 432475 - DNA, 101 bp, Homo sapiens
cctacctccatcatcacatgaccaaagcattcctcttctatgcccctgagttttgaaagcaagaaaagctacaccttaaaggtggagggagccaatcctca

SEQ ID NO: 432476 - DNA, 127 bp, Homo sapiens
aatatagaggcctgattaaatactggtttcacactccaccaagcatcccattacagatagaagagaagttactcaggcgtggtggcgtgtgactgtaatctcagctaccggggaggctgaagcagaa

SEQ ID NO: 432477 - DNA, 51 bp, Homo sapiens
ccgggagcacgtcatcgccatcgaaggcagttgcagtggtgcagaatggct

SEQ ID NO: 432478 - DNA, 100 bp, Homo sapiens
acccaggggaagttacacgaggttggtcatgaaagagattccttgcagagacagctcaacacggcacttccacaggaacccagctatttagtggtcgaag

SEQ ID NO: 432479 - DNA, 89 bp, Homo sapiens
tactcacagttgaagcctgattgcagggccacatctgccagagcctggagtctgcgaaggccgggacccggttccccggcccacagtgg

SEQ ID NO: 432480 - DNA, 84 bp, Homo sapiens
agctgtgctcgcgctactctctctttctggcctggaggctatccagcaacctaaaggcagacccagaagagctttttacaaaac

SEQ ID NO: 432481 - DNA, 83 bp, Homo sapiens
gctggcggacatcactttagaccctccacctaattgcagaacccagcttagactagaaagtctagaagacacacacataatga

SEQ ID NO: 432482 - DNA, 75 bp, Homo sapiens
aaatgacctaaacttttgagatagatttggctctaagtctctcttccagcttcttttggaaatcaccgttcgaag

SEQ ID NO: 432483 - DNA, 75 bp, Homo sapiens
gggacgagacgccgggatccgaggtgccgggtgacaaggccgccgaggaacaggatggaatggggcgagtccttg

SEQ ID NO: 432484 - DNA, 99 bp, Homo sapiens
ctggactccatgccgaaggtatctggaagtcgtgacacgtaacaaatgtggcaattattttggatctatcacctgtcatcataactggcttctgcttgt

SEQ ID NO: 432485 - DNA, 100 bp, Homo sapiens
caggtgaagcggcgcccagcccacctcatggccctcctgcagcacgtggccctgcagtttgagccaggacccctgggcaagcgaccagcgtgatctcaca

SEQ ID NO: 432486 - DNA, 101 bp, Homo sapiens
tcaggaacagggacagcacctcatcccctggatgggggaccacaagatcctcatcgacagggaccacggcaaagtcgggcagtgcccccatcctcaagtgc

SEQ ID NO: 432487 - DNA, 98 bp, Homo sapiens
cagtgcatcgagcgctgccatgtgcctctggctcaagcccaggctttggtcaccagtgagctggagaagttccaggaagggaggcaataataagttaa

SEQ ID NO: 432488 - DNA, 100 bp, Homo sapiens
gtgggggtgtgcaaacccgagagaactgggttttgcacactagggaccaagaagccctcggggacactgctgagaaaagactgccgaagggaagaccagc

SEQ ID NO: 432489 - DNA, 83 bp, Homo sapiens
gcacatatggaagatctcgaaaattgtagaaggcatgaaacaaaaaatgtggagtattgaaaatattgccttcggttctggtg

SEQ ID NO: 432490 - DNA, 100 bp, Homo sapiens
gagctggcggcgacggccacaggggcggcgacggcgcagtgcgaagcgaaacagaggcacagttgaatgctgttgatgctttgattgactccatgagctt

SEQ ID NO: 432491 - DNA, 80 bp, Homo sapiens
gccaggggacatccgccatgctccaaacaacttggcctcagtctgctccatctggacacaagcatctgacggtagaagag

SEQ ID NO: 432492 - DNA, 83 bp, Homo sapiens
ctgggcgcggattcgccgaggcaccgaggcactcagaggagattggtttatcttggaagctaaagggcattgctcatcctgaa

SEQ ID NO: 432493 - DNA, 50 bp, Homo sapiens
tgccccgccggagcagcatcatcaagtttcagtggcgattctccagagaa

SEQ ID NO: 432494 - DNA, 100 bp, Homo sapiens
tgccactttgttcagcaggcttcccagatcatccccaggctgactcaggttcctgtgtacaagagcccccctccatgcgcctgaaggcccgacccagcag

SEQ ID NO: 432495 - DNA, 74 bp, Homo sapiens
ctttcctaccatctaaaatacgaaggtttctggctggctgaaccttcacctagccccaggattacaaggaaaag

SEQ ID NO: 432496 - DNA, 51 bp, Homo sapiens
gccgcccgcccgccgagcagccatgagatccagacatttaatgtggatgca

SEQ ID NO: 432497 - DNA, 50 bp, Homo sapiens
aggcgaggtggctcctgacgctaagagcagcgggcagcaccagaatgaca

SEQ ID NO: 432498 - DNA, 82 bp, Homo sapiens
gtgcagatcaatgacatttccctgcaggtagtgacttgtcaggaggatcaatatgaaggacggcctaaacatctccctgcaa

SEQ ID NO: 432499 - DNA, 100 bp, Homo sapiens
cttcctcaaggtggggttcggggggccaccgaatcgctgtcacgccggcaggaacatcaggagagcattctgggtaataccatgcaaagtgtgattgcat

SEQ ID NO: 432500 - DNA, 83 bp, Homo sapiens
caacccgtcctctcccgagtttttcatgagtttaccagctacttccaaagacatgacgaggtcctaacagaactggaaaaggc

SEQ ID NO: 432501 - DNA, 75 bp, Homo sapiens
ggcaggtggtctgtggagctggtcaacgaccgcggggcgcagacctcacctccacccgcgacaacccagtcccct

SEQ ID NO: 432502 - DNA, 100 bp, Homo sapiens
aagaagaattagatgcccttaaaaaaaccattgatgaaactgagtatgagtacagtgggagtgaggaagaagaggaggaagtgcctgaacaggaaggaga

SEQ ID NO: 432503 - DNA, 83 bp, Homo sapiens
cttggaccccggcttctgggacgcgtcagacaatgcagatcttcgtgaagactctgactggtaagaccatcaccctcgaggtt

SEQ ID NO: 432504 - DNA, 100 bp, Homo sapiens
cgctgggctgtcggcctggaccttgcagccgcaatggtcttcaaagcttcacctttctccaaaggcagatgtgaagaacttgatgtcttatgtggtaacc

SEQ ID NO: 432505 - DNA, 100 bp, Homo sapiens
ccagaaacatttgctctggctagcagtcttttggataggtttttagctaccgtaaaggatgttgagaaagaactggagatgcagatcagcatgaggcagg

SEQ ID NO: 432506 - DNA, 90 bp, Homo sapiens
gctcgctgggagagaggtacctctccttttccctctccctttccctaaggtcctcagaatggttggaatgaccctccagctttgaacaga

SEQ ID NO: 432507 - DNA, 83 bp, Homo sapiens
cgcacatcatgcagttgcaggttcaatggctactgcttgtcctccagactcatatgattcgtcgcagaagcctaaggacacgt

SEQ ID NO: 432508 - DNA, 50 bp, Homo sapiens
ctggcggatgcggtcgtgaagatagcaaagccttctagacaagctcagtg

SEQ ID NO: 432509 - DNA, 100 bp, Homo sapiens
gaagactgtttaaaacctgttgagaaggtactgatgacatggagattaatttgacaccagtccctcagagaggtgtgctctgaacaagccgagacggggc

SEQ ID NO: 432510 - DNA, 98 bp, Homo sapiens
ctttactagagcaagagaaggagccctggatggtgaagcgagagctgacaggaagcctgttctcaggaagctgaatatggtgggcatgatcagataga

SEQ ID NO: 432511 - DNA, 83 bp, Homo sapiens
ccccgctgctaccgccggcgccggtggtgctgtcgctcttgatactcggctcaggccctgggctgcatcttgtacctgctgtg

SEQ ID NO: 432512 - DNA, 101 bp, Homo sapiens
ccggaccgagcgcctcgacctcggtctgagatgatgatgtgcctgcagatatggttgcagaagaatcaggtcctggtgcacaaaatagtccataccaactt

SEQ ID NO: 432513 - DNA, 100 bp, Homo sapiens
tgctcaatgttaagatggcccttgacattgagattgccacctacaggaagctgctggaaggcgaggagagcagagccctatgagtttgtctctctggaat

SEQ ID NO: 432514 - DNA, 98 bp, Homo sapiens
ggagagcgaggcctgagcctctgcgtctaggggctgggaaccgacgaggactctctcattgagatcatctgctccagaaccaaccaggagctgcagga

SEQ ID NO: 432515 - DNA, 100 bp, Homo sapiens
cttacaacagtgccggcgctgggccttttagcgccacagttaatgtaaccaccaagaaaacgcgagttgtagatcttatggctctgacagtgaaagtgac

SEQ ID NO: 432516 - DNA, 74 bp, Homo sapiens
cgcggcggcggcggcggtggaggagccggagcataatgacagcccacctgaggatattgaccataaggactcat

SEQ ID NO: 432517 - DNA, 114 bp, Homo sapiens
ctggctcaatcaagaaaggagaaagagagctcaaaatcggagacagagtattgcaaagccttctagacaagctcagtggaatctgaagggcccaccccatggaggaatgctggg

SEQ ID NO: 432518 - DNA, 83 bp, Homo sapiens
tgaacttccagcagccggcggacggtgtcgtgaaaactacccctaaaagccaaaatgggaaaggaaaagactcatatcaacat

SEQ ID NO: 432519 - DNA, 73 bp, Homo sapiens
caacttcgctgtggtgaagctggggcggcaccggatcaccaagacggagaaagatgtgtcatggcaatgctga

SEQ ID NO: 432520 - DNA, 78 bp, Homo sapiens
ctgcctcatcccagccatgtcatcttatctacgaaatgattcagatgggtttcagcccagcagaagcattatctttgc

SEQ ID NO: 432521 - DNA, 78 bp, Homo sapiens
ctttttggacgatgtgcggcggatgaacaagcggcagattttgagatacagagtgaaaatggggagaactgtaatcaa

SEQ ID NO: 432522 - DNA, 100 bp, Homo sapiens
ccgagcttggcgtgtgctaataaatgtgtcttctgttggcgaattctgcttggtcagaatcgtgatggcattgtgttcagcactgatgactattttcacc

SEQ ID NO: 432523 - DNA, 99 bp, Homo sapiens
cgacgacgacgaggaagaggaggtttctgaggaaaatgtttataggaggccttagctgggacactacaaagaaagatctgaaggactacttttccaaat

SEQ ID NO: 432524 - DNA, 100 bp, Homo sapiens
gcaacatcctgtcacaggccatgctctggcaaaaacagactctccaacatgtgccttctgaccatacaaatgaaacttccaacagtactgtgaaaccacc

SEQ ID NO: 432525 - DNA, 50 bp, Homo sapiens
cgcctcagcatctggtacagccgagtaccctcctctgaaatcaaaactct

SEQ ID NO: 432526 - DNA, 100 bp, Homo sapiens
ctctagctctcagcggctgcgaagtctgtaaacctggtggccaaagctgtaggtaaaacttgcctactgatcagttacacaaccaatgcatttcctggag

SEQ ID NO: 432527 - DNA, 100 bp, Homo sapiens
tactcgcgcttttcgccgtcgccgctctccatcaaacaattcctggacttcgggatgttcgttccaacgcagagaacagaaggcatctcaacatcggaca

SEQ ID NO: 432528 - DNA, 50 bp, Homo sapiens
caggcatcatccgctatgcaattgggtggaaattgcaacactaacaagag

SEQ ID NO: 432529 - DNA, 73 bp, Homo sapiens
acaaaagaaacgggccccgactggttcgagaacttgtcttggacaattgcaaatcaaatgatggaaaaattga

SEQ ID NO: 432530 - DNA, 75 bp, Homo sapiens
gaggcaagcgcagggggacggggaccagcagctgtcgccgccgctctcagatcacctcagccagttctcagacac

SEQ ID NO: 432531 - DNA, 100 bp, Homo sapiens
gaatccatgtttcttccaagaagcagggtttggacagaggagccaaaggccaaatttccactttcagcagttttatttcagctgttagcccgaagaaaga

SEQ ID NO: 432532 - DNA, 100 bp, Homo sapiens
gttcagttggcaaaccagatatatgacttgccatgaaccagagaatcagtcagagtgctccagtgaaacagccaccacccctggctccccagagcccaca

SEQ ID NO: 432533 - DNA, 90 bp, Homo sapiens
cagggatcggaagccggttggggtgtgagaggttttctcgctctaggaatggtctgccgaaaaccgaccgacccggttgattggccacca

SEQ ID NO: 432534 - DNA, 75 bp, Homo sapiens
tacgtctgtgcggctgcgtggggctcggccgcgcggactgaaggagactgaagagaaattcactgcatgtaacta

SEQ ID NO: 432535 - DNA, 83 bp, Homo sapiens
cctggaacaacgtcaagtacggaacaagatcactcaaggtgaaggataatctactaataccagcactttgaatgaaaatttgt

SEQ ID NO: 432536 - DNA, 100 bp, Homo sapiens
atcgctgtcattaaaaattaagcgtggcttttgaggaagatgtgacaactaccggagatgaacaagttgttatgggcaataagctccttgtatatattag

SEQ ID NO: 432537 - DNA, 51 bp, Homo sapiens
aactatggtggatgatatgctgcaggagagaagaccaagaggtcggagaag

SEQ ID NO: 432538 - DNA, 50 bp, Homo sapiens
ctgggctggcggccaggatggttcttagcacccctggctacatatttggg

SEQ ID NO: 432539 - DNA, 85 bp, Homo sapiens
gaccctggagcctcagttggaagcagccgatccagcctgcggagcctgtggggcagggaactactggagaccacgtgccgcctgg

SEQ ID NO: 432540 - DNA, 100 bp, Homo sapiens
tggtatacagctacatccaggagagaatgctgacagtcctgcagttctcaggggctctgtacatcgtaggagccattcacaagcagaatccaacaatggc

SEQ ID NO: 432541 - DNA, 74 bp, Homo sapiens
ctcgggggcggcggccacgccaaggacgggatcaatgtgactctaagaacaaatggatgaatgaatatccatat

SEQ ID NO: 432542 - DNA, 74 bp, Homo sapiens
cttcatcgtttgactggacagtaaagctttggacaactaaggtgaaatgtctagaagatgaacgattaagaaca

SEQ ID NO: 432543 - DNA, 91 bp, Homo sapiens
gcctgcagcgggagctggacggcgagcgcgagcggcgcgagaaagagggccctcctggacccgggagcggaccctggtggcggtgaagccc

SEQ ID NO: 432544 - DNA, 100 bp, Homo sapiens
ccatcctcgcctcagtcaaagaacagctgaggatttgtgactggaccatgaatcaaaacggcaggcatttataccccagtaccagtgaggatacattggg

SEQ ID NO: 432545 - DNA, 98 bp, Homo sapiens
ttcggctgcggaccctgccattccggaggagaccttcctgatgtaaatgataaacaaagccaagccataaatgatctcctagaagccatatatccaag

SEQ ID NO: 432546 - DNA, 100 bp, Homo sapiens
ctgcagccagggaccgctctcttctctcgccgacaggatttttttcccaggaagccatcccgtcagaggggttcaagtgatgaaagttggcaaactgcag

SEQ ID NO: 432547 - DNA, 83 bp, Homo sapiens
gccagccgcaccatgccgctcctaagcctgcacagccgcggcggcagcagcagtgagagaagctggcagggcggagatgctgg

SEQ ID NO: 432548 - DNA, 100 bp, Homo sapiens
cttttatacactcttagtgctgtccaggcatcatcatgaaaattttgtgggctatcaagatgacaatctattccaggatgaaatgagatatctacgttca

SEQ ID NO: 432549 - DNA, 90 bp, Homo sapiens
ccctcccatctgccttggacatggcaatatgggtggggggaattgtgtgttgctgagaatcaggctgaaagccgggcagcagtggagggg

SEQ ID NO: 432550 - DNA, 100 bp, Homo sapiens
gcttaataaaataaccgtccccgccagtcagaagttgaggaagataaatccgtcttgaaaaaccacgatctttctgttcgtgcaaaaatggccatcaaat

SEQ ID NO: 432551 - DNA, 98 bp, Homo sapiens
ttagactgaccagagtaataagagcaccatggcactgcaacaggcccagatgttgctgagcatgaacagcctggaggcggtgaatgcgggcgtgcagc

SEQ ID NO: 432552 - DNA, 98 bp, Homo sapiens
cgcgtggctggaagacatggccactccagtcggtgttgagcacggcgagcagtctcaggcctttagtgatgatgttaattggccttggtcctcacagc

SEQ ID NO: 432553 - DNA, 100 bp, Homo sapiens
taagtacaagcaaacttcagacccctttaaaggtactggctcctgtatcacccagctctggagttgaaagagctcttcattcctgagtctcctgtaccac

SEQ ID NO: 432554 - DNA, 87 bp, Homo sapiens
gatcttccagaaggttaaagagtggtctctcatggactctagtatgggattcctttctacctacaatacctcgcccactggccagag

SEQ ID NO: 432555 - DNA, 88 bp, Homo sapiens
gtgtgaagtcaaatgcatgccaacattccagttttttaagaagggacaaaagtgccaggccgggcacctggtgtgtaaccaatgccgc

SEQ ID NO: 432556 - DNA, 101 bp, Homo sapiens
aaaacattcaagaatgagagcgagaacacctgtcaagggaacgggctgttgaggaagaagacgctggtcccagggccgccaggttcgagccgcccggtcaa

SEQ ID NO: 432557 - DNA, 50 bp, Homo sapiens
cagctccgaaatcaccaccaaggtgtgattcccttcagtacggcggcacc

SEQ ID NO: 432558 - DNA, 98 bp, Homo sapiens
ctagatctgctgatggggagtaacaccattgtccagtctatggctgccaagacccagaggcggcttatgacccctacgcttatcccagcgactatgat

SEQ ID NO: 432559 - DNA, 98 bp, Homo sapiens
gcggatcgcgtggagtgaaggtcacgccgcggcgcggaccattgcaatttagagatgtggccatagaattctctctggaggagtggcattgcctggac

SEQ ID NO: 432560 - DNA, 80 bp, Homo sapiens
tggctgcggcgcgggagccggcgtgggcggcggcaacggggcactgacctgggtggaatatattaaaggaatctgtgaac

SEQ ID NO: 432561 - DNA, 98 bp, Homo sapiens
ggaacaatgaggcctacgcagagctcatcgtccttggtttttcttcccccagtccctcagctgctgctgctgctcaggaggtcagatctgccactgat

SEQ ID NO: 432562 - DNA, 100 bp, Homo sapiens
tggatatgacccatatgccaacccacctaactacggaaaacctgatcccaaaattattgaaaacactcgaaggacctccaatggaagtccgggcacatgg

SEQ ID NO: 432563 - DNA, 51 bp, Homo sapiens
gattctattcatgaacaatgctatttcaaaatgaggctgtggacccaggct

SEQ ID NO: 432564 - DNA, 89 bp, Homo sapiens
cgcttcctgcgtatcatccccagcatgaagagctcaggccccggggcctccagcggcaccagcggagaccacggtgagctcgtcgtccg

SEQ ID NO: 432565 - DNA, 96 bp, Homo sapiens
ccggctcctccagctaccggcccaaggccatctacctggacatcgatggacgcattcagaaggagaacatattgtgatgttcgtgcctcagagcta

SEQ ID NO: 432566 - DNA, 100 bp, Homo sapiens
cgaggctcagtgggagctggaggcctccggtgtggctgtctctgatggtgtcatcaaggtgttcaacgacatgaaggtgcgtaagtcttcaacgccagag

SEQ ID NO: 432567 - DNA, 127 bp, Homo sapiens
tgcacttgaggcccagaatgcactgcacaatattaaaactttacctgggggaccagttactctccacaagaaaattcacacaaccacagtgctcttcatagttcaaattcacattcttctaatccaa

SEQ ID NO: 432568 - DNA, 51 bp, Homo sapiens
agccgcgcacgctacagtacaaggaaaaacgtggtcttcgagaaatgcgag

SEQ ID NO: 432569 - DNA, 83 bp, Homo sapiens
atttagtgaaggatttgggcagcctcaatgggctccgggattgtggagggctgcgggaggtggaggtgactgcctgcctggtg

SEQ ID NO: 432570 - DNA, 76 bp, Homo sapiens
ctcgcctggagcatctctccctacctagccgtgcagctgcctgccaggaattacatgaacgacagccttcgcaccg

SEQ ID NO: 432571 - DNA, 50 bp, Homo sapiens
ttttgtcagattatcaggatgagggactttgcctcccgggccaaactggc

SEQ ID NO: 432572 - DNA, 78 bp, Homo sapiens
caaaaaaagaagatggctgtgtcggcaaagctctatggaaggtggcaaatggtaggatccaaagccttgaggccacca

SEQ ID NO: 432573 - DNA, 100 bp, Homo sapiens
tgcagggcctgggccgccgctgctacctgcagcgccgtgtggcacgacacaaaaatcagggaacaccagctggctgatgagcctggagaacccgctcagc

SEQ ID NO: 432574 - DNA, 100 bp, Homo sapiens
ctcatccacaatgatttctccagtgctcatcttgttctcgagttttctctgccatgttgctattgcaggacggactttcctgctctgggaccctaccaag

SEQ ID NO: 432575 - DNA, 82 bp, Homo sapiens
cctgcaccgcgcctcgcaaaatgaaggatttgggggcagagcacttggcaggtcatgaaggggtccaacttctcgggttgtt

SEQ ID NO: 432576 - DNA, 51 bp, Homo sapiens
tggacccctactattgcaacaagaccattcctcaagaattttgtatccaag

SEQ ID NO: 432577 - DNA, 50 bp, Homo sapiens
caggagtcctccacttgccactgggacagtcattttgtttactcattcag

SEQ ID NO: 432578 - DNA, 100 bp, Homo sapiens
cggaagaggcgtctgtgtcgcagcttggtctcagaggagcatcgctgggacaattggcgggcaacgacctttcttttatccacccaaaggccttgtctgg

SEQ ID NO: 432579 - DNA, 101 bp, Homo sapiens
tcggcgggcgcggacgcgcagcatggcggtggaggacgaggggctccgggtcttccagagcgtgaagatcaagatcgggaaatcctcattgacgattcaat

SEQ ID NO: 432580 - DNA, 74 bp, Homo sapiens
cccaccctcggtttagtctagaatactctgcgaatcagctttttggccctagagtgcctggaagagctgggatg

SEQ ID NO: 432581 - DNA, 86 bp, Homo sapiens
ctctacctgagaaatggtcgcttgcccctagtctagacacgttaatggccagccaagaccccttgaatcaagtcaggtgaaatatc

SEQ ID NO: 432582 - DNA, 102 bp, Homo sapiens
ggaggccgaggcgggcggatcacgaggcagaagattttcgcaagctctggaaaactccacctcgagagaaagcaggcttccttcaccacgtcaagaagtcgg

SEQ ID NO: 432583 - DNA, 75 bp, Homo sapiens
aaattggagaaaagcattgatgacttagaagcttggatttacactgggcaacgtggttggaatgtatctggctca

SEQ ID NO: 432584 - DNA, 50 bp, Homo sapiens
ggaaactcgactgtgtgacaactgtgagctgatccagtttattacaactg

SEQ ID NO: 432585 - DNA, 75 bp, Homo sapiens
aaaaactcatcgaggaggtgaaggttctggatgaagcaacattaaaggtcctggatgaccccaatgaggaccatc

SEQ ID NO: 432586 - DNA, 99 bp, Homo sapiens
cagtggaagatgaggacagcatggatgggctggagacaacagaaacagaaacgattgtggaaacagctagtgtcagcagtgggatacctgcgcttgaag

SEQ ID NO: 432587 - DNA, 100 bp, Homo sapiens
aatatgtggctttggtggatggggtattcttgaaccaggtcatgctccaaatctccataatgggagaagtaaagaacaaagacttaaggaacagcttggc

SEQ ID NO: 432588 - DNA, 90 bp, Homo sapiens
aaagaaagaggatggagagggcaacgtttggattgcaaagtcatcagccggtgccaaagatgctgctgcagattgctgatgattttatcg

SEQ ID NO: 432589 - DNA, 100 bp, Homo sapiens
tcttgctcggccgatgaagtgcagaggtttttttctgaacatgggcctggaattgatatattcacacctggtaaacctggagaatatgacttggaaggtg

SEQ ID NO: 432590 - DNA, 100 bp, Homo sapiens
tgtaaaaggaaaaatgcaatcatattccgtgaatcatttgctgatgtacttcctgaagcagctgctctagtgaatgaggagaaggaggaagtgaccatgg

SEQ ID NO: 432591 - DNA, 82 bp, Homo sapiens
aaaaactggagagcttcatcaaaaatagtgatagctttgataattaccggtattgtaagaacaagccgtacccaaagtctcg

SEQ ID NO: 432592 - DNA, 126 bp, Homo sapiens
aaaaacagatcttgtaccaccacttccggtgacccgttcttcggatgctcagggttctggggatgctacagttcatcagtccagtcacattatctcaatcacggcctccctatctcttgaacatct

SEQ ID NO: 432593 - DNA, 99 bp, Homo sapiens
cccacagagaaagtcaaggctgtggataccacgaaagtgagtgagaaggttggaggagctgaaggaaccaagctagatgatgacttcaaagagatggaa

SEQ ID NO: 432594 - DNA, 100 bp, Homo sapiens
aagaagatgatgctccaagaacaatagcttgccctcataaaaaaatgtatggagatctagatgtcttattcctgacagatgaatacgacacagttctggc

SEQ ID NO: 432595 - DNA, 50 bp, Homo sapiens
gaagaactactgaattaactgttacaggagagattaaacagattctagaa

SEQ ID NO: 432596 - DNA, 96 bp, Homo sapiens
ccagggtaggacggactgttcggatgaccagtgtcccagtgaaggaacgagtgaaggtgtctcagaactggagactggggcgctgccgagagggga

SEQ ID NO: 432597 - DNA, 100 bp, Homo sapiens
ggccggcagctggcgctggggatccctgctcttcgctctcttcctggctgcgtccctagatcttgagcagcaggcagagcagctgaatgccaagattgag

SEQ ID NO: 432598 - DNA, 80 bp, Homo sapiens
cgttccatctgtggaaggacctaccaaccaggatcaaaatacttgctggatggtggactcagagaccaataaaaataaac

SEQ ID NO: 432599 - DNA, 83 bp, Homo sapiens
cggcccactccgacgtgtgctccgcccagggggtgcgaggataccccacgtgaatgaaaactttgccattgatttgatagcag

SEQ ID NO: 432600 - DNA, 95 bp, Homo sapiens
agatggatgtagagaaatggcgtgtgaagaggtactgctagttgaacagctcttccgcaaggagttccaaccatttttgaagaaatggtatcgtg

SEQ ID NO: 432601 - DNA, 83 bp, Homo sapiens
gctcacactgttggtgtaaggattatggattggatatgtctacttctggatgcaaattttactgttgttgtaatgatgccaga

SEQ ID NO: 432602 - DNA, 100 bp, Homo sapiens
gataaagactacaggagaattcggtttgtaggtcgtcagaaagagaggttgacggatatattcagacgttacgacacggatcaggacggctggattcagg

SEQ ID NO: 432603 - DNA, 82 bp, Homo sapiens
gatagcatcacctgtctcacgtgccaggggacaggctacattccaacagagcccaaatcttgtgacaaaactcacacatgcc

SEQ ID NO: 432604 - DNA, 100 bp, Homo sapiens
aactgatcaagcttgcctcaagtgaaccccgaatgcatctaggtaccaatggagccaactgtggtggagctacagagacttctgaagtggagagtctgcg

SEQ ID NO: 432605 - DNA, 100 bp, Homo sapiens
ccgaggaggaggcctgcggcgtgtggctggacgcggcggcgctgaagaggcggaaagtgcaggtcaaaggtcgtgataaacatatcaataatttgaaaaa

SEQ ID NO: 432606 - DNA, 100 bp, Homo sapiens
cctccagctccctgaacacggcagcaaggacatcggaagtatcgagaaccttccctgcgaacttcagaggaacttccagctgatgcgagagctggaccag

SEQ ID NO: 432607 - DNA, 100 bp, Homo sapiens
gccggagtctctatactcactcgtatgaggtaccaggtactccaaagattcaggtttactcacgtcatccagcagagaatggaaagtcaaatttcctgaa

SEQ ID NO: 432608 - DNA, 75 bp, Homo sapiens
agagacacgctgggccgaccccagagcggcgctggacaggaccccgtggtttaatggatggggctttaacctacc

SEQ ID NO: 432609 - DNA, 100 bp, Homo sapiens
ccgcgtcccgctcgctgggagagaggtacctctccttttccctctccctttccctaagcagggagaaggttttaaggtgaaaacgaagaaagaaatccgg

SEQ ID NO: 432610 - DNA, 99 bp, Homo sapiens
taaatacttgctttactggaaagacccagaatatgccaagtatctaaaataagccaatggacacgtcagtgttatctgaagaaggaggagagccttttc

SEQ ID NO: 432611 - DNA, 90 bp, Homo sapiens
ctgccgccggccggcgcgtcgtccccacaggttaatttggagtggcccctggagtcagtttcctacaccatccgaggccccacccagcac

SEQ ID NO: 432612 - DNA, 100 bp, Homo sapiens
agacagccagcatttccatcgcaggtatctgccgctgattatttcagtcgctccaatcgtaggggaagtgttgtctctgaggtggatgatatcagtatcc

SEQ ID NO: 432613 - DNA, 83 bp, Homo sapiens
gcgcggtccctgtattggtctcctgctcctagagataacgaaggaggcccaacttcattcaataaggagcctgacggatttat

SEQ ID NO: 432614 - DNA, 100 bp, Homo sapiens
aacttcacggagtcccttcttcgtatggcagctgatgatgtagaagaatcaattctgtttatgggaagagtgacaaatcctgacacccaggagataaaag

SEQ ID NO: 432615 - DNA, 100 bp, Homo sapiens
tcagtcttcccgcgtccgccgattcctcctccttggtcgccgcgtccttggctggcgtgagggtgaggacaaaatcttcttaatcaacaagcttcactcc

SEQ ID NO: 432616 - DNA, 74 bp, Homo sapiens
cttcctccctgtgtactttccatttgccttcctggatgtcatttgtcagagtgaaccgctgtggtccccgagtt

SEQ ID NO: 432617 - DNA, 51 bp, Homo sapiens
tcctgagaatagtggttcttaactctatttcagaagaaagtggtagcttcc

SEQ ID NO: 432618 - DNA, 82 bp, Homo sapiens
ctctttgccgtacccaccggagcctggcgcagcctccctctattaccaggatgatctgtctgctgtgcgtccggaccgcgtc

SEQ ID NO: 432619 - DNA, 82 bp, Homo sapiens
atgagcgacgtggctattgtgaaggagggttggctgcacaaacgagatcattgagaagcagccaggccacattcggagcagg

SEQ ID NO: 432620 - DNA, 83 bp, Homo sapiens
tgaacaacctgaacgtcaccgaggagaagtaccaggaggcgttggccaaggccctactgccaataaagggaaaataagagatg

SEQ ID NO: 432621 - DNA, 50 bp, Homo sapiens
ccagcctggaagtgttgcagagtcatatttgatcagaaattggatgaacc

SEQ ID NO: 432622 - DNA, 100 bp, Homo sapiens
ctatccaaatgcgattagttgatgtggcctgcaagggtaacccttctgttatttaaagatgtaaaaaatgcgggagacttgagaagaaaggccatggaag

SEQ ID NO: 432623 - DNA, 83 bp, Homo sapiens
cccggcagcagcccgacgcaaaccaaggatctggggatcttcgcactatcccaagctttctgaaacaaagactcattttgaag

SEQ ID NO: 432624 - DNA, 101 bp, Homo sapiens
ccgggacgcggagcccggagctggggcgacgaggcgattgcgggggcctgggctaggctgaccggttccctgatgtgttacctgcttctgctactgatcca

SEQ ID NO: 432625 - DNA, 90 bp, Homo sapiens
tgaagagcgacaagccgctggcagccgcggatctcaccgccgctcaggggtgtttctgtggcctgggactggttagcaccaacaagtcct

SEQ ID NO: 432626 - DNA, 75 bp, Homo sapiens
cgacatctagccctgaatctgcagtgtagagactgaagttggtgattacatgttctgctttgacaatacattcag

SEQ ID NO: 432627 - DNA, 74 bp, Homo sapiens
ttagatagcttcatgcaacatgatgttcaggagctttgtcgagtggttgataggtatatcgagaacaggtacgt

SEQ ID NO: 432628 - DNA, 74 bp, Homo sapiens
cggcccggacgcgcccgcgcccccgcggctggagggtggtgctggagaatctggtaaaagcaccattgtgaagc

SEQ ID NO: 432629 - DNA, 100 bp, Homo sapiens
gcaagaactttgctgctctacttgaggaacatgacatttttgttccagaggatgatgatgatgatgactaacagctctatgttctatgatgaggatgggg

SEQ ID NO: 432630 - DNA, 75 bp, Homo sapiens
tgaagtgtggcatccaaaatcagaatccaaaaggtaattctggcacttggagactatatgggagccacttgtcat

SEQ ID NO: 432631 - DNA, 75 bp, Homo sapiens
caggaggcctctgggtgaaggcagaggctaacatgggactcaagtaggacgttttgctcctcaattttctggcta

SEQ ID NO: 432632 - DNA, 75 bp, Homo sapiens
ctccacagaaacccggactgagaggcagcgagagggttcatgcatgggagatctcagaccagttgttacagatcc

SEQ ID NO: 432633 - DNA, 136 bp, Homo sapiens
aatgatgtccacatatttgacacaaagacacagacttggtttcaaccagaaattaaagtgtccttgctggtcatgacaaccgtgtgagctgcttaggtgtaactgatgatggcatggctgtggcaacaggctcttg

SEQ ID NO: 432634 - DNA, 82 bp, Homo sapiens
ctgaaccggggctggcgggaagaggtgccgacgccaccgccgagcccatgatcctggaacagtacgtggtggtgtccaacta

SEQ ID NO: 432635 - DNA, 80 bp, Homo sapiens
cacaccagcgcccgcaggatgcccagacaatgcagatcttcgtgaagactctgactggtaagaccatcaccctcgaggtt

SEQ ID NO: 432636 - DNA, 75 bp, Homo sapiens
gaaggaggggaaaatatcagtgcttcaccattaactagtaaagcagtacaagagtttgtgaagtgtggatatgca

SEQ ID NO: 432637 - DNA, 51 bp, Homo sapiens
gggatggcagctgctgatttgtcccatggacgagcctgtggagtgggagac

SEQ ID NO: 432638 - DNA, 100 bp, Homo sapiens
atggaggccgtggcgacggcgacggcggcgaaggaacccgataagggattcttctcatcgcagtgctccaggcagccactaccaatcgattggagttagc

SEQ ID NO: 432639 - DNA, 100 bp, Homo sapiens
caccttatattcctgatgtgagcagtccctctgacacatccaacttcgacgtggatgacgacgtgctgagaaacacgagtattgggaaagggtcgttgtg

SEQ ID NO: 432640 - DNA, 75 bp, Homo sapiens
aaacaaggcttccagtgccaagttctggagagtcttggcttctgggaggaagtcagagggattatctcaggatca

SEQ ID NO: 432641 - DNA, 75 bp, Homo sapiens
gacttccgtttgcagaacagcacactaatggccgagttcagcaaggtgccaaatcaatcattcaggagtttccag

SEQ ID NO: 432642 - DNA, 95 bp, Homo sapiens
tgaagatgttgatggagaagctctaagtacactcgtcttgaatagcgggacctggacttcaccatcgacctggacttcaagggccagctgtgcga

SEQ ID NO: 432643 - DNA, 87 bp, Homo sapiens
caggcggagcagggccttggaccccgcggcgcccctcggcctcggagcaacgagcgcagcgccggatgtgatggagctgcttgaaga

SEQ ID NO: 432644 - DNA, 95 bp, Homo sapiens
gaggaaccacacgctgatcatggcttgaagccacagtgcatggccagaaccagccagacctttggagttcaagaactcgagaggtgggtgaaaac

SEQ ID NO: 432645 - DNA, 100 bp, Homo sapiens
aggtgccaatccagcagtcattacttggtatttattacagtatcaggagccaataccttgtgagcagttggttacagcgctgtgtgatatcaaacaagct

SEQ ID NO: 432646 - DNA, 98 bp, Homo sapiens
ggaagccatcgcctggccccggctctctggaccttgtctcgctcgggagcggaaacagcggcagccagagggacatgagagatggctttagaagaaaa

SEQ ID NO: 432647 - DNA, 83 bp, Homo sapiens
tctcaatctctggaaaaacttcttgccaaccaaagaatttatgttgatgcagttaactccttgggccaaacagcactttttgt

SEQ ID NO: 432648 - DNA, 51 bp, Homo sapiens
ctggaaacaactgggcatatggaaagaagatgctgatatgctacaacacgg

SEQ ID NO: 432649 - DNA, 98 bp, Homo sapiens
ccggtccccatcaccggcacacattgtcgtgtgagatcaaccatgagttccgttgcagttttgacccaagagagttttgctgaacaccgaagtgggct

SEQ ID NO: 432650 - DNA, 75 bp, Homo sapiens
gcgacgcgcagtccacgcaggagatccatgagaaggttgtgaccgagattcccgacgagagagactgaggggaag

SEQ ID NO: 432651 - DNA, 100 bp, Homo sapiens
gcctgcccagacggctcacctgtgcgggatggaacaaaagctgataggaagatgtcttcaggaaatgctaaaattgggcaccctgcccccaacttcaaag

SEQ ID NO: 432652 - DNA, 51 bp, Homo sapiens
gtcctcgggaagaagtttcagactacaagggagcccagattctacctctcc

SEQ ID NO: 432653 - DNA, 98 bp, Homo sapiens
cattcagatgtggtggaatatgccaaggaaaaactggagagcttcatcaaaaatagtgatagctttgataagtgtgtatgtaatatagattgcagtgg

SEQ ID NO: 432654 - DNA, 100 bp, Homo sapiens
agaaacagtgtgtaccattccgacgttacaatggtggagttggcaggtgtgcgcaggtgtgccacgtcatcaccgaggtgaaatctggaaatttctagct

SEQ ID NO: 432655 - DNA, 83 bp, Homo sapiens
tggtgttgctgctgtactccttctccgccgagagggtgacctctctgggcaaggactggcatcggccctgcctgaagtgcgag

SEQ ID NO: 432656 - DNA, 75 bp, Homo sapiens
tgctctgtgaatggtgttcagatcgtggaggccacacatctaaatcaaggagctgactaaggctttggaacagaa

SEQ ID NO: 432657 - DNA, 50 bp, Homo sapiens
tcccagttgtatggctatgcacttcttggaggtgctcccctcatctggag

SEQ ID NO: 432658 - DNA, 76 bp, Homo sapiens
taaccacactatttatatcaacaacctcaatgagaagatcaagaaggatgttttttgctccactcaagcctgttag

SEQ ID NO: 432659 - DNA, 100 bp, Homo sapiens
gcccaacctgggattcaaatgaaagtgaaaatgttagaagaactcgtgagccggattgatgcatcaaacacttggcttgttccagaaactaaaggagcta

SEQ ID NO: 432660 - DNA, 100 bp, Homo sapiens
ctcagaccgcaccttcaacgccagttggtggaatatgagagaaccaagttccaggaaattttggaagaaactccaagaagtggtcctgtactgcttagag

SEQ ID NO: 432661 - DNA, 83 bp, Homo sapiens
acactatcgtgatgctgacggaggtgcaggagagagagcaggaactgtggctgcaccatctgtcttcatcttcccgccatctg

SEQ ID NO: 432662 - DNA, 75 bp, Homo sapiens
cgaggctgctggaatcgactggggcatcttcccggaatcagattcaaaggtctgggaggggctgaacgtggtgaa

SEQ ID NO: 432663 - DNA, 51 bp, Homo sapiens
gcaaaaatcaatcggactctggaaacggcgatgaatctgaggacacagata

SEQ ID NO: 432664 - DNA, 85 bp, Homo sapiens
taaaataattgggcagaagagaagcagtgaaggagtgcagaggcatcacctgaaagccgtctttaaatcctgagtatgagagaga

SEQ ID NO: 432665 - DNA, 83 bp, Homo sapiens
acgaaagtgaacaggagccgctcttaggcgacacacctggaagcaggttcggaacctcacttacatggtgacccgcagggaaa

SEQ ID NO: 432666 - DNA, 90 bp, Homo sapiens
catgtttatcacactccttggatgatttccgaagcaccactgccggaactgtggccacatcttctgcaacacctgctccagcaacgagct

SEQ ID NO: 432667 - DNA, 80 bp, Homo sapiens
gaactgatagcttatggttctccattgtgatgaaagcacatggtacaggtgtcagaaactatttaaaagaagcactggtg

SEQ ID NO: 432668 - DNA, 50 bp, Homo sapiens
ctggctggcttcagtggaccagcagtgtcatcattaggctgtctttgtgc

SEQ ID NO: 432669 - DNA, 100 bp, Homo sapiens
agtcaaggttgcccccaggcggtccttcctgggttttgaggttttgctgaagatattcctgaagaatcatcccaggtgccacactaaaaaaatgatccag

SEQ ID NO: 432670 - DNA, 50 bp, Homo sapiens
ctcacactcatgaggagccggaaggcgagaaggttttgggattcgaattc

SEQ ID NO: 432671 - DNA, 127 bp, Homo sapiens
aagatgtgtcgaagcagcaactcgatggccttcctggcacacattcgcactcacacaggtcacaagctacctaactaagaagtttgctgaactacgcagccccaatgagttcaaggtgtacatgggc

SEQ ID NO: 432672 - DNA, 98 bp, Homo sapiens
ggacgccgggcgcggcggcgcgcggagaagtgcggcggagcggcgcctgcattagcaggaatggaagttggatacactttgtgacttgtacgagacac

SEQ ID NO: 432673 - DNA, 50 bp, Homo sapiens
caataccttagttgacccttgttgtcttctcagaaacaaccagctgagaa

SEQ ID NO: 432674 - DNA, 98 bp, Homo sapiens
ctggggactgcgggcggcgctgtgtccgtcgccatgacagattcacaatgacatcctttcaagaagtcccattgcagacttccaactttgcccatgtc

SEQ ID NO: 432675 - DNA, 73 bp, Homo sapiens
tcgccgctggcgtcaggactattttcacgttttaatgccgagagacggaaatggagagctggatttctccact

SEQ ID NO: 432676 - DNA, 82 bp, Homo sapiens
gcggaccatgataatttccccagagcgtcttgatccttttgcagatggttctctacttaaaagacaatgactactgatgaag

SEQ ID NO: 432677 - DNA, 75 bp, Homo sapiens
gagaccagcctgggcaacatgggtaagaaggtggatggctctgtaaatgcctatgccataaatgtctctcagaag

SEQ ID NO: 432678 - DNA, 82 bp, Homo sapiens
gtccgcaccggcaccatcctgctcggcgtctggtatctggttcatcatgcctagtggcgtataagaagaccccgccaccggt

SEQ ID NO: 432679 - DNA, 82 bp, Homo sapiens
ggagatgaagaagaagattaacctggagttaaggaacagatccccggaggagaaaatgatgcatcctgttgccagcagtaat

SEQ ID NO: 432680 - DNA, 113 bp, Homo sapiens
agattaacaagtggtggaataacctaagtgatggccagcggactgtgacaggaggagaccaaggcacaggacattctgggagcagtgacccttctgctggagggagtgatggc

SEQ ID NO: 432681 - DNA, 90 bp, Homo sapiens
aaagatgagatttacctgtgagatgtttcatcccaacatatgtgccaagtgctctctgctgccccagcagagccagtatcctgacaggaa

SEQ ID NO: 432682 - DNA, 75 bp, Homo sapiens
tggaaacaccctcctggctgttcgatacttatctcagacagaggagaaacttcgtggagcagtgctacacgcact

SEQ ID NO: 432683 - DNA, 90 bp, Homo sapiens
ggctcccgcaccatggaggaggacgacagctacggaaggagtcaagactgagaacaacgatcatattaatttgaaggtggcggggcagga

SEQ ID NO: 432684 - DNA, 82 bp, Homo sapiens
ctcttcttcggcgccctccaggcctgttggaggttttaaaatcaaagatgggaaaatcggagaaaattgcccttccccatgg

SEQ ID NO: 432685 - DNA, 51 bp, Homo sapiens
cttgtccacggggcagatccgattttactaaaagatgtaactgaactgcag

SEQ ID NO: 432686 - DNA, 82 bp, Homo sapiens
gcaaaggcaagaaggcaacgacgttccatctgtggaaggacctaccaaccagctgccactgcagagccccgccatggaagac

SEQ ID NO: 432687 - DNA, 74 bp, Homo sapiens
cagtctgttctggttcacagtcatcaccctcagctttggctactacacaaatcctcactatggatgggctcatt

SEQ ID NO: 432688 - DNA, 100 bp, Homo sapiens
atgaggaaagctgtgaaagttctcaagaggctattttagcctgcaaaaccccaaagaagactgtttcctccagattagagtggaagaaactgggtcggag

SEQ ID NO: 432689 - DNA, 100 bp, Homo sapiens
agcgcacgtttaaacatctcaagactgcttttcaggaagccttggacgctgcaggtgataaacttgtagtagttgacttctcagccacgtggtgtgggcc

SEQ ID NO: 432690 - DNA, 83 bp, Homo sapiens
cgcagaagcttattaaagttaagtgggccgaattcattttgttttcctgcctcctgctggtgatctgcctgatcttctccatc

SEQ ID NO: 432691 - DNA, 97 bp, Homo sapiens
ctcaagcacacccaatggacagcatgcctcaccaagtcacatgacaagcagtgatccggacggacacgttcaagcacctgcggcacctggagattct

SEQ ID NO: 432692 - DNA, 90 bp, Homo sapiens
ggccggcgggcggggcgcagagccaggcagcgcaggtaatttgtgaaagaagcaaaaataaatctgtggaactgaaggagcggatcagag

SEQ ID NO: 432693 - DNA, 74 bp, Homo sapiens
cgcagtctccccaggtccgcccagcagccgcgcttcagccaggttgatatccctgaaagtacttaatagcatcg

SEQ ID NO: 432694 - DNA, 100 bp, Homo sapiens
tgcgggcagagcactgcgccgtttgggaacgcaactttgaggagacagtgcggtgggcagcggaggaggaaatggcaggtcctaatcaactctgcattcg

SEQ ID NO: 432695 - DNA, 98 bp, Homo sapiens
atgcacaggaccttcaacaagaagctaatgaattgagcagagaaatggtcaatgcatggtttgctgagagagttcacaccatccctgtgtgcaaggaa

SEQ ID NO: 432696 - DNA, 101 bp, Homo sapiens
ggccatggtcactgctgactccaagtactgctacggcccccaaggcaggacaatctctatgggaagcagaaggcaaggaccccggtcattttaggtagaaa

SEQ ID NO: 432697 - DNA, 96 bp, Homo sapiens
cttggccccggcaaactccccatccagctccagctccgggaggaagcctggcgggggtttgctgccttggacgaccccctggccgggcttctggac

SEQ ID NO: 432698 - DNA, 83 bp, Homo sapiens
ggggctcggccgcgcggactgaaggagactgaaggacggggaggtttactgcatcgacgcgcggttctacgggaacgtcagcc

SEQ ID NO: 432699 - DNA, 88 bp, Homo sapiens
aaccaggaggcgttggtgctcacggccaaggccacgaaaaatatggtgttatccctaagaaatgcttccctgaatcttatacaacaga

SEQ ID NO: 432700 - DNA, 99 bp, Homo sapiens
tgagctgagccgggttccgcccggggctgggatcccatcaccctccacggccgtccgtccaggcgaggattaaatccaccacacagggtgaaatctatc

SEQ ID NO: 432701 - DNA, 50 bp, Homo sapiens
aggctggtctcgaactcccaacctcaggtgatccgcctgcctcggcctcc

SEQ ID NO: 432702 - DNA, 100 bp, Homo sapiens
taaggattccaagtaactcttatttgattatggattggatatgtctacttctggatgcaaattttactgttgttgtaatgatgccagaagcaaagaggct

SEQ ID NO: 432703 - DNA, 90 bp, Homo sapiens
ttagatcttgtcattcagtggtgtcgaatgctcaagtgcaatgtcaagagctttctggctctcttatttagtgcaacttttcggaagaag

SEQ ID NO: 432704 - DNA, 80 bp, Homo sapiens
gggttattcgagtgaccgagaccgcggccgggaccgaggctccatgtccatccgctggccgggccgccccctcggaagcc

SEQ ID NO: 432705 - DNA, 100 bp, Homo sapiens
agctctcctaatacggttgaccagtgaggcatcaagcatgatggaaccatgtgtgatacctgccgccagcaaccaatcattggcattcgatggaagtgtg

SEQ ID NO: 432706 - DNA, 83 bp, Homo sapiens
cccaggtgtaagcgcagaaagcaggcgaacccgcggcgcaataacgtgcagggctcgcggcctggcaagaatgtacagctgac

SEQ ID NO: 432707 - DNA, 100 bp, Homo sapiens
atcagccacagtctctgcatgtttccaagagcaacaggaaatgaacacattgcaggaaagtggagaatgaggacatgaataaagaccagatcttgctgga

SEQ ID NO: 432708 - DNA, 90 bp, Homo sapiens
cctctctggggtcctggcggccgaccgagaacgcagcatccacggaagaaggtagataatgactataatgcccttcgagaaagactcagc

SEQ ID NO: 432709 - DNA, 100 bp, Homo sapiens
ttcagtacaattaaaaagggcttttgtaagtgtgctggaattgatgttcgtctgtgtgatgttggtgaggccatccaagaagttatggagtcctatgaag

SEQ ID NO: 432710 - DNA, 95 bp, Homo sapiens
gcgtcgagaagggcgactactacgaggcgcaccagatgtaccggaccctgttcttcagccctacacagttttccagtaacttttccctgatgctg

SEQ ID NO: 432711 - DNA, 100 bp, Homo sapiens
acatactcaccatacctcccctgtccagaaaagctgccttatatgcgcatcaagcatgatggaaccatgtgtgatacctgccgccagcaaccaatcattg

SEQ ID NO: 432712 - DNA, 80 bp, Homo sapiens
gtccttgtgcaagttctcctgaggcgctgactgtcgccatccgcagggactttgaacatgtcggggatcgccctcagcag

SEQ ID NO: 432713 - DNA, 98 bp, Homo sapiens
tccgacagccaggcccgggagaaatcaagtcccagcagagcgaggtgacccgaatcctggatgggaagcgcatccaataccagctagtggacatctcc

SEQ ID NO: 432714 - DNA, 100 bp, Homo sapiens
aaacagaggatgacacgcagatcccttcctggtgaacaagaacaggaggtggctggatgaatacgttgccagcttgcatctgccatcatttgatgcccac

SEQ ID NO: 432715 - DNA, 89 bp, Homo sapiens
aggaggtgaccctgaacctctacgacacggccggtgttacagcacatgaaggccgtgcaggcagatcaggagcgggagaggcagcggcg

SEQ ID NO: 432716 - DNA, 100 bp, Homo sapiens
tgagaatgcagccgtgtgacagtaactgaacattggtctaaagtctttccaaaaggtcaaggttcacaagcatgattccacctttccactgatagactca

SEQ ID NO: 432717 - DNA, 100 bp, Homo sapiens
gaatcaaagctgatagagaagattcttctcaacatttctgcagactgcctcaacagagtgataggtggccagcatcgaaatgttcagccttttagtgatg

SEQ ID NO: 432718 - DNA, 76 bp, Homo sapiens
tgactgaaggggacatcatctgtgtgttctcacagactatttaagaaacaactgaggcatcagaccaactttcccc

SEQ ID NO: 432719 - DNA, 83 bp, Homo sapiens
cggcgagagtgggcgagaacgtccactgcgggccggcgaaagctggtgttgacttcaaaatcaaaactgtagagctaagagga

SEQ ID NO: 432720 - DNA, 82 bp, Homo sapiens
ctgtatcagatgcggctgctgtcggaggcttttgtcatcaaaggggccacctacagatgctcctgcagtggacacagcagaa

SEQ ID NO: 432721 - DNA, 50 bp, Homo sapiens
gacgcgctggtgcacttcgcgctggttcctaaatatttgtcacagcaatg

SEQ ID NO: 432722 - DNA, 85 bp, Homo sapiens
gttattgaatatcaagaggaggagttgttggtggccaagcaagaggagttcttcaacctgtcccactgccaactggtgaccctca

SEQ ID NO: 432723 - DNA, 88 bp, Homo sapiens
cccgcctccgcgtcacagctgcaaattttattcagaccatgtctgcaaaggagaagtcgaagtttgaagatatggcaaaaagtgacaa

SEQ ID NO: 432724 - DNA, 90 bp, Homo sapiens
ccgcccctcctggaagaaggaagaggaaacccttttccaaagagaaatgaagaagaaaactgtatgtaccctaaatatgggagataagaa

SEQ ID NO: 432725 - DNA, 75 bp, Homo sapiens
ctttgctcttccatccgcctttgatcgtcttcctcttcagccatccagttcaggaaccttttcagctggctactg

SEQ ID NO: 432726 - DNA, 100 bp, Homo sapiens
cccgcccccccagtctcggagatctcagaggcaccgactgggagcaggggaaatgctgtctgtagctgagcacttcctggagcagcagatgcacccaaca

SEQ ID NO: 432727 - DNA, 90 bp, Homo sapiens
cggcttcctagtgagtcggcggctgatttagaaggaggttcaggctacggtgagccgaagctttcctgctgccccttaatcaggaagata

SEQ ID NO: 432728 - DNA, 90 bp, Homo sapiens
ggaccgcctgtcctcagacccctccgcagcgactgtggcggccgcagggtgagatctcagaccccttccgcttcaccaccttctacatcc

SEQ ID NO: 432729 - DNA, 100 bp, Homo sapiens
gaagacgagactttcaaagatggaatcacaaacggcgcacattggtatgatgtggaagaaatggctgcaagcaactgacctcactagagaagtgtaccag

SEQ ID NO: 432730 - DNA, 100 bp, Homo sapiens
tttggctgaggagttttcaatcccagtcactacaggaaaagatatcttcattaaagtgcaacagcacactgagagcaacacaccaccacagcagttaatt

SEQ ID NO: 432731 - DNA, 96 bp, Homo sapiens
gtaaagttggaagttaagggagacaaagttgaaaacaaagtgctgagcctacaaatacatttggcaagtacccaagggcccattgaggtttactta

SEQ ID NO: 432732 - DNA, 100 bp, Homo sapiens
cccaatcaggacagagcagcatgattccaggtggctcaatggaattatccagactgccttgccactagatgaatggaagacaatgatttgaactaagggc

SEQ ID NO: 432733 - DNA, 80 bp, Homo sapiens
acggagagaacacgagcccatcaggggtcaccagtcgttggcacaccaagaagctgccccgcaagacccaccgaggcctg

SEQ ID NO: 432734 - DNA, 100 bp, Homo sapiens
aaacaagagagacatttctggctctgaaggcgaacgcttcgctggccatttaggagctctgctcaaagccagacgatttatcagcaagactgttgaacgc

SEQ ID NO: 432735 - DNA, 89 bp, Homo sapiens
agcggtccctgcgcttgctgctgggaagtggatgaagaagatgactttatgtgtaagaaggcggcctctaaatcaaaagagaatggaag

SEQ ID NO: 432736 - DNA, 75 bp, Homo sapiens
ataccgaagcgggctgtgtgccccttctccacccagagggcacattcagaaaatgaaggtaccgctttaccatcg

SEQ ID NO: 432737 - DNA, 83 bp, Homo sapiens
acgctatgtgctgccccgggaattactgcaaaaatggaatcatattgacaggtcatgaaaatgagaccaaaagatctctggaa

SEQ ID NO: 432738 - DNA, 75 bp, Homo sapiens
accacgacatgtcaatctatctagccttgttcctagcctttgtccactgaagatcctggtgtcgccatgggccgc

SEQ ID NO: 432739 - DNA, 75 bp, Homo sapiens
cttgggaggattaagtgaggggacatgaggaacgaatgcaggaatttgggaactgagctgtgcaagtgctgaaga

SEQ ID NO: 432740 - DNA, 140 bp, Homo sapiens
cgggatcgtgaccgagaccgtgaccgagagcgtgaccgagagcgcgaatatcgtcatcgttagaaggaccgagatctcactcagcagacagcagcagcccgggagcctgagctcaggaggaactcttacctggaaattgg

SEQ ID NO: 432741 - DNA, 83 bp, Homo sapiens
ctcgcaacaagatcccctatgagagtcccatcttcagcagagcaaaatgatgcttcaacacccaggccaggtctctgcctcgg

SEQ ID NO: 432742 - DNA, 101 bp, Homo sapiens
acaatcggggcaccgagctcgcacgtcagctaactgttcagatgatgcaaaatcctcagattcttgcagcccttcaagaaagacttgatggtctggtagaa

SEQ ID NO: 432743 - DNA, 83 bp, Homo sapiens
gcggaagccttcgtctcccagattgcaggcagaagtcaattcatctggaaagactatctctgagtcagacttaaaccactctt

SEQ ID NO: 432744 - DNA, 100 bp, Homo sapiens
ttgggcctgcggctctctacgtccctgcggagcagccggtcgtaatctgaaggagtggctgagggagcaattttgtgatcatccgctggagcactgtgag

SEQ ID NO: 432745 - DNA, 75 bp, Homo sapiens
cgcgtctctctgctgcggcgcggggaccgctgtgctctcgaggctgggaggcggcagaatgcagccagaggaggg

SEQ ID NO: 432746 - DNA, 90 bp, Homo sapiens
gcgaggtagaacagaatttgaaaaggagcccaggacagggattttatattggaagacatggatcttgctgccaacgagatcagcatttat

SEQ ID NO: 432747 - DNA, 75 bp, Homo sapiens
ttgatagatgtcataacagtatttggagaactcactgatgaaaacaaaagtgcctttttatgtggagtcatgaag

SEQ ID NO: 432748 - DNA, 83 bp, Homo sapiens
ggccggaccgagcgcctcgacctcggtctgaggtacggtggttgaggagagcaatggttctgatgagatggagaattcagatg

SEQ ID NO: 432749 - DNA, 60 bp, Homo sapiens
tcccggtgcacacagttcctctttctgaagatcagggtgtgaaggaagccggtgagaagc

SEQ ID NO: 432750 - DNA, 73 bp, Homo sapiens
gggaagtctataagctttgcaacagaattacagagtatgatgtgcaggctgccccatggatgccacacgtggc

SEQ ID NO: 432751 - DNA, 101 bp, Homo sapiens
tggctccacgccctgctgggtcctacctgtcagagccccaagaatcagcatgattcttcagaggctcttcaggttctcctctgtcattcggtcagccgtct

SEQ ID NO: 432752 - DNA, 75 bp, Homo sapiens
gaagaacaaatggaacgcttggaagcccttggcgcttaaattcctagcgaagtgccgtaagaaaaagaaactatt

SEQ ID NO: 432753 - DNA, 100 bp, Homo sapiens
ccagctgggcgagtatctggaggaggtgggaatgatggttagatgctgccgaacatacgaagaagtgtgcgaaggtgatgtgatgttggcaaagtcatca

SEQ ID NO: 432754 - DNA, 50 bp, Homo sapiens
acagtgctacagagccaactcctgacagaagaagctcattcacacagaag

SEQ ID NO: 432755 - DNA, 80 bp, Homo sapiens
caacaggcacgacaagtttctggacactctccgagaggtgaaggaccagttacagaagtggatccgcggtaatgtgagtg

SEQ ID NO: 432756 - DNA, 75 bp, Homo sapiens
ggggattaccttacagagctactgagaatgacatttataatgcccagtgatgttctttcccttcttgacaaccgt

SEQ ID NO: 432757 - DNA, 90 bp, Homo sapiens
gaggaggcggccatgtatgaggaggagatggaaagggaagtgctcctgattcctgacaatgccaacgtcttctatgccatgagtccagtc

SEQ ID NO: 432758 - DNA, 100 bp, Homo sapiens
aataccttagttgacccttgtgcctactgaacttgacgcactggtatttggccatctatacaccattcttaccacacaattgacaaatgatgaactttct

SEQ ID NO: 432759 - DNA, 50 bp, Homo sapiens
tcaacatctctcagagacgaaagacagtgtactgaggccctaattgtgtg

SEQ ID NO: 432760 - DNA, 100 bp, Homo sapiens
agccaaggctggtgggatgaggagcaggagaaggcctggaggaagcagtcccgcaggaagagacggggtttcaccatcttggctaggctggtcttgaatt

SEQ ID NO: 432761 - DNA, 100 bp, Homo sapiens
ctgggaggcacggagggtggcgaggcaggaggaggaagccaagaatctggtgagcgaagccatcgcagctggcatcttcaacgacctgggctccggaagc

SEQ ID NO: 432762 - DNA, 100 bp, Homo sapiens
cagtgcggatttgcgaggcgcgccctggagctgctagagatccggaagcacagccccgaggtgtgcgaagccaccaaatgatgattattctccaccgtct

SEQ ID NO: 432763 - DNA, 90 bp, Homo sapiens
gttcatatcattgtcttccacagatgtgtcaccaaaccagggggctctgccctttgatgacgacaacctccgccagctgctggagaaggt

SEQ ID NO: 432764 - DNA, 75 bp, Homo sapiens
gcggtgcgctgggggccggggcgcgtcgcagattgtgcttgagaacagtagtcgagaagacaagcatgaatgtcc

SEQ ID NO: 432765 - DNA, 74 bp, Homo sapiens
catcaagggaatgaacttcacagttgtgctggtgaggtggaatgagccctaccagaaactggccacgtgcgatg

SEQ ID NO: 432766 - DNA, 121 bp, Homo sapiens
gagtgagtgctccatcatcgggagaatccaagcaggaccgccatggaggaaggtcaatattcagtgtccaaggtccccagctccataagtcaggaacaatccaggcaagacgcgatctacc

SEQ ID NO: 432767 - DNA, 90 bp, Homo sapiens
gccgtattcatcggcctattcctggctttcctgttttggtgtttcggtccattgtggtagagaaagtgttgttacagatcttataacagt

SEQ ID NO: 432768 - DNA, 100 bp, Homo sapiens
agaacaaaaaaccaaacccacccaaaacagcgtccgcgcactgaggggtttaggcctgtctccagatctggttattgcagccgaaggagaaatgaatgca

SEQ ID NO: 432769 - DNA, 105 bp, Homo sapiens
ccccgatccgccagcaccacctgaggatccagaaaccgccccagcgatggaagaggatcaggagctggagaggtcagcccaaggccaaccccactgtcactctgt

SEQ ID NO: 432770 - DNA, 98 bp, Homo sapiens
cgcgttagggccgccgctgcctccctcgccgccgccgctgccgaaacctcgacctgtctcccagttggttgcacagcaggttactcagcagtttgtgc

SEQ ID NO: 432771 - DNA, 100 bp, Homo sapiens
catagctgtgagtggcgatcacgagaacaataagatgctgcagttggagaagaaacttgaacgtgaacttgaggatgatgcacgagttattgcttgccgg

SEQ ID NO: 432772 - DNA, 74 bp, Homo sapiens
gatttacttgaaacaaaaggagaccctaatcttcagtgaaaatgcctcgtgtaaaagcagctcaagctggaaga

SEQ ID NO: 432773 - DNA, 115 bp, Homo sapiens
gcgggacagagcgcctgcgaccccagtcggtgctccggggaggtcacctgacgaggagagccgctcccgaggccccggcgcggcgcgagggcgcggggcgcggcgtccacaggcg

SEQ ID NO: 432774 - DNA, 100 bp, Homo sapiens
gctaaagtggactgcacggcccactccgacgtgtgctccgcccagggggtgcgaggataccccacgatattagaaatggctactccccagtcaattttca

SEQ ID NO: 432775 - DNA, 101 bp, Homo sapiens
cgactacctgacctctgcaaaattccttctctaccttggtcattctctctctacttggaatttcacggtccctcatggtgtctcactccagcagacagagg

SEQ ID NO: 432776 - DNA, 50 bp, Homo sapiens
gaaacatcaaagctggattagaacatctgacctgtggatatctgggcttt

SEQ ID NO: 432777 - DNA, 75 bp, Homo sapiens
gggtgaagtgctccgtcgcccttgcctccagatggtggaagagagtgaagagcggctcacggaggagcagattga

SEQ ID NO: 432778 - DNA, 110 bp, Homo sapiens
cccaagaaagcaagttacgatatattcaaaatttcaagtggactgatacattgcaaggacaggttccaagagttcagcaagaccagcagattggaagtatcaaagtggat

SEQ ID NO: 432779 - DNA, 100 bp, Homo sapiens
accgctgtgggttccagcccttcaaccaacatcttctgccctgggtcaagtgtacaaccgtcttcagatctctactcaagggaaagaagctcagtttgcc

SEQ ID NO: 432780 - DNA, 111 bp, Homo sapiens
cggcgacggaccagcgacccaagcgccgcggttaaccacgtctcgtccacgacctccctagacaatgcagatcttcgtgaagactctgactggtaagaccatcaccctcga

SEQ ID NO: 432781 - DNA, 75 bp, Homo sapiens
tcagaactgagaagctgtcaccacaggttagaaaatggatttctgactggaatctcaccactgaaaaaaagcaca

SEQ ID NO: 432782 - DNA, 100 bp, Homo sapiens
gcagcacagccccatccaggttcccatggttgccggctcccctctcaggacaacccagatgtgcaacaaagtgcgatgacggtctcactgtgtcacccag

SEQ ID NO: 432783 - DNA, 82 bp, Homo sapiens
cagggcgttggctatgtgcccatcacagtgtcaacagcatctccaccctggagcctgtgagccggtgccagcgcctgagtga

SEQ ID NO: 432784 - DNA, 100 bp, Homo sapiens
tcaggaaccaccagtgacagaataaacattgacgatcttgaggatgaccctgtggtgaacggggagaggtctggctgtgcgctcacagacgctgtggcac

SEQ ID NO: 432785 - DNA, 75 bp, Homo sapiens
agcacacagcaagcaccttctgagggggcagtacccaaaggaaacgctacgaaagaatacatggagagcttgcag

SEQ ID NO: 432786 - DNA, 99 bp, Homo sapiens
ccaaacattcggaacactgatgggaaatcagccctggacctggcagatccttcagcaaaagctgtccttacagacacgaatgcagagtttgagtccaga

SEQ ID NO: 432787 - DNA, 100 bp, Homo sapiens
tcaaatcataatccctcgaaacacaacctttaatgttgagtctaccaaaaagaatgaaccgcttgcttcttatttagggtggctgttgcgaagtgattac

SEQ ID NO: 432788 - DNA, 75 bp, Homo sapiens
gaagtttctcgagtggatgcaaaaccacgaggccccctggtggctgccacactgatgagttccagtgccggctgg

SEQ ID NO: 432789 - DNA, 137 bp, Homo sapiens
cgagtccttgggtgcccacatcaacgtggtcctggtgcggatcatcctcctgagctatggaaagaatgccgggacattctgcttcctgtcatcaccaaagagctgaaggagctgctggagcagaaggatgacatgca

SEQ ID NO: 432790 - DNA, 100 bp, Homo sapiens
gaatgtgataacttctgtacccagcgaattgtgtttacatgaatacttcattgctccatcagtagatatacaagaacaggtttatcgtgtccaaaaactc

SEQ ID NO: 432791 - DNA, 50 bp, Homo sapiens
agccatagtacctacagcagcactccagggcgttttccactgcgccgtgg

SEQ ID NO: 432792 - DNA, 90 bp, Homo sapiens
gttcactgctggacgcctctgggcaatcttaccctcctgggaactgagagagggtaaaggacatgttcagttttgaaattccagagcatc

SEQ ID NO: 432793 - DNA, 75 bp, Homo sapiens
acaatacgagcagatccttgcatttgtccaagagtccatgttgtacttagatgggcagcggcatttcaactccat

SEQ ID NO: 432794 - DNA, 74 bp, Homo sapiens
agattgggttggtatattcaagccaatggagatcttcgtggatgatgagacgaagttgacgctgcatgggttgc

SEQ ID NO: 432795 - DNA, 100 bp, Homo sapiens
acgaacccctggacgggagagtctgccggcggagaatataaggggctttgaccacgacctttgaagagcttcattttgagatcaagccccacgatgactg

SEQ ID NO: 432796 - DNA, 109 bp, Homo sapiens
cggcgtttgggctacggttgttgttggcgactgtgcttcaagcgagagtgattgactgcctggaggatgagaaggcaaccctcaccttggccatggctgactggctgcg

SEQ ID NO: 432797 - DNA, 83 bp, Homo sapiens
ctgatgaggaagctaaggtccagaaaggtggatgaggaggctgcgctggagcaggctgtgaagttctgccaggtccatcttgg

SEQ ID NO: 432798 - DNA, 100 bp, Homo sapiens
accacaggctcctcaccaagtacgctgaggccgagaacaccattgaccagctacgcctcggggccaaggtgaaccggcgggactttgagtcagagaagcg

SEQ ID NO: 432799 - DNA, 100 bp, Homo sapiens
ctccaaggccaggacctccctggatgccctgaagatcagcatccgccagctcaagtggaaggagggaactctaatgatccaggacaaagaagttaccctg

SEQ ID NO: 432800 - DNA, 75 bp, Homo sapiens
ccggacaccgacgcgctcatctgctggagcccgaccctggaagctgtcctgaatttcaaatactctggaggcccg

SEQ ID NO: 432801 - DNA, 100 bp, Homo sapiens
tcgagatgtaccatcctgcctactgggtcgtcttctcggcgacaactgccctgctcttcatcccagctggctgtcttcatgtggctgatgacctatgttg

SEQ ID NO: 432802 - DNA, 98 bp, Homo sapiens
gtatccaggcgaggtggtcatcaaaatagctacaaaccatactaaattattccatttgcaacttatccccaacagcactccagttctcgcctgaatta

SEQ ID NO: 432803 - DNA, 74 bp, Homo sapiens
cagcttcccttcctcaaataaggaaattgacacctggcgtgctgctggaacccaatgtgaatattggactggcg

SEQ ID NO: 432804 - DNA, 100 bp, Homo sapiens
cagctggacctagctcagcggaccctgtaccaggaggtgatgctggaaaactgtgggctcctggtatctctgggtgacagcacaaaacctgagaccgtag

SEQ ID NO: 432805 - DNA, 100 bp, Homo sapiens
ccctccatggccaggaggacacccctggtggcctgcttgaccaagatcactccatggatgaaatgacagctgtggtgaaaattgaaaaaggagttggtgg

SEQ ID NO: 432806 - DNA, 75 bp, Homo sapiens
ctggtgcagaacattgcgcggcaggtaaaagtacacctgtaagccagcttggttccgcagactttcccgaggccc

SEQ ID NO: 432807 - DNA, 75 bp, Homo sapiens
tatcgaaggatgtgcatgaaggacagcctcttctcaatgggcagccactgatcacaatgtggataatacaacaga

SEQ ID NO: 432808 - DNA, 98 bp, Homo sapiens
tcagaaccctccgcagagtaaagcttggtgtaaaaattgccaaagcagttgcctgccacaactttgtaaaagccaaaaaggaggttgaaaattcacag

SEQ ID NO: 432809 - DNA, 94 bp, Homo sapiens
gcgggcgtgggaacccaggccccgccgaggcggccagtaagactttgaccccgacgcaggcttcagtgattgccgcggatcagaagcctgagca

SEQ ID NO: 432810 - DNA, 100 bp, Homo sapiens
gcagaattcagcacggatggaaagatggagatgaacctctaacacagtggaaaggaaccgttctggatcaggtgagccttccagatggtcaccctcacac

SEQ ID NO: 432811 - DNA, 83 bp, Homo sapiens
ctaaaaacaagactggggctgctcccatcattgatgtggtgcgatcggatctgtctggctccattgatgacctccccacggga

SEQ ID NO: 432812 - DNA, 100 bp, Homo sapiens
ccacgtcctgctggggctagtcgtgtccctgggcggcttgacggagtcgacggtagaagaagtatgtcttcctggaccccctggctggtgctgtaacaaa

SEQ ID NO: 432813 - DNA, 100 bp, Homo sapiens
ctagctcgcaggccgcgccgggaccaggtacaggtttgcagattccgccagcagcacagcaagctctacagatgagtggctctttggcatttggtgctgt

SEQ ID NO: 432814 - DNA, 100 bp, Homo sapiens
ccttgaatcgctctctcccagatatccggcacccaaagtactttgaactcaagtaaacaaaagggaagattttctcgttgatactggagactgcacaaca

SEQ ID NO: 432815 - DNA, 100 bp, Homo sapiens
aggtggagtatgcctacagcgacaacagcctggaccccggcaaccccgtgaaaatcctttccagaatctgaaggtactcttggtatcagaccaacagcag

SEQ ID NO: 432816 - DNA, 125 bp, Homo sapiens
acagggcaaggcggcggacggctgcgtcgcccgaggcgaggaggagcgctggcgtttgaagaaaacaggtctgaaacaaggtcttacccccagctgcttctgaacacagtgactgccagatctcc

SEQ ID NO: 432817 - DNA, 100 bp, Homo sapiens
cctgcgctttgctgttcgctgtgtaggcaaaggatctgcagcactgctgcagccactagtcacacagcttcagcgcctgctcctggtcatcactaaccag

SEQ ID NO: 432818 - DNA, 100 bp, Homo sapiens
ggagagcgccaaaccattactgatgatgtggaggttaacagctatctttctgttggaaaagagactgttcaaaccactgaggatcagattttgaagagag

SEQ ID NO: 432819 - DNA, 88 bp, Homo sapiens
gctccttgcccgagaacatccagtttgatgtttactacaaggtgaagattgtccccagtggatggtccctatcacaatctctactagt

SEQ ID NO: 432820 - DNA, 100 bp, Homo sapiens
ctagtcaggaagaggacacacagagtattggtcctaaagtccagagacagagcactaattaggatacagttgatatattagttggatggcatatagatca

SEQ ID NO: 432821 - DNA, 83 bp, Homo sapiens
gcccagcgcgctaaccctttactcgcgacctttcgcttcaccttcacagcagccctgcgagggaaatcctcattgacgattca

SEQ ID NO: 432822 - DNA, 98 bp, Homo sapiens
ccggccccccacctccccccggagccaggctggtttcggaaatgcccttacagcagcaggacactggggttgggaaatcaagcatcgtgtgtcgattt

SEQ ID NO: 432823 - DNA, 83 bp, Homo sapiens
ctttccaacgctgtaaaaaaggacagaggctgttccctatggcaggctggcctgccactcctcctgctatgatgcctgggcag

SEQ ID NO: 432824 - DNA, 100 bp, Homo sapiens
ctgaggaggcggcggccgacggtggcggcgggatgcaggcccggtggttctgggaagcgtacttccagtcaattaaagccattgccctggccaccctgca

SEQ ID NO: 432825 - DNA, 82 bp, Homo sapiens
gcactttccaaagtggatgcctccggggaggttattcagcttctcaaggctggaaaagcgaaggaagtttcctacaatgcac

SEQ ID NO: 432826 - DNA, 50 bp, Homo sapiens
ggacgacattggccatgggatcaaggtgagaagccctaccactgcaactg

SEQ ID NO: 432827 - DNA, 100 bp, Homo sapiens
tccgtggtgaagctactcaatacgcgccacaacgtccgactgcactcacacgacgtgcgctatgggtcaggtgtgagcgccactttgaagggcatccaac

SEQ ID NO: 432828 - DNA, 100 bp, Homo sapiens
caccaacaagaatgaggagcaggacatcttcatttacagagcaacttgatgaaggtacacccaatagagagccagagactgctgctactttgaaacgtac

SEQ ID NO: 432829 - DNA, 51 bp, Homo sapiens
tcagcagcttgtacaacattactcaggttcattttccagacactgaaagag

SEQ ID NO: 432830 - DNA, 75 bp, Homo sapiens
aatcagaaacctgaagttagaaaggctcaacgagaacaagctatcaggtctgctcaccaggtggccagataccgc

SEQ ID NO: 432831 - DNA, 75 bp, Homo sapiens
gtttacacttgtcaacttcctcttcagtcatcagtgacttgacacagcaagcaaaagacatacagaacataacag

SEQ ID NO: 432832 - DNA, 83 bp, Homo sapiens
tgaaacatgaaaacatcgtggccctgtacgacttccagatgaagatctccttcaacgacaaaagcctgcagaccacatttgag

SEQ ID NO: 432833 - DNA, 91 bp, Homo sapiens
cgcagaagtcgcgtgtctaggtgagtcgcggtgggtcctcgcttgcagttcagcgaccacggctttaaggagttttaagctgagtgtcact

SEQ ID NO: 432834 - DNA, 75 bp, Homo sapiens
acgatgaagccccctctgatgactgggctggcttagatgaagatgaagatgcacatgtctgggaggataattggg

SEQ ID NO: 432835 - DNA, 90 bp, Homo sapiens
tcagattacctgcctggttataagtgaggaaattagcccagatggctcttatcagtgatgacaagaacttcagacgtggatcaacctgga

SEQ ID NO: 432836 - DNA, 89 bp, Homo sapiens
cgggctgccccgcaggatcatcaagcactgggaggtgttcagaaaagttacagaagttttcattttagtccctgcacttcttggtctca

SEQ ID NO: 432837 - DNA, 75 bp, Homo sapiens
ggattccaagtaactcttatttgctcctctctgctatatgaaatatgggagacgacagaccgtttgtgtgcaatg

SEQ ID NO: 432838 - DNA, 100 bp, Homo sapiens
ttctggctgcgcggcctgcgcgcgcctcccgggcggattccagccccgagcgggacagcgcggcggggagcgacgagctatggagttactagtagagaaa

SEQ ID NO: 432839 - DNA, 100 bp, Homo sapiens
acggcgaccggatccggttcattctggacgtgcttctgcccgaggcaaaatacatatctcagtgcattgatgagatcaagcaggagctgaagcaggacaa

SEQ ID NO: 432840 - DNA, 88 bp, Homo sapiens
gactggattgttcagtatgaccctccggatgaccctaagcaatgtttttggaacagtgccagtggttgcttctgcacagacacagcct

SEQ ID NO: 432841 - DNA, 90 bp, Homo sapiens
ggcagagtctcagtccaatgtctcagaggcctgttctgaaagtttgtaaccatggtaaataccagctgtcccctacagtgaatatgcccc

SEQ ID NO: 432842 - DNA, 95 bp, Homo sapiens
gggcgcttcgccccgggccccccagcatgaagaccccggcggacacagtaagactttgaccccgacgcaggcttcagtgattgccgcggatcaga

SEQ ID NO: 432843 - DNA, 75 bp, Homo sapiens
ctgactgtcgctctgcctttgacaggagaggctgcttcttgtagaggtgctgcatgccatggggacctcacagag

SEQ ID NO: 432844 - DNA, 82 bp, Homo sapiens
gtcctagcgcctggcctgcgcgccgctgcccgcgccacaggacggagaagcaggtggtgggcgcagggctgcagactgcagg

SEQ ID NO: 432845 - DNA, 90 bp, Homo sapiens
cggacttcctgtgggacaagcgcacgggcctcgccgccagaacggtcagattgagttgtacactcacctgcctgtgatgaaacagctggt

SEQ ID NO: 432846 - DNA, 80 bp, Homo sapiens
cagagctggcctggagtccgcggctggccgcgtgagtagggacctccagattgagagcttgaagagagaggtggaaatgc

SEQ ID NO: 432847 - DNA, 80 bp, Homo sapiens
aggagctaaagcagcgtgcgttcagccctggggaatcccagtcagaagttccagcctgccactgttctctgatgccatgc

SEQ ID NO: 432848 - DNA, 100 bp, Homo sapiens
agggggaagtagagagataacaaaagctgctcagagtctcaatgaacttgcccctggaggaacgcgcatagatgatggtgacaagaccaagatgaccaac

SEQ ID NO: 432849 - DNA, 82 bp, Homo sapiens
gaaggaggggtatgagccacacatccccgaccacttgcggcctgagtatgacgagccaaactcaggctgtaccttgagcagc

SEQ ID NO: 432850 - DNA, 82 bp, Homo sapiens
cctggactgtgcagtatttccagtctgtctcagaatgacagcccatatcaaggcggtgtattctttttgacaattcattttc

SEQ ID NO: 432851 - DNA, 82 bp, Homo sapiens
cctgctggcattgaatgatttatagctaagactccaggacacccctgaagccgagaaatgcaaaatgatgcttcaacaccca

SEQ ID NO: 432852 - DNA, 102 bp, Homo sapiens
ggagtttcatgaagagcccaaaacctattacgaactcaaaagtcaaccgctgaagagcagtttgtcccatgaggagcacccccatagccatcctctctatgg

SEQ ID NO: 432853 - DNA, 83 bp, Homo sapiens
gtgtaatacatcatgaactgcaggcttaccctgaaagaagcagatcccagttcaaaagtagccataagaaggaaggattcacc

SEQ ID NO: 432854 - DNA, 100 bp, Homo sapiens
gttttcttggatgaattgcttgctttggagacgcaaacatgcagatctttgtgaagaccctcactggcaaaaccatcacccttgaggtcgagcccagtga

SEQ ID NO: 432855 - DNA, 82 bp, Homo sapiens
cctcgaaggagtcagcctcctggaaagaaggcttacggagttcctatgctagtcagcatagtcagcttgggcaagaccttcg

SEQ ID NO: 432856 - DNA, 75 bp, Homo sapiens
ctttcctctaaagtcaaactgctacttcttacaactcagtttccctttaaaataaatgaaaaagtattacaggtt

SEQ ID NO: 432857 - DNA, 82 bp, Homo sapiens
cagcagaagctggtggaccagaacatcttctccttctacctgagcagggggcttcgccaccttctcctcctgcttccccggc

SEQ ID NO: 432858 - DNA, 100 bp, Homo sapiens
tgcatttccaggggtcagttgtccagttcatccctgagccttgagctcccagtcgcaggtttacccaaggtccagcctagcccctaggcaccatgtcgga

SEQ ID NO: 432859 - DNA, 51 bp, Homo sapiens
cgcagtggtcgcttcttctccttgtcggatacgctaaaaatcaagcagttg

SEQ ID NO: 432860 - DNA, 50 bp, Homo sapiens
gataataagcttttacaaactgatatgtgtcttgctgaatcagggctctc

SEQ ID NO: 432861 - DNA, 90 bp, Homo sapiens
ggcctcggcctcggcctccgacacggcacacaaaccaatggtctggactttcagaagcagcctgtgcctgtaggaggagcaatctcaaca

SEQ ID NO: 432862 - DNA, 101 bp, Homo sapiens
cttccttagaggatcaaaaggggctcgtggcatcctatcaaggttcgagaacttgtcttggacaattgcaaatcaaatgatggaaaaattgagggcttaac

SEQ ID NO: 432863 - DNA, 100 bp, Homo sapiens
atcctggacctatgaatatccagtttgagccatcggatctaagatccaaaaggcaattaagttggaatatgcaaggttggttaagttggcccaagaagac

SEQ ID NO: 432864 - DNA, 50 bp, Homo sapiens
cagaggtggaggcgctttgaaagagagaagaagaaggaggttcctgctgt

SEQ ID NO: 432865 - DNA, 109 bp, Homo sapiens
cgctcgatcttgggacccaccgctgccctcagctccgagtccagggcgaggttttaaaatcaaagatgggaaaatcggagaaaattgcccttccccatggccagcttgt

SEQ ID NO: 432866 - DNA, 96 bp, Homo sapiens
tcacccagcaggcgctgcagcggtacctgaagacccgggagaagatgaacgacaatctccttgagagctggagcgacctcgacgagctgaagggag

SEQ ID NO: 432867 - DNA, 82 bp, Homo sapiens
tggaatagccttgccatgtctgttggacgctgacaaatatttctgcctccatcaagaaatcggcgagagagagctgagctaa

SEQ ID NO: 432868 - DNA, 101 bp, Homo sapiens
gattgtttaaatcctcccagtgaaaaagcactgcaggagtattccagtatctctgaaaaattgtcatcaaccaattttgccatgaaaagggatgtccagga

SEQ ID NO: 432869 - DNA, 83 bp, Homo sapiens
ctgcagctggcgcctctgcagtgggacaatgcagatcttcgtgaagactctgactggtaagaccatcaccctcgaggttgagc

SEQ ID NO: 432870 - DNA, 100 bp, Homo sapiens
acaagtgtctgtgcacaggagtcagagagggggaaccgccgtcccaacatcacaaaaaggcaacttcaaagtgggagttcacattgctgacgtgagttac

SEQ ID NO: 432871 - DNA, 90 bp, Homo sapiens
gctgttcctccttagaccacccgacagaccagaaactcatcccagagttcattaagaagtaaatacctgggcacaggacttcaaagcaaa

SEQ ID NO: 432872 - DNA, 83 bp, Homo sapiens
ggagctggtcgcagatcctgagacccggacagtggcagtgaaacagatggtggatgcttccaaaagcatcgaagctgtccatg

SEQ ID NO: 432873 - DNA, 90 bp, Homo sapiens
gggattatgtgcctggggaaggctacaatcaaaaattcagagagctctataagattgggatcacgtgctggagtgcagtggcgcgatctc

SEQ ID NO: 432874 - DNA, 100 bp, Homo sapiens
cgccgaggcaccgaggcactcagaggaggtggccaaggtggaatacgtcaggaagaagccaaaattaaaagaagtccaggtgaggttagaggagcatttg

SEQ ID NO: 432875 - DNA, 90 bp, Homo sapiens
gtgctcaattgttttttgtggtctttgaatggaaagatcctttcatccagaaagtccaagatattctggacaatcaggaagtccaagcca

SEQ ID NO: 432876 - DNA, 51 bp, Homo sapiens
gaccaaggtggagatcaaacatgctgcctcgaactctgtcactgagacccc

SEQ ID NO: 432877 - DNA, 87 bp, Homo sapiens
cttttaaaaataatgataatggagcttgggtcagaggaggagatattatcgttcaaaattcagcttgttctaccatctccagaggga

SEQ ID NO: 432878 - DNA, 100 bp, Homo sapiens
agatatgaccatgtatttgtggcttaaactcttggcatttggctttgcctttctggacacagaagtatttgtgacaggtcctcgatgggcttcctggaat

SEQ ID NO: 432879 - DNA, 98 bp, Homo sapiens
agaatgccggatcctccggggacctgatgggctgagtcgagtccggttccagttgttggcaaaggagaggaagaggaagaggaagatggcatgcggct

SEQ ID NO: 432880 - DNA, 100 bp, Homo sapiens
agcactggaagtacgggcagttgcagtgttggagctaaagtgtgatggatgtcagatgtttcctatcaatggatccagattcaaatgcagaaactgtgat

SEQ ID NO: 432881 - DNA, 76 bp, Homo sapiens
gcgtctccggggaaagccgtggccccgagggcggatccgagggaagaggaagaacgtctgagaaataaaattcgag

SEQ ID NO: 432882 - DNA, 75 bp, Homo sapiens
tgccttttgcctcccaccgtgattctgaggcctccccaaccatgtgcaatttttgaagaaaacaggtctgaaaca

SEQ ID NO: 432883 - DNA, 100 bp, Homo sapiens
ttttgatatgccttcaagtatggatgagtatgtccatcaggagtcagagtcagaagcaaaggtagatggagagactgcatcggacagtgagagccgggca

SEQ ID NO: 432884 - DNA, 98 bp, Homo sapiens
gatgcggtttactatactgcttcatatgcaaaagatccacttaataactatgcagtcaaggtggaaaatgaggttgatcgcagcattcagaaagtgta

SEQ ID NO: 432885 - DNA, 88 bp, Homo sapiens
gcccaacatggcggagagagaggtggagtccggcccccgaaagaggaccccatatcatgtgaacctcctcctggctggctatgatgag

SEQ ID NO: 432886 - DNA, 100 bp, Homo sapiens
gtcatgattctttataattacttcaatgccatgtttgtcggtccgggctttgtccctctggggtggaaaccgtgtgtgtgaagttcctggaggatgccct

SEQ ID NO: 432887 - DNA, 97 bp, Homo sapiens
acacagggacagccgcaatccggacctggcggagagattaaacagattctagaaaatgaacttcagatacctgtgtccaaaatgctgttaaaaggct

SEQ ID NO: 432888 - DNA, 82 bp, Homo sapiens
cggcggccctacgacctggaccgacgagatgatgcctattggccagaaggaaagcgtgtggcaatggaggaccgatatcgtg

SEQ ID NO: 432889 - DNA, 87 bp, Homo sapiens
gaggacgccttcaacaccaccttcatctccaccatcgtgaccatctttccaccgtagaaaaggacacaaatggagaagttctgtggg

SEQ ID NO: 432890 - DNA, 74 bp, Homo sapiens
ggccgtaggaacgggcctgtcgaagtgcgcctgacagagcccaaatcttgtgacaaaactcacacatgcccacc

SEQ ID NO: 432891 - DNA, 100 bp, Homo sapiens
caactttcggggcatgtacaatcagaggtgtgtctgacttgctgctccagggatgtcatagttaaagttgaccagatctgtcacaaaaatagcatcaagt

SEQ ID NO: 432892 - DNA, 98 bp, Homo sapiens
acactttcctgggagcggcggccacggaggcaccatgaagaagtcttactcagctgtcgcctggttgggcccggaaatgggacgtcgcgctttctcag

SEQ ID NO: 432893 - DNA, 75 bp, Homo sapiens
gtctaccctacctggctccatgaagatgccacagggatcctaaaatctaatttaacacgtgaactggagaatggg

SEQ ID NO: 432894 - DNA, 51 bp, Homo sapiens
tgatggtgtagcgctttaggggaagttaacaagcacaagccctggctggag

SEQ ID NO: 432895 - DNA, 100 bp, Homo sapiens
gggtgccacctcccgggacgctgcccacggcgtccccggtcgcgtttcccgcatgaaaattacttaaacgttgcacacaacgtttcacaaaatcttttgt

SEQ ID NO: 432896 - DNA, 50 bp, Homo sapiens
aagaaactacacgctaattctagaagtacttcctcgcgtattgctaaagg

SEQ ID NO: 432897 - DNA, 85 bp, Homo sapiens
tgaaaggatgtgcaaccctccaagtggaagcaccttggaagttgttttcaaccatatccagcctttgccgaatacatcctatctg

SEQ ID NO: 432898 - DNA, 97 bp, Homo sapiens
tgatatgaaccaaagatggaatgacttaaaagcaaaatctgctagcatcagctgtgttccagatcatctccctggtaatttaccccgtgaagtacac

SEQ ID NO: 432899 - DNA, 82 bp, Homo sapiens
cgggagatcccaggcggtgacagagtggagccatggctagagatgccatggacaatattaccaggcagaaccaattctacga

SEQ ID NO: 432900 - DNA, 100 bp, Homo sapiens
ggaaacaaaggggaagaccagagcattgaagatcagtacaaaaattcttcaagaaatctaaggaatggcagtggaagacacagttgcagccaaactcatc

SEQ ID NO: 432901 - DNA, 51 bp, Homo sapiens
cctgctgaagccagaggacggaagagaagggggcagtacccaaaggaaacg

SEQ ID NO: 432902 - DNA, 99 bp, Homo sapiens
tctaccctctgcagatctcccccgtgtcttcctatgcagcatcagaggctccttgaaatgctagatacagagaaggaactgttaaaagaaaaaataaag

SEQ ID NO: 432903 - DNA, 74 bp, Homo sapiens
ccgcactcgctgccgccgccactcacgctccactgcaacatcacgaactacctgaagaagcaggtcacacccct

SEQ ID NO: 432904 - DNA, 75 bp, Homo sapiens
cccaatgcggccgcgagaagcagcgggggggcaggcgatcgaagataaatttgcgcctcattttggtaagcggaa

SEQ ID NO: 432905 - DNA, 82 bp, Homo sapiens
cgcctgcgacctgcccgcctgggcggtgcgtctttctacgtgaataggattttgtggctggccagatacactgcatcatctt

SEQ ID NO: 432906 - DNA, 97 bp, Homo sapiens
tgggcacgctggagttcctggtgtcgctccaaaaggaattcttcatttgtctcctgatgtttatcaagagatggaagccagccgccacaaagtaatc

SEQ ID NO: 432907 - DNA, 83 bp, Homo sapiens
gtcatcatgggccggcctggaacaggatttttagactctgaggagcagttggagctaatccacattatggaaatggaaaccac

SEQ ID NO: 432908 - DNA, 98 bp, Homo sapiens
ccagaaagcagttaacagtgccaccggtgttccaactgtttaaactttatttgaaggtagacgcatcgaatttgcagaacaaataaataaaatggagg

SEQ ID NO: 432909 - DNA, 90 bp, Homo sapiens
aaaagagaagacgctttacccgactctttgggccgttatctcacgaaaaccaattctgtgtcctcggaggaccacagcccagttgggccc

SEQ ID NO: 432910 - DNA, 74 bp, Homo sapiens
gccaacatcacctacgccagtcgcaagcggcggaagccggtgcagaaaacgtggatgacaatattccacttagg

SEQ ID NO: 432911 - DNA, 100 bp, Homo sapiens
acaccgtcacgctgctggaggaggttatttggaaatagcggtgcttgcagcgcttgcggacagtcgattcctgcgagtgaactcgtcatgagggcgcaag

SEQ ID NO: 432912 - DNA, 83 bp, Homo sapiens
tgggcgagctgggcgacggcgccttcggcaaggtttacaagctccttccgcttccagccgttcgagtcctatgactccaggcc

SEQ ID NO: 432913 - DNA, 75 bp, Homo sapiens
gagcccaaacccggggcaggcgggcagctgtgcccgggcggcacggccagattttgcaagaacgaggctcaagga

SEQ ID NO: 432914 - DNA, 74 bp, Homo sapiens
tcgaaaaggtcttgattctgagaatgaatttgaaactggcgatggaatatgagaggagccctctggaaagaaaa

SEQ ID NO: 432915 - DNA, 82 bp, Homo sapiens
gctgttcccagaagcgaagtggagagcgccagagtaatgggtcgatccagtgtttacaagggaagtgaaagccaaagtgaaa

SEQ ID NO: 432916 - DNA, 100 bp, Homo sapiens
cgtccagcaactccagcctgtccggctcgtcggtgtcctccgtctaccctgatgggagagtctgcatttccatcctccacgcgccaggcgatgaccccat

SEQ ID NO: 432917 - DNA, 82 bp, Homo sapiens
gaggggaccaagttccggagcctgctcctcaacatgctgcaggccccttcacagatgtagtcactacaaatcttaaattgcg

SEQ ID NO: 432918 - DNA, 75 bp, Homo sapiens
caaattcatcccagaaatctaagaggtctatgaaaattatcctacttatgatttaactgaaagaaaagatttcat

SEQ ID NO: 432919 - DNA, 100 bp, Homo sapiens
ctgaggaaagaccaacaactgctgcaggcacaagcttggaccggctggcgctgcttgcagattctggctgcaggactgttcctgccaggttcagtgggta

SEQ ID NO: 432920 - DNA, 80 bp, Homo sapiens
cctgcccccaagaaggaagtcatcatgggccggcctggaacaggtggaaatgagttctcaacagtttcctcggttaggag

SEQ ID NO: 432921 - DNA, 116 bp, Homo sapiens
gccgagccgcaggagagacacgctgggccgaccccagagcggcgctggacagggtgaggtggctttgaccccgggttgcccggccagcacgaccgaggaggtggctggacagctgg

SEQ ID NO: 432922 - DNA, 83 bp, Homo sapiens
gagtgcagaagatctgggtgcccgtggaccacaggccctcgttgcccagattttcactgttacatgccttgaagtgatgagga

SEQ ID NO: 432923 - DNA, 75 bp, Homo sapiens
atcatcacccaggcgcggagggaagacgccctggtgctcaccaagcaagggatgtttcagcagcccctgagaagg

SEQ ID NO: 432924 - DNA, 100 bp, Homo sapiens
ttggtgaatacacgatttggtgcagccggggtttggtaccgagcggagaggagatgcacacggcactcgagtgtgaggatgacgtagctttgccaaagac

SEQ ID NO: 432925 - DNA, 74 bp, Homo sapiens
gtggtgagcctttttgtcactgatgaacaagagaactgggcaacccatgatccacatctacctggacaaggaaa

SEQ ID NO: 432926 - DNA, 96 bp, Homo sapiens
cgacgttcgagaggaagattcttacctctttgatctcgacaataagagcactgcagcctgtggtgttgaggctcacagcgatgccatccagccctg

SEQ ID NO: 432927 - DNA, 104 bp, Homo sapiens
caggacctgcccgccgggagccccggagtccgcggcagcgccgagggcccctcccccaggcctctgggctctgaggagctggtgtgggtgacattggtgtggag

SEQ ID NO: 432928 - DNA, 100 bp, Homo sapiens
atgtgaccacccacggctggtatggctgggtgaaaaaggagctggagaagaaatctcctgcaaagaagctgagccatgcaattagtaaatctttggggtg

SEQ ID NO: 432929 - DNA, 83 bp, Homo sapiens
gaggaactggcccggaaacaggaggacatctctgttgaggagctggcgcggaatctggtcatcaaggtcaacagggatgctgt

SEQ ID NO: 432930 - DNA, 100 bp, Homo sapiens
cacgaaatggattggagtgaaccggagaccccgaaaacggaagcgcagggagaaggaagaggtgtttgaaaagtttcccgtcaccaattttccttggaat

SEQ ID NO: 432931 - DNA, 100 bp, Homo sapiens
gttgggtgagcttgtttgtgtccctgtgggtggacgtggttggtgattggcaggatcctggtatccgctaacagggaccattgacatttatggatgtggc

SEQ ID NO: 432932 - DNA, 75 bp, Homo sapiens
aagagacacagtatggtagccacacccccagtttttggtgttgagccagacttgaccagggaaggcggcagtatt

SEQ ID NO: 432933 - DNA, 98 bp, Homo sapiens
ttcctcctggaggaatacctggcattgacctctcagatcccaaacaactggcagaatttgctagcgcgatgtacaatacggtgtggagtatggaccgc

SEQ ID NO: 432934 - DNA, 74 bp, Homo sapiens
accaagagcagccccggtctctcggacaccattttctgccgctggacgcaaggagccatgtggctagaaatcct

SEQ ID NO: 432935 - DNA, 83 bp, Homo sapiens
cccagaaacgtcactatcaagaagacctcggaatatacagaactggatgacagtaacttcgattggacttgtccaaatactca

SEQ ID NO: 432936 - DNA, 100 bp, Homo sapiens
acaccggtggtctaccataacaagtggaggagaagatcaagcagacccaccgtaagtacctgctgcaggagcagctaaagatcatcaagaaggagctggg

SEQ ID NO: 432937 - DNA, 90 bp, Homo sapiens
ataatggagctactgtactggctattggaaggaggagattctgaagataaggaggaggagatgttaaagtaacccatcttgcaggacgac

SEQ ID NO: 432938 - DNA, 100 bp, Homo sapiens
cgcgctgcgatttgcgcagagctgaagaagcccctgaccattgaagaggtggcccccgccccgtcgggcctcacgagattgcttccaagtatgatcatca

SEQ ID NO: 432939 - DNA, 97 bp, Homo sapiens
atgagtaagctgtggcggcgtgggagcacctctggggctatggaggcccctgagccgggtgtcatggagaaactccagctgggcccagagattctgc

SEQ ID NO: 432940 - DNA, 100 bp, Homo sapiens
aacacgaagccccgggcaccttccgggtggagttcagtgaaagggcaggaatcatcatgttggttggctggttactgggaaaagatatcctggaaatgtt

SEQ ID NO: 432941 - DNA, 109 bp, Homo sapiens
gcactgtaaaaaacccagctgaagaccactttagaaactcaattaagaggaattaattccaatgagtgtgaaaatgtatcaagaaaaaagaaaatgtcagaggaatttg

SEQ ID NO: 432942 - DNA, 87 bp, Homo sapiens
ggccagccccgccgccctcgcaacctggcagccgccgccgtggaaggccaccctggagaaatgtgccacgtgctcccagcccatcct

SEQ ID NO: 432943 - DNA, 97 bp, Homo sapiens
gttaatttccaaaatggaatagaatgtggtggtgcctatgtgaaactgctttctaaaacaccagaactcaacctgcatccgcacttccactaatagc

SEQ ID NO: 432944 - DNA, 100 bp, Homo sapiens
gccctttccaaaccagacccctgtgtcatcctcaagatgcagtctcatgggcagtggtttgagtgtcgtgtgggagccaatgggagatgggaagaaaatc

SEQ ID NO: 432945 - DNA, 101 bp, Homo sapiens
cagccaggagcaccgccgaggactccagcacaccgagggttcgtgctggccgtgggcagcgccgtctttgatgccatgttcaacgggggaatggccacaac

SEQ ID NO: 432946 - DNA, 75 bp, Homo sapiens
gaagaatgtgacatgaaaaaaatgcattatgtggaccctgaccatgtaaaggacaggaccttcaggcctctgaaa

SEQ ID NO: 432947 - DNA, 90 bp, Homo sapiens
ctccctgaccccttgcgcttcccaggtaaagatgagcccagcagctacacatgtacaacttgcaaacagccattcaccagtgcatggttt

SEQ ID NO: 432948 - DNA, 75 bp, Homo sapiens
gaaacatcaaagctggattagaacatctgggccgttgctccagggagaactgcaaatatcttcatccacccccac

SEQ ID NO: 432949 - DNA, 98 bp, Homo sapiens
cagagtaatgcggagaagcacgcagatggaatgatagtgaccaagaatatggcccaggtgaccaaagccctggacaaggccctgagcaccatggacct

SEQ ID NO: 432950 - DNA, 75 bp, Homo sapiens
cccagctgaagctgggcatctggggcgctgtgaaagttgtgtagatttactgtttgtgagaggagctggaaactg

SEQ ID NO: 432951 - DNA, 97 bp, Homo sapiens
cgagttttaggcgtgccaatcatagtacaggcatcacaggtttttcgttggaatatacgttgcacatttatggcgattctgagtgtgagggcagact

SEQ ID NO: 432952 - DNA, 100 bp, Homo sapiens
ccttgtcccgctgcagccgagatgccgggggagcggggccttccacaccccctccgtgggtgtgtggctggcgcccatgcggctctacacgctctccaag

SEQ ID NO: 432953 - DNA, 100 bp, Homo sapiens
tctgctaacaccagatagtggaaagaaaccatgtgctgaaatgtttgacgacactgatggtttggatcagtttgacaacttagaaaaacacacacagtgg

SEQ ID NO: 432954 - DNA, 100 bp, Homo sapiens
gggaaagagagcgccaggtgcttagcaggaatgtctgaatctgaacaggctcttaaaggtacttctcagattaaattactctcatctgaagatatagaag

SEQ ID NO: 432955 - DNA, 82 bp, Homo sapiens
agcgcaaccgtcggtgggtcggggatcggtcgcctgagagttccagggtctccctccactgctgtagtaacccgggtccggg

SEQ ID NO: 432956 - DNA, 99 bp, Homo sapiens
aagaacagctaccgctctgaggaggcctgcatgctccgctgcttccgccagcaggagatggaaccttccagaagtgggcagctgtggtggtgccttctg

SEQ ID NO: 432957 - DNA, 83 bp, Homo sapiens
cccgaccccacttgtgctggaaggtaaaagtacacctgtaagccagcttggttccgcagactttcccgaggcccccgatccat

SEQ ID NO: 432958 - DNA, 75 bp, Homo sapiens
cttctaaagtgtccagtggatttttaatcacatgaggagagagctctgttagcagaatgaaaaaattggaagcca

SEQ ID NO: 432959 - DNA, 51 bp, Homo sapiens
tggatcaacttggagatttagagttcaggctaaagaattacctccaaagcc

SEQ ID NO: 432960 - DNA, 101 bp, Homo sapiens
tgaccaacaggaagttccgccatgacaaaagggtttacttggggtcttgggcgtctttggtactggcttttttaggggtctgcctggggattacccttgct

SEQ ID NO: 432961 - DNA, 100 bp, Homo sapiens
cagactcttggagccagaagctacatgacccctaaacgtgagaaagatcagtctaaagaaaaggagaagaaagtgaaaaaaacaattccttcctgggcta

SEQ ID NO: 432962 - DNA, 98 bp, Homo sapiens
tcagcactgactttcagctatggaatcggcaacagttacaacactccacaaatcagctcgccaaggaaacaaatgaattgctgaaagaattagggtcc

SEQ ID NO: 432963 - DNA, 75 bp, Homo sapiens
cccgagtcactgcagccaacccttcagcaaggaattcttttcaaagaagtcagattgttctttattcatgtttgg

SEQ ID NO: 432964 - DNA, 100 bp, Homo sapiens
aactgtctcagccaccagagctcagtctccagtcatcactacgacagcggcgcatgctactgattcagcacttagtcaccattactttaagtactgcaaa

SEQ ID NO: 432965 - DNA, 100 bp, Homo sapiens
gttgtcaacatagtcaaacatttacagtgagttctactgtagaaatcattataatgcaagccctttgctgggtacatgatgacttgaatcaagtagatgt

SEQ ID NO: 432966 - DNA, 75 bp, Homo sapiens
caaaattgcaccgaacacacctcagctggctgacattattgcaacaggtattaaaggtggaagaaggtccatatc

SEQ ID NO: 432967 - DNA, 76 bp, Homo sapiens
taatcaaccaactgttacaatcaaggtctatgaagatgataacaccctatgcccattgtcctgatctgaaaattct

SEQ ID NO: 432968 - DNA, 83 bp, Homo sapiens
ggagaaacatgcagattatatcgcatcctatggctcaaagaaagatgattatgtgtgatgaatgcagactctgctaccatttt

SEQ ID NO: 432969 - DNA, 82 bp, Homo sapiens
ccttcctgctgctcttcctgctcgtgctcactgtcaccgagccgctgcggccaggggttcaactagatatagcttcacaatc

SEQ ID NO: 432970 - DNA, 89 bp, Homo sapiens
tgagttaacacctctgccgctgctaaaagatcttatgccttcattcatccggcatggtccaacaattccaagacgaactgatatctgtc

SEQ ID NO: 432971 - DNA, 75 bp, Homo sapiens
aggcccgcgaccgtccgccagtcgtcccgagccagctgaggtgggtgtcctggttggcaaagaccggtcaagttt

SEQ ID NO: 432972 - DNA, 83 bp, Homo sapiens
cgaccccagtgaccggccccgcttcaccgagctggtgtgcagcctcagcaatggctgccatccggaagaaactggtgattgtt

SEQ ID NO: 432973 - DNA, 85 bp, Homo sapiens
cgcgaacatggacgccgtcaacgccttcaaccaggagacaatgcagatcttcgtgaagactctgactggtaagaccatcaccctc

SEQ ID NO: 432974 - DNA, 75 bp, Homo sapiens
gatgctgaggagctcctggtcgatgaagaggatgatgtttttggtgaagacctctgtgagtgaaagccttcagag

SEQ ID NO: 432975 - DNA, 80 bp, Homo sapiens
ctcactgccatcagctgcatcctccctatggcactggtatttaaaccatgtcagagctgcctcaccacaggaccttgctg

SEQ ID NO: 432976 - DNA, 82 bp, Homo sapiens
ctggattctgaggaccagcagatggccagtcacgagaacccaggggttgtgtccactgtggtccccgactctgcccacaagc

SEQ ID NO: 432977 - DNA, 100 bp, Homo sapiens
aaggagtacagggaagtctataagctttgcaacagaattacagagtatgatgtaaatattgcaacttcagcaacttcaaatattgaatatgcccacgttc

SEQ ID NO: 432978 - DNA, 98 bp, Homo sapiens
aatttgactgaagaacagaaggcgatcaaggccaagtatccgccagtcaataggaagtacgagtggctcaatcaagacatcacagatgtgtgtttttc

SEQ ID NO: 432979 - DNA, 88 bp, Homo sapiens
cctgcagttccagatgaaccatagcgtgcttcagcttatcacacagactttcagccaccacaatcagctggcacagaagacccggcgg

SEQ ID NO: 432980 - DNA, 75 bp, Homo sapiens
aaaactttcagctttggctttgctctctcttctgccatctgataatagggagagcttatggatggagaccaaaca

SEQ ID NO: 432981 - DNA, 100 bp, Homo sapiens
ggagcaaccccaagtcaccacaaaaacctatcgttagagtcttcctgcccaacaaacagaggacagtggactgacaggcagagaataggaatatgcagct

SEQ ID NO: 432982 - DNA, 89 bp, Homo sapiens
atcctcctggccaccgactcctacaagagagaagacacggttcaatgtgtagaccttctccctctccagtgtctccagcctccaatccc

SEQ ID NO: 432983 - DNA, 85 bp, Homo sapiens
cgcagagtgtaccaggggatgctggactgcatggtgttggggatgtcctttgcactgaccctgaactgccagattgacaaaacca

SEQ ID NO: 432984 - DNA, 88 bp, Homo sapiens
gctgaaataacccttgatcctcctcctaattgcagtgcatcagagaatttagatgagctgtcttcctccagtagctggttacttaacc

SEQ ID NO: 432985 - DNA, 88 bp, Homo sapiens
tgaacctgcggcctgacccagagccacttctcaccgagatgattcatgaaatttttgtggtcaacaaccaggaggagcttgagaggct

SEQ ID NO: 432986 - DNA, 100 bp, Homo sapiens
agaaaaatcacgggctgtccaggaactgtcggaacagaaccaaaggctattggatcagctcagcaggtctcagaccagtatccttcaggggttctcttac

SEQ ID NO: 432987 - DNA, 75 bp, Homo sapiens
cctgaagcctcaaagtttcatggaagcatagtgagtgtgggcgatcctaagaagaaatatacacggtttgagaag

SEQ ID NO: 432988 - DNA, 97 bp, Homo sapiens
gaacatctgtggcagtggacagagtcgtgagtgaccacagaaggctttctggaggcaggacttgaggaacagcatatgccatatatgagctggctgt

SEQ ID NO: 432989 - DNA, 87 bp, Homo sapiens
aagccttcaaggttgaagaccctggacaccaagccaggagaacgtcagctgcctcaacaccagcctggtgatcctgatgctggcccg

SEQ ID NO: 432990 - DNA, 100 bp, Homo sapiens
tctatcacaacggccgccgcctccggtgtttcccgcagccccggaaacagaactggttcttgggtcacctgggcctggaatagccaggtctggctgggtc

SEQ ID NO: 432991 - DNA, 100 bp, Homo sapiens
ggtcagcgggagaggcacccggaagctcccggcgtctgcaccccggcagcgcgaggaaatgcccaaagctgctgtgacttactcgaagcctcgattggcc

SEQ ID NO: 432992 - DNA, 75 bp, Homo sapiens
cttcgaggcactcaagtcctggctcagcaagactctcgagcccatggcggcgactggcggcgcgatggacctgac

SEQ ID NO: 432993 - DNA, 82 bp, Homo sapiens
ctaaaaagactgcaatggctgctgctaaggtcattgaccacagtggcgcccgccttggtgagtatgaggacgtgtcccgggt

SEQ ID NO: 432994 - DNA, 96 bp, Homo sapiens
gttgccatgaggaaagaattctccgagctgcttcggaggaacccagagcggaggctgggatctagcgagagagatgcagaagatgtgaagaaacag

SEQ ID NO: 432995 - DNA, 100 bp, Homo sapiens
gcaagtggatcttgacttatccaggccacttttcacttctgctgcactgctttcagcatgcaagtgattcgcatctaggtggcggcagtcgagaaggctc

SEQ ID NO: 432996 - DNA, 76 bp, Homo sapiens
ccgcggcctccgagcgcgcgggatttgcagaaagcagcatttttgaagctttacgactgtcctcatattcaaccac

SEQ ID NO: 432997 - DNA, 90 bp, Homo sapiens
tatgataaaaagctgaggccagatattggaagtacaccaggggttggaaaaaccacactaggcaaagaacttgcgtcaaaatcaggactg

SEQ ID NO: 432998 - DNA, 83 bp, Homo sapiens
cgcgccccgaggtctccgcggcccgaggtctccgcccgcaccatgcggctgggcagattcccaacttcttctggagcctgggg

SEQ ID NO: 432999 - DNA, 87 bp, Homo sapiens
gcaccctgtcggtattcggcatgcaggcgcgctacagcctgagaggagtgcctgtgaagaaaacggggtattgccctgaggcttata

SEQ ID NO: 433000 - DNA, 90 bp, Homo sapiens
ctgcgctgccgccgctctgaggagttaaaggtatatggctccatccctcgactccgtgctgatggactgcagggtggcggtagatttgct

SEQ ID NO: 433001 - DNA, 75 bp, Homo sapiens
gtacaccagcctcatgctgcgggactacaggttttcagctgctactaaagataatgagcataagcgttcactgac

SEQ ID NO: 433002 - DNA, 101 bp, Homo sapiens
tgtatcttacggctacacatctattatttatcgactctcatcaaaaagaaacctgggttttgatgatgatggttcagaatttcatgaacatatatttctgg

SEQ ID NO: 433003 - DNA, 83 bp, Homo sapiens
ccgccgtctcttcgagttcttcgtgctgctcaaggtcgcaatggaagaagagatcgccgcgctggtcattgacaatggctccg

SEQ ID NO: 433004 - DNA, 55 bp, Homo sapiens
gaggatcagaatcaagtcctatagcaggaacttagtgatttggcccgtgaccctc

SEQ ID NO: 433005 - DNA, 75 bp, Homo sapiens
tggttcttatagccctggagtgacctactcgcccgtcagtggttataataagatcgttcttgatgttggctgtgg

SEQ ID NO: 433006 - DNA, 145 bp, Homo sapiens
caagacattgtttctctccctctgcccccccttccccacgcaaccccagatccatttacactttacagagcatctttccttgaagaagtacattattgacattgtggttgaaagtacagctccagcagaagctttgaaagatgga

SEQ ID NO: 433007 - DNA, 100 bp, Homo sapiens
ccaagttgaaaatggacgagtaatcgcctgctttgattcattgaaaacatatctgaagagatggattaagaatgctttggattaaggattgtggagcaca

SEQ ID NO: 433008 - DNA, 50 bp, Homo sapiens
gatggtttcgagatcatatgcagttccatcaatggtgagcaccagcctga

SEQ ID NO: 433009 - DNA, 77 bp, Homo sapiens
cagatgtcaaagacttagcttttaaattaaaaaggaagctattcaccattgagagacggggtcttgctctgtcaccc

SEQ ID NO: 433010 - DNA, 131 bp, Homo sapiens
gtaaatcaccagatgatgctgtgttccaacaaatagcactttcttattccaaggctggcctgctgtctgccttgggctccctgatattgatgatttggctgatggcaacacctcatagccatgaaactgaa

SEQ ID NO: 433011 - DNA, 100 bp, Homo sapiens
aaccgacttctccccttgtggaattacaagagatttcgactgtggaaggatgaggaagatggagagaatgcccacccatatagaaacagtgaccctgtga

SEQ ID NO: 433012 - DNA, 75 bp, Homo sapiens
aaggccatgtgggaagcctggggaaatcccagcagcccgtattcagcaggggatgccaacagacagatcagcgac

SEQ ID NO: 433013 - DNA, 90 bp, Homo sapiens
ctcgaagatgaaccctttgtggaacaccatggtcatcggaggctatgctgatggagagaggctgaccggttccctgatgtgttacctgct

SEQ ID NO: 433014 - DNA, 100 bp, Homo sapiens
gctcccccgcctcggggagggcaccagccatccacgaaaatgctttcattgtgttcattgcctcatccctcgggcacatgctcctcacctgcattctctg

SEQ ID NO: 433015 - DNA, 75 bp, Homo sapiens
ctttacgttcatgtaaacagcatgacgtgaggccgtggatgcaggcattaagaaaactttagaaactgttccttt

SEQ ID NO: 433016 - DNA, 100 bp, Homo sapiens
tttgcatacaagcaggaaaatgagatgttatccagttgctgttgctgatgcaaagaagtctctagaactcaatccaaataattccactgctatgctgaga

SEQ ID NO: 433017 - DNA, 75 bp, Homo sapiens
gcgcgtttggctgtgacctgacggagtatctggaaagctcgggacaggatggggccagatcatcaaacaatttta

SEQ ID NO: 433018 - DNA, 102 bp, Homo sapiens
cccagaccctggagcctcagttggaagcagccgatccagcctgcggagcctgtggggcagaacatgttcttcaagtatacatggaataactttttgcataca

SEQ ID NO: 433019 - DNA, 98 bp, Homo sapiens
gtttgtatggacaggcttgtccatctgtaacttcattaagatgtgtcttgctgaatcagggctctcttatccctgccatcgacttacagtgggaagaa

SEQ ID NO: 433020 - DNA, 101 bp, Homo sapiens
ggttctaccaggaggtaatctgggcgcacagaatttatctgagtctctggctgatgaacttgctcttgtggatgttttggaagataagcttaaaggagaaa

SEQ ID NO: 433021 - DNA, 74 bp, Homo sapiens
ttggtgatgagtatgatgcacctgcagtagaaatgggacgtcggtcatcagatactgaagaagaaagcagaagc

SEQ ID NO: 433022 - DNA, 90 bp, Homo sapiens
tcttcagataatcagagtggaggaagtacagccagcagctatcaagtactagctccaactgcctattatgatcagactggtgccttagtg

SEQ ID NO: 433023 - DNA, 139 bp, Homo sapiens
atcgaggacgacttcaactatggcagcagcgtggcctccgccaccgtgcacatccgaatggatctttaatctcatgaagtacgacagctacagccgcttcttaaagtctgacttgtttttaaaacacaagcgaaccgag

SEQ ID NO: 433024 - DNA, 100 bp, Homo sapiens
aagcgcccacggggacggattggttgttttttcctgtatgaagcggttggcaccactgaagtgaccgaatgagatactgaccgagctttatcattactgg

SEQ ID NO: 433025 - DNA, 50 bp, Homo sapiens
ctgtacttgttccaactcaagatgaatcttcaagtcatgaatgtaaccag

SEQ ID NO: 433026 - DNA, 50 bp, Homo sapiens
agatgctgaaccatgctacctgcaagaacatccagtcatggataaaaatg

SEQ ID NO: 433027 - DNA, 83 bp, Homo sapiens
agatcctgttccaggctattctgttccagcagcagaacacagtgagaaagatcagtctaaagaaaaggagaagaaagtgaaaa

SEQ ID NO: 433028 - DNA, 100 bp, Homo sapiens
aaacaaaatgtcaacaaattgatggtgaaactggaacgccaagctgaagaagaacgaatacggaagcacaaagcagctgctgagaaagctttccaggaag

SEQ ID NO: 433029 - DNA, 97 bp, Homo sapiens
ggggttcagattgcaaggtggcaaggagcagaagcagcccttacaagttgcaaagaagtgaacatccacttgcccagctttactgccattcaatcat

SEQ ID NO: 433030 - DNA, 74 bp, Homo sapiens
ttaaagaagatgatgctccaagaacaatagcttgccctcataaagttatgaagacagtatggagtttccagacc

SEQ ID NO: 433031 - DNA, 100 bp, Homo sapiens
actggatgcagctgtggaatgtcaccgtggagaatgtcaagctgaaggcgtcctcttcttccaaggtgtgcctgaccctgacagccaagcgcatggcacg

SEQ ID NO: 433032 - DNA, 75 bp, Homo sapiens
ccccagttctggcagattctggaaactgtacattgaagcagagccatgctgtgacctacaagcaaactaaatagc

SEQ ID NO: 433033 - DNA, 101 bp, Homo sapiens
ggtcgagcaggtgccatcaggcacatgaacggtggagtcttcaaaggtgctggagaatctggtaaaagcaccattgtgaagcagatgaggatcctgcatgt

SEQ ID NO: 433034 - DNA, 75 bp, Homo sapiens
acaagcgacataccgtggagagacagctcaaagtctccactgcctcctgaagaagaggcaaaagatgaggaggag

SEQ ID NO: 433035 - DNA, 98 bp, Homo sapiens
cgtggtataccgcgacatcaagcgagggtgggtcctgggccccaacaactactacagttttgccagccagcagcagaagccggaagacaccaccattc

SEQ ID NO: 433036 - DNA, 100 bp, Homo sapiens
cgaggagggttgctagtggagaaggacgtgttcctcatgatccggcgccacaagaccaccatcttcacggacgccaaggagtccagcacggtgttcgaac

SEQ ID NO: 433037 - DNA, 82 bp, Homo sapiens
cgaggctgaggatgatggtagattgccagcctggtggagttgacagaagagatcctgaagctgctgatggaactggtcttcc

SEQ ID NO: 433038 - DNA, 50 bp, Homo sapiens
ccggagcacccgacccctgagtggatttcgccttcacagtgtggcagagc

SEQ ID NO: 433039 - DNA, 97 bp, Homo sapiens
agtactctgaaatgagtgaggaaaaacgagccaaacttcgtgaaattgaggaagtttatcatgaaaaggacatcaaggtattttttgataaagctaa

SEQ ID NO: 433040 - DNA, 107 bp, Homo sapiens
caccagatgggcacagatggctacatgccccgggaattggcatctatgtcacgcagtttggtggttatgccaaggaagcagactacgtagcacaagccacccgtctg

SEQ ID NO: 433041 - DNA, 74 bp, Homo sapiens
ttcattggaggtgtcactggatgttttctggatatgccgcagaaggatccgtgccagaagcaagcctgtgagat

SEQ ID NO: 433042 - DNA, 97 bp, Homo sapiens
cctcccaccttagcctcctaagtagctgggaccacaggattgtcaccagacctgcaatctatggagcagattcggagaattatgagacctactgatg

SEQ ID NO: 433043 - DNA, 100 bp, Homo sapiens
tattgatctccatacaaatgttgccactgctgttttagaacatataaagttccctgaatgtggtttctacggaatgtatgataagatcctgctttttcgc

SEQ ID NO: 433044 - DNA, 75 bp, Homo sapiens
gactccaggacacccctgaagccgagaaatgcaacgcacctcttgctttttcctccaaagtatgttatgttaagt

SEQ ID NO: 433045 - DNA, 100 bp, Homo sapiens
tcttccgccagtacctgcgtatccgcactgtccagcccaagcctgactatgaattagacctttacgagaagcacagttttgtcttcagtttcctctcccc

SEQ ID NO: 433046 - DNA, 75 bp, Homo sapiens
ccttgaagaggaagacggggcggaagaccaagatcatcgagatggtggaaaaatgctaatcactgaaagaaaaca

SEQ ID NO: 433047 - DNA, 75 bp, Homo sapiens
tggaatcatgggagaaaaccagacctccacttccaaggatatagagcaggtttcagatcgggtggagcggcggct

SEQ ID NO: 433048 - DNA, 90 bp, Homo sapiens
ctccactgtatctgggaattgccaaggagaagagtaccaaggctgctagtgaacagcgacgtggtcatgcagaaggcttttgtatgatgt

SEQ ID NO: 433049 - DNA, 90 bp, Homo sapiens
caaagcctagacctttcagccgctgccgaaatgatggtgatggaaagtggggactggctggttggtggagaccttcaggtgctggagaaa

SEQ ID NO: 433050 - DNA, 87 bp, Homo sapiens
aagtagaaactgccaagaaatccaaaaagccgagtagagaagttatcagtattaaaggtggaagaaggtccatatctttttctgtgg

SEQ ID NO: 433051 - DNA, 101 bp, Homo sapiens
gcctgaatggcgggaagtgtgaagcggccaatggcacggaggcctgcgtgagcatcagatccatgctgctgctgactcggagccccacagcttggcacagg

SEQ ID NO: 433052 - DNA, 75 bp, Homo sapiens
tcagagcagatccagaagctcttagccagcactcgctatccacctccagagtttgacataaagagcttctgcaag

SEQ ID NO: 433053 - DNA, 83 bp, Homo sapiens
cggcgagcgcgagcggcgcgagaaagtttgtgactggttatatcctctagttcctgatagatctccggttctgaaatgtactg

SEQ ID NO: 433054 - DNA, 50 bp, Homo sapiens
cagtgacaacgcccaagggggaggacagagcgggatgccaccagcttgtc

SEQ ID NO: 433055 - DNA, 102 bp, Homo sapiens
cggggcgggccgggcgggccgcgggagccgcacgcggcgatatggaagaggagggcaagaagggcaagaagagttcctgagttggaggtagaagaagaaacc

SEQ ID NO: 433056 - DNA, 83 bp, Homo sapiens
gtaagccagcggcaggaccagcgggcgggggcccacgaatctgaagaagacacttgaatcatgggtgacgttaaaaattttct

SEQ ID NO: 433057 - DNA, 83 bp, Homo sapiens
cctgaatggagtgaaaaagtggctcacaacattttgtcagactcagtgttcctgaaagtacacctttcacagcagtcttaaag

SEQ ID NO: 433058 - DNA, 74 bp, Homo sapiens
ggaggatcaagaagggcttcgtgcccaacatgcaggcaagagtacagcactgcatctgctctgtagccagtgac

SEQ ID NO: 433059 - DNA, 101 bp, Homo sapiens
ggggttctacgggaatacagtgaccgggttgtatcaccgtccagtcattgaagtcaacaagagagacatagtcttcctggtggatggctcatctgcactgg

SEQ ID NO: 433060 - DNA, 112 bp, Homo sapiens
gagccactggccatcctgcagcgagatgaggatgggcccaacattgacaacatgaccatggaagctgagccacttccgagtggatccagttctttaaggaagccggcattcc

SEQ ID NO: 433061 - DNA, 97 bp, Homo sapiens
tcaaaaggtggtaaactatacctactgtccctcaagagaacacaagaagtgctttaagaggagggaaaacccctgatcctaaaatgaatgctaggac

SEQ ID NO: 433062 - DNA, 75 bp, Homo sapiens
gttggagaactacagaaacctggtctccctaggtggatatcatccagtgaaaattggagacctcttcaatggccg

SEQ ID NO: 433063 - DNA, 75 bp, Homo sapiens
tttagaaggaggttcaggctacggtgagccgaagggtatcagctttcccagcctgacgctgcctccaggctggac

SEQ ID NO: 433064 - DNA, 50 bp, Homo sapiens
gaccagtttgccatcccaaggccgaagttatcaagtgggaatcctgtata

SEQ ID NO: 433065 - DNA, 50 bp, Homo sapiens
gccgtctgcaaagtgtccccggcaagaagtacaaaattggacagctgtac

SEQ ID NO: 433066 - DNA, 50 bp, Homo sapiens
tctggaagttctgaggaaaagcagctggtgctgtccgccctgcagtcccc

SEQ ID NO: 433067 - DNA, 96 bp, Homo sapiens
tggcttatgagtggaacatggctagcaggaatgcttactgttgcgtggttcgttattaacagattcccgactgtggcggttagcattggatttgct

SEQ ID NO: 433068 - DNA, 82 bp, Homo sapiens
ctgcagcccgcgcacagctgctcccttcgccttcgccctttccacctcgcggcagttcggccacggcatatgcctccaagga

SEQ ID NO: 433069 - DNA, 96 bp, Homo sapiens
gcaacaagacacatgcggacaaaatggaaaaggagaaaacaattttggaagctcaaaggatggcacccgaggtgatcctggccatggatgaggggc

SEQ ID NO: 433070 - DNA, 96 bp, Homo sapiens
gggtagctctcctgtcgatgatattccacaggaagaaacagaggaggaggaagtttctacagtaaatgtggagcgaatcaaggagcgtgtggagga

SEQ ID NO: 433071 - DNA, 83 bp, Homo sapiens
tggtgggacaacggcagcgtgcccatctggatcacagcccagaggcagacaatgcagatcttcgtgaagactctgactggtaa

SEQ ID NO: 433072 - DNA, 90 bp, Homo sapiens
agtttgtgcaggacaccgacatggaacagggactcactgggggaatgggtaccacagaccatgtcatcgtcctggcgtccacgaaccgag

SEQ ID NO: 433073 - DNA, 101 bp, Homo sapiens
ccgccgtcatgcagtccccggcggtgctcgtcacctccaggtctgaggagctctggccatggatggcccacgtgctgctgccctacgtccacgggaaccag

SEQ ID NO: 433074 - DNA, 100 bp, Homo sapiens
atgcttcaatggagaggactttgacaggccggtggtcgtgtccaactgctcctgcacccgggaggactatgagtggaaaccactgattgcttgtgtggag

SEQ ID NO: 433075 - DNA, 100 bp, Homo sapiens
ggggccgcgctgagggcgcccagctgtgattcgcctttgccagtctcatctcgtgtctgctttgttaagttccatgatccagactcagcagttgtggcac

SEQ ID NO: 433076 - DNA, 75 bp, Homo sapiens
cgaggggaacggaggccagagctgcggactccctggaggaaaagcggaagcggcagcggtctgaacgcctggaac

SEQ ID NO: 433077 - DNA, 100 bp, Homo sapiens
ttgttaaagttgttaagaataaggcctactttaagagataccaagtgaaatttagaagacgacgagatacctggaggcatcattgaagactcctgtgtct

SEQ ID NO: 433078 - DNA, 100 bp, Homo sapiens
actgtgaacacatcaaatcatttgacaaaaatttgtacagacaactcatctcttacccacagacttttggaaaagaatttgataaacattttgggaaagg

SEQ ID NO: 433079 - DNA, 101 bp, Homo sapiens
ctctattagtccacaattaatacattgtgtgaacaattatactcaatcttatccaatgaggaacccaacggatatcaccaggagactaaagtccatcaaaa

SEQ ID NO: 433080 - DNA, 100 bp, Homo sapiens
gtgtgcaatgccccgggctgtggacagcacgtcagctaactgttcagatgatgcaaaatcctcagattcttgcagcccttcaagaaagacttgatggtct

SEQ ID NO: 433081 - DNA, 100 bp, Homo sapiens
gagggaggcccgtcccacggtctgtggctacggatcccaggaccctcttcgcgggcgattcgcgtagcctcagtgcccctctcagctgaggaggaaccga

SEQ ID NO: 433082 - DNA, 98 bp, Homo sapiens
agggtgtcaggactaagagaagtcacaaaacagcagatttcccaagagcagcggaaaatgatccagtcacaggtcccgctcccggtcccctcggagga

SEQ ID NO: 433083 - DNA, 83 bp, Homo sapiens
cagcggccgggatagccccggcggagcccgcagcttccctgccggtgtggacactgccagcggctgcagccgacttggaatga

SEQ ID NO: 433084 - DNA, 96 bp, Homo sapiens
aaatcctacctaggtaatgtgtagttctcaatgcatcatgtcaggcagcttatgatgccaatttgtcccatgcatcttctaaagtactaaagagca

SEQ ID NO: 433085 - DNA, 75 bp, Homo sapiens
atttgccatcttcaagtttgttcaggcggaattcaatgctgatgatgaacctgctggccttcgtgtccgccgtgc

SEQ ID NO: 433086 - DNA, 100 bp, Homo sapiens
cagccatggccccagacttgtcgcacggatgcagaaaacttaatggaggaggctgaggcaattaagttggaatatgcaaggttggttaagttggcccaag

SEQ ID NO: 433087 - DNA, 83 bp, Homo sapiens
cacacaccggcctcagcccgcaccgaattggcagagggggtcgatttgggaggaaaggtgtggctataaactttgttactgaa

SEQ ID NO: 433088 - DNA, 100 bp, Homo sapiens
gaatgatattcagtggtgtttttctcaggtgaaaggagcagtagatgatgatgtagcagaagtgatatcagtatcaagataaaagtttggaatgggagaa

SEQ ID NO: 433089 - DNA, 90 bp, Homo sapiens
gaccacaggaattggatctactagtgcaggtgactctcctattccatctgtttcttcgggatcatcttcacctctttcagccacttctgc

SEQ ID NO: 433090 - DNA, 100 bp, Homo sapiens
atgccatcacacctgcggaacctgcgtggggcccactgatgatggtgaagaagagatggaagaagacacagtcacaaacgggtcctgagcagtgaggcag

SEQ ID NO: 433091 - DNA, 75 bp, Homo sapiens
taggaactgttctgccggaatttgaaaagtgcctagcagttgaacaacagatggattgtagttcagtcccaattg

SEQ ID NO: 433092 - DNA, 80 bp, Homo sapiens
gaggatgctcctgcctcccagagaggggagccggcgaggatcaaaatcttcgaaggaggcacaaattgaagtgatccctt

SEQ ID NO: 433093 - DNA, 75 bp, Homo sapiens
gttactcgcacgcggatttggctggcgtcccgcttgttcaggggatgaaggaagctcaggaaaggctgacgggtg

SEQ ID NO: 433094 - DNA, 82 bp, Homo sapiens
gcagtcctaccatgtcagccttcccagtagctgggaccacagcatttaaatcaaacggtattgagatggattgggttatgaa

SEQ ID NO: 433095 - DNA, 74 bp, Homo sapiens
tccaatgggcctttccagcccgtggtccttctccatattcgagagcaaattggtcaggagatgttggaaaacct

SEQ ID NO: 433096 - DNA, 98 bp, Homo sapiens
gcaggaggtcgctcggctgcaggcccaggtgctgaagctgcagcagcgctgccggatgatcacacgccgctatgcagagttctcctccgctcttgtca

SEQ ID NO: 433097 - DNA, 100 bp, Homo sapiens
gatgtccaaggccctgcagctgctgcacatgatgcaggagaaggatttgatcccaaagctgtttcaagtactggcccctcggtacaaagatcaaactggg

SEQ ID NO: 433098 - DNA, 75 bp, Homo sapiens
ggcgaccgccatggcgttcctcaaactccgtgaccaggtttggtgcacctcgatttggaggaagtagggcagggc

SEQ ID NO: 433099 - DNA, 80 bp, Homo sapiens
ataatatggtgaacggccgcctggcagggagtgcatccgccccaacccttttccccctcgtctcctgtgagaattccccg

SEQ ID NO: 433100 - DNA, 83 bp, Homo sapiens
cctgactctgggagcacgcagttaccacggcagcagctacagccccgaaggggtggagcccgtcagccctgtgagctcaccca

SEQ ID NO: 433101 - DNA, 73 bp, Homo sapiens
agacatggcggacggcagcggctggcagcaatctgcacatcgtgctgccacacgaggcttcattcgttatggc

SEQ ID NO: 433102 - DNA, 100 bp, Homo sapiens
gaaggcgcagttcgagagagacctgcaaaccagggatgagcagaatgaagagaagaagcggctgctgatcaaacagtgctgtgttaaatgagaataatgt

SEQ ID NO: 433103 - DNA, 76 bp, Homo sapiens
aagttttgtgcagattgccagtctaaaggaaatccaaatctcctcccaaagtgcccattgtgattcaggacgatag

SEQ ID NO: 433104 - DNA, 100 bp, Homo sapiens
cgggagtctgcggtcgttccctcggctgtggaccgggcggcacgcacgcggtgcagggtaacatggcggatgcggaagtgagaaagatcagtctaaagaa

SEQ ID NO: 433105 - DNA, 97 bp, Homo sapiens
tggcctctctctcccaacagcttacaggatggaaaagaatatttattccaggccaaggatgaggtgccgacgccaccgccgagcccatgatcctgga

SEQ ID NO: 433106 - DNA, 101 bp, Homo sapiens
gtgggacgccaagactggagaggaagcgactgcggatctccagcaccctgccggtggcactactgagagacgaggtgccagggtggttcctgaaagtgcct

SEQ ID NO: 433107 - DNA, 101 bp, Homo sapiens
ccatcactggcgtcaccatgggggctgtgctgggtgtcttctccctcgccagctgggaactttatattgctgttggaatatctggagccatccaacattta

SEQ ID NO: 433108 - DNA, 75 bp, Homo sapiens
acagtgaaaccctttgccatcgacatatttcctgtcaccaacaaagatttcagatgataacaccctatgcccatt

SEQ ID NO: 433109 - DNA, 98 bp, Homo sapiens
cagccagtggcgccagatagaaaacggcgagagtgggcgagaacgtccactgcgggccggcgaaagctggtctctaattaacagaagatggcaaagcc

SEQ ID NO: 433110 - DNA, 78 bp, Homo sapiens
tccctgcgggacctctcggaagccggccctgggaggagcggggacactgaggacctctctccaaattggcctctcaac

SEQ ID NO: 433111 - DNA, 98 bp, Homo sapiens
ctgaaggccagcaggaacaggctctagcgaaatgggtgctgtgtccccttcctgcatgtggcagaaagttgcaaagccccagcctttgtcgcagccgt

SEQ ID NO: 433112 - DNA, 75 bp, Homo sapiens
actatcgggagaaagtggagtccgagctgagatccatctgcaccacggtgctgttgccagagtctgccctccgag

SEQ ID NO: 433113 - DNA, 75 bp, Homo sapiens
tatgattggctctttagctgaaatacttctgaagatctatgggagtcgtcagattatactggagaaagaggaaac

SEQ ID NO: 433114 - DNA, 88 bp, Homo sapiens
gaaaagctttttaaactgaagacaccagcatgtcataccctaatgatcccagcaagataatgtcctgtcttctaagatgtgcatcaag

SEQ ID NO: 433115 - DNA, 100 bp, Homo sapiens
cgtggccttacggggtgctgtcacgctgcctttggcagcctaccagcactacatcctggccaaggctaacagagaccctgatgctggaattgatgaagct

SEQ ID NO: 433116 - DNA, 115 bp, Homo sapiens
cgagcggggaatggtgaagccgatgatcagagtagaacagcagccagattatcgcaggcaagaaagcagatgacaagagcacctcaaaggcagcagcctcaaggagcagccatgg

SEQ ID NO: 433117 - DNA, 98 bp, Homo sapiens
aaattcttcgttctgtgcggcgacctcatccacgccatgccaggctgttcacggaagaccaggatgtagatgagggacttgtctatgacactgtattc

SEQ ID NO: 433118 - DNA, 75 bp, Homo sapiens
aaaaagggactgctaagaagataccaccagctcaccatctgctacctggatatgctgatgaccagtgaggagcgc

SEQ ID NO: 433119 - DNA, 74 bp, Homo sapiens
agatcggtcgtcgcttcagtgaagaaaggggtgctacatccattgtgtacagatgcaaacagaaggggacccag

SEQ ID NO: 433120 - DNA, 75 bp, Homo sapiens
gaaagagaaacccggagggcgccgggagagcgcctgctcgctgtgcccccgggttatgacgacccccaataaagg

SEQ ID NO: 433121 - DNA, 88 bp, Homo sapiens
gaagaagagcaaaaggcggagctgtagccactgtagcagcaagtatgccaagtacatggaaaaccatagcattgaaggagtgaggcat

SEQ ID NO: 433122 - DNA, 50 bp, Homo sapiens
cgatttggaggacagagactgcaatatccggctgctttgatgaacctggg

SEQ ID NO: 433123 - DNA, 75 bp, Homo sapiens
acttcgttcaagacaggtgtttaagctgacctgaaaaaaatgtctggatttctagagggcttgagatgctcagaa

SEQ ID NO: 433124 - DNA, 75 bp, Homo sapiens
ccacagccagcaccaccaccaccactgtttccacgacagcagcagggaaaccatctgccgtgtgactggtgggat

SEQ ID NO: 433125 - DNA, 100 bp, Homo sapiens
ctgcacttcttttttgagaaaggaaggaatatatcctgactgatttcactcaagactgcttgcaactgattgcagacagtgaaacaccaactatacaaaa

SEQ ID NO: 433126 - DNA, 74 bp, Homo sapiens
actatccgtttgttcaggaaccaccagtgacagagtatacaaaactaggatatgctggaaatacagaaccacag

SEQ ID NO: 433127 - DNA, 90 bp, Homo sapiens
tgaagagctatggtgaaacaccactgaagcattgccaagaaggggcttgttccctgcaactaccttgaaccagttgagctgcggatccac

SEQ ID NO: 433128 - DNA, 110 bp, Homo sapiens
tgcagatcctttctactggatgagagttattctggcttccaatagaggatgcgtattggatagcaatgaatagttctctgaaatgtaaaaccctcagcgacatctttctg

SEQ ID NO: 433129 - DNA, 108 bp, Homo sapiens
agaggggagtcatcatgagcgatgttaccattgtgaaagaaggttgggttcagaagaggggagccatgtggctagaaatcctcctcacttcagtgctgggctttgcca

SEQ ID NO: 433130 - DNA, 100 bp, Homo sapiens
ctggcgacccattcaggcacttatggccatttcagccaccaggtctaaactgcagtaatccatttactcagctggagaggagacatcaagaacatgccag

SEQ ID NO: 433131 - DNA, 100 bp, Homo sapiens
ctttaatccggcagtgaccgtgtgtcagaacaatcttgaatcatgaagctactaaccagagccggctctttctcggagcgcctggaccatgctgctgagc

SEQ ID NO: 433132 - DNA, 75 bp, Homo sapiens
ttatgatgagcagccccccaatgtcgaggagtggaatcatcggactcaggtacatctgtgagtgagaacaggtgt

SEQ ID NO: 433133 - DNA, 83 bp, Homo sapiens
aggcaccactaataatcagacctgattctggaaaccctcttgacactgtgttaaagctgtgtgtaacagcatctcaaaccctg

SEQ ID NO: 433134 - DNA, 74 bp, Homo sapiens
aagagaagacctcagatgtgaagtccattaaaggcattgatcaatatgacagagatagcatcataaatgacttt

SEQ ID NO: 433135 - DNA, 96 bp, Homo sapiens
gcattgccaaaagaacagacacgcttcaacagagttgatgaagattttaggtgtctttaatacatctggtggaagtcactccggtcagaattcagg

SEQ ID NO: 433136 - DNA, 73 bp, Homo sapiens
ttaattcatatgaccatgctcacaagcagggagagcttatggatggagaccaaacatccagatctggagtgcc

SEQ ID NO: 433137 - DNA, 100 bp, Homo sapiens
tggaagcgcagcaacagcaagctcccgggcagtgccggtggtggtgtgcacattgagccccggtatagacagttcccccagctgaccagatcccaggtgt

SEQ ID NO: 433138 - DNA, 98 bp, Homo sapiens
gtgctgtgtctactagtgggaatttaaatggtcagcttttgccaactgttttcaaatcacatgcatgggggatcttacacacactccttgagatgttt

SEQ ID NO: 433139 - DNA, 113 bp, Homo sapiens
aaactggtacggaagatcgggtctggctccttcggggacatctatttggcgatcaacatcaccaacggcgaggtgtatcagttcctatccctgtgattggactgagggacgaa

SEQ ID NO: 433140 - DNA, 92 bp, Homo sapiens
tggcggcggcgggtcaggagcagccgcagcgacggcggcgacagcaggtgtcgtgaaaactacccctaaaagccaaaatgggaaaggaaaag

SEQ ID NO: 433141 - DNA, 80 bp, Homo sapiens
accgagaccgtgaccgagagcgtgaccgagagcgcgaatatcgtcatcgttagaagatctacgaactgcgtgtgatggag

SEQ ID NO: 433142 - DNA, 82 bp, Homo sapiens
tgctcatccattctcctgccacccccagacctcctcagctccagactccatcaagaatgctggaggaagggtgtttgtccac

SEQ ID NO: 433143 - DNA, 100 bp, Homo sapiens
ctggggacgctgcaggtgctagcgctgctgggggccgcccatgaaagcgcagccatggcgggaactcgaatcatttatgacagaaagtttctgttggatc

SEQ ID NO: 433144 - DNA, 99 bp, Homo sapiens
ctgcacccccatcagccctcccatcccagggcagcatctcccaggataaggaaagaagacagctgccaggcatcagagactaaggtgtcagtatgttct

SEQ ID NO: 433145 - DNA, 51 bp, Homo sapiens
cctatgggcacaggcagtgtctggaattggagaaacatcagatggagtgag

SEQ ID NO: 433146 - DNA, 50 bp, Homo sapiens
caaactctcattcttcagcactccacgtgtctttcaggttgcagaaaaga

SEQ ID NO: 433147 - DNA, 100 bp, Homo sapiens
cttccagatgtgtaatacattactgcagagaaacacggaaactaggaagaggaaattaactatctgtacttataaggtcagaagaggccaagtgatggaa

SEQ ID NO: 433148 - DNA, 90 bp, Homo sapiens
aactccccagcagcacgtgttggaatggacttcggaccctggcctcttgggatgcaaagggtgtcaaattgagaaccaggtagatcccca

SEQ ID NO: 433149 - DNA, 88 bp, Homo sapiens
gagtgaacagctggccaaagaattgcagttagaagaagaagctgccgtttttcctgaagttgcactataatgtaactgcaaactccaa

SEQ ID NO: 433150 - DNA, 97 bp, Homo sapiens
tgggagacaggctgcacgacgatcccccacagaagccccctcggtccatcaccctcagggattatatgcgtcaggcaggagaagtgacttatgcaga

SEQ ID NO: 433151 - DNA, 100 bp, Homo sapiens
acctgcccaaggggccggacacgctctgcttcgacaaggacgagttcatgaaggagtcgtaagaaagcagtgggagttgaagtcattgtcaagtgcttgc

SEQ ID NO: 433152 - DNA, 90 bp, Homo sapiens
ctgaagtatgcagttctgggcaaatccaatgttccaaaacccagatggacgtgcacattactccggggacccatgcctcagagcatgcag

SEQ ID NO: 433153 - DNA, 100 bp, Homo sapiens
agaagaccaccatcaacaatgagtacaactaccgctgctggaccacaaaccgctgccagaaaaatcttcccagacccgtcagattttgaccgctgctgca

SEQ ID NO: 433154 - DNA, 51 bp, Homo sapiens
acctgggacaccgcggaagtcgggaaatgggtgccttgtactgtctccttg

SEQ ID NO: 433155 - DNA, 100 bp, Homo sapiens
taaaggagacctcaccatagctaatcttgggacatcagagggtcgcttcatgcagattgactttgaagatgtgattgcagaaccagaagggacacacagt

SEQ ID NO: 433156 - DNA, 76 bp, Homo sapiens
ggatctgaacttcctgggcagccgcccggtccagtttccccctcccaggatttcgactcagttcagcgaagtcacc

SEQ ID NO: 433157 - DNA, 96 bp, Homo sapiens
ttttccggtatattgattgggagaaacttgaacgcaaagagatccagcccccttataagccaaaagctaggcattcgacttacagcagtgtgcggc

SEQ ID NO: 433158 - DNA, 90 bp, Homo sapiens
attttctttgtgcttttccagtttgcaagttttccacatatggtgctttctcttcatcagaagtatctcgcacctgaggtgcttcataag

SEQ ID NO: 433159 - DNA, 74 bp, Homo sapiens
tgtagagctaagaggaaagaaaattagattacagatctggtttatcttgcagattatggactttcctacagata

SEQ ID NO: 433160 - DNA, 82 bp, Homo sapiens
caagagggcagcagtgaggaattgtactgtatctgcagaacaccttatgatgagtcacagagttcatgatcaagtgttgccc

SEQ ID NO: 433161 - DNA, 101 bp, Homo sapiens
cccgcccgcgccggaagagccacgccggaatgaatctgaagtctgctgcagtaaaacacagaaggctttaaaatgttttcttgcataaaattcaaaacttt

SEQ ID NO: 433162 - DNA, 75 bp, Homo sapiens
gggaccgttctcagctccagtggaaccagggtgaggacgcttgagcggaagttagaagcaaaaatgatcaaggag

SEQ ID NO: 433163 - DNA, 90 bp, Homo sapiens
aggagctgaaccttcaagaatacagaaacagaaactggccatggtataatggaagaaccagaacttactttaataagcaccactgatacc

SEQ ID NO: 433164 - DNA, 75 bp, Homo sapiens
aaagccttacgatctatgcccaagtccagaaaccaggtcagctcttgccaggtaaaaagttttgggaaacagatg

SEQ ID NO: 433165 - DNA, 120 bp, Homo sapiens
gattattggaaatatcctgcagttagatgttaaggacatgagcaaatccttaaccaatgtggatgaaactcagtttaagaagatcctcggctacatcaacacggggaagcaagagggggc

SEQ ID NO: 433166 - DNA, 95 bp, Homo sapiens
atgttggtatatcctactttctggatctgtgcttgtgaaaggctccatggtcttgcctccttgcagtgccctgcaggagtcattaaatcaaaact

SEQ ID NO: 433167 - DNA, 98 bp, Homo sapiens
atggcagccctcatacctcaagggttctcttgtttatcgagggttttgggctggtggtctcggcaggtgaagattgtccccagtggatggtccctatc

SEQ ID NO: 433168 - DNA, 80 bp, Homo sapiens
agcctgcacggatggtcttgaaacacaaatggtttttggtgctactcgtgagcagtagtcgccatccagacagatggatt

SEQ ID NO: 433169 - DNA, 50 bp, Homo sapiens
cacctttggatccgcagaaatcgagccagaagatcagctgccatgttact

SEQ ID NO: 433170 - DNA, 109 bp, Homo sapiens
cgggagcacgggcgccggcatagtacaatgaggcagccagcggatcttggggggacttgatctcatcttcatgccaggccttgggtttgacaaacatggcaaccgactg

SEQ ID NO: 433171 - DNA, 74 bp, Homo sapiens
tcaatgttgccaaaatgtttcctaaagttcgtgaatctcaacttgatgaaaactttcggaagagaaagttgcct

SEQ ID NO: 433172 - DNA, 100 bp, Homo sapiens
cagaagacagagggttttcttttgagcggacaaggcaaaatctcagcaagttcggacctctagtacaataaggcgaacctcctctttggatacaataaca

SEQ ID NO: 433173 - DNA, 100 bp, Homo sapiens
attgtgctgccttggccaaaagagctcatagaagacccagatgtcaagatcaaactcaagcttcagtctttaatatatcctgcccttcagacgcttgaca

SEQ ID NO: 433174 - DNA, 87 bp, Homo sapiens
atggtgaaacaccactgaagcattgccaagtgtcagaacctccatgactccgagcacttaacgtggctcattgtaaatcacattcaa

SEQ ID NO: 433175 - DNA, 74 bp, Homo sapiens
tacctctttctgggtgactatgtggacagaggctatttcagtatagaggtttattcagtcaccatgaagctgct

SEQ ID NO: 433176 - DNA, 83 bp, Homo sapiens
gcgagcgcgagcggcgcgagaaactggattactgggccagttacaggtcttgttcttactggacatccaaggtcaggcatggg

SEQ ID NO: 433177 - DNA, 98 bp, Homo sapiens
gaaaccccagacatcaaccagctgccgccgtccatcctgctcaagctagagaccgttggatggcagcttaaccttcagatggctcactctgctcaagc

SEQ ID NO: 433178 - DNA, 96 bp, Homo sapiens
gacaacatcaccgtactgcatgtgaagctcaccgagacggcgatccgggcgctcgagacttaccagagccacaagacctttccaaagtgaaactga

SEQ ID NO: 433179 - DNA, 100 bp, Homo sapiens
tccgcttccgggaccctgacctccggcagatgtttgggaagcggcaccatgtactacagacggctcatccctcccctttgtcagtgtatagagggttctt

SEQ ID NO: 433180 - DNA, 100 bp, Homo sapiens
tgtcggtggcggggctgaagaagcagttctacaaggcgagccagcccgagggcaacatccttcgagaccggttcaagagcttccagaggaggaatatgat

SEQ ID NO: 433181 - DNA, 74 bp, Homo sapiens
cgatccgctggcgctagtctgaccctccgccaggcaaaaggaaggcagacatctggtccctgggcataacagct

SEQ ID NO: 433182 - DNA, 100 bp, Homo sapiens
attaactttgcgctcagacgagtaacttcggcaaagggatggggagagtctcttcaagaaaatgaggaggaggagattgggaacctagagcttgcctggg

SEQ ID NO: 433183 - DNA, 106 bp, Homo sapiens
ggaaaatttcgatattgaagtgtcaaaatccatagatggaaaagatgaggagtgaattccttaggcgtatcctccttggagcacatcactcacagcctcctgggac

SEQ ID NO: 433184 - DNA, 76 bp, Homo sapiens
aagatcagctccaggcctgggaaagtgaagagcctgctccaagttttcctcagtgaggccttttgctggattggtc

SEQ ID NO: 433185 - DNA, 76 bp, Homo sapiens
agctattatcagcaagttgacagatgctagttggtataccgtggccaaactggcaagacgcagtcaagaacgggac

SEQ ID NO: 433186 - DNA, 75 bp, Homo sapiens
gcggccagagcgccggcaagagctcggtgctggagaacttcgtgggccggcaccatgactcctgtgaggatgcag

SEQ ID NO: 433187 - DNA, 100 bp, Homo sapiens
cacccaggccttctcgcgctgcctggtcgctggtgaagcccgcggcgcgcgcctctcccggaccctgcaggaaagtgttgtgaagagcgaagacttttcg

SEQ ID NO: 433188 - DNA, 98 bp, Homo sapiens
tggcaccaaagagggcatcgagaaagctcgccatgaagtcttactcatctctgccgagcaggagttaacaccgtcaccaccttggtggagaacaagaa

SEQ ID NO: 433189 - DNA, 74 bp, Homo sapiens
tgcagccacatactatccgtttgttcaggaaccaccagtgacagaccagagactgctgctactttgaaacgtac

SEQ ID NO: 433190 - DNA, 100 bp, Homo sapiens
gtgcgcaaacttgacactcaccctgaccgtgccggtggtggtgtgcacattgagccccggtatagacagttcccccagctgaccagatcccaggtgttcc

SEQ ID NO: 433191 - DNA, 100 bp, Homo sapiens
aaaatatcggagaataatttctttctcgctgatcgcctaacttctactgacgaagcttggaagttgcagaagggaaacagaagtacctgtgcgccagcag

SEQ ID NO: 433192 - DNA, 96 bp, Homo sapiens
acaagagaaactttatgtgcctgtaaaagaatacccagataaaatgatgcatcctgttgccagcagtaatccagctttctgtgggcctggcaagcc

SEQ ID NO: 433193 - DNA, 82 bp, Homo sapiens
gattctcagggattgatcgcctcttcaggttttaaaatcaaagatgggaaaatcggagaaaattgcccttccccatggccag

SEQ ID NO: 433194 - DNA, 80 bp, Homo sapiens
tcttcgtagacattgtctcccaagacaacttcctcaccagcaccttacagattatgagcttacagaaagcctggcctaca

SEQ ID NO: 433195 - DNA, 100 bp, Homo sapiens
aggagacggcggccttcgaggaggtgatgatggacatcggctccacccgggtcagaggtttcctatccccctcaagcccccacaggagtcaccaacccag

SEQ ID NO: 433196 - DNA, 98 bp, Homo sapiens
cttccttcagcagcgcaggcggtggtccctgaggcccgtggaaggagtcaaacttgcgggaattttgcagaccggtaccgggagtaccagtggatcgg

SEQ ID NO: 433197 - DNA, 83 bp, Homo sapiens
gaaataaaagatgaactaaagaaaaagaagaatctcaaccgatctggtgaaaacttttggcccgtttggaagcggcagccagg

SEQ ID NO: 433198 - DNA, 74 bp, Homo sapiens
gaggacgccgggacacctggaagccgagaaatggtgaacctatgggtcgtggaacaaaagttatcctacacctg

SEQ ID NO: 433199 - DNA, 98 bp, Homo sapiens
gcccagtcggacggttccgaggcgttgccgggagccgggcgcggctctgtgtggactcggagaaacgcgggtgcagtacctgaaggacaggcagctgg

SEQ ID NO: 433200 - DNA, 50 bp, Homo sapiens
acaccaaacatttcctgccgctcggaaatagacagacggttggaaaaaaa

SEQ ID NO: 433201 - DNA, 100 bp, Homo sapiens
ctctcatgaagcaaccgcccattcagtctacggctggggccgtcccagttcgcaatgagaaaggcaccgggagcctggccgctgcagtggagacagcctc

SEQ ID NO: 433202 - DNA, 50 bp, Homo sapiens
caacggggcactgacctgggtggattctgaaaccttccttgtatccctcc

SEQ ID NO: 433203 - DNA, 100 bp, Homo sapiens
ctttctttcttttctttttgtttgccccaggtccagcaagactatgaatctctgttccaaatgctttgctgaatccagggcctgaaaacccagaatgaac

SEQ ID NO: 433204 - DNA, 50 bp, Homo sapiens
atcctcttctgctgttctggaaagaaatacccgcagcccaaagggcagaa

SEQ ID NO: 433205 - DNA, 87 bp, Homo sapiens
tgcggccgaagcgtggggcgcgcgtgcggaggaccaggcgcggcgcggctgcggctgaggaatggtcctcgtccgaagtgagaatgg

SEQ ID NO: 433206 - DNA, 100 bp, Homo sapiens
ggcgcagtgccggaacactgtggcggccatcgaggaggcctcaggagtgcaagtagctgatgaagtatgtcgcattttttatgacatgaaagttcgtaaa

SEQ ID NO: 433207 - DNA, 90 bp, Homo sapiens
cagcgggtcaagtgcagtacctggatctcatcaaaaaggacaccagcaagctgttcaatgaggagaaccagacgtcctgggtcctctcca

SEQ ID NO: 433208 - DNA, 100 bp, Homo sapiens
gccgcaatgccattaccagttcctacagctccactcgaggcatctcacagactgtcagcatcaataaggccattaatacgcaggaagtggctgtaaagga

SEQ ID NO: 433209 - DNA, 88 bp, Homo sapiens
ggcgggcgagggcgactacgaccagtgaggcggccgccgcagcccaggcgcgggggcgacgacagaatttaagaagaggattacctca

SEQ ID NO: 433210 - DNA, 100 bp, Homo sapiens
gacggctgtctctggactggacagcagtggcgtccgcttttctctaaggaacccggaccatggccaacctggagcgcaccttcatcgccatcaagccgga

SEQ ID NO: 433211 - DNA, 98 bp, Homo sapiens
ggcgcgggaggcggtggcggcggctgcccggggccaacatgaccagcttgacagagccaattcgctattaaaccagactcaacagccttacaggtatc

SEQ ID NO: 433212 - DNA, 98 bp, Homo sapiens
ggatctccagaactgttctctggaggaccctggtccaaactttcatcaggcacataccactgtcatcatatttggagcaagaggtggtggtggccttc

SEQ ID NO: 433213 - DNA, 100 bp, Homo sapiens
atttagaacagaaaacagtctgtggagagaatctgcctcctttaacttatgaccaggaactgtggctgcaccatctgtcttcatcttcccgccatctgat

SEQ ID NO: 433214 - DNA, 98 bp, Homo sapiens
tatagcgtggcaacccagctgttcattggaggtgtcactggatggctaaaaggtcagattcctgaaattaaacagactttggaaattctaaaatacat

SEQ ID NO: 433215 - DNA, 101 bp, Homo sapiens
cgtgggcgtggcgggccgcgcgcgggtctccgtggaagtccgtttcgtgagcagcgccaaggagatgcttttgacaagttataataagggagagatggtag

SEQ ID NO: 433216 - DNA, 97 bp, Homo sapiens
caaggggcaattgggcctctaggatcccccggattaataggacccaaagagtgtgaacatggctacgcctcttcattcccgtccatgccgagccccc

SEQ ID NO: 433217 - DNA, 95 bp, Homo sapiens
gtgggaggattgactgctgctggggctgggctcgccagtcttggggacagtgtcagcgaaaggacctcggaagtcttctaaggagagtcatggcg

SEQ ID NO: 433218 - DNA, 89 bp, Homo sapiens
acgagggggacttggcgatggctctggtcctggatgagaaagacaggtttttctatatgagtggagaagacagctgttaccagggaggt

SEQ ID NO: 433219 - DNA, 75 bp, Homo sapiens
attggctcccaggtgtctgagcacagcatcatcaaggacttcaccaagcagctggaaatgcagaaatcacaaaat

SEQ ID NO: 433220 - DNA, 83 bp, Homo sapiens
ccttcagtacttggcaagatttgatgctcttgtgctcagtgacatcattcagatgtacctgtgtggtctaagctggaatctgg

SEQ ID NO: 433221 - DNA, 82 bp, Homo sapiens
accgcggacctcgccccgggacagcgaggagctgagggaccctgattgtcagtggcttcgccccgaggagagctgactgccc

SEQ ID NO: 433222 - DNA, 83 bp, Homo sapiens
tctggctctggaattgctactgctgcctctgtcactcctggtgaccagcattcaagtgttctaagaacggaagcatctgggct

SEQ ID NO: 433223 - DNA, 100 bp, Homo sapiens
attagcaatattatatagtatcgtggacagcagagttgctccaacagcaaatattttttcccagcaacaactatatattggttcaacggctggggttgcc

SEQ ID NO: 433224 - DNA, 75 bp, Homo sapiens
gatatcgacgtcgtgatccagaagtccagagctgaggactgcctgtttgcaggacttcaaacaagtgtgaagagg

SEQ ID NO: 433225 - DNA, 100 bp, Homo sapiens
agcctttcgaccaattattgtggcgctaatggcccgagcatgcaatattcatcataacaactcccggacttcatagacctcacgttgtcgaagactcaac

SEQ ID NO: 433226 - DNA, 74 bp, Homo sapiens
caacttatggaactggccgggctgagctgtgctacagccatcgccaagaccacagtccatgccatcactgccac

SEQ ID NO: 433227 - DNA, 50 bp, Homo sapiens
gccctggctggggatgtgcgagggctgaagaagatgcagagcagcctgaa

SEQ ID NO: 433228 - DNA, 75 bp, Homo sapiens
gtgtgcgcgcccgccagctgctccggagatacgagacatgaggctgagctggttccgggtcctgacagtactgtc

SEQ ID NO: 433229 - DNA, 75 bp, Homo sapiens
ggctgggatcaccaggagaaattgcagctgcatgaatcccaaaaagatgaaggtcaccgtgtccaaagggggcga

SEQ ID NO: 433230 - DNA, 87 bp, Homo sapiens
tgtatgcatactccacagcacctggacagagcgggatgccaccagcttgtccaaagggaagttccaggagctcctggtgggcatcgt

SEQ ID NO: 433231 - DNA, 90 bp, Homo sapiens
gggaggacaacttcgcccgggacttcatgatatctaacagtgatacgccttcaccaccacctggtttgtcaaaatccaatccagtcatcc

SEQ ID NO: 433232 - DNA, 100 bp, Homo sapiens
cagcgactacgcggccgcggagacctacctgcggcgtcggcagctgctgctccgagatgcagacagacatgctgaactatctggaagtccactgaaaagc

SEQ ID NO: 433233 - DNA, 90 bp, Homo sapiens
gcggctgaggaggggccccagcagcccccgaaggccctatcaggacatggagtatgaaagacgagtgcctggaagagctgggatgtctgg

SEQ ID NO: 433234 - DNA, 50 bp, Homo sapiens
ccccggagcctttgactggtttctggagagagaactcgatgccaccgcaa

SEQ ID NO: 433235 - DNA, 99 bp, Homo sapiens
ggagggtgttgtggaaaatggaattaccacatgtaatggaaaggagcaaggacaaggccgtggcggagcctgtcagccgcctgctggagagcacgctca

SEQ ID NO: 433236 - DNA, 100 bp, Homo sapiens
agcgtggctgtctcctctctccgccatgatgtcaagccctccaacatcctagtcaactcccgtggggagatcaagctctgtgactttggggtcagcgggc

SEQ ID NO: 433237 - DNA, 100 bp, Homo sapiens
tggccatcaccatctactgccaggcatcggaggagttcctgaacggcagggcagtgatgagttccacccgttcatcgaggccctgctgcctcacgtccgc

SEQ ID NO: 433238 - DNA, 80 bp, Homo sapiens
ctccactgttcctggaggaatccgagaagagcagagcggagggagccccagacacggactgcctggacagatcctttcgg

SEQ ID NO: 433239 - DNA, 101 bp, Homo sapiens
ggggaggtggcctgcgcttgtagagactgcatccccgagacgatggcggagggagataatcgcagcaccaacctgctggcattgcttcaccggcagctacc

SEQ ID NO: 433240 - DNA, 100 bp, Homo sapiens
agacagctggaggaggaacttcgaaccatggaccaggccctcaagtccctgatggcctcagaggaggagatgggcactgtgccccgactgcggcctcgcc

SEQ ID NO: 433241 - DNA, 82 bp, Homo sapiens
acaccgagtactcattcctcaaagaagtccggtacttccagtgtggcctccaaatatgaagagctggagtgcctctacgcag

SEQ ID NO: 433242 - DNA, 100 bp, Homo sapiens
gttggctgcagatttgtggtgcgttctgagccgtctgtcctgcgccaaggagccttcacgtaaatgggtccagtcatgcctcccagtaagaagccagaaa

SEQ ID NO: 433243 - DNA, 95 bp, Homo sapiens
cgaacgaccaagagggtgttcgactgctagagccgagcgaagcgtatcatgatattagctggtttgacatcaagtcatttgtgagtcatcagatc

SEQ ID NO: 433244 - DNA, 80 bp, Homo sapiens
cttcctgggaacaggatttcatgttgagaaagcctttggggcagctggagaaacaattgtcattgaagaacttcttgacg

SEQ ID NO: 433245 - DNA, 75 bp, Homo sapiens
caacgtgttggaccttccggagcttctcagaagacagagggttttcttttgaggacacatgacggaagtgtgtat

SEQ ID NO: 433246 - DNA, 100 bp, Homo sapiens
ggaaggagaaggcttcatccttgggggagttttcgtggtgggatcaggaaagcagatcatcccgatggtcactgaactgattgggagaagccaccgctac

SEQ ID NO: 433247 - DNA, 75 bp, Homo sapiens
agtcaacaaccgcttcgagctgagtctctggtaagaagagtgaaagcaaagaagccaagaagtctgaagaaccaa

SEQ ID NO: 433248 - DNA, 74 bp, Homo sapiens
tttggacctgaaacagaaattctggaacacctatatgatctcacattcttgaaggtggcattgaagagcactaa

SEQ ID NO: 433249 - DNA, 75 bp, Homo sapiens
ctcgagagcgagagtcacgtcccggcgctagcccagcccgacccagcctacaaggagaagatgaaggagctgtcg

SEQ ID NO: 433250 - DNA, 80 bp, Homo sapiens
cttcatcaaaaatagtgatagctttgataagtcctagcagaagatgtgactcagactgcctctgggtggggctggctggc

SEQ ID NO: 433251 - DNA, 111 bp, Homo sapiens
gccaggtcaactcacaggaggattacaaggccgtcgtcagcttatgcggaggcctggacagttctttttactctgacgtctgtggttgtacttgtgattacaacggactgg

SEQ ID NO: 433252 - DNA, 83 bp, Homo sapiens
gctgaccaccaatcagatccgtaagggcgccatgttttggaagtttgacctgcacacaagctcgcacctggacacgctgctgg

SEQ ID NO: 433253 - DNA, 83 bp, Homo sapiens
ctctaacgttttagaaaatcataacaagcggttctctaccctgtaaagggtaaaccagacttgaatacaacattgccaattag

SEQ ID NO: 433254 - DNA, 83 bp, Homo sapiens
gtgacgctatcaactgcagagattgatttatactatggtggggaagctttctctgtagagcagccacagtcttttacttgtcc

SEQ ID NO: 433255 - DNA, 75 bp, Homo sapiens
aacgcagactcgagtgcgaagcgcgcagtcgccgggttgtgggctgcacactgcagaaagatacagctgaaaaag

SEQ ID NO: 433256 - DNA, 133 bp, Homo sapiens
ggctccggctccggcttctgctgttgctcttctccgccgcggcactgatccccacagcctcctctattggcccaggaagcccacccagccccgccacgcagagcccagaaggaaagaaagcctcatgcctgag

SEQ ID NO: 433257 - DNA, 82 bp, Homo sapiens
aacttgcagaaatcacattggaccctcctcccaactgtagagccagccccagtgcctgctgagccgtttgacaacactacct

SEQ ID NO: 433258 - DNA, 100 bp, Homo sapiens
gaccgagcgcggaccctgccggcctccgttctcttccgcttgtctcagcctcaccctgtgatcccactttcatcctgggctgtgctccctgcaatgtgat

SEQ ID NO: 433259 - DNA, 100 bp, Homo sapiens
ttctgaagaagtggctgtagggagcatagctgctacactgaagatgaagcaaggcccaatgacccaggcgggctaaggaatatgagagtttaatggaaac

SEQ ID NO: 433260 - DNA, 111 bp, Homo sapiens
ctctgaaagctctgaggcccaaagcacagcctgaggaggaggatgaagacgaggtggttcaccaatttttaaaatccaaatatatctcatggtacagtggaagaactggcc

SEQ ID NO: 433261 - DNA, 98 bp, Homo sapiens
aagaggttctactctttggatagagaccaaaatcatactttgaaagcttgtggacaaatgtataggatcaagaattcacatcgtgatgaagagtgata

SEQ ID NO: 433262 - DNA, 75 bp, Homo sapiens
ttggaatgcaaattacttcctgagccagcaccgctctttgaccttgccatgcttgccttagatagtccagagagt

SEQ ID NO: 433263 - DNA, 74 bp, Homo sapiens
accggcgtggtcaacatccctgccgcagagatttccatggagaatgattatctgggacctcgaagaattgagag

SEQ ID NO: 433264 - DNA, 100 bp, Homo sapiens
gcggttggaggcttcgcccggctttgcagcggggacttcggcggcggcgcctcaggcacctcggcccggaaaacttggaatataacgtggagcctcaaga

SEQ ID NO: 433265 - DNA, 82 bp, Homo sapiens
aggaactggagcgagctccccgacgaggagcgcggcgagatctacgtgccaggtttggtgcacctcgatttggaggaagtag

SEQ ID NO: 433266 - DNA, 75 bp, Homo sapiens
cgggacgccgcatcggctctgctgaagagcctgcgggttggaggagcagcatttctttctattactactatctat

SEQ ID NO: 433267 - DNA, 100 bp, Homo sapiens
cattgatgccccaggacacagagactttatcaaaaacatgattacagggacatctcaggctctgggaaccacccttctactttctgtctctaggaatttc

SEQ ID NO: 433268 - DNA, 71 bp, Homo sapiens
ttcagcgagggtactgtatttatggagaccgctgcagctgcagaaccttggcctgaaaatgctacattata

SEQ ID NO: 433269 - DNA, 90 bp, Homo sapiens
ccgtttcctccaggacagcacctagtcgtggccggaggagtctcagagctgtcagaaagaacccagcttagactagaaagtctagaagac

SEQ ID NO: 433270 - DNA, 82 bp, Homo sapiens
ggtggaggcaggctgcggcagacggcgacagtggcggcggcgccatggcagggcttgcagaagaggactgtcagaaggacgt

SEQ ID NO: 433271 - DNA, 75 bp, Homo sapiens
aacccccaaattggctgggacagaacaaaatccagtctcatagcagaggagaatataatgtttacagcaccttcc

SEQ ID NO: 433272 - DNA, 100 bp, Homo sapiens
cggcttcccccaaggaatatacaggacagtcattttgtttactcattcagccctgttgcaggtcccaataaactcttcataaggttgacagaagcaccct

SEQ ID NO: 433273 - DNA, 100 bp, Homo sapiens
aattcttgaaccacctgaaggccaagatgaaggtgtgtggaagtatgaacatttaagcttaatgaattcaatcccatgggggacacgctggcctctgcaa

SEQ ID NO: 433274 - DNA, 100 bp, Homo sapiens
ctgtggaaacctgtgatccattctcattaaataaatctctgggtacctactaaagatgatgatgaattctgcaacatttggcagtccttacagggatctg

SEQ ID NO: 433275 - DNA, 75 bp, Homo sapiens
ccaaacgctaggtggctgggtccagataatctcagtgataccttgaagaagctgaagataacagctgttgacaag

SEQ ID NO: 433276 - DNA, 100 bp, Homo sapiens
taaaaatcaccagttactttaatgattttcggctttgtgagaaaccttaccatcaaacacgatggccagcaacgttaccaacaagacagatcctcgctcc

SEQ ID NO: 433277 - DNA, 90 bp, Homo sapiens
cgtgctcacggtcaacgagcggggcaaccactgcgagtactgcttcaccaggagggtgcatctgcccggaagactcagactcctgcagcc

SEQ ID NO: 433278 - DNA, 101 bp, Homo sapiens
agaacatggacacgagaacccccataaataatcttcaggactaccccaatggcacctggctgggcgacgagaacaaccccgagatgcgggtacgctgcgcc

SEQ ID NO: 433279 - DNA, 90 bp, Homo sapiens
gcaaaagtcatggcaacttctggatgtgcagcaatcagatttatcattcgggaggttgctcaaagaagtacagtctttaaaacaaccata

SEQ ID NO: 433280 - DNA, 75 bp, Homo sapiens
tggaggagtcccgctcgaagctagcaatcctcccctcatccatggtttcattttctatggttccagttactcatg

SEQ ID NO: 433281 - DNA, 101 bp, Homo sapiens
gagacgaccggttcgtcgcctccttgcccgtgaccgtcgctagaactcagttgtgcgttgcggccagtcgccactgctgctgaagagatcactttaacaat

SEQ ID NO: 433282 - DNA, 75 bp, Homo sapiens
caaaacttcaagccaaacatcaagcagaatgtgatttgcttgaagatatgagaatgtggaggctgtggacccacg

SEQ ID NO: 433283 - DNA, 75 bp, Homo sapiens
cttcgcagtctggaaagctttaggagttcacagtagacggtctcgccacattgcccagactggtctgaaagtctt

SEQ ID NO: 433284 - DNA, 75 bp, Homo sapiens
gcaaaccaaggttattctggatggaaatagccttgaaaaggaagagagaagggcacagttacctaagtatcaacg

SEQ ID NO: 433285 - DNA, 100 bp, Homo sapiens
gaaggcagtctttgctacgtacagcaaaagtggtgtggagattccagcactcccaggacagtggagtcagcagtaagccctgggacaggtggcaagggtg

SEQ ID NO: 433286 - DNA, 50 bp, Homo sapiens
agtcggcgtaactatcgcctgacagggtgagcgagtgctgtgctttcatg

SEQ ID NO: 433287 - DNA, 101 bp, Homo sapiens
aaacaggtcgctcttcagacttttggaaaccagactacaattatcccagctggtggtgctggcatgctggaagatggactgccctccaatggtgtgccccg

SEQ ID NO: 433288 - DNA, 98 bp, Homo sapiens
gtcgacttggtcccgtcagccggaccccacctggacggctggggccacttgtggtcgccgggaggccacagaaacagatgcctctctcagcacgttgc

SEQ ID NO: 433289 - DNA, 83 bp, Homo sapiens
gccgaactggccctggactacctctgcagaagtcggccagagcagcatgtggatctccactgatgccgccgcctcggtgctgg

SEQ ID NO: 433290 - DNA, 100 bp, Homo sapiens
gccaccgaaccgccggcgggccatggccactctgccgagcgcagagcgccgcgcgttcgcgctcaagatcaacagagttgctacgatggaagttaaaggg

SEQ ID NO: 433291 - DNA, 74 bp, Homo sapiens
tgtcttcagaaaactcatgatgatcctggccatgaatgaaaaggacttggcagatgaacttgctcttgttgatg

SEQ ID NO: 433292 - DNA, 100 bp, Homo sapiens
cttcacccagcatttcatccctcgtcgaaaggattggattggcatctttagaataagctgtcattggaaggaatagtggtacaaagagctgaatgccgac

SEQ ID NO: 433293 - DNA, 100 bp, Homo sapiens
tcttgttactccctagcagtgtggtaaggtgctggagaatctggtaaaagcaccattgtgaagcagatgaggatcctgcatgttaatgggtttaatggag

SEQ ID NO: 433294 - DNA, 100 bp, Homo sapiens
aattacccttcatattggagactacaatatggatggctatccagacgctctggtcatactaaagaacacatctggaagactatgaaaatgatgttagaca

SEQ ID NO: 433295 - DNA, 83 bp, Homo sapiens
ggctccctgctcagctcctggggctgctaatgctctgggtctctgaccagcatctcagacatgtcgaaaaagatgttttgatc

SEQ ID NO: 433296 - DNA, 95 bp, Homo sapiens
gatgaagagtgacttgtttctggatgattctaagaggaggaactcccgtgagatccggtgcctgacaccccccgggcagagccctggcagcgctc

SEQ ID NO: 433297 - DNA, 75 bp, Homo sapiens
aatgccaaacagagaaaaggtcgagctggaagaatgttcatgaagaagtcttacaagaatatcagaagataaagc

SEQ ID NO: 433298 - DNA, 76 bp, Homo sapiens
ggagtggaaaggctctcagtgaaaaaggttactataacaacagtaccaaggtggctgtgaaaaccctgaagccagg

SEQ ID NO: 433299 - DNA, 100 bp, Homo sapiens
ccgagatgtctcgctccgtggccttagctgtgctcgcgctactctctctttctggcctggaggctatccagcccttacgacagtctgcctacctcacaga

SEQ ID NO: 433300 - DNA, 98 bp, Homo sapiens
acacattacgatggatgatggaaacataagtggtctcacgtgtgaaacatggctacagattggctgggaagtattgtgtccatcaattgtggagatag

SEQ ID NO: 433301 - DNA, 83 bp, Homo sapiens
aaattcctggaggcctcactggaggaggtgagccgagaggagctcaaacaggcagaaaggagaaggcagagcccccccaggct

SEQ ID NO: 433302 - DNA, 75 bp, Homo sapiens
aaaaacttcaaaaggacattaaggatctgggagggggtgtgggccgaagatatgctcatgtggtgttgaggaaag

SEQ ID NO: 433303 - DNA, 100 bp, Homo sapiens
tcgtcagcccccaggaggccttgccgggccggaaggaacagacccctgtagcgggctgctgaacaggatgtcctcggacgacaggcacctgggctccagc

SEQ ID NO: 433304 - DNA, 95 bp, Homo sapiens
tgggccagtgcggcatcacctcctccaagaccgtgctggtctttctcaacctcatcttctggcggtgcagaggggcaggatgccgccgacccagc

SEQ ID NO: 433305 - DNA, 96 bp, Homo sapiens
gcagaaggttgtgactttagtatacagttgaaatcacaaagattagacacctttttagataggtgttcttcagcaccactgacaacacggttctga

SEQ ID NO: 433306 - DNA, 73 bp, Homo sapiens
ggacagcgagtcggaggaggacgaggacttggaagagttatgcccagccaagtcttcagtatatccaggggca

SEQ ID NO: 433307 - DNA, 101 bp, Homo sapiens
aagaaaacgtgcacagaatcagatgtttcacaatctcagaattccagtactatactggcaattgctggagaagattttgcaattgttgcttctgatactcg

SEQ ID NO: 433308 - DNA, 86 bp, Homo sapiens
acgaggcaaggagctaaagcagcgtgcgttcagccctggggtacaatgactcttcttgcttttcacctaagttgaataagcaccct

SEQ ID NO: 433309 - DNA, 80 bp, Homo sapiens
ggagcggagacctggacgccctggacaagcagcacaggtttactcctggcttgggggcattaggaagcactggaggctct

SEQ ID NO: 433310 - DNA, 90 bp, Homo sapiens
cgcgcctctcccaggacccgcctggctgcgagatatcctcgctcaaggagcacccccggggcaccctcctgtccgatggcagcccggccc

SEQ ID NO: 433311 - DNA, 132 bp, Homo sapiens
tcgacagcagtggcagaaacgtcaggccgtagccgaagcctcggaaggagcggcccacggcaaaggatgtggaaagctacgatccagttttgaacccggtgctgaaccgtgaagtgcggcgaacagggggga

SEQ ID NO: 433312 - DNA, 100 bp, Homo sapiens
gatgatgaggagatgtactcagcccacatgcccgctcacctgcgctgtgatgcctgcagagctgtggcttaccaggtaggtgcacgtctcatcgcacatg

SEQ ID NO: 433313 - DNA, 96 bp, Homo sapiens
tggacgaggactctcctgtgctcacccaagaccgagactgggaggcgtattggcggctactctttaaaaagagacgctcttctggctcttccgtga

SEQ ID NO: 433314 - DNA, 75 bp, Homo sapiens
aatggcaaaaacacattctgggatgtggatggaagcatggtgcctcctgaatggctttccttaaagtttcccatg

SEQ ID NO: 433315 - DNA, 101 bp, Homo sapiens
acggtttacagcgaagtccacccagcgtttccgaggtgaaggcgccgcgccaggccgggcgggcgactatgaagagtgtaaagacctcataaaatttatgc

SEQ ID NO: 433316 - DNA, 100 bp, Homo sapiens
ggcgcccccggccgctaccgctcaggtgctgcaggcacagcccgagaaaccgcagcactacacgagaaggcttctccttcaaatacagccccgggaagct

SEQ ID NO: 433317 - DNA, 90 bp, Homo sapiens
cgaagctggccgagcaggctgagcgatacgacggtattggcaagcttgccagtgtacctgctggtggggctgtagccgtctctgctgccc

SEQ ID NO: 433318 - DNA, 75 bp, Homo sapiens
ccgtatgcagctggccaaactctgctatgacccagattttgcctgggccgaggccactggtgcatatgttcccgg

SEQ ID NO: 433319 - DNA, 98 bp, Homo sapiens
tttaatcccagctggaaaatctcagtaagaatgatggcaatggatttagaagtaccggtattggccaggaacatccccgggaatgctgccgtggtgaa

SEQ ID NO: 433320 - DNA, 99 bp, Homo sapiens
acagtcacagaattgagtgatttcctgcaggctatggaacacactgaagttcttcagcttctcagccccccagactacatgaggaaataattgactttt

SEQ ID NO: 433321 - DNA, 83 bp, Homo sapiens
attctcccttgtcagcacaacctgtgtaggaaatgtgccagtgatattttccaggatcccattgaagataccacgctgcatgt

SEQ ID NO: 433322 - DNA, 82 bp, Homo sapiens
agctcatctggaattttgccgatttcatgactaaccagtgttaaataggattgcgaatcaggtggccattcagcggaagaag

SEQ ID NO: 433323 - DNA, 100 bp, Homo sapiens
ggccccagtgctgcagcagacattacttcaggacaacctcttgggcagggtgttggggatgtcctttgcactgaccctgaactgccagattgacaaaacc

SEQ ID NO: 433324 - DNA, 74 bp, Homo sapiens
gaacatgcggcaagaggccattgaccgcttcaatggggctgcttgctctcggtgactacatgaatgtccagtgc

SEQ ID NO: 433325 - DNA, 98 bp, Homo sapiens
ctggaccgcgagcggcagcggcggatggagctggagcagaaggtgcaggaggtgctgaaggccagatgctgagccagggaggcggcccttccagcagc

SEQ ID NO: 433326 - DNA, 74 bp, Homo sapiens
acatggtggacagaaagtcagcctcttgtgagaccacctgggaacgtcccagcagttctcctgggattccagcc

SEQ ID NO: 433327 - DNA, 90 bp, Homo sapiens
tgccgatttcatgactaaccagtctgcacggaacgtcatgaaggaccaacgcctggttttccatagtaaagttaggtcatctggttatgc

SEQ ID NO: 433328 - DNA, 100 bp, Homo sapiens
ataagcttgacattacagccaagatggtgctgtcccagagacaacgagatgaactcttctgcagaaagccgtcattacacctgattttgaaaaaaaccac

SEQ ID NO: 433329 - DNA, 100 bp, Homo sapiens
accacgtccagcttcaccacgcggctgcacaactgcaggaacaccgtcacgctgctggaggaggctctgtacaactcaatcaagaatgagaagcttgaat

SEQ ID NO: 433330 - DNA, 75 bp, Homo sapiens
gttcagtatcgctacttcaaagggtactttttagaaccaaaggaggagcaaaggccagtgcagatgatgtatcag

SEQ ID NO: 433331 - DNA, 97 bp, Homo sapiens
tcacgtgcattgcggtggggctgcccctgctgctcatctcgctggccttcgcgcaggagatctcgattgtgcctccacttctcattcagagaattca

SEQ ID NO: 433332 - DNA, 88 bp, Homo sapiens
ctggaacttatgctgtagacatttctttgtggtttatctaaaaaccaaagggcaagttaaagtcttcagagccctgtatacgtttgaa

SEQ ID NO: 433333 - DNA, 75 bp, Homo sapiens
gagacagagttgcgaccgcgcggcaggccctggccaacgtcaacattgggagcctcatctgcaatgtaggggccg

SEQ ID NO: 433334 - DNA, 80 bp, Homo sapiens
aagtcaccacaaaaacctatcgttagagtcttcctgcccaacaaacagaggacagtgggtcttactgaagtaacacaaag

SEQ ID NO: 433335 - DNA, 100 bp, Homo sapiens
tcgtgtggcatgaaacagaagaagaaggggaaactgaggcccaaggaaattgagtatctctgcaaagtcaccagctgagttcgaaccagacagatcctgg

SEQ ID NO: 433336 - DNA, 74 bp, Homo sapiens
cacaagatcactcacctgtccacactgcagttgattccaggcgtgaattccaagaagaaccaaatgtattttga

SEQ ID NO: 433337 - DNA, 97 bp, Homo sapiens
ctctctttactgctgaagctttacttcgagctcatgtatgaatctgatgaacaagaaaagagtgcctatcaagagtatgacagtgacagtgatgttc

SEQ ID NO: 433338 - DNA, 76 bp, Homo sapiens
ctgctcaaaacctcgctccggaaaggggacacctgtgggtaattccagaattgattggccataccattgtcactgt

SEQ ID NO: 433339 - DNA, 100 bp, Homo sapiens
cgggacaactttggaggtggaaacactgcctgggaggaagagaatttgtccaaatacaaagacaggagcatcatcatggggtctagtgccacagagattg

SEQ ID NO: 433340 - DNA, 98 bp, Homo sapiens
ggccgtggaagcggccaccgactactgtcagcagctgtgccagtgcttatcagattgttgtggaagaactgcacccacaccgaaccaagagagaagcc

SEQ ID NO: 433341 - DNA, 90 bp, Homo sapiens
tgtaccaggcgaagctggccgagcaggctgagcgatacgacggaaaaccagtagattcccagacatcgcgaagtgaatctgaaattgtgc

SEQ ID NO: 433342 - DNA, 100 bp, Homo sapiens
aggaacctctacaacgaaggtgaagccacggaagataagatttggtcgtattgggcgcctggtcaccagggctgcttttaactctggtaaagtggatatt

SEQ ID NO: 433343 - DNA, 83 bp, Homo sapiens
ctcgcgcctctcgatgggcagctcgcacttgctcaacaagggcctgccgcttggatgatcggctgaatgtaacagaggaacta

SEQ ID NO: 433344 - DNA, 82 bp, Homo sapiens
ggagactagacctcgtaattacattctctcggccagcgcctccgcggaagcggggagaggtggtgagagatgacccctgttg

SEQ ID NO: 433345 - DNA, 52 bp, Homo sapiens
ctctgctgcccgctgtgagggaaaaggacatggatttgattgacatactttg

SEQ ID NO: 433346 - DNA, 113 bp, Homo sapiens
tggcggatggccccaggtgtaagcgcagaaagcaggcgaacccgcggcgcaataacggagcactcactgtgggcctcgtgcgacagtgtcaaacaatccatggacgagaccgg

SEQ ID NO: 433347 - DNA, 100 bp, Homo sapiens
cccacagtgcagcgctccgtgtttgcatcggtggacaaggtgccagtgccaaatctttggagtgttgatggagaagttacagtagctgaacagaagccgg

SEQ ID NO: 433348 - DNA, 83 bp, Homo sapiens
tttcgtttttcggatgatgccttcaatactacctttatttccaccatagttcaaatctgaacatcaatgatgtactagggaac

SEQ ID NO: 433349 - DNA, 100 bp, Homo sapiens
gctgagggtggaggccggattgtactgtatggggactccaattgcttggatgacagtcaccgacagaaggtgagggtcgctgtctgcccattgatagagg

SEQ ID NO: 433350 - DNA, 83 bp, Homo sapiens
cccgaacgggttgcttcccccgctgcgaggtctcagcggcggtggcagccgaggtgcaggatgcaagaaggcgccccccggcc

SEQ ID NO: 433351 - DNA, 50 bp, Homo sapiens
gacggtacagcgaaggcagagagttcagttgtcgccgtgatcctgaaggc

SEQ ID NO: 433352 - DNA, 90 bp, Homo sapiens
aaagacctcaccaagaatttggcatttcaaggcacgtgtggttctcaaatataggcattctgatgggaacttgtgtgttaaagtaacaga

SEQ ID NO: 433353 - DNA, 145 bp, Homo sapiens
atggattggagtgaaccggagaccccgaaaacggaagcgcagggagaaggaagaggtgtttgaaaagatgtccctggtagatttgggaaagaagcttttagaagcggcacgagcaggtcaagatgatgaagttcgtattttgatg

SEQ ID NO: 433354 - DNA, 96 bp, Homo sapiens
gccttcgggtcgggcgtctccgccggctactgccgcttcagttctcccggtgtggccacgagtcgggatgtacagttacccagcacgtgtacctcc

SEQ ID NO: 433355 - DNA, 73 bp, Homo sapiens
ggcatgggctacaaggaaaacgatggatatggcagtggacgtggatttggggatggctataatgggtatggag

SEQ ID NO: 433356 - DNA, 100 bp, Homo sapiens
cgcacatcccgcggggcccggccgggtgcttcggaaccaaaaagaagcttcccagagccggggccaggagccccaagcgccctctagcagcaaacacaga

SEQ ID NO: 433357 - DNA, 100 bp, Homo sapiens
tattaacatcacggagctgaatctgccgcagctagaaatgctcaagaaccagctggaccagctctgtgacttcctggagactcacttcctagatgaggaa

SEQ ID NO: 433358 - DNA, 75 bp, Homo sapiens
cttttatattcatctcaaaaacaaaattctgaactcaggacttggcaagggcaagctctgtgtgattgattggaa

SEQ ID NO: 433359 - DNA, 83 bp, Homo sapiens
gggtcaagatcgccgaagtagactgcactgctgaacggaatatctgcagcaagtattcgttgcacctggacttgatatgaaag

SEQ ID NO: 433360 - DNA, 118 bp, Homo sapiens
cgcgagagatggagatgggcagacggattcatttagagctgcggaacaggacgccctctgatgtgctggagaatctggtaaaagcaccattgtgaagcagatgaggatcctgcatgtt

SEQ ID NO: 433361 - DNA, 100 bp, Homo sapiens
tggacgagtacctggagtaccggaggatgtacagttacccagcacgtgtacctcctcctcctcctattgctcgggctgtagtgccctcgaaacgtcagcg

SEQ ID NO: 433362 - DNA, 75 bp, Homo sapiens
tgtgaacagtacgcagtgaatgttgaagaagatgaagtaccggacgatgagactctgaaccaaatgattgctcga

SEQ ID NO: 433363 - DNA, 100 bp, Homo sapiens
acggcaataaagcaaagaaacaaaagacaactctgcttttccagaaactgtgccaggatcacggatggtgccatgacaatggtgtgaactacaagattgg

SEQ ID NO: 433364 - DNA, 100 bp, Homo sapiens
tggaagctcttcatctacaacccgaccaccggagaattcctggggcgcaccgccaagagctgggagatttaccgcattgtttctcagaagcaaatgtcag

SEQ ID NO: 433365 - DNA, 73 bp, Homo sapiens
agcgaatcaagcgggagttcaaggaggtgctgaagagcgaggagatcagcggtttgagtgctacgtttgcaga

SEQ ID NO: 433366 - DNA, 88 bp, Homo sapiens
atcattgatgtggtgcgatcggtcagaatggcggcagtggagcatcgtcattcttcaggattgccctactggccctacctcacagctg

SEQ ID NO: 433367 - DNA, 107 bp, Homo sapiens
cgggcggtgagcgcccatatgggggttctggagagcggggtgtgggacaatgcagatcttcgtgaagactctgactggtaagaccatcaccctcgaggttgagccca

SEQ ID NO: 433368 - DNA, 100 bp, Homo sapiens
cacgataaaggaactcaggcgcctcttcttagttgatgatttagttgattctctgaaggatgatcttgaagaccttatagttaattgggatgagagcaaa

SEQ ID NO: 433369 - DNA, 100 bp, Homo sapiens
atttgatcttccatatggataagccgtcatttcaccaagctgataatgttcggggaacccgccatcacgggctggtggagaggccatccaggaaccgctt

SEQ ID NO: 433370 - DNA, 101 bp, Homo sapiens
accagtccccagtgagggtgtacaaatacccctttgaattaattatggctgatgcctggtgtgcaggagtatatacaacagcctattctcaatggtctgcg

SEQ ID NO: 433371 - DNA, 100 bp, Homo sapiens
cagcaatgcctccatgaacaatctcacccaattactctgctcagtagaaaccattgaaggttttcagtgttctccctatcctgaagttgatcattttgtt

SEQ ID NO: 433372 - DNA, 100 bp, Homo sapiens
gagggcagtatttgttcagaagatgactgtacaaaggataataaactagttgagaagcagaacccagctgaaggactgatcatcttcatggtgggccgag

SEQ ID NO: 433373 - DNA, 75 bp, Homo sapiens
agcatctgatgcacgttccatccggcgctcagctgggcttgaggtattgttgcagcatctggcagtgagactgag

SEQ ID NO: 433374 - DNA, 100 bp, Homo sapiens
aggagaattttcagatgactggactcttagtggaaaggcatccaaccatgatgaggtaccttgttgaacaaactaactctgccactgagaacgatgaaag

SEQ ID NO: 433375 - DNA, 83 bp, Homo sapiens
cgcagagcaaacatctttcaaaggaaattgagaggctgactgagcgactagaagaaaaagagagggagatgcagcagctgctg

SEQ ID NO: 433376 - DNA, 98 bp, Homo sapiens
cggggcctgggcctcccggtccgcaagcagttgattatggaagattcccacaagagtaccacgtcagagacagcacctcaacctggttcagcagttca

SEQ ID NO: 433377 - DNA, 75 bp, Homo sapiens
attttttctcatggatgttcttcttcgagtatttgtagaagggtctctttttcagtcatgcaggagtcagtcgaa

SEQ ID NO: 433378 - DNA, 50 bp, Homo sapiens
cgtgagggtgtaacttacaaaaagaaaccaaggtgtatgttggtaacctg

SEQ ID NO: 433379 - DNA, 75 bp, Homo sapiens
ctgatgtgaaaaataccacgacaaaaccaccctagtcgatttggtcagacaacgccaccacttgttgattttctc

SEQ ID NO: 433380 - DNA, 101 bp, Homo sapiens
ggaaaacagagagatgcagcttgaagatggacgcttcctgatgtctgctgagcgttacgacaaacttctccgagaattgaacaacacatgtgaacccgttg

SEQ ID NO: 433381 - DNA, 82 bp, Homo sapiens
cgcgcgcagggcctgcagcgggagctggacggcgagcgcgagcggcgcgagaaagtaaatgccatctgctatggggccaaga

SEQ ID NO: 433382 - DNA, 71 bp, Homo sapiens
gagccgctgccgccgcccccagctcccccgcctcggggagggcaccaggccctgccctgggagaagccctg

SEQ ID NO: 433383 - DNA, 88 bp, Homo sapiens
gctagaagaaaaggtgtacttgcaagaaacctcaggacttgagtaacagcaacatggtgagtggcagtgtgatgagtgtttatagtgg

SEQ ID NO: 433384 - DNA, 95 bp, Homo sapiens
gaccttccacgtcaccactgagtcattcttctcctagtgaaatttctggaacgagttcatcaggatatgaaaaacagtagctccgtatcgaatac

SEQ ID NO: 433385 - DNA, 90 bp, Homo sapiens
tgggaggctgtggaggttggggcctccagccatgacagtgatgagaaagacgctgaccggaaaggagattgagattgacattgaacctac

SEQ ID NO: 433386 - DNA, 100 bp, Homo sapiens
aaggaaacacatttcatatactgcagaatttgcaccatcctgggattgtaaacctggaatgtatgtttgaaaccccagaacgagtctttgtagtaatgga

SEQ ID NO: 433387 - DNA, 83 bp, Homo sapiens
tcagaccctgaggaacatgcagaaggaagctattgctgctcacaagcttaccctgaaagaagcagatcccagttcaaaagtag

SEQ ID NO: 433388 - DNA, 100 bp, Homo sapiens
agaaacaaaatgtcaacaaattgatgggtcagtttgctgagaacgaaaccaatgaggtcaattttagagagataccttcacatgtgctatcgaaagtatg

SEQ ID NO: 433389 - DNA, 75 bp, Homo sapiens
tgatgacgaagctcccaaaaggcagactcgtcgaagagcggctaaaaacgttagatactttacttgtgaaagaac

SEQ ID NO: 433390 - DNA, 99 bp, Homo sapiens
gggggactggcctggcgtgcactccgcacctcggggacattattgcgcgtggaacggctgcttttggaaggaagctcttcgtgggcggtcttgactgga

SEQ ID NO: 433391 - DNA, 100 bp, Homo sapiens
gccacatgtgtttcaaaatggccctatgcttagggttcatcatgcctagtggcgtataagaagaccccgccaccggtccctccacgcaccacttcaaagc

SEQ ID NO: 433392 - DNA, 96 bp, Homo sapiens
gggtcacttcctggcagtacaccctcctccagctccagctaacaggcctcacctcttccattccggagatgatccttggacatcttttcagccagg

SEQ ID NO: 433393 - DNA, 101 bp, Homo sapiens
cctttgtccagatgcagaagtggaactgaatcctgttgctcctcttaagaccagttctttattggtgaaaacatgaatccagatggcatggttgctctatt

SEQ ID NO: 433394 - DNA, 98 bp, Homo sapiens
ccgggattggaccgacgcagccatgaggaatacccacacaccgaagttgggtgaggaagattcgttttgctcctggtaaaggaaatcaaaaattaata

SEQ ID NO: 433395 - DNA, 74 bp, Homo sapiens
ggagccgatactgagcttcttcctatttgccatggggaagtcgagacaacatgagtgtgattttgatctgtttt

SEQ ID NO: 433396 - DNA, 100 bp, Homo sapiens
ccccgtaaaagttttggcatcaaggtccagaatcttccagtacgctctacagaatggtagctgagtggaggttgtctcgaggtgttgaagaacagacaca

SEQ ID NO: 433397 - DNA, 75 bp, Homo sapiens
ggcgaacgcttcgctggccatttaggagctctgctcaaagccagacggcttacctatttctactccatgtaccac

SEQ ID NO: 433398 - DNA, 98 bp, Homo sapiens
gtacaaggaggtgatgttggagaattatagcaacttggtgtcacttgttgctgagagatggatgttaaaaatcaacaccaggactacagtaaggctga

SEQ ID NO: 433399 - DNA, 98 bp, Homo sapiens
cagacaccacctccttccctctcttcacatggatcctcttcaagcttaaacctggctgaactgtcccaagcaataaacagtggtacattgttatcaaa

SEQ ID NO: 433400 - DNA, 101 bp, Homo sapiens
cggcgggcagcggcgcgatggggcccctccgcgagagcaagatgtgctggtggacggacagccatgtgaccgcgaggctgtggcggcctgccaggtgggcg

SEQ ID NO: 433401 - DNA, 82 bp, Homo sapiens
ctttgctgacctgataatgaagaattattttgcaccactggatgttgtttactgagctggactggccattatggaggaggag

SEQ ID NO: 433402 - DNA, 75 bp, Homo sapiens
cggcgcagaagaaacccgcggcgaccacagccaaagcgggcttgccctcaaattggctgtagccacacggatata

SEQ ID NO: 433403 - DNA, 98 bp, Homo sapiens
actcacaatgacatcgtggctaccacctacctgagtatgtcgaaaatctctgcccctggaggagaaatagaagtttggaaattttagcattcaggtgc

SEQ ID NO: 433404 - DNA, 101 bp, Homo sapiens
cgaaaggagcaagagcaagatcaccgtgacatccgaggtgcctttctccaaaagcatgaacaggctgaacactttgccacgaggcttcggctccctgccag

SEQ ID NO: 433405 - DNA, 75 bp, Homo sapiens
cgttgcctgctcccggagggagacgcgctgccgaggagaacccagcggaaaatgacagatggcgagacctggaca

SEQ ID NO: 433406 - DNA, 74 bp, Homo sapiens
gacgtcggggccgagctaacccggcctctggacaagaggaatcttgatcacgtggacaaagggttttaaggcaa

SEQ ID NO: 433407 - DNA, 50 bp, Homo sapiens
cctgctgctggctgcccttgtctcctttgcaacatcgaaaccaaccataa

SEQ ID NO: 433408 - DNA, 100 bp, Homo sapiens
agcttcaggaatgccaggagcaggatctgcagaagacgcagggctcaagaaacacctggattcttatctagctgactgctacgatgccattgctgttttt

SEQ ID NO: 433409 - DNA, 89 bp, Homo sapiens
ccgctctggatcagtgtcgcgtggtgttcaatcacacgggaacagtgatgtatggagtttcagagcctgaggccggcactttggaccca

SEQ ID NO: 433410 - DNA, 100 bp, Homo sapiens
ggcaacaacccagcgcgcctagcctggcgccgtgcagcgaagcccaagagctggcctcgccacgaagggggtcctgatgacaacttaattgaaggtggag

SEQ ID NO: 433411 - DNA, 100 bp, Homo sapiens
ctcagatgttattcgggacctggagtgggtcatctttgatgaggttcactatatcaacgatgtcgaggtactgctctccatctaccccagagtacagaag

SEQ ID NO: 433412 - DNA, 75 bp, Homo sapiens
cggaggcagaggtggaggcgctttgaaagtcaccaaaggcttcgtgtacagctctttcctaaagccctacaatcc

SEQ ID NO: 433413 - DNA, 100 bp, Homo sapiens
attgagttaacacctctgccgctgctaaaagtacaaaattggacagctgtacatgatcagcaaacacagccatgaacagagtgaccggggagaaggggtg

SEQ ID NO: 433414 - DNA, 76 bp, Homo sapiens
cagaagccaggctggagtggaccagtgagtgagttggagaacaaagaactttgagtctggcaaggcttataagaca

SEQ ID NO: 433415 - DNA, 96 bp, Homo sapiens
tccccctcggcctcgcggcgacggcggcggtggcggcttggacgactcggagagccggtgagaagccctaccactgcaactgggacggctgcggct

SEQ ID NO: 433416 - DNA, 99 bp, Homo sapiens
gaacgcggctcccagccacaccaagttcaggctgaccggttccctgatgtgttacctgcttctgctactgatccaaactgcagaacttctcattcatcc

SEQ ID NO: 433417 - DNA, 95 bp, Homo sapiens
ccaccattttgtgacttacagaaagacttaattcagtgcacaaatgagatgaatgtgaacatcccacagttggcagacagtttatttgaaagaac

SEQ ID NO: 433418 - DNA, 75 bp, Homo sapiens
agaaatggaagtgttcagcggcggcggcgcgagcagcggcgaggctttgaaatttctgaaaaccagaagaggcag

SEQ ID NO: 433419 - DNA, 100 bp, Homo sapiens
ggatgaggcgtgcaggcctgggcacagaccccacaggctcctcggacactgggtccatcacctcctgccccatcatccactccaacaccaacagccccta

SEQ ID NO: 433420 - DNA, 100 bp, Homo sapiens
tgttcaagaaactgaagcaaaagatcagcgaggagcagcagcagctccagcaggcgctggctcctgctcagtctgactgacagtactccacaagcttgcc

SEQ ID NO: 433421 - DNA, 83 bp, Homo sapiens
caaccgctccgctgcgcgcaggctgggctgcaggctctcggctgcagcgctggaaaccaaggtgtatgttggtaacctgggaa

SEQ ID NO: 433422 - DNA, 80 bp, Homo sapiens
gcttctttgagatcagtatcaaatatttactgaaatcctggagtaatagacccagatgatgtggtaccagttggccaaag

SEQ ID NO: 433423 - DNA, 98 bp, Homo sapiens
gcggatgggatccagctgttagtcgggtaggcataggttgatctcctatcaagagtttttggcatttgaatctgttttatgtgctccagattccatgt

SEQ ID NO: 433424 - DNA, 103 bp, Homo sapiens
ttgtagaagatcggcttgaaattaccaactgctttcctttccctcagcacacagaggatgatgctgactttgatgaagaaacctctgcgccatgagagccaag

SEQ ID NO: 433425 - DNA, 83 bp, Homo sapiens
cagatggccagtcacgagaacccagccacccgcgagtcggccttcgttcacgccatcgcctcggccggcgtggccttcgccgt

SEQ ID NO: 433426 - DNA, 100 bp, Homo sapiens
ggacggacatctttggtgcagcacaacttcgaattatgagcaggaccagaaatactctttctgcacagaccacactgctggagctccgttactctcatgg

SEQ ID NO: 433427 - DNA, 100 bp, Homo sapiens
ggaagcacattgatgcggccatggttttggaagagtgtgcccagatgtttgagacggaggcagatgagaagagggagatggccttggaggaagggaaggg

SEQ ID NO: 433428 - DNA, 100 bp, Homo sapiens
ccgttctctcggctggatgttctcatcgtccctgccaactttccaagtctggggatggccaggttgtggcagcactgcctgaaggtatgagaccagattc

SEQ ID NO: 433429 - DNA, 90 bp, Homo sapiens
aaaagatccctggaatatgaagggacacagtacggtagtcaaacccccagaggaattaaggaatttgcaagagcaaatgaaggccttaca

SEQ ID NO: 433430 - DNA, 82 bp, Homo sapiens
gcagatctgaagacctattttactgataagaaaacacatctttacacactaaatgggcttccccaaggatttattgacattg

SEQ ID NO: 433431 - DNA, 50 bp, Homo sapiens
gttgccctgagttacataaataggtcccagagaactacttctatgtgcca

SEQ ID NO: 433432 - DNA, 83 bp, Homo sapiens
ctcatggtggaggtagagaacgttgtccacgaggacttccaggtcacggaggaggtgaaagtttggtgcacctcgatttggag

SEQ ID NO: 433433 - DNA, 75 bp, Homo sapiens
cggcctgaggtcaaggagaaattgaactaaactctcctttgaagactgctggtgtgtgacagctctgtgctgctg

SEQ ID NO: 433434 - DNA, 97 bp, Homo sapiens
cctcttcctgttgcaccaggttcttcgaaaactgaagcagatgttgaacaacaagttgccgaacaagcaaccggaaaagcttaataggcaatgggca

SEQ ID NO: 433435 - DNA, 96 bp, Homo sapiens
gcccacaacccgcagagacttctactggctgcgctcctttctggccggaggcgcagtcatgtcgggattcgacgatcctggcattttctacagcga

SEQ ID NO: 433436 - DNA, 98 bp, Homo sapiens
ggagatggtgacaagctcaaggcctgcgagttgctgatagtccaactccaccgccaccacctccaccagatgacattcccatgtttgatgactctcca

SEQ ID NO: 433437 - DNA, 97 bp, Homo sapiens
gcaagggcaacttcgcggtggtcaagcgggccacgcacctcgtcaccaaggccaaggtatgatgaagaattggcccagggtgacggggctgaccggg

SEQ ID NO: 433438 - DNA, 100 bp, Homo sapiens
aacaaggcatgtatactcccaaagattgaatttagtggaagcttttgtagaagatgcagaattgaggcagactttacaagaagatttacttcgtcgattc

SEQ ID NO: 433439 - DNA, 90 bp, Homo sapiens
ctgcttccattggccagtatgaagtggtgaaggagtgtgtgcagcgctgtcctgagagcacgtctctacatctctacctgcattctggaa

SEQ ID NO: 433440 - DNA, 50 bp, Homo sapiens
ctgcaggggccgagacttcgttgaaagaccacagcaagattctttcattc

SEQ ID NO: 433441 - DNA, 100 bp, Homo sapiens
cacttcaacaagggcccttcctatgggctctcggccgaagtcaagaacaagataaccagttcaggatgtccatcctggaacgactggagcagatggagag

SEQ ID NO: 433442 - DNA, 75 bp, Homo sapiens
ttacctgtgagatgtttcatcccaacaatgagctcacagtgcctgcactttaccccagtagccctgaagtgtggg

SEQ ID NO: 433443 - DNA, 75 bp, Homo sapiens
atcttctgtcatgagaagtggcgatcaaaattggtgtggtggacacaggcctattcatcaacatggctgagagag

SEQ ID NO: 433444 - DNA, 75 bp, Homo sapiens
taagtcgaaggggaaggcgcctgaagaggacgaagatcgggcccgggacacccagacagatgagattgtcgcact

SEQ ID NO: 433445 - DNA, 97 bp, Homo sapiens
atttacttgaaatgaaaggagattccaacctacttcagatgggcggaagccatttccaattaaccatggtgaaactagtgatgaaactttattagag

SEQ ID NO: 433446 - DNA, 114 bp, Homo sapiens
cctgattcaagtgttggcggatggaagggaggagactcctgaccctcagaatggttcgaaaacatggccaaaagaaatgccgagaaggaactgacagataggaattgggatcaa

SEQ ID NO: 433447 - DNA, 83 bp, Homo sapiens
cggggttcgggtgtctcgtgtgtgaacatcacagccctgggcgctgcctatggcacagccaagagcggtaccggcattgcggc

SEQ ID NO: 433448 - DNA, 100 bp, Homo sapiens
ctccttcttcaggagagcgccccagggcaagccccgctccggccaacaagtattatacctgaagaaccttagccctcgggtgactgaaagagatcttgtg

SEQ ID NO: 433449 - DNA, 100 bp, Homo sapiens
atttctaagcaacttacattagaacaggggctgataacatccggaaatactggagccgctactaccaaggatctcaaggggtaatatttgtattagacag

SEQ ID NO: 433450 - DNA, 100 bp, Homo sapiens
gactgaagtatccagcgctcattgggaatttagttaaggccaaggcagaggcttcctcaggagaccatcccactgacacagagatgaaggaggagcagaa

SEQ ID NO: 433451 - DNA, 75 bp, Homo sapiens
cctttccctgttcctgttaagtaggtaccgaaagcacagtaatcactggtgtcgatattgtcatgaaccatcacc

SEQ ID NO: 433452 - DNA, 83 bp, Homo sapiens
ctggcagccccgctctctgcagataatttcttgagaggagataactcccgtaaagttcagcaccagcagcagaggaaacccag

SEQ ID NO: 433453 - DNA, 100 bp, Homo sapiens
tacggcgtgcgcggctatcccaccatcaagttcttcaggaatggagacacggcttcccccaaggaatatacagagccgctcccgaggccccggcgcggcg

SEQ ID NO: 433454 - DNA, 82 bp, Homo sapiens
ctacgacaccggcgaggaacttggcaggcgatcagtgggtgaccgcggctgcgagggactttgtcatccgtcctccaggatc

SEQ ID NO: 433455 - DNA, 75 bp, Homo sapiens
caagatcttggcaaagcttctccctcagtatttagaccaggtaaagtcagtgataaatcttttgtttgctgcata

SEQ ID NO: 433456 - DNA, 82 bp, Homo sapiens
cagcagtcaagtatgtcccaaacgtctctcgatgcattctatttctcatcatttggctcataactggaggaaggcaccactt

SEQ ID NO: 433457 - DNA, 75 bp, Homo sapiens
aactgaagaggttctacacaattgttaaacgagaagattcatcaccgctttgatggctgcctcacaaacttcaca

SEQ ID NO: 433458 - DNA, 75 bp, Homo sapiens
cttgccctggtcttgctcggccgatgaagtgcagaggtttttttctgctgagatctgtatctgtggacctgaatg

SEQ ID NO: 433459 - DNA, 100 bp, Homo sapiens
gacccgggactagtggaccagctggtgaaggcagacagcgagtggcgacgatgttgttcctggtcattgagtacgtcaacggcggggacctgatgttcca

SEQ ID NO: 433460 - DNA, 100 bp, Homo sapiens
tctctccatcccttccgaggcccgacttcgatcactggcgttatccttcttgcagttggcatttggggcaaggtgagcctggagaattacttttctcttt

SEQ ID NO: 433461 - DNA, 74 bp, Homo sapiens
agccccaaatgcctcccccctactcttcatctcgtctgtacccagtgtaccacatgaaggaagatggttgggtg

SEQ ID NO: 433462 - DNA, 89 bp, Homo sapiens
gaccggggcctgggtccacgccgagggcaggacgaacttcaccagatcaggatcctcatgaccagccaaagagaagaagaattaggaag

SEQ ID NO: 433463 - DNA, 97 bp, Homo sapiens
tgatattcagtggtgtttttctcaggtgaaaggagcagtagatgatgatgtagcagaagaaagctcctgctgcttctgtaccccgcctgtccctccc

SEQ ID NO: 433464 - DNA, 100 bp, Homo sapiens
tcctcctcccgtccttctcatccttcgtactccaaagattcaggtttactcacgtcatccagcagagaatggaaagtcaaatttcctgaattgctatgtg

SEQ ID NO: 433465 - DNA, 50 bp, Homo sapiens
cggggacctccggcgaataaagggtacggcagctggagagaactggccaa

SEQ ID NO: 433466 - DNA, 104 bp, Homo sapiens
gtcggtgttccacgtgaagctcaccgacagtgccctgagggccttcgagagctaccgcgccagacagggggggccctcagcctcttggccttgaacgggctgtt

SEQ ID NO: 433467 - DNA, 100 bp, Homo sapiens
cctggaggtcagaggccctttcatcatcaggacaaatgaccagttggtggcgtttctctcccgataccgagatatgaatttcttgaagtcacacggccgg

SEQ ID NO: 433468 - DNA, 51 bp, Homo sapiens
gagagcgcgggcctctaggaagtgaacacctacctcttcatgatgcaagcc

SEQ ID NO: 433469 - DNA, 51 bp, Homo sapiens
caggaaccaccagtgacagaagttcctgagttggaggtagaagaagaaacc

SEQ ID NO: 433470 - DNA, 96 bp, Homo sapiens
atgggatcttcaactcagtcctgtttgacaacatctgccctacccccatcctgcagaagaataaacagccattggactcttcaaacaaaaacgctg

SEQ ID NO: 433471 - DNA, 87 bp, Homo sapiens
gcggcggacgcgcccgggacgcgcggcggcaccgggaggccgggccgagcggttcgagaacttgtcttggacaattgcaaatcaaat

SEQ ID NO: 433472 - DNA, 128 bp, Homo sapiens
actctccccaaccctctgcttggacagcccccacacgagcacgagatgcttcgccacccagttttcggtgcatggctgcctcctaatcccatagtccagaggaggcatccctaggactgcgggcaagg

SEQ ID NO: 433473 - DNA, 75 bp, Homo sapiens
atgacattgacgacaggcgggagtttcaggaaactctgagggcgtgcatcgacttcgccatcagcgccaaacctc

SEQ ID NO: 433474 - DNA, 82 bp, Homo sapiens
gacgactccgtcgcagactacggacctgtctgggtctcagccgccaaagaccccgtccgtaagactttgaccccgacgcagg

SEQ ID NO: 433475 - DNA, 87 bp, Homo sapiens
cccagcccctggaaaggggcaggaacgacaaactcaaagtccaggatgaagatttgataaagtggaaggcactgtttgaggaagtcc

SEQ ID NO: 433476 - DNA, 100 bp, Homo sapiens
gaagaattgaattttacaaagaatccaagcaacaggctctgtccaatatggtgctgggactctggtgcccccaaccctgggcatcctcaggctttgagga

SEQ ID NO: 433477 - DNA, 74 bp, Homo sapiens
agaaagaaatagaaaatttgaagggtattgttccagatcttaacagtactaagcagtcttctggggaaaagctc

SEQ ID NO: 433478 - DNA, 100 bp, Homo sapiens
catcccgtcctttcgctatgaagagagcgacctggagcggggatacacgatgccttcaattaagttgcagagttctgatggagagatatttgaagttgat

SEQ ID NO: 433479 - DNA, 98 bp, Homo sapiens
cggcgcccaggccccctgccgcggcgtccccgcggccccagcccagaaaaatggctacaaacttcctagcacatgagaagatctggttcgacaagttc

SEQ ID NO: 433480 - DNA, 100 bp, Homo sapiens
tctcaacaaagatccacgagattttaagcgcactgatgattttgaggaaagcaacagaatgcatgtttttcccctacatcctgctgctctttgcgatcct

SEQ ID NO: 433481 - DNA, 100 bp, Homo sapiens
cggcagagcaaggggcttacgcagaaggacctggccacgcctggggaccagcggctggcacagagcgcggagatgtaccactaccagcaccaacggcaac

SEQ ID NO: 433482 - DNA, 92 bp, Homo sapiens
ccttgtggagccggagctgggcgcggattcgccgaggcaccgaggcactcagaggagatcaatgtccgagttaccaccatggatgcagagct

SEQ ID NO: 433483 - DNA, 101 bp, Homo sapiens
agtggcttcatgctgatgaagaactgcatggggttccaaaaggtcccaggtgtcctctccgtgcagtcggaaaaagccccgcatgggccagcaagtcctgg

SEQ ID NO: 433484 - DNA, 96 bp, Homo sapiens
gtgccctcggcctgagtcgggatggagctgcctgctgtgaacctgaaggtcctatctgactcctgtacgggatgaggaagcagagtctttacggaa

SEQ ID NO: 433485 - DNA, 98 bp, Homo sapiens
aaagtctccaagaagatgcccaagatcccagtgttggttaggtcattcaacatttattcaaccaaaaatactaagtcagctctatacaaactaatgga

SEQ ID NO: 433486 - DNA, 98 bp, Homo sapiens
cggggcccaaccacaagacgactcaataggaggaaggtagagctgaagtttcctgcaccaggcaagcctggaaattatcagtatactgtgtttctgag

SEQ ID NO: 433487 - DNA, 83 bp, Homo sapiens
cggacgggccatacccaataaccaggtgcttggcaaaatcgagcgggccattggagccttcacgtaaatgggtccagtcatgc

SEQ ID NO: 433488 - DNA, 96 bp, Homo sapiens
gttagagaactacagaaacctggtcttccttgccttcaaagaaaaacctcggtatccaccaagtcaggctcaagcagctcttcaagacagtccccc

SEQ ID NO: 433489 - DNA, 51 bp, Homo sapiens
tctgggtgacactcaacaggattcccgattcttgttggatctagccttgga

SEQ ID NO: 433490 - DNA, 100 bp, Homo sapiens
accaaaaggccagactgaacacgatgaggctcggacctcaggcacatgcgaatgacccggagtgtggacaacgtccagttcctgccctttctcaccacgg

SEQ ID NO: 433491 - DNA, 104 bp, Homo sapiens
gagaagctgctgaaaaaaatttatatctctctcagttgattatattggatacactggaaaaatgtcttgctgggcttagcagtgtctgcaaaaacgaatctttt

SEQ ID NO: 433492 - DNA, 100 bp, Homo sapiens
ggaggtgcccctgcgttgtaccatccgcctgtgggacacctaccaggagtctactcttcatcttgtgttgagacttcgtggtggtgctaagaaaaggaag

SEQ ID NO: 433493 - DNA, 135 bp, Homo sapiens
gcgcggccgcggccccggccgctctgggcgactgtgctggcgctgggggcgctggcgggcgttggcgtaggaggtactccaaagattcaggtttactcacgtcatccagcagagaatggaaagtcaaatttcctg

SEQ ID NO: 433494 - DNA, 100 bp, Homo sapiens
ggatccatttctcctattgaggagtcaacgaagccttatcagttgtgagtgaggaccagtcgttgtttgagtgtgcctacggaacgccacacctggctaa

SEQ ID NO: 433495 - DNA, 100 bp, Homo sapiens
cattcactgatttggcaagtcaagaaaagccactggtattacccagtgtagatattgacagcatttcaaatagtagtgctgatgtcctttcacctctgtc

SEQ ID NO: 433496 - DNA, 83 bp, Homo sapiens
tcaagttcatgtcacgctgggtaatgaggatttgactgtgaaggtgtcagtggtaactggatcgagatcgcctatggtacgag

SEQ ID NO: 433497 - DNA, 130 bp, Homo sapiens
agagaccaggcttaatgaggtggagaagctgctgaagacgatcataagcatgccctgtaaagaaaagaatacttgagatccatttgtaaggaaagaaaaggaagcaacaacataatgcccagagttggag

SEQ ID NO: 433498 - DNA, 78 bp, Homo sapiens
ggatagtatcttggccagggaactcaaacagcagatgcaggtgtcgtgaaaactacccctaaaagccaaaatgggaaa

SEQ ID NO: 433499 - DNA, 50 bp, Homo sapiens
actgccttggttggaaccttgcagctagaggagcgagttttggattggca

SEQ ID NO: 433500 - DNA, 75 bp, Homo sapiens
gccctgtgtgacaccaagataagtaacgtgaccaagaatatggcccaggtgaccaaagccctggacaaggccctg

SEQ ID NO: 433501 - DNA, 82 bp, Homo sapiens
aataaggctaaacttgcaatatggatgtacttgaaggatataatggaacaatatttgcatatggacaaacatcctctgggaa

SEQ ID NO: 433502 - DNA, 50 bp, Homo sapiens
acactgccagctggaaccagaccatttcactgagacttttttgacggaga

SEQ ID NO: 433503 - DNA, 101 bp, Homo sapiens
cggtggcagcatctcctggacctcattgcagccagttgtattccctgaatgactataaaccacccatttcgaaagcgaaaatgacccaaattactaaggca

SEQ ID NO: 433504 - DNA, 98 bp, Homo sapiens
atgactgtccgaaacatcgcctccatctgtaatatgggttcagtttggcaaagacttggtgcagatgtgacagcagttgaatttttaggtcatgtagg

SEQ ID NO: 433505 - DNA, 74 bp, Homo sapiens
tggactgtggctttggaaattggaaacgatttgaacagcagcaaaaactcttagaagaagaaagaaaaagacgc

SEQ ID NO: 433506 - DNA, 100 bp, Homo sapiens
cttagtggccctcctggaagatgacagtggcatggaggttgtgcccacgtgcctcagggccttggtagaaatggcccgggtagggggtgcctcctccctg

SEQ ID NO: 433507 - DNA, 100 bp, Homo sapiens
cgccttgcctccctgccgccgtcctcgccgcttccccggcggtagcagcctgcagccacgagagaactcgatgccaccgcaacggtattggcgaaccggc

SEQ ID NO: 433508 - DNA, 90 bp, Homo sapiens
aagacaaaaaacatctggataaattctcttcttatcatgtgaaaactgccttctttcacatggagtctcgctttgtcgcccaggctggag

SEQ ID NO: 433509 - DNA, 101 bp, Homo sapiens
acagagctgtaccagtacacggcccacgttgccaggatggaatccgacgtggtaggcccagagcagatactgtccgcgatttaataaatgaaggagagcat

SEQ ID NO: 433510 - DNA, 83 bp, Homo sapiens
ctgggggccacaaatgctccttctcctggagacgcaactcaaggtgaaggacttaactaagtacttggatcccagtgggctcg

SEQ ID NO: 433511 - DNA, 75 bp, Homo sapiens
acacccaggaaaagactcaggacggacaagcacagtcttcggaagaggttggaaagaaccatgactgtattcagg

SEQ ID NO: 433512 - DNA, 100 bp, Homo sapiens
aaactgaggaatttgaagtgaccaaaacagcagatgaggacggggacttggttgccttttccagtgacgaggaattgacaatggccatgtcctacgtgaa

SEQ ID NO: 433513 - DNA, 101 bp, Homo sapiens
cccggacatgagcaagcccccgacagctcagccagacttcccctatggtcagtatggtgtcgtgaaaactacccctaaaagccaaaatgggaaaggaaaag

SEQ ID NO: 433514 - DNA, 74 bp, Homo sapiens
ggccaaggagaggacaagcgacgcgtggcccacctgggctgccattcaggggacagagcacaggaaagggaccc

SEQ ID NO: 433515 - DNA, 75 bp, Homo sapiens
agttgctgaactacaaagaaagaaaaggtgtgagcggtactgggcccaggagcaggagccactgcagactgggct

SEQ ID NO: 433516 - DNA, 143 bp, Homo sapiens
gcttccagaatcactgagctgtaacaaagcactctgtgctagtgatgtgagcaaatgcctcattcaggccgccagatcccacccttggacccccatgaaaatggaaacaatggaacaatcaaagttgagaagccaaccatgca

SEQ ID NO: 433517 - DNA, 75 bp, Homo sapiens
aagggaagcttttctccctagaactggttgacgaaagtgtgacctctgagaaggatgtgcaaacagctctggctc

SEQ ID NO: 433518 - DNA, 76 bp, Homo sapiens
cctgccggagccccgccgccgccggcttggacccagatgatgtggtaccagttggccaaagaagagcctggtgttg

SEQ ID NO: 433519 - DNA, 75 bp, Homo sapiens
cgtctaccagagcatggtgctcttcttcttcgagaattacaccggggtccaggatctttcgaagatggtttggct

SEQ ID NO: 433520 - DNA, 100 bp, Homo sapiens
cttgtgagaaatccaattcagctttttgtgctgccagcaagaaatgatcagtagcaccagtgtttatggtgattaaagtatacagtgaagatgaaaccag

SEQ ID NO: 433521 - DNA, 82 bp, Homo sapiens
ggggactcctcatacgccaaagtaagcaggaaattcacaggaggtctgctcggctcagaaacactaaatacaaatctgctcc

SEQ ID NO: 433522 - DNA, 83 bp, Homo sapiens
ggagaaacaggcgccgcgggctccgcgcccggccggacccgggcccgagggggagaagcgagcggacatccagctgaacagct

SEQ ID NO: 433523 - DNA, 74 bp, Homo sapiens
gagagaccccgcggctgggcgttcatctaccacgctttcgtataaacaggggtcacatgacgacagaagccaag

SEQ ID NO: 433524 - DNA, 83 bp, Homo sapiens
gagttcgaagagttggatactcagcgtcgctggcagccgctgtacttgattgcttgtcttactcagctttgcaagtcctatcc

SEQ ID NO: 433525 - DNA, 50 bp, Homo sapiens
acgtgtacctggacatcaccggagtctccccaggacagtgctatcacccg

SEQ ID NO: 433526 - DNA, 90 bp, Homo sapiens
atagcctttcacttattcatctgtccagcatgactcatccccgggagtgttgatttgtgaagtgtggatatgcaggctctaactttccag

SEQ ID NO: 433527 - DNA, 100 bp, Homo sapiens
ggcggcggcgccatggcagggcttgcagcagccagactgccttccgggtcactgccatggaggagccgcagtcagatcctagcgtcgagccccctctgag

SEQ ID NO: 433528 - DNA, 118 bp, Homo sapiens
taattagctgaaaacatcatcgttttgaagagttctgcgttttgccagtcacctctcaactgtgtgccaaagagaagatggcgaattagaagatggtgaaatagacgatgcaggattt

SEQ ID NO: 433529 - DNA, 88 bp, Homo sapiens
atcatgctgaaacgattcaataggttggatggcaagcatgtggtgtttggcaaagtgaaagaaggcatgaatattgtggaggccatgg

SEQ ID NO: 433530 - DNA, 75 bp, Homo sapiens
aaaaggcctgacatatctgagggagaagcacaagatcatgcacagagaaaagaatggtttgtcattcattgaaac

SEQ ID NO: 433531 - DNA, 83 bp, Homo sapiens
tttccgcaggactacttccccgagaggaaatatcattctgcaaaagaagcttatgaacaacttttgcagacagagaatctttc

SEQ ID NO: 433532 - DNA, 100 bp, Homo sapiens
cattgacatttaattttagggtcctttatatagaagggagagtagactatcacaagtccctggaggatgctctgagctcagacacatctggccacttcag

SEQ ID NO: 433533 - DNA, 100 bp, Homo sapiens
ggccttacttggaacctaaccatgctggtaccctgatctcggacttgcagcctccggaactgggtgagtcaggtgctgggaagacagaaaatacaaagaa

SEQ ID NO: 433534 - DNA, 75 bp, Homo sapiens
ccttgtgggatgtgaaaactctgttactgaagttgacggactggacaaagcttctatagcaaactcagatggccc

SEQ ID NO: 433535 - DNA, 100 bp, Homo sapiens
aagcggaacagccacagcagcctcccaaggagtctgcaagttgatctcacattcttgaaggtggcattgaagagcactaagatcggaagatgagtgagct

SEQ ID NO: 433536 - DNA, 50 bp, Homo sapiens
tgacagcaagctgagcttccgggaggagctgtatgcggccggggagaacc

SEQ ID NO: 433537 - DNA, 100 bp, Homo sapiens
gaagaaagaagaggagaaggagcagtccgtgctcaatccaatatcagatggaaatgatgcggagccttcgccatgtaaacattgatcatcttcacgtggg

SEQ ID NO: 433538 - DNA, 75 bp, Homo sapiens
acttatacttctcaaatcttaatttcctaaagctgaaaatgtgtgtctgacatgcaagctcagtggggcagagac

SEQ ID NO: 433539 - DNA, 101 bp, Homo sapiens
gcctgggaggccggccggtgccagcacctttcggcttctgagacggcggcagcagcggcattcaggcctccggtgtggctgtctctgatggtgtcatcaag

SEQ ID NO: 433540 - DNA, 100 bp, Homo sapiens
tataacttgactggctccaatgcagtgggagattttgataagatctggcgagaacactgtgaggatgaagaaactctttgtgaatatgccgttgcaatga

SEQ ID NO: 433541 - DNA, 75 bp, Homo sapiens
caaagactgcatgaagaaggtggtggctgtccacctccaccagacggtccagccgtggtccttcagcatatctct

SEQ ID NO: 433542 - DNA, 100 bp, Homo sapiens
gggagccccaacacacggtccacagctcatcatgatggacttggagctgccgccgccgggactcccgtcccagcaggttcatgggcgggggtggtgagag

SEQ ID NO: 433543 - DNA, 100 bp, Homo sapiens
cggtgcccggagtgtggtacttctcctagttgcagtcaggcttcatacgctattgtcctgcccgaaaccatcaacacaggcccttttgtgatgcgttcca

SEQ ID NO: 433544 - DNA, 112 bp, Homo sapiens
gatgaactgtccttccaacggggtgacctcatccgtattctgagcaaggctgagtcatcactagagagtgggaagggcagcagcagcagagaatccaaaccctaaagctgat

SEQ ID NO: 433545 - DNA, 100 bp, Homo sapiens
atcagaagcatcaggattctgttacgttaatgatattgtgcttgccatccttgaattactaaacttatgtccctgatgccaaaaatgcacctactctttc

SEQ ID NO: 433546 - DNA, 90 bp, Homo sapiens
tctggctgtgctgcgcgacccccgcgcatggggcaagattcttgccaagagaattaatgtgcgtattgagcacattaagcactctaagag

SEQ ID NO: 433547 - DNA, 100 bp, Homo sapiens
tatgtccagcctatttgcacaccatccaggagtcagtttattactggaaaattcatgatgttgctatcaaaagttgagaaattgtcagaagaaatcatgg

SEQ ID NO: 433548 - DNA, 100 bp, Homo sapiens
ccccgacttgtccactgaagtaacagcagcaatgaccttccctcgggaattccacctctgcgtttttccctccagctttggaatcccaaagcccaaagag

SEQ ID NO: 433549 - DNA, 75 bp, Homo sapiens
ttggcctatggaaaacggggatttccaccatctgtcccagcagcagcctcttgctgatccataccaaccccagcg

SEQ ID NO: 433550 - DNA, 100 bp, Homo sapiens
agacgctttacccgactctttgggccgttatctcactgtactaatggtcacttgatgtgcgctggctgttttatccacctactagcagatgcccggctga

SEQ ID NO: 433551 - DNA, 101 bp, Homo sapiens
gagcagagaacagagtctccaggaggtctgtggccagggccaggcgatttatgggaaagaggcagacattttcctggtctctgctttctatccgtcaagat

SEQ ID NO: 433552 - DNA, 82 bp, Homo sapiens
cagggtcaaaggagagcacaaccatcgcagttggaagcccatggggcagcgaggatctggatgagctgcactaccaggacac

SEQ ID NO: 433553 - DNA, 50 bp, Homo sapiens
tcttcgagtatttgtagaagggaagaccaacactgtcatctgaagttgga

SEQ ID NO: 433554 - DNA, 98 bp, Homo sapiens
accatctgaaaacaacatcatgcagtggaatgcagttatatttggatgtttttatacctatgccagagaacttattagtaaacttaaatgaaagtaaa

SEQ ID NO: 433555 - DNA, 100 bp, Homo sapiens
ccgacccgggccccgggctagcagagcggaggcgctgccacgaaactcgtacctgcggctaagagcaggccggagcctcaacagaaagctcctttagttc

SEQ ID NO: 433556 - DNA, 75 bp, Homo sapiens
attaaccagtatagcaactattattggaagaaagctggcttaaatattagtgatgatgaaccaggttatgacctt

SEQ ID NO: 433557 - DNA, 100 bp, Homo sapiens
atagtgacttccatgacttccacatgagaatcactgaacagcttgctaagtactgtgacaacttactgaagaagtcagcgaaagggatgacagagaatga

SEQ ID NO: 433558 - DNA, 100 bp, Homo sapiens
tcgctctgtgacctgcgggtattggatgattggtagctaagactcccgaatacttcagaagtggggaaatgcaagagtgagccatggagctacgtgtggg

SEQ ID NO: 433559 - DNA, 100 bp, Homo sapiens
gcaatgagtatagccagtattttgaccaacaccatggaagattataagcgccatggctatggctagtgttaaattgcttgccggtgttttaagaaagcca

SEQ ID NO: 433560 - DNA, 98 bp, Homo sapiens
ctgtccagagcctccagggccctgcgccttgctccttttgtctaccttcttctgatccagacagataacccaacagcttgagggaatctgcttacagg

SEQ ID NO: 433561 - DNA, 73 bp, Homo sapiens
tcctccggcccgggccctggcccagctagccggccatggaaggcagcaagaattattgccaagttagcagctt

SEQ ID NO: 433562 - DNA, 100 bp, Homo sapiens
ccttctctgatttgctgtcagccatgaacggatggatgtgatgcctgctagccaaaaggaattaaacaaccaccatgtcgagcaaaaaggcaaagaccaa

SEQ ID NO: 433563 - DNA, 100 bp, Homo sapiens
tagagggaaccgacttggaatttgaggactttgaggttctcatgtatcagccatcttctgtaagggtgcccagtgtgacttcggttgatcctgctgctat

SEQ ID NO: 433564 - DNA, 75 bp, Homo sapiens
caagaatgtctgcctgtcattctggatgtgggaaccgaaaatgaggaaggtgtcttgctgcaggtaactaatgaa

SEQ ID NO: 433565 - DNA, 59 bp, Homo sapiens
cgccaccctgcgctgccgccgctctgaggagttaaaggagagccttgaacttaggaatt

SEQ ID NO: 433566 - DNA, 100 bp, Homo sapiens
atcatgcagttgttacgtgataatctgacactatggacttcagacatgcagggtgacgtttctcttcagcaacgggtagcagaattggaaaaaattaatg

SEQ ID NO: 433567 - DNA, 100 bp, Homo sapiens
aaagcataaccaatggcagtgatgatggagctcagccctccacctccacagtctgcagatctccaggggagcccaccagcctagtcaacatggcctcgga

SEQ ID NO: 433568 - DNA, 96 bp, Homo sapiens
tcagctcagtgctgtgcgggccaggtatgtctccctgcaacacagctgttgtacctcaggggtggtctgtggaagccttaaactctccacactcag

SEQ ID NO: 433569 - DNA, 98 bp, Homo sapiens
cgcacggatcatggccgcagccgctctggggcaggttcttgggtgtctctggggagtccctgggccagaccttcctccagactccagcccacctcttc

SEQ ID NO: 433570 - DNA, 82 bp, Homo sapiens
ctcggttttcttatgcttataagagtggaacaggttgattcttcaccacactgaaaccattaggaaaaatccttgtggttaa

SEQ ID NO: 433571 - DNA, 98 bp, Homo sapiens
caaaatcacgttataatcagattttgaccaagcattttgtaagggatagctgggagtatggccaccctgctccacgatgcggtaatgaatccagcaga

SEQ ID NO: 433572 - DNA, 100 bp, Homo sapiens
atctcatcttggcaggagtgaaaggactgaccatgctggatcacgaacagaaaaagcggatggtggttcctgctgccctcaaggtcgtgcgtctgaagcc

SEQ ID NO: 433573 - DNA, 83 bp, Homo sapiens
ggccaaggcgccaggcaggacgacagcagcagcagcacgtctccttcagggtctgggggtggtggcatctcccctaaaggaag

SEQ ID NO: 433574 - DNA, 100 bp, Homo sapiens
cgagtgccggcttctcccctacgcgctacacaagtggagctccttttcctccacctaccttcccgaatatggaatgtgcagatgtcccactattaactcc

SEQ ID NO: 433575 - DNA, 75 bp, Homo sapiens
gttaccgccacctaaaaacaaagaggattttgagaaggaggagatgttaaagtaacccatcttgcaggacgacat

SEQ ID NO: 433576 - DNA, 90 bp, Homo sapiens
catcccgctgcagccggtgcgccagaagaagcggatggacagcaggccccgcgccgggagctgcccaatggggaccccaaggaggggcct

SEQ ID NO: 433577 - DNA, 97 bp, Homo sapiens
ctggaaattcctgacgttcattgatctgcttctcacctggggcgggtgggttctgcaccaccctcccaccctccttcctccgtgtggacgatagagc

SEQ ID NO: 433578 - DNA, 75 bp, Homo sapiens
aaggaagaagcagatcttcttttggagcagcagagactggtctttcatggtgctgattcagacatagaatggcta

SEQ ID NO: 433579 - DNA, 101 bp, Homo sapiens
cagccggctggcgatgacgcctgctctgtgcagatcctcgtccctggcctcaaagttctcccaggagaaagccatgttcagttcgagcgccaagatcgtga

SEQ ID NO: 433580 - DNA, 75 bp, Homo sapiens
cagattccagaaaaattacagcacatctcagtgaatttgcaagtgagaaactccagaaaatcttgccaaacttct

SEQ ID NO: 433581 - DNA, 110 bp, Homo sapiens
caaaattttggtctgatgatagcagatcctatctgttcaattcttatagccattcttatagttgtaaggctctctatgagaacatgctggtggagctgccctttgcaggc

SEQ ID NO: 433582 - DNA, 50 bp, Homo sapiens
taaagagcaggaatcatggactgtgtttgctaatccagactttacacaac

SEQ ID NO: 433583 - DNA, 75 bp, Homo sapiens
ccgcttcttccccatctccaaggaccagcctcggatgccttcaattaagttgcagagttctgatggagagatatt

SEQ ID NO: 433584 - DNA, 75 bp, Homo sapiens
aaactttgggcttgcaacttttgttaccaaaggaatcagttcctgcgacctgaaatacacagaaggagtacagtc

SEQ ID NO: 433585 - DNA, 98 bp, Homo sapiens
cggaagacctcactgaccccagagtggcagaaaggctgatgcagcaggtacaccaggggttggaaaaaccacactaggcaaagaacttgcgtcaaaat

SEQ ID NO: 433586 - DNA, 98 bp, Homo sapiens
ggctgcgggaaatcgggctgaagcgactgagtccgcgatggaggaactgtggctgcaccatctgtcttcatcttcccgccatctgatgagcagttgaa

SEQ ID NO: 433587 - DNA, 96 bp, Homo sapiens
gcgcagcgacggcgtcgggagagcgcgcctagccggctcgcgatgggtaattccagaattgattggccataccattgtcactgtattactgctcat

SEQ ID NO: 433588 - DNA, 75 bp, Homo sapiens
caaatctccaggttttccctgcgctgggtaatcatgactattggccacagggattacatctactacaacgacgtg

SEQ ID NO: 433589 - DNA, 82 bp, Homo sapiens
gccgatccagcctgcggagcctgtggggcaggctggtgcagtggtgtcatcttggctcagtgcagcctcgacttcctgggat

SEQ ID NO: 433590 - DNA, 100 bp, Homo sapiens
tttagaggcatctgttctatcttcccatcataaaaaagaaccatgtaagaagtctgactgccctgctggagaaatcaaatggagaggtcaagagacaaca

SEQ ID NO: 433591 - DNA, 78 bp, Homo sapiens
caaactctacctcatccttgagtgcctcagtggtgccgtttcatcagggaacgagaccgtgctgtcaacgactacccc

SEQ ID NO: 433592 - DNA, 100 bp, Homo sapiens
cccaggtgtaagcgcagaaagcaggcgaacccgcggcgcaataacgagttgcatgctgagaatttgaaaaatgaagatgatgtagacactggactattag

SEQ ID NO: 433593 - DNA, 90 bp, Homo sapiens
gttttaattcttcggaaataccaagtggtctctgagagaaactgagtccgagggatgtcaacatgccaagtccatggaaatatcagtggg

SEQ ID NO: 433594 - DNA, 75 bp, Homo sapiens
tgacagaccctattcgctctttgaaggtctgtcatgctaatccatcagaaagagctcgttttattcgctgcatct

SEQ ID NO: 433595 - DNA, 100 bp, Homo sapiens
ataaggaattggctgactatttttatcctttttcccctgaagctcgtagagaaatgtggtacaggtttgcagattccgccagcagcacagcaagctctac

SEQ ID NO: 433596 - DNA, 100 bp, Homo sapiens
atgaatgtgtggagatggcgactagtggacaacagaacaatattggaatggtgccaaggccacctttgatgccatttctaagacctacagctacctgacc

SEQ ID NO: 433597 - DNA, 50 bp, Homo sapiens
gcgtcaacttcctcaagtcgcccaaaggctgaccccgcactacatctacc

SEQ ID NO: 433598 - DNA, 76 bp, Homo sapiens
cctcggcaaattccgacgtcttgaagacttccgagtagattaacaaatgtggcaattattttggatctatcacctg

SEQ ID NO: 433599 - DNA, 110 bp, Homo sapiens
tgcggttcttcctgaatcagtattcagcgtctgtccactccctcgatggcttccggcctccggtgtggctgtctctgatggtgtcatcaaggtgttcaacgacatgaagg

SEQ ID NO: 433600 - DNA, 88 bp, Homo sapiens
gcaggggcctcaattaatgtatctgggcagagcatcaaccccaagttggcgggcctgattgggcggcacgggccccagaacaagcagc

SEQ ID NO: 433601 - DNA, 75 bp, Homo sapiens
atttttcattatccttttctgggtgctatgggtgatcattccaagactgtttgcagacaaggtcccaaagacagc

SEQ ID NO: 433602 - DNA, 125 bp, Homo sapiens
catgtcatggaagaattatttcaatccagtttcaggaggattgccagaaggtagaaaatctggtgtattaactgtgaaaattttagagctgcatgaggaatgtgccatgcaagttgccatgtgtg

SEQ ID NO: 433603 - DNA, 82 bp, Homo sapiens
cgaagctgctgaagtggtttttcctaatggaaaatcacatacctttccagagccctctggcacaaatggaagaagaaagaag

SEQ ID NO: 433604 - DNA, 87 bp, Homo sapiens
ccgcgggcccagctgcgaccccggccccgcccccgggaccccggccatggacgatgttcccgctgcctgtcaccaacgggaagggcc

SEQ ID NO: 433605 - DNA, 103 bp, Homo sapiens
agaaaacttgcagctgtgacttataatggagttgataacaacaagaataaagggcagctgactaaggttgaagctttgagagaagcagcaactgctgttgagc

SEQ ID NO: 433606 - DNA, 100 bp, Homo sapiens
agacagggcacaccaaactccatctgcaattctgtggtgttcttggtcacacatttatggagtttctgaagggcagtggagattactgccaggcacagca

SEQ ID NO: 433607 - DNA, 96 bp, Homo sapiens
aattactgatacagagacgatggtcggaatcagatttgaaaatgaaagtgattcgctaaatattgtaatggatcaaggagatacacctacactaga

SEQ ID NO: 433608 - DNA, 100 bp, Homo sapiens
agggcctggtcgagacaactatttttgaggtatctgaggctaccccacagcactctctggcattggcctgccttgctctgccaggaaccatgagtgaggc

SEQ ID NO: 433609 - DNA, 82 bp, Homo sapiens
tctcagatgttaataccaaccgttgattcaagatggattcatcatttttcggtggtggaaaatgtataacccaaaacagaag

SEQ ID NO: 433610 - DNA, 82 bp, Homo sapiens
ctaagatgccaggacatcctggaagctgggaaaaggatttcaaatatgcgtgcattagagaatgattttttcaattctcccc

SEQ ID NO: 433611 - DNA, 83 bp, Homo sapiens
ccaacatcgggcgcctggtagaggaatactcccccagttgcaagaggcgcaggaccgtggaagacttcaacaaattctgcacc

SEQ ID NO: 433612 - DNA, 101 bp, Homo sapiens
cggagcaccgccttccggcagaagctggtcagtcaaatgtgctggagaatctggtaaaagcaccattgtgaagcagatgaggatcctgcatgttaatgggt

SEQ ID NO: 433613 - DNA, 90 bp, Homo sapiens
ctgatggcgatggtgatggcagcagttactcgcacaaccccagttaagctgcgctccgggaggttgttttggaaaccgaaataacaaata

SEQ ID NO: 433614 - DNA, 50 bp, Homo sapiens
ccaaaggcacaggaagaagcttgcaggtgtgtgtgtgcaggccacagcag

SEQ ID NO: 433615 - DNA, 100 bp, Homo sapiens
ttacgtcttcctcagtgacattgacttcctgcctgcctattctctctacgactacctcagggcggcgactggcggcgcgatggacctgaccgggctcctg

SEQ ID NO: 433616 - DNA, 90 bp, Homo sapiens
cagcttcccacatctccaggtcatatgcacacccaggtaccaccttatccacagccacagcggcttcgtgggacacatatgcaacatgcc

SEQ ID NO: 433617 - DNA, 100 bp, Homo sapiens
gctttattttgttctggattttgttaatggaggggaggatatcggggctggcaaaggcaagtattatgctgttaactacccgctccgagacgggattgat

SEQ ID NO: 433618 - DNA, 75 bp, Homo sapiens
ggaacagtcgccgaggcgattcccgcccaggcatacagaaagttagccaaggaatatcatcctgataagaatcca

SEQ ID NO: 433619 - DNA, 80 bp, Homo sapiens
tgctcattctttgtacctggtgatagacaggtagtcataggaacaaagtgtttatccaacatatgattttgcctgcccca

SEQ ID NO: 433620 - DNA, 74 bp, Homo sapiens
tttagtgaaatgggctaataatgctggcaaagtggaaaaatgtgcggtgattgatatgcccgagcacaaccctg

SEQ ID NO: 433621 - DNA, 82 bp, Homo sapiens
caaccctcagggcagctttgactgcatccagcaaacattctccagggagtgaagagcaaggccagcctacccaactttcttg

SEQ ID NO: 433622 - DNA, 100 bp, Homo sapiens
ccgcgccctgctccctctcagcacctgggcggacgactgttgggcgggagctgctgctccatctgattgactatctcgtaaccagtgatggcaaagaccc

SEQ ID NO: 433623 - DNA, 100 bp, Homo sapiens
gtgaccgagagcgcgaatatcgtcatcgttagaagccgagcttttgcttcatcaagagcagttggacagccactgtgctggggtgaccgagacgctgaag

SEQ ID NO: 433624 - DNA, 75 bp, Homo sapiens
ggaggaatacctccgctcccctctctcagggactgcaggcaccacctgtgtgaaccggacatgaaactggtgtgg

SEQ ID NO: 433625 - DNA, 83 bp, Homo sapiens
ctcggcaaatacaaacaccgtggagccttcacgtaaatgggtccagtcatgcctcccagtaagaagccagaaagctcaggaat

SEQ ID NO: 433626 - DNA, 80 bp, Homo sapiens
cgcccccgccggttcgcgtctctctgctgcggcgcggggaccgctgtgctctcggtgtctttcctgaagactatcttccc

SEQ ID NO: 433627 - DNA, 101 bp, Homo sapiens
atgctctactctatttctcgagacagtgacattttatttacccttcctaacctctccaaaaaaggaggagatgttaaagtaacccatcttgcaggacgaca

SEQ ID NO: 433628 - DNA, 100 bp, Homo sapiens
cggtcccttccttttggggctctcactctggaggatggggtggatgggaggtcctggcattgatgtgcctgctccagacatgagcacaggtgagcgggag

SEQ ID NO: 433629 - DNA, 75 bp, Homo sapiens
gcaagcagttcagaagagccaaggaataaacatgcaatgaacccaaaagggttcaactactcaatttcatgctgg

SEQ ID NO: 433630 - DNA, 101 bp, Homo sapiens
ctaccttatgagctcggttttcttatgcttataagagtggaacagcaacatggccaacgccctggccagcgccacttgcgagcgctgcaagggcggctttg

SEQ ID NO: 433631 - DNA, 75 bp, Homo sapiens
cgctcgcatgagcacctcatacggctgcttctggagaaggaaaatggcattcctatgaagaaagcacgaaatgat

SEQ ID NO: 433632 - DNA, 50 bp, Homo sapiens
cagaacatgattaagcagtttaaaggatcgaatcatcaatttagttgttg

SEQ ID NO: 433633 - DNA, 75 bp, Homo sapiens
caggtgccgatggaagtccttaagagataaggtctcaccatgttgtccagactggacttgaactcctggcttcaa

SEQ ID NO: 433634 - DNA, 75 bp, Homo sapiens
tacctgctctgtaccaactgccggaaagtgctgcggaaggtgtgactgcacagaaaagttacaaaacaaatttga

SEQ ID NO: 433635 - DNA, 74 bp, Homo sapiens
aaggattccaagtaactcttatttggattccccagctttccgttgcacaaacagtgaagtgacagtccagccca

SEQ ID NO: 433636 - DNA, 100 bp, Homo sapiens
agggcgcctacggcatggtgtgagcagaaggagaaacgtgtgtggagtttaaagccatgttgattgcagtgggcatccacttgctcttgttgatgtttga

SEQ ID NO: 433637 - DNA, 108 bp, Homo sapiens
caaggcctgagtagccggtaacaaacgagggttcccgggattggaccgacgcagccatggttccagcaacagatagaaatgctttaagttcactctggggaaagctgg

SEQ ID NO: 433638 - DNA, 90 bp, Homo sapiens
ataaagacaggagtggagtgatatcagacaccgagcttcagcaagctctctccaacgactcgctctccgtctccagcaatgacgccagtc

SEQ ID NO: 433639 - DNA, 82 bp, Homo sapiens
cgtgctgtgcgggatcgacgcggacagcgggctggagcctgacgagctggcggagatgccctgtatccaagcccaatatggg

SEQ ID NO: 433640 - DNA, 95 bp, Homo sapiens
gactacaagcatcactggcaagtctctgctggatgaaccgaatcctaacagtccagccaatagccaggcagcacagctttatcaggaaaacaaac

SEQ ID NO: 433641 - DNA, 75 bp, Homo sapiens
gaacacagctgtaaattccagctccagaaaccactcggctacgggggtccactggacggggcctgagctacaact

SEQ ID NO: 433642 - DNA, 50 bp, Homo sapiens
agacattggtgttgaaccagaaaacgtcttggctgttcaaccgtactttc

SEQ ID NO: 433643 - DNA, 51 bp, Homo sapiens
aaggatttcagcaaatttggagcaggatgttcccttcggagaggcagctcc

SEQ ID NO: 433644 - DNA, 83 bp, Homo sapiens
cctgtcacaggccatgctctggcaaaaaccaattctgtggtgttcttggtcacacatttatggagtttctgaagggcagtgga

SEQ ID NO: 433645 - DNA, 74 bp, Homo sapiens
ggagagatcgttggttcacagggaagtcgcctggaaaaaccaatagtaataagaccacagcttgccaaagagaa

SEQ ID NO: 433646 - DNA, 115 bp, Homo sapiens
aagacatttcctgctcggaaccttgtttactaattatgcctgaaaacttcatgcctcctgttcccatcacatcaccaatcatgaacccgttgggtgacccccagtcacaaatgct

SEQ ID NO: 433647 - DNA, 98 bp, Homo sapiens
ctatggcgccagtaagaagaaaaaagcgtccgcttccagctttgcgcagttacggacgagtttatgctgccgacccctaccaccacgcacttgctcca

SEQ ID NO: 433648 - DNA, 90 bp, Homo sapiens
gtgagagaaaggctggaagacgagaaagttcgtcgctgcttcctgtgctccaggagaggacatctcctgtattcctgtccagcccccctt

SEQ ID NO: 433649 - DNA, 100 bp, Homo sapiens
ttcaccttcaacttgggcttctcgggcaagttctatcatactgggtcctgcagttctgagcttgggttccctttgcctggacaccaaccaagcccccaac

SEQ ID NO: 433650 - DNA, 75 bp, Homo sapiens
actaaagcttgaaatgctacatttccaaggtgatctgtgaaaatggttcgctattcacttgacccggagaacccc

SEQ ID NO: 433651 - DNA, 100 bp, Homo sapiens
gtatgacagtttgaatatgcactctttggaaaattcccttatcgatattatgagagcagagcatgatcctcttaaggtgttctaagaacggaagcatctg

SEQ ID NO: 433652 - DNA, 75 bp, Homo sapiens
gcagcgggatcaagctgtgtgcattagtacaaatgttatcagggaataccaagagcagagagagcatccaggaac

SEQ ID NO: 433653 - DNA, 97 bp, Homo sapiens
ctgccctctcgaaggcaggacagcggtggcggcaggacatgttcccgatttgaggtgaaaccatgaagagaaaatagaatacttaataatgcttttc

SEQ ID NO: 433654 - DNA, 101 bp, Homo sapiens
ccgccaggcggtgatgaagaatccccccgaaaggaccccccaggtactaggttttgacaagcttgcatcatgcgtgagtataagctagtcgttcttggctc

SEQ ID NO: 433655 - DNA, 88 bp, Homo sapiens
ttacgcagaaggacctggccacgatggagaaggatgaaactgtgagtgactgctccccacacatagccaacatcgggcgcctggtaga

SEQ ID NO: 433656 - DNA, 59 bp, Homo sapiens
agcgtgttggggaaggagctgtaaagagaaatgcttcagacatgcctgaaacaatcacc

SEQ ID NO: 433657 - DNA, 100 bp, Homo sapiens
gaccaatactgctgctctgacgtgctgaagaaatttgtgtggagcgaggaaaggtgtgctgtgcctgaggccaggccttttggttgcccaccattgatga

SEQ ID NO: 433658 - DNA, 88 bp, Homo sapiens
agagtctgtggaagaggtggttcgaggtgaccaagaatatggcccaggtgaccaaagccctggacaaggccctgagcaccatggacct

SEQ ID NO: 433659 - DNA, 100 bp, Homo sapiens
ctcaagaggaagtgccgcgtcttggtgggtctggagctggctgacaatgcagggaattgaatgatctggcacgggaccctccagcacagtgttcagcagg

SEQ ID NO: 433660 - DNA, 105 bp, Homo sapiens
cgcgcgcagggcctgcagcgggagctggacggcgagcgcgagcggcgcgagaaaggaaagcaggcaggatgggagagtcgccgatagaaccacctcttccctgcc

SEQ ID NO: 433661 - DNA, 87 bp, Homo sapiens
cgcagtgccggaacactgtggcggccatcgaggaggtcgtccttggtggaaggaaccatgaactggcatctccccctcttcctcttg

SEQ ID NO: 433662 - DNA, 80 bp, Homo sapiens
ctgcagcgggagctggacggcgagcgcgagcggcgcgagaaagtttgcctgcaatgagatttcattctctacatttaaag

SEQ ID NO: 433663 - DNA, 83 bp, Homo sapiens
aggaaattgaagagccatccctggagccaggtcacggtctagatcacattctcgatccagaggaaggcgatactctcgctcac

SEQ ID NO: 433664 - DNA, 90 bp, Homo sapiens
cgcgggctgcggacgctcggtcccgcgctgcgcatccccgcggacgccacagcgctgtgagaagccctaccactgcaactgggacggctg

SEQ ID NO: 433665 - DNA, 100 bp, Homo sapiens
ctgctggagctgaacctactggggacgtacaccttgaccaagctccggggaaccttgtacaacaccggccgacatgtctccttcctgcctgcaccccgac

SEQ ID NO: 433666 - DNA, 82 bp, Homo sapiens
ggaagtgcagctgcctcagttcttagcgcaggtggatttgtttaaaaagagtcttctgttgattcctattcacctggaagtc

SEQ ID NO: 433667 - DNA, 75 bp, Homo sapiens
gttggtcttctgatagcaactttaatgtggttggacgcacttttggatattttccaaaagatttaatccaggtag

SEQ ID NO: 433668 - DNA, 75 bp, Homo sapiens
ctcacctgtgcgggatggaacaaaagaaatctcctgcaaagaagctgagccatgcaattagtaaatctttggggt

SEQ ID NO: 433669 - DNA, 100 bp, Homo sapiens
ctgattcaagtgttggcggatggaagggaggagactcctgaccctcagaatgtcagtggaacctagtgaagtgaaacaagcaacttcaacatcaggacca

SEQ ID NO: 433670 - DNA, 75 bp, Homo sapiens
tcatacatgatgtcagtgatgaaggatgctgaaaacgccattcaacagatgggtggccagtggcttggtggaaga

SEQ ID NO: 433671 - DNA, 100 bp, Homo sapiens
tgctagcagaaaatcaaaacgctgattaaaagaagcacggagtttgttcatctggcaaagagactggttagtgatcctgcattagaaaaggaaatcgtag

SEQ ID NO: 433672 - DNA, 74 bp, Homo sapiens
cgggcgcgctgtacagcaagtcaatgccatggtattcgtggacaccgtagggatgccagagacataccaggcgc

SEQ ID NO: 433673 - DNA, 100 bp, Homo sapiens
caagagtataatgtctatggtgaagtcttttgtacagtggttaggttggtgttcgaggaagagacattgttgttcttggtgtggagaagaagtcagtggc

SEQ ID NO: 433674 - DNA, 100 bp, Homo sapiens
catcattaagttggagcagggagaggagctgtggataacgggaggtgaatttccatgtcaacatagtcctgttggattggatgctgctggcaagacaacc

SEQ ID NO: 433675 - DNA, 82 bp, Homo sapiens
tgtgattttcagcattccatgtgaacccaatcttgatgctttaatacagaaccagcatgttgctgctgactcagccattcta

SEQ ID NO: 433676 - DNA, 100 bp, Homo sapiens
cggtttttctcttccttcgctaacgcctcccggctctcgtcagcctcccgccggccgtctccttaacaccgaacaccgcaggcaatccatggaccttgtg

SEQ ID NO: 433677 - DNA, 96 bp, Homo sapiens
cgcgcggggcgggtgctgcttgctgcaggctctggggagtcgccatgtcaagccagcgcctttagaaataaaacctttgccagaatgggaagaatt

SEQ ID NO: 433678 - DNA, 74 bp, Homo sapiens
cttgggccgccgagctggacccggaccggttttgggcaaacctgcccttgctgcagcgggagctcctgcactgt

SEQ ID NO: 433679 - DNA, 100 bp, Homo sapiens
agggaatggcgcaccgtttgaggagagcctggccccactccaggagagctcctgggcaacgtgctggtctgtgtgctggcccatcactttggcaaagaat

SEQ ID NO: 433680 - DNA, 75 bp, Homo sapiens
caagagcagcggaaaatgatccagtcacagttggtacgtgataatgcagatctccgctgtgaacttcctaagttg

SEQ ID NO: 433681 - DNA, 100 bp, Homo sapiens
ctgctcctacaccatccacgcagagggagacgagagggggaccaaggtgaccaaaagccagccccactgtgagttgaactctttcgtgttgaccggccac

SEQ ID NO: 433682 - DNA, 50 bp, Homo sapiens
caccatggaggaggacgacagctacggctggagtgaagtggcacgatctc

SEQ ID NO: 433683 - DNA, 100 bp, Homo sapiens
tggccacttgcttgggatcctttatcctggtcatcttctatttccaaatccgtggtggatgactggattgaatcatataaacaagacagggacatcgcac

SEQ ID NO: 433684 - DNA, 100 bp, Homo sapiens
gccctgtttcagacagacctcatctataacctccttgaaaaactgggatacatggatctggcctcaagactggtggttgatcccccaagtcccagggctg

SEQ ID NO: 433685 - DNA, 75 bp, Homo sapiens
cctacttcaaggataagggcgacagcaacagctctgccggctggaaggtgctggagaatctggtaaaagcaccat

SEQ ID NO: 433686 - DNA, 82 bp, Homo sapiens
tccggctgcagggcggtaaggatttcaacatgcctctgacaatctctagtgctgcaaggtgtgactgttgtaaatctcaagg

SEQ ID NO: 433687 - DNA, 99 bp, Homo sapiens
aaaaactgacgaaattgaaacaaaatgtaaaattaaagaattcacaagaaaccattccaaatagtggcacattgcaagcaacccgtgccttgatggtgg

SEQ ID NO: 433688 - DNA, 82 bp, Homo sapiens
ggcctgctcggccctcacaggagctgaagaagcaggtggagagtgccgagctgaagaaccagcggctcaaggaggttttcca

SEQ ID NO: 433689 - DNA, 97 bp, Homo sapiens
ccgttacgttttgcaagccatgaagcatatggagcctcaagtaaaacaagtttttcaaagcctaccaaaatctgtatggagagtcggcttgactaca

SEQ ID NO: 433690 - DNA, 82 bp, Homo sapiens
ggagaagattgactttgacagctgaaggtgatgtggccgccctcaaccgacgcatccagctcgttgaggaggagttggacag

SEQ ID NO: 433691 - DNA, 75 bp, Homo sapiens
atgaacaatgagaagcaggcagaagattgcatcacacggggatagtggtcctagaagaatgtcagcttccaaaag

SEQ ID NO: 433692 - DNA, 82 bp, Homo sapiens
agccgcaccatgccgctcctaagcctgcacagccgcggcggcagcagcagtgagagatacagatcacttggattcagtcgag

SEQ ID NO: 433693 - DNA, 98 bp, Homo sapiens
aggatttcaacatgcctctgacaatctctagtataatctcagtgataccttgaagaagctgaagataacagctgttgacaagactgaggatagtttag

SEQ ID NO: 433694 - DNA, 90 bp, Homo sapiens
gtcccctgccccttgccctgcttctgcagaaggcctcattgctacgatttcagagtaccctggtaatagctgagcatgcaaatgattccc

SEQ ID NO: 433695 - DNA, 82 bp, Homo sapiens
caggaacccctccgagacccagtccaaaaggagcctcacagtctactcagagaaaaataaaagaaggcaaaatgagtcctcc

SEQ ID NO: 433696 - DNA, 51 bp, Homo sapiens
cccacggatagcaagagtgtgcaagaccctggagaaccatactcagaactc

SEQ ID NO: 433697 - DNA, 49 bp, Homo sapiens
ttttgcaccactggatgttgtttactggcgacagaaggctagagagagg

SEQ ID NO: 433698 - DNA, 100 bp, Homo sapiens
caagcatccctgcctcgttttggtacaccattgtcaccatgaccacactgggcactaagtcaggagattggaaaagcaaatgcttttacacaacagacac

SEQ ID NO: 433699 - DNA, 98 bp, Homo sapiens
ggaggttcgcggctctaacggggctttctacaagaacaagttgaaatcatcgcagaaggataaagttcgtcagtttatgatcttcacacaatctagtg

SEQ ID NO: 433700 - DNA, 80 bp, Homo sapiens
gccctcgctggaccagaccatggccgcggccttcgatgtgaagttcatttccaatccgccctccatggtggcagcgggga

SEQ ID NO: 433701 - DNA, 90 bp, Homo sapiens
ggccccggcagcgcctgggacaaggtttcctatgttattcgagatgaagtggagaagtacaaccgaaatggagtcaatgctctgcagctg

SEQ ID NO: 433702 - DNA, 80 bp, Homo sapiens
ggcacctggagaccttcgagcaccccaacgtggtcagatcttgtagaaaatttcagctgtagcccttggactagaagctg

SEQ ID NO: 433703 - DNA, 75 bp, Homo sapiens
aagactggggctgctcccatcattgatgtggtgcgatcggagtcagtggatcggtggggaaaatgctgcttaccc

SEQ ID NO: 433704 - DNA, 90 bp, Homo sapiens
tcccatgggttggccttacaaccctccttcccaggaagcccaggttcgggaaagcaaattcaggctgcaggacagctgcccgggcccccc

SEQ ID NO: 433705 - DNA, 89 bp, Homo sapiens
tagtctggatcccggggaagaggaggcggcggagattccagttcttcagacaaacaatggtccaagtctaacaggattgactactatag

SEQ ID NO: 433706 - DNA, 100 bp, Homo sapiens
gtggttggttgcagttgtgtagtagttaagaacatacatatgatagttgagaaagacacatattctgatcatgaagaaataaacacaagttaaatatgac

SEQ ID NO: 433707 - DNA, 75 bp, Homo sapiens
gttggatatttcattcattggtatacatatggactgtaaggaaaacatttaaagttgatgatatgttatcaaaag

SEQ ID NO: 433708 - DNA, 50 bp, Homo sapiens
ctccaaaaccaccaaggacccgcaggtggtgatgatgtccagcaactctg

SEQ ID NO: 433709 - DNA, 100 bp, Homo sapiens
gaagggggtcaaatccacgggaaagcgcacaactacgggattggcgccgccgcctgcgtgtactttggcatagcggcctccctggtcaagatgggccggc

SEQ ID NO: 433710 - DNA, 50 bp, Homo sapiens
gccatagtacctacagcagcactccagtgagatggaagattttcgaggta

SEQ ID NO: 433711 - DNA, 75 bp, Homo sapiens
aacatgccaggagagcaatgcaaaaggtgatgaccccacaaggaagaggtactgttgcagccgctgcagctgctg

SEQ ID NO: 433712 - DNA, 75 bp, Homo sapiens
cactgcatggcctttgagggcattcatctgcctcagggggtaactacggggatgatcgtcgtggtggcagaggag

SEQ ID NO: 433713 - DNA, 100 bp, Homo sapiens
cagaaactcagccactggttgccttggtaggcaataaaagaaatcacattctgcctgatgaagatctggcttcctttcactggagtttacttggtccaga

SEQ ID NO: 433714 - DNA, 100 bp, Homo sapiens
gctgcgagggatcttcctgagcagagctctccgggttccccggctcgcggggcccggcgaagggcagcaattctgtggtgttcttggtcacacatttatg

SEQ ID NO: 433715 - DNA, 90 bp, Homo sapiens
gcccagcatgccgctatcgaaaatgtcttcaggctggaatgaacctggaagggatcatagacggtatttctatgtaaacgaacagtcggg

SEQ ID NO: 433716 - DNA, 73 bp, Homo sapiens
cgatattcaccaagcgcttcgctacaaggttggtgttcgaggaagagacattgttgttcttggtgtggagaag

SEQ ID NO: 433717 - DNA, 51 bp, Homo sapiens
ggcgactgtggcagagttgaaggctgtgaattttgaagattgcaccggtcg

SEQ ID NO: 433718 - DNA, 100 bp, Homo sapiens
aaccagacccctgtgtcatcctcaagatgcagtctcatgggcagtggtttgagcaatttcctgctgcagagagcattttaagaaaggacagcattcctgt

SEQ ID NO: 433719 - DNA, 100 bp, Homo sapiens
ctaacttctactgacgaagcttggaagttgcagaagtcggggtctaatggaggaagatgctgagcccatctttgaagatgtgatgatgtcatcccgaagc

SEQ ID NO: 433720 - DNA, 98 bp, Homo sapiens
gaaattgtcccgaatccctgcaggtggcggcggaagagctaagcaacgtggcttagtccatcagcatcttattctgggtaataaaaaataaaaataaa

SEQ ID NO: 433721 - DNA, 100 bp, Homo sapiens
ggaaaagcaggtgccggtgcctgtccccgggggcgccatggcgaccggagcgaacgccacgccgttggcccgcggcgccatggctcacgtcggctcccgc

SEQ ID NO: 433722 - DNA, 75 bp, Homo sapiens
gagaacgcaaggtgcctgcctcccgcatcagccgcttggccaactttggggtagtggccacagaagaagtagtta

SEQ ID NO: 433723 - DNA, 100 bp, Homo sapiens
tgacaataacaggagcacgaaacagattcattccatgattgctcgaatatgtcctgaggagatgttaaagtaacccatcttgcaggacgacattgaagat

SEQ ID NO: 433724 - DNA, 98 bp, Homo sapiens
ccgacccttcctgtcgctgacggcgactgcgggaggccaggctgaactcacgggaatcaaatggcgtaggtacaattttggagggcatggggactgtg

SEQ ID NO: 433725 - DNA, 83 bp, Homo sapiens
caacgcctggctcggagcagcagcctctgagcaagagtgagccatggagctacgtgtggggaacaagtaccgcctgggacgga

SEQ ID NO: 433726 - DNA, 50 bp, Homo sapiens
attccaagtaactcttatttggagtgggaatagctttgcgaaaaatgggc

SEQ ID NO: 433727 - DNA, 75 bp, Homo sapiens
aggagaagtaccaggaggcgttggccaagggtgatctggaaagtgcaccagtgttgagaacttctggggaaggcg

SEQ ID NO: 433728 - DNA, 75 bp, Homo sapiens
ttgctcctggagatgagcacgccctttacctgcgtttcctggatgctcttaaagattgcagagggaatggcatac

SEQ ID NO: 433729 - DNA, 82 bp, Homo sapiens
gacgctgccagcatcgccgccgccaggaagtcctgacggccacgctggatctggaggacgtccggagctacagggcggagat

SEQ ID NO: 433730 - DNA, 75 bp, Homo sapiens
aggagcgtgtggctcatctacgaagagtccaggtggccacgtcttttattagaacaatagagcttggagggaaag

SEQ ID NO: 433731 - DNA, 100 bp, Homo sapiens
ctttcatggagttcacagaagagtcgaggaggcctggaagaaacgctggtttatcctgcggagtggccggatgagcggtgacccagatgttctggaatac

SEQ ID NO: 433732 - DNA, 100 bp, Homo sapiens
aatttttctccctttcttctgtggataagctggaacagatctatgaatgcagggccagtgtcattcaaagatgtggctgtggatttcacccaggaggagt

SEQ ID NO: 433733 - DNA, 117 bp, Homo sapiens
aactgctgttgttacctgggaaccctggaggggccttcctcatccgggagagccagaccaggagagcttaagagttggacagtggaggaccttcagaagaggctcttggccctggac

SEQ ID NO: 433734 - DNA, 82 bp, Homo sapiens
ggaggtagtcatgatctatgacgccgagaagcagaggccccgagaagctccaccatgaggcgaggtggatggaggaagcgag

SEQ ID NO: 433735 - DNA, 74 bp, Homo sapiens
gttcagtttacagttcattttttgcttggtttggaaaaatttcattagagggtctttttggagttcctgagctg

SEQ ID NO: 433736 - DNA, 100 bp, Homo sapiens
gcggggggaaaatggagcccttcaccaatgaagctgaaacctatcaacactcttcaaaatgcaatggaatgtaccacggactgtatctcgactggcacgc

SEQ ID NO: 433737 - DNA, 98 bp, Homo sapiens
cgcgccagagatcccagactgcgtggagcagcagaaccttctaagtctcagacacgtaaacccaagtgtggcaaaggaactcattgctctcgaaatgc

SEQ ID NO: 433738 - DNA, 100 bp, Homo sapiens
ctactcgggacgctgcacctcccgcgccgcacggtggacgagggctcaaaatttgggcggggaactggactcactcagccttctcaacgcacgtctgctc

SEQ ID NO: 433739 - DNA, 82 bp, Homo sapiens
agagcaaggggcttacgcagaaggacctggccacggattctgtttcactgaggccatctatccgatttcaaggaagccaagg

SEQ ID NO: 433740 - DNA, 75 bp, Homo sapiens
cttgcctacgtcagtaacagccaccaaggaattcctcctgatcagcagagactgatctttgctggcaagcagctg

SEQ ID NO: 433741 - DNA, 95 bp, Homo sapiens
tttgtgtcctgagatcaaatggcacttcattggccacctacagaaacaaaatgtcaacaaattgatggaggaagaaattgttgagcttccagatt

SEQ ID NO: 433742 - DNA, 98 bp, Homo sapiens
ctccagctaccggcccaaggccatctacctggacatcgatggacgcattcagaagttccctgtattgaacactgatatacaaggaatgaatagaagtc

SEQ ID NO: 433743 - DNA, 100 bp, Homo sapiens
tgaagacggcgtccgactgcggggcagtgaagcactgcctgcagaccgtttggaacaagccaacagtgacaaatcttcctattttcaagctgaaagaatc

SEQ ID NO: 433744 - DNA, 76 bp, Homo sapiens
gattgcagtagctacagtacatactgggttacacatcattttggaatgactgtatatcatctggattacgtggctg

SEQ ID NO: 433745 - DNA, 99 bp, Homo sapiens
aaaataatgagcaacgagaagagatcattcgcctcaagcaagagaaaagttgcctgcacgatgaattgctttttactgtctgttcattaccaacagagg

SEQ ID NO: 433746 - DNA, 100 bp, Homo sapiens
cggaaatgcccttacagcagcagagttcctggaataactattgctacagatattatctgtggttttcctggagaaacagatcaggattttcaagaaacag

SEQ ID NO: 433747 - DNA, 100 bp, Homo sapiens
actgatgtcagaagattattttacacaagcaatggaagtgaaagcattgtgtccatctcttcacagtcatggctgatcttgtcatccacttttgggagat

SEQ ID NO: 433748 - DNA, 101 bp, Homo sapiens
aaaagaaagatgcagaggaagaggaaagcgaactgtttgctaatccagactttacacaacctatctcagaagttgtagatgaagtaattcagaattgtcct

SEQ ID NO: 433749 - DNA, 100 bp, Homo sapiens
ggagcgcggtggcggcgtgggagggagcctctgacggcgtctgaactgataaatttcaaacggaagagagtggcagcatttagaaagaatctaattgaaa

SEQ ID NO: 433750 - DNA, 75 bp, Homo sapiens
tttcatgtccaggaaatggtggttttcctttggaatatggataaatacaccatgatacggaaactagaaggacat

SEQ ID NO: 433751 - DNA, 83 bp, Homo sapiens
attggttactgggtctcctctcaagaaatctcaagatattaaagttactgctgttaaaaagataacacagccagcattctgac

SEQ ID NO: 433752 - DNA, 109 bp, Homo sapiens
cccatatcacccatcatcgatcttcatgaatgcaatatttatgatgtgaaaaatgacacaggattcccaaagaaattacagtgagtaatattcaccaggccatttgcaa

SEQ ID NO: 433753 - DNA, 75 bp, Homo sapiens
caccagctccgaaatcaccaccaagaaatgagccgtcagactgctacagcattacctaccggtacctcgaagtgt

SEQ ID NO: 433754 - DNA, 75 bp, Homo sapiens
cgacaattgcaggatgcacagattctggttcatcatgcctagtggcgtataagaagaccccgccaccggtccctc

SEQ ID NO: 433755 - DNA, 100 bp, Homo sapiens
tcttttagcccccaaactgataagctgttcaacattttggatgtccaggcatttgagaacaacctttttcgtgctccaatttatcttcataagatgccag

SEQ ID NO: 433756 - DNA, 100 bp, Homo sapiens
catcgataagaaatatgagactgtaataatgcccgtgtttggcattgcaacaccgtttcacattgccacaatcaaggagctgcgggcgtctttggagaca

SEQ ID NO: 433757 - DNA, 98 bp, Homo sapiens
cctgagccgctcttcccttacagtttctttgagcagtttgtggaagcgatcactgtccagaccaaaacgaagaagacgttagccaaacccaatataag

SEQ ID NO: 433758 - DNA, 82 bp, Homo sapiens
tgagaaggaggggtatgagccacacatccccgaccacttgcggcctgagtatgggagagacaaaggcagcgctgccctcggg

SEQ ID NO: 433759 - DNA, 100 bp, Homo sapiens
gtgcagaggatcctggaggcctgggaagccaacgaccacacgcagcctcgggccagcggccaggagctgcctcccccagcccccgtcccgcggcccccag

SEQ ID NO: 433760 - DNA, 82 bp, Homo sapiens
aacctttggattttaatgcagaaacattcactgatgatcctcttgaatctgaatcaggaagcttgtcaaaattcccaaaaat

SEQ ID NO: 433761 - DNA, 120 bp, Homo sapiens
tgcaattgttgccattgaaaaccctgctgatgtcagtgttatatcctccaggaatactggccagggacttgtcgctgatcaaggtgattgacgtgggccggaggttcctggtgaaccggg

SEQ ID NO: 433762 - DNA, 83 bp, Homo sapiens
gttcaactgggaggacgtgaagactgacaagcagcgggagaactacctggataacgaaggaggcccaacttcattcaataagg

SEQ ID NO: 433763 - DNA, 74 bp, Homo sapiens
agcgtgtggctcatctacgaagagtccagtgcccactgttgatgtctttcagatttccacaaaagagcgatttg

SEQ ID NO: 433764 - DNA, 96 bp, Homo sapiens
gagctcatctcagatctggagcatcggctgcaggggtcagtgatggagctgcttcagtgcggaccaggctctggaccggtttgcaatgaagcggtt

SEQ ID NO: 433765 - DNA, 75 bp, Homo sapiens
cgaaggccggtagctgtcagagccaaagacatcgggtatggtcaagatcttttcaggccgaaaacccatgttgta

SEQ ID NO: 433766 - DNA, 100 bp, Homo sapiens
ggggcgagcctggaggattgtcactccaacctcttttcgctgggagaagatgtcaaccggacactagaaggtggaaggaaacctcttcattatgcagcag

SEQ ID NO: 433767 - DNA, 90 bp, Homo sapiens
cgttccgggggtgaagcctcctgcgccggccttgcctcggtccaagccttatgcatttgatcgggtgttccagtcaagcacatctcaaga

SEQ ID NO: 433768 - DNA, 98 bp, Homo sapiens
gtgtattcccttaaaaagacggacagcccatcgtgtgaactatagagtttgtggacagatttatattggtcctagcttactctgccaccactgcccgg

SEQ ID NO: 433769 - DNA, 89 bp, Homo sapiens
cccaagcctggaagaactcgtcatgctctttgtagcgtggtgcttctgttgctcacagatggctgtatgggcgaaaaagatgaccgaaa

SEQ ID NO: 433770 - DNA, 74 bp, Homo sapiens
tgagaagatcttctgttgtcatggagtgaataaccctataccttccaatttgaaatcagaagcaaaaaaggctg

SEQ ID NO: 433771 - DNA, 100 bp, Homo sapiens
gtgataatgccacctgaagtagccattggggcccttggatcaattaagaaatgagccgtcagactgctacagcattacctaccggtacctcgaagtgtcc

SEQ ID NO: 433772 - DNA, 97 bp, Homo sapiens
ccatttcgcccctcgcgtccggagtccccgtggccaggtacccactgatggtaatgctggcctgctggctgaaccccagattgccatgttctgtggc

SEQ ID NO: 433773 - DNA, 75 bp, Homo sapiens
ccaggttcctggcaggctgctgctgtgggacacgaaaaccatgaagcagcagctgtggtgcacgtaccatgagaa

SEQ ID NO: 433774 - DNA, 100 bp, Homo sapiens
cggtctgctatcctaaccagcatgaaaaagaagctgcataccctgagccagattgaaacttctattgcaacagttcagctgaactttgacctggaccggg

SEQ ID NO: 433775 - DNA, 90 bp, Homo sapiens
gggtcgtggagccaggagcgacgtcaccgccatggcaggcatcaaagatttcctttgacctcgctgagtacactgcggacgttgacggag

SEQ ID NO: 433776 - DNA, 145 bp, Homo sapiens
aagtcattcctcctaaggagctggtgtcttcatccagaagggacagtttgtgccagctctccagagagaaaaggtagatcgttggccggagacaggatatgtgaagaaacttcagagaagggacaatacgttctattactacaac

SEQ ID NO: 433777 - DNA, 82 bp, Homo sapiens
gtcttcggtggactccttcggcagtccacccaccgccgccgcctcccaggattgaaagaaggtggcaagaggaagaagcaga

SEQ ID NO: 433778 - DNA, 75 bp, Homo sapiens
ggacgacgacgatggggatatcgatgtcaagccctccaacatcctagtcaactcccgtggggagatcaagctctg

SEQ ID NO: 433779 - DNA, 75 bp, Homo sapiens
aagttccatcccacctttgagtcagctgaagaagtcacagatctaaagaggcaagcagttgaagagatgatggat

SEQ ID NO: 433780 - DNA, 75 bp, Homo sapiens
gtccaggccgtggtcagccgcttcgacgagcagggggaacttgaacggcagcttttgcaagcaaatccaattctg

SEQ ID NO: 433781 - DNA, 98 bp, Homo sapiens
gtccataccggagcgcaatggcgtccaaccccgaacggggggagattctgctcacggaactgcagttaaagccttccatctgaagtatgatgaagttc

SEQ ID NO: 433782 - DNA, 82 bp, Homo sapiens
gtatgaagcccttcaccaacaaagatgcctatacttgtgcaagtgacttaagagattaaaattaatttggttgctgttggtt

SEQ ID NO: 433783 - DNA, 98 bp, Homo sapiens
tcaaacgatacctcagcagcagagttaccaacaggtgctgggcgtcctcttctttgccatagcctgcttcttatacaagcccctgtcggagtcttcag

SEQ ID NO: 433784 - DNA, 75 bp, Homo sapiens
aaagcacaaagcatggagaccctccctccagccacagacccctttgcttctgtttttgggaatgaatcatttgga

SEQ ID NO: 433785 - DNA, 74 bp, Homo sapiens
cccacagctatcccctgaggcccgacccagcctcaagtactacagccttccagcagccttcccagacccacaga

SEQ ID NO: 433786 - DNA, 80 bp, Homo sapiens
gtggatgctcttcagttcgtgtgtggagacaggggcttttatttcattctggagagtcttggcttctgggaggaagtcag

SEQ ID NO: 433787 - DNA, 83 bp, Homo sapiens
tttaattcacatttataaaggctttgaaaatgccttgcaaaataccctactaaataaatcattttagacatggagtgcaggtg

SEQ ID NO: 433788 - DNA, 96 bp, Homo sapiens
tcctctccttccagctcaacctcaagaccaacaccgtcatcaactggttccacaactacagcaaacggggattcagcgtccgatcctttggaacag

SEQ ID NO: 433789 - DNA, 83 bp, Homo sapiens
agaagagcaagatttaccagagcaaccaaaagctctgggtgtgcggcagtaccatgtggcctcagtcctgtgccaacgggcca

SEQ ID NO: 433790 - DNA, 82 bp, Homo sapiens
acaagctgatggactgtattctggccctacctcggttctaccagtttcttcaaaggaaagaagcaactggaacacacatata

SEQ ID NO: 433791 - DNA, 98 bp, Homo sapiens
tggggaaaaggcaaaaatcccatctaccgcaactctcagttcgagagtaaagacttaattcagtgcacaaatgagatgaatgtgaacatcccacagtt

SEQ ID NO: 433792 - DNA, 76 bp, Homo sapiens
ggagcactggaagtacgggcagttgcagtgttggagctaaactatcagttgagggatttgcagttgataaaatggc

SEQ ID NO: 433793 - DNA, 90 bp, Homo sapiens
cttatttagttctggggagcgcctcgtcgacatgagtgatgtggaggaaaacaacttcgagggcagagcataatcaccagcaacacccgg

SEQ ID NO: 433794 - DNA, 83 bp, Homo sapiens
aaagaggcctccctcgtgagttgggcttggtaccgtgctgcccagaatgcccttcgggagccgccgccatgatcctgctggag

SEQ ID NO: 433795 - DNA, 75 bp, Homo sapiens
ccgcgccggaagagccacgccggtttggtgcacctcgatttggaggaagtagggcagggcccttatctggaaaga

SEQ ID NO: 433796 - DNA, 127 bp, Homo sapiens
gcagaagaccgcagtgggataaatctcaaagatctcgtacaagatccttctttatgcggaaaacgccatgcggtacataaatgggacgcgtctggatgaccgaatcattcgcacagactgggacgca

SEQ ID NO: 433797 - DNA, 75 bp, Homo sapiens
ctgcggccaggcattttcctcctggagctgctgctgcttctggggcaagtacgaggatgtcgtccaggaaagatt

SEQ ID NO: 433798 - DNA, 98 bp, Homo sapiens
taaagactttgtagccatcaacccgagtgcagtttcgatggaaaatgaaggtacagaatgagcacatgttgttggtgtacgccaggtggtgcttccac

SEQ ID NO: 433799 - DNA, 82 bp, Homo sapiens
tggcttatgaaagtgtgatgttcgcgtatttcttgacagttttcggctttgtgagaaaccttaccatcaaacacgatggcca

SEQ ID NO: 433800 - DNA, 75 bp, Homo sapiens
gtactgtgggcctggagccaagcccctcttcaggagtaaggcttcaacggaccacaccaaaatgccatctcaaat

SEQ ID NO: 433801 - DNA, 75 bp, Homo sapiens
cccgactctttgggccgttatctcacgttaaagatcgaggtccggaagccactaggagattttttaattggtttt

SEQ ID NO: 433802 - DNA, 100 bp, Homo sapiens
ctatccacatccaggaactgacaatctgttgatgttaaatgagtcatccttctggaatgctttgtgtcatgagagtgtcacctacatcaccaagacttag

SEQ ID NO: 433803 - DNA, 100 bp, Homo sapiens
tgtgagggggaccatgtctctgcagatgaccctgatgatctgcaatgtaagcggggagaacatgttgcgctggctaactggcagaaccacgcatccctac

SEQ ID NO: 433804 - DNA, 97 bp, Homo sapiens
ggttttgagagattacctgaagttgcactcaaaagcaagatatactactaactttgaaatggaataagaatgaccgaagaagcatgccgaacacgga

SEQ ID NO: 433805 - DNA, 75 bp, Homo sapiens
caaaaaggccagagctgtgtttaaaagaaagtggtaaaatagctgtggagtgcagacccagtgaagagattgtag

SEQ ID NO: 433806 - DNA, 100 bp, Homo sapiens
ggaggttcaggctacggtgagccgaagctggcgggtcctactacatgatatcgcgctcgctgggacccgagtttggaggcgctgtcggcctctgcttcta

SEQ ID NO: 433807 - DNA, 75 bp, Homo sapiens
agaagcctgaaaagtcgcagcgagctggagccgccggaggtatccagtgaattttttgaagaaggatttatggct

SEQ ID NO: 433808 - DNA, 100 bp, Homo sapiens
gagaggccggcggggcctcccgggaggagaacggggaggtgaagccgctgccccgaggttgcttctagaactgctggagttactgtttgacaagtttaat

SEQ ID NO: 433809 - DNA, 100 bp, Homo sapiens
ccgggaccgagaaccgaacttaccaagcatcctctgcggctttcagatttggtgctatggagaaatttttggtagaatataagagtgcagtggagaagaa

SEQ ID NO: 433810 - DNA, 100 bp, Homo sapiens
cttctgactatcttctcttcaccagctcttcagatcaatatgattttgaagatgatgatctctacggccagtctgtagaggatgattattgtatttcgcc

SEQ ID NO: 433811 - DNA, 100 bp, Homo sapiens
aaagcgggcaaagttagaccttccagaacctggttgagaatctgtagtactgagaagtttctccactatcagccgagattaacagccacagctggattct

SEQ ID NO: 433812 - DNA, 75 bp, Homo sapiens
gcctcttgagtagcctgagtagctgggactaaagatgttcctcctgctgatcaagagaagctttttatccagaag

SEQ ID NO: 433813 - DNA, 100 bp, Homo sapiens
ctactgtaaagtcaccaacgagatcttccgccactacgagtggtatcacggaaaacttgacagaacgatagcagaagaacgcctcaggcaggcagggaag

SEQ ID NO: 433814 - DNA, 50 bp, Homo sapiens
ctctcacaagattctgtcatgatttgttgagaaagagataagaaaagcta

SEQ ID NO: 433815 - DNA, 100 bp, Homo sapiens
gcaagcgatggcatagtaaatgaaaacttggttgttcggaatcctataattgaaaaacagtaaagatggaaaaccagttattgaatatcaagaggaggag

SEQ ID NO: 433816 - DNA, 88 bp, Homo sapiens
gagctggaaactttcccggcaggcattatcctgcactgaaaactctggaacatctagagcatacctacctgcctcaagtaagccacta

SEQ ID NO: 433817 - DNA, 100 bp, Homo sapiens
gctgctccaggcggtcttattgtttgtcccgctggctggaagcctggcagtgacacgattaagcccaacgtggatgacagcaaggaatatttctccaaac

SEQ ID NO: 433818 - DNA, 75 bp, Homo sapiens
tggacccctactatgcagacaaaaaggatgaagatgggtttcaagaactaaatgagaatggaaatgctaaggatg

SEQ ID NO: 433819 - DNA, 75 bp, Homo sapiens
gacaaagcagtggaagtatccaattgagcttcatgggattggtcggagtccctctgaagaaccaagaggtggagg

SEQ ID NO: 433820 - DNA, 80 bp, Homo sapiens
tactgaaataggaacaatgatctcggtatcatctgcagaatatggtactaatgcaaaggaaattcagttcatgaagataa

SEQ ID NO: 433821 - DNA, 89 bp, Homo sapiens
aggaaggaatatatcctgactgattccatgaaccagagaatcagtcagagtgctccagtgaaacagccaccacccctggctccccagag

SEQ ID NO: 433822 - DNA, 100 bp, Homo sapiens
cccgttgtgtttgtgaaacagagaaagataggcggccatggtccaaccttgaagctcatcatactggctagtggtggaccccaagctttagtaaatataa

SEQ ID NO: 433823 - DNA, 100 bp, Homo sapiens
ggaggaagcagaaagaatagctagagaagaacatgggtctgggaaaatcgctgtgatatcagaaatctccaaattggacatccagagcagcattcttgtt

SEQ ID NO: 433824 - DNA, 100 bp, Homo sapiens
tgaaaacaaatgtttttctggtcttcacttttttgaggcaggaaggcctgtttaaagaagaaaacccgtatgctagatttgaaaacaactaaagcgctcc

SEQ ID NO: 433825 - DNA, 75 bp, Homo sapiens
cgggggccaagcgggttgctcacttacactggaaaagcctacgaggacaagcagaaactcaagcggaccgagatc

SEQ ID NO: 433826 - DNA, 80 bp, Homo sapiens
ggcccgcgctgcccgcactcctggtcctgctcggggctctgttcccagataacgaaggaggcccaacttcattcaataag

SEQ ID NO: 433827 - DNA, 118 bp, Homo sapiens
ggtcatctgaagtcgtgattgggtcactaataacaccaggacaaagttaagggatcactactcaagcataaggtttccacttgagcggcacagtgacagaacctgcaatacaatcgga

SEQ ID NO: 433828 - DNA, 100 bp, Homo sapiens
ccgtcgggaacagccatgcaaaggcaggggaggaagccacctcgaggcagaaggagaagacagcctgaagaagatgcagctgatggagcttgcgattctg

SEQ ID NO: 433829 - DNA, 90 bp, Homo sapiens
agaaactcaatgatcgtgtcatgagaaatgcaagttctagccggtttttcctacaaggaatccagttgaatacaattcttcctgacgcca

SEQ ID NO: 433830 - DNA, 73 bp, Homo sapiens
tgaatcaggtctggaacattattgaaatgagttcacagttaccagccaagaaaacttgaaaatgagcagccga

SEQ ID NO: 433831 - DNA, 89 bp, Homo sapiens
ccaggctcatcctgtccatcgtgtgcctgatgatcacgcagctggctggcttcagtggaccaggaacctcagaacctgttctggatcca

SEQ ID NO: 433832 - DNA, 100 bp, Homo sapiens
caacaagttaaaaggaggcctgctgtccacagatgacaaggcctccccatggccacccatggaccagtcggcattcacttcctcccttctgcggcccata

SEQ ID NO: 433833 - DNA, 75 bp, Homo sapiens
cgggagcctagatcctgtgctttactctgaagactcctttagccacagtagaagacttccagattcgtccacata

SEQ ID NO: 433834 - DNA, 82 bp, Homo sapiens
tcatggccgtcatgccgactctcatacaggcgggcgccagtgcatcttctaggtaccacaagagccaggccatctatctgga

SEQ ID NO: 433835 - DNA, 83 bp, Homo sapiens
ctgctcggaaccttgtttactaattatctcacattcttgaaggtggcattgaagagcactaagatcggaagatgagtgagctt

SEQ ID NO: 433836 - DNA, 73 bp, Homo sapiens
ccgtatatatagacattgcagatcgaagccaagtgctcagcaaggaggataagatcaatgccctcattaaagc

SEQ ID NO: 433837 - DNA, 90 bp, Homo sapiens
cgtggccttagctgtgctcgcgctactctctctttctggcctggaggctatccagcggtggcacctgtggaaatgaaacggagaaataag

SEQ ID NO: 433838 - DNA, 100 bp, Homo sapiens
cagtaagggagggcaagaagatatgaacctgagccttcagtcaagaccctccagcttgcctagtaagagggaccatctcctcatgaacgtcaaatggtac

SEQ ID NO: 433839 - DNA, 50 bp, Homo sapiens
ctggaagtcattcaacgggaattgaatagaggaattcagaaaagcagctc

SEQ ID NO: 433840 - DNA, 75 bp, Homo sapiens
ggaacccttgccgctgctgtcctgcgaccccaagcaggcccagctgagagccagcctggaggttacccagcagca

SEQ ID NO: 433841 - DNA, 104 bp, Homo sapiens
cacgcaccgactatgtcgcctgccaccgagccgggcccacctccccaccaaggaaggtgtttcccattaaacactaccaggacaaaatcaggccttacatccag

SEQ ID NO: 433842 - DNA, 90 bp, Homo sapiens
accgctcagaactcatctccactcgtttcacaggcgccactggcagagcatttctttttaacaagctgccctgtgagctacaggacatgg

SEQ ID NO: 433843 - DNA, 100 bp, Homo sapiens
aggaaggagctgtgtatttcatcaacctcaaggcacttctaggacctgcctcttctcaccaagatgaactcactggtttcttggcagctactgcttttcc

SEQ ID NO: 433844 - DNA, 83 bp, Homo sapiens
ttgtggctgtgcttgccaggcctggctccaacaagccatctatgatgcatttgaccgcttcctccataaatacgctaactagt

SEQ ID NO: 433845 - DNA, 90 bp, Homo sapiens
cagcggcgcagcgtctatggcaccgcggagttcaaggagcctacgccgagcctcaccgagaggtggagaagagcgagtacttgagaaaga

SEQ ID NO: 433846 - DNA, 119 bp, Homo sapiens
attataccttcacccagcatttcatccctcgtcgaaaggattggattggcatctttagactgcaagctttcttcctggtggcagatgacatcatggattcatcccttacccgccgggga

SEQ ID NO: 433847 - DNA, 100 bp, Homo sapiens
aaggaaatgtggatgaaacaggaaacaatccttctgtttctttaaaactggaagaaattaaaagatgttgatactcggaaaatcataaaagcaatgcttt

SEQ ID NO: 433848 - DNA, 98 bp, Homo sapiens
gctactactgtctgaacgtgcccctgcgggatggcattgatgaccagagagggcatcctggctgtttcacccgtggacttgaacttgccattggactg

SEQ ID NO: 433849 - DNA, 99 bp, Homo sapiens
gtttgattgctgctactcgtgcacaactggcaaagaatgcaaaaaccagcagcaatgcttctgcagaaagccgtcattacacctgattttgaaaaaaac

SEQ ID NO: 433850 - DNA, 74 bp, Homo sapiens
acttgaaagaagctgcagcggaggaaggcgaggaaatgacatcggagagagagacaagatcacagagaatccag

SEQ ID NO: 433851 - DNA, 83 bp, Homo sapiens
gagcccggggcagcggctgccgggccgggactggtgcgcgagggctttgctgtctgcatgccgacatgctgggctcactgggc

SEQ ID NO: 433852 - DNA, 80 bp, Homo sapiens
cgggcggtgagcgcccatatgggggttctggagagcggggtgtggggtgtccctggccagtgtccttccacctgtccaca

SEQ ID NO: 433853 - DNA, 100 bp, Homo sapiens
cggaaccactctttgtgccgcagcttcgcaggaaatactcttaattctaaggaaaacctggaagcacaatgggagatgacagtgagtggttgaaactgcc

SEQ ID NO: 433854 - DNA, 75 bp, Homo sapiens
cccatcaccatcacagagagcgatgcgccaagcccatctttgtgtgcttgcatccaactgtgatgagcctatgta

SEQ ID NO: 433855 - DNA, 83 bp, Homo sapiens
cttggactgagtcctgcaggacacagatattcaagagaagcttatgtggagttagttcaccatattagagaatctattccagg

SEQ ID NO: 433856 - DNA, 98 bp, Homo sapiens
aaatatcggagaataatttctttctcgctgatcgcctaacttctactgacgaagcttggaagttgcagaagattttaacctttgagaccaagaacccg

SEQ ID NO: 433857 - DNA, 98 bp, Homo sapiens
gaagccagcccgctaccgccgtggcttcatccacaatggcatcatgcaggtgagctcaggagataagatggaagatgcaacagccaatggtcaagaag

SEQ ID NO: 433858 - DNA, 74 bp, Homo sapiens
ggtcgaccatatctccttgatcctggctgtggactggctagttctgaagttgcagccggagtgaagaagagcgg

SEQ ID NO: 433859 - DNA, 82 bp, Homo sapiens
cccaatctctgccatcaaggccgattttctttgaaccttcagcaaagtgccggtggtggtgtgcacattgagccccggtata

SEQ ID NO: 433860 - DNA, 88 bp, Homo sapiens
agaatcagctgttccctgcgaaagaggtgctcagcacagtggactttgtcgcccctgatgatcgagttgtcttccgcacctgtgaaag

SEQ ID NO: 433861 - DNA, 75 bp, Homo sapiens
atctgcgagaacagagaagggagctctatagtcggagtggagaactgcaaggagcagcatttctttctattacta

SEQ ID NO: 433862 - DNA, 101 bp, Homo sapiens
ccccattgtggccctgtcctggctgcacaatggtgtgaaactggccctgcacgtggagaagaaaaagcttgtggtgaaggggggcaaaaaaaagaagcaag

SEQ ID NO: 433863 - DNA, 95 bp, Homo sapiens
ctacttcatcacaaagatgcacatgtagatttcctgaaaagtggtagcaatgaatcgagcccaagtttgtttgatatccagttccaagtctggag

SEQ ID NO: 433864 - DNA, 131 bp, Homo sapiens
ggcctgattaaatactggtttcacactccaccaagcatcccattacagatagaagagatgtatcctccactcctcgctggccaccatcctgctgcccaacagaagaagctcttctgtctccgatttcctga

SEQ ID NO: 433865 - DNA, 95 bp, Homo sapiens
cagccgtctcctgtgaaggccatatttgataaacaggaacttgagaattgcagaatgtttgcagactatctctgacctggagacggagtgcctag

SEQ ID NO: 433866 - DNA, 74 bp, Homo sapiens
gacaaaattctggagttggtacatgaccacctgaaggatctctggaatgatggattcagacccgcaacatccgc

SEQ ID NO: 433867 - DNA, 50 bp, Homo sapiens
ggcacacccggctccccggacgcctcggtcgagtcccagacaccagaagt

SEQ ID NO: 433868 - DNA, 50 bp, Homo sapiens
tatacatgaaagaggggcatcaggtatcttcaaagaacagtaaaacatcc

SEQ ID NO: 433869 - DNA, 100 bp, Homo sapiens
cctctctcaagagaagctgcaagagcaacatctttcctcaccccaagagaatagtgacagtggtacaggaaagaaagaaaaagaaaagaaaaacagaaag

SEQ ID NO: 433870 - DNA, 100 bp, Homo sapiens
gacgtgactcagtgttcataaataggacgacgtccctgcattcccaatctgcactattggaagaaaagccaatgtttggaggcggatgccccaaaccttc

SEQ ID NO: 433871 - DNA, 90 bp, Homo sapiens
gtggaggtggccgtggaggcagaggtggcatggggtctgggatctgccgatatgggggatatgaagacccctgattttgatgacctcctt

SEQ ID NO: 433872 - DNA, 100 bp, Homo sapiens
gcacttccttccagcagctacacagtattggatacaaatgaccgatttctacgaaaaataaccatcgggcagggaaacacagagaagggccattaccggc

SEQ ID NO: 433873 - DNA, 85 bp, Homo sapiens
ggcagggtgttagccaagcggattgagccaggacacaacaccgcggagccctgcaggcgaaagaatcttcaagagggagacatag

SEQ ID NO: 433874 - DNA, 75 bp, Homo sapiens
cccggagtgagcggagtagcgagtcggcaacccggagtatggtatttggaagtcaactggatatccattcaggtg

SEQ ID NO: 433875 - DNA, 100 bp, Homo sapiens
cgcacccatctccagccctaaaaccaatggcctatccaaggacatgagcagtttacacatctcacccaattcagccatgaagactttgaatttatttcag

SEQ ID NO: 433876 - DNA, 83 bp, Homo sapiens
caaattgctcacagctgatcctaagattctgaaaaagagttccacgtcctcccttatcgagtctttgttccccttcctggatc

SEQ ID NO: 433877 - DNA, 100 bp, Homo sapiens
tgatccgccactcacccgtatgccaaaaggattccacctgagcggaaacatccgcgagccagggagtcctggagagcccgagcgcctctaccatgtctcc

SEQ ID NO: 433878 - DNA, 83 bp, Homo sapiens
ttggtgaggattcactgggtgagttcatgcaaagcgctgagaacaggaccccccgcccccgtttgggcaaaactacccctgat

SEQ ID NO: 433879 - DNA, 75 bp, Homo sapiens
cagaagccctcctgcaggcccttgaaaggaatgacaccatcctggaagtctgcatggacaccacgttgctgaaaa

SEQ ID NO: 433880 - DNA, 100 bp, Homo sapiens
tcaatccggagtaactggcaagcagattgagaacctagatccccgaggaattcagctatcagctctcttcatgagtggagtagacatggccttgtttgca

SEQ ID NO: 433881 - DNA, 90 bp, Homo sapiens
ctgactacgaatctgtgaatgaatgcatggaaggtgatcgaggagttctacaaccagacatgggtccaccgctatggggagagcatcctg

SEQ ID NO: 433882 - DNA, 82 bp, Homo sapiens
gccggcgtggagagccgccagggctctatcaaggggctggtgtactccagcaacttccaggacgactgggtttggattcaga

SEQ ID NO: 433883 - DNA, 100 bp, Homo sapiens
ctaagatgtcaggacatcctggaagctgggaaagggctgcaagatcaaggccctgcgggccaagacaaacacctacatcaagaccccagtgcggggcgag

SEQ ID NO: 433884 - DNA, 82 bp, Homo sapiens
cctgtctctgccctcctggcgggcccggcggctctcactatccagcagaggaagaaccgatgctggaacgtcgttgcagggg

SEQ ID NO: 433885 - DNA, 98 bp, Homo sapiens
acccggtggtgcagctgggcctgaccaacccgaaaacattgctagaacatacggtccctaatgagcacagagaagaccaagggcttctgccagctggt

SEQ ID NO: 433886 - DNA, 50 bp, Homo sapiens
agaaggaagaggtgtttgaaaaggctcccagccaacctctgataaaccct

SEQ ID NO: 433887 - DNA, 106 bp, Homo sapiens
aggactcctaaggcttgcaacaagtgttgttaaacacaaaccaccctttaaattttcaagggaaggacaggaatgtatcctgtcaggtataatgtcagtgaatggc

SEQ ID NO: 433888 - DNA, 104 bp, Homo sapiens
tgctggtccaggtttgtgacctgctcaggctaaaggactgccacctctttggactcagtgttatacaaactgcagtgacatgtacgagaaagtgctgtgcacca

SEQ ID NO: 433889 - DNA, 98 bp, Homo sapiens
aaatatcctcggaagagcgctcccaggagaaacaaaaagaaatgaccgcccggatgtgccactgagagccccgcgggtctcccggtgcccgaaccgcc

SEQ ID NO: 433890 - DNA, 74 bp, Homo sapiens
caaccccaagatgtcggagacacggtggaaacgcttatgagggctgtgctgaagtttgctgctgccactggagc

SEQ ID NO: 433891 - DNA, 76 bp, Homo sapiens
ctcagacctgggcacagcaaatgctgaggactcagaccagtctctgcaagatttacaggagagccgaccattttca

SEQ ID NO: 433892 - DNA, 101 bp, Homo sapiens
gaaatagtaaccctgccaaatacatcagcttgtaggagacagaggttgttgtcgggataccagatttcctactccgagaggccccgggtccctctgccaca

SEQ ID NO: 433893 - DNA, 75 bp, Homo sapiens
gcggaagacagtgagctgttcgagctggattattgcctcaaagtactaaggctcgtacgtctgcatcgattatct

SEQ ID NO: 433894 - DNA, 75 bp, Homo sapiens
aggagtctctgtccgggggcctggctaaggaaaccctattacctccaggttaatttggagtggcccctggagtca

SEQ ID NO: 433895 - DNA, 98 bp, Homo sapiens
aaaaagcctctgtagtttgaacttcaatggaaaacatgaaaaggtgaacagtcagcccaggtctgccatcatggatgttctcgcagaagcaaatggca

SEQ ID NO: 433896 - DNA, 74 bp, Homo sapiens
ggcaattgaaaagtaccctctggttttctcaccgcagatggtgggtttttgaatcagagccgacaggcacttga

SEQ ID NO: 433897 - DNA, 75 bp, Homo sapiens
cggcagaggattcgctcccagagcagctgcggccagatttggaacattgctaccaataaactgacgttcttgaac

SEQ ID NO: 433898 - DNA, 100 bp, Homo sapiens
cgcaccggtcccccagcggcagccgagcccgcccgcgcgccgacctgcgaccgcatcaagcagtccgccagcggaaccaagcggcgcgtgttcatcatcg

SEQ ID NO: 433899 - DNA, 82 bp, Homo sapiens
ctctgagtgggaagcggagccgggggcctgggacccgtcgcgtcagagccagacgtccttctatggccgcttcaggcacttc

SEQ ID NO: 433900 - DNA, 100 bp, Homo sapiens
ttgggcttcagaggcccaaattgaggcgcaatgatgagaggatgtggtggtctactctgatgtcaatcttgagggctagcacacacatgccctcttggtt

SEQ ID NO: 433901 - DNA, 100 bp, Homo sapiens
ttaacatgcatcttactggttctttatgaagagctttctcttgttgacttttgtgccctggtaattctgtatcctgtttaccgtttacctacttcccacg

SEQ ID NO: 433902 - DNA, 95 bp, Homo sapiens
gaaaatcagcaagagctttctggaagaaaggaaatgttaggatcactttattctggcgcacctatgttggcagcatgcctggtcgcatcatcaac

SEQ ID NO: 433903 - DNA, 101 bp, Homo sapiens
tcactgcagaggtgctggagctggcaggatcccgctgcacaagttcacgtccatccgccggaccatgtcggaggttgggggctctgtggaggacctgattg

SEQ ID NO: 433904 - DNA, 116 bp, Homo sapiens
cccaagcagcagctgccggagcccgagtggatcggggacggagagaacacgagcccatcagatataacacgtgggaaccggaggagaacatcctggaccccaggctgctgatcgcc

SEQ ID NO: 433905 - DNA, 100 bp, Homo sapiens
gggagatccttgttgccgtcccttcgcctccttcaccgccgcagaccccttcaagttctagtcatggtttaaagcaatgttgtggatgtgtgaagagttt

SEQ ID NO: 433906 - DNA, 100 bp, Homo sapiens
ctcggtgggacagggcctcagaggcttggtggagccagtgaacgtggtggacaatggagatggcacacacacagtaacctacaccccatctcaggaggga

SEQ ID NO: 433907 - DNA, 82 bp, Homo sapiens
cgcacctccgtagctgactcgttacagaatgtctgaaggggacagtgtgggagaatccgtccatgggaaaccttcggtggtg

SEQ ID NO: 433908 - DNA, 100 bp, Homo sapiens
cataatgcagaagtaagaaaggctttgtctagacaagaaatgcaggaagttcagagttctaggagtggaagaggaggcttccgaggaggcagaggaggag

SEQ ID NO: 433909 - DNA, 74 bp, Homo sapiens
ccgctgagccgtcgcggagccgcgcagccctcggagcacggtgtcagttgtacccgaggcgttctcagcagcag

SEQ ID NO: 433910 - DNA, 97 bp, Homo sapiens
cttcaaaatcagacctctgtggcagcattttttccagaacacaaaagaatcatattctaagaactcagccactcaggtatccaccatggtgctgggt

SEQ ID NO: 433911 - DNA, 99 bp, Homo sapiens
tgaatttagagccaaactgtccaaggctttggcagctaccggctctctgaccagttccacgacatcctcattcgaaagtttgacaggcagggacggggg

SEQ ID NO: 433912 - DNA, 99 bp, Homo sapiens
gatcacagatgcagccaccatgaagacattctgtggcactccagaatatctggcaccagagtatttgattttcatcaagcagctgatggtatccaggaa

SEQ ID NO: 433913 - DNA, 75 bp, Homo sapiens
ggaaaattgaccagttctagcagttctaaaatcatggctcgtatgaagtaaccaagactgaggacagagagttgg

SEQ ID NO: 433914 - DNA, 75 bp, Homo sapiens
gttgaagattactggatgcacgtacagaatacattcagccgtcaggcaattaagttggaatatgcaaggttggtt

SEQ ID NO: 433915 - DNA, 135 bp, Homo sapiens
actggccgaaggggcgtctgcggctctccgccgtccccagccctgcctctccctgggctctggtcacaagaggaccagattaaaaatgctattgataaactttttgtgttgtttggagcagaaatactaaagaag

SEQ ID NO: 433916 - DNA, 100 bp, Homo sapiens
cattggaaaggagatttgctatttactctgctcgagatgatgaggaattggtccatgaaaggaaacagattcattgtctgtctgaggatgagttaagttc

SEQ ID NO: 433917 - DNA, 98 bp, Homo sapiens
cacagctttgcgggaaggccttccaaaggggtattattaacccaaagaatccaaaggaagctccaaagtccttcagcttcgactattcctactggtct

SEQ ID NO: 433918 - DNA, 98 bp, Homo sapiens
agcctcccaagtagctgggactacagggtttcagaagctgccagaggaggagccagaaacagatctcagccccgggctcccagctgcccacctcatag

SEQ ID NO: 433919 - DNA, 51 bp, Homo sapiens
gcctgggctgtctggaaatctgagccttccgcagctactttgagatcttca

SEQ ID NO: 433920 - DNA, 83 bp, Homo sapiens
ttcccttcctgcctcacgcgtggaaatacattgcctacgtgttcttcagattattaaggaatcccagcagcagcatggtttac

SEQ ID NO: 433921 - DNA, 98 bp, Homo sapiens
tgtagaccttccacactgccacctgattaaaggaattggtcattcaagacacagatatgcacttatacccataccattagcagtaattacaacatgta

SEQ ID NO: 433922 - DNA, 100 bp, Homo sapiens
aggagaccgaaaagtggatggaggaggcgatgcacatggcaatggacctcatcatgaccgttgctgtacttacaatgaaaacaacttggtggatggtgtg

SEQ ID NO: 433923 - DNA, 50 bp, Homo sapiens
tggacgtcatcgagtctgtcaacctcttgaccacactgcccacgtttcag

SEQ ID NO: 433924 - DNA, 100 bp, Homo sapiens
caccaacctcctccagggctggcagaacagggcatcattgcagaatacaacaaaatcaatgatgtaaaggaagatgatgacacggagaagtttaaagaag

SEQ ID NO: 433925 - DNA, 75 bp, Homo sapiens
ggagggactccccgtgaacaacatcttccagcagatctcccccgtggtcacgccgatgatggagctgaagcccaa

SEQ ID NO: 433926 - DNA, 75 bp, Homo sapiens
ccggagctgttgctggacccctggcagggcatgtcgggccccaggcctgtggtgctgagcgggccttcgggagct

SEQ ID NO: 433927 - DNA, 82 bp, Homo sapiens
cttgtccataaggctgaaccggcaactccccaggtgtgtcctggtagacaactgctcccaggagctggcatagaagcaaacc

SEQ ID NO: 433928 - DNA, 100 bp, Homo sapiens
ctcagtttgtgcaggacaccgacatggaacagggactcactggggatacactgcctctaggactgggacagatagccactgagtacctgcttcaaatcac

SEQ ID NO: 433929 - DNA, 75 bp, Homo sapiens
cgagagcaaggagaggctagggctccccaaaaaggccacaaagacagccccacctgccctgcctacaggttatga

SEQ ID NO: 433930 - DNA, 75 bp, Homo sapiens
agttaatcctcaatttaagcctgatctaacccctagaaacagtgataatatgcagcatgcatactgggaactgaa

SEQ ID NO: 433931 - DNA, 75 bp, Homo sapiens
gagaccgggctggccatgatctatgctgatggtgagaccattctaaaaggcctccagtccattttccaggagcag

SEQ ID NO: 433932 - DNA, 100 bp, Homo sapiens
tcactccatggctgcagcaaggagaggcggcggcggcctcggctgaagaaagaaggtgggagcggagagcgcaggcgtgcagcgtccgtctccaagagag

SEQ ID NO: 433933 - DNA, 75 bp, Homo sapiens
cgggaagagggagagcaaacttggctcagcccatgcagaatacagaaactgcagccatgaccacgcacgtcaccc

SEQ ID NO: 433934 - DNA, 75 bp, Homo sapiens
tgtctcggaacccgtggtcctccgcttcatcttgtactcccagagtacctcatccacgctttcttctgtgtcatg

SEQ ID NO: 433935 - DNA, 75 bp, Homo sapiens
gaatctgctctgagggcggatggctctccttggaggcattttttattttttgaacatttttagccatggcgagct

SEQ ID NO: 433936 - DNA, 73 bp, Homo sapiens
agaaaccatgagtgtaaggttaccccagagtatagacagatttagtacctcaagacaaactcttatgtggatt

SEQ ID NO: 433937 - DNA, 82 bp, Homo sapiens
gtgaaacccaaacaacatctcctgctattccttgggctgcctttcctgcagcctttctgagaaaagtctacagcattctttc

SEQ ID NO: 433938 - DNA, 99 bp, Homo sapiens
ctgaaaaattcaagaagttgaaaaacgcttttcacgtcacctggagagatgcacaggaattcatgaagattaccaactgccttattatgatcttgtacc

SEQ ID NO: 433939 - DNA, 100 bp, Homo sapiens
ccagcaccatcagggaccttgctgtggctgggcctgagatgcagattgcagtgagtgccagcaccatccccgaacaaatacagtccctctctgtgcacga

SEQ ID NO: 433940 - DNA, 101 bp, Homo sapiens
aaaagatccgatggcagcaccacttcgaccagcttcatcctcagacagggactttgaacatgtcggggatcgccctcagcagactcgcccaggagaggaaa

SEQ ID NO: 433941 - DNA, 80 bp, Homo sapiens
cccgaattaagccctggggcaggggacagggagagggcaccaagcagcagcagatgccgacctggccgaggggccccctc

SEQ ID NO: 433942 - DNA, 80 bp, Homo sapiens
tcaatgcctggagcaccaaggagcccttttcttggatcaaggtcaaaatgcagatcttcgtgaaaacccttaccggcaag

SEQ ID NO: 433943 - DNA, 90 bp, Homo sapiens
ctgggaacgtgagtatcaaccaagggccatgtggaagagctgtggggcctggccacacaccccagtcgggcccagtttgtgacctgcggg

SEQ ID NO: 433944 - DNA, 75 bp, Homo sapiens
gtcggtttccggatgaaacgaggagccagagtgcttgtgatttcacgtatttttgctgaactcgtaaaagagaca

SEQ ID NO: 433945 - DNA, 128 bp, Homo sapiens
ccctggcctccggtcccaacttcgcttctctgctgaccctctctcgtcgccgctgccgccgccgcagctgccaaaatattgtcattcttcagggatggcagccctaaacacagcatggcaactcatct

SEQ ID NO: 433946 - DNA, 100 bp, Homo sapiens
actgcagcattgcagccgccaagacggagttcatgatcaagtgttgcccacaccaaatgcttcatccagagtcatagtacatgtggatctggattgcttt

SEQ ID NO: 433947 - DNA, 100 bp, Homo sapiens
cacagattttggtgcagctagagaattagaagatgatgagcagtttgtttctctgtatggcacagaagaatatttgggaccactgacatttatggatgtg

SEQ ID NO: 433948 - DNA, 100 bp, Homo sapiens
ctattaagcacccaaggaaagcacttaaaagtggaaagatgacggatgaaaagaatgaacactgtccttcaaaacgatctccctctccctctctttccac

SEQ ID NO: 433949 - DNA, 100 bp, Homo sapiens
ctctccacaagcttccaccagcagagcttgctgcaggctcccagctctgatgggatgaatgtagttttgtatgaacaattcaagtttttcttgaatctct

SEQ ID NO: 433950 - DNA, 50 bp, Homo sapiens
cttggcgaggcctttcaccaagtccatgattccctataaggagcccctgc

SEQ ID NO: 433951 - DNA, 75 bp, Homo sapiens
acgtcggctcccacgcttagccagctcccgcatcaggcactggccaagatgatgctgatggccactcagtgtaca

SEQ ID NO: 433952 - DNA, 90 bp, Homo sapiens
cccggcgacactgcacccatcccggctgcttttgctgcgccctctcagcttcccaagaaagccacagtacacgaacctggggctcctgaa

SEQ ID NO: 433953 - DNA, 100 bp, Homo sapiens
acccccggcaacccggagaaggtctacagagcggcctgcgccagcgaggatctgaaacttgcccacccttcgggatattgcaggacgctgcatcatgagc

SEQ ID NO: 433954 - DNA, 95 bp, Homo sapiens
ggcaaagccaaagctcccatccaagacatctggtaccacgaggatcggattagagctgttggagagctggctggactacactggggaactggagc

SEQ ID NO: 433955 - DNA, 51 bp, Homo sapiens
ccctggaccagcagaaacctagagtgaaaacatcggttgtgaagagaaagc

SEQ ID NO: 433956 - DNA, 74 bp, Homo sapiens
tttggaaccgattccatcaccccaataaaggagctcttcacagcacctgtccccagcctgggtaaagatggccc

SEQ ID NO: 433957 - DNA, 99 bp, Homo sapiens
agaaagaatcatgagcaactggaaaaaataataaaatgtaataggtctacagaaatatcttcagtaaactgtttcacgttagacctgtaacccaaggag

SEQ ID NO: 433958 - DNA, 101 bp, Homo sapiens
acgaatcgttaaacatctgaaagggtcaggaagtgtttggattgtgagctatttcagaactgttctcaggactcattattttaacatttgggagaaacaca

SEQ ID NO: 433959 - DNA, 73 bp, Homo sapiens
aaccgagacaagttcaccccgaagtctgccggtatagctgtggaccaactgtatatgatcatgcgcaccttgg

SEQ ID NO: 433960 - DNA, 96 bp, Homo sapiens
actgcttagcaggtcccgctatacccaggagtacatctgtcagatcttctcacactgctgtaaaggccgttgctccagggagaactgcaaatatct

SEQ ID NO: 433961 - DNA, 128 bp, Homo sapiens
ggatgttaaaaatcaacaccaggactacagtaaggctgaaatcattgaagtgcttggagtgcagaactgaaagagaactgataaatttcaaacggaagagagtggcagcatttagaaagaatctaatt

SEQ ID NO: 433962 - DNA, 100 bp, Homo sapiens
catgtctctgcagacagatgaagatgaacacagtattgaaatgcatttgccttatacagctaaagccatggaaaggcgaggattaaatccaccacacagg

SEQ ID NO: 433963 - DNA, 100 bp, Homo sapiens
gtgctgtttgaaacgtctgtgggttacgccatctttaagagcttcttcgagacaccttcacttccctgggctatgaagtccagaaattcttgcatctcag

SEQ ID NO: 433964 - DNA, 73 bp, Homo sapiens
cagggggtgatcaagtacatggggccggcagattgttaggaaaaaagcattgcctgacagcggtgaagatcga

SEQ ID NO: 433965 - DNA, 75 bp, Homo sapiens
aagaggatgcggagacgcggggatttttacctcctataactccaccagaaaagttttttctttcccagctgatgc

SEQ ID NO: 433966 - DNA, 98 bp, Homo sapiens
tttgcagcagctggaccatgttcctcattaacatctgtctgtccgcttagtcatcacatcatttcactgtggaagatgaggagggaagctgggctcag

SEQ ID NO: 433967 - DNA, 90 bp, Homo sapiens
cccagctttggttggaagacctattatcagatcaaccaccaaagtgggaaacattgaaatcaaggggccacctacagatgctcctgcagt

SEQ ID NO: 433968 - DNA, 83 bp, Homo sapiens
tttcggggatgcagctggccaagctgatccgacagagaaaggttcaaggtgtttgcagactatgaagcctacatgcagtgcca

SEQ ID NO: 433969 - DNA, 50 bp, Homo sapiens
ctgcaagcaggcaacctgaatacaggatgagaacaagttgagcagtgcca

SEQ ID NO: 433970 - DNA, 97 bp, Homo sapiens
gttccgtaaaaacaacaactactagtcggccgaactccaagcgtgaccagctttctgttgggaacactcaaaggatacttttgtggaactctatggg

SEQ ID NO: 433971 - DNA, 80 bp, Homo sapiens
gactcagagaccaataaaaataaactgcttgaacatcctttgactggttagccaggattacctcacagacctcatcacca

SEQ ID NO: 433972 - DNA, 101 bp, Homo sapiens
gatgattatcgtaggaggagtcctccacctcgtcgcagagatagaatctcactatgttgaccaggctggtcttgaactcttggcacccaagcgatcctttt

SEQ ID NO: 433973 - DNA, 75 bp, Homo sapiens
attagttccgtcacaggggctatttgtttggatatcctgaaagatcaatggaaaaccagtgttctctggacatga

SEQ ID NO: 433974 - DNA, 75 bp, Homo sapiens
agacctgccactcgactgtggactacgccactttctaccggtaagaatgattgatgttggctgatattggagtgc

SEQ ID NO: 433975 - DNA, 82 bp, Homo sapiens
tggacagaggctatttcagtatagaggtaacaaatatactctggagactagaccaaaccaagaaggcattgatgtaagacaa

SEQ ID NO: 433976 - DNA, 75 bp, Homo sapiens
gatggaagaggatcaggagctggagaggtgctgttccaccccaacagcggggcagctggagagtttggagccctg

SEQ ID NO: 433977 - DNA, 50 bp, Homo sapiens
aacgcaaggccgaagccaaagccagttaagtgggcagaccaacatccacc

SEQ ID NO: 433978 - DNA, 96 bp, Homo sapiens
caagcatgcagcttactgcttgaaagacgttggaacttgccaggaatccagcaatgatgcaggagatgatgaggaaccaggaccgagctttgagca

SEQ ID NO: 433979 - DNA, 82 bp, Homo sapiens
tcagtcctcaatctccttttccttggctacccgaaaagagcactggttgccattggtacccatgatttggacactttgtcgg

SEQ ID NO: 433980 - DNA, 90 bp, Homo sapiens
ccgggacagcgaggagctgagggaccctcaagagtgagccatggagctacgtgtggggaacaagtaccgcctgggacggaagatcgggag

SEQ ID NO: 433981 - DNA, 100 bp, Homo sapiens
aaggaaacctctctgaaatctgacacctgctctcccggcaaggaaacttcgcaggctggtagttggcaaaaaaggagaaagccactaaggtacaaaagac

SEQ ID NO: 433982 - DNA, 85 bp, Homo sapiens
gtgaacatttgtagcattgatttcccggatctggtaacatggcaaaagatcccgttttacggagaagacttttactgtgaaattc

SEQ ID NO: 433983 - DNA, 75 bp, Homo sapiens
catgcatgtaccgaccttctgaacaaggccaacacctatgcaggctttagaaaagaactcaggaatttggaagca

SEQ ID NO: 433984 - DNA, 90 bp, Homo sapiens
cgtgccctcgctctgagctgcgcctggacctggttctgccttctggacaatctttccggaccctgatgctcccataagacagaaaatgcc

SEQ ID NO: 433985 - DNA, 100 bp, Homo sapiens
gctgatgaagacaaggactcacagtggctgcaagctccttcgaatgttcttccggcagcaggatgagattcgacggttgaaagaggagctggcccagaag

SEQ ID NO: 433986 - DNA, 100 bp, Homo sapiens
gatggtggaggaatacacttatttatgaagacacagagtctgggatctaataattcagtcattttggatggactaaaaagaagacagaattttctgcaaa

SEQ ID NO: 433987 - DNA, 100 bp, Homo sapiens
ggatctctgaggagtattttgcacagagttttcctccaacgacagaaaaacactgcagtaagctttggcagcgtgtcctttgaagaggcagagactcgtt

SEQ ID NO: 433988 - DNA, 75 bp, Homo sapiens
tgctagagggcttgggcattcacacgcaaacggggattcagcgtccgatcctttggaacagggactcacgtgaag

SEQ ID NO: 433989 - DNA, 83 bp, Homo sapiens
gaattgagaatctggaactaatgtcacagcatggatgtaatgcctggaaagtatacaatgagatgggtttgtggagttcttcc

SEQ ID NO: 433990 - DNA, 83 bp, Homo sapiens
tgaagaactgaagaagctggagttgctcagacagacaggggcaagtgtccgagtggtgaatcagctacttacagagatggatg

SEQ ID NO: 433991 - DNA, 96 bp, Homo sapiens
agattttgatttgctggaggacattgaaagcaaaatccaaccaggttctcaacaggctgactatcttcatcataaaagaggagaaacagataaaag

SEQ ID NO: 433992 - DNA, 100 bp, Homo sapiens
agattccatcagcattccaaaatcatgctgtcggcatgaagagctacatgaagctctcttcacagatggaatcacaaataaacttattggctgttacgtg

SEQ ID NO: 433993 - DNA, 108 bp, Homo sapiens
ccgcctccctcccgcgcgtgctgcgggtctgctcgggggtctacttcgaggtgttctaagaacggaagcatctgggctggatggaatttagcatcaagcagagtcccc

SEQ ID NO: 433994 - DNA, 122 bp, Homo sapiens
gccacggtggataacgacaagaaaaacaatcgcttcaatgatgggaaggtggatcccgccgggaggtactttgctgagtccctgcaggaagcatcacccaggctggcagatcatggtagcag

SEQ ID NO: 433995 - DNA, 83 bp, Homo sapiens
gcggattcgccgaggcaccgaggcactcagaggagaggcagaagaggcctggaccttggcgcacacagacccaggaacagatg

SEQ ID NO: 433996 - DNA, 100 bp, Homo sapiens
aatgatcaactattgaccatatagaatcttccctggagaaggagagggagactcccagtcccatcgaccccaattgtgtggaagtggatgtgaacttcaa

SEQ ID NO: 433997 - DNA, 100 bp, Homo sapiens
ctcacatggtgtctgggcccttggcactccgggcttgtagggggagagaccaggatcatcaaggggttcgagtgcaagcctcactcccagccctggcagg

SEQ ID NO: 433998 - DNA, 82 bp, Homo sapiens
cattagcgtgaaaaccacaagcaggtccaaagagagagtggaagttaaacgagctgagcctcgggacagcaagagccaagcg

SEQ ID NO: 433999 - DNA, 100 bp, Homo sapiens
ctaaactttctgagcttcatgacaatcaggacggtcttgtggattggccatttgatgatggagctccaccccctaatcagatagtagatgattggttaaa

SEQ ID NO: 434000 - DNA, 100 bp, Homo sapiens
aacttcaaatctgacatctggtctcttggctgtctactatatgagataattctaaggcactgatagcatttctggcatttctgattattgtgacatcaat

SEQ ID NO: 434001 - DNA, 100 bp, Homo sapiens
gtgtgattagcttcgcagtctggaaagctttaggagttcacagtatttctaccactccaaacgccggctgatcttctccaagaggaagccctaatccgcc

SEQ ID NO: 434002 - DNA, 90 bp, Homo sapiens
aggcctaagaattttggcattggcatgctggaagatggactgccctccaatggtgtgccccgatctacagccccaggtggaatacccaac

SEQ ID NO: 434003 - DNA, 75 bp, Homo sapiens
gcccccccttccccacgcaaccccagatccatttacactttacagctttcaaggatatgctgtattcagctcagg

SEQ ID NO: 434004 - DNA, 100 bp, Homo sapiens
tttaaatgcagcatctgcgatgtgaggaaaggcacctccaccagatccaaaaagttggcagctcttgcagaagccttaaaggaagtctcccttacaaagg

SEQ ID NO: 434005 - DNA, 75 bp, Homo sapiens
ggctttggggaccgggaccgggatcgtgaccgtggagggagctgatggtacacacatggatggtgatcaaattgt

SEQ ID NO: 434006 - DNA, 75 bp, Homo sapiens
aggacagcagagaataagctggacaccaaatacccgtacgtgcaccaattccagctggacatcactgtgaaaatg

SEQ ID NO: 434007 - DNA, 100 bp, Homo sapiens
tctctgcagaatgtaattaaaaggaagaatattgggcttactgagggttcaggataagtttgaggtgctgaattacacaagcattcctatctttctcccg

SEQ ID NO: 434008 - DNA, 87 bp, Homo sapiens
tcttcacagatctcagagaaattggccatggaagctttggagcagtgtatttttctgtaggtatattgttagagccatgcagtgacc

SEQ ID NO: 434009 - DNA, 100 bp, Homo sapiens
agctgaacagcgcgaggcggcggcagcgagccgggtcccaccatggccgcgaatgacctgaaggagaagaaggagaaggtggaggagaaggcaagccgga

SEQ ID NO: 434010 - DNA, 100 bp, Homo sapiens
ctttggaaggctgaatgcactaaacatgaagagcttgaaagcgaagttcaggaagagtgacgttgacatcatggacatatgtgagtccatcctggagagg

SEQ ID NO: 434011 - DNA, 98 bp, Homo sapiens
tgaccgagaccgtgaccgagagcgtgaccgagagcgcgaatatcgtcatcgttagaagacatggagattaagtagcttgcccaagatcacccagccag

SEQ ID NO: 434012 - DNA, 100 bp, Homo sapiens
gacgcctgaggatgatgccccagctgcagttcaaagatgccttttggatggtgaagaaagccaagactatgatgaagaatgctcagaagaagatgaatcg

SEQ ID NO: 434013 - DNA, 75 bp, Homo sapiens
ccacctacagaaacaaaatgtcaacaaattgatggtcttcagatcctgacctgaggcgatccttagataagcaac

SEQ ID NO: 434014 - DNA, 98 bp, Homo sapiens
ggtcgaagaaggggacgccgacaagacgaaggccttcatccaccacgagctgctggcctacctatactcctcggcagaccagagcagcctcatggagg

SEQ ID NO: 434015 - DNA, 100 bp, Homo sapiens
aagactctctgaaagccttaaattaagctccagtcagcccggtcaagcatgacagcaactcaaactcggcaaacttccaagacgtggaggacatgcctga

SEQ ID NO: 434016 - DNA, 75 bp, Homo sapiens
cattgttcagctgggtggccaaggatttggagttccatggagtgatgagattttattttcaagataaagctgctg

SEQ ID NO: 434017 - DNA, 100 bp, Homo sapiens
acaacttgacttctctggggactctgaacttccctggtcgaacagttttttctaatggctattcaagcaatggaccaagaatctggtaaggctgtctggc

SEQ ID NO: 434018 - DNA, 51 bp, Homo sapiens
aggaacgcgacggcggcgcccgcaggaggctaataatgaaggggccgggaa

SEQ ID NO: 434019 - DNA, 100 bp, Homo sapiens
taaaaggtgtcaagaagctcagaatggcagagatctggctccacaaggaggcccagaaggagggctggagcaaagctgccaagctccaagggaggaagac

SEQ ID NO: 434020 - DNA, 83 bp, Homo sapiens
gggcgcggattcgccgaggcaccgaggcactcagaggagggactggtgattgcagctggaagtgcccatgaccgagctggcgt

SEQ ID NO: 434021 - DNA, 100 bp, Homo sapiens
tgatttgcctcagcttgtactcacccaccaaggctccggatgtgttccccatcatatcagggtgcagacacccaaaggataacagccctgtggtcctggc

SEQ ID NO: 434022 - DNA, 83 bp, Homo sapiens
ggcccttacccagacctgggcgggtttcatcagagcaagaaaaagaacaagagactttaataagccagaaaagcatccctgag

SEQ ID NO: 434023 - DNA, 100 bp, Homo sapiens
tgagctccaggagttcgtctcttacgtctgcggaagtgcagctgcctcagttcttagcgcagaaggacttactcctcagtgatattccaagcagcaccgc

SEQ ID NO: 434024 - DNA, 127 bp, Homo sapiens
ggaaaactcgtgtccatcaaaatccagatgctggatgacacccaggaggcatttgaagttccagtattacacaatggcctcgttatggagatggagcatccaactgtggggaagatttccgtcccag

SEQ ID NO: 434025 - DNA, 50 bp, Homo sapiens
gtttgtcacctggctcgatggcattaaagctcaggccccggggcctccag

SEQ ID NO: 434026 - DNA, 100 bp, Homo sapiens
agctaaggcagttctacgtggctgctcagggcatcagttggagctaccgacctgagcccacaaactcaagacatgtcatgctgcccaaggacatagccaa

SEQ ID NO: 434027 - DNA, 98 bp, Homo sapiens
tttcttttggctgttcgactccatacctttcttacaacttcccttccagcctatcgagctcaactccttcaccaagctattgacctgaaaagtggttc

SEQ ID NO: 434028 - DNA, 90 bp, Homo sapiens
gaaggaaaccagagccagtcgggccaagagaagaggcggtggaggacacgacgcgcttaaaggcatgcagcagattggaataaatatgat

SEQ ID NO: 434029 - DNA, 75 bp, Homo sapiens
caattgcccaaacccaaagtgtggaggaccgagatctcactcagcagacagcagcagcccgggagcctgagctca

SEQ ID NO: 434030 - DNA, 83 bp, Homo sapiens
gagtaagccagcggcaggaccagcgggcgggggcccacgatgccgcagaatggaattcggcattgttcctacacagcttctcg

SEQ ID NO: 434031 - DNA, 101 bp, Homo sapiens
agccaagaggaggacagttcgctacacagcaatgcatcgagtgacctgaaaaaaatgtctggatttctagagggcttgagatgctcagaatgcattgactg

SEQ ID NO: 434032 - DNA, 75 bp, Homo sapiens
gggaagctggccatcttcacagatgaccccatgcagaatgccaccaagtatggcaacatgacagaggaccatgtg

SEQ ID NO: 434033 - DNA, 96 bp, Homo sapiens
tgaatcgtagccaggacaaaacagcatggttagtcattgtggatgatgatacattaataagccagaactgtgtagatgcgtaccccactttcctcg

SEQ ID NO: 434034 - DNA, 100 bp, Homo sapiens
atgagaaggagatgacacaaaagttagatctcatcacaagtgatatggcagactgtgatcaaccactctatgattgtcctatgtgtgggctcatatgtac

SEQ ID NO: 434035 - DNA, 100 bp, Homo sapiens
gctggaggctcgcaagaaagccaagaacaagcagctgggccatgaggaaggtgaccctggcagcaaccccaacaaacgccagaggcagccccctctcctg

SEQ ID NO: 434036 - DNA, 83 bp, Homo sapiens
aaagttggaagttaagggagacaaagttgaaaacaaagtgctggtaaactgtcttgagccccaccctcacctgcctgtgctgg

SEQ ID NO: 434037 - DNA, 80 bp, Homo sapiens
ccgctcgtcatggcctacccgggatacggaggagggggactttgaacatgtcggggatcgccctcagcagactcgcccag

SEQ ID NO: 434038 - DNA, 75 bp, Homo sapiens
gtctccaacatcatccagctgacagcaacctccggctgttcgtgagccgcgatggctctgccacgctgagcggca

SEQ ID NO: 434039 - DNA, 75 bp, Homo sapiens
aaactgttcggacttccccgttagaactcgcgtttccacttcagagatctgaggctgggaggcggcagaatgcag

SEQ ID NO: 434040 - DNA, 87 bp, Homo sapiens
tcgccgcttccccggcggtagcagcctgcagccacgaccttagctggatctccaaaatacaagtgaatcacccggcagttctgaggc

SEQ ID NO: 434041 - DNA, 50 bp, Homo sapiens
gcctcccgggtagctgggactacaggtctctaattaacagaagatggcaa

SEQ ID NO: 434042 - DNA, 90 bp, Homo sapiens
ctggtttgatagcggaacttcatggtcttatgttcttccaggtactgggcctaatcgctacgtgcctctttggctatgatgcctatgtca

SEQ ID NO: 434043 - DNA, 82 bp, Homo sapiens
cggcttgtcctggctcttgccctcatcctggttctggaatcctcagttcaagagctggaagtcgagtgtgctactcaactca

SEQ ID NO: 434044 - DNA, 96 bp, Homo sapiens
aaccatggaggaggctagcaagcgaagctaccagttctgggatacgcagcccgtccccaagctggatgctgagatgaatcgtcacctgtgtgtttg

SEQ ID NO: 434045 - DNA, 100 bp, Homo sapiens
aaatgtaaaggccaagatccaggataaggaaggtcttatcgaatgttacttagcctccaacagtattcgagaagcaatggtaatggctaacaacgtttac

SEQ ID NO: 434046 - DNA, 50 bp, Homo sapiens
taatacatcatgaactgcaggacaaatacaacgacttcatcgaggccaac

SEQ ID NO: 434047 - DNA, 95 bp, Homo sapiens
tgagaagcactatggtcgtgagagtcgtcagtgccctattccttcacatgtaattcagaaattagggacagggtggagtattattgctagtactg

SEQ ID NO: 434048 - DNA, 100 bp, Homo sapiens
ccggggtcacccgctacgggaagcaggcctcgccacagatatcagaaaaccaggactctgcagatgttgatcctcaggagcattcatttactcgaactat

SEQ ID NO: 434049 - DNA, 73 bp, Homo sapiens
tgggttcaagcgattcttctgcctcagcctcctgaggaatgcagtggtgtcttttgaaagaagaggatgtcat

SEQ ID NO: 434050 - DNA, 97 bp, Homo sapiens
aggatgaggtggccgctctgctacatgcccacctgagctcgggccagcccgacacccagagagcccgagcccagcacattgtgccctgtactatatc

SEQ ID NO: 434051 - DNA, 100 bp, Homo sapiens
gggacaggcagaagaagtggtacaggagagaatttgtgatgatgagctgatcttaatcaaaaagacaaggaagatggggagccaaagaccaagcatctca

SEQ ID NO: 434052 - DNA, 51 bp, Homo sapiens
caggataattccattcttaaagtgttggggatgtcctttgcactgaccctg

SEQ ID NO: 434053 - DNA, 51 bp, Homo sapiens
cttcatcgacatcagtgaagaagatcagctgttaggcaattttcttcagtg

SEQ ID NO: 434054 - DNA, 50 bp, Homo sapiens
cgtctgtgaggccaatgcaaatccaaggccacctttgatgccatttctaa

SEQ ID NO: 434055 - DNA, 82 bp, Homo sapiens
aaacgtgataagaagcacctggatgagacatttgctacagcatcccacattaagtcaacgtcattgaaattatgagactatc

SEQ ID NO: 434056 - DNA, 100 bp, Homo sapiens
cagaggaatgcctggacaaactggccccaaggttatgaaaactacaattactatggcgcccagaacaccagtgtcaccacaggcgcaacctacagctacg

SEQ ID NO: 434057 - DNA, 98 bp, Homo sapiens
gctcgaccagttgcctgacgagagtgctcttgatgatttcgataaagccaaaccctccccagcacccccttctaccaccacggcccctgatgcttcgg

SEQ ID NO: 434058 - DNA, 89 bp, Homo sapiens
gacatgtctgagactcctgctcagtgtagcattaagctgctgcagaagaatattttgcctgctggaacctgctgtatctactcaagagt

SEQ ID NO: 434059 - DNA, 80 bp, Homo sapiens
cagcaggagtttggaagcccttttcctccaaatcctgggaaaggaccgaggtgatgagttcacatacactggaagcggtg

SEQ ID NO: 434060 - DNA, 75 bp, Homo sapiens
ccaacaggaatgcggcttcccccacatcagtcagatgaggcctgcctgtgttaatacacctagtgaggagtggag

SEQ ID NO: 434061 - DNA, 50 bp, Homo sapiens
ccgggacatctgaaagccaggaaatggtggtggacataatgcgagttaac

SEQ ID NO: 434062 - DNA, 100 bp, Homo sapiens
agacggagactgagtacttcgctgctctgattcctgtctgactaaagggacctcaaaaaggagggaaaatggcttctgagtctgaaactctgaatcccag

SEQ ID NO: 434063 - DNA, 100 bp, Homo sapiens
gagatgttattgagaaggggagaaagcttgacgtcactgacctgcttgctgatcctgtggtccggatccagagaaagggtggcactgaatcaacaagaca

SEQ ID NO: 434064 - DNA, 100 bp, Homo sapiens
tatactttggttacctatgtacctgttaccactttcaaaattgctgagacaaaggaaaacccactcccttggaggagcatgaccttttcctgtaattctt

SEQ ID NO: 434065 - DNA, 98 bp, Homo sapiens
ccacttctgccctggcccccaagatcggccccctgggtctggaaattgtgaacagaggatctgacacagacgtctggaagaccatcctctcagaggtc

SEQ ID NO: 434066 - DNA, 87 bp, Homo sapiens
caagcaatgtggcaaaacgaaaaagctcaatgcctcagaaattcattgggtgttcctgaaaagccccatagtgattgagtcttcaaa

SEQ ID NO: 434067 - DNA, 78 bp, Homo sapiens
tcgtgatcccggcgacatactacctctggccccgagatcagaatgccgcctatacggttcagacatccgagagcatga

SEQ ID NO: 434068 - DNA, 74 bp, Homo sapiens
gaccaaggtggaaatcaaaccacctgaactcctggggggaccgtcagtcttcctcttccccccaaaacccaagg

SEQ ID NO: 434069 - DNA, 100 bp, Homo sapiens
tgggcggcccggccgaggcggaccgcgtggcggcggcgcacgggtacctcaacttgggccaggttgccaagagggtgatcctgttgtcgggcacaccagc

SEQ ID NO: 434070 - DNA, 50 bp, Homo sapiens
tggagcaaatcacggcagtcactacgacttatgaaaatatgcatcagttt

SEQ ID NO: 434071 - DNA, 100 bp, Homo sapiens
cctcccacccgctgtgtaaacctgggtacaaattctgagctgtctaacccctctgaaacggaatctgagcgtaaagacgagctgagtgattggtcattgg

SEQ ID NO: 434072 - DNA, 100 bp, Homo sapiens
gacgaactccgcaatgaggacgttcaggaatagccaggccagaagaaggaaggcctgtggtgagtgggacaggaaatgacatcaccaccccaccgaacaa

SEQ ID NO: 434073 - DNA, 96 bp, Homo sapiens
gcagaaatcatttcggctctcatgttcctccatgataaaggaatcatctataggcatcccgggcccaaatcctagacaaagccacagaatatatcc

SEQ ID NO: 434074 - DNA, 95 bp, Homo sapiens
gggtgtgtgagaagaacatcaagaggttcagggctcaagggttcttgttgatgcacgagataagcttggcattccttggcagtattctgaaaatg

SEQ ID NO: 434075 - DNA, 50 bp, Homo sapiens
ccgtcgcgccactcctccgagtggcagcacaccctgggccccccactccc

SEQ ID NO: 434076 - DNA, 82 bp, Homo sapiens
ggaagttactgccgcgccaccgagtccggaccggagactttggggcctaactaggagaagtgccagaaagcccggaagcaag

SEQ ID NO: 434077 - DNA, 82 bp, Homo sapiens
cgtttgtcattcccttcctgaagtgcctacaccaactaatgttacaattgaatcctataacatgaaccctatcgtatattgg

SEQ ID NO: 434078 - DNA, 83 bp, Homo sapiens
tctacgccggcttcaaccaggaccacggtcttgagtcaccacgtccgaatataattcttgggttagtaatctgccaaaaaatc

SEQ ID NO: 434079 - DNA, 75 bp, Homo sapiens
ggaatttggagtagtttcaaatacaagattgattgctgctgctacttctgtatttgcgagaaagaatcaaagctg

SEQ ID NO: 434080 - DNA, 100 bp, Homo sapiens
ccccgacggcaccgtcaccgaggcgccgcgcacagtcaagaaggaaattgcagcttatttaataacatttgagaaacacgaagaatggctaaccacctcc

SEQ ID NO: 434081 - DNA, 90 bp, Homo sapiens
ttcgtactgggcagaacgcgacgggtctgcggcttaggagaatgggtccagcttggctttggctactgggaacagggatcctggcctctg

SEQ ID NO: 434082 - DNA, 78 bp, Homo sapiens
atgaagccactgattagcaatttaaagatcctctccaaggttttcaattcaaaaacagctgaactacttagtcatcat

SEQ ID NO: 434083 - DNA, 100 bp, Homo sapiens
gaccctgcgaccacctgagcgccaggccctgtttggctcctgggagctcatctacggcgccagccagacaccttgttggagtgtgtgaataagaaggtcc

SEQ ID NO: 434084 - DNA, 53 bp, Homo sapiens
gagcaacaggaaatgaacacattgcagatcaatgtaaccactgtgcgggaata

SEQ ID NO: 434085 - DNA, 83 bp, Homo sapiens
accgtgtctggagctgagcgggaaacggccgcgttatggctgcagcttcgattgccaatattgtaaaaagttctcttggtcca

SEQ ID NO: 434086 - DNA, 100 bp, Homo sapiens
tctgcccggccaagaggcaaaggggaggttacgcagcaaaccatccagaagaagaggcaattcggacataaagagaaacatcaagggcatgagtgcacag

SEQ ID NO: 434087 - DNA, 100 bp, Homo sapiens
ggttgataactgtgccatctgcaggaaccacattatggatctttgaagatgttaccgagtacttcagtgaattccttagtgcaggggaacggagtcttga

SEQ ID NO: 434088 - DNA, 100 bp, Homo sapiens
gggttgattttgcaaaaagtgccagaaaaccaaagagaaccctgtacagtaagaaatatggtgtggacctcatcagatacactcatgcagcaaacacagt

SEQ ID NO: 434089 - DNA, 100 bp, Homo sapiens
cgagccgccaccgcaggtcgaggacggtcggactcccgcggcgggaggagcctgttcccctgagggggcagctggcattttatgctatgtgggagcctat

SEQ ID NO: 434090 - DNA, 100 bp, Homo sapiens
gaaggtggtggtgtgcgacaacggcaccgggggcagcaaggagcgcttccactggcagagccacaacgtgaagcagagcggcgtggatgacatggtgctt

SEQ ID NO: 434091 - DNA, 117 bp, Homo sapiens
gagcacatcagtgatgaatgcaagaggcgtttctataagaattggcgtggtgaccaagatgaagatgcagaggaccattgtcatccgccgagactatctgcactacatccgcaagta

SEQ ID NO: 434092 - DNA, 74 bp, Homo sapiens
gaaaatagcacacttttactctacgcaactgttgctttttcatggtccttatcttgcttccctgccattggaca

SEQ ID NO: 434093 - DNA, 90 bp, Homo sapiens
gttcaagaaggttcacaatgaaaactgtacttatgttagctgaccagggagagcctggggatgtacaggagatgcctgctccagaatctc

SEQ ID NO: 434094 - DNA, 75 bp, Homo sapiens
gggcgccggcgtagaatctgagctgcagatgacacacaataatttttggttgaagaagatagaaatcagtgtttc

SEQ ID NO: 434095 - DNA, 76 bp, Homo sapiens
acacgagaagtatatgtccctcacactgtgtacagctccagtggctgttggacaattatgagacagcagaaggagt

SEQ ID NO: 434096 - DNA, 99 bp, Homo sapiens
cgagaagccggtacaggtgccctgcggacacgtaactggcatcaaatactcacaacatagctcaggatctgtcaaacaaaagttcttatggactcaaag

SEQ ID NO: 434097 - DNA, 90 bp, Homo sapiens
cagacggcgcgtttctatcgggacgtcctggggatgaagacttaattcagtgcacaaatgagatgaatgtgaacatcccacagttggcag

SEQ ID NO: 434098 - DNA, 89 bp, Homo sapiens
agcagatcgattttaccttggataccctgctttgggccctgggaggagcggggacactgaggacctctctccaaattggcctctcaact

SEQ ID NO: 434099 - DNA, 104 bp, Homo sapiens
ttttagacagcgtgtgccaagcagatgagaattcagggtgataaaagaaaatgtggctgaagttacccgaagttcagcttgcagtgtaattcagaagagttaag

SEQ ID NO: 434100 - DNA, 74 bp, Homo sapiens
ggaaaaagactgtcatttggaagggcccagcactagaagatttcagtcatctgccaccagaacagagacgtaaa

SEQ ID NO: 434101 - DNA, 75 bp, Homo sapiens
aaaacaacgaggccggtcgcagggatcaactcactatcctgaaggtccattctcccaagaagaggggacagaaag

SEQ ID NO: 434102 - DNA, 90 bp, Homo sapiens
ctatcagcggccagcgcgggcgcggccggagaccgtggggcccccggttgccgccccctcgggcccctgtgtccgtctgggatgaggagg

SEQ ID NO: 434103 - DNA, 49 bp, Homo sapiens
ggcaaacctgcacctccacctcagaaaaatctgctgatattgtaatttg

SEQ ID NO: 434104 - DNA, 83 bp, Homo sapiens
gtgacaccttccgagaccagtccacctacatcagcggattccacaggcacgcactccctctacaccacataccaggaccacga

SEQ ID NO: 434105 - DNA, 75 bp, Homo sapiens
cagtgttaaaggaacctctacaacgaaggtgaagccacggaagataaggtattgaaaaccttccctttgaattac

SEQ ID NO: 434106 - DNA, 100 bp, Homo sapiens
ctcgagttggagattctcagaatcctcttctgagtgatggagatttgtctaccatgattggcaaggtgatttgaagatattaaagctagaaattggaact

SEQ ID NO: 434107 - DNA, 109 bp, Homo sapiens
cagcaccgcagccttgggcctcgcgccggctatggccgtgccctggggctgagccctcagccctgggcgctgcctatggcacagccaagagcggtaccggcattgcggc

SEQ ID NO: 434108 - DNA, 93 bp, Homo sapiens
ctggggccagggaaccctggtcaccgtctcctcaggctgaccctgggcaagccccttggggagggctgcttcggccaggtggtcatggcggag

SEQ ID NO: 434109 - DNA, 75 bp, Homo sapiens
agctttagccgagagtacacagctgctgtagaagccaaacaagtgggttcaaggtgtttgcagactatgaagcct

SEQ ID NO: 434110 - DNA, 86 bp, Homo sapiens
ccgcttcctggaatggcaagcgcagcaacaacagagagcacgtgccctgggcgctgcctatggcacagccaagagcggtaccggca

SEQ ID NO: 434111 - DNA, 74 bp, Homo sapiens
caactgatgaacaagaagaaaagttaaaatcagaatgtttttccaaaagaatttgcagtactaccctctgggtg

SEQ ID NO: 434112 - DNA, 100 bp, Homo sapiens
aggaaaagttgggctttcaacattcaagggccgttgctccagggagaactgcaaatatcttcatccacccccacatttaaaaacgcagttggagataaat

SEQ ID NO: 434113 - DNA, 101 bp, Homo sapiens
gcgacaccgcgagctatatctgcgcgtggagctgagtgacgtacaggtgaactactgagttcttcattatgtctgatggagattatgattacctcatcaag

SEQ ID NO: 434114 - DNA, 85 bp, Homo sapiens
cagcagggacgtcggtttgctatcgggactcggcgaggacgagactaggagttttgcatgtgggacaaaagcttgaagaacaaga

SEQ ID NO: 434115 - DNA, 75 bp, Homo sapiens
gagacacatcacctacttggaggaagagctggctgctggagccagttctgcttctcggcaaggagcgatttgctg

SEQ ID NO: 434116 - DNA, 107 bp, Homo sapiens
gcgtaataagaaggtgggcgttatcttccgactgatccagctggtggtcctggtctacgtcatcgggtttttcgttggaatatacgttgcacatttatggcgattct

SEQ ID NO: 434117 - DNA, 100 bp, Homo sapiens
agggtcctgaggaggatcataaggcctgagctcaggccttacctcgtgcacatacctagaataatccagaatggctactctgatctatgttgataaggaa

SEQ ID NO: 434118 - DNA, 98 bp, Homo sapiens
agactttcacaaattctaacagatttccccaaattggatggtgttgcaattaataacacctttctcccgtcacaaaatgatcttagaatatgcagttt

SEQ ID NO: 434119 - DNA, 80 bp, Homo sapiens
atcgacttcctcacccgcgcctgcgacctcgcgcgagcccagcattgacctgctgcaggccttcgtggagcactggaagg

SEQ ID NO: 434120 - DNA, 98 bp, Homo sapiens
cgccatcatggacgaggactactacgggagcgcggccgagtggggcgacgaggctgacggcggccaggtattagaaaactactcggatgctccaatga

SEQ ID NO: 434121 - DNA, 75 bp, Homo sapiens
atctcagccatcaccatcagtgacgtctcaaatgattacggacctgaagccaaagaacaagatgcgctagtggac

SEQ ID NO: 434122 - DNA, 88 bp, Homo sapiens
agaactcgtcatgctctttgtagcgtggtgcttctgttgctcacagaacacagatatgtagaactcttcttgaattctacagcaggag

SEQ ID NO: 434123 - DNA, 100 bp, Homo sapiens
ggttggagacattgcagagctaagaccaaaccaggtcaaaatgcagatcttcgtgaaaacccttaccggcaagaccatcacccttgaggtggagcccagt

SEQ ID NO: 434124 - DNA, 84 bp, Homo sapiens
cgaacgaccaagagggtgttcgactgctagagccgagcgaagcaacccagcgggtgccgcttctccacccgaggcttccacctc

SEQ ID NO: 434125 - DNA, 100 bp, Homo sapiens
cacgggaacagcctgcggggcattgtcaagcacctggaaggcccggaaacaaaactcatgctgtgccatcatgtgatgcagcctgccagaggcccaatgc

SEQ ID NO: 434126 - DNA, 98 bp, Homo sapiens
gagaagtccgcatcatgaagggcctaaaccaccccaacatcggtgaaaggtgtagcagtcactcggcctacacccacagcatcgaccttgtgaaccca

SEQ ID NO: 434127 - DNA, 100 bp, Homo sapiens
tttctaacttttattaacaaattggaccgaatgggctccaacccagccagggccctgcagcaaatgagctgtcaccactgactaaagaagagaaaactgc

SEQ ID NO: 434128 - DNA, 75 bp, Homo sapiens
cgacgtcatcatgctgaccaccaatcagatccgtaaggcccgatgagagaaagggaaagttaaggatgctggagc

SEQ ID NO: 434129 - DNA, 137 bp, Homo sapiens
accccagaatatcgaagatgaagcaaaagaacaaattcagtcccttctccatgaaatggtacacgcagaacatggtcctcttcctgatggatgggaacaagccatgactcaggatggagaaatttactatataaacc

SEQ ID NO: 434130 - DNA, 100 bp, Homo sapiens
aaatacccctttgaattaattatggctctgaagaagcatctgtagggaatccagaaggagcgttcatgaagatgttacaagcccggaagcagcacatgag

SEQ ID NO: 434131 - DNA, 75 bp, Homo sapiens
ctggagccatgaaggccttgtgctgaccaagctgctcacctcgaatgctgcaaagagactctgcagatagtgaaa

SEQ ID NO: 434132 - DNA, 75 bp, Homo sapiens
ggagcccggccccggggaactagggagcgtctccggctgcacagcgctcaggttgggggccgtcccgctcctaag

SEQ ID NO: 434133 - DNA, 74 bp, Homo sapiens
cattatgatattcacaggctagcaaaagtgatgcagaatcagcagagttcacatgagactctgaatatagtgga

SEQ ID NO: 434134 - DNA, 51 bp, Homo sapiens
tggctggtggaatatggccgcaaccaagatcaggcctttgtgacactaacc

SEQ ID NO: 434135 - DNA, 100 bp, Homo sapiens
agaacctctctcaaatagaaaatgtccatggatatgtcttgcagtctcatatttctcctctgaagaattttgaaaaccaacctggacaaggttcagatgc

SEQ ID NO: 434136 - DNA, 100 bp, Homo sapiens
ggctctgcgtgagtgtggtctacgagctgtttctcatctttatactcttccaggatcaacggccaccccgggaagtccacgcgcctggcgggcttgtgga

SEQ ID NO: 434137 - DNA, 75 bp, Homo sapiens
accgacaactccaccgtggcgctcgccaaaggtttacccaaggtccagcctagcccctaggcaccatgtcggaca

SEQ ID NO: 434138 - DNA, 75 bp, Homo sapiens
accagatgatgaccctgagcaaggaaaatctgaggccaacaaatggaattttcttgagcatgtttctaatcgttt

SEQ ID NO: 434139 - DNA, 100 bp, Homo sapiens
tactgaatgccgtgaaagtgacgccttcgctcaacgaggacctgcaggtggaagtgatgaagaagaaaaagtcagcactttttgaagtgtctgaggttat

SEQ ID NO: 434140 - DNA, 74 bp, Homo sapiens
caccgcggagccctgcaggcggttatgaagacagtatggagtttccagaccatagtagacatttgctacagtgt

SEQ ID NO: 434141 - DNA, 96 bp, Homo sapiens
gccgccaagatgatgtgcggggcgccctccgccacgcagccggccaccgccgagacccagcacatcgccgaccagtacgtcccggaggacctcctt

SEQ ID NO: 434142 - DNA, 100 bp, Homo sapiens
agacttatgagatctggcatcgacggcatgactactggctgctagccggcattataaatacatgatcatccttggtttggtcttcatcttccaatttgta

SEQ ID NO: 434143 - DNA, 97 bp, Homo sapiens
tacaagcctgagatctccagggagcagggtggttcagaatctggggagccttatattccaggtgtctttttcagacagtttctacctgtatcaccca

SEQ ID NO: 434144 - DNA, 82 bp, Homo sapiens
aaagaacctctggtgttgaaagatgatgatgtgcctgcagatatggttgcagaagaatcaggtcctggtgcacaaaatagtc

SEQ ID NO: 434145 - DNA, 79 bp, Homo sapiens
agaaggcagacaagcagcttttcagatgcaaatggtttgatgacaaatacaccttgaagctgaccttcatcagtgggag

SEQ ID NO: 434146 - DNA, 100 bp, Homo sapiens
cgggccctctggaccctggagtacaccccgcagcacagccgcgacttcaagagagaagactggcagtggagcatgcatctggagggcagagacggcaggc

SEQ ID NO: 434147 - DNA, 75 bp, Homo sapiens
gcagattttaatttcagtgactgaattaaaaggtgtcaagaagctcagaatgctgctctgttaaaagcgaaaatg

SEQ ID NO: 434148 - DNA, 74 bp, Homo sapiens
agacaggaggcagtagccaaacacccagcaaatgcagccctgaggatttggctactgcatataacaacaggggg

SEQ ID NO: 434149 - DNA, 100 bp, Homo sapiens
accattgacgccatgtcgggttattcgagtgaccgagaccgcggccgggaccgagggtctcctccgggctggggctgagcaagccctcggagtgaccgtg

SEQ ID NO: 434150 - DNA, 83 bp, Homo sapiens
ccgcaggagcacggatgccccccggagccgcgggctggcagtaagactttgaccccgacgcaggcttcagtgattgccgcgga

SEQ ID NO: 434151 - DNA, 101 bp, Homo sapiens
cagcggaggagcccgaccgacccggagtatgctgctgctgttccgctttgcgtcctcgctacaaacgcctggtggacaacatattccctgaagatccaaaa

SEQ ID NO: 434152 - DNA, 100 bp, Homo sapiens
taaccaaatattatggatcctatctgaaggctttgaagacaagattcccaaaaggagattctctgagatgcaaaatgaaagacgagaacaggcacagcgg

SEQ ID NO: 434153 - DNA, 90 bp, Homo sapiens
ggtggtgcgagtcttcggagcgaccccggcagaaatacaaacctggtcgatgtgatgatattttgaaatggaagcctcccagtctgaatt

SEQ ID NO: 434154 - DNA, 75 bp, Homo sapiens
acctgggccattggtgaaatctgcatgcagatggacaaggcgaccagccagctcctgttggagacagattgggag

SEQ ID NO: 434155 - DNA, 83 bp, Homo sapiens
ccagtttggaagagaagattgctgcgctctttgatcttgaatattatgtccatcagggccacgactgcttcccggtgctgttc

SEQ ID NO: 434156 - DNA, 116 bp, Homo sapiens
caccaaaggacaaactaagagaaacttggcgaaaggcaaagtttcagagactcctccactctctgggaatgacacggactccctctcctgcgacagtggcagttcggcaactagca

SEQ ID NO: 434157 - DNA, 100 bp, Homo sapiens
gaaattgaaattcttcttcgttatggacagcatccaaacattatcactctaaaggatgtttggataaatacctcggacattattttggttggtctccgag

SEQ ID NO: 434158 - DNA, 83 bp, Homo sapiens
ctcgcccagctcgcccagcgtccgccgcgcctcggccaagtgcaagaagaaacacacgctgctgtgccccgactttgcccgca

SEQ ID NO: 434159 - DNA, 98 bp, Homo sapiens
gctcagctgcttctctttcaaccaggactgcacgtgctggagaatctggtaaaagcaccattgtgaagcagatgaggatcctgcatgttaatgggttt

SEQ ID NO: 434160 - DNA, 137 bp, Homo sapiens
gagcaagaccaaaatttgaacaggttaatctgttggattctaatgcagttcatcacatcattcatgattttcagtggtggacttgctttgtgaagagacagttcatgaacaagagtctttcaggacctggacagtga

SEQ ID NO: 434161 - DNA, 100 bp, Homo sapiens
atccgcccgcaagagcgagccgcctgccccggtgcgcagacagagctattccagcaccagcagaggctgctttgaatgctgcatcaagtgtctgggagga

SEQ ID NO: 434162 - DNA, 90 bp, Homo sapiens
cctcgtggccgacggaacaatgaagggctacaccaagtccattgatatttggtctgtaggctgcattctggcagaaatgctttctaacag

SEQ ID NO: 434163 - DNA, 100 bp, Homo sapiens
ctccaatgggcctttccagcccgtggtccttctccatattcgaggaaatgaatggggtgctgaaaggaatgctctcagaatggttttcctccgggttcct

SEQ ID NO: 434164 - DNA, 100 bp, Homo sapiens
aattcctcaagtggacttggccatgattggttgtcctggacccaagccagaagcctctgcaaagcttccttccagacctgcagataactatgacaacttt

SEQ ID NO: 434165 - DNA, 100 bp, Homo sapiens
cctccgactactttctccttcaaggggttccaatttcatctgctgttgcaggcgtagcaataggattggtcaccaaaaccgatcctgagaagggtgaaat

SEQ ID NO: 434166 - DNA, 123 bp, Homo sapiens
gccgctcagccaccggggcctgccgcgcctgtcctggatcgacaccctctacagcagtgctggagaatctggtaaaagcaccattgtgaagcagatgaggatcctgcatgttaatgggtttaa

SEQ ID NO: 434167 - DNA, 100 bp, Homo sapiens
ggatgtgatgccagaggtcaacaaggttctggacaagatgaagtctttctgccaggaaaaaggtcactggtcagaacagcaagaagaaagtagctcttga

SEQ ID NO: 434168 - DNA, 75 bp, Homo sapiens
ggctttgtgatcacaaccactttctctgctaccagattttcagctgaactctcatctctcaacactggcaaatat

SEQ ID NO: 434169 - DNA, 98 bp, Homo sapiens
aagatcatctcttgtaaacagtcagacaatagtgagctggttagtgaaggtttttgtagaactcactaaagaacaagaggaggaagataatagttgtg

SEQ ID NO: 434170 - DNA, 50 bp, Homo sapiens
ctcggacgtagcccggcttgtattgggcactggagatattattgctgtca

SEQ ID NO: 434171 - DNA, 100 bp, Homo sapiens
gggcggtggcgcccgcgggacctgcggtgccatgtttcagaacagagtaagacccctggtaaagaagaactgaagatattatacagataccagatatagc

SEQ ID NO: 434172 - DNA, 74 bp, Homo sapiens
atctacttcctgtttggcacttcccggcacatctccgtggcttatgttcctgaggaagaattgaaggcagcaga

SEQ ID NO: 434173 - DNA, 87 bp, Homo sapiens
tgctgaaaatgatgttggaaatgcacaagctggagcccaactgataatccttgaacatggaagcaagatttccagatgtagcaaatg

SEQ ID NO: 434174 - DNA, 88 bp, Homo sapiens
cacgggcccggctgccggcccccgctctgccctgggctacggggaccacaagcccaagtcttccactgcagcccaggaggtaaagact

SEQ ID NO: 434175 - DNA, 80 bp, Homo sapiens
actgtgggctggtgtgtggaactgcaaacggggattcagcgtccgatcctttggaacagggactcacgtgaagcttccag

SEQ ID NO: 434176 - DNA, 101 bp, Homo sapiens
acctgaagacttcagccttgtcaggtagaaaatctggtgtattaactgtgaaaattttagagctgcatgaggaatgtgccatgcaagttgccatgtgtgag

SEQ ID NO: 434177 - DNA, 96 bp, Homo sapiens
tgtaaacaagaacttgagcaaatggaaatagaactcaaaaggctgcaacaagaggaagatgagaagtttttgtctgaagtttttgcacaattaaca

SEQ ID NO: 434178 - DNA, 50 bp, Homo sapiens
ggatttgttcccttagcagaaattatggcaatgaatcgctccctggctaa

SEQ ID NO: 434179 - DNA, 73 bp, Homo sapiens
aaaaataataattacatctgcaaagaccttatttccagaacagatctcggcccctttccaaacactcctgatg

SEQ ID NO: 434180 - DNA, 75 bp, Homo sapiens
tgaaagtgaaatgtcatgcctctgaaaatgaaggcaaaaatctccagccctacagagactgagcggtgcatcgag

SEQ ID NO: 434181 - DNA, 100 bp, Homo sapiens
gctcctttaaccccatcaccaacatgcacctgcgcatgtttgaggtggccagagatcacctacaccaaacagaatccaaaggccctattgtgcctttaaa

SEQ ID NO: 434182 - DNA, 75 bp, Homo sapiens
ccggatcagatgagcagattggttagtgaagttgatcgtggaacagcaggatgagcagttggagctggtctctgg

SEQ ID NO: 434183 - DNA, 51 bp, Homo sapiens
gcctgtcttctccttttacctcaacagggaccctgaagtggctgatggagg

SEQ ID NO: 434184 - DNA, 75 bp, Homo sapiens
aggatccggacccccgcaaggtcaacctgggagtgggagaaagtgaagtcactgcttttgctgtcttggatcaag

SEQ ID NO: 434185 - DNA, 82 bp, Homo sapiens
acagtgccctgagggccttcgagagctaccgcgccagacagcccctggcgaagcggtgctgcctccagcccagagatgccgc

SEQ ID NO: 434186 - DNA, 74 bp, Homo sapiens
ttcctcgagggcttccatgacgagagcacacagctcacccgacgactgccacccatcaaagaagctaagcctcg

SEQ ID NO: 434187 - DNA, 101 bp, Homo sapiens
cagcctcccgaatagctgggattacaggtatgtgaggagcagcgctgtgaggaggaagtcttccccctggccatgaactacctggatcgctacctgtcttg

SEQ ID NO: 434188 - DNA, 83 bp, Homo sapiens
tggaccctgagattgagctttttgtaaaggctataactcagatgacaacctctgtgagccatccctggagtttgaggtcccca

SEQ ID NO: 434189 - DNA, 46 bp, Homo sapiens
gggggtggtgacagcaggtctgagtgtgccatgcggagctgaatgc

SEQ ID NO: 434190 - DNA, 75 bp, Homo sapiens
gagaaaccgcctcgaaaacggagaagcagggaagacactgatcaaggtggcagaagctgaaaagcaactgggagc

SEQ ID NO: 434191 - DNA, 100 bp, Homo sapiens
cagcctcccaggtagctgggattacaggtaggagcaacggtgggaatgccctctgaggaatgcagtgatgtccatcagtcacctctcacccagagcctgg

SEQ ID NO: 434192 - DNA, 100 bp, Homo sapiens
acgccggtgatcatagccatccagaccttctgctaccagaaaaccttctccaccagaatccagctcacgctggccaggaggaggggggctgcctgccccg

SEQ ID NO: 434193 - DNA, 98 bp, Homo sapiens
aggaaccacacgctgatcatgatgttaaggacatgttcacttccagatctctcaaagctgttcagaacccttatggatgttcccaccgtaggagatgt

SEQ ID NO: 434194 - DNA, 76 bp, Homo sapiens
ataatttccccagagcgtcttgatccttttgcagatgaggaagaatacaagcgattgagtgaagcactagcagagg

SEQ ID NO: 434195 - DNA, 74 bp, Homo sapiens
gaagtacgagcgctgcctgatggccttcaagcatcccaatggagtcaaccagccccagtctgctaaccactgac

SEQ ID NO: 434196 - DNA, 82 bp, Homo sapiens
tcaaggttaattcgaaagtcttgtggaagatctggaagaaacaggcgtcagaaacagtggctttccaagaagtccacctatc

SEQ ID NO: 434197 - DNA, 100 bp, Homo sapiens
ctgaaagatggcggcggcgtctgtctctgcggcttctggttctcacttgtcggtctggaaatctctccaggcaccctgctttggccctctagaatacaga

SEQ ID NO: 434198 - DNA, 75 bp, Homo sapiens
ggcaagacgtgaacgttttttggacggcgatcaggatggtgatgagggtggggatatgagactttctactcggaa

SEQ ID NO: 434199 - DNA, 75 bp, Homo sapiens
tgatctgcccatcttgttactccctagcagtgtggtaaggtcagcccaaggccaaccccactgtcactctgttcc

SEQ ID NO: 434200 - DNA, 50 bp, Homo sapiens
aaatgtggcagcgcctgaaaggaatgtttggactggtctgaagagagcgg

SEQ ID NO: 434201 - DNA, 75 bp, Homo sapiens
gtttacaatgtgttttttgcaagatcaaggtttactttatcatcatcaagaaataagaagcatgctaaaaacaat

SEQ ID NO: 434202 - DNA, 75 bp, Homo sapiens
caggcgtgagcctccgcgcccggccgtcagagcaccataacatggtgtgggaagtgaagacaaatcagatgccta

SEQ ID NO: 434203 - DNA, 88 bp, Homo sapiens
cagcctcttgagtagctgggattacaggtactgggcctaatcgctacgtgcctctttggctatgatgcctatgtcaccttccccgttc

SEQ ID NO: 434204 - DNA, 100 bp, Homo sapiens
gaaagagaaaatcagttcgtggttgcattgtggatgcaaatctgagcgttctcaacttggttattgtaaaaaaagggagagaaggtacccaaagggaaaa

SEQ ID NO: 434205 - DNA, 100 bp, Homo sapiens
cttggcaccagatgctacagctgcagataaacgactcacagtactttgtgcaactgcagatagaagacctgactcgtaaactgcgcacaggagacctggg

SEQ ID NO: 434206 - DNA, 51 bp, Homo sapiens
ctccgttgactttgaccaaagggacaatgccctgtgcaccaaggtgccgga

SEQ ID NO: 434207 - DNA, 74 bp, Homo sapiens
tgcctcgcatgctgataacaattctgggcacggtgaagcccaatgcaaacaggaaaatgtctgatgaattttcg

SEQ ID NO: 434208 - DNA, 97 bp, Homo sapiens
gcgtccgcccgggtcgtggcggcgggcgcccagcgcgtggagcgatctctctttgagtcggcatggaagaaggagaaggacatcgtttccaaggaga

SEQ ID NO: 434209 - DNA, 74 bp, Homo sapiens
aacatgtctgcagcaagaatctgggcgacagatgcgaaagaaacgagttccagtgccaagacgggaaatgcatc

SEQ ID NO: 434210 - DNA, 82 bp, Homo sapiens
gggaaggaaggagagtgaagagacaattattcaaactgatgaagatgggtaatgctggctttcctggatttgttggaacttc

SEQ ID NO: 434211 - DNA, 75 bp, Homo sapiens
tgtgcactcacgctctgctggaagacctaccatcaaccttttacaagagcaaggaatatccttggaattaatata

SEQ ID NO: 434212 - DNA, 75 bp, Homo sapiens
ggaaaaactggagagcttcatcaaaaatagtgatagctttgataagttgtttacattcagagctctatcaataag

SEQ ID NO: 434213 - DNA, 97 bp, Homo sapiens
tggagcttcatccgggcacttcataagggatccgcagctgctcccgctctccaggttgggcagcccccttcccgaagcttctggacggaaggcccca

SEQ ID NO: 434214 - DNA, 100 bp, Homo sapiens
gtggtaacgacggcctcagcaggcggggaagatgaaaggatggtgacaaatatcccatggaaagtgataattcatttgatctgtttgattcctcccaggc

SEQ ID NO: 434215 - DNA, 98 bp, Homo sapiens
tttaattttagggtcctttatatagaagggagagtagaagttgattcaagtcagttgagacgccagttgtgtggaggaagtcaggccgccatagaaag

SEQ ID NO: 434216 - DNA, 74 bp, Homo sapiens
ggaattcccatagatatgtggaatatccctgggtatcagtatgtgtcacctgaaggcaattgtatagaacatgt

SEQ ID NO: 434217 - DNA, 100 bp, Homo sapiens
attgtcgtggagaagcggtctactccagtacagtgtggtctgtcatcaaaagtattcttaggaaagatggccccttggggttctaccatggactctcaag

SEQ ID NO: 434218 - DNA, 98 bp, Homo sapiens
aggccacgacccacgagatcatggggcccaagaaaaagcacctggactaacttggagcgtgatgcccagaagtgtgtgaactggtctgtgaccacaaa

SEQ ID NO: 434219 - DNA, 82 bp, Homo sapiens
ctggcgcggctgctggagagcaggaagtacatcctggtggtgcccctcatcgagctgccatcagtcatgctcttaaacgggg

SEQ ID NO: 434220 - DNA, 100 bp, Homo sapiens
ggctggaagctttatttctctgaagatggaagaagctcatttgattggctgaccgggagcagcactgacccgctggtcgaccacaccagtccctcatctg

SEQ ID NO: 434221 - DNA, 100 bp, Homo sapiens
cgcggcggcagcagcagtgagaggttgagaacttgttgcttagtaaccaagggaccattaagctgtgtgactttggcagtgccacgaccatctcgcacta

SEQ ID NO: 434222 - DNA, 75 bp, Homo sapiens
atgactttaattgtaatgtatgggacacgctaaaaggagatcgtgcagagataattgacgaccttgccaacctag

SEQ ID NO: 434223 - DNA, 97 bp, Homo sapiens
gaggatggctactatttcaccaatctgctgctttgctccccctgtggatgtaaccccttagctggcattttgcatctcaattggcttgtgatggagg

SEQ ID NO: 434224 - DNA, 74 bp, Homo sapiens
agcgcattgcctcacagtcacgccgcagcatggatgtgtcgcgccagagtgtaatggataggtaacagagaaga

SEQ ID NO: 434225 - DNA, 100 bp, Homo sapiens
acgggcgtcatctatagtccggaggacagccccagggcagaggcctctggtgaatatgtttacaaaccaaggaacagtgatccactttaacaaccctaaa

SEQ ID NO: 434226 - DNA, 74 bp, Homo sapiens
aagaaatccaagtatgaaatagcagttgaaactgagggatttgtgattgagcttcttctcacattggaatctgc

SEQ ID NO: 434227 - DNA, 99 bp, Homo sapiens
agaccctggagcctcagttggaagcagccgatccagcctgcggagcctgtggggcaggcgatcttcactctcctcctcggaccgttcaccttctttgac

SEQ ID NO: 434228 - DNA, 100 bp, Homo sapiens
aaaccgaatcgaaagagtccttggcgctactcttttgcctgacctgattcaaaaagtcctcacgtttgcactttcacccactttccttgtggaactgtcc

SEQ ID NO: 434229 - DNA, 82 bp, Homo sapiens
tcgcgcggcgtgccctgcttgtcacaggtgggaggctggaactatcaggttgtttgatgtgtgcacagtgtcacgaacagac

SEQ ID NO: 434230 - DNA, 90 bp, Homo sapiens
tgtacaccaaatgtgaaggtgatgaggttgaagatctctatgagcttttgaaacttgttaagagcttacaagaccctatgaaaaaattag

SEQ ID NO: 434231 - DNA, 87 bp, Homo sapiens
gaatcgaatctcttctccctccccttcttggatctttcgaagatggtttggctgccttggagatttggagatctgatgccacgatga

SEQ ID NO: 434232 - DNA, 75 bp, Homo sapiens
ggcggcgcgtcccccgagcttgctcaccatggatgatgatatcgccgcgctcgtcgtcgacaacggctccggcat

SEQ ID NO: 434233 - DNA, 100 bp, Homo sapiens
ttatgtctggaggtggcagcagaaatcctactccacccataggaagacccacgtccacacctactcctcctcagcttatggaaaagtatttctagttcgt

SEQ ID NO: 434234 - DNA, 100 bp, Homo sapiens
ggcttctgagacggcggcagcagcggcattcagcgtctgcttctgcgctttgcctgggagaggccctggtggcctcgttcctggcgcccggagtccctgc

SEQ ID NO: 434235 - DNA, 75 bp, Homo sapiens
attagctgggaccatggatggagaaggtccgtcagttggaatccaatcttcttcccaagcaccaaaaacatctaa

SEQ ID NO: 434236 - DNA, 100 bp, Homo sapiens
tcccagtgaccccaggctttttatggctgtgagacacgttaaaatttcagggaaaatgtttataggaggccttagctgggacactacaaagaaagatctg

SEQ ID NO: 434237 - DNA, 107 bp, Homo sapiens
gtctccagtgaatggttattttggaggaagtctgtatgctagacaaggagcttcaaaagcagtggactgtcttttggattcaaagtgggcaaaggccaagaaaggag

SEQ ID NO: 434238 - DNA, 99 bp, Homo sapiens
tgaacattcggtgcccaaaaaacaaaggatgagcacaagcctgggagatggcagtgatggaaatggcctgcccaggtgcccctggctcagcagtggggc

SEQ ID NO: 434239 - DNA, 87 bp, Homo sapiens
tagagaagaattttccaaatgaatttgcaaaacttactgtagggtatttctcaagctgccagatacgtttaccaacgactcatcaac

SEQ ID NO: 434240 - DNA, 95 bp, Homo sapiens
aagaccaagtacctgcagatcctgacctctctgatgagatggatcgacccagagtcccagagaaagaggacagtgcagaatgtcctggatctccg

SEQ ID NO: 434241 - DNA, 100 bp, Homo sapiens
caacggcccgtcgctgcccagggatgaagggcccccgaccccaagctctgccacgaaggtgccaccggagcttgaagaaatccgcaaatgtgggatgaaa

SEQ ID NO: 434242 - DNA, 100 bp, Homo sapiens
ttgattctcttatacgctacttttactcagagtttgaaggttgtgaccaaaagaggctccgatggtaaggttgaagttacaaaagaaggtgtgaagttgt

SEQ ID NO: 434243 - DNA, 100 bp, Homo sapiens
gagaaaaggcaacatcctgtcacaggccatgctctggcaaaaacacaatgcagatcttcgtgaagactctgactggtaagaccatcaccctcgaggttga

SEQ ID NO: 434244 - DNA, 94 bp, Homo sapiens
tgttacattaaatatgaacgtggctatgccttcatgacattgtatgcaaacctgttccattctttcttcgtggacaacccattccaaaaagaat

SEQ ID NO: 434245 - DNA, 99 bp, Homo sapiens
agatgcgcaaattcactccccagtacaaaggttccccctaaaggactcaaaacgtctaatccaatggttaaaagctgttcagagggataactggactcc

SEQ ID NO: 434246 - DNA, 100 bp, Homo sapiens
cgactcagtcagtctcttggtttggtctctaaaagtaaagggtggataatattaatgcagctgtgatggatttgaaaaaaaagaagatccgcagtctaag

SEQ ID NO: 434247 - DNA, 100 bp, Homo sapiens
agtgtggaccctattcctggtttgcagaacccttaggagaaatcttgagagtggacagcaattgtgaagatcgccagagagttctgtgtttcatcaccgc

SEQ ID NO: 434248 - DNA, 73 bp, Homo sapiens
ggagtaggcaaagttatcagaggagaaccactcgttttgactattattttatcactctttgtgaaacttcaca

SEQ ID NO: 434249 - DNA, 90 bp, Homo sapiens
accttatcacccggaacctgcaggtaaaggccgaggggcaaagaaaaggaaagcatctggctctgaaaatgaaggcgattataaccctgg

SEQ ID NO: 434250 - DNA, 96 bp, Homo sapiens
tcaagaaactgaagcaaaagatcagcgaggagcagcagcagctccagcaggcgctggctcctgctcagctcctgcccctcctaaagctgaagccaa

SEQ ID NO: 434251 - DNA, 100 bp, Homo sapiens
aaaaagagggcaaaactccaacaggagaacagcgaggagacggatgagaacgaggcggaggagcttgtattggttggtgatggtggtactggaaaaacga

SEQ ID NO: 434252 - DNA, 95 bp, Homo sapiens
cacactcctggaactgtacacctattggaacccttaaggattctcaaagttggattggtggaaacaatgaaccattgacaggctttacatggcga

SEQ ID NO: 434253 - DNA, 74 bp, Homo sapiens
gctggagatggccctgagagaagctcactctgagagctactcagagttgctgtttctccttgagatgcttttgg

SEQ ID NO: 434254 - DNA, 100 bp, Homo sapiens
gtggaagtgacagcagatttgctggatacgtgacatcaattgctgcaactgaacttgaagatgtgttcctccaagaaaagctggttatattgaagacctg

SEQ ID NO: 434255 - DNA, 76 bp, Homo sapiens
tctgtggttcaggactcccgacttgacacgatattttttgctaagcaggatgtacgaagtaggtccaaagttgttg

SEQ ID NO: 434256 - DNA, 83 bp, Homo sapiens
aaaaaacaagaaggatggattcaaggcatacttttttgatgcaccagagatggaccatctcccaacaactacagctactccaa

SEQ ID NO: 434257 - DNA, 102 bp, Homo sapiens
cgattgcttacatcctgcagggggtgctgaaggccctcgactacatccaccacatgggatatgtacacaggtcagtcattggcaccatgaactggaataaag

SEQ ID NO: 434258 - DNA, 82 bp, Homo sapiens
gcttgccctggtcttgctcggccgatgaagtgcagaggtttttttctggacgctgccaaggtctgcagagaattcaccgagc

SEQ ID NO: 434259 - DNA, 98 bp, Homo sapiens
ggacacacctccattggatttaaaagacagtcctcgtcagcactgactttcagctatggaatcggactgcaagatggaggaaggcgggaacctaggag

SEQ ID NO: 434260 - DNA, 75 bp, Homo sapiens
gcaaacaattcctactgcatcgtgggcatagcgtacaatgccaaaataggagtttgcctgagaatacagatcaac

SEQ ID NO: 434261 - DNA, 100 bp, Homo sapiens
gctgccggctggatgggaagttaatgtttacggcgaagtctactcaacgtttccaagtatcggttttatggagaacctgtaataaaagcatgtattgaaa

SEQ ID NO: 434262 - DNA, 100 bp, Homo sapiens
caccgcggagccgccgaaacctgcagaagtgtatgctgacttgtaaagtgaagaagccagtggtgctgcgggtgttcttttggggtagtgtctgggatcc

SEQ ID NO: 434263 - DNA, 98 bp, Homo sapiens
cggggccgaggccgcggagctcgcggaggcaaggccgaggataaggaggtgatgccactgttacaatatctcatcgatatactcccaaagagcagttg

SEQ ID NO: 434264 - DNA, 100 bp, Homo sapiens
cggagcgtcccagctgcgaggaggggtcgggccccggctcagtggtcccaggcagctcgggtgtcggaacccccagacagttcacgcgacaaagaatcac

SEQ ID NO: 434265 - DNA, 98 bp, Homo sapiens
agagcgtcacggcgtacgccctcatggggaaaatctccccggtgactttcaggcacttcgtcttagtaacatggccatggggaagacaaccacaggcc

SEQ ID NO: 434266 - DNA, 75 bp, Homo sapiens
gtctacttcctcagcagcaccttcaagcaggtgtgggcaagagcagtttactgttgcgttttgcagacaacactt

SEQ ID NO: 434267 - DNA, 80 bp, Homo sapiens
gggatgcggggcctggcggtcttcatctcggatatccgcaactgaagccatcttcgacaagagcacagggaaggttgttt

SEQ ID NO: 434268 - DNA, 74 bp, Homo sapiens
agcacattgcctggtaagatggcacttaagtattcatcgaagagtcaccccagtagcggtgatcacagacatga

SEQ ID NO: 434269 - DNA, 90 bp, Homo sapiens
gaggatctgataatcaagtgattcactgggaaatagaggataatcaggtcagcccaagactaccccgtcggtcattctgttcctgccgtc

SEQ ID NO: 434270 - DNA, 100 bp, Homo sapiens
ctcggaacagatgtatagtgatctgattaaaaagataactaatcacttagagagagtctcaaaggagctgcagttgagcatcatttggcatcgaacgttc

SEQ ID NO: 434271 - DNA, 99 bp, Homo sapiens
tgatcaggctgaggccgagaagcagtacgaagactcctgccgcgtataccaggcatccagccccgatgagctggttatattctgggcactaaatgaagg

SEQ ID NO: 434272 - DNA, 96 bp, Homo sapiens
caaggaaataaattagtggcagagtaagggtgacttggcgacattgactacagcaccgtgctcctcggcatgctggtgacgcaggacgtgcagctc

SEQ ID NO: 434273 - DNA, 105 bp, Homo sapiens
gacactgcgatgttctgcaggacaattgcaccgctttagagcttccaggaggccaagcattatggcagggagatgcacttatttacatggaaccagagaaacaag

SEQ ID NO: 434274 - DNA, 75 bp, Homo sapiens
ctaagactctgggacactcctgaagtcgggaaatgaatagcctaacatggcagaccagagacagcgctcactgtc

SEQ ID NO: 434275 - DNA, 50 bp, Homo sapiens
gccctccactcaacacaggaagggaggttatattcaaaagaaaaaggaac

SEQ ID NO: 434276 - DNA, 75 bp, Homo sapiens
cctgggccagagctcttcccttacgcaaccatacacactgctgctatggatatgctgggaggacctggtatcgaa

SEQ ID NO: 434277 - DNA, 100 bp, Homo sapiens
gcgccctcagcagctccctgcgggacctctcggaagccgctgctgaaatgggttgcggattgaacaagttagagaaacgtgatgaaaaacggcctgggaa

SEQ ID NO: 434278 - DNA, 75 bp, Homo sapiens
tgcatcagtaccggcggacacagccaggttcaaaccttgtactactcagctgatcacaagctgcttgatgggaac

SEQ ID NO: 434279 - DNA, 83 bp, Homo sapiens
cctcgcgcgcgaccgccgaatcgctcctgcagcagaggtcatcaacttccccttcccgacgcccccctccgtggaagcccttc

SEQ ID NO: 434280 - DNA, 75 bp, Homo sapiens
gtcagagcccggggacggcgaggccctcatgtaccacacggtgaaaggtgtagcagtcactcggcctacacccac

SEQ ID NO: 434281 - DNA, 90 bp, Homo sapiens
aggagccccagagctcaatgggggaccacagcatgcacttccttccagcagctacacaggcttgcagccaatttactggagcagggatga

SEQ ID NO: 434282 - DNA, 83 bp, Homo sapiens
aattgtagatcccttcagttcaaaacataatgtgattgattgtgcttcaagaagaccatagggaagaacgcattttcatcttg

SEQ ID NO: 434283 - DNA, 100 bp, Homo sapiens
gagaattgtggatattttggtggggtgaagaccccagttttgctgaccttattcaccatgacttatcaggccttttcagatattaatggcaaagttcaga

SEQ ID NO: 434284 - DNA, 75 bp, Homo sapiens
ggaggagacatcggcctctgcaggcttgccgaagaagggaggagcaggccgggctctcgccatgggtcactgtcg

SEQ ID NO: 434285 - DNA, 51 bp, Homo sapiens
aaaacatcaaagaggtctagcaaagttgtcatttacgtgctgaagcatatt

SEQ ID NO: 434286 - DNA, 101 bp, Homo sapiens
atgcagatctcccccacggcaagcagcagaccccctgcctgttctgtaacagggtactgcgttcaacagatcctgatcgcttccaggtaatgttctgctac

SEQ ID NO: 434287 - DNA, 82 bp, Homo sapiens
ctccccagggcccagtgcggactcgcctccgtgaaggcttcccagcagcggcttatggaccagtggcagcagcggcggtggc

SEQ ID NO: 434288 - DNA, 100 bp, Homo sapiens
ttagttctggggagcgcctcgtcgacatgagtgatgtggaggaaaacaacttcgagggcagatggtcgtggagtcggactttgtgaaatacgagggcaag

SEQ ID NO: 434289 - DNA, 98 bp, Homo sapiens
gtgggacctggttctctccatcgccttgtctgtggggtgcactgatcgggcccgggacacccagacagatgagattgtcgcactgaagaaggtgcgga

SEQ ID NO: 434290 - DNA, 100 bp, Homo sapiens
attcagtggtgttaaggattccaacaacaattccgatggcaaagccgttgccaaggtcgggaaagaggttaaagaagacacgcaagtatgatatcatcac

SEQ ID NO: 434291 - DNA, 98 bp, Homo sapiens
tctgtcaaatgaagaacactttcaagaaccagttttcggctttgtgagaaaccttaccatcaaacacgatggccagcaacgttaccaacaagacagat

SEQ ID NO: 434292 - DNA, 102 bp, Homo sapiens
gccgggagttacaccgccaccgccagaagagcttaaagcagcgcctgggtaagagtaacatccaggcacggttaggccgacccataggggccctggccaggg

SEQ ID NO: 434293 - DNA, 90 bp, Homo sapiens
ctggccacaggcagtacggcatggtgctcggaaatgcaacctcaccacaagtacaaagaccatctttcatggactactttgataagcaag

SEQ ID NO: 434294 - DNA, 82 bp, Homo sapiens
ccgcctggctccccatactagtcgccgtacttcctcctgtgctggttccaagacacagcgaatataatcctcagcacagcct

SEQ ID NO: 434295 - DNA, 75 bp, Homo sapiens
atgattagagacatactaatgtacatggaaataatgaagatgtttcattttcaagaccagcagatcttgacctta

SEQ ID NO: 434296 - DNA, 75 bp, Homo sapiens
cctgcactacgaggaagagtagggtggcccagttgaaatccttcccttcctctaccttggaagtgcctaccatgc

SEQ ID NO: 434297 - DNA, 75 bp, Homo sapiens
gccgccgcccgtctcctgtcgcgcagcttcctcccgcggagacccacatcaagggcttcacactgaacgatgctg

SEQ ID NO: 434298 - DNA, 83 bp, Homo sapiens
ttgaaagagaatgttctcagaatcaaggtctgctggagtttgctggaggtccactccagaccctgtttgcctgggtatcacca

SEQ ID NO: 434299 - DNA, 121 bp, Homo sapiens
cgaaatccttcctgtaccgcttatgccaggccgatcccgacctggactcagacaagtaacaaatgtggcaattattttggatctatcacctgtcatcataactggcttctgcttgtcatcc

SEQ ID NO: 434300 - DNA, 51 bp, Homo sapiens
aatggctgccgaaaacaagccggaagaggatgaaagtcctggacagactta

SEQ ID NO: 434301 - DNA, 98 bp, Homo sapiens
tgcaacccagcgagggacgcgggcagccatggccgaagcggcgcctgcccgggaagcaaaatgtggattcagcaaacaaattctggaaatactaaata

SEQ ID NO: 434302 - DNA, 82 bp, Homo sapiens
gtggcaaccagatcggtgccaaggtgacttaagagattaaaattaatttggttgctgttggttctgaacaaataatgagttc

SEQ ID NO: 434303 - DNA, 83 bp, Homo sapiens
agtgtttctccagcaggacctgagaatacaggaatcggtggtggaattatccatcagcatgaattgatccacggaagctcctt

SEQ ID NO: 434304 - DNA, 74 bp, Homo sapiens
tttgaagatccagaaactacaaggcaaatgcagtcaaccaggatattatcaactcactggtaacaacagtattc

SEQ ID NO: 434305 - DNA, 75 bp, Homo sapiens
cgagcgtcgccgccgccgccgccatgaacaactcgggcgccgacgagatcggatctgtgacttcctccgcggagc

SEQ ID NO: 434306 - DNA, 100 bp, Homo sapiens
acatcagaagtggcatcgaatatggcaagatttgatgggctacaatatgccttcacagttgttgatcacatagcatggtcatccactcacagcttaaaaa

SEQ ID NO: 434307 - DNA, 99 bp, Homo sapiens
gtcaacaacaacaaccacgccgaggcctacaacaacctggctgtgctggagatgcggaagggccacgttgaacaggactttgtttggagaagctgccta

SEQ ID NO: 434308 - DNA, 100 bp, Homo sapiens
tccgtatacggcttcactggcgcccaggtgggcaagttgccgtgcctggagatctcacaggtcctggaccggatcaaaggctcactgctgccccggcctg

SEQ ID NO: 434309 - DNA, 50 bp, Homo sapiens
caggtgccaggatctgcccggatccagcgtccagcagaacggctccatct

SEQ ID NO: 434310 - DNA, 100 bp, Homo sapiens
aacattcagtggcccaatggcatcaccctaggatggaaaaattcgagtcaccattcttgcacggagcacagaataccggaaaatccttaaccaaaatgag

SEQ ID NO: 434311 - DNA, 90 bp, Homo sapiens
gacctgactctctgaggctcattttgcagttgttgaaattgtccccgcagttttcaatcatggttgtgggactggaaaatatcttaaagt

SEQ ID NO: 434312 - DNA, 98 bp, Homo sapiens
ggccacaggcttagctgttaacgggaaagaacaccttccaccatgaccacctcagcaagttcccacttaaataaaggcatcaagcaggtgtacatgtc

SEQ ID NO: 434313 - DNA, 83 bp, Homo sapiens
ctgccatgtggcttgctcttctctactctggagaccatcacaggccagcatcctgccggagccttcacgtaaatgggtccagt

SEQ ID NO: 434314 - DNA, 50 bp, Homo sapiens
gcacctcgtcaccaaggccaagctgggatctagcaattgggaggcagcag

SEQ ID NO: 434315 - DNA, 76 bp, Homo sapiens
ctcctgtcgtccgttctctcaggctcccgttcaggtctcggcgcggaagatggccggcggcgtggacggccccatc

SEQ ID NO: 434316 - DNA, 75 bp, Homo sapiens
gccttgttagggcgtggcctgaggcttggataagtgggccttgaaaagatcttttgaggtcgaggaggtcgagac

SEQ ID NO: 434317 - DNA, 100 bp, Homo sapiens
caatctctttgttgtgcctgcactgaggaaaatgcagggcatcttggatcctcggccaaccatcatcaaagcaaggttccgccatggagtcatagttgca

SEQ ID NO: 434318 - DNA, 100 bp, Homo sapiens
aatatggaaactgaacagccagaagaaaccttccctaacactgaaaccaatggtgaatttgaatcatcctggcccagcgcagtggctcatgcctgtaatc

SEQ ID NO: 434319 - DNA, 100 bp, Homo sapiens
acgagtgcccattgcagtctgcgagaaggaacccagctccatcattgcttttgctctcagctatgatttaggcatagagaatcgtgatgccaccaacgac

SEQ ID NO: 434320 - DNA, 87 bp, Homo sapiens
aagtcaacagtctagcagatcagccagtctctttcatcatcaagcagacatactcaagaaacttgtgatactttctcactacatggt

SEQ ID NO: 434321 - DNA, 75 bp, Homo sapiens
gatcctgggctaccggtctgtgggatcgaatcatcaatttagttgttggcagcttaacatccttattgattctag

SEQ ID NO: 434322 - DNA, 82 bp, Homo sapiens
tcatggccatgtgctctgtgtaccagtctggaggagtcaacatgtggttggaataaaaacagggttgaatgagttccagaaa

SEQ ID NO: 434323 - DNA, 97 bp, Homo sapiens
ggtcggccgccgctccccgcctagtccacggagctcaatggcggcagtcgcgctgagggactcggctcagtcccgaaccgacagccacaagtggcgc

SEQ ID NO: 434324 - DNA, 98 bp, Homo sapiens
ggctctcggtccgggacgtgcgcttccccacgtcgcttgggggccacggcgcggacgccatgtatcttaaatagtgaagatggagaaatattcaataa

SEQ ID NO: 434325 - DNA, 88 bp, Homo sapiens
ggcaaagaggatgagggggaggaggccgcttcccccatgctgcagacttcattagaggggtggtagactcggaggatctccctctaaa

SEQ ID NO: 434326 - DNA, 83 bp, Homo sapiens
tgcaaatttacatacgagaatggcttgtgaaatcatgcctctgcaaagtttccaaccggaggccctatcggcagtactacgtg

SEQ ID NO: 434327 - DNA, 76 bp, Homo sapiens
ggactgagtactggattgtccggaattcatggggtgaaccatgggatgctttggagtctgcaatgaagaatggcct

SEQ ID NO: 434328 - DNA, 113 bp, Homo sapiens
ccagcttcttcttggggaaggtgtgtttcctcgccacaggtgccggggccagcagccctgcgcccaggacggcgctgcagccgcaggagtcggtgggcgcgggggccggcgag

SEQ ID NO: 434329 - DNA, 100 bp, Homo sapiens
gggctgatgagtgactgtgtcaggatgttcatcgccacgttccactttcctcaccccaaatatgtggacctgtacaagggagatgcacttatttacatgg

SEQ ID NO: 434330 - DNA, 100 bp, Homo sapiens
acagcgctgacacgcttgctcaccacaacgacattgggctggtggacgaagccattgataccaaatctctgttggatgcttcagaagaagcaattaaaaa

SEQ ID NO: 434331 - DNA, 90 bp, Homo sapiens
catggacatgtcctgtgtgtgacaagaaggctccctatgaatctcttatcattgatgggtgacagtgggaactggatcgagatcgcctat

SEQ ID NO: 434332 - DNA, 100 bp, Homo sapiens
atcgaagcggatttccgattgaatgtctctagtgatccctgaaaagttccagcatattttgcgagtactcaacaccaacatcgatgggcggcggaaaata

SEQ ID NO: 434333 - DNA, 119 bp, Homo sapiens
cagcatgtcctcaactttctgggcgttcatgatcctggccagcctgctcatcgcctactgcagtgcgcgcggagccatggttatcatgtcggagttcagcgcggaccccgcgggccagg

SEQ ID NO: 434334 - DNA, 100 bp, Homo sapiens
atgaccagtggctgagcaccgtctcccagtacgaccgggacaagtactggaaccgctttcgagaccttggtgctaacagtggtttgcacatcatcatctt

SEQ ID NO: 434335 - DNA, 100 bp, Homo sapiens
ttcctggaaggacaccccagttcgggcagctggtctaccctgctggaggcgcccaggacaggctgcctttctgcaccagtggagacttcgtgtccccagg

SEQ ID NO: 434336 - DNA, 75 bp, Homo sapiens
cacgaggcggcgggctggagacatggaccgcggcgagcaagtcttctcacaagactttcaggattaagcgattcc

SEQ ID NO: 434337 - DNA, 100 bp, Homo sapiens
gaaggagaagatgtgccgccgctgccaacgtcgagcggcgacggctggtttcttctgggtccattcaagagagtgtgaaagaccgagtgattgactcaag

SEQ ID NO: 434338 - DNA, 90 bp, Homo sapiens
cagaaatgagcatttcaagagaggacaaaataactaccccgaaaacagaggtgtcagagccaggccctcgggaccaaggatcacgtcatg

SEQ ID NO: 434339 - DNA, 98 bp, Homo sapiens
acagagggacaacaaaagcctcctacaagagtcctaccaaaagccgtcaccgatgggttgtatatactactgaaatgaatggcaaaaacacattctgg

SEQ ID NO: 434340 - DNA, 75 bp, Homo sapiens
cgggacctccagcgactcctggagatagactccggcaccgcgtccgtgctgcagcgccggtcccccaatgaggag

SEQ ID NO: 434341 - DNA, 102 bp, Homo sapiens
ctttgacttggtgttgaaagtgaaatgtcatgcctctgaaaatgaaggttcaatacttcttcaagatcttggataattagtggtgtggaaagtaaagaagtc

SEQ ID NO: 434342 - DNA, 97 bp, Homo sapiens
agtagtcgctgttggatcgggttctaaaggaaagggtgctgacaaccagggtgcaggagaacaaggtagaccagtgaggcagaatatgtatcgggga

SEQ ID NO: 434343 - DNA, 75 bp, Homo sapiens
cgaggagccctgttccaaagcctcctggaccgtccaagaagtgtctttcctgaagactatcttcccgtctcaaaa

SEQ ID NO: 434344 - DNA, 100 bp, Homo sapiens
cggaaagctgcccagccaccagcaaccccccagtttcaccagtgatcattaaagaatgggcagcttacaaaggaaagtctcctcaaaccccggaactggt

SEQ ID NO: 434345 - DNA, 97 bp, Homo sapiens
ctggatcagccacaaatgtacccccagtacacttactactatcctcattatctccaaaccaaggcatcgttggcttcacagtatgactgatgatcct

SEQ ID NO: 434346 - DNA, 130 bp, Homo sapiens
gggatgtctacctggtaatagaggacttgaagcagaaagcaagtgaatacgagtcagaagttgaggagctcaagcttgggaaaatggtgtgcattccttgtatcgtcattccagttctgctctggatcta

SEQ ID NO: 434347 - DNA, 75 bp, Homo sapiens
ccgcgggcccggccacggcggagccaaggtgccaagtcctgccctgccaacttcttggcagctgccgacgacaaa

SEQ ID NO: 434348 - DNA, 100 bp, Homo sapiens
ccaacaacttcaaagtaaaatcagtttaatttcagaaaaggagttgaactgaatgaccgactcttgggcagccaacttttggcctgtaccctctcccata

SEQ ID NO: 434349 - DNA, 50 bp, Homo sapiens
agtcagcagccggcagcagcagcggaagagaagctgaatttggacgacag

SEQ ID NO: 434350 - DNA, 100 bp, Homo sapiens
agtcacctgtactggaaatcagtttgctgaaattaatcaacgattcttgaagttgaagaaaaggacagccctttcttggcggagcacaaatatcccactt

SEQ ID NO: 434351 - DNA, 98 bp, Homo sapiens
cctccagttccatccatgttgctgcaaatgctgcaccacctcgtgagcgatgacgtctgcctgaaggtggtggagctctacctgaacgagaagaagcg

SEQ ID NO: 434352 - DNA, 75 bp, Homo sapiens
aggcatcacatgttggcaagataaagaccaaatggatgacctgcgagctcgtgacttcatggtcatgacgatttt

SEQ ID NO: 434353 - DNA, 75 bp, Homo sapiens
gtctcttctaagctgaataaagctgttttggaactgtcaggtacctcaaagcactcacagatgaatgcttctcac

SEQ ID NO: 434354 - DNA, 101 bp, Homo sapiens
atagacacaattatgcgtgttttgacaacggaatgaatctgaagtctgctgcagtaaaacacagaaggctttaaaatgttttcttgcataaaattcaaaac

SEQ ID NO: 434355 - DNA, 74 bp, Homo sapiens
atctgagggagaagcacaagatcatgcacagagagatgggatttcaccatgctactcaggcttgtcttgaactc

SEQ ID NO: 434356 - DNA, 83 bp, Homo sapiens
tggagtttgagtttcgaccggacggccccacatcaagaccatcttccaaggcattgctgcaaaagtgggaactggagaaccct

SEQ ID NO: 434357 - DNA, 100 bp, Homo sapiens
acaacatggaggccgtgaagaccttcaatagcgagtcactcagcctctgaagaagcttcgggttcagactcaggcagtcagtcggaaagtgagcagggaa

SEQ ID NO: 434358 - DNA, 75 bp, Homo sapiens
ggcctggagaagaaagatgttttgcctactgttgatccggcagtggaaattggaacatttgtgttacaaatcagg

SEQ ID NO: 434359 - DNA, 100 bp, Homo sapiens
ttttataacacttccctcaagtttttccttaataagccgatgcttgccgatgttgtcttcgaaattcaaggttgacagactaatggagttgcattttaaa

SEQ ID NO: 434360 - DNA, 90 bp, Homo sapiens
caaagctgtcctaggccaaccagagattcatctttcatgcagtgacatgttgataaaaaatgatgcaaaagctggcaggctgacagaggc

SEQ ID NO: 434361 - DNA, 95 bp, Homo sapiens
agaagatcattatggagcagagatcaggccaagtttggaatcactgggtatgctccgtatagtgattgtagctgttcctctggattcaccatctg

SEQ ID NO: 434362 - DNA, 75 bp, Homo sapiens
accattcgcctgatgaactctcaggaattgaatgatctggcacgggaccctccagcacagtgttcagcaggtcct

SEQ ID NO: 434363 - DNA, 96 bp, Homo sapiens
gcacggagcaaccccaagtcaccacaaaaacctatcgttagagtcttcctgcccaacaaacagaggacagtgccctgaatcgtgtgcacttacttg

SEQ ID NO: 434364 - DNA, 50 bp, Homo sapiens
atggatgtcctagaagtcagtctcagatgacttaattcagtgcacaaatg

SEQ ID NO: 434365 - DNA, 75 bp, Homo sapiens
gctgtcccagagacaacgagatgaactgagagtagttatcttgatggaattagaagttttgaagtcagctgaagc

SEQ ID NO: 434366 - DNA, 101 bp, Homo sapiens
aaacatgtgaacactcaagtgaagcaaaagccttccatgattactttttcagaagaagtgaagtcaagatgaagaaccatttgcttttctggggagtcctg

SEQ ID NO: 434367 - DNA, 50 bp, Homo sapiens
gatccggcagggctacgcctgcgaggagatggggttccgccatgttgccc

SEQ ID NO: 434368 - DNA, 100 bp, Homo sapiens
cagaatatgctaaacttttggccaagagaatgaaggagctgctgaaggagacgcggaaggagcacacgctgcgggcagtggagctgctctactccatctt

SEQ ID NO: 434369 - DNA, 100 bp, Homo sapiens
gcggactctgcctggggcgactcgggctccagccctgcccgggcgggcactgggctctccagggtcgaaggcaggggtgctggagaatctggtaaaagca

SEQ ID NO: 434370 - DNA, 100 bp, Homo sapiens
gagggaacatcttaatgaacctggctaccacatactgttgattgtgatgaaatgccagttgaagcacctgtcctgcgagcttaggggtgctacaagttga

SEQ ID NO: 434371 - DNA, 83 bp, Homo sapiens
atttatgaatttagccaaccatcatgcaatgtggaactctaggaagcgatgaaatctacattgctccttcaggagtgcaaaag

SEQ ID NO: 434372 - DNA, 90 bp, Homo sapiens
agtaaccctcactggagaatccagaggtttctacgataaagacagttcagggtggagttctagcaaagataaggatgcgtatagcagttt

SEQ ID NO: 434373 - DNA, 76 bp, Homo sapiens
aaaagctgctgcctatatgaagtctttgagaaagtatgaaatgcttcatgtcacacctccaatgagcccaccagat

SEQ ID NO: 434374 - DNA, 74 bp, Homo sapiens
ggtatctacgtgggggccaaggtgtacttcatctacgaggtgaccaagaatatggcccaggtgaccaaagccct

SEQ ID NO: 434375 - DNA, 83 bp, Homo sapiens
cggggaccgctgggaaggcgaggacgaggacgaggacgtcaagtgcaccaggtggcggagcgggtggaggccctggggcagtt

SEQ ID NO: 434376 - DNA, 75 bp, Homo sapiens
caccttggacaaattgaaaatcatagcaaccaagagtcaagagagtgattaccagccaattaagaaaaatgtgac

SEQ ID NO: 434377 - DNA, 100 bp, Homo sapiens
cgacatctttctgcttttcaagagttccgatttcatcactcgtgacttcactcagccatgaggaaaatgaagctcgggctggttaactgacttgctcagc

SEQ ID NO: 434378 - DNA, 50 bp, Homo sapiens
atcaaggaggaaggcctggttcttcaaggagagcgaagacctggagaaac

SEQ ID NO: 434379 - DNA, 75 bp, Homo sapiens
tgaggtacaggctcagtctgcggccaagactccgtcctgcaaggacaggctgcgggaggagctgcaggactgagg

SEQ ID NO: 434380 - DNA, 78 bp, Homo sapiens
aaaggatgctttagaaaaacacgatcagctcttagacaggtgaccaagaatatggcccaggtgaccaaagccctggac

SEQ ID NO: 434381 - DNA, 74 bp, Homo sapiens
ctaccagaccaccaagcagaacctctggtcatcatcctgaaccacccggggcagattagcgccggctactcccc

SEQ ID NO: 434382 - DNA, 82 bp, Homo sapiens
ttcgtaatgcgactcaaagctgcacggcagtctgtttatgaggaagaacatacttcgtttcttagatgcagaacgagatgtg

SEQ ID NO: 434383 - DNA, 100 bp, Homo sapiens
gcagggagcggagtaccagcacttcatccagcagtgcacagggcgaactttctgaccaagtatacaactacccagagggcctaggagaagtgctgtatag

SEQ ID NO: 434384 - DNA, 75 bp, Homo sapiens
ggacctggaggagggcatgctggccgtgggtcctggcattgatgtgcctgctccagacatgagcacaggtgagcg

SEQ ID NO: 434385 - DNA, 51 bp, Homo sapiens
ggcggcagcacgaaagtaccattggtattcatgggtagtttgaaatatcca

SEQ ID NO: 434386 - DNA, 90 bp, Homo sapiens
cttttcttcagaagctggtcgccgccggcagaaattgagaaagctgatgatcatctgcagcagcccttgcaaaaccaaaaaatactgaag

SEQ ID NO: 434387 - DNA, 75 bp, Homo sapiens
gtggggcgatgcttgtgaccctgcagctcctcaaaatccagctatgggacacagcaggacaagaacgattcagaa

SEQ ID NO: 434388 - DNA, 100 bp, Homo sapiens
gcagcttctgggccatgctgaccttggtgggcctggtcacccatgcaggttgactatagtcaatggggccaatggagccaagtgtatggaaacccacaac

SEQ ID NO: 434389 - DNA, 96 bp, Homo sapiens
gccgaaggaggggcaaagctcaagatggcggacaaaacgccaggcggatctcagaaggccagttcaaagatgttccatttaagcagacctcttcca

SEQ ID NO: 434390 - DNA, 75 bp, Homo sapiens
cgagtctgaggcggagggagtaatgctgataggaagatgtcttcaggaaatgctaaaattgggcaccctgccccc

SEQ ID NO: 434391 - DNA, 98 bp, Homo sapiens
cggagggtgatggcgagagcgagaggacccagtcccacatctcccaggtgaaagaaaagatgttgtcccggttaagagtagtttccaccacttgtact

SEQ ID NO: 434392 - DNA, 100 bp, Homo sapiens
tatgcggaggacagctctgatgaggaggttaaacccatccagagtaatggctgcggccttacccaggaccctgggggagttgcagctgtatagaatatta

SEQ ID NO: 434393 - DNA, 75 bp, Homo sapiens
gtggagggcctcgccatgtcctgctgcccggtacggacattgctgcaggagaagaggttgccatcaagcttgaat

SEQ ID NO: 434394 - DNA, 100 bp, Homo sapiens
agcctggtcaatttgtacctgcaggcctcctacacctacctctctctggatggatttgtcttcaagatgccatggaagcccacacatcccagctccaccc

SEQ ID NO: 434395 - DNA, 83 bp, Homo sapiens
aggagtttaaggagctgaaagcgcggaatgagaagtgttacctctgtaaatccctggtcccatttagagagtatcagtgtcat

SEQ ID NO: 434396 - DNA, 100 bp, Homo sapiens
cactggcccctcatgtaacctcagagatctgggcaggtagagatggattcctggaaatacctcctcaaggccagtgtagagccctcaatcacccactgcc

SEQ ID NO: 434397 - DNA, 75 bp, Homo sapiens
aatacacctctgattttaatcagttctgcgtttgaaaggaaacccgcaagaagttgagaactttaagaagctaaa

SEQ ID NO: 434398 - DNA, 83 bp, Homo sapiens
cctttcggcttctgagacggcggcagcagcggcattcagacttaattcagtgcacaaatgagatgaatgtgaacatcccacag

SEQ ID NO: 434399 - DNA, 74 bp, Homo sapiens
agtcttcaggagagcctagatgagctcatacaggtcagtatgggaatcctttaaataaatatatcagacattat

SEQ ID NO: 434400 - DNA, 83 bp, Homo sapiens
gctgtaagccggcctttgtcagagccatcatggagcctggagaaagttcttgtggaattcagtcacaaggagttgtttgattt

SEQ ID NO: 434401 - DNA, 87 bp, Homo sapiens
gctctgtaccaactgccggaaagtgctgcggaagccaacatcccatgcaccatcgtggagactggctggatgccctgtgctctatca

SEQ ID NO: 434402 - DNA, 98 bp, Homo sapiens
ctgagcagaggacgacatgttgcttttcgtggagctctgcggccgtcacgatgttctggaagtttgacttgaacaccacgtcccatgttgacaagctg

SEQ ID NO: 434403 - DNA, 100 bp, Homo sapiens
tgaaatctggcatattagcgctagccctgcagacagaggtgtgctgacgacctgctacaacagaagttttcaaaattcacttctacagatcgtaattcca

SEQ ID NO: 434404 - DNA, 96 bp, Homo sapiens
agggtttgatgaaggtggaggcagcgcggctctcaggaactgctgctggagtttgaatcgaaaatgcggaagagggagcacgaattccgtctgcag

SEQ ID NO: 434405 - DNA, 75 bp, Homo sapiens
ccgccgccgggactcccgtcccagcagatcaatgttaatgacagcctgtgaccttggagccgtgaccaaaccgtg

SEQ ID NO: 434406 - DNA, 87 bp, Homo sapiens
gctttacctcgctgaccctatgaagttttcggctttgtgagaaaccttaccatcaaacacgatggccagcaacgttaccaacaagac

SEQ ID NO: 434407 - DNA, 86 bp, Homo sapiens
cgccagcccgtgccgcgagcgcggcctgcaggagatagcctgggctggaagctcttctacgtcacaggctgcctgtttgtggctgt

SEQ ID NO: 434408 - DNA, 87 bp, Homo sapiens
cagctgccgcgactgggaggagcgccggaacgccgaggcccaggcaaaagctgtgcctcacttctgcgggttgaaccctttgtatgt

SEQ ID NO: 434409 - DNA, 74 bp, Homo sapiens
gaggcagccaagctcatggcctgccactgcgtgcgtccaggtgcaggtacagcagtctccgcaacaggtctcgg

SEQ ID NO: 434410 - DNA, 80 bp, Homo sapiens
ttgatattcttcataaagactcatcacttgggcgctgagatgcgtctggagagccagagggcctgcctgaaggaatcacc

SEQ ID NO: 434411 - DNA, 90 bp, Homo sapiens
ctttgagggacccccattcaagttcaagttcacaattggcacccaacatgagtgaagtttcctgcaagaaacgggacgactatttggaat

SEQ ID NO: 434412 - DNA, 50 bp, Homo sapiens
cggagctgtgcgagagcctcctcacttggaaagaagatcttctggagcca

SEQ ID NO: 434413 - DNA, 75 bp, Homo sapiens
gggatgtgaaaactctgttactgaagggaatgtttaattcagccttggaagtggccaaatttgaaggtgctgtga

SEQ ID NO: 434414 - DNA, 90 bp, Homo sapiens
acttttgacacggctttggaaacgacgtcatgtgttagacctgcctagagctggaacgttacctccagagcgagccctgctatgtttcag

SEQ ID NO: 434415 - DNA, 74 bp, Homo sapiens
gcttgacgcgctggagcttgagagatcctgacagcgagcggcgatggcacatgtgccctgtgggacgtggagag

SEQ ID NO: 434416 - DNA, 100 bp, Homo sapiens
tcaggaccgggcctcaaaatggccacacgcgtacccccgtagcggaaaaacgccgagacgcatccagagctttcgtgaccggggactgttctgaagcagg

SEQ ID NO: 434417 - DNA, 100 bp, Homo sapiens
cggctcatgttctgggacttaggagggcaggaagagctgcagtctttgtgggacaaggtgcagaggccaagaccgttttgcccaagaaggagaaaatgaa

SEQ ID NO: 434418 - DNA, 98 bp, Homo sapiens
gtcgttcccgctgcgctaggggaagcgggcaggactacaaagctgatgaagacccagcattattccagtcagtcaagaccaagagaggccctttggga

SEQ ID NO: 434419 - DNA, 100 bp, Homo sapiens
tgactatgagtatgagctattatagaaaccatggtggagagtatagtgaagatgatgtaaatgaattagtgaaggaagatgaagtggatggtgaagagca

SEQ ID NO: 434420 - DNA, 82 bp, Homo sapiens
tgcctttgatgattttcaagagagttgtgctatgatgtggcaaaagggagaagcatgacactggccaacactgcgtccagca

SEQ ID NO: 434421 - DNA, 50 bp, Homo sapiens
tactgattgagctacgaggaccaagattagtgacaagagctggggttagg

SEQ ID NO: 434422 - DNA, 121 bp, Homo sapiens
ctttctacctgcccggcctggcgcccgtcaacttctgcgacgaagaaaaaaagagcgacgagtgcaagaacctaaaggcagacccagaagagctttttacaaaactagagaaaattgggaa

SEQ ID NO: 434423 - DNA, 73 bp, Homo sapiens
tcagtatcgctacttcaaagggtactttttagaaccaaagacatggcagctactgcatcttcatgtgtcacaa

SEQ ID NO: 434424 - DNA, 100 bp, Homo sapiens
taagatggcgacgcctttggcggtaaattcgggatgctgaaaacgccattcaacagatgggtggccagtggcttggtggaagacaaatcagaactaactg

SEQ ID NO: 434425 - DNA, 82 bp, Homo sapiens
gccagtgcggcatcacctcctccaagaccgtgctggtctttctcaacctcatcttctgggcatgtactggcattgaaaacat

SEQ ID NO: 434426 - DNA, 75 bp, Homo sapiens
cacaccatgaatctactaaagcagcacctggagattactggtgggcaggctattgagggcacctacattgacaag

SEQ ID NO: 434427 - DNA, 101 bp, Homo sapiens
tgctctaactcatatgctttacacagccattgccttcttaggtgtggcagatcacaaggtgttggagcgggccggagagaagtagagtgggctgcgaggag

SEQ ID NO: 434428 - DNA, 75 bp, Homo sapiens
gccggagtgaccccgccgccgccagccccagcccgctagccgcggaccaacagcagaatggggaaatggagagag

SEQ ID NO: 434429 - DNA, 100 bp, Homo sapiens
cccagattatgcttttggaaaatgagaacaaaaatttaaagaaagatttgaagcactacaaacaagcagctgagctgttcacggaagaccaggatgtaga

SEQ ID NO: 434430 - DNA, 74 bp, Homo sapiens
cgggtgtggacgccactacagttcatcaacatcaactacgtccctctgaagggcccaggagacaccagcggggg

SEQ ID NO: 434431 - DNA, 100 bp, Homo sapiens
aagcagtgacggaggagcttgtaccaccgagccccccaagatgaacccagtggtggagccactgtcctggatgctgggcacctggctgtcggacccacct

SEQ ID NO: 434432 - DNA, 75 bp, Homo sapiens
actcctacgtcaggccagagaggtagatgatgagctggagatcaaggcctactatgcaggccacgtgctgggggc

SEQ ID NO: 434433 - DNA, 90 bp, Homo sapiens
gcaggaagagctgcagtctttgtgggacaagcaatgcagagtccctggacaggctcctgccacctgtgggcactgggcgctctccccgga

SEQ ID NO: 434434 - DNA, 98 bp, Homo sapiens
cggaacgcaggagacacaagaagcggatccaggtctcatcctcgtactgggtctgtccagacaagcccatcaagtactccagtcgcaggacgaagggg

SEQ ID NO: 434435 - DNA, 100 bp, Homo sapiens
ccaggcctgcgtccgagtctccgccgctgcgggcccgctccgacgcggaagaggtgctgatactcaaagaaggtttaagttgtctgatctctctataaat

SEQ ID NO: 434436 - DNA, 75 bp, Homo sapiens
catttctgaagaatctgaagagctggatcagaagacattcagcattcccttgaaggtagtggacccagatcatcc

SEQ ID NO: 434437 - DNA, 146 bp, Homo sapiens
cgcccccagcaatccccggctcctgcgggtggcgctgctgctcctgctcctggtggccgccagccggcgcgcagcagattttaacctttgagaccaagaacccgtcggaattagcagaacgtttgcgctctgtttgtgggaatcag

SEQ ID NO: 434438 - DNA, 75 bp, Homo sapiens
ggaccagaggaactcagccctgattgcgttttcaggactctacatcctgtccttcactgtcatcatggtggggtt

SEQ ID NO: 434439 - DNA, 97 bp, Homo sapiens
tggccacaagagcgaggagaagcgagaaaagatgaaacggaccctataacgaaggaggcccaacttcattcaataaggagcctgacggatttatccc

SEQ ID NO: 434440 - DNA, 100 bp, Homo sapiens
gaactccctcaagtttcatttgtgaaggtcctctggtgatgttcttgagacgttcaatttcttagaaaatgccgatgacagtgatgaagatgaggaaaat

SEQ ID NO: 434441 - DNA, 125 bp, Homo sapiens
ctgagtttcccacttgattacccgttaagtcccccaaagatgagatttacctgtgagatgtttcatcccaacaggccgcgatgggcctcttggaacattggtgtgttcatctgcattcgatgtgc

SEQ ID NO: 434442 - DNA, 83 bp, Homo sapiens
aggaagtttgtcctgtcctggatcagtttctttgtcatgtagccaagactggagaaacaatcatgttggcagataaattgaac

SEQ ID NO: 434443 - DNA, 100 bp, Homo sapiens
aacttgcagttgaaggagtataacacaggagtctggttggaagcaaatgtttttttaatggacttgcatctcctcaccttgatcaggactaaaggacgga

SEQ ID NO: 434444 - DNA, 82 bp, Homo sapiens
cgggagatcccaggcggtgacagagtggagccatggctagaggtcgagtcccagacaccagaagtctgaatttggagaaggc

SEQ ID NO: 434445 - DNA, 100 bp, Homo sapiens
aggatatctttggtaggcatcatgttctgtttacttgaaccagtgagaagatggccgagcaagcaaggataagtgacactggggttgggaaatcaagcat

SEQ ID NO: 434446 - DNA, 100 bp, Homo sapiens
ctcagccggttgcttctgtcctgatcatgaactgcaggattggtcaccccgtcctcaagaggtcatctgtgatccgcaggggctggctgaccatcaacaa

SEQ ID NO: 434447 - DNA, 75 bp, Homo sapiens
tgcaagactgtccgtgtggaccctgactcacaggtgctgggtaggccaggtttcagcatcgcagacaagaagcgc

SEQ ID NO: 434448 - DNA, 88 bp, Homo sapiens
gcgggactaagagagccgaggtcgctccccatccactctcacaagatggccctctacctgacccaagtatgatccgtggcagtgtgcc

SEQ ID NO: 434449 - DNA, 100 bp, Homo sapiens
tcttgtcactttagccactgctactacagaaaccatcatagcctttgcctgggaaccaaatggaagtaagtttgctgtgctgcacggagaggctccgcgg

SEQ ID NO: 434450 - DNA, 100 bp, Homo sapiens
ccagtgccagaaacagaagactggcccagcagatggagaatagaccctctgtccaggcagcattaaaacttaagcagggggctagagagctgaaggagag

SEQ ID NO: 434451 - DNA, 100 bp, Homo sapiens
tgcaattgagaaacaggcacacaagtgtgaggagttgctaaatgctcagttcaattttgtggggaaattgcttggaccaagaggaaactccttgaagagg

SEQ ID NO: 434452 - DNA, 98 bp, Homo sapiens
actaggaatctatgatgctgatggtgatggagattttgatgtggatgatgccaaagttttattagggcgatgctggatcttttcttgtctgaatgtta

SEQ ID NO: 434453 - DNA, 80 bp, Homo sapiens
cttgggcgggggatgtgagcgctgagcccttggcagctctccctgtccagccgcctgcagctgaccctgtaccagtacaa

SEQ ID NO: 434454 - DNA, 82 bp, Homo sapiens
ccggggactgttgacagccagaacctttaagcgtaacagagtcacctggaagatgatccctatgatcttgaagatgtttctg

SEQ ID NO: 434455 - DNA, 76 bp, Homo sapiens
atctacatccaccgagtcggccggacggcccgtgcagacaaagatcattccactcagcctgggacgatggggagga

SEQ ID NO: 434456 - DNA, 75 bp, Homo sapiens
tgaagcaaaggccggggcagacctcctaactcagcgtaaaccagatcactgacggtggggtaaaggtgctaagcg

SEQ ID NO: 434457 - DNA, 100 bp, Homo sapiens
ttgacccagcagggactccaaggggtggagctgggaacattcctcataaagcgagtcgtcaaggagttgcagcaatacctgaacaccttctatggctgcc

SEQ ID NO: 434458 - DNA, 76 bp, Homo sapiens
ggacatgtttgatcagcttttgcaagcagtggaaatttaatggagccaccatttcagaaccaaaagaaatttggaa

SEQ ID NO: 434459 - DNA, 75 bp, Homo sapiens
tcacgcaaacaacttatcagtagtgacttacagtaaggttgcagagcctgaggcctgtgatcagatgtacgagag

SEQ ID NO: 434460 - DNA, 85 bp, Homo sapiens
gcctggtgctctgcgtcctcatcgggcttatgttcgagatctgggttggaatttgcccctgacaaataataaaatgatgagtgat

SEQ ID NO: 434461 - DNA, 100 bp, Homo sapiens
atcaaatccaactatcaaggcctcccagtacgttgtgtgaagagtatcattcgacaggtctattctggataagcaggttttgtgaagacatttattcttt

SEQ ID NO: 434462 - DNA, 101 bp, Homo sapiens
agcctccgcggtggatacgtcgccatcttggatccgcgggacaagaaaattcatgcgcatttgctggacaaattatgcaaagaaatagagaaagatctgcg

SEQ ID NO: 434463 - DNA, 83 bp, Homo sapiens
cctccgcagaggcccccgacggagacaaggacggtgtcgtgaaaactacccctaaaagccaaaatgggaaaggaaaagactca

SEQ ID NO: 434464 - DNA, 100 bp, Homo sapiens
aagaaaaagacctgtggctattaagatagtcaccaggagactaaagtccatcaaaaacatccagaaaattaccaagtctatgaaaatggtagcggcagca

SEQ ID NO: 434465 - DNA, 100 bp, Homo sapiens
ctcggctgcgccgcgtgtcctcggagcgcggtccctgtattggtctcctgctcctagagtgacaaagcataaatcatggacaccagagaataaggtggac

SEQ ID NO: 434466 - DNA, 134 bp, Homo sapiens
aagactccaagtaaggaagaaattgagaaagaatgtgaagataccagtttgcgtcaggagacacagcttatggtgctgctatctggagtaatagctttcatggtgaacttatcaatttattggatcattgggaa

SEQ ID NO: 434467 - DNA, 100 bp, Homo sapiens
gaaacatctcaccaatttcaaatctgaccatatactccttgacgacagggactaccaccttcaccttcatgcccacaaggtgtcacactgcaaggctgag

SEQ ID NO: 434468 - DNA, 87 bp, Homo sapiens
aaaagctgcacttgaggcccagaatgcactgcacaatattaaaactttacctgggatggactcaccctgtcacccaggttggactgc

SEQ ID NO: 434469 - DNA, 98 bp, Homo sapiens
cggagcagaggaaccacacgctgatcatgctgaagagtctgctgcttctggagcaaagggagatctggctgctagtgaccgatgtcactctgcaaacg

SEQ ID NO: 434470 - DNA, 98 bp, Homo sapiens
attcagtccttcacacagttccctggaaatgcaacagcattattgagaaaagcccttacagaagagtgtggccgtaggtcagctattcacagtagtga

SEQ ID NO: 434471 - DNA, 90 bp, Homo sapiens
ggtgacggatgtgaagaataagctgcagacgcagctggcgaagcacatcccgctctgggctttaaacgtgacccctcgcctcgactcgcc

SEQ ID NO: 434472 - DNA, 87 bp, Homo sapiens
aacttggaaatgacattggcatccagattatccactgcagtttatacagtgggtccagattatgcccatgctgaagctcgaaaatct

SEQ ID NO: 434473 - DNA, 51 bp, Homo sapiens
ctgaccatatcccatggtaccgctgaagaactgaaactggccacccagctg

SEQ ID NO: 434474 - DNA, 72 bp, Homo sapiens
gaagcaaagaaattggcttctgcctctgcaaagctaaaggactgactgcattgcacagatgatggatattta

SEQ ID NO: 434475 - DNA, 90 bp, Homo sapiens
atgcctcaatttgctggatttaagcactgctgcactttatgagctggagcagatccgcagggacatccgagacttccggtctagcgcggg

SEQ ID NO: 434476 - DNA, 98 bp, Homo sapiens
tggggggctccaacatgaacaagaagagtgggcggcctgaagagctggtgtcctgcgcagactgtggacgctctgggtctcctatggacagaagtgcg

SEQ ID NO: 434477 - DNA, 78 bp, Homo sapiens
ctggaatggcaagcgcagcaacaacagagagcacgtgatagggccagatttgagtgtgtgaatttttgagtgaaacct

SEQ ID NO: 434478 - DNA, 50 bp, Homo sapiens
aggaaagccattgctgaaagcctgaatgtgctggagaatgccgaaggtgc

SEQ ID NO: 434479 - DNA, 75 bp, Homo sapiens
cgtcttcatcctgacgggaatctctgtcttcctggctcccatcctaaaggtgaaaggtgtagcagtcactcggcc

SEQ ID NO: 434480 - DNA, 100 bp, Homo sapiens
agcaaggaggccaacgccaacggttccagcccaggtgtaattgaaaagtgatcctctcttcagagatgtcaaaaacaaacaaatccaagtctggatctcg

SEQ ID NO: 434481 - DNA, 83 bp, Homo sapiens
tgtcttcaaagaatattaaaaaatctggagggactccaacttcaatgtttggtgccctggttgtcagatgttggaaagcagta

SEQ ID NO: 434482 - DNA, 100 bp, Homo sapiens
gagatgaggaagctggttctctcggggttcttggccagcgaagagatctacattaaccagctggaagccctgttgctgaaatggtggagtcaatgaagaa

SEQ ID NO: 434483 - DNA, 82 bp, Homo sapiens
tgaaatcagaggagatgtaactatcgcggaagatccatccaaaagctatgtgaaattacgagactttgtgcttgtgaagctt

SEQ ID NO: 434484 - DNA, 100 bp, Homo sapiens
ggcggaggtcgataagctggaactgatggcaagataacccctgtgacagaaggctactgttgctgtaacaaagggcatacatacattttcaagaactgca

SEQ ID NO: 434485 - DNA, 100 bp, Homo sapiens
gcagaggctcctttaagacggtctacaaaggtctggacactgaaaccaccgtggaagtcgcctggtgtgaactgcaggtttggaattacaagcttcggcg

SEQ ID NO: 434486 - DNA, 98 bp, Homo sapiens
tggctaaaagtgcggaggtcaaactggcaatatttgggagagcaggcgtgggcaagtcagcacgtcagctaactgttcagatgatgcaaaatcctcag

SEQ ID NO: 434487 - DNA, 119 bp, Homo sapiens
cggcgcgatggagcagcgaaaacgtggttgtagagttccgtgactcccagaatgattacggacctgaagccaaagaacaagatgcgctagtggacagattgctgaccaggggcttgaga

SEQ ID NO: 434488 - DNA, 50 bp, Homo sapiens
cctggaccagcagaaacctagagtggagtatagtcatggccaacagcaaa

SEQ ID NO: 434489 - DNA, 98 bp, Homo sapiens
gctgcagccccggctgcccactcgcctcacctgagcctggccatgcgatgatggacctactggttgaactttgccttcagaaccacctgaatccatcc

SEQ ID NO: 434490 - DNA, 75 bp, Homo sapiens
ttcttctgtcgccggcttcagcagcccgcgcccgggcagattgtgaataagtggaatacagctctcattggcctt

SEQ ID NO: 434491 - DNA, 100 bp, Homo sapiens
aggttgcatttcctgaaggggaagagcaagatgcagtcagtggaggcttatgggataaaagcacaaaggtctgctgatttctcaccagcattcttatcta

SEQ ID NO: 434492 - DNA, 75 bp, Homo sapiens
aagctgcaccagcttctaaccgagttgtatcagagtaagatggacggtagctttgattgtgattgtggtgagctg

SEQ ID NO: 434493 - DNA, 88 bp, Homo sapiens
ttacatcttcctgaatcgagcagagaaactgatcaatatattttctgctatcaagtcatcctttatgtcctgacacgtcttcaagcag

SEQ ID NO: 434494 - DNA, 100 bp, Homo sapiens
tgtctgtatacctgcaaggaggggctggacctgcaggtcctcgaagacagtggcagaggcgtgcagtatttcactcagctgtccgaggacaagctctggg

SEQ ID NO: 434495 - DNA, 90 bp, Homo sapiens
gcgaagctggaatctgcctctgtcacgggggctggtgcctcacgggtttgtgtcctagacaggtgtaatggataggtaacagagaagacc

SEQ ID NO: 434496 - DNA, 80 bp, Homo sapiens
tggaaagagtgaagaagaatcaagaaaatattagctcgatcccctgtaagcagcttacagattcgctatgatcaaccagg

SEQ ID NO: 434497 - DNA, 100 bp, Homo sapiens
ctgatggagcgcttcaccgacgacaccttctgcgaggcctgcaagtccaccgtgggtgaaaggtgtagcagtcactcggcctacacccacagcatcgacc

SEQ ID NO: 434498 - DNA, 98 bp, Homo sapiens
aacctttgccctctgttccagaagagaaaaagcccaggcataaaatcatctccatattctcaggcacagagaaagatgcggaaaacgccatgcggtac

SEQ ID NO: 434499 - DNA, 98 bp, Homo sapiens
gagaacaatatggcggatggcgaggagccaccggcatgggctgcaggagccgcggcgggtggaggagctgcagaaccgcatcgccagctgcctgaagg

SEQ ID NO: 434500 - DNA, 82 bp, Homo sapiens
cgggacctgcatggccaggcagagtcagcagctgcagtgtggaaggtgtccctggccagtgtccttccacctgtccacaagc

SEQ ID NO: 434501 - DNA, 83 bp, Homo sapiens
aagctttggaagatgcagatgagaaggttcagttggcaaaccagatatatgacttggaattgaatgatctggcacgggaccct

SEQ ID NO: 434502 - DNA, 100 bp, Homo sapiens
ctgctgcacagaaattaatgcgaacagacagacttgaggaatccttcaactgctttctaccaagcgttccatttgaacacgttaaaggaatcaaagagcc

SEQ ID NO: 434503 - DNA, 99 bp, Homo sapiens
taggatttgttagaaaggagacccgactgcaactgctggattgctgcaaggctgagggacgagaacgaggagagcctgacaaggagctgaatcctaaga

SEQ ID NO: 434504 - DNA, 87 bp, Homo sapiens
gtaaaccgaatccagaagcaaatggctgcttttaaagaggcacaagaccagttgcacaatgccctgaatcttaataggcacgatctg

SEQ ID NO: 434505 - DNA, 100 bp, Homo sapiens
gtttaaagccactgcattttggcatgatttgttatgcagtcgtagataaccagaaaacatcggatttacattttaagtggactaaagaggatggacatag

SEQ ID NO: 434506 - DNA, 50 bp, Homo sapiens
gtgatcagttcacctttgaatttatgaaacatgccagcagaagcattcac

SEQ ID NO: 434507 - DNA, 96 bp, Homo sapiens
ggtggagtgcaactaccactgctaccacgagaaggacccggacggtgtctggggaagccaatgaaactcagattgcagaagcactgaagcgttaca

SEQ ID NO: 434508 - DNA, 90 bp, Homo sapiens
ttcttctaaatcaggaatggattgaaatctaatgaaccgaaactttgggaatttgaagtgattgcccagataaagctcttacagtctgcc

SEQ ID NO: 434509 - DNA, 100 bp, Homo sapiens
catcggctacgcgcccacttggcgggccctggctggggatgtgcgagatgaggacggggacttggttgccttttccagtgacgaggaattgacaatggcc

SEQ ID NO: 434510 - DNA, 75 bp, Homo sapiens
cacatcagcgaccgggagaacatagacgctgtgattgggttattatacccctgcattgacagacatctaggagaa

SEQ ID NO: 434511 - DNA, 100 bp, Homo sapiens
tttctgctgaccgcgggccctgccctgggctggaacgaccctgggagttcctaggctcaaattacagtgaaacattctactccatgaaaggagaagcgtt

SEQ ID NO: 434512 - DNA, 88 bp, Homo sapiens
cggatacgatagaaaatgtaaaggccaagatccaggataaggaaggttatttccagaaagaagagaatggcaaagtatgagaaggctg

SEQ ID NO: 434513 - DNA, 74 bp, Homo sapiens
gttaccctggaacaccccctcttcgttggaggaatgtgccaaaactgcaaggaatcagagatcattgatttctt

SEQ ID NO: 434514 - DNA, 50 bp, Homo sapiens
cccgttccctggaggtcctgtggaatgggacccagacagcgtggtcctct

SEQ ID NO: 434515 - DNA, 101 bp, Homo sapiens
atcctcagcggcgccttgcggagggaccccactgtgttggagtagaagaacatcatgctgttgacattgacctgtatcactgtcccaactgtgcagtttta

SEQ ID NO: 434516 - DNA, 100 bp, Homo sapiens
tccttctgtcggttggtcctggagcggcgcagccggagtggggccgtgaggctgaactccagtgcacccagttagacttggagcggaaactcaagttgaa

SEQ ID NO: 434517 - DNA, 95 bp, Homo sapiens
aaacaagttataatcaatctgctttggtctgctctaaacttatccatctctgtccattactggaacaactccgcaaagtccttattccctaaaac

SEQ ID NO: 434518 - DNA, 75 bp, Homo sapiens
ctgatggccacctttgtcaatgtatacatcgccagttttatcagcaatcagccatgactgcctttgcactgtcca

SEQ ID NO: 434519 - DNA, 100 bp, Homo sapiens
ctgcctcagcctcccgagtggctgggattacagggctttctgatactaagccaaatgtgatctccttattggagcagaagaaagagccctggatggttaa

SEQ ID NO: 434520 - DNA, 100 bp, Homo sapiens
cagcaatatgcagctattgaacgtttgacatgtggcaagtttgaattgagatgtgctgtggtgcttcccacctttatcctggagaagcgatctttgctgg

SEQ ID NO: 434521 - DNA, 100 bp, Homo sapiens
agccgctcaagaagtcgagatcgaagatttagaggccgctacagaagtccttagaagtgggaaaactcttgcctttgccatcccaatgattcatgcggtg

SEQ ID NO: 434522 - DNA, 111 bp, Homo sapiens
gcaaggtgcaagagtccacaaagggacctgatgaagcgaagatcaaggtccctttctagagataggagaagagagagatcgctgtctcgggagagaaatcacaagccgtcc

SEQ ID NO: 434523 - DNA, 50 bp, Homo sapiens
atggcaaagaaacctattctgaggagaggcagcttccccccttgggtcca

SEQ ID NO: 434524 - DNA, 50 bp, Homo sapiens
ccacaacgatgcgtctcctggatggggctccccagaataatccagaagtc

SEQ ID NO: 434525 - DNA, 100 bp, Homo sapiens
cgctgtcgagcagctatgccggtcctaaaggtcaaaatgcagatcttcgtgaaaacccttaccggcaagaccatcacccttgaggtggagcccagtgaca

SEQ ID NO: 434526 - DNA, 50 bp, Homo sapiens
taaccgccttgaagagctgatgaagatgctgtacccctcaaggatttaaa

SEQ ID NO: 434527 - DNA, 101 bp, Homo sapiens
gataaatcaggaatagattctcttgaccatgtgacatctgatgctgtggaacttgcaaatcgaagggtggttgagtttgcctcttatggtgacttaaagaa

SEQ ID NO: 434528 - DNA, 50 bp, Homo sapiens
gtaattgcctgctttgattccctaaagatacactctgtgcagttttagag

SEQ ID NO: 434529 - DNA, 98 bp, Homo sapiens
cccggcacgcggtgctggctctgctgaaggccatcgtgcaggggcagctccggggaaccttgtacaacaccggccgacatgtctccttcctgcctgca

SEQ ID NO: 434530 - DNA, 100 bp, Homo sapiens
actcagctcctcgacatttccacacccagacccaaagtttgcaacaatcagtcaggtgcgtgcatcctctaatgacaaagcaaccttgtatttccttcca

SEQ ID NO: 434531 - DNA, 100 bp, Homo sapiens
acaggatacatcaaggcctggccaccagcagctgtcttttggggagacattgccttagatgaagatgacttgaagctgtttcacattgacaaagccagag

SEQ ID NO: 434532 - DNA, 100 bp, Homo sapiens
aagatcatttatatacacatggtgatagaattacctcttacaaacccagagttatttcagcgtgtaggaataatacctccaaaaggctgtttgttatatg

SEQ ID NO: 434533 - DNA, 82 bp, Homo sapiens
aggacatgcaaaacttgcagattttggggtagcaggtcaacttacaggagaagagaagtttacctttattgagaaatgtaac

SEQ ID NO: 434534 - DNA, 113 bp, Homo sapiens
ccgtggctgctcgataaatcagacagaacagttaatcctcaatttaagcctgatctaacccctagaaacagctataaggaagaccagatggatgagaaactaatggaacctct

SEQ ID NO: 434535 - DNA, 91 bp, Homo sapiens
cccgcagtttccaggatttcctccacctgtacctccagggaccccagtggcccagatgacagaggatgccgtcgacgcggaacggctgaag

SEQ ID NO: 434536 - DNA, 90 bp, Homo sapiens
acccaacagagatctcttctgttctccactgctagaactctaagaaggagctgatgtggaggagcagctgagacagttcaagatgacgac

SEQ ID NO: 434537 - DNA, 98 bp, Homo sapiens
gtcggggccgaagcggacagggaattggaggagcttctggaaaaggcatttcatccttcatgaagccattcaggattttgaattgcatatgagtgctt

SEQ ID NO: 434538 - DNA, 75 bp, Homo sapiens
aacggtttccccagcagtagcctctgcgaccaggtgcggcttcagtggaagtatgcgagacttaagagctcaagt

SEQ ID NO: 434539 - DNA, 74 bp, Homo sapiens
ccaactgttggatgcagatggaattgcagaatttacctcaagaactctttgctgttgacccaactaccgtttca

SEQ ID NO: 434540 - DNA, 75 bp, Homo sapiens
taggatgttttggcgagagatgtattcagtggaggaagctggtcagccaatcaaccctcaatgtcgaatctaccc

SEQ ID NO: 434541 - DNA, 83 bp, Homo sapiens
aaagtgattaagcagagaatggagaagaaggttgattccaggtgatctttagacagtgactgagtatggatcatttgaacgag

SEQ ID NO: 434542 - DNA, 100 bp, Homo sapiens
cctccagtcactgcctctgggtggatgagtttgcaccccgccactacacggagctgctcagtgatgacgttgaatcctgttccctgaaaaagacgtattc

SEQ ID NO: 434543 - DNA, 96 bp, Homo sapiens
caggaacatgtggctgctcccagctctactccttctctgcctctcaggcacaccttgggcccaccccacctccacatagccttaattacaaatcag

SEQ ID NO: 434544 - DNA, 82 bp, Homo sapiens
cgggccatacccaataaccaggtgcttggcaaaatcgagcgggccattgaatctccggcctgtgaaactgtgaggggattcg

SEQ ID NO: 434545 - DNA, 75 bp, Homo sapiens
cccaaatatcctcggaagagcgctcccaggagaaacaactgggatagatgggcagcagaagatcatgtgcttcgt

SEQ ID NO: 434546 - DNA, 100 bp, Homo sapiens
cacaaatgcaaatacttgtgcactgggagaggtgacatctgttcccgagctgttcctgactgcagtgaagctcacccatgatgacacaggagccaggtat

SEQ ID NO: 434547 - DNA, 100 bp, Homo sapiens
cccaacggcaccagccctttgcacctcgcagctaaaaacggccacatcgacatcatcagaccagtgtgcttttcttggagaaagaagaaaagaagaaaga

SEQ ID NO: 434548 - DNA, 101 bp, Homo sapiens
tggagctccttttcctccacctaccttcccgaacccgtttgatggagctgcaccgccagtgggaattacttttggagaagatgcgagaaaaaggaatcaaa

SEQ ID NO: 434549 - DNA, 80 bp, Homo sapiens
gtgacagcaacagctcggcgggctggaaggtgaatgaaaactttgccattgatttgatagcagagcagcccgtgagcgag

SEQ ID NO: 434550 - DNA, 75 bp, Homo sapiens
ttggaagcagccgatccagcctgcggagcctgtggggcagatgcagcagaagttgcaaaatgacctaactgcaga

SEQ ID NO: 434551 - DNA, 74 bp, Homo sapiens
ctccttgggcctgcggctctctacgtccctgcggagcagccgaaatcctccacctactttacttcatccagaaa

SEQ ID NO: 434552 - DNA, 75 bp, Homo sapiens
cacgatgttcttctacctgagcaagaaagcggctgtgcgtggcgagcagtggacgcccatcgagcccaagccccg

SEQ ID NO: 434553 - DNA, 82 bp, Homo sapiens
gtaaagcaatatttcgagcagtttggcaaggttttaaaatcaaagatgggaaaatcggagaaaattgcccttccccatggcc

SEQ ID NO: 434554 - DNA, 103 bp, Homo sapiens
ggtcagtgccgtttaacctttattgtggtggagtccaccccgctgtggatcccctaacaacagtgagagagcaatgcgagcagttggagaaatgtgtaaaggc

SEQ ID NO: 434555 - DNA, 83 bp, Homo sapiens
ggagagcattccatccctacggggctctatcactcagataggagtgtcaggcctctgagtccaagctaagccatcaaatcccc

SEQ ID NO: 434556 - DNA, 83 bp, Homo sapiens
agccgatccagcctgcggagcctgtggggcagattggatttgaggctcctcccctccagggacaggctgcagctccagcgagt

SEQ ID NO: 434557 - DNA, 100 bp, Homo sapiens
actattcagatcatccaagtggaggttcctacagagattcatatgagagttatggtctgtttggcaccccactgctgaccagcctcccagagaaagtgtg

SEQ ID NO: 434558 - DNA, 143 bp, Homo sapiens
caagacgggttcagttcgtcatggggctgtttggaaagacccaggagaagccgcccaaagaactggtgtcagctgtgatgcatgtttaaaaggaaattttcgaggtcgcagatataagtgtttaatttgctacgattacgatc

SEQ ID NO: 434559 - DNA, 82 bp, Homo sapiens
cctcaatttgctggatttaagcactgctgcactttatgagatgtgttcagagcaacattgttttgttgacacaagcatttag

SEQ ID NO: 434560 - DNA, 96 bp, Homo sapiens
cacctgctgcacccacgaatctgcccacccctcctgtaacccagcctgtttcacttcttggcaattcgaagttttcaagtagcccttcacatctat

SEQ ID NO: 434561 - DNA, 100 bp, Homo sapiens
tgcccacctcacccacctgctgatgggccttgccagtggccgcattatccttatcctagaggtaaactgtcttgagccccaccctcacctgcctgtgctg

SEQ ID NO: 434562 - DNA, 75 bp, Homo sapiens
ccttagctgctcacatatggatactttcacagttcagcttgtcagctcatttgcagcttacatttttggtttctt

SEQ ID NO: 434563 - DNA, 50 bp, Homo sapiens
cacctgtgccccaggattcaaactggcccgagataacttcttccgctgtg

SEQ ID NO: 434564 - DNA, 83 bp, Homo sapiens
aagaagactatcagccactaatgaagttgggaactcagaccgtaccttgcaacaagcaccagggaaaaattggagttaagttt

SEQ ID NO: 434565 - DNA, 75 bp, Homo sapiens
gcgggccctgggggtcctcagcgtggtctgcctgctgcactgctttgcatgattccacctttccactgatagact

SEQ ID NO: 434566 - DNA, 130 bp, Homo sapiens
ggtggacaagatctcaatgaaggaaaccgcactctcacactggccttgatttggcagctaatgagaagagacccatctattttggatagtttagatttgaatgaagatgaacgggaagtactcattaata

SEQ ID NO: 434567 - DNA, 95 bp, Homo sapiens
tggacccggacccaaagtgccatgtctttaataaagcataacccctactgtagaactaaatgcactgtgcatgaaacttggaaaaaaaccaatgt

SEQ ID NO: 434568 - DNA, 100 bp, Homo sapiens
gtccttcagtgtccatatgagcatttcagtggagaagaaaagaaactttgctacctgggaactgaagactacttaggagctctttctgagatgaagagaa

SEQ ID NO: 434569 - DNA, 98 bp, Homo sapiens
ggagcaattgaagctgactactaaggagaataaggttatcaatactctggctgaccatcatcatcgtgggactgactttggtggaagtccttggttac

SEQ ID NO: 434570 - DNA, 83 bp, Homo sapiens
ctggtggtcccccgctcccggggtccccggccggccaagcagggcgatgccagtccctccactccagaggagaacgaaaccac

SEQ ID NO: 434571 - DNA, 82 bp, Homo sapiens
ctgctcctctgggttgaaacccgggcgccgccaagatgccgacaatgcagatcttcgtgaagactctgactggtaagaccat

SEQ ID NO: 434572 - DNA, 80 bp, Homo sapiens
ggctgagggaaaagcgaggcaaggcaggcggatctaattatcatggacctgcgacagtttcttatgtgcctgtccctgtg

SEQ ID NO: 434573 - DNA, 75 bp, Homo sapiens
aagaggattgcacggaggagctctttgacttcttgcatgcgagggaccattgcagggtcgatgaatggatggcga

SEQ ID NO: 434574 - DNA, 83 bp, Homo sapiens
tcctgacggaccacatcctggagaccaaggaggcatcgatgatggacccaacgatgatcaaatatggcatcaacaatatccgg

SEQ ID NO: 434575 - DNA, 100 bp, Homo sapiens
cgatatctcacctctactcccatgaattcacctttgattccagtgtgaactgtcaatcataaggttttatgacttacctagtggagcctttatttacaga

SEQ ID NO: 434576 - DNA, 82 bp, Homo sapiens
gtgcccgaggcccaggacagccaggtcaccagcaccaagacgtccgtctccaagagagtatgaagagagtgcgtctgtaggg

SEQ ID NO: 434577 - DNA, 75 bp, Homo sapiens
caaagagcccctcatcgagctcttcgtcaagccctgaaggatggctgccatattgggagacaccatcatggtggc

SEQ ID NO: 434578 - DNA, 100 bp, Homo sapiens
cttcatcctcggcggcggtggccgctagctccaaggaaggggctactgttcccgtagacaaagacgtcttcgaaaaacactcaacttcaagatgggtaac

SEQ ID NO: 434579 - DNA, 74 bp, Homo sapiens
aacgctctctcagcagcttccaagagaaccaatggaatggagaaggtaatcacaagtgaagaagctgaaagacg

SEQ ID NO: 434580 - DNA, 73 bp, Homo sapiens
tggctcttgccctcatcctggttctggaatcctcagttcaaggaggatgaagaaggttataacgatggagagg

SEQ ID NO: 434581 - DNA, 100 bp, Homo sapiens
cctgtttgaatctcacatgaacaggctgaagagtgcaattgaaaagggaatgggactttgatctgaagaaattaccaaacattaaaatgagaaaaatttg

SEQ ID NO: 434582 - DNA, 100 bp, Homo sapiens
cctgaaagagtattttagtacctttggagaagttcttatggtgcagattactgacagccctgtcctaggagcacaacgtccgagaaatgctcagcttgac

SEQ ID NO: 434583 - DNA, 75 bp, Homo sapiens
gaccacaatggggaggacaacttcgcccgggacttcatgatctgccggaggcgctgggcaatgaccccgggactc

SEQ ID NO: 434584 - DNA, 74 bp, Homo sapiens
ttacaacagatgatgctttgcaagaacttgtggaactcatctatcaacagcgtttatcaatccggaaagaggga

SEQ ID NO: 434585 - DNA, 100 bp, Homo sapiens
gtcgattggtctgaaattcttgaagagacaggccctgtctcagcgggaccctcctcacaacaacttcttcttcttcgatggcatgaaggggaatgggatt

SEQ ID NO: 434586 - DNA, 90 bp, Homo sapiens
cggccggggcgctagcgttcgccttcagccaccatggggaatgggatgaacaaggtgtacgaagccatcgacagcagagatggagcatct

SEQ ID NO: 434587 - DNA, 97 bp, Homo sapiens
atcattaagaagcagatcctgaaacacctgtcccggaacctacaagcagcaattggcgcctattatgactttgagagcccaaacatcagtgtgccct

SEQ ID NO: 434588 - DNA, 83 bp, Homo sapiens
attgaaattggactgcattacaagattccttacccaaggccagctcagcaacagcctcaccaaggactccatgaatatcaaag

SEQ ID NO: 434589 - DNA, 100 bp, Homo sapiens
ttattgacatgcccccgaaagtgttaagcacatggtggagaggcaagcacggattccagctctgtcagattcagggagttttgtatcttctcgagcccgg

SEQ ID NO: 434590 - DNA, 75 bp, Homo sapiens
gactcgggaggaccagggaagcagtgaaaatgatgagagatgaagtcaccaaagcagtacagcctctcttactgg

SEQ ID NO: 434591 - DNA, 97 bp, Homo sapiens
atgcttcagttgccatgagagccatgaacggagagaatgatgccaatgggtggaatgatgccacctggaccaggaataccacctctgatgcctggaa

SEQ ID NO: 434592 - DNA, 100 bp, Homo sapiens
aaaaaaaggagatgcctggcagccccgctctctgcatgggatgccttctccatccctgaacttcagaacttcctaacaatcctggaaaaagaggagcagg

SEQ ID NO: 434593 - DNA, 100 bp, Homo sapiens
agaaaatacaaatcacacgcataatggatgaaaggaaccgacagtacctcactgtggaccgaaatcgtctatggtatgtgccgcgccatctctgccagct

SEQ ID NO: 434594 - DNA, 48 bp, Homo sapiens
agaattgctgcttaaaaaacttgaagtcaaataaagtgcccgtggtgc

SEQ ID NO: 434595 - DNA, 75 bp, Homo sapiens
agattgatggacgtaagaacaagagacgtctcccacaacctgctccgggcgctggacgttgggctcctggcgaac

SEQ ID NO: 434596 - DNA, 110 bp, Homo sapiens
accgctgcctgctgatctgagggccaaagtttggaaggtctggctctgggagaggagtggacagcagctggttgagatacatccccatctggagacaggactgccactga

SEQ ID NO: 434597 - DNA, 74 bp, Homo sapiens
tcttccccaactcttttatcatctacgagaaattggggctcaaccatccctgcatgtcactgagtccaccatgc

SEQ ID NO: 434598 - DNA, 75 bp, Homo sapiens
tggtggttaaaccatgttaaggaggattttacagagggaattttggagagtaaaaggctgaaccttgttaaagag

SEQ ID NO: 434599 - DNA, 100 bp, Homo sapiens
gtggctatgaacccagaggtcgtggaggtggccgtggaggcagaggtggcatggggcactacaaatactgtggcagcatataatttaacttggaaatcaa

SEQ ID NO: 434600 - DNA, 117 bp, Homo sapiens
gcctgggaggccggccggtgccagcacctttcggcttctgagacggcggcagcagcggcattcaggttaccatcccaccatttcatgaccctttgaaaaaagcacaatatgacaagg

SEQ ID NO: 434601 - DNA, 90 bp, Homo sapiens
catgggctcctctgtgcggaggcggaccttccgcagcagaggtagccggttcaaccccatattagatatgctggcagcccttaaaaaagg

SEQ ID NO: 434602 - DNA, 99 bp, Homo sapiens
gctggaactggcaaagcagctacacaaagagggtcatctcttctattgtacctgcagaagctaatggtatagatatagaagtcatccacagagatgtta

SEQ ID NO: 434603 - DNA, 88 bp, Homo sapiens
gaacgaccgcagtgacatcgtggactcgctggacgaggaccggctccggccgccatggcatcagatgaaggcaaactttttgttggag

SEQ ID NO: 434604 - DNA, 100 bp, Homo sapiens
tggagcaacagtccaagctcaaagtttccttcaagcaggatggtacctttccactttcctccatcaaaatgtgcactttggaacccaacgccaactggag

SEQ ID NO: 434605 - DNA, 80 bp, Homo sapiens
gcagctgacctcgcccacgcccagcagcagcagcaacaggtattttggcctctccccagtctgctcctggaaacttggac

SEQ ID NO: 434606 - DNA, 96 bp, Homo sapiens
acaaagagatcatagccgagtatgaaagtcaagtcaaagacgtgctgtattgcccagaagccatcgtgtcgctggtcggggtcctgcggaggctgg

SEQ ID NO: 434607 - DNA, 100 bp, Homo sapiens
gggtccgtggtcgtttgtttctccaaggtttgaaaagcagctggcctgcaaggagcggagagtttaataggcaagaaggaagggagaagacagaaggaag

SEQ ID NO: 434608 - DNA, 90 bp, Homo sapiens
aacattatcactctaaaggatgtcattgacgagactctggatgttaaggaaatgattttcaatgccgagagagttggaggcctcgaggaa

SEQ ID NO: 434609 - DNA, 103 bp, Homo sapiens
gcccgcgccgacgcggggcccatggccaggaccaccagccagctggtgctggagaatctggtaaaagcaccattgtgaagcagatgaggatcctgcatgttaa

SEQ ID NO: 434610 - DNA, 101 bp, Homo sapiens
atgaatgacaggcttactgaatatcctcttataattaatgcaataaaacgcttccatctttatccagaggtattcaaaacctttgaccacatggcccgtca

SEQ ID NO: 434611 - DNA, 87 bp, Homo sapiens
ggcgcgcgcctgcccagctttgcagcccccgaacgcggcctcgcacaggaggaagaagccagacgacagtcaggagctcagtatggc

SEQ ID NO: 434612 - DNA, 80 bp, Homo sapiens
acctgaggtgaaccttcgaccttggacttctcagcctccagaatggctgtgaggatatcattgctgagagcatctcatta

SEQ ID NO: 434613 - DNA, 89 bp, Homo sapiens
ctcacggcgcctgccttggcgctggccggctacatcgaggaagtcctgacggccacgctggatctggaggacgtccggagctacagggc

SEQ ID NO: 434614 - DNA, 98 bp, Homo sapiens
cgggaggggggagcggcgttggaggccaccgtttccaggccccttcacagatgtagtcactacaaatcttaaattgcgaaatccatcggatagaaaag

SEQ ID NO: 434615 - DNA, 49 bp, Homo sapiens
gaattacaactattatcctcctgtagagacggagtctcgctctgtcacc

SEQ ID NO: 434616 - DNA, 100 bp, Homo sapiens
cttaaagcaattgagcaggctgatctactgcaggaggtgttcaggcgcttcgtggaggttggccgggtggcctatgtctcctttggacctcatgccggaa

SEQ ID NO: 434617 - DNA, 75 bp, Homo sapiens
agatgcgggccctgctggaccagctcatgggcacggctcgggacggggcccggctcccgggcgcggccctcgggc

SEQ ID NO: 434618 - DNA, 100 bp, Homo sapiens
tgcgagagatcgagagcactgacacggcctgcatcgggcccacgctcaggatagagattccttctgccatcagatgtctttctgcttgactgaactgcac

SEQ ID NO: 434619 - DNA, 82 bp, Homo sapiens
cggcgccagttctccggcgggaaggaaaaccgcgcagagaggttaacacagaaatctgcctcctgggccatgccgcttctaa

SEQ ID NO: 434620 - DNA, 80 bp, Homo sapiens
tgacagcaacaccgatatgtttcaggaactgtggctgcaccatctgtcttcatcttcccgccatctgatgagcagttgaa

SEQ ID NO: 434621 - DNA, 98 bp, Homo sapiens
gggccgcttctcgcgggccggggccacgctcagcgccgagggcgagatcgtgcaggtgtggttcctcagagtgcaccaccagtgccaacagcctcttc

SEQ ID NO: 434622 - DNA, 98 bp, Homo sapiens
ttcgcagtggtcgcttcttctccttgggtgaggtggctttgaccccgggttgcccggccagcacgaccgaggaggtggctggacagctggaggatgaa

SEQ ID NO: 434623 - DNA, 74 bp, Homo sapiens
ctctggagtagctgggactacaggtcgctgaagagttcgaaaccgtgctcagcaccgcgtttggggcatgtgag

SEQ ID NO: 434624 - DNA, 83 bp, Homo sapiens
cagagaatatgatacagatgtattcaaatggatcttcaaagaagccggcaggagtgactctcggcatggaggacccatctcct

SEQ ID NO: 434625 - DNA, 117 bp, Homo sapiens
accccgaagagttctacaacctggtgcgcttccggatcgggggcaagcggaaggtgatgcccaagatggaccaggagaataaaggcagccccgttgatgactgaaaatgacaaagca

SEQ ID NO: 434626 - DNA, 50 bp, Homo sapiens
gaaattttttacacaacctgaaaagttttagaaagagcgttttcgctacg

SEQ ID NO: 434627 - DNA, 96 bp, Homo sapiens
ctccatcaggaccccagatgtctgacagccctgtgtgacaccaagataagtaacgttgatgctatgaaactgggagtaaaggaaatgaagaaggca

SEQ ID NO: 434628 - DNA, 111 bp, Homo sapiens
tgcaggaaatgtgaatctcaggagagagcagccagagtggagtggctttggagagatatcatcccctgtaatccgggaggcagaggtgacacggactgcacggaaacagag

SEQ ID NO: 434629 - DNA, 83 bp, Homo sapiens
gtcatgagctttgtgaacctgggcaaagcgaaggctggagctaggagaaagcggtcatcagtacctctcagatggtttaaaaa

SEQ ID NO: 434630 - DNA, 74 bp, Homo sapiens
cgccccaacatcatcctggtgctgacggacgaccaggatgtggagctgggctggagtgcagcggcgcgatctcg

SEQ ID NO: 434631 - DNA, 90 bp, Homo sapiens
ccactggattgggaaagaccatggcagctgtccgcaggcttgtccaaaaggaaacatcggaatgaccacttaacatctacaacttccagc

SEQ ID NO: 434632 - DNA, 75 bp, Homo sapiens
cgccaggaggagcgcgcgggcacagggtgccgctgaccggatctcactggcatcgaatctatggatcagtgtcgc

SEQ ID NO: 434633 - DNA, 83 bp, Homo sapiens
gttttgcgtgtgttgaaagtacaattctattgcacatcaatgatatcatcccagagctccttaataagcatttatagtcagtt

SEQ ID NO: 434634 - DNA, 75 bp, Homo sapiens
ctcctttgctgtcagtgaagtggggaagaaggagaaagggccaacccctgaagaagcaatacagaaactgaagga

SEQ ID NO: 434635 - DNA, 74 bp, Homo sapiens
aagaggacgacgacgacgaggaagaggaggtttctgagacctgcctagagctggaacgttacctccagagcgag

SEQ ID NO: 434636 - DNA, 75 bp, Homo sapiens
catgtttgtgcttctgcccaacgacatcgatggcctggagaaggtctctaattaacagaagatggcaaagcccag

SEQ ID NO: 434637 - DNA, 100 bp, Homo sapiens
ccaaagtggatgaggtgaagtccacaatcaagttccaaatgaagaagggttatgtggtccgaatcagtggtgggaacgacaaacaaggtttccccatgaa

SEQ ID NO: 434638 - DNA, 83 bp, Homo sapiens
gttgatcctctcacaagattctgtcataacactcgtgaaactgctcaggccatcaagggtatgcatatacgaaaagccacgaa

SEQ ID NO: 434639 - DNA, 100 bp, Homo sapiens
atgatggccacgcgtcggactggtctgtctgagggagatggtgacaagctcaaggcctgcgagatcctgtttgaccaaactcagagatcaattaaggcac

SEQ ID NO: 434640 - DNA, 73 bp, Homo sapiens
cagtttggagtctgtccatcctgcaggccacaagctctgggtgctcctgacctctgataaagctgcagccaat

SEQ ID NO: 434641 - DNA, 83 bp, Homo sapiens
ctcacctgaaacagttgacagtgtgattatgggcaatgtcctgcaggacaagaaatggattctcagtcatgaagatgtcatat

SEQ ID NO: 434642 - DNA, 96 bp, Homo sapiens
agcacagccccgaggtgtgcgaagccaccaagaagacagagatgtcaatgaccccatgcccaaccgaggcggcaatggactagctcctggggagga

SEQ ID NO: 434643 - DNA, 73 bp, Homo sapiens
cccgttacaatcactagtgttgcagattctgaagggagtggtaatggaagtgaagatgcttcaaaggacagtg

SEQ ID NO: 434644 - DNA, 83 bp, Homo sapiens
ccggcctgccggcccccagaacaaggaatgggtaccacagaccatgtcatcgtcctggcgtccacgaaccgagctgacatttt

SEQ ID NO: 434645 - DNA, 51 bp, Homo sapiens
tccacgacctatcctaggcgccatgctgcagaaccttggcctgaaaatgct

SEQ ID NO: 434646 - DNA, 98 bp, Homo sapiens
gaccaaggtctccgactatattctgcagcataagaaagtggatgaatacacagacactgacctgtacacaggtaagaagaaagcagcggcattgttcg

SEQ ID NO: 434647 - DNA, 51 bp, Homo sapiens
aagagatctcagcgctcaccgacttctctgcacaaccagtgtctctgaaga

SEQ ID NO: 434648 - DNA, 103 bp, Homo sapiens
ccatggcggctgacagtcgggaggagaaagggcaattcatgatgttaaagccacagatctgggattaggtaaagtaagatttaaggcagaagtagattttgat

SEQ ID NO: 434649 - DNA, 83 bp, Homo sapiens
cccgcccccgccggttcgcgtctctctgctgcggcgcggggaccgctgtgctctcgcgccgtgccgtccctgcagtgacaccg

SEQ ID NO: 434650 - DNA, 90 bp, Homo sapiens
tggatgattcgtatctaagactctgggacactcctgaagtcgggaaatgtaagactttgaccccgacgcaggcttcagtgattgccgcgg

SEQ ID NO: 434651 - DNA, 98 bp, Homo sapiens
ctgacacaaacttcaggaaaggattttgcacttgtgcagaccgggcgagcagagtaagaagcagcgaatgctgatgtcttaaaggcgatggtagcaga

SEQ ID NO: 434652 - DNA, 104 bp, Homo sapiens
taagaactttgccgataccttaggatacaacatagaacctattatgctctatcaggtgtacctgaaggaaatcttaaaagaaattggtgttcagaatgtaaaag

SEQ ID NO: 434653 - DNA, 99 bp, Homo sapiens
ggaggaggccatcatcatgaaggacgtgcccgactggaagttaaacacagtgggaatatcacttttgatgagattgtcaacattgctcgacagatgcgg

SEQ ID NO: 434654 - DNA, 74 bp, Homo sapiens
aagaaagctggtaatagatgtctgacaaactaaagaaagacttgtgttacgcaagacatctgtatagattctgc

SEQ ID NO: 434655 - DNA, 83 bp, Homo sapiens
cgcgcgcagggcctgcagcgggagctggacggcgagcgcgagcggcgcgagaaacaccgaacaagatttgtgatgaaatggag

SEQ ID NO: 434656 - DNA, 50 bp, Homo sapiens
cctatgccttcagacatcaccagccagtttctccacagacactacccaaa

SEQ ID NO: 434657 - DNA, 50 bp, Homo sapiens
gcggcggcagcagcagtgagagagcttggggcttccttggtcgcacccac

SEQ ID NO: 434658 - DNA, 116 bp, Homo sapiens
aattttacctggattgttcttaggcccatattcatctgctatgaaaagcaagcttgacaaaagtaagctgaagccaggaacaagagttgctttggatatgactacactaactatca

SEQ ID NO: 434659 - DNA, 100 bp, Homo sapiens
caactaataagaccaagagctggaaggacaaagtggcccatcatgaaggattaattcgactgatagaaccaggtttattttcttgaaaaggctccaggct

SEQ ID NO: 434660 - DNA, 75 bp, Homo sapiens
agcggcgagcagaactacggcgagcggatgagttttgatcatcctgagaaaaatgggccttggcctgcagaccca

SEQ ID NO: 434661 - DNA, 74 bp, Homo sapiens
cttgggaaccgctcgagcctaccagaggaattcagaaaagcagctcagcaacaggaagaacaagaagaaaagga

SEQ ID NO: 434662 - DNA, 83 bp, Homo sapiens
gcaaggtcttcgctgtgctccggagagattgctccctaccctcacctcaagacgaccatggccaccatcccagactggaagct

SEQ ID NO: 434663 - DNA, 73 bp, Homo sapiens
ggccagctaggagcgctctgtggtgcctggggctgaacgcggctttctgtccctgaaacgaattaagaggtca

SEQ ID NO: 434664 - DNA, 100 bp, Homo sapiens
cgtccgccgattcctcctccttggtcgccgcgtccttggctggcgtaagttccacctggtgccaagcatcaacaccatgagtggcagtcaggagctgcag

SEQ ID NO: 434665 - DNA, 101 bp, Homo sapiens
ttgtggatattatggctaataacacaacaagtttagggagtccatggccagaaaacttttggggctgttgaagctcaaatccgaagttttggacagactcc

SEQ ID NO: 434666 - DNA, 100 bp, Homo sapiens
caggagcccggccaggcgctggggaaagttaaacacagtgggaatatcacttttgatgagattgtcaacattgctcgacagatgcggcaccgatccttag

SEQ ID NO: 434667 - DNA, 101 bp, Homo sapiens
gccttccacaccccctccgtgggtgtgtggtttttcgttggaatatacgttgcacatttatggcgattctgagtgtgagggcagacttctgccaggctcag

SEQ ID NO: 434668 - DNA, 82 bp, Homo sapiens
gcacggtgaacctggaccaggaggaggttttcaggaccaaaattgtggaaaagtcactctgatggactcaccctgtcaccca

SEQ ID NO: 434669 - DNA, 90 bp, Homo sapiens
cagtatttaggaagctgtcctggctcagatggctcggtcatcacgggacttgagaccaggagacgtatccagcaagcggaacctctggga

SEQ ID NO: 434670 - DNA, 100 bp, Homo sapiens
ggaggaaccccaggcccttccagcggtggccacacgtcacacagtggggacaacagcagtgagcaaggtcaagaagaagagagattggccctagaaactg

SEQ ID NO: 434671 - DNA, 134 bp, Homo sapiens
ctgggaacagggcgggggcgacaccccagggagtagggctgaggaccgcaaaaatcaatcacacagggaatatggaggttctgcacctgtatggaagtgaggaacagaagaaacagtggcttgagcctcttctt

SEQ ID NO: 434672 - DNA, 100 bp, Homo sapiens
tggacccaatgataaaattcaagcggtcatcgatgcgggagtatgtaggagacttgtggaactgctgatatttcagagacaactgtctgaaccctgccac

SEQ ID NO: 434673 - DNA, 100 bp, Homo sapiens
agcactgttcttggaatttaacatgcttgcacaaggtgggaaagcagtgccactctccgcttcacagatgccccctgccaagatgtcagtgatgctgccg

SEQ ID NO: 434674 - DNA, 50 bp, Homo sapiens
cgacgctgctggccagggtccaggggctgttttgggagagggactgagta

SEQ ID NO: 434675 - DNA, 83 bp, Homo sapiens
gcctcaggccagtcgcctccaggccaagagggatccttcacccgtgtctgggagtgcatccgccccaacccttttccccctcg

SEQ ID NO: 434676 - DNA, 100 bp, Homo sapiens
ccgggatcgtgaccgagaccgtgaccgagagcgtgaccgagagcgcgaatatcgtcatcgttagaaggtacctggaagaggtgggctacacagacaccat

SEQ ID NO: 434677 - DNA, 83 bp, Homo sapiens
atcagggagtcccgaaggactacactggagaggtaagcggaagggtacagccaatgcccgaatgccagagaaggtcacatgga

SEQ ID NO: 434678 - DNA, 100 bp, Homo sapiens
cagatgatgatgccaatcggatcgcccaggttactaagtggtcatctccatcagaggcaactgaaagtttcttatcaaaagaaatttggttgccaccccc

SEQ ID NO: 434679 - DNA, 100 bp, Homo sapiens
tgacatctgacgacgtgaaggagcagatttacaaactggccaagaagggccttactccttcacagatcggtctgcgcaggcatggcactaagtgtcccat

SEQ ID NO: 434680 - DNA, 83 bp, Homo sapiens
ggagagtttaaacagccaaaacagttcattcatattcagcgaaggaacctcaaaatttgcaaacctggacagcagtgtgaaag

SEQ ID NO: 434681 - DNA, 74 bp, Homo sapiens
aatggaaccaattgttttacagtctgttccacatgatcattgtaataagtcatccgtccttggctcaggatttg

SEQ ID NO: 434682 - DNA, 82 bp, Homo sapiens
ctcgcctttgccgatccgccgcccgtccacacccgccgccagaggttgacggatatattcagacgttacgacacggatcagg

SEQ ID NO: 434683 - DNA, 98 bp, Homo sapiens
cagcaggatttacagtcaacatcagaccaaatggataaggaaattggtgtggatccggagttgtatgagttaacaacttctaagctggaaatctccac

SEQ ID NO: 434684 - DNA, 75 bp, Homo sapiens
ggagacggcggcggctgtagcggcgtgacaggttcagaaaagagaccctcgtgactggactgcacagttcatgga

SEQ ID NO: 434685 - DNA, 100 bp, Homo sapiens
cgcccgtctgcttcgggcctctggaatttagcgctcgcccagctagccgcagccatatacaacttccaaggcagcggagccccccagctctccctgcaga

SEQ ID NO: 434686 - DNA, 89 bp, Homo sapiens
cacccatcatcctggaagccacacttcacctagcagagtcacctgatatgaaaaaggagcaagacccccctgccaagtgccacaccaaa

SEQ ID NO: 434687 - DNA, 98 bp, Homo sapiens
gaagacaagctaaaaatgattcgggaatatcggcaaatggagctgctaagccgcacatctcttgagacccagaagctcgatctgatgactgaagtgtc

SEQ ID NO: 434688 - DNA, 50 bp, Homo sapiens
tccaaatgaatttgcaaaacttactgtagttaccaccaccctgtgaatct

SEQ ID NO: 434689 - DNA, 100 bp, Homo sapiens
gtcttcaacaactacttcagcctgggctttgacgcccacgtcaccctggagttccacgagtctcgaggatgaccattctgccccccttggagaaactgcg

SEQ ID NO: 434690 - DNA, 100 bp, Homo sapiens
aatgaacccaaactacacagaatttaaattccctcaaattaaggcacatccttggactaagaatgtgacagtgatgataacatgggtgccaaaaatactt

SEQ ID NO: 434691 - DNA, 83 bp, Homo sapiens
ctggctacagcttcagaagaccgaagcgttcgtatctggaagatgtacggagcgcaagaggacggcagcgtcggcgaaggtga

SEQ ID NO: 434692 - DNA, 75 bp, Homo sapiens
gctgcttatggcggcgctggagagggggcgctgagctgttgggttggaaaatggatataccttatttgattatga

SEQ ID NO: 434693 - DNA, 75 bp, Homo sapiens
gagaaagaacatcctctttaacccagttcccaccctcacagtcagggcgcaaaccagaagaagagggtgtggaag

SEQ ID NO: 434694 - DNA, 100 bp, Homo sapiens
ggaacagctccggtctacagctcccagcgtgagcgacgcagaagacgggtgatttctgcatttccatctgagatggagtcttactctgttacccaggctg

SEQ ID NO: 434695 - DNA, 100 bp, Homo sapiens
tcaaacgtggagatcaactcctctctgttaatggagtggaactgcaagcacatgttgaccagataactgaaatggcagcagtaatgaggaaagccattga

SEQ ID NO: 434696 - DNA, 100 bp, Homo sapiens
gagacctcatcacggagccctttctgccaaagtaaaatcacagtttatccctgcaccttcatagattatgttgctcgtcttagagaccaccaggcagcga

SEQ ID NO: 434697 - DNA, 101 bp, Homo sapiens
ctttattgtgaacaggtagagtacctgttgttgcagagttattttctgagtcagtttcagattgttctctggggccggactgagaaatgcctgaaggagac

SEQ ID NO: 434698 - DNA, 90 bp, Homo sapiens
gaacagcctgaagaagggctccctcgtgaagaacctgaaggacacactagagaatagtgacagtggtacaggaaagaaagaaaaagaaaa

SEQ ID NO: 434699 - DNA, 82 bp, Homo sapiens
cttcaacaagaggacccaggagaaattcgccctcaaaggctgaaatctctttaatgatggagggaagcaggcagacgcgagt

SEQ ID NO: 434700 - DNA, 90 bp, Homo sapiens
gaaagacattcaggatcaacttgaacgaatatttctgattcgggaactggagcctctcctctgtcacagtgacaatccatctcagctcat

SEQ ID NO: 434701 - DNA, 50 bp, Homo sapiens
ggatccacaatcggaatggaaagagacgagatttcatcatgttggccagg

SEQ ID NO: 434702 - DNA, 100 bp, Homo sapiens
aaacagaagctttattcgagaacagggaggaatcaatgctgctctggggaacatggaggaggacaactggaggtggcatttctacgacaccgtgaagggc

SEQ ID NO: 434703 - DNA, 100 bp, Homo sapiens
gtggggctcatcgtgatcccggcgacatactacctctggccccgagatcagaatgccggcacggtgacatgctgaagcgcaaggcggagctggaggagcg

SEQ ID NO: 434704 - DNA, 90 bp, Homo sapiens
gagcatttgtgttgatgaagatgaaagagactgcaggtgacaaaaggtgagacactcacctagaacagtgccgtgctgctgctgggaagt

SEQ ID NO: 434705 - DNA, 100 bp, Homo sapiens
gtcctgacaatgggcagaacgaattcagtgatatcattaagtccagatctgaatacttcagagagtcagagttgtgccagaagtctcttaatggcagata

SEQ ID NO: 434706 - DNA, 75 bp, Homo sapiens
cttcagcaagctctctccaacgcggacaaggcaaaatctcagcaagttcggacctctagtacaataaggcgaacc

SEQ ID NO: 434707 - DNA, 116 bp, Homo sapiens
acagcggcgagacgcgcgtgtgtgagcgcgccggaccaagcgggcccagaagcgggtgagaagccctaccactgcaactgggacggctgcggctggaagtttgcgcgctcagacga

SEQ ID NO: 434708 - DNA, 75 bp, Homo sapiens
cggatcgggtggagtgtaggtcatatcgccgcgacctagaggatcaagacataatgggagcatttttagacaagc

SEQ ID NO: 434709 - DNA, 98 bp, Homo sapiens
cgcagataccgacctactaagaactacctgagctacctgacagccccggattattctgcctttgaagatgtttgccacacgagtcactcgagagaatc

SEQ ID NO: 434710 - DNA, 74 bp, Homo sapiens
gaggccttcgtgcccatcctgcaccgggacctcaagtccagcaacaatcagttggccttatttcctcagtggaa

SEQ ID NO: 434711 - DNA, 75 bp, Homo sapiens
tgagaagtcatttccttggagatcaacagaaacaagtgttgaaaatgttaaaggctgtgctgaagaagagccgag

SEQ ID NO: 434712 - DNA, 49 bp, Homo sapiens
gagcaggcggctgcagccaaggagggaaaagaagatctcccggagcagt

SEQ ID NO: 434713 - DNA, 75 bp, Homo sapiens
ccatcaccgacctcatcagtgagctgtccctgctggaggagcgcttccggattttgactaaaggagaagttcaag

SEQ ID NO: 434714 - DNA, 136 bp, Homo sapiens
ccacaccaccagtgaggcgcttggttccttacttctagagtctggaatatttaaaaaggagtcagtggatcggtggggaaaatgctgcttaccctgggccctgggctgtagaaagaagacaccaaaggcaaagtac

SEQ ID NO: 434715 - DNA, 99 bp, Homo sapiens
gtcctcctggctgtgctcatatacacctggactatggccccaaagtcaactttcggaaacagaagctaaagaccgagggcttctgcggcctccccagct

SEQ ID NO: 434716 - DNA, 90 bp, Homo sapiens
gagtgaatgggcggatctcatatcttcacttggcaaactcaacaaggacacagcattgttggttttgccatgtactattttacctatgac

SEQ ID NO: 434717 - DNA, 101 bp, Homo sapiens
agggaagtatgatgctgatgacaacgtgaagatcatctgcctgggagacagcgcagtgggcaaatccaatttttgaaatcatgaatcctgtttatagtcct

SEQ ID NO: 434718 - DNA, 80 bp, Homo sapiens
cggccgaggaggaggagggggaagcggcggcggcaaagggtgactctgttttgagaagtgcaaccagatctctcctggaa

SEQ ID NO: 434719 - DNA, 101 bp, Homo sapiens
cagcgccttcccacggagcagcactcttcaccctgcacagccttgttagttgctacccaagcattgtgccaaaactatcagtcaagcagtgaataagaaat

SEQ ID NO: 434720 - DNA, 82 bp, Homo sapiens
caaagttctctcgatcagggcatacatctttcttcgacaaagggtttggtgcacctcgatttggaggaagtagggcagggcc

SEQ ID NO: 434721 - DNA, 100 bp, Homo sapiens
ttcctttccctcagcacacagaggatgatgctgactttgatgaagcaagtctggaaaagtttgaaattccagtaaaaattcgtttgagtcctgaaccgtg

SEQ ID NO: 434722 - DNA, 75 bp, Homo sapiens
cgccgccatccgggaggcccagggaagccaggtgctgcccacctacgacagcctggatgagccgtcagtgaaaac

SEQ ID NO: 434723 - DNA, 95 bp, Homo sapiens
accgaggccgcaagcagcgccgcggggtgtggggcggacccaggagatgaaatgacaacgtcaaccctccagagacgtctcagagaggctgtgca

SEQ ID NO: 434724 - DNA, 90 bp, Homo sapiens
ggagttcctggtcgttcccacagccattctggcgttcctggtcaatcatgacttcacccctctggagagtctccgggaccattatggcag

SEQ ID NO: 434725 - DNA, 75 bp, Homo sapiens
cgcccccggcgcgatgcccttcaggaaagacaggccgacggtcgcaaggtcctacggtcaagcatccgggagttt

SEQ ID NO: 434726 - DNA, 131 bp, Homo sapiens
cagcaagagcagcttccgcgagatgctccagaaagagctgaaccacatgctgtcggcgctggctgtgctggtcactaccttccacaagtactcctgccaagagggcgacaagttcaagctgagtaaggggg

SEQ ID NO: 434727 - DNA, 75 bp, Homo sapiens
actggacggctgagctgggcatccgacacgtactgctgtacttcctgccataaaactccagataaagtaaaccat

SEQ ID NO: 434728 - DNA, 95 bp, Homo sapiens
cgggctttccttctgatggcctctcagtaccaacaaccccacgagatgatgaaacatgcttggaataattataaaggttatgcctggggattaaa

SEQ ID NO: 434729 - DNA, 100 bp, Homo sapiens
ggaagttagacatggtggtctgctgggaataaaatatgctttggcagtccgtcaggttatgcttcctcctggagcccagcattctgatgaaaagggtgct

SEQ ID NO: 434730 - DNA, 75 bp, Homo sapiens
tgagcgtctcacctctgtctccagctccgttgactttgaccaaagggacaatctggaggaaagcaggaatgttca

SEQ ID NO: 434731 - DNA, 90 bp, Homo sapiens
ggaaacaagacagttctgtctgcagaagcccattatggctgtaactggagatgacacaggtccagtccaggtgcagcagcaaggagaaca

SEQ ID NO: 434732 - DNA, 100 bp, Homo sapiens
ggagatgatacttcctcttcttgacagccttatggttaagaaatcttctctacatataccctcagagtcttaattttgccaatcgtcaaggttctgctag

SEQ ID NO: 434733 - DNA, 100 bp, Homo sapiens
atgcttcagccttgatgacggccatcttcccccgtttttggctttcacccccaaccagtgaccaaagacttgaccactcaaagtccagctccccagaaca

SEQ ID NO: 434734 - DNA, 97 bp, Homo sapiens
ggaaacattcctgaagccatttcagcttgctgatgaccgtatggcactggtgtcaggcatcagcttagatccagaagcagcgattggtgtgacaaaa

SEQ ID NO: 434735 - DNA, 74 bp, Homo sapiens
gaatgtgaagaatcagaaatctttactgattccaatatatggatcagaaactttcgaagttggtagaagagctc

SEQ ID NO: 434736 - DNA, 75 bp, Homo sapiens
aaagaagagaaagacaaggatgaccaggaatgggaaagccccagggatactacatcaacctcgctaacgcctgag

SEQ ID NO: 434737 - DNA, 100 bp, Homo sapiens
tgcccggccaagaggcaaaggggaggttacgcagcaaaccatccagaagattttaggtgatgggcaagtcagaaagtcagatggatataactgatatcaa

SEQ ID NO: 434738 - DNA, 100 bp, Homo sapiens
gtttatcacctttaaagaagaagaacccgtgaagaaggttctggagaaaaagttccatactgtcagtggaagcaagtttgtcccgctggctggaagcctg

SEQ ID NO: 434739 - DNA, 75 bp, Homo sapiens
gactcagacgcttcctatccctacaaagccatggatcagtttgacaacttagaaaaacacacacagtggggaatt

SEQ ID NO: 434740 - DNA, 73 bp, Homo sapiens
cgcactggagtaccctgttcctggcagtgaatatgcaggttttgatgagacgcagccaacagctgaatctggt

SEQ ID NO: 434741 - DNA, 98 bp, Homo sapiens
atttacccaagccagagcacattggatccgagcagttaccaaggttcgactccagctgcaggagggcagcagaagaagcctttgtaaatgacattgac

SEQ ID NO: 434742 - DNA, 98 bp, Homo sapiens
cgcactggagtaccctgttcctggcagacgagattgaggagctgcgggccgagatgctggagatgcgggacgtctatatggaggaggacgtgtatcag

SEQ ID NO: 434743 - DNA, 51 bp, Homo sapiens
atgagcgagcgcctccgtcccaggctgacattcacgtttcattctgccaca

SEQ ID NO: 434744 - DNA, 100 bp, Homo sapiens
tactacctgctcctcggctggggattttgaatgtggaaatgacgtggaactgtcttttaccaagaatggaaagtggatgggcattgctttccgaatccag

SEQ ID NO: 434745 - DNA, 75 bp, Homo sapiens
ctggaccgtcaccaacacccgcttctctgtggatgaaggaacgaatgatcacacactttgaaaggtccaaaatgg

SEQ ID NO: 434746 - DNA, 100 bp, Homo sapiens
tgactttctgccggtagaaaagtcgtgagatggagaataaagaaactctcaaagggttgcacaagatggatgatcgtccagaggaacgaatgatcaggga

SEQ ID NO: 434747 - DNA, 75 bp, Homo sapiens
gcacccagacaggtggcgacggcagaggagctcctctgctgtttaatggctgccgctctggggaaatctttgcca

SEQ ID NO: 434748 - DNA, 95 bp, Homo sapiens
agcagccttggtgctcaggtgccagatgcaaagcaacctgaacaaaccatacctgttctctgtgctgctgggggcctggcagctggggaaccctg

SEQ ID NO: 434749 - DNA, 75 bp, Homo sapiens
ctgactacttcatcgtggtaggctatgaccacgagaagccagacaatgcagatcttcgtgaagactctgactggt

SEQ ID NO: 434750 - DNA, 91 bp, Homo sapiens
gttggagtgcgttcggtgtgccgtgggtccgcgctgcttccacccaacttcctgttagttttccaagagataacttcaccaagatgtccag

SEQ ID NO: 434751 - DNA, 74 bp, Homo sapiens
agatggatttttgcatgagacgcttctggacagctgtgattgtaggtggaattgattcaatgtctcaatctttg

SEQ ID NO: 434752 - DNA, 83 bp, Homo sapiens
cggcgtgatcacggccagcgaggacagggcgtctctggccgagcctctttttgtggaaaacgacagcagcagcagtggcctgg

SEQ ID NO: 434753 - DNA, 80 bp, Homo sapiens
tgatgccccacttggtgaatggagatgcagctcagcagattgtgtcagcagctaaggtgtgtggagctgccagtgagtca

SEQ ID NO: 434754 - DNA, 97 bp, Homo sapiens
agagaacgcattgccactgatgcttgctgagccctttcttggactccgtactgttggtgtaaccaaggcctggaggtctgggtggctcaggtttcct

SEQ ID NO: 434755 - DNA, 75 bp, Homo sapiens
ccgctcctaagcctgcacagccgcggcggcagcagcagtgagagggcgaagctgtgctcaggcccgggctggacg

SEQ ID NO: 434756 - DNA, 101 bp, Homo sapiens
gctgccaccatccgcgaggcaggagagaggaggaggagtgcggcgcggcggccccgggaccaaggagactcggggtctaaatgtgagaccaagaagttacc

SEQ ID NO: 434757 - DNA, 100 bp, Homo sapiens
ctaccttcttctgatccagacaggtgatgacacatctccacgtgattgaagaaaggaggaaccaaagcctctctctgctctacaaagtaccttatgtagc

SEQ ID NO: 434758 - DNA, 99 bp, Homo sapiens
agacagcatcgctggtcattgcccgccaagaaggacattttctgccccgagagttgcatgtcagtgaaaaaaccagtgaatcgccttccaaaccaggag

SEQ ID NO: 434759 - DNA, 75 bp, Homo sapiens
caaatcaaagaaagccgactacagatacacatatgatgaggctgagattgtgggcaaaaaattattaagccttct

SEQ ID NO: 434760 - DNA, 89 bp, Homo sapiens
tggctgaaattgagaaattggggcagaagtatcgagtggctctaaggccaactacacagacccccagagcaaactgcggttcagcacca

SEQ ID NO: 434761 - DNA, 100 bp, Homo sapiens
ggtaaacccatctaatcacagactcctatttgaagtatttgacgaaaatagactggtacaagggatttaaaggcaactgttccatgaccttcattgatca

SEQ ID NO: 434762 - DNA, 100 bp, Homo sapiens
ggtctacaaaggtctggacactgaaaccaccgtggaagtcgcctggtgtgaactgcagctctacattaatcatactcctccaccactgtccaagagtaag

SEQ ID NO: 434763 - DNA, 101 bp, Homo sapiens
ctgaaagtcccagatttttgctcattaacagaaaagaagaggagaatgctaagcagagtgtggggatattcagctttgccaggtatggcagtgatttttat

SEQ ID NO: 434764 - DNA, 75 bp, Homo sapiens
ccgagatggctaagaagtccatgccaggaggtcgtctgcagtcagcgtatccagtatgccaagaccgactcagat

SEQ ID NO: 434765 - DNA, 75 bp, Homo sapiens
tgcggggcctgggcctcccggtccgcaagcagcaaattgtggctactaatttgccccctgaagatcaagatggct

SEQ ID NO: 434766 - DNA, 75 bp, Homo sapiens
tgcccgagaagtgaccccagcaaaagaaaaatattgctgtacctaaattcaagtgtctgatgatttgtgagcctc

SEQ ID NO: 434767 - DNA, 75 bp, Homo sapiens
ggtggcagtcagcagccggcagcagcagcggtccaatatcagatggaaatgatgcggagccttcgccatgtaaac

SEQ ID NO: 434768 - DNA, 75 bp, Homo sapiens
tagaggagggttcgtccttctggaaccaagggctcacgtggaaagtggccttggacaagattcgctatgagagcc

SEQ ID NO: 434769 - DNA, 98 bp, Homo sapiens
ataccctttcaaatctccatctataggacctgaaggagaagaaggagaaggtggaggagaaggcaagccggaaagagcgaaagaaagaagtggtggag

SEQ ID NO: 434770 - DNA, 75 bp, Homo sapiens
gtgtgaggagttgctaaatgctcaggaactgcaagcacatgttgaccagataactgaaatggcagcagtaatgag

SEQ ID NO: 434771 - DNA, 101 bp, Homo sapiens
caacttgtccccaacttcatcacccctctcttccaaatcctgtagccataaatgtctggctaatggcatttacaggaggacatggatttgattgacatact

SEQ ID NO: 434772 - DNA, 98 bp, Homo sapiens
agtgctcatgctggaccagcagtatgacaccttccacaatggcagctgggtccacctcaccatcaacggctgaagccgacgtagcttctctgaacaga

SEQ ID NO: 434773 - DNA, 103 bp, Homo sapiens
tgaagaagtcggctctgggctccagtgcgggaatcacacacatacctcagcacccagtcagcttgaagagtttcaaatggaccctaccactgagaaatcaaga

SEQ ID NO: 434774 - DNA, 75 bp, Homo sapiens
cgtggggtcactggtgtatgtcatggaagtatgggaagactctctatgataactaccagcgggctgtggcaaagg

SEQ ID NO: 434775 - DNA, 51 bp, Homo sapiens
gaaggtctctggagacatcttcagcaggtaaatggaatcgcgttccatcct

SEQ ID NO: 434776 - DNA, 90 bp, Homo sapiens
cgcagcgcaccgagtggacattttggtctttgtccgcggctccgtggatggccgcgtgagacgctatgacctaaggatggggcagctctt

SEQ ID NO: 434777 - DNA, 78 bp, Homo sapiens
aggcctccaccctggcaggaatcccaatttgcctccacttagtgagcggaagaatggcccaagaggatgctgagaaac

SEQ ID NO: 434778 - DNA, 75 bp, Homo sapiens
aatgacagtctccaaattcgcctccatctgtaccatgttggctggggaacagaccagggaattggtggatttgga

SEQ ID NO: 434779 - DNA, 74 bp, Homo sapiens
ggacagttcgctacacagcaatgcatcgagcgccgcgcggtgaggttctctagtccacgctcgcagccatgccg

SEQ ID NO: 434780 - DNA, 85 bp, Homo sapiens
cgctggccgggctggctgcggccgccctgggccgggccccaccggacgcaaattgtggctactaatttgccccctgaagatcaag

SEQ ID NO: 434781 - DNA, 74 bp, Homo sapiens
cggtttgctgatcgccccagggatcaggagtcccgaaccgacagccacaagtggcgcccgaacagggacgtgag

SEQ ID NO: 434782 - DNA, 97 bp, Homo sapiens
gtaacatacagcactttgtggagaaagtcgtcttccacttgcacgaaagctttcctaggccaaaaagaggaatacaaacagaagcttgcacgagtaa

SEQ ID NO: 434783 - DNA, 100 bp, Homo sapiens
cgcttgtccgccagcacctcctcggcgagctcctccacttctacaaggtaccgaaagcacagtaatcactggtgtcgatattgtcatgaaccatcacctg

SEQ ID NO: 434784 - DNA, 85 bp, Homo sapiens
gtcggaggaaatactggttcttgaaccgaagactcataattgccggtggtggtgtgcacattgagccccggtatagacagttccc

SEQ ID NO: 434785 - DNA, 100 bp, Homo sapiens
ccgccgacgacccagcagccgccatggctctgctccgaggtgctggagaatctggtaaaagcaccattgtgaagcagatgaggatcctgcatgttaatgg

SEQ ID NO: 434786 - DNA, 89 bp, Homo sapiens
gaattttgataaaatcagagtgtggctgcaaagtgaaaagcttgaacgttccggaatgaggactacaccatacatgtgcagctgaatga

SEQ ID NO: 434787 - DNA, 82 bp, Homo sapiens
gaccacttactctcctatgatggcagcgaaaacttatcacggttttggtaaacgccctgcagaagatatggaagaggaacaa

SEQ ID NO: 434788 - DNA, 118 bp, Homo sapiens
gaagatgcctcgaactaaacaaattcatcccagaaatctaagaggtcctcgatgggcttcctggaatattggtgtgtttatttgcatcagatgtgctggaattcatagaaatcttggg

SEQ ID NO: 434789 - DNA, 74 bp, Homo sapiens
ctggccaagaagatcatcattaaggacggaggcacgcaaattgtggctactaatttgccccctgaagatcaaga

SEQ ID NO: 434790 - DNA, 90 bp, Homo sapiens
tgggcaagggctctgtgcccgtgccctgtacgactaccaggcaggggacaccgtggtgtttaaggatggccagtactggatccgaggccg

SEQ ID NO: 434791 - DNA, 83 bp, Homo sapiens
gccggctgcttccctgggctgggcgtcagccgccaccggcagcagcagcaccaccggacgacatgtagactgccaaagtgtat

SEQ ID NO: 434792 - DNA, 78 bp, Homo sapiens
gccgcccacgccgctcagcgcccttcctcactccgggacctgaggtacagccccgtggtggaggccggctcggacatg

SEQ ID NO: 434793 - DNA, 98 bp, Homo sapiens
tactcacagagttagagagagggatggtgaagcgggcccaggatgctgtgatcatcctggggggaggaggacttctcttcgcctcctacctgatggcc

SEQ ID NO: 434794 - DNA, 102 bp, Homo sapiens
ccttagtctgcaacttgtgcaagttgaagacgggggcttgtattcaggagagaagccttataaatgcacctgggatggctgctcctggaaatttgctcgctc

SEQ ID NO: 434795 - DNA, 83 bp, Homo sapiens
gcctcagtactctttgccgtacccaccggagcctggcgcagcctccctctattaccagacgcatcatgggctttgtgagtcgg

SEQ ID NO: 434796 - DNA, 80 bp, Homo sapiens
ggtttggtcattttccccggagcctttgactggtttctggagtgtcttgggacaaggtgcgcattcctggtgtgctgcag

SEQ ID NO: 434797 - DNA, 83 bp, Homo sapiens
gaagaaaccagccgaacttcagggtttccaccgttcgttcaaggttacaagaggacccacctgtgggtgtcagtggcgcacca

SEQ ID NO: 434798 - DNA, 100 bp, Homo sapiens
ggcaaggaaacagttgaaaaagtggttcgccaaggaagaggaattcccaagtagcgaatgccgcatcctcgaaggtaccactcctcagagcgaggcagcc

SEQ ID NO: 434799 - DNA, 97 bp, Homo sapiens
tccctcaggaagtagccgagcgatttctcagggtgatgacttggcaaggtcttgctcagtgtgcagaactctgctggcagctgagaggggaagccgg

SEQ ID NO: 434800 - DNA, 98 bp, Homo sapiens
agatgtcgaaggacaaggaagctgttgatcctcctgacagtgggcctccaccattgccaacatcctccctcccagaaggttattatgaggaagctgtg

SEQ ID NO: 434801 - DNA, 82 bp, Homo sapiens
gggcggagctgtgcgagagcctcctcacttggagatcctgaaggagctagacgagtgctacgagcgcttcagtcgcgagaca

SEQ ID NO: 434802 - DNA, 75 bp, Homo sapiens
tacagccatgtgtctctgcagaatgccacctcccctgtcatggagttttgggatactatactggcaattgctgga

SEQ ID NO: 434803 - DNA, 98 bp, Homo sapiens
cctcccagcggcgcgtgagcggcactgatttgtccctggggcggcagcgcggacccgcccggagatgagctcccctcccacccggtcactccgtccag

SEQ ID NO: 434804 - DNA, 101 bp, Homo sapiens
cgcagagccgagtgcagaagatctgggtgcccgtggaccacaggccctcgttgcccagatggcgcaccctacgacgcgcacaccaccggcatgaccggcgc

SEQ ID NO: 434805 - DNA, 112 bp, Homo sapiens
ggttcttcgaaaactgaagcagatgttgaacaacaaggtacgtggtcatctcccgggaggagagggagcagaacctgctggcgttccagcacagtgagcgcatctacttccg

SEQ ID NO: 434806 - DNA, 100 bp, Homo sapiens
cggcaagattacagacgttatcttactcagagtgctgagattgattctgatgacaccggaggcagcgctgctcagaagcaaaaaatctcctttcttgaaa

SEQ ID NO: 434807 - DNA, 100 bp, Homo sapiens
caccctcacagtttgctctgctcttccaacaccagtggaagatgatcacatcccagatatgaggccccaggattcctggcgaggtcctcctccccttttc

SEQ ID NO: 434808 - DNA, 75 bp, Homo sapiens
aactactggacaagtgtgcacaattgatccagcaagtgcagccgcggagccctgtacacaggcttttccatcctg

SEQ ID NO: 434809 - DNA, 82 bp, Homo sapiens
ccctgctgaggaagacaaaatgccgccctacgacgagcagacgcaggccttcatcgatgctactcccgagcccggagaggac

SEQ ID NO: 434810 - DNA, 50 bp, Homo sapiens
gattccaagtaactcttatttgatggctgtatgggcgaaaaagatgaccg

SEQ ID NO: 434811 - DNA, 80 bp, Homo sapiens
ccgtccgcgggtccgtggagctggagcagatcccccagccggctgagacaggaagagaatggagactacacatatgtgga

SEQ ID NO: 434812 - DNA, 112 bp, Homo sapiens
actgggtgaaggaagctgaaaccacagacatgactgagtcctccatgaagagtgcagctctgtcatttccactctgctctgctgcacagaaggcagaagccctggccgtccc

SEQ ID NO: 434813 - DNA, 75 bp, Homo sapiens
cggatctcagctccgacgcccgaggagaaggaggagtggattaagtgcattaaggctggtgaattaccagatctc

SEQ ID NO: 434814 - DNA, 108 bp, Homo sapiens
aaggaccttacttttccagagattttccgtcatctttatggatgtactctttgtgtatgctgtccgtgagtttgcatcgccagcttctatatattacggccttttttt

SEQ ID NO: 434815 - DNA, 49 bp, Homo sapiens
cacaacaggagctacgaggagttgtaccttctccaggcaaattccgttc

SEQ ID NO: 434816 - DNA, 82 bp, Homo sapiens
aagtacctgtggaccgtgtgctgccactgcgggggcaagacgaagggacaccacatcatttgaagcattctttcaatccaag

SEQ ID NO: 434817 - DNA, 98 bp, Homo sapiens
tcaacccaccgctgccgaaatgaagtataagttggaaaatggatataccttatttgattatgatgttggactgaatgatataattcagctgctagttc

SEQ ID NO: 434818 - DNA, 75 bp, Homo sapiens
cagaaattctgaagaatctaagccaggtaattctgaattgctcagctctgcagagtttattgcatttgctgagta

SEQ ID NO: 434819 - DNA, 90 bp, Homo sapiens
gtaaaagccgaggaaaagtagaaattgatcagcaacaactaactcagcagcaacttaatggaaactaggccagattacctgtccctaata

SEQ ID NO: 434820 - DNA, 101 bp, Homo sapiens
tcccaccttccaagtcctggcatctcaatgcatctgggaagctacctgcattaagtcaggactgagctatcagttgagggatttgcagttgataaaatggc

SEQ ID NO: 434821 - DNA, 100 bp, Homo sapiens
tttaaggaatactgcccgatggtcttccgtaacctgcgggagaggtttggaattgatgatcaagatttccaggtttaccgacaagactgtgaaactttcg

SEQ ID NO: 434822 - DNA, 114 bp, Homo sapiens
ctggctccttggcagcaatggctgtatttgaagataagtttaggccagacatggagtttctgtttcagatgatcgggctgaacaacgaacctgtctcatttgtggggaccgcgc

SEQ ID NO: 434823 - DNA, 80 bp, Homo sapiens
atcatgtctgcgagccaggattcccgaccctcaaactgacacaagacctacagagaaaaccctttgccaaatctgctctc

SEQ ID NO: 434824 - DNA, 101 bp, Homo sapiens
gagagttctccaaacatgatcgtttactgcaaagtactaggttttgacaagcttgcatcatgcgtgagtataagctagtcgttcttggctcaggaggcgtt

SEQ ID NO: 434825 - DNA, 102 bp, Homo sapiens
ctgagggggaggagacggtggggggcgacgatggccttctgaggggctgggacaccagggtacccggcaaatttctcttcaccagcaaaaggtaactgccca

SEQ ID NO: 434826 - DNA, 74 bp, Homo sapiens
aatgtccgcatcgcaaccaccgccctggccatctaccatgtgatttttctacaccaccgccacactcatcatag

SEQ ID NO: 434827 - DNA, 100 bp, Homo sapiens
aagtccgggagctgggcggccatttaccaggtggagctcatgaaggacttcagcatttgggtccttttggcaacatccccaacatcgtggcagagttgac

SEQ ID NO: 434828 - DNA, 96 bp, Homo sapiens
cctcgccatgccggcccggcggctgctgctgctgctgacgctgctgctgcccggcctcgggatggtgatggaatttcctgataatgtgttaaatct

SEQ ID NO: 434829 - DNA, 83 bp, Homo sapiens
ctggtcaagacgctgcagcgggactgcctggggttcagtcggctgccgtcaatgtcatctgcgagctggccagacgcaaccct

SEQ ID NO: 434830 - DNA, 100 bp, Homo sapiens
gaagaagcaaccaagagagtgcccaaactgaaaaagctggatgattgttgtaggagataaagttgttttgatgcctgtgaatgcagggcagccactacat

SEQ ID NO: 434831 - DNA, 100 bp, Homo sapiens
gggcatgagttagtcgcagacatggacaccaaacatttcctgccgctcggttcattttaatcgtgatggatccttgatagtttcaagtagctatgatggt

SEQ ID NO: 434832 - DNA, 96 bp, Homo sapiens
caaagccatcggatggatgagcagtcacacagactttgaactaaaattccagatggcaaactcaatgaatggcagaaaccctggtggtcgaggagg

SEQ ID NO: 434833 - DNA, 100 bp, Homo sapiens
gcgggatcccagcctcaggcgtgcgcggacggtgtgcgggaaaatgaactgaaggatgccacccagggagagtatctcctgagatcccatcatgcaggcc

SEQ ID NO: 434834 - DNA, 100 bp, Homo sapiens
tgctggaacctgctgtatctactcaagagtggaagttttcacagagcccgcggttcccttcaaaaagcggctgcaagatctggaggtgcgggagaaggag

SEQ ID NO: 434835 - DNA, 74 bp, Homo sapiens
caaagctgcagaaaccacagtggtagagggttacacatcattttggaatgactgtatatcatctggattacgtg

SEQ ID NO: 434836 - DNA, 90 bp, Homo sapiens
tcctggacggtgtcctaatggaactgcaagactgtgcccttcccctcctgaaagattatttgcatgggtgcaaaagaaaatggtttgccg

SEQ ID NO: 434837 - DNA, 75 bp, Homo sapiens
ccccggtacatctgaaagccgggaaatggtactaggttttgacaagcttgcatcatgcgtgagtataagctagtc

SEQ ID NO: 434838 - DNA, 97 bp, Homo sapiens
tgacctccctcctccgagggaggggggttgtgaccccagcacctgctgaagattgtatttccagcagtacagaacccaaacctgatccaaaaaaggc

SEQ ID NO: 434839 - DNA, 100 bp, Homo sapiens
aatgctctgcatcatgctgcactaaggggaaatcccagaaactagaaaaactgcttttggaattatctctacagtgaagaaacctcggccatcagaagga

SEQ ID NO: 434840 - DNA, 99 bp, Homo sapiens
cagaaaactatgggaagattttggtagagaagaatgaacattgtattgagaacaatatagatttgcagattctgatacagagcgtctgtgagacgatgg

SEQ ID NO: 434841 - DNA, 75 bp, Homo sapiens
ctcttggcatttggctttgcctttctggacacagaagtatttgtgacagcttcttctcagcctgttgataaccat

SEQ ID NO: 434842 - DNA, 50 bp, Homo sapiens
gtactttgagaattatggatctccggataggagtatggaatgtcccatat

SEQ ID NO: 434843 - DNA, 82 bp, Homo sapiens
ctgctcacggccattcactgcccatgctgagcgcctctcacacaggctcccgagccagccgggaggacacttactacagctg

SEQ ID NO: 434844 - DNA, 71 bp, Homo sapiens
cgtgatgaataaaaacatttcaactccctacagttgtgccatgcatgaagaggaagatgatgatgtagtgg

SEQ ID NO: 434845 - DNA, 154 bp, Homo sapiens
ctgcccagcagggctccagagtttcttctgctgccacagttctcaaaataaatacttcagtatcaaccaggacttaaagtgcagtaagagcttgcctggcctgtgtgcagagctgcctcatcctgaaattctgggagttgaaagccccagggca

SEQ ID NO: 434846 - DNA, 74 bp, Homo sapiens
ggaaatgaagtataataccaagaaagccccacttgttcctattatccttgccgtaaataaatgtgacaaagctg

SEQ ID NO: 434847 - DNA, 101 bp, Homo sapiens
cagaataatcggagccatggccatattttttcaagtgactgtaatcaatgagagactgaagacagatcaacatacatcttacccatgctctttcaaagact

SEQ ID NO: 434848 - DNA, 100 bp, Homo sapiens
tgcactcccggccgggtggtgggcgcatatcctgggtagcctctaggaagcgctagacacatgctgaccggttccctgatgtgttacctgcttctgctac

SEQ ID NO: 434849 - DNA, 75 bp, Homo sapiens
tggtgaaagctgcacagaagaggagaaaggaactcgggaaacttcctctgaaattcccagaaatgaatgctatga

SEQ ID NO: 434850 - DNA, 90 bp, Homo sapiens
caaccttcccagaaagtccaagctcgtggttgtttacattcagagctctatcaataagaggaatacatattacagtgaattcgacaaccg

SEQ ID NO: 434851 - DNA, 75 bp, Homo sapiens
gggagccgctggagcgggaagcccggaggccgcgctgcgccggagaaaggtgatgcagagccagagagtccagac

SEQ ID NO: 434852 - DNA, 90 bp, Homo sapiens
aggcgccggccggctgcgaagacgcggtgggccgcccctccggagccaaaaacctgtatatcatctccgtgaaggggatcaagggacggc

SEQ ID NO: 434853 - DNA, 75 bp, Homo sapiens
gagaggcaggcaggggatcccggacatgcctgaggaaacccagacccaagaccaaccgatggaggaggaggaggt

SEQ ID NO: 434854 - DNA, 102 bp, Homo sapiens
tacagagggtgcccagcagggtcttctacagtggctgttgaagaggctgaagctcagagtcaagatctccactgaagttggcatcacaaatgttgatctttc

SEQ ID NO: 434855 - DNA, 75 bp, Homo sapiens
catatctgacagcccgagatcctggatacaggtgcagagttatggaggttttgatgactatggtggctataataa

SEQ ID NO: 434856 - DNA, 90 bp, Homo sapiens
aaaggccgcgtcgtgatcgactcggacacagaggacagcggcagcgacgagaacctggatcagaacctcaagaaggcatgaagccagccc

SEQ ID NO: 434857 - DNA, 80 bp, Homo sapiens
ctgggtgagttcatgcaaagcgctgagaacaggaccccccgcccccggaccagttactctccacaagaaaattcacacaa

SEQ ID NO: 434858 - DNA, 117 bp, Homo sapiens
atttgttggggagaagaggattggaggtgtcagtgttaaaggaacctctacaacgaaggtgaagccacggaagataagtcctgtgcctcctgattgctgagtgttcacctggacctt

SEQ ID NO: 434859 - DNA, 100 bp, Homo sapiens
caggcaggcatctatcttgaagagttctaaagttcctgttgcttcagacaatggatgagcaatcacaaggaatgcaagggccacctgttcctcagttcca

SEQ ID NO: 434860 - DNA, 100 bp, Homo sapiens
aaaacgggcaataagactctttaaagaaggcaaggagagaatgtatgaagaacagtcacaggacaggagagagaagctcttcagaaacagctggatgaag

SEQ ID NO: 434861 - DNA, 82 bp, Homo sapiens
ccggttgttgccatggcattcgccagctggtggtacaagacggaagaaggtagataatgactataatgcccttcgagaaaga

SEQ ID NO: 434862 - DNA, 98 bp, Homo sapiens
gagcttgggctgaacttcactgtggtgaacaatgacctgggagaggcgcagtatgtccgtggttcagaccctgtattaaagcttttggacgacaatgg

SEQ ID NO: 434863 - DNA, 100 bp, Homo sapiens
gaggacatcgacccccgccggactgcagtgacaacgcccaagggggagcgggaagagaggcagagcacttgtcctccccttggggagaatcctcaccaga

SEQ ID NO: 434864 - DNA, 90 bp, Homo sapiens
acattcattgcggaataacatcggaggagaaggaaaattgcctaagaattatgacccaaaagttaccccagatccagaaagatggctgcc

SEQ ID NO: 434865 - DNA, 75 bp, Homo sapiens
tgagtccgaggccacttgcaatcctcccaagaaggtgaccacagtgattcaaaaccccatgccgattcgagaagg

SEQ ID NO: 434866 - DNA, 76 bp, Homo sapiens
tcaacatgatagagcagagtggaccaccccatgaacctcggactgcaagatggaggaaggcgggaacctaggaggc

SEQ ID NO: 434867 - DNA, 82 bp, Homo sapiens
tcaagtgccacatcaacgtgtatccacacaagcaggaatgggtaccacagaccatgtcatcgtcctggcgtccacgaaccga

SEQ ID NO: 434868 - DNA, 82 bp, Homo sapiens
gattttgttattttctgccctgaaccagggcagaagcttatggtcagaggattcccagctcccaaccccgcagctagccaac

SEQ ID NO: 434869 - DNA, 100 bp, Homo sapiens
tccgacacgccggggcgcccgcgcgcggggaccccacgggtacatagtggaatgtcatgggatcacccttcttccccagttcttgggcatgtaccggctt

SEQ ID NO: 434870 - DNA, 82 bp, Homo sapiens
gcgacaagccgctggcagccgcggatctcaccgccgctcagggctccataaaaatacagactcaccagttcctgctttgatg

SEQ ID NO: 434871 - DNA, 114 bp, Homo sapiens
cacgactgggatcctacgtgcatgaagatggacgaggtcctgtacagcatcgccgagaagatgttcatgagagcgcagtttgactatgatcccaaaaaggacaatctgatccct

SEQ ID NO: 434872 - DNA, 153 bp, Homo sapiens
gaaaacaacatacctgacaatgaaaccgggaggaaagaagacaagagagaacgcaaacagtttgaagctgaggatttttccttgcctgcattaattgaacaaggagagggattttcccaagttctcaggatgcagcctgttatccacctccag

SEQ ID NO: 434873 - DNA, 87 bp, Homo sapiens
gcctggggaatgagacccaaactgctcatacagaattacgcatttccacttctaatgacgagtaccggaagcgagagtgtcgagacc

SEQ ID NO: 434874 - DNA, 100 bp, Homo sapiens
ttggtgcacaaaatactgtcatttgctcaaagccatctgtgttttgtgtgagcctggaccccaagaccaataccttggcagtgaccgggggtgaagatga

SEQ ID NO: 434875 - DNA, 90 bp, Homo sapiens
cggagacgcacggagcggccgggggctcggccgggccgtcccggcctgcgcagcctgaggtctatgaaggcctagacatcatcaccaaca

SEQ ID NO: 434876 - DNA, 82 bp, Homo sapiens
caaaaactcaggcttcgccacctgcgtgcaaagtatcgagaaccttccctgcgaacttcagaggaacttccagctgatgcga

SEQ ID NO: 434877 - DNA, 96 bp, Homo sapiens
attggggaagataccgatgtcttcttttccttatatgacatgagggaaggcaagcagatcagttacatgggaataggactctcggctcaaggcgtc

SEQ ID NO: 434878 - DNA, 75 bp, Homo sapiens
aacaaagacaacattgttcctggaacgccctctttttaaaaaaggaacaggagtacagctgtgtagtaaagatgc

SEQ ID NO: 434879 - DNA, 83 bp, Homo sapiens
cgttgcgtgccctacttcaaggataagggcgacagcaacagctctgccggctggaagaaaattgtgttaaggaatggtactga

SEQ ID NO: 434880 - DNA, 113 bp, Homo sapiens
ggcgcgcccgcccggggagccgttcttggtttcaggcccgcactcgacagccaccgccgcccccaacgtccatgcctgaaattcctagaggacctgtgcaacaacctcttgag

SEQ ID NO: 434881 - DNA, 87 bp, Homo sapiens
agaattcagaaggagctggcggacatcactttagaccctccacctaattgcagggcagcacattccccctgttcccaggtgggtcca

SEQ ID NO: 434882 - DNA, 75 bp, Homo sapiens
tacggcggcccctaccacattgggggcagccccttcaaggccaaagtcacaggaacccttctctgaagcaacagc

SEQ ID NO: 434883 - DNA, 75 bp, Homo sapiens
caagattcaccatgtacaccacatcatctaaggttttcctttggaatatggataaatacaccatgatacggaaac

SEQ ID NO: 434884 - DNA, 100 bp, Homo sapiens
aaggaggttggcttcttcatcatccgggccagccagagctccccaggggacttctccatctctgtcaggacccagatgatgtggtaccagttggccaaag

SEQ ID NO: 434885 - DNA, 98 bp, Homo sapiens
agcaggctgctcattacctaagatactgaagtactctttcccagtgggactaagaaccagcagaacagatatactttctctcaagatgtctctccagc

SEQ ID NO: 434886 - DNA, 100 bp, Homo sapiens
tggggggccgccaccggccgccgccgccgccgcccaggcgcagtgaagtacatgcgagaagccacgccctatgtgaagaaaggatccccagtatccgaga

SEQ ID NO: 434887 - DNA, 100 bp, Homo sapiens
agctggaactgcagtgctgcatcgactggacccatgtcactgaccccctcataggatgcttggttaccaagtaaaggattccaaagtggagcagcaagac

SEQ ID NO: 434888 - DNA, 88 bp, Homo sapiens
ggtattggatgattcgtagctaagacttcgcgacacccttgaagctgagaaatgttttgattacgaagatgcaggctaccagactgca

SEQ ID NO: 434889 - DNA, 90 bp, Homo sapiens
gttttcaggagaaagctggctgtgatgagatctgggaaaaaatttgtcagggcgataatctgatggctttggcagaagcaacagttgctc

SEQ ID NO: 434890 - DNA, 100 bp, Homo sapiens
gaaacagacattcaacatgattgcatttgaaggttggccaacggtccagatgtgctggagacagacggcctccaggaagtgcctctctgcagctgccgga

SEQ ID NO: 434891 - DNA, 100 bp, Homo sapiens
aggaaaagtcaggggagtgttgaagactctgcctcctacaaatatacacgatgaggcgagtggtacgacagagcaagtttcggcatgtatttgggcaagc

SEQ ID NO: 434892 - DNA, 76 bp, Homo sapiens
tgatcgtcctgctgctgatggtgtgcggtctatgaaaattatcctacttatgatttaactgaaagaaaagatttca

SEQ ID NO: 434893 - DNA, 82 bp, Homo sapiens
gggcctcaaacgtggagatcaactcctctctgttaatggagtggtgtggacactgccagcggctgcagccgacttggaatga

SEQ ID NO: 434894 - DNA, 100 bp, Homo sapiens
ggatggactcccaggacaccctggacagagaggcgagactaacaacgacattgcaccccgaggagtcaaaggagcaaaggggtaccggggtcccgagggc

SEQ ID NO: 434895 - DNA, 100 bp, Homo sapiens
gaggatatcgtgtctggagcagtggagcccaaagacccctggagacatggctgaccccgcactacatctacccaccagccatcgtgcagcccagcgtggt

SEQ ID NO: 434896 - DNA, 98 bp, Homo sapiens
gaggatcagtctgtctcaagcagtcagagtaaggctgtagcttctggacagactcagacagtccacaagccctagccatgccgtggtagccaatgttc

SEQ ID NO: 434897 - DNA, 100 bp, Homo sapiens
ctcgctaacaactgcccagctttgaggttcttttgaagtaaccagtgatcttttttgcttaccctcatcaacagaatggatgaagatagatttgactgtg

SEQ ID NO: 434898 - DNA, 100 bp, Homo sapiens
gccacactttacctgaagaatggaagtatttgcccttccttgccttaccagatggcgcacacaactaccaggaaggatctgggattggcacaagactctg

SEQ ID NO: 434899 - DNA, 80 bp, Homo sapiens
cagagagacgtgaaacatgtgaacactcaagtgaagcaaaagccttccatgattacatcatcacgaagtatgtatatgag

SEQ ID NO: 434900 - DNA, 100 bp, Homo sapiens
cgcagatcggcgcccagcaatcacagaagccgacaaggcgttcaagcgaaaacatgaccgctgagcccatgagagcctggcccaactagagaatctgtgc

SEQ ID NO: 434901 - DNA, 59 bp, Homo sapiens
ctaagacgccaggatttcctggaagcagagaaatgaaaatgtttcgatgaaagatcctc

SEQ ID NO: 434902 - DNA, 74 bp, Homo sapiens
tgtccctgaccatggctccctgcagtaccctttaacgctgcagaaccttggcctgaaaatgctacattatatca

SEQ ID NO: 434903 - DNA, 90 bp, Homo sapiens
gcagctcaggaggctgttaaactgctccatctgatccactggaactccactctgtttggcagcattgatgaggctgtggggaagccgcac

SEQ ID NO: 434904 - DNA, 75 bp, Homo sapiens
tcaaccttgtgggatgtgaaaactctgttactgaaggacttttcttggtagagatggaaatccaaataaacggaa

SEQ ID NO: 434905 - DNA, 121 bp, Homo sapiens
cgactggaccgggaaggagcatcccaggacctaccagaatctggaacatcatttacagcgagcaatttcagcacagcaagtgtttagagaaaaaaaagagagtatggtcattcctgttcct

SEQ ID NO: 434906 - DNA, 100 bp, Homo sapiens
ctgcaaggaccccctccggctcaagtgtgtcaagcaaggtactccaaagattcaggtttactcacgtcatccagcagagaatggaaagtcaaatttcctg

SEQ ID NO: 434907 - DNA, 75 bp, Homo sapiens
gctacagatatgtcaccaagccgcctgcacctcccaactccctgatgaacaagagaactgggcaacccatgatcc

SEQ ID NO: 434908 - DNA, 82 bp, Homo sapiens
cccaagcccgggcgccaccgctgccacctccgcgaggtgtggacactgccagcggctgcagccgacttggaatgacctggga

SEQ ID NO: 434909 - DNA, 101 bp, Homo sapiens
gggacagcgacgacgcggaggcagagaagggaacgcccggcccagccccgtagttaaaccagagagcaatgacaaagaaacagaagctgcgtatgaatcag

SEQ ID NO: 434910 - DNA, 75 bp, Homo sapiens
cagactccacactcctagcaatggatatcaaagtattgcagagtgccttagcagccatccgacatgcccgctggt

SEQ ID NO: 434911 - DNA, 75 bp, Homo sapiens
cgaggaagctacacttttcaccaaggaactggtgctgcagcgagagaaaactttagaaactgttcctttggagag

SEQ ID NO: 434912 - DNA, 80 bp, Homo sapiens
ggccggcctcgcaaggcgcttcccctttccagagagccagaaagaagattttttatcaagcagaaatgcatcgaacaacg

SEQ ID NO: 434913 - DNA, 100 bp, Homo sapiens
cttatacttcagttgttcagtcagattggaccctgtaaaagctgtaaaatgataacagagacaatgggccctgcttgggatatagaaaaccaaaccagcc

SEQ ID NO: 434914 - DNA, 131 bp, Homo sapiens
atcgttctatttctctagctattgccttattttttctcatggatgttcttcttcgagtatttgtagaaggggatggtctcactgtgttgctgatcttgaactcctgacctcaagcaatcctctgtcttggc

SEQ ID NO: 434915 - DNA, 50 bp, Homo sapiens
atagcaatctggttttcttggggttctcggaccagcagtgaccttcaaag

SEQ ID NO: 434916 - DNA, 76 bp, Homo sapiens
tggccagatttgcagatggctctgctgtagtacaggttttgaacgaagaatgtgatcagaactggtacaaggcaga

SEQ ID NO: 434917 - DNA, 100 bp, Homo sapiens
gcggccgccgcagccggggcccccgccgccgccggagcgatggtggttgctatttcaggcccagacataatcaaatccatgtgaagaaaagagatttctt

SEQ ID NO: 434918 - DNA, 50 bp, Homo sapiens
caacagctctgccggctggaagatcactttcaggaaagatcaccttgagg

SEQ ID NO: 434919 - DNA, 100 bp, Homo sapiens
acagcagcgactttggggcccgtcaccctcaggtcctggtgcttgatggtcgaggccatctcctgggccgcctggcggccatcgtggctaaacaggtact

SEQ ID NO: 434920 - DNA, 82 bp, Homo sapiens
agaagtgctgcctggtgcagaggatcctggaggcctgggaagccaacgaccacacgcaatggaaatcatattatgtagaata

SEQ ID NO: 434921 - DNA, 75 bp, Homo sapiens
gtttctgctgaccgcgggccctgccctgggctggaacgaccctggaagagagaagggcacagttacctaagtatc

SEQ ID NO: 434922 - DNA, 76 bp, Homo sapiens
agcgtgtcaggcggagagacccgccgccagtcaggtcaattcagtgaagatatgatacccacagtgggcttcaaca

SEQ ID NO: 434923 - DNA, 100 bp, Homo sapiens
gccggactgcggttggggcgggaagagccggggccgtggctgacatggagcaggacgaaaatgatgatgacgatgactggaacccctgcaaagcagcagg

SEQ ID NO: 434924 - DNA, 51 bp, Homo sapiens
gtgatctcccaccttagcctcccaaatggctatatgcatccagttcatcct

SEQ ID NO: 434925 - DNA, 82 bp, Homo sapiens
gctatgccttcatcgagtacgaacacgagcgagacatgcactatgtggacgagtgctcactagcagaaaaaacctgtgtgag

SEQ ID NO: 434926 - DNA, 105 bp, Homo sapiens
acaggtccttggctggaagaggctggataaaatactgcatttgagaaagatcagtctaaagaaaaggagaagaaagtgaaaaaaacaattccttcctgggctacc

SEQ ID NO: 434927 - DNA, 75 bp, Homo sapiens
aagattgcttgcaacaattgttatgcttatttaacccttagtggcttctgaagaaaatggcagaaacatcgccag

SEQ ID NO: 434928 - DNA, 60 bp, Homo sapiens
cagacaagacacttttcagaaagacaggggaatccgtaccagagtaccagatggcttttc

SEQ ID NO: 434929 - DNA, 101 bp, Homo sapiens
tgtagctctgatgagtgcaatgacaacatcatcttctcagaaggcacagaccccacaggctcctcggacactgggtccatcacctcctgccccatcatcca

SEQ ID NO: 434930 - DNA, 100 bp, Homo sapiens
actcagctgacattctacacggagcagtaccgcagtcgccgccgcagcaaagctcaaatagctataactgtaccaaagacatggaagaaaccaaaagatc

SEQ ID NO: 434931 - DNA, 82 bp, Homo sapiens
caaggagctaaagcagcgtgcgttcagccctggggtgcattgtggccaggtatgaaacctgaaagtggtttaattcagactc

SEQ ID NO: 434932 - DNA, 75 bp, Homo sapiens
ctgttgcctatccagaagaaaatacactactcatcaaggaagaaccagtctgaccagtgcacaggacttcagggc

SEQ ID NO: 434933 - DNA, 75 bp, Homo sapiens
ctttcaatgacaaaaagtttgtcattaaacccatcgacaagaaggcacctacctagaggatcaagacataatggg

SEQ ID NO: 434934 - DNA, 101 bp, Homo sapiens
aagacgatctgcacttcgcattttggcattgacatttaattttagggtcctttatatagaagggagaggtgtacaactatgagcctttgacacagctcaag

SEQ ID NO: 434935 - DNA, 82 bp, Homo sapiens
ctgaaggccgtgaacgactccatgcacctcatcgctatcaccggctatgacgtcacaaagcctactgcctgctaatcggcaa

SEQ ID NO: 434936 - DNA, 90 bp, Homo sapiens
tttgattaactcattcaaggttacccagttggttatatcttaagtgtggtgctgctaacattgcccaggcagcatctggttcagctttat

SEQ ID NO: 434937 - DNA, 80 bp, Homo sapiens
ccaaactgtgttgtttcagctgtattagggtgatcgaggaaacatctcaacatcttctaaaccagcctctacatcaggaa

SEQ ID NO: 434938 - DNA, 82 bp, Homo sapiens
aaggcgaacgcggtctgcaagctgacgtatccgcttacaaacacgcagatggcaagaagattgatggcaggagggtccttgt

SEQ ID NO: 434939 - DNA, 100 bp, Homo sapiens
acaatggctaaaacagcaatgggcgggagtcatggatgtagatgctgaaagagagaagataacacaggagatcaaggagctggaaaggattttggatccc

SEQ ID NO: 434940 - DNA, 75 bp, Homo sapiens
caagcagcaagtgcgcggttggggccactgcgaggccgttttaggtgatggccattgccactttggctgcctgtt

SEQ ID NO: 434941 - DNA, 82 bp, Homo sapiens
gacaagtggaggcgccgctctagcggccgggactctgaactatggcggaattgaatgatctggcacgggaccctccagcaca

SEQ ID NO: 434942 - DNA, 97 bp, Homo sapiens
tgagatcaaatggcacttcattggccacctacagaaacaaaatgtcaacaaattgatggggtagtcagcagagtgcacacagcagctgtcatccctc

SEQ ID NO: 434943 - DNA, 75 bp, Homo sapiens
gattcttttacctggcaggtaactttggaaggtcgtgctggagctctatgtggttatggatgatgaatcagatga

SEQ ID NO: 434944 - DNA, 50 bp, Homo sapiens
cggagcctttgactggtttctggagcacccccaaattcagaaggagtccc

SEQ ID NO: 434945 - DNA, 83 bp, Homo sapiens
agtgctctgttcacggctccatcgctgttagtgtggtggacacaggcctattcatcaacatggctgagagagtctactttggg

SEQ ID NO: 434946 - DNA, 100 bp, Homo sapiens
atggaacagaaaagatggattcagttatttaaggtcggtgcccactttctggaggcagtggtgaggaagttcgatgccatctataaatacggaagcgaag

SEQ ID NO: 434947 - DNA, 89 bp, Homo sapiens
gcgaagatcgccaagactcacgaagccgtgctggtatagaggactctaagaagtggggcatgctgtttctggtgaaccagctgtttaaa

SEQ ID NO: 434948 - DNA, 87 bp, Homo sapiens
aaacctggcacggctcttgcttccggaacagcatatgccatatatgagctggctgtggcttcatttcccaagaagcaggagtgactt

SEQ ID NO: 434949 - DNA, 75 bp, Homo sapiens
tcgctgcgctcatggcgtcgcccggacaatgcagatcttcgtgaagactctgactggtaagaccatcaccctcga

SEQ ID NO: 434950 - DNA, 75 bp, Homo sapiens
gacggcgcgggaactctacgccaacgtggtgctgggaggtacttggaaggctccatcgcccctgaagacaaagga

SEQ ID NO: 434951 - DNA, 83 bp, Homo sapiens
cagacgacaagcacacactatggcgctgaaacggattaataaggatgtatcaggaatgccagctctgtgctctccaatttccc

SEQ ID NO: 434952 - DNA, 120 bp, Homo sapiens
gcgagctcgcgatgagtggtctcggcaggctcttcgggaaggctcccatcccagatctcaaagtgtttgagcgtgagggagtacagctgaatctgtctttcattcgaccccctgaaaacc

SEQ ID NO: 434953 - DNA, 75 bp, Homo sapiens
ggagtgttggctgcatatttgcagaaatgtttcgtagaaagaaaccactgattgcttgtgtggagaaacagctat

SEQ ID NO: 434954 - DNA, 75 bp, Homo sapiens
tgcattgtggtgggttttacttcaggttatgtacgcttctacactgaggatgaggatgaagatgacgctgatctc

SEQ ID NO: 434955 - DNA, 75 bp, Homo sapiens
ctggcggccgacgcaggcaccttcctcagtcgcgccgtgcagtggacacgtcgatctgacaatgctaggagcgat

SEQ ID NO: 434956 - DNA, 100 bp, Homo sapiens
aaaatcagaaattaagattctaagcataggcggaggtgcaggtcctggtgcttgatggtcgaggccatctcctgggccgcctggcggccatcgtggctaa

SEQ ID NO: 434957 - DNA, 75 bp, Homo sapiens
gcagctccagcccggcccggcagcgacatggaaggtcagcccaaggccaaccccactgtcactctgttcccgccc

SEQ ID NO: 434958 - DNA, 98 bp, Homo sapiens
tattgtctgctgcatccaaatcttctccctggacctcgtgcatacgaatgcctcggctggggtggagcgcctcttgctggggaacaaatgtgacatgg

SEQ ID NO: 434959 - DNA, 100 bp, Homo sapiens
ttaagagcagcttattccaagctttgctagcacccctacggagaacgagctgaagttccactacatggtgcacacatctctggacgtggtggatgagaag

SEQ ID NO: 434960 - DNA, 101 bp, Homo sapiens
ccgggggaagctggccttgggcaataatgacgatgaggacctgacaccagagcagaaggcagagcgtgagaaggagcggaggatggccaacaatgcccgag

SEQ ID NO: 434961 - DNA, 144 bp, Homo sapiens
cccactcgagcgccccgggagccagagggcgggggtcctcgccgggaccctcctgtgggcccaggggcgaggattaaatccaccacacagggtgaaatctatctccatgacaacattcacacaacaggaaattgaattcttaca

SEQ ID NO: 434962 - DNA, 82 bp, Homo sapiens
ccaagagggatccttcacccgtgtctggctccaccgaggacaccgcgtccagcttgtgtggcgaggaggacacagaggacga

SEQ ID NO: 434963 - DNA, 101 bp, Homo sapiens
aaagcataagatattctcgtcagcatcacagtattcagatggaactttatattgctgttggaatatctggagccatccaacatttagctgggatgaaagac

SEQ ID NO: 434964 - DNA, 75 bp, Homo sapiens
cagcaatcagctggcctggtttgatactgacctgtaaatcatcctttaggaggagattgtatttcgttactacca

SEQ ID NO: 434965 - DNA, 100 bp, Homo sapiens
agatgtgacttgctcctgcttgccttcctccatgattgtgaggcctccccagccacgtggaactgttttccaagaccttccaaacacattggatgaaatt

SEQ ID NO: 434966 - DNA, 101 bp, Homo sapiens
ctggcggccgcggagtcttcggcgagacctaccgggccctgtctgtgccggccgtgagctgcggcaggacggctggagctttggctagatcagagtctaag

SEQ ID NO: 434967 - DNA, 90 bp, Homo sapiens
gccgcggactgtcctttcgtggctcactccctttcctctgctgccgctcggtcacgcttgagacggggtttcaccatgttagccaggatg

SEQ ID NO: 434968 - DNA, 100 bp, Homo sapiens
gaatcatgagcccaatgtctccaaaaggttgctgaaaagccaggagtcaaaatgactgagcgctttgactgccaccattgcaacgaatctctctttggca

SEQ ID NO: 434969 - DNA, 100 bp, Homo sapiens
gactccgggcagcccaaggaaggccaacgtggaggcctcacgcagctccacagacagccccagctcggtgttcctcagatggtatacctcaagtttacta

SEQ ID NO: 434970 - DNA, 83 bp, Homo sapiens
aacagcccgcccgaccccgtcccgaccctggccgccccgagcggagcctggaggttctccggcgcttggcaaccaaatggggc

SEQ ID NO: 434971 - DNA, 101 bp, Homo sapiens
agggcgcgagcgagcagacgcgcacaccggcgagccaagttccgcagcctggcatggcttctggggacctttacgaggataccgaagtgtataaagctaca

SEQ ID NO: 434972 - DNA, 50 bp, Homo sapiens
gatgatgatgatgatgactaacagatatctgtgtgaggctggattttctt

SEQ ID NO: 434973 - DNA, 100 bp, Homo sapiens
gaaaacggaaacagagcacccaagatgaagatgctgttagcctttgcagtctcgacataagtgtcagcccaaggccaaccccactgtcactctgttcccg

SEQ ID NO: 434974 - DNA, 74 bp, Homo sapiens
tagaggaggctggagattccacccaaatcctcttctccaagaagttcaacaatgtggaattcacagtaaacaag

SEQ ID NO: 434975 - DNA, 100 bp, Homo sapiens
tcaacatgattgaccagaaccgtgatggcttcattgacaaggaggacctgcacgacatgctggcctcgctgggtgagcccgtggtagcagcagaagcagg

SEQ ID NO: 434976 - DNA, 83 bp, Homo sapiens
tagaaagtgaaatcagaggagatgtaactatcggccaaggatccaccacaacacttcagaaacgctttgaacccactggtttc

SEQ ID NO: 434977 - DNA, 74 bp, Homo sapiens
acccgtctgtgcagcaggacatcaagttcttgccgttcaagctcctttacaattccaaagaaaaataaaaagaa

SEQ ID NO: 434978 - DNA, 90 bp, Homo sapiens
gagaaagccagttatccacggactggaagatcaaaagagggcgtttagatgccaaccatattacctcagtccccgaggacagttttgaag

SEQ ID NO: 434979 - DNA, 90 bp, Homo sapiens
cccttgggatctgccctccgctcagctcgagcttccctcgtggccgacggaacaatgaagaccggaacatgaacattttgcagtactgcc

SEQ ID NO: 434980 - DNA, 76 bp, Homo sapiens
gaaaccccgttgacaaggcactgctttttcatgacggacaggaagatgtcacccaagcgcatagctaaaagaaggt

SEQ ID NO: 434981 - DNA, 82 bp, Homo sapiens
cgcggccccttagcgcggtcaggccgccctccttttccagttggattggatgctgctggcaagacaaccattctgtataaac

SEQ ID NO: 434982 - DNA, 74 bp, Homo sapiens
aaccactaacaacatccagtcccggatcaccaagaccttcaccaagacacccttggtgcaggaggtgcaccaga

SEQ ID NO: 434983 - DNA, 96 bp, Homo sapiens
ttgtgtcctgagatcaaatggcacttcattggccacctacagaaacaaaatgtcaacaaattgatgggaaatttgccccgcgatgttctgtgtgca

SEQ ID NO: 434984 - DNA, 75 bp, Homo sapiens
ggaccttgtcctgcaggactcagctgcagaaggacagaataacgggctcccagattcacaagccccaccaagagg

SEQ ID NO: 434985 - DNA, 76 bp, Homo sapiens
tttcgaaaatgtgtgtgaattggatttgatcttccatatggataagttgatattcactgatggactccaaagaatc

SEQ ID NO: 434986 - DNA, 75 bp, Homo sapiens
tagattctttgactgaaatgtattacattggcacagcaataactaactataatgtaactgcaaactccaagctgg

SEQ ID NO: 434987 - DNA, 74 bp, Homo sapiens
gctcggctctcgctgcggcagacgggctcccccgggatgatctacagatatggtgattgccatcctgtattttt

SEQ ID NO: 434988 - DNA, 100 bp, Homo sapiens
atgggaccattgaagaattccaaacaggttcagtgtatctttgcctgcctacatcaatctgcaagggagttgcagaaagcctcatgttcatcgagccgtg

SEQ ID NO: 434989 - DNA, 90 bp, Homo sapiens
gcgtcccctgcaccatgagctggggcaccgagctctgggaacatgcttttgaaagcagccagaaatataaagaaggcaaatacatcattg

SEQ ID NO: 434990 - DNA, 51 bp, Homo sapiens
aggatgagagcgtggatccctgggtactcatgtaatggaaggctctggaag

SEQ ID NO: 434991 - DNA, 100 bp, Homo sapiens
gaacaaatgaggcgccaaagagaggaaagttacagccgaatgggctacatggatccagtcctgtcatttgggcagaggtgggagacaccatcagagtaac

SEQ ID NO: 434992 - DNA, 82 bp, Homo sapiens
tgcagtttgtgaagaaaaaattagacctgcctagagctggaacgttacctccagagcgagccctgctatgtttcagcctcag

SEQ ID NO: 434993 - DNA, 75 bp, Homo sapiens
ggaggccaggggtgtcgccatgatggttcacaggcaccagccagaccccctaaaccacgaccgcgcaggactgca

SEQ ID NO: 434994 - DNA, 74 bp, Homo sapiens
aagagaaactcagcgctggggaagaaggttttgattcccaccatggccatcacccagtttcggttatttaaatt

SEQ ID NO: 434995 - DNA, 75 bp, Homo sapiens
tgggctaagtgctggcaagagcgatgtctactacttcaggacttggcagatgaacttgctcttgttgatgtcatc

SEQ ID NO: 434996 - DNA, 83 bp, Homo sapiens
ctggggccaagggacaatggtcaccgtctcttcaggccgcaatgtttaccgaatgctttttaagagcaaagcatatgagcgga

SEQ ID NO: 434997 - DNA, 146 bp, Homo sapiens
ggttcctagagttgttcagaatcctccaaaaccagtcatgaccactagacccacagctgttaaagcaacaggtggtcaaacctgtcctgacacccagaggtctgcatgaggggtggccactgaaggaggagttctcaaaggccaca

SEQ ID NO: 434998 - DNA, 75 bp, Homo sapiens
tgggtctgtctctgccacctggtctgttgagaagctgatgtctcctcgacttccaactggaaccttgaaccccca

SEQ ID NO: 434999 - DNA, 90 bp, Homo sapiens
cccggccagccgccccgtccgggaggtacctcatggcagggccaggttccagcagtgaggaggatgaggcctctcacagcggtggcagcg

SEQ ID NO: 435000 - DNA, 53 bp, Homo sapiens
gctgctcatgaaccacttggcaaaatgccttcaattaagttgcagagttctga

SEQ ID NO: 435001 - DNA, 50 bp, Homo sapiens
cttgggtgtgctgacgagcagggtggtgatttgtctacagcaaccaagag

SEQ ID NO: 435002 - DNA, 75 bp, Homo sapiens
tagaaatgtatacccagaagaaatgattgtggcattgagagaagctttgaaaaacatccagtacagacctttctg

SEQ ID NO: 435003 - DNA, 74 bp, Homo sapiens
ccaaagattggtttgcaaacttcgacaaaatactcttctccactcgctattgatggagtctcgccctgtcaccc

SEQ ID NO: 435004 - DNA, 95 bp, Homo sapiens
gcaggaaggtgaagtgggagcagatatgtcacacgaggcgtagatcccccaccatgtgacgctgggacagaccaggactccaggtggaggttgca

SEQ ID NO: 435005 - DNA, 75 bp, Homo sapiens
gcaggcagtgccgggccagacatggcggaaggtgcctcaatcaggaaccctgaagctgtcccacctacaggaggg

SEQ ID NO: 435006 - DNA, 97 bp, Homo sapiens
tcctcccagcccggggctacctcctcggtcctggacaccatctgcactctgtcagccagctctcctatgtggacgccgagggcaaccctgtgggtgt

SEQ ID NO: 435007 - DNA, 89 bp, Homo sapiens
ccggaatgctcgacggaaggcagcgccgcggatcgaatgggactttgaacatgtcggggatcgccctcagcagactcgcccaggagagg

SEQ ID NO: 435008 - DNA, 95 bp, Homo sapiens
tcatgggatttgctgctcccttcaccaacaagcgaaaggcttactcggagcgtagaatcatgggagttaaacatgaagtttctggagagacagtg

SEQ ID NO: 435009 - DNA, 90 bp, Homo sapiens
ctgcagtggcgcctaaagtctgagagagggaagtcgcctctgtgctcgtgagtgcatggggtataagggttattatgtgtaccgtgacat

SEQ ID NO: 435010 - DNA, 100 bp, Homo sapiens
tggcttgtagaattctatgctccatggtatgctgccccacaaaaccaagcgaggccaggccgctctggaccgtctcaaggtgtttgacggcatcccaccg

SEQ ID NO: 435011 - DNA, 90 bp, Homo sapiens
gctgtgcagactgctaaaacaaaagctccttaataagcatttatagtcagtttttggcagcaatagaatcactaaaggcattctgggatg

SEQ ID NO: 435012 - DNA, 100 bp, Homo sapiens
ttacagccgaatgggctacatggatccagaagatgatgtagaacagccatttaatgacagtggctgtcttcttgtggataaagacctttttgaaactggg

SEQ ID NO: 435013 - DNA, 101 bp, Homo sapiens
attatacatccccaggtttatatttacctatgcctaatgaaaaaaatgatgcagaacttgattctccaccttcaaagaaaaaaagattaggttttttccag

SEQ ID NO: 435014 - DNA, 74 bp, Homo sapiens
gttgtgagggaagagacaggaagatggtgcccagggcaagatcacctgttgcctgaagcagaagaaatcactat

SEQ ID NO: 435015 - DNA, 90 bp, Homo sapiens
aagcaataacactttcagatcttttgagcctaaattaacaatggcgaaatgcaggcgaaatgtggaaaatttcctagaagcttgcagaaa

SEQ ID NO: 435016 - DNA, 75 bp, Homo sapiens
ggcggccacggcatcctgtgctgtgggggctacgaggaaaggttctgatctacaatggccaactggacatcatcg

SEQ ID NO: 435017 - DNA, 100 bp, Homo sapiens
aaacttaggatctattttaacgtatgccttcttgggaactgccatctcctgcatcgtcatagggccaccaccacctatcatgacagatggtgaagatgcg

SEQ ID NO: 435018 - DNA, 89 bp, Homo sapiens
gtccgtggactttcccgctgcacactgccctccgaagtcggggacgcgggctcggtccctccagctacaaggtgggcaccatggcggag

SEQ ID NO: 435019 - DNA, 75 bp, Homo sapiens
agccggcggcccggagtggggcggcgggttcaaccttaaagtgcaattgcagattctggcaagcttcatgctcac

SEQ ID NO: 435020 - DNA, 73 bp, Homo sapiens
gaaaatccaaccagctcttcaggagaagcacgccatgaaacagggtttggatgcatctgctcagactacttct

SEQ ID NO: 435021 - DNA, 76 bp, Homo sapiens
gcccattttagaggcatctgttctatcttcccatcataaaaaactcgtttgtggtggaaagacagccctgcatgcc

SEQ ID NO: 435022 - DNA, 74 bp, Homo sapiens
aagagtcaagggcacgagcatcgggcccggattgcatttctacaaggcgaaagaaaaggtcaagagaacctgaa

SEQ ID NO: 435023 - DNA, 100 bp, Homo sapiens
cctctggagtagctgggactacagcaggaacgaatttcatatacacctccagagagcccagtgccgagttacgcttcctcgacgccacttcatgttccag

SEQ ID NO: 435024 - DNA, 90 bp, Homo sapiens
ggctggccaatggagaggtccgcatttatcgtgacaaggccctgctcaatgtcatccacaccccgcttctgcagaaagccgtcattacac

SEQ ID NO: 435025 - DNA, 82 bp, Homo sapiens
gagacgcgcgtgtgtgagcgcgccggaccaagcgggcccagaagcgggttacattgattacccacctagtacaacatcttac

SEQ ID NO: 435026 - DNA, 99 bp, Homo sapiens
gaccgagagcgtgaccgagagcgcgaatatcgtcatcgttagaagtcgcagcgccgtgttacgtttcatctccctgatggctcccaggaaagctgcagt

SEQ ID NO: 435027 - DNA, 100 bp, Homo sapiens
cctgtcccacctggcggccatcgtcatcctgctgctgaagatctggaagacgcgctcctgcgccggattattgcatcgagcttttagtgtcttcttattc

SEQ ID NO: 435028 - DNA, 100 bp, Homo sapiens
taacaaaggatttgacaagactaaaaacacttctctcagaaacagaggaatgtatcctgtcaggtataatgtcagtgaatggcaagaaagttcttcatat

SEQ ID NO: 435029 - DNA, 50 bp, Homo sapiens
aagagagctctgttgttgcaggaaaccccaaagccacggagaaaatcagg

SEQ ID NO: 435030 - DNA, 105 bp, Homo sapiens
ctgttatccagctgggggatccaacgcacacttaaggctccagcaaaacaatgcagatcttcgtgaagactctgactggtaagaccatcaccctcgaggttgagc

SEQ ID NO: 435031 - DNA, 100 bp, Homo sapiens
ggacatattcctctcctgatctggcctcatctgttccagggaggtgggattgagcactgcaacatggtgctggagaacgtgaaggagatgtggactgagg

SEQ ID NO: 435032 - DNA, 75 bp, Homo sapiens
ttcgtttttaccttagtctcgggaatggacaaatgaggttttcagtttggcaacaaacctgctggcccaaaacat

SEQ ID NO: 435033 - DNA, 98 bp, Homo sapiens
acactcaacggccggaccggctggttccccagcaactacgtgcgcgaggtcaaggccagcgcacctgtggaatcctctcaagaggaacagtcattgtg

SEQ ID NO: 435034 - DNA, 82 bp, Homo sapiens
tattggagtagcgaggaatctgattccaagcaaaaaccagaaaaggcgacggcggattgacagaagtatgattggagagccc

SEQ ID NO: 435035 - DNA, 118 bp, Homo sapiens
tggagatgtccataagatggtggtgagcataggatggaacccatattacaagaatacgaagaagtctatggttttctgtctcaactggtctctgacaagcctctgactgaatgtatcc

SEQ ID NO: 435036 - DNA, 82 bp, Homo sapiens
ctggtctgtgagatgtcctcactgtttcaggagatgatatcatcaagttgaatcgaaaggaagggaagaagcagaattttcc

SEQ ID NO: 435037 - DNA, 100 bp, Homo sapiens
gcggggtctgcaggacgtgctgaggaccaacctggggcccaaagggaccataaagatgatccacctctgatgttcactgaagagtaccagaaaagtctgc

SEQ ID NO: 435038 - DNA, 100 bp, Homo sapiens
ttgggagtgatttgcgccatcatcctcatcatcatcatagatgactctggccactggggcagaggtggtttatttacagctctggaaaagcgatccgctg

SEQ ID NO: 435039 - DNA, 75 bp, Homo sapiens
cggccgccctgggccgggccccaccggacggtaaccatgtgcgaccgaaaggccgtgatcaaaaatgcggacatg

SEQ ID NO: 435040 - DNA, 88 bp, Homo sapiens
attgaaaagctgcaggccggtgctcttgcaactgacgcagtcactgcagcactggtggaacttgagactggtcgaattgacaaatctt

SEQ ID NO: 435041 - DNA, 100 bp, Homo sapiens
cctcgtggccagctctgcgtctgcggtcaccaccaaggccatttcataattctgaatcatgtctgataacggagaactggaagataagcctccagcacct

SEQ ID NO: 435042 - DNA, 75 bp, Homo sapiens
gtttttctcccaagccattcacagctattacagtgaccacggatcaagatgaaagctgacttcatgagaccgagg

SEQ ID NO: 435043 - DNA, 50 bp, Homo sapiens
gcacagtgctggtctgcctgacatgcaaacgaatgcacgtgcagttgtcc

SEQ ID NO: 435044 - DNA, 97 bp, Homo sapiens
caacacgcaaacgagagctgaggctaatgaaaaacagcttcttccagaccagctggtcttgcttctggagcatctcttggagcagaagactctgagc

SEQ ID NO: 435045 - DNA, 101 bp, Homo sapiens
gcatggagaggggccgtggcccctgcagcggaaccggacccagtccctgagccgcccctacacccacagttggctgattgcaattctggcccaactcaacc

SEQ ID NO: 435046 - DNA, 100 bp, Homo sapiens
gatatggagcctttggtgttgtctggttgatgaaaagcccagaaccttgatgacagattgtctggttataaagcattttttacgtaaaatcatcatggtg

SEQ ID NO: 435047 - DNA, 75 bp, Homo sapiens
ggccttcacaatccaagttccacaatatattgactactgccacaattccggtcctcttcctgatggatgggaaca

SEQ ID NO: 435048 - DNA, 75 bp, Homo sapiens
acttggttcaatgggtagcctcaccatgaaatcacagcttcagatcactgtgactgtgaagtgctgaccacactc

SEQ ID NO: 435049 - DNA, 50 bp, Homo sapiens
tctggagctggccaacgtgcaggagctgtgctccattgaagtgacttgtg

SEQ ID NO: 435050 - DNA, 75 bp, Homo sapiens
ggcttcaatgctgaggaagcccacaatattgtcaaagagatcactggggtgatcctgctggctgttggagtctgg

SEQ ID NO: 435051 - DNA, 100 bp, Homo sapiens
gtgaagatttggaggatttgggggctgtagcccccccagtcagtggagacttaaccaaagaggccgagcaggagctccgcgtggcccagacagagtttga

SEQ ID NO: 435052 - DNA, 95 bp, Homo sapiens
tctcaccgttacccggggcaacagctgagccgtctgggaagggatgcatctgtgcagcggaactgctgcctgacgctctgcaacttcagcatccc

SEQ ID NO: 435053 - DNA, 111 bp, Homo sapiens
gctaagtccccagattggaggaggctggctctggtcttcgatgcacaggagtggccgttatggaacgcagtatgaaaacccatggacaatcccgaatatgttgtcaatgac

SEQ ID NO: 435054 - DNA, 83 bp, Homo sapiens
aacctggatcttcgaacttttgacacggctttggaaacgacgtcatgtgttaggaactttatattgctgttggaatatctgga

SEQ ID NO: 435055 - DNA, 80 bp, Homo sapiens
gcgccccaagcccgggcgccaccgctgccacctccgcgagggctgggttacgacccctacaaccctgagctgcccaagcc

SEQ ID NO: 435056 - DNA, 75 bp, Homo sapiens
cgccatcaggaacgccgccttcttggcaaaggaatatgagagcctggagcaagaaaacaccatgctgcggagaga

SEQ ID NO: 435057 - DNA, 101 bp, Homo sapiens
ccaggacgtcttcaacacggtgggcgccgacatcatccagctgcctcaaatcgtcgtagtgggaacgcagaccttagctggatctccaaaatacaagtgaa

SEQ ID NO: 435058 - DNA, 75 bp, Homo sapiens
cgctggacaagctggacgttaaagggaagcgggtcgttatgagggttcatagtggcgtcatgcacgcagactcct

SEQ ID NO: 435059 - DNA, 83 bp, Homo sapiens
atcaaatgggacccaactggcaatctcttggcctcctgttctgacgacatgactttaaaggacctagatgtgaaggctggtgg

SEQ ID NO: 435060 - DNA, 100 bp, Homo sapiens
cggcagagcacgagcggatcctgcgagagatcgagagcactgacacggcctgcatcgggcccacgctcagggaacaagctaccctctgagtcagcactgg

SEQ ID NO: 435061 - DNA, 74 bp, Homo sapiens
gggtggagctcagaccggtgggctaggtgccgtgagcgatgtggagatgcaggaacactatgatgagttttttg

SEQ ID NO: 435062 - DNA, 89 bp, Homo sapiens
ctggagggagccctcctggctgggggcaagattaactgctgaagtactgatcgagttctgcatttcttcaatgaggaactacaggctga

SEQ ID NO: 435063 - DNA, 100 bp, Homo sapiens
agtaatcgcctgctttgattcattgaaagttatcttatgatgaggcttttgctatggctaatgatcccttggaaggcttccatgaagtaaaccttgcttc

SEQ ID NO: 435064 - DNA, 72 bp, Homo sapiens
ccgttgcctgctcccggagggagacgcgctgccgaggagaacccagcggtcccaccaggatatttgcgatat

SEQ ID NO: 435065 - DNA, 101 bp, Homo sapiens
tagctgaactaaggagaaagtcctacaacagtttggcgtgcaacatggggcttgagaaaggatcccagattacaggaatgcagtaatcgtggccaagtctc

SEQ ID NO: 435066 - DNA, 100 bp, Homo sapiens
ctccctgagaaccccaagatcccacatggagaagtccaaggcttgcgagaaggtcatttccgtgggtcaaacggtcatcacgaagcatcggaacacccgg

SEQ ID NO: 435067 - DNA, 100 bp, Homo sapiens
ccacaatggaaggcttcttggaggaggagatgattgagctgcttctactaaggcaagaaactatattcagtctttgactcagatgccgaagatgaacttt

SEQ ID NO: 435068 - DNA, 75 bp, Homo sapiens
cttccatgaggactgtcacatcccgcctgtggaagctgagagtgccgtgctataagcggtgcaaacagatggaat

SEQ ID NO: 435069 - DNA, 82 bp, Homo sapiens
cctccacctacctgaagcagatgaagcttcgagtgatgaattcccaggagcagatctgtgtcgagggcaatattgcaagtgg

SEQ ID NO: 435070 - DNA, 98 bp, Homo sapiens
gagaggttaaagagacccgttcagagtcctacagtggcaggtgctcccactctttcccggcttttagaagctggtcctacacagttcaccacacctct

SEQ ID NO: 435071 - DNA, 80 bp, Homo sapiens
acaaaaccagaacttcttgactataaggtctgaagaactgttgcccaattcaacagtgccagcattccaactttgttaaa

SEQ ID NO: 435072 - DNA, 80 bp, Homo sapiens
ttggtgggttcttggtctcactgacttcaagaatgaagctgcggaccctcgcgaacagtgctcggcatggcagggattcc

SEQ ID NO: 435073 - DNA, 97 bp, Homo sapiens
cggcccgctcttctccctgcttaacgagaaccatagatctaaagcatgtattccttatttgaaaaagagcaaagttgctcatatcctcaatatcagt

SEQ ID NO: 435074 - DNA, 74 bp, Homo sapiens
cccggttccccggcccacagtgggggtgtgcaaacccgagagaactgggagcccaagaagaggccgaaaccgag

SEQ ID NO: 435075 - DNA, 110 bp, Homo sapiens
gggagcaagaggtgtcggaggtctcatctttgaactactgccggagcttctgccagacaatgcagatcttcgtgaagactctgactggtaagaccatcaccctcgaggtt

SEQ ID NO: 435076 - DNA, 87 bp, Homo sapiens
agcatctaactaacacggtttttattgacagagctctgatagttgttccttgtgcagaagtaacaaatgtggcaattattttggatc

SEQ ID NO: 435077 - DNA, 100 bp, Homo sapiens
caaatgcaactagccaatgccatgatgcctggtgccccattacaacccgtggtcgttgaggacttccacatggagattggcacaggaccagactcaagac

SEQ ID NO: 435078 - DNA, 90 bp, Homo sapiens
ctcatggattcctggtgccagcccggctttgacatcaaggacgttgccaggtccctaatcatggactccccaagagctggcacccaccag

SEQ ID NO: 435079 - DNA, 75 bp, Homo sapiens
aggctcaacggcagaagcttcaccacaaaagcgaaatgggcacaccacaggactccctggcactggggaaaacag

SEQ ID NO: 435080 - DNA, 83 bp, Homo sapiens
attcaaacccagcactcaatgacagtccagagggagccaacctgttcatctaccacctgccccaggagtttggtgatcaggac

SEQ ID NO: 435081 - DNA, 74 bp, Homo sapiens
tcggccggcgggcgtgcatcatccacggggtgctgcagatcctgttccagctggagcagttcaacatgatggag

SEQ ID NO: 435082 - DNA, 75 bp, Homo sapiens
tgcaaagcctgggagcagctggattccatttaaagagatatccatgttcaagaggaaatgtttgttcaaggcaaa

SEQ ID NO: 435083 - DNA, 89 bp, Homo sapiens
cgcaagctcctacgaaagaaagctcatcgaggtgaaaggtgtagcagtcactcggcctacacccacagcatcgaccttgtgaacccagc

SEQ ID NO: 435084 - DNA, 50 bp, Homo sapiens
gttgaatgccagccaccagccatggcaggatggcccaatggaatcagcta

SEQ ID NO: 435085 - DNA, 100 bp, Homo sapiens
aagaaaagctgtatcgattgttgagatctggcgacttgtttaaatttcatcagcctcacttctatgaactctcagtattctaccttgtaaatactgttat

SEQ ID NO: 435086 - DNA, 100 bp, Homo sapiens
gtcacctacacgggctcctacctcctggacggcaagccgctcagcaagctccacatccccgtggttatcaatactctggctgaccatcatcatcgtggga

SEQ ID NO: 435087 - DNA, 75 bp, Homo sapiens
cctgggcacatgggagtccccaaaattacattgccaaggatctgtctggctccattgatgacctccccacgggaa

SEQ ID NO: 435088 - DNA, 100 bp, Homo sapiens
gccagggcagagggcacctgagcggctggagagcctgttggagaaacacaaagagatcactggggtgatcctgctggctgttggagtctggggcaaactt

SEQ ID NO: 435089 - DNA, 82 bp, Homo sapiens
agaagaccttcaagcagcgccgcaccttcggttctctacttttagagtcgaaaataaatcctaacactgcataccagaaaca

SEQ ID NO: 435090 - DNA, 75 bp, Homo sapiens
ccgaccttctcggcctgcagtggcgcgactgtgtacgccgccagctggatggagaaggaggagacaacccgggag

SEQ ID NO: 435091 - DNA, 114 bp, Homo sapiens
tgattagcttcgcagtctggaaagctttaggagttcacagtgcatgttatttgaaagcaattgagacgcaaccgaactttgcagtagcttggagtaatcttggctgtgttttca

SEQ ID NO: 435092 - DNA, 83 bp, Homo sapiens
ccgtcggccccgggggatacgccgtggtcgtgtgcattggacagggtcatgtaaaattatctgattttggtttatgtacggga

SEQ ID NO: 435093 - DNA, 87 bp, Homo sapiens
tcatctaccatggctcagccgggaactctgaacctcaataacgaggagtcagcattggtaatagtgctgtgctgcggaagagtggag

SEQ ID NO: 435094 - DNA, 100 bp, Homo sapiens
agcggcggcggcggtggcagcggcggaaaccgaaggggagccatggcggctgacagtcgggaggagaaaggcctgtgaccctgggctgtctcgaacgtgt

SEQ ID NO: 435095 - DNA, 98 bp, Homo sapiens
ggtaatcactttgatcagtatgaggaaggacacttggaaattgaacaagcgtcacttgacaagcctatagaatcgcaatgaatcctccaatgtacctg

SEQ ID NO: 435096 - DNA, 71 bp, Homo sapiens
tcagacggtggcccggaaccggagtggggtcacaaatgccctttctggttactgtggctttatggcagcca

SEQ ID NO: 435097 - DNA, 100 bp, Homo sapiens
cgccatggaaaccgctctggtcacaccaatactgttgcagattggctatagaaagcgcaattggtggtaacgcttatcaacacagcaaagtgaaccagtg

SEQ ID NO: 435098 - DNA, 101 bp, Homo sapiens
cctcaataagaaatgcacgcatttgattgttccagagccaaaggggttttctggatatgccgcagaaggatccgtgccagaagcaagcctgtgagatacag

SEQ ID NO: 435099 - DNA, 98 bp, Homo sapiens
ccagaagagcggcggctggaccacttctctgtcgacggctatgacagttctgctccgctctgcattggataaaacagaagagctcgaggtgagcaacg

SEQ ID NO: 435100 - DNA, 101 bp, Homo sapiens
cgcgtgtctgcgtcgggttctgttggagtgcgttcggtgtgccgtgggtccgcgctgcttccacccaacttcctgttaggagcaactttcagccagaggca

SEQ ID NO: 435101 - DNA, 100 bp, Homo sapiens
tgggatccagcgatcctcccgcttcagcctctagagtagccgagaccacagtggcgagctttcctgcccggcctgaagttcgaggtcatcagctctgctc

SEQ ID NO: 435102 - DNA, 100 bp, Homo sapiens
ctggaaggtgcgtgtggggctgggtctcggagtgggagacgtggagtgcagggcgaccctggacatctttgactacatctacatagatgcttttgggaaa

SEQ ID NO: 435103 - DNA, 97 bp, Homo sapiens
gatcaacccagagctgaaccagaagggctacaatgtcaagtccgacgtctggagcctgggcatcaccatggaatctgaacctgtgatgttaagaaat

SEQ ID NO: 435104 - DNA, 95 bp, Homo sapiens
gaaagaagcccagcttttccatcctggagatctacaggatttatcaaatcgagtcactgtcaatgctgggcctaaaggagataacatttatgaat

SEQ ID NO: 435105 - DNA, 100 bp, Homo sapiens
tcggcctctgcaggcttgccgaagaagggaggcttgggcactgtttaaaggaaagttccgagaaggcatcgacaagccggaccctcccacctggaagacg

SEQ ID NO: 435106 - DNA, 98 bp, Homo sapiens
cacacagctgcttccattggccagtatgaagtggtgaaggagtgtgtgcagcgattggaaccaaccagatggctgtgtgtgccaaagcacagaacaaa

SEQ ID NO: 435107 - DNA, 107 bp, Homo sapiens
cgagccgcccgcagagcaagcgcggggaaccaaggagacgctcctggcactgcaggtgccagaaccctgtggagcatcatgaactgggaagagtagctgagccccag

SEQ ID NO: 435108 - DNA, 73 bp, Homo sapiens
tttttatctgtgcctggaaccctgttagtgatctcctagcatcagggccatggaagagctggtggatgaaggg

SEQ ID NO: 435109 - DNA, 100 bp, Homo sapiens
ccgtcccgtccgacagccaggcccgggagaagtactaggttttgacaagcttgcatcatgcgtgagtataagctagtcgttcttggctcaggaggcgttg

SEQ ID NO: 435110 - DNA, 90 bp, Homo sapiens
gatgatgcgctgcagccagctggcccccagggccctgcaggtcacgagaagagaatgccttctagatgcaaaatcacctccaaaccagac

SEQ ID NO: 435111 - DNA, 94 bp, Homo sapiens
ttcatttacaagttattttctcttcttctgaaaaagagatcttgatactaaaatgtctgatgatgctggtgacaccttagccactggagacaaa

SEQ ID NO: 435112 - DNA, 96 bp, Homo sapiens
gagagactcgccggccgagggtggccctaggggcagcgagcaagacagcaagcaggtgagaagccctaccactgcaactgggacggctgcggctgg

SEQ ID NO: 435113 - DNA, 102 bp, Homo sapiens
cgacgatgcgtgcagaaaagagatccagggcttcctcgattgtgccgcgagggctcagatcaccagaaactagaacgtgaggctcggatatgtcgacttctg

SEQ ID NO: 435114 - DNA, 74 bp, Homo sapiens
agctggcaacctttgacctttctgttcaagagacgagttgtactgctgtcacaggaaatggacgctggattaca

SEQ ID NO: 435115 - DNA, 75 bp, Homo sapiens
cccacttctggaaggttccatcccctgcagaaatctgacccggtcgtctcgtaccgcgagacggtcagtgaagag

SEQ ID NO: 435116 - DNA, 98 bp, Homo sapiens
ccggtggcagccagaactgatacagcccccctggtctggggccaggacgccagcttgaggagttcctgaaccagagctcgcccttctacttctggatg

SEQ ID NO: 435117 - DNA, 82 bp, Homo sapiens
agccccgggaggtgcttctgcggctgtacggagccatcttgcagagagcctggggatggtgaatgaatggggctgtcacgac

SEQ ID NO: 435118 - DNA, 100 bp, Homo sapiens
caacggggccggcaagaccaccaccctaaactcctgattggtccgaagggccacgtgatctcccagatagcacaggaggcaggccatgacctcatggaca

SEQ ID NO: 435119 - DNA, 100 bp, Homo sapiens
gagtctttgatcacattgattgaaaaggagaagtgtgcccagtactggccatctgatggactggtgtcctatggagatattacagtggaactgaagaagg

SEQ ID NO: 435120 - DNA, 97 bp, Homo sapiens
taccaaaagagaaattttagcacaactccggacacttgttttccagtgtgatcttacccttaaagctgcactgtggttggcgtggacgagagcactg

SEQ ID NO: 435121 - DNA, 96 bp, Homo sapiens
cactgccctggggcagctgaactgagcgtatgtgccacgccgcccaggagacccctctgctgcaccacttcatggaccttttaccaatttgaggct

SEQ ID NO: 435122 - DNA, 100 bp, Homo sapiens
ctcaaaagttaggattgaagcctgcatgtgggttccttatcgattacatgccgttttagttcacgaaggccaagctaatgctgggcactactgggcatat

SEQ ID NO: 435123 - DNA, 100 bp, Homo sapiens
tattaactgcctttcttctgtgggctgtgattttcagaggggaatgctaagagaggctgacccgcggctgattgagtccctctcccagatgctgtccatg

SEQ ID NO: 435124 - DNA, 100 bp, Homo sapiens
agacagaaaggatggctatgtgctgagactcaaccgagtgaacgacgcccaggaatacagacgggcaacatcacaggacatggccccctcagccacctag

SEQ ID NO: 435125 - DNA, 90 bp, Homo sapiens
gcaagcgtgggaacgcgggcggcgagacggcggcaggacggcggcagtgcttcaccgatatagacacattttgggattgtggcagccaga

SEQ ID NO: 435126 - DNA, 100 bp, Homo sapiens
tcggccaagggaccaaggtggaaatcaaactgatggaatggggagaagatattaaagcagtttcaaaagatgaagcagtgatgttggtgaatcatcaggc

SEQ ID NO: 435127 - DNA, 75 bp, Homo sapiens
ttaatcagacctgctcacacttcagaatagagaagttccgccatggagtcatagttgcagctgactccagggcta

SEQ ID NO: 435128 - DNA, 90 bp, Homo sapiens
ccttgggtttctttcttaaaggactgatttttagaactccacatttgagctgacccacctccatacattgatggaattcgaattaacagc

SEQ ID NO: 435129 - DNA, 95 bp, Homo sapiens
cccaggctacacattctgtcagtgctgttctccaagaggcccagagacatgctgaaacatcgaaggacgagcctgtggagtgggagacacctgac

SEQ ID NO: 435130 - DNA, 100 bp, Homo sapiens
gtctcatgggtaccgcttgccaactttggaggttggtcaaagaaaaagtgatgtatgaaaaagaggcaaaacaacaagaagaaaagattgaaaaaatgag

SEQ ID NO: 435131 - DNA, 100 bp, Homo sapiens
gaaagaattccgagagaacgagcacctcctcgaagtcatcccagtgaaagttatatcacagatgatattggaatatcgacttggaaggagcagacttttc

SEQ ID NO: 435132 - DNA, 101 bp, Homo sapiens
gtcgtgggtcagcaagagggccccgctgaccaggtggctgcagatctttaatctcatgaagtacgacagctacagccgcttcttaaagtctgacttgtttt

SEQ ID NO: 435133 - DNA, 80 bp, Homo sapiens
cagtagacggtacagcgaaggcagagagttcaggagcggtggtgccccccccgggcacggggccatgtacaacgggatcg

SEQ ID NO: 435134 - DNA, 101 bp, Homo sapiens
acatgactgtgaggcgctgggctggggctccgaggcagccggcttccaggagtcccgaggcaccgtcaaacgctgctcccggcagatcggcttctcctttg

SEQ ID NO: 435135 - DNA, 50 bp, Homo sapiens
gacacaccgctggatcagtgtaaggtgtcttcagtgccctgggtttgcct

SEQ ID NO: 435136 - DNA, 83 bp, Homo sapiens
tcctcctgctcacagtgtgaataacagtgctccatgtgcatccctcttgaagcttcgcactctgttgaagaggacactcatcc

SEQ ID NO: 435137 - DNA, 50 bp, Homo sapiens
cacatggccctttatgttctccaggaaccatcactgttgctggaggcacc

SEQ ID NO: 435138 - DNA, 75 bp, Homo sapiens
ctgctgccgctcctgctggtgctcctggcggcggcgcccgcagccagcaaggttcagccgtctgtatatctcccc

SEQ ID NO: 435139 - DNA, 75 bp, Homo sapiens
ataagcacaagagaaagaaggttaagctggctgtcctgaaatattataagggcggcgactggcggcgcgatggac

SEQ ID NO: 435140 - DNA, 98 bp, Homo sapiens
ttgaattggccagaggaatagagagtatgaagtctggcaaactgatgacctaatagagagaatccaggaagaggaaaataaaccttcaaggcaaactg

SEQ ID NO: 435141 - DNA, 98 bp, Homo sapiens
tcgtgcgacccaagcccctgcattcctgtacggtctccacaaaccggaggactacccccagactgcagtaagtgttgtcatggagactacagctttcg

SEQ ID NO: 435142 - DNA, 90 bp, Homo sapiens
ggcgggagagaagatgccgcagcccgagtcccagaaggcggcgatcctgggctgcgggcaaggcggtcagcctcagatgtcacaacctct

SEQ ID NO: 435143 - DNA, 75 bp, Homo sapiens
ggaaattcaacaggagctgatcaaccaagagccctatgagtttgtctctctggaatggctgcaaaagtggttgga

SEQ ID NO: 435144 - DNA, 90 bp, Homo sapiens
gagaaggaacagttggctcaggctgtggctcgcatcaagaagatttatgaggagaaggaaaactaggtgtctgtgttcactccaggctga

SEQ ID NO: 435145 - DNA, 100 bp, Homo sapiens
caggcttccatgcagcctgccttaccggtctctagaagaaactgtcagtgccagtgaagaagaaaacgtgggacaccagcaggctgggaatgtgaagcag

SEQ ID NO: 435146 - DNA, 75 bp, Homo sapiens
cactgggatgcatacggtcctggctggagcattggatttgctaaaggagcttaagaatattcctatgaccctgga

SEQ ID NO: 435147 - DNA, 51 bp, Homo sapiens
cacctgtgcgggatggaacaaaaggattatataagaaaactggtaaactgg

SEQ ID NO: 435148 - DNA, 74 bp, Homo sapiens
cagtccaatcccaaattcctttgtgctgactatgccgagcaagatgagagatggacagagacgtatgtgcgttg

SEQ ID NO: 435149 - DNA, 100 bp, Homo sapiens
aagatcctggacctctgcgtgctctttggaaaaggcaactcaccactgctccagaagatgatagatgcctgaggaagtgcaccatggagaggaggaggtg

SEQ ID NO: 435150 - DNA, 73 bp, Homo sapiens
ggtggagtgtaggtcatatcgccgcggttgaaatcacaaagattagacacctttttagataggtgttcttcag

SEQ ID NO: 435151 - DNA, 50 bp, Homo sapiens
agactgcatcgccaagatcatggaacaagcacatcatgattgacttgggg

SEQ ID NO: 435152 - DNA, 50 bp, Homo sapiens
ccaggcaggcatctatcttgaaggtatatgtctcgagtccacggtatgca

SEQ ID NO: 435153 - DNA, 100 bp, Homo sapiens
tgggaccggaggagacatcggcctctgcaggcttgccgaagaagggagaagcaaggtctcgctgtgttaccctggctggagtgcagtggctacttacagg

SEQ ID NO: 435154 - DNA, 75 bp, Homo sapiens
tctggggaacagaccagttgtggcctatgaaaggaggttccctacatgtcctttgattccgatgttcgtgggcag

SEQ ID NO: 435155 - DNA, 90 bp, Homo sapiens
gcggcctcggctgaagaaagaaggtgggagcggagagcgcaggcgtggcctcatggcggtccgagcttcgttcgagaacaactgtgagat

SEQ ID NO: 435156 - DNA, 100 bp, Homo sapiens
atgcttgtttcttcaccatcaaccggacctacctccatcatcacatgaccaaagcattcctcttctatggtctgtgtgaaaatgtgtgaccctgccaaag

SEQ ID NO: 435157 - DNA, 80 bp, Homo sapiens
agtcaactgcgtggaagagaaggcacctgaatggacagaagaggacctcagccaactgacaagaagtatggttaagttcc

SEQ ID NO: 435158 - DNA, 74 bp, Homo sapiens
cgacagagcatcagccacaagtatttgatgcgaggtccatgtactatactggcaattgctggagaagattttgc

SEQ ID NO: 435159 - DNA, 96 bp, Homo sapiens
tccatcttcattcatgactccagacagtgaggagctggtttcacctgaggacctgctggagtggctgcggcctttctgtgctgatgacgcctggcc

SEQ ID NO: 435160 - DNA, 74 bp, Homo sapiens
tggaaaaaatcttctgtggattaactcagtggctcaacaggctgaagggagatcattaagcagcttcgagtctg

SEQ ID NO: 435161 - DNA, 75 bp, Homo sapiens
gagctaatgttgatgcccagaatatcaagattgccttgggtccccagtgtttactcccatcaaggcagacataag

SEQ ID NO: 435162 - DNA, 83 bp, Homo sapiens
cgcgtcccctgcacagcacagaggggcagccggagagcctgggaaagcagcccctgtcaaagggaacaggaagcagtccacgg

SEQ ID NO: 435163 - DNA, 75 bp, Homo sapiens
ccagacatgtcttggagaaaacccatatatccgaatgggggcaatggcggcttcctgtgttctactgcacactgg

SEQ ID NO: 435164 - DNA, 83 bp, Homo sapiens
caggaatctcactctgttaaagctggtctgttctaactgaggtgcatcatgggcttcatcagcaaggagcgagagcgtgccct

SEQ ID NO: 435165 - DNA, 96 bp, Homo sapiens
gcctcaaagtctacctgagcgcccaggtatcattggaacatttcaagatcatcaaatcaaattccacagggattggtgaccaaccagaaggctcag

SEQ ID NO: 435166 - DNA, 51 bp, Homo sapiens
atagaacctgtcaatattgatgtgataattgatgaccagttacctgttgat

SEQ ID NO: 435167 - DNA, 82 bp, Homo sapiens
aggacttctggaggcccccgtcaccctccgcgtctccaggacgagattgaggagctgcgggccgagatgctggagatgcggg

SEQ ID NO: 435168 - DNA, 82 bp, Homo sapiens
gagcctgttggaggaactggcccggaaacaggaggacggaacggcaggagcagctgatgggatatcggaagagagggccgaa

SEQ ID NO: 435169 - DNA, 75 bp, Homo sapiens
gtgttcccgcgctttatcaagattatcgagcactatggagatgaccgccatggccacggaggacccccagagcgc

SEQ ID NO: 435170 - DNA, 83 bp, Homo sapiens
cgcggccaacctgacgcacctgggcatcggtggcgccggccagggagaactacgatgacccgcacaaaacccctgcctcccca

SEQ ID NO: 435171 - DNA, 98 bp, Homo sapiens
aaacactgcattgtgttgctgcagattgccaaaacatagggcctgattacattccaacagaggaagaaaggagagtcttcgcagaatgcaatgatgaa

SEQ ID NO: 435172 - DNA, 88 bp, Homo sapiens
cagactgaccatacccctgtccacctggcgttgctggatgaggaaggatttgatgccctggatccctttattcccatcctggtttcca

SEQ ID NO: 435173 - DNA, 50 bp, Homo sapiens
catgctcttcatcaactgcctggagaattggcagagggggtcgatttggg

SEQ ID NO: 435174 - DNA, 87 bp, Homo sapiens
atcatgttgcctttcattactacgttcagatctgtgcagatgtcctgtgaagtcaacgagtgccgaaaaattgagagtcttgaaaac

SEQ ID NO: 435175 - DNA, 98 bp, Homo sapiens
aatccacagtaaaaggaaagaagtgcattgttttggtgactgaacttatgacgtctggaacacttaaaactagtttatgccaacgtgacttcattcat

SEQ ID NO: 435176 - DNA, 82 bp, Homo sapiens
tgccgccgccgcgggagccgctgcccgaactcccggcccgaactccagacgcatcttctctccagactgccgatcccagaaa

SEQ ID NO: 435177 - DNA, 100 bp, Homo sapiens
acaagtccgggagctgggcggccatttaccagcccactccatgctgggaatagacaactctcctctgaggctgaggctaaccagattatgcagaactttc

SEQ ID NO: 435178 - DNA, 97 bp, Homo sapiens
aatttcctgaacacaccattatgaccaatgatgcgagctcagagtcaatagcatccttctctaaacaggaggtcatgagtagctttctgccagaggg

SEQ ID NO: 435179 - DNA, 100 bp, Homo sapiens
ccctgctggaggagcgcttccgggttacgaaggtgagaatctgatgaaaattctaaaagacattgaaaacagcacagaaatcatgttggacaggtggaag

SEQ ID NO: 435180 - DNA, 75 bp, Homo sapiens
tcggaatgcactacaacaggaaaatcatattatagatggagtaaagggattgtcaatgaggcagatcagattccg

SEQ ID NO: 435181 - DNA, 75 bp, Homo sapiens
cggggaccagcagctgtcgccgccgctctcaggttttgcaaattgatgatgtcacaataaaaataagtgctttaa

SEQ ID NO: 435182 - DNA, 113 bp, Homo sapiens
tgaaggttggcctgacaaattatgctgcagcatattgtactggcctgctgctggcccgcaggcttgaagctcaactagagaaaaaggaccaacaatttaaagaacaagaaaag

SEQ ID NO: 435183 - DNA, 74 bp, Homo sapiens
cgatcagcatcagcaaaggctccgaggtgccagaggcataacatggctccttactatgaagccttgtgcaaatc

SEQ ID NO: 435184 - DNA, 100 bp, Homo sapiens
tttgacagtgtatggtgcaaggttgtgagctgtatggagcagttgacacgtagtcactgggaaggatttgcctctggaggtgttcctgctcatatgtttg

SEQ ID NO: 435185 - DNA, 75 bp, Homo sapiens
tgctcgcgctactctctctttctggcctggaggctatccagcgatattagaaatggctactccccagtcaatttt

SEQ ID NO: 435186 - DNA, 100 bp, Homo sapiens
ttacgatgttgaatgggacttgaacaggaagctggacgctgcagctggaactagcgtgccaagaactcccccactggaaaggattctgaaagaaatgaag

SEQ ID NO: 435187 - DNA, 100 bp, Homo sapiens
ctatggcgctcaacaagaatcactcggagggcggcggagtgatcgtcaataacaccgagagagacgaagtttcatcatgttgtccaggctggtgtcaaac

SEQ ID NO: 435188 - DNA, 50 bp, Homo sapiens
gtttcagagtctattctacagacacaggatcgaagtagaatgtatgacag

SEQ ID NO: 435189 - DNA, 75 bp, Homo sapiens
cgagacttcatttcattgctccctaaagaggtgatacacttgggtgttgaaggacatttttgaaatcatgagaac

SEQ ID NO: 435190 - DNA, 100 bp, Homo sapiens
acgtttttatggtcccctatgcctgaacattatgtggaaggatcaacagtcaattgtgtactagcattccaaggccctcgggaccaaggatcacgtcatg

SEQ ID NO: 435191 - DNA, 85 bp, Homo sapiens
tccttctcaaccttgtgggatgtgaaaactctgttactgaagaagaaaaagtcagcactttttgaagtgtctgaggttataccag

SEQ ID NO: 435192 - DNA, 100 bp, Homo sapiens
tggaaagcaccctgggaatcaatcttcctaagctgaagaacctctacctggtgagttgcctttgcctggaggaaaatgtggaaaatgatccctgtaaatt

SEQ ID NO: 435193 - DNA, 88 bp, Homo sapiens
ctgggtcagtccgccgctcaccccgcggccgcaccttcccgccttctcaggttttttattggcacctcagtctcaacattttcttttc

SEQ ID NO: 435194 - DNA, 90 bp, Homo sapiens
ccaaagcacaggaatctcactctgttaaagctggtctgttctaactgaggacctcaatacagtctccatcttcatatggtaacagctccc

SEQ ID NO: 435195 - DNA, 83 bp, Homo sapiens
ctccgagtggaggcgactgggggctgaagagcgcgccgccctctcgtcccactttccaggtcagcccaaggccaaccccactg

SEQ ID NO: 435196 - DNA, 125 bp, Homo sapiens
tggaaatgaacttcacaagttcctcatctgggacactgctggtcaggaacgggtatgtgtaatcctcgaaattatagtgacacacctccaacttcaaagagcacagtggaggagctgcatgaacc

SEQ ID NO: 435197 - DNA, 100 bp, Homo sapiens
taaagaggtcgcagaagcttatgaagtattgagtgatcctaaaaagagagaaatatatgatcagtttggggaggaagcggaagtgaaacgtgtaggagac

SEQ ID NO: 435198 - DNA, 83 bp, Homo sapiens
ctaaagcagcgtgcgttcagccctgggatagcagactccttgaaagcagggtccttgtttagtgcatctttgcccacatacac

SEQ ID NO: 435199 - DNA, 125 bp, Homo sapiens
ctcaatatctgtcttcggtggactccttcggcagtccacccaccgccgccgcctcccagttctgcctcctgggggcattgctggcccccatccgagtgcttctggcctttatcgtcctctttctc

SEQ ID NO: 435200 - DNA, 83 bp, Homo sapiens
ctgcgttcacaggtgtttctgcggcaggttgatgataattagaagcatgctttccactgaacttcccgacaacatttgttatg

SEQ ID NO: 435201 - DNA, 73 bp, Homo sapiens
tttgattctccatatcacctacagatcaggcttcagctgtgggatactgcgggtcaggaacgtttccgtagcc

SEQ ID NO: 435202 - DNA, 89 bp, Homo sapiens
cgatggctctgtgcaacggagactccaagggctgaagaagatgcagagcagcctgaagctggtggactgtatcatcgaggtccacgatg

SEQ ID NO: 435203 - DNA, 95 bp, Homo sapiens
ggttctggggctgggattggaactgtgtttgggagcctcatcattggttatgccagatacagtttatgtaacttgatggaagaaaatggaattac

SEQ ID NO: 435204 - DNA, 80 bp, Homo sapiens
gagatcttgggcaccgagagggactacgtgggcaccttgcgcttcttgcagtcgaatgaaacagtgattcagagtgcata

SEQ ID NO: 435205 - DNA, 50 bp, Homo sapiens
cgccgcccgtccacacccgccgccaggttaaacccatccagagtaatggc

SEQ ID NO: 435206 - DNA, 100 bp, Homo sapiens
tacagtcactttcctgtgggggctgccctgctcacccaggaggggagaatcttcaaagagtgtgaacatggctacgcctcttcattcccgtccatgccga

SEQ ID NO: 435207 - DNA, 90 bp, Homo sapiens
ggcctacggggcgggggcggggcggcagtgagctcggccggcaaccgagggacccgcgtccaggtgcactttacaggtccccgatgaacc

SEQ ID NO: 435208 - DNA, 100 bp, Homo sapiens
gttcgtcgtggcaacgttgctggtgacagcaaaaatgacccaccaatggaagcagctggcttcactgctcaggtatgggaggacatggctatggtggagc

SEQ ID NO: 435209 - DNA, 101 bp, Homo sapiens
atctgtcttcggtggactccttcggcagtccacccaccgccgccgcctcccagttaccggtattgtaagaacaagccgtacccaaagtctcgcttctgccg

SEQ ID NO: 435210 - DNA, 100 bp, Homo sapiens
acgaaggtgaagccacggaagataaggcctcaggcccaggcccaaggccaagtgagagagcccaggccacaggacatgctgccattctgccaagagaggc

SEQ ID NO: 435211 - DNA, 110 bp, Homo sapiens
cgtctgtgccacatcccgaactgaccgggagatcaaggtagttggcaaaaaaggagaaagccactaaggtacaaaagacactggacaaccatattgcaatcagatctaca

SEQ ID NO: 435212 - DNA, 83 bp, Homo sapiens
cttagctaagatcgcggagatagaagcagagcttcctgcctgacacagctcacttcaagaagtgcacaatgtcagaacgtgga

SEQ ID NO: 435213 - DNA, 83 bp, Homo sapiens
cgttcattgtgattgatattcttattgacatcatcagagagaaaggtgccagaagcccaggaagcacacatcaaggctcactt

SEQ ID NO: 435214 - DNA, 100 bp, Homo sapiens
cttcccaagacccacagtgcctggagaggacatggggaagcagaagatggctgtgccacccacgtatgccgatcttggcaaatctgccagggatgtcttc

SEQ ID NO: 435215 - DNA, 100 bp, Homo sapiens
ctaccacaagaagcggaagtatgagttggggcgcccagctgccaacaccaaggaccctcatcggggatgtctgtgtcctggaggacatgaccgtccacct

SEQ ID NO: 435216 - DNA, 95 bp, Homo sapiens
tctggctgttagaagaattcatgctcatccggttccaatgacaggatttacacagagagcaactattgatccagaactgaatgaaatacacgtct

SEQ ID NO: 435217 - DNA, 75 bp, Homo sapiens
catccgccagcatgcccaagctcttcctgcacctggaaaagaagtctcgctctgtcgccaggttggagtgcagtg

SEQ ID NO: 435218 - DNA, 75 bp, Homo sapiens
gcacctacgtcccgctgccgtcgccgccgccaccatgcccaagagaaagatgggggctccggaggtggcgcccag

SEQ ID NO: 435219 - DNA, 95 bp, Homo sapiens
ctggcaataaagtttttggtgccctgaagggagctgtggatggaggcttgtctatccctcacaggagtttgacttacaaggaatctggagtagat

SEQ ID NO: 435220 - DNA, 100 bp, Homo sapiens
gcagccctggatctattaaagggagcattccgatcatctgaggaacagcagacattccacttcttccatctattacatctctgagtctaaatgaaaatga

SEQ ID NO: 435221 - DNA, 100 bp, Homo sapiens
gcggtgaaaaaagattcagagttggataagcacttggaatcacgggttgaaggctgagaacatctctaaggacctctacatagaagtatatccagggacc

SEQ ID NO: 435222 - DNA, 75 bp, Homo sapiens
tcaatacaggacagcttttgaaaccataatactgcttacaaaagaagtttcagctgatcctactgccacactcac

SEQ ID NO: 435223 - DNA, 106 bp, Homo sapiens
ctgaggcggctgcagtgctgacaccactcagggcaagggtgtccgacggctggagcgacaatgcagatcttcgtgaagactctgactggtaagaccatcaccctcg

SEQ ID NO: 435224 - DNA, 74 bp, Homo sapiens
aggaaatggctgaagttcgtaaagatgatgttgtaacagtgactggttttgctgttactgctcagtgtagtcac

SEQ ID NO: 435225 - DNA, 98 bp, Homo sapiens
acctgttttcttctgtaccatagaacccccatcactgtctaagcagccagatcctgggtgtttggctgacctacagatacaggaaccagaaagacccc

SEQ ID NO: 435226 - DNA, 96 bp, Homo sapiens
gctgcttctggcctctgggcatcgcagccttctacttgtcccatgagccaaaactggacaagccaaggcatctgtagccaaagtaaacaaatctac

SEQ ID NO: 435227 - DNA, 100 bp, Homo sapiens
ctgcggcagacggcgacagtggcggcggcgccatggcagggcttgcaggttgtggcagcactgcctgaaggtatgagaccagattctaatctttatggtt

SEQ ID NO: 435228 - DNA, 100 bp, Homo sapiens
acccacacccacacgtgttcaatacacctcccacctgtcctcaggcatatcaaagctgagatgagtgaactgagtgtggcacagaaaccagaaaaacttt

SEQ ID NO: 435229 - DNA, 50 bp, Homo sapiens
accagcaccggctccagtgggctctggcgaactttctgaccaagtataca

SEQ ID NO: 435230 - DNA, 82 bp, Homo sapiens
tcaacctaagttttaaacagaaggtgaacctctgaggttatctaccttgcctgctcctatgccacagtgtacctgatctacc

SEQ ID NO: 435231 - DNA, 98 bp, Homo sapiens
caagaaaagcctctgggagcagaagggaggctccaagacctcatcaacaattaagtggacagaggactgcagaaaatcaacctatcctccttcaggac

SEQ ID NO: 435232 - DNA, 88 bp, Homo sapiens
tacgtcccgctgccgtcgccgccgccaccatgcccaagagaaagggcagctggtggaatttttgaagaaaatggaatctcgaggcccc

SEQ ID NO: 435233 - DNA, 100 bp, Homo sapiens
gcgccccgcgcctgccgctgccctacggcttctccgccatgcaaggctggcgcgtctccatggagagacacctatggctgccgatgaaggctcagcagag

SEQ ID NO: 435234 - DNA, 125 bp, Homo sapiens
cgagtgcaggagccataatgtcgacctgccggagtcgaggattccagggtcgaacactcgtggagacctttggcgacttggcctttggcgacatcttcctccacctgctcacgggcaaccttgcg

SEQ ID NO: 435235 - DNA, 97 bp, Homo sapiens
gcgagggacctgggactgctcacagccaggccctgctgctcctgggggccgccgccctggcctgcctcgccctggacctcctcttcctgctcttcta

SEQ ID NO: 435236 - DNA, 113 bp, Homo sapiens
cttctgaagaaattattagtcctgaatccaataaagagaggcagcttggaaggtgtgggccgaagatatgctcatgtggtgttgaggaaagcagacattgacctcaccaagag

SEQ ID NO: 435237 - DNA, 98 bp, Homo sapiens
aattattaggctctcagatgtaactagagagagaaggaacattccagaaactttggggggagtttgttgcttgtctcctgtccctattacgacaaatg

SEQ ID NO: 435238 - DNA, 100 bp, Homo sapiens
tggcgtccgcgcgctgcacaatggcggctctgaagagttggctgtcgcgcagcgtaacttcattcttcaggtcagctccgccgaaggcgccgccaaggaa

SEQ ID NO: 435239 - DNA, 100 bp, Homo sapiens
ctgactgatgagatcagacgaaaagtgtggcccaagctcctcaatgtcaatgccaatgacccacctcctatatcaggtgacagagctgaatgaacctctc

SEQ ID NO: 435240 - DNA, 98 bp, Homo sapiens
atttgctgattaaacccttggaaaatttccggaaggaacaaataggcttcaccaagacgccacaggtcatcatctggatcatcccattctggttcccg

SEQ ID NO: 435241 - DNA, 98 bp, Homo sapiens
cctttctggacacagaagtatttgtgacagaagaagaagaggacagtgctccagtgaaagtggaagaacaaaggaagatgagtcaggatagtgtccat

SEQ ID NO: 435242 - DNA, 83 bp, Homo sapiens
ttgtttggaagcctacgtaactttgacatctaagagctcaagatttactgatgagccttgaaaccagcgaaacaataatcaaa

SEQ ID NO: 435243 - DNA, 75 bp, Homo sapiens
ttacaaatgaacaaggatctcccaggttttaggagaagttttagcacaacttctgcttcttcccaaaaggagatt

SEQ ID NO: 435244 - DNA, 100 bp, Homo sapiens
gctgcagtcgccgccgccgccgccgcaggccgggaggagccgcagcgccgggcgaccccgcccgggcctcggaaagtgttgtgaagagcgaagacttttc

SEQ ID NO: 435245 - DNA, 75 bp, Homo sapiens
gtgctgcttaaggagatacatatccagcctcatcttgcatctcttgcaactttatcacaggaagctatgatcgga

SEQ ID NO: 435246 - DNA, 50 bp, Homo sapiens
ctaaaacatctagtgaagaggaggaactgataaatttcaaacggaagaga

SEQ ID NO: 435247 - DNA, 90 bp, Homo sapiens
cgggagtgccgtgcgccgcagcccgggcccaggccccggcagcgcctgggacaagacagagtcttgccctgttgcccaggctggagtata

SEQ ID NO: 435248 - DNA, 82 bp, Homo sapiens
gtgggcaccgtgggccgactgaacatcacggtggtacaggacactcatgaggaccatgatacttccactgagaatacagacg

SEQ ID NO: 435249 - DNA, 101 bp, Homo sapiens
gggagattcttttgccagacattactacttcctaggcagaatgcttggaaagtgaaactggaacgccaagctgaagaagaacgaatacggaagcacaaagc

SEQ ID NO: 435250 - DNA, 75 bp, Homo sapiens
tggcagaacctggagaagccccgggccattgccttgcatcccatggaggggatcaagcaccccaacattgtagcc

SEQ ID NO: 435251 - DNA, 75 bp, Homo sapiens
agctgcctcagttcttagcgcaggtgattcgcaaggggtggctcaccatcagcaacattggcatcatgaaaggcg

SEQ ID NO: 435252 - DNA, 95 bp, Homo sapiens
ctgagctttgtggaagcatttggcggcataccaccctgcactgtgaggtgcatcatttctggcatggcttcaggaagcattgtgctattttacaa

SEQ ID NO: 435253 - DNA, 100 bp, Homo sapiens
agaggaaacgtttagcatcagtgactcacaaatcagcaacacagaatttctgcaagtaattggttggatggcaagcatgtggtgtttggcaaagtgaaag

SEQ ID NO: 435254 - DNA, 117 bp, Homo sapiens
tacaataaacaggacctttttgaggagttgccatgaggactgtcaggtaaatattgcagattttcaagagaatcagtgggtgacttgtttccaggagtctgctgaagctatccttgg

SEQ ID NO: 435255 - DNA, 75 bp, Homo sapiens
caaacttgcctacgtcagtaacagccaccaaggaggcaaaaccttcaactgaggacttgggggataagaaggaag

SEQ ID NO: 435256 - DNA, 95 bp, Homo sapiens
cctcgactggcagcgcgggaaacgtcaaactcgagcctgtgtccatggcggctccaacagcaatcacagaagcaggaacacagcctcagaagggt

SEQ ID NO: 435257 - DNA, 83 bp, Homo sapiens
gacggggccctgacacggccaccctactgcctggaggccggggagccgacgcctgggtgatcagcccatgacctaaacctcca

SEQ ID NO: 435258 - DNA, 82 bp, Homo sapiens
cgagaccgcggccgggaccgagggtgcatggctgcctcctaatcccatagtccagaggaggcatccctaggactgcgggcaa

SEQ ID NO: 435259 - DNA, 75 bp, Homo sapiens
ggtgctgctgtgcaagaaacgggccaagaggagaattctgcctaagccaactcgaaaaagccgtacaaaaaataa

SEQ ID NO: 435260 - DNA, 96 bp, Homo sapiens
ctgttttcgacaggtgtgcaggtttcggcacatggagattgatgtttcatctgatggaaatcttccccagcaagccgcgtcagccccaagccgtgt

SEQ ID NO: 435261 - DNA, 98 bp, Homo sapiens
cgacaagctggtgcagctgtacgccgtggtgtcggaggagcccatctacatcgtgaccgagttcatgtgtcacggcacagaaaactgaatctgtagat

SEQ ID NO: 435262 - DNA, 76 bp, Homo sapiens
gacggctcacctgtgcgggatggaacaaaaggggctatcaacagcaggacgcccatgaattcatgcgctacctttt

SEQ ID NO: 435263 - DNA, 82 bp, Homo sapiens
ccgcgcacttcgtcatgttcttcgcgccctgggcgatgccagtccctccactccagaggagaacgaaaccacgacaaccagc

SEQ ID NO: 435264 - DNA, 100 bp, Homo sapiens
gtcctcgtcagcactgactttcagctatggaatcgctcaaggagttatgaccactcagaaaattctgatttggtctttggtggccgcacaggaaatgagg

SEQ ID NO: 435265 - DNA, 100 bp, Homo sapiens
gcagccaaatgtctcctttgtgaggataaacagctcgttggcagtagcagcttatgaggatggctggatcctcattgaccgctgtgggaagcactttggt

SEQ ID NO: 435266 - DNA, 100 bp, Homo sapiens
gttcagcaggtcctgttggagatgatatctctgctggatgaaccgaatcctaacagtccagccaatagccaggcagcacagctttatcaggaaaacaaac

SEQ ID NO: 435267 - DNA, 100 bp, Homo sapiens
gaaggcatcctgcagtattgccaagaaggtctgctcttgataaaataacagcaagtttatgtgatcttaaatcaaggcttgattcaagaactggtgtggc

SEQ ID NO: 435268 - DNA, 100 bp, Homo sapiens
acccagaaggtgctggacccgaagaaggacgtgctgacccgcctgaagcacctgcgggcgctgctggctaatgggaatgacagcaagaaatttaaacgag

SEQ ID NO: 435269 - DNA, 90 bp, Homo sapiens
ccaagctgttttaaatctagtagataagccaggagagtgaatgcaaagcatataatcctagacctttctgtaaaacatacaccatggata

SEQ ID NO: 435270 - DNA, 100 bp, Homo sapiens
cccagttgaaccaagactctgaggctgatatgcaatgtcacttacaacattaatcagatactgcatttaagagaatgctgctcggtcctcctacccctct

SEQ ID NO: 435271 - DNA, 100 bp, Homo sapiens
gcagttcatcttcctccctgtgtactttccatttgccttcctggatgacgtccggttgtttgccttcgtgcgcttcaccaccggggatgccatgagcaag

SEQ ID NO: 435272 - DNA, 75 bp, Homo sapiens
gtcaacaccaagtgcatcaccatccccagctggtattccctctcgagtggtttccactcaacaagcccagtgttg

SEQ ID NO: 435273 - DNA, 50 bp, Homo sapiens
aaacagtcttccgcaggaaggagatgtgcggttgctgatgctattagaac

SEQ ID NO: 435274 - DNA, 100 bp, Homo sapiens
tggcaataaagaatgttggcaagcagatgccttcaattaagttgcagagttctgatggagagatatttgaagttgatgtggaaattgccaaacaatctgt

SEQ ID NO: 435275 - DNA, 100 bp, Homo sapiens
gaaacagtatctcacctccctaaactggttaatagtggcatggaagatccatttggtcctactgctctgttggctcatgaaataggttttggaagtaaag

SEQ ID NO: 435276 - DNA, 100 bp, Homo sapiens
gatcagcgaggagcagcagcagctccagcaggcgctggctcctgctcagttggattggatgctgctggcaagacaaccattctgtataaactgaagttag

SEQ ID NO: 435277 - DNA, 100 bp, Homo sapiens
cagcggcgcagctgatagcaggaacagctcctgttcgacacagtggagaccatgggaaaagactatttgtcatcagaccttctagattctatgacaggcg

SEQ ID NO: 435278 - DNA, 100 bp, Homo sapiens
tggacattgtgccctcaagctgtggcgctgcgatggtgactttgactgtgaggaccgaactgatgaagccaactgcccaggtggcctgacggagcaagag

SEQ ID NO: 435279 - DNA, 90 bp, Homo sapiens
cagtatcccagtgcattcccatcctcgctcccacctgtcagccttctaccccatgagaaagaccagtgaaccgtcctcaaatgaaaccca

SEQ ID NO: 435280 - DNA, 101 bp, Homo sapiens
gaaggaaaaaccacacacaccagcaagatattgacgacctcaagcggcagaatgctcttctggagcagcaagaactgcagttaatccctggggtctgtgga

SEQ ID NO: 435281 - DNA, 75 bp, Homo sapiens
gagctactgcgactacttctggattagtgggatggtttggccatgaactcagcaccagatttaagatggataaca

SEQ ID NO: 435282 - DNA, 100 bp, Homo sapiens
gcgctagctacagcgcctgctgcctgagcccgccagcgacgtgcgcctcgggagtcggcctgtgagcagattccagagtcattaaaaagtatcacatggc

SEQ ID NO: 435283 - DNA, 90 bp, Homo sapiens
cagcctatcctgtatgcgtattcttttagtggaccaccagaggatattttaattaactgtcgacgtgctgccacgtctgttgctatttgc

SEQ ID NO: 435284 - DNA, 88 bp, Homo sapiens
cttttttgggcgccatgctgaggggaagaatccagcaactatcacaagaatactccttagccacttcaattgggataaagagaagcta

SEQ ID NO: 435285 - DNA, 51 bp, Homo sapiens
ccgcgtgcccaaaagcaagctggaagtggattccccagctttccgttgcac

SEQ ID NO: 435286 - DNA, 100 bp, Homo sapiens
ggactaccgaaccaggtggagtggtatccggaagcagcacatggtgaatgccacacccttcaagattgctcgaggccagagggtgtaacttgggccaaga

SEQ ID NO: 435287 - DNA, 82 bp, Homo sapiens
gatccagcaaatacggtttactccactgtggaaataccgaaaaaggtccttgaatgggcaagagggcacatgaagtacggcg

SEQ ID NO: 435288 - DNA, 110 bp, Homo sapiens
gtggctgctcgataaatcagacagaacagttaatcctcaatttaagcctgatctaacccctagaaacaggaggagatgttaaagtaacccatcttgcaggacgacattga

SEQ ID NO: 435289 - DNA, 100 bp, Homo sapiens
caccaaataaaatagccatctcacctttgaaatcgccaaataagggcagcagcgttctcggatgctagctactctttttaaggatgaaaggtgccagcaa

SEQ ID NO: 435290 - DNA, 100 bp, Homo sapiens
catggcgactcccgggccgcgcggtactaggttttgacaagcttgcatcatgcgtgagtataagctagtcgttcttggctcaggaggcgttggaaagtct

SEQ ID NO: 435291 - DNA, 75 bp, Homo sapiens
tgcagttgcagctctttctgcagatgccctgagagaggagctttgtgtccctggtgatgttggaacattaatgat

SEQ ID NO: 435292 - DNA, 75 bp, Homo sapiens
gattcatttagagctgcggaacaggacgccctctgatgtacatgtactgggcagattggggtgagacgccctgga

SEQ ID NO: 435293 - DNA, 81 bp, Homo sapiens
gcagccgcgggcgcccgaggggccgagcgaggtttttcgttggaatatacgttgcacatttatggcgattctgagtgtgag

SEQ ID NO: 435294 - DNA, 57 bp, Homo sapiens
acgatatattctcccccgcccttaagaagactcagcctgcctgcacccaggtgaaat

SEQ ID NO: 435295 - DNA, 97 bp, Homo sapiens
tcgtcgcctccttgcccgtgaccgtcgctagaactcagttgtgcgttgcggccagtcgccactgctgttacactcctggcacaccttacaaagtgtc

SEQ ID NO: 435296 - DNA, 100 bp, Homo sapiens
ggaaggaggccgagccgggatctcaggtcctcgggggcggcggccacgccaaggacgggttgaaatcacaaagattagacacctttttagataggtgttc

SEQ ID NO: 435297 - DNA, 80 bp, Homo sapiens
tggcattgacatttaattttagggtcctttatatagaagggagagtagagacttatttttgagctcgctgtaagactgag

SEQ ID NO: 435298 - DNA, 50 bp, Homo sapiens
gaagaatttcgcagtaagacagcaacagtaactctcgaagtgataaaagc

SEQ ID NO: 435299 - DNA, 83 bp, Homo sapiens
tgtccaactatgacactgacctttttgtcccttactttgaagccattcagaagcgtccagaggaccagaggttaatttattct

SEQ ID NO: 435300 - DNA, 99 bp, Homo sapiens
gattcttcaacgatggcgaacctcccaccaaaaagcccagcaggagcgagaacccgagcagcgccatgagcaacactaccgtcgtccccagcactgcag

SEQ ID NO: 435301 - DNA, 119 bp, Homo sapiens
aggcggaagaccgcgcgcagggcctgcagcgggagctggacggcgagcgcgagcggcgcgagaaaaacatccagtcatggataaaaatgagctggttcagaaggccaaactggccgagc

SEQ ID NO: 435302 - DNA, 100 bp, Homo sapiens
ctggtgccaatcattgacaatattatgttggttgaatctggcgatgtggaacccatggatatggagggctgactatatacaccatgttttttcctggcac

SEQ ID NO: 435303 - DNA, 88 bp, Homo sapiens
agcagaagcgagaggaggaggagaagaaagcggagttcgagcggcagcgaaaaatgtagcagaaggtcaagaaatttgtgtgattgaa

SEQ ID NO: 435304 - DNA, 50 bp, Homo sapiens
cgcgggcacagggtgccgctgaccgaaaaatggctacaaacttcctagca

SEQ ID NO: 435305 - DNA, 96 bp, Homo sapiens
ctggacagtggcacacagataccgtttattaaaagagctgtggctgctagacagcaacaagcagaattggcccaacaggaatggcttcaaatgcag

SEQ ID NO: 435306 - DNA, 100 bp, Homo sapiens
ccgagcgcgggcaggcgggaggcaacggagctaccagccggtacatggccacctctggcctagaccaccagctgaagatctttgacttgcgagggacgta

SEQ ID NO: 435307 - DNA, 100 bp, Homo sapiens
tctggcaagttggccctgtcggttggtacagataaaactttaagacatttctcttgggaagttgtgcatctgacaggaatatagtactgtacgatatgag

SEQ ID NO: 435308 - DNA, 100 bp, Homo sapiens
ccggagtcttcctgatccatggacccgatgaacatagacacaggatgctccagaccttgtatgattacttctggtgggaacgtctgtggctgcctgtgaa

SEQ ID NO: 435309 - DNA, 75 bp, Homo sapiens
aaattgtcagtaagggaagagatggggatcgcttacacctgagacgaactacagaacagcacgtaccagaggtgg

SEQ ID NO: 435310 - DNA, 100 bp, Homo sapiens
atgagcatggccaccaacctctatgagggccacatcgagaaggacgcccgagagttcatcgacaagcaggcagctgtgttactggagcaggaacgacagc

SEQ ID NO: 435311 - DNA, 100 bp, Homo sapiens
aaagcacttggttctgcttcgagatggaaggacacttataggctttttaagaagcattgatcaatttggcccgatgagagaaagggaaagttaaggatgc

SEQ ID NO: 435312 - DNA, 75 bp, Homo sapiens
ctcgctgcagatgcagtacagtattatcagttcctgcttgctggccgggaaagttggggacatgctgctacaata

SEQ ID NO: 435313 - DNA, 100 bp, Homo sapiens
cttgcactgtgcctgtatggtgtcagatgctgactgtgtggagttacttctggaaaaaggagccgagatacgggaatatgaatggattcattcccaaacc

SEQ ID NO: 435314 - DNA, 139 bp, Homo sapiens
ggatgatcgagaggatctggtgtaccaggcgaagctggccgagcaggctgagcgatacgacgtgtggacgaatgtggaacctcgctctgtggctgtgttcccttggcactccttagtccccttcctggcacccagccag

SEQ ID NO: 435315 - DNA, 90 bp, Homo sapiens
gtacacagggagcaaatatatcggggaatatgtagatgggaggtgctgatgtatggacagccgtatcgtgttaccttagagcttgagctg

SEQ ID NO: 435316 - DNA, 98 bp, Homo sapiens
agcggtagcgggagcccggccggagctgggtctggagacgccgtggcagcctgaacggagtgtgcgacggattgggagttacagaatgtctgaagggg

SEQ ID NO: 435317 - DNA, 75 bp, Homo sapiens
atgtgaggctgatgaagaggaaaacagtgtgcaaatttaaggcccacaagcgctgtgctgtgcgtgcaaccaata

SEQ ID NO: 435318 - DNA, 50 bp, Homo sapiens
cccatccctgcagcatgaacaagatccgtgattctaactgcaactatgag

SEQ ID NO: 435319 - DNA, 50 bp, Homo sapiens
ctctgttccaaatgctttgctggatggcacatttcctagaggcagaatcc

SEQ ID NO: 435320 - DNA, 98 bp, Homo sapiens
acacgtggacctaactgcaccagtagcttttctgagaatacttgctgaaaaggaagttttctggaatggggaaatgaggcaagttatcctttggaaat

SEQ ID NO: 435321 - DNA, 97 bp, Homo sapiens
agttcctctccctcatcggcgagaaggtctgcctgaagggcttcaccaagtacgctgcccagctggacgtcaagagctggaccagatgatatcagaa

SEQ ID NO: 435322 - DNA, 100 bp, Homo sapiens
ctccggggtaggtgggtgacggcggtcggaggtgtaggagggagccgtggaggtccagaacattaaccaggtggtatttgttggaaatttcttgagaatt

SEQ ID NO: 435323 - DNA, 75 bp, Homo sapiens
cagctggctggcggagcatgagcgccccagacagagggggaagacggtggggcctccccacctgccccgcagaag

SEQ ID NO: 435324 - DNA, 83 bp, Homo sapiens
cgtccgccgccaccacccactccggacacaggcattgaagttgatatcgatgtggagcacggagggaaaagaagccgcctgac

SEQ ID NO: 435325 - DNA, 90 bp, Homo sapiens
ggtgaccttcgcttggtgtcctcctggcctcagcaacctgacaattctgtcgtgtcccggagagattaaacagattctagaaaatgaact

SEQ ID NO: 435326 - DNA, 100 bp, Homo sapiens
gttagtgcctggtacaatatgaagaaaaagtcagcactttttgaagtgtctgaggttataccagtcatgacaaataattatgaagaaaatatcctgaaag

SEQ ID NO: 435327 - DNA, 97 bp, Homo sapiens
gcgggagcccgcgggggccgcgcccttctctcgcttcggactgcgcaacgctgcgctctgggctgacaggaggagatgttaaagtaacccatcttgc

SEQ ID NO: 435328 - DNA, 96 bp, Homo sapiens
ggtcctggtggtggttctgtcgatcgtcttggaaggtctctggacactatgggcacacgactcctcccagctctgtttcttgtcctcctggtattg

SEQ ID NO: 435329 - DNA, 50 bp, Homo sapiens
cgagatcctgcacatgtctttgaataagttcccctgtcagtggaggatgg

SEQ ID NO: 435330 - DNA, 74 bp, Homo sapiens
aaagaccacttaagcaaacttaatataccagacactgcaactggcacatttcacattttatgcaaaacatccct

SEQ ID NO: 435331 - DNA, 80 bp, Homo sapiens
cattggcaagaaagggcagaacctggccaaaatcactcagcagatgccaaagtggctttacagtgggtaccctgtcagaa

SEQ ID NO: 435332 - DNA, 75 bp, Homo sapiens
caatgagaacagcacctcggacaaccagatatatgtaatcgacagtgcagacagaaaaagatttgaagagacggg

SEQ ID NO: 435333 - DNA, 116 bp, Homo sapiens
gaagtaatccacccccaaccactctcttctgagggctcccagacatatataatggagccagatgaccaagatgctccagatgaacatgagtcgcctccacctgaagatgccccatt

SEQ ID NO: 435334 - DNA, 75 bp, Homo sapiens
cagaagatattcacagacatgcggaatttgagaatgaaattccacaattagttggtgaaatttatcagaatttct

SEQ ID NO: 435335 - DNA, 86 bp, Homo sapiens
gggagcgcggcggagacgatgcctgagatcagagtcacgcccttggcaaacggggattcagcgtccgatcctttggaacagggact

SEQ ID NO: 435336 - DNA, 50 bp, Homo sapiens
tgataacaccctgtaacagctgaaaaactctctgcagaggaattagagcg

SEQ ID NO: 435337 - DNA, 90 bp, Homo sapiens
tccaaatgttggctgaaattcatcccaaggctggtctgcaagtcgcttataccaagttgaatatgccatggaagctattggacatgcagg

SEQ ID NO: 435338 - DNA, 90 bp, Homo sapiens
ctcttcttgagagtgtcacatggattgttttaaagcaacctataaacatcagctctcaacaggcattgggatcccgtggcagttgcagca

SEQ ID NO: 435339 - DNA, 83 bp, Homo sapiens
agtatttgaatttgctagtaacgtcatggaggatgaacgacagagttgatctctctaatgtattagatcttcatgcctttgat

SEQ ID NO: 435340 - DNA, 75 bp, Homo sapiens
cccatgtgagcaatctcagtgaccttcaggtactctgtggatatccccttggacaaaactgtcgtcaataaggat

SEQ ID NO: 435341 - DNA, 75 bp, Homo sapiens
tcaaagaagatgcctcgaactaaacaaattcatcccagaaatctaagaggatgaagtcattgctgtttccgaaaa

SEQ ID NO: 435342 - DNA, 100 bp, Homo sapiens
ctctcctccctggacacgtgtggggaagaggcctccgtgctggagatcctggtgtacaacagcaagattgaggatcctggaggtgatgggatagactggg

SEQ ID NO: 435343 - DNA, 82 bp, Homo sapiens
aggcatttccagcccgcccacccagaacatccagtcatggataaaaatgagctggttcagaaggccaaactggccgagcagg

SEQ ID NO: 435344 - DNA, 82 bp, Homo sapiens
aggaaacacctctacctcctgcgaggcctcccgggctccgggaaaactacactggccagagatcctgaaggagctagacgag

SEQ ID NO: 435345 - DNA, 97 bp, Homo sapiens
tgtggttggagaaaagggtgttctcctctcaggccaggacgactggaatgggaccaggccgtcgctgaaggcccctcctgctaggccagtgaaggga

SEQ ID NO: 435346 - DNA, 80 bp, Homo sapiens
cgcccaggaccgccggccgggggacgagctcggagcagcagccaggaaattcagttcatgaagataagaagtttcttgac

SEQ ID NO: 435347 - DNA, 83 bp, Homo sapiens
tcgtgatccagaagtccagagctgaggactgcctgtttgcagatgatatcatcaagttgaatcgaaaggaagggaagaagcag

SEQ ID NO: 435348 - DNA, 75 bp, Homo sapiens
cccttgtccagttactctaacaagtctggagctgcttttctaacccaaactgtatgtcttgatgacactacagta

SEQ ID NO: 435349 - DNA, 75 bp, Homo sapiens
cttcaagtacttggcagatcactctcttagcagaggacaagaattttgggcagatttgaatgccatgaacgtgta

SEQ ID NO: 435350 - DNA, 98 bp, Homo sapiens
gtcggccaagctcatcgccaacggtggtcaagcgggtgctgacccagaccagcagcgggggcttctgtgggaacgacggcttcatgcacatgaccctg

SEQ ID NO: 435351 - DNA, 82 bp, Homo sapiens
tggttcgtgctggactacaatgcaggactgctctcctactacacggtctttcccccgttcaggctgatgcccaggaaggtga

SEQ ID NO: 435352 - DNA, 100 bp, Homo sapiens
ctctgatctacgaaagtcatgttacccaacaccggggaccctgatgccccacaaccctgcggcaccacagagccgaccacaagctccagtctgtgtggga

SEQ ID NO: 435353 - DNA, 126 bp, Homo sapiens
gacgagcaggacttcatccaggcctacgaggaggtgcgcgagaagtacaaagcttcggaaccaaaaagaagcttcccagagccggggccaggagccccaagcgccctctagcagcaaacacagaag

SEQ ID NO: 435354 - DNA, 82 bp, Homo sapiens
gcgattccgcagtccccccgttccctggaggtcctgtggaatgcaaccatgtccaagggacctgcagttggtattgatcttg

SEQ ID NO: 435355 - DNA, 82 bp, Homo sapiens
cgacgactgtgacgaggacgaggaggcagccacggggcccctggagcccaaatcttgtgacaaaactcacacatgcccaccg

SEQ ID NO: 435356 - DNA, 75 bp, Homo sapiens
acttagatgacaatgtcaagaaagaaaactcctccttgtacctagtatccagcgagcagcattggtggtcctaga

SEQ ID NO: 435357 - DNA, 75 bp, Homo sapiens
gtagagtatttcaaccataaagacatcttaattgggcacgaaagagactgtgccctgtccacggtgcctcctgca

SEQ ID NO: 435358 - DNA, 95 bp, Homo sapiens
aaagctgaactgaatgagtttcttactcgggagctggctgaagatggctactctggagttgaggtcgaaggtttcctttaagatcacgctgacgt

SEQ ID NO: 435359 - DNA, 80 bp, Homo sapiens
tgacatcaatcccctggatcctggagaatgcaatccgcttatccccaggaagctgagatgatttccaagaacaagaaccc

SEQ ID NO: 435360 - DNA, 90 bp, Homo sapiens
cctgacacttggcatgacagtggctttacaggaagtatggtgctggcatctgcttggcttctagagagtcttacaatcgtggaggaaggt

SEQ ID NO: 435361 - DNA, 75 bp, Homo sapiens
ggagatcccaggcggtgacagagtggagccatggctagagatgatatcatcaagttgaatcgaaaggaagggaag

SEQ ID NO: 435362 - DNA, 75 bp, Homo sapiens
ccatactggaataatggagcagagacttcttggcaggctaaagaattacctccaaagccattgtcaagaccacag

SEQ ID NO: 435363 - DNA, 85 bp, Homo sapiens
gaaggataagtcgaaggggaaggcgcctgaagaggacgaagatgtgaggtgaggatgagccgcagccctttcctgggacatggat

SEQ ID NO: 435364 - DNA, 75 bp, Homo sapiens
agttatggcaatgtgatcgtcatcacagtcaactatcgacttggagtactcgatgaaagttttagacaaagccga

SEQ ID NO: 435365 - DNA, 82 bp, Homo sapiens
cgcttctcccgcttcaacgaagaccgagactttcaggaggcaagtgaggcctatctggttggcctttttgaagacaccaacc

SEQ ID NO: 435366 - DNA, 100 bp, Homo sapiens
agcagccgtccggagccagccaacgagcggagttccaccatcttcctctgaagacgtagccatcttgctccatgaaggtcaggacaatctgacatgcact

SEQ ID NO: 435367 - DNA, 143 bp, Homo sapiens
tggggcgaaggtgcgggaacgtccactcccgcgcgcccctctcggggaccagggcggcctcccaggaggagcttgaacccttaggagaaatcttgagagtggacagcaattgtgaagatcgccagagagttctgtgtttcatc

SEQ ID NO: 435368 - DNA, 75 bp, Homo sapiens
gatcattgtcgtcagtaccatatcccatgtccttatcagttaagtgggcagaccaacatccacctcagcaaaaac

SEQ ID NO: 435369 - DNA, 100 bp, Homo sapiens
aggaagactgtctgccgagttctcacgtgcccatcagtgacagcaagtccattcagaaaccagtgctctctgaataacggtggctgcagccacaactgct

SEQ ID NO: 435370 - DNA, 75 bp, Homo sapiens
gtcggcgtttgaagaggtggaactcctagggcttttttgagagtgtaaattcaagatggaggcgctttcctactg

SEQ ID NO: 435371 - DNA, 75 bp, Homo sapiens
gcagccaccaccagtttgcggcaagcaaatcagggtgatgatgaacagtctacacagatggctgcaagttgggaa

SEQ ID NO: 435372 - DNA, 51 bp, Homo sapiens
cccctggggacgccgccctcccgggtgtggatgaggtcaccattgtcaaca

SEQ ID NO: 435373 - DNA, 80 bp, Homo sapiens
gccctgagagaacagggtggccgcttggtccaggtaaattggcaggatgaggagcagcaaatcaaaagaggtgcctttac

SEQ ID NO: 435374 - DNA, 75 bp, Homo sapiens
ctctaaacgaccatctgaagcatctgcttacaagcgatttgacgggatctgaactatacacccaggcggccagcc

SEQ ID NO: 435375 - DNA, 119 bp, Homo sapiens
ctgggagagcggtcggcggggtttcttcgttgcattgcctgagaggagcggagtctgccaggtggtgtccatcatgggcgtctctggccgagcctctttttgtggaaaacgacagcagc

SEQ ID NO: 435376 - DNA, 100 bp, Homo sapiens
ccttcagcaagaagagaagcaacttcagccgtgtatgcaaatggataaccggttgcctcccaaaaaagatccagtttgctgaccagaagcaagaattcaa

SEQ ID NO: 435377 - DNA, 82 bp, Homo sapiens
ctgcagcggaaccggacccagtccctgagccgcccctacacccacagagggtcaccatgaagttcaatcccttcgttacctc

SEQ ID NO: 435378 - DNA, 90 bp, Homo sapiens
cctgaatccggattatcgggaagaggacacggatacgggacgtgcaggaaacactgatgccccaggtcctgaccaccctggaggaggatt

SEQ ID NO: 435379 - DNA, 75 bp, Homo sapiens
taccgagatgcggttttcctcgcagaacgcctttatgcagaagcgtccgtgtgcctggccctgcgcccctgcctc

SEQ ID NO: 435380 - DNA, 86 bp, Homo sapiens
gggcgcagcagtactttgagaaaatggacgctgacatcaatgtcacaaaagcggatgttgaaaagaaatcttcccaaggctgcaga

SEQ ID NO: 435381 - DNA, 75 bp, Homo sapiens
aaggcctaagaattttggcattggtctgaaggggcgtctcgattacctgagctctctgaaggtgaagggccttgt

SEQ ID NO: 435382 - DNA, 98 bp, Homo sapiens
ggatggatgtgatgcctgctagccaaaagggatctcatagatcagaacatactggagcctgtaacccgtgcacagagggtgtggattacaccaacgct

SEQ ID NO: 435383 - DNA, 50 bp, Homo sapiens
agacagagtctcgctctgtcgccaggctgaggcaggagaattggttgaac

SEQ ID NO: 435384 - DNA, 75 bp, Homo sapiens
cgaggaggtgcgcgagaagtacaaagagtgcctggtgaagaatgtgatgggatcactagcatgtctgcggagagc

SEQ ID NO: 435385 - DNA, 51 bp, Homo sapiens
cttttccgtgctgatttctttcaacctcgtatgaatctgatgaacaagaaa

SEQ ID NO: 435386 - DNA, 82 bp, Homo sapiens
gagaccgcggccgggaccgaggggagaggctgtcgatgctgaggcacgagagaatttgctcctgctcctccagagaaaatgg

SEQ ID NO: 435387 - DNA, 97 bp, Homo sapiens
ctttggccgtacattctataatcaggcaattatgtcttctaaaaatattgcacagtccacagcaggagcatcattattggctaatgcctcacctctg

SEQ ID NO: 435388 - DNA, 96 bp, Homo sapiens
cagagaaaatgaaaccagcagacagaatttgtcagtgcgtcagcatttatcccgtttgccaaccattgatccgaataccaggaccctgcttttgtg

SEQ ID NO: 435389 - DNA, 50 bp, Homo sapiens
ggaaaatctccccggtgactttcaggggcagccattttggggggtgctga

SEQ ID NO: 435390 - DNA, 74 bp, Homo sapiens
aatcaacctatcctccttcaggaccaacgttggatggcaagcatgtggtgtttggcaaagtgaaagaaggcatg

SEQ ID NO: 435391 - DNA, 51 bp, Homo sapiens
gaaacccagccgaagcatttaaaagtgatgtcttggcattgcccattttca

SEQ ID NO: 435392 - DNA, 82 bp, Homo sapiens
aggacaatggggacccgggacgacgagtacgactacctattcaaagatcattgagaagcagccaggccacattcggagcagg

SEQ ID NO: 435393 - DNA, 75 bp, Homo sapiens
agatcccaccttcagtcctggctctgacaagccctccagttggttgaatctggcgatgtggaacccatggatatg

SEQ ID NO: 435394 - DNA, 74 bp, Homo sapiens
agaagatctattaagtgcaaaagtttgtgacttgaagtggatacatatgatggctcatgaagcaatggaatatg

SEQ ID NO: 435395 - DNA, 100 bp, Homo sapiens
caccaggatctcgggctcggaacgagactgcacggcatcaactctcaattgacttatagcattgcttcaggtgatagccttgggcagtttactgttgaca

SEQ ID NO: 435396 - DNA, 50 bp, Homo sapiens
ggcgccggagacgatgccgttgctgatcagctgaccgaagaacagattgc

SEQ ID NO: 435397 - DNA, 97 bp, Homo sapiens
cagctgacaaactgctgagcctgccaatgcaacagccacggaagattaagcagcactctcgagtggaccctgaggagctcttcaccaagctcgaccg

SEQ ID NO: 435398 - DNA, 100 bp, Homo sapiens
catggagcaagtctgtcagcaccatctttctaacagtcctcaaaggcttcccttccctactggttacaaaaggcagcgagaatatgaagaggaagatgac

SEQ ID NO: 435399 - DNA, 80 bp, Homo sapiens
cccagacatggggaacagggtcacagctctcacccagatgtgtcttgctgaatcagggctctcttatccctgccatcgac

SEQ ID NO: 435400 - DNA, 75 bp, Homo sapiens
tggggccgcggccggaccgagcgcctcgacctcggtctgagggttttttgattaactcaaaaccagagaatgcct

SEQ ID NO: 435401 - DNA, 113 bp, Homo sapiens
gctgaaaacagcctcaagaaaccagtaacagattgtgttatttcaaatgtccctcttccagtggaaagcccaaccatgcagacatcttgctcataaacttacagtatgtttca

SEQ ID NO: 435402 - DNA, 100 bp, Homo sapiens
tacattcctgattacctgccacccattgtgtcttctcaagaaggaactgaaattaccattcacttttttaagtggacatattcatgaattgaggattcat

SEQ ID NO: 435403 - DNA, 98 bp, Homo sapiens
tgctcttcggcaccgccttgggctcccgcggccactcggcctagttcacccccgccaccccagcaatttgtcgtccagcactctctatttgggagtcc

SEQ ID NO: 435404 - DNA, 100 bp, Homo sapiens
aacagcggaggacgaagagcgggacccgagccctgttctggatacttaaaggccaaacagtatatggaagaagaaaactacgataaaatcataagtgaat

SEQ ID NO: 435405 - DNA, 100 bp, Homo sapiens
tccactgcaccctgcgcgagaagtgtcctgttggataaacgttttcgagctgagtgtaagaattatggcgtcatcattccgtatccaccgtccaatcgct

SEQ ID NO: 435406 - DNA, 73 bp, Homo sapiens
cagctgatccaggaagcctgtcggagctgcctggagcaggaatccaagagttttgtaatctccatcagtcaaa

SEQ ID NO: 435407 - DNA, 100 bp, Homo sapiens
atgggaaggaggccgagccgggatctcaggtcctcgggggcggcggccacgccaaggacggagttccaggaccgcacgctccgaggaggaccgggacggc

SEQ ID NO: 435408 - DNA, 83 bp, Homo sapiens
cagaggcagtggagtttcttcacagtaaaggactgatgcacagggacctcaagtctctcagcaaacctgctgggcgacagcgg

SEQ ID NO: 435409 - DNA, 124 bp, Homo sapiens
ctgaagaattatggagagaacccagaagcctacaatgaagaactgaagaagctggagttgctcagacaggtgccttatgcccgctcagaggcccacctcacagagctgctggaggagatatgtg

SEQ ID NO: 435410 - DNA, 73 bp, Homo sapiens
ttcaaaccaccacagccgcctgccaggatggactcgctgctcattgcaggctctagaccaagatagaacagcc

SEQ ID NO: 435411 - DNA, 99 bp, Homo sapiens
cgtgtccccgctccgccgcccgagcagctgtgaaagtgaagtttggcttgaaaacacattctgccagtgcaaatccaaaaagtatcaagacaggattct

SEQ ID NO: 435412 - DNA, 75 bp, Homo sapiens
tgccgtgtgtgcgtgagagaagaccagtctttcctctaggtgggaggaggagctcgccaagcgcatgaaccttca

SEQ ID NO: 435413 - DNA, 98 bp, Homo sapiens
ctgagaaccatgctcaccgaccctgtggcagcacaccctgggccccccactccccgccgcaagtcctgaggatggccagcagagaaacaagaaaatgg

SEQ ID NO: 435414 - DNA, 98 bp, Homo sapiens
atggagattaatttgacaccagtccctcagaggaaatgcttccagactgcacacttttacttagaggacagtacatcccctagagttatatccacacc

SEQ ID NO: 435415 - DNA, 100 bp, Homo sapiens
gagcccgattacaaggatatttacctgctcctaccctgatctagtcttcagccagggttgacgagcccatgaccatgttcctctggacactttgtactag

SEQ ID NO: 435416 - DNA, 73 bp, Homo sapiens
acctgggcagagactacaagccaggcttggccaataacaccatccagtgggaccctgaagatgtgaacctcga

SEQ ID NO: 435417 - DNA, 101 bp, Homo sapiens
tcgggatgccgtccgaagtcggcgacagcggccggggcgcaggcgcccgtgcggaatggcagatattgaagcacagattcgagaaattcaaggcaagaagg

SEQ ID NO: 435418 - DNA, 100 bp, Homo sapiens
cggccaagactccgtcctgcaaggaaattgacaatggcccttcagctatgctaggtctataatgggaagtgtcacagttcggtatttctgttatgggtgc

SEQ ID NO: 435419 - DNA, 100 bp, Homo sapiens
ttgagatctgtttctggggcctctggcggtggcggcctggggcggcgcgacggctggtgcgcagaattctggggagacattgccaaggaattttactgga

SEQ ID NO: 435420 - DNA, 120 bp, Homo sapiens
aagatggcggatctggaggagcagttgtctgatgaagagaagtgggtaattccagaattgattggccataccattgtcactgtattactgctcatgtcattgcactggttcatcttcctt

SEQ ID NO: 435421 - DNA, 83 bp, Homo sapiens
acatcaagcagaatgtgatttgcttgaagatatgagagaaaatattctctttggaatgggaaatcctctgcttgacatctctg

SEQ ID NO: 435422 - DNA, 74 bp, Homo sapiens
ctctacctcctgcgaggcctcccgggctccgggaaaactacactggccagtgcagagcagagcgggcggaggac

SEQ ID NO: 435423 - DNA, 100 bp, Homo sapiens
gggctctgttgaagcccctaagacaaataagtctcctgaggccaaaccattgcctggaaagctaccaaaaggtggtggacatcatacgtgtgaacgtgga

SEQ ID NO: 435424 - DNA, 88 bp, Homo sapiens
gtgcaactggcccaccagtattttgagctcttccctgagcagaaagaccctctatggcagtctgacagcaatgcaagcttcctccgtg

SEQ ID NO: 435425 - DNA, 95 bp, Homo sapiens
aattcaggagttcaagaaacgagatgcacagtgtggcaaaggagcagagaactttgacaagttcttcacacgaggacagcccgtcttaacaccac

SEQ ID NO: 435426 - DNA, 98 bp, Homo sapiens
aagttccagctctgcgccgatctatgcacgcagatgctggagaagtccccttatgaccagggcgtctctggccgagcctctttttgtggaaaacgaca

SEQ ID NO: 435427 - DNA, 89 bp, Homo sapiens
ttgctggcaagcagctggaagatggacgtactttgtctgactacaatattcaaaagcaggaagaaccggacccggcgaacctggaagtg

SEQ ID NO: 435428 - DNA, 99 bp, Homo sapiens
gaattttgtgccaagaaatttatttgaacaatttcacaggaaagatgaatgggagggctgattttcgagagccgaatgcagaggttccaagaccaattc

SEQ ID NO: 435429 - DNA, 100 bp, Homo sapiens
ccttgggtgaaattgttaggcgtggagagggagtgatgtcttccagactcggtgctgtacccgccgattctcaaagttggattggtggaaacaatgaacc

SEQ ID NO: 435430 - DNA, 83 bp, Homo sapiens
ggaccggaccctcgcgccgcccgcggctgtctgtccccagaccccagagcacgtccggcaccaccatgactgggctgttgaag

SEQ ID NO: 435431 - DNA, 90 bp, Homo sapiens
gttttggatagcaatgatcccaatttccagatgccttgttcaacaggtgaagtattacagacacttagcacctgatcacttgctgcaaat

SEQ ID NO: 435432 - DNA, 96 bp, Homo sapiens
gaaagtctgtcattctggactgcacccctacgggaacccacgaccattatatgctggaatggttccttggtcggcactcttcaccctcccgagccc

SEQ ID NO: 435433 - DNA, 82 bp, Homo sapiens
atcttggttttgagctctgctctgcctgtgatgtcgagaacactggtgtgctggaattgatgttcgtctgtgtgatgttggt

SEQ ID NO: 435434 - DNA, 74 bp, Homo sapiens
ggagggcgcaggagcgggactgagagcgcctggaggctcgagcggaggatgggacctgcaaaggataaactggt

SEQ ID NO: 435435 - DNA, 75 bp, Homo sapiens
cctcctcagatgcccctgccggagatccctcagccctggctgctgcatcttcctcccgtgaggctggccgagctc

SEQ ID NO: 435436 - DNA, 75 bp, Homo sapiens
gaaagctattttgcgaactatcttctccagcggagatggccaatgtatacaaaactaggatatgctggaaataca

SEQ ID NO: 435437 - DNA, 75 bp, Homo sapiens
ttattttgggtcttcttcttaatcccatatctggacatctggaacatccatggtctactttgaggatgaggacag

SEQ ID NO: 435438 - DNA, 96 bp, Homo sapiens
actccaggtccgacccgcgaacccctctgggatccccgccgctctgtctacaacccgagacaccattcgcttttcacccaagatgatttgatgtct

SEQ ID NO: 435439 - DNA, 98 bp, Homo sapiens
gcgtcgccatggccgcggttcccgagttgctgcagcagcaggaggaggaccgcagcaagcaaatgaagaaacacccctgccgccagtgtgacaagtct

SEQ ID NO: 435440 - DNA, 100 bp, Homo sapiens
ggcggcagtcgcgctgagggactcggctcagaggaggtggccaagttggagaagcacttgatgcttctgcggcaggagtatgtcaagctgcagaagaagc

SEQ ID NO: 435441 - DNA, 83 bp, Homo sapiens
ctggtcactgtgtttgagaatagcagacctgcctagagctggaacgttacctccagagcgagccctgctatgtttcagcctca

SEQ ID NO: 435442 - DNA, 87 bp, Homo sapiens
tctttacttggtgcaggaaggcagtctttgctacgtacagcaaaaggctgcctttaatattggttgggaacaaatctgatctggtgg

SEQ ID NO: 435443 - DNA, 100 bp, Homo sapiens
gtgccttttgcctcccaccgtgattctgaggcctccccaaccatgtgcaattcctggagatttgaaaaagagaattgaatctctgatagacagagactat

SEQ ID NO: 435444 - DNA, 100 bp, Homo sapiens
aatggaatatctggagaggaatggctatattcatagggatttggctgtattcatcaccaaagaaaaaacttacaccaatgcagaaatcggttagtccatt

SEQ ID NO: 435445 - DNA, 100 bp, Homo sapiens
tctggttactgctgtgtggctgcactcactctacgtggagttgggccctgcaggaaggacggacttcaggggcagggagagaagtttaactgtgaaaaat

SEQ ID NO: 435446 - DNA, 100 bp, Homo sapiens
ggcagggaggatgacggagctgcagtcggcactgctactgcgaagacagctggcagagtcaagcgtcagcctcactgttcctcctgtcgtaaagctggag

SEQ ID NO: 435447 - DNA, 50 bp, Homo sapiens
cagctaggttcctggtgctttggggttctttattggtgaaaacatgaatc

SEQ ID NO: 435448 - DNA, 96 bp, Homo sapiens
ctggcccacaagatccagtccccacaggagtgggaggcgatccaggccttgacgggacagcatggacagtgtcaagcagagtgcggccctgtgcct

SEQ ID NO: 435449 - DNA, 75 bp, Homo sapiens
gaaggccttgactacggaggggttgccagggccaggaaggaatactgggagaatcttcggatagcctcaggccgg

SEQ ID NO: 435450 - DNA, 82 bp, Homo sapiens
cggaggaccgtatccccagcccactgggctacgcagcaaattgtggctactaatttgccccctgaagatcaagatggctctg

SEQ ID NO: 435451 - DNA, 75 bp, Homo sapiens
caataacaatggaaaggtcatttcaaggttttgactctgggaggagggctgccttatttggagcaccttaatctc

SEQ ID NO: 435452 - DNA, 100 bp, Homo sapiens
gtctggagggctgagcagtcaactcaaatgcaagtccaagaggaggaggaggcggaggtccaagcggaaaggagcctgtgtgaaatgcagcaaaggggtg

SEQ ID NO: 435453 - DNA, 100 bp, Homo sapiens
ggacaaacctcagccctaacggtggtggagaacccaaaggcttcagggatgacttcttagggggcaggggaggtagtcgcccaggcgaccggcgaacagg

SEQ ID NO: 435454 - DNA, 100 bp, Homo sapiens
aaaagccatactctgaagaagaaagtaggcgtgttcgccgcaataaaagaagcaaaagcaatgaaggagcagatggtatcagcggcagggaaggaggctt

SEQ ID NO: 435455 - DNA, 75 bp, Homo sapiens
tggactacaatgcaggactgctctcctactacacgaaatgaatgctaagggagttatcctcaatgcatttgaacg

SEQ ID NO: 435456 - DNA, 74 bp, Homo sapiens
ggggtacaggaggcctctgggtgaaggcagaggctaacatgggtctctcagcaaacctgctgggcgacagcgga

SEQ ID NO: 435457 - DNA, 100 bp, Homo sapiens
gctgtagtcatctacaataataaatccaaagaggagccagttaccatgactcatccagggacaggagagagtggcaagagtacgtttatcaagcagatga

SEQ ID NO: 435458 - DNA, 90 bp, Homo sapiens
tggaaacattatgtgggttgttggaggatatatgttcaaccactcagattataacatggttctagcaaccacaatggacactgccagcca

SEQ ID NO: 435459 - DNA, 100 bp, Homo sapiens
ctggaggtgggcaaggtgatccagcaaggtcggcagagcaaggggcttacgcagaaggacctggccacggctggcctgccactcctcctgctatgatgcc

SEQ ID NO: 435460 - DNA, 90 bp, Homo sapiens
cctggagctctacgcctcctacgtttacctgtccatggacccagagttcaacaatacagatcagattgacctgtatgatgatgtgctgac

SEQ ID NO: 435461 - DNA, 97 bp, Homo sapiens
cccaggggtcgctgtcgcctgctgctggctcctcactggggcctttacaacaactaaacggacaggcattccagccccacgggaattttcagtaact

SEQ ID NO: 435462 - DNA, 107 bp, Homo sapiens
aaaaaaccaaagagagagaaaaaatgaattcatctaaatcatctgaaacacaatgcacagatggagtctcactcttgcccaggctgcagtgcaatggtgtgatctcg

SEQ ID NO: 435463 - DNA, 73 bp, Homo sapiens
cgccatccggactcccgggtcctctgtgcaggtcctggtgcttgatggtcgaggccatctcctgggccgcctg

SEQ ID NO: 435464 - DNA, 100 bp, Homo sapiens
tggaaccacagctgtccctacgtatcaggttggaaggttacacggtgtgggcacacaacctcattgccattgctcgtcttcggggctctgatctgaaagt

SEQ ID NO: 435465 - DNA, 99 bp, Homo sapiens
gggcgcgcagagggcaccgggcgccgggagcaggcggcgcagcaccagcccaataggggcacaaaacgtccccgggatgatgaagaggaggagcagaag

SEQ ID NO: 435466 - DNA, 50 bp, Homo sapiens
ggactcatggaggctgagcatttattcagtgccggtggtggtgtgcacat

SEQ ID NO: 435467 - DNA, 83 bp, Homo sapiens
ctcaagcagtcctaccatgtcagccttcccagtagctgggaccacaggaggaggagggggccagtgggggagcagtccattca

SEQ ID NO: 435468 - DNA, 90 bp, Homo sapiens
caggcatggagatgctactgatgtcaggatcctgataacttaagtgactctctcttttccggtgatgaagaaaatgctgggactgaggaa

SEQ ID NO: 435469 - DNA, 87 bp, Homo sapiens
cccggcatcggaatgttcgaggctataactacgatgaaggtcaagatattgttttcaagtgccttggagagaatatcctgcagaatg

SEQ ID NO: 435470 - DNA, 82 bp, Homo sapiens
caccaacgcggtgcgcgaccgggagctggacctccggggtgaccctggcagcaaccccaacaaacgccagaggcagccccct

SEQ ID NO: 435471 - DNA, 98 bp, Homo sapiens
cgcccgagtgccggcttctcccctacgcgctacacaagtggagctccttttcctccacctaccttcccgagtcaatgtgacggtggactacattagac

SEQ ID NO: 435472 - DNA, 75 bp, Homo sapiens
cgtggttgtagagttccgtgactcccagggcctcggcttcacaggatggggctgccagtgtcctgggcccctcct

SEQ ID NO: 435473 - DNA, 100 bp, Homo sapiens
ccgccctggacatcaagattaaaagagcgaataaagtttatcacgccggggtgtcagttgtacccgaggcgttctcagcagcagcaagtacctgtggtgg

SEQ ID NO: 435474 - DNA, 83 bp, Homo sapiens
gggcagtggaaaaggtggaagagcagtgccatccattgaatgggttgaacttttcacagaattaacactgaatcctccggaag

SEQ ID NO: 435475 - DNA, 97 bp, Homo sapiens
ttttgcacatccggacctgtttgtgagatcaaaggtccatcatcaaaacaccaaagactcaagacacagaagatgatgagggagctcagtggaattg

SEQ ID NO: 435476 - DNA, 110 bp, Homo sapiens
cagatctacctgacgggcctgcgagggttgaagattgtgaagcaatagcctaagaggcggggtttcaccatgttgcccagactggtcttgaactcctgagcttaagcaat

SEQ ID NO: 435477 - DNA, 75 bp, Homo sapiens
gtcaagaaggtgccggtggtgcgagtcttcggagcgaccccggcaggcctatggcatgtctgcgttacctttaaa

SEQ ID NO: 435478 - DNA, 75 bp, Homo sapiens
aatggaccaaagacgatcaatcaaattcgtcaagatgcagtaaaaaagcccctggtccctctgtctccctttccc

SEQ ID NO: 435479 - DNA, 82 bp, Homo sapiens
cacacctttccaaaggacgcgaccataactctaaaaggtgacatgtacagccatgatgggaatactgatgagccagaatggg

SEQ ID NO: 435480 - DNA, 120 bp, Homo sapiens
cgccatgataaagcaagggaatatattgacagaatgatcaaaatatcagatggtagtaaacaggtgtgaaccgacacttccacatgatttgtattcgggacaagttcagccagaacatcg

SEQ ID NO: 435481 - DNA, 95 bp, Homo sapiens
ccttggtttagctggaaaacctgctttcatgggacgagcagataagttggctggatctattattggcaaaggtggtcagcggattaaacaaatcc

SEQ ID NO: 435482 - DNA, 100 bp, Homo sapiens
ctcctcagtagctgggattacaggtacttgagaccagaaactgcacaggggattttcttgaatttcaaacgacttttggagttcaaccaaggaaagttgc

SEQ ID NO: 435483 - DNA, 101 bp, Homo sapiens
tgcaaaccgagctcccgtctgccttgcagggtgagcttgtcggccacagactgctacattgtgcatgagatctacaatggggagaatgcccaagaccagtt

SEQ ID NO: 435484 - DNA, 75 bp, Homo sapiens
agcgattggccgggctgcaggcgagcgttcctagaatcccatgggcctttgccatgacggaagtatgtggcatga

SEQ ID NO: 435485 - DNA, 90 bp, Homo sapiens
attgaacttctgatggaaaccgctgaagttgaacaaaatggtggtctctttataatgcaaggaaatttcaacagttcccttggctcagat

SEQ ID NO: 435486 - DNA, 117 bp, Homo sapiens
ctctacttttcaaccacagccgtgtgtatcacagaagttataaagttattgctaagtgtgggaattttagctaacaaggagctgtacctccaaccagttcagttcctcctgttgccg

SEQ ID NO: 435487 - DNA, 90 bp, Homo sapiens
cggcgggcgagggcgactacgaccagtgaggcggccgccgcagcccaggcgcgggggcgacgacagagactgacttgcataccaaatgtg

SEQ ID NO: 435488 - DNA, 90 bp, Homo sapiens
ggacccgaaccactcaacagccgaagcaacaaactgcactgggcgacgtcgtaaaccaggacgacctgtaccaggccttggccagtggta

SEQ ID NO: 435489 - DNA, 75 bp, Homo sapiens
ggagcagatccgatggagaggctgagctgctccaggacttggggaaaatgtttataggaggccttagctgggaca

SEQ ID NO: 435490 - DNA, 80 bp, Homo sapiens
gaagatcgaaaattaaacctcagttttgtaccaatggctagaagcagatcgtcatggcaagagccaaggtgctgcaaata

SEQ ID NO: 435491 - DNA, 75 bp, Homo sapiens
atcatccacgacccgggccgcggcgcgcccctcgccaaggtccatctggttggtattgacatctttactgggaag

SEQ ID NO: 435492 - DNA, 75 bp, Homo sapiens
gcgcgagccccgtcctccttcgccgccgcgcacaaccgcacgtgcagatgaactcacaaattcgtcagaaaccag

SEQ ID NO: 435493 - DNA, 51 bp, Homo sapiens
cgcggggcagccgccgctcctccgggcaagagtgagccatggagctacgtg

SEQ ID NO: 435494 - DNA, 98 bp, Homo sapiens
tttgatcgtcttcctcttcagccatccaggagcccaagaagaggccgaaaccgagaccatgccagggaagctgaaggtgaaaatcgtggccgggcgcc

SEQ ID NO: 435495 - DNA, 75 bp, Homo sapiens
cacctgtgcgggatggaacaaaaggcggtctatgcttgcttggtgcttatgctgacagtgatgacgatgacaatg

SEQ ID NO: 435496 - DNA, 100 bp, Homo sapiens
tccaactggtccctcagtcacacatgccagagattgctcaggaagcaatggaggtggcgcctggactctcgccctcagagggaggcccgtcccacggtct

SEQ ID NO: 435497 - DNA, 48 bp, Homo sapiens
gaggatgatgacatcactaccggaaataggaaggttgttgattactca

SEQ ID NO: 435498 - DNA, 82 bp, Homo sapiens
ccacagaatacagccaacctccaggtttcagtggcagttctcagaattacgttcctacagtgtttgagaattacacggccag

SEQ ID NO: 435499 - DNA, 141 bp, Homo sapiens
cggcgaggagcgtttcgtgcccctcggacccggccacgcagtccccaggggcccggcccggggcgcgttgaaggtttgttgaagaggaccatattccttacataaatgcttttcagcattttccagaacagatgaaattat

SEQ ID NO: 435500 - DNA, 90 bp, Homo sapiens
tgatgttttaacatttgataacagtcaaaataataatccattggcattaatggcccagtaccagaaagacaacaaagttgctgcatagtc

SEQ ID NO: 435501 - DNA, 75 bp, Homo sapiens
tcagaagttacgtgcagaaggacctcaagaatgggttttccaagagtgcaagcttttgtctgatccaaactatgg

SEQ ID NO: 435502 - DNA, 100 bp, Homo sapiens
ctggccccaaaggatctcctggtgaagctggtcgtcccggtgaagctggtctgcctggtgccaagggtgaaattggagctgttggtaacgctggtcctgc

SEQ ID NO: 435503 - DNA, 75 bp, Homo sapiens
gatctttacatgttgaatccttgcagcactaaaatttgcttatctcctggtcgaggaaaagactttaaatctcgg

SEQ ID NO: 435504 - DNA, 89 bp, Homo sapiens
ctcaaatatgaccacactacagcctgtacacaacaagacagtttatcttgtccatgggattggccatcgggactttgatgtggagaagc

SEQ ID NO: 435505 - DNA, 90 bp, Homo sapiens
cgcggggcgctgggccgccagcctcggcaccgtcctttcctttctccctcgcgttaggcgaccgactggaccccacggccgtgaacatcc

SEQ ID NO: 435506 - DNA, 100 bp, Homo sapiens
atggggacggcaggagggaagtgagaagcccaactaaagccccacatttgcagctcattgaaggaaagctaaagttggtggttaagaaaggaaatcaaac

SEQ ID NO: 435507 - DNA, 84 bp, Homo sapiens
cagaccctggagcctcagttggaagcagccgatccagcctgcggagcctgtggggcaggacatggatttgattgacatactttg

SEQ ID NO: 435508 - DNA, 100 bp, Homo sapiens
atttttgttcttcagcagaatttgaccaacatcaccatgtcgcgggaggcagacctggactttgcaagatccgggtggatggacccaggggcaacgccct

SEQ ID NO: 435509 - DNA, 99 bp, Homo sapiens
aaaagctgtgagaacaactacacgttacgctattcgttgtggtccaaaacagtttacctcttatctaacaggtgtcatggagaaactccagctgggccc

SEQ ID NO: 435510 - DNA, 101 bp, Homo sapiens
aggacttgcagaagtaccacaacagggacacctggttccagctgcagcacgtggacgctgactcggaagtgcaggtctctaattaacagaagatggcaaag

SEQ ID NO: 435511 - DNA, 75 bp, Homo sapiens
aagacacgcttcttctggaagaccagccaacaggtcagacatggctgtgatgccacatgctggggtccgggacct

SEQ ID NO: 435512 - DNA, 49 bp, Homo sapiens
cggcggcccctgcgggcgccagtcagcctgatcctgcctgaagatggtg

SEQ ID NO: 435513 - DNA, 124 bp, Homo sapiens
aggggagacgtcggttgagcggcggcgaacatgcgcttttgacacattggaggagagtagttatcttgatggaattagaagttttgaagtcagctgaagcagttggagtgaagattggcaatcc

SEQ ID NO: 435514 - DNA, 82 bp, Homo sapiens
ggacggcgtggaccacatagacatttacgcggatgtcggcgaagagttcaaccaggatgcagcaccgaggcttcctcctcct

SEQ ID NO: 435515 - DNA, 100 bp, Homo sapiens
gttatacagcaggctgggtgtcctgtaccagaatacataaaaggttttcagaaactactaagttatgtgtctcggtaccacgtgaaagactcctcacgcc

SEQ ID NO: 435516 - DNA, 98 bp, Homo sapiens
aaaaagatccatgcccagtggcagaaagttccatgatccagactcagcagttgtggcacagcatctgacaaacactgtattcgttgacagagctttga

SEQ ID NO: 435517 - DNA, 82 bp, Homo sapiens
gtgggatgacagtgcgattgccccatctagtgaggttgataagcaatacaaatcggtaacaaaaccaaagccactaagtcaa

SEQ ID NO: 435518 - DNA, 75 bp, Homo sapiens
cattggtctaaagtctttccaaaaggtcaaggttcacaaggttaatcactgttctgaagatggtgtttgtaacac

SEQ ID NO: 435519 - DNA, 89 bp, Homo sapiens
cgacgcggggccatgtgcaggaccctaacgacaggcgcctccggcccatttacgcacaaggccaatcagcccccccacggtgtccccca

SEQ ID NO: 435520 - DNA, 100 bp, Homo sapiens
agcccccctcaacacggaccgcgcccgccgggcacacaagaatggtcactcacccggggggccagcgggtcatcgggcactacgctggagaagatgcaac

SEQ ID NO: 435521 - DNA, 50 bp, Homo sapiens
aacagcccgtagcagaacaaatagagcaagatgaagagcgacgtcggcag

SEQ ID NO: 435522 - DNA, 100 bp, Homo sapiens
gatgtttcggaatgggcattgtcgccaattttcaggtttgtatttcagcagtcagaaaaatttgcaaaggtggaaaaccaataccagttactgaaactag

SEQ ID NO: 435523 - DNA, 126 bp, Homo sapiens
tgagctccaggccgtgcgcatgtttgctgactacctcgcccacgagagtcggagttgacatgaagacaatggagactgcagagaaactggctagatttgttgctcaggtgggaccagagatcgaac

SEQ ID NO: 435524 - DNA, 100 bp, Homo sapiens
atcggaacccctccttgaagctgatggtgaatgtgtgcggacacactctacgttccatcctcagagcagcctgaactgttcctaaagaaacttcagcagt

SEQ ID NO: 435525 - DNA, 75 bp, Homo sapiens
cgagtccgcgacggtcgccgcccacggcgagggggctcgagttggtagaatagatgcttttgttcagagcttgga

SEQ ID NO: 435526 - DNA, 100 bp, Homo sapiens
gaggaaggcgatactctcgctcacgcagcaggagcaggggacgaagacctcggaatatacagaactggatgacagtaacttcgattggacttgtccaaat

SEQ ID NO: 435527 - DNA, 101 bp, Homo sapiens
tggagtagaagtgtccagcgacagcttctgggagtttttacagggtgaacgaggtccagcgatttgaatattctcggccaatccggaagggagagaaaaac

SEQ ID NO: 435528 - DNA, 97 bp, Homo sapiens
gcaggagtccacatcgaggacgtcctccgggcactcccacgaccagtggagacctttggcgacttggcctttggcgacatcttcctccacctgctca

SEQ ID NO: 435529 - DNA, 105 bp, Homo sapiens
tatctgtcttcggtggactccttcggcagtccacccaccgccgccgcctcccagtctctgctttctatccgtcaagatgataaagtcgtgtgcccgagaaccaaa

SEQ ID NO: 435530 - DNA, 100 bp, Homo sapiens
catcacctgctctgctcttacaaggatccgagccctgctgctcctgggggccgccgccctggcctgcctcgccctggacctcctcttcctgctcttctac

SEQ ID NO: 435531 - DNA, 75 bp, Homo sapiens
gggtgggagtgacccgattttccaggttcaagatgttgttcctataactagttatgacactgctggatcattcct

SEQ ID NO: 435532 - DNA, 147 bp, Homo sapiens
cgcgactcgagggtgacgctcgctccgctcgtcccgctcgtcatggcctacccgggatacggaggagggggggccgaaggccagagaccaggatttggctacggaggcagagcgtccgactataaatcggctcacaagggattcaag

SEQ ID NO: 435533 - DNA, 98 bp, Homo sapiens
gagtgttgccaaaagtcagaggagttctgggaaatcgttcattcatttacagatgaacagaaaagactcttcttgcagtttacaacgggcacagacag

SEQ ID NO: 435534 - DNA, 126 bp, Homo sapiens
gttattgcagtggcaggtgcacgcttatctttatctgtggcatgcaactggccgaatacatcaagcaatggtaacatctttaaatgaagataatgaaagtgtaactgttgaatggatagaaaatgg

SEQ ID NO: 435535 - DNA, 75 bp, Homo sapiens
cgggaccaaggatcacgtcatgactccgccaagaagtatgatgcgtttttggcctcagagtctctgatcaagcag

SEQ ID NO: 435536 - DNA, 100 bp, Homo sapiens
cgtggcagccgcccagacaggtgtgtctcggtttctccaagtcaacagcgcctggagctctgcttatgataatgtcaacaaagttcgagtagctatcaag

SEQ ID NO: 435537 - DNA, 101 bp, Homo sapiens
atgatacaagtttatttcccaaaagaaggtcgtaaaattttgacaccaataattttcaaggaagaaaatcttagggaaatgctgacttttaacccacacaa

SEQ ID NO: 435538 - DNA, 100 bp, Homo sapiens
ctcagcgacaccgcgagctatatctgcgcgtggagctgagtgacgtacagggggcagctggcattttatgctatgtgggagcctatgtcttcatcactta

SEQ ID NO: 435539 - DNA, 82 bp, Homo sapiens
cacctggagctgaggaaccggaccccggcagctgtgaggtttatacatggggcgacaatgatgagggacaactgggagacgg

SEQ ID NO: 435540 - DNA, 100 bp, Homo sapiens
gctcaccttctatgcaggccccaatggcagccagtttggattttcactggacttccacaaggacagccatgggaggtgctgacctggaggggaagcggca

SEQ ID NO: 435541 - DNA, 100 bp, Homo sapiens
tcttatgcaatgaatgtggcaatcgctggaaggaggcggcgacggcggcggcggggggagaggaagagaaagaagcgtctccagctgaagccaatgcagc

SEQ ID NO: 435542 - DNA, 99 bp, Homo sapiens
cttgctgcccagacaagctgaaggaccacagagcatccacaatgggtaccccagcctcggtggtcagtgagccacccccttggcaggccccgattgagg

SEQ ID NO: 435543 - DNA, 75 bp, Homo sapiens
cgcaagaacaagactctcggctatggagtccccatgttggtcgacatttataactcagaccccctgatctgccgg

SEQ ID NO: 435544 - DNA, 83 bp, Homo sapiens
gcagagacttctactggctgcgctcctttctggccggaggtttggcagttctctaccagtggaccaatcttttcatccccgtg

SEQ ID NO: 435545 - DNA, 75 bp, Homo sapiens
gccggcattcatttaaggcctaaggatgaaggcgatggcccactgcgtgaccttggttcagctgtccatttcctg

SEQ ID NO: 435546 - DNA, 98 bp, Homo sapiens
gcgcagcgccggcgcccgggagacccaggaggagcccgcagcccgacctgctgaatttcaagaaaggctggctgactaagcagtatgaggacggccag

SEQ ID NO: 435547 - DNA, 82 bp, Homo sapiens
aagcagcgtgcgttcagccctgggatggggtcgaggatttggtcttttgggttccatttttggaaaggatggtgtattaaac

SEQ ID NO: 435548 - DNA, 75 bp, Homo sapiens
aggaggacagttcgctacacagcaatgcatcgagagccagctctcccaggcgctgaacggactgtcagacagggc

SEQ ID NO: 435549 - DNA, 100 bp, Homo sapiens
gccccggtccgccgaaggctagcgccccgccacccgcagagcgggcccagaggacagagcgggatgccaccagcttgtccaaagggaagttccaggagct

SEQ ID NO: 435550 - DNA, 101 bp, Homo sapiens
ctgctgagtgtgattgccaacttcatccctttctctgatcacaaccagagtccacggaacatgtaccaatgccagatggacattggcgaggaggctgggag

SEQ ID NO: 435551 - DNA, 75 bp, Homo sapiens
atggggcctgaagaaagctgctgatggggctgctgagcttcttggacacttaatgattgttggcaagaaatgtgc

SEQ ID NO: 435552 - DNA, 75 bp, Homo sapiens
catgatgcagtccctcccttggaacagcagctggaggaacatatgcagcagaaaaaagaggaggaagaagttctt

SEQ ID NO: 435553 - DNA, 100 bp, Homo sapiens
ggtttcatcatatgtgcaagaccagagcgaagactgcctatatttaaatatatatgtcccgactgaggatggtggggaccaaggcatactgaacacattt

SEQ ID NO: 435554 - DNA, 75 bp, Homo sapiens
ctcaaaagtggggggcaggaaagaatgctatgaacctacctcctgacaaagccaggttactgcggcagtatgata

SEQ ID NO: 435555 - DNA, 100 bp, Homo sapiens
ctgcactaacgcaggatccggctgccgaaggtcctcgccaggtctgggacctgcgccagaacaagctaacctacaccatgagaggccatgcagattcagt

SEQ ID NO: 435556 - DNA, 100 bp, Homo sapiens
attcggagcctcccctgcagcgactcggaagattcgaggcggcgggggacaagtcggcgccccagagcggacgagcagccagacccggtccgtttggaat

SEQ ID NO: 435557 - DNA, 100 bp, Homo sapiens
tacagttcatgacaatgactttgagccctaccttactggacagtcaaatcaggatcatccagcagctcgtcaacggcatcatcacgcccgccaccatccc

SEQ ID NO: 435558 - DNA, 75 bp, Homo sapiens
gattgtaacctttctaaagagtcgggtcacaaatcttcgaagagtgacatatgttgttttagatgaagcagacag

SEQ ID NO: 435559 - DNA, 100 bp, Homo sapiens
aaccctgaccggatcccataaacactgtcggtcaaccgattatggaacaacctatgagaagctgaatgataaagttggtttgaaaaccattttgagctat

SEQ ID NO: 435560 - DNA, 74 bp, Homo sapiens
tgcaggtgccctgaatgcaggttcctatgcgtcactagaggcggccttagcaacatgctgttccagtgctccct

SEQ ID NO: 435561 - DNA, 100 bp, Homo sapiens
accaaagcggatcagagagggctaccttgtgaagaagtgggacttctcctcttgcatgcctgaatgcaatgcttcacacaaactccagaggtgaagaggg

SEQ ID NO: 435562 - DNA, 99 bp, Homo sapiens
cactttcgccagcccgtgccgcgagcgcggcctgcaggaggcccgcgatgctcccagcccggtgagacctgcctgaatggcgggaagtgtgaagcggcc

SEQ ID NO: 435563 - DNA, 74 bp, Homo sapiens
aaactaggatatgctggaaatacagaaccacagtttatcatcccttcctgagatttcttctatcttacaggaac

SEQ ID NO: 435564 - DNA, 90 bp, Homo sapiens
ctggtagttccatgctgtctgttcagacttcagcttggtgataagttctgaacgtcgaaaagaaaagtctcgagatgcagccagatctcg

SEQ ID NO: 435565 - DNA, 75 bp, Homo sapiens
gactgcatcgccaagatcatgggtctaaaattcccaggactccacagctttgcaccagataagcctggaggaata

SEQ ID NO: 435566 - DNA, 98 bp, Homo sapiens
tcaagaagcagctccacgaaaggcagccgcggatcgccgcgctcagcgacaaacaagggaacgcccttttgcttgtgactggcagggctgcgacaaga

SEQ ID NO: 435567 - DNA, 103 bp, Homo sapiens
gggatcgtgaccgagaccgtgaccgagagcgtgaccgagagcgcgaatatcgtcatcgttagaaggttgttgaagattggaaattcatagcccaggttcttga

SEQ ID NO: 435568 - DNA, 73 bp, Homo sapiens
caaaaaagtggtgcagtttttgatgaaattgtagagaactgcgaggattaaatccaccacacagggtgaaatc

SEQ ID NO: 435569 - DNA, 133 bp, Homo sapiens
cagcagtaacaacagcgaggaagaagaggacgacgacgacgaggaagaggaggtttctgaggagtacaagatcctcagcatgagagaattattactgtgtctactaatggaagtattcacagcccaaggtttc

SEQ ID NO: 435570 - DNA, 100 bp, Homo sapiens
agttacgaaacttgtccaaaatcacacaacttgtaaagggcacagccaagattcagagccaggctgacaaacgggctcatcataatgcactggaacgaaa

SEQ ID NO: 435571 - DNA, 75 bp, Homo sapiens
ggaagccagagccgcctgccatgccccagccagtccccacagcataacagctcctacagaagaagggaaaaaaga

SEQ ID NO: 435572 - DNA, 98 bp, Homo sapiens
ttctaaccattccaaaatctctttcaggggtctctctttttggcatgtcggccctgttactccctgggaactttgagtcttatttggaacttgtgaag

SEQ ID NO: 435573 - DNA, 85 bp, Homo sapiens
tcctccacccctggaatccctgtctgggtgcggactcggagaagccctcgagcatccccacaggcaggatgacgcaaaacacggt

SEQ ID NO: 435574 - DNA, 100 bp, Homo sapiens
gatctgttcaccactcatttgcaacttatatcgccagtccagcagctaaggatattttgtgcaggtgaagtgggcaatgcagccaagatgatgctgatcg

SEQ ID NO: 435575 - DNA, 88 bp, Homo sapiens
gagacctgaaattctgccatcctgaactcaagagtggatctgtgccagttcagaagcaggcgagcctcttccctgatgaaaaagaaga

SEQ ID NO: 435576 - DNA, 100 bp, Homo sapiens
gttgaacgtccttctcacaactgctatgtttgtagggggctgtgtggcttttatcctggataacaccatcccaggtggagccgccaccaaaatgcagatt

SEQ ID NO: 435577 - DNA, 83 bp, Homo sapiens
cggcagtcgcgaagcagcaaccatggaggactggaatgaaattgaccccattaaaaagaaagaccttcatcacagcaatggag

SEQ ID NO: 435578 - DNA, 75 bp, Homo sapiens
tgatctcagcgggaagagtgcgaccccgagggcgcgctaggaattgcattttgtgaaaaaagaacaagaattttc

SEQ ID NO: 435579 - DNA, 50 bp, Homo sapiens
caccaaacagagcctgcaggtgatcgatggagtctcgctttgttgcccag

SEQ ID NO: 435580 - DNA, 98 bp, Homo sapiens
gtgtgacgggctgcctgactgcttcgacaagagtgatgagaaggagtgcccttgaagaagagagtaaaggagattgtacataaagcgttttgggattg

SEQ ID NO: 435581 - DNA, 98 bp, Homo sapiens
aaggctacacagagacagatcaaagcagctcgtctggagcccggcactgtggtcataacagagcaggcagtggatacctgcttcaaggcagagtttga

SEQ ID NO: 435582 - DNA, 88 bp, Homo sapiens
gccggcggtgctggcaggggctctggagagagggagcccaaatcttgtgacaaaactcacacatgcccaccgtgcccaggtaagccag

SEQ ID NO: 435583 - DNA, 83 bp, Homo sapiens
tggagcttgacgcgctggagcttgagagccatattttctgctcttaagaatcttcaagataagattcgacgcttggaacttga

SEQ ID NO: 435584 - DNA, 98 bp, Homo sapiens
tcctgcagggctggctgctactgctatgtcttctacccctgttccattaggctggtgcttgagttcagcctcctgtcttatgcttttggcaaatttcc

SEQ ID NO: 435585 - DNA, 100 bp, Homo sapiens
ggaaaacaacgccttaccaagtggctgctgaaattaggagtttggatcataatacaagagaagcacagggcaaagacactgcataacctcaagaactaag

SEQ ID NO: 435586 - DNA, 75 bp, Homo sapiens
ccgcagccccctcctggcgacccgcaagaatgtatcctgtcaggtataatgtcagtgaatggcaagaaagttctt

SEQ ID NO: 435587 - DNA, 101 bp, Homo sapiens
gccatgtgagacgtgcctttgaccttctgccatgattgtgaggcctccccagccacgtgaaactctcactgaaaactgaagctaatttggaagttttgaag

SEQ ID NO: 435588 - DNA, 100 bp, Homo sapiens
ctggccaaaactacaaacaagacttcgcaggacggagagagatgcttcaaattggtccacggataagctgaaaacactgttcctggcagtgcaggttcaa

SEQ ID NO: 435589 - DNA, 50 bp, Homo sapiens
agcactgactttcagctatggaatcggagtttcggacgtggctgagggag

SEQ ID NO: 435590 - DNA, 82 bp, Homo sapiens
gggcgctgttcgacgtgcggcccgaatgccagcgcctcttctaccggggcaagcaggaaccacgtgaatgttgagggggcga

SEQ ID NO: 435591 - DNA, 74 bp, Homo sapiens
gtcggcagcaagaacagagagagaggtggacagatctgagagatactgaggttcctctcctggctgaaatttat

SEQ ID NO: 435592 - DNA, 104 bp, Homo sapiens
taccagcacattgaccgctggctgctggccgagatgctcggggatctgtcggcatcaattccaaagaatgtctttttagcactgcatgaaaaactctatattat

SEQ ID NO: 435593 - DNA, 75 bp, Homo sapiens
tgaactaggatgtcccgacatgaagaggccacaagaggaagctgaatgaagaggacgccgccagcgagtccagca

SEQ ID NO: 435594 - DNA, 98 bp, Homo sapiens
cgctaccggactacatgtcggaggagaagctgcaggagaaagctacaaaccactgagtaagcaaaaatcagaggaagagctcaaggacaagaaccagc

SEQ ID NO: 435595 - DNA, 88 bp, Homo sapiens
tgtaccagaatcagttgttggagaaaattaaaggtagctacagcaagctgggtagcaggcagatccaaaggatatcatgaagtttcca

SEQ ID NO: 435596 - DNA, 50 bp, Homo sapiens
ggcgacccttcccctccagtcacctggtgcgacaacgcaaaagggttgaa

SEQ ID NO: 435597 - DNA, 80 bp, Homo sapiens
ctcaaagggaacttggaaatgacattggcatccagattatccactgcaatggcaggcagcagattctgagtttgggcatg

SEQ ID NO: 435598 - DNA, 75 bp, Homo sapiens
cttgctcggccgatgaagtgcagaggtttttttctgcaaggacattggagtccctatcaccggttgcctagacaa

SEQ ID NO: 435599 - DNA, 75 bp, Homo sapiens
tttcacgtcacctggagagatgcacagatcctgaggaggatgaaggggctggccctggaggccgagagtgagctg

SEQ ID NO: 435600 - DNA, 100 bp, Homo sapiens
gcctggagaccaacctgcacttgttaggaattacatgaacgacagccttcgcaccgacgtcttcgtgcggttccagccagagagcatcgcctgtgcctgc

SEQ ID NO: 435601 - DNA, 127 bp, Homo sapiens
caaattaaagcaagaaacccctgcagtacttgaagatttgcataaagccaacattcgcaccgtcatggtcacagggtgggccaggaggcagattctcatcagatttggaaggaagcaaccatttgga

SEQ ID NO: 435602 - DNA, 98 bp, Homo sapiens
gcgcacttgcccgctgggccgcagacccggccaacacagcctggatggagagtcctaactgggaccacctactccccttggagggtccggatggagtt

SEQ ID NO: 435603 - DNA, 75 bp, Homo sapiens
cttcgacgcgatgttccgccggagcttgaatcgttttgtggccaccgagtactaaattcacttgggaataaaaga

SEQ ID NO: 435604 - DNA, 75 bp, Homo sapiens
ccccggcccagtgagggagaccgacaggtacggttcctggagcagcagaacaagatgctggagaccaagtggagc

SEQ ID NO: 435605 - DNA, 98 bp, Homo sapiens
ccagacattaaggattataaactttatgatgtagaaaccaaatatggtttgcttcaggagatcatgaatcagacagataaaaatcaacaagaaatccc

SEQ ID NO: 435606 - DNA, 50 bp, Homo sapiens
aaagttcttgggacaaacttcatttggtcatgaagacatatcacatgtac

SEQ ID NO: 435607 - DNA, 82 bp, Homo sapiens
ccccagcgctgtcctgtgtctggccttccaccccacgcagccctcccacgtcgcaggtggcacaagaatggctcaactctcc

SEQ ID NO: 435608 - DNA, 107 bp, Homo sapiens
gatcagcaatccttggctcactgaggaggtttggagcaccagcatgtttgacatgcggtgtgaggaggaggccgcggtgcagccgcacagcagggcccgccaggagc

SEQ ID NO: 435609 - DNA, 50 bp, Homo sapiens
gcctgagttgggagaagagctccagagagaaaaccaattctgtgtcctcg

SEQ ID NO: 435610 - DNA, 83 bp, Homo sapiens
cgcctcgggaccggctgtatgattaggccacaatcttcaatgagtaaacatattcctgtgatgtgtccaatctagatcccaac

SEQ ID NO: 435611 - DNA, 75 bp, Homo sapiens
acatgtgggctgattacatcctgcgcattttggaggaccaggaggaaaacccgctgcccgccgccctggtccagc

SEQ ID NO: 435612 - DNA, 78 bp, Homo sapiens
tgcatgtaaacaaatgaagcagcgctttgaaagaagactggagcgctcagcctgccacggaagactggtctgcagctc

SEQ ID NO: 435613 - DNA, 110 bp, Homo sapiens
ctttagatgacatggtgtcagctgacattggaattctcaggaaccggattgatcaggccagcttagactattcatacgctcgatgaccagctgaactcagaagaaaaaaa

SEQ ID NO: 435614 - DNA, 75 bp, Homo sapiens
cttgcaggccacaaatgcagtgtctccactcaaagttgataacactgatgctgaggggaggctcatactggctga

SEQ ID NO: 435615 - DNA, 100 bp, Homo sapiens
ttccgaggaagctaaggccgcgttggggtgagaccctcacttcatccggaggcactggctacaattaggcttctcgacgtcctgtgcgaaatgactgtga

SEQ ID NO: 435616 - DNA, 74 bp, Homo sapiens
accccaacagcaggaatagctcccgaacaccttccaccatgaccacctcagcaagttcccacttaaataaaggc

SEQ ID NO: 435617 - DNA, 82 bp, Homo sapiens
cgccagcccgtgccgcgagcgcggcctgcaggaggtgtttcccattaaacactaccaggacaaaatcaggccttacatccag

SEQ ID NO: 435618 - DNA, 98 bp, Homo sapiens
gaggacctgcaggtggaagtgatgaagtattgctgacagacagaacgccttggaggctgagtggaggacggtgcaggcctctcgcagagatctggaaa

SEQ ID NO: 435619 - DNA, 101 bp, Homo sapiens
acagaagcacagcaagaaggcactaaagcagctcatttttgaaggtatccgaggtcctggaatagaaggtgacattgctattgatgatgtatcaattgcag

SEQ ID NO: 435620 - DNA, 98 bp, Homo sapiens
ccagaccgaattggccatgattggagaagaggatggtactggggaagtatgactgttaatgaagccaaagagaaattaaaagaggcaccagaaggaac

SEQ ID NO: 435621 - DNA, 98 bp, Homo sapiens
ttgcatacagaccaatttctgcatcagtgttatctcgaccagaggctagtaggactggagagagtgaagtcaccctgctgagaaatgaagtggcacag

SEQ ID NO: 435622 - DNA, 74 bp, Homo sapiens
cagcgcgcggagaagaacggggagccaggaggaagacagcgaacccctcccaccacaggatgcccagacctctg

SEQ ID NO: 435623 - DNA, 87 bp, Homo sapiens
ttgatgaaggaaatgctaaagcgattccaaggttttaggtagaggaatttcaggaagcattggagtagtggcttctatcaatgaaca

SEQ ID NO: 435624 - DNA, 100 bp, Homo sapiens
ctccagcagccttgttagggcgtggcctgaggcttggataagtggggtgccagtcacgaattgcccgaacattacctgctgatcagaagccagaatgtcg

SEQ ID NO: 435625 - DNA, 100 bp, Homo sapiens
caatgagcagttaaccagagccatccttcgggagaggatatgtagcgaggaggaacgcgctaaggcaaagcacctggccttcaagagggaattgaaaact

SEQ ID NO: 435626 - DNA, 50 bp, Homo sapiens
ctataccagggactctgttctgattagagggagacgtggtgggcggtcct

SEQ ID NO: 435627 - DNA, 100 bp, Homo sapiens
gctgtaataggactgcccatccactgagacatatgatgcggctgactaagcctactttattcaccaatatcccagtaacatgtgaagagaaagacttacc

SEQ ID NO: 435628 - DNA, 51 bp, Homo sapiens
ggctgctcggtcctgctcaaccacaaggtgtatggtattcgaacccgttcc

SEQ ID NO: 435629 - DNA, 75 bp, Homo sapiens
actgctgctgctgctccggccgccggcgacgcgggacttaattcagtgcacaaatgagatgaatgtgaacatccc

SEQ ID NO: 435630 - DNA, 100 bp, Homo sapiens
aaacaaaaggaaagaatattcagagagaagaattttagggattgcaagtcaagtagctgctttggaccttggctataagcctggggtggaagcaattcgg

SEQ ID NO: 435631 - DNA, 75 bp, Homo sapiens
gtttgtggaacagacagctccttctttattggacatccaggcagaaattgatgcccacaatgacatatttaaaag

SEQ ID NO: 435632 - DNA, 75 bp, Homo sapiens
ctctgcgcggacttgtggagacagccgctcaccgagctgtatgcggccggggagaaccgcctgggaacagacgag

SEQ ID NO: 435633 - DNA, 100 bp, Homo sapiens
gcttcaagacaaagggccccttacacaccagacaggatcacagaagaactgcagcttcctggggagcagtttcacctccacaggcatcgcttcatactcc

SEQ ID NO: 435634 - DNA, 100 bp, Homo sapiens
ctggcgactccaccgtgttcggctctccctccggacggtgaactcctcccgctctgcctatgcctgctttctctttgccccgctcttcttccagcaatac

SEQ ID NO: 435635 - DNA, 97 bp, Homo sapiens
attgctgcagccgcttgtcagtgtgatgaagattggcacccagagccgagactgtctgaagctgggcccacctgctgagggagaagtcgtccaagtc

SEQ ID NO: 435636 - DNA, 98 bp, Homo sapiens
tctcagctgccacctgcctttgacctttttgaagcctttgcaaaacccagaagaatcagtgcggtttctgtggcagagcgagttgcatttgaaagagg

SEQ ID NO: 435637 - DNA, 100 bp, Homo sapiens
cagatagccaaactttcagtaaggataattctttcagaatgctttatcaaagactgcaataaggtcactgatcagtgcctgtccttcttcaaacgctgtg

SEQ ID NO: 435638 - DNA, 75 bp, Homo sapiens
cttggacctgaaccttgctccgagagggagtcctcgcggacgtcagccaagggtgataaaagaaaatgtggctga

SEQ ID NO: 435639 - DNA, 100 bp, Homo sapiens
gcgcttcgtgcaccggggcggtccgttgccaaagccagggaacagatggaatcccagttggaaaaggaggcccggttccgacagctgatggcccacagct

SEQ ID NO: 435640 - DNA, 100 bp, Homo sapiens
cttatgcaaacccccccaactatggcaaccctgaccccttcgtcatcaacaacacacagcggggtggcaattttaagcccagccagaaaggttttgcagg

SEQ ID NO: 435641 - DNA, 88 bp, Homo sapiens
ttgcccttggccccctcgtcgtctgccccagtacgtttcaggagacggcagcgaggctaccttgcatggtgtggtggacgagctggtg

SEQ ID NO: 435642 - DNA, 83 bp, Homo sapiens
cggaagacccctggctctataagctgaattatggcagcccagtcaagacaaatttacatgtattggagaccagaccagaagcc

SEQ ID NO: 435643 - DNA, 100 bp, Homo sapiens
tggagtccaacttgcctggaccagcttaatggttctggggtgcacagagcgttttgtatgtagtccagatgaagttatggataccatagatgaaggaaaa

SEQ ID NO: 435644 - DNA, 60 bp, Homo sapiens
tgtaatcccagcactttgggaggcttcaccgctgacctgaggtccaacacgggcggccag

SEQ ID NO: 435645 - DNA, 98 bp, Homo sapiens
aggaagaagaagaggaggaggacgatgacgaggaggaaaaggcccctgtgacctaggctgggaggcggcagaatgcagccagaggagggcacaggctg

SEQ ID NO: 435646 - DNA, 74 bp, Homo sapiens
ggtataaagaagctcgagcattctttcagcagcaacaactccaggcccagcatttatcacatggacatggtctc

SEQ ID NO: 435647 - DNA, 85 bp, Homo sapiens
gagatccacagctaagacaccgggacctcctggaagccaaaaatggtttggaaggcgctttgagtccccgctgctgtggcagagc

SEQ ID NO: 435648 - DNA, 100 bp, Homo sapiens
cctctgccagactgaggggccgttccttgtggtccggtggcagccttcaaggtcgccacgccgtattccctgtatgtctgtcccgaggggcagaacgtca

SEQ ID NO: 435649 - DNA, 102 bp, Homo sapiens
cgtgctcttgctaaagaggtagcaagaaagaaaattagagtgaatgtagttgcaccagcgcggagacccacatcaagggcttcacactgaacgatgctgcca

SEQ ID NO: 435650 - DNA, 116 bp, Homo sapiens
atcgacttcaaggtgaagacagtctaccgtcacgagaagcgggtgaaactgcagatctggatttttggaagtaccagcacagtgacgcttcctgaaaccttgttgtttgtgtcaac

SEQ ID NO: 435651 - DNA, 100 bp, Homo sapiens
ctacttcacactgcagaactgggttctggactttgggcgtcccattgccatggattgacttctaaggactcttggtacatgaggaagaaacccggaaggg

SEQ ID NO: 435652 - DNA, 98 bp, Homo sapiens
aaatttatggcattcagaacatgcaagcatctcttggcagtttacctgagtcaggttatgaggacctgtcagcagctaagtgtctctgacaagcagtt

SEQ ID NO: 435653 - DNA, 99 bp, Homo sapiens
gctgcctgggtggcagatggtgttcagtgcgacaggacagttgtaaacggcatcatcgcaaccgtcgtggtcaggcaggaccttaaagaaacattcatt

SEQ ID NO: 435654 - DNA, 100 bp, Homo sapiens
ctacagctggagcgcccagaggcgagccctggtggaggaagagttctgggaggtgatcagtgatgaacatggcatcgaccccaccggcacctaccacggg

SEQ ID NO: 435655 - DNA, 82 bp, Homo sapiens
agaaaagaggcaaagcaagcgagaagtcgcgggcccagcccacagcaggtgtactaatggtcacttgatgtgcgctggctgt

SEQ ID NO: 435656 - DNA, 83 bp, Homo sapiens
ggccggaccgagcgcctcgacctcggtctgagtatgaaaacccatggacaatcccgaatatgttgtcaatgacgagaattggc

SEQ ID NO: 435657 - DNA, 98 bp, Homo sapiens
tccggggcctgggccagcctgacctccccaaggagatggcctctctgtggcagctggtggaatttttgaagaaaatggaatctcgaggccccctttcg

SEQ ID NO: 435658 - DNA, 100 bp, Homo sapiens
gtgtcttcccgccagcgcctggagcttgtagcccttgtttactcctcgtgcattgctggtacttcctatttaacagacattgtgtggtgggctggcacaa

SEQ ID NO: 435659 - DNA, 75 bp, Homo sapiens
atcgcggcgccggagttgcataagggagattctcacagaaagttctccgctcccagacatgggtccctcggcttc

SEQ ID NO: 435660 - DNA, 100 bp, Homo sapiens
cttctgtcgccctgtcgtctgtgttgtgactgctttggacgtgggagtcacctgaaagccaggaaatggagaataaaggcagccccgttgatgactgaaa

SEQ ID NO: 435661 - DNA, 51 bp, Homo sapiens
cccagacaagatggacaccgcggaggaagatctctggaaacatggctacag

SEQ ID NO: 435662 - DNA, 100 bp, Homo sapiens
cggacagcatgccttcgctgcgatgcctgtataacccagggactggcgcactcacagctttccaggtgtccaagtcacacagagccacggaatctcacag

SEQ ID NO: 435663 - DNA, 100 bp, Homo sapiens
tgcagctcaaagaggccaagcacattgcggaagaggctgaccgcaaatacgaggagcagccttggaagtggagtttactctccccttgaggaagctgaag

SEQ ID NO: 435664 - DNA, 75 bp, Homo sapiens
ggaggagtctcagagctgtcagaaagcataagcagtactataatggatgtagacagcacaatttccagtgggcgt

SEQ ID NO: 435665 - DNA, 138 bp, Homo sapiens
tcggaggcggctgcgagagtggcagaggagctggcggagagcggcctgcgggcgatcgggccgaggatcctgcgcatccagaaagagacgcccacgctgcagcggaaggagcccccgcccgcagtgctagaagctgac

SEQ ID NO: 435666 - DNA, 117 bp, Homo sapiens
gaaacaggggagcaaggtgcaagagtccacaaagggacctgatgaagcgaagatcaagacttacaataacagcactaggagaaaagctgaatgattactggaatgaaatgaaagtga

SEQ ID NO: 435667 - DNA, 82 bp, Homo sapiens
cccaccttctttcttcagccgaggccgccgccgcctctccttgctgcagccatggagtgtgatgaatgcagactctgctacc

SEQ ID NO: 435668 - DNA, 100 bp, Homo sapiens
gaactgggtgctttatatagggagcgctatagttatgtctgcccagatttagtaaaagaatttaacaagtatgatacagatgggtcaaaatggattaaac

SEQ ID NO: 435669 - DNA, 100 bp, Homo sapiens
cttctctgaggcggcgagagatggtcaggtctggagctcgaccgggccagttgatgaggaatctggattaaaggattcagaaccagagcgaaaacgcaag

SEQ ID NO: 435670 - DNA, 82 bp, Homo sapiens
gccctcgcaacctggcagccgccgccgtggaagacaatgcagatcttcgtgaagactctgactggtaagaccatcaccctcg

SEQ ID NO: 435671 - DNA, 75 bp, Homo sapiens
gaaatatcttctggaaagctggccagatttgcagatggctctgctgtagtacagaacatgaatttgctttcggat

SEQ ID NO: 435672 - DNA, 100 bp, Homo sapiens
gcattgccatatgtgatttgtatgtttcatctcgacataaccaaggtttttcatttctaacaaccagatggccccacctggacctgccaaccagttctgt

SEQ ID NO: 435673 - DNA, 82 bp, Homo sapiens
agagagttgggtccaaactcttctttgacaagagagacaactctgactttggtctctaattaacagaagatggcaaagccca

SEQ ID NO: 435674 - DNA, 100 bp, Homo sapiens
gcccgtccccggcacacgcgcagccccggcctctcggcctctgccggagaaacaggccgggctctcgccatgggtcactgtcgcctctgccacgggaagt

SEQ ID NO: 435675 - DNA, 75 bp, Homo sapiens
ttccccagaggagctcaaaatggagttgccggagagacagcccaggtggagccgccaccaaaatgcagattttcg

SEQ ID NO: 435676 - DNA, 100 bp, Homo sapiens
gcagccaggctaaggccattaacaccctggagactcggattcttcagaggaggcccctccagccactcagaacttcatcattccaaaaaaggagatccac

SEQ ID NO: 435677 - DNA, 97 bp, Homo sapiens
cagcactgcgaatttcacagagcagagttaaagttcctcgtaattttcgcttgttggaagaacttgaagaaggacaaaaaggagtaggcgacggtac

SEQ ID NO: 435678 - DNA, 75 bp, Homo sapiens
aattttctttctcagaaagcagaggctcagagcttggagacagacgacatatgtagagtgtgtcggtcagaagga

SEQ ID NO: 435679 - DNA, 100 bp, Homo sapiens
gggtgattgtgagactagctcaatgccaagtctatgacatgcgcccagaaacggacccgcagagatagaagagcgagcagaatttttgaataagtctgtg

SEQ ID NO: 435680 - DNA, 74 bp, Homo sapiens
ctgcattcgcggggcatgttcccgaggctgtcaccaggatggatgtggagaaaggcaagattgaagacacagga

SEQ ID NO: 435681 - DNA, 121 bp, Homo sapiens
gactgactggcacagtggagaaaccgcctcgaaaacggagaagcaggttcaagggcagacggggtttttgaggaggattcgcaaattgacatagccacagtacaggatatgcttagcagcc

SEQ ID NO: 435682 - DNA, 97 bp, Homo sapiens
tttcacaccacgcctggcaatattacagactaaaatgttgatgggcgaagtgatgagagaagctgccttttcactagctgaagccaagttcacagca

SEQ ID NO: 435683 - DNA, 100 bp, Homo sapiens
acagtcgcttgaacagattggcacccgaattgccaaagttttggaaaaggaattgactttaaaattaggaccatagagctcgatggcaagagaattaaac

SEQ ID NO: 435684 - DNA, 100 bp, Homo sapiens
gattttgaggacacttgtggagagctcgaattccagaatgatgaaattgtgttgggccatgcaggctgctgcctatatcttcattcataggaaatggaag

SEQ ID NO: 435685 - DNA, 97 bp, Homo sapiens
ctatttctctagctattgccttattttttctcatggatgttcttcttcgagtatttgtagaaggggcctgcggcctcaccatggacccagaatgcgc

SEQ ID NO: 435686 - DNA, 76 bp, Homo sapiens
cgggacctgggctgggaacccgcggtggagcgggacacgaacgtgtaatctatgccagcaattatgacaatgttag

SEQ ID NO: 435687 - DNA, 100 bp, Homo sapiens
ccggaatctaaaaagccctcagtaccagagacagaagcagatggattcgtccttttaggtgctggagaatctggtaaaagcaccattgtgaagcagatga

SEQ ID NO: 435688 - DNA, 100 bp, Homo sapiens
atgcctgtcctgggatttggcacctatgcgcctgcagaggatatgtgggactagtaaaccaagcaatgacttgctatttgaatagccttttgcaaacact

SEQ ID NO: 435689 - DNA, 98 bp, Homo sapiens
gcaatgtggcagccctgcctggaattgttcatatcatggaagggaagtggttgctgtgtatgttactggtgcttggaactgctattgttgaggctcat

SEQ ID NO: 435690 - DNA, 75 bp, Homo sapiens
tggaaatatgctacagatagatgttaaggacatctgcaaatctttcaccaatctattccttgagcgagagcgggc

SEQ ID NO: 435691 - DNA, 100 bp, Homo sapiens
cataagaccgttggttctgacgaggcacagcgtttcttgcaagaatgggagctctccacacaaggagatgcaagtcaggtgattgggcctcttactgaag

SEQ ID NO: 435692 - DNA, 83 bp, Homo sapiens
agcccgacgcaaaccaaggatctggggatcttcgcactatcccaagccatcactggtgcaagctatatttaacggagatcctg

SEQ ID NO: 435693 - DNA, 103 bp, Homo sapiens
gggcctggatgcttctctctgctctgccctggctgggccactacaggtgctggagaatctggtaaaagcaccattgtgaagcagatgaggatcctgcatgtta

SEQ ID NO: 435694 - DNA, 74 bp, Homo sapiens
aagcgtggaggaaacctccctgcccggcaccagcccaaggagctggatccctctgctgtgctccccttagactg

SEQ ID NO: 435695 - DNA, 136 bp, Homo sapiens
ttgtggcccagcacccgcctgccaggcgctcgggggccgaactggccctggactacctctgcagcctgacatttaccccggtaactgctgggcatttaaaggctcccaggggtacctggtggtgaggctctccatg

SEQ ID NO: 435696 - DNA, 50 bp, Homo sapiens
agacaggtggcgacggcagaggagttttgggatttgagattgacgcggtg

SEQ ID NO: 435697 - DNA, 90 bp, Homo sapiens
tgaccccatgactggacgctgtgttcccccacgaacttctgctggcttccacctgaacaaccagctgacccagaccctcaccagccgcta

SEQ ID NO: 435698 - DNA, 90 bp, Homo sapiens
aggaaatgcaactcgaagtggacaaaatgggaaccaaacttggagagctaaacctgctaatattttagttatgggtgaaggtcctgagcg

SEQ ID NO: 435699 - DNA, 100 bp, Homo sapiens
gcgatgtgtgattaccatggcgaggagtctctgtccgggggcctggctaaggaaaccctattacctccaggcttatcaggagggcagacttcaaaagcta

SEQ ID NO: 435700 - DNA, 75 bp, Homo sapiens
tcaggagaaagattacacaggagctgcagtgctgtactctaaggactcgggcagccgcaagtagctcctccagcg

SEQ ID NO: 435701 - DNA, 97 bp, Homo sapiens
gtcctggcaagcacctcgggatcccattccttcacagggaccctagccaggttttagatggagcaggattagatattgatttccatcttgcctctcc

SEQ ID NO: 435702 - DNA, 98 bp, Homo sapiens
gccagcaagtacaagatgctgtggaagctgccgctggaagacgcagacatcatcaaagtctcctgggctacctgaccaagtacgactgctccagtgcg

SEQ ID NO: 435703 - DNA, 80 bp, Homo sapiens
gttccctcggattaaacgccggagagagcgtgaatttgcctcggggacgcctctccaggcgccatgtcagaaccggctgg

SEQ ID NO: 435704 - DNA, 83 bp, Homo sapiens
cagattcgcagtggtcgcttcttctccttgcttccactgcgattccaaagacttggacacctagtggctctgatggcactgct

SEQ ID NO: 435705 - DNA, 75 bp, Homo sapiens
cttggcggcttttctcctcagttttctggagtgctttggaggagaggttttagagtctttgccagaagatgtagg

SEQ ID NO: 435706 - DNA, 100 bp, Homo sapiens
cagcaggtgagtggcggtcgccatcagacccgcgaagggagaagcagaatttgcccgcatcatgagcattgtggaccccaaccgcctgggggtagtgaca

SEQ ID NO: 435707 - DNA, 100 bp, Homo sapiens
ggaagctacaggtgtgagtgccggagtggttatgagtttgcagatgaccggcatacttgcatctgcacagatgaggagagcatcctgactctgttgacat

SEQ ID NO: 435708 - DNA, 74 bp, Homo sapiens
agcagatatatctggcctaccatccttctgctgctgaaccaatgccaacagtggcagccgattaggaggcctgg

SEQ ID NO: 435709 - DNA, 75 bp, Homo sapiens
gaagcagaaagcaagtgaatacgagtcagaagatgaacgacaatctccttgagagctggagcgacctcgacgagc

SEQ ID NO: 435710 - DNA, 75 bp, Homo sapiens
catggaaaccgctctggtcacaccaatactgttgcagattgtgctacagttgaaactccagcagcgccggacccg

SEQ ID NO: 435711 - DNA, 100 bp, Homo sapiens
caccagctcaagctgcagttcgaggagctcgaggtggactatgaggctatccgcagcgagatggagcagctcaaggagcaaaaaagaaattcctgtgttt

SEQ ID NO: 435712 - DNA, 90 bp, Homo sapiens
cactggcacagcgaggttttgctcagcccttgtctcgggaccgcagacaatgcctgtggaagacaagtcagaccccccagaggggtctga

SEQ ID NO: 435713 - DNA, 98 bp, Homo sapiens
gcggcggaggccgttcctggctttgtagctcgctcaagatggcggcgcagccaccccgcgggatacgcctcagcgcgttacagaatgtctgaagggga

SEQ ID NO: 435714 - DNA, 75 bp, Homo sapiens
ggcgtgggtgttccccggcccctctgagcaccagcacctgagtacagttgtgaatttggctccgcgaagtattat

SEQ ID NO: 435715 - DNA, 110 bp, Homo sapiens
cgtgcaattgttgccattgaaaaccctgctgatgtcagtgttatatcctccaggaatactggccagagggcttccctggaggccgccattgcagatgccgagcagcgtgg

SEQ ID NO: 435716 - DNA, 75 bp, Homo sapiens
cacagctactccaacccaaacaacaaccaagccagtttaatggtatttctgggaaaagccagcttctgtttgcac

SEQ ID NO: 435717 - DNA, 100 bp, Homo sapiens
gtggggagcacaggccggtctggtggtggctggttactaccatgccaatgcagctgtgaacgatcagagctttatttgaaggtagacgcatcgaatttgc

SEQ ID NO: 435718 - DNA, 75 bp, Homo sapiens
ctgcagcgaagcacctctttacttttggaaatctagtcctagtattctggccgttcagagatctgcaatcctcaa

SEQ ID NO: 435719 - DNA, 75 bp, Homo sapiens
caaccatgatgctgccatctttccaggaggctttggagcggctaaaaacctggagagcaacaagccccggccctc

SEQ ID NO: 435720 - DNA, 98 bp, Homo sapiens
gcgctctcgtcttctgcggctctcggtgccctctccttttcgtttccggaaacatggagattatttggtagcaattgaagagaaaaacaaagctacat

SEQ ID NO: 435721 - DNA, 98 bp, Homo sapiens
ccagtcgcgcacaagtgttatctctgtaccgggcgatgctgagagagagcaagcgtttcagcgcctacaattacaggaattgaaagatgttggccatc

SEQ ID NO: 435722 - DNA, 74 bp, Homo sapiens
cagggaaggagggcgtccgagtcaacaaccgcttcgagctggagtgcgccggtctcggggaaatgcccggttcc

SEQ ID NO: 435723 - DNA, 97 bp, Homo sapiens
ttcgtaatgcgactcaaagctgcacggcagtctgtttatgaggaggaactctcattgggtaataaaagaaccctcttctactccagccctctccttg

SEQ ID NO: 435724 - DNA, 75 bp, Homo sapiens
tcagtactctgtaacacccagctaccagttctgtggctcctgatggatctgagaagatggacgtggaggatgaaa

SEQ ID NO: 435725 - DNA, 100 bp, Homo sapiens
cgctaaggaatgaaacccttccagctcgatctgctcttcgtctgcttcttcctcttcagtcaagttggcctttaccagagtttgatccaagccagattcg

SEQ ID NO: 435726 - DNA, 75 bp, Homo sapiens
tgcaaccaagcacctgaaacagcaggaggagatgttaaagtaacccatcttgcaggacgacattgaagattggtc

SEQ ID NO: 435727 - DNA, 101 bp, Homo sapiens
ttctcccaacgtcaggcccgatggctcggcttccccaggttcgagaacttgtcttggacaattgcaaatcaaatgatggaaaaattgagggcttaacagct

SEQ ID NO: 435728 - DNA, 51 bp, Homo sapiens
gggggagttctcagagtcattacatactgccaaatctgtcgaaagggagat

SEQ ID NO: 435729 - DNA, 110 bp, Homo sapiens
cgcctacccctcagagcaggagaagctgagcctttctggacagaccaacctgtcagtgctgcaactctctggcctgacaaccaatgttgtggacattattttggctcatc

SEQ ID NO: 435730 - DNA, 100 bp, Homo sapiens
gatgcagttacattttctccaaaagctgtgaccaagttcacagacattgggaccttcgagacagtgtggcaagtcaagttctacaattaccacaagcggg

SEQ ID NO: 435731 - DNA, 76 bp, Homo sapiens
tcgcgggcgggagaacggaaaactcccaacttcctgatcctgtggtattgtggaaattcccagaggactttggaga

SEQ ID NO: 435732 - DNA, 98 bp, Homo sapiens
aggccggggccggcggcggctcatggacagcggggcgggcggccggcgctgcccggaggcgggttatgaagacagtatggagtttccagaccatagta

SEQ ID NO: 435733 - DNA, 100 bp, Homo sapiens
ttatcaaaaacatgattacagggacatctcagctgatcacagaacaggccgatatcgcattgacccggggagctgaggtgaagggccgctgtggccacag

SEQ ID NO: 435734 - DNA, 97 bp, Homo sapiens
gagatgtagatgaaacaggtattactgtagccagtcttgaaagattcagcacatatacttcagataaagatggctaaaacagctcttggagaacatt

SEQ ID NO: 435735 - DNA, 75 bp, Homo sapiens
tccaaggaagccacgtgcagacatctacaaccttcgatctcctgacgatctctgctggatgaaccgaatcctaac

SEQ ID NO: 435736 - DNA, 100 bp, Homo sapiens
ttacaagttaattgaagagtcttgtccacagctggcaaattcagtgcagatcaggcttcctcatttggatatgtggaatgaattttttcatgttatgttg

SEQ ID NO: 435737 - DNA, 99 bp, Homo sapiens
gaaacagctgcgtttcctgttttaatgttagcgttgttaatactacctgcttttggatagaatgtaaagcctgagacagctgcctgtgtgggactgaga

SEQ ID NO: 435738 - DNA, 75 bp, Homo sapiens
cagagacgtgaagcactgaatctgagtcagtgctgattctctcaaatagagcttgaaggataaatcttcattttt

SEQ ID NO: 435739 - DNA, 100 bp, Homo sapiens
tgtgtgacaccaagataagtaacggtgtgcatcctgcattcctaggggctcagtacccttattcagtgactcctccctcacttgctgccactgctgtgtc

SEQ ID NO: 435740 - DNA, 74 bp, Homo sapiens
ttagcaaggagtgtttcatttgaacagagtgcccttatgcctgcacagttgttttttaagacggaagatggagg

SEQ ID NO: 435741 - DNA, 90 bp, Homo sapiens
cgagaaccccagcttggagaaccaccgcatcaagagcttcaagaacaagggccgcgatgtggaatgtgctcttgccattgctccatccgc

SEQ ID NO: 435742 - DNA, 98 bp, Homo sapiens
actggtgcgcggcctgaaggccggggtgctcagccaggccgactacctcaacctggtgcagtgcgagacgctagaggagctccacgcaggagatcggt

SEQ ID NO: 435743 - DNA, 73 bp, Homo sapiens
ccggcaacggatagaggggctgtgtcatagacgtccgacgtgtctgctttactgtctttcacaagcgcctttt

SEQ ID NO: 435744 - DNA, 100 bp, Homo sapiens
cttgtggcaagatcgtcggcaacaagtgggaggcttacctggggctgctgcaggccgagtacaccgagggctgtgtaaatgagtatggaagattatgatt

SEQ ID NO: 435745 - DNA, 100 bp, Homo sapiens
gtgaagatccaagatgttctacagatatcggaaactggcactgaagtggcatccagataaaaatcctgagaataaagaagaagcagagagaaaattcaag

SEQ ID NO: 435746 - DNA, 75 bp, Homo sapiens
gtcatggatgccaagcacaagaactgcatggagaaacagcgggagccacggaagggccgcctcatcgtgtgtggc

SEQ ID NO: 435747 - DNA, 93 bp, Homo sapiens
agaaactgttggaactgctttacaaagtattttaatatctattgaaatcgaggctcctacccagatatctttagtggatgaagcatcaggaga

SEQ ID NO: 435748 - DNA, 100 bp, Homo sapiens
ctactgttatagagagaacatttcatgtagatactccagaggaaagatattaataaggcagcggaaagaagaaatatgaatacggctccatcaagaccca

SEQ ID NO: 435749 - DNA, 100 bp, Homo sapiens
tggtcagaaatattctccatgtcccagctgaccttgatcaggagaaggactacaaatccctccaggatatcattgccatcctgggtatggatgaactttc

SEQ ID NO: 435750 - DNA, 71 bp, Homo sapiens
ggctgaggcggcgcggcagcggagggacggcagtctcgcgcgccgagtcgtccggaaatccattgcccgtg

SEQ ID NO: 435751 - DNA, 82 bp, Homo sapiens
gctcaccccgcggccgcaccttcccgccttctcaggtcatcatcagatttgaaatatttaaagtggatacaaaactatttca

SEQ ID NO: 435752 - DNA, 83 bp, Homo sapiens
cggagctttcgcagctggagaagtgagttattctccccacctcagaagtaccagcttttggtgtatcatgcagattctctctt

SEQ ID NO: 435753 - DNA, 149 bp, Homo sapiens
gcagagatgcccttgtcaaaatggaggagtgtgtcatcacgtcactggagaatgctcttgcccttctggctggatggttcatatccagctttcagagtggcaccgtgcaatttttcttccacaggcctggcttgcatacatgaatcgag

SEQ ID NO: 435754 - DNA, 90 bp, Homo sapiens
ctggaagcagaactggctgcgcatgagccggctattcagggtgagaaagtccaggccatgtatatctggatcgatggtactggagaagga

SEQ ID NO: 435755 - DNA, 100 bp, Homo sapiens
tgaaggcctgcaaggttccacgctttgagaaggtttgcatatcatctgagacagtggcaaattgaaggcactggtattagtagtcatttgaaagcactga

SEQ ID NO: 435756 - DNA, 75 bp, Homo sapiens
atcgaatcatggaatcccttgcatggctctcagcaaaaactgattattccaagtggaagttgccctgttattctg

SEQ ID NO: 435757 - DNA, 100 bp, Homo sapiens
cgccgagtcgcgcggaggcggaggcttggggctcttgcagccaatgccggaacaggatttgctgttgctgagcctcaaatcgcaatgttttgtgggaagt

SEQ ID NO: 435758 - DNA, 113 bp, Homo sapiens
tgttccttcagccaaagaaacaagccgtggaataggtgtatcaagtaatggtgcaaagcctgaagcagcctggcatcctcgctacaacctcattgttgtgggccgatacccag

SEQ ID NO: 435759 - DNA, 51 bp, Homo sapiens
atcaggcgtgtgtccagttctggccagagatcctcagcaggagcctatgga

SEQ ID NO: 435760 - DNA, 82 bp, Homo sapiens
tgtctcttctcgccctggcggggaaggtgacaaagttgttgtcacgtactccaaaggttatccgtgtggtggaaataagacc

SEQ ID NO: 435761 - DNA, 100 bp, Homo sapiens
cctccaggccgtcagcctgatgcatagcgaatttgcccagctgcccgcgctttatgaaatgactgtcaggagtccaaaactacttacctggaagaccttc

SEQ ID NO: 435762 - DNA, 80 bp, Homo sapiens
gtctcggaaaccggtagcgcttgcagcatgagctccacgcaggagatcggtgaggagctgatcaacggagtcatctactc

SEQ ID NO: 435763 - DNA, 100 bp, Homo sapiens
gttcttccttgaagaaatacagcttggtgaagagttactagctcaagggtgaacactttggaacaacggaagctacagaagccttctttgcaatgacgcg

SEQ ID NO: 435764 - DNA, 75 bp, Homo sapiens
ctggagctgaggaaccggaccccggcagctaaccaccgggaggaactgggccattctaacacccgttgctaccat

SEQ ID NO: 435765 - DNA, 76 bp, Homo sapiens
tatccaagggttgtatcgaggctataaaagcacagttttaagagaggccaagtcctgtatctgccatgtctgtggc

SEQ ID NO: 435766 - DNA, 90 bp, Homo sapiens
ctgcaaaggaaaatctgatcactactgggtggttggtatccatgaaaatccccagcaactaagatctgaagacagcatgtacacagccat

SEQ ID NO: 435767 - DNA, 75 bp, Homo sapiens
gacgagcagcaagtcagggagcttaagcagatataatttctacagtagaatttaatcattctggagaattactag

SEQ ID NO: 435768 - DNA, 101 bp, Homo sapiens
tacgtgggagtggggggggcctggatgcttctctctgctctgccctggctgggccactacagagctgcctgagaactggacagacacgcgggagacgctgc

SEQ ID NO: 435769 - DNA, 100 bp, Homo sapiens
tttcggcttctgagacggcggcagcagcggcattcaggtttcaggcacagaactgtatatccaataatagtgaaatggatcccactaattatgacagaaa

SEQ ID NO: 435770 - DNA, 75 bp, Homo sapiens
acgccatgatccccaccttcacggctctgctctgcctcggcatccgtgtcattctggaccttactcccaactacc

SEQ ID NO: 435771 - DNA, 76 bp, Homo sapiens
gaaggatgacaccggagtttgacgaagaggtggtttttgaggaggtgactgttatgttccacagagggtcatattt

SEQ ID NO: 435772 - DNA, 100 bp, Homo sapiens
tcgcagtggtcgcttcttctccttgacgccctcctgcaaaacggcccaactacgttaagcttggcactctggcacctttctgctgtccctgggagcagtt

SEQ ID NO: 435773 - DNA, 83 bp, Homo sapiens
agaaaacccaaattatgctttaacaaataatccgcaagatgggattatggtgaaactagttgtcaatttgttgcagttatcca

SEQ ID NO: 435774 - DNA, 90 bp, Homo sapiens
ctgcagtacctgcagaaggtctctggagacatcttcagcaggtatgtgccatcacaagcagatgtggcagtatttgaagccgtgtccagc

SEQ ID NO: 435775 - DNA, 100 bp, Homo sapiens
ggccatcgtcatcctgctgctgaagatctggaagacgcgctcctgcgccgatcttagcaaagcaatgtctcaagatggtgcttctcagttccaagaagtc

SEQ ID NO: 435776 - DNA, 90 bp, Homo sapiens
gtgcactggtgattgctgcggtgtttgaccgagacataaactgcagaagagcagcctctgccggagcctcaacagaaagctcctttagtt

SEQ ID NO: 435777 - DNA, 83 bp, Homo sapiens
gtgaggtcatcacggcgcgacgacgagctgcagttgtgggcaccttgtatgcgaatcctggtaattgatgtccacccgagaaa

SEQ ID NO: 435778 - DNA, 100 bp, Homo sapiens
atcattaaggacggaggcacgcggagctggagtttgttcagatcatcatcatcgtggtggtgatgatggtgatggtggtggtgatcacgtgcctgctgag

SEQ ID NO: 435779 - DNA, 115 bp, Homo sapiens
aagggaatcgcaaggctcttccctgaccattttctactgtccctgcgcgaggaaacatggtagaatggtgcttacctcaagatattgaccttgaaggtgttgagttcaagtctat

SEQ ID NO: 435780 - DNA, 100 bp, Homo sapiens
cggcatcgccggcctcgctatgatttgaaaaatgtgtgagtgctaaggaagctttggagactgatctttataagcggtttattctggtgttgaatgagaa

SEQ ID NO: 435781 - DNA, 101 bp, Homo sapiens
gtcatggtcttatcaacttcggcatctataagaggataaaacccctaccaagtgtttggagaagagggattgaccctgaatcttgaagacgttcagcctca

SEQ ID NO: 435782 - DNA, 75 bp, Homo sapiens
aaatgcgcagagcaaacatctttcaaagaaggacagaataacgggctcccagattcacaagccccaccaagagga

SEQ ID NO: 435783 - DNA, 100 bp, Homo sapiens
tattactcgttgctgaacgtgcgcagggagatgatcatgggaacagcaatagtagtcatgtaaaaatctttttaccgaaaaagctgcttgaatgtctgcc

SEQ ID NO: 435784 - DNA, 126 bp, Homo sapiens
gcaaggccgcccgggaactgctgacgcttgatgagaaggacccacggcgtctgttcgaaggtcttgttgcagtaggagaaagagcacaaaagaggtctgggaacttctctgctgcaatgaaagatc

SEQ ID NO: 435785 - DNA, 50 bp, Homo sapiens
ttagcagtcacgacctccagcacaggttcaacttgcctcgaaccctgtgc

SEQ ID NO: 435786 - DNA, 75 bp, Homo sapiens
caagttagaactctttatctttctgtggatccttacatggtgactctcctattccatctgtttcttcgggatcat

SEQ ID NO: 435787 - DNA, 85 bp, Homo sapiens
atgctttctgtagcactgtgtgaagggcagctgcaatgactctccgcacggtattattgtcattgcaagcactattggcagctgc

SEQ ID NO: 435788 - DNA, 75 bp, Homo sapiens
cagattcgcagtggtcgcttcttctccttggttatgatgtgattgctcaagcccaatctgggactgggaaaacgg

SEQ ID NO: 435789 - DNA, 100 bp, Homo sapiens
atgagctccggcggccggtgctgcaacgccagacgtccatcacacagaccatccgcagggtcacggagactcaccagttggcagaattaaatgagaagaa

SEQ ID NO: 435790 - DNA, 87 bp, Homo sapiens
agctgggagaccccgggcccagaggtgtctttcctgaagactatcttcccgtctcaaaatggacatgatggatccacggatgtacag

SEQ ID NO: 435791 - DNA, 75 bp, Homo sapiens
agccgatccagcctgcggagcctgtggggcagatggcagttgaattcctgcatgaactgaatgttccatttttca

SEQ ID NO: 435792 - DNA, 98 bp, Homo sapiens
ccaagcggtgagactatcacctatcgccaagtgctccaaagacaacaggccctccctctgccctcccgtctgtgagctccctgcccagcaccacctcc

SEQ ID NO: 435793 - DNA, 100 bp, Homo sapiens
ctcgtgcttcgggatggaaacctatggttatctgcagagggagtcatgctttcaaggacctcatgtatgagcagcagcgggacaatcttgcccaacagtc

SEQ ID NO: 435794 - DNA, 75 bp, Homo sapiens
ccaagctccatgaggagatcgagcatctgaagcgggaaaacaaggaggcaaatttctggagatgtgcaatgatct

SEQ ID NO: 435795 - DNA, 100 bp, Homo sapiens
cagctctgggtacccggctctgcatcgcgtcgccatgatgggccatcgtccagtgctcgtgctcagtccttctggcactcctctggtggaccgcccccat

SEQ ID NO: 435796 - DNA, 83 bp, Homo sapiens
ctccacctacgcagcagacaagggggattttttatcaagcagaaatgcatcgaacaacgagaatcaagatcactgagctaaat

SEQ ID NO: 435797 - DNA, 101 bp, Homo sapiens
gctggttggggaggaccagaaatcagatcagcctggatcccccaatcaagcaaggccaaactcgctaccacttcctgatcctcctcttctccaaggacgag

SEQ ID NO: 435798 - DNA, 100 bp, Homo sapiens
ggacctctcagaacacagtggacagtgacaaggccagccctccagatctctatattgaaagatttaatatagctcttggacaatatatgggagcattgca

SEQ ID NO: 435799 - DNA, 96 bp, Homo sapiens
cggcctggctaactcctgccaggcagtgcccttcccggagcgtgccctcgccgctggtggacaagagcaaggaccaagtgtggaaggtcttaatgt

SEQ ID NO: 435800 - DNA, 100 bp, Homo sapiens
tgccctcattaaagcagccggtgtaaatgttgagcctttttggcctggcttgtttgcaaaggtcctggatggtcgccggcccacaggggggcgactggag

SEQ ID NO: 435801 - DNA, 75 bp, Homo sapiens
gcagagttggctttcaaagaatgtactcgacaccttgcgaaatcatgaccaccccaggaaaagagaactttcgcc

SEQ ID NO: 435802 - DNA, 90 bp, Homo sapiens
ggatgatacaccttttccacagggaattgagttggcgcgggtttaagtggacgccaggtgcaccggacacaggctgtgtttaaccacacc

SEQ ID NO: 435803 - DNA, 100 bp, Homo sapiens
tgttagcccgaagaaagaagctgctgaaaacagaagttcacctgcacatcttgttttccctaacatcaagaatggtcacaatccaaggtccggctcctcc

SEQ ID NO: 435804 - DNA, 101 bp, Homo sapiens
caactccccagcagcacgtgttggaatggacttcggaccctggcctcttgggatgcaaagacaaatttacatgtattggagaccagaccagaagcccttct

SEQ ID NO: 435805 - DNA, 96 bp, Homo sapiens
gaaatcttgaaaaggactgaccagtttttgcagttctaaaaccatggcccattgaaggagaacgacctgctcagaatgagaagaggaaggagaaaa

SEQ ID NO: 435806 - DNA, 100 bp, Homo sapiens
gttccttgtctgcctcgctttctccttggccaccctggtccagcgaggggcttccatcgttggcgtgaactgccgctttgggcccgacaccagcttgaag

SEQ ID NO: 435807 - DNA, 101 bp, Homo sapiens
aggagatgcaaaaccgatacccacctgtatcagggtgataaaagaaaatgtggctgaagttacccgaagttcagcttgcagtgtaattcagaagagttaag

SEQ ID NO: 435808 - DNA, 90 bp, Homo sapiens
gcctctcctctatcagaatggagggccagttataacagtgcaggtggtgaagaaggtgaagtccatgcagatgttccacatgcccatcac

SEQ ID NO: 435809 - DNA, 90 bp, Homo sapiens
aaaagaagacatttcagatcctatggacccgaacccttgtagtgcaacatacagcaacttagcttcagtatcagacacagcacagcagcc

SEQ ID NO: 435810 - DNA, 100 bp, Homo sapiens
ccacgagcctcagcttcacctccatgggcatcaacatgctcccctcccacccggtcactccgtccagcaagcacgcagacagcaagcccgcgccgctgac

SEQ ID NO: 435811 - DNA, 83 bp, Homo sapiens
cgcttcgccaagggggtgcagtacaacagctcttgtcaggatggtgaagctgttcatcggaaacctgccccgggaggctacag

SEQ ID NO: 435812 - DNA, 88 bp, Homo sapiens
tttacctcgctgaccctatgaagccaccaaccgctaaaatgcacgccatcatcgagcgcacggccagcttcgtgtgcaggcagggagc

SEQ ID NO: 435813 - DNA, 90 bp, Homo sapiens
atcgagtgtgacatgtgccaggactggtttcatggcaggaaactactttgcttcgcactttttcatgggaggagagaaattcgacacccc

SEQ ID NO: 435814 - DNA, 100 bp, Homo sapiens
tgtgcggcgtccgctgtataagtatcagcagcgtcgccagcaggagaatatgcagcgccagagccgaggagaacccccgctccctgaggaggacctgtcc

SEQ ID NO: 435815 - DNA, 100 bp, Homo sapiens
aacagcctatgtgggcttccacggaggctgttcggctcttgaatcccagcgatgaaaccaggaactcactttcccgggatgccgagtctccattcctcca

SEQ ID NO: 435816 - DNA, 101 bp, Homo sapiens
tacctgcaggtattgggagatccacagctaagacgccaggacccactggaagcctagaaatggtgcgtatagcagcaaaattcatcattcatgcccctcct

SEQ ID NO: 435817 - DNA, 100 bp, Homo sapiens
ctctgaggtagatcatgaaagagatcctggacctatgaatatccagtttgagccatcggatctaagatccaaaaggtatgaggatacatgggctgcactt

SEQ ID NO: 435818 - DNA, 50 bp, Homo sapiens
tgaatgcaaaagaattcttcgaaaattggtcattaacagctgaagagaag

SEQ ID NO: 435819 - DNA, 75 bp, Homo sapiens
caggtctggagctcgaccgggccaggaggaacatatgcagcagaaaaaagaggaggaagaagttcttaaagaagt

SEQ ID NO: 435820 - DNA, 82 bp, Homo sapiens
tcaatgttctcgatgccaatctctgcttgaaaggagaagacttggattctcaggcaccgttcctgccttgggcgctcatggg

SEQ ID NO: 435821 - DNA, 102 bp, Homo sapiens
tcggggctgctgggctgcaagcagtgcggcgggggccgcgaccaggacgagtttgcaatggattttggataaacaagatctgttgaaggagcgccaaaagga

SEQ ID NO: 435822 - DNA, 83 bp, Homo sapiens
ctaaagtggagaatgaggatgaggtgtccctggccagtgtccttccacctgtccacaagcatggggaacatcttcgccaacct

SEQ ID NO: 435823 - DNA, 80 bp, Homo sapiens
caggagctcaaggaacaggatcaagaaaccatggcatttgaagaggctgggaggcggcagaatgcagccagaggagggca

SEQ ID NO: 435824 - DNA, 75 bp, Homo sapiens
tctgacccaggcgtgcgggtactcagaagttggataacagggcaagattcagaggaagaaaaggatattgatgca

SEQ ID NO: 435825 - DNA, 75 bp, Homo sapiens
ctcagactttcagcatcataacaaagcccttgctgttatggttgataaacctgctcctccaaagccagagcccaa

SEQ ID NO: 435826 - DNA, 100 bp, Homo sapiens
cctacgaaaattagttgaacttactcagaagccagttcatcagctctttgattacatttgtggtgtaagcacaggaatctttgtgacattctctctcagc

SEQ ID NO: 435827 - DNA, 100 bp, Homo sapiens
acaaaggtgatgatcgaagacttggcaaaaagcctatattcagtagctcgcagagttatgaagttgcaactgccctagaaaatcgaagccacaaagttcg

SEQ ID NO: 435828 - DNA, 100 bp, Homo sapiens
aggaggggaagggacgtgggggcggccacggcaggcatgtactggcattgaaaacattgacgaagctattacattgcttgaacaaaataattgggactta

SEQ ID NO: 435829 - DNA, 98 bp, Homo sapiens
gctccgccggctggtgcttttttatcagggcaagctgtgttccatggcagggaacttttggcagagctcccactatatttcagacaacttttaagagg

SEQ ID NO: 435830 - DNA, 83 bp, Homo sapiens
tacgtcctgatcgacatggttctcaacaagatggccaaaggacccattccaacaatctcgtaaaacatggtggattactatga

SEQ ID NO: 435831 - DNA, 96 bp, Homo sapiens
ttccagaaaaattacagcacatctcagtgaatttgcaagtgggtgtggatgaatggaacatagctcgcctcaatacagtcttggatgtggttgaag

SEQ ID NO: 435832 - DNA, 101 bp, Homo sapiens
taaaaactcacattgtgctcagactgtcagcagtgtttttaaagggattaacgtcttcaaggacccagttgctgatcccaacaaaaggtccaaaaagggcc

SEQ ID NO: 435833 - DNA, 75 bp, Homo sapiens
gttcggtgaccgcagcactggggaaacgatccgctcccaaaacgagggcaaggagttggtgcacacctacaaggg

SEQ ID NO: 435834 - DNA, 100 bp, Homo sapiens
cttggatgaggtgaaagactatgtggccaaggctggaggctcccaggtgattttcacaaatcctttagaaatcgtcaagatccgtttgcaagtggcagga

SEQ ID NO: 435835 - DNA, 49 bp, Homo sapiens
gttggctgcaggagcagctagcacagggagaggagcggaagaccttctg

SEQ ID NO: 435836 - DNA, 76 bp, Homo sapiens
atactgccttatgggacagatcaagtgttcagtgtgaggtggagctgatagagtccatagaggacctgagacaacc

SEQ ID NO: 435837 - DNA, 100 bp, Homo sapiens
agcgccccggaatgacctgtcgcctgccagctctgaccccaccaacaactgaacgctttggtcaggctgctacaatggaaggaattggggcaattggtgg

SEQ ID NO: 435838 - DNA, 100 bp, Homo sapiens
tcggctcttccagctacaaactctaggtttgaaaggtgatgtttgcagacagaaaaagtaaactgtcaaggaattcagagcattgggtacttgttatttg

SEQ ID NO: 435839 - DNA, 110 bp, Homo sapiens
tgcacctcatgatcaacaatctttttaaagatgacatcaggtatctgttgacaatggacaaactatggcggaaaaggaaacctccagttccgttggactgggctgaagta

SEQ ID NO: 435840 - DNA, 82 bp, Homo sapiens
gacatcggcctctgcaggcttgccgaagaagggagagtgaagacatttccacctggacacctgaccatgtgcctgccctgag

SEQ ID NO: 435841 - DNA, 100 bp, Homo sapiens
tgctcgcgcccctggtcctgctgctcggggtccgcgcggcctccgcggagccagcattccacgcctacgggaaggcaggcaagatgctggtggagaccag

SEQ ID NO: 435842 - DNA, 100 bp, Homo sapiens
ctggctctgctcccccagactctgttggatcagaaggtcaagagtgcccaagacaggagcaggacattgtgttcctgatcgatggctcaggcagcatctc

SEQ ID NO: 435843 - DNA, 97 bp, Homo sapiens
attactgaaactcagtgcactctagtgcagtcattggagaaatcgatgaagaaacagattctgcgcttgatttggggaatattcgagcagaaccttt

SEQ ID NO: 435844 - DNA, 82 bp, Homo sapiens
tgatgccaacagtgtaccagcagggcgttggctatgtgcccatcacaggtcctcagccctcgctctcgctggcggagcagca

SEQ ID NO: 435845 - DNA, 97 bp, Homo sapiens
gcaagtgtgcgacgctctcttcctcatcttctcctttgtcttcttctacacccgactggtcctctttcccacccattttaagataaaattggctgca

SEQ ID NO: 435846 - DNA, 74 bp, Homo sapiens
aaagacaccccagattgcgcccccagtcagtctgcaagagttgtattgtgaagtacctccaaactagcaagtac

SEQ ID NO: 435847 - DNA, 75 bp, Homo sapiens
gtataaaaatggacactggagtagaagtctctgatattggaagccaaggaagaggatcacctagcccgggtagaa

SEQ ID NO: 435848 - DNA, 75 bp, Homo sapiens
tatgtggattccaatctctgttgcttcatcccaggaaagggtggaataattaatgatagttctgaattaattggt

SEQ ID NO: 435849 - DNA, 80 bp, Homo sapiens
ccagcgccctggcctccctcaccttggacacctcgcttggtttaggggaggaattgacctgggcattgaggagccatttc

SEQ ID NO: 435850 - DNA, 98 bp, Homo sapiens
ggagtcaggagtgttgtattatttggagtagaacgcattaaagcagagaaggccgaaatcacgaggttcttccagaaaccaaagactccacaggcccc

SEQ ID NO: 435851 - DNA, 83 bp, Homo sapiens
ctgggagctgtagaccggagctgttcctattgggccatcttggctccaccaccctgcacatgcagatgacaatccaggctctc

SEQ ID NO: 435852 - DNA, 101 bp, Homo sapiens
tggcggcgtggacacctgagtcccggggtaggggtctcccgcgaggccaaagaactgccaactctgaaagataatgatttcattaatgagggccaaaagat

SEQ ID NO: 435853 - DNA, 73 bp, Homo sapiens
agtgatgtcttccagactcggtgctgtacccgccgatgatccgttggtgctgaatgagatcagagaagacctt

SEQ ID NO: 435854 - DNA, 82 bp, Homo sapiens
ccacttacgttcagggttatcattcatagccagtcgtctgggattgtattccaaaacttcccagtcagtctcaggagaagaa

SEQ ID NO: 435855 - DNA, 130 bp, Homo sapiens
gacctttttggagggaaagaaagagccctggactgtgaagagtgaggagaccatagctgcacagccaggagcaatttacagcaatgagggatttatacatgaaaaatggacaaggatttgcattagttta

SEQ ID NO: 435856 - DNA, 100 bp, Homo sapiens
gtgctcctgcggctgtatggagcgattttgcagatgtaatggaggggaaagttccagtcgcagcgctgagaagcgatcagctgaagaagaagctgccgac

SEQ ID NO: 435857 - DNA, 83 bp, Homo sapiens
caacgagctgctggaggacgagggccagctgacggagatggtgcagaagatggaggagggacccagacatggagctgcgggaa

SEQ ID NO: 435858 - DNA, 83 bp, Homo sapiens
cgttattgggccttaggaaattcgttgatgttctggtggattatggatcagatccaaatcactcatctttgggtgaaaaattg

SEQ ID NO: 435859 - DNA, 101 bp, Homo sapiens
ttggaacccacttcagaagccaagtgatcgaactgtgagaatttggaaggctcgcaatttgcaagatggtcagatctctgacacaggagatctgggggaag

SEQ ID NO: 435860 - DNA, 89 bp, Homo sapiens
agcacctccctgatggggacaaaacgcccatgtccgagcggctgacgattgcctacagcattttatgggacttgaagtttttgatgagg

SEQ ID NO: 435861 - DNA, 50 bp, Homo sapiens
tccgaggtgcctttctccaaaagcgttggtaacggaaagcgacctgtaaa

SEQ ID NO: 435862 - DNA, 75 bp, Homo sapiens
ctgtgcactattctttcccaggaaccattggataaggataaagcatactggagcatagtgaaagagtctattttg

SEQ ID NO: 435863 - DNA, 83 bp, Homo sapiens
gcgcaccccagcggagccaagccccacgctggccggacagggccgcctgtcgccgggtgagaagccctaccactgcaactggg

SEQ ID NO: 435864 - DNA, 100 bp, Homo sapiens
ccaggagaatctcctgcaggatctcagtgatggaagtcggcttggccctgaggacattattggccactgtggatgagaccattcccctcctaccagccag

SEQ ID NO: 435865 - DNA, 98 bp, Homo sapiens
cggttgccgggcgcgggcgagaaagggctgaaaacacagttaaatcactttcaaagttaaaagactattaagaacacaagatggggactcctgcttct

SEQ ID NO: 435866 - DNA, 75 bp, Homo sapiens
ccacgcttgaggcctcttggcctcacatacaggtaaaatgatccattctatggtagctcacttggatgctgttac

SEQ ID NO: 435867 - DNA, 100 bp, Homo sapiens
gcccccctcgataccaacggcaaaaatctcaagaaagaggtgggcaagatcctgtgcactgactgcgaccccaagactgcttctgagacagaaacagata

SEQ ID NO: 435868 - DNA, 100 bp, Homo sapiens
tgggaactcagaccgtaccttgcaacaaggcagggaacgtggtgacaggagaaatggtagaagagcttattctttccggagcagatatcatcaaagtggg

SEQ ID NO: 435869 - DNA, 82 bp, Homo sapiens
tgaagatcctggtgtcgccatgggccgccgccccgcccgttgttacaggcccaaaaactgcgactggcatacacaaggagct

SEQ ID NO: 435870 - DNA, 74 bp, Homo sapiens
cctagaccggtttttagtccattgactatgcagcctaatgctcaccgggattattcaagccatggtggatggtc

SEQ ID NO: 435871 - DNA, 123 bp, Homo sapiens
ctcctccccaccaccaccatctccatcacccaccaacaacaccacaataatccacagccaagacaatgcagatcttcgtgaagactctgactggtaagaccatcaccctcgaggttgagccca

SEQ ID NO: 435872 - DNA, 100 bp, Homo sapiens
cggttggagaaaatatgtccctccggaggcacattgggaaccctgagggaaatcctcattgacgattcaatttgttgaaggccaatttgtggactcctac

SEQ ID NO: 435873 - DNA, 90 bp, Homo sapiens
gctcgctgcagcttcaacggagacttcgtgtgcggacagtgtgtgtgcagcgagggctggctggaatgcaatagcgtggtcttggctcac

SEQ ID NO: 435874 - DNA, 76 bp, Homo sapiens
aggagacctggtggaaaaggttgatctcatagacaagtttgtacatccaaatggccagtttgccatcgtgaagaag

SEQ ID NO: 435875 - DNA, 75 bp, Homo sapiens
ccgacaacagcctggcgtccgccacgcataagaagctgggcccccgaggcgatgtggatgtcaacatggaggaca

SEQ ID NO: 435876 - DNA, 104 bp, Homo sapiens
gtggacccgcacagaccttccgggaaagcgcggaattcagaggcagaggtcactctgtgagactgctgggtcagaaaaaggataatggaaggcggcttggggga

SEQ ID NO: 435877 - DNA, 100 bp, Homo sapiens
aagaaggcccaggagatcccagttcagggaagatcagttttcctgccatccaggctgctccctccttcagcaactcattcccacagatcttccgagacag

SEQ ID NO: 435878 - DNA, 101 bp, Homo sapiens
tgtggatttgccaggaatgaccaaggttcaagtgctggattgtgtcatgtgaccatcccaaaactcagagcaccctatggccgtctttgccctctgtcaca

SEQ ID NO: 435879 - DNA, 82 bp, Homo sapiens
accttcgcttggtgtcctcctggcctcagcaacctgacaattctgtcgtgtcccgactgaaggggctggacttgctacctgt

SEQ ID NO: 435880 - DNA, 82 bp, Homo sapiens
ctgtgacttcagagacactgccaagcagccttagccctagtgtagagcatcaaagctaagccagaagatttatcacattttc

SEQ ID NO: 435881 - DNA, 51 bp, Homo sapiens
caaagagtctcacatgctctgctggaccctgcggatcaacgtgtgttactg

SEQ ID NO: 435882 - DNA, 100 bp, Homo sapiens
ctgtctcaacgatacctattttctagtgctgagatcctgagacaatggtcctcttcctgatggatgggaacaagccatgactcaggatggagaaatttac

SEQ ID NO: 435883 - DNA, 75 bp, Homo sapiens
cagtggtcgcttcttctccttggtactctttcatctactggacagagttcgagagtcctctaccactgcagacaa

SEQ ID NO: 435884 - DNA, 83 bp, Homo sapiens
gcggtctgacatcgcgacgctgctcaaaacctcgctccggaaaggggacacctgacggagtctcactgtgttgcccaggctgg

SEQ ID NO: 435885 - DNA, 100 bp, Homo sapiens
cgggatccttctgtcatagaaactcacatgagacaaatgcgctcagcttcaattggcagagaagaggcgatggcggcgatggcatctctcggcgccctgg

SEQ ID NO: 435886 - DNA, 99 bp, Homo sapiens
gaggacccgcggccagtgcgggtggctggctttgccattagcgggggcctttcctgaggacggcgtacggagtgtggcatcccagccatcactcttcca

SEQ ID NO: 435887 - DNA, 98 bp, Homo sapiens
tcagctcagtcccggccgccgccgcgcgaggaaatggccgaggagccggagccgcagaaaacctcggatcaattctcagctggtggcacaacaagtgg

SEQ ID NO: 435888 - DNA, 100 bp, Homo sapiens
cgttttgccagcgataatacgcctcaggtgaagtggatcctaaagagaggatagcacgccaacgaaaattattacagaagaaacttggccttaatatggg

SEQ ID NO: 435889 - DNA, 100 bp, Homo sapiens
gtacagcatcaactacctgcactttggggagcctaagtcctggtgctggagaatctggtaaaagcaccattgtgaagcagatgaggatcctgcatgttaa

SEQ ID NO: 435890 - DNA, 87 bp, Homo sapiens
ttataccttcacccagcatttcatccctcgtcgaaaggattggattggcatctttagagtctgggaggggctgaacgtggtgaagac

SEQ ID NO: 435891 - DNA, 50 bp, Homo sapiens
tgaggatacactgctggatcccagcttgcggtcctcggagcctgcctttg

SEQ ID NO: 435892 - DNA, 82 bp, Homo sapiens
ctcagctccgagtccagggcgagcttcggaaccaaaaagaagcttcccagagccggggccaggagccccaagcgccctctag

SEQ ID NO: 435893 - DNA, 90 bp, Homo sapiens
gtgacttggtttagagaagggcacaagattattccaagcaacagaatcttcagaggatgattccgaagaagacggagaccataacaggac

SEQ ID NO: 435894 - DNA, 78 bp, Homo sapiens
ggcgagctgggcgacggcgccttcggcaaggtttacaagggccgagaactactggtggcgtggccagaacacacggac

SEQ ID NO: 435895 - DNA, 100 bp, Homo sapiens
gttccagcagcagcagtagctatggcagtggcagaagattttaattaggcatctggtgtcgaaggctcagatattcctgatgatggtaaactgataggat

SEQ ID NO: 435896 - DNA, 75 bp, Homo sapiens
tacgttttcaatggattgccacagtaagcttttgtctggtcctctgagccccagtgagagtttcctgaggtacct

SEQ ID NO: 435897 - DNA, 100 bp, Homo sapiens
ctggagaatatgcagagcgacttgcgcgccttgtcactggagtgcaagaagaaattcccacctgtcaaagagacacgatgaggcgagtggtacgacagag

SEQ ID NO: 435898 - DNA, 90 bp, Homo sapiens
gagctgcaagccggtgcagcagccttcagcttttggcagcatgaaagttagcagcataatgattataaagtggtttctcctgctttgcga

SEQ ID NO: 435899 - DNA, 82 bp, Homo sapiens
gagaactacagaaacctgatcttccttggtggcgacatgtctaagaatgtgagccagtcacagatggcaaaattgaaccaac

SEQ ID NO: 435900 - DNA, 75 bp, Homo sapiens
gaagacttgaacttaatacagcaagaaagaccatcaagtttaccaagccctgaggatgatgacaggaaggtccga

SEQ ID NO: 435901 - DNA, 97 bp, Homo sapiens
cagtgtcccttccgagggtcagtttcccgagtacccaccagagggcgccactaaactggatcactgtgtccactactatgatcttcgtaacactaaa

SEQ ID NO: 435902 - DNA, 100 bp, Homo sapiens
gctcatctcccgcctggacctgcacatttgtgatgatagccagtcccgagagccaggacacagcattgttggttttgccatgtactattttacctatgac

SEQ ID NO: 435903 - DNA, 75 bp, Homo sapiens
caagaagctcattaagagcttggaggcggcccgcgggcttctgcttcagtttacccaacctcagcaaacatcgtt

SEQ ID NO: 435904 - DNA, 82 bp, Homo sapiens
cggctatggccgtgccctggggctgagccctcagttaataaaggtatccatggagaacactgaaaactcagtggattcaaaa

SEQ ID NO: 435905 - DNA, 50 bp, Homo sapiens
tacaggcgcccgccaccacacccaggtacctaaaacagatccaggacctg

SEQ ID NO: 435906 - DNA, 83 bp, Homo sapiens
cctgccatgtccgggagaagacaacaatgcagatcttcgtgaagactctgactggtaagaccatcaccctcgaggttgagccc

SEQ ID NO: 435907 - DNA, 99 bp, Homo sapiens
gtgttaccggaacggcggcgacaagggtgttcccgaactagagtggaattaactcctgaggagagagcccaaaagattgccaaagccatgcgcaaacag

SEQ ID NO: 435908 - DNA, 75 bp, Homo sapiens
gcagcggagcccacgagaggcagcgccatggcggagcagacctactcgtggcgggtgccacgtctatgtgggctt

SEQ ID NO: 435909 - DNA, 132 bp, Homo sapiens
attacagtttcaatgggtattgacttttgtgattctactcagactgccagtttccagttgtgataagtttataccatggatagcacaaaggagaagtgtgacagttacaaagatgatcttctgcttaggatg

SEQ ID NO: 435910 - DNA, 75 bp, Homo sapiens
gaagaaggctgctattgaaagagagtatgcacaggatgtcactgattttatcagtcatttgttcatgcagctggg

SEQ ID NO: 435911 - DNA, 148 bp, Homo sapiens
ggctgccgaggcctgtcccgcgcggagtggggagtgggggtgccgcagggtcgggctggcgcgaccctcgggtcagactactccctgtgccatgaacggagatgacacctttgcaaggagacccacggttggtgctcaaataccagag

SEQ ID NO: 435912 - DNA, 82 bp, Homo sapiens
gtcgcagttcttgtttgtggatcgctgtgatcgtcacttgtgaactttgaggcgctgatcatcaccatgtcggtagtcgggg

SEQ ID NO: 435913 - DNA, 82 bp, Homo sapiens
tcccacaccatgcggggaactcgggcagaggccgcttgaggcagccctaggtgaggccaagaagcaacttcaggatgagatg

SEQ ID NO: 435914 - DNA, 98 bp, Homo sapiens
tacaaaagacaaggaagatgagctgtcctttcaggaaggagccattatttatgtcatcaagaagaatgacgatgattgttaaaggaaatgggctggca

SEQ ID NO: 435915 - DNA, 100 bp, Homo sapiens
gctgtccacacagtcatctttgctggcttcagtgcagagtccttggctgggaggatcaatgatgactcagtgactatctcttcacgctagccagatatgc

SEQ ID NO: 435916 - DNA, 82 bp, Homo sapiens
ttggaatggcagtgttggagaaaaattaagagtttgggatatgagattgaaaatgacgactcggaattttcctgagagagaa

SEQ ID NO: 435917 - DNA, 82 bp, Homo sapiens
aacaaggtgacacatattctgtctgtccacgatagtgccaggcctatgttggaggtactccaaagattcaggtttactcacg

SEQ ID NO: 435918 - DNA, 96 bp, Homo sapiens
aggaacagaaaaaaaggcaaaaggaaagactgaaagcccaagaagccagtctgatcaagcagttagagcaccactgccggaactgtggccacatct

SEQ ID NO: 435919 - DNA, 100 bp, Homo sapiens
tgcgtcaggtcacccagcagagatcagcaatccttggctcactgaggaggtttgcataccctttttggagacaaattatgcacagttgcaactcttcgtg

SEQ ID NO: 435920 - DNA, 50 bp, Homo sapiens
tgtcttacatcagttcagagaggtcagtttaggggctggtgcaaaggatg

SEQ ID NO: 435921 - DNA, 78 bp, Homo sapiens
tcagaaggagcaggattaccaaaggctagtccctgagcacgtcgtcatgaccaaggaggaggtgacagagctgctggc

SEQ ID NO: 435922 - DNA, 100 bp, Homo sapiens
tggctctgggaagacgttggcgtccttaagggaaagaagttaagtcttccaatgccaatctgaggaccttcagagacagtctacgccttaacaagcacat

SEQ ID NO: 435923 - DNA, 100 bp, Homo sapiens
caggagccatgtttggagcttctcgagattattttccaccaggggatttcccaggtccaccacctgctccatttgcaaaaagcagaagccactggagaaa

SEQ ID NO: 435924 - DNA, 90 bp, Homo sapiens
cccacgcagacatcttcagccgctgccagggagtaccctgacttctaccggaagctctacggcctcttggacccctctgtctttcacgtc

SEQ ID NO: 435925 - DNA, 49 bp, Homo sapiens
ctctattctctcggcctgtcagcaaagccaagctataacatcagaaatg

SEQ ID NO: 435926 - DNA, 100 bp, Homo sapiens
cggccatctcgctgcccgacgatgtccgcaggcgagagaagggccgtaaggagagagagtccctgcagcagatggccgaggtcacccgcgaagggttccg

SEQ ID NO: 435927 - DNA, 51 bp, Homo sapiens
ggccaaaggacagttagaagacagtagctgaagaagaatctgtagggaatc

SEQ ID NO: 435928 - DNA, 72 bp, Homo sapiens
cgtggaagcaggactgcgccgcgtcttcctcaagcatcctgaggttagcattacacttctcccagtggagcc

SEQ ID NO: 435929 - DNA, 117 bp, Homo sapiens
aagactcatacaaagacagcaccctcatcatgcagttgcttagagacaacctaacaagaccccgcaaacaagcgcatcagaggatctgggtggtgcgagagcctcctacagcagcca

SEQ ID NO: 435930 - DNA, 83 bp, Homo sapiens
ggctgactacctgctgtacaccctcaacaaacaccagcgctttgggtgtatgtggaatttgatgatcttgaatgggataaacg

SEQ ID NO: 435931 - DNA, 75 bp, Homo sapiens
ccggcgccggcgccgcggcctcttcggctgcggaccctgccattccggaggagaccaaacctggaccacccaaaa

SEQ ID NO: 435932 - DNA, 89 bp, Homo sapiens
gggggctgctgtcatacctttggaaagaatggccttgaatttgacacagctcaaaagccaaaagtctctgagaacgactttgaagatct

SEQ ID NO: 435933 - DNA, 80 bp, Homo sapiens
cgtcatgcggctcctcggctggtggggtgagcccctccagactccgaataggagatcaagagtttgattcattgcctgct

SEQ ID NO: 435934 - DNA, 82 bp, Homo sapiens
acgcttcacatacactacacggactggaaggatcaccagcacatatgcggccagtcagcagctgtcaccgtccaggcagacg

SEQ ID NO: 435935 - DNA, 122 bp, Homo sapiens
tccatactattgattgggtgcgagaaaaatgtaaagacagagaaaggcatagacggtcataccctaatgatcccagcaagataatgtcctgtcttctaagatgtgcatcaagcctggtacat

SEQ ID NO: 435936 - DNA, 50 bp, Homo sapiens
gagctggtgatgtttatggcacaggaggagatgttaaagtaacccatctt

SEQ ID NO: 435937 - DNA, 82 bp, Homo sapiens
ctgactgcgagaaggtggctgtggagttcgggaaccagctggagaggtctgcggggtttccgagaggctcgccgggatttct

SEQ ID NO: 435938 - DNA, 83 bp, Homo sapiens
ccaggctaccatggtctacaagactctcttcgctctttgcatcttaactgcagctgctgatgcaaggaatcccctgggctccc

SEQ ID NO: 435939 - DNA, 76 bp, Homo sapiens
tttgctggatttaagcactgctgcactttatgaggctgaggccgcggaaggagcagggcacatacgccctgtccct

SEQ ID NO: 435940 - DNA, 101 bp, Homo sapiens
gttatatatttgagtcaaagggtgatggaggaggaggggaacacccagccccagaaacaggagctgtggccctcaagaatcttcaaattaaagaaaatgcc

SEQ ID NO: 435941 - DNA, 75 bp, Homo sapiens
gctcaggctagggaggagaaacatcagaagcagttggaaaggacctcagcagccatgtcgaagccccatagtgaa

SEQ ID NO: 435942 - DNA, 83 bp, Homo sapiens
cctcggcctccggcgcagcccggaaatgtccggcaagatcgagaaagcagacctgcctagagctggaacgttacctccagagc

SEQ ID NO: 435943 - DNA, 98 bp, Homo sapiens
acagggctggtagcagcgcagaggaaaggcggcttttagccagtgatgtccttgcattgcccatttttaagcaagaagagtcgagtttgcctcctgat

SEQ ID NO: 435944 - DNA, 100 bp, Homo sapiens
cgctgtgtggctgaaaagtgaaggcaagagctgatttggcctctgtgctcccctccgcaaggggatcgttttctccagcccttagagatttgtttgattc

SEQ ID NO: 435945 - DNA, 90 bp, Homo sapiens
ggaagatcaaggaaggatctgtgtggtcattgacctcgatgaaacccttgtgcatagctcctttaagttcctctgtgacgagggtgcagg

SEQ ID NO: 435946 - DNA, 100 bp, Homo sapiens
acgggaagatcctggaggtggatctgaagaacggattttatcatgtgggcaacctgctgcaactggttctgcctggatggacagcctgaggaggtcccac

SEQ ID NO: 435947 - DNA, 90 bp, Homo sapiens
gcgggactccggggcgccacgggggccatgtaagcagctctgactatgaggagatcaccatcgaccccacgtgcagctggaagccagtgc

SEQ ID NO: 435948 - DNA, 96 bp, Homo sapiens
aacatgctggtgccgctagccaagctgtcctgcctggtttcagatgcttcatcaagatgaatcaaataaaagagaaaagatcaagacaaagggaat

SEQ ID NO: 435949 - DNA, 100 bp, Homo sapiens
cgccaccgcccaggaccgccggccgggggacgagctcggagcagcagccagaagaggatgtggagaactttgacgtgaccaacttgtctcaagacatgct

SEQ ID NO: 435950 - DNA, 82 bp, Homo sapiens
aatgagtgaccagtcttcactggttctggggagaaaatccccttcaacattcctgggatatatatctaatagtcccatatat

SEQ ID NO: 435951 - DNA, 100 bp, Homo sapiens
actgctgcagagggtaaacttcacaacatgatagttgatctggataatgtggtcaaaaagctgaaccttcacctagccccaggattacaaggaaaagcac

SEQ ID NO: 435952 - DNA, 89 bp, Homo sapiens
tgagtcaggagctgtatgaccttaacgtggagctctccaagatgcgtctgttactagagtggagagtctaccttcgtctcacatgtgcc

SEQ ID NO: 435953 - DNA, 75 bp, Homo sapiens
tcatggcgttggaataccggctctcagcggctgtataaagatggctgtgaccacatcggggagcaccgagatgat

SEQ ID NO: 435954 - DNA, 100 bp, Homo sapiens
aatgcctcctgaggatttctgtgcctggaaaatatctgttaacagactgcttttacacctacgcttatgtacataaaagcgtgatggaggaactgaagag

SEQ ID NO: 435955 - DNA, 51 bp, Homo sapiens
gcgcaggccgcggggagcacctggactaccatggctgcaggagtcttgcct

SEQ ID NO: 435956 - DNA, 100 bp, Homo sapiens
ggccatcgtcatcctgctgctgaagatctggaagacgcgctcctgcgccgtaaaacgatgtttgcagaaatggaaatcattggtcagtttaacctgggat

SEQ ID NO: 435957 - DNA, 90 bp, Homo sapiens
tgaggtgacttggtgattttcctggaaaattatagatcatcagaaaagcccttactgaggaaaaacgtgtctcaacaaaaacatcagctg

SEQ ID NO: 435958 - DNA, 103 bp, Homo sapiens
gtcatcctgctggatgaggccctcaagtacctgtcccggaaccacatgcacgacaatgcagatcttcgtgaagactctgactggtaagaccatcaccctcgag

SEQ ID NO: 435959 - DNA, 87 bp, Homo sapiens
ggagctccaagatgcctttgactgtggggagaagccatcatttgacagcttcgcaaacctgggtatacttcatgtgacaaagaaaaa

SEQ ID NO: 435960 - DNA, 100 bp, Homo sapiens
gtggaccgacccgtgaccctcgtgagagggccatgaagcccccaggaggagaatcgagcaatctttttggaagtccagaagaagctactccttccagcag

SEQ ID NO: 435961 - DNA, 134 bp, Homo sapiens
cggcgctgggtcggtggcggaggctgaggagaaggaggagcgggccgtggaggcttcgccgcctagaccttctctgggggctacgtgcacgtgctgaagggtgtgctctcagacgacctcctcctgaagagctt

SEQ ID NO: 435962 - DNA, 100 bp, Homo sapiens
agaggaagcatatgcactgaagaaaatatcctatcaacttaaggtgatccgggagccgaagccacgttcagcccgctggctcagcacctctatccccgag

SEQ ID NO: 435963 - DNA, 82 bp, Homo sapiens
tcgctggactgctcagggtgccagacctcatctctttactcctcctgtgaagaagggagaggaccccttccgaacagacaac

SEQ ID NO: 435964 - DNA, 83 bp, Homo sapiens
aggccatcaggggccttgataacacagagtttcaagcccaccttgggacaccttgactccaagcccagcagtaagtccaacat

SEQ ID NO: 435965 - DNA, 75 bp, Homo sapiens
ggaccaggaccgtaggatgatgtttcctccgccagatcttatgccttcattcatccggcatggtccaacaattcc

SEQ ID NO: 435966 - DNA, 98 bp, Homo sapiens
cctgtacagcctgcagaactagcctgatgctggatgaccaaccccctatggaggcccagtatgcagaggagggcccaggacctgggatcttcagagca

SEQ ID NO: 435967 - DNA, 100 bp, Homo sapiens
ctgaagcccaccggtccccaacgcatcatgccagggagccaagcgtcctgcccggccgggactcagaagaagatccttgacattgccaacatgctgggct

SEQ ID NO: 435968 - DNA, 83 bp, Homo sapiens
tctcatgatagcttccaagggacaaggtgtcaacaatgtgccgctacaaaagaccccacagctgtagagagagcaaacttgtt

SEQ ID NO: 435969 - DNA, 75 bp, Homo sapiens
cgccgctggtttgtgctcaagggacacacgctctactggtaccgccagccccagtacgcctgcctcacaccttgc

SEQ ID NO: 435970 - DNA, 50 bp, Homo sapiens
ttgacatcaaccagttactatttgataaacttctgcactggaggggcctc

SEQ ID NO: 435971 - DNA, 75 bp, Homo sapiens
ggaccctgagactcccctaaaggccagaaaggcctagttccccgagagcgttcagacagtgggggctcaagctca

SEQ ID NO: 435972 - DNA, 83 bp, Homo sapiens
cgcgacttggttttttcaccacctacttcttgcccctggctaacaccctgaagagcaaagatcgaaagctgctttgcgtcgca

SEQ ID NO: 435973 - DNA, 75 bp, Homo sapiens
gggggaaaaagtaattcgaccagaatggattgtggaaaggcacgtggaggagttcagccccagagctgtctacac

SEQ ID NO: 435974 - DNA, 74 bp, Homo sapiens
agcaccaggttccaaatcatcaatgaagcaagtaagttggactaaatgctcttccttcagaggattatccgggg

SEQ ID NO: 435975 - DNA, 82 bp, Homo sapiens
ggttttccgagacaacaacggcaccgcgagcgggacaaggagaaccggcatcggaagcgcagccacagccgctctcggagcc

SEQ ID NO: 435976 - DNA, 100 bp, Homo sapiens
atggccgatcctcgcgtgagacagatcaagatcaagaccggcgtggtgaagcgtgcagcctgggagctctattccaccttacaacaccgaggtgactgag

SEQ ID NO: 435977 - DNA, 87 bp, Homo sapiens
gactatgtctcaccatgcagcagctctcaaggttctccaaaatacttatcattcaggttgaataaaccagttctacagactgcttct

SEQ ID NO: 435978 - DNA, 75 bp, Homo sapiens
ctcgccagctgggcagtaggaaagaaaaaacactgattccccatcctatccagagattagttttagttgcagcat

SEQ ID NO: 435979 - DNA, 98 bp, Homo sapiens
gtcagcagtctccactggaaaaaaagatcttggaaatgggtcctgatgaatatgaagagatggaagaagaggaggaggaggaagaggaggaagacgag

SEQ ID NO: 435980 - DNA, 95 bp, Homo sapiens
tccagaagcaaacattcatatcccaacattcctgtgtcaattcgacggagctggatgaactcattcaggtttttggattcaaagcataaaaacca

SEQ ID NO: 435981 - DNA, 100 bp, Homo sapiens
gcggggaacgactgcggcgcgctgctggacgaagagctctcctccttcttcctcaactatctcgctgacacgcagtttggtgccctggttgtcagatgtt

SEQ ID NO: 435982 - DNA, 98 bp, Homo sapiens
caggcatggaacccgagaccacagccaccactattctagcatccgtgaaggagcagatcattgtcacagtcgtactgggactggttataggtgccatt

SEQ ID NO: 435983 - DNA, 121 bp, Homo sapiens
cccttttgaagaggaaatgaagggtattgccgctgttactgatatacctttaggtgaccaagaatatggcccaggtgaccaaagccctggacaaggccctgagcaccatggacctgcagaa

SEQ ID NO: 435984 - DNA, 100 bp, Homo sapiens
aaagatgatgatgaggtttttgagaagaagcaaaaagagatggatgaagctgctacggtgatggcccgctccctctccccacccccggagctggaagaaa

SEQ ID NO: 435985 - DNA, 95 bp, Homo sapiens
tagttctcaatgcatcatgtcaggcagcttatgatgccaatttgtcccatgatggccgaacagacccaattttggatgatgttggtgaagctttc

SEQ ID NO: 435986 - DNA, 96 bp, Homo sapiens
cgatacttgaggaaccttcaaaggcacttcgtggggtcacaggtacaggtttgcagattccgccagcagcacagcaagctctacagatgagtggct

SEQ ID NO: 435987 - DNA, 75 bp, Homo sapiens
cggagtcccattcctgggcccctaccacaaggagtcggctgtgacggccttcagtctctcagcaaacctgctggg

SEQ ID NO: 435988 - DNA, 75 bp, Homo sapiens
cgaacgcttcgctggccatttaggagctctgctcaaagccagacggtgaagagatggcgtttgtgaagagtggct

SEQ ID NO: 435989 - DNA, 80 bp, Homo sapiens
ccgccggccgctagcgtcagcgccagccaggacttgaaagaggagattgatattcgactctccagggttcaggatatcaa

SEQ ID NO: 435990 - DNA, 100 bp, Homo sapiens
tgctgtcaggctacatcagcaaaggggttaaagcagtaaagttgggtcatattctggtagtagatgaggctgacaaagctccaacaaatgtcacgtgtat

SEQ ID NO: 435991 - DNA, 100 bp, Homo sapiens
acagggaatatgtcagtggatttggaaaagctatgaggatgcccatgtggagttcatacacagtcccccagttgaaatcaatgtggactgaacataaatc

SEQ ID NO: 435992 - DNA, 100 bp, Homo sapiens
cgtaacctcggcgccggtgacgtccctcccgctggtcaccactccggcaccagttgtcgccgtgatcctgaaggcgctgacctacgacgagaagcggggt

SEQ ID NO: 435993 - DNA, 83 bp, Homo sapiens
gtctatatttaagtatctccgctacttcactcgcactatccttgatgctagatacttgccagaactaatacagctgatgaaat

SEQ ID NO: 435994 - DNA, 90 bp, Homo sapiens
gaagaaacctggaagaggaagaggaaagcaaaggagtcagggatggctcttcctcaggactgtgtcattttgatatgaatattatctcca

SEQ ID NO: 435995 - DNA, 50 bp, Homo sapiens
gggttcacgccattctcctgcctcagaggtggaggttgcagtgagccgag

SEQ ID NO: 435996 - DNA, 100 bp, Homo sapiens
cccgggtgctgctggttagtgtgctctgagggagggtccgagccagccgctgttttgccggaggagcccctcaggcctagcaggacccagtgctccataa

SEQ ID NO: 435997 - DNA, 97 bp, Homo sapiens
ctgaaccagaagatcgagagcctaactttgcaaccattggtctgcaggacatcactttagatgatggtgtcatggagaaactccagctgggcccaga

SEQ ID NO: 435998 - DNA, 90 bp, Homo sapiens
ctgcaataaaacccagagtaaactcttagataaaatgacgacgtccttctggaagaggcgaaactgtactaaggctcgtacgtctgcatc

SEQ ID NO: 435999 - DNA, 85 bp, Homo sapiens
gatggcggacagtgcggaactaaagacaatgcagatcttcgtgaagactctgactggtaagaccatcaccctcgaggttgagccc

SEQ ID NO: 436000 - DNA, 82 bp, Homo sapiens
ccagtaccggctgacctcgctgtacgccgagcacccaggcgactgcctcatcttcaagacgagccaaactcaggctgtacct

SEQ ID NO: 436001 - DNA, 100 bp, Homo sapiens
gtcatcgcggatttgcaccccgtggggtggtgcacacagaacaacaaggtgttgatgccgccggacggtgtactatattctctcaagatgtccttttggc

SEQ ID NO: 436002 - DNA, 115 bp, Homo sapiens
aaagcagcacagcaggcagcctcttccagtgggcagggtcagcaggcccaaacccccacaggtttgtggtaaatatgccagctctagaacacatgaatcagattttacacatctt

SEQ ID NO: 436003 - DNA, 82 bp, Homo sapiens
ccggacgcgagcccgctcccctgaggggatatgagactttctactcggaatatcctgagtgttgcgtggatgtaaaacccat

SEQ ID NO: 436004 - DNA, 100 bp, Homo sapiens
tgcagtccaggctgaagacagagggctctgatctgtgcgacagaccggctgatcatgggcacccaccgggacctggaagctttcaagcgccttaactacc

SEQ ID NO: 436005 - DNA, 74 bp, Homo sapiens
ttaactgaggatgaaatgagagaattccaagttattagtgaacagacaccagagactctaccaggacataccaa

SEQ ID NO: 436006 - DNA, 82 bp, Homo sapiens
ttttttctaatggctattcaaggtggtatggtcaggaaaaagactacaatgtactagtcatggatcttctgggacctagcct

SEQ ID NO: 436007 - DNA, 106 bp, Homo sapiens
ggattgcaaatatacagtaccatcccatgtgtctaaagagtgtaaagagcatatcacacctgaaaaattttatgtggaagcttgtgatgatggagcagatgacgta

SEQ ID NO: 436008 - DNA, 100 bp, Homo sapiens
tgagcaaaacactaagaatcctaaaagcactactggtagaagttccaaatctaaagagacctactatgtggctggctttagcatactctgtggagcaggc

SEQ ID NO: 436009 - DNA, 98 bp, Homo sapiens
ctgcgaggagtatctgcggcagcatgacaaggtgtccccaggtgtcattgccaacccctttgcggcaggcatcggccaccggaacagcctggagagca

SEQ ID NO: 436010 - DNA, 100 bp, Homo sapiens
ggccccatctggtccagttactatggaaactgccgttctctcctgtcaccaggagactaaagtccatcaaaaacatccagaaaattaccaagtctatgaa

SEQ ID NO: 436011 - DNA, 74 bp, Homo sapiens
atgaaagctcggaaggacattgttgctagactgcagactcagctactctgacctacgacactctccggtttgct

SEQ ID NO: 436012 - DNA, 91 bp, Homo sapiens
aattaaaaggtgtcaagaagctcagaatgagaaccatggagtctggcagtaccgccgccagtgaggaggcacgcagccttcgagaatgtga

SEQ ID NO: 436013 - DNA, 96 bp, Homo sapiens
ttggacccaaaagatgtcaacctggcctcttgtgcggctgatggctctgtgaagctttggagtctcgacagtgagaaagatcagtctaaagaaaag

SEQ ID NO: 436014 - DNA, 75 bp, Homo sapiens
ctggaactgaatgggacagaagcgaaattagtgcggaaagttgccggggaaaagcgccaagcccatctttgtgtg

SEQ ID NO: 436015 - DNA, 100 bp, Homo sapiens
ccaaggtcctaccaagatgacaaaagaagagttaaatgccctcaagtcgacaggggatgggaccctagggaaagaatatggcaaagctgatgcaagatgg

SEQ ID NO: 436016 - DNA, 101 bp, Homo sapiens
cagctgacgtaagagtgatagaggtactccaaagattcaggtttactcacgtcatccagcagagaatggaaagtcaaatttcctgaattgctatgtgtctg

SEQ ID NO: 436017 - DNA, 75 bp, Homo sapiens
gcacaccaaaccctgggttagagcaagtgatttcctgaaggaaatataatgatctgttcatcgaagtagaagata

SEQ ID NO: 436018 - DNA, 82 bp, Homo sapiens
acggctcgcaggccgggggcaaggggcggccgggcgcggccggttaaacccatccagagtaatggctgcggccttacccagg

SEQ ID NO: 436019 - DNA, 75 bp, Homo sapiens
caaaagcagcacttcagattctgttgatgaagttgctggactgagacatgagcctccaactgtgtggttgggctc

SEQ ID NO: 436020 - DNA, 100 bp, Homo sapiens
ccctgaaaaagtatcgtcgagaagcctatcatcgattctgaaggaagatttccattaggtaatttgtttaatcagtgcaagcgaaattaagggaaaatgg

SEQ ID NO: 436021 - DNA, 101 bp, Homo sapiens
acaacaggagaggcttctacagccaggacctgcccccaggagcctctcagggtgcaccaattccagctggacatcactgtgaaaatgggacgggataaagt

SEQ ID NO: 436022 - DNA, 50 bp, Homo sapiens
tgtgcaaacccgagagaactgggactattcttgataagaaagagctcttg

SEQ ID NO: 436023 - DNA, 82 bp, Homo sapiens
cggaagttgccatcctcagcctccaccttcctctccccagggccccaaagtcaccagatgctctggagtcggctcagtcgga

SEQ ID NO: 436024 - DNA, 100 bp, Homo sapiens
gggaaagaagccttctcaagtgggaacaaaaatgagtgtgaggcgaacagccatcccgggcactatgtgaatttggggcatggctctgtgagcgctgatg

SEQ ID NO: 436025 - DNA, 100 bp, Homo sapiens
aaaaggaattgggggtcacaaatggttctcattgacatgagtgtagacctttctactcagcggaagccctgaccaggcatggagtatctcacaaagtaga

SEQ ID NO: 436026 - DNA, 100 bp, Homo sapiens
tctacgcctcctacgtttacctgtccatgctccaggccatgcccgcagccggaggtgtgctctaccagccctcgggaccagccagcttccccagcacctt

SEQ ID NO: 436027 - DNA, 74 bp, Homo sapiens
cggcaactctttgatgtactactataatgggaaagcggcttcctgtgtccagtaccggttagtggtccgggatg

SEQ ID NO: 436028 - DNA, 146 bp, Homo sapiens
cctccttgtggccctgggaggaagccatggactctaccaagtctgaacccctgaagggatcaccagagaatccagcaagctaaagtgcaaattcttcccgaatgtgtgttgccttcaaccatgtctgcagttcaattagaatccct

SEQ ID NO: 436029 - DNA, 75 bp, Homo sapiens
cagttcaattaccgcctctgccaccgaggaattggccttctctagaagactcttaatgcagtaatagtggccttg

SEQ ID NO: 436030 - DNA, 100 bp, Homo sapiens
gtcggacttcctcaacaatgcggcagtagacagcagggactccctggccatggctctgtatgcgtgctgctttgagtgggtaatcaagaagatcaacagc

SEQ ID NO: 436031 - DNA, 113 bp, Homo sapiens
tgaatgccaatgtgtggtccaatgtagtgatgaagaatgaccccaagactgcttctgagacagaaacagatatctgtgctgaatgggagataaagaccatcactagtgctctg

SEQ ID NO: 436032 - DNA, 75 bp, Homo sapiens
cctgcttttggtttccctggcaggggttgaactgtggagtgtgtgggaagggaaaaggccgaggcatcagcgtgt

SEQ ID NO: 436033 - DNA, 75 bp, Homo sapiens
gaaaatcaagtagtgtttgccagagttgattgtgatcagcactgtgctggagaatctggtaaaagcaccattgtg

SEQ ID NO: 436034 - DNA, 83 bp, Homo sapiens
gtggggctcggccgcgcggactgaaggagactgaaggtaatcattaccaaatgaggaggaaaggacgatgtcatcgaggctct

SEQ ID NO: 436035 - DNA, 75 bp, Homo sapiens
cctttccgtttccagggttccgaccagggtgcttattggttctccgttagttggccaacccaaaaacagaactgg

SEQ ID NO: 436036 - DNA, 75 bp, Homo sapiens
gaggctgccgatgagatctgcaagaggatctcattttgcccaacggtggtactccagcaggtacttcaagtccag

SEQ ID NO: 436037 - DNA, 75 bp, Homo sapiens
aactaacaagaggaacacggtagatctagagagaacattgaaagtattctctaagctatttgaagagagtgacta

SEQ ID NO: 436038 - DNA, 83 bp, Homo sapiens
aggcggtccacccgaatccccgggacagatgctcaagctcaggaaaggttatttgtcaatgaagaaaatgttaatgagtttct

SEQ ID NO: 436039 - DNA, 96 bp, Homo sapiens
atcctgtccaggccactgcttcccaaggaagtgcgactaagcccatcagtgtatcagatcagccaaatggccgatgacacagtggcagaactggac

SEQ ID NO: 436040 - DNA, 97 bp, Homo sapiens
cttatttagccggagtgagaagcaagaaggccctggacacagcaatatctctgggctttcacaggttatgatgtgattgctcaagcccaatctggga

SEQ ID NO: 436041 - DNA, 74 bp, Homo sapiens
cgggatctcaggtcctcgggggcggcggccacgccaaggacgggcactactgcagtcttcagttaagcaacaag

SEQ ID NO: 436042 - DNA, 100 bp, Homo sapiens
aaatgattggagtattaacattggacagtcattttgtttactcattcagccctgttgcaggtcccaataaactcttcataaggttgacagaagcaccctc

SEQ ID NO: 436043 - DNA, 100 bp, Homo sapiens
ttgagagattacctgaagttgcactcaaaagcaagatatactactaactttgaaatggaataagcttcctgcctgacacagctcacttcaagaagtgcac

SEQ ID NO: 436044 - DNA, 96 bp, Homo sapiens
gcttggtgtcgtttttccttgagctgaacgtcttgcaacagtggccgcacgcataggcagcatagcctccttccaggctccaaatgccaaacttcg

SEQ ID NO: 436045 - DNA, 98 bp, Homo sapiens
cgctgctcagcgtcctcatgtggggggtaaaccactcgagtatctttagaagatctgtataatggcaagacaaccaaactacaacttagcaagaatgt

SEQ ID NO: 436046 - DNA, 50 bp, Homo sapiens
gattatttccagcgcccattcatgttgggaaatcctcattgacgattcaa

SEQ ID NO: 436047 - DNA, 90 bp, Homo sapiens
agcccgtggtccttctccatattcgaggaatgtatcctgtcaggtataatgtcagtgaatggcaagaaagttcttcatatggatcgaaac

SEQ ID NO: 436048 - DNA, 90 bp, Homo sapiens
gcagctggcggccggaatccgcgcgcagcccggatatgactccacgtagcatgtcaaggactacattaatcaccaattcctttatttttc

SEQ ID NO: 436049 - DNA, 101 bp, Homo sapiens
gcaataccaacatgtctgtacctactgatggtgctgtaaccacctcacagattccagcttcggaacaagagaccctgccaccagctgaacaggccaaagcc

SEQ ID NO: 436050 - DNA, 100 bp, Homo sapiens
tcctaatcccagctcagaaagggagcctctgcgactcattcatcgccctccaggcaggatggggaagcagaatagcaaactggcccctgaagtgatggag

SEQ ID NO: 436051 - DNA, 101 bp, Homo sapiens
atggtgatggagattttgatgtggatgatgccaaagttttattagatatgattctataacagactcttccagaaatgatatgaagaggaaatttgccctga

SEQ ID NO: 436052 - DNA, 75 bp, Homo sapiens
aagccattaaacctgagtcaagttgaagtcagggtgaccgtcgatgccatctctgtggaaactccgcaggacgtt

SEQ ID NO: 436053 - DNA, 75 bp, Homo sapiens
gacggcgtggaggacatgcttctcgagctgctgccagatgactgatgtctgccacctcttccttccatgcctccc

SEQ ID NO: 436054 - DNA, 89 bp, Homo sapiens
tggcctggtttgatactgacctgtaaatcatcctttagactgagcgtgcctaccaaaagcagccgaccatctttcaaaacaagaagagg

SEQ ID NO: 436055 - DNA, 108 bp, Homo sapiens
gccgccagtgccttcttcacctacgtgtcgctgagccaggaaggcaggtcgctgcctgtgccccagctggtgcagaaaaatatggctcaggagactaaccagaccccg

SEQ ID NO: 436056 - DNA, 100 bp, Homo sapiens
tgaggacaagaccatcgagctcatgaaccttctgataacttaagagagattctccaaaatgtggccagattgcagggagtatcaaatatgagaaagctag

SEQ ID NO: 436057 - DNA, 101 bp, Homo sapiens
accaataaaaataaactgcttgaacatcctttgactggttagccaggaaagctgtgtgaagagacaaagggagaatgccatgtgaagatggaggatcggag

SEQ ID NO: 436058 - DNA, 100 bp, Homo sapiens
tgatggccgcctgcttcaccttctgcctcagtcatcagaacctggtgatttgatgaaggctgctgcaggagagttcgcagatgatccctgctcttctgtg

SEQ ID NO: 436059 - DNA, 100 bp, Homo sapiens
ggggcccgggtggtactggtggccgtggacaagggcgtgttcgtgctgaataagaagaacaaactgacgcagagtaaggagctttggttcggagacaggc

SEQ ID NO: 436060 - DNA, 75 bp, Homo sapiens
caagcggagctcccccaagagccggaaagggcctgcacccagagagggtgagctacgtccttggggccacagggc

SEQ ID NO: 436061 - DNA, 90 bp, Homo sapiens
cttttcaagaaagcaggatggactatcattactcctccaacaccaatcatcccagacgcctccctgcccttcgctatcctgacgctggtg

SEQ ID NO: 436062 - DNA, 100 bp, Homo sapiens
aggtcgagtgtcattacgctcaaacaaggtctggtgccctatgtctcctgaattttaccgggaatatgtggcaatcaaaaccaagaaacgaatcttgctg

SEQ ID NO: 436063 - DNA, 100 bp, Homo sapiens
ctgtgtgaggcccaacagtggaattattgacccagggtcaactgtgactgtttcaggctgaactccagtgcacccagttagacttggagcggaaactcaa

SEQ ID NO: 436064 - DNA, 75 bp, Homo sapiens
ccgaagatgggggatttctacgacccggagcacccgacccctgaaaaggaagctgttgaagttattgaagtacct

SEQ ID NO: 436065 - DNA, 100 bp, Homo sapiens
aggagaagtgaagtgcattaagttttccttagaaaataagatattggctgttcagaggacctcaaagactgtggattctgaaagactaatggagcaacaa

SEQ ID NO: 436066 - DNA, 75 bp, Homo sapiens
ggatactgtgggcacctttgagatggccaaggttctctgtggagccgccaccaaaatgcagattttcgtgaaaac

SEQ ID NO: 436067 - DNA, 74 bp, Homo sapiens
agatgggttgcacctggggaatgggttcgagaaatggctgctactaccttaagcggtctgctacagtgtaactt

SEQ ID NO: 436068 - DNA, 100 bp, Homo sapiens
ggggattcagcagctgctgcaggccgagaagcgggcagccgagaaggtgtccgaggcccgcaaaatggacagtttgcggttgtgaagaaatgccgtgaga

SEQ ID NO: 436069 - DNA, 49 bp, Homo sapiens
ccagattccaaaacttatgtcaagtgatgatgaacagtctacacagatg

SEQ ID NO: 436070 - DNA, 75 bp, Homo sapiens
ctaggttccacccttttctgggaacctatcatggtgaacttacttcagattgtgcgggaccactgggttcatgtt

SEQ ID NO: 436071 - DNA, 100 bp, Homo sapiens
ctgagaatgagtttgtggtgctgaagaaggagaagctagagcatcaatatgcacagagctataagcaggtctcagtgttagaagatgatttaagtcagac

SEQ ID NO: 436072 - DNA, 75 bp, Homo sapiens
cagcccagcactcaaggagaagcggaaggacactcgtgaagtggtagccataaagtgtgtagccaagaaaagtct

SEQ ID NO: 436073 - DNA, 50 bp, Homo sapiens
gcgggacaagaaaattcatgcggggacggcaaaacagaacagaaaggcgg

SEQ ID NO: 436074 - DNA, 88 bp, Homo sapiens
ctgagtgtccctccgggtacacgatgaattccagcaaggtccaggtgcggaagtatggagagcagaagacgttgtttatctttcccgg

SEQ ID NO: 436075 - DNA, 100 bp, Homo sapiens
ggacagttcgctacacagcaatgcatcgaggaatctgagaaaaaggggttgattgaaagaatctatatggtacaggatattgtttcaactgttcaaaacg

SEQ ID NO: 436076 - DNA, 51 bp, Homo sapiens
ctgaagatgcgcgccgtcttccccgaaggtcgcctgcgaggccgctggcca

SEQ ID NO: 436077 - DNA, 75 bp, Homo sapiens
cagaattcggccatgagccgctacatactcatcatggggctcctgtacaaggcccaggaggctgacgccatcact

SEQ ID NO: 436078 - DNA, 90 bp, Homo sapiens
gcacgcagcctggggactctgcctcgtgccgctgagcctggcgcagatcggctgatgcggatagtttttatatgacatgcaatggccgcc

SEQ ID NO: 436079 - DNA, 100 bp, Homo sapiens
gctaagggtcttcatataccacgattaacagagaataacaagcctttgtattcatttgaagataatgcagactatgtttatgatgttatgtggtcaccta

SEQ ID NO: 436080 - DNA, 98 bp, Homo sapiens
cactagtctagcttcagatgaacagactggtcaaacaaatggattttacagaggcttacgcggacacgtgctctacagttggacttgctgccagggaa

SEQ ID NO: 436081 - DNA, 100 bp, Homo sapiens
ctgcaacaatggcccagggtgtcctctggatcctactcggattgctactgtggtcagacccagggacagagagagtctacagggagattgaacaggtgat

SEQ ID NO: 436082 - DNA, 83 bp, Homo sapiens
ctgcttatggcggcgctggagagggggcgctgagctgttggggtgaggctttccccgtctcggagcaccaccagcactcagac

SEQ ID NO: 436083 - DNA, 90 bp, Homo sapiens
ggaccagccatttcggtgtagaagtggcagcacggcagatgagcgtgaagccgtgcagaagaagaccttcaccaagtgggtcaattccca

SEQ ID NO: 436084 - DNA, 98 bp, Homo sapiens
tcatggcaccatggcaagaagaagctgtatcttatctatggaagataaagcatggagttggctaatggatgctgtgagatggaagattttcgaggtat

SEQ ID NO: 436085 - DNA, 100 bp, Homo sapiens
ttcaggccagagttgtgggccgccgtcggcagcaagaacagagagagaggtggacagatctgagagatactgaggctcggacatcatcatgcagctggac

SEQ ID NO: 436086 - DNA, 80 bp, Homo sapiens
cacccagcccccaaggattctgggggaggcctcagatgagtgccaaaccaaatatggaaatgctaatgcctggagatact

SEQ ID NO: 436087 - DNA, 100 bp, Homo sapiens
cctcaatatgtgccgccagtgtttccgtcagtacgcgaaggatatcggtttcattaaggttcaggaacaagtgcatcccactctctcagctaatgaagag

SEQ ID NO: 436088 - DNA, 100 bp, Homo sapiens
cgccgcgccgggagcagcaccgcggggccagcaagtgcagccgcggagccctgtacacaggcttttccatcctggtgactctgctcctcgctggccaggc

SEQ ID NO: 436089 - DNA, 75 bp, Homo sapiens
tggccctgatggtgtggcaggctctggactcctaaagctctggagcggttttgattcccaccatggccatcaccc

SEQ ID NO: 436090 - DNA, 75 bp, Homo sapiens
tggctgctcagctgctgactgatgaggcactggtatatgccctcattttgcttaagacctctggccagagcaggg

SEQ ID NO: 436091 - DNA, 105 bp, Homo sapiens
cgagcacgcgggtctgtcatcatgtcgcgttacgggcggtacggaggaggccctactgttgagcagcagggagaaatggcgcgatctggaggaaggatgttggcc

SEQ ID NO: 436092 - DNA, 88 bp, Homo sapiens
caacactaaaccacaaatatacaacaaggccattttctcaaacgagagtcagcctttaacgttggattggatgctgctggcaagacaa

SEQ ID NO: 436093 - DNA, 100 bp, Homo sapiens
tcggagcgcggtccctgtattggtctcctgctcctagagaaaatgaaactgaagccgtggtcacgtgacaggacatgtagtatatagcaggctgccagcg

SEQ ID NO: 436094 - DNA, 50 bp, Homo sapiens
ccaaagtgcccggacccaaaacaggaaatggtcatcatgggccagtgcta

SEQ ID NO: 436095 - DNA, 80 bp, Homo sapiens
ttttcttatgctgggatgtgccttagaggattatgggacttcatagacctcacgttgtcgaagactcaacgaaagactcc

SEQ ID NO: 436096 - DNA, 100 bp, Homo sapiens
aacagctttgccactcgactttccaacatttttgttattggcaaggaaatctgaaatagagtactatgctatgttggctaaaactggtgtccatcactac

SEQ ID NO: 436097 - DNA, 100 bp, Homo sapiens
atcacagataacgtttgtgtctttcagaggtaacctgacctctccactgaagggcgtgtggctttctgatgacagtagcaagaggtggaaacatacagaa

SEQ ID NO: 436098 - DNA, 98 bp, Homo sapiens
tcaggactccagattatctacaacactgatgaggatgaatttcacccattcatcgaggcacttcttccacatgtccgtgcaattgcctatacttggtt

SEQ ID NO: 436099 - DNA, 90 bp, Homo sapiens
gagtccggggccaaccatcccgtctccagcccgggcttacgccccgccgacaggcctcattgctacgatttcagagtaccctggtaatag

SEQ ID NO: 436100 - DNA, 101 bp, Homo sapiens
ggcgctgcagctgcacttgctccgggcgctggcgcaagcaactgcttcgagaacgacagcagatggccagccgtccctttgcttctgttgatgtagctctg

SEQ ID NO: 436101 - DNA, 90 bp, Homo sapiens
atacacttgtggcctttgcatggttgggagttgttcctcttacagcatatggccatcacagcagtgacccttggagctcctccagtggga

SEQ ID NO: 436102 - DNA, 101 bp, Homo sapiens
cgtctgcctgtacaccgagtgcagccactcggccctgcgccgcgacaagtacgtggccgagttcctcgagtgggctggaccagctattccttctgttgtgg

SEQ ID NO: 436103 - DNA, 98 bp, Homo sapiens
aatattcgagtggcaactgcaagtgaagatagtccaagtcctaagagacagcgcctctctcattcagtctttgattatacatcagcatcaccagctcc

SEQ ID NO: 436104 - DNA, 83 bp, Homo sapiens
ctttaataaccatgcttaatgcaaaagaccttctacaggacctgaagttgaaggggaccagctgcctccaggacacacagtca

SEQ ID NO: 436105 - DNA, 100 bp, Homo sapiens
cgcggcggggctgctacccaccagcatcctccaaagcactgaacgcccggcccaggtgaagatggaggagatgtataagaaagctcatgctgctatacga

SEQ ID NO: 436106 - DNA, 74 bp, Homo sapiens
ccggcctctcggcctctgccggagaaacagatctcacattcttgaaggtggcattgaagagcactaagatcgga

SEQ ID NO: 436107 - DNA, 101 bp, Homo sapiens
acagaaaccaattatctttgactgccgttctcgaccacgtaatgtgccagtcatcactggtagcaaaggacagtcattttgtttactcattcagccctgtt

SEQ ID NO: 436108 - DNA, 75 bp, Homo sapiens
ggagctgctgcactacgtgggccagctgcgggctgagctggccagcgcaggtgtgtcaaggatgccacaatgcca

SEQ ID NO: 436109 - DNA, 87 bp, Homo sapiens
tatcacttacctgatgcagaatcagatgaagatgaagattttaaagagcagactagacttctcaagcttcataaacaagcagatatg

SEQ ID NO: 436110 - DNA, 98 bp, Homo sapiens
gcccacacacaggtgaatttaaaggagcagccctggtgtcacctatcagtaaaagggtatgcagaagttggctagtcaatacctgaagagagattggc

SEQ ID NO: 436111 - DNA, 90 bp, Homo sapiens
gtttggtcaatattgtcttaacatgcttcaaataaatcaggttgaaatcacaaagattagacacctttttagataggtgttcttcagcac

SEQ ID NO: 436112 - DNA, 90 bp, Homo sapiens
tagaagctgaacgaagagacagaggtcatgattctgagatgattggagaccttcaagaaatgggatcttggttcctggccagcacccggc

SEQ ID NO: 436113 - DNA, 100 bp, Homo sapiens
agagaaatatcgtatggaacgccccaaaatccaacagcagttctcagacctcaagggctgcgctggcctcggcacaccagtgccacccgctgccccggac

SEQ ID NO: 436114 - DNA, 100 bp, Homo sapiens
ctccgacgcaagactgtcccggcccggattggtttatcttggaagctaaagggcattgctcatcctgaagatcagctgaccattgacaatcagccatgtc

SEQ ID NO: 436115 - DNA, 75 bp, Homo sapiens
gatgctggaccagttgatgggcacctcccgggacggtttgaggggttgggtccaactgtaattgtctgtccaaca

SEQ ID NO: 436116 - DNA, 98 bp, Homo sapiens
ttaaaatacttgcttgtgatgacttggatgaagctgctagaatggcctatggcatgtctgcgttacctttaaatctgataaaaggcactagaagcgct

SEQ ID NO: 436117 - DNA, 51 bp, Homo sapiens
tcagctgtagaccgcggcttcttcagatatatcattgtggtggaacatgat

SEQ ID NO: 436118 - DNA, 75 bp, Homo sapiens
tgagaccgtgaagagaaagatgcagaaaaaaggagttcatcgttgcccaaaatgcagactacaatttttgaccag

SEQ ID NO: 436119 - DNA, 75 bp, Homo sapiens
ggagcctcagttggaagcagccgatccagcctgcggagcctgtggggcagctgggatagatgggcagcagaagat

SEQ ID NO: 436120 - DNA, 83 bp, Homo sapiens
atggcgtgcagcgcaaccacgagacggccttccaagagatcctgaaggagctagacgagtgctacgagcgcttcagtcgcgag

SEQ ID NO: 436121 - DNA, 87 bp, Homo sapiens
gcaggcaaacgagaattaaatgccgagaaggccagtacgatcttaatatttgccagtgatgcctgcaaaaatgtgacattacatgtt

SEQ ID NO: 436122 - DNA, 83 bp, Homo sapiens
ccctgcctcccctgcgtcccgccaccggccgcttctgtcctcggctttatcctgtggataaacgcagagtgaacgagtttggg

SEQ ID NO: 436123 - DNA, 100 bp, Homo sapiens
accccaaacccaaattcttcgttctgtgcggcgacctcatccacgccatgccagtggacaggttgctggaccccgccaacagagcccacctgggcctgga

SEQ ID NO: 436124 - DNA, 83 bp, Homo sapiens
ctgagggtctcggggcgggcgccgcgggacctctccgggccatggcgggctgacgcacgaggcacacaggaaggaggtggagc

SEQ ID NO: 436125 - DNA, 83 bp, Homo sapiens
ggacggtccacatcagccggcagcccgggcgggtcccggggtgcgagcagcgcacttccggctgaaggtgatgtggccgccct

SEQ ID NO: 436126 - DNA, 82 bp, Homo sapiens
tgcggcgtgtgcgcgcccgccagctgctccggagatacgtgcagagcagagcgggcggaggaccccgggcgcgggcgcggac

SEQ ID NO: 436127 - DNA, 100 bp, Homo sapiens
tgtccttctttgtggagagcaagattcaagtccagcatccagcggccaagtccatgatcgaaattagccggacccaggatgaagaggttggagatgggac

SEQ ID NO: 436128 - DNA, 100 bp, Homo sapiens
caacgtgagcgccctcaagtaccacgcgggcacctaacccttaggagaaatcttgagagtggacagcaattgtgaagatcgccagagagttctgtgtttc

SEQ ID NO: 436129 - DNA, 122 bp, Homo sapiens
ttgacatgcctgaaggagagaagagagcaacttcctccccaggaggattctaaggtgaggttagtacctgtctcctttgaggacccagagttcaagtcgtctttcagccagtccttttcttt

SEQ ID NO: 436130 - DNA, 100 bp, Homo sapiens
gcggacatcactttagaccctccacctaattgcagagccggggccatccagtcttggcagcatgctcatgcctgtccaggagactgcctgggaagagctc

SEQ ID NO: 436131 - DNA, 75 bp, Homo sapiens
acatctcttcatctgtatcctctgcagcatccttgatgataaaccagtaaatctccctagatctttagcttctac

SEQ ID NO: 436132 - DNA, 99 bp, Homo sapiens
cagaaaatcaccaaggataacaatgcccacacagtgaagagcaggctagaagagctcgatgagagagccccccaagatgaacccagtggtggagccact

SEQ ID NO: 436133 - DNA, 89 bp, Homo sapiens
ctggctgtgactacttctgccaacgaggtgtcccctgtgtcttccagcggcgtcacctactctagtttcgctcttgttgccccggctgg

SEQ ID NO: 436134 - DNA, 100 bp, Homo sapiens
gaagccaaatgccacgagacctgtaacgcctccaaggggttcctccggtttaggctcagctagcagcatccaggcagctgttcggcagctggaggctgag

SEQ ID NO: 436135 - DNA, 90 bp, Homo sapiens
gagatcttcagcctccaggctctccagtttttcgtcgagagattcactatggaatcggttagtaacactgaagaaatcacttttgaagca

SEQ ID NO: 436136 - DNA, 75 bp, Homo sapiens
tcttagcaccactgacatcagtcctgctcggctctgctatgttatgccatcatccagtgcaagatgtgctcagtt

SEQ ID NO: 436137 - DNA, 90 bp, Homo sapiens
tttacaaatcttcagggaatggccaagtgacaaaggtttatcgtcttgaacttggttttaaacataacgaaattcaacatatgatcacca

SEQ ID NO: 436138 - DNA, 98 bp, Homo sapiens
ttgaaggaaaaggaagatgcactgactagaactgaacttgaaacacttcaaagatatccattaccaaaacttgacatgaacttctcattggagaatag

SEQ ID NO: 436139 - DNA, 51 bp, Homo sapiens
gtggttgaagccccagcaaaggacctgttaccctccaaatcttctgtgacc

SEQ ID NO: 436140 - DNA, 75 bp, Homo sapiens
cgattacacagttctggatgatgtgggccatggtgtcaagggaaatgaggcaagttatcctttggaaatgtgctc

SEQ ID NO: 436141 - DNA, 82 bp, Homo sapiens
gctattgaaagagagtatgcacagctgtgattgggttattatacccctgcattgacagacatctaggagaaccacataaatt

SEQ ID NO: 436142 - DNA, 98 bp, Homo sapiens
ctcctcctgctgctactgtgtccagcgcaggtatcagcagatgttgcacacaaacttggtataccttgctacaatagcagattctaatcaaaatatgc

SEQ ID NO: 436143 - DNA, 50 bp, Homo sapiens
caagggtgttcccgaactagagtggattattgctatggcagctttggtcc

SEQ ID NO: 436144 - DNA, 88 bp, Homo sapiens
ccgcggaacagcggaggacgaagagcgggacccgagccctgttctagacctggaaggcctcctaagaggactcaaagtgtcacctccc

SEQ ID NO: 436145 - DNA, 83 bp, Homo sapiens
cccctgtactttgtggacttgcaggatgacttagacgactgcattgaagttgatatcgatgtggagcacggagggaaaagaag

SEQ ID NO: 436146 - DNA, 152 bp, Homo sapiens
accacctgcaagcatggcaaagactggcaaaagcacaaggattctcgctgtgacagagacaacaccgagtatgagaaggaaaaagttggattgttaaaagaagttatgaagattttcgggtacttgataaacatcttcatctgtgtatttat

SEQ ID NO: 436147 - DNA, 51 bp, Homo sapiens
tcccaaggtgctgggattacaggtgctgcgggaacccctggagccggccgc

SEQ ID NO: 436148 - DNA, 100 bp, Homo sapiens
gattaggccacaatcttcaatgagtaaacatattccttgcctacaccaactaatgttacaattgaatcctataacatgaaccctatcgtatattgggagt

SEQ ID NO: 436149 - DNA, 75 bp, Homo sapiens
gtgctctgcacagagctccccactataacagttgctgccgccggaagtacagaatcaggaaacccaggcccaacg

SEQ ID NO: 436150 - DNA, 80 bp, Homo sapiens
cgccgctgccgccgcgacccttggcgcctgcccctgcaacgggagcagcccctgtcaaagggaacaggaagcagtccacg

SEQ ID NO: 436151 - DNA, 100 bp, Homo sapiens
ataaaccttgagaaatgtcaaactagcatggatgaactcctgatttggagtctctctacctttggtcttctccatacttttgtcagtgaacatgctcggc

SEQ ID NO: 436152 - DNA, 84 bp, Homo sapiens
ttcgcctccctggaaaccgttggcatctacttcggactaggtttaagaattgtttaagctgcatcaatggagcacatacaggga

SEQ ID NO: 436153 - DNA, 75 bp, Homo sapiens
atcgcatcctatggctcaaagaaagatgattatgaagcacaagcctatgcagacgacaacagtttgctgttcatg

SEQ ID NO: 436154 - DNA, 83 bp, Homo sapiens
cccagaccctggagcctcagttggaagcagccgatccagcctgcggagcctgtggggcagagtggagagatctacagaccaag

SEQ ID NO: 436155 - DNA, 80 bp, Homo sapiens
aaagaatgacagcaagaggcaaaacttcggacatagaggccaaccaacctttggagaaaccaatagagccatggcgactc

SEQ ID NO: 436156 - DNA, 96 bp, Homo sapiens
gctgaatgtccagcagggcctcacggccataggaaaaggatacagagtagagtttcatgaacctgaaacttggtggaaatttgatcctgaagaatt

SEQ ID NO: 436157 - DNA, 50 bp, Homo sapiens
agaggatgatgtttttggtgaagggatgatgcagtgtgtgattgcagtcg

SEQ ID NO: 436158 - DNA, 90 bp, Homo sapiens
cgggaggatgaagttgattgactatggtctctccggctaccaggccaggcacctcattgagaagtcagtgcgtaagatcgtctccttgct

SEQ ID NO: 436159 - DNA, 100 bp, Homo sapiens
ctcgcctctccgccccgcgtccagctcgcccagctcgcccagcgtccgccgcgcctcggccaaggaggcaccgacatcatctcctgcttcatgggccaca

SEQ ID NO: 436160 - DNA, 75 bp, Homo sapiens
ggattcaccatctcaaaacctgtggtgaagcagtattttccaatttgaagattcatttgaaggtggctcctgcca

SEQ ID NO: 436161 - DNA, 101 bp, Homo sapiens
ctgtcatgaagccatagaaataacaagcgatgaccacgtgattcaggttgctttctgcaatggagagcactgcttctttagagaaaatgcctgctgcgttt

SEQ ID NO: 436162 - DNA, 75 bp, Homo sapiens
tacagaaacctggccttcctggactgcctgcgctgctgacttaaggccccaacaccaaacacagaagcaacagcc

SEQ ID NO: 436163 - DNA, 74 bp, Homo sapiens
gagacagatcaaagcagctcgggctcgttttgatgatggtgctggaggtgacaatgaagtgcagagaacaatgt

SEQ ID NO: 436164 - DNA, 106 bp, Homo sapiens
tccatatcagcaagaagcaccgcacgtggttcttctcggcctcctccgaggaggagcgcaaggcctccagaggaagaagtccaagttccgcttgtccaagatctgg

SEQ ID NO: 436165 - DNA, 50 bp, Homo sapiens
tggccgagcaggctgagcgatacgacgctttagccagggccctctgaagg

SEQ ID NO: 436166 - DNA, 82 bp, Homo sapiens
tgaggagatggaaaacttgtcactgtcgattgaggatgtgcagccaaggcagtcatggatcaggtaatgcagtttgttgagc

SEQ ID NO: 436167 - DNA, 82 bp, Homo sapiens
tcagacagtgttggaggattcagatacatgatatcagtatcaagataaaagtttggaatgggagaaaaattctcaaagcctg

SEQ ID NO: 436168 - DNA, 75 bp, Homo sapiens
cgcggccggggacctggacaacccccctaagaagttccgtggttcctgctccagcgtggctcctggactggcgcc

SEQ ID NO: 436169 - DNA, 111 bp, Homo sapiens
ctgactggggttctgagactccctgtcccggaccgcaggaagatgagagactgcttaggcgccaccactagtaccatgagtccctgcactggttaaagccatcgccacaac

SEQ ID NO: 436170 - DNA, 90 bp, Homo sapiens
ggccgctgggagccgttattggctgccgttaaggaccgttacgtttcccggctccaaagacaacaggccctccctctgccctcccgtctg

SEQ ID NO: 436171 - DNA, 100 bp, Homo sapiens
gtttggagccccggagtggggtgtcggcgcctcattcgggtggagctgagccggagacagcgggacgaccctgggacagtctccactggggcagatccag

SEQ ID NO: 436172 - DNA, 50 bp, Homo sapiens
tacttagctcagcaattcttaccttgtgaatctggattgggaaagtcgac

SEQ ID NO: 436173 - DNA, 108 bp, Homo sapiens
atggtggaagtggtgaaacccaaacaacatctcctgctattccttgggctgcctttcctgcaggagaatggtgttgaacgcgtgtgtcctgagagcctgctgcagtcc

SEQ ID NO: 436174 - DNA, 75 bp, Homo sapiens
tccgaggggtctggaagccagagaccaacgagatcctgcacatgtctttatggagtctggctctgtcgcccaggc

SEQ ID NO: 436175 - DNA, 50 bp, Homo sapiens
gccccgcctctgccttcggataggactttgcctcccgggccaaactggca

SEQ ID NO: 436176 - DNA, 89 bp, Homo sapiens
gtgaattggcaccaagccttcccagttatcataaccttgaatggcgactagatgtacagcagcaacaactccaggcccagcatttatca

SEQ ID NO: 436177 - DNA, 90 bp, Homo sapiens
cttagtctcacacccgccgggccgttgttcccgagacgttgttgagtcccctgtgtcctcttctggcacttttccagccattaactccag

SEQ ID NO: 436178 - DNA, 74 bp, Homo sapiens
gtcttctgtggcttccagcgtcaaaggaagacgcgacatgtcaacatcttgctgtttatgggcttcatgacccg

SEQ ID NO: 436179 - DNA, 100 bp, Homo sapiens
ccgggaggtacaactggaagagctagagggggaacgcccttttgcttgtgactggcagggctgcgacaagaagttcgcccgctccgacgagctggcccgc

SEQ ID NO: 436180 - DNA, 144 bp, Homo sapiens
cccggctgcaggaagtggctttttatcagttgcaacaggactgtgacctgagctgtcagatcaccattcccaaaggtacaggacatctgcttcagccatgactgtcgctgggttgtggtcagtactctccggggtacttcccac

SEQ ID NO: 436181 - DNA, 75 bp, Homo sapiens
gtttgacccagttcctgtcaagcaagaggccatggaccctgtctcagtgcagcgtcaccctttacaccagaaagc

SEQ ID NO: 436182 - DNA, 122 bp, Homo sapiens
tgaaaggcactttattatgcaggtggtctgtgaagccacacagtgtccagatacgaggggttccaaaaggtcccaggtgtcctctccgtgcagtcggaaaaagccccgcatgggccagcaag

SEQ ID NO: 436183 - DNA, 98 bp, Homo sapiens
tggctcttgccctcatcctggttctggaatcctcagttcaaggcagagtggcatgattccgactggatactctcagtgccagccaaattacctgaaat

SEQ ID NO: 436184 - DNA, 82 bp, Homo sapiens
caaagtcatcgacggcacctcgggggccacactgcaggcctccgcgctcagtggtcagcccaaggccaaccccactgtcact

SEQ ID NO: 436185 - DNA, 80 bp, Homo sapiens
gcttctccctcagtatttagaccagtccttgctggtgcagacgaagcggcgggctctggagaagattgaccttaagttca

SEQ ID NO: 436186 - DNA, 101 bp, Homo sapiens
acccaaccctggaaagtttgcagaagtggaaggagcagaacgtgagggtgtaacttacaaaaaggtggtatcacggcaacctcacacgccatgctgctgaa

SEQ ID NO: 436187 - DNA, 82 bp, Homo sapiens
gcttctgctggaccgaatccttggaatggacagcaattctgtggtgttcttggtcacacatttatggagtttctgaagggca

SEQ ID NO: 436188 - DNA, 75 bp, Homo sapiens
ggaggccaggtttactggagtaggtgttagtaagctccataatgggagaagtaaagaacaaagacttaaggaaca

SEQ ID NO: 436189 - DNA, 98 bp, Homo sapiens
tcgagtgaaggagtatgcacgaaacaaaaacatccattactatttcatggccctgaagaatgatgagattcgagaaatgatggagtccttcgaaggcc

SEQ ID NO: 436190 - DNA, 75 bp, Homo sapiens
ttccgttttcgcgtggttcttttgcaagttcgatcctttggtacagaagacagaccgacagatcgtccaatacca

SEQ ID NO: 436191 - DNA, 75 bp, Homo sapiens
acttttacctgtttggattaatatgtctctgttcagtgcaaggatgatgctgaaaggaataacaaggcttatctc

SEQ ID NO: 436192 - DNA, 83 bp, Homo sapiens
aacgaaagcagtgacggaggagcttgtaccaccgatgccatggacaatattaccaggcagaaccaattctacgatacccaagt

SEQ ID NO: 436193 - DNA, 115 bp, Homo sapiens
aacaacagaaattatccctttatgtttgcgaattatggaatctggaagtgaactttctaaaacagtgatctggtgccagctggtggaacagtgggtgatggcgtccctgctgcaa

SEQ ID NO: 436194 - DNA, 100 bp, Homo sapiens
gtacatctgaaagccgggaaatgagtctccacagcctattggctcacttggacatgatgctgacttgaggcggcagcagcaggatacctgtaactccggc

SEQ ID NO: 436195 - DNA, 108 bp, Homo sapiens
cgccagagagagaagatcggggggctgaaatccatcttcatcctaccgctccgcccgtgtccctggccagtgtccttccacctgtccacaagcatggggaacatcttc

SEQ ID NO: 436196 - DNA, 80 bp, Homo sapiens
gctggatttttttcgggtagtggaaaaccagctcctgcctgaagagtcactaagtgtcttttctcaagaatgtcataaac

SEQ ID NO: 436197 - DNA, 83 bp, Homo sapiens
gcgtctccgttgggtccggccgctctgcgggactctgaggaaaagctcgcaccagatgtgtatatctcatgattgatatggag

SEQ ID NO: 436198 - DNA, 100 bp, Homo sapiens
agccatccatctttgaggtggtagcacaggacagtttaatgacagcagtgagacccgctcttcagcatgtggtcaagaagacttgcactatctgccagat

SEQ ID NO: 436199 - DNA, 83 bp, Homo sapiens
cttcaatgagtaaacatattcctgatgatcggctgaatgtaacagaggaactaacgtccaacgacaagacgaggattctcaac

SEQ ID NO: 436200 - DNA, 100 bp, Homo sapiens
tgaaaatcaacgacaacttgagcacaggtcctcaagaaggctgtctcagtagtgtgacttatgcctccatgatccctctccagatgatgcagaactacct

SEQ ID NO: 436201 - DNA, 89 bp, Homo sapiens
catcaccttaaggtgttaagtgtaaggatcttcatgatgaaatttctgtaaatgccagaagatcagctgccatgttacttgactcacac

SEQ ID NO: 436202 - DNA, 74 bp, Homo sapiens
cctggcccccgggactccctgtgccttgcttggagctgacgccgacgggttcgcaattcagaccctaatgatcc

SEQ ID NO: 436203 - DNA, 100 bp, Homo sapiens
ccccggcaaccacgagcccagccaatcagcgccccggactgcaccagagccatggtcggtgtacgtggttgggaatgaacctttaacagttttgatggat

SEQ ID NO: 436204 - DNA, 100 bp, Homo sapiens
gaaggcgcgagtgaggaaaggaggtactgtagttcgttcccacatgcagggcagcacaaggagaatgggcgtcatgactgatgtccaccggcgcttcctc

SEQ ID NO: 436205 - DNA, 75 bp, Homo sapiens
agcaaaaactggagcagaaattggaggctcagcatagtggttggcacttaccatggttccccagaccagtcccat

SEQ ID NO: 436206 - DNA, 100 bp, Homo sapiens
gagaataaagaagaagcagagagaaaattcaagcaagtagcggaggcatatgaagtgctgtcggatggtagatgacattaatgctgataagaatatctct

SEQ ID NO: 436207 - DNA, 82 bp, Homo sapiens
ggatttaacttcatcttctggatgatgataattccgaagaaggcttccacactattcattcaggaaggcatgaatatgcatt

SEQ ID NO: 436208 - DNA, 51 bp, Homo sapiens
tacaggcacgcgccaccactcccagatggtcagtaggacagaaggtaacat

SEQ ID NO: 436209 - DNA, 100 bp, Homo sapiens
agccaagcggattgagccaggacacaacaccgcggagccctgcaggcgaaactatgttccaacttcctgtcaacaatcttggcagtttaagaaaagcccg

SEQ ID NO: 436210 - DNA, 90 bp, Homo sapiens
atcacccgacgctttgtgaaccaattaaataccaagtaccgggattccttgccccagttggatgcattcagtctactagcatattcagat

SEQ ID NO: 436211 - DNA, 100 bp, Homo sapiens
tgcacacagtctgttttggcaggcattatccaattggtttgctatttgatcttcttgcatcaagttcagctcttccttggaacatcacagtacattttaa

SEQ ID NO: 436212 - DNA, 100 bp, Homo sapiens
ggagggagcaggagctggatccggcttccggaagagcagccatggaggaggtggtgattgccggcatgtccgggaagctgccagagtcggagaacttgca

SEQ ID NO: 436213 - DNA, 74 bp, Homo sapiens
gcgagggctacccgctctttgccgtgacaacaccgttcccccagccgggctgaatgccagcagttactctgcag

SEQ ID NO: 436214 - DNA, 74 bp, Homo sapiens
aggttggattctttgatgtgttggggaatgacaggaggtttcctatcctgggagcaggagagtgtgcctatttg

SEQ ID NO: 436215 - DNA, 98 bp, Homo sapiens
ggacattcagtcagaagaaggctgctattgaaagagagtatgcacagatgagaagaggacagctgacatgtgctgctcggggatgtgggaagagactg

SEQ ID NO: 436216 - DNA, 83 bp, Homo sapiens
tgaaaactgaatggaaatccaatgtgtatctggcacggtctcggattcaggctttgtggtgacccagctggtgacttcctgtg

SEQ ID NO: 436217 - DNA, 101 bp, Homo sapiens
atgaagcgcaccccgactgccgaggaacgagagcgcgaagctaagcacaacattctgaaattttttggttattgtaatgatgttgatcgggagttgagaaa

SEQ ID NO: 436218 - DNA, 83 bp, Homo sapiens
tcctggttctggaatcctcagttcaagagtgttttctgcctacattaaagaagtggatgaaaagccagccagcacgccctggg

SEQ ID NO: 436219 - DNA, 101 bp, Homo sapiens
agagatgctgggcgtggcggccgggatgacccacagacttaaaaggaattgtattcgtcatccagagtcaaagtaattcttttcatgcaaagagagcagag

SEQ ID NO: 436220 - DNA, 80 bp, Homo sapiens
cgaagtggccaagaaggagaagcagctgcggaaaatgctagaagctgtcgcctggttgggcccggaaatgggacgtcgcg

SEQ ID NO: 436221 - DNA, 101 bp, Homo sapiens
gttttcaacaagtgctccatcaatggccacagctatgggattgtggtccatcaggagtctgtgtgtgccacctatggaagtggcttaagcagcacgtgtat

SEQ ID NO: 436222 - DNA, 100 bp, Homo sapiens
caggagtcgggcaccatcccaaagaagcgctctggacatcctgagcccaagtcccccacactcagtgcagtgatgagtgcggaagtgaaggtgacagggc

SEQ ID NO: 436223 - DNA, 90 bp, Homo sapiens
acgcagatcagaggtagtcggacctttcccgctggcgcgcagcctcagctaggttggtcaaagaaaaagtgatgtatgaaaaagaggcaa

SEQ ID NO: 436224 - DNA, 100 bp, Homo sapiens
gcaggcgggacatggaggtggtggacgagacggaggcgctgcagcgcttcttcgaaggagctcgaggccatgagcagatataccagcccagtgaacccag

SEQ ID NO: 436225 - DNA, 98 bp, Homo sapiens
tgtctttgtgtcctgagatcaaatggcacttcattggccacctacagaaacaaaatgtcaacaaattgatgggtgactattatatggttaaaaagatt

SEQ ID NO: 436226 - DNA, 50 bp, Homo sapiens
caacgtctattgaaagcccattcaagatgtggagagcatcttgtgcgcac

SEQ ID NO: 436227 - DNA, 100 bp, Homo sapiens
agccactggttgccttggtaggcaataaaagtcctcatgctgataccgccagtggatgccagaatttgcagtgtggttttcgagcctgctgccgctctgg

SEQ ID NO: 436228 - DNA, 83 bp, Homo sapiens
ccaagatcttggcaaagcttctccctcagtatttagaccaggtgggcaccatgtccttgaagcttcaggcaagcaatgtaacc

SEQ ID NO: 436229 - DNA, 74 bp, Homo sapiens
gcatctaaaaagactgcaatggctgctgctaaggaaggaaaatcacctcggcagtgtttgaaggaaggatactg

SEQ ID NO: 436230 - DNA, 128 bp, Homo sapiens
ctgaaccagctcgtcctggagcacctgcagctggcgcctctgcagtggggtgtcatggagaaactccagctgggcccagagattctgcagcgggaaaatccaaggcttatttatgccaggctgagtgg

SEQ ID NO: 436231 - DNA, 101 bp, Homo sapiens
ctctacttgtgatttaaggaaaccagctcgatccaagcactgcactttcaccaacaatcaccagtggtttacacaacattgcaaggagcattgaaactcga

SEQ ID NO: 436232 - DNA, 82 bp, Homo sapiens
tgttgggccaactacacagaccttactccccttagaacagattagtgatgatgaaccaggttatgaccttgatttattttgc

SEQ ID NO: 436233 - DNA, 100 bp, Homo sapiens
agcatggcctctctgggcccagaatggagatgtatgcatttcgattcttcatccgcctgtagatgacccacagagtggagaactgccttctgaaaggtgg

SEQ ID NO: 436234 - DNA, 87 bp, Homo sapiens
aatatccgaatgtgttcagtctgacactcatacagctctctgatgtaaaggatggagtaaatcaagcagcacctgcatttggatttg

SEQ ID NO: 436235 - DNA, 75 bp, Homo sapiens
gtggagccaccagcctctccctgaaatcgagctatagcagattatcttcgttcaaatggctatgaagaggcatat

SEQ ID NO: 436236 - DNA, 90 bp, Homo sapiens
ttcttggcttggaaagaagatataacccaagagtttccgggaaaaggcaaggctttgttccaggtgcctcgagtctttattggtaaagat

SEQ ID NO: 436237 - DNA, 100 bp, Homo sapiens
caggagaggccctcagcttgtctgcactggcagtgacgatggcacagttaagacacctagctcccctgtttgacaaccctaagttggataaggagctgcg

SEQ ID NO: 436238 - DNA, 98 bp, Homo sapiens
tctcttaattcaacagaaccatattgggagtgtgattaagattgaggaacagttgactttggaaaagttgcatgagtggactaaacctgagaatctcg

SEQ ID NO: 436239 - DNA, 98 bp, Homo sapiens
atctcagttcttcatcacctatggcaaacagccacatttggacatgaaatacaccgtatttggaaactcaacagaggcagaaggatccaaggaaagag

SEQ ID NO: 436240 - DNA, 98 bp, Homo sapiens
gttttacattggctgttttcctcacattcctcaagcaggctaccaagcagtttctcgaagagattaacaagtggacagttcagtacaatgtttccccg

SEQ ID NO: 436241 - DNA, 80 bp, Homo sapiens
gcctgcttcagagtggggccaagaagaaagcacagccaaaactggacaagccaaggcatctgtagccaaagtaaacaaat

SEQ ID NO: 436242 - DNA, 99 bp, Homo sapiens
agcgagaagtgctttgcggcctgccgacgagcctacttcaagagaaataagattcttcaaacacctaaatgaaagtgataaattcaaaactgatccttt

SEQ ID NO: 436243 - DNA, 124 bp, Homo sapiens
ttctctgctgaccctctctcgtcgccgctgccgccgccgcagctgccaaaatcattagtgaccagaaggatcccaaggatcgaatggttcaggttgtgaaatggtacctctcagcctttcatgc

SEQ ID NO: 436244 - DNA, 96 bp, Homo sapiens
caagttggttttgcaggaggctatacttcaaatcctacttataaagaagtctgctcaggtccctcgtctgagctggctcactcgcccaccaacagc

SEQ ID NO: 436245 - DNA, 75 bp, Homo sapiens
tgcgaggaaagggaaggagcaagccgtggtgctggagaatctggtaaaagcaccattgtgaagcagatgaggatc

SEQ ID NO: 436246 - DNA, 90 bp, Homo sapiens
ggtgatagctccagagctcagagaaaggaggtctctttacaagaagtctggctctcaaaggctggctacagcaaacatcattcaagatgt

SEQ ID NO: 436247 - DNA, 83 bp, Homo sapiens
gtgagcctcatcacacaggatccgcccctggacatggaggagaaggtccgcttcaagtgtctgcctgtatcccagtgttcagg

SEQ ID NO: 436248 - DNA, 98 bp, Homo sapiens
tttgtctttctatgtttatgataagaatgttttacaaagagatctccgtatagtggccataaaatgcagtaaaaacaaatccagttcccaagaagctg

SEQ ID NO: 436249 - DNA, 88 bp, Homo sapiens
acggccagttttgaaatcgacacacaaagaatagagttgagcctgtgggacacttcggatgaggacggggacttggttgccttttcca

SEQ ID NO: 436250 - DNA, 98 bp, Homo sapiens
aagccttggaaatggaggaaaaagaagaccagcgacaaatttagagaaacctcggcagcagtgtggggatgtgccaactgccgagtggttttgtccaa

SEQ ID NO: 436251 - DNA, 75 bp, Homo sapiens
gtgggatggagaaacagctgtgtgtgataatggggatgatgaggagtctgatgaggaagctgtgaagaaaaccaa

SEQ ID NO: 436252 - DNA, 50 bp, Homo sapiens
catatttggcttcaatgtcatattttggtgaattttgtggcgaaaatcta

SEQ ID NO: 436253 - DNA, 100 bp, Homo sapiens
tctagtcaccctcttcaagcttttgggctatgacgtccatgttctatgtgaccagactgcacagattgcccccgaggaattagcacttgttcacaacttg

SEQ ID NO: 436254 - DNA, 98 bp, Homo sapiens
acagcttgggagcgtgcttcaaggatgcagagtatagaatcccgttctgcttccagaagtggaagtgctcacggatcggggaaatctgcaaggcatac

SEQ ID NO: 436255 - DNA, 50 bp, Homo sapiens
tctgtcttagcaaggctgtcatcacatgacgagtagcacagcccctctat

SEQ ID NO: 436256 - DNA, 76 bp, Homo sapiens
gtgctgctcagtgtggtggatcatttcaaccgggatttccacaagatcaaattcgattgtggcccatgcaagcaag

SEQ ID NO: 436257 - DNA, 90 bp, Homo sapiens
tatgcaccagaaggagatgaagaaaaatccagttacactcttaaaggaattgtcagtgataaagtctcgatatcaaactttgtatgcccg

SEQ ID NO: 436258 - DNA, 123 bp, Homo sapiens
cttcaggatgacaaaaaccaaagtctcttctgctgggaaatcccagtacagatcagcgatgccacttcaacggagagtgaaagtgaagacaacttcctcacgctgcctcccagggaccacctg

SEQ ID NO: 436259 - DNA, 97 bp, Homo sapiens
ccggccccgcgcctggacgccgctgacggccccgagcacggccgcccggccacgagctaatttacaaagaagtcatggattgggaagaaagaagcaa

SEQ ID NO: 436260 - DNA, 88 bp, Homo sapiens
gaaacatggagtcctgtaggcaaggtcttacctgaatcagcgcccgggggctggagaaggccaggcagcagctgcaggaggagctccg

SEQ ID NO: 436261 - DNA, 100 bp, Homo sapiens
gcatcgaggtctttcccgaagttatgcagctcccagagatcaaggaagaagaccgaaaactgttagttggattcttagaagatgtaatgacgctgctttc

SEQ ID NO: 436262 - DNA, 75 bp, Homo sapiens
atccaggggacaaaagaggggaaactgagagttcccaattaataatgaagcagctatctctgaccgccggaggct

SEQ ID NO: 436263 - DNA, 90 bp, Homo sapiens
gaggaagggaaccaacccactttctcggcgccgcggctcttttctaaaagtgtaagaatgattgatgttggctgatattggagtgctcat

SEQ ID NO: 436264 - DNA, 74 bp, Homo sapiens
ctgtccagcccaagcctgactatgcccgaaaatggcacagaaatggtatcaagaaaccccgatcacaaagatac

SEQ ID NO: 436265 - DNA, 75 bp, Homo sapiens
ctgagacggcggcagcagcggcattcagaagtttccaagggtcacttgtgtctcgtccgtgggaagaccggggga

SEQ ID NO: 436266 - DNA, 90 bp, Homo sapiens
ccctgtgtgacaccaagataagtaacgctgctctttggcgtaaattgcaatcgattagggatcgtttctcagaatcaagttagaagtgag

SEQ ID NO: 436267 - DNA, 100 bp, Homo sapiens
caggctgccctcaaactcctggactgaaacgatcctctcatctcagcctccaaaagtgctggcattacagggccatgaagcccccaggaggagaatcgag

SEQ ID NO: 436268 - DNA, 100 bp, Homo sapiens
agcagtgtcacgcattttagaagaatggtgcagctccttcaacctcgccatggcctctgccggaatgcagatcctgggagtcgtcctgacactgctgggc

SEQ ID NO: 436269 - DNA, 74 bp, Homo sapiens
gggacgatgtccgcatgacaaccgacgttggagtttggagacctgcctagagctggaacgttacctccagagcg

SEQ ID NO: 436270 - DNA, 75 bp, Homo sapiens
ctggtgtaccaggcgaagctggccgagcaggctgagcgatacgacgccatatacaacttccaaggcagcggagcc

SEQ ID NO: 436271 - DNA, 75 bp, Homo sapiens
tgacaattctgtcgtgtcccggccagagtggactgggcaaatcaacgctggtcaacacgctcttcaaatcccaag

SEQ ID NO: 436272 - DNA, 76 bp, Homo sapiens
tgaacttatatatgagaattgctccagaactctatcataaggtgtccatctcttcacagtcatggctgatcttgtc

SEQ ID NO: 436273 - DNA, 82 bp, Homo sapiens
ccagcctgcggagcctgtggggcagttacacaacagccaatgcggagtctgacaatgagcgggactctgacaaagaaagtga

SEQ ID NO: 436274 - DNA, 83 bp, Homo sapiens
gttcgttcgtttccagcctcaggaatttatggtcgcctttttgaatgagtgtaaacaggaacatcgataagtagtgtaaaaac

SEQ ID NO: 436275 - DNA, 140 bp, Homo sapiens
cgagtcagtggacactccaggaagagcggccccgcggggggcgatgaccgtgcgctgaccctgactcactccagatgccgacaaaaggatcaaggtggcgaagcccgtggtggagatggatggtgatgagatgacccgta

SEQ ID NO: 436276 - DNA, 101 bp, Homo sapiens
cacgaaccccctcaaccggcagaaactggacagtaagaaacttctaggcaggaaaagacactcgtgatgaacaagcacgtggggcatctacttcgaaccaa

SEQ ID NO: 436277 - DNA, 98 bp, Homo sapiens
gttggtggtaccctaaaattagggcatgattaagggaaggttgggtgtggctctccaagaatacattttggtggactcattgaggaagatgatgtgat

SEQ ID NO: 436278 - DNA, 75 bp, Homo sapiens
tagaagtttctcccttcttcaagtgccacgaggtaaaaaagagtgtcaagtggacatgcaaagcttgtggagaga

SEQ ID NO: 436279 - DNA, 74 bp, Homo sapiens
aagagccaattattttaaagaattatttgaaacaattgcaagagacagtcattttgtttactcattcagccctg

SEQ ID NO: 436280 - DNA, 100 bp, Homo sapiens
ggaagcacaccctgtcctatgtggacgttggcactgggaaggtattgttgcagcatctggcagtgagactgaggatgaggacagcatggacattcccttg

SEQ ID NO: 436281 - DNA, 100 bp, Homo sapiens
cctggagctgggccaggccgtggagagagaagaagaaggaggttcctgctgtgccagaaacccttaagaaaaagcgaaggaatttcgcagagctgaagat

SEQ ID NO: 436282 - DNA, 100 bp, Homo sapiens
cttgtgaacattcaagtgaagcaaaagcctttcatgattattgcatactccttccacgttactgcagacggtcagatgcagcctgtcccttttccccccg

SEQ ID NO: 436283 - DNA, 75 bp, Homo sapiens
cttcatattttctcacatatacaacacgattcttctaatggatgggaacatgggttggctggggaacagaccagg

SEQ ID NO: 436284 - DNA, 83 bp, Homo sapiens
cttggtttcgggatctcggtgctgcagacggcgagacctcctgcacagtaaaatgtttattggaggcttgagctgggatacaa

SEQ ID NO: 436285 - DNA, 98 bp, Homo sapiens
agtgaaagtcctctttttctttgtaccacttactgagactgatgaagtatttctggaagcccagattcagaatatgacaacctcacctatgtttatgg

SEQ ID NO: 436286 - DNA, 90 bp, Homo sapiens
agggaggaccccagacaccggagactgggaaatgtggtcgtttttcaatgagctagagaagttaccaagtctacgggctttgtcctgcct

SEQ ID NO: 436287 - DNA, 97 bp, Homo sapiens
aggacaacggcaggacgtgtaaggcaggcgtctacggtgacgtgcagcgcgtgaagatcctgttcaataagaaggagaacgccctagtgcagatggc

SEQ ID NO: 436288 - DNA, 82 bp, Homo sapiens
cgaggaggcgcgggaggtgttcgagaacgaccccgagacgaatgacgtgggcggcgaaaagctgctgcagaagaagtggacc

SEQ ID NO: 436289 - DNA, 99 bp, Homo sapiens
ccgccgcctcgcacccgcagcctcgcgcccgccgccgcccgtccccagaatcatggtgtcatggaaagggatttactttatactgactctgttttgggg

SEQ ID NO: 436290 - DNA, 98 bp, Homo sapiens
ccccgcccgccatggcccgggactacgaccacctcttcaagctgctcatcatcggcgacagcggaagctcttcgtgggcggtcttgactggagcacga

SEQ ID NO: 436291 - DNA, 83 bp, Homo sapiens
tgcctaggcattttgctgtctcctcctaatacgacaagttggatggcttgaggactggtactaaaaggaaacgtgactgggag

SEQ ID NO: 436292 - DNA, 98 bp, Homo sapiens
aaagaatctgcctatgcaaagtcagaagaatttgctgtatgccgagatgattcctttaagcctccccagcgatctattgacaaaccttttagattatg

SEQ ID NO: 436293 - DNA, 90 bp, Homo sapiens
aggtaatgtgtagttctcaatgcatcatgtcaggcagcttatgatgccaatttgtcccatgccagagactgctgctactttgaaacgtac

SEQ ID NO: 436294 - DNA, 99 bp, Homo sapiens
ttaccatatggcccatggaaaagattttgcatctagaggaattgaaagctatgtatgtcaaaaaggatgttcctttgtggcaaaaacatggacggaact

SEQ ID NO: 436295 - DNA, 88 bp, Homo sapiens
aacccggggcaggcgggcagctgtgcccgggcggcacggccagcttcctgcctgacacagctcacttcaagaagtgcacaatgtcaga

SEQ ID NO: 436296 - DNA, 83 bp, Homo sapiens
ggtgtaccaggcgaagctggccgagcaggctgagcgatacgacgaggccacaagaggaagctgaatgaagaggacgccgccag

SEQ ID NO: 436297 - DNA, 83 bp, Homo sapiens
ccatgattgtgaggcctccccagccatgtggaactgtatttgaaatggacatcgctaaacagttacaagcttatgaagttgag

SEQ ID NO: 436298 - DNA, 100 bp, Homo sapiens
gcctgcgtgcccatccagcaatgtggctgctaccacaatggtgcctactatgagctgctggagccagttctgcttctcggcaaggagcgatttgctggtg

SEQ ID NO: 436299 - DNA, 83 bp, Homo sapiens
cctggattaaacagtttgatacttccagatttcatcctcagcaattctgtggtgttcttggtcacacatttatggagtttctg

SEQ ID NO: 436300 - DNA, 51 bp, Homo sapiens
ctttacgcttgtgtgataaaactgggttatcaggaactgttgccgttatta

SEQ ID NO: 436301 - DNA, 90 bp, Homo sapiens
aaaacccacaagtatgtatatgaatgatggctatgcaccacctgatatcaccaacttttctagacccaaaccattatcagcagttccaaa

SEQ ID NO: 436302 - DNA, 100 bp, Homo sapiens
ctggctggtgccgcgttcctgctgctctgcctgctccacaagcggcgccgcgccctcggcctgcacggagcagcccgacggccatggaggctgaagagac

SEQ ID NO: 436303 - DNA, 76 bp, Homo sapiens
ccagcctgcggagcctgtggggcaggtcagaaacccttcccttgtcaaaaatgcgatgccttcttttctaccaaat

SEQ ID NO: 436304 - DNA, 82 bp, Homo sapiens
gtggaaaatgcgctcgggctggaccagcagaataccctctaccatctgctttggtcagggtgccgctcgaggatttaaaagc

SEQ ID NO: 436305 - DNA, 101 bp, Homo sapiens
aagccatgggattcacgggacctttgaaatacagtaaatggttccagaaagctgagtctgatctggattacattcaatacaggctggaatatgaaatcaag

SEQ ID NO: 436306 - DNA, 75 bp, Homo sapiens
atgaagatggacgaggtcctgtacagcatcgccgagaagtggatcaatcttcctgtcctacaactgacaaaggat

SEQ ID NO: 436307 - DNA, 100 bp, Homo sapiens
gcagtcaactcaaatgcaagtccaagaggaggaggaggcggaggtccaagcggaaagagatgtgaactttgtccccataaggatggagctttaaaaagaa

SEQ ID NO: 436308 - DNA, 98 bp, Homo sapiens
tttcgttggtggtgttcagttgtggcggttgctggtcagtaacagccaagatgctgcggaatctgctgtgctgaagctgctgaaagatggcagaagaa

SEQ ID NO: 436309 - DNA, 100 bp, Homo sapiens
aaacatctcaccaatttcaaatccgttggttgaatctggcgatgtggaacccatggatatggagggctgactatatacaccatgttttttcctggcacat

SEQ ID NO: 436310 - DNA, 114 bp, Homo sapiens
atcaaagtgccagcagattcagtgtcatgtgaggacgtgcttcctgcttcatagataagaggtacaggtttgcagattccgccagcagcacagcaagctctacagatgagtggc

SEQ ID NO: 436311 - DNA, 74 bp, Homo sapiens
tttcagagcgtttgggtcctctgaggccccttgaccaggccaaccccttcaaggagcgaatctgcagggtcttc

SEQ ID NO: 436312 - DNA, 98 bp, Homo sapiens
atcatgctcaagtcagagggcttttactcctacctgtgtaccgagccaggggaacgcccttttgcttgtgactggcagggctgcgacaagaagttcgc

SEQ ID NO: 436313 - DNA, 98 bp, Homo sapiens
gatagccagcctgacctcctgcaccaacttgtcaccctcatgaatcccaacaccctcatgtcccatggtgtgccagatgcccaggctgaggaagagat

SEQ ID NO: 436314 - DNA, 82 bp, Homo sapiens
aactccgcaccgcagagccggcgcctcctcggcagcgtctgttcctcacacaccccgcccaaggacgtgcctggcagcggcc

SEQ ID NO: 436315 - DNA, 100 bp, Homo sapiens
gagagatggtcaggtctggagctcgaccgggccagcatcctttcctgaaactggccaaaccgttatctagcttgacaccactgatcatggcagctaaaga

SEQ ID NO: 436316 - DNA, 100 bp, Homo sapiens
aagatggctaccagagcacttgggacaaagctcagaagagaggcgtaaagctcgtttcggtgctctgggtggaaaagtggtgaaatgacagaactcattc

SEQ ID NO: 436317 - DNA, 112 bp, Homo sapiens
cttgtataaaataggctgagatatagtgactgtaagctgtgatctcagtatacaaaggatggagagcaatacatcatcatctttggagaatttagcgacggcgcctgtgaac

SEQ ID NO: 436318 - DNA, 74 bp, Homo sapiens
acaggtattaagcagaaaaaaccatggccacgtgtctcctggttgggaaaggttgcttctccatttctggagcc

SEQ ID NO: 436319 - DNA, 90 bp, Homo sapiens
ggctgacaccgtagtgttttcaaaactggatatggccaggatgctatagcattgtcagtttttctgagtttaaccagtaatgccattcag

SEQ ID NO: 436320 - DNA, 74 bp, Homo sapiens
caagtcccatcggaggacctccctgccctgtataccgagggaacagagactctccaacatgtgccttctgacca

SEQ ID NO: 436321 - DNA, 74 bp, Homo sapiens
agagctatggtgaaacaccactgaagcattgccaagaaaccatttctccaccgaaggaggagagtccgaaagcg

SEQ ID NO: 436322 - DNA, 107 bp, Homo sapiens
ggaacatggcggatcggctcacgcagcttcaggacgctgtgaattcgatttttgcactgagtggccagccgcactggacagtgacgagaaatgtgagaagcattttc

SEQ ID NO: 436323 - DNA, 111 bp, Homo sapiens
taactgcaacacaaaacactaaaaatggagttgatgtattgcctaaaatcatccaggcttgagtttgaagaaacagaagaacctgattttactgcattatgtcagaaatta

SEQ ID NO: 436324 - DNA, 98 bp, Homo sapiens
gggctgtgaggagccgggaggagcggggtgcgctgccgggcgctgaccgccctcccgcccgccgtcagaggtcctgcaaccctggttccagtctggca

SEQ ID NO: 436325 - DNA, 100 bp, Homo sapiens
tcaaatgtatccagataacaaaagcaggaggattaacagatgaatggacaatcaatattcttcaatccttccacaatgcaacaaggagacgcgcctttgc

SEQ ID NO: 436326 - DNA, 74 bp, Homo sapiens
tcatggatatcctccataatgttggctgtcatgtatggtggagcccccaaatacatcaagatgtttgtactgga

SEQ ID NO: 436327 - DNA, 75 bp, Homo sapiens
gatggctcctcccgctgccgctgccgctccaggagacaggtaagaagtttgatagctgtaggactgggtgttgca

SEQ ID NO: 436328 - DNA, 75 bp, Homo sapiens
gtcccaaaagaccatcctgctctcaactacaacatcgtttcaggtactatactggcaattgctggagaagatttt

SEQ ID NO: 436329 - DNA, 100 bp, Homo sapiens
tccggaccatggccgacgacgacgtgctgttcgaggatgtgtacgagctgtgcgaggtgatcggaaagtaagaatgattgatgttggctgatattggagt

SEQ ID NO: 436330 - DNA, 98 bp, Homo sapiens
cggagttccaaacaacatggcgtcctgctcacccactttgcaccctggactcagcacatcctcctcaggaatgtctgatcacagatacggggatggtg

SEQ ID NO: 436331 - DNA, 96 bp, Homo sapiens
tgctgaaatagctttaagaacccagaagacaccacctggacttcaacatgaatatgcagctcctgctgatcactgatcccaagaaccataccgtaa

SEQ ID NO: 436332 - DNA, 51 bp, Homo sapiens
aggatgtaccacctttctggcaatgaggcgtgccgccgccagacggattac

SEQ ID NO: 436333 - DNA, 98 bp, Homo sapiens
cggaaacacccagaccagtggacattggttctggaggatttggtgatgtcgagcaccccaagatctggctacctcgggccctgaggcagacctacatc

SEQ ID NO: 436334 - DNA, 90 bp, Homo sapiens
cccctatccccagtggagccggagtgcgggcgcgccccaccaccgccctcaccatgacacacccatgacctccggattcatcaactgcaa

SEQ ID NO: 436335 - DNA, 87 bp, Homo sapiens
gtcctgggcctggatcctaagtcctgacctttcatgagttcccatggagaatgttgcaacaattgctgattgtgccagtgtgattga

SEQ ID NO: 436336 - DNA, 82 bp, Homo sapiens
tttactgccttgtgacgttggtcttcttttactcatctgcctcattttgggcctgggtgcaggccaatgtggagaagtcgct

SEQ ID NO: 436337 - DNA, 50 bp, Homo sapiens
ttgctgagcaactattcaaaaatgaaatgggtcctgatgaatatgaagag

SEQ ID NO: 436338 - DNA, 75 bp, Homo sapiens
tgcaagccgaatctggactgtggatgattatcgattacggtatgttcatgcggatgctcctaccaataaaacact

SEQ ID NO: 436339 - DNA, 51 bp, Homo sapiens
tccggaggcaggaccagctgcagctgctgtactacgacgtccccatcgcca

SEQ ID NO: 436340 - DNA, 101 bp, Homo sapiens
tggcgacgcggggccatgtgcaggaccctaacgacaggcgcctccggcccatttacgggcaagaagactatgaccggctgcggcccctgtcctaccagaac

SEQ ID NO: 436341 - DNA, 71 bp, Homo sapiens
cgggggacgagctcggagcagcagccaggttagagcagccagcgggtacagaatggattttggaagaggga

SEQ ID NO: 436342 - DNA, 88 bp, Homo sapiens
caggattacaaggaaaagcaccaggcaaaccaccatcacatctcattttgcaaaggggatgagctcaggtttctacaaaaatgtggtg

SEQ ID NO: 436343 - DNA, 102 bp, Homo sapiens
ccaaacgtcagcaagaagaagaagcagctgctcagatgaactctggtagctgaagaacatctcacagtggacgccagggtctattcctacgctctagcactg

SEQ ID NO: 436344 - DNA, 75 bp, Homo sapiens
acaatggttagagaagaattttccaaatgaatttgcaaaacttactgtagggccgggaagaagatccacatgaag

SEQ ID NO: 436345 - DNA, 50 bp, Homo sapiens
cttcaagaagaaaaccgtggatggaaggaccagtacctcctctcgcctgt

SEQ ID NO: 436346 - DNA, 74 bp, Homo sapiens
ttagcgaaagaaaccctctctgagttcttgggcacgttcatcttgattcttttggaaagaacaaacagtggatt

SEQ ID NO: 436347 - DNA, 100 bp, Homo sapiens
cagaattcatgattgaagaaatgcagggccatgaagcccccaggaggagaatcgagcaatctttttggaagtccagaagaagctactccttccagcaggc

SEQ ID NO: 436348 - DNA, 74 bp, Homo sapiens
cagcagctggcgccgctctcgcagtccctacagccctgtgctcagcggacaaggcaaaatctcagcaagttcgg

SEQ ID NO: 436349 - DNA, 75 bp, Homo sapiens
gccggaaggacaccaagatgcggatccgggcctttccgatgatggtggtgctaccccagtacaggatgaacggga

SEQ ID NO: 436350 - DNA, 75 bp, Homo sapiens
tggggggattctcgacctgctaacagaactggaccttttcggaaaagaagatttttcagatcccctggatgcatg

SEQ ID NO: 436351 - DNA, 100 bp, Homo sapiens
aatgactgtccgaaacatcgcctccatctgtaatatgagttattaagcctacgctcagatcaaggtagcagctagactggtgtgacaacctgtttttaat

SEQ ID NO: 436352 - DNA, 75 bp, Homo sapiens
cgacgaagaaaaaaagagcgacgagtgcaagtaattcgccaaaatgacgaacacaaagggaaagaggagaggcac

SEQ ID NO: 436353 - DNA, 75 bp, Homo sapiens
ttggcacaaactgggctgctgtgtggtagagaaaccccagccgactataggcaataatggagaccagtcccacaa

SEQ ID NO: 436354 - DNA, 97 bp, Homo sapiens
gcgtccgccgattcctcctccttggtcgccgcgtccttggctggcgtccatcccaggcctcaggacctgagttctccgacgcccacatgacatggct

SEQ ID NO: 436355 - DNA, 101 bp, Homo sapiens
ataaagcctaaatgtagcatatatcctaaaggagatggaagtgatgtaccatcatgggtagcctttgataaacagcgggctacattgagagacctcagctg

SEQ ID NO: 436356 - DNA, 75 bp, Homo sapiens
aatagcccttcagtactgttgtacggatacagattataaaccagtgccactgaaaacaggagaaggtgaagaata

SEQ ID NO: 436357 - DNA, 74 bp, Homo sapiens
gaccagttattaatgtgtgccatttatgtgatggcaaagtcttagagtttgaaagagtctatcttgataatctc

SEQ ID NO: 436358 - DNA, 75 bp, Homo sapiens
gagaagctccagatggcgtcttccgtgggcaacgtggccgacagcacagccgttggacataccagatggtcgaag

SEQ ID NO: 436359 - DNA, 100 bp, Homo sapiens
gtggctgcaaagtgaaaagcttgaacgaaggaaaatcacctcggcagtgtttgaaggaaggatactgcaactctttgaagtacgcattttttgagtgtaa

SEQ ID NO: 436360 - DNA, 100 bp, Homo sapiens
agacggggcagcaaccaggagattccctgggcctgcaggaagcccttccgcggaccgaaaggtgtatcagttcctatccctgtgattggactgagggacg

SEQ ID NO: 436361 - DNA, 48 bp, Homo sapiens
gcgctcgatggaacctcatcccaggtcatctgtgggaagtgctccgag

SEQ ID NO: 436362 - DNA, 80 bp, Homo sapiens
cctcaatccaacagcccagtgcttctgtctcgactgcactttgagaaggatatggctttagttgcccctgaagctccttc

SEQ ID NO: 436363 - DNA, 75 bp, Homo sapiens
actgaccccagagtggcagaaaggctgatgcagcaggtgatagaagtattcattagagcagaagatggcctttgt

SEQ ID NO: 436364 - DNA, 101 bp, Homo sapiens
cccgctcgctctgtgtcagcgcccgaacccaaaggggtggacgcggcctccaggccatcgaagacggcaatttggaggaaatggaagaggaagtacggctt

SEQ ID NO: 436365 - DNA, 75 bp, Homo sapiens
cgtggacgtcactggccctggtggggattgacagccacgggaagagagtcacaccccaaagcctctttattcttt

SEQ ID NO: 436366 - DNA, 100 bp, Homo sapiens
ccactctttccgccctaatggaggtctccagtttcggcatccagtaccctgctgactctgacatgcccccagcctcccccagctctgcagggagccctgg

SEQ ID NO: 436367 - DNA, 90 bp, Homo sapiens
gtttatctctgatttctggagttcagcactagagctacttcctcagccgagcccagagcctgtgtggccccgagcacagtgctgttcctg

SEQ ID NO: 436368 - DNA, 82 bp, Homo sapiens
ccagaccctggagcctcagttggaagcagccgatccagcctgcggagcctgtggggcaggcccagaccgagccataattcca

SEQ ID NO: 436369 - DNA, 82 bp, Homo sapiens
cggcgtcccccagggcctcggcggccgctctgcctgcgcgctgctcctgctctgctacctgagccccccaagatgaacccag

SEQ ID NO: 436370 - DNA, 100 bp, Homo sapiens
ggaggcggtgcctctgcagcaagcgtggggcgcgggaacccgagcagcagtaccatcccactgatatcacgggcccgctcaacctctcagatccctcggt

SEQ ID NO: 436371 - DNA, 100 bp, Homo sapiens
agccattgagattatacggaaccagaagcagattgccaacattgaccgtattacaaaatgtgtcttgctgaatcagggctctcttatccctgccatcgac

SEQ ID NO: 436372 - DNA, 50 bp, Homo sapiens
ggtgtttttccgtaagcatactcaggggagcctgtcacagtgtatcgttt

SEQ ID NO: 436373 - DNA, 80 bp, Homo sapiens
gaactgggcaacatctacacgcacgatgtgaagttcatttccaatccgccctccatggtggcagcggggagcgtggtggc

SEQ ID NO: 436374 - DNA, 80 bp, Homo sapiens
ccgccgccccgaaactttcaccgcgagcgggtctgctgagaacagacccagtccctgaggaaggagaagatgttgctgcc

SEQ ID NO: 436375 - DNA, 90 bp, Homo sapiens
agaagggtcatatcatccacatcgtctcgcccaagaacttcaaggtgaaaatgatcatgaagacatcagttctgctcagctgggagttcc

SEQ ID NO: 436376 - DNA, 97 bp, Homo sapiens
tttgagtcatttccttcgtacccacagtgcttcatgagaggttaaaaggactactgactcaaactctgcctcttgagttcatggttcaccacttcca

SEQ ID NO: 436377 - DNA, 100 bp, Homo sapiens
ggaaaagggcactcgtctccgtgggtgtggcggagcgcgcggtgcatggaatgtgttccagaagatctagaactgaagaagaagatttttgctcagttag

SEQ ID NO: 436378 - DNA, 75 bp, Homo sapiens
tctgtcgctcttgtgccctagcaccccgagaaccgtcagtttgagccagatggcaccaccaggaccagctgatca

SEQ ID NO: 436379 - DNA, 95 bp, Homo sapiens
gaaggaacgaggcaaggagctaaagcagcgtgcgttcagccctgggcattttgaaagcgaagcagaagccgtagaatcagcggcgagcctgttga

SEQ ID NO: 436380 - DNA, 88 bp, Homo sapiens
gcgcagatagcagagccatccttgggacaaggacgagggtgaccaccccaacaacagcttcagcccctgtagcgcccatgaccgcagg

SEQ ID NO: 436381 - DNA, 101 bp, Homo sapiens
caggattccatggtagctgggatgttagggctcagacttgtgtatgcggatacctgcttcagtaccatcaagttaaaagcagaagatgcttctggtagaga

SEQ ID NO: 436382 - DNA, 135 bp, Homo sapiens
gggctccctgtatgcatggtgtggggttggtgtgattagcttcgcagtctggaaagctttaggagttcacagttctctggaatctgttctgcgccacccggcagataatcgcacccagattcgagagcttggcca

SEQ ID NO: 436383 - DNA, 71 bp, Homo sapiens
ctgcctcaggctcccgtgtagctgggattacaggacccccaggaccttcaaaacactgaagtgccaattgc

SEQ ID NO: 436384 - DNA, 123 bp, Homo sapiens
cccagtgcactagccattgaagtatttgaagcacatttgggaagccacattttgcaggcaatggtggcttgctatccgggaaatggaacaggttatgttcgccacgtggacaaccccaacggt

SEQ ID NO: 436385 - DNA, 75 bp, Homo sapiens
cccaggctcaagcaatcctaccatgtcagccttcccagtagctggaactacagggcaaaggtgcatgggagaaga

SEQ ID NO: 436386 - DNA, 75 bp, Homo sapiens
caccgtcttcggtctcctggggtcggcgccgagtgggaggatggcggaatcccttttctagctcctccggtcatg

SEQ ID NO: 436387 - DNA, 83 bp, Homo sapiens
gaaagcattaccgggttcgctaggctcacagactgaaatcgccaagagattgaatacgatttgtgcacaagtcatcccatttc

SEQ ID NO: 436388 - DNA, 101 bp, Homo sapiens
ggaagccggttggggtgtgagaggttttctcgctctagggacaatgactcattcttcccaggacactggttcttgtggcattcaggaagatggaaagcttt

SEQ ID NO: 436389 - DNA, 75 bp, Homo sapiens
gagcatttgcccatgatgcaggaggtatcgggttgaatatgaagctttgtgtaaagtagaagcagaacaaaatga

SEQ ID NO: 436390 - DNA, 87 bp, Homo sapiens
cccgaccctgtattagtgcggggtgccggccacatcactgtatgagaactggactgatgaccaactgcttggttttaaaccatgcaa

SEQ ID NO: 436391 - DNA, 75 bp, Homo sapiens
gtgcgatctggacgcggcgctgctgaccgacatcgaaggtctggtccgagagcaggaggctgggctgctgcagtt

SEQ ID NO: 436392 - DNA, 100 bp, Homo sapiens
acaaaattgagaagaactcataaacttggcttcctcgcttctgctcctcagaagacagcgacagctgtggcgcactgcaaacgcggcaatggtctcatca

SEQ ID NO: 436393 - DNA, 126 bp, Homo sapiens
aactggaacagttgaggcaagaagcagaacaactgcggaatcagattcagctccctagatctttagcttctactcccactgctcctaccactccagcaacgccagataatgcatcacaggaagaac

SEQ ID NO: 436394 - DNA, 74 bp, Homo sapiens
aaaactgttcggacttccccgttagaactcgcgtttccacttcagagatctgatgtgttcagagcaacattgtt

SEQ ID NO: 436395 - DNA, 83 bp, Homo sapiens
cgggaggaaggaacgaggcaaggagctaaagcagcgtgcgttcagccctgggacccaacatgagtgaagtttcctgcaagaaa

SEQ ID NO: 436396 - DNA, 75 bp, Homo sapiens
cgagccagcgagccagcgagccgccgacccgccgagcaaaatgacagcccacctgaggatattgaccataaggac

SEQ ID NO: 436397 - DNA, 100 bp, Homo sapiens
cgtgaggaggacttcagaaacccgactgagaagtggagcgacccccagggagggtcggacctgcctcaataccgccaagaaacctctgcgccatgagagc

SEQ ID NO: 436398 - DNA, 96 bp, Homo sapiens
cctcttgataaaaagagatgtggggggattctcgacctgctaacagaactggaccttttcggtgaccattgtgaggtagatattttgttctaattt

SEQ ID NO: 436399 - DNA, 96 bp, Homo sapiens
agttaagtgtacagcagatattttggaagttaaatgaagttcgaaagagattgaatgagctaagagaattagttcattattatgaacaaacgtcag

SEQ ID NO: 436400 - DNA, 82 bp, Homo sapiens
cagtggagtgacccgttgccagagtgcagagggggatatgagactttctactcggaatatcctgagtgttgcgtggatgtaa

SEQ ID NO: 436401 - DNA, 83 bp, Homo sapiens
ctattttcacgttttaatgccgagaggtctctgtgacgattttgagcccccctccatgcgcctgaaggcccgacccagcagcc

SEQ ID NO: 436402 - DNA, 98 bp, Homo sapiens
ggagaagtcccggctgttggagaaggagaaccgtgaactggaaaagatcattgctgagaggagctgagtgccctgcacagctggttccagacactgag

SEQ ID NO: 436403 - DNA, 75 bp, Homo sapiens
ctctgtgacatctccaaggtggacaggactgtggacgtggtattgctgaaggtccagagggggcaaacctcttta

SEQ ID NO: 436404 - DNA, 82 bp, Homo sapiens
cttgggtgatttacaggcctctgtctattcctgcatggcccagaggacagatgcagcaatggctgccatccggaagaaactg

SEQ ID NO: 436405 - DNA, 82 bp, Homo sapiens
agcaaacctctcggattgggtgtcaaggatgcctaaatcaaaggaacttgtttcttcaagctcttctggcagtgattctgac

SEQ ID NO: 436406 - DNA, 100 bp, Homo sapiens
gtggacccttggagccatcctctacaggacccgctttctaccattaagagttcctgagttggaggtagaagaagaaacccaagttcaagagatgacttta

SEQ ID NO: 436407 - DNA, 100 bp, Homo sapiens
gcagcttccagaagagcagagctttggtatcctactcacagcgccaaaactgcaggggccaagaattcaaagaagctttttcactatttgacaaagatgg

SEQ ID NO: 436408 - DNA, 100 bp, Homo sapiens
cgaattcgtcctgcagaatcacgcggacatcgtctcctgtgtggcgatggtcttcctgctggggctcatgtttgagacactggccaaaagaagaccctag

SEQ ID NO: 436409 - DNA, 82 bp, Homo sapiens
cgcgcgcagggcctgcagcgggagctggacggcgagcgcgagcggcgcgagaaagctggcggtaaggctggaaaggactccg

SEQ ID NO: 436410 - DNA, 75 bp, Homo sapiens
gggacagtctccgaagtctcgagcagatcttgagccagatgattgtgcatccatttacatctttaatgtagatcc

SEQ ID NO: 436411 - DNA, 82 bp, Homo sapiens
gtgggatctttgagccttttggaagagtcatcatcagatttgaaatatttaaagtggatacaaaactatttcagcaatgcag

SEQ ID NO: 436412 - DNA, 100 bp, Homo sapiens
aaacccaaagaggtaagcattcagggttatgtaccgaaggactctaccgtgtcagcgggaataaaactgaccaagacaatattcaaaagcagtttgatca

SEQ ID NO: 436413 - DNA, 103 bp, Homo sapiens
ggtcacttagactaccccaggaacccgcgccgcgagggctccttccctcagacagagtttcactcctgttacccaggctggaggacaatgatgtgatctcggg

SEQ ID NO: 436414 - DNA, 76 bp, Homo sapiens
taaacatgaattgctcagccttgccagcagaggcgtagaggctccggtgttttttgtgccaattgcctgaccacaa

SEQ ID NO: 436415 - DNA, 74 bp, Homo sapiens
cggcgagaagcggccgagccagcagcagctttccagagtgttgaatcttccaccagaaaacttgatcacatcaa

SEQ ID NO: 436416 - DNA, 82 bp, Homo sapiens
taacattggcagtgtggtgcagcacagtgagggggttatcaatactctggctgaccatcatcatcgtgggactgactttggt

SEQ ID NO: 436417 - DNA, 83 bp, Homo sapiens
atcttcaacaagaggacccaggagaaattcgccctcaaaggcgaactttctgaccaagtatacaactacccagagggcctagg

SEQ ID NO: 436418 - DNA, 75 bp, Homo sapiens
agtccatttggggaaatccttcggatggtgaactcattagaagctcctgctccagcccagcccccagagagcaga

SEQ ID NO: 436419 - DNA, 100 bp, Homo sapiens
cttgccgccagtggcgggctccgttctccctcgaagcactccccccagctccatgaatggaaatcggctccgcagaccccatatcatgtgaacctcctcc

SEQ ID NO: 436420 - DNA, 82 bp, Homo sapiens
ggagcgtcaacagcagcaccatgggcagtgctcggaatgtgaccaggcagggagcagtgacatggaagcagatatggccatg

SEQ ID NO: 436421 - DNA, 98 bp, Homo sapiens
agctgtccaatcacctcgcaggagccctagggtaaagcagctgagcagccattttcagatttaccccttctcattgaggaaaccaaactcagattgac

SEQ ID NO: 436422 - DNA, 75 bp, Homo sapiens
ggagattatagctctgtatgagaaggacaacacctacttaggtgtttcagtcacctccagtaacacgggcgtgcc

SEQ ID NO: 436423 - DNA, 50 bp, Homo sapiens
gctcactgcaacttccgcctcccaggagaatcacttgaacctgggaggca

SEQ ID NO: 436424 - DNA, 98 bp, Homo sapiens
acgggcggtggcactctgtgcaggtgcagtactacaacaagccgctgtgagcgcttgccttgccatgagaatcgggagtgctccaagctgcctctgag

SEQ ID NO: 436425 - DNA, 90 bp, Homo sapiens
gctgagggcagccccgtccaggcagcccctgtcaaagggaacaggaagcagtccacggagggtgacgccctagacccacctgcatccccc

SEQ ID NO: 436426 - DNA, 75 bp, Homo sapiens
tgggattataggcgtgagccactgcacctggcacagcggggatctgatgagcttctttcttctggcatcattaac

SEQ ID NO: 436427 - DNA, 75 bp, Homo sapiens
ccaagatacctgtggaaaacatccttggagaggtcggagatgggtttaaggtctcggcgcggaagatggccggcg

SEQ ID NO: 436428 - DNA, 75 bp, Homo sapiens
acagagtctgtggaagaggtggttcgaggtgttggtaaatcatgcttattgctacagtttacagacaagaggttt

SEQ ID NO: 436429 - DNA, 100 bp, Homo sapiens
ggcggcgggagcacgtcctcaagcagctggagcgggtcaagatgtggacgagtgcagctccgggcagcatcagtgtgacagctccaccgtctgcttcaac

SEQ ID NO: 436430 - DNA, 100 bp, Homo sapiens
tggaatcaatttttcttacttgaagaatatacaggatctgattatcagtacgtaggcaaggacactgatgacattgaaagtcctaaacgcagtatccgag

SEQ ID NO: 436431 - DNA, 75 bp, Homo sapiens
gcagagggatggctgctcagctgctgactgatgaggcactggccagcgatctgtacatgagacccaggaattatt

SEQ ID NO: 436432 - DNA, 75 bp, Homo sapiens
gtagaacactctctccccagaaatccaacttctcaaggatggtgccatgacaatggtgtgaactacaagattgga

SEQ ID NO: 436433 - DNA, 83 bp, Homo sapiens
cggagatggtgcagaagatggaggagagtttattaaccacttaacctctcagaactgaacaaagacaacattgttcctggaac

SEQ ID NO: 436434 - DNA, 98 bp, Homo sapiens
cttggctgtacagctcgatctaggttctgcggcacgggatggcggaggcgcctcctgtctcaggagtggtccgcagacctgaatcgaaccctcagccg

SEQ ID NO: 436435 - DNA, 75 bp, Homo sapiens
ctcgtagcctgccactccgtgcgtacatgtcccagagcaagcacacggaggcccgggagctcatgtactcgggag

SEQ ID NO: 436436 - DNA, 100 bp, Homo sapiens
cagagttctagggttctaagtgatgtccaggaaggaggaggaataatatttatggagcatatattatggaacacattgctctatatgcaatcagtgctgt

SEQ ID NO: 436437 - DNA, 75 bp, Homo sapiens
gatgacgtacagaagagtactgggtgtgattttgcaagttgaaactgtgggacagccagacagaagagatagcat

SEQ ID NO: 436438 - DNA, 97 bp, Homo sapiens
gaaggaacgagagaaggaaattagtgatgatgaggcagaggataaaggaggaagagaaaagggcagcagaggagaggcagaggataaaagaggaaga

SEQ ID NO: 436439 - DNA, 74 bp, Homo sapiens
atgtcaagcgaagccttgaaaaagctgccctgagacggtgtcccgccgaaagaccatggtgaatccgggcagca

SEQ ID NO: 436440 - DNA, 75 bp, Homo sapiens
ctggtccctgctcttccacttcaaggagacaacggccacacactgtggggttcggagcgaccttggccgttggcc

SEQ ID NO: 436441 - DNA, 101 bp, Homo sapiens
ggtgttctatactggaagaggcatgccagaggtagagcagctctggaaaggaagagaaatggaagtgagaaagttgagcatttcctggcagttcttgatag

SEQ ID NO: 436442 - DNA, 51 bp, Homo sapiens
tacctgccggacacgcttctcttggagatgacattgtccccgagctaccgc

SEQ ID NO: 436443 - DNA, 83 bp, Homo sapiens
agacaggtggcgacggcagaggaaactccatccggcacaacctgtcactgcatagtcgattcatgcgggtccagaatgaggga

SEQ ID NO: 436444 - DNA, 74 bp, Homo sapiens
tacaaagagagcacttcctaagaagagtcaggtggttgctgtatatggaactttatctgatttgctttctgtgg

SEQ ID NO: 436445 - DNA, 75 bp, Homo sapiens
cctgaacaaattttaggaaaagttagcattgctaaaagaatggtttgtcattcattgaaacttcggccctagact

SEQ ID NO: 436446 - DNA, 97 bp, Homo sapiens
ccgcgcgcagggcctgcagcgggagctggacggcgagcgcgagcggcgcgagaaatccctgaagaggaaggagaaggaatatgagcatgaaatggag

SEQ ID NO: 436447 - DNA, 83 bp, Homo sapiens
ttcggcgcctgttacattctctatctgcgcaccttggagtccaagcttgtgctctttggtggtaaaaccaatcccagttaaag

SEQ ID NO: 436448 - DNA, 82 bp, Homo sapiens
aaggatatcgacgtcgtgatccagaagtccagagctgaggactgcctgtttgcaggaagccatcttcgacaagagcacaggg

SEQ ID NO: 436449 - DNA, 88 bp, Homo sapiens
agaattgaaagatccaacagatcattaccatgcgcagcctttagagctctggtagctgaagaacatctcacagtggacgccagggtct

SEQ ID NO: 436450 - DNA, 75 bp, Homo sapiens
tggctgtaacctgggggctcagggggggcagaccgggccgttccagtgctgatcattggcattctggtgttccta

SEQ ID NO: 436451 - DNA, 100 bp, Homo sapiens
cgggcgcctaccccaaactcatggaaattgatcaggtgtcatggagaaactccagctgggcccagagattctgcagcgggaaaatccaaggcttatttat

SEQ ID NO: 436452 - DNA, 100 bp, Homo sapiens
aatcaatgggccatcttggacgacaatgcagatcttcgtgaagactctgactggtaagaccatcaccctcgaggttgagcccagtgacaccatcgagaat

SEQ ID NO: 436453 - DNA, 98 bp, Homo sapiens
caatcattctgctgtttgctccttgccaggttcaacatgggattgtttttcggctttgtgagaaaccttaccatcaaacacgatggccagcaacgtta

SEQ ID NO: 436454 - DNA, 75 bp, Homo sapiens
aacatgttttatcaatgcagctaagcttgaaattttgacaaacttggcaaatgaagccaacatatcaactcttct

SEQ ID NO: 436455 - DNA, 74 bp, Homo sapiens
aaacagaagaagttgagcctgatgaagaagaagtttgttatccaggcataagaccaagaaattatcttcagaaa

SEQ ID NO: 436456 - DNA, 100 bp, Homo sapiens
ggggcggcggcggcggcggctgcggcccaatatagcaattctgtggtgttcttggtcacacatttatggagtttctgaagggcagtggagattactgcca

SEQ ID NO: 436457 - DNA, 74 bp, Homo sapiens
tctcatgggcgatgacatattctgttattatttcaaacttttccagagaatggtggcatgaagctcaaaaaaat

SEQ ID NO: 436458 - DNA, 86 bp, Homo sapiens
tgcccaccctggccattgcgtatttcacaggagatgcacaaaagctcgcagacctctgaagagagtgccattgagacgggttccag

SEQ ID NO: 436459 - DNA, 96 bp, Homo sapiens
tgatcttcaccttggattctttgttaaaaggagacctaaagggagtcaaaggagcagtacttaattttcctaaatattgtgaacccgtggttaaag

SEQ ID NO: 436460 - DNA, 100 bp, Homo sapiens
ctcaaaatcagcctacatgccatctttgctcgagatgctgctgtgcagaagattgagactattatcaaagaacagtttgctcttgaaatgaagaataagg

SEQ ID NO: 436461 - DNA, 51 bp, Homo sapiens
ggattttctgtcatggaaaaagcttggggtctgccatcatggatgttctcg

SEQ ID NO: 436462 - DNA, 75 bp, Homo sapiens
tggaaaacttcccttccctttcgacatagtcaactgtgacctgaaatctacactacgagtgttgtacaacctctt

SEQ ID NO: 436463 - DNA, 75 bp, Homo sapiens
gaaaaccagttattgaatatcaagaggaggagttgttgttctcctgtgcctcctgttggctctctttgcatctgg

SEQ ID NO: 436464 - DNA, 100 bp, Homo sapiens
gtaaagttacaaatatgggatacagcaggacaagaacgattcaggtacgtcatcagcagcttagagctcctggtggctgaggactacatgatcgtgtacc

SEQ ID NO: 436465 - DNA, 96 bp, Homo sapiens
atttctttctcgctgatcgcctaacttctactgacgaagcttggaagttgcagaaggctgctttgtaccgcctcagtggagactggaatcccttac

SEQ ID NO: 436466 - DNA, 75 bp, Homo sapiens
cgaagatatggtgagacttgggaaggattctggtctgaaaccatttgaacagattcgattacgtatcctccctgg

SEQ ID NO: 436467 - DNA, 50 bp, Homo sapiens
tccacctgcaaggattcaaagaagaaccccgagatgcccctgtccttcac

SEQ ID NO: 436468 - DNA, 100 bp, Homo sapiens
gatttctaaaccagtttactgaagataagccaactttgaatttcttctatcaacaggctttcttagaaatggcttctgaggaagctgccgttactatggt

SEQ ID NO: 436469 - DNA, 100 bp, Homo sapiens
ccaggcgaagctggtggtggcgctgagccgcacctaccgcacggtggcacatttagaacgaacagggcattacttaactgtgaaagataaccaggtggtt

SEQ ID NO: 436470 - DNA, 75 bp, Homo sapiens
agtacctggtttcacaccacgcctggcaatattacagtctgaagatgatgagaaactgaaaaagaggaaggagcg

SEQ ID NO: 436471 - DNA, 74 bp, Homo sapiens
atcctgaaagccatgcagcggaataatcatgggccagactgggaagaaatctgagaagggaccagtttgttggc

SEQ ID NO: 436472 - DNA, 99 bp, Homo sapiens
gtggcggcacgaggggccttcgccaccacgcactgggtcgtcacggaggacgggaaaatccagcagcagagtgtggaaggagaacaccatgagaaagct

SEQ ID NO: 436473 - DNA, 107 bp, Homo sapiens
tttggccacatatatgcgaatctataagaaaggtgatattgtagacatcaagggaatgggtactgccgctcggagggtgtggtggccgtcctgctgaccaagaagtc

SEQ ID NO: 436474 - DNA, 50 bp, Homo sapiens
ctttgacctttttgaagcctttgcaaaaagcctggagaaagttcttgtgg

SEQ ID NO: 436475 - DNA, 90 bp, Homo sapiens
ggagtcggcgagcccccgcggcgacagagacacgctgtgaacaagacaggccttccccaaccacagcgccccctgcgccacccagcccct

SEQ ID NO: 436476 - DNA, 98 bp, Homo sapiens
acgggccgccgccgccaagaagtataatatgcgtgtggaagactacgaaccttacccggatgatggcatggggtggtttgtgatgaaaatggttccaa

SEQ ID NO: 436477 - DNA, 75 bp, Homo sapiens
ggggcttcacctgcagctgcccggcaggcaggggaggcgccgtctgtgagaaggaggagcccaaggtgggcatca

SEQ ID NO: 436478 - DNA, 83 bp, Homo sapiens
cggagatggtgcagaagatggaggagtctggctggatgagacagggtcgtgcccagatgatggagaaatcgacccagaagcct

SEQ ID NO: 436479 - DNA, 98 bp, Homo sapiens
ccaaaataagcagacacttctaggttatcctgaatacatgtctaacaattttccttgcaacgttagctgttgtttttcactgtttccaaaggatcaaa

SEQ ID NO: 436480 - DNA, 75 bp, Homo sapiens
gggggccacggcgcggacgccatgattcccaacttcttctggagcctggggatcggtcacactggtgcgtggtgg

SEQ ID NO: 436481 - DNA, 100 bp, Homo sapiens
aacacagatgggaagaattactgtggcctaccagatgaagattatggaagagattcgggccctcccactaagaaaattcgatcatctccccgagaagcta

SEQ ID NO: 436482 - DNA, 50 bp, Homo sapiens
ggacctggcacccgaatccggcctgccggatggacaccagttaaacagac

SEQ ID NO: 436483 - DNA, 50 bp, Homo sapiens
gctgaggactgcctgtttgcaggaaacatttactagggacaacttttgag

SEQ ID NO: 436484 - DNA, 100 bp, Homo sapiens
gctgggttctgagccggagtggtcggtgggtgggatggaggcgaccttggagcagcacttggaagacacggcccagctggagacagccctgaagtggagg

SEQ ID NO: 436485 - DNA, 75 bp, Homo sapiens
ggatgacaaactctggagtaattggagccaagaaatgagtatagatctcaacagcaacggattcatttgtgacta

SEQ ID NO: 436486 - DNA, 99 bp, Homo sapiens
cggcggcggccgaacaatgaagctcctgaagccgacctgggtcaaccacaatgatctacgaactgcgtgtgatggagaccaaacccgacaaggcagtgt

SEQ ID NO: 436487 - DNA, 126 bp, Homo sapiens
ttttcggcggggtctttaggatttgcagctccaggaagcgagatgtcgaagccgccacccaaaccagtcaaaccagaccccaagactgcttctgagacagaaacagatatctgtgctgaatgggag

SEQ ID NO: 436488 - DNA, 82 bp, Homo sapiens
gggcgagcgaggaggatggcggagtcggggctcctgacggtgagaagccctaccactgcaactgggacggctgcggctggaa

SEQ ID NO: 436489 - DNA, 97 bp, Homo sapiens
cggccgccttctaccaggagcctgatccgtgccgcccgccgcccggatgggaccaccagagtgctgtgtctgaggcctgtgatgccgtgttcgtggc

SEQ ID NO: 436490 - DNA, 50 bp, Homo sapiens
gggggctacggaggagctggaggaggatgatattctatcctttgaggcag

SEQ ID NO: 436491 - DNA, 100 bp, Homo sapiens
cttcattgctgccaggacctttgtccaggggctgactgtgggcagagaagttgcaaaccgagtttccaagattgtctacaaagcctggctctgttcccag

SEQ ID NO: 436492 - DNA, 75 bp, Homo sapiens
ggggccttccacaccccctccgtgggtgtgtggatgtacagttacccagcacgtgtacctcctcctcctcctatt

SEQ ID NO: 436493 - DNA, 75 bp, Homo sapiens
attagattcctcaccaactactaccagtcatttgtggatgtcatggaatttcggtgcagaaataccataccatca

SEQ ID NO: 436494 - DNA, 80 bp, Homo sapiens
aggagggcggcggcggcggctgcggtcgaagaaggggacgccgacaagggatcgcttacacctgagacgaactacagaac

SEQ ID NO: 436495 - DNA, 75 bp, Homo sapiens
ggagacctggtcatggacacagtccctgaaaaggaaactacagtcgtcgggaaggaacaagaggctccagttgga

SEQ ID NO: 436496 - DNA, 82 bp, Homo sapiens
gccaattttgctaactttgcacatttcaacagtcatgcagttgttgacctcctgtactggagagacattaagaagactggag

SEQ ID NO: 436497 - DNA, 100 bp, Homo sapiens
ttggagtgtgcgtgcgcgccgagcgccctgggcgctgcctatggcacagccaagagcggtaccggcattgcggccatgtctgtcatgcggccggagcaga

SEQ ID NO: 436498 - DNA, 82 bp, Homo sapiens
catttagttcgttttgaaaggctgcgacgagcaatggaacttcgaagcactttatgaaaatgcatgctgagaagaagcacaa

SEQ ID NO: 436499 - DNA, 100 bp, Homo sapiens
cttgagaagaggagccaaaacatcatagttgaaccgtcctggaatagaagaaagaccacagcaagattctttcattcgtctcctcctagcctgggggacc

SEQ ID NO: 436500 - DNA, 95 bp, Homo sapiens
tcatccacgatggcctagcacgtggaattcgcgaagctgccaaagccttagacaaccaaagaaagatctccatttcctgatggaatgtaatcacg

SEQ ID NO: 436501 - DNA, 100 bp, Homo sapiens
ttggtgaacggtataaatttttgcaagaaatgcgagggtatgtccaagacttgcttgagtgtttcagtgaaaagcctgtaaatgaaaatatgcaagtcaa

SEQ ID NO: 436502 - DNA, 85 bp, Homo sapiens
ggacggtcatggtcaacattgagaccactacatatacccgccggggccatgggacatgcaccagcccagggtgctcctttacata

SEQ ID NO: 436503 - DNA, 90 bp, Homo sapiens
tggaaaagaaatactccagcctctctggggggaaagggtttcccgttaaccccaatactttaaaagagcaaaaaagggagacgctgtccc

SEQ ID NO: 436504 - DNA, 98 bp, Homo sapiens
gtggctgtgcagggccccgagccggcccgggtcgagaggcctcagtgttgtccctgatgaagaagtcattgaaatgtacgaggggtcccacgtgccct

SEQ ID NO: 436505 - DNA, 100 bp, Homo sapiens
ctggcccgggacatcttgctcaagtcaggaggccggagatcattcagagcctagactgggagacctttgagcagtattgtgcctggcagctctttctggc

SEQ ID NO: 436506 - DNA, 50 bp, Homo sapiens
cataatatggtgaacggccgcctggcagctggacccacaaaccgtggaga

SEQ ID NO: 436507 - DNA, 100 bp, Homo sapiens
agagaataagatggttttccgaagatgcactgtgtctggtgtagaatattctcatgatgcaaatggggaagcatttctccttgcattggtttgctggtat

SEQ ID NO: 436508 - DNA, 101 bp, Homo sapiens
gagccatggaaacaggaggaagaattcccaagccaaagctttccaggacaaaactttcggtttgaagaataagaaaggagcaaagcaacagaagtttatca

SEQ ID NO: 436509 - DNA, 75 bp, Homo sapiens
gtttggaccattgagcagcagattggaaaagtgaatggtgtgcatcacattaagcaagagtgagccatggagcta

SEQ ID NO: 436510 - DNA, 100 bp, Homo sapiens
ctgctgctcctgtttgccacacagatcaccctgggaatcctcatctccactcagcgggcccaggccatcgtggcccgagccaacagtctgaagaattccg

SEQ ID NO: 436511 - DNA, 100 bp, Homo sapiens
ggcttgttcaagacacaccggaggcgacggccatggccacaggtgtcatggagaaactccagctgggcccagagattctgcagcgggaaaatccaaggct

SEQ ID NO: 436512 - DNA, 100 bp, Homo sapiens
agggagcagctcttgtacctgtatgccaggtacaaacaggatgacatctgaactggagagcagcctaacgtctatggactggttaccacagctcaccatg

SEQ ID NO: 436513 - DNA, 51 bp, Homo sapiens
agccgcaaccaggaatgacttctaaatacagattctgttcatcttgctctg

SEQ ID NO: 436514 - DNA, 100 bp, Homo sapiens
aattatcaaacagcacagtatatttccttaatctatttaatcacaccctgacctgctttgaacataaccttcaggtttttggattcaaagcataaaaacc

SEQ ID NO: 436515 - DNA, 100 bp, Homo sapiens
aagctgctgtggttgagtatagtgatccttatgctgaagaggacccaccgtgggctccacgttcttacttggaaaaggagaaaatgctgctgtgaagacc

SEQ ID NO: 436516 - DNA, 100 bp, Homo sapiens
gaggacatgaagcggctccacgaggaggaccagaaggagatcggtgacctccgtgcccagcagcagcaggtaactccagaagatcccggagctcagttct

SEQ ID NO: 436517 - DNA, 76 bp, Homo sapiens
gtcaccccgctgtgacgcgcacgctgtaggaaaactattattgaaactatgccaatgactgagaaagttgaagaat

SEQ ID NO: 436518 - DNA, 100 bp, Homo sapiens
gcaagacagtcgacgcgctcaccggctgggtgggttcgagcaactaccgggcctgcacagctgaccacagttgggaaacgttgctgtctttggattcagg

SEQ ID NO: 436519 - DNA, 82 bp, Homo sapiens
gccgaggccgggaggccgtgcccggaggtttactcctggcttgggggcattaggaagcactggaggctcttcgggaactaat

SEQ ID NO: 436520 - DNA, 82 bp, Homo sapiens
cgccctgggcacccactaccgcgcctatctcctcaagtgccacgagctgccgttttatggatgcttgtggttggtggcatcg

SEQ ID NO: 436521 - DNA, 100 bp, Homo sapiens
acagttatgcactttaccctttttaatattggccaatcatcaagacaagccagcagctcgctcagtacaagagaaaaaagcagcaagcctcggcagcagt

SEQ ID NO: 436522 - DNA, 83 bp, Homo sapiens
tatggaaaacggggatttccaccatctgtcccaggtggtcctgctgcaagctcagctgactttggagcggaagcagaagcagg

SEQ ID NO: 436523 - DNA, 102 bp, Homo sapiens
gaagaaacagttaatcgtgatatcccaccccttacagggccgagatggacgaaaaaatgtggttccttgtgttctctctgtaaatggggacctagaccgagg

SEQ ID NO: 436524 - DNA, 96 bp, Homo sapiens
attttctgaatgcctgaacttgattaatgagatgtcatgggaacagacatgtcttggagaggtgcaccctgggatctgtccaggatcagaaactct

SEQ ID NO: 436525 - DNA, 75 bp, Homo sapiens
aatttgcttggatctaaggaaggtgaacatatgctaagtaaagctttccagagtccagcctctgatgaagcagga

SEQ ID NO: 436526 - DNA, 90 bp, Homo sapiens
gactgtggcggtttatagtgaggctgacagaaattccatgcatgtagatatgggccgttgctccagggagaactgcaaatatcttcatcc

SEQ ID NO: 436527 - DNA, 90 bp, Homo sapiens
tgcctacctccctgaaacacatcatcagcaatgcagaatactatggcccatcactcttcctcctagggtggacaagcttcatttacacga

SEQ ID NO: 436528 - DNA, 83 bp, Homo sapiens
gtggaggagctgtgcagccgcgaggaggcgcgggaggtgttcgagaacgaccccgagacggctttaaggagttttaagctgag

SEQ ID NO: 436529 - DNA, 100 bp, Homo sapiens
atgcctgcttttatggagcatctgcaaagaaggttaaatcaggatggctggataaactctctcctcaaggaggttggaaagaaccatgactgtattcagg

SEQ ID NO: 436530 - DNA, 74 bp, Homo sapiens
ttatatcctgacactatgaatgctacttggatgcctcttaagagaattttctctacatgtgcacccatttaaag

SEQ ID NO: 436531 - DNA, 97 bp, Homo sapiens
tctatgcagtcatgtatcctgtgtttaatgaggaatgaagccaagagtgatgaaagaagctgtatctactccatcacgaatggcccacagggatcag

SEQ ID NO: 436532 - DNA, 100 bp, Homo sapiens
cgccgagctggacccggaccggttttggggtgcccatcatcctagtgggcaacaagtcagacctgcggtcggggagctccatggaggccgtgctccccat

SEQ ID NO: 436533 - DNA, 50 bp, Homo sapiens
agatgcgagaggccctgcaggagaaggtaatagcctgcagctggtgtttt

SEQ ID NO: 436534 - DNA, 75 bp, Homo sapiens
gccttcaaccactatctcagtgcaatggatgcagtgaaagcttgcacagatgagagccttgctgttgaggaaaga

SEQ ID NO: 436535 - DNA, 71 bp, Homo sapiens
aaaatcgacttggactcagatggctttctcactgaaagtgaccaagaatatggcccaggtgaccaaagccc

SEQ ID NO: 436536 - DNA, 103 bp, Homo sapiens
cttctaaaaggatatgtgttgctaatacccatctttactggcatcctaaagttggattggatgctgctggcaagacaaccattctgtataaactgaagttagg

SEQ ID NO: 436537 - DNA, 75 bp, Homo sapiens
ctcagacttccagccttcagaactgtgccagcgagatttcagattcctgtaaacctctaaagaaaaggagtcgcg

SEQ ID NO: 436538 - DNA, 100 bp, Homo sapiens
gtgaaggccaacatgctgaggacgttcagcagcattcccgtctcacggatatgcaaggcgctccaggcccctgcctgtcacgagaacatggtgaaggttg

SEQ ID NO: 436539 - DNA, 76 bp, Homo sapiens
taaagatgaagtatttggaacagtaaaggaattagaaggtgacgaggagggagaagacgaggatgatgcggaaatt

SEQ ID NO: 436540 - DNA, 100 bp, Homo sapiens
agttcccgccccggagagcggcgaggcggcagccacagtatcagatgtagaaggtggtgatggactgcagctcagaaaggaacatactctcaaaatattt

SEQ ID NO: 436541 - DNA, 76 bp, Homo sapiens
tctgatcttttaaaatattacttaagagaatctcaagctgctaagccaccaattaccctagttatgggcccatcat

SEQ ID NO: 436542 - DNA, 90 bp, Homo sapiens
gggccggagtacgtcgttcccgctgcgctaggggaagcgggcagcattcaacagaaggtgtcaaattgacagctctcaatgacagcagcc

SEQ ID NO: 436543 - DNA, 85 bp, Homo sapiens
acaacagaaacagaaacgattgtggaaacaggcgataaactacattcagttgagtctgcaagactgggaggaactggggtgataa

SEQ ID NO: 436544 - DNA, 83 bp, Homo sapiens
gagactcagaatcgaatctcttctccctccccttcttggacaaagcccacaaacgctatctgctaatgagcattgaccagagg

SEQ ID NO: 436545 - DNA, 100 bp, Homo sapiens
cgccggcctcttggagtcggagcttcgcgacggcagcggcaagaagggctctctgccttcctgctggtggcctgcctcctggatttccagagggccctgg

SEQ ID NO: 436546 - DNA, 89 bp, Homo sapiens
gcagctgcattgcaggcacagggcccgatgagccagagaagcttgatttgtgtaagaattgtcatcatgtaatagccagacatgagtat

SEQ ID NO: 436547 - DNA, 111 bp, Homo sapiens
ccctggtcccgtataacatgcagatcgacttggtggaagcacacaccccaggccgccgcggccccgcagcgctggtctccgaagtcttcgagcagcacctgggaggtcaca

SEQ ID NO: 436548 - DNA, 100 bp, Homo sapiens
tagtctcagaactgttccttcagccaaagaaacaagccgtggaataggtgtatcaagtaatggtgcaaagcctgaattccaagatgagatgggattctcc

SEQ ID NO: 436549 - DNA, 100 bp, Homo sapiens
aaataaggatgatcccaaagccaaggagaagttctcccagctggcagaagcctatgaggttctgtacagagtaatgagatgtgtgacggctgcaaaccag

SEQ ID NO: 436550 - DNA, 83 bp, Homo sapiens
accgctttccatggagagtaaaggccggctggaaagtccccaagcgcatcctaatgtcctatgatcacgtggaactcacattc

SEQ ID NO: 436551 - DNA, 97 bp, Homo sapiens
tgccgccgggttgctgtgcgactattctccgggagccgtccgtgtcaccgccggaacctggcgcagctttatcttcaagccaggatgaagggagact

SEQ ID NO: 436552 - DNA, 82 bp, Homo sapiens
ccccaagacagagcgctactcctggcagtgcgtcaatcagagcgtcctgtgcggtgacagagttagtccttgataattgcct

SEQ ID NO: 436553 - DNA, 74 bp, Homo sapiens
ctcctatgtcccctattatctcccctgcccagagatcttgtactatttcttgatcatccaaaaaagaagattcg

SEQ ID NO: 436554 - DNA, 82 bp, Homo sapiens
gtccaggcctgacagctctgcggctcgggccctgagggtgtgctgatctgcaaaccctggacacaatgcagccaattgagag

SEQ ID NO: 436555 - DNA, 97 bp, Homo sapiens
ggcaagagcgatgtctactacttcaggtgtgatgaatgcagactctgctaccattttggctgtttggatcctcctttgaaaaagtctcctaaacaga

SEQ ID NO: 436556 - DNA, 90 bp, Homo sapiens
tgacctcttcctttatcagccacaggcacagtcagtggtgtgctgctagttacaccaaataatataatgtttgatccacataaaaatgac

SEQ ID NO: 436557 - DNA, 100 bp, Homo sapiens
gacatttgctacagcatcccacattaagtcaacggaattcctcctgatcagcagagactgatctttgctggcaagcagctggaagatggacgtactttgt

SEQ ID NO: 436558 - DNA, 51 bp, Homo sapiens
agacagggcacaccaaactccatctggtgaaaaaccttttgaatgtccaaa

SEQ ID NO: 436559 - DNA, 75 bp, Homo sapiens
accgggacaagtactggaaccgctttcgagaccatttgaagacacttcgtcacccttgcttgctaagatttttat

SEQ ID NO: 436560 - DNA, 50 bp, Homo sapiens
aaaagtggcctggaaatgattcagcaggattctagtataattgacttcta

SEQ ID NO: 436561 - DNA, 82 bp, Homo sapiens
ccagtcggtgctccggggaggtcacctgacgaggagctgcagatctgggacacggccggccaggagcggttccgcaccatca

SEQ ID NO: 436562 - DNA, 100 bp, Homo sapiens
catcgtcatctgcagcgtcctgctgctgctctccgtggtgggtacaggtttgcagattccgccagcagcacagcaagctctacagatgagtggctctttg

SEQ ID NO: 436563 - DNA, 82 bp, Homo sapiens
cgccaaggcatccgacgaggacgacacttacaagcccggcaaggtgagcatgggtttatgcgtcttaggcattattgtgatg

SEQ ID NO: 436564 - DNA, 100 bp, Homo sapiens
tgggtggtggctctgctagtgaatctgacccgactggattcctccatgactcaaggcacagactctccagtatccctctgaagaagatatgatcgaatgg

SEQ ID NO: 436565 - DNA, 82 bp, Homo sapiens
ccagaagtccagggctaggagcctcagccggcggacgccaggaaacaggaatgaagccaagagtgatgaaagaagctgtatc

SEQ ID NO: 436566 - DNA, 97 bp, Homo sapiens
agcagaaccccaggactgcgcccccgggagcgggcgcccagaggatgctcgtcagaagttccgctctgttctggttgaagcaacggtgaaactggat

SEQ ID NO: 436567 - DNA, 100 bp, Homo sapiens
gagagaaaggattcgaatgcgccaagaggagctcatgaggcagatcagccatgcagaagctggggacagaagtatttgaagaggtctataattacctcaa

SEQ ID NO: 436568 - DNA, 98 bp, Homo sapiens
cacgaggggccttcgccaccacgcactgggtcgtcacggaggacgggaaaatccagcagcagcaaattgctcgaccctcgcaagaagaaaaagtagaa

SEQ ID NO: 436569 - DNA, 100 bp, Homo sapiens
attgcgaggagcccatgtcctgtgactcagacctgggcacagcaaatgctgaggactcagaccggtctctgcaagaggcagctgcaatgactctccgcac

SEQ ID NO: 436570 - DNA, 75 bp, Homo sapiens
cgccggcctcctccgtgcggagaagaagctgcggccgcacctggccaaggaatcagagatcattgatttcttcct

SEQ ID NO: 436571 - DNA, 83 bp, Homo sapiens
tgcccacctcagccttccaagtagctgggactacagacatgcgccagcacgcctgacagtacaatgtagattataaactggag

SEQ ID NO: 436572 - DNA, 50 bp, Homo sapiens
ccctcagcctcagagtcagatgcaggagcagtcattatggcgaaccttgg

SEQ ID NO: 436573 - DNA, 99 bp, Homo sapiens
ctcgcggcgtctccggggaaagccgtggccccgagggcggatccgaggagatacaactcgtcaacgaatcaaattcagtgatgacagagtatgcaagag

SEQ ID NO: 436574 - DNA, 100 bp, Homo sapiens
gaggacctgttcaccagcactgtctccaccctagagtcagccataatggcaggtgaagaaattaatgaagactatccagtagaaattcacgagtatttgt

SEQ ID NO: 436575 - DNA, 95 bp, Homo sapiens
cttattttttctcatggatgttcttcttcgagtatttgtagaaggcggcagtacatacctgtgaaaatgaagagcaaagccttctggatcttttc

SEQ ID NO: 436576 - DNA, 82 bp, Homo sapiens
cctcgggaccggctgtatgattaggccacaatcttcaatgagtaaacatattcctgtattgatgtcaagctgaaccatcgta

SEQ ID NO: 436577 - DNA, 90 bp, Homo sapiens
cgcctgttcaactttgtcctctctcaggttatcaatactctggctgaccatcatcatcgtgggactgactttggtggaagtccttggtta

SEQ ID NO: 436578 - DNA, 75 bp, Homo sapiens
ctgaacgtctggatggtggagaagagcaggatgtgggggctcaaggttctgctgctacctgtggtgagctttgct

SEQ ID NO: 436579 - DNA, 100 bp, Homo sapiens
ctctgttccccgggcagaagaggaggatctcccacctttccaagcaaggccaggagccagcagaaaactgagcttccggtcacagagaacgtgcagacga

SEQ ID NO: 436580 - DNA, 75 bp, Homo sapiens
acaagtttgaatgtgcctggaacgggagcgacaggacagaactgtaccgctctctttttggccagctccaccctc

SEQ ID NO: 436581 - DNA, 74 bp, Homo sapiens
cagcctgcggagcctgtggggcagcatcaagatggtgctcatgtggaccagtggtgacgccttcaagacggcct

SEQ ID NO: 436582 - DNA, 83 bp, Homo sapiens
cggcggctcagttgtccatgaccctgaaggtccaggagtacccgaccctcaagcaaattgtggctactaatttgccccctgaa

SEQ ID NO: 436583 - DNA, 100 bp, Homo sapiens
cataatagtggatccttgaatgttgaagatgtccttaccagctttgacaatacaggaaatgtttactccagggattagagctcgatctgcaaggcttcag

SEQ ID NO: 436584 - DNA, 119 bp, Homo sapiens
gtggagctctgaagaagctctgagcggagttgtgttcttccccagaacaagttgaaatcatcgcagaaggataaagttcgtcagtttatgatcttcacacaatctagtgaaaaaacagc

SEQ ID NO: 436585 - DNA, 82 bp, Homo sapiens
agaacgtgagggtgtaacttacaaaaagtacctggagtagaacagaaaaattattatgtctgtgttcccttgggactcattg

SEQ ID NO: 436586 - DNA, 97 bp, Homo sapiens
atctcagcctcccaaggagctgggacctcaggataagttctgaacgtcgaaaagaaaagtctcgagatgcagccagatctcggcgaagtaaagaatc

SEQ ID NO: 436587 - DNA, 100 bp, Homo sapiens
ctccaacagcttcatatggacagatggacttcaaatgctgtttgtattccagagactaggcctggaacgaatgcttaaaacgtactccagcacctcctcc

SEQ ID NO: 436588 - DNA, 90 bp, Homo sapiens
cccggttccccggcccacagtgggggtgtgcaaacccgagagaactgggtggtggtgtcccgcgtggcccgagtgtgcaagaacgacgtg

SEQ ID NO: 436589 - DNA, 95 bp, Homo sapiens
atctttctgatgctccatcccactactctcaagatacgccaatgcgctcaaaggcaaaaaggtatatgagcaacgtggattcatggtgtaaagct

SEQ ID NO: 436590 - DNA, 88 bp, Homo sapiens
acgcccatcccggtgctcacgtcatacttacctggttgcttgcgcatctagtaatgttggatcatattctggatgttttgaataccaa

SEQ ID NO: 436591 - DNA, 88 bp, Homo sapiens
ggcgagggcgccttccatggagacgcagacaatgcagatcttcgtgaagactctgactggtaagaccatcaccctcgaggttgagccc

SEQ ID NO: 436592 - DNA, 100 bp, Homo sapiens
gcaaaaaacagccaccgattttgctatgtctctgagctgcgagcatgcagtgacctggagttcagggaagtggcaaacagattgcgggactggttcaagg

SEQ ID NO: 436593 - DNA, 100 bp, Homo sapiens
gtctatgacaacgtctctctgccgtgaatcattcctgcagatgaaaaagtgtgacttggcagctgaatatgcttataggcgtggaattgcagaggctgtt

SEQ ID NO: 436594 - DNA, 80 bp, Homo sapiens
agtgaaaaaagtctggtaaaactgcataaacaggttcaaaccttgtactactcagctgatcacaagctgcttgatgggaa

SEQ ID NO: 436595 - DNA, 100 bp, Homo sapiens
ttgcagtgtgagaacctcaaggacactgtagagaacctaacctcaagactgcagtgcagatgacgacaacttccttgtgcccatagcggtgggagctgcc

SEQ ID NO: 436596 - DNA, 97 bp, Homo sapiens
gagcccctgaactacttcttggagcaaggcattataccaaagctattgatggagaggagaaaacctatggtggctgtgaaggacctgatgccatgta

SEQ ID NO: 436597 - DNA, 120 bp, Homo sapiens
caaggatctggaaagcatcatcagacccaagtgccaagttatttactttcccatcaggtttcctgatgtgagcagatccggacaaaggacagagtctttgacagtatcagccacctcatc

SEQ ID NO: 436598 - DNA, 75 bp, Homo sapiens
gggatctttccggatcaatccagatggcagccagtcagtggtggagaggtacttggaaggctccatcgcccctga

SEQ ID NO: 436599 - DNA, 100 bp, Homo sapiens
aagaagtgggagcagaagcaggtgcagatcaagaccctggagggcgagttctcggtcaccatgtggtcctcagttgttgacctcctgtactggagagaca

SEQ ID NO: 436600 - DNA, 96 bp, Homo sapiens
tgtgtgcagaaaaacaggatggatatgactctctgcagcgggatcaagctgtgtgcattagtacaaatgagtgaaagcagcagcagtagcaacatc

SEQ ID NO: 436601 - DNA, 149 bp, Homo sapiens
cagtcactgcagtagaattccttgtagataagcaactggattttttaactgaagatagtgcctttcagccctaccaggatctagtgaaaagccatttgatgtatgcggtcagagaagaagtggaggtcctcaaagagcaaatcaaagaa

SEQ ID NO: 436602 - DNA, 75 bp, Homo sapiens
aaaacatcagagagctcgtactggcagccataggaaaaggatacagagtagagtttcatgaacctgaaacttggt

SEQ ID NO: 436603 - DNA, 75 bp, Homo sapiens
ttcaagccctggctcaaaatagattggtccaaaggaagattttttccattgtttgaaatgtaacttatgcctagc

SEQ ID NO: 436604 - DNA, 98 bp, Homo sapiens
aaggtccggggcttgccctggtcttgctcggccgatgaagtgcagaggtttttttctgggttgtgagtcccggcccagcccctccacccccctgcccc

SEQ ID NO: 436605 - DNA, 98 bp, Homo sapiens
tcaacttcggcagcaaggaggatgcggcccagtttgccgccggcatggccagtgccctagaggcgttggaagatccacagaccagcatggctgccact

SEQ ID NO: 436606 - DNA, 100 bp, Homo sapiens
ttctcccctacgcgctacacaagtggagctccttttcctccacctaccttcccgaatgagacaccaattattgcggtgatggtggccctgtcctctctgc

SEQ ID NO: 436607 - DNA, 115 bp, Homo sapiens
ctggcggctgctggtagttccatgctgtctgttcagacttcagcttggtccgggggccattgagactgccatggaagacttgaaaggtcacgtagctgagacttctggagagacc

SEQ ID NO: 436608 - DNA, 100 bp, Homo sapiens
aacttggagaatggaaaagaaccattgaagcttgagagaaaagcccccaaaagcagctattcagaattcactcgtgaagtaacagacacacagatgccac

SEQ ID NO: 436609 - DNA, 100 bp, Homo sapiens
taattggcctttaagtgaaggaaaggctttgaagcaaaagtttgatgagattttttcagcaacaaggtggaaccgtcccaaaatgtcccttgctcagaag

SEQ ID NO: 436610 - DNA, 100 bp, Homo sapiens
agtcctgccgcctcccgggagtgccgtgcgccgcagcccgggcccaggccccggcagcgcctgggacaaggaatcatctgctgcagtttgctttagagtc

SEQ ID NO: 436611 - DNA, 75 bp, Homo sapiens
cgacaacatctcttctgaactcaagaccaggaacccaagacagaccaggatgaggagcattgccggaaagtcaac

SEQ ID NO: 436612 - DNA, 75 bp, Homo sapiens
aaatcaccagttactttaatgagttcttgggtgtctctggggagtccctgggccagaccttcctccagactccag

SEQ ID NO: 436613 - DNA, 50 bp, Homo sapiens
aacccagatgtgcaacaaagtgcgatggagtgtggccatctggggccgtg

SEQ ID NO: 436614 - DNA, 75 bp, Homo sapiens
cacaagacgactcaataggaggaaggtagttttggatgttgggtgtggaactggaattctctctatgtttgctgc

SEQ ID NO: 436615 - DNA, 100 bp, Homo sapiens
ggctctccgggcctcccgccgcttagcctgatgctggaaggacgaaggaggagcagcccccacaacatcgatccaagagggggggctcagtgggcggcgt

SEQ ID NO: 436616 - DNA, 90 bp, Homo sapiens
gagaacccagaagcctacaatgaagaactgaagaagctggagttgctcagacaggtagagttggctttgtgggacacagctgggcaggaa

SEQ ID NO: 436617 - DNA, 105 bp, Homo sapiens
ggaggatgactcggatgtctggtggggcggagcagacacagactatgcagatgggaggggcactgcaattgcgggcattgtttttggaatagtatttatcatggg

SEQ ID NO: 436618 - DNA, 133 bp, Homo sapiens
gggcggtgagcagtgacaattgctaggcggagacagtgcagggaagagagaccttagaaaggatcaggactggcggatggcagttgaattcctgcatgaactgaatgttccatttttcaaagttggatctgga

SEQ ID NO: 436619 - DNA, 100 bp, Homo sapiens
gagaaagtcctctcgggagaagcagcgcctgttcccggggcagatccaggttcaggtcgtgatgtctcgggagtcggatgttgaggctcagcagtctcat

SEQ ID NO: 436620 - DNA, 75 bp, Homo sapiens
ctctctggagccgagagaggccggtttcccccacccaagagtgagccatggagctacgtgtggggaacaagtacc

SEQ ID NO: 436621 - DNA, 98 bp, Homo sapiens
aggaggctaagaaagtggtgaatcccctgtttgagaaaaggcctaagaattttggcattgcctttagaagaagccacactctctgaattaaaaactgt

SEQ ID NO: 436622 - DNA, 96 bp, Homo sapiens
tgctaattgggccaaatgctcctttaatttttgaacgaggatggtgccatgacaatggtgtgaactacaagattggagagaagtgggaccgtcagg

SEQ ID NO: 436623 - DNA, 82 bp, Homo sapiens
gaagaggtcccaatcccccactctttccgccctaatggaggtctccagtttcgacctgcctagagctggaacgttacctcca

SEQ ID NO: 436624 - DNA, 98 bp, Homo sapiens
ttcacaataagagcagaggatggaacacttcagtgcattcaagtgcatcctaacgttagtcaaggctgccaaggaggctgtgcaacatgctcagatta

SEQ ID NO: 436625 - DNA, 132 bp, Homo sapiens
gaaaactaggaatctatgatgctgatggtgatggagattttgatgtggatgatgccaaagttttattaggatctagtgaaaagccatttgatgtatgcggtcagagaagaagtggaggtcctcaaagagcaa

SEQ ID NO: 436626 - DNA, 74 bp, Homo sapiens
agcttcgcgcccaacaaccccgacctggccaaggcggctggaatatgacaacgcgcctgcaaaagggaacaaga

SEQ ID NO: 436627 - DNA, 116 bp, Homo sapiens
cgggatggcttctatgaggctgagctctgcccggaccgctgcatccacaggttcaagggcagcaggaaagacgagatcctgggcatcgccaacaaccgactgatccgcatcgactt

SEQ ID NO: 436628 - DNA, 75 bp, Homo sapiens
ccgcggttaaccacgtctcgtccacgacctccctaggcagcgagtatgacgaggaggaggtggactatgaggagt

SEQ ID NO: 436629 - DNA, 90 bp, Homo sapiens
gttccatcatggcgtcaatgcaggccctgattacgtcaaacagagatttcaggaaggtgtagatgctaaagaaaatccagaagaaaaggt

SEQ ID NO: 436630 - DNA, 98 bp, Homo sapiens
gaaaaattacagcaatattatatttttattccctctaaattcaagggtacagccaaagaccggagctttggagagatgaagtttaaacagtgtcctac

SEQ ID NO: 436631 - DNA, 82 bp, Homo sapiens
aaacgtcaccggaatcaggaccgagagagacaagagagacacctccaacttcgacaaagagttcaccagacagcctgtggaa

SEQ ID NO: 436632 - DNA, 82 bp, Homo sapiens
ctgaagactgctcagggctatcctctcagagtgacattttaaccactcagaatggatttctgcctgatcctccaagaatacg

SEQ ID NO: 436633 - DNA, 100 bp, Homo sapiens
agccaacttattggcatgatggagtgacaggaaaaacagctggcatggaagattgcattctcacaacacaatacaatcatggaccttgtgcagttttttg

SEQ ID NO: 436634 - DNA, 82 bp, Homo sapiens
ctgtgctcgcgctactctctctttctggcctggaggctatccagcgaggatcccttttcccccagaaattactcaatgctga

SEQ ID NO: 436635 - DNA, 75 bp, Homo sapiens
cgcggcggcggcgttgacaatggtggtcttcgagggatagcacgaggtggtctgacaggactaacacttaccagc

SEQ ID NO: 436636 - DNA, 100 bp, Homo sapiens
tcaaggatgggacaccctggatgcactggagaggggtctcctgaaaaccctgcagaaactggatgaatatctgaattctcctctccctgatgaaattgat

SEQ ID NO: 436637 - DNA, 99 bp, Homo sapiens
tccagtaatggtggatgaagttgttcattgtttgtcaccacaaaaaggacagggaagtgccagacacagcttcagaatgtgactccttaaattcttcca

SEQ ID NO: 436638 - DNA, 100 bp, Homo sapiens
tcgccgcaggatctgtgagaatgggcctgactgtgcaggctgcaatgtgagcaaagactcaggtggactgaaggccgctatgatcgaattggtggaaagg

SEQ ID NO: 436639 - DNA, 75 bp, Homo sapiens
gcttccgggagggcggctcgcgggtgcagtagacattgttgcaatcatgatcggcaatctgaaaggcacaaaaat

SEQ ID NO: 436640 - DNA, 100 bp, Homo sapiens
gaggccgagccgggatctcaggtcctcgggggcggcggccacgccaaggacggatgacaagagcacctcaaaggcagcagcctcaaggagcagccatggc

SEQ ID NO: 436641 - DNA, 100 bp, Homo sapiens
aatcgttaaacatctgaaagggtcaggtggaatgaatcttacttgttgaatatcttctggttactagttggattcatttgtgaaagaatcattttcccct

SEQ ID NO: 436642 - DNA, 82 bp, Homo sapiens
tctgcgtgagaatagagaccaccgaggcgtccgacctccgatcatgaacgggcccctgcacccgcggcccctggtggcattg

SEQ ID NO: 436643 - DNA, 96 bp, Homo sapiens
gaggggcaaccaggaggtgcgtgtggctgcagagcacacagataaactcatcctgaaagtcgctgttgttctcctgctgagcaagaatggaggccc

SEQ ID NO: 436644 - DNA, 83 bp, Homo sapiens
cggtgtggggcggtcccggccccgcagtattctaccttgtaaatactgttatttgtatatactgtaaatgatgacatcggtgg

SEQ ID NO: 436645 - DNA, 100 bp, Homo sapiens
caaataatgcgacgatatggagaacagcctgctagcttaaagatgacggcgccttgaggtaagctacaggcaacaccacttccgcgtttctcttgcgccc

SEQ ID NO: 436646 - DNA, 100 bp, Homo sapiens
cgaagcccaagagctggcctcgccacgaagagctgcagctttggaacagttcaagtctcttggtgctgagcccttggaggtggacttgaaggaatctggt

SEQ ID NO: 436647 - DNA, 100 bp, Homo sapiens
tctttccagcagaagcccagcggcaaaaatctcaggaactgaagaggagtttggaggtcttgtatcagctaatcttatacttttgaggaacagacttctg

SEQ ID NO: 436648 - DNA, 90 bp, Homo sapiens
gagaagccaaacctaagcggcggaagaaaaaatgatcttccagtggtccccagctcaaagaggtctgctgtttcagctccaaagtcaacc

SEQ ID NO: 436649 - DNA, 100 bp, Homo sapiens
ggattttggaagagggagtcaccactggacctccaaggaagccacgtgcagacatctacaaccttcgatctcctgacgaatatttggtttccaggcagga

SEQ ID NO: 436650 - DNA, 100 bp, Homo sapiens
aaggacagagtcagtgatttccataaattgaagcaaagatgaaacactagtgcattgtagtctaaatgagctagaagatgcagcacttacttttccagtc

SEQ ID NO: 436651 - DNA, 100 bp, Homo sapiens
aggaggttggtgcatgggtccaatatacaagcatcttctgtcctgaatacagtatctccttaagttgcaaataaaattgaatccattccagtcaaaggaa

SEQ ID NO: 436652 - DNA, 100 bp, Homo sapiens
accatgttcacgtgacatcaagaggaagcggaaaccagtggccacagcatctttgtctagccccagtgcaggaaacctggacaagcatgaagaactagag

SEQ ID NO: 436653 - DNA, 96 bp, Homo sapiens
tcggcatgtcctctgaaaactcgggaatttgtcactgaaatggtgacaggagtgaaaatgcctcgtgtaaaagcagctcaagctggaagacagagc

SEQ ID NO: 436654 - DNA, 100 bp, Homo sapiens
cgtggtgggggaactgctggggaaggcgattggcatcgatctctccatcccttccgaggcccgacttcgtactatactggcaattgctggagaagatttt

SEQ ID NO: 436655 - DNA, 101 bp, Homo sapiens
gatgagattgatcagtacctcagcaaacaggacgggaagatttacagaagccgagacccacagctatctctgcactcgtcctaagagcccaggcctccgag

SEQ ID NO: 436656 - DNA, 100 bp, Homo sapiens
caccaatcagcatgctgtgtctagctcaagagcctggcccaactagagaatctgtgcaaacagctgtatgaaaccacagacacaaccactcgactccagg

SEQ ID NO: 436657 - DNA, 100 bp, Homo sapiens
gacctgggactgctcacagccagttctttatagctccaagctctacagattcttcaaatatattgagaatagggatgttgcaaaaacagtgttaaaggaa

SEQ ID NO: 436658 - DNA, 98 bp, Homo sapiens
accaaatctccaggtttttcgttatacctcttcactcaggctctgcccagaactcaagcttgaagctcaactagagaaaaaggaccaacaatttaaag

SEQ ID NO: 436659 - DNA, 82 bp, Homo sapiens
cttagctgtgctcgcgctactctctctttctggcctggaggctatccagccggaatggccaaagactatgacgggtcttcct

SEQ ID NO: 436660 - DNA, 100 bp, Homo sapiens
ctctaagagatgcctgcagcctgccatgggacgtggggtccaccggtacaggcccagatgggggaaccccgggctggggccgccctggacgatggcagcg

SEQ ID NO: 436661 - DNA, 74 bp, Homo sapiens
ctaatcatggaatttctccctggagattctcctgcccctgaagcttctgccctttcccaggaagagaacccaag

SEQ ID NO: 436662 - DNA, 85 bp, Homo sapiens
gtcatgctgcgccatgaaaacatccttggatttattgctgctgacaataaagccttttgactcggatgaagagacacggaagggg

SEQ ID NO: 436663 - DNA, 100 bp, Homo sapiens
tgcacaggcagacgcgggccagcctcagcaccgacagccgacgcgcagatagcagagccatccttggggccctgtctcagcgggaccctcctcacaacaa

SEQ ID NO: 436664 - DNA, 100 bp, Homo sapiens
atcttcccagagtatgaatttctctatgatgagcactaacactgtgggacttggtttgcctatgtcaagatcacagccccccatgggtgaggagggcaac

SEQ ID NO: 436665 - DNA, 158 bp, Homo sapiens
gacggaacctttctcctccgcttcagcgactcagagattgggggcatcaccattgcccatgtcatccggggccaggatgagttcgaggaagggctgctggacagatgtcctgccccaggaccccatcccgcgctggtggagggtcgcaggagcagcgt

SEQ ID NO: 436666 - DNA, 101 bp, Homo sapiens
cagctgagggctccggggtaggtgggtgacggcggtcggaggtgtaggagggagccgtggaggtccagatactctcagcccctgcatgaagaaatagcatt

SEQ ID NO: 436667 - DNA, 100 bp, Homo sapiens
cccgaaacccccatctccggcggagagaccgtccgaggtaattgtctgccacgagtgcacattctgaaaacagttgatcgtggaacagcaggatgagcag

SEQ ID NO: 436668 - DNA, 99 bp, Homo sapiens
aaggtctacaaactcgtcatccacaagaagggctttgggggcagtgggtatggtggctgtgtctggcagtttgtcagtgcttctggattccattatctg

SEQ ID NO: 436669 - DNA, 95 bp, Homo sapiens
acgacggtggcgtttgacgtgcggcccggcggcgtcgtgcattccttctcccataacgtgggcccgggggcaaaaactgattattccaagtggaa

SEQ ID NO: 436670 - DNA, 100 bp, Homo sapiens
ttctcagaagagaattccacaaggtgtctgcttttggggcagagttttcatcggaggcatgcagagagttaggcttttctagcaacttgctttgcagctc

SEQ ID NO: 436671 - DNA, 75 bp, Homo sapiens
ggaaggaccagagcccagtcagctcaaaccactagttatacagggaaggcccggcgactgaagcaggcaaaggag

SEQ ID NO: 436672 - DNA, 101 bp, Homo sapiens
aaaacttcagagacctaagctttttccagagaagagaagctttactggtgttccagccctaaggtctcagcagcttgaaaaaccattcgctggaaaggaag

SEQ ID NO: 436673 - DNA, 98 bp, Homo sapiens
ataccactatttgttgagaaatgtgtggaatttattgaagatacaggcaatggtggcttgctatccgggaaatggaacaggttatgttcgccacgtgg

SEQ ID NO: 436674 - DNA, 90 bp, Homo sapiens
gttcgcgtctctctgctgcggcgcggggaccgctgtgctctcgttccctgacatcgtggagttctgcgaggccatggccaacgccgggaa

SEQ ID NO: 436675 - DNA, 88 bp, Homo sapiens
aagagcaaagggccttctgcaggcatcgttggcttcacagtatgactgatgatcctccaacaacaaaaccacttactgctcgtaaatt

SEQ ID NO: 436676 - DNA, 100 bp, Homo sapiens
aggaaaggggaaaatgtctcagtcgaaaggtcactgcccagccccaccctcgacccaaccaggatgaagaatgggcaagccagatagctacagtaatcga

SEQ ID NO: 436677 - DNA, 98 bp, Homo sapiens
ggaaactcacagcctcagcaaaagcaatttgaatcaacccatagaagtgacagcgctgtattcatttgaaggacagcagcctggggatttgaattttc

SEQ ID NO: 436678 - DNA, 82 bp, Homo sapiens
aggaatagggtgaatgaatctcatcagaaaagcagactcccaccactacccaggaccaactcctgctcctgaatcttctgat

SEQ ID NO: 436679 - DNA, 50 bp, Homo sapiens
ctagacccatcgctgttacatggagaagatatgaggaaagcactttccag

SEQ ID NO: 436680 - DNA, 75 bp, Homo sapiens
ctcaccaaaaacaacatctttccagaaagagactcctgaaacagactactctttgcctttttgctgcagttggag

SEQ ID NO: 436681 - DNA, 90 bp, Homo sapiens
gagaaatttcaggatacagcagaagcattagcagaagtgatgagagcctatttacaacagctaaggcaagagactggactgagactttgt

SEQ ID NO: 436682 - DNA, 100 bp, Homo sapiens
cacgcggacatcgtctcctgtgtggcgatggtcttcctgctggggctcatgtttgagggggaaatttgcagtggtgagaaaatgtataaagaaagattct

SEQ ID NO: 436683 - DNA, 100 bp, Homo sapiens
acagtgggggtgtgcaaacccgagagaactgggatgccaaccctgtggtaattgagccatcatctgttttgaatggaggaaaatactcatttggaactgc

SEQ ID NO: 436684 - DNA, 100 bp, Homo sapiens
gcagtgtccatcattgagtgtgacatgaacagattttattccctcaaagttgcccccaaagttaaagccacagctgcgcctgcaggagcaccgccacaac

SEQ ID NO: 436685 - DNA, 98 bp, Homo sapiens
cagaagcagacccgtgccggccagcgcaccaggttcaagaaccgggggcggctggcagacaagaggacagtcgccctgcctgccgcccggaacctgaa

SEQ ID NO: 436686 - DNA, 82 bp, Homo sapiens
aagaatatgaagacatagctgtgaagctgggaactgatctagaatagcctccccaaagccagtcctgtgtcaccaatcaaag

SEQ ID NO: 436687 - DNA, 74 bp, Homo sapiens
cttttgcagagtcactcaggacaagcttgaaggttttacgactactagatgtcattggtttgcctgaactggtt

SEQ ID NO: 436688 - DNA, 90 bp, Homo sapiens
cgagccgcgaaccgagcgggcggcgggcgcgcgcaccatgggggagaaacccgggaccaggttggatccatgccgtctacacccctgtag

SEQ ID NO: 436689 - DNA, 97 bp, Homo sapiens
aaagaactaaatgaatttaaaagcacagaaatggaagttcatgaagagagtcgacagtttacaaggtgaaagtgggagatacattggatcttctcat

SEQ ID NO: 436690 - DNA, 97 bp, Homo sapiens
ggtgaaaaatatatccgcagggttcggatgagaccagcaaactgaaaccgtgtcagttcagtcttcggtattggggaagggtgtaaaacatcgaccc

SEQ ID NO: 436691 - DNA, 100 bp, Homo sapiens
aatctgtagaccttccacactgccacctgattaaaggaattgggaagtcgttgcatatgatgatcccaaaattccacttttcaacacagatgtggacaac

SEQ ID NO: 436692 - DNA, 99 bp, Homo sapiens
ttcaactgcgcagaatctaccaacttcgccaccctgcggtggattgactacggcaaagtggccactcaggcggttaaagaagaggggcaagatcctgat

SEQ ID NO: 436693 - DNA, 75 bp, Homo sapiens
cgaggaagttttctactgtaaagtcaccaacgagatcttccgccactacgaatccacctccgacccttaagccag

SEQ ID NO: 436694 - DNA, 89 bp, Homo sapiens
tacacctcatccctgtacgggtgcctggcctcgcttctgtcccagttttaaaatcaaagatgggaaaatcggagaaaattgcccttccc

SEQ ID NO: 436695 - DNA, 98 bp, Homo sapiens
tgaaaataaagatgacagctccagtgacaagctacgtggagcctggttcaggtccttttagttaccagagagaacttctctatcagagggaagatggc

SEQ ID NO: 436696 - DNA, 101 bp, Homo sapiens
gatactccagaaaatggagaaactggaaaaagtgacccattttgtgtggtagaactgaacaacgatagactgctaacacatactgtctacaaaaatctcaa

SEQ ID NO: 436697 - DNA, 90 bp, Homo sapiens
cgggatttgggcctgcagccagcattgagatgaccctcaagaaccctgagctacaactagatgcttttgaagtagaaaaacaggcattgt

SEQ ID NO: 436698 - DNA, 75 bp, Homo sapiens
ttgcctgttgtagcatttggacgaccattaccaaaattaactccacatatcaccttttgccatgatagcatttct

SEQ ID NO: 436699 - DNA, 100 bp, Homo sapiens
cggacgcgtacggctgcctgggggagctgaggctgaaatctggtgctggagaatctggtaaaagcaccattgtgaagcagatgaggatcctgcatgttaa

SEQ ID NO: 436700 - DNA, 101 bp, Homo sapiens
ggtgtagacgctgatcaccgtttccagtcattttaaaaattcaggcaatactgaacactgcgcagcttgcagaggtctcctggcagccctcattaggaatt

SEQ ID NO: 436701 - DNA, 75 bp, Homo sapiens
ccaagagaatgtgtcagccgatgcaccgagtccagcccaggaaaatggagagattgtcctgtgagttcctgagtg

SEQ ID NO: 436702 - DNA, 100 bp, Homo sapiens
ggcggagcgccatggcctgcatcctgaagctataaggaagaccagatggatgagaaactaatggaacctctgaaatatgctgaacaacttcctgtagctc

SEQ ID NO: 436703 - DNA, 75 bp, Homo sapiens
actgcatatgacaactttgttgaacttgtagctaatttgaaggaaggcacaaagattcaacctcatcttccctaa

SEQ ID NO: 436704 - DNA, 100 bp, Homo sapiens
gtcatccgcatcaacaagatgttgtcctgtgctggggctgacaggccgctacctgtctgaggaacccgagccctacctggcagtctacctgcactcggag

SEQ ID NO: 436705 - DNA, 108 bp, Homo sapiens
attagcttcgcagtctggaaagctttaggagttcacagtgaactagaggctgctatccagccagatactagcctggtgtcagtcatgactgtgaacaatgagattgga

SEQ ID NO: 436706 - DNA, 107 bp, Homo sapiens
aacacttaaaatggtactcggggacctccaaagactaaactgacaagccttcaaggagcccaggggccctgtgcaccaaggtgccggaactgatcagaaccatcatg

SEQ ID NO: 436707 - DNA, 83 bp, Homo sapiens
ggcggctgcaggcttcagcctgcgctggttggtgaaacagagatgtcaggtcagcccaaggctgccccctcggtcactctgtt

SEQ ID NO: 436708 - DNA, 87 bp, Homo sapiens
tgctgctaaaaacaagactggggctgctcccatcattgatgtggtgcgatcggcagaggcaaggctggcagcaaaacgggctgcccg

SEQ ID NO: 436709 - DNA, 100 bp, Homo sapiens
agccgcctcctagcggcgcggcgctcgctcctacggtgatgcagaagatggggaagaatatgatgacccttttgctgggcctccagacactatttcatta

SEQ ID NO: 436710 - DNA, 75 bp, Homo sapiens
ggaaactgaggcatctaatatgaagggcttctgtatgtaatgtactgttgacttgctgcaaagataatgtgtgtc

SEQ ID NO: 436711 - DNA, 49 bp, Homo sapiens
cctgtgtgacaccaagataagtaacgtggaaaggagactatggaaccag

SEQ ID NO: 436712 - DNA, 100 bp, Homo sapiens
tctacagcctcgtcaaccagcagagcttccaggacatcaagcccatgcgggaccagatcatccgcgtgaagcgtattatgcctacctgtattcttatgtg

SEQ ID NO: 436713 - DNA, 100 bp, Homo sapiens
ccggcgtggggcgggacagcggccccctggagggggcagtcccgggagaacctgcggcggccggagcgaaatcaatgtggactgaacataaatcacctga

SEQ ID NO: 436714 - DNA, 72 bp, Homo sapiens
gaagtccagagctgaggactgcctgtttgcagtttcagacccaaagtttacgcctatcagacctacacagaa

SEQ ID NO: 436715 - DNA, 75 bp, Homo sapiens
cgctacgtgactcttttctccagattgctgctaaaattgattcaattcctcacttgaataattccacacctctag

SEQ ID NO: 436716 - DNA, 90 bp, Homo sapiens
accaacattttatacatctgatggtgttcctttcactgcagctgatccagaccttagctggatctccaaaatacaagtgaatcacccggc

SEQ ID NO: 436717 - DNA, 100 bp, Homo sapiens
tggagcggaagatcttggacctctacagccttagtaaggaatccagacgctctgcagtgtcccatcgtcttatgcggatggcggggaaaggcctccattc

SEQ ID NO: 436718 - DNA, 97 bp, Homo sapiens
ccaggacgatttaaggatttttaccagtttacttttaattttgcaaagaatccaggacaaaaaggattagaaacctctgtagaggagcaggatgcaa

SEQ ID NO: 436719 - DNA, 90 bp, Homo sapiens
gtggccagaacatctcttcgtactaaagttcatgctgaacttgcagatgtcttaacagaggtgaatatgcaggttttgatgagacgcagc

SEQ ID NO: 436720 - DNA, 90 bp, Homo sapiens
ccaacacacggtccacagctcatcatgatggacttggagctgccgccgccgggactcccgtcccagcagagactctccaacatgtgcctt

SEQ ID NO: 436721 - DNA, 75 bp, Homo sapiens
tgctcagtctctgtcagaggaagatcccttgggcgacatggagtccaatgggaaatacatcaccaaatctggaac

SEQ ID NO: 436722 - DNA, 75 bp, Homo sapiens
ggagaatggagcgggcgggcggcgacaatgcagatcttcgtgaagactctgactggtaagaccatcaccctcgag

SEQ ID NO: 436723 - DNA, 75 bp, Homo sapiens
accttgaaaagcggcacgacaacattaaaccatcagatgaggtgctggacgtcattgctcctccttatacctctg

SEQ ID NO: 436724 - DNA, 100 bp, Homo sapiens
agtcatctggtacaagaatggccggcctctgaaggaggagaagaaccgcatccgtgtcattctggaccttactcccaactaccggggtgagaactcgtgg

SEQ ID NO: 436725 - DNA, 100 bp, Homo sapiens
gcacatccttctccatgatgcctacatgttctgcatcattgacaagtcattggttctagtaaataccgcttgctgtgttttgatgttggtggctaagctc

SEQ ID NO: 436726 - DNA, 75 bp, Homo sapiens
agccgatccagcctgcggagcctgtggggcagattgccttgggtccccagtgtttactcccatcaaggcagacat

SEQ ID NO: 436727 - DNA, 100 bp, Homo sapiens
aggacattgcgttcgaggtggaagattgtgactacatcgtgcaggtttccatgctgagctcctgcccatcttcagtcctgaactctctcccagaaacctg

SEQ ID NO: 436728 - DNA, 75 bp, Homo sapiens
ttttaattttgccggaatatttcaagacaccgaaagctgtagaaattcttgctgatataatacaaaacagcacat

SEQ ID NO: 436729 - DNA, 100 bp, Homo sapiens
tttagttccatcaaacacagaggaatgaccaccatggcagatggcaacagaggatgtcaacaattttttggagatgccttcaattaagttgcagagttct

SEQ ID NO: 436730 - DNA, 110 bp, Homo sapiens
ctttctcaacctcatcttctggggaaaggtggcccagacagcgtgtatgtcagcttgcaagcatttagccacatccttgatgcaacttttgttggaagctgaagtgcggc

SEQ ID NO: 436731 - DNA, 51 bp, Homo sapiens
ttccaaatgaatttgcaaaacttactgtagccaagacaatgcaaactccag

SEQ ID NO: 436732 - DNA, 73 bp, Homo sapiens
gctgagggaaaagcgaggcaaggcaggcgggaatatgctgaatttcagtatcggaggaggcacagacaacgtc

SEQ ID NO: 436733 - DNA, 100 bp, Homo sapiens
tcatcctgctgggcttcgtccagatcgggaagggagtgttggaggaagcagaattttacaatatcacctcattaataaaacttgtaaaggacaaaattag

SEQ ID NO: 436734 - DNA, 75 bp, Homo sapiens
cacgccagacggccctccctcggggcgcgctcgcagacggagtccagttacaacacagggatcacaacaaacaca

SEQ ID NO: 436735 - DNA, 75 bp, Homo sapiens
tggtgatcgtggcaggttcaaatggctggtataattataggcaccagatacgaccatatgtgggatgtttggtac

SEQ ID NO: 436736 - DNA, 98 bp, Homo sapiens
tttgatccagaacttgcagcaacaataggcggcatattttctaccttcagcatcacttaaatggtaggtttcctcacagcatgacccagttgtcacct

SEQ ID NO: 436737 - DNA, 108 bp, Homo sapiens
cctcggcctccggcgcagcccggaaatgtccggcaagatcgagaaagcagacaatgcagatcttcgtgaagactctgactggtaagaccatcaccctcgaggttgagc

SEQ ID NO: 436738 - DNA, 100 bp, Homo sapiens
ggagactgactgcctatgaatttgctaaacttaaaagcaagctggttctctgggatataaataagccaagggaagagatggtgttgagtggaaaatacaa

SEQ ID NO: 436739 - DNA, 98 bp, Homo sapiens
ctcagggcagtattgctgcagccttggcttttcttcctgacaacaccaaccagcctgaaggaatgtacctcaatggaaaagaaaatgaagatgctcat

SEQ ID NO: 436740 - DNA, 83 bp, Homo sapiens
gttcgcccgtccccctgccccgttcacaatgaaggtgggagtcaatcattttgacaagtctcctgaaaggaacagctagcagg

SEQ ID NO: 436741 - DNA, 75 bp, Homo sapiens
agaacacatcaagcatttatgcggtgctgggcctaaaggagataacatttatgaatggagatcaactatacttgg

SEQ ID NO: 436742 - DNA, 83 bp, Homo sapiens
gcatgtccttcgcctgccagtcatgaaggatttgggggcagagcacttggcaggtcatgaaggggtccaacttctcgggttgt

SEQ ID NO: 436743 - DNA, 100 bp, Homo sapiens
ttacagttgcgctgcccagggaccgatgttgcgcgaggaaaatgcgggacgcccagccatacacactgctgctatggatatgctgggaggacctggtatc

SEQ ID NO: 436744 - DNA, 113 bp, Homo sapiens
cggcgccagacccgaggcgctagggaagatcgcaccgcggacgcccgctgagcttggcgcacgggccgaccagctctacgaactcgacggggaccccaagaggaaggaattcc

SEQ ID NO: 436745 - DNA, 100 bp, Homo sapiens
agttaaacccaggaagctttggatcagacttttgtgttgcagttcgggattctttctactaatccagatacttgttgaagtgctgactagtttcttgggg

SEQ ID NO: 436746 - DNA, 100 bp, Homo sapiens
cctggggactcagaggagtacttcgccacttactttaatgagaagatctccattcctgaggaggagaggaaccagactagcatttctcagtgggttccag

SEQ ID NO: 436747 - DNA, 75 bp, Homo sapiens
ggagaattctggtcactcagtgacacacacaactcgggcctccccagcgacagtgcgatgcttcagtacctctgt

SEQ ID NO: 436748 - DNA, 73 bp, Homo sapiens
tgaagccccagcgccgggccaaggccaaggccagccggactaaaacaaagttccaggaatggatggaggtgct

SEQ ID NO: 436749 - DNA, 98 bp, Homo sapiens
aatgaccacctagagccttggatccaggagaacggcggctggaggcattcgacttacagcagtgtgcggccagccagcagaggggtgactcaacgctt

SEQ ID NO: 436750 - DNA, 73 bp, Homo sapiens
gaggagtctcagagctgtcagaaaggctcaacagtcactggagcttatccagtcaaaaatagtaaaagctgct

SEQ ID NO: 436751 - DNA, 158 bp, Homo sapiens
gatccacgaaaggtgctaatagtagctggccatcacaactggattgtagctgcatatgcccattttgctgtgtgttacagtgagaaagatcagtctaaagaaaaggagaagaaagtgaaaaaaacaattccttcctgggctaccctttctgccagcca

SEQ ID NO: 436752 - DNA, 82 bp, Homo sapiens
cactgaggctctggaacttctgcccagctctccttggtgtggacactgccagcggctgcagccgacttggaatgacctggga

SEQ ID NO: 436753 - DNA, 90 bp, Homo sapiens
cggcggcgccggcctccggggagaaacggtatgcccaagaggacagagaacgaatgcacagaaatattgtcagccttgcacagaatctcc

SEQ ID NO: 436754 - DNA, 115 bp, Homo sapiens
gcccaatgcatgaatgaatgagttcctctctgcactgcactctgctactgttcctacctaatggcttccagattgtctacaaagcctggctctgttcccagtattttgaagtcac

SEQ ID NO: 436755 - DNA, 100 bp, Homo sapiens
agccaggccgactacctcaacctggtgcagtgcgagacgctagaggttctttggggtgactttcaagatggactctactctaacagcaagtgaaatccgg

SEQ ID NO: 436756 - DNA, 108 bp, Homo sapiens
cggtggatacgtcgccatcttggatccgcgggacaagaaaattcatgcgggacatgagagatggctttagaagaaaaagtttctactcttcccattatgcgagagagc

SEQ ID NO: 436757 - DNA, 75 bp, Homo sapiens
cacctggataaccttttgctaacaaaaacagctctggccaggctgccgcacctctacaggaactttgccgcggag

SEQ ID NO: 436758 - DNA, 101 bp, Homo sapiens
gatttataccggttcagcaagtatgttctcagaagctatacactcattatctgatacttgtaatcaggctttcatctgagtggcacagtaactgagctggc

SEQ ID NO: 436759 - DNA, 75 bp, Homo sapiens
acaactgctggaaggagaagcagcagaggctcagaaacacttatgggattttctaagcacggagggttcacttcc

SEQ ID NO: 436760 - DNA, 91 bp, Homo sapiens
tccagcatggacgtcttccacctggagggcatgactacatctgtcatgacgttggacctctcgaacaaccagctgagcgagatccctgcag

SEQ ID NO: 436761 - DNA, 50 bp, Homo sapiens
ctgtgggctgttgcaaggaattgcagatgccacttcaaatgaacaacaag

SEQ ID NO: 436762 - DNA, 100 bp, Homo sapiens
cagagctcaatgggggaccacagcatgcacttccttccagcagctacacaggtcagggccaaaactggaaccaaggatttaataactattatgatcaagg

SEQ ID NO: 436763 - DNA, 100 bp, Homo sapiens
cgactgcggcctgaactctagggagccgggttgatttttaaagcttcaaaatcctaagactcagcactgttgcgggatatgaggccccaggattcctggc

SEQ ID NO: 436764 - DNA, 75 bp, Homo sapiens
ggcatccatgaaccttgatatagttgacctgcttaaaaaggccaaggacagaactgtaccgctctctttttggcc

SEQ ID NO: 436765 - DNA, 75 bp, Homo sapiens
tgaaaatggacacgtgggaggtttaaatcttcttgcagctggagccatggcagcggaagatccatccaaaagcta

SEQ ID NO: 436766 - DNA, 87 bp, Homo sapiens
aaagaggagccagttaccatgactcatccagaaacaaatcattgtggaccccttgagcttcagcgaggagcgctttaggccttccct

SEQ ID NO: 436767 - DNA, 80 bp, Homo sapiens
gatccagcctgcggagcctgtggggcagatctcacttccctgctaaccggtgggcggcccgccggggtgcacctctcagg

SEQ ID NO: 436768 - DNA, 73 bp, Homo sapiens
gaacaaatactactacatcccgcagtacaagaactggagagcttcgatgtttttgaagcaggcatttgaagga

SEQ ID NO: 436769 - DNA, 50 bp, Homo sapiens
gtttgacgacactgatggtttggatcttttgccagaaatgagggcatact

SEQ ID NO: 436770 - DNA, 100 bp, Homo sapiens
gccttagctgtgctcgcgctactctctctttctggcctggaggctatccagcggctagttgcacatagtgatttagatgaaagagctattgaagctttaa

SEQ ID NO: 436771 - DNA, 51 bp, Homo sapiens
ggacgcgcagtccatctctctcagttgttgaatgttgggtcacgaagatct

SEQ ID NO: 436772 - DNA, 101 bp, Homo sapiens
gaagatcgaaaattaaacctcagtttaagtgctgtggggctgctaactacacagattgggagaaaatcccttccatgtcgaagaaccgagtccccgactcc

SEQ ID NO: 436773 - DNA, 83 bp, Homo sapiens
gagctgtgcagccgcgaggaggcgcgggaggtgttcgagaacgaccccgagacgacttcccagactcccggccagccatcgag

SEQ ID NO: 436774 - DNA, 100 bp, Homo sapiens
ggaagatggcgcctgttgtgacaggattcttcttgatgaactatcttctactaaacattgggcatctatgcacgtttcagaccacagtggatttcactac

SEQ ID NO: 436775 - DNA, 100 bp, Homo sapiens
ggctctgccgtgccacctgctgcacccacgaatctgcccacccctcctgtaacccagcctgtttcacttcttggtgccacatcatctcacagttcaacca

SEQ ID NO: 436776 - DNA, 97 bp, Homo sapiens
cagcagcgccgtcccgtccgacagccaggcccgggagaagatttttagactctgaggagcagttggagctaatccacattatggaaatggaaaccac

SEQ ID NO: 436777 - DNA, 100 bp, Homo sapiens
gtattttggcccaggcacccggctgacagtgctcggtttggtgcacctcgatttggaggaagtagggcagggcccttatctggaaagaagtttggaaacc

SEQ ID NO: 436778 - DNA, 124 bp, Homo sapiens
cttcagtgttggctgataaaattgccctgaaactggttggtgaagaaggatttgtagatttgatccaggctaccaacgagaccaatgttaatattcctcagatggccgacactctctttgagcg

SEQ ID NO: 436779 - DNA, 82 bp, Homo sapiens
atgaggagaaggcattctaatttaggaacctggcttctgtatttaccatgtacctggagcattggtttggcagctgaaccag

SEQ ID NO: 436780 - DNA, 95 bp, Homo sapiens
cggccgacccttcctgtcgctgacggcgactgcgggaggccagaatctcacaaactatgatctctgcagcatttttcttggaacctctacgctct

SEQ ID NO: 436781 - DNA, 99 bp, Homo sapiens
gtcacaaagaactcaagaaaatcttcgaagacttttcattacccggctgtatgtgaattcttacagcacaataacttgttatctatactccgagcccac

SEQ ID NO: 436782 - DNA, 97 bp, Homo sapiens
ggccagccttggaagactatgtagtattgatgaaaagagggactgccataacattcccaaagaggtcctgctgtactagccaccaaagcagctgctg

SEQ ID NO: 436783 - DNA, 100 bp, Homo sapiens
cctgcatccaccagcagccaggaatccaaggggctgcgatttatccagttgaaaaatccttggagtcatttacgttggaaaggaagatacagtgaaaatg

SEQ ID NO: 436784 - DNA, 100 bp, Homo sapiens
agaggcgctggagctgggtcagtccgccgctcaccccgcggccgcaccttcccgccttctcagacggaagtgaaaatgtgacaggattggacctttcaga

SEQ ID NO: 436785 - DNA, 100 bp, Homo sapiens
gttgtcaaggtggcctaccaggaggccaggggtgtcgccatggtgcggcggcagcacatggagcgttgtaccagcttcctggtggatgagctgggcgtgg

SEQ ID NO: 436786 - DNA, 90 bp, Homo sapiens
cggaggacaggaagaaggaccactttaagaaaaatcgatgcctgtctatcgggatacagagaaaattgaaggccggagtcaaggaaatga

SEQ ID NO: 436787 - DNA, 82 bp, Homo sapiens
caattgtcttcagccatgggcctccaaagagagagaagctcttcagaaacagctggatgaagcaaatcgagaagcacaaaaa

SEQ ID NO: 436788 - DNA, 104 bp, Homo sapiens
ttacacccgtgcccaggagcttgacgccttagataacagccatcctattgaagagacgcaggtcagaatggaaatgggctgcagaccgggcagctattgtcagc

SEQ ID NO: 436789 - DNA, 90 bp, Homo sapiens
caagtgagcgatttggtgaacagacactcccttctgtaggctgagctcattggaagtctcacccacaagctggagaccctccaggaggcg

SEQ ID NO: 436790 - DNA, 100 bp, Homo sapiens
gagagttctacttcaggtttcactcctggtggaggaggctcttcagtctccatgggaaatgcaataccttatttccagatgactcctatcagcacttctc

SEQ ID NO: 436791 - DNA, 100 bp, Homo sapiens
agcacattagccaaagaatgccctctctcccagcaagtctggaaaagtttgaaattccagtaaaaattcgtttgagtcctgaaccgtggacccctgaaac

SEQ ID NO: 436792 - DNA, 90 bp, Homo sapiens
ctgggaaatgaaagagcgccttgggacagggggatttggaaatgtcatccgatggcacaatcagatttgaagaacccaagtgattcagca

SEQ ID NO: 436793 - DNA, 100 bp, Homo sapiens
ctcgacttatttcagagaccacatctgtgtgcaaaccagaacaggtggccaaacaaattgttaaagatgccataataaagctgtacaccaagcatgggac

SEQ ID NO: 436794 - DNA, 100 bp, Homo sapiens
cagagatttcatcatggtctcccaggccctcaggctcctctgccttctgcttgggcttcagggctgcctggctgcaggtctgagagtcactggagctacc

SEQ ID NO: 436795 - DNA, 82 bp, Homo sapiens
attgaaaacgaacttataaagttctgccgggaagcaagaggcaaagagaatcggttgaagctggaggatcaggagcagcggg

SEQ ID NO: 436796 - DNA, 75 bp, Homo sapiens
ccacatggcaggaggcaaattgtgcaagtacaacaaataacactgtgactccaacctcacaacctgtgcgaaagt

SEQ ID NO: 436797 - DNA, 51 bp, Homo sapiens
atctactactgcaatggccatgttgactatattgtggagtatgactatgat

SEQ ID NO: 436798 - DNA, 83 bp, Homo sapiens
caggcctagtttgactctgacagtcctcccactaaggggacaccgtggtgtttaaggatggccagtactggatccgaggccgg

SEQ ID NO: 436799 - DNA, 97 bp, Homo sapiens
atggtgctgagtttcctggtagagccggccgagctgaggcggtcgcggccatgaaggaatagccaggccagaagaaggaaggcctgtggtgagtggg

SEQ ID NO: 436800 - DNA, 82 bp, Homo sapiens
tgactccatcttcttcctctcggtcgccatgcatcagatcatgcccaaaggtttttagaacttcagccataaaaatgggcag

SEQ ID NO: 436801 - DNA, 117 bp, Homo sapiens
gggtgggcaacttacccgagaacgtgcgggaagagaagatcatcgagcatttcaaacgaaacgcttcgttaagggactcaggcagtacgggaagaacttcttcagaattagaaagga

SEQ ID NO: 436802 - DNA, 74 bp, Homo sapiens
ccgggggcccgaggaggtgaaccggctcacggagagcacctaccgggtggctttaaccaagagagcagatccag

SEQ ID NO: 436803 - DNA, 80 bp, Homo sapiens
cagactctcctgcagaccttcccaggaagccagagccacacacaccatcatggtcctgagggctctgaactcctacttcg

SEQ ID NO: 436804 - DNA, 100 bp, Homo sapiens
ctgatgacaccttctactttgacaccgagttcacgtcccgcacacccaaggaaattccgggtagatatgcctggctcaggcagtgcattcatccccacca

SEQ ID NO: 436805 - DNA, 110 bp, Homo sapiens
tggaagagtcctgtgccattaaaaacaacaaggaagctttcagtggaggaaataatgctggccatacagttgttgtggattctgtggaatatgattttcatctcttaccc

SEQ ID NO: 436806 - DNA, 100 bp, Homo sapiens
tgactacctggctgccatagatgaggccctggcagccttgcacgtgacggggtcgggccccggctcagtggtcccaggcagctcgggtgtcggaaccccc

SEQ ID NO: 436807 - DNA, 82 bp, Homo sapiens
tatgcaggaaattttgtggaatgagaaagatcagtctaaagaaaaggagaagaaagtgaaaaaaacaattccttcctgggct

SEQ ID NO: 436808 - DNA, 98 bp, Homo sapiens
aagagaacatgcattaacatcaggcacgataaaagccatgttgagtggcccagcctcattgactgttatttcagtaaaggccgtctcaggcatgatca

SEQ ID NO: 436809 - DNA, 100 bp, Homo sapiens
gaaagtgaaatgtcatgcctctgaaaatgaagaaaacaccaccactcttcagttacaaatagctcgagataaaggactacttggggatattgccattcac

SEQ ID NO: 436810 - DNA, 83 bp, Homo sapiens
cctccggcgtgttcatgcccccggggtgtccctggccagtgtccttccacctgtccacaagcatggggaacatcttcgccaac

SEQ ID NO: 436811 - DNA, 80 bp, Homo sapiens
catggaactcagacatctgcaaatcatggtgaggagtaagaggagcaggctcctgcacagtgactacatgaacatgactc

SEQ ID NO: 436812 - DNA, 98 bp, Homo sapiens
agctttaattgaaggagctggtatcttgttgacaagatttgcctctgcacagtttcccaatgcaaaacaagctatcgatcagggaagatctccagtta

SEQ ID NO: 436813 - DNA, 82 bp, Homo sapiens
agctgcctcagttcttagcgcaggtgtttcccattaaacactaccaggacaaaatcaggccttacatccagctgccatcgca

SEQ ID NO: 436814 - DNA, 87 bp, Homo sapiens
ggactgtcgcgtcggcgcccgacgccggagtcagcagggcgcaaaagcgccggtgaagaacaaattggttttgagctagtggagaaa

SEQ ID NO: 436815 - DNA, 100 bp, Homo sapiens
aagaaacgggccgcgaaccgcagtatcatgctggccaagaagatcatcattaaggacggaggcacgagagtgataatcttcaaaatgaagactttggaaa

SEQ ID NO: 436816 - DNA, 82 bp, Homo sapiens
tggggcttaagatgtcctgcctgaaagcatcatcggctggttcgtgcgaagcttcaagtacttttacgggctccgcttcgag

SEQ ID NO: 436817 - DNA, 74 bp, Homo sapiens
agccgctactttgtaatccggatccaggatggtactggtggttatcactaggctaaaactggacaaagaccgca

SEQ ID NO: 436818 - DNA, 90 bp, Homo sapiens
agagatgatgatgttataatcagaatcaacacagatggggccgaatataacatagagattttagtccatggagaacagaatgaaatggcc

SEQ ID NO: 436819 - DNA, 98 bp, Homo sapiens
cagacactgtctttatggtttagatgctgacttggtggaaattcttgcttctcttcagaaaccaaagaagatttctttaaaaggctcagatggaaagt

SEQ ID NO: 436820 - DNA, 100 bp, Homo sapiens
tcgccgctggcgtcaggactattttcacgttttaatgccgagaggctagcttgtcactttctgcaaaggtttccctcagggagcctcctgctgccaggca

SEQ ID NO: 436821 - DNA, 100 bp, Homo sapiens
ctctgccacccagtggtttactggcataattactcatcatgatctcttcacccgcaccatgatcgttatgaatgatcagatgtgctgccaccagttccag

SEQ ID NO: 436822 - DNA, 88 bp, Homo sapiens
taggctcagcgtcagttacctgagagccaagagcttctttgatggaaagcaaagatatcctgttagtggatctaaactctgaaatcga

SEQ ID NO: 436823 - DNA, 76 bp, Homo sapiens
gaggcctcccgcaggggccgcatgctgtctggggctttttccctgtcgccttcggcttcctgggcaatgtctgcaa

SEQ ID NO: 436824 - DNA, 83 bp, Homo sapiens
ggggactacgacgtccctcaaaccttgcttctaggagataaaaaggttccactctggtgcaccctttcagagcgcttgggaag

SEQ ID NO: 436825 - DNA, 100 bp, Homo sapiens
gaagcagtacgagccattctactcatcttttgttgcactttccacacactatattacaacagtttgcagtctcacacacacaagaccgccaagcattaag

SEQ ID NO: 436826 - DNA, 80 bp, Homo sapiens
cccgccctgcagctgcccaagcagcccagctgagagccagcctggaggttacccagcagcaggccacccaggccgaaggc

SEQ ID NO: 436827 - DNA, 75 bp, Homo sapiens
gttcgtctcttacgtctgcggaagtgcagctgcctcagttcttagcgcagaaagttcaggagccctggaaaggag

SEQ ID NO: 436828 - DNA, 100 bp, Homo sapiens
cccgaacaacatgcaggtcctctataccgcactgcagcacagctcagagctggcgcccaaggaagaagttgcctatgaagaaagggcctgtgaaggcggc

SEQ ID NO: 436829 - DNA, 100 bp, Homo sapiens
cagaattatgagaacctggtctctgtagatcacaaaatttgtccaggatagacatagagctagaagaaacagacttcgtaaagatcaacttaagaaactt

SEQ ID NO: 436830 - DNA, 80 bp, Homo sapiens
gctcgctccgctcgtcccgctcgtcatggcctacccgggatacggaggaggggtctaggcgttttacactgagattctcc

SEQ ID NO: 436831 - DNA, 100 bp, Homo sapiens
gggagatcgtgggcgagctgggcgacggcgccttcggcaaggtttacaagggccaattcctgtccccccagcagcatggcatcgtgtgctgaaccctctg

SEQ ID NO: 436832 - DNA, 74 bp, Homo sapiens
gggtttaccatggcaatggggatttatactggggggctgacgtttaccctacgtcctggtgaggtgacggcgct

SEQ ID NO: 436833 - DNA, 98 bp, Homo sapiens
cgcggtggccagcgcgcagaggcgggcgcggaggcggctagaaggtgaccgcggatcccagcttcctgcagccagtccacaggtcctggctaccctgg

SEQ ID NO: 436834 - DNA, 100 bp, Homo sapiens
tcgacccgtacttgaagccctacgccgtggacttccagcgcagtttcctgtgggccgcatccacagacacttgaagactcgcaccacaagccatggaagg

SEQ ID NO: 436835 - DNA, 100 bp, Homo sapiens
cgccgcatcgcgggggtggaggacatcgacatccaggcgaactcggcctatcgctaccctccgaagtccggtttcaagtgccccatttgctccaagtctg

SEQ ID NO: 436836 - DNA, 75 bp, Homo sapiens
aagatggggttgtcctctttaagaagatacaaactggactctcaggacaaaacgacaccagccaaaccagcagcc

SEQ ID NO: 436837 - DNA, 82 bp, Homo sapiens
tgcggacccagcacgcctgggccgggggctgcagcatggatgaagccccacccgcccttcaggatgccagccttggcaacat

SEQ ID NO: 436838 - DNA, 50 bp, Homo sapiens
tttctggacacagaagtatttgtgacagtgtatcctactcagtacatgta

SEQ ID NO: 436839 - DNA, 75 bp, Homo sapiens
gcctccgaagtagctgggattacaggaatcaagaacccagtctcggttgccaacagactcttatgtgaagggcag

SEQ ID NO: 436840 - DNA, 75 bp, Homo sapiens
gtgctgggtgtcttctccctcgccagctggtatcctaagaaatccggtaaccaataagaagcattacagattgta

SEQ ID NO: 436841 - DNA, 100 bp, Homo sapiens
gtggataccccgagcggcaccaacagcggcgcgggcaagaagcgctttgaagtgaaaaagggcagggtgccatttgccgtgcctgacaaagtgctgtggc

SEQ ID NO: 436842 - DNA, 87 bp, Homo sapiens
ccggccggtgccagcacctttcggcttctgagacggcggcagcagcggcattcaggctccaggaggccagagctctactgaagcggc

SEQ ID NO: 436843 - DNA, 83 bp, Homo sapiens
cttctttcttctactctttcatccctttggaagaagctagtaggtccaatgaagcgtcaagtggcagtaaaatcaacccgagg

SEQ ID NO: 436844 - DNA, 75 bp, Homo sapiens
tggaccaagcagacagtgggggcaacaggacacagcacagatgatgattcagatctgtactctcccagatactca

SEQ ID NO: 436845 - DNA, 87 bp, Homo sapiens
ataaagaacatcaagaggttcaagatgcccatattcagcaaatggcggcgactgtgccaccctgctgaagaatattggagcgctgcc

SEQ ID NO: 436846 - DNA, 51 bp, Homo sapiens
catgaacggtggtgtgtttgctgtctccagaaaattccttgacatactcca

SEQ ID NO: 436847 - DNA, 51 bp, Homo sapiens
gttcagcatccccaagcagggggaggttttcaagctagaaatgcccttctt

SEQ ID NO: 436848 - DNA, 50 bp, Homo sapiens
cagattgctgctgtatgcagagagccaacagaagctgttcttccctctcc

SEQ ID NO: 436849 - DNA, 88 bp, Homo sapiens
ggttatggtgggaggagccgatactgagcttcttcctatttgccatggggtgaaacttcctacatccgagtttatcctgagagaagca

SEQ ID NO: 436850 - DNA, 75 bp, Homo sapiens
gaaaagtggcactgaggctctggaacttctgcccagctctccttgggacccgagctgatccagaaagccaacggt

SEQ ID NO: 436851 - DNA, 99 bp, Homo sapiens
gcgccgcggggatgggggcctcgggcgccccgcagccccccaacatcctgctcctgctcatggacgacgatgtaaatgaagaccctggagaagatgtgg

SEQ ID NO: 436852 - DNA, 125 bp, Homo sapiens
aattactgcaagtttgaggactggctgatgcccattctggaccagatggtgatggagcagaacacagaggtctcctctgagcctccggcctccataagacccaaaacagatgacacctcttccca

SEQ ID NO: 436853 - DNA, 95 bp, Homo sapiens
ccatcgccgcttctagaccctactgcggtctcggatattgccggacaatgcagatcttcgtgaagactctgactggtaagaccatcaccctcgag

SEQ ID NO: 436854 - DNA, 100 bp, Homo sapiens
gtttcagagaaagttacgtggagcgtgggcgtttcgcagactcctaagtggtcctttggcgtgctcctctgggagctgatgacaagaggagccccacctt

SEQ ID NO: 436855 - DNA, 90 bp, Homo sapiens
gttggattctgaagattataatacctgtgagatgccttcaattaagttgcagagttctgatggagagatatttgaagttgatgtggaaat

SEQ ID NO: 436856 - DNA, 85 bp, Homo sapiens
attatcaaagcttttggactcttatttcaacaattccaactagccgtttaaaattcctcaaagaagctggtcatggaacacaaaa

SEQ ID NO: 436857 - DNA, 74 bp, Homo sapiens
cgatcctcccaccttacccttcctgaatggatggggccacaggccctcgggaccaaggatcacgtcatgactcc

SEQ ID NO: 436858 - DNA, 109 bp, Homo sapiens
gcggcagcagccgctctgagggcgcctgctcaggttcttgggtgtctctggggagtccctgggccagaccttcctccagactccagcccacctcttcggagcagctctg

SEQ ID NO: 436859 - DNA, 100 bp, Homo sapiens
ctgggtggtctggagaccatggagaccctcacggagctgggcgacgagctgaccctgggagacatcgacgattgtaaaccatggctgtgtggatacaagc

SEQ ID NO: 436860 - DNA, 80 bp, Homo sapiens
atctggtccagttactatggaaactgccgttctctcctggtgtctcaaaggctgttgagcacatcaataaaactattgcg

SEQ ID NO: 436861 - DNA, 99 bp, Homo sapiens
tgacacagaaggtgtgaccccaacgaagagtggagaacggcaacccatccagatcaccatgccgggaggtggggaagacagggctccagctaccacagg

SEQ ID NO: 436862 - DNA, 96 bp, Homo sapiens
cccctaaggagttgggtggactcggcatgctctcaatgggccatgtgctcatcccccaatccgacctcaggggtgagcacagacaggatcgcaggg

SEQ ID NO: 436863 - DNA, 75 bp, Homo sapiens
gaggatgatgtttttggtgaagatatcttcacagtcatcacttcttggagttggttaccttgcttctgtcaattc

SEQ ID NO: 436864 - DNA, 97 bp, Homo sapiens
tggggcggccggccaggaaccacccgttaagggtatcactgggatacatcagattggatgccaagcgttcctctgccggacatacaagagttcccca

SEQ ID NO: 436865 - DNA, 100 bp, Homo sapiens
tgaggcctccccagccctgcagaacagctatctatgtgcctgctgatgacttgactgaccctgcccctgctactacgtttgcccatttggatgctaccac

SEQ ID NO: 436866 - DNA, 99 bp, Homo sapiens
tgagtctctcctgcgccgagccttcggggcgatgtgtagtgccttccatagggctgagtctgggaccgaggagtccaacctataccttctcagggaggc

SEQ ID NO: 436867 - DNA, 75 bp, Homo sapiens
caggcgctctgcacaggaagctgcaggacactttgccaccatcaccttgaccttcatcgacaagaacggagagac

SEQ ID NO: 436868 - DNA, 83 bp, Homo sapiens
catgagccgctacatactcatcatggggctcctgtacaagcgtccgtctccaagagagtatgaagagagtgcgtctgtagggc

SEQ ID NO: 436869 - DNA, 78 bp, Homo sapiens
ccagagggcggccacccggagccagcggagggacaggacctgaaggagaagaaggagaaggtggaggagaaggcaagc

SEQ ID NO: 436870 - DNA, 75 bp, Homo sapiens
cgccgccgccgccgccaccatggtttttagaacttcagccataaaaatgggcagaattttccttgatcatatcgg

SEQ ID NO: 436871 - DNA, 75 bp, Homo sapiens
ttttggtgcgccctagtggagaaggcctatgccaagtctccgatgatgacctcgacccatcctttactgtctcaa

SEQ ID NO: 436872 - DNA, 90 bp, Homo sapiens
gtctcagcgcgggggacgactcaggcggtctatgcttgcttggtgcttatgctgacagtgatgacgatgacaatgatgtttccgaaaaac

SEQ ID NO: 436873 - DNA, 76 bp, Homo sapiens
atattgaccatgatggaatgcttgacagagatgagtttgcagttgtatctcgggggagctttgtgccttgatggat

SEQ ID NO: 436874 - DNA, 94 bp, Homo sapiens
tccacacagctcagaacagttggatcttgctcagtctctgtcagaggaagatcccttgatgccttcaattaagttgcagagttctgatggagag

SEQ ID NO: 436875 - DNA, 100 bp, Homo sapiens
gacttttgtgtccttccacttagaaggtgctgatattcgtggcttcagtgctcctaggacatttggccttacactgggacatgtagtagatgaaatacag

SEQ ID NO: 436876 - DNA, 50 bp, Homo sapiens
cctgcctttgagcggactcccttttaagatagagtctcgctctgtcgccc

SEQ ID NO: 436877 - DNA, 76 bp, Homo sapiens
ctggagtgttacattcagttcctggactccgtgcaatggctgccatccggaagaaactggtgattgttggtgatgg

SEQ ID NO: 436878 - DNA, 73 bp, Homo sapiens
gcttaagccagcaagctgatgttcgactcatgctttatgagaggccccacagtatcaaatatccgcctggctg

SEQ ID NO: 436879 - DNA, 82 bp, Homo sapiens
tgttaaagtaacagatgatttagtttcaggtagcattggtgctgcagatagtcctgagaactgggagaaagtctgggacaac

SEQ ID NO: 436880 - DNA, 101 bp, Homo sapiens
tgttactaccatggacatgtacggggatattctgattcagcagtcagtctcagcacgtgttctggtctcaggtggatggagagagaaagaaaaagccagag

SEQ ID NO: 436881 - DNA, 147 bp, Homo sapiens
ccctcggtgcttcccagctgccgtctgcaccagccatggactgctacacggcgaactggaacccactcggggactctgccttttaccgccacgaaggaagacaggaggtccgaggagaaagcggcagccatggcagcctcaaagaaa

SEQ ID NO: 436882 - DNA, 74 bp, Homo sapiens
gaaggggagccatggcggctgacagtcgggaggagaaagtgtttaactgctgaagagatcttttcccttcatgg

SEQ ID NO: 436883 - DNA, 83 bp, Homo sapiens
ctttgacacacagcagttcttgtcaggtatataatgttgactccaaaacctataatgcctcagtgctgccagtgagagtcgag

SEQ ID NO: 436884 - DNA, 75 bp, Homo sapiens
tgtagccctggagaaggtggaggagttggaggagcatgtgtcccatgcactaaccaggctgtatctggacaaggc

SEQ ID NO: 436885 - DNA, 73 bp, Homo sapiens
cattgcttcttatttagcactcacagcaaaccagtccagctacgggggcccagccagccagcagctgagtggg

SEQ ID NO: 436886 - DNA, 82 bp, Homo sapiens
cggatcgcgtggagtgaaggtcacgccgcggcgccgtccgtctccaagagagtatgaagagagtgcgtctgtagggcaggga

SEQ ID NO: 436887 - DNA, 98 bp, Homo sapiens
cttcaagatgaaccgcaaggagagaagttcttatgactcctccatgtctccagctggcgctacgtacatctttgggaaaagtggtgggcttatcctct

SEQ ID NO: 436888 - DNA, 75 bp, Homo sapiens
gaggaaacaaactcacctttgggacaggcactcagctaaaagtggaactcagaggaccccgttctggagcgttat

SEQ ID NO: 436889 - DNA, 123 bp, Homo sapiens
cagaaacgtcaggccgtagccgaagcctcggaaggagcggcccacggcaaagtgttgtcatgactggatcttacaataatttcttcagaatgtttgacagaaacacaaagcgagacataaccc

SEQ ID NO: 436890 - DNA, 75 bp, Homo sapiens
gatcgccgcggggcagttcgggccggctgtcctggcgcgccactgtatgatgctgcttaccttacaatgtacaat

SEQ ID NO: 436891 - DNA, 82 bp, Homo sapiens
tttgctgatcgccccagggatcaggagtttttgaaatcatgaatcctgtttatagtcctggatcttctggggttccctatgc

SEQ ID NO: 436892 - DNA, 100 bp, Homo sapiens
tttttatttttccccaattcagcagagaatattttcaaggggggtcgccgccctggagaggcaggtgtttgacttcctgggctaccagtgggcgcccatc

SEQ ID NO: 436893 - DNA, 90 bp, Homo sapiens
acagaatggcccgaggcctggacactctctgaggacatctctgcaaaggccccagcggcccaggatgcctctattgctcatcgattccac

SEQ ID NO: 436894 - DNA, 100 bp, Homo sapiens
gactgggctaaccgggagtacattgagataatcaccagcagcatcaagaaaatcgcagactttctcaactcgttcgacaaagatcattccactcagcctg

SEQ ID NO: 436895 - DNA, 100 bp, Homo sapiens
taaagatttttggactacggtattcaagaaacaaatcgacaatctaaggacaaatcatcagggaccctgaagtggctgatggaggagagctggtcctggg

SEQ ID NO: 436896 - DNA, 83 bp, Homo sapiens
ggttgtagcatagaagatgtggactacaatggaaaccttccagacttggtggtggcagtcaacggggtctggatcctcgtgga

SEQ ID NO: 436897 - DNA, 98 bp, Homo sapiens
agaaattgaggccgttgtacaaccatccagcagtgaagctgtggtctaccaatctagacaactcagtggcaagcattgaggcaaaggctaatgtgtgc

SEQ ID NO: 436898 - DNA, 80 bp, Homo sapiens
gctgcgctgcattctgcgggacgaaccctgctccgcgcgaggcccggcgcccgcctgcccgcaccctcgtcctcacagac

SEQ ID NO: 436899 - DNA, 75 bp, Homo sapiens
cggcgcgggaggtgaagttgctgctgttgggtttcctgaaatgcagtttttccagcaagaaaatgtgagaaaaat

SEQ ID NO: 436900 - DNA, 98 bp, Homo sapiens
tccagcagatggcggatgccctgcagtacctgcagaaggtctctggagacatcttcagcaggcctccggtgtggctgtctctgatggtgtcatcaagg

SEQ ID NO: 436901 - DNA, 99 bp, Homo sapiens
tcacgttttaatgccgagaggtctctgtgacgattttgcaatctgcacatcgtgctgccacacgaggcttcattcgttatggctggcgctggggttgga

SEQ ID NO: 436902 - DNA, 97 bp, Homo sapiens
gtttgaatgtctcttcaatctccagaaagttcagatattttggatggcagtagtagcagcagtggcttatcctcagacccgctggctaaaggcagcg

SEQ ID NO: 436903 - DNA, 98 bp, Homo sapiens
tggcataggttatgaagctaatcctggcgttccaccagcaaccatgagtggttccatgatgggaagtgacatggtaccagcaactaaggtttcagagc

SEQ ID NO: 436904 - DNA, 82 bp, Homo sapiens
gctgcaagtcaccatggacgctgaagcaagagtgagccatggagctacgtgtggggaacaagtaccgcctgggacggaagat

SEQ ID NO: 436905 - DNA, 100 bp, Homo sapiens
ccaccttccaagtcctggcatctcaatgcatctgggaagctacctgcattaagtcaggactgaggtctctctcctcctgggcgagccgttcttcactacc

SEQ ID NO: 436906 - DNA, 73 bp, Homo sapiens
caaacctcaatatgtagaccagattcctaaggctgcaaaggggactcagaagaagatccttgacattgccaac

SEQ ID NO: 436907 - DNA, 82 bp, Homo sapiens
gcagaaaccccgttgacaaggcactgctttttcatgacgatgatatcatcaagttgaatcgaaaggaagggaagaagcagaa

SEQ ID NO: 436908 - DNA, 100 bp, Homo sapiens
cggagaatggagtcttccatcaatcatatctcacaggctttgaagacaagattcccaaaaggagattctctgagatgcaaaatgaaagacgagaacaggc

SEQ ID NO: 436909 - DNA, 90 bp, Homo sapiens
catcaaaaatagtgatagctttgataaatgtcgcacgcggccacaagcgccttatgccgctccataaagctgcagtgtgagctgtacccc

SEQ ID NO: 436910 - DNA, 97 bp, Homo sapiens
ctaacattttgaaagcccagcccatttcattcacagcaggatggcagagagtgagtaaaggaatacttaaagcatttggtaattctactgaaaagtt

SEQ ID NO: 436911 - DNA, 99 bp, Homo sapiens
acgatgcaaccatgatagaaataaatccaatggtggaagattcagatggagctgtgtttctaagacctcagagaaatttggaatctatagacccgcagt

SEQ ID NO: 436912 - DNA, 83 bp, Homo sapiens
agttccttgtggagccggagctgggcgcggattcgccgaggcaccgaggcactcagaggaggcactacaagggcccccaggga

SEQ ID NO: 436913 - DNA, 51 bp, Homo sapiens
cgcggctctccaagttctaccagccctacaacattctagtatgccagtaga

SEQ ID NO: 436914 - DNA, 80 bp, Homo sapiens
ctctaggcaggactgccatgcaggcagtggctctgccaatgatcctgtgagtattcaggaatcactgttgcccctgggga

SEQ ID NO: 436915 - DNA, 100 bp, Homo sapiens
cacaggctgcaagcgcccaaagccaatgggaatcacctggttcaagggtggtgacttcacacgccataatggcactggtggcaagtccatctatggggag

SEQ ID NO: 436916 - DNA, 100 bp, Homo sapiens
ggagaggttgtggtggatgcgctgccgtattttgatcaaggttatgaagcccctggtgtgcgggaagcggtatataatgtttacatggcagggaggcagc

SEQ ID NO: 436917 - DNA, 83 bp, Homo sapiens
cgggacctctccgggccatgggggcctagaagacagttcccaggaggccgaggacgaggcatcggggctggggctatctgagc

SEQ ID NO: 436918 - DNA, 75 bp, Homo sapiens
gaaacatatatcccagatttctgtggcagaagatgatgatgaaagtgcaactcatgcagcaattccagaaccccg

SEQ ID NO: 436919 - DNA, 100 bp, Homo sapiens
ccaaaagattgaaggaaggtgatacaatgatggggcagcaagtggccaaatgctgtacccctcaaggatttaaactaacgaaaaatcaataaataaatgt

SEQ ID NO: 436920 - DNA, 107 bp, Homo sapiens
cggagaacagcggtcgcgccggcaagagcagcgggagcggcgcggggaagggggcggtgtccgcagagcagtgcctcccctgccctcactgaatcctggtccagcac

SEQ ID NO: 436921 - DNA, 83 bp, Homo sapiens
cggcgctgtggacgggcgaaggaaagtacaggtaagtaaggaggtctctgtaccatggctcgtacaaagcagactgcccgcaa

SEQ ID NO: 436922 - DNA, 75 bp, Homo sapiens
aaaagcgtcaagaagaggaggaagccatgcgtaggactccagggattagagctcgatctgcaaggcttcagtggt

SEQ ID NO: 436923 - DNA, 100 bp, Homo sapiens
gacacgcccggaagccctgaccacagagacgcgtccagtactatactggcaattgctggagaagattttgcaattgttgcttctgatactcgattgagtg

SEQ ID NO: 436924 - DNA, 96 bp, Homo sapiens
gggcatcgtgtctcgaccgcgtcttctgagtcagctcgccctcccctacctgcggaagagtcaagggaatgtcatcaacatctccagcctggtggg

SEQ ID NO: 436925 - DNA, 75 bp, Homo sapiens
ccctcacatctatgccatcacagacaccgcctacaggagtatgatgcaaggccttctctgactaccagatccagc

SEQ ID NO: 436926 - DNA, 101 bp, Homo sapiens
cttccatttgaattaccacgtagatcacttggattcctccaatagtttttccgtgacaaatgcttgccgccatcaacgtcctcctgagcatcctgaaccgc

SEQ ID NO: 436927 - DNA, 100 bp, Homo sapiens
cggccatggcgctggacttcttggctggatgcgcggggggacaatgccgtcttctgtctcgtggggcatcctcctgctggcaggcctgtgctgcctggtc

SEQ ID NO: 436928 - DNA, 75 bp, Homo sapiens
acaaattagaatcagattatatggccgcatcttcacaactccgtcttacagaggggagagtacggtttccatgaa

SEQ ID NO: 436929 - DNA, 75 bp, Homo sapiens
tttaaacttaaggaaagagtgggaaagtgaggtttctccacagacactacccaaagcagtccttcactacagtgg

SEQ ID NO: 436930 - DNA, 120 bp, Homo sapiens
aaaagctttggatgaaggagcttcaaacccaaagaggtaagcattcaggagtcggagaggatggcaggggccggaggccagcaccaccctccgggcgccgctggaggagcggccgccgga

SEQ ID NO: 436931 - DNA, 74 bp, Homo sapiens
cctgcttcctctgcgccagaagaaggcccacctgatggagatccaggttgtacgtggacactataaaggtcagc

SEQ ID NO: 436932 - DNA, 83 bp, Homo sapiens
tctggagctgtggttgctgctgtgatatggaggaagaagagctcaggttcccagtctaagtgggtgactttccaagatagagg

SEQ ID NO: 436933 - DNA, 85 bp, Homo sapiens
tgtgttcaggacctcggcccagcccacagccatcccaggaactgtggctgcaccatctgtcttcatcttcccgccatctgatgag

SEQ ID NO: 436934 - DNA, 51 bp, Homo sapiens
attccaagtaactcttatttggacattgccgagaatggctgcgcccccacc

SEQ ID NO: 436935 - DNA, 75 bp, Homo sapiens
cctctgagatatgccgtttacggattcgtccagtccagccagttggccaatcatattcgccaccacgacaacatc

SEQ ID NO: 436936 - DNA, 75 bp, Homo sapiens
tggtttgtggaacagacagctccttctttattgctcaccatggatgatgatatcgccgcgctcgtcgtcgacaac

SEQ ID NO: 436937 - DNA, 80 bp, Homo sapiens
ctcctacttccagaaaaagtgctcctgggactccaggataccagtttgcccgaccatctgtaagtcacacggctgcaccg

SEQ ID NO: 436938 - DNA, 90 bp, Homo sapiens
ctgatctccatgtcctgttgtggggcttttacagcctttggatgaaaacgaatgcctcagcgctcacatctgcggaggagcctcctgtca

SEQ ID NO: 436939 - DNA, 100 bp, Homo sapiens
caaacccacttcgttcaagacaggtgtttaagccgtctgcttctgcgctttgcctgggagaggccctggtggcctcgttcctggcgcccggagtccctgc

SEQ ID NO: 436940 - DNA, 74 bp, Homo sapiens
ccctagaccggtttttagtccattgactatgcagcctaatggtgcgtgggactcatgaactcaccaatcccggg

SEQ ID NO: 436941 - DNA, 75 bp, Homo sapiens
ccagaatttgccgtggagatactttttgggcaaacttgaagataaatcttttgactccagctctttagaggatct

SEQ ID NO: 436942 - DNA, 100 bp, Homo sapiens
cggccatgccaccgctttaatccagtctctggattcttcgaggcggcagtatcaagagaaggcaccacaaggccacataaggagggtgaggtccctggag

SEQ ID NO: 436943 - DNA, 107 bp, Homo sapiens
tctggctctggctgtgcgcgctggcgctgagcctgcagccggccctgccggtgcatctgcagacgcagcaggaggtgaagctgcgcatgacgggcatggcgctgcgg

SEQ ID NO: 436944 - DNA, 90 bp, Homo sapiens
catttgtttcccttagccagcccgagcaagtaaagattggaattactctcacttccaccacccgatgtatggaaactgctatactttcaa

SEQ ID NO: 436945 - DNA, 74 bp, Homo sapiens
tatatctacaagggggtccgcaagaatgaccagtcaacaggggacataaaagtaattggtggagatgatctctc

SEQ ID NO: 436946 - DNA, 83 bp, Homo sapiens
atcccgggcatgggcggcaactctttgatgtactactataatgggaaagcgacaatgcagatcttcgtgaagactctgactgg

SEQ ID NO: 436947 - DNA, 100 bp, Homo sapiens
cagagactcggagagcatcactggttttgaaaacattgaattgactcctcttgctgcaatatgtgtgaaaatatattctggaggaaaagaactaaaggtc

SEQ ID NO: 436948 - DNA, 100 bp, Homo sapiens
tcgccgaggaggtgctggcggacaagcggcaggttcatcatgcctagtggcgtataagaagaccccgccaccggtccctccacgcaccacttcaaagccg

SEQ ID NO: 436949 - DNA, 98 bp, Homo sapiens
tcgaagcgagggtctgaagttcacgactactagaaggggaggggagtggaaaggctctcagtgaaaaagaatcagcatgattcttcagaggctcttca

SEQ ID NO: 436950 - DNA, 100 bp, Homo sapiens
gagaaggaaattagtgatgatgaggcagaggaagcggctgctgagattactaggaagctggagaaacaggagaagaaacgcttaaagaaggaaaagaaac

SEQ ID NO: 436951 - DNA, 83 bp, Homo sapiens
ttaggcagcagcagccgcggagcagtagccgccgtgggagggagccatgaagcattacgaggcaccgtctgcgtcctgctgtc

SEQ ID NO: 436952 - DNA, 90 bp, Homo sapiens
tcaaagaaggagacgtggggtcactggtgtatgtcatggaagggcaagcaggaggacttcaagacgacagttctggagggtatggagacg

SEQ ID NO: 436953 - DNA, 93 bp, Homo sapiens
tgaagggcaaggaaagcagcatagagaatgagatagccgtcctgagaaaacctgcctagagctggaacgttacctccagagcgagccctgcta

SEQ ID NO: 436954 - DNA, 90 bp, Homo sapiens
cagagctctgccaggcagaaggcctctctcctgatacagcaggcgctcaccatgttccctggaggaaagatgaatgggagggctgatttt

SEQ ID NO: 436955 - DNA, 82 bp, Homo sapiens
cctgaacgaagtggccaagaaggagaagcagctgcggaaaatgctagaaggctgaccccgcactacatctacccaccagcca

SEQ ID NO: 436956 - DNA, 100 bp, Homo sapiens
taagtagtgatatttctcttttgtctgcccctattgtaagtgcagatggaacacaacagatcgtcagtatttaaacagatcacatcatgcgtgagtacaa

SEQ ID NO: 436957 - DNA, 100 bp, Homo sapiens
cgcagtggtcgcttcttctccttggagctcttgtccctggcaaagcgaaagcgcagtgactctgaggagaaggagccgcctgtgagtcagcctgcagcct

SEQ ID NO: 436958 - DNA, 100 bp, Homo sapiens
cggaggcctgcccgtatagttcagggccggacagcgagcggcggcgacttgccagtaagttttatccaagtatgaagatcagattactattttcactgac

SEQ ID NO: 436959 - DNA, 99 bp, Homo sapiens
caaagagaaggatgtggcagatggaaatgtctcggattttgataatgaagaagggagaaggctctggccctcacagggaaccagggcatcgaggctgcg

SEQ ID NO: 436960 - DNA, 100 bp, Homo sapiens
caaaatgaacacagtcactgggaaagttgaagttgatggtagtttaagtgatagccacgtatctcctccagccaaacgcactttgaaacaacctgattct

SEQ ID NO: 436961 - DNA, 101 bp, Homo sapiens
tgcttttcctcgctggggtgtacgcatgctacaagtgaaaactgatgagaaactgaatgtgtctgatgagaatacagcaagttgccctttgagccccatta

SEQ ID NO: 436962 - DNA, 74 bp, Homo sapiens
cagaaggaggagttactagtgaagattatcgcacgtttttacagacagtgtttaagaatgaaagcctcaacgca

SEQ ID NO: 436963 - DNA, 75 bp, Homo sapiens
acctggacgaggccggccgctgcacggcctgcgtgagctgttctcgagccttcctacagcaacttcccactccag

SEQ ID NO: 436964 - DNA, 131 bp, Homo sapiens
gaagaactgatccaggggacaaaagaggggaaactgagagttcccaattaataatgaagcagttgctgttgctgatgcaaagaagtctctagaactcaatccaaataattccactgctatgctgagaaaag

SEQ ID NO: 436965 - DNA, 100 bp, Homo sapiens
tgcctgggctccagatggagaattatttgctgttggatcgtttcatactttacgcttgtgtgataaaactggggtggatattccatctattataaccaag

SEQ ID NO: 436966 - DNA, 100 bp, Homo sapiens
tgcgcagcggcgagtggcggagtgaggaacagcttttcagaagtgctctgtctgtgtgtcccctcaatgctaaggcaacagagatgcttatttttggaaa

SEQ ID NO: 436967 - DNA, 105 bp, Homo sapiens
gccgccgccggcgcggaaggacgaggctgaggcgagaaacgagagagacaagagagacacctccaacttcgacaaagagttcaccagacagcctgtggaactgac

SEQ ID NO: 436968 - DNA, 98 bp, Homo sapiens
ctccatccagctccctgcgtcccggccttcgctgtgctccctcagaccatcatggagcagttcaaccctagcctccggaacttcatcgccatggggaa

SEQ ID NO: 436969 - DNA, 50 bp, Homo sapiens
cgggggaacagctagcggcaagatttcctttgacctcgctgagtacactg

SEQ ID NO: 436970 - DNA, 100 bp, Homo sapiens
ctcgctacacagcccagcagttccgaaatggctctcctagatgtgaagaacatcgcccaccagaacaagtttggggaggatatgccccacccacactaag

SEQ ID NO: 436971 - DNA, 51 bp, Homo sapiens
aacaacaccacaataatccacagccaagactcctgcccctgccacgagaac

SEQ ID NO: 436972 - DNA, 100 bp, Homo sapiens
gggcctctgagatatgccgtttacggggggccccactgcacccaggtcatccctgtgcagggccgggtcacctccctgagcctcagccacgaccaactgc

SEQ ID NO: 436973 - DNA, 100 bp, Homo sapiens
gggctggtggtgcttccaactgcgggacaggaagtggccgtagcggcttgttggataagatacagtttatgtaacttgatggaagaaaatggaattactc

SEQ ID NO: 436974 - DNA, 90 bp, Homo sapiens
atcaagcctagtgcttcgttttgtgaaaggccaatttcatgaatttcaagagagtaccattggggcccccaaatacatcaagatgtttgt

SEQ ID NO: 436975 - DNA, 100 bp, Homo sapiens
gccacctgcctttgacctttttgaagcctttgcaaaacatggtgttagtctgtatattcaagataaagaaggcttgtcagctttggatcttgtaatgaag

SEQ ID NO: 436976 - DNA, 50 bp, Homo sapiens
gctttcatgctatagaaagtctcctgcagctcaaagttatgaagtttcag

SEQ ID NO: 436977 - DNA, 100 bp, Homo sapiens
gctgatcctcctcctgcaatttgggttgcaacaactaagtctacagtaaataaatgggctccctacacaccttttctcactgaattgatgtaccagaatc

SEQ ID NO: 436978 - DNA, 82 bp, Homo sapiens
ggacaagcatatctaagaggctgaacatgaatccacagatcaggctttatcctgtggataaacgcagagtgaacgagtttgg

SEQ ID NO: 436979 - DNA, 49 bp, Homo sapiens
gtttgatcacaagacgggcaaggctttcctcggagacgggtggcatggg

SEQ ID NO: 436980 - DNA, 101 bp, Homo sapiens
ccgggcagccacccccggccctgctgccacagcagcagaagatggctgtgccacccacgtatgccgatcttggcaaatctgccagggatgtcttcaccaag

SEQ ID NO: 436981 - DNA, 51 bp, Homo sapiens
attctgagatgattggagaccttcaaggagtagatcccataatagatcacg

SEQ ID NO: 436982 - DNA, 98 bp, Homo sapiens
ctggtcctactacgcgtacgtggtggagctctgcgtgtgtccaatgatgcatcagcagcctccttctcagcaatacaatatgccacagggaggcggac

SEQ ID NO: 436983 - DNA, 100 bp, Homo sapiens
ggccggcccagagttcgtggaggtcattggaggtgatgtgtccaatctagatcccaacttctcatttgaaggcaccaaactggatgtggggaacattgtg

SEQ ID NO: 436984 - DNA, 75 bp, Homo sapiens
actttggaagaagtatatgcaggaaattttgtggaatctgaccagtgcacaggacttcagggcttcctggtgttc

SEQ ID NO: 436985 - DNA, 49 bp, Homo sapiens
tagctgggccaggccaaagagagtatacgctcaacggcaagaaagtgga

SEQ ID NO: 436986 - DNA, 75 bp, Homo sapiens
gcctggaagcgttcaagagaattccgccccaggaaaatgctgtccagtggggtgtgtacatcaactgttcagctt

SEQ ID NO: 436987 - DNA, 75 bp, Homo sapiens
ccaagggtctggcagaagcttcctccgagactgggcatttcatcctccctggagaaaatgttttcagactgctca

SEQ ID NO: 436988 - DNA, 95 bp, Homo sapiens
gggagatccacagctaagacaccgggacctcctggaagccaaaaatggagtacgaccccagcaaagcgacctttgtgaaggtggtgccaaccccc

SEQ ID NO: 436989 - DNA, 80 bp, Homo sapiens
agtttttttaatgtggttggaacaactgagtgcaaaatggcaactcttaaggaaaaactcattgcaccagttgcggaaga

SEQ ID NO: 436990 - DNA, 83 bp, Homo sapiens
agagctttcacgaaggcaccgacgtcatcatgctgaccaccaatcagatccgtaagcttgtgctgcattgcacctgtcctcgc

SEQ ID NO: 436991 - DNA, 73 bp, Homo sapiens
caggtctggagctcgaccgggccagaaattgacattgaacgctgtgtgagagaatctatcaacctgttttgtt

SEQ ID NO: 436992 - DNA, 84 bp, Homo sapiens
agaaacaagagtgcttatcccagctaagctccaggagtcgacttcaatgttcctatgaagaacaaccagataacaaacaaccag

SEQ ID NO: 436993 - DNA, 100 bp, Homo sapiens
tgcatggattgggagatactgggtctgccatgtgaatctggaggggcagccgttctactccaagaaggacagacccctgtgcaagaagcacgcacacacc

SEQ ID NO: 436994 - DNA, 100 bp, Homo sapiens
agctgcagccgcagcctgtggctgtgcagggccccgagccggcccgggtcgagattggagacccacagttggtgatctgtatggactgctcggcagacac

SEQ ID NO: 436995 - DNA, 75 bp, Homo sapiens
gaagaatggaaagagaagactgatagagacttcgttaaggcataccaatcccattgtggaaaatggacagactca

SEQ ID NO: 436996 - DNA, 75 bp, Homo sapiens
acctgttaccactttcaaaaggaaacagaagtacctgtgcgccagcagaaatgattgcactattgataaattccg

SEQ ID NO: 436997 - DNA, 90 bp, Homo sapiens
atgcagagatgctgtggttcggggggtgctcgctggacccacaaaccgtggagaccaagaactggcacacggacgtgattgagatgaacg

SEQ ID NO: 436998 - DNA, 101 bp, Homo sapiens
gaagaaagctgagagaggggggaaacgtttttggatgacaaaggatggctggacagtgccacatcgcttatccaggcagctaaaaacctgatgaatgctgt

SEQ ID NO: 436999 - DNA, 74 bp, Homo sapiens
gaggagtactcggtgaaatcctgtcctgaagactgtaagcccagcagaccgggttatcccagtccgaggtccag

SEQ ID NO: 437000 - DNA, 50 bp, Homo sapiens
gatcgggacccccccgcagaaggtgagccaccagctgggcagcatcatgg

SEQ ID NO: 437001 - DNA, 83 bp, Homo sapiens
cacgttccccgccttcaaccggctgcaaggggatcgcctgcgcgtcccgctcgtttcggattaagttgtcatcattctgggaa

SEQ ID NO: 437002 - DNA, 90 bp, Homo sapiens
ttgaccacccgactctcatagaaaacgagagtatatgcgatgagtttgcatatctttctgaagccatgaagctgacacagtcagagcagg

SEQ ID NO: 437003 - DNA, 100 bp, Homo sapiens
ctcagccgcgaccgcccgctcgtactgctgctgcacctgctgcaacttgggccccttttcagttggtgcttcccgtgctgctgttgatgctggctttgtt

SEQ ID NO: 437004 - DNA, 82 bp, Homo sapiens
cccagcctgacaaccttggaacagaacaagaggacaggaggtgtcgttccagatgtggaagatgtgaaatttgtcatcaatt

SEQ ID NO: 437005 - DNA, 50 bp, Homo sapiens
gctggatgcccactaccacgtcaaggtcttgtccaataagcatgtggctc

SEQ ID NO: 437006 - DNA, 74 bp, Homo sapiens
tatgatagttcagatgacagtgattttaaagttggagatgcctcagttgcattaaaatcctcccctactgaaag

SEQ ID NO: 437007 - DNA, 95 bp, Homo sapiens
atactttggttacctatgtacctgttaccactttcaaaactggtgctcaagaccgaatcggctgggcttttggcctaggattagaaaggctagcc

SEQ ID NO: 437008 - DNA, 82 bp, Homo sapiens
acgcggttcttctccagcgccctggcctccctcaccttggacacctcgcttggatgcctgctctgtgcctgtatctgagatc

SEQ ID NO: 437009 - DNA, 82 bp, Homo sapiens
tctctcaagaacctctactaaggaaatgagtggagcctctttcagaattcttcaagccagaagaatgatgtttttcacttgg

SEQ ID NO: 437010 - DNA, 90 bp, Homo sapiens
cgctcggagaacgactatctcaaggttatcaacatggattatggaatgcaagaaaagaatccaattgatcatgttagcttctattgtaag

SEQ ID NO: 437011 - DNA, 101 bp, Homo sapiens
cgcacatttgacttggaagcaatgtttgaacaaactcgaagaacagctgtggaaagaagttgcaaaacactggctcagaattctgcaaatgcagattttgc

SEQ ID NO: 437012 - DNA, 75 bp, Homo sapiens
cgctacctccgggtcaagatccctctccggccaggctgaggtcgggatggtggaggaggtggtggaggtgatgag

SEQ ID NO: 437013 - DNA, 75 bp, Homo sapiens
cgcgtctccgcttctgctgcctgccgggcgggctccggtggccggtgctggagaatctggtaaaagcaccattgt

SEQ ID NO: 437014 - DNA, 90 bp, Homo sapiens
cggagcccgagcgcggaggcttcggttccggtggcggcgatggcttctctttccacctggagcagggctcagaggtaaccaacagcaaga

SEQ ID NO: 437015 - DNA, 100 bp, Homo sapiens
ccattaacaacagcagatcctaatttgccattttcagtggaaaacaagtggtcgttactagctaagatgtgtttgtactttggatctgcatttgctacac

SEQ ID NO: 437016 - DNA, 75 bp, Homo sapiens
cgagagtggcacggtggcctcctcatccacagactttcccctgcctccacctccccttgctggggatggcgacga

SEQ ID NO: 437017 - DNA, 96 bp, Homo sapiens
gctggccgggggcgcgggcggcggcgccggcaggaagcttgctcacttccgacagagaaaaacaaaaggtgacagttcgcattcggagaaaaagac

SEQ ID NO: 437018 - DNA, 100 bp, Homo sapiens
ccaagcagccttagccctagtgtagaggctttgaagacaagattcccaaaaggagattctctgagatgcaaaatgaaagacgagaacaggcacagcggac

SEQ ID NO: 437019 - DNA, 75 bp, Homo sapiens
gtttccacgtgcggtgctcgtcgggagtgatcacctaccctacaggaaaatgttggggcttttcaggaagcataa

SEQ ID NO: 437020 - DNA, 100 bp, Homo sapiens
gctgcccgagaaggtggacgtgctggtgtctgagtggatggggacctgcctgctggccgccagatcccacccttggacccccatgaaaatggaaacaatg

SEQ ID NO: 437021 - DNA, 51 bp, Homo sapiens
tgcctggcagccccgctctctgcaggtctgcaagtggatgatgagattgtg

SEQ ID NO: 437022 - DNA, 82 bp, Homo sapiens
agctgaggactgcctgtttgcagacacggcttacctggatggggtgtcgttgcccgacttcgagctgctcagtgaccctgag

SEQ ID NO: 437023 - DNA, 119 bp, Homo sapiens
ccaacaggatattttttgccatggtggattttgatgaaggctctgatgtatttcagatgttcgaagcattcagcaaacaatggcaaggcagagccaccagaaacgtacacctgattttc

SEQ ID NO: 437024 - DNA, 83 bp, Homo sapiens
tatctgtcttcggtggactccttcggcagtccacccaccgccgccgcctcccagggaggcagtgtggaagaagggaaaatgag

SEQ ID NO: 437025 - DNA, 100 bp, Homo sapiens
ggtgaatgctgctaaaaacaagactggggctgctcccatcattgatgtggtgcgatcggccctgctggccctgcctcttctggcctggtgtctcctcatg

SEQ ID NO: 437026 - DNA, 89 bp, Homo sapiens
ttgggaaggtgcaaggggtgtttttccgtaagcatactcaggatgaccggaaagaagggatgaccgcgtttgtggaaaagagaaaggcc

SEQ ID NO: 437027 - DNA, 98 bp, Homo sapiens
ccatagctgtctggcatgggcctctccaccgtgcctgacctgctgctgccactgctcctggactggattgagggcaaggagcggaacatccgggccct

SEQ ID NO: 437028 - DNA, 100 bp, Homo sapiens
tccagcatgactcatccccgggagtgttgaatatcagttttagagaatgtggcgtggagaaattctcaaggaaagagtaaaatgctggtgatgtgctgag

SEQ ID NO: 437029 - DNA, 74 bp, Homo sapiens
gcaaattaaagcaattatgaaagaagtcattccttttttgaagggtggaataattaatgatagttctgaattaa

SEQ ID NO: 437030 - DNA, 100 bp, Homo sapiens
ctcggccggggccgcagtctggccacccgcttccatgcggttcgggtccaagatgatgccggaatccggagatgatgagtatcaaggggaccagtcagac

SEQ ID NO: 437031 - DNA, 100 bp, Homo sapiens
ttagagtccaccagatcatccatgtgagtgaccatgcagcaaaagaaggagggtcctctcagtgattaagactgttggcaagagtagcaagatgctgcag

SEQ ID NO: 437032 - DNA, 106 bp, Homo sapiens
gatcaactatgggaagaacacaattgcctacgatcgttatattaaagaagtcccaagctgattgctgaggaaggggtggacagcctgaatgtcaaggagctgcagg

SEQ ID NO: 437033 - DNA, 50 bp, Homo sapiens
cggctctccagcaagaaggtggcaaggtgtcgtgaaaactacccctaaaa

SEQ ID NO: 437034 - DNA, 100 bp, Homo sapiens
ccagctgccgcgactgggaggagcgccggaacgccgaggcccagatcagccaaatggccgatgacacagtggcagaactggacaggcatctggcagtgaa

SEQ ID NO: 437035 - DNA, 100 bp, Homo sapiens
caatcccccactctttccgccctaatggaggtctccagtttcgttcttctcaccactaaatccaatacgagttcatattgatattggagctgatggcaga

SEQ ID NO: 437036 - DNA, 82 bp, Homo sapiens
gcgtgtctaggtgagtcgcggtgggtcctcgcttgcagttcagcgaccacggatgaagccccacccgcccttcaggatgcca

SEQ ID NO: 437037 - DNA, 50 bp, Homo sapiens
cacaactctgcaaataaatgtgcatctcccagatggacgtatcatcaaag

SEQ ID NO: 437038 - DNA, 51 bp, Homo sapiens
ggtcgccctcaaggccatgatcaaaacgtaatagcctgcagctggtgtttt

SEQ ID NO: 437039 - DNA, 100 bp, Homo sapiens
cagcggctgtgccgaggcgcccaactcagcatttgacattgtgcagcaaagaaatggttatggagaagcccagtccgctgcttgtagggcgggagtttgt

SEQ ID NO: 437040 - DNA, 100 bp, Homo sapiens
acaggagagctggctgcagtaaaaatcattaaattggagcctgtctgtgaatttctggtacgtgctggtgatgaatgatgagcacacagagaggcgatat

SEQ ID NO: 437041 - DNA, 123 bp, Homo sapiens
ggcgtgcactccgcacctcggggacattattgcgcgtggaacggctgcttttggaagatgtgtatatctcatgattgatatggagaaactagtcatgggccaaaggtcaagatacttctctgg

SEQ ID NO: 437042 - DNA, 100 bp, Homo sapiens
cagcaagctgatgttcgactcatgctttatgaggaagtttcacggctataactccctgaaggaatactatgaggaagaaagttgcatgcggtacctgcac

SEQ ID NO: 437043 - DNA, 75 bp, Homo sapiens
agtggtcctacctggggatattatcaaatctactactgttcatggcaggtaatgtacagaaggattctgcagcag

SEQ ID NO: 437044 - DNA, 98 bp, Homo sapiens
ctggagtgggcgcggaggcgaccgccatggcgttcctcaaactccgtgaccaggatgacccctccggcgaaggtgtcctgccctcggcccgcggccca

SEQ ID NO: 437045 - DNA, 100 bp, Homo sapiens
accgttggtgtctggcacgcgccaccccgatgtaccagcaggtggtccattatggctgacatgcaaaatctggtagaaagattggagagggcagtgggcc

SEQ ID NO: 437046 - DNA, 75 bp, Homo sapiens
aaaacatcagcctcgtcagcctctgcctctaattcctccaggtgtttcctacccaacatgtggtccgtgctctcc

SEQ ID NO: 437047 - DNA, 75 bp, Homo sapiens
cgtgttggaatggacttcggaccctggcctcttgggatgcaaaggttgtggcagcactgcctgaaggtatgagac

SEQ ID NO: 437048 - DNA, 100 bp, Homo sapiens
catctatgttcggctggacttctccatcaccaagggctaccctgagaggaatctacatgcagagaagttcaggagactgaactaacggaacgtcaggaag

SEQ ID NO: 437049 - DNA, 75 bp, Homo sapiens
atccagggcctaacatgggacagccgcaaccaggaatgacttctagatacaggatcactgtggtgatcgagatac

SEQ ID NO: 437050 - DNA, 75 bp, Homo sapiens
agccctgctccaggaatgggacctcgagtcactgtggattctaacattttcagagaaccttttggaaagaacaag

SEQ ID NO: 437051 - DNA, 101 bp, Homo sapiens
cgcgctactctctctttctggcctggaggctatccagcacgacaggatctgctcgccacccttcatggagctcacgagcctgtgcggggatgacaccatgc

SEQ ID NO: 437052 - DNA, 75 bp, Homo sapiens
tcgtcatcgtcatcttcctgtcagtctgcagctactcagagcacaaagttatcattgttgggctggataatgcag

SEQ ID NO: 437053 - DNA, 88 bp, Homo sapiens
tctatggaaagttctgagacatcttgtagagggacggaagaagtctatagtggctgtggagcccaggagtcttattcaaggagccttt

SEQ ID NO: 437054 - DNA, 82 bp, Homo sapiens
caagtccagctgctcgcccgtctacattggatgtggcagccctgaatggcctgtaccgggtccggatcccaaggcgacccgg

SEQ ID NO: 437055 - DNA, 100 bp, Homo sapiens
accccgcaggagaacgagtccctcttcactttcctcggcaagaaatgtgtggaaaatgtctaatcaacaggagaagtatgaagctcagaatatagtcaat

SEQ ID NO: 437056 - DNA, 100 bp, Homo sapiens
tatgccagagaaccctgagtgtgcccctgacatgacaaggagccgtcgtcgttagataaacaggggtcacatgacgacagaagccaagagggctgcaaag

SEQ ID NO: 437057 - DNA, 101 bp, Homo sapiens
ggagcttgagatacgccgctctgaatcttgccgccctgcactgccgcttcggtcactattccgatgaagttaaattccgtcaagatttaatgaatattgcg

SEQ ID NO: 437058 - DNA, 98 bp, Homo sapiens
gccgctggcggcagtcacttgtacagcgccggtcaacatcgcggtcatcaagtacttttatgtgaagaaccagctcagtgggactctacagattaaac

SEQ ID NO: 437059 - DNA, 107 bp, Homo sapiens
ggccaatgtgattctgggcaaagtgtggtgacttgtggattttcactgtaagtgttctgagctggaggaggagctgaagaatgtcaccaacaacctcaagtctcttg

SEQ ID NO: 437060 - DNA, 98 bp, Homo sapiens
ttctggtaaacttacagtaccgccgtctctaccgaagcatgaactcccagtatctgaagctgcttagctcacaggatccaccagaagatatgaagcag

SEQ ID NO: 437061 - DNA, 90 bp, Homo sapiens
gtctacaggctaccaccttggttcgcccactgctgaacaccatccagaagacacagagtgaagaacaaattggttttgagctagtggaga

SEQ ID NO: 437062 - DNA, 74 bp, Homo sapiens
caaaacacgacaggtgtgtccattggacaacagagagtgggaattccaaaagttagatggagtcagatttgaaa

SEQ ID NO: 437063 - DNA, 96 bp, Homo sapiens
tactagaggcaggaaagcaccgagctgacaagtcaactctaaggtaaaataccatgaagattttgaaaaaacaaaggggagaggctttactcccgt

SEQ ID NO: 437064 - DNA, 90 bp, Homo sapiens
aagagagaccttggagtaattcgtcgacaggcagagatcctacaagaatccaggatgatgatcccagattgccagcgcaggttggaagcc

SEQ ID NO: 437065 - DNA, 75 bp, Homo sapiens
ttgagggacccccattcaagttcaagttcacaattggcgagcatattaatgaaaagtgccataaactgaaaaacc

SEQ ID NO: 437066 - DNA, 100 bp, Homo sapiens
aaagagtcaacagcagtggcaacagggcccagcactagaagatttcagtcatctgccaccagaacagagacgtaaaaaactacagcagcgcattgatgaa

SEQ ID NO: 437067 - DNA, 50 bp, Homo sapiens
cccggttttacacttttcaacatggggtaaccttggaaatgttctgaaga

SEQ ID NO: 437068 - DNA, 100 bp, Homo sapiens
attttggcattgacatttaattttagggtcctttatatagaagggagagtaggtctagcacataccgctccaagggctttgacgtcacagtgaagtacac

SEQ ID NO: 437069 - DNA, 100 bp, Homo sapiens
ctctagcagaggaaaataagaacacagtggatgtcgagaacggtgcttctatggcaggatatgttactccacaggatccgctgaacataggatgttgcca

SEQ ID NO: 437070 - DNA, 100 bp, Homo sapiens
gagtcatcgcgtctctccacagagccatccagcgaggtgacacagtggtcttgtccctgaagaagttcctgaagcaggatacatatgacgtgcacctttc

SEQ ID NO: 437071 - DNA, 98 bp, Homo sapiens
tggaagctaaagctaccaaagacgtagaaagaaatcttagcaggctcagtagatgaaggcgtttctgagggcttgcctacacttcaaagcacgtctag

SEQ ID NO: 437072 - DNA, 100 bp, Homo sapiens
ctgcccggaggcaccacaggactgcagctccccagcacgtccttatccagcagccctcaagcccagccccctcggccagcagagctgtcagatgaggaag

SEQ ID NO: 437073 - DNA, 100 bp, Homo sapiens
agcggctggagagcctgttggagaaacacaaagagattacctctctagtgacccttcagctgttaaccctggttggccatgacgatcagcttgatggacc

SEQ ID NO: 437074 - DNA, 100 bp, Homo sapiens
ggaaatagtggcaggtgacagtctgcatgtgcagttttcagcttcctgggtctgcaggtccagccggctggcaccctccatgtacccaggggagattcca

SEQ ID NO: 437075 - DNA, 76 bp, Homo sapiens
cgcaacttttcggctccgaactgctgcaatgaatcgctccctggctaatgtgattcttggaggctatggcaccact

SEQ ID NO: 437076 - DNA, 80 bp, Homo sapiens
cctgttgtttttgagaaggtgaaaatgggtgcaggctgcactgcccttgtggtggccgtggtggcccgaaagctggaact

SEQ ID NO: 437077 - DNA, 100 bp, Homo sapiens
cttggagtgctgtcccttggaacaggaggagtaagattgaggaaaatgtttataggaggccttagctgggacactacaaagaaagatctgaaggactact

SEQ ID NO: 437078 - DNA, 76 bp, Homo sapiens
cttccgtggactggcggaaaaaaggaaattttgtctcacctgtgaaaaatcaggaaatggccagcctcaaacgaca

SEQ ID NO: 437079 - DNA, 98 bp, Homo sapiens
tgcctgcctgctgctgcttggagagccccagacagtcgcttgaagagaaagtgactgagaccgaagatgatagtgatagtgacagcgatgatgatgaa

SEQ ID NO: 437080 - DNA, 75 bp, Homo sapiens
aacggctcccacagccgggcgttgggggaaaggtcctcgatgggcttcctggaatattggtgtgtttatttgcat

SEQ ID NO: 437081 - DNA, 100 bp, Homo sapiens
gtgaagccttgcactcctgaattttatcaaacacacttccagctgacaggtccggtggtagaacaggcagtgagaggccttgttcttgttcctaccaagg

SEQ ID NO: 437082 - DNA, 101 bp, Homo sapiens
ccaccatcaagctgtctaagtccaaagatttttacccaggggccaacaggacaaaactctacgacatgatagctgatctgggagatgatgagctgccccac

SEQ ID NO: 437083 - DNA, 83 bp, Homo sapiens
cacctgcgctgtgatgcctgcagagctgtggcttaccagcgcttggcgtgggaacagcaggagccaggcgagaggaagctgag

SEQ ID NO: 437084 - DNA, 75 bp, Homo sapiens
tggtcaggtctggagctcgaccgggccagcatgttggcagataaattgaacatgactccagaagaagctgaaagg

SEQ ID NO: 437085 - DNA, 133 bp, Homo sapiens
gtccccggctgctcctcctcgtgctggcggcggcggcggcggcggcggcggcgctgctcccgggggcgacgggtagcacaggcggagtgcagcggaggcccctgccgctgccgtcatgccgttcccgtttggg

SEQ ID NO: 437086 - DNA, 115 bp, Homo sapiens
gagctgggtggtctggagaccatggagaccctcacggagctgggcgacgagctgaccctgggagacatcgacggccctgggcagtgacggggttcgggtgaccatggagagtgcg

SEQ ID NO: 437087 - DNA, 90 bp, Homo sapiens
caccagatcatccatgtgagtgaccatgcagcaaaagaaggagggtcctctcagtgattaagtgcaaacccagcctaccatgagttacta

SEQ ID NO: 437088 - DNA, 85 bp, Homo sapiens
ttgtgaggcctcccgagccatgtggaacttgggatctggtatgcgaatctcaaccactgaattcagtagctaaatttctattcat

SEQ ID NO: 437089 - DNA, 100 bp, Homo sapiens
agacaccgctatcacagctgctgcaatcgcttgggagagctcctgggccacccctcctttcaggtcaagaaatgcactcggtgatggaaagagagccact

SEQ ID NO: 437090 - DNA, 130 bp, Homo sapiens
cagccttccaagctctactgtgacttcagagacactgccaagcagccttagccctagtgtagagatgccttcaattaagttgcagagttctgatggagagatatttgaagttgatgtggaaattgccaaa

SEQ ID NO: 437091 - DNA, 90 bp, Homo sapiens
ggcgcaggcagcaactgaggcagcggcaggctcaggtgcagccgctggcatctcccctcagatggaagtcacatgtgtgcccacgcccac

SEQ ID NO: 437092 - DNA, 80 bp, Homo sapiens
cttatcaccttcttgcttgcagcctttaaatctacaagacagcagccttcccgaaatgtcactactaagaattattcaga

SEQ ID NO: 437093 - DNA, 87 bp, Homo sapiens
ttgatgtactactataatgggaaagcggttggtacaggtcttgggcctacactggagttttatgcgcttgtatctcaggaactacag

SEQ ID NO: 437094 - DNA, 95 bp, Homo sapiens
aatgctgcgtatagtggaaccttatgtgacctggggtcatcgaagaagccaactggatgactctggacaaagatgtgccccagtcagcagagggt

SEQ ID NO: 437095 - DNA, 100 bp, Homo sapiens
caggccgtgcgcacccaggagaaggagcagatcaagaccctcaacaacaagtttgcctccttcatagacaagatttctccacccaggtgaactcctccct

SEQ ID NO: 437096 - DNA, 98 bp, Homo sapiens
aggtgcctgaggtcctaaaacgattgcagagccttggggtgcccggtgcggctgcttcaagtttaagatccttaatgtacccatgtcctctcaacttg

SEQ ID NO: 437097 - DNA, 112 bp, Homo sapiens
atctgtcttcggtggactccttcggcagtccacccaccgccgccgcctcccagggagcatttcctgaagacgtagtcatgcagcacgtcagcagctcccagagcagccagcg

SEQ ID NO: 437098 - DNA, 100 bp, Homo sapiens
tcccacttggggagctgcatcgagaaagcccggccctactatgaggctcggcggctggctaaggagataccactgcatccccacccagcgcatccccgag

SEQ ID NO: 437099 - DNA, 102 bp, Homo sapiens
ccaccatgtcagacgcagccgtagacaccagctccgaaatcaccaccaaggtggaagcagggaaaggcctggagatgaggaagctggttctctcggggttct

SEQ ID NO: 437100 - DNA, 75 bp, Homo sapiens
gccctcagcatctcccttcatgtctgggtcatggacctgaaggagaagaaggagaaggtggaggagaaggcaagc

SEQ ID NO: 437101 - DNA, 98 bp, Homo sapiens
ccacaccagtgcctttggaatttgtacagcagcccagcgacttctccgtgtcccttaaagcgtcagggaagaacaaacacttcaaggtgcagctcgtg

SEQ ID NO: 437102 - DNA, 75 bp, Homo sapiens
tgcggctggaaaacaggatcaccttcgagtcattgattacaacggggaacgcacgctggatggttttaagaaatt

SEQ ID NO: 437103 - DNA, 100 bp, Homo sapiens
aaatccaaagttctcgcccactatcctcagaatatagaatggaacccttttgatcaagatgcggtgaacatgtgggaacttcatgaggccctcgaacatc

SEQ ID NO: 437104 - DNA, 100 bp, Homo sapiens
tttctttttaataatgtgtgacccttcacctttgatcccctgacctgcattaccttgatatgagatcctgactccaaactccattcccaagggtttcatg

SEQ ID NO: 437105 - DNA, 76 bp, Homo sapiens
tgacatttaattttagggtcctttatatagaagggagatgtaccacatgaaggaagatggttgggtgaaagtagaa

SEQ ID NO: 437106 - DNA, 75 bp, Homo sapiens
atccccctaaacaggagcacctgctggcgctaaaagactgattttgcacgatttagcggaacaaatgtggaaact

SEQ ID NO: 437107 - DNA, 97 bp, Homo sapiens
gccaccaccagtttgcggcaagcaaatcaggccggagaattttcatccttgggccttctcatcatgtgcccctctctcgatgtgcactttccagtgt

SEQ ID NO: 437108 - DNA, 111 bp, Homo sapiens
ggaggaggcaggcgcggctgccggcggctgggactgaagagggacgggtcccgcggcgagcgagctcctgaggtttattccctgctgtcctgaatcttgcttctaatgctc

SEQ ID NO: 437109 - DNA, 90 bp, Homo sapiens
aacttatggtagaacttccttggaacaaaagtacaactgccctttggagtgaatcaacctggaccttatatcatgtatacaactgtagat

SEQ ID NO: 437110 - DNA, 101 bp, Homo sapiens
tcggcgccgcggccgctgcggacggacgctcgcctgccggctgagatctggaaagcatgaagactgggctttttttcctatgtctcttgggaactgcagct

SEQ ID NO: 437111 - DNA, 90 bp, Homo sapiens
gtttgccattcgctggggctttatccctcttgtgatttacctgggtcaaagttggaaattgtaatactcctaaaccaagcttctttgatt

SEQ ID NO: 437112 - DNA, 50 bp, Homo sapiens
cttgggtgaactctagcaattacaaggttactcactataaacaatatcca

SEQ ID NO: 437113 - DNA, 75 bp, Homo sapiens
gcaggacttacggcagtgggggctgacagaatagcctaacatggcagaccagagacagcgctcactgtctacctc

SEQ ID NO: 437114 - DNA, 76 bp, Homo sapiens
aacatggaccgggccgcggtccagaccaacatgagagacgctttgatgacagtagggaaagaaccatttcctacca

SEQ ID NO: 437115 - DNA, 100 bp, Homo sapiens
aattttggggctccctcgggcacctccggtaccgctgcagccaccgcggcccccgcgggtgacttcaggtggaacattcattggcattggacggaaaaca

SEQ ID NO: 437116 - DNA, 80 bp, Homo sapiens
atcaagttgcaagagattccaaccttccagccccttttgaaaggtctgtgcagacttttgcagacaaatcaaaacaagaa

SEQ ID NO: 437117 - DNA, 100 bp, Homo sapiens
caaagtcaagcagaaagcgtttgtggagccgtattttaaaggtgatgaaagatcaatattgacttccgcactcgagaatctacagccaagaagattaaag

SEQ ID NO: 437118 - DNA, 74 bp, Homo sapiens
gactcctgtcatccgctcagtgatactgaaactgcttttgaagtacagtgataatatgcagcatgcatactggg

SEQ ID NO: 437119 - DNA, 101 bp, Homo sapiens
gctaaactcaatgctgctgtgtgggaagaagatttgtaaagaaaactcttagaaagtttcctacactactgaggtttaggggcactgtgaagcaaaagcca

SEQ ID NO: 437120 - DNA, 90 bp, Homo sapiens
accacatagtccatcgaagaagagtccttggaacaagcaactggctattgaaaaggttgaaatcacaaagattagacacctttttagata

SEQ ID NO: 437121 - DNA, 51 bp, Homo sapiens
ccaccagagggaaagctggggcggtcctcctcgactggattaatgacgtgc

SEQ ID NO: 437122 - DNA, 75 bp, Homo sapiens
tgcaaaccacactaacatattactggcatcttcaatctgaatggagctggtttgtcaaaatccaaaggaagccga

SEQ ID NO: 437123 - DNA, 82 bp, Homo sapiens
cggcgaacgcggagagcacgccatgaaggcctcgggcacggttttaaaatcaaagatgggaaaatcggagaaaattgccctt

SEQ ID NO: 437124 - DNA, 100 bp, Homo sapiens
ctcgctctgcctctccctctgcctctgcctctgcctggccgcggctctgggaagtgcgcagtccgtttgcatttatgtcggatcctcagtgaaaataaaa

SEQ ID NO: 437125 - DNA, 87 bp, Homo sapiens
atgcagctggcccgagagctgaagaccctggcccgggaccttggcatggcagtggtgggctgggttctcagagaaagaaaacgtgat

SEQ ID NO: 437126 - DNA, 90 bp, Homo sapiens
taattattcccagagtcgggagctgctcgtgcagtgaatctgaatggtgcctaccctaagctggtgcctttcagacctgcaggacggctg

SEQ ID NO: 437127 - DNA, 83 bp, Homo sapiens
gcgcactcgtaacctggatcccagaaggtcgcgaaggcagtaccgtttcctcagcggcggtgcctccggagccagcgtggtgg

SEQ ID NO: 437128 - DNA, 100 bp, Homo sapiens
aaagactgccccatcaaggaagaaaaaggaagccccttaaatgccgcaccctacggcatcgaaagaaaatgtgccagaggaacttcaagaaccattttac

SEQ ID NO: 437129 - DNA, 99 bp, Homo sapiens
gctaaattacatattccagtaatggtggatgaagttgttcattgtttgtcaccacaaaaaggacagatcctccctgtctatgagcaaggatcccacttt

SEQ ID NO: 437130 - DNA, 49 bp, Homo sapiens
cgagtccctccggaactcacactccagcaaaacacttactattttggag

SEQ ID NO: 437131 - DNA, 100 bp, Homo sapiens
gatctggaggaccagagagtagtgaaagaggaggaagccatagcactcgcagagaaatatggatttgagttctgtgaacctgcatttgttgttggtaatt

SEQ ID NO: 437132 - DNA, 83 bp, Homo sapiens
gataaagtggagctgatgctgcccgagaaattgaggccgttgtacaaccatccagcagaaaactttagaaactgttcctttgg

SEQ ID NO: 437133 - DNA, 83 bp, Homo sapiens
gatatctggccgcctctgccgcagctggaggatctatcttgggatcccatggctttctttactgggctctggggccccttcac

SEQ ID NO: 437134 - DNA, 112 bp, Homo sapiens
ctgggccggagcagccgcgggcgcccgaggggccgagcgaggctggccagctaaactatgtggatccagctactggctatgtggtgctcacacagattgcccacttgcaaag

SEQ ID NO: 437135 - DNA, 90 bp, Homo sapiens
tggaatccatgtttctggacgcggatttttggcctcatactctgttatagataaacaaggctctcaactacaatctgagcaaagaagggc

SEQ ID NO: 437136 - DNA, 87 bp, Homo sapiens
atccaacaccgcccaacacccctcccgctccccagtccggggacttcgataggtcatgactgtccaaagtatgataatcacatgaga

SEQ ID NO: 437137 - DNA, 100 bp, Homo sapiens
agtagagtatttcaaccataaagacatcttaattgggcacgaaagaggtactagcaaaggccagacgtcttactcaacaacttccctgccaccacctcca

SEQ ID NO: 437138 - DNA, 100 bp, Homo sapiens
gcgaccgtctggatccccgcccaggaagcccctctgaagcctcctcgccgccgtttctgagaagtgccagcacatcagacccaccaacagccaatatcaa

SEQ ID NO: 437139 - DNA, 51 bp, Homo sapiens
ctgccaggtggagcattgccggcagcgagcattccaaaatatgcccggtgc

SEQ ID NO: 437140 - DNA, 100 bp, Homo sapiens
ctgtcataaagtcacctactgtaccagagtttcaggagcatcagatccatgctgctgctgactcggagccccacagcttggcacaggctctctcagctca

SEQ ID NO: 437141 - DNA, 75 bp, Homo sapiens
tgcgagagcctcctcacttggggggatatgagactttctactcggaatatcctgagtgttgcgtggatgtaaaac

SEQ ID NO: 437142 - DNA, 90 bp, Homo sapiens
ggagcagctcctgccggagcttctgaagaaggccggctacgtcagcaagattgtcggcaagtgcctgagaaatgccagtggcctgacagc

SEQ ID NO: 437143 - DNA, 100 bp, Homo sapiens
tagaaagagaagctagaatctgccgtcttttgaagcaccctaatattggtgaaacctggagatgacttagaaagtgatcgatacttaatcacagttgaag

SEQ ID NO: 437144 - DNA, 75 bp, Homo sapiens
gctcgtcctcatctgggttctcactggccattggcttctcatggatgagcctattgtgaagaatggcaggcctcc

SEQ ID NO: 437145 - DNA, 75 bp, Homo sapiens
catgctgggagccatctgtgccatcatcgtggtagttattgtaaatgaaggatttgggggcagagcacttggcag

SEQ ID NO: 437146 - DNA, 101 bp, Homo sapiens
caaagatgctctgcggtttttgggctgtgttgacatcaaggatctaccagggctttagatatccttgaagaagttaacgtatcaggaactcggaaaaataa

SEQ ID NO: 437147 - DNA, 75 bp, Homo sapiens
ctagaggttgaggacgctcagaaagatgaatgggagggctgattttcgagagccgaatgcagaggttccaagacc

SEQ ID NO: 437148 - DNA, 75 bp, Homo sapiens
tcctcccagtgacgggtctggagtgcgtgggggaccggctgttggcgggattgtcagtggcttcgccccgaggag

SEQ ID NO: 437149 - DNA, 100 bp, Homo sapiens
atagcttatggttctccattgtgatgaaagcacatggtacaggtgcagcctttgtgaaggagaaccaccggcaactccaagccaggatgggggacctgaa

SEQ ID NO: 437150 - DNA, 75 bp, Homo sapiens
atggtgcagaggccctccacgctgtgtgttctcatttcacccaaaacctttggacagtgcagggcatagaagatt

SEQ ID NO: 437151 - DNA, 100 bp, Homo sapiens
tctgccgcaaacatgctccgccagatcatcggtcaggccaagaagcatccgagcaacaccaatcagggtcttcaggcctggaagattgaagacattccag

SEQ ID NO: 437152 - DNA, 101 bp, Homo sapiens
ggtaaccaagcccaacccaagcttcatgagacaactggaagagtatcaggggatcttgctggcaagttatgagttgcagaaacgaattgctgaaatggaaa

SEQ ID NO: 437153 - DNA, 75 bp, Homo sapiens
aacggttagcggtggcaggggctgactgagagcgtctgcttgcctcagactatggcatgaaactgccaatcctgc

SEQ ID NO: 437154 - DNA, 74 bp, Homo sapiens
ttctgaagttgttcattaagacttcccagcattcctacagatataaataggagtcttttagtcctgctatacag

SEQ ID NO: 437155 - DNA, 75 bp, Homo sapiens
tgcactcacacgacgtgcgctatgggtcaggttctttcagagcacggcttcggccccatcactaccgacatccgg

SEQ ID NO: 437156 - DNA, 50 bp, Homo sapiens
agtctcgagcccgggaagtgcgttttgtgtttcctgaggttataggcggg

SEQ ID NO: 437157 - DNA, 101 bp, Homo sapiens
ctcaaaatatgatggtggttggacagtcagcatttgcagactttgactcagcccacctgcacccaggtgaaataaacagctttattgctcacacgaagcct

SEQ ID NO: 437158 - DNA, 100 bp, Homo sapiens
cgtgcctgctgaggtgctctgcaggggccgagacttcgttacgttggacctctcgaacaaccagctgagcgagatccctgcagagcttgcggactgcccc

SEQ ID NO: 437159 - DNA, 83 bp, Homo sapiens
gaagatatgacctatgcagttcgaaaactggataacactaagtttagatctcatgaggaaactatggtccaggaggcagtgga

SEQ ID NO: 437160 - DNA, 75 bp, Homo sapiens
gttggagggagagatgcaaataccaggaatactcccccagttgcaagaggcgcaggaccgtggaagacttcaaca

SEQ ID NO: 437161 - DNA, 75 bp, Homo sapiens
ccgacaacttttctcctgatttgaggattcatgatgttgctatcaaaagttgagaaattgtcagaagaaatcatg

SEQ ID NO: 437162 - DNA, 75 bp, Homo sapiens
aagcctctgggagcagaagggaggctccaagacctcatcaacaattaagggaccattgacatttagggatgtggc

SEQ ID NO: 437163 - DNA, 100 bp, Homo sapiens
ctcgttacctgcaggtattgggagatccacagctaagacgccaggacccactggaagcctagaaatggatcgagcggtccacggaccaggtcatcaagcc

SEQ ID NO: 437164 - DNA, 102 bp, Homo sapiens
gaagttctagaatgtcttcctcaaggcctgccatggacaattccaccagaggagttcagcaagagaagggatttaagtcaccaggtgtcaagatgctgcaag

SEQ ID NO: 437165 - DNA, 83 bp, Homo sapiens
cctggaatggcaagcgcagcaacaacagagagcacgtgcctaagttcgaggcccaggcgcctccatcagcgccgcctgcgccc

SEQ ID NO: 437166 - DNA, 82 bp, Homo sapiens
ttagctgtgctcgcgctactctctctttctggcctggaggctatccagcgggctttgaccacgacctttgaagagcttcatt

SEQ ID NO: 437167 - DNA, 50 bp, Homo sapiens
gccggaacaccctggaagccgagaaatggctgaaggtgatgtggccgccc

SEQ ID NO: 437168 - DNA, 99 bp, Homo sapiens
gtctgttagtccccagagcctccaagggaaaacggtaaagattatagttcccaacagcacagcaggtctgataatagggaagggaggtgctactgtgaa

SEQ ID NO: 437169 - DNA, 82 bp, Homo sapiens
tcaagcagtcctaccatgtcagccttcccagtagctgggaccacagtgggcttaaaattgaattcagtggatccaacaatga

SEQ ID NO: 437170 - DNA, 96 bp, Homo sapiens
ccagtacattaggaaacatgctagaattacctggaacttcatcatcatctacttcacaggaattgccatttgctcatggatttgagatcttatgct

SEQ ID NO: 437171 - DNA, 51 bp, Homo sapiens
gccaccatggagaagcataaagaggatcttaagattgaaagtgatgttcaa

SEQ ID NO: 437172 - DNA, 100 bp, Homo sapiens
taatatggcaagctttgtgaggcaactgaatatgtggccatgtttatgagtggactaagtgaaagcaaacaaacccatgtacacctgaggaatgtcgatg

SEQ ID NO: 437173 - DNA, 83 bp, Homo sapiens
tcatcttctaaacagagcagcagcagcagagatgataacatgtttcagatacttggatgatattgatgatgagatggacccag

SEQ ID NO: 437174 - DNA, 75 bp, Homo sapiens
ggagactttcagattaaaccagttgaattaccagaaaacaggtatgttgagtctaaaaaggacagagtcacagta

SEQ ID NO: 437175 - DNA, 75 bp, Homo sapiens
tgcgacacggtgcgcgtcaaggccctcttcgccatctcctggccgcatcatcgagtgcacacactgtggctgtcg

SEQ ID NO: 437176 - DNA, 100 bp, Homo sapiens
agaatgcctggcatttgataaatgtttgttgaacttgaagagacatatggacaatgaatctgcaaaggaataagtcttgactgggatgaaaagagaccag

SEQ ID NO: 437177 - DNA, 97 bp, Homo sapiens
ccctcctgaaactctaccctccaggggatgaggaaggatgtcacatgtacttcagtttgaggataaaagcagaaaagtgaaagatgcaagcatgcaa

SEQ ID NO: 437178 - DNA, 82 bp, Homo sapiens
aggagaggaaaaaggaagagagcactgcagccagtgaaaccactgagttgcagagtgggcaggatcttaagacccgataggt

SEQ ID NO: 437179 - DNA, 83 bp, Homo sapiens
tgcaacaaatatcactgaaatgattcatttctggaagcattctacttcgcaatgtatctgctgagcaaaaagatgaaaacaaa

SEQ ID NO: 437180 - DNA, 100 bp, Homo sapiens
ccggacgtgtccgcgaagatggcgggccgggctgaccggttccctgatgtgttacctgcttctgctactgatccaaactgcagaacttctcattcatccc

SEQ ID NO: 437181 - DNA, 116 bp, Homo sapiens
tcttccacttgcacgaaagctttcctaggccaaaaagagacatccacgacagcgatggcagttccagcagcagccaccagagcctcaagagcacagccaaatgggcggcatccctg

SEQ ID NO: 437182 - DNA, 90 bp, Homo sapiens
ggggtttccggctgcagggcggtaaggatttcaacatgcctctgacaatctctagtgttttcttccacccctgagatggcaagaccagcc

SEQ ID NO: 437183 - DNA, 96 bp, Homo sapiens
cccgccgagacatccgctccttgcccgagaacatccagtttgatgtttactacaagaatgtgaaagatgttgcagaagtgttccagaagtggctga

SEQ ID NO: 437184 - DNA, 100 bp, Homo sapiens
ggccatgtatgtgcatgcatatacactctacagtgctgttagaccttttggctgcaggtatatgagtagaccagtgatgagtggcccaggactctatgac

SEQ ID NO: 437185 - DNA, 90 bp, Homo sapiens
tatccgccatggagaaatcttgccttgttgtcctcctggtgcgaagagctcggccgcctgctgctgctccgacatcagaagagccgccag

SEQ ID NO: 437186 - DNA, 83 bp, Homo sapiens
ggcccccgacggctctgcagttaacgggaccagctctgcggaatgatatcatcaagttgaatcgaaaggaagggaagaagcag

SEQ ID NO: 437187 - DNA, 72 bp, Homo sapiens
tcgggctgcaggagaagatggcggtctccacagcaattctgtggtgttcttggtcacacatttatggagttt

SEQ ID NO: 437188 - DNA, 74 bp, Homo sapiens
cgtggagtttgatgactctcaggacaaagcaggtacaaattctgagctgtctaacccctctgaaacggaatctg

SEQ ID NO: 437189 - DNA, 75 bp, Homo sapiens
tcggccgtcccggcgcccctggggacgccgccctcccggtaatctatgccagcaattatgacaatgttagcagac

SEQ ID NO: 437190 - DNA, 100 bp, Homo sapiens
gcattttggcattgacatttaattttagggtcctttatatagaagggagagtagcagtggacgtcagctcagcgaggtcttcatccagctgccctcgcga

SEQ ID NO: 437191 - DNA, 83 bp, Homo sapiens
gtaaccgggacccggtgtctgctcctgtcgccttcgcctcctaatccctagccactatggtctcctccgggctggggctgagc

SEQ ID NO: 437192 - DNA, 100 bp, Homo sapiens
aggagatacattaaatgcaatagcccttcagtactgttgtacgattgctgcagcaaaaccaactccaccaaaaagccaggtaacattaacaaaagaattc

SEQ ID NO: 437193 - DNA, 100 bp, Homo sapiens
cagaaaacacggtgggccaaaggatgaagagaggtgatgtcagtgttggcattaagtgtgatgcccgggtgttaagtgaagatgaggaagacgtggattt

SEQ ID NO: 437194 - DNA, 74 bp, Homo sapiens
gtggactccttcggcagtccacccaccgccgccgcctcccagatgagttttgatcatcctgagaaaaatgggcc

SEQ ID NO: 437195 - DNA, 100 bp, Homo sapiens
tccagagaaggtggaggaatcctgatactgagcgtaagactttgaccccgacgcaggcttcagtgattgccgcggatcagaagcctgagcactttggctc

SEQ ID NO: 437196 - DNA, 83 bp, Homo sapiens
ttctggcctggaggctatccagcgtgaatctgtggatgactgtgggggcggctacagcgagtccatagctgagatctgtgagg

SEQ ID NO: 437197 - DNA, 74 bp, Homo sapiens
ccaacactagtggaatatgatcacatcccagatatgggacccgtacacatggactttttaagagactgggaatt

SEQ ID NO: 437198 - DNA, 97 bp, Homo sapiens
tcatcgggtgctggaggtggtgaatcacgtggacaagaatggagatgcagcagcttcactgactgtggccgagcagtatgtcagcgcgttctccaaa

SEQ ID NO: 437199 - DNA, 100 bp, Homo sapiens
agcctggaggattgtcactccaacctcttttcgctggaactcattatacaatgacaaatggaggcagcattaacagttctacacatttactggatctttt

SEQ ID NO: 437200 - DNA, 98 bp, Homo sapiens
atatgagctgacagtcaaaagttcggaacagacaggccacttggtcattctggcattttatggtagagaatacgttgagtttggctctggaaggaata

SEQ ID NO: 437201 - DNA, 101 bp, Homo sapiens
ctggttgagggtctccagggttctttggggcccgagcagatccagagccagagctctacctcgatcctttctgccctccgggtttctccagtcagaaattc

SEQ ID NO: 437202 - DNA, 74 bp, Homo sapiens
ggtgagagagctccacaaggtgaaggaggagatcatcgacgcggagtttaagagagctgtgaaagtagcaacag

SEQ ID NO: 437203 - DNA, 125 bp, Homo sapiens
tttccactcgcctcttgggacttaactcttctttccttctctccagcccaggaatcctgtggagttcagctcagcaagcctcgctttgtaccgtatggagtcctccagctgcagcccagctcacc

SEQ ID NO: 437204 - DNA, 100 bp, Homo sapiens
ggccgacttcgatgatcgtgtgtcggatgaggagaagccgcagggccgtaggcagccatggcgcccagccggaatggcatggtcttgaagccccacttcc

SEQ ID NO: 437205 - DNA, 75 bp, Homo sapiens
ctactatcctcattatctccaaaccaaggtgaaaggtgtagcagtcactcggcctacacccacagcatcgacctt

SEQ ID NO: 437206 - DNA, 100 bp, Homo sapiens
cttgggcaatcttcacggggctggctgctctgtgtctcttccaagagacaaagcatggaggacacaagaatgggaggaaaggcggactctcaggaacttc

SEQ ID NO: 437207 - DNA, 75 bp, Homo sapiens
tgaaaagacaagatgtcctttatgatcgtctcgacccaggagaaggagctggtgcagcccttcagctcgctgttc

SEQ ID NO: 437208 - DNA, 100 bp, Homo sapiens
aagtaaccagttctgtttgcctgttttggatagcaatgatcccaatttccagatgccttgttcaacagggtatttgaagtataccatacaactgttttga

SEQ ID NO: 437209 - DNA, 90 bp, Homo sapiens
gatttatcaaatagccttgaggaaatatatattatcgtcgtcctccccgcagtcaggctgcccatcacccaccattccagcaggtaaagt

SEQ ID NO: 437210 - DNA, 100 bp, Homo sapiens
aagactctgacattcctggctgtcatgctcattgttctgaactccacgcttgccagagtgatctctcggcttgccgactttgctaaggaacgagccagtc

SEQ ID NO: 437211 - DNA, 100 bp, Homo sapiens
cgtcaaactcaccaaaaacaacatctttccagaaagaggttcaaaccttgtactactcagctgatcacaagctgcttgatgggaacctactagatggaca

SEQ ID NO: 437212 - DNA, 100 bp, Homo sapiens
gcagagtgaagaaagctggtaatagatgtctgacaaactaaagaaagacttgtgttacattcccagcctgtagttcatgtaattgcttcccggcgtcagg

SEQ ID NO: 437213 - DNA, 82 bp, Homo sapiens
gcgcccagtcgagcccggggcagcggctgccgggccgggactggtgcgcgaggggtgagaagccctaccactgcaactggga

SEQ ID NO: 437214 - DNA, 101 bp, Homo sapiens
gagcgtcgaggaggcgcaggagactgaccgcaacggcaggcctcccagtgcaacgtcagcttaaagaagcagaggagccgcagcatccttagctccttctt

SEQ ID NO: 437215 - DNA, 74 bp, Homo sapiens
tgagattcttcaaatccctccactctcttcaactgcaactctggatcccctaacaacagtgagagagcaatgcg

SEQ ID NO: 437216 - DNA, 102 bp, Homo sapiens
ggccttccccgggcggagagcccctctccagcgagaattagaactgcagcgtcagcgtgacttgcataagatcaagcagcttcagcagacagtgagagacct

SEQ ID NO: 437217 - DNA, 87 bp, Homo sapiens
acaggcagaaaacgagaggctcaccgcagtcgtgcaggatctgaaggaggttatcaatactctggctgaccatcatcatcgtgggac

SEQ ID NO: 437218 - DNA, 100 bp, Homo sapiens
aggacagcggcaccgccagacggccagaaagttccgccatgagctggggcacggagctgtgggttgaagaaatatggagatcaacacaaaactgctcatc

SEQ ID NO: 437219 - DNA, 75 bp, Homo sapiens
cagtgccaatgcatcttctgtactctggggtcaggcccagccccaggcccagtggtattactgaattcactgaat

SEQ ID NO: 437220 - DNA, 98 bp, Homo sapiens
agctggggaagttgcgagagaggctgcagggggagcacagccagaatggggaggaggagcctgagccaagacaatgcaaactccagtgaacattcccg

SEQ ID NO: 437221 - DNA, 101 bp, Homo sapiens
gtccactggaaaggagtttgccctaaagattatagacaaagccaaatgttgtggaaaggagttgatccctgaattttattatctccctgagatgtttgtca

SEQ ID NO: 437222 - DNA, 90 bp, Homo sapiens
ggacgatatctaatattacagctggaaatagggcacagatccaggtgagtcgttcctctttgctaatagaacagcctgtgaaaaaacggc

SEQ ID NO: 437223 - DNA, 101 bp, Homo sapiens
actgacattgaggaaagaagcagctatgaagaccagggggttcagctttccaagacaaagctcccaaaatggcgatgacaccggcacctggcccaacaacc

SEQ ID NO: 437224 - DNA, 82 bp, Homo sapiens
gaggctgcctcctgcagcccccatagcagaatcagacacaagtttggcagaaggaagtgtcagctgcttagatgaaagtctt

SEQ ID NO: 437225 - DNA, 99 bp, Homo sapiens
gcacggttagacacacagctgaagaataagcttataacactgatgggacacagagcacagccaagacctgcagagtgccctcatccggctggaggagga

SEQ ID NO: 437226 - DNA, 83 bp, Homo sapiens
cctctttggcaatgttttcttggacgatgatgccaccagtccccatttctcaacacgtcatgaagggtccttccaagttcctg

SEQ ID NO: 437227 - DNA, 75 bp, Homo sapiens
cctggagtccctggagaaggcggaagtggaggtggctgacgagctgctggatgggcccaaaagcacaagaactgg

SEQ ID NO: 437228 - DNA, 96 bp, Homo sapiens
gtgttagtgtctggagccatgaaggccttgtgctgaccaagctgctcacctcggttcaacattcatttgagaccccaaatatactgacccagctgc

SEQ ID NO: 437229 - DNA, 80 bp, Homo sapiens
ctacccgcttctcgtagtcctgggagcacagcagaagtttgctgatcatctgggctgtgatccacaaacccggttctttg

SEQ ID NO: 437230 - DNA, 98 bp, Homo sapiens
agcctggaagaactcgtcatgctctttgtagcgtggtgcttctgttgctcacagcattaaagggcagtatttaaagtcagttggcaagcagtggaata

SEQ ID NO: 437231 - DNA, 96 bp, Homo sapiens
gagaaggttagctgttctctgatggtggtggctaatgccgtagcggcattatctgaaatcagtgagtctcacccaaacagcaacttacttgatctg

SEQ ID NO: 437232 - DNA, 151 bp, Homo sapiens
tcagaaccatcatgggctggacattggacttcctccgggagcggctgttgggctggatccaagaccagggtggttggggctccaaggtgggcaaactgaccctcaagaccacagagatggagaccatctacgacctgggcaccaagatgat

SEQ ID NO: 437233 - DNA, 83 bp, Homo sapiens
agaaccggtacctggatggcatggaactgtggctgcaccatctgtcttcatcttcccgccatctgatgagcagttgaaatctg

SEQ ID NO: 437234 - DNA, 100 bp, Homo sapiens
gaaaagaatggcagcggaaacgcagacactgaactttgggcctgaatgcatgccaatgaagatgtggaaagaatgttactaggaaacaagtgtgatatgg

SEQ ID NO: 437235 - DNA, 100 bp, Homo sapiens
gaagatgccgcagcccgagtcccagaaggcggcgatcctgggctgcgggcaaggcgattgaagaatgtcccggattccactggggaaggtcctcctgagg

SEQ ID NO: 437236 - DNA, 96 bp, Homo sapiens
gactccttgtcgggtgtcgtgcgttgcctatactttgccgacacattccttcgagatggaatactcccccagttgcaagaggcgcaggaccgtgga

SEQ ID NO: 437237 - DNA, 100 bp, Homo sapiens
ctttgccccattcctatctcgtacacttcttggcagtcatggacaagagctattgatagaagaggactattttaacaaagggaaaaatgagcctgaggac

SEQ ID NO: 437238 - DNA, 82 bp, Homo sapiens
aaaccgacaaccttcccagaaagtccaagctcgtgaagcgccaagaaccagaaccagaacagccacccagaccagagcccca

SEQ ID NO: 437239 - DNA, 101 bp, Homo sapiens
gcggtttcctcccgactcgcgatcaaaatgggtatcgagaaccttccctgcgaacttcagaggaacttccagctgatgcgagagctggaccagaggacgga

SEQ ID NO: 437240 - DNA, 110 bp, Homo sapiens
gcgatgctcccagcccggtgagacctgcctgaatggcgggaagtgtgaagcggccaatggcacggaggcctgcgttaagactttgaccccgacgcaggcttcagtgattg

SEQ ID NO: 437241 - DNA, 100 bp, Homo sapiens
tttttattacaagactacggagcataggaggaaaattcatcatctgctctttcaccatgcctggatcacttcctttgaatgcagaagcttgctggccaaa

SEQ ID NO: 437242 - DNA, 82 bp, Homo sapiens
cgcacagccaggacatcctggaacctgggaaaggagctggaagtcgagtgtgctactcaactcaggagatttggagacaaac

SEQ ID NO: 437243 - DNA, 98 bp, Homo sapiens
tcgaaaggattggattggcatctttagatccttcagctgtggaagaggatgaagatgaagatggtcatactgtggtggccacagcccgaggcatattt

SEQ ID NO: 437244 - DNA, 116 bp, Homo sapiens
ccacaagcagatctactactcggacaagtacttcgacgaacactacgagtaccggtgagaagccctaccactgcaactgggacggctgcggctggaagtttgcgcgctcagacgag

SEQ ID NO: 437245 - DNA, 73 bp, Homo sapiens
tgatccgtgtatatattgcatcttcctctggctctacagcgatctggcatttccttgtgctcataatgagaat

SEQ ID NO: 437246 - DNA, 74 bp, Homo sapiens
ctcagcctctgcccaaagaaagaaggagattggcacttctctgtttgatgaagagggagccaagattgtcaaag

SEQ ID NO: 437247 - DNA, 100 bp, Homo sapiens
ctggaaaaactgtgggtggtgaacagagagaacaggtcttgtcaacggaaaggggtccctatccagaccccaagagagcattcttggatctcttgcaaga

SEQ ID NO: 437248 - DNA, 73 bp, Homo sapiens
ccccagcgtgggtgaagataggatcaagatggccatgtggcaggccaacatcccatgcaccatcgtggagact

SEQ ID NO: 437249 - DNA, 78 bp, Homo sapiens
gcttgtccatctgtaacttcattaagatgaagataaaacgttacctgcagagtcgggatgtacaatagaggatcacgt

SEQ ID NO: 437250 - DNA, 100 bp, Homo sapiens
ctgcaaaacgggcggcccgcgcggaggctcgcgagatccgcatgaaggagctggagcggcagcagaaggagcctacaacacagcagtcccctcaggatga

SEQ ID NO: 437251 - DNA, 100 bp, Homo sapiens
attagagacaagcggtcagcagagcctcagtgctgatcgtcggagcttgggagcaggaagatgtcgaatgaacttgatactatactggcaattgctggag

SEQ ID NO: 437252 - DNA, 100 bp, Homo sapiens
gcgcccccggggctcgcggagccagatgagcagcagctgctcagggctgagcagggtcctggtggccgtggctacagccctggtgtctgcctcctccccc

SEQ ID NO: 437253 - DNA, 100 bp, Homo sapiens
cagacttatcagcaggttgcaggtgaacatggccttgagaaactaattctgaagcaagcccttatagttgtgctgcagtggtgtttcaatcacaatttta

SEQ ID NO: 437254 - DNA, 75 bp, Homo sapiens
cggccgcatccgtttccacgactttctgggagactcgccacagatggggaagtcacagccgtggaggaggcaccg

SEQ ID NO: 437255 - DNA, 75 bp, Homo sapiens
cgcgcacttcgtcatgttcttcgcgccctgatgacgacaacccccccgtgtcttttgtgaagttctccccgaacg

SEQ ID NO: 437256 - DNA, 82 bp, Homo sapiens
gtgccgcagctgcgatggccgtggccgtggggagaccgtctttgagccccatatgggggttggcaggcagcagagaggcccc

SEQ ID NO: 437257 - DNA, 98 bp, Homo sapiens
gttaagtgggcgcaagtcccagaagatgtcggagcccatagcagatcttctggtgaccccacttctcgctgctcatgccgctgggactggggcggcgg

SEQ ID NO: 437258 - DNA, 90 bp, Homo sapiens
atctgcctacctcccgttaatggaaccgcgactcacagatacactgcctctaggactgggacagatagccactgagtacctgcttcaaat

SEQ ID NO: 437259 - DNA, 131 bp, Homo sapiens
aaattattagaaattccgcgggcggtgtagaggcggcggacgggccggagggaggatgttaaagccccgcggtgcaatggatgagcttcatagtctggatccaagaaggcaagagttattggaagctagat

SEQ ID NO: 437260 - DNA, 100 bp, Homo sapiens
atgttgaaagatctaaaggagctgtcagatggagaaataaaagtggccattagtactgtgagcatgaaccttgagagaaatctgacagaatattttgtgg

SEQ ID NO: 437261 - DNA, 98 bp, Homo sapiens
gacgacagctatgccagcggtgagggcctcaagcgcagcgccctcagcagctccctgcgggacctctcggaagccgggccagttctgtgactattgca

SEQ ID NO: 437262 - DNA, 75 bp, Homo sapiens
gtgcctgatgatcacgcagctggctggcttcagtggaccagttatcaatactctggctgaccatcatcatcgtgg

SEQ ID NO: 437263 - DNA, 100 bp, Homo sapiens
cggcgcggccggcctcttcgccaagcaggtgcagaagaagtttagcagggcccaggagaagaagaagaagatggagtgtgggagaatggactttcctatg

SEQ ID NO: 437264 - DNA, 74 bp, Homo sapiens
ccggggacctcgtccgagcccacccgcctttggagcctacagcctggctcccgcgacgccggaggtgaaggtgg

SEQ ID NO: 437265 - DNA, 100 bp, Homo sapiens
tgtatatcgctgatggcatgcagtccctgcgcatcctcaagcttatcggctatagccagggcatccggtgacactccattcagggtaatggacaagatgg

SEQ ID NO: 437266 - DNA, 100 bp, Homo sapiens
atgaacggatggatgtgatgcctgctagccaaaaggtcgtgagatggagaataaagaaactctcaaagggttgcacaagatggatgatcgtccagaggaa

SEQ ID NO: 437267 - DNA, 82 bp, Homo sapiens
ggacagaggaacatctgtaccctctcaacgtcccgagcagccccgcccaacatggacccagacccccaggcgggcgtgcagg

SEQ ID NO: 437268 - DNA, 82 bp, Homo sapiens
tgccctctgaggagatggtcatgacagggactttgaacatgtcggggatcgccctcagcagactcgcccaggagaggaaagc

SEQ ID NO: 437269 - DNA, 75 bp, Homo sapiens
cggggagagaccccgagacccccggggcacgaagtccagagcgagcggtgcaggcctgagtgttccttccagcat

SEQ ID NO: 437270 - DNA, 100 bp, Homo sapiens
tcctccttgaagtatttggctgaggagttttcaatcccaatatgaggccccaggattcctggcgaggtcctcctccccttttccagcagcaaaggtttga

SEQ ID NO: 437271 - DNA, 75 bp, Homo sapiens
acagctgtggaaagaagttgcaaaacactgggaactaattctgaagcatcaaatgcttctgaaacagaatctgac

SEQ ID NO: 437272 - DNA, 100 bp, Homo sapiens
gcctcccgagtggctgggattacaggtgatgtacctgctcccccttcaccttctgccataattggaagcttcctgaggccctcaccagaagcagatgccg

SEQ ID NO: 437273 - DNA, 100 bp, Homo sapiens
ccgcttgcagcggggacgcgaggacccgggctgggctttcctcacccggttccatggaaaatgggagaccacctgatcctgcagactgggccgtgatgga

SEQ ID NO: 437274 - DNA, 99 bp, Homo sapiens
ctcacatcttcaggtgcctcattcacatacgtcaaggaaattgagctgagatctgtatctgtggacctgaatgttgatccctcgcttcagattgacata

SEQ ID NO: 437275 - DNA, 97 bp, Homo sapiens
tgctcacctggagaagggatggaaatacttcaacaaggtccttgaatgggcaagagggcacatgaagtacggcgtcctccacattcacggcctctac

SEQ ID NO: 437276 - DNA, 82 bp, Homo sapiens
tggagcctcagttggaagcagccgatccagcctgcggagcctgtggggcaggccccagtgcagagagcccacggccatccag

SEQ ID NO: 437277 - DNA, 138 bp, Homo sapiens
gccactcctcccggaggcgacatggggcacccggtgtaccgcggcgagaagccccagctgcactacgcgacaatgcagatcttcgtgaagactctgactggtaagaccatcaccctcgaggttgagcccagtgacacc

SEQ ID NO: 437278 - DNA, 83 bp, Homo sapiens
cacgagaccggctacttctcggcgctgccgtctctggaggagtactggcaacagggtaagaagtaccaatgggatgcagaaac

SEQ ID NO: 437279 - DNA, 50 bp, Homo sapiens
cgcagtggtcgcttcttctccttgctggagctctcaaacactgctgtcct

SEQ ID NO: 437280 - DNA, 75 bp, Homo sapiens
cgattctgcatcagcctcccgaatagctgcgattacaggttctcccatgggcaggtggtctctctggatgagctg

SEQ ID NO: 437281 - DNA, 97 bp, Homo sapiens
accttcactgggatgatgcgctgcagccagctggcccccagggccctgcaggaacagatggagtcggataactgttcaggaggagatgatgactgga

SEQ ID NO: 437282 - DNA, 74 bp, Homo sapiens
ttttttcctgtatgaagcggttggcaccactgaagtgaccgaatgaggtgtccctggccagtgtccttccacct

SEQ ID NO: 437283 - DNA, 83 bp, Homo sapiens
aagctggcgtgggcaggccagctgtacctggcctggagctccagagctggtggagttgagatctataatggagatcgtaaaat

SEQ ID NO: 437284 - DNA, 90 bp, Homo sapiens
gctctcctctgcgccggcccgctcactccgcccggccccagccctagcgctggccgcgaccccggcggacctgcaaatgcaactggttga

SEQ ID NO: 437285 - DNA, 90 bp, Homo sapiens
gtgcgattgtggaagctgctcggggtgcagttctgaagccagagttgaaaagggaccctgtcagtacaagagtcaagttaaagattgtcc

SEQ ID NO: 437286 - DNA, 100 bp, Homo sapiens
gagaggagatgcacacggcactcgagtgtgagctgctctgttaaaagcgaaaatgaaacaattgcctgcggcaacagttcgactcctttcaagttctcag

SEQ ID NO: 437287 - DNA, 82 bp, Homo sapiens
gtgaccttggtctgggccgcttcttcagctctgagaccaccgcagcccactccctagactctcagcgttctcatctctcttc

SEQ ID NO: 437288 - DNA, 100 bp, Homo sapiens
tttttctaatatgggcagtaacacatagcgtcaaagagtatgccaccacgggctgttccctgaccctgcaccatacggagaaaccagaacatgaagacat

SEQ ID NO: 437289 - DNA, 100 bp, Homo sapiens
agtggaagaggtcaaatacatgaaaaatggggcagaagaagagcagaaaatagcagccaggaaccaagaaaacttgccgactcttctaccttcagagtgg

SEQ ID NO: 437290 - DNA, 75 bp, Homo sapiens
ggaagcaaatataataatggcagcacagagctacattcgagtttccaaggcaggaaaggtaaagagacaaagaaa

SEQ ID NO: 437291 - DNA, 78 bp, Homo sapiens
agcctcttgagtagctgggattacagtctgcagatctccaggggagcccaccagcctagtcaacatggcctcggaaga

SEQ ID NO: 437292 - DNA, 82 bp, Homo sapiens
cttcaggaggccaccaacttccctctgcggccgtttgtcattcccttcctgaaggatttgtactgtgttcgcagtgacctgg

SEQ ID NO: 437293 - DNA, 50 bp, Homo sapiens
caaaaggacctgactcaggcaaagggtcacagtgtcatccgttcagctac

SEQ ID NO: 437294 - DNA, 75 bp, Homo sapiens
cacagtcatcgagaggaccttccacgtggattctccagacgagagggtgaggaggtcctccggcagctgcagacc

SEQ ID NO: 437295 - DNA, 100 bp, Homo sapiens
ctggagagaggctctgcacccgagcacagcctgctgcgactcctcatagacccggaaaactgattagaaggcagaggctcagagactcaggtcccaggac

SEQ ID NO: 437296 - DNA, 75 bp, Homo sapiens
cagagcctcagtttgtgcaggacaccgacatggaacagggactcactggggggaccatgggctgtggctgcagct

SEQ ID NO: 437297 - DNA, 111 bp, Homo sapiens
gaggggctcggagaggtgctcggattctcgtagctgtgccggggtttggaaatcccttgtctccaggttgctgggattgacttcttgctcaattgaaacactcattcaatg

SEQ ID NO: 437298 - DNA, 82 bp, Homo sapiens
cccggcgatattgtcattattgatcagttcattgacagcgtacacagactttactaaaagagtacaaagaaagggataaatc

SEQ ID NO: 437299 - DNA, 51 bp, Homo sapiens
aagttaatggagccaaatttaataaagattagcctgaggcctgctcagtcg

SEQ ID NO: 437300 - DNA, 50 bp, Homo sapiens
gaaggtctctggagacatcttcagcagggctttgttcgcgggggtcacag

SEQ ID NO: 437301 - DNA, 90 bp, Homo sapiens
agcaggtggagcaccctttgctgagtggcctcttataccccggactgcagaaatcatatcgtacagagactgtgtgaaagtaaagaagat

SEQ ID NO: 437302 - DNA, 83 bp, Homo sapiens
catcaatagcaatagctttatagcagctccggttacctgttttaaacatggaatgacagaggaagaggaagacaaacttctgg

SEQ ID NO: 437303 - DNA, 100 bp, Homo sapiens
cagagctgagtccattcacactggtttggaagttgcaatcaaaatgaactcatcccaagaacagtatccataaggaagatggaaaagggggacagaataa

SEQ ID NO: 437304 - DNA, 100 bp, Homo sapiens
gagcagacgcccgagaagcccaggcctatgaaaggaggttccctacatgtcctttgattccgatgttcgtgggcagtgacactgtgaatgaattcaagag

SEQ ID NO: 437305 - DNA, 98 bp, Homo sapiens
cccaggggtctgagtctcacagcttgtaaagatgggcttccccaaggatttattgacattgctacttgagtgtgaacagttacctggaaatactgatg

SEQ ID NO: 437306 - DNA, 98 bp, Homo sapiens
ttgggacccaccgctgccctcagctccgagtccagggcgagtggaggccatagtggagtttgactaccaggcccagcacgatgatgagctgacgatca

SEQ ID NO: 437307 - DNA, 100 bp, Homo sapiens
ctaaaagatgtcacaaaggaaaacgaggaaagtcccaggatgactactgtgtcaaggcaagtgtccagagaatggctgggatgaaagtacacttgaactc

SEQ ID NO: 437308 - DNA, 100 bp, Homo sapiens
gacatcgctgtccctggagcatcctccgctggagctggagcttgacaggctgtgggtgagcgtggaggatgctcagatgcacaccgtcaccatctggctc

SEQ ID NO: 437309 - DNA, 50 bp, Homo sapiens
agaagacgacgcccatagaagccgttactggctgaccaacaaagttccta

SEQ ID NO: 437310 - DNA, 75 bp, Homo sapiens
agtttgcagatcgggagcgcaaggtcgccctcaaggccatgatcaaaacagtccggcagcgtcttctcttgaggg

SEQ ID NO: 437311 - DNA, 100 bp, Homo sapiens
cgccagctgcagccctggccgcgcactcgcctcagctgagcctggtttggcctgtcactgctcctcatcctcctgagccgtggtgaagacctacagagtt

SEQ ID NO: 437312 - DNA, 75 bp, Homo sapiens
caaagatggtacaaaagagtctttggaggatgcggctttgatgggtccaggccatcaacgtgtccagccgcttcg

SEQ ID NO: 437313 - DNA, 75 bp, Homo sapiens
gggccctggctggggatgtgcgagctccaattaaggaacagctatatcctgcttccttctgtaagcagcatcgac

SEQ ID NO: 437314 - DNA, 75 bp, Homo sapiens
gcacctgagttaacggacgctaagcggggtaggggaagatatggaatgtgcagatgtcccactattaactccaag

SEQ ID NO: 437315 - DNA, 51 bp, Homo sapiens
gtgggtctggagctggctgacaatgcaggttttacatgtggcacccataaa

SEQ ID NO: 437316 - DNA, 100 bp, Homo sapiens
tccaaaggaattgttaatgcagttaaggatcctgatgccaatgggaaatcctttgctttcgttggcaggagcaatggaaccagaagacaacaaagtgaca

SEQ ID NO: 437317 - DNA, 80 bp, Homo sapiens
agactcagaatacaacatcatgtttgctacgagagtacaaggtagtgggtcgctgcctgcccacccccaaatgccacacg

SEQ ID NO: 437318 - DNA, 51 bp, Homo sapiens
atccagcaagatgcaagccttcaggacctagatgtgaaggctggtggaggc

SEQ ID NO: 437319 - DNA, 91 bp, Homo sapiens
gaggaaactggcggctgctggtagttccatgctgtctgttcagacttcagcttggtgtgctggagaatctggtaaaagcaccattgtgaag

SEQ ID NO: 437320 - DNA, 98 bp, Homo sapiens
gtgccggatcatggacaatggcttcgacaatctctatgggaagcagaaggcaaggaccccggtcattttaggtagaaacaacagcatgctaatgcaaa

SEQ ID NO: 437321 - DNA, 75 bp, Homo sapiens
gccgccccctccggcgtgttcatgcccccggggagaactacgatgacccgcacaaaacccctgcctccccagttg

SEQ ID NO: 437322 - DNA, 74 bp, Homo sapiens
aagcaatcctaccatgtcagccttcccagtagctggaactacagacttatgcagagatggaccccaccacagca

SEQ ID NO: 437323 - DNA, 82 bp, Homo sapiens
ccgtcatactacccatatccgaaccttaggagctcttgtccctggcaaagcgaaagcgcagtgactctgaggagaaggagcc

SEQ ID NO: 437324 - DNA, 98 bp, Homo sapiens
ctcttctaaaaggatatgtgttgctaatacccatctttactggcatcctaaagacaatcaactgaaggcactaactgagaaaaacaaagaacttgaaa

SEQ ID NO: 437325 - DNA, 98 bp, Homo sapiens
atggacgctgcttccaacgaacatgagcacggggcggagctatgcagaaggagtttgccctgaccaacccagagaagagcagcaccaaagaaacagag

SEQ ID NO: 437326 - DNA, 97 bp, Homo sapiens
tagaaacgtgttcgctgcccagaagaagggaaggcgcgagtgaggaaaggaggtactgtagcaacacagtcactcctggcggcaaaccaaacaaaac

SEQ ID NO: 437327 - DNA, 97 bp, Homo sapiens
cccctgacagccacctgcccactttgtgatcagagccgtgttcggggagtctttcagacttctgcctggtgtcgaaggtggtgggcagatgccgggc

SEQ ID NO: 437328 - DNA, 75 bp, Homo sapiens
cctcagaagaatttaatggatatctgaacctacacattgtgaggctaaccctgacctgatctttgaagatatgga

SEQ ID NO: 437329 - DNA, 100 bp, Homo sapiens
cccatggctgatgcagcaggcatcatccgctatgcaattgggaaagtgaaattcgttattctacatggaagaaagctgtgatgaagtcaatgggttgggt

SEQ ID NO: 437330 - DNA, 120 bp, Homo sapiens
gcccagagagagacgtggagagggacgtcttcctgtatagagcgtacctggcgcagactggacgccgggcatggcagtgccacgggacattgcagccgcctacctgctccagggaagctt

SEQ ID NO: 437331 - DNA, 82 bp, Homo sapiens
gagagcaatcgccgggacagctgcaagaattttgtagccaccttggctaatgggatgagcctccagccgcctcttgaagaag

SEQ ID NO: 437332 - DNA, 76 bp, Homo sapiens
tgcgagtaaaagaagccgattccagttcctgtatgatgttcaggacccccgcagcaaacacaagtttaagatccac

SEQ ID NO: 437333 - DNA, 74 bp, Homo sapiens
gtgtgccgtgggtccgcgctgcttccacccaacttcctgttagattcccctcttcccgcggcctcgccatggcg

SEQ ID NO: 437334 - DNA, 131 bp, Homo sapiens
cttgccgccggcggccaagcagccaaccatgctcaacttcggtgcctctctccagcagactgcggaaagaccacagcaagattctttcattcgtctcctcctagcctgggggaccaggctcgaactgaccc

SEQ ID NO: 437335 - DNA, 100 bp, Homo sapiens
cacatttcgattctgtgctcactgtagagcactccctagtgggctttcagactccaaggttctccggcactgtaagagctgtggatcggtccgtttcatc

SEQ ID NO: 437336 - DNA, 75 bp, Homo sapiens
ggccacaaagtgaccaagaacgtgagcaagcccaggcacagccgacgccgcgggcacatgattaagtaccggtac

SEQ ID NO: 437337 - DNA, 88 bp, Homo sapiens
gctgatttagaaggaggttcaggctacggtgagccgaagtaacccgtgtccatgccgcccctgcagccccttctgccacagcattgcc

SEQ ID NO: 437338 - DNA, 75 bp, Homo sapiens
acttgtgtgactacaaggtagtaaaggcctgatcaaccccgtataaccaaagatgtaatttgttttcatgctgaa

SEQ ID NO: 437339 - DNA, 100 bp, Homo sapiens
gcctggttaccagcattctagaagctgaaagaggagaagttcttggaagactaagaagtccaacattcggtcaggatggctaactggttggctccccaca

SEQ ID NO: 437340 - DNA, 83 bp, Homo sapiens
atcacagctatgcatctattcaaagtgatgatctgtgggatagttttaatgaggtgccactgattaatgaacttgaatcagca

SEQ ID NO: 437341 - DNA, 125 bp, Homo sapiens
gtgcggcccagcgagttggtcggtcccggggtcacccgctacgggaagcaggcctcgccacaggatgatgatgctgaagctatccttgctgcagacttcgaaattggtcactttttacgtgagcg

SEQ ID NO: 437342 - DNA, 74 bp, Homo sapiens
ggagaatgtcttggatgcagaattcttaaagaaaaagcagagagatcttgctaagatgagaaaatgtctcagac

SEQ ID NO: 437343 - DNA, 75 bp, Homo sapiens
agcagaacgatcaaaagccaagtggcaaacggtagcctttccagtaaatatatgactcagggaaaagcctcagcg

SEQ ID NO: 437344 - DNA, 74 bp, Homo sapiens
gcagaattcaccagagagcagcagccatgccaatgcgatgaagcgccaagaaccagaaccagaacagccaccca

SEQ ID NO: 437345 - DNA, 51 bp, Homo sapiens
gcgacatccgagtgcagaacctgcaagtttaaaattggtggtgaatggtgg

SEQ ID NO: 437346 - DNA, 89 bp, Homo sapiens
cacacctccattggatttaaaagacagtcctcgtcagcactgactttcagctatggaatcgacccaacatgagtgaagtttcctgcaag

SEQ ID NO: 437347 - DNA, 51 bp, Homo sapiens
ccacccctctggaggccatgaaagggctcccactgcagcagctcgggggac

SEQ ID NO: 437348 - DNA, 75 bp, Homo sapiens
aggaaatccggaattatcacagaacaagttggatggcttgaggactggtactaaaaggaaacgtgactgggaggc

SEQ ID NO: 437349 - DNA, 83 bp, Homo sapiens
tatttagaggacattatcatgggaactgtggctgcaccatctgtcttcatcttcccgccatctgatgagcagttgaaatctgg

SEQ ID NO: 437350 - DNA, 100 bp, Homo sapiens
ccaatcgcaaggcacctctgagaacttcagatgccatcatcacagaaggcggggagaatttcagccagggacagaggcagctgttctgcctggcccgggc

SEQ ID NO: 437351 - DNA, 75 bp, Homo sapiens
cctggtcttgctcggccgatgaagtgcagaggtttttttctgcctctgctgcgagaagttctggagaagcagcca

SEQ ID NO: 437352 - DNA, 100 bp, Homo sapiens
aaaaggcggcgccctgaagaagtgcaagagcagaggccttctctagaccttgccaagatggcacaggttttgattcccaccatggccatcacccagtttc

SEQ ID NO: 437353 - DNA, 82 bp, Homo sapiens
ctcgcctttgccgatccgccgcccgtccacacccgccgccagcacggggtcactctggtgcccattgaggagttcagcccgg

SEQ ID NO: 437354 - DNA, 100 bp, Homo sapiens
cgaccgctacgctgtctactggaacagcagcaaccccagctgatgttctaatcatgtcagataaagatgatattgagactccactgctaactgaagcagc

SEQ ID NO: 437355 - DNA, 75 bp, Homo sapiens
ggcagcgcccgcggagacgtgaagagatggcagaaacggtggacacaagcgaaatggtcaacggcgctacagaac

SEQ ID NO: 437356 - DNA, 84 bp, Homo sapiens
cccttcacctgcagaagcgtgtcgttctgcaccagcgccttgatcgagtacttgaggaagctcttcgtgggcggtcttgactgg

SEQ ID NO: 437357 - DNA, 101 bp, Homo sapiens
caagaggcctacgtgcgggtggtcaccgagaagtccccgaccgactggggccattaagtttaatgatggcctgagcttacaggaaagttgccgccttattg

SEQ ID NO: 437358 - DNA, 74 bp, Homo sapiens
cagtggctcgccacgggcaggagcatgttgaggatgagaacaagttgagcagtgccaacggccatgaagaacgt

SEQ ID NO: 437359 - DNA, 103 bp, Homo sapiens
gaggagtcatggaagagtttttaaaccagggggctgttgtggttccgactataaacagtacgtgtttggcggctgggcctgggcctggtggtgtatctccgac

SEQ ID NO: 437360 - DNA, 82 bp, Homo sapiens
cccgaccctggccgccccgagcggagcctggaggggcagaaccccttcgagctggccttctccctagaccagcccgaccacg

SEQ ID NO: 437361 - DNA, 97 bp, Homo sapiens
ttcttcatcctttacgagcacggcctcttgcgctacgccctggatgagatgcaaaaatcaccatcagagtcgtttattggtcgagagaagaggtcaa

SEQ ID NO: 437362 - DNA, 97 bp, Homo sapiens
tgacctggaccacggcgcagacgcgggcgagctgcggctcggacgccagcggacacgcgggcgagcttgctgagcgagagcgagaagcggcccttcg

SEQ ID NO: 437363 - DNA, 90 bp, Homo sapiens
ggctacagagagccctgctacgcgtcgggtccaggtggcagaacatcctaggaatactcccccagttgcaagaggcgcaggaccgtggaa

SEQ ID NO: 437364 - DNA, 100 bp, Homo sapiens
aaaaagttccaccgcgcgcgcctcgacctgctgctggagacctggatctcgcgccacaaggagatgacatttatgcagtgtgtgattctttctaaaacaa

SEQ ID NO: 437365 - DNA, 100 bp, Homo sapiens
gtccagttgcagcccatggagatccagttcaattatgaatctcaggaacaccaccttctgtcagattttagaaagagaaggggaagaaaatgaagcctta

SEQ ID NO: 437366 - DNA, 100 bp, Homo sapiens
gccgctttgccattggctcccaggtgtctgagcacagcatcatcaaggacttcaccaagcagctggtgatggcctccctgtaccacatctatgtggccct

SEQ ID NO: 437367 - DNA, 99 bp, Homo sapiens
tacacccagattatgcttttggaaaatgagaacaaaaatttaaagaaagatttgaagcactacaaacaagcagctgagatacagttgatatattagttg

SEQ ID NO: 437368 - DNA, 51 bp, Homo sapiens
tggggcaaaatgtggacaagggtcttagaaaaataccccaatacacccatg

SEQ ID NO: 437369 - DNA, 100 bp, Homo sapiens
catccaggttgatgaagctaatttattgacttggcaagggcttattgttcctctttaccactcctgaaggccctaaaccccgttccagatgctctgactg

SEQ ID NO: 437370 - DNA, 90 bp, Homo sapiens
gcgacaccatgtcatctcccagtccgggcaagaggcggatggacacggacgtggtcaagcttggcctggacaatgctggaaagacaacca

SEQ ID NO: 437371 - DNA, 101 bp, Homo sapiens
tggagcctcagttggaagcagccgatccagcctgcggagcctgtggggcaggagatggtaacctgcacctcaatgtgacggcggaggccttcagcccctcg

SEQ ID NO: 437372 - DNA, 96 bp, Homo sapiens
gtttgatattagtgaagatgagccactgtggaagaagtatatttctcagaattagcagcagcctctgtcaccatccaaagattacaacccatgaaa

SEQ ID NO: 437373 - DNA, 100 bp, Homo sapiens
cacaaaaagcgtggcatctttcccaaagtagccacaaatatcatgagggcgtggctgttccagcatctaacacctgattttccctacaaagatgacctcc

SEQ ID NO: 437374 - DNA, 95 bp, Homo sapiens
acttatggaagtaaccctatttccgtgtatatcgggtacacaatttgggggtcagtaatggtggtctgtttttctggggggccaccaacacctcc

SEQ ID NO: 437375 - DNA, 100 bp, Homo sapiens
gaaggtgctggagagggtgaatgccgtcaagaccaaagtggaagctttccagacaaccatttccaagctctgtgactggggcaacctgcaaggagctggc

SEQ ID NO: 437376 - DNA, 75 bp, Homo sapiens
cgaaggcgggcggcagaggcgatcaggacacaactcagatgggaagttcatcgcccgggcacagcggatagagta

SEQ ID NO: 437377 - DNA, 154 bp, Homo sapiens
agggagtccccggggacacctcggcacgcagcggagatgcctctttttgccaccaatcccttcgatcaggatgttggccaaagaactgccaactctgaaagataatgatttcattaatgagggccaaaagatttatattgatgacaacaacaag

SEQ ID NO: 437378 - DNA, 100 bp, Homo sapiens
cgcggccaaggtgccggccgacaccgggatcaagcatgaattgcaagcaaactgctacgaggaggtcaaggaccgctgcaccctggcagagaagctgggg

SEQ ID NO: 437379 - DNA, 75 bp, Homo sapiens
tctcagtagtccgaactctaatatgagcagcatggtagttacagattatagcatttgatgagctgaagactgatt

SEQ ID NO: 437380 - DNA, 100 bp, Homo sapiens
ttgcagtcgcctgctgctgtcgtcgggagtggttggcacttaccatggttccccagaccagtcccatcaagtgactggtaaccaccagcagcctcctcag

SEQ ID NO: 437381 - DNA, 82 bp, Homo sapiens
ggattggctgcagcagctacattagcagttgatattcactgatggactccaaagaatcattaactcctggtagagaagaaaa

SEQ ID NO: 437382 - DNA, 100 bp, Homo sapiens
cctgacttggaccctggaaaacctggccctcttcaatttctgacaaaaggtcctgccgccacccccactggtgcctgtggttccggtccgtcttgtgggt

SEQ ID NO: 437383 - DNA, 90 bp, Homo sapiens
ggaagccatcagcagtgccatccagcttctagaagacccattacagaggctttggacatcagacagtgcaggagaagaatgtgatgcggc

SEQ ID NO: 437384 - DNA, 100 bp, Homo sapiens
ctcggggtcccggtcgcgaggaggaggaggatgtggcgcgcggaggggaaatggctgccgaaaacaagccggaaggtgtgcaactgaggaacatggctca

SEQ ID NO: 437385 - DNA, 100 bp, Homo sapiens
gaccagctggtgaaggcagacagcgagtggcgacgatggagcatcgagtacagctgtccggcctccaacgagtgtgagatcaccaagcggagacgcaagg

SEQ ID NO: 437386 - DNA, 83 bp, Homo sapiens
gaagatcggcagcggctccttcggagacatctatctcggctgaccccgcactacatctacccaccagccatcgtgcagcccag

SEQ ID NO: 437387 - DNA, 100 bp, Homo sapiens
actggcaggcatggagccaacaaggagaacctggagctcaacggcagcatcctgagtggcatcaagcatgatggaaccatgtgtgatacctgccgccagc

SEQ ID NO: 437388 - DNA, 75 bp, Homo sapiens
tggccacctacagaaacaaaatgtcaacaaattgatgggtggacccaagtggagagattgtggaactggcgaaag

SEQ ID NO: 437389 - DNA, 90 bp, Homo sapiens
gcggaggcgagggtgcgatggcgcggagcccgggacgcgcgtacgccctgctgcttctcctgaaaaagcttgtggtgaaggggggcaaaa

SEQ ID NO: 437390 - DNA, 75 bp, Homo sapiens
tatgtattccctggggatggcgcatcacacaccaaaggtctatcagccacagtctctgcaagtttccaagagcag

SEQ ID NO: 437391 - DNA, 97 bp, Homo sapiens
ccagtccctgagagagctcatctcagatctggagcatcggctgcaggggtcagtgatggagctgcttcagctgagatctgtatctgtggacctgaat

SEQ ID NO: 437392 - DNA, 49 bp, Homo sapiens
atccagcctgcggagcctgtggggcagctccagtgatccacaagctcag

SEQ ID NO: 437393 - DNA, 73 bp, Homo sapiens
ccgaatccaacaaatcctcaactacatcaaagatatgtgaaagaggccaaagaagcaactaagaatggagacc

SEQ ID NO: 437394 - DNA, 95 bp, Homo sapiens
ctgcagtttggcgtgacatacctggaggactattcggcagagtacatcattcagcaaggtggctggctcctgggctataacgaaaagccaataaa

SEQ ID NO: 437395 - DNA, 90 bp, Homo sapiens
cattccagcgattcctcattgctcaaggtttgagttcctgagatctagttggtgagagacatgatgttctaccggttgctgtcgattgtt

SEQ ID NO: 437396 - DNA, 102 bp, Homo sapiens
cagacttctcgtgggcagcctcccctcggaactcgggcatcatggcctcaggaattacatgaacgacagccttcgcaccgacgtcttcgtgcggttccagcc

SEQ ID NO: 437397 - DNA, 100 bp, Homo sapiens
tccagatgaggtgatggcaacggccaacttcggcaagatccagatcgggatttacgtggagatcaagcgcagcgatgagacccactgctaaggagttatt

SEQ ID NO: 437398 - DNA, 75 bp, Homo sapiens
aggactggggccacgtggagctgctggagggagcacgtgaattgcctctgcttacgttcaggccctgtcctaaac

SEQ ID NO: 437399 - DNA, 100 bp, Homo sapiens
aatacgcatactttagaaataggtttaggggctcaggagcaaggagccacagatcatattaaagttcaagtgaaaaataaccacctgggactcggagcta

SEQ ID NO: 437400 - DNA, 100 bp, Homo sapiens
tgccccttgctggccatcctcaatgttttgctcctggcctggaaggaccgtataatagacgctggccccaaaggaaactactctcgatttatgaatcaca

SEQ ID NO: 437401 - DNA, 75 bp, Homo sapiens
aggatgttttataccatgctaaatcacagaaactcggagacaccagccataccctttgcttcctatggcctccac

SEQ ID NO: 437402 - DNA, 97 bp, Homo sapiens
tgatgagctggtctgcgatcctgaatgggggcggcgtgcccgccggggggctagtggccacgctgcagagcctcgccaaaacagagtggagtacgag

SEQ ID NO: 437403 - DNA, 51 bp, Homo sapiens
agcgtgtggcatctccacctcaaggtgctcctgcgggaagaagtgtcgcgg

SEQ ID NO: 437404 - DNA, 100 bp, Homo sapiens
agacaatgttctcaaagcatttacagtacctaaaaacaggtccctggcgagccccttgcagatctccagtctatgtgctgaagaagcagcagcccaagag

SEQ ID NO: 437405 - DNA, 75 bp, Homo sapiens
tttggctctgactggatggggttaccgggttatcgctggcaggctttctattttaaaagtctgtacaaaaaccat

SEQ ID NO: 437406 - DNA, 90 bp, Homo sapiens
caaccttttggtcatggggactgatagaaggtttgatgaaatagtgattatagagcacaaatccatcatctgcccaggctataatgcggt

SEQ ID NO: 437407 - DNA, 100 bp, Homo sapiens
tgctgctcagcgccaggcatcagctgggaagctggcgtgggcaggccagctgtacctggcctggagctccaggtgcaaatatatacagagcttcataatc

SEQ ID NO: 437408 - DNA, 50 bp, Homo sapiens
aacacaccaagcctcctgcagttgcgagcccccctccatgcgcctgaagg

SEQ ID NO: 437409 - DNA, 96 bp, Homo sapiens
cggcaccagcagtaacaacagcgaggaagaagaggacgacgacgacgaggaagaggaggtttctgaggttaccttccgaacaagaatctatcactg

SEQ ID NO: 437410 - DNA, 104 bp, Homo sapiens
cagattatgtgattccatgctttgatagtgtaaactcagcacgagccattttgcagagattatggagaagtctggcgaggaaggaatgcctgatcttgcccatg

SEQ ID NO: 437411 - DNA, 100 bp, Homo sapiens
tcagaatgtctgtgagcaagcagtgtgggcattgggaaatatcatagatcagtgctaacatcttccgtacacttcctccaagtgataatccagattttga

SEQ ID NO: 437412 - DNA, 100 bp, Homo sapiens
agagaagtcacaaaacagcagatttcccaagagcagcggaaaatgatccagtcacaggtgaccattgtgaggtagatattttgttctaattttccagatg

SEQ ID NO: 437413 - DNA, 97 bp, Homo sapiens
ctaccttccccgggcaggggcgctcaacccaaccggctccagggcactggtgctggagaatctggtaaaagcaccattgtgaagcagatgaggatcc

SEQ ID NO: 437414 - DNA, 90 bp, Homo sapiens
ggacgacaaagatggcggcagggaccagcagttactgggaaggaagagagaagggcacagttacctaagtatcaacgtaatcttcctcgg

SEQ ID NO: 437415 - DNA, 82 bp, Homo sapiens
tggaccccaactccacccagcgctaccggctggaagccctcaagccggtggctgctggcagcggaatcccccagatcaagtg

SEQ ID NO: 437416 - DNA, 100 bp, Homo sapiens
gggaagcagaggagaaccgggagccattcagaaaaggaatctggtgaacagtaacaaactttggtgaaatttcaggaaccatagccattgaaatggatga

SEQ ID NO: 437417 - DNA, 98 bp, Homo sapiens
acgcattgccgccggtcctgaccaccgtgaacggacagtcccccccaggtaccgctagagcgacatgatggtggaatctgcctcggagacaatcaggt

SEQ ID NO: 437418 - DNA, 100 bp, Homo sapiens
aacatccagaacttccagctgcccccaggattgtcagtggcttcgccccgaggagagctgactgccctgggctgctgcctccggcagagctgagccaaaa

SEQ ID NO: 437419 - DNA, 83 bp, Homo sapiens
gttagccggcgtcttcgtttgggacgaggagaggatccaggaggaggagttgcagaggtgcaatggatgagcttcatagtctg

SEQ ID NO: 437420 - DNA, 75 bp, Homo sapiens
ttcgaatggacagagccatccctgacacccggcatgaccatggctatgattttggctatatggtaaagttgctta

SEQ ID NO: 437421 - DNA, 75 bp, Homo sapiens
ttcgacaccaaccccttcgcggacccagtggatgtaaaccccttccagaaccaccgggaggaactgggccattct

SEQ ID NO: 437422 - DNA, 96 bp, Homo sapiens
aatttccatgtcaacatagtccaggcaatacagtacggtactgaggataacagtactgcagtagtagtgccttttggtgcctggggaaaatataag

SEQ ID NO: 437423 - DNA, 74 bp, Homo sapiens
cgtggacgtggtcaagtacgagagtggccctgacggaggggaggaaatcactactggttacaacctggaagatg

SEQ ID NO: 437424 - DNA, 75 bp, Homo sapiens
cgctgcccgcactcctggtcctgctcggggctctgttcccaggtcttaaaattttggtagcagaaagcaaatgtg

SEQ ID NO: 437425 - DNA, 83 bp, Homo sapiens
cctggctcttgccctcatcctggttctggaatcctcagttcaagggtgtacagcaagctgtgattcctgggaaaactaaaaaa

SEQ ID NO: 437426 - DNA, 95 bp, Homo sapiens
caagttctgaagttcactcttgattgcacccaccctgtagaagatggaatcatggatgctgccaattttgaatactcccccagttgcaagaggcg

SEQ ID NO: 437427 - DNA, 98 bp, Homo sapiens
cgggcgggccgcgggagccgcacgcggcgatatggaagaggagggcaagaagggcaagaagattgatcgtgtcctgtgctgaagatgtttccggaaca

SEQ ID NO: 437428 - DNA, 75 bp, Homo sapiens
tgaaagcagcagttttcatcatctaagtgaaagaaactcccatcaagactgaagcagacgttttggcagaaaacc

SEQ ID NO: 437429 - DNA, 83 bp, Homo sapiens
ccgcagtgggataaatctcaaagatctcgtacaagatccttctttaaaaatccagttacactcttaaaggaattgtcagtgat

SEQ ID NO: 437430 - DNA, 75 bp, Homo sapiens
agagcctcacttcggcaaacgtggtccttgcaacaaacacaggcaaacgaatgcacgtgcagttgtccaccagcc

SEQ ID NO: 437431 - DNA, 100 bp, Homo sapiens
atgccaagaagtgccaggtggagcggcaggaaggccactcacagggcttcaacaagctagctgaggttgcctgttcactctgatcgtagtattggaagtt

SEQ ID NO: 437432 - DNA, 74 bp, Homo sapiens
agcagcagcagtagctatggcagtggcagaagattttaattagcctctactcttcatggatcttttggatgaaa

SEQ ID NO: 437433 - DNA, 100 bp, Homo sapiens
caaaagccaagaggaggacagttcgctacacagcaatgcatcgagatcgagacgctccctccggagctcttccagtgccggaagctgcgggccctgcacc

SEQ ID NO: 437434 - DNA, 75 bp, Homo sapiens
aagcagtctggaccgaaaagaaagaggcggggtttcaccatgttgcccagactggtcttgaactcctgagcttaa

SEQ ID NO: 437435 - DNA, 87 bp, Homo sapiens
tagcatcagtgactcacaaatcagcaacacagaatttctgcaagtaattgggcactccacagaaggatgttattatcaagtcagatg

SEQ ID NO: 437436 - DNA, 83 bp, Homo sapiens
ccatgagctggggcaccgagctctgggttttaaaatcaaagatgggaaaatcggagaaaattgcccttccccatggccagctt

SEQ ID NO: 437437 - DNA, 75 bp, Homo sapiens
ccttagcagtttaacatcagtcatgaaaaatactgacatcgctattgcggttccgaggcagtgggaagagatgcg

SEQ ID NO: 437438 - DNA, 100 bp, Homo sapiens
agtcttcggagcgaccccggcaggtatgcaattggcattgcctacaaatcagctccaaagaatgaatggattggcaagaatgcctcctcatgggtcttct

SEQ ID NO: 437439 - DNA, 51 bp, Homo sapiens
aaatattatggatcctatctgaaggtgaaaagccatacaagtgtacctggg

SEQ ID NO: 437440 - DNA, 75 bp, Homo sapiens
ctggattgtcacctttgctgcaaaaaattacgggaccccaggagcaagcacaagttcaaaatccacacttacgga

SEQ ID NO: 437441 - DNA, 82 bp, Homo sapiens
ggcagctggccctggagaccatcgacatcaacaagtgaagtacctggggctgctggcaatgtccaagatcctgaagacccac

SEQ ID NO: 437442 - DNA, 51 bp, Homo sapiens
atttctaagcaggaactccccagactgaacctccattgaatactccagaaa

SEQ ID NO: 437443 - DNA, 82 bp, Homo sapiens
caggctgcggcagacggcgacagtggcggcggcgccatggcagggcttgcaggctactgcagcactggggtgtcagttgttg

SEQ ID NO: 437444 - DNA, 83 bp, Homo sapiens
aaagctgctgccgccccttgggctaaaaggaattgcattttgtgaaaaaagaacaagaattttctgcaaggatcatatctaag

SEQ ID NO: 437445 - DNA, 71 bp, Homo sapiens
ggaagtgcagctgcctcagttcttagcgcagtggtaagcatccgtggcattcaagacgaagatccccctga

SEQ ID NO: 437446 - DNA, 82 bp, Homo sapiens
tgaaaaatgtcacctttgaacatgttaaagggcctcttctgaaacagtctccctggagcaaccatcagagcagtggctgggg

SEQ ID NO: 437447 - DNA, 100 bp, Homo sapiens
ctgatcctccacttcagagaacagggaaattcagtgtctgggtttaagtcttataggatacttgattacaaagaagaatgtgttcataggaactggacat

SEQ ID NO: 437448 - DNA, 83 bp, Homo sapiens
gtcggagtcccaagctgcggttcggctgctgccgagtgtactaatggtcacttgatgtgcgctggctgttttatccacctact

SEQ ID NO: 437449 - DNA, 50 bp, Homo sapiens
atcccagcactttaggaggccaaggaccccagccaggccacggggacaac

SEQ ID NO: 437450 - DNA, 96 bp, Homo sapiens
aaacaatggctcaccacaatctctcagtatgacaaggaagtcggacagtggaacaaattccgagacgatgacagtgatgggattccgtggtcagaa

SEQ ID NO: 437451 - DNA, 100 bp, Homo sapiens
gcagcaagtgcgcggttggggccactgcgaggccgttttagaacatacaacctcctcttcagtgtcaaaaaagccacggttagaccagattcctgccgcc

SEQ ID NO: 437452 - DNA, 83 bp, Homo sapiens
agaacaagaagtaggcattgaccccttgtccagttactctaacaagtctggagggacaagcagatcttttgaaatatgctaag

SEQ ID NO: 437453 - DNA, 74 bp, Homo sapiens
tgcagcctcgtcagactcggagacgtctgacagtgacgatgagggtgcttttgagaggaagatgtcttacgatt

SEQ ID NO: 437454 - DNA, 75 bp, Homo sapiens
tccattgtaccaactcactatacattgctgtatacaatcatgaggtgagtgtttctatggttggctagaacctct

SEQ ID NO: 437455 - DNA, 120 bp, Homo sapiens
gcttaggaatccgggcttttgctgatatgcatgcatgtaccgaccttctgaacaaggccaacacctatgcagaattataaggctgtctgcagagatttgaaaaatggcaacaaatgaaag

SEQ ID NO: 437456 - DNA, 100 bp, Homo sapiens
agcagcagcagcagccgcggtggcagtgcaaaaggctggcagtacagctctctggtggatgtgagctgacagtggtcctccaggacttcagtgcgggcca

SEQ ID NO: 437457 - DNA, 100 bp, Homo sapiens
cgaagtgccccctctgcctcccaggtacaggtttcgagatttgctgctaggggaccaaggatggcaaaacgacgacagtactatactggcaattgctgga

SEQ ID NO: 437458 - DNA, 100 bp, Homo sapiens
atatttgtctttatggaactcagcaacatcacatacagggtcaaaggttccgttacagttactatgatgaatcccagggggagatttatagatccattga

SEQ ID NO: 437459 - DNA, 82 bp, Homo sapiens
ctcggctctggggccgccgccgcgggccggagccgagcagccgtcggcagggaactgtggctgcaccatctgtcttcatctt

SEQ ID NO: 437460 - DNA, 100 bp, Homo sapiens
actgcctgctgttcgaggccggcacggtggccacgctgggtgaatgaaaactttgccattgatttgatagcagagcagcccgtgagcgaggtggagactc

SEQ ID NO: 437461 - DNA, 83 bp, Homo sapiens
ggccaagtatgcgcccagcggattctacattgcctccggagaacatagataccctggagcgaatagccgggctggaacaggag

SEQ ID NO: 437462 - DNA, 100 bp, Homo sapiens
ttcaaggagctggaaggctgggagccagatgacgaccccataactacagttcctgaggaagaactaaatccaaagatactagctttgcagaatgctcaga

SEQ ID NO: 437463 - DNA, 100 bp, Homo sapiens
gggggattaacgaaagagtttgtaaagaaaatcgctgctgagaatagacttcatcatgtgcttcagaagaaagagatcctggtggacctctcaaaccccg

SEQ ID NO: 437464 - DNA, 75 bp, Homo sapiens
cttggaatcaaagataaatccaaatactgcatatcagaaacaacaggagctcagtctgaatattcttggagaaag

SEQ ID NO: 437465 - DNA, 83 bp, Homo sapiens
gacacacattcataatcagggtcttgcagccattgaaaagtgtggagaagctgctttaaatggaccattgacatttatggatg

SEQ ID NO: 437466 - DNA, 75 bp, Homo sapiens
gaaggataagtcgaaggggaaggcgcctgaagaggacgaaggctcatcggaacctgtcccagctccctaattttg

SEQ ID NO: 437467 - DNA, 90 bp, Homo sapiens
atccaggctggtcagtgtggcaaccagatcggtgccaagcacaggaagtcctggagaacctgaaggaccgctggtaccaggcggacagcc

SEQ ID NO: 437468 - DNA, 75 bp, Homo sapiens
tcctcgcggtgcgcaccgtttgcgacttggaatatgtttatccagaagccagagacagacaatacttactatttt

SEQ ID NO: 437469 - DNA, 73 bp, Homo sapiens
gtccatacttgccaaaatgggggactggcagcctcaaggaataggttctcctagtgtctatcatgcagttatc

SEQ ID NO: 437470 - DNA, 82 bp, Homo sapiens
agccgggctggtcctgctgcgagccggcggcccggagtggggcggcgggtgctggagaatctggtaaaagcaccattgtgaa

SEQ ID NO: 437471 - DNA, 75 bp, Homo sapiens
tcaggaggtgctcaaaacgcccgtgcggaccacggcctgtcagcacgtatccaggatgagaagactgataaaaga

SEQ ID NO: 437472 - DNA, 90 bp, Homo sapiens
caagaaccattggtggagatagaaggtgtttgatcagtatgtaaagaccagggcagaggaagaacgcagggaaaagaaaaataaaataat

SEQ ID NO: 437473 - DNA, 75 bp, Homo sapiens
tatttactcgatgatggaactctggtggtttcaggaagaaatgttgcagtctcttgcacagcgcccagctccagc

SEQ ID NO: 437474 - DNA, 127 bp, Homo sapiens
ggaagctgacggtgttcactgtgctgtgtgagcagtaccagccatccctccggcgggaccccatgtacaacgagcaaaacttagagagtaacctcaccaaccttattaagaggaacacagaactgga

SEQ ID NO: 437475 - DNA, 90 bp, Homo sapiens
cggcgccgctctccgagctcgatccgctgctcgcacgggagccagctgggtggtgatgacacaatgactggtgatgggggagaatacctt

SEQ ID NO: 437476 - DNA, 74 bp, Homo sapiens
aacgcgcaggtgctagcggccccttcgccctgcaggttaagaaggcttttttgctctgtagcctggacgtactt

SEQ ID NO: 437477 - DNA, 93 bp, Homo sapiens
gaggaaggaacgaggcaaggagctaaagcagcgtgcgttcagccctggggcataatcaccagcaacacccgggacaataatacgggggccacc

SEQ ID NO: 437478 - DNA, 75 bp, Homo sapiens
tcaaattggacttaagtctgaatttcggcagaatttagccacgacgtttttccaccacatcaacctgcagtatag

SEQ ID NO: 437479 - DNA, 83 bp, Homo sapiens
ggagccagccttcaatgtgtcctacaccaggcagcccccaaatcccggcccaggttttaaaatcaaagatgggaaaatcggag

SEQ ID NO: 437480 - DNA, 116 bp, Homo sapiens
acgcagctggtgacttccgctcaggagatgaagaattcaagggtgctgtaacagaagacaagtacgaaatactgcaatctgtcgacgatgctgcgattgtgataaaaaacacaaaa

SEQ ID NO: 437481 - DNA, 100 bp, Homo sapiens
ttcggcttcctcttggtgatattcgccattgaaatagctgcggccatctggggatattcccacaaggatgaggaaactttgaaaagcaccccaaagaact

SEQ ID NO: 437482 - DNA, 50 bp, Homo sapiens
agctgcggccgcacctggccaaggcattttccctgaagatgagatcccag

SEQ ID NO: 437483 - DNA, 97 bp, Homo sapiens
tcgtcgacatgagtgatgtggaggaaaacaacttcgagggcagaatcatgacaagatgtttaagatgagtgaaaagatattactcctgtgtgttgga

SEQ ID NO: 437484 - DNA, 100 bp, Homo sapiens
ttgattcagtctgccttgtaacagccagatgaaaactcgctggatttttcctcctgtatgttacggcctgggattaaaaatgctcaggagcttgcctgtg

SEQ ID NO: 437485 - DNA, 83 bp, Homo sapiens
ccgctcctaagcctgcacagccgcggcggcagcagcagtgagagtgccctctggtggtcagaagatgctgtgctgtctcgtta

SEQ ID NO: 437486 - DNA, 100 bp, Homo sapiens
gcatcccccatcagcaccatccagcccaaggccaattttgatgctcagcaggatggcacatttcctagaggcagaatcctacaacttccactccaagtga

SEQ ID NO: 437487 - DNA, 102 bp, Homo sapiens
caaacagaagattctggacaagtgtaatgaaattatcaactggcttgataagaatcagactgctggaagaggaggaagagaagctgaagcagttgatgcagc

SEQ ID NO: 437488 - DNA, 74 bp, Homo sapiens
gaccagtctgggggcgctggcggcctgcgcagccacctcaaggagagcgaagacctggagaaacagaacgcggc

SEQ ID NO: 437489 - DNA, 119 bp, Homo sapiens
tggaagccaggaatcaaaagtgaagaaactctgcaagcccttagtagccggatcgagctgggagatgtgacaccacacaatattaaacagttgaaaagattgaatcaggtcatctttcc

SEQ ID NO: 437490 - DNA, 76 bp, Homo sapiens
ctacaatggcccagtaccaggctatcagcaaacacctccccaagtggaaagaggccagaagatcagtgagcagatt

SEQ ID NO: 437491 - DNA, 76 bp, Homo sapiens
atcagtcaaaatcgtcttttcctgctggtaaataacactgaaatgagagccttgaacttaggaattcttcgagatc

SEQ ID NO: 437492 - DNA, 73 bp, Homo sapiens
gagcctccaggagcccagacaccagccccccaccatgcatttcttgaagcccctgcaacggttcctgaaacct

SEQ ID NO: 437493 - DNA, 100 bp, Homo sapiens
gcatccaccacgtctcaccccacgagacctacttctgcatcaccacagagatttaccgcattgtttctcagaagcaaatgtcagacagacgcgaaaatga

SEQ ID NO: 437494 - DNA, 100 bp, Homo sapiens
ctggttcctgcgtgctacggccctgtgggcctgggagctgcctctgaggaacacgccgcagtaagactttgaccccgacgcaggcttcagtgattgccgc

SEQ ID NO: 437495 - DNA, 83 bp, Homo sapiens
cggcgccgaagaggcgactgaggccggacggggcggacggcgacgcagcccgcggcagaagaccaaatacacgctgatcgatg

SEQ ID NO: 437496 - DNA, 100 bp, Homo sapiens
cgctgctggtggcgcccaccccgcccgcgctgcagaagcttctaggacccgtacttcatgaagaaccacctgggctcctatgaatgcaaactctgcctga

SEQ ID NO: 437497 - DNA, 82 bp, Homo sapiens
gagaccgcggccgggaccgagggtttttgatttgaagggctctcttaggaatcggaatgtaaaaactgacactggaaaagag

SEQ ID NO: 437498 - DNA, 90 bp, Homo sapiens
cattcaccaaaaggaggcatcactgcagagcatgtgggaagaccccatatcatgtgaacctcctcctggctggctatgatgagcatgaag

SEQ ID NO: 437499 - DNA, 90 bp, Homo sapiens
cgagaagaagctgaggctctttgtgctggagaatctggtaaaagcaccattgtgaagcagatgaggatcctgcatgttaatgggtttaat

SEQ ID NO: 437500 - DNA, 75 bp, Homo sapiens
aggattcccacgctccactcagggactcaagggtttcagaagctgccagaggaggagccagaaacagatctcagc

SEQ ID NO: 437501 - DNA, 74 bp, Homo sapiens
cagagggattttgtaaagctttcacagacccttcaggtgtgatccctcacatccacaaatctctgattggaaag

SEQ ID NO: 437502 - DNA, 75 bp, Homo sapiens
cgggaagatggcggctgggttcaagaactctgtgaatctcttgaagaagattacaaagacatagaacatcttaaa

SEQ ID NO: 437503 - DNA, 100 bp, Homo sapiens
ccaacagcttcatatggacagatggacttcaaatgctgtttgtattccagagactaggtgcccattcctgcacagaaccacaggggacactgagcgcagg

SEQ ID NO: 437504 - DNA, 100 bp, Homo sapiens
agccttaaccctgcagcctttgtgcccatcaccagctctacaggtgagacatggaatccattaaaattgcattatcagttaagaaatgtacgggaacgat

SEQ ID NO: 437505 - DNA, 100 bp, Homo sapiens
gcccagcagaatttgtatagagatgtgatgttggagaactacagaaacctggtctccctaggtcctggcattgatgtgcctgctccagacatgagcacag

SEQ ID NO: 437506 - DNA, 97 bp, Homo sapiens
agcggatcgggtggagtgtaggtcatatcgccgcgatatctcttgtaaatgtgtaaacacggatttgccaccaaaggggaagaacaatatgggagaa

SEQ ID NO: 437507 - DNA, 74 bp, Homo sapiens
aaaaagctgcagatgagagtgagaggcgcagttgtgtagcagttgagtaatgctggttagctgttaaggtggcg

SEQ ID NO: 437508 - DNA, 75 bp, Homo sapiens
cagagagggctaccttgtgaagaagcttgtgaaactttgtattgcaatgattgatactggaaaagccttttgtgt

SEQ ID NO: 437509 - DNA, 100 bp, Homo sapiens
aagcagccgatccagcctgcggagcctgtggggcaggcctactctgtgtatgatgaagacattgggtactgtcaagggcagtcttttcttgctgctgtat

SEQ ID NO: 437510 - DNA, 100 bp, Homo sapiens
cttcctcaactatctcgctgacacgcaggactcgctcagcagcagcctgaaaacttgctacaagtatctcaatcagaccagtcgcagtttcgcagctgtt

SEQ ID NO: 437511 - DNA, 98 bp, Homo sapiens
ggcaggacgaggtgtcggcgcgggagcagcacttccacagccaagtgcgggagtccacgagatggagtctcactctgtcacccaagctagagtgcagt

SEQ ID NO: 437512 - DNA, 75 bp, Homo sapiens
tgaacttcaccttttggctttcttggcctgatgctgaactctcgagggttgttaaaggccttacttatttgtgga

SEQ ID NO: 437513 - DNA, 75 bp, Homo sapiens
aacctgatttgagatcaattcttggagaacacaaagaagtgtgatgatgtgcagcacattaagaggagagacatc

SEQ ID NO: 437514 - DNA, 82 bp, Homo sapiens
aggctggactcggattcgttgcctgaggagaacgtatttaccgggcagtcaaagatctattcctacatgagcccgaacaaat

SEQ ID NO: 437515 - DNA, 80 bp, Homo sapiens
tggcatctttcatctaacacaagagaagctgaatttggacgacagccagtgggaggacatccacgttgtcaccggagcac

SEQ ID NO: 437516 - DNA, 100 bp, Homo sapiens
tgcacatcaatgatatcatcccaggtactccaaagattcaggtttactcacgtcatccagcagagaatggaaagtcaaatttcctgaattgctatgtgtc

SEQ ID NO: 437517 - DNA, 100 bp, Homo sapiens
ccggcacgcgccttccccgccgccacgatgcccaagaggaagtttgtcgctgatggcatcttcaaagctgaactgaatgagtttcttactcgggagctgg

SEQ ID NO: 437518 - DNA, 74 bp, Homo sapiens
tcatgtctgcgagccaggattcccggaacttgctactaccagcaccatgccctaccaatatccagcactgaccc

SEQ ID NO: 437519 - DNA, 82 bp, Homo sapiens
accctggagcctcagttggaagcagccgatccagcctgcggagcctgtggggcaggaaaagcttttgacatcacctatgtgc

SEQ ID NO: 437520 - DNA, 76 bp, Homo sapiens
gcatgatccgccacgggaaggagctgggcggcgagtccaactttggaggtcgttcagctacctttagagtttgtga

SEQ ID NO: 437521 - DNA, 90 bp, Homo sapiens
cgagaactaagcaaattagctgagaccacagataaagtcaaacaaggcttttgggaagaatttgagccatacacactgctgctatggata

SEQ ID NO: 437522 - DNA, 51 bp, Homo sapiens
cagctgtcggggccgcgagtcggacgaagatcccactcactccactccagc

SEQ ID NO: 437523 - DNA, 98 bp, Homo sapiens
aagaagcagctccacgaaaggcagccgcggatcgccgcgctcagcgacaaacaactgcatatctatgtgagactgaattttcctcttagacttcagct

SEQ ID NO: 437524 - DNA, 100 bp, Homo sapiens
tgctgaccgaggcccccctgaaccccaaggccaaccgcgagaagatgacccaggcacagagttcgagtacaccgactcagagagcgaggtcaaggtgcgc

SEQ ID NO: 437525 - DNA, 83 bp, Homo sapiens
cggctgtcaagctggcgcgccagagcggcatcgagctcctgtccaaatatgacccccagaaggaggcagagctccgcacctgg

SEQ ID NO: 437526 - DNA, 50 bp, Homo sapiens
gttccggggagctcggctccaagttctggtagaagtgggtttcaccatgt

SEQ ID NO: 437527 - DNA, 92 bp, Homo sapiens
tgttggaccttccggagcttctcagaagacagagggttttcttttgaggttgctgcttttgctcagaggacatccatgaccctaatggtctt

SEQ ID NO: 437528 - DNA, 50 bp, Homo sapiens
gagcgcgaatatcgtcatcgttagaagcttcagctttagctgcagctgcc

SEQ ID NO: 437529 - DNA, 95 bp, Homo sapiens
ctgactctctgaggctcattttgcagttgttgaaattgtccccgcagttttcaatcatggagaattactggctccagtagccgcagaagccatgg

SEQ ID NO: 437530 - DNA, 100 bp, Homo sapiens
gacggtaaccgggacccggtgtctgctcctgtcgccttcgcctcctaatccctagccactatggtggacccaagtggagagattgtggaactggcgaaag

SEQ ID NO: 437531 - DNA, 130 bp, Homo sapiens
tggaggaggctgaggaggagaggacagaggtgcctggggcaacctccaccttgacggttccagggagatgcagttaaagacttgatgcttcgctttctgggtgaaaaagctgcagcaaagagacaagtcc

SEQ ID NO: 437532 - DNA, 75 bp, Homo sapiens
ggcttcttttctctcatgaagaggagatgaagttggagcccttgtttttgacattggatcctatactgtgagagc

SEQ ID NO: 437533 - DNA, 50 bp, Homo sapiens
caccgcggagccctgcaggcgataaggagtcaggccagggcgggatgaca

SEQ ID NO: 437534 - DNA, 90 bp, Homo sapiens
tctgctttgctggacagcttctgttgctggatttgtgcgactcggtgaaggatgatgcccggagggtgatctcgacctttaacattccac

SEQ ID NO: 437535 - DNA, 100 bp, Homo sapiens
cggccgggggatcagaacccgaggctggggacagcgacaccgagggggaggacattttcaccggcgccgcggtggtctgttgcatctgagccaagaaaac

SEQ ID NO: 437536 - DNA, 100 bp, Homo sapiens
gtctgcttcaagccctggctcaaaatatcagatgccctggatgcagctagaggatgattctctgtacatatcccaggctaatttcatcctggcctaccag

SEQ ID NO: 437537 - DNA, 75 bp, Homo sapiens
agcagagttttgattaccactgacctgctgggtggtgacttcacacgccataatggcactggtggcaagtccatc

SEQ ID NO: 437538 - DNA, 100 bp, Homo sapiens
gctcatcgagcttcttcccagctgtgaacaggagggcctgttccctaattcttgccggatcagttccatgacaagaccccttatacgattatgtttggtc

SEQ ID NO: 437539 - DNA, 83 bp, Homo sapiens
cgacgttcggccaccggaggagcgggagccaagcaggagtacgagagggcctccaaagtggaccagtttgtgacgcgcttcct

SEQ ID NO: 437540 - DNA, 98 bp, Homo sapiens
gggcatgctctacctgcatgaggaggccttcgtgcccatcctgcaccgggacctcaagtccagcaacatagagatggggtttcgccgtgttagccagg

SEQ ID NO: 437541 - DNA, 100 bp, Homo sapiens
catttgtgtatgaagctcaagatgtggggagtggcagagagtatgcattaaagacacgatgaggcgagtggtacgacagagcaagtttcggcatgtattt

SEQ ID NO: 437542 - DNA, 98 bp, Homo sapiens
gtcgctgtcgctgagagcctcacgagtcgaggtcctgcaggtggagctccggcagccgccctgttggttagtctgctgctaattggaattgctgcgtg

SEQ ID NO: 437543 - DNA, 99 bp, Homo sapiens
gaaaaagaagaagaaaataaaaaatggcagtaaccctgagacaaccacttctggtggttgccactcacctgaggatggtgacgtgtcagagacaatcag

SEQ ID NO: 437544 - DNA, 75 bp, Homo sapiens
cgggcggcttcctggcctgggcgctccggtggcggcggagctccatgtccatccgctggccgggccgccccctcg

SEQ ID NO: 437545 - DNA, 75 bp, Homo sapiens
ggaattcaaggtcacagatgccaggatacagtttatgtaacttgatggaagaaaatggaattactccaaaaagac

SEQ ID NO: 437546 - DNA, 73 bp, Homo sapiens
ctgcttcccgtctgcgcgagtccacgcagctccccagctgccactgcagagccccgccatggaagacacgccg

SEQ ID NO: 437547 - DNA, 100 bp, Homo sapiens
acgcgctctcaatgaactgggacgccacaaggaggcctacgagtgcagcagccggtgttccctcgccctgccccacattatgtttgagaccttcaacacc

SEQ ID NO: 437548 - DNA, 75 bp, Homo sapiens
agtgggggtgtacgagtcggccaagttgatgaatgtgccgtttgagcaaggaagacattgaacgtatggtccagg

SEQ ID NO: 437549 - DNA, 100 bp, Homo sapiens
ccaggagttcgtctcttacgtctgcggaagtgcagctgcctcagttcttagcgcaggcaagaaaattggatgtatattttgaatatgaagaaaaaataat

SEQ ID NO: 437550 - DNA, 75 bp, Homo sapiens
ggagcaggaggagctgctggcgcccgcagatgattgacgagatgcctgaggctgccgtgaaatcaacagccaaca

SEQ ID NO: 437551 - DNA, 90 bp, Homo sapiens
gtgtcctttacaaatcttcagggaatggccaagtgacaaagttcacagaaggctccttattggatgggctgtactggaagatgcagccca

SEQ ID NO: 437552 - DNA, 99 bp, Homo sapiens
caaagttactgtaccatggcaggccaacgaacatgtcaaaggaggagcagcagagctggccccggggtggaacttgcagaaatctgtgccaagagtgag

SEQ ID NO: 437553 - DNA, 100 bp, Homo sapiens
tgaggacagttcatatagcatctggacagtcaacacgggcaccatgaagcacttcctgaggtgtgtataggacaaattctacgaataatacaactacttg

SEQ ID NO: 437554 - DNA, 83 bp, Homo sapiens
gtgaagatgaagagcaggaagctcggggaaaatgtttcaacgtgcgcaagagttgcggtggcgggcagaggactaccacaaat

SEQ ID NO: 437555 - DNA, 95 bp, Homo sapiens
tgaagtatttgaagccatcaacatcacaaataatgaaaaagttgttgttaaaattctcaaggtatgatctcgtgaaatcttgagagaaactgaat

SEQ ID NO: 437556 - DNA, 82 bp, Homo sapiens
cctgctcttcctgctgctgctgccctggttccccggccccacccgatgcggcctccaagtgtactaatggtcacttgatgtg

SEQ ID NO: 437557 - DNA, 83 bp, Homo sapiens
ccgagatggagccctggtgggcacggcgtgcaagacaatgcagatcttcgtgaagactctgactggtaagaccatcaccctcg

SEQ ID NO: 437558 - DNA, 100 bp, Homo sapiens
aaggtttcctttaagatcacgctgacgtcggacccacggctgccgtacaaagtataaatttgcgcctcattttggtaagcggaaaaacaaaagagttcct

SEQ ID NO: 437559 - DNA, 100 bp, Homo sapiens
tacccactttgctgtggtcacagtggagaaggaactgtacacttgggtggtgactgtgggaaaacacctgactgctcgtgtcctgtgcctcatagtgctg

SEQ ID NO: 437560 - DNA, 98 bp, Homo sapiens
gatatccccctgctgtttgagaccaagaagttgctcaagtacatgaagcacaccgtggtagtatactggaatggccttgatgaagatgacaggcatgg

SEQ ID NO: 437561 - DNA, 97 bp, Homo sapiens
tcactgaactctctggcaaccaggtcttcgctgaaaagaacccacgagaagctgatcccatgactaaagtgcaggccgaactagatgagaccaaaat

SEQ ID NO: 437562 - DNA, 87 bp, Homo sapiens
aattattggaggccaggtttactggagtaggtgttagtaagtcctgaatagctacagtgctcaaccgaattttggcgcgcccgcttc

SEQ ID NO: 437563 - DNA, 100 bp, Homo sapiens
gtacggcctggcactgcgcttcttcaaaggggtcttgctcctcagaacaaaccagaattgcagaaggtgatggaaaaaagaaaacgagaccaagtaataa

SEQ ID NO: 437564 - DNA, 73 bp, Homo sapiens
actacggagcataggaggaaaattcatcatctggacattggctccctggattatcaagagtttgtagttgaca

SEQ ID NO: 437565 - DNA, 75 bp, Homo sapiens
cttcagcacaatgacattgacaaacgggactactgttcgaagatttttggaagaatactgagaacggcataaagt

SEQ ID NO: 437566 - DNA, 96 bp, Homo sapiens
cgggcgagcagagtaagaagcaggtgctcttacagcctgttccaagtgtggcttaatccgtctccaccaccagatctttctccgtggattcctctg

SEQ ID NO: 437567 - DNA, 83 bp, Homo sapiens
aaagaggttgattacagcggcctcagggttcaggcaatgcaaataaggttgtggttcaccttgaaactattctaggagcctca

SEQ ID NO: 437568 - DNA, 80 bp, Homo sapiens
gcaggcatcatccgctatgcaattgggaaacaagccaacgacctggtggccacactgatgaggtgcacaccccactacat

SEQ ID NO: 437569 - DNA, 75 bp, Homo sapiens
gcagtcaaatggcagtcaaacccagcttttgcaggatgagaacaagttgagcagtgccaacggccatgaagaacg

SEQ ID NO: 437570 - DNA, 83 bp, Homo sapiens
gcaagctctcgagagtctcacggagacgcaggtaactaggatttctacctcaaccgcgagacctatgcaaggacggtgtggac

SEQ ID NO: 437571 - DNA, 74 bp, Homo sapiens
ccggtgctcttgcaactgacgcagtcactgcagcactggtggaacttgagttacgccccatggtgtccatcctg

SEQ ID NO: 437572 - DNA, 73 bp, Homo sapiens
aagagcctcaccagccacgaccccatgaagcagtgggaagtcactagcagtgagaaagatcagtctaaagaaa

SEQ ID NO: 437573 - DNA, 82 bp, Homo sapiens
aggaacctatgtcactttcaacttccatatagaagaaagggaagggccaatgaagactcttggaagctagggaccaagtgca

SEQ ID NO: 437574 - DNA, 100 bp, Homo sapiens
ctacagtgcttacaccgcccagcccactcaaggatatgcacagaccacccagggggaggggttgcaccagctacgcgaggctttgaagattttagctgag

SEQ ID NO: 437575 - DNA, 75 bp, Homo sapiens
cagctctccactactttaagaaagctgctgacatggggacttcagacgcagagcgagcccttgctgtggccaggc

SEQ ID NO: 437576 - DNA, 51 bp, Homo sapiens
ggcagctgggaagaaacccgcagattcatgttacatgtaaagctgtcctca

SEQ ID NO: 437577 - DNA, 90 bp, Homo sapiens
aaattatctctggtgctgcagctctcgcaaatctgtccaaggctgcctggggagcattggagaagaatggcacccagctgatgatccgct

SEQ ID NO: 437578 - DNA, 100 bp, Homo sapiens
agcctgtccattgaaaccagcaaaaggacttatgagttacaggataattacaggttcctcatgccatgcacctgctgtcacccagcatgcaccctatttt

SEQ ID NO: 437579 - DNA, 90 bp, Homo sapiens
ccggtgggctaggtactgagcgcgcgaggtacaggtttgcagattccgccagcagcacagcaagctctacagatgagtggctctttggca

SEQ ID NO: 437580 - DNA, 75 bp, Homo sapiens
ggggctccgcgccctccccagaggcatgcccaaggatgtgaccgagctgcccgccatgttcatagaggataaagc

SEQ ID NO: 437581 - DNA, 80 bp, Homo sapiens
taggcgtgagccaccgtgcctggctgaagtggatgacaatcgagcagcagaagaatggtgtgcctaccctttaatgctgc

SEQ ID NO: 437582 - DNA, 50 bp, Homo sapiens
ctggtctcttggctgtctactatatgagggatggatctcagcaaacggga

SEQ ID NO: 437583 - DNA, 126 bp, Homo sapiens
aatgtttgaacaaactcgaagaacagctgtggaaagaagttgcaaaacactgggacacattcagctaacgtattttagcaggtggagtgaggttgaagattcctgtgacagcgatgccatagagag

SEQ ID NO: 437584 - DNA, 78 bp, Homo sapiens
ggaaagacgtttcttctcttggcaagagagctctgcatcaatgcgccggccatagaagcagttgggctcgttgaaaaa

SEQ ID NO: 437585 - DNA, 100 bp, Homo sapiens
tcatggaatcccttgcatggctctcatctcagaccagtatccttcaggggttctcttactctgatttgcggaaatttggcatcgtcttgtctgctgtgat

SEQ ID NO: 437586 - DNA, 82 bp, Homo sapiens
agaaggggaacggatctgtgtgcccacagctcctggagccccacaggtgcatctgcagacgcagcaggaggtgaagctgcgc

SEQ ID NO: 437587 - DNA, 82 bp, Homo sapiens
tttgaacggaatgctggagtcagtggaagacggagctggtcggcccgaaggtgtcgtgaaaactacccctaaaagccaaaat

SEQ ID NO: 437588 - DNA, 111 bp, Homo sapiens
agaaacaataggacggaaacgccgaggaacccggctgaggcggcagcgtgcctgccagtgtagagccggtggagcagctgggctcggcgctgaggtttcgccctggctaca

SEQ ID NO: 437589 - DNA, 90 bp, Homo sapiens
aagccagaccggtcctcgtttgtaccgtccctcttcagatcaggatcctcatgaccagccaaagagaagaagaattaggaagcataaatc

SEQ ID NO: 437590 - DNA, 100 bp, Homo sapiens
cagcaactacaggctttgaaccttcttgtcatcctcctacctgatgcaaacagggacacactgaagtggagttggatcacaggattgattttgaactcag

SEQ ID NO: 437591 - DNA, 112 bp, Homo sapiens
gccgcgggagccgcacgcggcgatatggaagaggagggcaagaagggcaagaagaatgattacggacctgaagccaaagaacaagatgcgctagtggacagattgctgacca

SEQ ID NO: 437592 - DNA, 100 bp, Homo sapiens
ttggagtacgcccgctcccatggctttgctgctgaattcaagttggtcgaccagtccggacctcctcacgagcccaagacatatctactgaagatggtga

SEQ ID NO: 437593 - DNA, 82 bp, Homo sapiens
aggataagggtgacagcaacagctcggcgggctggaaggtgtcgtgaaaactacccctaaaagccaaaatgggaaaggaaaa

SEQ ID NO: 437594 - DNA, 93 bp, Homo sapiens
tgggattggagattccacccaaacttgctggtcactgggagggagtgcatccgccccaacccttttccccctcgtctcctgtgagaattcccc

SEQ ID NO: 437595 - DNA, 101 bp, Homo sapiens
gtcatctgtgaggaccgtgacccacctggtacatcgcctcagggcattcatttcaggctccttctaaatggccaaggatagtggccaaagcctccaagaac

SEQ ID NO: 437596 - DNA, 75 bp, Homo sapiens
atgacatcgtgaaggttgaagtctgggatgtagtagacaaaggtgtgcctaccgcatgttgccgctgctgtttct

SEQ ID NO: 437597 - DNA, 100 bp, Homo sapiens
caataatgttgtcatccatttgcttggagatgaagaccccagggtgcgacatgttgccgcagcatcactaattaggtctcacactctgaggatgactgtc

SEQ ID NO: 437598 - DNA, 133 bp, Homo sapiens
ctcctattaaaaccatttttggtccatggtcaatgagaatacgaggatgtacattccagaggaaaaccaccaaggaaattgatactttatcaacatagagattaattatttgtatttgggagcagcagaactg

SEQ ID NO: 437599 - DNA, 82 bp, Homo sapiens
aaagtgacaaaacttttattccacatttggagcctacacaatggaaaagccaaacaaaagaaaataaagttggaacttcttt

SEQ ID NO: 437600 - DNA, 50 bp, Homo sapiens
cgcggacccgcccggagatgagaactgccattggatgtccagaatcccct

SEQ ID NO: 437601 - DNA, 75 bp, Homo sapiens
tgccaactttccaagtctggggatggccagctgaagaaaaggtgactggtctcatgagccctgaagaatgaactc

SEQ ID NO: 437602 - DNA, 83 bp, Homo sapiens
cagagctttcacgaaggcaccgacgtcatcatgctgaccaccaatcagatccgtaaggtgtggccgacgacgatgccctcgct

SEQ ID NO: 437603 - DNA, 83 bp, Homo sapiens
ggagaagtggcctaaaacttcggcgttgggaggatacgaagcgttttcggcttcctgcccggagctgtgcagcaaacagtcga

SEQ ID NO: 437604 - DNA, 90 bp, Homo sapiens
cagacaaacagcccgcccgaccccgtcccgaccctggccgccccgagcggagcctggagtttccaggaatatggatctactggaacagcc

SEQ ID NO: 437605 - DNA, 82 bp, Homo sapiens
gcgacgcagcccgcggcagaagggagtaccctgacttctaccggaagctctacggcctcttggacccctctgtctttcacgt

SEQ ID NO: 437606 - DNA, 74 bp, Homo sapiens
cacgagtcgaggtcctgcaggtggagctccggcagccgccctgagacagggcagggcattgttcatgcactgac

SEQ ID NO: 437607 - DNA, 96 bp, Homo sapiens
tttctcagcaccttggcgaagccttgggtttctttcttaaaggactgatttttagaactccacatttgagtgattcgcctttgccagtctcatctc

SEQ ID NO: 437608 - DNA, 100 bp, Homo sapiens
cggggaggtaccaggtatttgagagcaatcgccaccgctttcctggaacttgaggtctcctctgagcctccggcctccataagacccaaaacagatgaca

SEQ ID NO: 437609 - DNA, 97 bp, Homo sapiens
gatgaagatgatgacgatgatgatgaagaggatgatgatgaagaggatatcagtatgaacaacattactcagttgccagaagatgcatttaagaact

SEQ ID NO: 437610 - DNA, 104 bp, Homo sapiens
ggacttctgcaaatacagagactcggattaaaggtggtgatctttgtgaagtctgtgcagcggtgcattgccttggcccagctactagtggagcagaacttccc

SEQ ID NO: 437611 - DNA, 99 bp, Homo sapiens
gttgccgtcctgggagaatgcgccagtgacccaaccagcatctcactttccttgctggacaagtcaacgtattgaaacttactgttgaagacttggaga

SEQ ID NO: 437612 - DNA, 75 bp, Homo sapiens
caccatgccctccactgcatgccatcctcatctgaccacacgaactgtggctgcaccatctgtcttcatcttccc

SEQ ID NO: 437613 - DNA, 75 bp, Homo sapiens
gtgaagtcggccagcctgagcaagcggaggacctacgccggcctggacctgcctagagctggaacgttacctcca

SEQ ID NO: 437614 - DNA, 75 bp, Homo sapiens
tccgcaccccggggtcccaggaagggcggcccaggtatggacctgtctgccaatcaggacgaggagaccgaccag

SEQ ID NO: 437615 - DNA, 83 bp, Homo sapiens
gacatcgggcctctcccaatcctgtggccatggaaacccgaagtgacaacaggacttctgtaacgataagagttatatttcag

SEQ ID NO: 437616 - DNA, 75 bp, Homo sapiens
gcgattctgcaaccaagcacctgaaacagcaggtggaaccaaagttttaatcaaagaaggtggtgttcagttgct

SEQ ID NO: 437617 - DNA, 100 bp, Homo sapiens
ccaccaccaccaccacagagtctgtggaagaggtggttcgagttgagaaaccaaggcagtatcatgagcaggaagaaacacctgagatgatggcagcccg

SEQ ID NO: 437618 - DNA, 82 bp, Homo sapiens
aggaactggcccggaaacaggaggacccctgccaggagcccggaagtgggtccgcacgagacagaatagactacactcaaac

SEQ ID NO: 437619 - DNA, 82 bp, Homo sapiens
cagccaggagtcatgagcgacagcggcgagcagaactacggcgagcgggtgcgcgcggagccatggttatcatgtcggagtt

SEQ ID NO: 437620 - DNA, 100 bp, Homo sapiens
gcgccccggaatgacctgtcgcctgccagctctggccaaatttgagtttcatcatggtgactatgaaaaacagtttctgcatgtactgagccgcaaggac

SEQ ID NO: 437621 - DNA, 101 bp, Homo sapiens
ccggagcggtccgcgagccaccgaggcccaggtagcttcctattgaagtttattcggaagatgacaagtaggcattggtgtgctgttcccattttgtttct

SEQ ID NO: 437622 - DNA, 100 bp, Homo sapiens
caagtacatggagtatgacagcccatgggaccacctttgaattaggttgttttggaaaccgaaataacaaataagtccgctttgaaactttatgaaaatc

SEQ ID NO: 437623 - DNA, 85 bp, Homo sapiens
agatcaaccaccaaagtgggaaacattgaaatcaagatgatgagagttcactggttgaccctgatgacatcatgaaacacatagg

SEQ ID NO: 437624 - DNA, 82 bp, Homo sapiens
cgtcccgaccctggccgccccgagcggagcctggaggagggtgtgaagacagagaatgaccacatcaacctgaaggtggccg

SEQ ID NO: 437625 - DNA, 75 bp, Homo sapiens
cagcagcttcggcggcggcagaggcgtctgagagaagaaatggaagaaatcacacagcagcagctggtacacgac

SEQ ID NO: 437626 - DNA, 88 bp, Homo sapiens
caatgtttgaacaaactcgaagaacagctgtggaaagaagttgcaaaacactgggctgttcggctcttgaatcccagcgatgaaacca

SEQ ID NO: 437627 - DNA, 88 bp, Homo sapiens
aggagggcgcaggagcgggactgagagcgcctggaggctcgagcggaggatctgccgacaccccaggccatcgagccccaggccatcg

SEQ ID NO: 437628 - DNA, 74 bp, Homo sapiens
tggcccagcatttaccacacaatggcctcgggaagagaggcagagcacttgtcctccccttggggagaatcctc

SEQ ID NO: 437629 - DNA, 83 bp, Homo sapiens
cggcgagcgcgagcggcgcgagaaaggccctccaggaaagcctgcagctgtccacagagcccaggggcccaggatcccctccc

SEQ ID NO: 437630 - DNA, 83 bp, Homo sapiens
ccacaacaacacattttgcagagagtaatcaagtcagaggattatatgacttttatctgcctagagaagaactatggatctac

SEQ ID NO: 437631 - DNA, 113 bp, Homo sapiens
cgcagagcgaggctgcgggaccccaggatgggggacaggaggctgcggggcctcagatgaggctgccagccttgagagcaccaccgttacctggttgaagaggggaggggaag

SEQ ID NO: 437632 - DNA, 90 bp, Homo sapiens
gcggggcctgaggaggactgagctggggcgggacccagcctctgaagagccaatccattcaggatgggaaaccacgcaggcaaacgagaa

SEQ ID NO: 437633 - DNA, 83 bp, Homo sapiens
ggtgaatggagatgcagctcagcagatcaggcctttgtgacactaaccacaaacgatgcctacgccaaaggtgccctggtcct

SEQ ID NO: 437634 - DNA, 98 bp, Homo sapiens
gagagagcaagcagggaaagagagcgccaggtgcttagcagagagaagaagaaggaggttcctgctgtgccagaaacccttaagaaaaagcgaaggaa

SEQ ID NO: 437635 - DNA, 99 bp, Homo sapiens
agacgcgggccttcgagcagctcatgaccgacctcaccctgtcgcgggtggatggaagcatgcctaggggaagatctgcctcccaccacagaactggag

SEQ ID NO: 437636 - DNA, 83 bp, Homo sapiens
actcttcagggatgagtcatgtggcagtggaaaatgcgctcgggctggaccagcagacggcgggcgctaacaccaccgacaag

SEQ ID NO: 437637 - DNA, 96 bp, Homo sapiens
cgagctgtgcgggcgggcggtgagcgcccatatgggggttctggagagcggggtgtggggaagctcttcgtgggcggtcttgactggagcacgacc

SEQ ID NO: 437638 - DNA, 101 bp, Homo sapiens
ctcggagccctcccagcctgctgtccagcagtttaaggaagaaatctctaaacgttttaaatcacatactgaccaacttgtgttgatatttgctggaaaaa

SEQ ID NO: 437639 - DNA, 75 bp, Homo sapiens
ctctgaagaaaggggacattgtggcccgagacgaggtggagagctgatcatggatgaacaggatcaacagctgga

SEQ ID NO: 437640 - DNA, 73 bp, Homo sapiens
gctgagtacgacagcctcaaacaggagctggagcagctcaaagaggttctgtacagagtaatgagatgtgtga

SEQ ID NO: 437641 - DNA, 85 bp, Homo sapiens
gaggtctcatgtctgcttatgcggtggctcgctgctcagaacagggagctttattgcagaaatgaccatttatatcaagcagctg

SEQ ID NO: 437642 - DNA, 88 bp, Homo sapiens
aaaattctgaactcaggacttggcaacacttttccagccattaactccaggctctcgagaatttgaagatgttgtaaatattctccat

SEQ ID NO: 437643 - DNA, 90 bp, Homo sapiens
cccaactaaagccccacatttgcagctcattgaaggaaagggagagtcccgtattctcagagtaaaagttgtttctggaattgatctcgc

SEQ ID NO: 437644 - DNA, 75 bp, Homo sapiens
gcgaatcagatcagagtgtggtcgaatgtaagggggacttgatctcatcttcatgccaggccttgggtttgacaa

SEQ ID NO: 437645 - DNA, 82 bp, Homo sapiens
gcccttttcagggcccccaaactgtcacagaaagagctgttaacacttcctagataacggatccctccctggtgccacagca

SEQ ID NO: 437646 - DNA, 100 bp, Homo sapiens
agaaaacagggaagatattagccaatatggaattgccaggttcttcactgaataagttttgccgaattgacaagcccctgtgtcacagtgaggatgagaa

SEQ ID NO: 437647 - DNA, 80 bp, Homo sapiens
ctcagcaccgagaacatctactctttcaactacaccagccagcccgaccagtgtcaaaaacggtatttcgctgcctggca

SEQ ID NO: 437648 - DNA, 80 bp, Homo sapiens
ggaagaacggattcacacaggatggcttgcagaagacgctatttgatttttagactctgaggagcagttggagctaatcc

SEQ ID NO: 437649 - DNA, 83 bp, Homo sapiens
tctgaatgatgaatacttttactactgtgacaacattaacgacgccacaggtcatcatctggatcatcccattctggttcccg

SEQ ID NO: 437650 - DNA, 75 bp, Homo sapiens
gacaacacggcttttatggacgagttcttttctgaggtgtgcaactgaggaacatggctcaagaaactaatcaca

SEQ ID NO: 437651 - DNA, 75 bp, Homo sapiens
attgaggaattcatggtaacttctgaaaatttaagaatttgctgattcccttggaattccgtttttggaaaccag

SEQ ID NO: 437652 - DNA, 51 bp, Homo sapiens
tgaaaaaatggttgacctcacccagtctctagtgatccctgaaaagttcca

SEQ ID NO: 437653 - DNA, 100 bp, Homo sapiens
ccaggtcctggggctgggcatcaacggcaaagttttgcagatcttcaacaagaggacccaggagaaattcgccctcaaacatccccgcggggagaccgag

SEQ ID NO: 437654 - DNA, 100 bp, Homo sapiens
aatgtttgaagcaacaagattgcttgcaacaattgttatgcttgatgatgatgctgaagctatccttgctgcagacttcgaaattggtcactttttacgt

SEQ ID NO: 437655 - DNA, 95 bp, Homo sapiens
acctcttttaccctgttaccctggaagttcttcatcaggtctctcaggcagctgcagagcttcaacagtactgtatgcagaatgcctgcaaggat

SEQ ID NO: 437656 - DNA, 100 bp, Homo sapiens
cttcgacagaagtggaagtgctgaaaaatgctcatctctcacacagacttttgatggacaggaggttttgacctgtagcagagaaccaattctggagaac

SEQ ID NO: 437657 - DNA, 100 bp, Homo sapiens
gaaccagatccagaagactgtgatcgagcccttaaaaaaccacttccacctggaccactgcggggcactcccctacttcagcgagatggtgggctacgac

SEQ ID NO: 437658 - DNA, 100 bp, Homo sapiens
ccgggccctcttcgacagctacacaaatctggaacgggtggccgattactgcgagaacaactacatacagatggaattactctgatcaccaaagaggaag

SEQ ID NO: 437659 - DNA, 94 bp, Homo sapiens
ctggggccagggaaccctggtcaccgtctcctcagacattcactactttcactgcctaagaatcctggaccttctcaaaggcacagaggcctcc

SEQ ID NO: 437660 - DNA, 90 bp, Homo sapiens
cgctggggcggggaccttgccttgcccgggagccagagcccagaggtggagcagttagggagggttgtggaactggacagtgacatggta

SEQ ID NO: 437661 - DNA, 90 bp, Homo sapiens
agaccatggccgcggccttcgatggcttccggaaagtggtccacatcgagcagggcggcctggtcaagccagagagagacgacacggagt

SEQ ID NO: 437662 - DNA, 100 bp, Homo sapiens
gtgagactggataagaaatcaaaaatctggtgaaattgccggcaagagggagttaaggacattccaggcagaggcaaggcacccctttcccaaagtgttc

SEQ ID NO: 437663 - DNA, 98 bp, Homo sapiens
ggactttcttccagcttctgctgtccttctttgtggagagcaaggatttaagtgccctgtatgctcaaaatttgtatcctcagatgaaatggatttgc

SEQ ID NO: 437664 - DNA, 96 bp, Homo sapiens
gtcgacatgttccaggtcccggatagcgagggcggccgcgccggctccagtagccacgatggaggtgatgaacctgatggagcagcctatcaaggt

SEQ ID NO: 437665 - DNA, 98 bp, Homo sapiens
gacggagccgatcccggcctgagcaagcggccgcgcactgaggaggcggcggccgacggtggcggcgggatgcagataaaatacccaggagctgatat

SEQ ID NO: 437666 - DNA, 100 bp, Homo sapiens
atctgttggattctaatgcagttcatcacatcattcatgattttcagcaagagaaggcagctgctgtggatttgactaaccacttagaatacactctgaa

SEQ ID NO: 437667 - DNA, 90 bp, Homo sapiens
ctgcccgtggcatgagggagccggaagagctgatgcccgctttatgaacaaattctagctgaaaatgaaaagctgaaggcacagctacat

SEQ ID NO: 437668 - DNA, 51 bp, Homo sapiens
cttgaacatcctttgactggttagccagatcaaggatctggattttgcata

SEQ ID NO: 437669 - DNA, 75 bp, Homo sapiens
gggggaagcggcggcggcaaaggaaactatgttccaacttcctgtcaacaatcttggcagtttaagaaaagcccg

SEQ ID NO: 437670 - DNA, 73 bp, Homo sapiens
gatccagggcggagacttcaccaggggagatggcacaggaggaaagaatttaatgtttctggtgttgcgagat

SEQ ID NO: 437671 - DNA, 100 bp, Homo sapiens
ttggggtctcgtcggcttgggattatcaatgcttgggagcttttcttgcctggagaagagggaggggagaggacaagggccctggctactcctggattcc

SEQ ID NO: 437672 - DNA, 75 bp, Homo sapiens
cttttaccatgaatagttctactccttctacaggatacaatgtctctttgctatatgaccttgaaaatcttccgg

SEQ ID NO: 437673 - DNA, 75 bp, Homo sapiens
gaggccaggggtgtcgccatggcagcacagtcagtgctgatttcattatttgaactcaataccccagagtttaca

SEQ ID NO: 437674 - DNA, 75 bp, Homo sapiens
ggctgtggatgtgtcccccctgcgccgtgtgaaccaggccaactgcattgactccacagcctcagccgaggccgt

SEQ ID NO: 437675 - DNA, 120 bp, Homo sapiens
gagttttcttttcatgtaccaagtcttgaagagcttgctggaggatcaggtcatccagctgatgaacgcgatcttcagcaagaagaactttgagtccctctccgaagccttcagcgtggc

SEQ ID NO: 437676 - DNA, 73 bp, Homo sapiens
gggccgaggtcgaggcggaggctttagaggtcaaaacctgctccgaggtggacgagccgtagctccccgaatg

SEQ ID NO: 437677 - DNA, 82 bp, Homo sapiens
ccgggcgcaccgaccatggcctccaaatgccccaagtgcgacaagaccgtgtacttcgggggatatgagactttctactcgg

SEQ ID NO: 437678 - DNA, 74 bp, Homo sapiens
tcagaaggaacttgcagaaatcacattggaccctcctcccaactgtagcggagctccctgggtcctcagcagtg

SEQ ID NO: 437679 - DNA, 74 bp, Homo sapiens
gaagacgacgggcagccccggactctcatctgcaggaagccctaggactgcctgctgggaggggggatgagaat

SEQ ID NO: 437680 - DNA, 74 bp, Homo sapiens
ggctacagcttcagaagaccgaagcgttcgtatctggaaggggacggcaaaacagaacagaaaggcggagataa

SEQ ID NO: 437681 - DNA, 82 bp, Homo sapiens
gaagtccacccagcgtttccgaggtgaaggcgccgcgccaggccgggcgggcggagctcgaggccatgagcagatataccag

SEQ ID NO: 437682 - DNA, 78 bp, Homo sapiens
caagagggagttaaggacattccaggcagaggcaagatctttctctggaatcaaaggactccagctgaaagttaacct

SEQ ID NO: 437683 - DNA, 129 bp, Homo sapiens
taggaatcatggcggctgcgctgttcgtgctgctgggattcgcgctgctgggcacccacggagcctccggggctgctgtgagccgtgagctttgaggcggtgggatgtgtcagcagaatgtctcctgcc

SEQ ID NO: 437684 - DNA, 100 bp, Homo sapiens
gaaagggataggagaaggatgtggactgcagtgctgcagtgccagactggggctgtggctgagatgtcacatggcagataggatcacaaatttctgttgt

SEQ ID NO: 437685 - DNA, 76 bp, Homo sapiens
cgtgttctgatcactactgacttgttgaaacaagtcatcgatgggcacagccagacactgccccactacctgtccc

SEQ ID NO: 437686 - DNA, 76 bp, Homo sapiens
gatccagtgttcaccatcctggccccggaaggacagagcgggatgccaccagcttgtccaaagggaagttccagga

SEQ ID NO: 437687 - DNA, 127 bp, Homo sapiens
gtcgaaaggatccagaattgtggggcagcgtgctgctggaaagcaatccttacaggagacccctaattgaccaggactttgcctcccgggccaaactggcagttcaaaaactagtacagaaagttgg

SEQ ID NO: 437688 - DNA, 74 bp, Homo sapiens
caaggagggactccccgtgaacaacatcttccagcagatctcccccgtggggctcggagcccagctacctggac

SEQ ID NO: 437689 - DNA, 51 bp, Homo sapiens
tatgtggacgttggcactgggaaggggttggctgtgttccggccgcagagc

SEQ ID NO: 437690 - DNA, 90 bp, Homo sapiens
ctggatttctgaggagccgttcgaactgtctcaccacttccctgcagctcccggcgatgccagtccctccactccagaggagaacgaaac

SEQ ID NO: 437691 - DNA, 143 bp, Homo sapiens
cgcgggcctcgcctccgccctccgccacctcgagctgcggtagcagcgactcatgagagcgcggccggaggacaggatgtttcgtctgaactcactttctgctttggcagaactggctgtgggttctcgatggtaccatggag

SEQ ID NO: 437692 - DNA, 88 bp, Homo sapiens
gtggatggaaaagcaccacttgctactggagaggatgatgatgatgaagttccagcaagacactaagggcgactaccagaaagcgctg

SEQ ID NO: 437693 - DNA, 75 bp, Homo sapiens
attctggggcagtatcaacggagtctccgggaaataggaaggttgttgattactcacagtttcaggaatctgatg

SEQ ID NO: 437694 - DNA, 82 bp, Homo sapiens
ctttgtgtcatcctccacagctccagggaaggcactcaaaagtggggggcaggaaagtcttttatcacgagtcatgaataca

SEQ ID NO: 437695 - DNA, 100 bp, Homo sapiens
caggtgcctacatcttcagacccaaccaacagaaaccgctgcctgtgagccgctgggctcagatccacctggtgaaggtttatccaccaggtgaaccagg

SEQ ID NO: 437696 - DNA, 82 bp, Homo sapiens
cgacgtcttgcctgtgtcccacttgttcgcggcctatagtgtaagagacttaaatgaatatgactgtcacacaaaaaaggtg

SEQ ID NO: 437697 - DNA, 75 bp, Homo sapiens
cttgggagaaagacacagtctccatcatcccagacccaacatgagtgaagtttcctgcaagaaacgggacgacta

SEQ ID NO: 437698 - DNA, 80 bp, Homo sapiens
acggctgcgtcgcccgaggcgaggaggagcgctggcgaatccggacaatcagatagttcaaaccagcaaggagatgcgga

SEQ ID NO: 437699 - DNA, 75 bp, Homo sapiens
gactactatagcagatcatacagaggagaatgaggtgcgaacaatggtggatccaaactcacgcagtgaccccaa

SEQ ID NO: 437700 - DNA, 51 bp, Homo sapiens
cagccggagaagcgagtttcagctggtaagaatgattgatgttggctgata

SEQ ID NO: 437701 - DNA, 50 bp, Homo sapiens
gtcgtcttgggcttcctggtgctccgcagacttcacagagaatgcagttg

SEQ ID NO: 437702 - DNA, 50 bp, Homo sapiens
caattccgatggcaaagccgttgccaaggggagttgctgagtcagcccag

SEQ ID NO: 437703 - DNA, 73 bp, Homo sapiens
ttccccggcccacagtgggggtgtgcaaacccgagagaactgggtattggcatactccacacatctgtaccat

SEQ ID NO: 437704 - DNA, 82 bp, Homo sapiens
ctcggaagatctaaaaagcctgaccatggaccctcacaaactgccctcctcaagtgaacagcgaagaatagccagaattcag

SEQ ID NO: 437705 - DNA, 83 bp, Homo sapiens
gccgggaggaggaggaggagccgagaggagctgagcgagcgcggaagggaaaccggctcctgaaatcaggtgtcccattccag

SEQ ID NO: 437706 - DNA, 142 bp, Homo sapiens
ttagcacccagtatgttttagatggcagtggccacatactttctcagaaaccttcacatcttggtcaaggtcagaagagatcaattctacagaaatttccagtggttctgttgaggctttatggaattcagcatgtcaaaat

SEQ ID NO: 437707 - DNA, 90 bp, Homo sapiens
gaaaacatcaatgatgagcctgtggatatgagtgctagacggagggtgaagtaccatgcaagcatttcttaaaggtacatccatcagtac

SEQ ID NO: 437708 - DNA, 96 bp, Homo sapiens
gtaatcgcctgctttgattcattgaaagttcgtaatgttcttaatgatgcagtggatttactggaattccgtgatagagtcattaaagcatctttg

SEQ ID NO: 437709 - DNA, 58 bp, Homo sapiens
ccttcccgcaccctgggaccgatcagcccggaggaagaggagcgccgccgagtaaggc

SEQ ID NO: 437710 - DNA, 100 bp, Homo sapiens
gcacaggcaccaagatgtccaaccgagtggtctgccgagaagccagtcacgccgggagctggtacacagcctcaggttgtgtggaggaaacttggagatg

SEQ ID NO: 437711 - DNA, 100 bp, Homo sapiens
caaggcggaacacgaccagctgctcctcaactcaagcttcacctgtggtctggcaggggccctggcctcaaaccctgttgatgttgtgaggacacgtatg

SEQ ID NO: 437712 - DNA, 75 bp, Homo sapiens
ccggccgtcccgggccgggggacccgcccgccatggccaccaaggttcagccgtctgtatatctccccagatacc

SEQ ID NO: 437713 - DNA, 83 bp, Homo sapiens
ccccgtacggccacccggcggcctgggctggaagctcttctacgtcacaggctgcctgtttgtggctgtgcagaacttggagg

SEQ ID NO: 437714 - DNA, 100 bp, Homo sapiens
atcacctgtctggagcaaggaaaagatccctggaatatgaagagacacagtatggtagccacacccccaggatttccagatgtgacttgcactcagaaga

SEQ ID NO: 437715 - DNA, 99 bp, Homo sapiens
ggagttcattgcaaatctgcaaggggtaaatgagggtgttgatttctccaaggatctgctgaaagattcactggcaaaatttgctggcagaaaactgaa

SEQ ID NO: 437716 - DNA, 100 bp, Homo sapiens
caaggggtgtttttccgtaagcatactcagagccagctctcccaggcgctgaacggactgtcagacagggccaaagaagccaaggagtttctggtacagc

SEQ ID NO: 437717 - DNA, 98 bp, Homo sapiens
gcaggcatcatccgctatgcaattgggctgctgaatgccatggtggcaaaactggggaaccgggaggacccactcccccaggactcctttgaaggcgt

SEQ ID NO: 437718 - DNA, 75 bp, Homo sapiens
ccgagacagaactcgtcagattcttgcctgcaggaacaggagtacagctgtgtagtaaagatgccttctggtgaa

SEQ ID NO: 437719 - DNA, 100 bp, Homo sapiens
ctgggccgcttgcctcctgctcctcctcctcctcgccagcctgaccagtggctctgttttcccacaacagtggtggacttgctttgtgaagagacagttc

SEQ ID NO: 437720 - DNA, 106 bp, Homo sapiens
cagctgaacctggtgttttagaggataccttggtcccagagtcatcatgaagggccgcgatgggcctcttggaacattggtgtgttcatctgcattcgatgtgctg

SEQ ID NO: 437721 - DNA, 85 bp, Homo sapiens
gctcaagttgctactcgggacgctgcacctcccgcgccgcacggtggacgagggagagctggtgacggcctccaaggccatcatt

SEQ ID NO: 437722 - DNA, 73 bp, Homo sapiens
tccgggattcccagccatggcagattcctccgggcagcaggccacacccactcgcccgggtctatggccacgg

SEQ ID NO: 437723 - DNA, 74 bp, Homo sapiens
ctgcctcagcctcttgagtagctgggattacaggtttatttgcaagatgggtttgagggaattaaggataaagt

SEQ ID NO: 437724 - DNA, 88 bp, Homo sapiens
agagcaggagccactgagatgaggaggcgtcgcgcgcgcctgtagctcgcgggcctcgcagggagctgtgattggtatagacgatgag

SEQ ID NO: 437725 - DNA, 100 bp, Homo sapiens
agatgacagcccgcagagagttaacttctgtttacatggaactcagacatctgcaaatcatgaatgattacggacctgaagccaaagaacaagatgcgct

SEQ ID NO: 437726 - DNA, 88 bp, Homo sapiens
cataccttggaacagcataactggaacatagaggtgggtgacatcaccatcctggtgaacaatgccgccgtggtccatgggaagagcc

SEQ ID NO: 437727 - DNA, 100 bp, Homo sapiens
gcaagcccaggagttgacatttctctgcccagccatgggcctcaccctgctcttgctgctgctcctgggactagaagtttgcacctgagtttcaggtagg

SEQ ID NO: 437728 - DNA, 83 bp, Homo sapiens
aagacggtccctgccaacatccgtttgaaaagacccttgaaaatggaagaccctgtttatacccagaaagcggtactctagaa

SEQ ID NO: 437729 - DNA, 95 bp, Homo sapiens
cttcccagggatcttgagagtgaagatctcgaaggatttcataggttctttcaaactgggaaagctcattaaaagaaaaatgagaaaatctattg

SEQ ID NO: 437730 - DNA, 98 bp, Homo sapiens
agccagtcctgacaatgggcagaacgaattcagtgatatcattaagtccagatctggttgaaaggattgttgacaaaaggaaaaataaaaaagggaag

SEQ ID NO: 437731 - DNA, 75 bp, Homo sapiens
agaagatctgtgtcatattgcccataaagctattgtggacgatgaaaggctctctgcagaggagatggatgagag

SEQ ID NO: 437732 - DNA, 100 bp, Homo sapiens
aggaggggccccagcagcccccgaaggccctatcaggacatggagtatgaaagacgtggcagtatggagccggcctttcacagaggagacctcctgttcc

SEQ ID NO: 437733 - DNA, 100 bp, Homo sapiens
gccaacatggcggaacgcaggagacacaagaagcggatccagcaggacagctggcctgaagctcagagccggggcgtgcgccatggccccacactgggct

SEQ ID NO: 437734 - DNA, 83 bp, Homo sapiens
gagatgctgaaccatgctacctgcaagaaccagcctttcaaacagtttccagagatggattatcctactttacttttggctct

SEQ ID NO: 437735 - DNA, 80 bp, Homo sapiens
cgcagtttctcacgacgggccgagcctgccactgtatcatgatattagctggtttgacatcaagtcatttgtgagtcatc

SEQ ID NO: 437736 - DNA, 75 bp, Homo sapiens
ataatcttcatcctggtgtaactgagaaagatcagtctaaagaaaaggagaagaaagtgaaaaaaacaattcctt

SEQ ID NO: 437737 - DNA, 75 bp, Homo sapiens
ctcccgagtagctgagattacagggggttttgtgctgctggatggggagacgttcgaggtgaaggggacatggga

SEQ ID NO: 437738 - DNA, 75 bp, Homo sapiens
atcgggcgctgcggccggggacccgctgctgagatagacaggtgctggagaatctggtaaaagcaccattgtgaa

SEQ ID NO: 437739 - DNA, 89 bp, Homo sapiens
ccgtggtcaagttcaccatgagagggaaacttggatttaactggccagaagcaggtattcaaagcagagaacaatccctgggtgacccc

SEQ ID NO: 437740 - DNA, 95 bp, Homo sapiens
ggctgcccagaaggcaaagccagttgctactgctcctattcctggtactccatgatccaaggttttgccatcaaggggggacgatttaccaaagc

SEQ ID NO: 437741 - DNA, 80 bp, Homo sapiens
aggagactttcagacccttgtgcacaaagagatcctaattatctcatggctaatgaacgcatgaacctcatgaacatggc

SEQ ID NO: 437742 - DNA, 83 bp, Homo sapiens
cacccaccgccgccgcctcccaggttgggatttgctgtgttcctgggcaggtgcctggtcaatcagtcctcgggatggcagcc

SEQ ID NO: 437743 - DNA, 75 bp, Homo sapiens
cttggttaaaacctgacacttttaacaggaaagattctgaagcttggcggagaggggtgtgtgagtggacaccag

SEQ ID NO: 437744 - DNA, 89 bp, Homo sapiens
atgggatacagctggacaagaagattatgacagattacgccccctatcctatccgcaaacacatcctggtggggaagaagttttaaggg

SEQ ID NO: 437745 - DNA, 101 bp, Homo sapiens
caccatgcaagctttgtcggaagaggaccggaggctctggatggaagccatggatggccgggaacctatgttttctggcaaaggccttcctgcatttatga

SEQ ID NO: 437746 - DNA, 100 bp, Homo sapiens
tagtgttttcttatttagccggagtgagaagcaagaaggccctggacacagcaatatctctgggctttcacagctgcaggacaagttcgagcatcttaaa

SEQ ID NO: 437747 - DNA, 98 bp, Homo sapiens
ggactttagggctgtggtgatggatgaggtggtgctgacaatcgagcaaggaaacctgggtccgtgtgaaaaaattcatgatgaaaatctacgaaaac

SEQ ID NO: 437748 - DNA, 100 bp, Homo sapiens
aaagatccaaaaataaatgacgctacgcaagaaccagttaactgtacaaactacacagctcatggtggagccgccaccaaaatgcagattttcgtgaaaa

SEQ ID NO: 437749 - DNA, 83 bp, Homo sapiens
tagaaactcacatgagacaaatgcgctcagcttcaattgattcatctgaaaactacattaagatgaagacctttgaaggtttc

SEQ ID NO: 437750 - DNA, 50 bp, Homo sapiens
cggcggcctacgagcagctgaagctgaatagccaggccagaagaaggaag

SEQ ID NO: 437751 - DNA, 100 bp, Homo sapiens
cttgcgcgcgtgagctgagccggtgggtgagcggcggccacggcatcctgtgctgtgggggctacgaggaaaggcattgaatgccccagaggagcccgaa

SEQ ID NO: 437752 - DNA, 75 bp, Homo sapiens
cgcgagcaccgcgctgcagacgaagcccgcgcgtgatcccgctccgggaggaggaagccaagaatctggtgagcg

SEQ ID NO: 437753 - DNA, 141 bp, Homo sapiens
gcatttgttggggagaagaggattggaggtgtcagtgttaaaggaacctctacaacgaaggtgaagccacggaagataagtgtctgcgagattaatctctcatggccgctgcacaagaacctggcttttagctgaactaag

SEQ ID NO: 437754 - DNA, 80 bp, Homo sapiens
agaggagccggccgcgcgggccgggaggggacggccgccggagccgcgaggccaagttgttcctcaaagtcattcaagct

SEQ ID NO: 437755 - DNA, 100 bp, Homo sapiens
cgggacccggttccccggcccacagtgggggtgtgcaaacccgagagaactggtttggcaatgaggagcagcagctggcgtgggccaagcgggagagcga

SEQ ID NO: 437756 - DNA, 100 bp, Homo sapiens
tttatcaggcaaaaaacagggctgtatagaagaacagtgcaaacgccgtacaatcttgacaagaccatcaaatgttttcaaaattgtgaagatgattatg

SEQ ID NO: 437757 - DNA, 75 bp, Homo sapiens
gttcaagcgattctcccgcctcagcctcctgagtagcaattacagaagatgaattgaatcttctggttattgtag

SEQ ID NO: 437758 - DNA, 76 bp, Homo sapiens
gaaatcacattggaccctcctcccaactgtagtgactctgacagttggcagtgtgaacctagagatccacaatggc

SEQ ID NO: 437759 - DNA, 100 bp, Homo sapiens
tgattttggctgacatggcagatgtctacaaattacttgttcagctgaaagttaaatttctgaataaattggcagaagaacgcagacagaagaaggaaac

SEQ ID NO: 437760 - DNA, 75 bp, Homo sapiens
tttggaggctctgtaaaactggttctccgggagatgttgcataaccactccttcgtgggctgtgtgaatcctcag

SEQ ID NO: 437761 - DNA, 100 bp, Homo sapiens
caaattcagctgtctatgaaaatgccagggaaaaattttttagaaccaaagaactaattgcagaggcttcgattctgcgacccgggatcctgaattcctg

SEQ ID NO: 437762 - DNA, 75 bp, Homo sapiens
ttattcgtaatgcgactcaaagctgcacggcagtctgtttatgaggagtctcgctctcagtcaaaatctccaacg

SEQ ID NO: 437763 - DNA, 51 bp, Homo sapiens
aagtagaaatcagcagtggagtgtctgtgataaagctgtacaccaagcatg

SEQ ID NO: 437764 - DNA, 78 bp, Homo sapiens
tgtacagccagtgctacgagctcaccaccaacgagaacctgaatgaacctgaaagcaaagaccgagtggagacgctca

SEQ ID NO: 437765 - DNA, 75 bp, Homo sapiens
cgcgcagcgtgtcaggcggagagacccgccgccaggcctcattgctacgatttcagagtaccctggtaatagctg

SEQ ID NO: 437766 - DNA, 50 bp, Homo sapiens
gtggccgtggaggcagaggtggcatggggcacagaccccacaggctcctc

SEQ ID NO: 437767 - DNA, 87 bp, Homo sapiens
gtcctggcattgcatccacaggaggggcaggaaattctttgaagttcatcagagaagatatgaaatataaagatgctactaataaac

SEQ ID NO: 437768 - DNA, 110 bp, Homo sapiens
cgctccgtggccttagctgtgctcgcgctactctctctttctggcctggaggctatccagcaaaccaaggtgtatgttggtaacctgggaactggcgctggcaaaggaga

SEQ ID NO: 437769 - DNA, 101 bp, Homo sapiens
caaggaggagatagaagcgcagatcaaggccaactatgacgtgctggaaagcgtgctgttggcagcagcggtctgcacaaaagcaggaaaggctattgttt

SEQ ID NO: 437770 - DNA, 100 bp, Homo sapiens
cgggtcctcgtggatcagactacaggttcctgacggagacttcgcccttcatgtggtccaacctgggcattggcctagctatctccctgtctgtggttgg

SEQ ID NO: 437771 - DNA, 100 bp, Homo sapiens
tgaggccaaaggcagttgtattgaacacaccacagccatcagcactggaatgcaaagaccagaacaaacagaaggaagccagcagccaagccggggcagt

SEQ ID NO: 437772 - DNA, 75 bp, Homo sapiens
ggtccagcaggcggagcactgttcagtccagctgggagctccccgacctccaggagggcaagatccaagccatca

SEQ ID NO: 437773 - DNA, 100 bp, Homo sapiens
gcacgattggatttgccgaagattaggaagaatccactgatagaaatcatttccatcaataccggaccttagctggatctccaaaatacaagtgaatcac

SEQ ID NO: 437774 - DNA, 74 bp, Homo sapiens
ctcatggatgttcttcttcgagtatttgtagaagggtaaagtgttgagagaggagaaccagtgcattgctcctg

SEQ ID NO: 437775 - DNA, 100 bp, Homo sapiens
aggactccgggaacgccaccgactgcaagccaccagtcacaggaaaacctccctgccctgcccaaactctcttgatagagcccaagcagccaagaataaa

SEQ ID NO: 437776 - DNA, 100 bp, Homo sapiens
tcgggcaggccttccgagaggaacctctatgccgacatcgacgccgcctggcaggccctgcgcaccagacaagttggatggcttgaggactggtactaaa

SEQ ID NO: 437777 - DNA, 75 bp, Homo sapiens
agatctggcatctccactggacactggtcaggtattaggggaatattcctacctcttagataaggaaacgccaga

SEQ ID NO: 437778 - DNA, 82 bp, Homo sapiens
ccacactaacgagattcaagattatttgcaacagctcacgggagcaagaacgaattcagaaggagctggcggacatcacttt

SEQ ID NO: 437779 - DNA, 100 bp, Homo sapiens
ccaaagctccctgctgcataagaccttgtcagagatcatggaagggaagtggttgctgtgtatgttactggtgcttggaactgctattgttgaggctcat

SEQ ID NO: 437780 - DNA, 75 bp, Homo sapiens
gccacatactatccgtttgttcaggaaccaccagtgacagacaaagtggaagatgctttctacaaaggtgaactc

SEQ ID NO: 437781 - DNA, 87 bp, Homo sapiens
aatcatattatagatggagtaaaggttgctccttgagggcaggacagttcttatggctttatccgttgcgtaagcacagagaggtct

SEQ ID NO: 437782 - DNA, 101 bp, Homo sapiens
agtcaagtgtccattttctttcaactatatttgagcatacccagttttgtttggctatgccaccacagtcatccccagggtctatacatactatgtttcaa

SEQ ID NO: 437783 - DNA, 95 bp, Homo sapiens
gtgcctttgaccttctgccatgattgtgaggcctccccagccacgtgaaacttgagtgttgaaaagatagacctgaagggattatcacacacaaa

SEQ ID NO: 437784 - DNA, 90 bp, Homo sapiens
cggggacattattgcgcgtggaacggctgcttttggaaggcccagaagccatggcccactataagactgagcaggacgactggctgatca

SEQ ID NO: 437785 - DNA, 100 bp, Homo sapiens
aatctgtactgcctgaagccgaccatctgctccgaccaggacaactactgcgtgactgtgtctgctagtgccggcattgagccccaaaggcttcctggag

SEQ ID NO: 437786 - DNA, 100 bp, Homo sapiens
ggctcatcctacaccacctattccggcgaaaagcgaatgagaaggagcggcaggcagccctgcaggtggccgagggcttcatctcgcgcatgcagtacgc

SEQ ID NO: 437787 - DNA, 98 bp, Homo sapiens
aaaagaatcttttatggggggctgagttccatctggaatatgacaaattagaagaacggcctcacctgccatccaccttcaactacaaccctgctcag

SEQ ID NO: 437788 - DNA, 100 bp, Homo sapiens
atttgatctgaatagtattaaaataaaatacctggatgaggaagatgaagaggataacttttccagtaagaagtggaaaagggaagaaaaggaaagatgc

SEQ ID NO: 437789 - DNA, 75 bp, Homo sapiens
ctttccggtgtggagtctggagacgacgtgcaggacatggatttgattgacatactttggaggcaagatatagat

SEQ ID NO: 437790 - DNA, 100 bp, Homo sapiens
tggaggatgcgttccctggggtccgggcacaaatcctgaagagcccgtgggcgtggactgctcatctgtaaagaaagtggagacatgaccttgagatttg

SEQ ID NO: 437791 - DNA, 99 bp, Homo sapiens
gcgcgggcgggaagatggcggctgggttcaaggtatattcagttctcgaggagaaaagatccttatggcagatgctgatggagccacaaagtttccaga

SEQ ID NO: 437792 - DNA, 74 bp, Homo sapiens
aaaagcaccttggacaaattgaaaatgtttctacacctgtgctatggactcctggaactgcccaaattggagag

SEQ ID NO: 437793 - DNA, 75 bp, Homo sapiens
caccgctgccctcagctccgagtccagggcgagggtgcttcaaggatgaccgcatcgtcttctggacttggatgt

SEQ ID NO: 437794 - DNA, 101 bp, Homo sapiens
cacagtgaccattatccatgagaaggggagcgagctccattggaaagatgttcgtgaactggtggtagttaagtgggcagaccaacatccacctcagcaaa

SEQ ID NO: 437795 - DNA, 75 bp, Homo sapiens
gtcggaactagatctttctgacaacaaactcgaagactggcatgagtggaagatagatgataagcctgtaaaaat

SEQ ID NO: 437796 - DNA, 75 bp, Homo sapiens
acgacgggtttgtgagcctggactcgccctcctatgtcctgtacaggatgaagctggaggcagattcgtcgcttt

SEQ ID NO: 437797 - DNA, 75 bp, Homo sapiens
cttcactcccgctgtctcagcagtctacagcacgggcaagaatatcacggcatgggcatgagtagcttgaaactg

SEQ ID NO: 437798 - DNA, 51 bp, Homo sapiens
gaaggcgaatccccataagtaagtgtggcttcctgttgtggtgcatggccc

SEQ ID NO: 437799 - DNA, 100 bp, Homo sapiens
gaatatatcctctaaatctgatgaccgcctgtactttgtgatggagtacgtgaatgggggcgacctcatgtatcacatccagcaagtcggccggttcaag

SEQ ID NO: 437800 - DNA, 100 bp, Homo sapiens
gatgtggggcagatgctgatgggcaaactagatgaaccaaggatcgggatagcagtataaaattagaatcaagacagctgactgctcagcaggatgccat

SEQ ID NO: 437801 - DNA, 143 bp, Homo sapiens
cggtggataacgacaagaaaaacaatcgcttcaatgatgggaaggtggatcccgccgggaggtactttgctggagaagaaaatgtaattgctgttcctttgggaagtcgaagtgtgagaattacagtgaaaggacctgcccac

SEQ ID NO: 437802 - DNA, 100 bp, Homo sapiens
ctctctgaagaacctccgagtacgagcttgcattgaaaggctctagttacagtggacttcttgaacgacatcatattcacaccaaaaatgtagaacatat

SEQ ID NO: 437803 - DNA, 96 bp, Homo sapiens
gcgtggaacggctgcttttggaaggcagcagtacctgtccaaagatcgctttagttccaccttgctccacaagcagcacaaccacactggttggtg

SEQ ID NO: 437804 - DNA, 90 bp, Homo sapiens
gccgctgtgtggttgcaacggagataaattcccggaaccgcgattcggcgtgtcagctgggaacttctggggtaggacgttgtctgctat

SEQ ID NO: 437805 - DNA, 94 bp, Homo sapiens
gtgttccatggcagggaacttttggcagagctcccactacctgaagagttgagagaaatcattgagaagacaagagagatggagcagaacaatg

SEQ ID NO: 437806 - DNA, 100 bp, Homo sapiens
cgaccggcgacagcagccaggagtcatgagcgacagcggcgagcagaactacggcgagcgggaactcgtgtccctgaagccttgtaaagctgcggagctg

SEQ ID NO: 437807 - DNA, 90 bp, Homo sapiens
ctgctggttacctcgtgaggcgcctcagggtaaaccagacttgaatacaacattgccaattagacaaacagcatcaattttcaaacaacc

SEQ ID NO: 437808 - DNA, 88 bp, Homo sapiens
acctgctgtatctactcaagagtggaagttttcacaggtgatctttagacagtgactgagtatggatcatttgaacgaggcaactcag

SEQ ID NO: 437809 - DNA, 110 bp, Homo sapiens
ttttgttccagagctacatagaaatgtacaccctcgagagcggcctgattgggaagaaactcttagcgcaatggtgtgactgcacagaaaagttacaaaacaaatttgac

SEQ ID NO: 437810 - DNA, 100 bp, Homo sapiens
agggttacgtgaagtcaagtaaaatcgcacactggatacagttgatatattagttggatggcatatagatcatactcagaaaccttcgctcacgcagcag

SEQ ID NO: 437811 - DNA, 100 bp, Homo sapiens
ggacacttcactaaatcggcttcacagaaaggagtcactgccttctaacgaaagggcagtacagactttggcagaatggaacaaaagtgggacttttaaa

SEQ ID NO: 437812 - DNA, 127 bp, Homo sapiens
ttgtgtccccacggctctcctagggacagggaaactgagtcatatcaaggtggaaggcagctgaaggtttttcgttggaatatacgttgcacatttatggcgattctgagtgtgagggcagacttct

SEQ ID NO: 437813 - DNA, 98 bp, Homo sapiens
agcacttccgagccccgacccctgcagctgtgagtctgtagatggacggcagatccgagtagaccaggcaggcaagtcgtcagacaaccgatcccgtg

SEQ ID NO: 437814 - DNA, 100 bp, Homo sapiens
catcgacaaaagaaccattgaaaaatttgagaaggaggctgctgaggtgggaggattgcttgagcctgggaagtagaggctgcagtgaactataactgtg

SEQ ID NO: 437815 - DNA, 50 bp, Homo sapiens
cggagtcgtccggagccgctgcgcgcatatattcgatccaatcagacaat

SEQ ID NO: 437816 - DNA, 90 bp, Homo sapiens
aaacagaaagaatttactgacaatgtgagcagtgcttttgaacaaggcaaatcctgatcctaactgttgtcttggagtatttgggctgag

SEQ ID NO: 437817 - DNA, 100 bp, Homo sapiens
gtcgctgctttctgaggccacaggaaaggggccgtcggtcgccgccatgacagcgagcgaggcggagcaaatggcggatgacgccggtgcagcggggggg

SEQ ID NO: 437818 - DNA, 100 bp, Homo sapiens
tggggacctgggagccccctccgagttacacctccagagccaaaagtactccagcggaacatcttggcctcgaacccccgggtgacccgcttccatatca

SEQ ID NO: 437819 - DNA, 87 bp, Homo sapiens
gagtcgcgcggaggcggaggcttggggtgcgtataatttgctctgcgtcgactcctatatcaagcttatttttgcatcaacatcatg

SEQ ID NO: 437820 - DNA, 75 bp, Homo sapiens
atcattgcatttacctcggatcatggtcagcagcaaggacaagatggagtaaaagtccagcaagctactatagct

SEQ ID NO: 437821 - DNA, 50 bp, Homo sapiens
cctgcacttagccccgcgcccgagctcagcctgggcggcacagccagatg

SEQ ID NO: 437822 - DNA, 100 bp, Homo sapiens
ccagtggccacagcatctttgtctagccccagtgcagtttccaaccggaggccctatcggcagtactacgtggaggcttttggagatccttctgagagag

SEQ ID NO: 437823 - DNA, 99 bp, Homo sapiens
tcttttgcctggccgcaacccgccagcctgcaatgtcaaaatgcagatcttcgtgaaaacccttaccggcaagaccatcacccttgaggtggagcccag

SEQ ID NO: 437824 - DNA, 83 bp, Homo sapiens
gacaagtcctgcgcttggggatcctctgtacgcccgttcactgtttgcaatggattttggataaacaagatctgttgaaggag

SEQ ID NO: 437825 - DNA, 100 bp, Homo sapiens
taaaatgggctttggtggtacgctagaaataaagatatttgttcagtcgaatcaaggtgaagaggaaacaacaagaatttcatattttacttttattggt

SEQ ID NO: 437826 - DNA, 75 bp, Homo sapiens
caaccgcctacgagacactcaagctcaaagttatgaagtttcaggatgaattggaatctgggaaaagacctaaaa

SEQ ID NO: 437827 - DNA, 100 bp, Homo sapiens
gtgatggtgaaacttaagtggggaatggagtacaagggctatctggtatctgtagatggctacatgaacatgcagggtgtccgcaatgttgccagtgtct

SEQ ID NO: 437828 - DNA, 122 bp, Homo sapiens
cagtgaagctgcaataatgaataattcccaaggggatggtgaacattttgcacacccaccctcaggaagaccaacactgtcatctgaagttggaatcatcatctgtgatattgctaatccag

SEQ ID NO: 437829 - DNA, 50 bp, Homo sapiens
caagaccacagctggtgaacagtccagtgatgtaaattggagtcaaccag

SEQ ID NO: 437830 - DNA, 99 bp, Homo sapiens
agaaccggaggctggagagcaaaatccgggagcacttggagaagaagggaccccaggtcagtatgggaatcctttaaataaatatatcagacattatga

SEQ ID NO: 437831 - DNA, 50 bp, Homo sapiens
tagagcacatagctgctaagataagaagtgaccggggaggtgcgtcctca

SEQ ID NO: 437832 - DNA, 82 bp, Homo sapiens
tcaaagagaaaaggcaacatcctgtcacaggccatgctctggcaaaaacatattccaggaacctaagagcgcacaccaggtg

SEQ ID NO: 437833 - DNA, 76 bp, Homo sapiens
cctcggtcgcgagtatctccgtttcctggatgtgaacaggtggtgcggagctcctgtttgacggtattaagaaaca

SEQ ID NO: 437834 - DNA, 82 bp, Homo sapiens
cccaaatcccggaaactccagcgtgtctccagccgtgggagtgcatccgccccaacccttttccccctcgtctcctgtgaga

SEQ ID NO: 437835 - DNA, 100 bp, Homo sapiens
ttagaggtaggatcagtcctggctgctatactcaagcaggaaagatcttacagactctttcagcacctacgaaaaatttagaacagcaggtgaatcacag

SEQ ID NO: 437836 - DNA, 121 bp, Homo sapiens
cggatggtttccggcggagtgcgtggaggaggtccagtgtaagcccagggacagccaggcaggagcttctacctggccctctacaagcagatgagcttcctggagaagcgaggctgcccgc

SEQ ID NO: 437837 - DNA, 100 bp, Homo sapiens
gcaatgatgagaggatgtggtggtctactctgatgtcaatcttgagggctagcatacacaagctgagggagaatgtctttcaagagcatcagacccttaa

SEQ ID NO: 437838 - DNA, 100 bp, Homo sapiens
atgactgtccgaaacatcgcctccatctgtaatatggatgttggcaaaggatgaactgatgaccatacttgagaaatgtttcaaggtttttaagtcttat

SEQ ID NO: 437839 - DNA, 50 bp, Homo sapiens
attcccatcagtgagcattacagcgatgaagaacgatacagatacaggga

SEQ ID NO: 437840 - DNA, 96 bp, Homo sapiens
gatctacctaccaatcgtgaaaactatattcacaggcatgaaagaattactgatgtccttgatcaaaaaaattatgtggaagaacttaaccggcac

SEQ ID NO: 437841 - DNA, 100 bp, Homo sapiens
aaaacacagcagttgcaccctgttttgcaaaaaccatcagtgtttgggaatgattctgatgatgatgatgagccagatgaaaactcgctggatttttcct

SEQ ID NO: 437842 - DNA, 80 bp, Homo sapiens
tgctttataaaggaacaaattgtaggaccacttgaatcacctgtcgaagattcattggggtttttagatgcctgcgagaa

SEQ ID NO: 437843 - DNA, 100 bp, Homo sapiens
ccaccccgaagagttctacaacctggtgcgcttccggatcgggggcaagcggaaggtgatgcccaagatggaccaggttttgggatttgagattgacgcg

SEQ ID NO: 437844 - DNA, 100 bp, Homo sapiens
ttacagagagagccatttacaattgcacaaggtgaaggtgataaagtaaagtgctttcactgtggaggagggctaactgattggaagcccagtgaagacc

SEQ ID NO: 437845 - DNA, 123 bp, Homo sapiens
ggatgacagatgtgtggtgcacccagaggccggggaccttgccaaccctcccaagaagttcagaggtctgccatcatggatgttctcgcagaagcaaatggcacctttgccttaaaccttttg

SEQ ID NO: 437846 - DNA, 82 bp, Homo sapiens
cccgaagccgcgggtctccggccggcggcggcggcggcggcggcggcggcgcagggttatgtaccgaaggactctaccgtgt

SEQ ID NO: 437847 - DNA, 103 bp, Homo sapiens
ttgagcgctgctgctccgcggtggagtcaccgcaccgctcccgggatcatggtgttctacttcaccagcagcagcggaacactgtaacaacctctatgatgat

SEQ ID NO: 437848 - DNA, 98 bp, Homo sapiens
ttgcaaagagggctacgtgaaagatctgaaaggatccattccagatgaaaggctctatcgaatgtttgtcaataaaaaagtaacaatgttgagaccaa

SEQ ID NO: 437849 - DNA, 83 bp, Homo sapiens
cagaaattctggaacacctatatgcattttgaaagcgaagcagaagccgtagaatcagcggcgagcctgttgaaagaacccac

SEQ ID NO: 437850 - DNA, 83 bp, Homo sapiens
ggctccctaggcgtcccatctcggctggggccgggctggcggggccctcccgactgacttccccttgcagaacccagcgggtg

SEQ ID NO: 437851 - DNA, 100 bp, Homo sapiens
aagaaagtacggaccataataatcaggagtgaagtcccagggatattctgtgctgaaaattcaattctacagggagtggattatgactcacagtagcagt

SEQ ID NO: 437852 - DNA, 130 bp, Homo sapiens
caaggcttcatgaaatacttcagaaagacagagattttactgctgaagattatgaaaagatatgtgctgattagaaggctcacttgtgcagtgtggaggataaccagtgccttacaaaatggggtttggg

SEQ ID NO: 437853 - DNA, 82 bp, Homo sapiens
gggggaggcgacgctaagttgctgatcgtggcggagctgcagcagctgctgtgctgcacgcggcaagaggcgagggcccggc

SEQ ID NO: 437854 - DNA, 97 bp, Homo sapiens
ggaagccacgtgcagacatctacaaccttcgatctcctgacgaaaacaggaccttgccctgtcactcaggatggagttcagtggtcctatcatggct

SEQ ID NO: 437855 - DNA, 100 bp, Homo sapiens
ggacatcctggaagctgggaaatggtaaagtgaacagagttatctgtgacattccatcaggcacctatgtaacgaaatcataccgtaataactcaccatg

SEQ ID NO: 437856 - DNA, 76 bp, Homo sapiens
cgcgaggaggacgccgcgctcttcaagatgcggttcatgctattattcagccggcagggaaaactgcggctgcaaa

SEQ ID NO: 437857 - DNA, 53 bp, Homo sapiens
cgagttgatgccaaagttatcctgaatgtggtgaaggcatttgtggtcctggc

SEQ ID NO: 437858 - DNA, 87 bp, Homo sapiens
tgtctactttgacaactctccagattactgtgtcttggacaaggctgcagatatactttgcccatacagccctgaagtggatagaga

SEQ ID NO: 437859 - DNA, 100 bp, Homo sapiens
gggcagactggtagcaaagcccccacgcccagccaggagcaccgccgaggactccagcacaccgaggcacagacgcagtcttcagcaaggaagtgctggg

SEQ ID NO: 437860 - DNA, 98 bp, Homo sapiens
agcaattgttcaggcacgcagcatctaccccatcaccagaacccagcagcttgccagcatcgttgcagggtgatcagcccatgacctaaacctccaga

SEQ ID NO: 437861 - DNA, 50 bp, Homo sapiens
cgaaaaaaaccttcaggcggcccatggggccgttgctccagggagaactg

SEQ ID NO: 437862 - DNA, 90 bp, Homo sapiens
cagctacgccacccccgtggatctctggagtgttggctgcatatttgcagaaatgtttcgtagaaagtggctttaaccaagagagcagat

SEQ ID NO: 437863 - DNA, 100 bp, Homo sapiens
gactgtctcacattggccggcaacttgttccaggctgttttggagtcagcggaagatcaccaaggccagggagtggttccaccgcactgtgaagattgac

SEQ ID NO: 437864 - DNA, 98 bp, Homo sapiens
ctgcaaacgctctttgttccagagcatggagatcagcctcaggagtgcaagtagctgatgaagtatgtcgcattttttatgacatgaaagttcgtaaa

SEQ ID NO: 437865 - DNA, 87 bp, Homo sapiens
cgaagaggggcccgggccgggcccgctggcggagacaatgcagatcttcgtgaagactctgactggtaagaccatcaccctcgaggt

SEQ ID NO: 437866 - DNA, 100 bp, Homo sapiens
tggagatggagcaggtgtttgagatgaaggtcaaagaaaaagttcaaaaactgaaggactctgaagctgaggtaaaaagaacgtattctcatggtactta

SEQ ID NO: 437867 - DNA, 83 bp, Homo sapiens
gcgatttcctccgcctcttccaaagcgggacttccttccccgcggttcaggaatcgtcacccggcggcctctcattctgcagc

SEQ ID NO: 437868 - DNA, 83 bp, Homo sapiens
cgcaccgcggcttaaatgatgtattttgtgatcgcagcgatgaaagctgtcgcctggttgggcccggaaatgggacgtcgcgc

SEQ ID NO: 437869 - DNA, 100 bp, Homo sapiens
cgagagcctcggcgagccctctgcagcggagccccctgcccatttggttttgggtccaggtgcaggtacagcagtctccgcaacaggtctcggctcagct

SEQ ID NO: 437870 - DNA, 75 bp, Homo sapiens
ccctgaagttgcctcttctggtgtcaaagcttttggacattcctggggatgtgggggctcaaggttctgctgcta

SEQ ID NO: 437871 - DNA, 75 bp, Homo sapiens
ccggcaggactggagacacctgggagtcgcagcggtggtttgggatgcggtggcccactttaaggactacattcc

SEQ ID NO: 437872 - DNA, 100 bp, Homo sapiens
ctgagatccttaaagcaaaaccaggtttaagaagccaactagatgatcatccggattccatgataaagacagttcaggttggagttgcagcaaagataag

SEQ ID NO: 437873 - DNA, 89 bp, Homo sapiens
aagtccaagttcttcatcgaggaaatgatccgggacctgtgccaggcagacaaggcagtgacatcagtgtctggcccaggtgagcacct

SEQ ID NO: 437874 - DNA, 82 bp, Homo sapiens
attactccaggcccagcaacatatgagggccatgatccaaaggaaccagagcagttgagaaaactgtttattggtggtctga

SEQ ID NO: 437875 - DNA, 100 bp, Homo sapiens
gttactgtgagcaggacctggccagcctcctggagaatatgccaacacccttctcggaggctcagttcctgacggagctgaccagacttttccagaagtg

SEQ ID NO: 437876 - DNA, 100 bp, Homo sapiens
cacttcatgaacgccctgcgctacgatgccatgtcttcgtaacccaggaggaagcccacggcgtcctgcaccggcgccggcgcgccaacgcgttcctgga

SEQ ID NO: 437877 - DNA, 75 bp, Homo sapiens
actgtgaatcttccattgtgattggaccagtcctgcctctgttgtagaagacatgtggtgtatataaagtttgtg

SEQ ID NO: 437878 - DNA, 100 bp, Homo sapiens
gttgccattgccagtaagccaagagaggcaatgaatcgctccctggctaatgtgattcttggaggctatggcaccacttcaacagctggtggaaaaccca

SEQ ID NO: 437879 - DNA, 100 bp, Homo sapiens
gcggccaccgactactgtcagcagctgtgccaggtggagccatcgaagcccccacccacaggctgacagaggcaccgttcaccagagggctcaacaccgg

SEQ ID NO: 437880 - DNA, 74 bp, Homo sapiens
ggatgaggagcggctggagctgaggcaacagattggcaccaagctcaccagatcctgcccggcctgtacatcgg

SEQ ID NO: 437881 - DNA, 98 bp, Homo sapiens
gaacagctaatccgccgaagaaaagaacagaaactgttcatacttggtgcgctgtggactcttgtgataattaaccaagagtagctctatttgtccaa

SEQ ID NO: 437882 - DNA, 75 bp, Homo sapiens
actaagaatattattagcacaagagcaccatactttgaggtggacagaggactgcagaaaatcaacctatcctcc

SEQ ID NO: 437883 - DNA, 90 bp, Homo sapiens
cttccatggacaggacaactatgaccagcctcggagtgaatcagaactcattgatgaactttcagaagattttgaccggtctgaatgtaa

SEQ ID NO: 437884 - DNA, 100 bp, Homo sapiens
cggcggctggcgcttcctgcgcatcgtctgcaagaccgcgaggcgagacctcttattcccaggactccggctctctctgcttctgtttccggtggctgct

SEQ ID NO: 437885 - DNA, 75 bp, Homo sapiens
tcttcggtggactccttcggcagtccacccaccgccgccgcctcccagcattgtcccagatatagccgttggtac

SEQ ID NO: 437886 - DNA, 82 bp, Homo sapiens
cacactcccgcaggatcccgccattgttcagggtatccagtatttcattgagcacaagctgctgacccctgacgtccaggac

SEQ ID NO: 437887 - DNA, 82 bp, Homo sapiens
tttgcctcagatactattttgaagcgggctacattgagagacctcagctgattcgagcaaaagtgccaattgtgaagttcag

SEQ ID NO: 437888 - DNA, 100 bp, Homo sapiens
gaaaggatgacatatttttggacctgaaacagaaattctggaacacctatatgatgtccagctcgccgctgtccaagaaacgtcgcgtgtccgggcctga

SEQ ID NO: 437889 - DNA, 51 bp, Homo sapiens
agggaaccctggtcaccgtctcctcagatgaattttgataagaggcaacat

SEQ ID NO: 437890 - DNA, 100 bp, Homo sapiens
gaagggacacagtacggtagtcaaacccccaggtaagagcttctgttcgtgtgcagggaaagcagctcacagacgccgttaaaaccagcttcatctttcc

SEQ ID NO: 437891 - DNA, 101 bp, Homo sapiens
aaaatgcaagaagactgatggagcaggcttgcaatattaaagaagagttacaggccaacctggacctgatccaaacctacagaatgcatattgcccaagac

SEQ ID NO: 437892 - DNA, 50 bp, Homo sapiens
ctggaagtgtgactgacctaggatgtcccaggagagaggagtacagccag

SEQ ID NO: 437893 - DNA, 100 bp, Homo sapiens
tgcaggcagcaccggaggcccaggtctccgtgcagcccaacttccagcaggacaagggtggttctcttcccaaagtggaagccaaattcatcaattatgt

SEQ ID NO: 437894 - DNA, 74 bp, Homo sapiens
gagaaaggatttctaagcaggaactccccaggagtcagagtattcatcgaaaagaaagcacagctaacactttt

SEQ ID NO: 437895 - DNA, 98 bp, Homo sapiens
gtcgcggaccatgggcgacaaagggacccgccgcctgtcttggttagatggctctggattaggattctcactggaataccccaccattagtttacatg

SEQ ID NO: 437896 - DNA, 89 bp, Homo sapiens
gcctctacaccccggtgatcaagtatggcatttcaaatatagatacaaccattgaaggaacgtcagatgacctgactgttgtagatgca

SEQ ID NO: 437897 - DNA, 90 bp, Homo sapiens
tgagctttggctactccagtttcccacgacacgtggatggcgttctgtgcttggccgacatcctgaccgacaacagccactcagaggcca

SEQ ID NO: 437898 - DNA, 100 bp, Homo sapiens
cgcgacgtcgtgtcgagttcccaaaaagctccgcaggggctgtagggaggatgacgtagctttgccaaagacttagaagctaagcagaaaatgagcttaa

SEQ ID NO: 437899 - DNA, 100 bp, Homo sapiens
ggaaaagactcaggacggacaagcacagtcttcggaagagctcacaatgtctctctgcaccaagctccatgactcaggatttgcctggagttcctgggaa

SEQ ID NO: 437900 - DNA, 102 bp, Homo sapiens
cctctacttagctcagcaattcttaccttctgaaaatgtgtgtctgacatgcaagctcagtggggcagagacccgtggattgctgtgccctgccctccggac

SEQ ID NO: 437901 - DNA, 83 bp, Homo sapiens
caccatgccgctcctaagcctgcacagccgcggcggcagcagcagtgagaggcctccaggcccaaggtcagcatcccactgtc

SEQ ID NO: 437902 - DNA, 104 bp, Homo sapiens
actttcctccttctcaaattgcagcaggagctttttgcttagcactgaaaattctggataatggtgaatggctgcaagctttcttcctggtggcagatgacatc

SEQ ID NO: 437903 - DNA, 83 bp, Homo sapiens
ggcctgggcgctccggtggcggcggagttggaggacgagtaagtcgtgaattaaattatactcgccagaagattggagaagag

SEQ ID NO: 437904 - DNA, 75 bp, Homo sapiens
caccaagaagtaccaaacccagtgccagatagactagaagaagctttggatccagatgaagaacgtcgaatccgt

SEQ ID NO: 437905 - DNA, 52 bp, Homo sapiens
atttcgttcacccctgtcaacagtcaccaggagactaaagtccatcaaaaac

SEQ ID NO: 437906 - DNA, 98 bp, Homo sapiens
tttataccaggatttgcatatccttcaagatgcctgaagacaatcggaggggtatacaagcaagcgagatcatggaagggaagtggttgctgtgtatg

SEQ ID NO: 437907 - DNA, 100 bp, Homo sapiens
tagtaaaacagtatctagatatttctctccattccaaaaggattttcctatctgaatgaaagaggttatgtagcaaaacaattggaaaagtggcacaggg

SEQ ID NO: 437908 - DNA, 100 bp, Homo sapiens
cggcagcggttggaggcttcgcccggctttgcagcggggacttcggcggcggcgcctcaggcacctcggcccggtccaactcggtcctggcctgcaaccg

SEQ ID NO: 437909 - DNA, 100 bp, Homo sapiens
caaaagaaacactggcttctctccttcagctccaggctagcccgacttaaatctctgcaatggctaacgaagcttatccttgtccgtgtgacattggcca

SEQ ID NO: 437910 - DNA, 75 bp, Homo sapiens
ctctctatccatctctcgaagacttgaagagtctcattctgttaccaggctggaatgcagtggcgtgacctcagc

SEQ ID NO: 437911 - DNA, 74 bp, Homo sapiens
agagttcgaggtggtgggactcaccgctctggccagggtgcttttggaaactgctgacttgctcatcagttttg

SEQ ID NO: 437912 - DNA, 48 bp, Homo sapiens
catcatgactcaagaatcaagagatgtgtatatctcatgattgatatg

SEQ ID NO: 437913 - DNA, 90 bp, Homo sapiens
caacttcgctgtggtgaagctggggcggcaccggatcaccaagacggagtgggtgaatttgtaagtgatgtcctgctagttccagaaaag

SEQ ID NO: 437914 - DNA, 76 bp, Homo sapiens
gttcaagcagctgcttgccggccccaacacggaccttgaactgctttctccaggggttaaaaataagaattttaaa

SEQ ID NO: 437915 - DNA, 75 bp, Homo sapiens
ctctgccggacatggtggtgtcccacctttttgggaaggatggcacaacagcattattgaaagcagccaacaaag

SEQ ID NO: 437916 - DNA, 75 bp, Homo sapiens
gctgccagcacctgcaggcggagaagaagaagatgcagcagaacatccaggtttttgaattccagttgacatcag

SEQ ID NO: 437917 - DNA, 90 bp, Homo sapiens
gcccgctaggcgcgccgtccccagccccgccgccggccctcggtgcgcccggccgcctgcacccccagagcgcatcagcgaggaggtggg

SEQ ID NO: 437918 - DNA, 74 bp, Homo sapiens
gatcttcgagttcaaagagaccctcggaacgtgctggagaatctggtaaaagcaccattgtgaagcagatgagg

SEQ ID NO: 437919 - DNA, 85 bp, Homo sapiens
ccttcctgctgcggttcctgcgcgcccgggatttcgatctggacctggcctggcggagctgaagaagcaggtggagagtgccgag

SEQ ID NO: 437920 - DNA, 75 bp, Homo sapiens
gtgggggtgtgcaaacccgagagaactggacaacaagggaggtgtcacagttttccatttagatcaacaacttca

SEQ ID NO: 437921 - DNA, 83 bp, Homo sapiens
tggaacagcacccccttctttaaggggtcttgctcctcagaacaaaccagaattgcagaaggtgatggaaaaaagaaaacgag

SEQ ID NO: 437922 - DNA, 100 bp, Homo sapiens
gcggcttctgttattaggaatgccaaacaaccccttcttatcatcgggaaagcgagtggcatcgtgttccagtgggggactggtttggcatcatgtggac

SEQ ID NO: 437923 - DNA, 80 bp, Homo sapiens
ctggaaccctggggactacgacgtccctcaaaccttgcttctaggagataaaaagcctgacatttaccccggtaactgct

SEQ ID NO: 437924 - DNA, 75 bp, Homo sapiens
cgaaaagtatgagcccaaccagcagtttctggagcgaggtgggagacctccacagaacccttccagcaagctgtc

SEQ ID NO: 437925 - DNA, 82 bp, Homo sapiens
ccgaaaacccggagtgccccgcacagatgactacattgcaattggagctgatgaggaagaattaggatctcaaattgaagaa

SEQ ID NO: 437926 - DNA, 100 bp, Homo sapiens
agcagaaggttgacagcttcagtaagatctcaagagagcgagaagactggaatcaggaattgaatgatctggcacgggaccctccagcacagtgttcagc

SEQ ID NO: 437927 - DNA, 87 bp, Homo sapiens
gagccaaggaataaacatgcaatgaacccaaaaggaataactgaagtgaagtgatggactccgatttggagagtagtaagacgtgaa

SEQ ID NO: 437928 - DNA, 50 bp, Homo sapiens
ctcaacctcaaatcagtactgaggggttttactatgcatcacctacacgc

SEQ ID NO: 437929 - DNA, 100 bp, Homo sapiens
ggcaggaaaagcctactacgatggagtggccaagatcggtgagattgccactgggtcccccgtgtcaactgaactggggatacccacccaccatcccagg

SEQ ID NO: 437930 - DNA, 100 bp, Homo sapiens
atccaatggatgcaggaaaactggaccttatggattttctgaacccaaacggtagtgactgtactctagtcctgttttacaccccgtggtgccgcttttc

SEQ ID NO: 437931 - DNA, 100 bp, Homo sapiens
cagattcagtggcctgcattgcatttaaatcaaacggtattgagatggattgggttatgaaacataatggtccaaatgacgctagtgatgggacagtacg

SEQ ID NO: 437932 - DNA, 98 bp, Homo sapiens
atatgacatcagtcagttgtttgatttcatcgatgatctggcagacctcagctgcctggtgaggagatgaccgccgggttctgctatggcacatggaa

SEQ ID NO: 437933 - DNA, 74 bp, Homo sapiens
tgttgtgatcgcagtgggcgagggagtcagcgaccgcaaggtcaaaatgcagatcttcgtgaaaacccttaccg

SEQ ID NO: 437934 - DNA, 100 bp, Homo sapiens
ccctctagccccgctaccggactacatgtcggaggagaagctgcaggagaaaggaaccggctttacagttgatgcctttcagtatggcgtggttgaaggt

SEQ ID NO: 437935 - DNA, 90 bp, Homo sapiens
gcggaggcttcggttccggtggcggcgatggcttctctttccacctggagcaggaccgtgtttcttcgcctcgcctccctggtggtcctg

SEQ ID NO: 437936 - DNA, 100 bp, Homo sapiens
gtttgaagcaacaccctagatggatgtacagccatcaagaggatcttaaagtgtggtctttagtggaaaaaaagagactccagtacttcacttatttggg

SEQ ID NO: 437937 - DNA, 100 bp, Homo sapiens
aagatccattggtaaattgatcaggatttttggcctaccctccaaagaaaagaaaccaaggtgtatgttggtaacctgggaactggcgctggcaaaggag

SEQ ID NO: 437938 - DNA, 75 bp, Homo sapiens
tcacatcgtgcgggaagtcgacaggccgggatccagtgaacctatgggtcgtggaacaaaagttatcctacacct

SEQ ID NO: 437939 - DNA, 90 bp, Homo sapiens
agcaaataaaagagccctgcaatttgaagatacatgagacagcagccaaacccccagatggagtttcactcttgtctcccaggctggagt

SEQ ID NO: 437940 - DNA, 100 bp, Homo sapiens
gatgctgaatgtgcggaatctgtttgagcagcttgtgcgccgggtggagattctcagtgaaggaaatgaagtccactgtgggctgtttagtgccatgcac

SEQ ID NO: 437941 - DNA, 74 bp, Homo sapiens
agaagttgagcactcggtcccaaaaaggcaaagtactatactggcaattgctggagaagattttgcaattgttg

SEQ ID NO: 437942 - DNA, 76 bp, Homo sapiens
cagcagggttttttgaagaatcaaatattcactgggatacaaatgatctccagcaccctgccggtggcactactga

SEQ ID NO: 437943 - DNA, 82 bp, Homo sapiens
ccgggagttcaagaagaacactccagagcaaattgtggctactaatttgccccctgaagatcaagatggctctggggatgac

SEQ ID NO: 437944 - DNA, 51 bp, Homo sapiens
ttaaagaacatcttcgaaaacatacagacaggaacacagaggacgatcgcc

SEQ ID NO: 437945 - DNA, 97 bp, Homo sapiens
gaaagaggagcggcagagcctgctggggcagcacattccccctgttcccaggtgggtccagagatgtcgcctgggagccagggcctggagttctgtt

SEQ ID NO: 437946 - DNA, 75 bp, Homo sapiens
tgtggatcgctgtgatcgtcacttgattcttggtgccaccattgagaactccaggattgtcctgcagatcgacaa

SEQ ID NO: 437947 - DNA, 85 bp, Homo sapiens
atctcctcctccactgccactacagggaagtgcatcacatgtcagggttgcttttgtaatgaagaagcacttaaatactcatcta

SEQ ID NO: 437948 - DNA, 51 bp, Homo sapiens
agaactgcgactcagcatgcagaaggtcaaaatgcagatcttcgtgaaaac

SEQ ID NO: 437949 - DNA, 82 bp, Homo sapiens
tggaagcgtggccggcagcgtcccggacgaggaggtgtctgacttccagcaactgctggcctgtgccagggtgcaagctgag

SEQ ID NO: 437950 - DNA, 51 bp, Homo sapiens
ccgaagagcggcggcggcagcggcgaaatgcactcggtgatggaaagagag

SEQ ID NO: 437951 - DNA, 99 bp, Homo sapiens
attatgtgcaacattaggccttgcccagattagagtgcttttgatggaacttgaagaagcaaggggtaaccacgtaattcgtgatgaggaagtaagctc

SEQ ID NO: 437952 - DNA, 75 bp, Homo sapiens
cattctcgctaacaactgcccagctttgagggagaaacaaaggcagcgctgccctcgggggagcattggccctgg

SEQ ID NO: 437953 - DNA, 100 bp, Homo sapiens
gaggagccgatactgagcttcttcctatttgccatggcccttgaagaaagctgttaggatgatgggagcacctaacctaatagcagacagtatggaatat

SEQ ID NO: 437954 - DNA, 95 bp, Homo sapiens
ttcccttcctcaaataaggaaattgacacctggcgtgacatttctcttgggaagttgtgcatctgacaggaatatagtactgtacgatatgaggc

SEQ ID NO: 437955 - DNA, 83 bp, Homo sapiens
gtcgagcttgagcctggcgggccgcggagcgttcacctgcggccgggagaggctgggaggcggcagaatgcagccagaggagg

SEQ ID NO: 437956 - DNA, 74 bp, Homo sapiens
agccgcccttatcgatgcaagatcaaggctcctggttttgcccatctggcttcacaggctgctcaagaagccga

SEQ ID NO: 437957 - DNA, 100 bp, Homo sapiens
gttgagttaattaaccaaaaagttccccagtcagtgaccaactcagtgccaaaaccaggctacggtgttcagtatgattacttagatccccgtcagatca

SEQ ID NO: 437958 - DNA, 82 bp, Homo sapiens
cctcctcttccagaatgcctttgcgcagccccctcggaaaaccacactgagagttgcattaaaaaccagcatgtaggtattt

SEQ ID NO: 437959 - DNA, 100 bp, Homo sapiens
ctgtgtccctgaccatggctccctgcagtaccctttaacggccaagaataaggagacgggtgctttggctgcggccaaagtcattgaaaccaagagtgag

SEQ ID NO: 437960 - DNA, 87 bp, Homo sapiens
tttaaagctgagctgcgaggaaaatggcggcgggaggttgatccccatcttggtgaatgggatgaagtactcggaaattgacatcat

SEQ ID NO: 437961 - DNA, 96 bp, Homo sapiens
ggtgatgatgccctattcgacagaactgatattttatattgaaatggatcctccagtgattcgcctttgccagtctcatctcgtgtctgctttgtt

SEQ ID NO: 437962 - DNA, 82 bp, Homo sapiens
ttcacttgtgtgcggaactcctcggaaccatgggtaaatgttgtccagactcagagtttaagaaacactttcctgttggaaa

SEQ ID NO: 437963 - DNA, 100 bp, Homo sapiens
tccattctgcatatccagaggttctcctcatgactcagagcccctctgagaagagaaacaggctgatgtttcagacaccgcaggaaatgggcttaatagt

SEQ ID NO: 437964 - DNA, 90 bp, Homo sapiens
tccagaaactgtgccaggatcacgtgcagttttgaagactgtaagaagacctttaagaaacatcagcagctgaaaatccatcagtgccag

SEQ ID NO: 437965 - DNA, 100 bp, Homo sapiens
ctggtttgcatgaagtcgagtagttcagttgtggaattggttatgctactgtgttctcagtgccagcgccacagcccttcaatcattttggttgctatcc

SEQ ID NO: 437966 - DNA, 82 bp, Homo sapiens
cgcggattcgccgaggcaccgaggcactcagaggagaataccgtagcagtaggcaggacagttccaattcaacaaaaacctc

SEQ ID NO: 437967 - DNA, 100 bp, Homo sapiens
ctggaaactggatgcagcaaggaaataggatttaaccgctctctgcctcccaggtacgtacctgtgggcatcatgttccttgttggaagcaagatcgtgg

SEQ ID NO: 437968 - DNA, 75 bp, Homo sapiens
ttccttttggaggatccgtcttcaggcagaggaggaagatgactatctctttgatgatcctctgccaataccttt

SEQ ID NO: 437969 - DNA, 100 bp, Homo sapiens
taggtgaagaccatgtgattctgttatggaggttttgatgactatggtggctataataattacggctatgggaatgatggctttgatgacagaatgagag

SEQ ID NO: 437970 - DNA, 100 bp, Homo sapiens
accttccggcccgactcagccgatgccctgtgcagagcccgagtgcgcgctcaggaacccgagttcagctacggctgcgcagaaggcagctgctatcccg

SEQ ID NO: 437971 - DNA, 100 bp, Homo sapiens
caggggtgtcggacgcagggcgctgggccgggtttcggcttcggccacagcgatctgaagataaaggttggggacaggcacatcagtgctcacaagtttg

SEQ ID NO: 437972 - DNA, 80 bp, Homo sapiens
cgactcggtcctgtttcgacagcgaacatgtcgcggcctgtcagcaaaatgatgcttcaacacccaggccaggtctctgc

SEQ ID NO: 437973 - DNA, 100 bp, Homo sapiens
gagcagcagccctgtccggcatctgtcttgagctcccagcaagtgccgcgtatgatgctgtccttgacagaaatgtggccattaagaagctcagcagacc

SEQ ID NO: 437974 - DNA, 82 bp, Homo sapiens
agtacctgcagaaggtctctggagacatcttcagcagccttgttgtcctcctggtgcgaagagctcggccgcctgctgctgc

SEQ ID NO: 437975 - DNA, 101 bp, Homo sapiens
aaaaatcgccaaaaattacttggagcaaagggcagtcggcggagcttcgccaaggctggcgcagtcggagaaccaggtgcatcagcgcattgcggagctga

SEQ ID NO: 437976 - DNA, 100 bp, Homo sapiens
gggagcttccgggagggcggctcgcagctctacattaatcatactcctccaccactgtccaagagtaaggagagagaaatggacaagaaagatttggaca

SEQ ID NO: 437977 - DNA, 98 bp, Homo sapiens
ggagaaatgcctactgagtttagggaattgcttgctggaagaaatgatggtgcacattcaggttcccgagcacaaacatcaagataacgttcactgcc

SEQ ID NO: 437978 - DNA, 92 bp, Homo sapiens
ccaagatcgtgaagcccaatggcgagaagccggacgagttcgagtccggcatctcccagggaaatcctcattgacgattcaatttgttgaag

SEQ ID NO: 437979 - DNA, 74 bp, Homo sapiens
cctcatggggaaaatctccccggtgactttcagatttttgatgaaattgagtcatgaaactgtaaccattgaat

SEQ ID NO: 437980 - DNA, 100 bp, Homo sapiens
ctgggtggtgatcgtggcaggttcaaatggctggtataattataggcaccagggctgcacaaagatgttcagggataactcggccatgagaaaacatctg

SEQ ID NO: 437981 - DNA, 83 bp, Homo sapiens
tctcaatatctgtcttcggtggactccttcggcagtccacccaccgccgccgcctcccagaatcagcccagacaaccgattct

SEQ ID NO: 437982 - DNA, 100 bp, Homo sapiens
ttcaatattggaagcgctttgatttacagcagctgcagagcttggggcttccttggtcgcacccaccacctgcctgcccactggtcagccttcagggacc

SEQ ID NO: 437983 - DNA, 100 bp, Homo sapiens
caggcagggaccatccagatgctggaacaggtgtgctgggcatcaaggtgaagatcatgctgccctgggacccaactggtaagattggccctaagaagcc

SEQ ID NO: 437984 - DNA, 100 bp, Homo sapiens
actgcgtggagtcagcctggctgccggcttgttcttactggccctgagtctttgggggcagcctgcagaggctgcgaagaaattttggaatccataagag

SEQ ID NO: 437985 - DNA, 100 bp, Homo sapiens
ttttggaggccggggccgcgctgagggcgcccagctggaaccagtgaccttccgggatgtggctgtggactttacccaggaggaatgggggcagctggac

SEQ ID NO: 437986 - DNA, 75 bp, Homo sapiens
gctggctctgctgctgccgccggcgaaggaggaggcgttgccgggatgccaaagaagaccatgaaagaacacatc

SEQ ID NO: 437987 - DNA, 74 bp, Homo sapiens
ctgatcactactgacttgttgcatgccagagagtattggtggatcttttggtatctttgatgagttcaagaaca

SEQ ID NO: 437988 - DNA, 50 bp, Homo sapiens
gcacctcccgcgccgcacggtggacgaggatttttagactctgaggagca

SEQ ID NO: 437989 - DNA, 74 bp, Homo sapiens
ctccctcaagtttcatttgtgaaggcagcacacttctgcttttgttccttcatcaggacgaatttactcttttg

SEQ ID NO: 437990 - DNA, 100 bp, Homo sapiens
agactgtcgacctaaagcctgactggggcaaggttctagagccttctttccgccaggcctttcccaataccaaccgctggttcctcacctgcattaacca

SEQ ID NO: 437991 - DNA, 83 bp, Homo sapiens
ccgaggagtagtcgctggagtccgcgcctccctgggccgggcacaacttctacaacgtggacatgagctacttgaagaggcta

SEQ ID NO: 437992 - DNA, 100 bp, Homo sapiens
ggaaaatgtgataaaaacaaggtggaagattcttccaaggaaccagtgcgaagcctcatctagttgaatctgaagatgtggacctgctgatgaagagggc

SEQ ID NO: 437993 - DNA, 75 bp, Homo sapiens
gttatcttctggaaatgagtcttcaagctctgtaagacatgcaagttggacaaatgcaagtaaaaagcaacgtga

SEQ ID NO: 437994 - DNA, 78 bp, Homo sapiens
ctctgtgctgcgtgtggtggaaggttggatggcaagcatgtggtgtttggcaaagtgaaagaaggcatgaatattgtg

SEQ ID NO: 437995 - DNA, 121 bp, Homo sapiens
gccaacgtgaacctggcatatctgggcgccaagccgcggagcctccagacgggtgctggagaatctggtaaaagcaccattgtgaagcagatgaggatcctgcatgttaatgggtttaatg

SEQ ID NO: 437996 - DNA, 75 bp, Homo sapiens
tcttttaacatcacatcacatgctgacagcacaagaagaaaagaatggtttgtcattcattgaaacttcggccct

SEQ ID NO: 437997 - DNA, 100 bp, Homo sapiens
cttcggcggcggcgcctcaggcacctcggcccggcacaacattctgaaattttttggttattgtaatgatgttgatcgggagttgagaaaatgcctgaag

SEQ ID NO: 437998 - DNA, 75 bp, Homo sapiens
accagctcatgggcacggctcgggacggttctccttactatgacaatgtccgccccctctcttaccctgattcgg

SEQ ID NO: 437999 - DNA, 100 bp, Homo sapiens
tgccgtcgagatcgccgccgacgccgctgctgtggccgctgctgctgctgctgctcctggaaaccggatcttcatcatctgggccatcagcagttggttc

SEQ ID NO: 438000 - DNA, 109 bp, Homo sapiens
gtggaatatgccaaggaaaaactggagagcttcatcaaaaatagtgatagctttgataaggctgacgcgccactatgtagcgggtttcgggcgggccacgcgtgcggga

SEQ ID NO: 438001 - DNA, 75 bp, Homo sapiens
atttacgcgcacgttggaaccgaagagagctctgttgttgcatttggcctgtcactgctcctcatcctcctgagc

SEQ ID NO: 438002 - DNA, 143 bp, Homo sapiens
ccggcgcgtaccgccccagcccgggtgcccacactggccgtcccggccatctcgctgcccgacgatgtccgcaggcgactgtgccctgtccacggtgcctcctgcatgtcctgctgccctgagctgtcccgagctaggtgaca

SEQ ID NO: 438003 - DNA, 103 bp, Homo sapiens
gaggcgggaaaggagcacggcctgaagccggtggtgggcgaagtgtacgatcaaggttgcacactgggccacagaggatccagcaaggatgaagaaatggagc

SEQ ID NO: 438004 - DNA, 75 bp, Homo sapiens
gggagataaagctgtgtactgccgttgttggaggtccaaaaagatggagtgaaggtacctgagcgcaggaaccat

SEQ ID NO: 438005 - DNA, 75 bp, Homo sapiens
actgtgcgctcgatccagcaccatggggaagcgggacaatcgggtgtccaagtggtaagaagttcagaagcaagc

SEQ ID NO: 438006 - DNA, 75 bp, Homo sapiens
ccaggaatgctgatgccagcggtgcctgtcaccgcagcggacatttcatatatatggatttcacagctacactcg

SEQ ID NO: 438007 - DNA, 75 bp, Homo sapiens
ggacgtcaccctggtcgctcagctgtccatggacaggaatgtctgaatctgaacaggctcttaaaggtacttctc

SEQ ID NO: 438008 - DNA, 140 bp, Homo sapiens
gtacccaatgcctgtttattcaccatcaacaaagaagaccacacactgggaaacatcattaaatcgtctgaatttcctgctgctgttcacaaagatgctttttatctttaactttttgttttccccacttccgaccccgg

SEQ ID NO: 438009 - DNA, 98 bp, Homo sapiens
ctagaagaataagagatgtgattaatgtattccaccacctccgccagttaagaggaaaaagtgcctcaattgatgacaaggttggtagacatgttaaa

SEQ ID NO: 438010 - DNA, 115 bp, Homo sapiens
gggattcgcgctgctgggcacccacggagcctccggggctggttcgtgctggccgtgggcagcgccgtctttgatgccatgttcaacgggggaatggccacaacatccacggaga

SEQ ID NO: 438011 - DNA, 101 bp, Homo sapiens
ttaaaagccttttgtgctgatcaacttgatgtctttttacaaaaaggaaatctaccactgtcgaagacaaataaaatatagcaaagacaagatgtggtatt

SEQ ID NO: 438012 - DNA, 100 bp, Homo sapiens
caataattgcatttgtgagactggctcctgctgtcctccttacagggttgactgaggtccctgttccaaccagagagcacgttttcaatatcataggagc

SEQ ID NO: 438013 - DNA, 51 bp, Homo sapiens
cgctctgctgcccgctgtgagggaaaaggagtgagttgaatgaaataaaag

SEQ ID NO: 438014 - DNA, 74 bp, Homo sapiens
cgccacgggttggagacgcagcaccggctgagcggaaggaggagaaaaaggcggctgcccctgctcctgaggag

SEQ ID NO: 438015 - DNA, 100 bp, Homo sapiens
tacaggccagtcgtgtctccagtgatgtcattgaccagaaggtgtatgagatccaggacatctatgagaacaggctgttttggagtcagcggaagatcac

SEQ ID NO: 438016 - DNA, 90 bp, Homo sapiens
caagcagtattaagagtaaatgggcgccagcctcccagtgatggacctgactgaactccccaagtgcacggtgtgtctggagcgcatgga

SEQ ID NO: 438017 - DNA, 75 bp, Homo sapiens
tgtttgtgcaactacaggccaaggagacccccctgacaacatgaagatgaagatctccttcaacgacaaaagcct

SEQ ID NO: 438018 - DNA, 98 bp, Homo sapiens
atcaaccatagctgtgacccaaattgtgaaatgcagaaatgattgcgcagtctctttgtggagaggacttgatcattaaaggaatcagcgttcatata

SEQ ID NO: 438019 - DNA, 100 bp, Homo sapiens
gcctcagtatggaggccttccagcaccgttctgtgtcctggtcgcagttcaacaagaatgactcccggcgtggctcgggctccccggaagacacccctcg

SEQ ID NO: 438020 - DNA, 100 bp, Homo sapiens
gggaggtacagtgtgcatcctacaacaacaagccattcatgggccggttttatgagtgggaaccatttgcagaaggcatcaagcatgatggaaccatgtg

SEQ ID NO: 438021 - DNA, 82 bp, Homo sapiens
tagaggtggcgctcatgcatatttgagacaacatctggatggttggggagaacggcctgttgactggggctgcttttaaccc

SEQ ID NO: 438022 - DNA, 98 bp, Homo sapiens
tactctgttatagataaacaaggtaaagtaccttttattcatgtgggaaatcaagtagtatcagaacttggtccaatagtccaatttgttaaagccaa

SEQ ID NO: 438023 - DNA, 90 bp, Homo sapiens
gcctcgactacggcgagcctgagcgcggcggcggcccacgcgcagcgacagggagaggccacggcatatgcctccaaggacggggtcctc

SEQ ID NO: 438024 - DNA, 49 bp, Homo sapiens
aggaaaatgctacccagcagttcaaggccctttctggttactgtggctt

SEQ ID NO: 438025 - DNA, 97 bp, Homo sapiens
ggcaagcgctgttcaaacccatgaaaaatgagccgtcagactgctacagcattacctaccggtacctcgaagtgtccaccatcccagagggtgcctg

SEQ ID NO: 438026 - DNA, 50 bp, Homo sapiens
tggtagctgggatgttagggctcaggttgaccccctgtttacagtgccag

SEQ ID NO: 438027 - DNA, 100 bp, Homo sapiens
agagacttcagctactcttacaagcaatagtaccactggcacttctataggaggtgatctgtgaaaatggttcgctattcacttgacccggagaacccca

SEQ ID NO: 438028 - DNA, 100 bp, Homo sapiens
tgggaaggtggagccaccagcctctccttgtggtgaactatgacaatgtagtggacacaggttctgaaacagatgaggaagacaagcttcatattgctga

SEQ ID NO: 438029 - DNA, 95 bp, Homo sapiens
ccggctccgtcgtggaagcaggactgcgccgcgtcttcctcaagcggagctggagtttgttcagatcatcatcatcgtggtggtgatgatggtga

SEQ ID NO: 438030 - DNA, 83 bp, Homo sapiens
agcagattcggagaattatgagacctactgatgtccctgatacagatggccgccctgctcccccaatgaaaggccagcttcga

SEQ ID NO: 438031 - DNA, 74 bp, Homo sapiens
tattgtcttcatactgcctctggatgttagtacgatatgtgacaacagtaacatcatggtgcaggagactgacc

SEQ ID NO: 438032 - DNA, 85 bp, Homo sapiens
tcgtcacccgcaggatacccgccgagggtactgggcctaatcgctacgtgcctctttggctatgatgcctatgtcaccttccccg

SEQ ID NO: 438033 - DNA, 90 bp, Homo sapiens
aggtcacaaaggatctgcttgatatgattgggcagagcggcttgggtaaatccaccttaatcaacaccctcttcaaatccaaaatcagcc

SEQ ID NO: 438034 - DNA, 100 bp, Homo sapiens
ccgtgaccgagagcgtgaccgagagcgcgaatatcgtcatcgttagaagagcatgaataatctttcatttagtgagctatgttgcctcttctgctgtcca

SEQ ID NO: 438035 - DNA, 125 bp, Homo sapiens
gcttaggaccgcctgcccggggcaaccccgaaccaagctttagccgccgaggccgcgtgtcccaaaggccaggagctcttgtccctggcaaagcgaaagcgcagtgactctgaggagaaggagcc

SEQ ID NO: 438036 - DNA, 100 bp, Homo sapiens
gccgggagtcgctgggtgcgtggggctgcctcgccgcgtctcgccacgctggtgctcaagaccgaatcggctgggcttttggcctaggattagaaaggct

SEQ ID NO: 438037 - DNA, 93 bp, Homo sapiens
cgacgcggggccatgtgcaggaccctaacgacaggcgcctccggcccatttacggcgagaaccactgtctctgatcaacgtgcggaagaggaa

SEQ ID NO: 438038 - DNA, 83 bp, Homo sapiens
gcctggcaggggaaggatcgaggtactccaaagattcaggtttactcacgtcatccagcagagaatggaaagtcaaatttcct

SEQ ID NO: 438039 - DNA, 96 bp, Homo sapiens
gggctacgagcgtctcctgaagatgcaaaaccagcgtggcggccgcgctctcttccaggacatcaagaagctgatcgagcccctcaccaatctcat

SEQ ID NO: 438040 - DNA, 100 bp, Homo sapiens
ctcgcgcccgcgtcgcggcagcacctgggcagccccgcacgccgtgcgcgtcccgagcccgcggggcagctaccgctcgtgttttacctcaatcatatat

SEQ ID NO: 438041 - DNA, 75 bp, Homo sapiens
caagagtgtaataactttctaagaacgaagcaacagccaactcagtttataaatccagaaacacctggctatgtt

SEQ ID NO: 438042 - DNA, 75 bp, Homo sapiens
cgaggggcccaggcagagcccggagaaaagccacatgggtgctttcttctgcgacctggtactcatctacctcat

SEQ ID NO: 438043 - DNA, 80 bp, Homo sapiens
gtctcggagaccccgcgccgacggctgctcaaacatcagggtaagaatgattgatgttggctgatattggagtgctcatt

SEQ ID NO: 438044 - DNA, 98 bp, Homo sapiens
tgacagtagattacatcttcttctcagctgagtcctgtgagaatgggaacagaactgaaagttactgtggcccatgtcctaaaaactggatatgttac

SEQ ID NO: 438045 - DNA, 100 bp, Homo sapiens
ggcctactcgcccgccaccctgcgctgccgccgctctgaggagttaaagaacgaagcaatatccttagaagaaataagaattagagtagtacaaatgctt

SEQ ID NO: 438046 - DNA, 95 bp, Homo sapiens
cctacagaaacaaaatgtcaacaaattgatgggtagctacagcaagctgggtagcaggcagatccaaaggatatcatgaagtttccagggccttt

SEQ ID NO: 438047 - DNA, 75 bp, Homo sapiens
ttaatgtcctggaattttctagttacagaatgtctgaaggggacagtgtgggagaatccgtccatgggaaacctt

SEQ ID NO: 438048 - DNA, 49 bp, Homo sapiens
gtggccgtggaggcagaggtggcatgggctatatcgagaagtttactga

SEQ ID NO: 438049 - DNA, 74 bp, Homo sapiens
agccctggagaagctcaaaggcaaaggtgtgactgaagaaatatcaaatgtttcctagtaagacagcaactcag

SEQ ID NO: 438050 - DNA, 50 bp, Homo sapiens
gtatgaacaaaaccagtctgatgttgcacagccagagaacaacacatcac

SEQ ID NO: 438051 - DNA, 108 bp, Homo sapiens
cagggagctcacatttctcatattgctcaacaggatgctggaggtcagcagattggcttcttgctaggaagctgtggtattgccttagctcttaccagtgaagtttgt

SEQ ID NO: 438052 - DNA, 82 bp, Homo sapiens
aggtgctatgctgtgggccccgctcagaagaagctcattcacacagaagacccatttaatgatgaacatcaggagaggcaag

SEQ ID NO: 438053 - DNA, 99 bp, Homo sapiens
tcagaactcacgtccgtcgctgctgcaaccccaagatgtcggagacacggtggaaacgcttatggaagttctactacatcaccctgctacgagaccccg

SEQ ID NO: 438054 - DNA, 100 bp, Homo sapiens
gtccagggatctgaaaccactttgcagtcgacatactcggataccagcgctcagcccacctgtgattatggacggtaataacggaagaattcaaagtgcc

SEQ ID NO: 438055 - DNA, 100 bp, Homo sapiens
cgccaaggacatcaagaagatcttggacagcgtgggtatcgaggcggacgacgaccggctcaacaagctcagagtcaagatctccactgaagttggcatc

SEQ ID NO: 438056 - DNA, 100 bp, Homo sapiens
gcagtcaaccaatagatgatgaaatttatgaagaacttccagaaatacactttcgggaaatggcctctaaatcctggctgaattttttaaccttcctctg

SEQ ID NO: 438057 - DNA, 75 bp, Homo sapiens
aaagattgagctgcactgtattcctgtgccttagctggaccaattattgtggagccacatgtcacagcagtatgg

SEQ ID NO: 438058 - DNA, 75 bp, Homo sapiens
cagttcgctacacagcaatgcatcgagggaaaagcttcactctgaccatcactgtcttcacaaacccaccgcaag

SEQ ID NO: 438059 - DNA, 90 bp, Homo sapiens
aaccaaatggtatccatgtccatgagccctatgagtttgtctctctggaatggctgcaaaagtggttggatgaatcaacacctaccaaac

SEQ ID NO: 438060 - DNA, 90 bp, Homo sapiens
acggccgctgccagggtccttagcacagacattttgacggagatgaagccttatctaaatcagtgcctgtcacagtggatgatgatgatg

SEQ ID NO: 438061 - DNA, 99 bp, Homo sapiens
accaccatgacccacttcaacaagggcccttcctatgggctctcggccgaagtcaagaacaaggtaatctatttaaagaagacaccagaagaagcctac

SEQ ID NO: 438062 - DNA, 75 bp, Homo sapiens
gaaagaacatgataattctgtcaaagaagagggctaattgactataattttcattgcttccggaaggccattcat

SEQ ID NO: 438063 - DNA, 76 bp, Homo sapiens
cacacctgtaatcccagtactttgggaggccaaggcctgaagctgcccagcaggcattccaaggcctgggtcctgg

SEQ ID NO: 438064 - DNA, 100 bp, Homo sapiens
cttctttaaaatccccgacgactcacctgattaacctgctgcagttctgaccctgccaagctaaagtctccagtgaatattgaattgctgaggattttgg

SEQ ID NO: 438065 - DNA, 75 bp, Homo sapiens
gttccaggagccgaatcagaaatgtcatcctcaggcacatggacacagccctttgacctggcaagcaccagggag

SEQ ID NO: 438066 - DNA, 50 bp, Homo sapiens
cgctgctgctcgttcgagtcgcagtttccaacatggctagatccatcaga

SEQ ID NO: 438067 - DNA, 75 bp, Homo sapiens
cgactgtaagcaatctacgaagaccgaggaaaagctgcgggaactctaatgaatcattgattgaccagcactatt

SEQ ID NO: 438068 - DNA, 83 bp, Homo sapiens
cttcactcgcactatccttgatgctagttttttgtagcatcagatccaacagttaaaacagatcgactgtggcacgacaagta

SEQ ID NO: 438069 - DNA, 75 bp, Homo sapiens
gaaccgaggaacgaagaaacagacattcaacatgattgcatttgaatgaaggtggtgtttttaaggctcatctta

SEQ ID NO: 438070 - DNA, 75 bp, Homo sapiens
cgcagccctgaagttgcctcttctggtgtcaaagcttttggacattcctggggaggaagcagagttacgcagtga

SEQ ID NO: 438071 - DNA, 75 bp, Homo sapiens
gtgagaaggtggtgaggcttcccgtcatattccagagtgaattactggaactgaaacggcagcagcaagagcaag

SEQ ID NO: 438072 - DNA, 107 bp, Homo sapiens
tggaattgttacttagtgctgccacctgctggatgttaaaaggtgaccgggttattgatgtgggatctgaatggcgaactttcagcaatgacaaagcaacaaaagat

SEQ ID NO: 438073 - DNA, 75 bp, Homo sapiens
ttttagggtcctttatatagaagggagagtaggctttggatgaagagtatttaaaagtagatgcccaatttggag

SEQ ID NO: 438074 - DNA, 90 bp, Homo sapiens
tattagctttagtgaaatgggctaataatgctggcaaagtggaaaaatgtgcggataccatacttgcagagctccttcagatacataaag

SEQ ID NO: 438075 - DNA, 100 bp, Homo sapiens
aacagacaagacacttttcagaaagacagggggcagcactgaaatacttaccaacgatcgtcaacgatgtgaaattggtgtttgatcccaaagagctcag

SEQ ID NO: 438076 - DNA, 100 bp, Homo sapiens
ctcaaataatgtgggagaaataagtgtatccaccagactcacagttttgcgggacctagaggatcaagacataatgggagcatttttagacaagccaaag

SEQ ID NO: 438077 - DNA, 80 bp, Homo sapiens
aactgaaatgttagattttggtacactaagaacacaaggtcacagatgtgacattgatgtgtccactgaagccatgtatg

SEQ ID NO: 438078 - DNA, 87 bp, Homo sapiens
acgccccctatcctatccgcaaacacaatcagaaacggagactgttcatctgtttatcccagctctatcagtcggtgccatcatcgg

SEQ ID NO: 438079 - DNA, 97 bp, Homo sapiens
gggactggaaccatctcagaagccatgcccctcaggctggaacttgccctgtctcctcgcagatgaggcaaaggaagcgtccagaatctgggagcat

SEQ ID NO: 438080 - DNA, 115 bp, Homo sapiens
cggtgatcatagccatccagaccttctgctaccagaaaaccttctccaccagaatccagctcacgctggcaaatgtgcaataccaacatgtctgtacctactgatggtgctgtaa

SEQ ID NO: 438081 - DNA, 90 bp, Homo sapiens
cacagtgaaaaatcgaatgattcgactgcatcctgatggaacagttctctatggactccgattacgtgtgaaaatgaacttgtgcaaacc

SEQ ID NO: 438082 - DNA, 99 bp, Homo sapiens
tgtggctgaaaaggaacgagcagtgatggctgaaaaggatgctttagaaaaacacgatcagctcttagacaggagagaaaccttacaagtgtacctggg

SEQ ID NO: 438083 - DNA, 100 bp, Homo sapiens
agtaccgagtgggcaccgaccgcacgggcttcaccttcaaatacaggtaaactgaaggaacttaatggaactgcacctgaagagaagaagttaactgagg

SEQ ID NO: 438084 - DNA, 83 bp, Homo sapiens
gattccaagtaactcttatttgggtatgcagaagttggctagtcaatacctgaagagagattggcctggagtaaaagctgatg

SEQ ID NO: 438085 - DNA, 82 bp, Homo sapiens
gacgctaaacgtgccctactctgccccgggggagaggcctggctacagcaatatggctacctgcctcccggggacctacgta

SEQ ID NO: 438086 - DNA, 100 bp, Homo sapiens
cccctaccacaccggggaccctcagctggacacggccatcgggcagtggctccgctgggataaggtacggttcctggagcagcagaacaagatgctggag

SEQ ID NO: 438087 - DNA, 130 bp, Homo sapiens
ccggcacggcgatgggttctcgggcctccacgttactgcgggacgaagagctcgaggagatcaagaaggagaccggctcctaaatctgtcattgttggattaattaaagaaatgattgccaagtttcaag

SEQ ID NO: 438088 - DNA, 97 bp, Homo sapiens
tgagatatgatgattttgaagtcatttcacatcgaagccatgatttaaatatcggcgttaagagtactgatgaaatctccatctccagcattacacc

SEQ ID NO: 438089 - DNA, 100 bp, Homo sapiens
gaggcggacgcgcggctgcgtcagggatcgcccggagcccacacccgtcctccgctctgcatttccctacgacgtccatcctaccccagacggcctccac

SEQ ID NO: 438090 - DNA, 106 bp, Homo sapiens
ggaacctgtgcctcgagaggtattaggcagtgctacaagggatcaagatcagctccaggcctgggaaagtgaagatgttgtagaagatgtaaaagaggagtgtcaa

SEQ ID NO: 438091 - DNA, 76 bp, Homo sapiens
tcggctctcatgttcctccatgataaaggaatcatctataggtgaaaagagatttgaatgcccggaatgttctaaa

SEQ ID NO: 438092 - DNA, 101 bp, Homo sapiens
gagagaagtttaagagaagaaatggacatgattgcctaaatcagccaaacacagggcagtggagctactgctgtggttcaggcagccctatgcaaacccag

SEQ ID NO: 438093 - DNA, 100 bp, Homo sapiens
tccaagccctcaaagtttgaaaggcaaaattctagtgaaggtactaggttttgacaagcttgcatcatgcgtgagtataagctagtcgttcttggctcag

SEQ ID NO: 438094 - DNA, 82 bp, Homo sapiens
cttggcgccaccgcctcatgcactgtgtagataacgaaggaggcccaacttcattcaataaggagcctgacggatttatccc

SEQ ID NO: 438095 - DNA, 82 bp, Homo sapiens
cgcttctggcagaccgaaccggcgctcctgcccccggggtgacgcgcagctcccagccgaatgatatggaacctagcaaagc

SEQ ID NO: 438096 - DNA, 75 bp, Homo sapiens
taacagaactatcttcaacttttcaggtatagtggaggattacaagccaccgttctacgatgtggttcccaatga

SEQ ID NO: 438097 - DNA, 88 bp, Homo sapiens
ggtgtgcaggtttcggcacatggagattgatggcagctgcaatgactctccgcacggtattattgtcattgcaagcactattggcagc

SEQ ID NO: 438098 - DNA, 90 bp, Homo sapiens
atcgtcaccgtgtgggagcgggagctgcggaaagatactgaacggctgtattcagtggtgtttcaagaaatatgtaatcgctatgacaag

SEQ ID NO: 438099 - DNA, 83 bp, Homo sapiens
ctgtgaggggattcacttgtgtgcggaactcctcggaaccatgtacctggagtagaacagaaaaattattatgtctgtgttcc

SEQ ID NO: 438100 - DNA, 80 bp, Homo sapiens
ggaatgtggtcgacgagaagccccaacagcacggcgtggcctctcagcctcgggaaatcctcattgacgattcaatttgt

SEQ ID NO: 438101 - DNA, 108 bp, Homo sapiens
ggaggttcgagcgctgttctcgctccggagccgctgcacatttcgcactttgatatgcctcatgatattgttgcatctgaagatgggactgtgtacattggagatgct

SEQ ID NO: 438102 - DNA, 51 bp, Homo sapiens
agatcatggtggccaaacccacagaaatcttttgatgcacatcccaggaag

SEQ ID NO: 438103 - DNA, 80 bp, Homo sapiens
ttcagaagagccaaggaataaacatgcaatgaacccaaaaggtaagactttgaccccgacgcaggcttcagtgattgccg

SEQ ID NO: 438104 - DNA, 75 bp, Homo sapiens
ctgcagccagctggcccccagggccctgcagctcagcgatgcctgccgctttcaagaggatcaggagatggctcg

SEQ ID NO: 438105 - DNA, 97 bp, Homo sapiens
ggttcactgtgcatcgcccactccagaagtagcatggaaatggagggcatcttcaaccacaaagcaattttcagaagcggcccaactgtatgaaaaa

SEQ ID NO: 438106 - DNA, 75 bp, Homo sapiens
tccatccaaaaccggcagctgttagccgagcaacatgtggagagggccaaatgtgaactgtgttgacagcactgg

SEQ ID NO: 438107 - DNA, 75 bp, Homo sapiens
aacggagtgaccaagagcaggtttgaggtgatttgtggagctatgatttcttcagtggtgaatttgtggtgtcac

SEQ ID NO: 438108 - DNA, 75 bp, Homo sapiens
actatattgatacccttggaagaattatgaatttaacagtaatgctggccctggccaacgtcaacattgggagcc

SEQ ID NO: 438109 - DNA, 100 bp, Homo sapiens
gcacaccggcgagaagccgttcggctgcaccatctgcggccgggccttcaccactaagggcaacctcaaggaacgagcatccggcacccttgtgcatgta

SEQ ID NO: 438110 - DNA, 137 bp, Homo sapiens
ggtggtcaccatcggcaccgtgctggtgcccatcctgctggtcaccctggtcttcaccaagaacttcgcaggtcaaaatgcagatcttcgtgaaaacccttaccggcaagaccatcacccttgaggtggagcccagt

SEQ ID NO: 438111 - DNA, 100 bp, Homo sapiens
ctgatttaatttcggaatacattcgaggccctgtgctaagttaggttatgcaatggtctctgcaagatggtttattcttgaattggacctttttaagact

SEQ ID NO: 438112 - DNA, 75 bp, Homo sapiens
aaacattaccgtcatattccacccattactaagggattgtgggactttaccaaatcggtttgtaataacacctag

SEQ ID NO: 438113 - DNA, 83 bp, Homo sapiens
cccagcccatgggctccctgaggcccgcccagccgacacaatgcagatcttcgtgaagactctgactggtaagaccatcaccc

SEQ ID NO: 438114 - DNA, 100 bp, Homo sapiens
aagtatatgcagaggaggtcccacaggctcctgccctggactaccgagatataaaccacagtacttcaggatcccattatgaaaattcccagcggggacc

SEQ ID NO: 438115 - DNA, 83 bp, Homo sapiens
ccgaaggggacggacgtcctcccacgtaccatttagaaggtgtcgtgaaaactacccctaaaagccaaaatgggaaaggaaaa

SEQ ID NO: 438116 - DNA, 75 bp, Homo sapiens
gcctccccagccacgtggaacttgtaaacaggaacatcgataagtagtgtaaaaacttgcacaatgaaatccgaa

SEQ ID NO: 438117 - DNA, 74 bp, Homo sapiens
gcccgtcttattgatcctggctttggaatatataagcatgtagagcgcatgaagtacaggacaataaagcttcc

SEQ ID NO: 438118 - DNA, 83 bp, Homo sapiens
ctgatggctgacatggtgtatgtcacacagtctattatcctcccagtccacaacgctgaaccgtggctggacgaatgtttgag

SEQ ID NO: 438119 - DNA, 80 bp, Homo sapiens
ccaggctctgcagcggcaacccccagcggcttaagccatggcgaggatacgaagcgttttcggcttcctgcccggagctg

SEQ ID NO: 438120 - DNA, 101 bp, Homo sapiens
gtttcaggcttaaacatcacagcagataatgaagctgattttttagctgaggcggtggaagcagggcagagccgaagcagcccgctcctcaagaggccggt

SEQ ID NO: 438121 - DNA, 76 bp, Homo sapiens
cagattcgcagtggtcgcttcttctccttgaataacattgctatggctttggaagttacttaccgggaacgactgt

SEQ ID NO: 438122 - DNA, 82 bp, Homo sapiens
ggccgtctccttaacaccgaacaccgggcactatggcagacaaagttaggaggcagaggccgaggaggcgagtctgttgggc

SEQ ID NO: 438123 - DNA, 100 bp, Homo sapiens
ggccctgctggaccagctcatgggcacggctcgggacgggtctggaaaaactgcagcatttctgttgcccatcttgagtcagatttattcagatggtcca

SEQ ID NO: 438124 - DNA, 50 bp, Homo sapiens
aagttcaaggagtctcttgttaattgccggtggtggtgtgcacattgagc

SEQ ID NO: 438125 - DNA, 100 bp, Homo sapiens
gaaagcacatgtttcagtgccactcacataagaagtgcccggccgccatggcatcagatgaaggcaaactttttgttggagggctgagttttgacaccaa

SEQ ID NO: 438126 - DNA, 115 bp, Homo sapiens
ggccgatcctcgcgtgagacagatcaagatcaagaccggcgtggtgaagcggaaaacacagatcctggtgccgaacatgaggacagggcaggccgaaggagaaagtggaaggagg

SEQ ID NO: 438127 - DNA, 100 bp, Homo sapiens
ttctaggctcaacagaatattccacctgccttgacatgtggtgttccattgcctaaagaggagaacatttctgctcccttgatctccagctccccagtga

SEQ ID NO: 438128 - DNA, 90 bp, Homo sapiens
gggtggagtgaaggtcacgtcgccatggactccctggaggaaaagcggaagcggcagcggtctgaacgcctggaacggattttccaactt

SEQ ID NO: 438129 - DNA, 76 bp, Homo sapiens
ttcaatcctggagcagcttctgtatgggaaccatgtagtgggttggatggcaagcatgtggtgtttggcaaagtga

SEQ ID NO: 438130 - DNA, 82 bp, Homo sapiens
aagaagtacaaggaatttcagaacagtagttgatgtcacttggcgatattcctgcaaacatgaagaggtgattgccagaaga

SEQ ID NO: 438131 - DNA, 100 bp, Homo sapiens
caagataatcatcgctggaataatagggacctgtctgaatgtagttggtagctggcagtgttgtgatggcttttgaagaagtatgcccggacagaataga

SEQ ID NO: 438132 - DNA, 82 bp, Homo sapiens
cggcgtcactgacgcttcgctccggtcctcggatcccgagcgcggggaggcagaccgctgccaatttgtggtgtctgaagac

SEQ ID NO: 438133 - DNA, 100 bp, Homo sapiens
gttttgtgcagattgccagtctaaaggataaggaagcctgtgtgggtaccaacaatcaaagctacatctgtgacacaggacactgctgtggacagtctca

SEQ ID NO: 438134 - DNA, 101 bp, Homo sapiens
tatctcccccatctcattgccacggctgaaccctccttctcaatcttggaacagcacccccttctttaaggtcactctggaatatagacccgtgatcgaca

SEQ ID NO: 438135 - DNA, 100 bp, Homo sapiens
ctgtattgtcctgtggaattttcaaaggagatcgtctgtgtcccttcatacttggaattatacacctgtaagatcggaatggagtgaacttcaaagtcag

SEQ ID NO: 438136 - DNA, 75 bp, Homo sapiens
ggtgcgggcctgcgcctccctcggctcctggcgcgggcctcggggagagggtgaaagaaaagatgttgtcccggt

SEQ ID NO: 438137 - DNA, 75 bp, Homo sapiens
aacaggaggtggtagagggcatggatatctctactcgctccaaagtctgcgctcctcagaccaccggcaggtgaa

SEQ ID NO: 438138 - DNA, 89 bp, Homo sapiens
ttttatcttgagaacatggtgtctggagttaaaggctggagtatagtggcatgatcatagatcactgcagcctcaaactcctgggctca

SEQ ID NO: 438139 - DNA, 100 bp, Homo sapiens
cacccgccggccccatgaggagggacgtgaacggagtgaccaagagcaggtttgagactgtgccctgtccacggtgcctcctgcatgtcctgctgccctg

SEQ ID NO: 438140 - DNA, 82 bp, Homo sapiens
ccgagggacaccgcagtatgaggcagagctctactgagatgaagaaagaaaaagaatacctgctcagctccagagacacgta

SEQ ID NO: 438141 - DNA, 83 bp, Homo sapiens
caccgacttcctggacagcgggcacggtcactctgtgagactgctgggtcagaaaaaggataatggaaggcggcttgggggag

SEQ ID NO: 438142 - DNA, 75 bp, Homo sapiens
actgtcaggtacctcaaagcgattgtcttcaaggaaagtggtgttaaatacaaatggcctatactacaatctaga

SEQ ID NO: 438143 - DNA, 100 bp, Homo sapiens
cggagaaattcctttggaagttattccgtagcataagagctgaaacttcagagcaagttttcattgggcaaaatggggttcttgggtgtctctggggagt

SEQ ID NO: 438144 - DNA, 73 bp, Homo sapiens
cttatttctgcttactcacttgtagatccagagaaagccaaagcatcaaagacacagctctccccttctatca

SEQ ID NO: 438145 - DNA, 99 bp, Homo sapiens
ggtgggcgtcgtggccttcggcctggtctacgtgctgaaccacgctgaggggctgggagccgcgcacaccaccatcacctccagagaaagatggaggag

SEQ ID NO: 438146 - DNA, 75 bp, Homo sapiens
agaccactggccttgtgggattggctgtgtgcaatactcctcacgagtggattgtattacacagagcatgaatat

SEQ ID NO: 438147 - DNA, 78 bp, Homo sapiens
gaaaaacggccaagaggcagacctaggaaatgggcatcattcttaacaaagaagttaaatattggtgggaaaagagta

SEQ ID NO: 438148 - DNA, 100 bp, Homo sapiens
gggatcgtgaccgagaccgtgaccgagagcgtgaccgagagcgcgaatatcgtcatcgttagaagaggcccccagaatgagaagtgacaacaaggaaaat

SEQ ID NO: 438149 - DNA, 101 bp, Homo sapiens
gcagtttcgatggaaaatgaagctaataaggcagtggattttacaacagtcaaattcttgcttcaggattctagaagtttgttacatgctttcagtacaag

SEQ ID NO: 438150 - DNA, 75 bp, Homo sapiens
ctcggtattccccttcctgctagtcctggtggatctgcagtacgaagccatcgactacagtgacagcgccatgct

SEQ ID NO: 438151 - DNA, 88 bp, Homo sapiens
cgacaagccgctggcagccgcggatctcaccgccgctcagggagtggagtcaacatatcaatggagcaagtcacagtcgtcgatgcca

SEQ ID NO: 438152 - DNA, 75 bp, Homo sapiens
gcttttgcagaatgacccctgtcttttaccagaggttatcctcttcacgcccctgaagcctactttccttatttc

SEQ ID NO: 438153 - DNA, 83 bp, Homo sapiens
cccttggagccatcctctacaggacccgctttctaccattaagacatccggctccgggttcgagcagagtactgcgagcatgg

SEQ ID NO: 438154 - DNA, 96 bp, Homo sapiens
ccgcggctccggccctggccccgatggctctgtgcaacggagactccaaggtgaaagaactcttttcttctttgggagtcgaatgtaatgtcttgg

SEQ ID NO: 438155 - DNA, 97 bp, Homo sapiens
aggtgaagagctgattgaggctgccaagaggaacgacttctgtaaggcctccgcccccgccgcggaccctccgcggtacacctttgcacccagcgtc

SEQ ID NO: 438156 - DNA, 100 bp, Homo sapiens
caaggcactggatgatgcaatcaaagctcgacttctcaatcccaagtggccaaagattggtgaaagacaacaagtgttagtaacagaagaatcttttgat

SEQ ID NO: 438157 - DNA, 76 bp, Homo sapiens
agctttctccttctggtgtggggcccgagatccaaaaagttggcagctcttgcagaagccttaaaggaagtctccc

SEQ ID NO: 438158 - DNA, 75 bp, Homo sapiens
tatgtccaccagtatagctctgggaaatttgacaatgcactcctgaagagttgagagaaatcattgagaagacaa

SEQ ID NO: 438159 - DNA, 75 bp, Homo sapiens
gagaagatccaggcctcagaggaggagaaaggccggagccagccgagaattcagaaggagctggcggacatcact

SEQ ID NO: 438160 - DNA, 51 bp, Homo sapiens
tgcccacactgcaaaaaaatattcgagtggtgaatgcatttcgtagttctt

SEQ ID NO: 438161 - DNA, 75 bp, Homo sapiens
aaaaatctgggtctttctaaaaactgctttggatccttctaaagtaaatattctggtacctggtgctggactagg

SEQ ID NO: 438162 - DNA, 75 bp, Homo sapiens
aagacatgtggtgtatataaagtttgtgatcgttggcggacattttgcgagtgatagacagccaagcagagaaac

SEQ ID NO: 438163 - DNA, 82 bp, Homo sapiens
gattctaaggcaacacttccttgaagaaacaagcttacaggtatgtgaaacaagaagttctgggtcctttcatcataaggga

SEQ ID NO: 438164 - DNA, 100 bp, Homo sapiens
tgccctatatggaggccttcatcctggagaccttccgacactcttccttcgtccccttcaccatcccccacaggttcgaacctctgacatgggtggctat

SEQ ID NO: 438165 - DNA, 75 bp, Homo sapiens
tagaactggaaaaaaacatgtcggatgaagagaaacaggtacgttcttcagatgtgtcatggtctgatactcgta

SEQ ID NO: 438166 - DNA, 80 bp, Homo sapiens
tgtcaatgccattgaattctccaacaatggaggccagtggctggtctcagcagttggaattgatcacaccttttcagttg

SEQ ID NO: 438167 - DNA, 96 bp, Homo sapiens
atcagtggttgtcccaatatccaagaagcagtagagggtgccatgcacattcagatgcctcctatgtggacccacttggccctcaaatagaacgac

SEQ ID NO: 438168 - DNA, 83 bp, Homo sapiens
gctctggacaagctggaatgcatccaagagaatccctcaacatgctgcacttgcacctcctgcgccgccgccccccatccaag

SEQ ID NO: 438169 - DNA, 98 bp, Homo sapiens
gactgttagtggagaatagccagcaggctgaaagtttagaagagaagaatatggctaaaattcatcgtggtcagctggagaagttgaaatcacagtgt

SEQ ID NO: 438170 - DNA, 80 bp, Homo sapiens
ctcgcttgcagttcagcgaccacggtgatctttagacagtgactgagtatggatcatttgaacgaggcaactcaggggaa

SEQ ID NO: 438171 - DNA, 90 bp, Homo sapiens
atttgtttcccttagccagcccgagcaagtaaagattgtgaaactggaacgccaagctgaagaagaacgaatacggaagcacaaagcagc

SEQ ID NO: 438172 - DNA, 100 bp, Homo sapiens
gagaagacaaagacctgcacagaaagatccaccggatcattcagcaggactgccagaaaccaaatcgtaaaatgtcggttccaggaccttaccaggcggc

SEQ ID NO: 438173 - DNA, 100 bp, Homo sapiens
gggtcgtgggggctgactgtcgctctgcctttgacaggagaggctgcttcttgtagagatgccagatatacgaaacccagaaggaactcagtacagttcc

SEQ ID NO: 438174 - DNA, 75 bp, Homo sapiens
ccctcctccaccagaggactgggaggagcatgtcaacagggtgtgctgatctgcaaaccctggacacaatgcagc

SEQ ID NO: 438175 - DNA, 75 bp, Homo sapiens
gcactttccgcctcctgggttcaacgggacgaccctgggacagtctccactggggcagatccagctgaccatccg

SEQ ID NO: 438176 - DNA, 100 bp, Homo sapiens
tttcgatagagacgttttccggagggattccatcataggattttttatcaagcagaaatgcatcgaacaacgagaatcaagatcactgagctaaatcccc

SEQ ID NO: 438177 - DNA, 95 bp, Homo sapiens
ccggaaatggttgtggactacgtctgtgcggctgcgtggggctcggccgcgcggactgaaggagactgaagtgttcaagaaggaagtgtatcttc

SEQ ID NO: 438178 - DNA, 74 bp, Homo sapiens
caccttgctggacatgtcctccattttccaccagaaggccgaaaagaacattctagtatgccagtagaaaaaaa

SEQ ID NO: 438179 - DNA, 83 bp, Homo sapiens
ccaggccggggaggtggtggatgtcatcgagaagaacgagagcgggggatatgagactttctactcggaatatcctgagtgtt

SEQ ID NO: 438180 - DNA, 98 bp, Homo sapiens
ctgaactttctggggaacagaccagttgtgttggacaagctcaggatgatcattgagagcatgctgacctcctcctccacgctcctgtccatgagcat

SEQ ID NO: 438181 - DNA, 74 bp, Homo sapiens
ggcagagtgctgatgtgaaaaataccacgacaaaaccaccctacagaaggtataggcacagaactcaaagctcc

SEQ ID NO: 438182 - DNA, 74 bp, Homo sapiens
tgaagacttgctagttaggattttattactggcagcatgtatatctttttacgctggggaggaggaggaggaag

SEQ ID NO: 438183 - DNA, 100 bp, Homo sapiens
cgggcctagaactccaaggagaaaggcggcgatatggagtctggagaacggttaccatcctcagcagcctcctctactacaccaacttcatcttcgacac

SEQ ID NO: 438184 - DNA, 100 bp, Homo sapiens
aaagaaatcccctctcactctccaattctgttgttgcctccatgcgccaatccaaaccgaaagccagaagagctattctcaagctggaataactgagact

SEQ ID NO: 438185 - DNA, 100 bp, Homo sapiens
agggagaagccaaacctaagcggcggaagaaatcattatttagaagcaaggtccttgaatgagcgagattatcgggaccggagatacgttgacgaataca

SEQ ID NO: 438186 - DNA, 98 bp, Homo sapiens
gttcattcgggagcaacactgtctgttccggagcatcccccagccagatggagaaggtgtgggcccatcgctggatggatctgtcagaacacggcttt

SEQ ID NO: 438187 - DNA, 50 bp, Homo sapiens
ccagcagccgcgcttcagccagcacccccaaattcagaaggagtcccagt

SEQ ID NO: 438188 - DNA, 96 bp, Homo sapiens
gcttgtggagctgccgcttgtgtctggcatgatatgattctataacagactcttccagaaatgatatgaagaggaaatttgccctgacaatggaat

SEQ ID NO: 438189 - DNA, 100 bp, Homo sapiens
ctcccaagaagaataagcacaagagaaagaaggttaagctggctgtcctgaaatattataagatggcagaaacggtggacacaagcgaaatggtcaacgg

SEQ ID NO: 438190 - DNA, 100 bp, Homo sapiens
gtggtgggtggaaaagtgttcgccgagtcgtcctcttgagttctggcgccttgactactgggaagatgacttgcggcgccggcgacgatttgtgcgtaac

SEQ ID NO: 438191 - DNA, 90 bp, Homo sapiens
ccaggacagaaatcattatcttagccaccagtggcatggcagagagaaatgctaattttgaagcccttcctgaggattggagagcaaggc

SEQ ID NO: 438192 - DNA, 100 bp, Homo sapiens
gctgcttgtagaatatgacttaccagcactcctggaccaagagctctttgaatgttttactgtgcctggctaactatagtcgagggggtgatggtcctat

SEQ ID NO: 438193 - DNA, 95 bp, Homo sapiens
attcaagaagttgaaaaacgcttttcacgtcacctggagagatgcacagagataatagtagcagaatttcacaaaaaaatcaaagaggcatttga

SEQ ID NO: 438194 - DNA, 100 bp, Homo sapiens
attgactcagatcgacattactgctcatgcctaaccttctatgaggcagagatcaatcttcaggctggacaacgttcatggctctcgggtagaacctagt

SEQ ID NO: 438195 - DNA, 83 bp, Homo sapiens
gcggccggagcgggcggctgagacaaaggcgacggtatcatgatattagctggtttgacatcaagtcatttgtgagtcatcag

SEQ ID NO: 438196 - DNA, 100 bp, Homo sapiens
gtgcgacctctgtggcgacttcatctggggcgtcgtgcgcaaaggcctgcagtgcgcgccaatggctgccatccggaagaaactggtgattgttggtgat

SEQ ID NO: 438197 - DNA, 101 bp, Homo sapiens
gcagctgactgcgaccttgagtctcagcttctgcatctgtgaaatgaagatactggtctgccatatccagaagacccagcagtttataaaccactctccca

SEQ ID NO: 438198 - DNA, 134 bp, Homo sapiens
ggggatgaggggagcatgggtgccaaggagtcacggatcggattcctcagctacgaggaggcgctgaggagagcacttattttagaggagattgcaattgattgtcataataaggaaactgaacagaggctgct

SEQ ID NO: 438199 - DNA, 98 bp, Homo sapiens
cgcaggatgggatccggctcctccagctaccggcccaaggccatctacctggacatcgatggacgcattcagaagagttgcatgctgagaatttgaaa

SEQ ID NO: 438200 - DNA, 100 bp, Homo sapiens
cccgcaccaagctctgctccacactgccaaccggccagaggacgagtgtgctgaacagatgggtaaggatggcaggggttatgtcccagctaccatcaag

SEQ ID NO: 438201 - DNA, 74 bp, Homo sapiens
ttaaaaacatgcagttcagtaacacacctgaaacaaagggtcatcctttctagaaagagaaccgctgtgctatc

SEQ ID NO: 438202 - DNA, 96 bp, Homo sapiens
gaggtccatctcgctgagatacgaagggagggtgtaccattacaggatcaacactgcttctgatggcaagatatgagaccttggtggggacaattg

SEQ ID NO: 438203 - DNA, 100 bp, Homo sapiens
tttcgtgtcccgctgtaaggaaacaagatggtccttaaaaccgaagaggaggacgatttatcagcaagactgttgaacgcataactgcccaagatgcctg

SEQ ID NO: 438204 - DNA, 99 bp, Homo sapiens
ggccagagaagattccgtgaagtgtctgcgctgcctgctctacgccctcaatctgctcttttggatataagcttaccaaagtcagcaacaatatgctac

SEQ ID NO: 438205 - DNA, 98 bp, Homo sapiens
ctggtgccggagggacaaaaagcaatgcaagagtcgctttgttacacctttcaagtgtctcgatggctcgttcggaacaccacctggatacggctgcg

SEQ ID NO: 438206 - DNA, 98 bp, Homo sapiens
gtccttgtcgctgtggagctgttgaaggcctgcttcggccttctgctcttctgttgtgtggtgaccctcaccagaggacagcttcatgctcttggact

SEQ ID NO: 438207 - DNA, 85 bp, Homo sapiens
ctcttggtcctggctggccccgcggcgttggagagaagttttcaacttgggaaccaaccaaacgggagcttgaactgctgaagca

SEQ ID NO: 438208 - DNA, 100 bp, Homo sapiens
tgtggatgactgagtacctgaaccggcacctgcacacctggatccaggataacggaggctggccagatgaattatactttgaggaaggtgatattatcta

SEQ ID NO: 438209 - DNA, 90 bp, Homo sapiens
cagggcaacgctgtgaccctgggagattactaccagggccggaggattaccatcaccggaacacatccgcgtgggctgggagcagctgct

SEQ ID NO: 438210 - DNA, 98 bp, Homo sapiens
tcgatgtaaagggagtagaattgggtggagctaccctgcgtatctggacacctttaaggattctcgcctcagcaggagactctctgaagaccagcagg

SEQ ID NO: 438211 - DNA, 100 bp, Homo sapiens
ggaagcttcatctgaagatgtcctgggcgttcatatgatgcaactgtgaaagttccttttcttaagaaatgcaaggaagcaggacttcttaattacttac

SEQ ID NO: 438212 - DNA, 100 bp, Homo sapiens
gtcccccgtagcagcgcaggccgggaagcttctgcgagccctagcgctgcggccccgcttcctggcggccgggtcccagcttgcagaccaggattctata

SEQ ID NO: 438213 - DNA, 82 bp, Homo sapiens
ctagaaatgaatgtttccatctcttcagagatgaaccaggtttttagaacttcagccataaaaatgggcagaattttccttg

SEQ ID NO: 438214 - DNA, 100 bp, Homo sapiens
cacctgcgccggcacacgggtgagaagcccttcgcctgcacctggccaggctgcggctggagggttgtgagtcccggcccagcccctccacccccctgcc

SEQ ID NO: 438215 - DNA, 80 bp, Homo sapiens
ggggctgactgagagcgtctgcttggagaagctggatgataatcagcttaatttgatccagaaagtgtgtgagctcatcg

SEQ ID NO: 438216 - DNA, 96 bp, Homo sapiens
gaagaaattgggaacattatcacaaagctatcatcctgccaaactccaggctcagatgtcacaggctattgagggcacctacattgacaagaaatg

SEQ ID NO: 438217 - DNA, 50 bp, Homo sapiens
agcaagtgaatacgagtcagaaggaacggagctttgactgtaagatctgt

SEQ ID NO: 438218 - DNA, 75 bp, Homo sapiens
agagatggagcaagagtacttatgaaacttatgccgccaggactatctgctgccaaactcttgactgaatatggc

SEQ ID NO: 438219 - DNA, 83 bp, Homo sapiens
ccgggggccatgcacgcggatcgagtttgataacgatggccggaaggtggtggtcgtacgctgtgaaggcatcaacatttctg

SEQ ID NO: 438220 - DNA, 96 bp, Homo sapiens
cgaagccttgggtttctttcttaaaggactgatttttagaactccacatttgaggcatctccttggaaacaatgccatctttgaatgtgagagata

SEQ ID NO: 438221 - DNA, 75 bp, Homo sapiens
gcggagggagccccagacacgggactttgaacatgtcggggatcgccctcagcagactcgcccaggagaggaaag

SEQ ID NO: 438222 - DNA, 50 bp, Homo sapiens
ccctggagcggccgccttccagcggggggccctcagcctcttggccttga

SEQ ID NO: 438223 - DNA, 75 bp, Homo sapiens
cactgatttgtccctggggcggcagcgcggacccgcccggagatgaggacgcaatgagcccctgaagaaagagcg

SEQ ID NO: 438224 - DNA, 82 bp, Homo sapiens
gtttcatcgttttttctactccaaatctttcgtcaaacacagtttcgaggatttttagactctgaggagcagttggagctaa

SEQ ID NO: 438225 - DNA, 82 bp, Homo sapiens
agtcagtctggtactaacaatgcaggcccgatgagagaaagggaaagttaaggatgctggagcagaacaatggatttctctt

SEQ ID NO: 438226 - DNA, 100 bp, Homo sapiens
aaaaggatatgaaaagaagaggtcaaagttaattggagcctaccttccgcagcctccgagtcatttcatgggcaacaacacagtgctggatgttttgcgg

SEQ ID NO: 438227 - DNA, 73 bp, Homo sapiens
ttccattggccagtatgaagtggtgaaggagtgtgtgcagcggtatagggctcaaggaataagcgcaaataaa

SEQ ID NO: 438228 - DNA, 90 bp, Homo sapiens
aaaaagcctgtcttcaacttggaatcccatgggagctggtgaggtggccaacttcgctgcgtatgcgtttgcaccagccactctagtgac

SEQ ID NO: 438229 - DNA, 101 bp, Homo sapiens
ggcggaggcaatggccggcaaccagctgtaagcgagggcgccctgcgtccggcagaggaggcgagcatcccgctcaggtgatgaggaacccctcgcgcacc

SEQ ID NO: 438230 - DNA, 100 bp, Homo sapiens
agaaagagcactaccaggtgttagggccgcgatgggcctcttggaacattggtgtgttcatctgcattcgatgtgctggaatccacaggaatctgggggt

SEQ ID NO: 438231 - DNA, 100 bp, Homo sapiens
ctggaacgccctctttttaaaaaaggtttgggaagtagctgctccatacattgaaaaatacagaatggagcatattccagaatcaagacctctttctcca

SEQ ID NO: 438232 - DNA, 101 bp, Homo sapiens
gtgccacccaagaacctggccaaagctatgaaggcaccacactgtaactcgaggcatcaccaaaggcgtgaaggaggactttcgcctggccatggagcgcc

SEQ ID NO: 438233 - DNA, 82 bp, Homo sapiens
ctctgcatcatgtcccggacctgtcttgccgtggatggcataccattctcatcgttggggcaagctctgtgtgattgattgg

SEQ ID NO: 438234 - DNA, 98 bp, Homo sapiens
agccacatgtgtttcaaaatggccctatgcttaggttggcaaacatgaattgactgggcataaagtagctgtgaagatactcaatcgacagaagattc

SEQ ID NO: 438235 - DNA, 75 bp, Homo sapiens
gctctggaattgctactgctgcctctgtcactcctggtgaccagcattcaagtttccacagagtgaaatagcctg

SEQ ID NO: 438236 - DNA, 122 bp, Homo sapiens
cagacggattcatttagagctgcggaacaggacgccctctgatgacccttgaacatctgtgaagaaatgactattctgcatggaggcttcttgctggccgagcagctgttccaccctaaggc

SEQ ID NO: 438237 - DNA, 100 bp, Homo sapiens
ggctctggcgaagctgctgccgctgctgatggcgcaactctgggagaattttcctgacactctcaactgtgcagaagtaaaaatctttccccagaagaag

SEQ ID NO: 438238 - DNA, 89 bp, Homo sapiens
gcccaatccagtagctgttaaaccgtcactgcagccagaggggtccagaagagagaggaggcactgcctccactacagcaactgcaccc

SEQ ID NO: 438239 - DNA, 75 bp, Homo sapiens
aaaggagtccctagagacacctagtaatggagtccaatgtgctgattgctgctaacagtcagggtacaattaagg

SEQ ID NO: 438240 - DNA, 80 bp, Homo sapiens
ggacgacaaagatggcggcagggaccagcagttactgggaagccttcaggctctacacacagatgatcctctcacttggg

SEQ ID NO: 438241 - DNA, 75 bp, Homo sapiens
gagtagccacagcggcagctccagcccggcccggcagcgacatggaaggtgatgagacaaaccatgcttctgcca

SEQ ID NO: 438242 - DNA, 75 bp, Homo sapiens
agaagattagcaaaggtgctaatccagtggaaatcaggagaggtgacatgactgtctacgtagaaaactccaaag

SEQ ID NO: 438243 - DNA, 90 bp, Homo sapiens
ctccattactggaacagattcctctgtggaagccagggagaagaggagagctcttcagtatccccatcagccagtttccgaggtgctgag

SEQ ID NO: 438244 - DNA, 80 bp, Homo sapiens
ctccagcagcaactgtagcgccaaaaaggaagggtacaatgactcttcttgcttttcacctaagttgaataagcaccctg

SEQ ID NO: 438245 - DNA, 75 bp, Homo sapiens
accgcggatctggggccgtcctcaggacgtcgtgtccaagatgctccacgtggaccctcatcagcgcctgacggc

SEQ ID NO: 438246 - DNA, 114 bp, Homo sapiens
taccggacagcaattaaacacagaaggaaatacccagactgttactacaacctcgggcgtctgaattttaccttcaatgatgacttcagtcccagcagtaccagttcagcagac

SEQ ID NO: 438247 - DNA, 89 bp, Homo sapiens
tgaagatggaagggcatgaaaccagcgactggaacagctactacgcagacacgcaggagacagggccaagaggaccttgcctgcccagt

SEQ ID NO: 438248 - DNA, 51 bp, Homo sapiens
acagcggctcctaccagacaatcaagttctgggattaccgccagcctcgga

SEQ ID NO: 438249 - DNA, 75 bp, Homo sapiens
gcttcgctggccatttaggagctctgctcaaagccagacgggttctgcagcattccagaccttgagcactgaatc

SEQ ID NO: 438250 - DNA, 100 bp, Homo sapiens
gtttgattccagtcatgatagaaatgaaccatttgtctttagtcttggcaaagaattcctggaaaactcaagcaattcgtatttgacttacattctggaa

SEQ ID NO: 438251 - DNA, 75 bp, Homo sapiens
cagcaaaagaaggagggtcctctcagtgattaagtaagcactatcctttgtactccctcaacgtggcctccatgt

SEQ ID NO: 438252 - DNA, 75 bp, Homo sapiens
tcaactcctctctgttaatggagtggtttcccttgggggctttgaaataacaccaccagtggtcttaaggttgaa

SEQ ID NO: 438253 - DNA, 82 bp, Homo sapiens
gaaacaacgactggagggattaagaagaactcttaggagcagcttggcctaaaggttgttgacctcctgtactggagagaca

SEQ ID NO: 438254 - DNA, 100 bp, Homo sapiens
agcgtgacagccagacccaggccatcctcaccaagctcaagtgtgccgcaggtgtgcggcgttcctacacctttggcctggctggaggcggctacgagaa

SEQ ID NO: 438255 - DNA, 100 bp, Homo sapiens
gcagtcaaagccatctcttcggcggtgcgcaaggcgggcatcgcgcacctgatcagctgctgctctctgaaaagccacagttgtgtcagctatgccagga

SEQ ID NO: 438256 - DNA, 83 bp, Homo sapiens
tatgaatttaacagtaatgctggttacacgggtagtattattgtgggtaaataatcacttcaatgactttgaaggagatcctg

SEQ ID NO: 438257 - DNA, 96 bp, Homo sapiens
cagcaacttgtgattggcggtgaccggatattcagttgcacatccccacatcaatgcactgccaatggtatttaaaccatgtcagagctgcctcac

SEQ ID NO: 438258 - DNA, 100 bp, Homo sapiens
tctaccctggaggagattctggggcagtatcaacggagtctccgggccttgccttacacccagacaaaactctcgttgcaactggccaagtcgggaagga

SEQ ID NO: 438259 - DNA, 75 bp, Homo sapiens
tcagcgccgcctccctgcttcttaacagttagttgaatccatggacatgaaacccacagatatagagggttggcc

SEQ ID NO: 438260 - DNA, 100 bp, Homo sapiens
actcagccactgcgggcgaggagggcacaaggccaggttcccaagagctcagatctcactgatgaaaaggcctccaggtttttcacctttccgatcatca

SEQ ID NO: 438261 - DNA, 104 bp, Homo sapiens
tatatgaacaatccgtctggatcacggatgtaggaagtgatcctgataacttaagtgactctctcttttccggtgatgaagaaaatgctgggactgaggaaata

SEQ ID NO: 438262 - DNA, 100 bp, Homo sapiens
gcttgttccctgttcaatgggggaccagattcgtgtggatgtgtctgctacaatgctgctgctgcacagagctgtggtcctcaggctccaacaggcctgc

SEQ ID NO: 438263 - DNA, 95 bp, Homo sapiens
tggacaaatactctgaggctctcaaagatgcccaggagaagctggagctggcagagaaaaaggccaccgatgaggaagagcaagcaggccctgag

SEQ ID NO: 438264 - DNA, 73 bp, Homo sapiens
cgagctagccgggagttacaccgccaccgccagaatcctcactatggatgggctcattgaggacattaagcat

SEQ ID NO: 438265 - DNA, 95 bp, Homo sapiens
ctttttaataatgtgtgacccttcacctttgatcccctgacctgcattaccttggtattgaagcccctgggtgataatttgatggaggaaaacat

SEQ ID NO: 438266 - DNA, 96 bp, Homo sapiens
gggattcgtggtgaaggtccggggcttgccctggtcttgctcggccgatgaagtgcagaggtttttttctgaagatggtgtgccacggggagcaca

SEQ ID NO: 438267 - DNA, 75 bp, Homo sapiens
ccagtgttcatatccaactggaaggccggccatccattttagaaatggtaaagtcagtgataaatcttttgtttg

SEQ ID NO: 438268 - DNA, 100 bp, Homo sapiens
ggagcccatgaaatcaagagcaccacagctacatttggaatacagattctataagcagttaggatctggagatttgtcaaagatgaaagtgaccttatca

SEQ ID NO: 438269 - DNA, 83 bp, Homo sapiens
cctccctttcatggttccatcagccgccttcatcaaatcaaacaggtgcagagcattgtagaccaaggagccatggataggag

SEQ ID NO: 438270 - DNA, 99 bp, Homo sapiens
gcacaccttaaaatattactactgggttattaatcctgctgacagtagtggcattacacctaaaggattagatgaacagactagccactttgcattgac

SEQ ID NO: 438271 - DNA, 74 bp, Homo sapiens
cggcgagcgcgagcggcgcgagaaagtcacaccgacaaatctgaagcgggtttgccaggggagtgtacccgtct

SEQ ID NO: 438272 - DNA, 50 bp, Homo sapiens
acaacaccacaataatccacagccaaggaatgctgtctctgcaatttgag

SEQ ID NO: 438273 - DNA, 83 bp, Homo sapiens
caaggacatcaacttccggccgcagatgtcccaggccgacgcctccccccagggtcagctgcgggctcccaggcctaggcgcc

SEQ ID NO: 438274 - DNA, 100 bp, Homo sapiens
gcaaacactgtgtcatattcttgggttcaaattcaagttttaccagctcaagactgcagtgcagatgacgacaacttccttgtgcccatagcggtgggag

SEQ ID NO: 438275 - DNA, 50 bp, Homo sapiens
cagaagaagctgaggatgaagaagatgatcctgataacttaagtgactct

SEQ ID NO: 438276 - DNA, 82 bp, Homo sapiens
tgaaatcgacacacaaagaatagagttgagcctgtgggacacttcggatatggctcgtggacagcagaaaattcagtctcag

SEQ ID NO: 438277 - DNA, 49 bp, Homo sapiens
cgtgtggcaggaaacagaagatgatggaatcagtgtgagtggctttccc

SEQ ID NO: 438278 - DNA, 100 bp, Homo sapiens
tttcaataacaggtcattgccgagaaaaggaaattgtagtgatgatgctgtttctcaccattctgggacttggtagtgctgtgtcactcacaatctgtgg

SEQ ID NO: 438279 - DNA, 90 bp, Homo sapiens
ccacatagaattcactcaacaagtagaaacgtgagagaagaaaaaacacgctcagagataacctagtgttgaatatctcatgtaagagta

SEQ ID NO: 438280 - DNA, 100 bp, Homo sapiens
ggcgtggtcagagcgagcttcggagaagcagtggtgggttccatgtgatggtggagtaggaggcaggtctccgcggatgttgccttatggctgtttagca

SEQ ID NO: 438281 - DNA, 74 bp, Homo sapiens
tttggcattgacatttaattttagggtcctttatatagaagggagagtaggctgcggctgtccccaacagtgga

SEQ ID NO: 438282 - DNA, 83 bp, Homo sapiens
gcagcaaactctttagctcttcttttaatggtggaagacgagatgagacaatgcagatcttcgtgaagactctgactggtaag

SEQ ID NO: 438283 - DNA, 96 bp, Homo sapiens
tacaggcacgcgccaccactcccagatgctaatcctgaggtgacgatgacaatgcttcgctggatctatacagatgagctggagttcagagaggat

SEQ ID NO: 438284 - DNA, 100 bp, Homo sapiens
tgttgttgactaagctgaaggaaactgctgaaaacagcctcaagaaaccagtaacagattgtgttatttcagctcggatgaggtgcaggttggacagcag

SEQ ID NO: 438285 - DNA, 83 bp, Homo sapiens
ggcgggcctgaggcgaaggagcggccgggagcccgccgcgctggtagcgctgctgatgcaaggaatcccctgggctcccgtcc

SEQ ID NO: 438286 - DNA, 74 bp, Homo sapiens
tcttcactagaacttctaaactggattctcgaattacttcttagacataaccctcggcctcaggaaagtcggac

SEQ ID NO: 438287 - DNA, 90 bp, Homo sapiens
gattgtgcgaggcatgatgtctgggcccatcgccagctccccacagggtctaaaattcccaggactccacagctttgcaccagataagcc

SEQ ID NO: 438288 - DNA, 82 bp, Homo sapiens
tcggagagctccagtgagtccagctcctctgacagcgaagactccgaaacagggacgactggagtgagcactggcctgggag

SEQ ID NO: 438289 - DNA, 73 bp, Homo sapiens
tggagtgtaggtcatatcgccgcgactgacttccttttggtagtactgcgtgatgttgttcaggcttatcctg

SEQ ID NO: 438290 - DNA, 100 bp, Homo sapiens
gagctgggcatccagaacctaagcttcaaagtgagaagtgggcagatgctggccatcatagggagctcagggggcaatggcggcttcctgtgttctactg

SEQ ID NO: 438291 - DNA, 75 bp, Homo sapiens
cacactgcatttctgtcggcactgcagcattctcttttggaagaaatgtagacaaccaatttcctgggcaagctg

SEQ ID NO: 438292 - DNA, 119 bp, Homo sapiens
ctctccttccaccaaggagcgcccagaggccggcgggagctccaggttcacctcctcctcctccagagagaagtggagatcctgatgtttctcagtgccattgtgatgatgaagaaccg

SEQ ID NO: 438293 - DNA, 75 bp, Homo sapiens
ctgactttcagctatggaatcgcacatggattaattgatgtatgttgagtttatggagctgccttttggtggctt

SEQ ID NO: 438294 - DNA, 50 bp, Homo sapiens
ccgcggcggcagcagcagtgagagggagaagaaatgggtgaccgttggtg

SEQ ID NO: 438295 - DNA, 98 bp, Homo sapiens
agaaaatctccctgctccgcagcgacatcaccaagctggaggtggacgccatcgtcaacgccggacctgaaggagaagaaggagaaggtggaggagaa

SEQ ID NO: 438296 - DNA, 82 bp, Homo sapiens
tatcttgaaaagctgccagaaagaatatcactttcctgattcctggtttctacagctacatggaccttgcgtacaacagctc

SEQ ID NO: 438297 - DNA, 100 bp, Homo sapiens
tgccgccgccgccgccgcggtttgtcgccagaaggaagatggcggatctggaggagcagttgtctgatgaagagaaggttggtcaaagaaaaagtgatgt

SEQ ID NO: 438298 - DNA, 87 bp, Homo sapiens
ttgccctgcccaccgcccaccacactctggggctgcctgtgggtatcaacttgaactgaaggatgactacatcattagaactaatcg

SEQ ID NO: 438299 - DNA, 100 bp, Homo sapiens
agggatcacaaacactcagagtggaaaaagtaccatcatttgaaacagctggttcgatgcccagaactgaatgctgtgctccagctgtggcctcaccggt

SEQ ID NO: 438300 - DNA, 100 bp, Homo sapiens
tgaatcagtctctctccctgctctacaacgtgcctgcagtggccgaggagattcaggatgaagttggcctgttacatgaacagaatatggcaaaaatgag

SEQ ID NO: 438301 - DNA, 82 bp, Homo sapiens
aggaaggaacgaggcaaggagctaaagcagcgtgcgttcagccctgggattggcggcagtaagcacacaatgaatgatcacc

SEQ ID NO: 438302 - DNA, 75 bp, Homo sapiens
ttaagacttcaaaacatgaaaagtgatacttttcaagaggcccctggatcctcctggaatccccgatccctcttg

SEQ ID NO: 438303 - DNA, 89 bp, Homo sapiens
acagcaaatggttgacacctttacacagagcagttgcatcttgtagtgaggtacgcaataactgtttggtattttgatgcagatgagag

SEQ ID NO: 438304 - DNA, 75 bp, Homo sapiens
tgggcctcttcctccccgcgctctggcgtagaggccgtgacttggcgagcacgaccctccccgggtaccctccac

SEQ ID NO: 438305 - DNA, 113 bp, Homo sapiens
aaggtgaatattgtgcctgtcattgcaaaagctgacactctcaccctgaaggaacgggagcggctgaagaaaaggcctaaatgcgatggccaggtattactgacacaagtgtg

SEQ ID NO: 438306 - DNA, 100 bp, Homo sapiens
cccggccatcatcacccaggtgaccaaccccaaggaggacgagggccggttgccgggcgcgggcgagaaagatggtaattgcgctgcagaacaccaccac

SEQ ID NO: 438307 - DNA, 100 bp, Homo sapiens
tgaacctttgcttactttggaaaggctcctatggatattccaggtttaaacctgagtcaacaagaatactacccctatgtgtactacaagattgattgca

SEQ ID NO: 438308 - DNA, 100 bp, Homo sapiens
gaaatcccctcgcttatcctgtgggggccgccgggctgcggcaagattgcctgtttggtacctgtggaccagtttcaactttatcagaggttaaaatttg

SEQ ID NO: 438309 - DNA, 100 bp, Homo sapiens
acactatcccagggagtgcaagcttagagcgtctggccaagaatcagaggaagtggatacgtgcttttcaacatgccttcagcactaatgactgctccag

SEQ ID NO: 438310 - DNA, 75 bp, Homo sapiens
aacgggggtcttcctcctccgccgttgacaggtctacttccccagcaggacagcatcattctcctatatcttcta

SEQ ID NO: 438311 - DNA, 50 bp, Homo sapiens
ggcggccgcagctgccacaaaccaggacccccgcagcaaacacaagttta

SEQ ID NO: 438312 - DNA, 100 bp, Homo sapiens
aggaactgtggcttgtgatccatgggcgagtctacgatgtcacccgcttcctcaacgagctctctgatgtaaaggatggagtaaatcaagcagcacctgc

SEQ ID NO: 438313 - DNA, 80 bp, Homo sapiens
ggcggcgctgtgtccgtcgccatgacagcttcaaggttactgactttttatgatgtttggtggctatgagactatagaag

SEQ ID NO: 438314 - DNA, 97 bp, Homo sapiens
tgcagaagaaaccagccgaacttcagggtttccaccgttcgttcaagaacgacaccgtaactatccgcactagaaagttcatgaccaaccgactact

SEQ ID NO: 438315 - DNA, 75 bp, Homo sapiens
ttgtagccctcgtccagacgccccaaacaaacacacctccgcgcaaaaagagtccctttttgaaaagcaaaaaca

SEQ ID NO: 438316 - DNA, 100 bp, Homo sapiens
ctattattgtaaggagtgcaccatccaggagaaggaccatggcggacaccgacctgttcatggaatgtgaggaggaggagttggagccatggcagaaaat

SEQ ID NO: 438317 - DNA, 75 bp, Homo sapiens
gagaaaacccacaaagaagtcacagaacaactgcagggtcagttaaatgaaagcatggaccatgggggagttgga

SEQ ID NO: 438318 - DNA, 83 bp, Homo sapiens
tgaacccggcccccgacggctctgcagttaacgggaccagctctgcggagccacgccttggagtcactcttcataaggttgta

SEQ ID NO: 438319 - DNA, 98 bp, Homo sapiens
cctcgccatgtcctgctgcccgttgggccatatggtgctcttcccagtctggttcctgtacagtctgctcatgaagctgttccagcgctccacgccag

SEQ ID NO: 438320 - DNA, 83 bp, Homo sapiens
aagaactcgagcgacagagacaagctgagcttgccgcacaaaaagctagagagagacacctgtgcatagcagatcatcttcac

SEQ ID NO: 438321 - DNA, 100 bp, Homo sapiens
ccccgcgcgagtcggcgcccggccgaggggctgcgtaggccccgcccggccaggcccagccgggccctggacagggtggagcttcagcatgggatcggcc

SEQ ID NO: 438322 - DNA, 100 bp, Homo sapiens
gctgggaaagaagttatgcttgttggaattggtgacaaaatcagaggcatactttatagggtgatcagcccatgacctaaacctccagacaaaataaaac

SEQ ID NO: 438323 - DNA, 75 bp, Homo sapiens
ccaaagtccagcacagaccctcgggcctcatcatggccaggaagcacagacgcagtcttcagcaaggaagtgctg

SEQ ID NO: 438324 - DNA, 75 bp, Homo sapiens
ccaccctgctgtccaagaaggaaaccagcaacctctataagatccagtgcccttctgcgatgttttacctggctg

SEQ ID NO: 438325 - DNA, 80 bp, Homo sapiens
cagcctgcggagcctgtggggcagggaaacctcaaatgaattctgaaggggagataccttccctgccatcaggcagccaa

SEQ ID NO: 438326 - DNA, 100 bp, Homo sapiens
gagggcacgtgtttgcggttcagccctttgatgaccgcagcaggtggggaagctgaggcaggaagccctttagtcacttgccgaaggccacgctgttacc

SEQ ID NO: 438327 - DNA, 82 bp, Homo sapiens
ctcccttcatgtctgggtcatggacagagggcttggtggactccttttctcagggactggaaaggtcatacgctgtcagcag

SEQ ID NO: 438328 - DNA, 75 bp, Homo sapiens
cgttggtcggcggcagtcgggccagacccaggactctgcgactttacgtactaggttttgacaagcttgcatcat

SEQ ID NO: 438329 - DNA, 100 bp, Homo sapiens
tggagagccgccagggctctatcaaggggctggtgtactccagcaacttccagaaaccagcctggacaccaagtctgtgtcagaaggccacctcaagagg

SEQ ID NO: 438330 - DNA, 50 bp, Homo sapiens
aagggaagcgggtcgttatgagggtctcactccattgcccaggccagagt

SEQ ID NO: 438331 - DNA, 90 bp, Homo sapiens
cagtgcccctggacgaccaggagaagctgcccttcaccgttgtgcatgaaagagagattcctctgaaataattttccagttcatatgaag

SEQ ID NO: 438332 - DNA, 74 bp, Homo sapiens
aatgcgctcttcaagcggatcttgaatgacagcccatatcaaggcggtgtattctttttgacaattcattttcc

SEQ ID NO: 438333 - DNA, 98 bp, Homo sapiens
ctcctgagtagctgggattacaggtgaaatgtatagatgttgttcaggcttatatcaacagaatcaaggacgtgaacccaatgatcaatggaattgtc

SEQ ID NO: 438334 - DNA, 87 bp, Homo sapiens
gaagatagcaataaaagatgctttgaatgaaaattctcaacttcaggaaagccagaaacaggcatccgtgtacaagatttgcagaga

SEQ ID NO: 438335 - DNA, 100 bp, Homo sapiens
ctggactggatatttctacctcggccccaggttctctgcagatgcagtaccagcagagcatgcagcttctgcagaaagccgtcattacacctgattttga

SEQ ID NO: 438336 - DNA, 80 bp, Homo sapiens
ccgacgcccgcaggtcctcgcggtgcgcaccgtttgcgacttggtcagcccaaggccaaccccactgtcactctgttccc

SEQ ID NO: 438337 - DNA, 75 bp, Homo sapiens
cgcagtttcagcagagccgctgcagccatggccccaatcaaggttcaagggcagcaggaaagacgagatcctggg

SEQ ID NO: 438338 - DNA, 100 bp, Homo sapiens
caaagcctgaacaggcagggccagacccagtaagactttgaccccgacgcaggcttcagtgattgccgcggatcagaagcctgagcactttggctcgaga

SEQ ID NO: 438339 - DNA, 90 bp, Homo sapiens
tattgataaacagaaagacaagactggagaccggataatcactataagctctccagtgaagaagccaagtcttctaaaggcccaccaatt

SEQ ID NO: 438340 - DNA, 83 bp, Homo sapiens
ccgtggccgctgccggtctacgtgcacattcaggttcccgagcacaaacatcaagataacgttcactgccctgtccagcgaga

SEQ ID NO: 438341 - DNA, 75 bp, Homo sapiens
ggatatggagcctttggtgttgtctgctttaccaacagggacgcttatgtcaactgggcagtgaattttgtgaat

SEQ ID NO: 438342 - DNA, 75 bp, Homo sapiens
catccgctccttgcccgagaacatccagtttgatgtttactacaaggtggctgtgaaaaacaatatcgatgtctt

SEQ ID NO: 438343 - DNA, 100 bp, Homo sapiens
tgacgaggctgcggtgtctgctgctattctccgagcttcgcaatgctgcaagaatcttattgacctccagaagcacctggatacccacagcgaggagcca

SEQ ID NO: 438344 - DNA, 90 bp, Homo sapiens
gttgaacatgtggaaggtgcgcgagctggtggacaaagcgcctgaattattggaacaactttggaaagccagagctgaaaaaaagaaact

SEQ ID NO: 438345 - DNA, 50 bp, Homo sapiens
aagcagctcaggaggctgttaaactggaaaggaaacagattcattgtctg

SEQ ID NO: 438346 - DNA, 98 bp, Homo sapiens
gctggtggggtgggagccccccagctggtagagctttggaacctggtcttcatgcaacacaacaggaataagacgagttggaagaagacctgatcaac

SEQ ID NO: 438347 - DNA, 89 bp, Homo sapiens
gtggagagtgcgattgcagaagggggtgcttctcgtttcagctgctggagccagttctgcttctcggcaaggagcgatttgctggtgta

SEQ ID NO: 438348 - DNA, 98 bp, Homo sapiens
caacactgataagattgaatgccaagcagaaaattacctaaatgcactctttcgaaagaaagtacctggagtagaacagaaaaattattatgtctgtg

SEQ ID NO: 438349 - DNA, 100 bp, Homo sapiens
gatccgcaagaacaagtaccgccccgacctgcgcatgaacactcctatgccaccttcaccagctgtacaagtgcagggccagcctaacagttctcagcct

SEQ ID NO: 438350 - DNA, 113 bp, Homo sapiens
ggaaggaaatgagggcaacttctgaagacttcaacaaggaatgtatcctgtcaggtataatgtcagtgaatggcaagaaagttcttcatatggatcgaaacccttactacgga

SEQ ID NO: 438351 - DNA, 80 bp, Homo sapiens
ttgtagtcatgtacagaacatgatcaagggtgttacactggtaaagcagctgagcagccattttcagatttaccccttct

SEQ ID NO: 438352 - DNA, 100 bp, Homo sapiens
gctctggctccccgcgtgcgtcgcggcccacgcagccagacccggtccgtttggaatgcctgggatggtgccgccgcatgttcctcctcagatgctcaac

SEQ ID NO: 438353 - DNA, 75 bp, Homo sapiens
ccagcagccataattttaaaagttgctttgaatatggcaagagggttaaagatcccagattacaggaatgcagta

SEQ ID NO: 438354 - DNA, 100 bp, Homo sapiens
atttgactgaagaacagaaggcgatcaaggccaagtatccgccagtcaataggaagtacgagtagacattttaaatcctaaggatgtgatcacaactcgc

SEQ ID NO: 438355 - DNA, 83 bp, Homo sapiens
gctggacacgtggacatctgccacatgctggttcagcaatgcagagtccctggacaggctcctgccacctgtgggcactgggc

SEQ ID NO: 438356 - DNA, 101 bp, Homo sapiens
ctggcctggcgtgcactccgcacctcggggacattattgcgcgtggaacggctgcttttggaagtgcattccactcttcgttcaacttgttttggagagat

SEQ ID NO: 438357 - DNA, 90 bp, Homo sapiens
atcaaatcagcatttgccccctttggtaaaatatcgtggagaaaatccgttactgcatcaccaaacttgacagggagcttcgaggactgg

SEQ ID NO: 438358 - DNA, 100 bp, Homo sapiens
cgggcctcagctgggattcccgcgcccctcggacggccacgagactcggacaggggcaagtgtccgagtggtgaatcagctacttacagagatggatggt

SEQ ID NO: 438359 - DNA, 98 bp, Homo sapiens
gcaaacaaggactctctgtataaggagctatgaagacatgattggtgaggaggtgccatcggatcaatactactgggctcctttggcccagcatgagc

SEQ ID NO: 438360 - DNA, 100 bp, Homo sapiens
aagaagcttatccaacgccaaccaaagatttgcatcagccatctcttagtccagcaagtcctcatagccagggagaatggtgttgaacgcgtgtgtcctg

SEQ ID NO: 438361 - DNA, 97 bp, Homo sapiens
taccatttattctacctcagtcaccgacagcaaggctatgcaagtggagagctgctcctcagccgtgggggtggtgatgttctggactatgatgctg

SEQ ID NO: 438362 - DNA, 100 bp, Homo sapiens
agggatgcctgttaccagccaatcattaaagaaattttaaaaaattttccaaaagagagatgctaatcttccagtaccaacaattgcagcaatagatgga

SEQ ID NO: 438363 - DNA, 83 bp, Homo sapiens
gcaatgcctccatgaacaatctcacccaattactctgctcagcaaccatgtccaagggacctgcagttggtattgatcttggc

SEQ ID NO: 438364 - DNA, 75 bp, Homo sapiens
gtccgtgacgctgagcgaggcggagaaggtgtacatcgtgcatggcgtccagaaattcatgccgaagtccaactt

SEQ ID NO: 438365 - DNA, 101 bp, Homo sapiens
cggaagacttatgaacgccttgttgcccagttccccagttctggcagattctggaaactgtacattgaagcagaggacagagcgggatgccaccagcttgt

SEQ ID NO: 438366 - DNA, 100 bp, Homo sapiens
tgccttagccagggacctgcttggccagcgacagatcctttgctgctctgtctgccggttcttgaggacagtcattttgtttactcattcagccctgttg

SEQ ID NO: 438367 - DNA, 90 bp, Homo sapiens
acaccattgaagactctgggattaatgctaaatttgtgaatgctgtgtatgataccttacttaatactaggtacttggaaggctccatcg

SEQ ID NO: 438368 - DNA, 96 bp, Homo sapiens
gttggcttatgagtggaacatggctagcaggaatgcttactgttgcgtggttcgttattaacagacatatctgaagagatggattaagaatgcttt

SEQ ID NO: 438369 - DNA, 89 bp, Homo sapiens
ctggccaagaagatcatcattaaggacggaggcacggtgtggacactgccagcggctgcagccgacttggaatgacctgggagacaaat

SEQ ID NO: 438370 - DNA, 100 bp, Homo sapiens
ctaagactccaggacacccctgaagccgagaaatggacctgagctccttcgccatgccgctcctggacggagacctggagggttccggaaagcattcctc

SEQ ID NO: 438371 - DNA, 74 bp, Homo sapiens
cggcaatggaacctacggacaggtgtacaagcaatggctgccatccggaagaaactggtgattgttggtgatgg

SEQ ID NO: 438372 - DNA, 110 bp, Homo sapiens
gatctctctcatctcgctcggctgcgggaaatcgggctgaagcgactgagtccgcgatggagggaacctcaggacctgacccaaccactgtctacgtggacatgagagcc

SEQ ID NO: 438373 - DNA, 100 bp, Homo sapiens
cctgcccagacggctcacctgtgcgggatggaacaaaaggctgctacctgcccagcaaccctgaggccattgtgctggacatcgactacaagtctgggac

SEQ ID NO: 438374 - DNA, 83 bp, Homo sapiens
cgggtggagtgtaggtcatatcgccgcggtgacttaagagattaaaattaatttggttgctgttggttctgaacaaataatga

SEQ ID NO: 438375 - DNA, 90 bp, Homo sapiens
gaggtcccagccagcatcccggtcaacacgcggtacctgaacctgcaagagaacggcatccaggccagcatccttcagaaaaagcatccc

SEQ ID NO: 438376 - DNA, 87 bp, Homo sapiens
tcggccaactgagcgagggggccattgcggttgcacactgggccacagaggatccagcaaggatgaagaaatggagcagcacagact

SEQ ID NO: 438377 - DNA, 100 bp, Homo sapiens
gcacctcccgcgccgcacggtggacgaggatattgactgggtacagacagagaagcacgtgtttgagcaggcatccagcaaccccttcctggtcggatta

SEQ ID NO: 438378 - DNA, 83 bp, Homo sapiens
agcgccagatggtggaggaatacacttatttatgaaagatcatcgacgagtacatcaaggagaacggcttcggcctggacggg

SEQ ID NO: 438379 - DNA, 75 bp, Homo sapiens
ctcaagatggcggacaaaacgccaggcggatctcagaaggccagttcaaaggaaaatttaaacctagctctgaat

SEQ ID NO: 438380 - DNA, 96 bp, Homo sapiens
aaaagaatggcagcggaaacgcagacactgaactttgggcctgaatgaaacctccacagctgttgagaaaaaggagaaacctcttccaagacttaa

SEQ ID NO: 438381 - DNA, 90 bp, Homo sapiens
ggcattgaattcatcgatcctgcttccagtggtgtctgtagtgagagaaacagagtcccagttactgccagatgtgggagctattgtaac

SEQ ID NO: 438382 - DNA, 88 bp, Homo sapiens
agcatgtgttgaacctctacctgttagtcgttgcttagcaaatctaaggcctcttttagattctggaacaatgggcactaagggacac

SEQ ID NO: 438383 - DNA, 89 bp, Homo sapiens
ttctggaaggaagattccggattccgtatttcatgtcagaaggacatgaagaatgcaaccctctccctgaattctaatgacagtgagcc

SEQ ID NO: 438384 - DNA, 75 bp, Homo sapiens
actctgcccttatggaattggacaaagggaacaagctaccctctgagtcagcactggacttgaagataaatccta

SEQ ID NO: 438385 - DNA, 100 bp, Homo sapiens
gatgtcggaagattttgatgggaaaatgcatgatggggagcttgaagaacaaggaatggctgctttaaatggtggcctgggcagcagtggcctttccaat

SEQ ID NO: 438386 - DNA, 112 bp, Homo sapiens
ctggccgtcaacatgtcctttcctaaggcgcccttgaaacgattcaatgacccttctggttttagctaaagaagatactgaggcagctattcaatcaatattatacaaagaa

SEQ ID NO: 438387 - DNA, 97 bp, Homo sapiens
gggcagacgctgtgctcgctggcaccccgaacgggttgcttcccccgctgcgaggctgaagccgacgtagcttctctgaacagacgcatccagctgg

SEQ ID NO: 438388 - DNA, 147 bp, Homo sapiens
caccgcacaccccccagcccagactccagccctggaccgcgcatcccgagcccagcgcccagacagagggatgtgtttggccaaatgggagagtggttacaacacacgagctacaaactacaatgctggagacagaagcactgatta

SEQ ID NO: 438389 - DNA, 122 bp, Homo sapiens
tgcaggtgatctgcatgaaggggaaggccaagtacaaggccagcgagaatgccatcgtgtggaagcctgcgtaagtgaggaaacagctgatcctgctcctgtggcctccagcctcagcgacc

SEQ ID NO: 438390 - DNA, 78 bp, Homo sapiens
agctgtaagcaaatgcttctaatgctgctgatagttcagtaagactttgaccccgacgcaggcttcagtgattgccgc

SEQ ID NO: 438391 - DNA, 100 bp, Homo sapiens
cgcggcgggcgcgagcgaggcgccctagacatcttctccctcccttgcctcagcaggacccagtgctccataaaggataatagtttccagtacactatcc

SEQ ID NO: 438392 - DNA, 100 bp, Homo sapiens
aaagcatgaatgcaacctgattttcagattaaaggtttcctgctctacgaaacgcactcttttgccttgaagcggcattggacagtggtgtcactaatgg

SEQ ID NO: 438393 - DNA, 100 bp, Homo sapiens
aatggatcccatcacgggagtcggggtggtggcttctcggaaccgagccccgacaggctatgacgtaatagtgtttttagaagaagcatctcaacaggaa

SEQ ID NO: 438394 - DNA, 97 bp, Homo sapiens
agtttgtggctgaggccctggagaaggggacccttcctctgttgaaggaccaggtacccgggctccacattcatggatcatgtgttacgctatcagg

SEQ ID NO: 438395 - DNA, 75 bp, Homo sapiens
cgctgccaacaacgggcactacaagggctggatcttcaacgtggttccttggttggtggcgattccggccagtct

SEQ ID NO: 438396 - DNA, 83 bp, Homo sapiens
cggcgtttggatgattgtctctcggcggcggagtcggcaaggtgaccgttctggatgctagagtgagtgtgcccacctgcgta

SEQ ID NO: 438397 - DNA, 83 bp, Homo sapiens
acgggacgcggaactggtgtaccctggtggacgtgcacccagaggaccaggcggcgacaatgcagatcttcgtgaagactctg

SEQ ID NO: 438398 - DNA, 106 bp, Homo sapiens
actgaactgatgaaactagcaaatcggtttcagctacagctcctcagggagagtgaaggtggtgtttttaaggctcatcttactttcccaaaagattatcccctcc

SEQ ID NO: 438399 - DNA, 74 bp, Homo sapiens
agggctcctgggcggccgccttttccagttccagacaatgcagatcttcgtgaagactctgactggtaagacca

SEQ ID NO: 438400 - DNA, 74 bp, Homo sapiens
aaacaagccgtggaataggtgtatcaagtaatggtgcaaagcctgaagtgtctttcctgaagactatcttcccg

SEQ ID NO: 438401 - DNA, 100 bp, Homo sapiens
gctgcacccacgaatctgcccacccctcctgtaacccagcctgtttcacttcttggatctagtgaaaagccatttgatgtatgcggtcagagaagaagtg

SEQ ID NO: 438402 - DNA, 100 bp, Homo sapiens
aggatgcctatgtattccctggggatggcgcatcacacaccaaaggtgaaatgtaacgagcagcctaacagagtggaaatctacgagaaaaccgtggagg

SEQ ID NO: 438403 - DNA, 73 bp, Homo sapiens
tctctgctgctctctcatttgctggccatcggattggggtctgtttctgtcgactgtggaccacttatgtgcg

SEQ ID NO: 438404 - DNA, 99 bp, Homo sapiens
ttgcagctaggccagcggctcggcggtgagatcgtcagcgctgactccatgcagcctcccctggtgaagacacaaactgtcaccatctcagataatgcc

SEQ ID NO: 438405 - DNA, 75 bp, Homo sapiens
cgtgccatggagacgcttaacgctgagcgggctttggacaccatgaactttgatgtgattaagggaaagccaatc

SEQ ID NO: 438406 - DNA, 82 bp, Homo sapiens
gggagactggaggtgtcctaagtgtttggctcagattcgggaactggagcctctcctctgtcacagtgacaatccatctcag

SEQ ID NO: 438407 - DNA, 108 bp, Homo sapiens
cttagctgtgctcgcgctactctctctttctggcctggaggctatccagcatgtggacgagtgctcactagcagaaaaaacctgtgtgaggaaaaacgaaaactgcta

SEQ ID NO: 438408 - DNA, 98 bp, Homo sapiens
tcagaagataaacgaggggctggaacacctcgccaaagcagagaaataatcccatgcgaggcccaagaaaactagaagtagtggaggtcaaatctcgg

SEQ ID NO: 438409 - DNA, 96 bp, Homo sapiens
accccgggcagcccgggaaatctccaagtcagaaagaaagtgaaattcgttattctacatggaagaaagctgtgatgaagtcaatgggttgggtta

SEQ ID NO: 438410 - DNA, 88 bp, Homo sapiens
gcaggcgaaattcgccgtggcaccagtggtgaatcaggtctaggaaaatcgactctcataaacagcctattcctaactgatctgtacc

SEQ ID NO: 438411 - DNA, 76 bp, Homo sapiens
gtcctcaggaagcacggagacatcgcttcggaaccaaaaagaagcttcccagagccggggccaggagccccaagcg

SEQ ID NO: 438412 - DNA, 50 bp, Homo sapiens
cgaaccggccccccacagccactgcagatggaccacacatccccgaccta

SEQ ID NO: 438413 - DNA, 100 bp, Homo sapiens
ggcggttcccagcatggccccttcacagggatgttaaattagaagacacctactttgatagagatgtggagaaggcatttatgaaggctagctctgaact

SEQ ID NO: 438414 - DNA, 82 bp, Homo sapiens
gcgcggctgcggtttaacccgcggtggcggcggcgacggcggccctggcagacaatgcagatcttcgtgaagactctgactg

SEQ ID NO: 438415 - DNA, 100 bp, Homo sapiens
gaaatagtgagaggacgtctgcaaaatgctgaccaagatcactccatggatgaaatgacagctgtggtgaaaattgaaaaaggagttggtggcaataatg

SEQ ID NO: 438416 - DNA, 100 bp, Homo sapiens
agccgcaccacctaacgctggccgacaacagcctggcgtccgccacggtgtcttctctttagggatggtgaggttggaaaaaggctcctgtaaccctcct

SEQ ID NO: 438417 - DNA, 100 bp, Homo sapiens
ctccgcgggcgccgaccaggcctggctcgcgcctctcccaggacccgcctggctgcgagatatcccccaaatacatcaagatgtttgtactggatgaagc

SEQ ID NO: 438418 - DNA, 50 bp, Homo sapiens
tcggaacccgtggtcctccgcttcatgtattgccaatgaaaatggaggga

SEQ ID NO: 438419 - DNA, 98 bp, Homo sapiens
tatggcaggggagcctgttcgcccaagctgcccaccctctgatcttctctatgggctagagtaaggttcgtgatcctcgggccaattttgatcagtcc

SEQ ID NO: 438420 - DNA, 95 bp, Homo sapiens
ggctatgagctcacagaggacaatagctgcaaaggccataaaattttgagtagaaaaatccagaaatttgaaaatcagtatcgtggtagagagct

SEQ ID NO: 438421 - DNA, 75 bp, Homo sapiens
tgaaaatgctgatgaatccagcagcagcatcctaaaacctctcaatcctaattatctcatggctaatgaacgcat

SEQ ID NO: 438422 - DNA, 76 bp, Homo sapiens
ggcacattggagaaatctgcatttccactgcatgaccgaaaatgaggaattacatgaacgacagccttcgcaccga

SEQ ID NO: 438423 - DNA, 100 bp, Homo sapiens
tcaagaataaaatcacagttgtttctgagaaacagttctctaaaagatatgaacaagctgaacattttaggaaaaaatcctttaaaattcatcagaaagc

SEQ ID NO: 438424 - DNA, 75 bp, Homo sapiens
catcagcttgtaggagacagagatttcctgttccccatcgatatttccttggtcaagagagagcatgattttttg

SEQ ID NO: 438425 - DNA, 74 bp, Homo sapiens
gatgccctgcagtacctgcagaaggtctctggagacatcttcagcaggttggcgctgtacgtttatgagtacct

SEQ ID NO: 438426 - DNA, 98 bp, Homo sapiens
cctgacgcatctgtctgaggagcggtcagtgacgcgatggagcgggcaagggaactctaatgatccaggacaaagaagttaccctggagtatgtatca

SEQ ID NO: 438427 - DNA, 100 bp, Homo sapiens
ccgcactcgccgatcctccaggcatgccccgctacgagctggctttaatcctgaaagccatgcagcggaaaaatggctactggacaggatcgagtggttg

SEQ ID NO: 438428 - DNA, 82 bp, Homo sapiens
ccgctggcggcagtcacttgtacagcgccggtcaacatcgcggtcatcaagtactgtgagaagccctaccactgcaactggg

SEQ ID NO: 438429 - DNA, 98 bp, Homo sapiens
atgactccgctgaggtggacgtgtacaacccgacgaggaacgaatgggacaagatcccgtccatgaatcagatacactactgctgcagctcacaaaca

SEQ ID NO: 438430 - DNA, 83 bp, Homo sapiens
ttgaccccatccagagggaacctgtgtgtgctgccctcaacagcgccattttaggtattgggaagaatgtggtttgcgagaag

SEQ ID NO: 438431 - DNA, 83 bp, Homo sapiens
cctgccagagactgtactgcttagggtattttcatctcagcctagtgacgatgaatcaagtagtgatgaaaccagtaatcagc

SEQ ID NO: 438432 - DNA, 80 bp, Homo sapiens
gaagtggatgcctccatttttaagggtttggaaatcccttgtctccaggttgctgggattgacttcttgctcaattgaaa

SEQ ID NO: 438433 - DNA, 83 bp, Homo sapiens
cgctctttgccgtgacaacaccgttcccccagccgggctgggcgtgatggtgggcatgggtcagaaggattcctatgtgggcg

SEQ ID NO: 438434 - DNA, 122 bp, Homo sapiens
gagcacacgcccgacgaggagagcatcgactggaccaagatcgagcccagcgtcaacttcctcaagtcgcccaaagggggggccctcagcctcttggccttgaacgggctgttcatcttgat

SEQ ID NO: 438435 - DNA, 76 bp, Homo sapiens
gtgattctacatctcaagctcatattttgaagtgtttacggcttttatcaaaatacaactcaaacctagctactcc

SEQ ID NO: 438436 - DNA, 75 bp, Homo sapiens
aattacatctgacccccaaagctcagcaggctctccttcggaaagatgtcggacacggcagtagctgatacccgg

SEQ ID NO: 438437 - DNA, 101 bp, Homo sapiens
attttgacatttctgctgtatgcaagttttcacttatctcgaaagcctatcagcatagttaagagcttgtcaggaagatcggaggtgccaagtagcagaga

SEQ ID NO: 438438 - DNA, 75 bp, Homo sapiens
ccgctctggtcacaccaatactgttgcagattggttctgaagcaaaaacacctggatgattgcctgcgacatgta

SEQ ID NO: 438439 - DNA, 100 bp, Homo sapiens
ggtcacgccatcgttgctgccttcttcgtcaagaggacgattatttatcatttctactaaagcaggatctctaggaattaatctggtagctgctaatcga

SEQ ID NO: 438440 - DNA, 51 bp, Homo sapiens
ctgtgggggccgccgggctgcggcaagattttgaagccagcttcataaggc

SEQ ID NO: 438441 - DNA, 96 bp, Homo sapiens
tagaatgtggtggtgcctatgtgaaactgctttctaaaacaccagaactcaacctgatgatgaggagtctgatgaggaagctgtgaagaaaaccaa

SEQ ID NO: 438442 - DNA, 82 bp, Homo sapiens
gaaggggatcgggcgtggagagcccctttctgtcctgaactaaatccggattctggggctggaggacagataaagcagaagt

SEQ ID NO: 438443 - DNA, 99 bp, Homo sapiens
catcttttcgtcgcttgccggctgtctgatgaagagcagcgagaatggcgcgtgtttcagctgaaccatccgttcatcttcaagccatcatgagctgta

SEQ ID NO: 438444 - DNA, 96 bp, Homo sapiens
ccctggccctgatcatcctgctgggcttcgtccagatcgggaagggcatgagccatgagcccaagtccccttcgctagggatgctttccaccgcga

SEQ ID NO: 438445 - DNA, 50 bp, Homo sapiens
cctgaggcctccccagccgtgcaaacctgcacagtctcactctcttaccc

SEQ ID NO: 438446 - DNA, 75 bp, Homo sapiens
ttttaaaatattacttaagagaatctcaagctgctaagtctctggctgatgaacttgctcttgtggatgttttgg

SEQ ID NO: 438447 - DNA, 100 bp, Homo sapiens
gctgctccccggtgcacccgcaacaggcgttttgcaatgcagatgtaggtcagttcaccgggacctggaggcccagattgcgatcgtgacggagaaccag

SEQ ID NO: 438448 - DNA, 106 bp, Homo sapiens
cagatgccagtagtgcccgccccacccgcatgctctttgtcactccccggcggcagcacgaaagtaccatcgcttcagcatggaagggatctcaaatgtcattcag

SEQ ID NO: 438449 - DNA, 98 bp, Homo sapiens
taacatacagcactttgtggagaaagtcgtcttccacttgcacgaaagctttcctaggccaaaaagagaaagttggagtgactggtccccctgatcca

SEQ ID NO: 438450 - DNA, 75 bp, Homo sapiens
gaagatgaagaaagcagcattcaggccacacgtgtctacacttagcctctatccatggctacctgggcatcgtgg

SEQ ID NO: 438451 - DNA, 97 bp, Homo sapiens
cgggagcctagatcctgtgctttactctgaagactccattaacacccttgtgaagatcagcaaaagtgcaggagccatgttgaaaccgcatgcacca

SEQ ID NO: 438452 - DNA, 90 bp, Homo sapiens
gcaagtggctgttcttgtagttttctgcatagataaactgctgagaaggaagaatttgaacatcaacagaaagagctggagaaagtttgc

SEQ ID NO: 438453 - DNA, 74 bp, Homo sapiens
ccccaggtgtaagcgcagaaagcaggcgaacccgcggcgcaataacggatatggaatattatcttgtaaaatgg

SEQ ID NO: 438454 - DNA, 75 bp, Homo sapiens
tgattcatgtgggagagtccttgtatgccatagtattgtgcaacttaattggcttagtgtcgacttcaataattg

SEQ ID NO: 438455 - DNA, 95 bp, Homo sapiens
ttcttcaactccttcaatgaggccaccatggttctggtctcctggatcatgtgtgtgaagcctcagtttaggtcatctggtggttcagaacactc

SEQ ID NO: 438456 - DNA, 49 bp, Homo sapiens
cacgttctccaacgacgccctgaaggaattcctcctgatcagcagagac

SEQ ID NO: 438457 - DNA, 142 bp, Homo sapiens
cggctgctgagccgggtggccgccctgttccccgcgctgcggcctggcggcttccaggcgcactaccgcggaacaggcctttgagagcagccagaagtacaaagaggggaagtacatcattgaactcaaccacatgatcaaa

SEQ ID NO: 438458 - DNA, 82 bp, Homo sapiens
cagccgcagcgacggcggcgacagcagggagccccctaatgaaagtcttcagtaaatagtttttctgcatgcactgattttc

SEQ ID NO: 438459 - DNA, 75 bp, Homo sapiens
gttaaggattccaagtaactcttatttgccactgaggcggctcccagctgcgttggcgacatggccgacaccccc

SEQ ID NO: 438460 - DNA, 100 bp, Homo sapiens
gaacaaaattgtatctgtttttctcagaagagaattccacaagctcgaattacatctttacaagaggaggtgaagcatctcaaacataatctcgaaaaag

SEQ ID NO: 438461 - DNA, 75 bp, Homo sapiens
ttgagccgcgcacgctacagtacaaggctttgtgtgcaacacgtgccctgaaaagtggatcaatttccaacggaa

SEQ ID NO: 438462 - DNA, 90 bp, Homo sapiens
gctattgaaagagagtatgcacagggaagccctatggggcggatgacttcctgcctgtgctcatgtatgtgctggcccgcagcaacctca

SEQ ID NO: 438463 - DNA, 50 bp, Homo sapiens
agaggcaccaaggacctccaagacaggaacttgaaagagttacctcattg

SEQ ID NO: 438464 - DNA, 100 bp, Homo sapiens
gcaaaggcaaaggcggctcgggagattcagccgtgaagcaagtgcagatagatggccttgcaagaaaaatctcgttgggaagtcctccaacaagaacaac

SEQ ID NO: 438465 - DNA, 82 bp, Homo sapiens
tggcctgttccagagtctttttggccagatcaaaattcgccaacactacttttcatgcaacacccaacacttataagcggaa

SEQ ID NO: 438466 - DNA, 75 bp, Homo sapiens
cagtgtttgcctctggttcagctcatacaacagcttcttaggttcaccaggctggtttaacctgcgattattcag

SEQ ID NO: 438467 - DNA, 100 bp, Homo sapiens
cgggaggtgaatttccatgtcaacatagtcctgggaagcaggctgctttagatccattcatactgttgaaccttctgccaaactcaactgacaagtatta

SEQ ID NO: 438468 - DNA, 100 bp, Homo sapiens
gacagcaatggttgtatcaactatgaaggtaagaggcgagtgagcgagtccgaggggtggccggggcaggtggtggcgccgcgaagatggtcgccaagca

SEQ ID NO: 438469 - DNA, 75 bp, Homo sapiens
atggttgcattgaagcacttctgttaggaatttacaatttgaaattatggatccggatgagcaattggaaaccct

SEQ ID NO: 438470 - DNA, 100 bp, Homo sapiens
cggagagcggcctgcgggcgatcgggccgaggctcctggaatcccagctgcagtcacagaagaggagccatgagaatgaggccgaggccctccgtgggga

SEQ ID NO: 438471 - DNA, 90 bp, Homo sapiens
gaaaatggggccaattgctcctgcccagtccccatgtgagagcagcagaggcggtcttcaacatcctgccagccccacacagctacagct

SEQ ID NO: 438472 - DNA, 100 bp, Homo sapiens
atggtcttaggacatgaaccaagacaaacaacttcgaatctgggtcacttaaacaagccatctatccagcttcagaggatgattccgaagaagacggaga

SEQ ID NO: 438473 - DNA, 100 bp, Homo sapiens
caaatttcagccatcagcaagtttttcacgactgaaaacaacatagcaaaataagccaagatgtctgtggatccaatgacctacgaggcccagttctttg

SEQ ID NO: 438474 - DNA, 100 bp, Homo sapiens
ttacatgggaataggactctcggctcaaggcgtcaacatgaacagacttcctgattacagccacggccttcaggagtgaccatagacgaatcctttctca

SEQ ID NO: 438475 - DNA, 74 bp, Homo sapiens
cttggtctcactgacgtcaagaatgaagctgcggaccctcgtgattcgagtggtgaatgcatttcgtagttctt

SEQ ID NO: 438476 - DNA, 85 bp, Homo sapiens
cgcaaggaccatgataaaacatcacttattcaggagaagacagactgctgctttggacctgttggtaatgatggcctgagctaaa

SEQ ID NO: 438477 - DNA, 100 bp, Homo sapiens
ctgccgccgccgccaccgcagcaggtcacagcccctcgaggcgacagcggccccgccgcaccagagcaggaatggcacaactagagaggagcgccatctc

SEQ ID NO: 438478 - DNA, 100 bp, Homo sapiens
gggtggtgaccatcgaaaggagcaagagcaagatcaccgtgacatccgaggtgcctttctccaaaagttccagctgtggttatattgtaaatgaagcatc

SEQ ID NO: 438479 - DNA, 98 bp, Homo sapiens
gaagtactgtttttgtcatttgcaccagcttctttctccaggaaagatcaaaacgatgcactgcaaggagcatgcaagttgtccccttggacaaacag

SEQ ID NO: 438480 - DNA, 101 bp, Homo sapiens
gggccctcctgtgacctgcatgtactgggggattcgcagggaggatgtcgggacaccccggaagctgggaaatgcctgaagcaggacattctaaatgaaaa

SEQ ID NO: 438481 - DNA, 82 bp, Homo sapiens
ggagcgcggagcccggctcccgcaccatggaggaggacgacagctacgaagctggcagggcggagatgctggaccacgccgt

SEQ ID NO: 438482 - DNA, 51 bp, Homo sapiens
gaactatagcaacttggtatcactaggacgtaattgcacacgggcgcctcc

SEQ ID NO: 438483 - DNA, 100 bp, Homo sapiens
gccaaggaataaacatgcaatgaacccaaaaggggttctgaagatggcttgaaagaaaaaaatgaaataattgcccgactagaagaaaaaaccaataaaa

SEQ ID NO: 438484 - DNA, 83 bp, Homo sapiens
caagccttttgttccaggaatcacaaatgatatgcatttgcaagtgaggaagcagcacaaccctgggttttagataatttcta

SEQ ID NO: 438485 - DNA, 88 bp, Homo sapiens
gcaggaggaggcagaactgccagccaagatcctggttgagtttgtggtggagtacctgaagggcctctgcagcccagaactgcaggat

SEQ ID NO: 438486 - DNA, 90 bp, Homo sapiens
cgccgccagtggagcccccgcgcgcccggccggcccggagcaccgagctcgcggcacgatttcgccagaagtttgagtatcactactcct

SEQ ID NO: 438487 - DNA, 75 bp, Homo sapiens
ctcttctactgtctcagaccttaggggcccagaagacacctgctttgagtttggtgtttttcctgccatcctgag

SEQ ID NO: 438488 - DNA, 74 bp, Homo sapiens
actaatcaccagaacaaaatgtgcaggttaatgactccagagagtaagatcagattcgtccacaaagagatggg

SEQ ID NO: 438489 - DNA, 100 bp, Homo sapiens
caaaagtggttacttctgactggtatatctgcacagactcagaaccgtgctgcatactatcctcctagccaaattgctcaactaagaccaagtcctcgct

SEQ ID NO: 438490 - DNA, 75 bp, Homo sapiens
gagccactgacgccgggaccgggaccgccgccgccgccgccaccatggttctgattggaactgattccatcccga

SEQ ID NO: 438491 - DNA, 128 bp, Homo sapiens
tggccctcgggctgcgggagccgggctaggacgccgagcggtgactccccgccgctcccgggggccgtgacggttttggacatagtgaaaacaagtattcgtacagttcttccacgcatctggaaggt

SEQ ID NO: 438492 - DNA, 75 bp, Homo sapiens
tttacatcagaagaggagaggatacgaatgaagcaggagcaggagagaaatctccaaattggacatccagagcag

SEQ ID NO: 438493 - DNA, 100 bp, Homo sapiens
tcttttctagagttctgcctcgcttcccggcgcggtcgcagccctcagcccacttaggataatggcgacagctgaggtcagaaattggctttggaaaaat

SEQ ID NO: 438494 - DNA, 90 bp, Homo sapiens
gggcagctggagcgttgcgagcgcgaatggcacgagctggagggagaatttcaagaactgcagtggcctgattccaccaagagaaggccc

SEQ ID NO: 438495 - DNA, 75 bp, Homo sapiens
gccgcggatctcaccgccgctcagggctcagctggaagctcagaaagccacgcaggacttccagagggccacaga

SEQ ID NO: 438496 - DNA, 100 bp, Homo sapiens
atgtatgaaaattcctactggacaagaatatgctgccaaaattatcaacaccaaaaagctttctgctagggctgtgcctttggctgcaacaagtatgttg

SEQ ID NO: 438497 - DNA, 81 bp, Homo sapiens
ctgacataccaggactgcctgagacaagccacaagctggaattgaatgatctggcacgggaccctccagcacagtgttcag

SEQ ID NO: 438498 - DNA, 74 bp, Homo sapiens
gtcacagagggagatgtcaggtgggagaaaggtcagtcaggagatcctagagctattaaatactacaacagcca

SEQ ID NO: 438499 - DNA, 98 bp, Homo sapiens
gacttgaagaatgaagccgcagaccctggcgacctgcaggctgggacaatgaaaagaaaatagctattttacatgaaaattttacaaccgtgaagccg

SEQ ID NO: 438500 - DNA, 100 bp, Homo sapiens
aggaagccttgcggagagtgacggagaatctggccagagctgcggtgcaaccctgggcagtttgcgtgtcgcagcggcaccatccagtgcatccccctcc

SEQ ID NO: 438501 - DNA, 75 bp, Homo sapiens
accaagagaatgtgtcagccgatgcaccgagtccagcccaggaaaatggagagagagaagctgcatgaggccaat

SEQ ID NO: 438502 - DNA, 98 bp, Homo sapiens
acacattagttctgcttgacaccgagggcctgggagatgtagagaagatgttttcatcttctgcccctgtggatcaggagattaaaagccttcgagag

SEQ ID NO: 438503 - DNA, 51 bp, Homo sapiens
tgccctgaggagtccccgctgcttggagcctagtaataaacgggtcaaacc

SEQ ID NO: 438504 - DNA, 101 bp, Homo sapiens
gtgtgaaagcattgatggaatgtgctttagaagttaaaaaggatggtaagcggatgtttggcacctattttcgtgttggtttttatggaaccaagttcggg

SEQ ID NO: 438505 - DNA, 50 bp, Homo sapiens
ctggttcagaatttaaacatctttctaggctgaccaactgactgaagagc

SEQ ID NO: 438506 - DNA, 100 bp, Homo sapiens
agggcggatggtggtgatggaagcaggtggaattatgccctgttggttccaatgctgggattggctgcttttcgctgaggctgaggtggcctccttgaac

SEQ ID NO: 438507 - DNA, 100 bp, Homo sapiens
tcctgtttgagcaccctgcagcccccacccaagatggcctggggccgggctagagcgacatcatggtattccccttactaaaaaaagtgtgtattaggag

SEQ ID NO: 438508 - DNA, 100 bp, Homo sapiens
aaaagaaggacacgcagggctttggggaggagtccagggagcccagcacagtcattgaagactctccggaattcagatttgaaaccatatattatcttca

SEQ ID NO: 438509 - DNA, 100 bp, Homo sapiens
aacatggaggcggaggtcgataagctggaactgatggattttttatcaagcagaaatgcatcgaacaacgagaatcaagatcactgagctaaatccccac

SEQ ID NO: 438510 - DNA, 87 bp, Homo sapiens
tttgtccgtaaccttgtggagaagaccccggcgctggtgaacgagctccctctttgcccactagcagggcattagctggtgctgaag

SEQ ID NO: 438511 - DNA, 100 bp, Homo sapiens
gaatggcaagatgaagattttccgattggtgaaagtggtgctggaaaaacagtggctgccaaatatatcatgagctacatctccagagtgtctggaggag

SEQ ID NO: 438512 - DNA, 100 bp, Homo sapiens
caacaatgagtacaactaccgctgctggaccacaaaccgctgccagaaaacttcacgagaagtttgaccttctaaagcggacacaccaagaagaaaagaa

SEQ ID NO: 438513 - DNA, 75 bp, Homo sapiens
tggaccgccatctccgccctggaatacggcgtacccgtcaccctcattgattgcgcagtctctttgtggagagga

SEQ ID NO: 438514 - DNA, 140 bp, Homo sapiens
atcgaattacagctgctagccaggaacatggactgaagtatccagcgctcattgggaatttagttaagtggaatcccccaaagaaggtaaagggagcaagccttccccactgtctgtgaagaacaccaagaggaggctgg

SEQ ID NO: 438515 - DNA, 101 bp, Homo sapiens
gacaaaattttgtggcgctctgcgtcccctgaagggcttttttgaagaagaagaaggtaaagagtatatttataaagagcctaagctgacaggtctgtccg

SEQ ID NO: 438516 - DNA, 98 bp, Homo sapiens
aatgtcattcaccagaacgtgctcaccatcgatctcctgaccgaggcctagatcgatcattagaagaatgtttctttctcagcaaaatagaggagaag

SEQ ID NO: 438517 - DNA, 80 bp, Homo sapiens
cccagaatgacaagcatactggcccagtgagagccttggatgtgaacattttccaggtggactgggtggttatggatcag

SEQ ID NO: 438518 - DNA, 75 bp, Homo sapiens
tgccagcacctttcggcttctgagacggcggcagcagcggcattcagggacactttgaaacaacatggtgctggg

SEQ ID NO: 438519 - DNA, 50 bp, Homo sapiens
ggccgcgggcgcgaccggaggcaggtattagaaaactactcggatgctcc

SEQ ID NO: 438520 - DNA, 90 bp, Homo sapiens
gctggttggagattctccggggacccttccgtatctgcctaggcattttgctgtctcctcctaatacgaaatgcactcggtgatggaaag

SEQ ID NO: 438521 - DNA, 101 bp, Homo sapiens
gctgtgcctcctcctcctgtggtggaggagaaggaaaggtctgtgcagacttttgcagacaaatcaaaacaagaagctctgaagaatgacctggtggaggc

SEQ ID NO: 438522 - DNA, 90 bp, Homo sapiens
cggatctggaggagcagttgtctgatgaagagaaggtggaggaaggagaggccagtctaccctcccctgccatgaccctgtcatcagcca

SEQ ID NO: 438523 - DNA, 98 bp, Homo sapiens
ttcgttcaagacaggtgtttaagcattgttagcactgctagagtttgctgaagagaagatgaaagtgaactatgtcttcatctgcttcaggaagggcc

SEQ ID NO: 438524 - DNA, 100 bp, Homo sapiens
ctacaaccttcgatctcctgacgagttcactggttgaggacccagttcccatctttggatatagaggtcgatggtggagtaggtcctgacactgtccata

SEQ ID NO: 438525 - DNA, 102 bp, Homo sapiens
gctctgtgagggtttcaatgaggtgctgaaacagtgccgacttgcaaacgaccccaccaacaactgaacgctttggtcaggctgctacaatggaaggaattg

SEQ ID NO: 438526 - DNA, 130 bp, Homo sapiens
gtcctttctctcaccgtatcaggaacacaaaactgcggcccttgtctgcaaacagtggtatcgacttatcaaagcccaaaggtgcagacagaaagcaaaaaacggatagggaaaaaatggagaaacgaac

SEQ ID NO: 438527 - DNA, 90 bp, Homo sapiens
ccatcatcctcgtgggcaacaagagcgacctggtgcgctctcgtgaggtctcggtggatgacacaactcaaggctcagaacagcaggatc

SEQ ID NO: 438528 - DNA, 75 bp, Homo sapiens
gaagacgcggagaaaaaagttctcggtgattgtagagaaggctccaaaagccagggtgcctgatctggacaagag

SEQ ID NO: 438529 - DNA, 100 bp, Homo sapiens
ctcccgcccgcctgcccagagagggccagagcgtcggggaggcaagatgatccaccagcggttccatcctacacttggaatacagttatggccacccagg

SEQ ID NO: 438530 - DNA, 96 bp, Homo sapiens
gctgggatctatgagtggaaaggtgaccaagcccaaagaggagaaagatgcttctaaggatcactactggttacaacctggaagatgaccgctgtg

SEQ ID NO: 438531 - DNA, 77 bp, Homo sapiens
cagatgcaggagcagacgctgcagttggagcaacagtccaagctcaaagctggagtgcaatggcgcaatctcggctc

SEQ ID NO: 438532 - DNA, 74 bp, Homo sapiens
cattcggctgtggatagagaagcaggaagagcactggacttggagtcagaacatccagtcatggataaaaatga

SEQ ID NO: 438533 - DNA, 100 bp, Homo sapiens
ggccttccgacgtgggcggtgggccccagccccacagaccagcccagcattcagaagaagctcattcacacagaagacccatttaatgatgaacatcagg

SEQ ID NO: 438534 - DNA, 100 bp, Homo sapiens
aggcttcttggcctggttatataatgaaagtattgttatgacagcagagggtgatgctccagagctgccagaagaaagggaactgatgaccaactgctcc

SEQ ID NO: 438535 - DNA, 83 bp, Homo sapiens
ctgtttgagagtgggaacatgacgcaggtgcaggtgtctcttctcgccctggcggggaagggcaaaataacatggcagccaga

SEQ ID NO: 438536 - DNA, 100 bp, Homo sapiens
gaggcggaaggactcctggaatgccacaaatgcaaatacttgtgcactgggagaggtttagacgtctgtgccacttgccatgaacatgccacatgccagc

SEQ ID NO: 438537 - DNA, 100 bp, Homo sapiens
tccaaccacagggccacagagctggaggattttgtgtggatgagggctcggctacagcaagaagtagaggagcagctcaaaaagaaatgtttcactctgc

SEQ ID NO: 438538 - DNA, 82 bp, Homo sapiens
gacggattcatttagagctgcggaacaggacgccctctgatagccaaatctcctcagccacctgttgaagaagaagatgaac

SEQ ID NO: 438539 - DNA, 88 bp, Homo sapiens
acccagctcttccaggactttgagccagtccagaccctgctgctgtcttcaaagaaggtgcttctcagcttcacgggaaagggcctgc

SEQ ID NO: 438540 - DNA, 73 bp, Homo sapiens
ttaagaatgttaattaaagctaagttggattcccttcaaggtgtaatcctgagagattcacatggtgttgcac

SEQ ID NO: 438541 - DNA, 90 bp, Homo sapiens
aaacagaataagctggagcaagtagaaaaggagttgttgagagtagcagaaacagagcaaatgcagcgttacaatcaaagacttattgag

SEQ ID NO: 438542 - DNA, 75 bp, Homo sapiens
ctccgagcctgtgacgtttgcggcagccaggccgtcgacgatgcccagacagagtctcgctctgctgcccaggct

SEQ ID NO: 438543 - DNA, 100 bp, Homo sapiens
agacagctcaggaagcaactttggtagatgatgagctggagatcaaggcctactatgcaggccacgtgctgggggcagccatgttccagattaaagtggg

SEQ ID NO: 438544 - DNA, 100 bp, Homo sapiens
cggaccgcagtgccccaagagaggctaccaagcagtttctcgaagagattaacaagtggacagttcagtacaatgtttccccgctgtcttggaatgtggc

SEQ ID NO: 438545 - DNA, 97 bp, Homo sapiens
gcgggcggcgcgggggagatggttttacaagatgaattagaaaaccgttctaatcaggtgcgatgtgcagagaaaaaattacaacacaaagaattgg

SEQ ID NO: 438546 - DNA, 88 bp, Homo sapiens
cagcctcgacccccggggctcaagctattctcctgcctcaccctcctgagtagataggactacagaatggggaatgcatcagcaaccc

SEQ ID NO: 438547 - DNA, 75 bp, Homo sapiens
cagcatgcccaagcggggcctggaggtcagcaagtgcgagatcgcccggtgtcagctgtgatgcatgtttaaaag

SEQ ID NO: 438548 - DNA, 101 bp, Homo sapiens
ggccacggcgcggacgccatggttggagtcagttagctgctatgcactgtgttatgctgccagacctactgggattggataaatttaggcctccccttctg

SEQ ID NO: 438549 - DNA, 108 bp, Homo sapiens
cttgcagctttttatggtgtttaatctaatacacttaagctgcagtcccaaaattagggggggaaaaaaatagtggctttgatgtcctctaccataatatgaaacatg

SEQ ID NO: 438550 - DNA, 75 bp, Homo sapiens
cccgactgcaactgctggattgctgcaaggctgagggacgagaacgaggaaaatgtttataggaggccttagctg

SEQ ID NO: 438551 - DNA, 123 bp, Homo sapiens
cgtggaggagctgtgcagccgcgaggaggcgcgggaggtgttcgagaacgaccccgagacgacaatgcagatcttcgtgaagactctgactggtaagaccatcaccctcgaggttgagcccag

SEQ ID NO: 438552 - DNA, 101 bp, Homo sapiens
ctgctcaacgtgaagatgatgaggatgaagacctttatgatgatccacttctacttattaaatatgagactgagggtgtgcccagtactgccatccgagag

SEQ ID NO: 438553 - DNA, 75 bp, Homo sapiens
cgcggtgctcctcgggcgccaagcggtcttcggggacgaggaagccacagccccatgagaactccagacccttgt

SEQ ID NO: 438554 - DNA, 90 bp, Homo sapiens
ccccagcacaggaaagcagcgtggtcaggaggggttaaacttcggctgaagcacaggactcacagaaaacactggacttccccggaagct

SEQ ID NO: 438555 - DNA, 75 bp, Homo sapiens
acgcagcctggggactctgcctcgtgccgctgagcctggcgcagatcgcgactgcatttgcctccagacttgtca

SEQ ID NO: 438556 - DNA, 50 bp, Homo sapiens
cacattaagaagtacaatagcattcgcgattgttaaaggaaatgggctgg

SEQ ID NO: 438557 - DNA, 99 bp, Homo sapiens
gaagggaaggcgcgagtgaggaaaggaggtactgtagaaactcccatcaagactgaagcagacgttttggcagaaaaccaggttcttgatagcagtgct

SEQ ID NO: 438558 - DNA, 115 bp, Homo sapiens
cctggacgacttgtcggcgccgccgcaccaccgcagcatccccaacggcctgcacggagccttcacgtaaatgggtccagtcatgcctcccagtaagaagccagaaagctcagga

SEQ ID NO: 438559 - DNA, 83 bp, Homo sapiens
cggcatcttgtgcagacgcactactataactacagggacactgcccatctctaagataagaacctggaaaggggactctgttg

SEQ ID NO: 438560 - DNA, 100 bp, Homo sapiens
tagtcatctcggaaggcctcagaaaaagccttaaagacatgggatgtagagctggaaagatctgcagaatcctgggctgaaagttgcttgtgggaacatg

SEQ ID NO: 438561 - DNA, 82 bp, Homo sapiens
caagatggcggccagcaggaggctgatgaaggtggctattatcatggaaaactaatttttcccagagaatttcctttcaaac

SEQ ID NO: 438562 - DNA, 98 bp, Homo sapiens
catcctggaacctgggaaaggccttatacaggatgctgtgttctttgctcctttgtgaatgtctgttgctggtagctggttatgctcatgatgatgac

SEQ ID NO: 438563 - DNA, 90 bp, Homo sapiens
gcatgctaaccaataccgcagcaagtctcctgctgtgtctgatgatttgtgagcctcaagtgactactctgtggaatcatctgtccttgc

SEQ ID NO: 438564 - DNA, 82 bp, Homo sapiens
tgcagcccctgcgtcgccgggaccctcgcgcgcgaccgccgaatcgctcctgcagcagagctcaaactggaggattataagg

SEQ ID NO: 438565 - DNA, 96 bp, Homo sapiens
atgacccaggcctatgccaatcagcatttcacattcctcatggttggttcaaaggcccctgggggagaagaagacgggcgccaaaaggcagaagaa

SEQ ID NO: 438566 - DNA, 100 bp, Homo sapiens
gtcccaccgggcaggatgaaggcagagcgtgtggcatctccacctcaagggtttgctgggatgggaaacctgctcaaagtccttaccagggaaattgaaa

SEQ ID NO: 438567 - DNA, 50 bp, Homo sapiens
cccggatctcaacaatcccttcaaggaccgtataatagacgctggcccca

SEQ ID NO: 438568 - DNA, 118 bp, Homo sapiens
gggccctgtctgctctgtggactcaacagtttgtggcaagacaagctcagaactgagaagctgtcaccacaggaattgaatgatctggcacgggaccctccagcacagtgttcagcag

SEQ ID NO: 438569 - DNA, 90 bp, Homo sapiens
aggaagtagaagaagactacaacccttgtgaagaggacctcttcgtgctgcaggagaccgggtgatggtgttgaaccggtcagggatgtg

SEQ ID NO: 438570 - DNA, 83 bp, Homo sapiens
catgaaaccattaaagttttagaagatcgcaatcatttggggaagaatctacagttgctgatggacagagtggatgaaatgag

SEQ ID NO: 438571 - DNA, 75 bp, Homo sapiens
cccaggagaaaagccagtattgcttgtgctcctaacaacctgtctcttggcaccttcttactgagatacgtaatg

SEQ ID NO: 438572 - DNA, 83 bp, Homo sapiens
ggcgatccgggcgctcgagacttaccagagccacaaggtgacctgagcatctctgcagaccgcctgagtgagaagcgctctcc

SEQ ID NO: 438573 - DNA, 100 bp, Homo sapiens
aaaccttcactgctaagaggaactaagatctagagtatctcctcgaggaagtacaactgaaaaggtcacggatcgcctacagtgacgaagtacggaatga

SEQ ID NO: 438574 - DNA, 83 bp, Homo sapiens
agtacttcttccttccaaggaccagcggtagctcccgggagattccagacattctaaatgcaagtaatctgaaaacatttagg

SEQ ID NO: 438575 - DNA, 122 bp, Homo sapiens
ctggactctgctcagagagatttgtatagagatgtgatgttggagaactatagcaacttggtatcactagacttacctcaacacttcactccatggcagttcccgagacccgccctaaccac

SEQ ID NO: 438576 - DNA, 100 bp, Homo sapiens
cagacgcggtggagccgccggagtctgagaaggctctacacagagaacagagggagctggttgctgtgctgagggagcctgagtgaggagaccgccagcc

SEQ ID NO: 438577 - DNA, 75 bp, Homo sapiens
ggtgttcctgatgatctgctctactcattccctgttgtaatcaagtcgttccccatcaggaagtcctcgcagaag

SEQ ID NO: 438578 - DNA, 75 bp, Homo sapiens
gcgccgctctccgagctcgatccgctgctcgcacgggagccagctgggtgttttacatgtggcacccataaaaga

SEQ ID NO: 438579 - DNA, 75 bp, Homo sapiens
atttcttctttgagaaaaacctgaaagatgtctcaggtagctataaccagcctctgggcctgtccagcacccagt

SEQ ID NO: 438580 - DNA, 101 bp, Homo sapiens
aggaagttagtgaatctatggattttagatatctgccagatgaaaaagcatgaatgtcagcatcatcattcaaagaacaagaaacattctaagaaatctaa

SEQ ID NO: 438581 - DNA, 100 bp, Homo sapiens
aatagtggcatggaagatccatttgggttaatgcgagatgatacaatatacgaggatgaagatgtaaaagaagccataagaagacttcctgagaaccttt

SEQ ID NO: 438582 - DNA, 96 bp, Homo sapiens
gcaggagttgccgcagccccaggctgagacagctggtgagcttgttgctcattggagtggctgcttggggcaagggcctgggtctggtgtccagca

SEQ ID NO: 438583 - DNA, 100 bp, Homo sapiens
ttccccgcaacttcccacgagtgccaggtgccgcgagcgccgagttccgcgcattggaaagaagcgaccgcggcggctgctggaaactgacaaactagct

SEQ ID NO: 438584 - DNA, 90 bp, Homo sapiens
cattgttggatactggtgacatcatcattgacggaggaaattctgaatatagggacaccacagaaatcaaagagcaggaggttgtggaca

SEQ ID NO: 438585 - DNA, 95 bp, Homo sapiens
tttaaaagacagtcctcgtcagcactgactttcagctatggaatcgtgtctttggtgcaacactaacaaggcttgtctggactacccagttacaa

SEQ ID NO: 438586 - DNA, 82 bp, Homo sapiens
ccaccagtccaactcgggtcgcccccaccattatttcggtgtggacactgccagcggctgcagccgacttggaatgacctgg

SEQ ID NO: 438587 - DNA, 100 bp, Homo sapiens
agacggcaaggaaatggctgaagaatatgacgagaagacgagtgaactacttggctggtggttcgtgagcacttctgaggagcagggctgggtccctgcc

SEQ ID NO: 438588 - DNA, 87 bp, Homo sapiens
cagtgttgtgtggaagccagaacatcgttctcaatggcaagggccatgtttatgagtggactaagtgaaagcaaacaaacccatgta

SEQ ID NO: 438589 - DNA, 83 bp, Homo sapiens
ccttcacccctggcttctaagcccacagctgatggttcctgggaaggaaggtggggtaccccttgctcccaaccagcctgtcc

SEQ ID NO: 438590 - DNA, 90 bp, Homo sapiens
catctttgccaggactgatgcagatgcccctcctccaccagaggactgggaggagcatgtcaacagagtattgggaaagggtcgttgtgg

SEQ ID NO: 438591 - DNA, 100 bp, Homo sapiens
atcacttcgaagcccccggtgcagtacaggaagtgctgtgtgatgtgttaagagcatattagaaggaatggttttgtctaattttcttcatgagttatgg

SEQ ID NO: 438592 - DNA, 98 bp, Homo sapiens
gctccctgcctactcccccaccggggatttcaggacatggatttgattgacatactttggaggcaagatatagatcttggagtaagtcgagaagtatt

SEQ ID NO: 438593 - DNA, 83 bp, Homo sapiens
aaatgtactccttgtgtcttttagcaacattaatgggatgctgaaaacgccattcaacagatgggtggccagtggcttggtgg

SEQ ID NO: 438594 - DNA, 96 bp, Homo sapiens
gcaacttatcctgtcacccctgaatgtgtttgtcagtgataactatcagcctgtggacatctctacagcaatgagtgaacgggcacttgctcagaa

SEQ ID NO: 438595 - DNA, 82 bp, Homo sapiens
tgacagtctccaaattcgcctccatctgtaccatggcgccatgtcagaaccggctggggatgtccgtcagaacccatgcggc

SEQ ID NO: 438596 - DNA, 82 bp, Homo sapiens
gaaggactgaagatacaggccatgaacagcctgaagcaggacattctaaatgaaaagactgaattggaagcaacacttaagg

SEQ ID NO: 438597 - DNA, 97 bp, Homo sapiens
tacatctgaaagccgggaaatgtgagaaagatcagtctaaagaaaaggagaagaaagtgaaaaaaacaattccttcctgggctaccctttctgccag

SEQ ID NO: 438598 - DNA, 101 bp, Homo sapiens
agagcctactgagcagcctgagtgggaagagagaagggcacagttacctaagtatcaacgtaatcttcctcggccaggacaggcccccatcggtaatccac

SEQ ID NO: 438599 - DNA, 100 bp, Homo sapiens
ttgagtgtgtatctctacatgcgctctttgaaagcgccccggaatgacctgtcgcctgccagctctgggttttcagagaaagatgctgatgaggtgaaag

SEQ ID NO: 438600 - DNA, 51 bp, Homo sapiens
aaaaaatttcaggattggtactacaagtttaaggaagaaatctctaaacgt

SEQ ID NO: 438601 - DNA, 76 bp, Homo sapiens
cagggccggttctgcaccatcttcaggtcctactccaggggcgctcagcaagagtgagccatggagctacgtgtgg

SEQ ID NO: 438602 - DNA, 117 bp, Homo sapiens
accgggatcgtgaccgagaccgtgaccgagagcgtgaccgagagcgcgaatatcgtcatcgttagaagaaatgcactcggtgatggaaagagagccactattctgaagaacacttgg

SEQ ID NO: 438603 - DNA, 100 bp, Homo sapiens
aggagtcctgcttatcacaatggtcccctgacaagcccaccaggccccctgctgagatggctgtgaccctgggctgacccgcccagtggcacattgactc

SEQ ID NO: 438604 - DNA, 100 bp, Homo sapiens
ccggggacctgcatgtgtgtgcgcgcgaaggagcggaagaatggcagtgctcaaactcaccgaccaggctgaagggtatgtgattggcagctgtattaaa

SEQ ID NO: 438605 - DNA, 98 bp, Homo sapiens
tgagatcgcacttcctgcagtgggcattagccacgtccaggccgccatggcatcagatgaaggcaaactttttgttggagggctgagttttgacacca

SEQ ID NO: 438606 - DNA, 75 bp, Homo sapiens
gcctccccctctaccactcagcaggcggaccgccgctaccagagccggctgcaagacctgaaagatcgcctggag

SEQ ID NO: 438607 - DNA, 96 bp, Homo sapiens
cgcgaagtggccgcatccgcaagtacgtttcaggagacggcagcgaggctaccttgcatggtgtggtggacgagctggtgcggttccggcagaagg

SEQ ID NO: 438608 - DNA, 75 bp, Homo sapiens
ttcgatagaccactgcctgtgtctcgtcttgtatctctaattggaagcaatatggccatttctgatgaactgcac

SEQ ID NO: 438609 - DNA, 48 bp, Homo sapiens
tcggagacacggtggaaacgcttatgagagaagaagaaggaggttcct

SEQ ID NO: 438610 - DNA, 75 bp, Homo sapiens
ccactcccgccgcgcaggagtcgggcaccatcccaaagaagcggtgctttgcaagatatcaccttgtcacagcag

SEQ ID NO: 438611 - DNA, 99 bp, Homo sapiens
ggacatcctggaagctgggaaatggtgtgaagcttacactctctgctctggtagatgggaagagcattaatgctggaggccacaaggttgggctcgccc

SEQ ID NO: 438612 - DNA, 74 bp, Homo sapiens
ggggcttgccctggtcttgctcggccgatgaagtgcagaggtttttttctgatgatgaggagtctgatgaggaa

SEQ ID NO: 438613 - DNA, 75 bp, Homo sapiens
aaggattccaagtaactcttatttggtcttgatgcagaactttattatgtgagaaatgaccttattagtcactac

SEQ ID NO: 438614 - DNA, 51 bp, Homo sapiens
ggggtcctgaggagaactatagcagactctgtttgctggctacacggacaa

SEQ ID NO: 438615 - DNA, 99 bp, Homo sapiens
cagctttataaatccccagccaaaaatgcctctagtggaacaaagtcctgaagtgtgccggtccaacaaaagcccttgggtctgtttgacttgttcaag

SEQ ID NO: 438616 - DNA, 50 bp, Homo sapiens
cggaaaactcccaacttcctggcaggcccccagcccctcatgtcagagcc

SEQ ID NO: 438617 - DNA, 82 bp, Homo sapiens
gccaaacgtgctgctaagaaacaagtgattgacttgggttccggtaaaggctacctaagctcttttttgtccttgaagtatg

SEQ ID NO: 438618 - DNA, 83 bp, Homo sapiens
gtggtttttcggatcatgtctggtggctccgcggattataacaggtcgggaaagaggttaaagaagacacgcaagtatgatat

SEQ ID NO: 438619 - DNA, 100 bp, Homo sapiens
cccgagcgctgcgtcctgcggctgccgcagcgggaaccgcaagagcttggtggtaggaacgccctccccgaccctctcccggcccctgtcgccattgtcg

SEQ ID NO: 438620 - DNA, 100 bp, Homo sapiens
agaaaaatgaacccaaacatagacttgcaagaacaatatgaatgatgattcaagtaacttgaaagaaggcagtaaagacaatcccgaacctctaaagtgc

SEQ ID NO: 438621 - DNA, 76 bp, Homo sapiens
cctgattggaacccagtccacagatgaaaaagagaggtttgaccctactcagtttcaagactgtattattcaaggc

SEQ ID NO: 438622 - DNA, 90 bp, Homo sapiens
cagggagtgcatcaaaggtgtgaacacagccacttctgccccaccaacgttgggccaaccaaaaggagtcagtgccagtcaagatcgaaa

SEQ ID NO: 438623 - DNA, 100 bp, Homo sapiens
ggcctacgccacgcagcgggagaagcttacctttctggaggaggatgacaaggttatcaatactctggctgaccatcatcatcgtgggactgactttggt

SEQ ID NO: 438624 - DNA, 90 bp, Homo sapiens
cgccaggcggatctcagaaggccagttcaaaggaagtgactttggtccagagacttctccagtcctgcaccttgaccacagtgctgactc

SEQ ID NO: 438625 - DNA, 75 bp, Homo sapiens
gcagcagccccaccctcagcagcagcccccctgtgctctgcaaccccaagtccgactttggtttgagcaactgcg

SEQ ID NO: 438626 - DNA, 48 bp, Homo sapiens
attcagcagtcctgtcaagtataaataatgtttggaatggttttggaa

SEQ ID NO: 438627 - DNA, 100 bp, Homo sapiens
caggacctcaaggtattcccggatgcaatggaaccaaggttgcatctggaggtggtggggttggagatggtgttcaagaaccaaccacaggcaactggag

SEQ ID NO: 438628 - DNA, 74 bp, Homo sapiens
gttagcgtgagtgatcactctcaatcccgggtccaagtgtgcctgccatcaactaactatccaggctacagcct

SEQ ID NO: 438629 - DNA, 87 bp, Homo sapiens
aacatccagaagatcacacagtgttatggggcgcctacccttcttcagcaagatgggaacagctgagtctgaaggaagagaaacact

SEQ ID NO: 438630 - DNA, 98 bp, Homo sapiens
atggctcattgtagcctcaaactcccaggctcaagcagtcctaccatgtcagccttcccagtagctgggaccacagtgccctataaggactgccaggc

SEQ ID NO: 438631 - DNA, 75 bp, Homo sapiens
gctgagcagagccctgcgatactattatgacaaggactgagtggagtagctggagtgagttcccgctgtgaaaaa

SEQ ID NO: 438632 - DNA, 98 bp, Homo sapiens
gggatgagaaggatgaacatggccgagcttactatgaattccgagaggaggcttaccacagccgggatgaggagaatttctgtgccactgtgcccaag

SEQ ID NO: 438633 - DNA, 75 bp, Homo sapiens
aacaagtgaaattgaggtcacaccttcagtccttcgagcaaaataactgaagtgaagtgatggactccgatttgg

SEQ ID NO: 438634 - DNA, 98 bp, Homo sapiens
gagcctcagtgactgccaccctggaggacagggcacaacaaccgtttctgagattaatgattcatcaagggatagttgtacttgtctcgtgggaatca

SEQ ID NO: 438635 - DNA, 50 bp, Homo sapiens
gcagcagcgaaccaatcccaaggtatttgaaatatctcaccaaaaaatat

SEQ ID NO: 438636 - DNA, 75 bp, Homo sapiens
ccgagggtgttcttgacgattaatcaacaggtacaggtttgcagattccgccagcagcacagcaagctctacaga

SEQ ID NO: 438637 - DNA, 82 bp, Homo sapiens
cgctggtgcatctgtttgccggagggatttttagactctgaggagcagttggagctaatccacattatggaaatggaaacca

SEQ ID NO: 438638 - DNA, 90 bp, Homo sapiens
caaacaatgggtcagtgttctcggagaactcctggaagccccgtcttcctcctcatgcccattgcctgaccagagccaccctgcactcag

SEQ ID NO: 438639 - DNA, 80 bp, Homo sapiens
tttctgtacaacacaagctggccttggcagtttcggtgcatagaaaatcaggaacaggcagaagctgaagggtgtcagag

SEQ ID NO: 438640 - DNA, 50 bp, Homo sapiens
ttcagcagtgcacagagccggaggatcgcagtggccatcgtggtgggcgc

SEQ ID NO: 438641 - DNA, 100 bp, Homo sapiens
gagcagcaactcacccagcacacaaaatggatctcttacgggggaagttgctgaagttatatttgtaggtgctaacccgaagaattcagtacaaaaccag

SEQ ID NO: 438642 - DNA, 82 bp, Homo sapiens
gcagtacctgcagaaggtctctggagacatcttcagcagctgagcgggctttggacaccatgaactttgatgtgattaaggg

SEQ ID NO: 438643 - DNA, 50 bp, Homo sapiens
gctggagacaaggagctacagctaaagtatcttggagatggccgcttcca

SEQ ID NO: 438644 - DNA, 83 bp, Homo sapiens
caagaagcaaaaaagggactgctaagaagataccaccagaacatccagtcatggataaaaatgagctggttcagaaggccaaa

SEQ ID NO: 438645 - DNA, 88 bp, Homo sapiens
gggaagaagcagctggacccgctcaccatctacggcatccggttgttctaagaacggaagcatctgggctggatggaatttagcatca

SEQ ID NO: 438646 - DNA, 82 bp, Homo sapiens
gcattatccaacggctgctggaagggcagctcagttctggcaccaaaccaaatccccaggtctactcgaggctcctcaccag

SEQ ID NO: 438647 - DNA, 100 bp, Homo sapiens
catgctgtggacaccagcacccccagacctgacccttggggaagagatgctgggacccagaaggagtaagtggcagccatcctggccattcacatctcta

SEQ ID NO: 438648 - DNA, 74 bp, Homo sapiens
gtggtcgtttgtttctccaaggtttgaaaagcagctggcctgcaaggtcgacaaagatgctgaattagtggccc

SEQ ID NO: 438649 - DNA, 100 bp, Homo sapiens
aaattcagcctcaaaaccgtcctgctgcttgctgaccaaatggcggccatgatggccgaggagctgaagaaggagcaggacacaagtgcacacctggaac

SEQ ID NO: 438650 - DNA, 80 bp, Homo sapiens
aaactcatccacgatggctgcctgctctggaagacagcgacggggcgcttcaaaggtgtggatgtggaagcagccaagcg

SEQ ID NO: 438651 - DNA, 74 bp, Homo sapiens
agacatctacaaccttcgatctcctgacgagtcaggagaggctcacggatcaggaaataggggatgggaaaggc

SEQ ID NO: 438652 - DNA, 100 bp, Homo sapiens
attagcagaagacattatgtcagaacccttaggagaaatcttgagagtggacagcaattgtgaagatcgccagagagttctgtgtttcatcaccgccgaa

SEQ ID NO: 438653 - DNA, 88 bp, Homo sapiens
gaacggagagcgtagtgaccatcatagaagcgtctgcaccgtttgaacctgctgcagtctcatccccaggaagtgatgtacttccaac

SEQ ID NO: 438654 - DNA, 101 bp, Homo sapiens
ctgaaattaacagacaagttggtcaaaaacttggactctcaaatgggggacagcgtttttgccggttgtcaaatcccttacccaaaacgagaatttttaac

SEQ ID NO: 438655 - DNA, 82 bp, Homo sapiens
agagagcgagctgagtggttgtgtggtcgcgtctcggaaaccggtagcgcttgcagcatgccccctccatcccatcggaaga

SEQ ID NO: 438656 - DNA, 75 bp, Homo sapiens
agtacacaactctaaccagtgtccagacggcaaacttgatgtcaattctaactgtgttaatgaagagcaaccaga

SEQ ID NO: 438657 - DNA, 96 bp, Homo sapiens
ctaggcctacgagggccccgcccagtgtcccaagtgtgccacctgggcttgaaggcatgaaggaacaggacctgtgcaacaagataatggctaaaa

SEQ ID NO: 438658 - DNA, 75 bp, Homo sapiens
gccagctgaatagcaaccctgaactgaggcagtctaacttctccctggccatcctgaatgtgggggccccggcgg

SEQ ID NO: 438659 - DNA, 100 bp, Homo sapiens
tgaccctgtgacggagtttataggtagaagaagtatgtcttcctggaccccctggctggtgctgtaacaaagacccatgtgatgctgggggcagagacag

SEQ ID NO: 438660 - DNA, 95 bp, Homo sapiens
tgaaacagcagttttggtagaagatgtggtacacactcagttaattaatctggaaaaatttgagggactgtttcggacttatgatgactgtgtga

SEQ ID NO: 438661 - DNA, 98 bp, Homo sapiens
gcaaactgtcagaaaagagtagcctgggctgtctggaaatctgagagaaaagaaaccttgtttattccctgtgaaaatgagaagatttctaaacagct

SEQ ID NO: 438662 - DNA, 75 bp, Homo sapiens
aacctcttgaggatcgaatcttcactcccgctgtctcagcagtctacagcacgccttcaacctggactactacac

SEQ ID NO: 438663 - DNA, 98 bp, Homo sapiens
tttccggggtgcacagcaagtggttgaatcgctcctagctgacccctcacgtctcttatgatacgtacagaaagcaagagcagcccatgccgtccggc

SEQ ID NO: 438664 - DNA, 82 bp, Homo sapiens
acgtcattaacggcatcctcttcattcctctcaggaagcggggagaggtggtgagagatgacccctgttgaggatttcattg

SEQ ID NO: 438665 - DNA, 98 bp, Homo sapiens
aacatgtccaatgtgtaaacttgatgtcatcaaagccctaggatattgggtttgtctgccattgtggatttcctgggcagagtggagtgaaggtgcca

SEQ ID NO: 438666 - DNA, 50 bp, Homo sapiens
cgccgcctcactgtttctagccttcaggttacagtctctagcttcgccat

SEQ ID NO: 438667 - DNA, 50 bp, Homo sapiens
cctcaacatctctcagagacgaaaggtgccaagctctcctgatgaaatgt

SEQ ID NO: 438668 - DNA, 51 bp, Homo sapiens
gtcccagcgctgtcgtgctcctctactcgaaatgcactcggtgatggaaag

SEQ ID NO: 438669 - DNA, 100 bp, Homo sapiens
ttaaatgccgtccatggagccatgcgtgtgctgacagggatgtctcagatgcagcttgcacaccatggccctcatggcttaggacatccccacgctggac

SEQ ID NO: 438670 - DNA, 100 bp, Homo sapiens
tggagcaaggcgacgaaccttggagagaggagaacgaacatcttctggacctttgtccagggtatcagctctgtgataacagcgtgggggtgctcttcaa

SEQ ID NO: 438671 - DNA, 76 bp, Homo sapiens
atgtcccaaggaacacctgggcaacagaatattggtcaagttgctgaccttgaattacatccagagcattccagtt

SEQ ID NO: 438672 - DNA, 100 bp, Homo sapiens
ctcaacatcagtggaaacgagatccagagattgccgcagatgctggctcacgttcgaaccctggagtacaagttgtgcaaagtgaggaagattactgtgg

SEQ ID NO: 438673 - DNA, 83 bp, Homo sapiens
gaaaacctaaccatgaagacttgaacttaatacagcaagaaagaccatcaagtttaccaaatgttgtaccatctttgggtagg

SEQ ID NO: 438674 - DNA, 90 bp, Homo sapiens
gtgcttatattcgatccttggcacccagcctcctggacagaaataaaactggagtttgaaacagctgagacacttctaaattcagaagtt

SEQ ID NO: 438675 - DNA, 78 bp, Homo sapiens
gcttatctgaggccaaacccgccactccagaaatccaggagattgttgataaggaaaaccagtagattcccagacatc

SEQ ID NO: 438676 - DNA, 75 bp, Homo sapiens
gtggaaggcaacaggtgtcacagcacggcggctgagccagaggccaactgcagaggaactggaacagaggaacat

SEQ ID NO: 438677 - DNA, 82 bp, Homo sapiens
cgacgttcggccaccggaggagcgggagccaagcaggcacagccaaaattggtcagaaaggggagtaaagtgggacacgagc

SEQ ID NO: 438678 - DNA, 50 bp, Homo sapiens
ggggaggagagcagagaacgtccccagagctgtaggtaaaacttgcctac

SEQ ID NO: 438679 - DNA, 100 bp, Homo sapiens
ttcagaaccaggttctccttcgaggaacagagaaaatgaaaccagcagacagaatttgtcaggtacaccaggggttggaaaaaccacactaggcaaagaa

SEQ ID NO: 438680 - DNA, 100 bp, Homo sapiens
gaagggtggtcagcgccgtggaggaggttggtgttcgaggaagagacattgttgttcttggtgtggagaagaagtcagtggccaaactgcaggatgaaag

SEQ ID NO: 438681 - DNA, 98 bp, Homo sapiens
cgtaacctgaatggctgtgatactggacatgcaaaaatcacatgtggctatgaccttcctgcaaaatattttgatgcatacgaaagagatggtacaaa

SEQ ID NO: 438682 - DNA, 90 bp, Homo sapiens
ttgatatcacagaggaaactctgcattctcgcttcctggagcgcatttgtagccatgaagtgccatcttgcccaatatgcctctatccac

SEQ ID NO: 438683 - DNA, 100 bp, Homo sapiens
cagaaagtgaagatcgaggtgaacgagagtggcacggtggcctcctcatccacagaaatcatgagtggaggatctcaagtccacattttttggggtgctc

SEQ ID NO: 438684 - DNA, 100 bp, Homo sapiens
ggaaccagcgcttctccaccaggatcacgtttgagtgtgctcagatatcggataccgtgtatggaaactgctccactcactttaccgtcaagacgaggaa

SEQ ID NO: 438685 - DNA, 96 bp, Homo sapiens
tgacgcacacggcaccaaactagcctcattttacagatgaggaaactgaggctggctgcgtgctcagagggtttgctgaaggcctcacagccgctt

SEQ ID NO: 438686 - DNA, 100 bp, Homo sapiens
cgagcggctggaactctgctggccttctgctgcctggtcttgagcaccactgggggcccttccccaggatgaaacaggcgcctatttaatcgacagagac

SEQ ID NO: 438687 - DNA, 96 bp, Homo sapiens
ctgcgtgctcacgcgctccaggctgcgcccagagctcagctgctgggttggagaaaaagagggacatgtattcctctgagaaaccttggacagcag

SEQ ID NO: 438688 - DNA, 75 bp, Homo sapiens
gcctgctgcactttgggttcaaggcgacaggacctcaggatggaaaccagcagcctgcaccgcccgagaaggtcg

SEQ ID NO: 438689 - DNA, 75 bp, Homo sapiens
ctatcctcactgatccgtggacttctgtatgatcagcacaccatatggtccctcggccatcagtgccacctcctg

SEQ ID NO: 438690 - DNA, 87 bp, Homo sapiens
ttcgagagcagcatccaaccaaaatcccggcctgaagctgcccagcaggcattccaaggcctgggtcctggtttctccggttacaca

SEQ ID NO: 438691 - DNA, 83 bp, Homo sapiens
aaggggacgtctgcagctgattttacagctcccagcacagtaggaaagagaaatttgagtcctagtcaagaggaagctggcct

SEQ ID NO: 438692 - DNA, 75 bp, Homo sapiens
ctgagctcaagtagtcctcctctctcggtctcccaaatattgggattacagattgctgcagcaaaaccaactcca

SEQ ID NO: 438693 - DNA, 100 bp, Homo sapiens
aaactgagacacataatgttttctacgtacgtagagaatacaggaaattcttcagagccaatgctggaaagaaaatctatgagtttacgcttcagagaat

SEQ ID NO: 438694 - DNA, 100 bp, Homo sapiens
ggtgtgcaagtccgactggaacaggaccgtataatagacgctggccccaaaggaaactactctcgatttatgaatcacagctgccagcccaactgtgaga

SEQ ID NO: 438695 - DNA, 50 bp, Homo sapiens
gatacttctatttcagttacgagttggtgttggtattaggagatctgcac

SEQ ID NO: 438696 - DNA, 80 bp, Homo sapiens
cgacgcggacctgcggactagcgaacccggaggaaatacaactggagcacgcaaagcaagcctttgtgcaacgggacaat

SEQ ID NO: 438697 - DNA, 90 bp, Homo sapiens
ccagttactatggcagttgcaaaatattcaggagaccgtcgttgccttgtatttccagagaacaggtcacttatacatctcaagaggatc

SEQ ID NO: 438698 - DNA, 88 bp, Homo sapiens
cataatccaccatcaatatatctggagagacggtaaagaacaggtccaagaaaagctcaaagaaagcaaataccagcagcagcagtag

SEQ ID NO: 438699 - DNA, 100 bp, Homo sapiens
aacatctgccagtttctcttggaggtgtctcttttgacaagacttcagctacctggcttgctctgtccagaattgcaggtctttgtaacagggcagtgtt

SEQ ID NO: 438700 - DNA, 100 bp, Homo sapiens
ctccaatatggcaattgacctcacctcaagcacacccaatggacagcatgcctcaccaagtcacatgacaagcatttctggcccccaaagacaaaccaag

SEQ ID NO: 438701 - DNA, 100 bp, Homo sapiens
cttaaaaccacgtggttcgatggctgccgcggctacgctgaggctctccgctcaggagccaaaaacctgtatatcatctccgtgaaggggatcaagggac

SEQ ID NO: 438702 - DNA, 82 bp, Homo sapiens
gcgccggcccgctcactccgcccggccccagccctagcgctggccgcgaccccggcggtgttgacttcaaaatcaaaactgt

SEQ ID NO: 438703 - DNA, 100 bp, Homo sapiens
aatccatctcattaatgacaatcagccatcctggattggacaggggacttgatctcatcttcatgccaggccttgggtttgacaaacatggcaaccgact

SEQ ID NO: 438704 - DNA, 74 bp, Homo sapiens
cttcaaaacaactggaatatttagcaaggattcaaggctttcaggttgtggcagcactgcctgaaggtatgaga

SEQ ID NO: 438705 - DNA, 75 bp, Homo sapiens
gggcaccatgatctgtggctgggataagagaggccctgcaaagtggaagatgctttctacaaaggtgaactcagg

SEQ ID NO: 438706 - DNA, 50 bp, Homo sapiens
tggagccacacagaccagaacggcagagacagagtcttgctatgttgacc

SEQ ID NO: 438707 - DNA, 90 bp, Homo sapiens
gcgccagcctgcgaaggtggcggcgctgctgctcgggctgctcttggagagttaatagagtggatacaaccttgctgaagatgaagaata

SEQ ID NO: 438708 - DNA, 85 bp, Homo sapiens
cgtggtggtggtggatatggtggcagtggggatggctataatggatttggtaatgatggaactcttgatcaagatgccgaaccct

SEQ ID NO: 438709 - DNA, 89 bp, Homo sapiens
tgaagacaaggactcacagtggctgcaagtggaaagaggcaaaacctgatgaattaatggattccaaattgagatgcgtatttgaaatg

SEQ ID NO: 438710 - DNA, 90 bp, Homo sapiens
cggggctccaatggcgctttctacaagtgtaaacaggaacatcgataagtagtgtaaaaacttgcacaatgaaatccgaagccaaggatg

SEQ ID NO: 438711 - DNA, 82 bp, Homo sapiens
ccagacggctgcccttcaagtaccagcccgccaagctgccccctgtgtgctattctttgatgagctggattcgattgccaag

SEQ ID NO: 438712 - DNA, 127 bp, Homo sapiens
gcgccgctctccgagctcgatccgctgctcgcacgggagccagctgggtgccagcgtcccatgctcggtggccccagaaaagtcagtgtgtaggcctcagccacttcaggtccggcgtacattctcc

SEQ ID NO: 438713 - DNA, 99 bp, Homo sapiens
ccaccgccgctgccccggctgcctcctccctgaggtgatgggcagaatctgtttacgaaagacgtgacagtgatcgagggagaggttgcgaccatcagt

SEQ ID NO: 438714 - DNA, 101 bp, Homo sapiens
agaaggcggcggctctctggtccgcagcggcaacagtaacgaaaaacagggctgtcctgtgtgacagacatgtgtgaatgtccagtccataaaaactgtta

SEQ ID NO: 438715 - DNA, 50 bp, Homo sapiens
cagcaatatccccacataccttctcaagcttccaccaacactttcttcca

SEQ ID NO: 438716 - DNA, 83 bp, Homo sapiens
gccatgcttcctgtacagcctgcaaaactattccctataaggagcccctgctggtgcaccagaactaccgggggccatctgcc

SEQ ID NO: 438717 - DNA, 98 bp, Homo sapiens
gtccttgtaccctacacctcggagcatgtgcccaggctcagtccccacaaagtaaaacgagatggtagaagccctcttcccgggactgcacggcatcc

SEQ ID NO: 438718 - DNA, 51 bp, Homo sapiens
acccggatctcaacaatcccttcaaggtgtcagcttcctctggtgcaacca

SEQ ID NO: 438719 - DNA, 98 bp, Homo sapiens
gtggatgaggctctgcggctggtccaggccttccagtacacagacgagcatggggaaggttacctgtcctgctgccgattcctggatgacaatcagat

SEQ ID NO: 438720 - DNA, 100 bp, Homo sapiens
ttcaaaggaaggagtgggactctgggacattcgaaaacctcagaggtaagttctcttctacgctgtatgagactggtggctgtgatatgtcacttgtgaa

SEQ ID NO: 438721 - DNA, 88 bp, Homo sapiens
ccccgaacccgcgctgcagggaacagcggggcaaacaagctagcaacatggaccacagatatactggtgactccgctctcctctggcc

SEQ ID NO: 438722 - DNA, 77 bp, Homo sapiens
catcacgcagaaggggtgaaagagactcggtgacagatacagctccatcaagtatgatggtgaaggatgaatatgtg

SEQ ID NO: 438723 - DNA, 90 bp, Homo sapiens
ctttgaaagaacttgccagacttaaacaggacccagatgatgtggtaccagttggccaaagaagagcctggtgttggtgcatgtgctttg

SEQ ID NO: 438724 - DNA, 75 bp, Homo sapiens
ggcgttgagctgctggctgcctctgcaccgggccttcccccaggcctgcggggcgggggcggggtggcgcccagg

SEQ ID NO: 438725 - DNA, 80 bp, Homo sapiens
cgccgctctgtctacaacccgaggccgggctctcgccatgggtcactgtcgcctctgccacgggaagttttcctcgagaa

SEQ ID NO: 438726 - DNA, 100 bp, Homo sapiens
cggacctttgagcatacaccgagagagtgaggagccagacgacaagcacacactatggcgctgaaacggattaataagctggtatcaaatctgaaggaag

SEQ ID NO: 438727 - DNA, 50 bp, Homo sapiens
cggagatttcttctataaaccaaaccagatggatcctgagcttgaaaaaa

SEQ ID NO: 438728 - DNA, 106 bp, Homo sapiens
tctggaaaggcggtagccggtgtgttggtggtcccggaacctctcgtaaaccagacatggcccatgaacatggacatgagcatggacatcataaaatggaacttcc

SEQ ID NO: 438729 - DNA, 100 bp, Homo sapiens
tgctgcccgctgtgagggaaaaggtgtgatgaatgcagactctgctaccattttggctgtttggatcctcctttgaaaaagtctcctaaacagacaggct

SEQ ID NO: 438730 - DNA, 83 bp, Homo sapiens
ccagcagcagaagcagcgcctgatcgagtccctccggaactcacactccagaatcttttagctgaaaaagtagagcagctgat

SEQ ID NO: 438731 - DNA, 74 bp, Homo sapiens
aaaggatttgatacgactgccataaacaaaagctattacaatgtgaaagaatcttcaagagggagacataggga

SEQ ID NO: 438732 - DNA, 83 bp, Homo sapiens
ccgtgtgcccgtcgctggtcgtgcgacccaagcccctgcattcctgtacggccatcactggtgcaagctatatttaacggaga

SEQ ID NO: 438733 - DNA, 98 bp, Homo sapiens
agaacatggtgctggtttccttgcttaaacactacagtgatttcttccaaggtcaaaggacgaagtgaattttgaagattgcaccggtcgacaaagga

SEQ ID NO: 438734 - DNA, 82 bp, Homo sapiens
cgacggcccaggagcgcgtctcggcgggagcctcagttactccacaggatccgctgaacataggatgttgccacaaaatcta

SEQ ID NO: 438735 - DNA, 90 bp, Homo sapiens
aaaaaacactctacctaatcatggaatatgcaagtggagctgtaccgatgggagatgtaccaatggatggtatctctgttgctgatattg

SEQ ID NO: 438736 - DNA, 82 bp, Homo sapiens
tgaaactcaatgctgctgaagagatgcttcaacagtgtaaacaggaacatcgataagtagtgtaaaaacttgcacaatgaaa

SEQ ID NO: 438737 - DNA, 76 bp, Homo sapiens
gcttctagtgtactcttactttgaaaagaacacttcagttatggaagatcaaaatgaagatgagtccccaaagaaa

SEQ ID NO: 438738 - DNA, 75 bp, Homo sapiens
ggcaggttcgaggcgattcgagagagacacatctcaattcaaaggcagcttgctgatctagagaatttagctttt

SEQ ID NO: 438739 - DNA, 90 bp, Homo sapiens
aacggagataaattcccggaaccgcgattcggcgtgtcagtgacattctgaaagttcccaaacctgaacctataccagagcctaaagaac

SEQ ID NO: 438740 - DNA, 100 bp, Homo sapiens
tgaatatatttacaaacgaataaagcagcgagaccggactgtgatgactgggagagcgggctgaatgcaatggagtgtgcattacatttggaaaaaaatg

SEQ ID NO: 438741 - DNA, 75 bp, Homo sapiens
gggaggtcggcggccccaaaaccctgtatgatgagattcgtcagtttcgcaaggcctgtggggaggctcatctta

SEQ ID NO: 438742 - DNA, 83 bp, Homo sapiens
atgggagaccaccgggatgggcagacttcccaagtaagaagcggaagaggagccgctggaaccaagacacaatggaacagaag

SEQ ID NO: 438743 - DNA, 98 bp, Homo sapiens
aataaagtgccctattacatcaaatggagtttcactcttgtctcccaggctggagtacaatggcatgatctcagcttactgcaacctccgtctcctgg

SEQ ID NO: 438744 - DNA, 50 bp, Homo sapiens
gagccagcgagccacgggagcgagccagctgtggaaagtgaagaaggcat

SEQ ID NO: 438745 - DNA, 75 bp, Homo sapiens
tatatgaagatgtcgtccaaatagtatcaggattccaaggggatgccaagggagcagagatgcctgcagcccgtg

SEQ ID NO: 438746 - DNA, 75 bp, Homo sapiens
atatcaattcctggacacagaggatcttagtaagagccctaagaccatgaaaaagctgctgcccaagcgcaaacc

SEQ ID NO: 438747 - DNA, 75 bp, Homo sapiens
attactctcacttggtcatcatcaatagctttgctgagcacgtcaccttccgcaaccctgtcattgagaggattc

SEQ ID NO: 438748 - DNA, 83 bp, Homo sapiens
aaactgtccgagaagcccaaaaaaaagtcgctggagtcgatcaactctaggctccaactcgttatgaaaagtgggaagtacgt

SEQ ID NO: 438749 - DNA, 98 bp, Homo sapiens
cggctagtacgcgaattggagaaaaagttcagtgggaagcatgtcgtctttatcgctcagattccaaagtcatgtgttgaaatagcggaattacttca

SEQ ID NO: 438750 - DNA, 129 bp, Homo sapiens
cttgccagaattaccccgaccccctccccgaagctgccggagccctctgtcctggtcacggagactcaccagttggcagaattaaatgagaagaagaatgaaagactccgtgctgcctttggcatcagt

SEQ ID NO: 438751 - DNA, 83 bp, Homo sapiens
ccgccttctctgtcagctctttccccgtcagcatcccagccgtgctcacgatatctcccggggccaattcagcatctctacct

SEQ ID NO: 438752 - DNA, 76 bp, Homo sapiens
cgtgttcggtgaccgcagcactggggaaacgatccgctcccaaaacggtcctatcagcagtatcctggtgaataaa

SEQ ID NO: 438753 - DNA, 100 bp, Homo sapiens
tcgctgcctcggaccccgccaccaagcgattattggagccggaattggtggcacttcagcagcctattacctgcggcagaaatttgggaaagatgtgaag

SEQ ID NO: 438754 - DNA, 74 bp, Homo sapiens
gcaaggtccgaactgatataacctaccctgctggattcatggctttgagcacacctttgaggtgtacacggagg

SEQ ID NO: 438755 - DNA, 100 bp, Homo sapiens
gcatcttcagctcttgggtttagcaaaagttcatctccttctgcatccttaactgagaatgaggtgtcatggagaaactccagctgggcccagagattct

SEQ ID NO: 438756 - DNA, 100 bp, Homo sapiens
caaaagccttcagcaagatgctgtgtgacattcagctggtaccatttccaccaatcctgaggcaaaagaaacattttaattcactgcacattccaaaagc

SEQ ID NO: 438757 - DNA, 80 bp, Homo sapiens
cgtccatgcggaagatcgtcgccacctggatgctggagttacagaatgtctgaaggggacagtgtgggagaatccgtcca

SEQ ID NO: 438758 - DNA, 126 bp, Homo sapiens
gagggcggggaccggcggcgctggaggagcgaggcagctgtactaggactgggaacggtagccatcctaatggatatgggttggttcctgttttctatttggaactttaaaaaaaattaaagcagg

SEQ ID NO: 438759 - DNA, 98 bp, Homo sapiens
ttcgtcccactgtggttaggggttaacgtccctaaaacccgccggactttctgtaagaagtgtggcaagcaccaaccccataaagtgacacagtacaa

SEQ ID NO: 438760 - DNA, 90 bp, Homo sapiens
cgcggcctggacaagcggaccccggcccaggcggccttcgagaaaatgcaggagaagcgggtcgccccacggctgaattctcggtgataa

SEQ ID NO: 438761 - DNA, 75 bp, Homo sapiens
attgctgcagctcgtgggtgctcagctcaacagacagtcagctaaaactgtggaatgtagggaaaccatactgcc

SEQ ID NO: 438762 - DNA, 83 bp, Homo sapiens
cggagaggaacagaccctcactctctctgtcagaaaaatttgatattcactgatggactccaaagaatcattaactcctggta

SEQ ID NO: 438763 - DNA, 75 bp, Homo sapiens
cttcagttggtgcacaaaatactgtcatttgctcaaagctgtcagcggccggagcggcagctcagcaagtggtgg

SEQ ID NO: 438764 - DNA, 75 bp, Homo sapiens
atacgggacagaattgaatcagggagatatgaagcctccaagctatgattctggaaatgcacaattttgaggaag

SEQ ID NO: 438765 - DNA, 90 bp, Homo sapiens
cttcaatgtgtcctacaccaggcagcccccaaatcccggcccaggttttgacctgtagcagagaaccaattctggagaacagcctcactt

SEQ ID NO: 438766 - DNA, 75 bp, Homo sapiens
agatggtgacttctacgaaaaagccctggtggagctgaaggttgcaggagagctagagaatgcccagagcatcct

SEQ ID NO: 438767 - DNA, 82 bp, Homo sapiens
ttttacagctgaagaatgggaaaaaattgatggtgatataaaggtagttgatgtcacttggcgatattcctgcaaacatgaa

SEQ ID NO: 438768 - DNA, 80 bp, Homo sapiens
aaagcaggcgaacccgcggcgcaataacggccctgggctgcatcttgtacctgctgtgcttccggcagcacccttttgag

SEQ ID NO: 438769 - DNA, 90 bp, Homo sapiens
gccagtgtcaaccgagtagtgtctcccggacctcttcattgcctaaagtctgacctacgagaaacatggcaaccagcgccgtccccagtg

SEQ ID NO: 438770 - DNA, 90 bp, Homo sapiens
atgatgacgaacatcacagtacattggtatctacaagacattatagagcacctgaagttattttagcagtagaccgactggaagaccacg

SEQ ID NO: 438771 - DNA, 82 bp, Homo sapiens
gcccttcaccgcgggcgccaatggggagcagaaggactcggacacaggcatgtcgggccccaggcctgtggtgctgagcggg

SEQ ID NO: 438772 - DNA, 129 bp, Homo sapiens
attttggcttgctcaaggtcacacagcttgtatgaggcagtgctgcaatttaaagccagaggaggaaggaagagacttgagctgttgtgtagcttctcttgttcaagtgatgctggatccctattttag

SEQ ID NO: 438773 - DNA, 88 bp, Homo sapiens
gagctgcgctggggccggaggcgggcgaggaaggttcgatacaagaggctgttttcctagcgtggcttgctgcctttggtaagaacat

SEQ ID NO: 438774 - DNA, 82 bp, Homo sapiens
ccgatttctatttgactggcaatagtctggaatgtatcctgtcaggtataatgtcagtgaatggcaagaaagttcttcatat

SEQ ID NO: 438775 - DNA, 75 bp, Homo sapiens
ccagaagcgggcggcgcgggggagatggtacgaaaccagcactggagcctcattatggaaagtgtggtcccatct

SEQ ID NO: 438776 - DNA, 100 bp, Homo sapiens
tacgcttgtgtgataaaactgggcatgttacaccagacagctatattccatgccttgcagacctgtgcaaagcactatgggaagttatgctcagctatta

SEQ ID NO: 438777 - DNA, 83 bp, Homo sapiens
aagaagggcgctgttttcgacaggtgtgcaggtttcggcacatggagattgatttttaagataaaattggctgcagcattggc

SEQ ID NO: 438778 - DNA, 80 bp, Homo sapiens
agacatatccttacaggcagagaggttcgtgacaataaaaaattaagagtaaatgctgttattgctcccaagagttcata

SEQ ID NO: 438779 - DNA, 75 bp, Homo sapiens
cctcatgacagtggtcatggccgtgtgctccctgcctctcacgcttgttttgagagtcccctccattgaaacacg

SEQ ID NO: 438780 - DNA, 74 bp, Homo sapiens
ctcgggggcggcggccacgccaaggacgggcaattaagttggaatatgcaaggttggttaagttggcccaagaa

SEQ ID NO: 438781 - DNA, 75 bp, Homo sapiens
aggataccttggtcccagagtcatcatgaagacatgtatggaggtattggaagccttgtatgatggtagcctagg

SEQ ID NO: 438782 - DNA, 100 bp, Homo sapiens
ccagctcgaagaaggcgagcagggtgcgggagagccccttgcagaagacgccgtacgaggggatgttcgtctaaccccagaagactttgctagagctcag

SEQ ID NO: 438783 - DNA, 83 bp, Homo sapiens
cagagcagacaccctctctgtgtctggaccggggaggagcagacgctggacagggcgtccgagctgggccacagcctgaacga

SEQ ID NO: 438784 - DNA, 75 bp, Homo sapiens
gctcgtcccgctcgtcatggcctacccgggatacggaggaggggagtttaccagctacttccaaagacatgacga

SEQ ID NO: 438785 - DNA, 96 bp, Homo sapiens
ttcttaccaaacattgattttgttggaggactccactgcaaacctgccaaacccctacctaagattaagcctgatcaagatgacaacctcccaaaa

SEQ ID NO: 438786 - DNA, 108 bp, Homo sapiens
gggaaacccagccccgcgctcgtctttggggccaccggtcgcccccgcctccgggacctgcggggagggcccgcgagagactatggaaatgatgttagacaaaaagca

SEQ ID NO: 438787 - DNA, 100 bp, Homo sapiens
tcattttactgtcaagacatttcttcggcattctgcaacaggacattcggaaattctttggagtaataccaagtggaaagaaacttgtaagtgaaacagt

SEQ ID NO: 438788 - DNA, 100 bp, Homo sapiens
aagatagaagctgaggctgaattgttgacctcctgtactggagagacattaagaagactggagtggtgtttggtgccagcctattcctgctgctttcatt

SEQ ID NO: 438789 - DNA, 74 bp, Homo sapiens
agaatcccaacgttcaggatattttgggagaacttagagaaaaggctcaaaagccaaaagtctctgagaacgac

SEQ ID NO: 438790 - DNA, 85 bp, Homo sapiens
cacggtgccctcgtacctcactgcctgagagaagtagaagatgccatggacaatattaccaggcagaaccaattctacgataccc

SEQ ID NO: 438791 - DNA, 51 bp, Homo sapiens
ctacaaccttcgatctcctgacgaatatgagggaaggcaccattggagata

SEQ ID NO: 438792 - DNA, 50 bp, Homo sapiens
agaccctcactctctctgtcagaaaaatggactgtgcagagtgtggggcc

SEQ ID NO: 438793 - DNA, 101 bp, Homo sapiens
gccgccgagtcgcgcggaggcggaggcttggggtccggacactgtttgtcagcggcctccctgtggacattaaacccagagaactctacttgctcttccgg

SEQ ID NO: 438794 - DNA, 76 bp, Homo sapiens
ctggaagttctgtgaagaacttgatcctgaaaagccatctggttatttcaaagttaaagacagaactctcaagcat

SEQ ID NO: 438795 - DNA, 101 bp, Homo sapiens
aaagaggccaagaagatcattgaggatcttcagcctgttaaacaagaaaacgaaaaaccccttccagaaaacatggatgcatttgaaaaagtgagaacaaa

SEQ ID NO: 438796 - DNA, 90 bp, Homo sapiens
gggctccttacccaagtacatatcctgtaagaccagaattgcaaggccagattcttctgatgtagagcgactggaaagattcttcgactc

SEQ ID NO: 438797 - DNA, 82 bp, Homo sapiens
ctttcagcacgctgtcagtggagacttcatgcttaaccagtacaccaagacatttgatcaggtctcctgggcatggctaaca

SEQ ID NO: 438798 - DNA, 100 bp, Homo sapiens
aggcataaattgattattcctcgcccacatctgtgccagctggaggagctgatagacatggctgtgctggaggaaattcaacaggagctgatcaaccaag

SEQ ID NO: 438799 - DNA, 75 bp, Homo sapiens
tcaagggagttttccggggccctctcagcaagaacgggaacaaaactctggtgcttttgaagatgatgatatcac

SEQ ID NO: 438800 - DNA, 87 bp, Homo sapiens
gatctaatgaaagacaggcatttggatcagctcctcctttgtgccttttatatcatggcaaaggtgcaaacagctgcacagcaagtg

SEQ ID NO: 438801 - DNA, 83 bp, Homo sapiens
gggctgaggcggcccagcggcggcaggattatatctgtccaagatgcgagtctggttttatcgaggagcttccggaagagacc

SEQ ID NO: 438802 - DNA, 75 bp, Homo sapiens
ggagggcaagagccggagggtctcagaggacagacagtgccaggtccagcaagactatgaatctctgttccaaat

SEQ ID NO: 438803 - DNA, 75 bp, Homo sapiens
gtggccgtggtgcgggctctgcagcgagcgctcgatggaacctcatcccaggcttctcacggcattcagcagcag

SEQ ID NO: 438804 - DNA, 100 bp, Homo sapiens
ggcagcgagggcgagggcgagccagagctcagccccgcggttcccagtgcccccgacaagcccctgctggtgtctccatctcctgccaagcatcctccag

SEQ ID NO: 438805 - DNA, 75 bp, Homo sapiens
accatctccttctttgagattgatggacgtaagaacaaggacagagcgggatgccaccagcttgtccaaagggaa

SEQ ID NO: 438806 - DNA, 100 bp, Homo sapiens
ctttaaagaatacacttcaacactgaacctaccagatgtatttgggttggtcgtcctcccattggaactgaaactacggatcttccgacttctggatgtt

SEQ ID NO: 438807 - DNA, 100 bp, Homo sapiens
ggcggcgctgtgtccgtcgccatgacagataacgaaggaggcccaacttcattcaataaggagcctgacggatttatcccagacggtagaacaaaaggaa

SEQ ID NO: 438808 - DNA, 75 bp, Homo sapiens
ggcttctctggcgttggccagtcagccacagataaggagggttcctgcccccaggtgaacattaactttccccag

SEQ ID NO: 438809 - DNA, 98 bp, Homo sapiens
ctcagacagatcgccggggaggcagcgcgggatcccagcctcaggcgtgcgcggacggtgtgcgggtctagcacataccgctccaagggctttgacgt

SEQ ID NO: 438810 - DNA, 90 bp, Homo sapiens
gcctgccatgggacgtggggtccaccggtacagggtaagcttgatgattaccaggaacgaatgaacaaaggggaaaggcttaatcaagat

SEQ ID NO: 438811 - DNA, 76 bp, Homo sapiens
agagcgccgcgcacttcgtcatgttcttcgcgccctggactttccttatcccagttgattgtgcagaatacactgc

SEQ ID NO: 438812 - DNA, 100 bp, Homo sapiens
gtgtggagatccctgccctcaaggagcgttcctgggtgcctgtgtggctgggtctgatgagcctggcccagagggcctcacctccacctccctgctagac

SEQ ID NO: 438813 - DNA, 100 bp, Homo sapiens
gcagctccgcctcctccgccgcgcagcacaacattctgaaattttttggttattgtaatgatgttgatcgggagttgagaaaatgcctgaagaatgaggt

SEQ ID NO: 438814 - DNA, 100 bp, Homo sapiens
tggaatgatgtcgtcagtaatgcctggaatgatgatgtctcatatgtctcaggcttccatgcagcctgccttaccggtgatgatgaacagtctacacaga

SEQ ID NO: 438815 - DNA, 100 bp, Homo sapiens
tgtgcgggttcaggaggtacccaaactgaagggcttctatttcgaccgcgatgatgtggctctggaaggcgtgagccacttcttccgcgaattggccgag

SEQ ID NO: 438816 - DNA, 87 bp, Homo sapiens
acgggatgcggggcctggcggtcttcatctcggatatccgcaactgtaccacatggaatgcttggacccccctctccaggaggtgcc

SEQ ID NO: 438817 - DNA, 98 bp, Homo sapiens
gctgatccgagaccctcgctcccccatcaacgtggagagcttgctggacatggatttgattgacatactttggaggcaagatatagatcttggagtaa

SEQ ID NO: 438818 - DNA, 51 bp, Homo sapiens
gcaccgaggaccagctcaatgacagcaagagtgagccatggagctacgtgt

SEQ ID NO: 438819 - DNA, 90 bp, Homo sapiens
cctttccaacacagatgtccaagctgccaacctcagggatttagagatactgttgttacttctgcatgttcattgcaaacagaaggttcc

SEQ ID NO: 438820 - DNA, 100 bp, Homo sapiens
gctgaccgaagaacagattgctggtttttcgttggaatatacgttgcacatttatggcgattctgagtgtgagggcagacttctgccaggctcagcacag

SEQ ID NO: 438821 - DNA, 100 bp, Homo sapiens
ccttttccacagggaattgagttgagagaaaaggaacagttccgtaagctctttattggtggcttaagctttgaaaccacagaagaaagtttgaggaact

SEQ ID NO: 438822 - DNA, 97 bp, Homo sapiens
accccaattataaaggcaaatggaagcctcctatgattgacaatcccagttaccaggttcctaaagagaaagatgaaatggtagagcaagagtttaa

SEQ ID NO: 438823 - DNA, 100 bp, Homo sapiens
cattcagacccatttccagtcatgagaattggatgaagacatgcatcagaaaattgcaagggagatgaacctctctgaaactgcttttatccgaaaactg

SEQ ID NO: 438824 - DNA, 82 bp, Homo sapiens
gcatgatcctttgcagaaatgactacattagccttatgccagcctggaccatcttggaggcagtgtaggatcatggaagaac

SEQ ID NO: 438825 - DNA, 98 bp, Homo sapiens
ccgccgggctcggggcctccgcagcgacaacatggaggccgtgaagaccttcaatagcgaggtgaagtattacagacacttagcacctgatcacttgc

SEQ ID NO: 438826 - DNA, 74 bp, Homo sapiens
cggggctccaatggcgctttctacaaggctgtacatccttttgaaatcccagagatcttcagtctccctgtgga

SEQ ID NO: 438827 - DNA, 75 bp, Homo sapiens
tcacgatcctgtaactgccaaacccaagttggttggagatgtggattttgaaggcaactcatgcagcaattccag

SEQ ID NO: 438828 - DNA, 90 bp, Homo sapiens
cctgatttgagatcaattcttggagaacacaaagaagtgtgatgatgacttgtttaaagttcacaagcttaagccaaatctgaagtggcg

SEQ ID NO: 438829 - DNA, 100 bp, Homo sapiens
aatgagacccaagatgctcttcatactgtagaaaaatattcctttgaagagagtgatagattcgtgtggcctttcaaatgattgtgaagtggtggaaatg

SEQ ID NO: 438830 - DNA, 89 bp, Homo sapiens
tgaagtagatgcacaacagtgtatgcttgaaatcttggatactgcaggaacggacagtcattttgtttactcattcagccctgttgcag

SEQ ID NO: 438831 - DNA, 90 bp, Homo sapiens
gtccggggcttgccctggtcttgctcggccgatgaagtgcagaggtttttttctggtatctcagatgaagacatcatcaacattactctt

SEQ ID NO: 438832 - DNA, 69 bp, Homo sapiens
tccagcttcattttcgccttacattcttacgaggtttttagaacttcagccataaaaatgggcagaatt

SEQ ID NO: 438833 - DNA, 75 bp, Homo sapiens
aaaagatgatccgggtataataatgaagttaaaagagcagcactccaagaaactaatctggattcactccctctg

SEQ ID NO: 438834 - DNA, 97 bp, Homo sapiens
gagccccagctgagccgagggctcgcactcttctggtctcccaggcccaacccacctgaagtttggcaatgaggagcagcagctggcgtgggccaag

SEQ ID NO: 438835 - DNA, 75 bp, Homo sapiens
gtacttgaagccctacgccgtggacttccagcgcaggttcctggtagagttacacagttgtgccgccagtatagc

SEQ ID NO: 438836 - DNA, 101 bp, Homo sapiens
ctccagtgactgctcaagaaactacccaatatggctcaagcctggaagatgacgtggtgggggacacttcagggtactaccagcggatgttggtggttctc

SEQ ID NO: 438837 - DNA, 100 bp, Homo sapiens
cgccgtcaccgccgcggctccggccctggccccgatggctctgtgcaacggagactccaaggttgatgataattagaagcatgctttccactgaacttcc

SEQ ID NO: 438838 - DNA, 75 bp, Homo sapiens
gcgtgccttatgctgttatagaaggaacgtcaaggtcgtgggaaataaaaggcagttctacacagactgcagcaa

SEQ ID NO: 438839 - DNA, 101 bp, Homo sapiens
cagatcgcaggaccgtggagaagacttggaagctcatggacaaagtggactgcccacagtggtgaaactggtagacagaaacaccttattaaaagagagag

SEQ ID NO: 438840 - DNA, 100 bp, Homo sapiens
gctgggctaccctgctcactttggacagttttttgctccactcaagcctgttagaatcaccatggaatacagctccagtgggaaggccactggagaagct

SEQ ID NO: 438841 - DNA, 75 bp, Homo sapiens
ctcgccccgccggttcctcaccctcggggagcaacatggggcgtctctggccgagcctctttttgtggaaaacga

SEQ ID NO: 438842 - DNA, 82 bp, Homo sapiens
ctcagttggaagcagccgatccagcctgcggagcctgtggggcaggaaggatgccaattctgcgcttctcagtaactacgag

SEQ ID NO: 438843 - DNA, 100 bp, Homo sapiens
ccgcgggcccgcggacccagctgtcaggcaaggggcctttatcatctgctggactcctggattggttttgttacttctagacgtgtgctgtccacagtgc

SEQ ID NO: 438844 - DNA, 83 bp, Homo sapiens
ggaagctggtggaacagctacgcatagaagccgggattgagcgcatcaaggacctgaaggagaagaaggagaaggtggaggag

SEQ ID NO: 438845 - DNA, 100 bp, Homo sapiens
tctgtagaccttccacactgccacctgattaaaggaattgaaaagagtctcatcgtggaaggcaagagggaaaagaaaaaagtagagaggttgacaatgc

SEQ ID NO: 438846 - DNA, 82 bp, Homo sapiens
cggcggcagagaggatatcttgggcgggggatgtgagcgctgagcccttggcagggggaaatttgcagtggtgagaaaatgt

SEQ ID NO: 438847 - DNA, 101 bp, Homo sapiens
gtgtactgcaaggaacaaaatgtttgtaaattctccttttaccaaggaatgaatctgaagtctgctgcagtaaaacacagaaggctttaaaatgttttctt

SEQ ID NO: 438848 - DNA, 98 bp, Homo sapiens
tcctgccacagctcctcaccccctgaaaatgttcgcctgctccaagtttgtctccactccctccttgagtggtgcacgtatcaacatctcagaaggga

SEQ ID NO: 438849 - DNA, 100 bp, Homo sapiens
aggaaaaaataaaaagaagaagaagaaaagcaagatactgaaatgtgatgaacatgaagagagaagggcacagttacctaagtatcaacgtaatcttcct

SEQ ID NO: 438850 - DNA, 76 bp, Homo sapiens
catcgaagctctagaaatgaatgtttccatctcttcagagatgaaccaggagtgtttctcaggagctatcagaaac

SEQ ID NO: 438851 - DNA, 75 bp, Homo sapiens
gcctgtcagcagctgcacccctcaggtggagaacgccggggccatcggcccgtcccggttcgggctcaagagggc

SEQ ID NO: 438852 - DNA, 98 bp, Homo sapiens
tggcccaccccttctccttggccgtctttgagtttaattggttggggtcagataagaagaggagtgacaatcaagccaacagtagatgatgactgaag

SEQ ID NO: 438853 - DNA, 75 bp, Homo sapiens
tttagaattgcacttggaggacaagatgtccctggtagatttgggaaagaagcttttagaagcggcacgagcagg

SEQ ID NO: 438854 - DNA, 74 bp, Homo sapiens
acaagaggggaagctgacagagatacctacagacggagtgctgtgccacgtcaagagcacctcacagctgctga

SEQ ID NO: 438855 - DNA, 82 bp, Homo sapiens
tggggtcggcgccgagtgggaggatggcggaagccctgggcagtgacggggttcgggtgaccatggagagtgcgctcaccgc

SEQ ID NO: 438856 - DNA, 82 bp, Homo sapiens
gcggcagcaccaccggggttgactccgggggcgcggcgaggagcccgcggcgccatggctcacgtcggctcccgcaagcgct

SEQ ID NO: 438857 - DNA, 82 bp, Homo sapiens
agaaagacgtggcagcaagcgggagtcggggatagtgtcatcggttcggaaccacgtgaatgttgagggggcgacacacaag

SEQ ID NO: 438858 - DNA, 76 bp, Homo sapiens
ggcggtgtctacagtgttctcgacttcgtcgctgggataaacacacttgttacctatgatatggttccagagccca

SEQ ID NO: 438859 - DNA, 75 bp, Homo sapiens
cctaatgacagtctccaaattcgcctccatctgtaccatggaactgtggctgcaccatctgtcttcatcttcccg

SEQ ID NO: 438860 - DNA, 50 bp, Homo sapiens
cagatactttgaagtagaagaagctgatgacaccaactctacaacattac

SEQ ID NO: 438861 - DNA, 101 bp, Homo sapiens
taatccctgctctgtcactaacaagctgcgtgatcttcggcagaaggagaagacagcctgaagaagatgcagctgatggagcttgcgattctgaatggcac

SEQ ID NO: 438862 - DNA, 100 bp, Homo sapiens
aaatcctgaagttccctcacattagccagtgtgaagacctccgaaggaccataggtggtatggtcaggaaaaagactacaatgtactagtcatggatctt

SEQ ID NO: 438863 - DNA, 83 bp, Homo sapiens
tgggaatattctcaaagagaccatgacagttacatttgcagaaggaaaaggggaagatagtgatgtactcagtataaatgcag

SEQ ID NO: 438864 - DNA, 109 bp, Homo sapiens
tcaatatctgtcttcggtggactccttcggcagtccacccaccgccgccgcctcccaggactgcctccgggcctgccaggagcagatcgaagccctgctggagtcaagc

SEQ ID NO: 438865 - DNA, 90 bp, Homo sapiens
catgtcctgttgtggggcttttacagcctttggctttgggacatccggaagaaagcagccatccagacatttcagaacacgtaccaggtg

SEQ ID NO: 438866 - DNA, 75 bp, Homo sapiens
ggcgcctgcttcgccagatcgtcatccagaatgagaacacgatgccacgcaccacctcctccaccctgaagggtg

SEQ ID NO: 438867 - DNA, 83 bp, Homo sapiens
atgtattccaccacctccgccagttaagaggaaaaaggcatgttatttgaaagcaattgagacgcaaccgaactttgcagtag

SEQ ID NO: 438868 - DNA, 90 bp, Homo sapiens
ctcggcgatggtaggcgtccctggagcggccgccttccagctacgctacttcctgaagaataaggtcagccctgatttgtgcaatgagga

SEQ ID NO: 438869 - DNA, 100 bp, Homo sapiens
ccggtgccagcacctttcggcttctgagacggcggcagcagcggcattcaggagcgcctggaccatgctgctgagcgcctactggcacggcctccacccg

SEQ ID NO: 438870 - DNA, 90 bp, Homo sapiens
caagaaggagcggaacactgaccaggcgtccatgcccgacaacacagctggtctcttgtggctcagcgccgtgcggaggttgaagcgtac

SEQ ID NO: 438871 - DNA, 90 bp, Homo sapiens
tgatttgagatcaattcttggagaacacaaagaagtgtgatggtctctctgcaatgcaatcaatgtttacaacctcacctgcaataactg

SEQ ID NO: 438872 - DNA, 83 bp, Homo sapiens
cccagcctccgcctgaaaaaacgccagccaagaagcatgtgcgactgcaggagaggagcagcatggacctgtcagcaactaag

SEQ ID NO: 438873 - DNA, 74 bp, Homo sapiens
actacaatgaaacagctccaatgctggagcagatatttggtttccaggcaggactgacgtctttggattgcagt

SEQ ID NO: 438874 - DNA, 98 bp, Homo sapiens
gcaggagaagctggagctcacggagaagaaggcctccgacgctcagaaaaaatgtctgaatcagacttcccccatttctgctcccaagaccacagacg

SEQ ID NO: 438875 - DNA, 82 bp, Homo sapiens
gctctggcacaccagctcctccgggggacagggcgtctctggccgagcctctttttgtggaaaacgacagcagcagcagtgg

SEQ ID NO: 438876 - DNA, 75 bp, Homo sapiens
cgacaagcacatcaccactctgcagtgtgctggaattgatgttcgtctgtgtgatgttggtgaggccatccaaga

SEQ ID NO: 438877 - DNA, 50 bp, Homo sapiens
agtgaagctgcataccttcgcgcctgatgttcaccaaggtgaagctggag

SEQ ID NO: 438878 - DNA, 100 bp, Homo sapiens
tgtcctccgtttagtctcctcctcggcgggagccctcgcgacgcgcccggcccggagcccccagcgcagcggccgcgatggcggactgtggcggcctccc

SEQ ID NO: 438879 - DNA, 48 bp, Homo sapiens
ctcctgagtagctgggattgcaggttgttgcttgtgaacttgacccaa

SEQ ID NO: 438880 - DNA, 87 bp, Homo sapiens
aacgtggtgggacccaaaatctgcctggaagataatgtgtatggctgatggcaagcattgtacttttccacatctgcctggcaaaac

SEQ ID NO: 438881 - DNA, 100 bp, Homo sapiens
gcaggccagagagggcctcgggaagagatgcgaggatgacaagactatagggtatgaccccatcatttccccagaggtctcggcctcctttggtgttcag

SEQ ID NO: 438882 - DNA, 90 bp, Homo sapiens
cctccacaatgattgattttcaaatgttgaaccagctttgcagaactataataaacccaagtgtgcattggaataggattgcagacagtg

SEQ ID NO: 438883 - DNA, 88 bp, Homo sapiens
ttttactactgtgacaacattaacgatgacgaagatgatcctgcagaagctgaaaaggagggaaatgaaatggagggtgaggagttag

SEQ ID NO: 438884 - DNA, 100 bp, Homo sapiens
ggacgaggaggctggaggtactgagaggatggaaatcagcgcggagttaccccagacccctcagcgtctggcatctgaacccttctctgaagcaacagct

SEQ ID NO: 438885 - DNA, 74 bp, Homo sapiens
tctgacggccggtatgtgaaggagaactgcaaacctctgaaggagagctgatagtattcattccactcttttca

SEQ ID NO: 438886 - DNA, 98 bp, Homo sapiens
gaggcggagaggcacggaggagccgctggggctgccgccacggccgcccggagataagcgtgtggaaaattggcctctgatgcagtctccttggccta

SEQ ID NO: 438887 - DNA, 122 bp, Homo sapiens
ggatgaattcaggaaggcctgagaccatggaaaacttgcctgctctctacactattttccaaggagagagtcagtggcctttcccccttcatgggagacaacgataacgaaaccttggccaa

SEQ ID NO: 438888 - DNA, 110 bp, Homo sapiens
accgaaatgagactccctcagatccagtgataattgacagcaccaatgttgttatgaattattcagagatcgagtctaaggttcgagaggcaacgaacgatgatccttgg

SEQ ID NO: 438889 - DNA, 100 bp, Homo sapiens
cgttggagatggaggggccgagcctgaggggtcctgcgctccgcctggcggggcttcccacccagcaggatttgcctcaaagggcactgcaaaaattgaa

SEQ ID NO: 438890 - DNA, 75 bp, Homo sapiens
atggtgcgagggctggcgttacggagcatgtgtagcctcagtactacgacatttctgccaaaagtaactacaact

SEQ ID NO: 438891 - DNA, 75 bp, Homo sapiens
ctccccaggtgaactcgaagtggagcaaaaggtgacagtcacagcttagtaggttgaaatcacaaagattagaca

SEQ ID NO: 438892 - DNA, 101 bp, Homo sapiens
aagtgacaagaaatgttccaccaggacttgatgaatataatccattctcggattctagaacatctctagtgatccctgaaaagttccagcatattttgcga

SEQ ID NO: 438893 - DNA, 90 bp, Homo sapiens
atagaggcacgtttgtcaagctattggctccacgtgttccccacgtttgtggcgtacgagctcacggtgctggtgttcctcaccttgtca

SEQ ID NO: 438894 - DNA, 90 bp, Homo sapiens
ttgagaagttttccatggaggtgaaaagttcagttgagaaacaagggctcaatatggaggattacgtgagacatggaatccattaaaatt

SEQ ID NO: 438895 - DNA, 100 bp, Homo sapiens
accatccggctgctggacgactcggagatctcctgccacatccagtacttggggtgcattgaagttctgcgctcaatgaggtctcttgacttcagtacaa

SEQ ID NO: 438896 - DNA, 101 bp, Homo sapiens
atttcctgtaattgaaaccaaaatgtcatttatagatccttaccagcacattatagaccccagagagatgcccaggcagcccgagaattcattctgaagat

SEQ ID NO: 438897 - DNA, 100 bp, Homo sapiens
tggagatcatgctggacattcagcaggatgagtacctgcccatctggggagagacagatttgaaaaagggcgcatctatacgttcattggagaagtcgtc

SEQ ID NO: 438898 - DNA, 100 bp, Homo sapiens
tggcattggaacttcctgttctgatagcgtggaagggcaaacttgaagataaatcttttgactccagctctttagaggatctaaagtgaccttgatggac

SEQ ID NO: 438899 - DNA, 100 bp, Homo sapiens
ctggccatcacaactggattgtagctgcatatgcccattttgctgtgtgttacagggttgaaaaataccggccacagaccctgaatgatctcatttctca

SEQ ID NO: 438900 - DNA, 97 bp, Homo sapiens
aagctctataagattcttcaaggtggggttggcatcccccacatacggcttggtttagaaagaggggaaacagctaaagaagccttagatgtcattg

SEQ ID NO: 438901 - DNA, 75 bp, Homo sapiens
gtttccatcacgagtgccgccagcatgtctgacaaactgccctacaaagtcgatcgaggagactggcagagggaa

SEQ ID NO: 438902 - DNA, 96 bp, Homo sapiens
ctgacatcacagttgtctgcaccctgttgtggctctataagcaggtcaatgagctgaaggagaaaggcaacaaggccctgagcgtgggtaacatcg

SEQ ID NO: 438903 - DNA, 58 bp, Homo sapiens
ggaaacagtattttctggaaggggattcaagatgaccaacgaagaacctcttcccaag

SEQ ID NO: 438904 - DNA, 74 bp, Homo sapiens
tgcgaccactgcccggctgccttccacctccagtgctggtcaaaatgcagatcttcgtgaaaacccttaccggc

SEQ ID NO: 438905 - DNA, 80 bp, Homo sapiens
cctcaagaagaagaagttgcgaaggatccccaacggggaggccaacgtgaagaatgctgagcttgcaagacctctgctgc

SEQ ID NO: 438906 - DNA, 76 bp, Homo sapiens
gcggcgctggagagggggcgctgagctgttggggttttggacatagtgaaaacaagtattcgtacagttcttccac

SEQ ID NO: 438907 - DNA, 100 bp, Homo sapiens
aaggaacaagagatgcaagagtgtactgagctccagaggagatgtaataccttaattactttgattgaaagagaaaacatggaactagaagaaaaggaga

SEQ ID NO: 438908 - DNA, 100 bp, Homo sapiens
ccagtcacctgtctggagcaagaaaaagagccctggaatatgaagagacatgagatggtggatgaacccccaggactcagtctcctttgaggatgtggcc

SEQ ID NO: 438909 - DNA, 100 bp, Homo sapiens
agtcgaccctgcacctggtcctgcgtctgagaggggtcaccagtcgttggcacaccaagaagctgccccgcaagacccaccgaggcctgcgcaaggtggc

SEQ ID NO: 438910 - DNA, 73 bp, Homo sapiens
gcctggtggtttttcgtctaaagaatgtcaagctgtcagctgaggtggagccatttattccccagaagaagag

SEQ ID NO: 438911 - DNA, 76 bp, Homo sapiens
agagagagagatgccctgcagctggaaatgagcttggtgcaggaagccgaaaacaccctgcaatctttcagacagg

SEQ ID NO: 438912 - DNA, 74 bp, Homo sapiens
cactactggaagcacaatagctgagggacaggcattagagcccaaacaggatgctttccaaggccaagaagcag

SEQ ID NO: 438913 - DNA, 75 bp, Homo sapiens
ccttccaacggggtgacctcatccgtattctgagcaagattgagaggatccagaatccagatctctggaatagct

SEQ ID NO: 438914 - DNA, 76 bp, Homo sapiens
tgacggaatgcctccatacatgccctccaggccctcctcacagtcctcaaagaaggaaatgctccccccgccaccc

SEQ ID NO: 438915 - DNA, 100 bp, Homo sapiens
ggaattgaaaatggtatttcagatccagatcagtaggattgaaacatccaatgtcatctgggtggaagatgagaatgtgcctactgctcctgatcctcca

SEQ ID NO: 438916 - DNA, 100 bp, Homo sapiens
gccatctttccatggagtggacctgtcggccctccgaggtgccgcggtggatgagtatttccggcagcctgtggtgaccacagcaccgggaagtccagtc

SEQ ID NO: 438917 - DNA, 75 bp, Homo sapiens
ctccaatacagttcaagagaaaacattcaacaaagatacagtgattatagtcttggctgaagaggaaataaaaac

SEQ ID NO: 438918 - DNA, 100 bp, Homo sapiens
aaaaaaatgaccttcggtatattgaaatgcaggtgaatgaaatcctgtgccgttcttcagtctggagtgccttcaaagatcagaaacatgatttgttcat

SEQ ID NO: 438919 - DNA, 101 bp, Homo sapiens
agaaccattgaagcttgagagaaaagcccccaaaagcagctattcaggtaaaacttccttttcctgtagatcaaatcacagatcttccaaggaacgatttc

SEQ ID NO: 438920 - DNA, 75 bp, Homo sapiens
ctttggcaatgttttcttggacgttgctgttagaaactttgcaagaggagctgaagctttttaacgaaacagcca

SEQ ID NO: 438921 - DNA, 100 bp, Homo sapiens
caaattaaagttttacaagatttaacctgtcatcaagacctgggattttggtgcttttctgggagaagaggctacaaggacttagtgcatcagatgtaac

SEQ ID NO: 438922 - DNA, 100 bp, Homo sapiens
gatagggctgacgctgctgctgtgtgcggtgctgctgagcttggcctcggcgtcctcgggtggagccgccaccaaaatgcagattttcgtgaaaaccctt

SEQ ID NO: 438923 - DNA, 95 bp, Homo sapiens
aggctctgcggctggtccaggccttccagtacacagacgagcatggggaagagatggagtttcactgtgtcagccaggatggtctcgatctcctg

SEQ ID NO: 438924 - DNA, 50 bp, Homo sapiens
cgaaacccaagcggcttctgctgcaggtggcttcgtcctgttcatcgcca

SEQ ID NO: 438925 - DNA, 80 bp, Homo sapiens
gattctccctctcctagaggcgcgggctgacgcacgaggcacacaggaaggaggtggagcaggtgtatctgcgctgtgcg

SEQ ID NO: 438926 - DNA, 100 bp, Homo sapiens
ggaaaatacttgaaaaggtggaggctgcatcaggatttacctctgaagaaaaaggcactgtttagtacagctgttgaaatgaagataaaacaatcagcag

SEQ ID NO: 438927 - DNA, 75 bp, Homo sapiens
gccatgtcgggttattcgagtgaccgagaccgcggccgggaccgaggtagccacgatggaggtgatgaacctgat

SEQ ID NO: 438928 - DNA, 103 bp, Homo sapiens
gaagatgagaccgggggaggcgacgctaagttgctgatcgtggcgggagtggagcaactgctgtagtccaagcagcttattgtgcccctaaaaaggagaaagt

SEQ ID NO: 438929 - DNA, 75 bp, Homo sapiens
cctctgcagcctctctgacaagtgaccactaaggcttttcttcctacgatgctggagattaatcatggtcatatt

SEQ ID NO: 438930 - DNA, 83 bp, Homo sapiens
cagtatgcaaggccacgacccacgagatcatggggcccaagaaaaagcacctggactgatcgaatcatcaatttagttgttgg

SEQ ID NO: 438931 - DNA, 100 bp, Homo sapiens
attggctgcgtgctcctcctggacctgcctcttctcgactttaagaagcgatgagagagaacattgacatcaccaatttcagcagcagctggagcgatgg

SEQ ID NO: 438932 - DNA, 83 bp, Homo sapiens
atccatgtgagtgaccatgcagcaaaagaaggagggtcctctcagtgattaaggattttttatcaagcagaaatgcatcgaac

SEQ ID NO: 438933 - DNA, 50 bp, Homo sapiens
ggaaaatcctggcagaggacaagtcttgagagctgatgacaataacatgg

SEQ ID NO: 438934 - DNA, 75 bp, Homo sapiens
agaagatccagctttgttgaaaagcgaagccgttagtcccttaatacaaaggctggtgaattctatagccaagac

SEQ ID NO: 438935 - DNA, 50 bp, Homo sapiens
gccaagttactggagccgatgacagagttcattcaaagaggcaggatttc

SEQ ID NO: 438936 - DNA, 82 bp, Homo sapiens
acgccgagcacccaggcgactgcctcatcttcaagctctacgaactcgacggggaccccaagaggaaggaattcctggatga

SEQ ID NO: 438937 - DNA, 74 bp, Homo sapiens
tgaacacgcaccgtgacaagccaactagcactgtccagagcttcctccagtggacaatagcatatttgtcgcaa

SEQ ID NO: 438938 - DNA, 73 bp, Homo sapiens
caaaaaagaaatggtgatgcagtacattaatactgcttctaagacagctcgtggtcccaagaagcatctgaag

SEQ ID NO: 438939 - DNA, 100 bp, Homo sapiens
agttctggtaccagctatcatgaacaggtgtccagtgatttggagaatattgacacaggagttaattctaaagttaagagtcatgtgactattaggcgaa

SEQ ID NO: 438940 - DNA, 98 bp, Homo sapiens
ttacatcccattccctgaagatgattctaattcaacaaatcataacttgggaactctaatgatccaggacaaagaagttaccctggagtatgtatcaa

SEQ ID NO: 438941 - DNA, 90 bp, Homo sapiens
ataaaaggcaaactcttcacctggctttttctcctccgtgacagccagagtaatccaaaggcatttgtactcacactgtgtcatcaccag

SEQ ID NO: 438942 - DNA, 143 bp, Homo sapiens
acgagagaggcaccgggatcgtgaccgagaccgtgaccgagagcgtgaccgagagcgcgaatatcgtcatcgttagaagaaatctcctgcaaagaagctgagccatgcaattagtaaatctttggggtgtgtacccacgagag

SEQ ID NO: 438943 - DNA, 95 bp, Homo sapiens
caaaattactgtatatgcacatgctgggctaccctgctcactttggacagcaccctggaggagaagaggttctgctggaacaagctggtgtagat

SEQ ID NO: 438944 - DNA, 75 bp, Homo sapiens
cggagggggctttgctggtctttcttggactattccagagaggcccctccagccagcgtcaggtgcagaatggcc

SEQ ID NO: 438945 - DNA, 75 bp, Homo sapiens
tctgaccgtgaagagacatgagatgattgccaaacccccagattcatgatgttgctatcaaaagttgagaaattg

SEQ ID NO: 438946 - DNA, 90 bp, Homo sapiens
cgcctgtagctcgcgggcctcgcagtgaacagagtatctgtcaggcaagagctgctgtgatggtttatgatgatgccaataagaagtggg

SEQ ID NO: 438947 - DNA, 51 bp, Homo sapiens
gccctgaagttgtccatcccttgatttctcgaatgctggcagccaaaaccg

SEQ ID NO: 438948 - DNA, 74 bp, Homo sapiens
aggcctcggttggatgcgaaggagctgcagcatccagtgtgaagcctcagtttaggtcatctggtggttcagaa

SEQ ID NO: 438949 - DNA, 100 bp, Homo sapiens
ccgagtcccagaaggcggcgatcctgggctgcgggcaaggcggctcacttatctaaagaatatgaggaggctaatttcagagctatatgtgcgagataac

SEQ ID NO: 438950 - DNA, 118 bp, Homo sapiens
ggaaactggcggctgctggtagttccatgctgtctgttcagacttcagcttggtgaatcccgttctgcttccagaagtggaagtgctcacggatcggggaaatctgcaaggcataccc

SEQ ID NO: 438951 - DNA, 75 bp, Homo sapiens
cacctctgtattcagcatagctattcctgttgatggtgatgaagacaggtctctaattaacagaagatggcaaag

SEQ ID NO: 438952 - DNA, 100 bp, Homo sapiens
cgatgatatggagagccagcccctgattggaacccagtccacagcaaagaatggccgagtggattctgaggaccggaggagccgccactgcccgtacctg

SEQ ID NO: 438953 - DNA, 100 bp, Homo sapiens
agcacaggtcacagtaaggccaaaaatgtgcatactcacagagttagagagagggatggtgagttgtggaaagtaaaaatgtagccctaccaaaaggaac

SEQ ID NO: 438954 - DNA, 100 bp, Homo sapiens
ccgaccacggggtctgtggagtggctggaggaggatgaacactatgattaccaccaggagattgcaaggaaatgaagtgtctgatgaagagtgcttgaag

SEQ ID NO: 438955 - DNA, 100 bp, Homo sapiens
caatcatacacaacttcagggccaacaacgtcagtccaatgacatgcctcaagaaacagaaaatgttggggcttttcaggaagcataataagattcctag

SEQ ID NO: 438956 - DNA, 75 bp, Homo sapiens
cggaggctgaagcgacgccggaggcagtggaagatagatgataagcctgtaaaaattgacaagtgggatggatca

SEQ ID NO: 438957 - DNA, 85 bp, Homo sapiens
taaacggaacttgcctgtgaatttcgaggtgatgatgaacagtctacacagatggctgcaagttgggaagatgataaagttacag

SEQ ID NO: 438958 - DNA, 80 bp, Homo sapiens
cagtgcggaaggaggaggagtgcatcagcaggctggcccaggacaagggagaggtgaagacaacaatatgcacaggtttt

SEQ ID NO: 438959 - DNA, 100 bp, Homo sapiens
gctgctcttcctgaggttttcctaagccatcccctggcggaaccgcccccagacgtcttgcgggaaacgctctgacatacattcccaagggagcattcac

SEQ ID NO: 438960 - DNA, 100 bp, Homo sapiens
tgccgctcgacctcctggtcagcacttaccggctgccccagatcgcgcgcctggacaacgagctgccaaatgctgttaaatcaactgagagaaatcacag

SEQ ID NO: 438961 - DNA, 100 bp, Homo sapiens
cgccaggcgctctgaccactctccagcaccagcttccagttagtggatatagcacaccatccccagccagctgagtatgagtttatcagctctggtctct

SEQ ID NO: 438962 - DNA, 76 bp, Homo sapiens
gccaaaaaaggagaaattgttgttataagaattaaacaaccaccatgtcgagcaaaaaggcaaagaccaagaccac

SEQ ID NO: 438963 - DNA, 100 bp, Homo sapiens
ccctgttggccgctctgtggatgagactttgagactagttcaggccttccagttcactgacaaacatggggaaggtgtccttaagtttgctcgcttggtc

SEQ ID NO: 438964 - DNA, 96 bp, Homo sapiens
ctggagcctcaggcggcagcgcttctagggattatcttgaacacataacctccattggccccaggactacaggaagtccagaaaatgaaattctga

SEQ ID NO: 438965 - DNA, 100 bp, Homo sapiens
ggcctggcccagcgcgtgtgcatccagcgcaagcccctcaggcgaggctgtgagtgtggtgggctttggcgtctttggccagtcttgcgggccctcggtg

SEQ ID NO: 438966 - DNA, 100 bp, Homo sapiens
gctgcagcagtgaggccaagctccagtgtcccacttgcatcaagctgggcatccagggctcgtacttctgctcgcagtttgcctgagaatacagatcaac

SEQ ID NO: 438967 - DNA, 74 bp, Homo sapiens
ccctgactaaagcttgaaatgctacatttccaaggtatcatgatattagctggtttgacatcaagtcatttgtg

SEQ ID NO: 438968 - DNA, 90 bp, Homo sapiens
cagaaaattatcaacattctcacagacaagcatggagcctggggaaattctgcagtgaggtgtaccaacagtaccgttattgccaccaca

SEQ ID NO: 438969 - DNA, 74 bp, Homo sapiens
gtgtctgaatacatttcaaatactttcttagagcaagaatatgatcctggaccaagcctttaaatatataacag

SEQ ID NO: 438970 - DNA, 96 bp, Homo sapiens
ccagcttgtgaatctggtgtagaagatgatcaaatggcccaggtctatgttaacaatgaatgggcaaccagtgttggggaaggagggagctttgga

SEQ ID NO: 438971 - DNA, 95 bp, Homo sapiens
atcaccttattctggtcccggaaccagacgtcctgggtcctctccagcatggcagccctctactggagggtgaaaggccaaggaaagaaggcaat

SEQ ID NO: 438972 - DNA, 100 bp, Homo sapiens
actaccctggttacctcatataaaatgcttggacagaagagatgagtactatttccactaaggcctagaattgcctactgtacaaatagtcctgatcagg

SEQ ID NO: 438973 - DNA, 75 bp, Homo sapiens
ctttgttcagctgcagcatggagagatagataaacggtggctgtgtggagtggtgtgaatgtggcaggtgtttct

SEQ ID NO: 438974 - DNA, 100 bp, Homo sapiens
cctggacccagctgagcgggcggtcattcgcatcgcagtttgtttcgacgccggaccgcgtaagagacgatgatgttgggcacggaaggtggagagggat

SEQ ID NO: 438975 - DNA, 98 bp, Homo sapiens
gcgggagggctgtgtgatggcctcggagcgcccggagccggaggtgctcgcatttggcttttcgttggtttcatgttggcctttggatctctgattgc

SEQ ID NO: 438976 - DNA, 100 bp, Homo sapiens
agcctagaatgcatcagtgcccttgtggcgaatggggctcacgtcgatatgatcttagctttgataaatgactgaagctggagaagccgtggttgaagtc

SEQ ID NO: 438977 - DNA, 50 bp, Homo sapiens
gggacaccccggaagctgggaaatgagctttcagcagaggccaaggcagc

SEQ ID NO: 438978 - DNA, 74 bp, Homo sapiens
gtcattctcgctaacaactgcccagctttgagaaactggcgatggaatatgagaggagccctctggaaagaaaa

SEQ ID NO: 438979 - DNA, 87 bp, Homo sapiens
tggttggagagctcatctggaattttgccgatttcatgactaaccagtattacctggctggtgtttgcttgttctggagtgatcttc

SEQ ID NO: 438980 - DNA, 97 bp, Homo sapiens
tcagcgcctatggcgaggtcggacgcgtcttctttcaggctgaggattatgtttgagaccttcaacaccccggccatgtacgtggccatccaggccg

SEQ ID NO: 438981 - DNA, 100 bp, Homo sapiens
ctccgggtgaggccggccacgccccgcacgttgatcatggccttgccaggttggtgacagtatattgtgagcatggtcataaagctgccaaaatcaaccc

SEQ ID NO: 438982 - DNA, 73 bp, Homo sapiens
gttgcaacagttgcggagcgcccatgcagattgttagcactgctagagtttgctgaagagaagatgaaagtga

SEQ ID NO: 438983 - DNA, 98 bp, Homo sapiens
tcttggtgtttcctggctcccggaggccctggtagctcgtgggtgtgggagctgagcaggaagcaaacggggattcagcgtccgatcctttggaacag

SEQ ID NO: 438984 - DNA, 100 bp, Homo sapiens
agctaagtgatgatggccgctttgaggtgtggaatgcgatgactcgcttcctggagatgatggaggctcgcagccgtggccatgcgtccccactggcggc

SEQ ID NO: 438985 - DNA, 82 bp, Homo sapiens
tggcagcagacatcagccacgcatctgaccttgttgagcaggacaggctgctttggtttgtgacctccaggcaggacggcca

SEQ ID NO: 438986 - DNA, 100 bp, Homo sapiens
aatcatagccactattcaggtgtttacgcagtgctttgtagaagctctggagaaagcaagcaagcagaatggtgaacacagaaatcgaggtgcaagctca

SEQ ID NO: 438987 - DNA, 98 bp, Homo sapiens
gtgatgtcacaagattgaccacattgatcacagttaaacccatccagagtaatggctgcggccttacccaggaccctgggggagttgcagctgtatag

SEQ ID NO: 438988 - DNA, 75 bp, Homo sapiens
aaagaatagagttgagcctgtgggacacttcggggcgaactttctgaccaagtatacaactacccagagggccta

SEQ ID NO: 438989 - DNA, 82 bp, Homo sapiens
ctgcccaacatccaggctgtactgctccccaagaagactgagagtcaccacaaggccaaggcttccccgggcgctgcctgga

SEQ ID NO: 438990 - DNA, 75 bp, Homo sapiens
ccactgctgaggaattctcactccaactctctgtgaacctggccctgcctgtgttcttcatcctggcctgcctct

SEQ ID NO: 438991 - DNA, 76 bp, Homo sapiens
agtcatcatgagcgatgttaccattgtgaaagaaggttgggttcagaagaggggacaatgaaggccaaacagctct

SEQ ID NO: 438992 - DNA, 100 bp, Homo sapiens
tgctagaattacctggaacttcatcatcatctacttcacaggaattgccattttggagcacatgatccagaagaaccaatgtctcttcaccaacacccag

SEQ ID NO: 438993 - DNA, 75 bp, Homo sapiens
gtagaaaaacactatctcttctatgacggagaatccgtttcaggaaagtatgggattgtgctggatgcgggttct

SEQ ID NO: 438994 - DNA, 97 bp, Homo sapiens
tggaccaccatcctgaatggtttaacgtgtacaacaagatgctggacctcagccacaatgagctgtcctttgtgcccccggacctgcctgaggccct

SEQ ID NO: 438995 - DNA, 100 bp, Homo sapiens
aaaggccaagacaaaggcggtttcccgctcgcagagagccggcttgcaggaggagatgttaaagtaacccatcttgcaggacgacattgaagattggtct

SEQ ID NO: 438996 - DNA, 50 bp, Homo sapiens
gacggccgctgcctaagctggaaaacccaccgtgcggaggtcgtttgaat

SEQ ID NO: 438997 - DNA, 71 bp, Homo sapiens
cacctgcacatccacactccgctgctcgacagtacccggcagtgtcacctgctcctggatgtcttcaactc

SEQ ID NO: 438998 - DNA, 90 bp, Homo sapiens
gttcagcgctttagcctcaggaggcagctatccaaggtcttgatgcagaactttattatgtgagaaatgaccttattagtcactacgctc

SEQ ID NO: 438999 - DNA, 88 bp, Homo sapiens
cccctgacagccacctgcccactttgtgatcagagccgtgttcggggagtctttcaggaattagaaggtgacgaggagggagaagacg

SEQ ID NO: 439000 - DNA, 78 bp, Homo sapiens
tatttcgctgggctctctaaatggattcagctccaggtggtattaaagataatcaaacattatcaagaagaaggacaa

SEQ ID NO: 439001 - DNA, 81 bp, Homo sapiens
gcaccccgaacgggttgcttcccccgctgcgagctacgagttccagggagctctgtcctggtgaccgtgcccgggttatga

SEQ ID NO: 439002 - DNA, 100 bp, Homo sapiens
ctttgtgaccctgaggaccccagagggatgatccctccccgcggcggcgatggcccgagccatgagagtgaggactttccgcgcccattggtgacccttc

SEQ ID NO: 439003 - DNA, 75 bp, Homo sapiens
ggacagtgcggctactcttgatcctctccggctgcttggtctacggcacagcccctaagacttgcagccccaagc

SEQ ID NO: 439004 - DNA, 127 bp, Homo sapiens
gggactcgcctgcgctcattctggagctggaggacgccgtgcgcgccctgcgggaccgcatcgaccgcctggagagcgccgccaagatgatcaaagagacaatggacaagaagttcggctcctcctg

SEQ ID NO: 439005 - DNA, 90 bp, Homo sapiens
cgaggggctccgggtcttccagagcgtgaagatcaagatcggctaccggctctctgaccagttccacgacatcctcattcgaaagtttga

SEQ ID NO: 439006 - DNA, 75 bp, Homo sapiens
catcctgccagattattcagttcatggagggggacaagggaggctcaggagaagctctacaaggaatatctgcag

SEQ ID NO: 439007 - DNA, 50 bp, Homo sapiens
gaggttcctgtgcaactcttcacagacttaattcagtgcacaaatgagat

SEQ ID NO: 439008 - DNA, 100 bp, Homo sapiens
ggtgcagttcagagtgttagagacggtctggaaaagcggtacattgcttcttatttagcactcacagcttggtgtaaaaattgccaaagcagttgcctgc

SEQ ID NO: 439009 - DNA, 75 bp, Homo sapiens
cggccgccggctcccccacgagagatcgagatggtgatcatggagcgtagcaagctctcagagctggccgccagc

SEQ ID NO: 439010 - DNA, 100 bp, Homo sapiens
gggagatagtgcagagactgaagggagaaaactggttgtcctggatgtttgaaaagttggtcgttgtcatggtgtgttacttcatcctatctatcattaa

SEQ ID NO: 439011 - DNA, 90 bp, Homo sapiens
caccccgagaaccgtcagtttgagccagatgggcattcttagcagggttacagaatctgttaagaatattgtgccagggtggctacaaag

SEQ ID NO: 439012 - DNA, 99 bp, Homo sapiens
ctgtcttctcaaccgtagatgctcctgtcgctccttcagacaaaggattggatagctttagtcaaagcagctgctgcagctgcagccaagaacaaaaca

SEQ ID NO: 439013 - DNA, 101 bp, Homo sapiens
tcatgagcagcctgcccaacttctgcgggatcttcaaccacctcgagcggctgctggacgaagtcaagctgtattagtcgacaggaccatttacatttcag

SEQ ID NO: 439014 - DNA, 73 bp, Homo sapiens
ggcacagagagggcctgggagcttgctgcagcttcagaatgaagactattctcagcaatcagactgtcgacat

SEQ ID NO: 439015 - DNA, 82 bp, Homo sapiens
ggctcttgccctcatcctggttctggaatcctcagttcaagctatgcagtcagaagggcctgtggaacatgttccagttttt

SEQ ID NO: 439016 - DNA, 58 bp, Homo sapiens
tcttggcttgattcagtctgccttgtaacaggaatacaaacagaagcttgcacgagta

SEQ ID NO: 439017 - DNA, 82 bp, Homo sapiens
aaggaaaaactggagagcttcatcaaaaatagtgatagctttgataaggatcatagacggtatttctatgtaaacgaacagt

SEQ ID NO: 439018 - DNA, 90 bp, Homo sapiens
agggcatgaaggtccaggcgctggccagagagatcgatgtcttattgtgatgagtctcgactgtcatatcttcttcggaggatcacccgg

SEQ ID NO: 439019 - DNA, 100 bp, Homo sapiens
cccgacatgatggcgagcatgcgagtggtgaagatactccactatgagctactggccattcgtgatgcctgcatcaaactggaaaaggactaccagcctg

SEQ ID NO: 439020 - DNA, 83 bp, Homo sapiens
cgtgccgcgtctccgcgttcccagcccgggtccccgcgttcacagccccagcgcaggtacatgtcccagagcaagcacacgga

SEQ ID NO: 439021 - DNA, 90 bp, Homo sapiens
ctgctggcctggcctaacacctggcgctgtggtgcaggcaagttgactatagtcaatggggccaatggagccaagtgtatggaaacccac

SEQ ID NO: 439022 - DNA, 100 bp, Homo sapiens
cctcccaagtagctgggagtacagtgacccctcccagagtgaccctgagaccaaagacttctggctcaacatggcagctctgaccgaagccctgcagcgc

SEQ ID NO: 439023 - DNA, 83 bp, Homo sapiens
atgatgccaatgtcctggtgtggcacgctctcctcctacccgctctattccgttcgctggttcgccacctcaggggaacgatg

SEQ ID NO: 439024 - DNA, 100 bp, Homo sapiens
acatggagacctgtgcagaccagcactattcctgatcagagaactccagttgcttcaacacacagtatcagtagtgcagccaccccagatcgaatccgct

SEQ ID NO: 439025 - DNA, 75 bp, Homo sapiens
acatttaattttagggtcctttatatagaagggagagtaggaaggtgctcgggtcttcggggcactgggtcccat

SEQ ID NO: 439026 - DNA, 100 bp, Homo sapiens
cgctgaggggcttgcctgaagcgaggggacttagagattcgcaacaacgcggccaactacctcccccagatcagccatctcctcaaccacgtgccgcgcc

SEQ ID NO: 439027 - DNA, 98 bp, Homo sapiens
agcatagctgctacactgaagatgaagcaaggcccaatgacccaggcggtgacttaagagattaaaattaatttggttgctgttggttctgaacaaat

SEQ ID NO: 439028 - DNA, 50 bp, Homo sapiens
tgaaaacctgggatccacagaggaaagcagcagccgctcttctaaaacat

SEQ ID NO: 439029 - DNA, 100 bp, Homo sapiens
caacgttaaggagctggaagtactgctgttgcaagaatgtagtaactctgatcagctacaaggaaaggaggaaagagtaaatgaagaaagtcatctaact

SEQ ID NO: 439030 - DNA, 75 bp, Homo sapiens
ccaggtgtaccccaagctgtacttgtcacctcgaattgagcaaaacctgtttccctccaatcttgtggttgcagc

SEQ ID NO: 439031 - DNA, 129 bp, Homo sapiens
ctctcatctcgctcggctgcgggaaatcgggctgaagcgactgagtccgcgatggagctttttgtcgataaagatacgattgttaatgctgtcggggcatcgcacgacatccacctcctgaagattgac

SEQ ID NO: 439032 - DNA, 88 bp, Homo sapiens
aagttctacaatgttcgtggggagcacatcttcacactggacactctcgtgcaggtagattggggtcaactggactacttagttgtag

SEQ ID NO: 439033 - DNA, 75 bp, Homo sapiens
gccacagtctctgcatgtttccaagagcaacaggaaatgaacacattgcaggagccctgtaatggccggactgcc

SEQ ID NO: 439034 - DNA, 80 bp, Homo sapiens
gtttcgtggcctgaccaaggacctccaagttccatgccattgcagtgtcaactaggcctcagttacttttcagtttgccc

SEQ ID NO: 439035 - DNA, 90 bp, Homo sapiens
tctggaaagaagctggtttggatcttcgtgcaagtggtgacccaggatgaaagagagcagctgtacacacctgcttccttaaaatgctct

SEQ ID NO: 439036 - DNA, 82 bp, Homo sapiens
tcaaaccagtattcttttcacacagtgttctaagaacggaagcatctgggctggatggaatttagcatcaagcagagtcccc

SEQ ID NO: 439037 - DNA, 72 bp, Homo sapiens
gagacatgcctcacccgaggatattaaaaaggcgttcatcatgcctagtggcgtataagaagaccccgccac

SEQ ID NO: 439038 - DNA, 75 bp, Homo sapiens
gggcaccttcatctggaataagggcaaacctggtggacctgcagaagaagctggaggagctggaacttgacgagc

SEQ ID NO: 439039 - DNA, 113 bp, Homo sapiens
ccggcctcatcgtgccggcttcgcgcgcgaacccggctttcgcatttgggaccctgcaggataacgaaggaggcccaacttcattcaataaggagcctgacggatttatccca

SEQ ID NO: 439040 - DNA, 100 bp, Homo sapiens
taaaaataaactgcttgaacatcctttgactggttagccaggcatcttattatagaaaactttatccctctggaagaaaaaagtaaaattatgaatagag

SEQ ID NO: 439041 - DNA, 100 bp, Homo sapiens
actcaccttccacctcctccatttcttccacctcctccgactgtcagcactgctccacctctgattccaccaccgggacatggatttgattgacatactt

SEQ ID NO: 439042 - DNA, 90 bp, Homo sapiens
gcaaatactcagaaacatccttccagaaggagcgaactgaagaggttctacacaattggctctcaaaattagagagatgtgtaattgtcc

SEQ ID NO: 439043 - DNA, 85 bp, Homo sapiens
ggagccttcagcggggggagctcggagccctcccagcctgctgtccagcaggaactgtggctgcaccatctgtcttcatcttccc

SEQ ID NO: 439044 - DNA, 83 bp, Homo sapiens
gagcgccgcgccttcgcgcacaagatcaacagacctgcctagagctggaacgttacctccagagcgagccctgctatgtttca

SEQ ID NO: 439045 - DNA, 50 bp, Homo sapiens
tattcctgttgatggtgatgaagacagggtacagctctgccgggggggga

SEQ ID NO: 439046 - DNA, 98 bp, Homo sapiens
tccggcttcccgcaatgaggagggcccttcacagaaccgggatggaatcgccacttatatatgtttcagttttgcttttgaacatatttgaattttca

SEQ ID NO: 439047 - DNA, 138 bp, Homo sapiens
gaagacctgcgtcctttttcgtttttcggatgatgccttcaatactacctttatttccaccatagggcttatttcaaaacctttgtccctcagttccaggaggcagcatttgccaatggaaagctctaggaaacacca

SEQ ID NO: 439048 - DNA, 100 bp, Homo sapiens
ttcacagaatacttaaggtggctgcgacaagtctccaaggaatccaaggcattgtagaggcgtatcggtcttgtcttcctcagataaaactctatggacc

SEQ ID NO: 439049 - DNA, 98 bp, Homo sapiens
gtcatgctggagaactacaggaacctggtctcactggagcagttgaagacatctcttcatcgaggactaacccctacagttatgcaatgagtactgaa

SEQ ID NO: 439050 - DNA, 101 bp, Homo sapiens
tcaggaccaggcaccttctgtggaagatggactagaggcttttaccagatttcttaaaactgaattcagtgaagaaaatattgaattttggatagcctgtg

SEQ ID NO: 439051 - DNA, 50 bp, Homo sapiens
tccaggtgaagtagatttttattgtagctacagcaagctgggtagcaggc

SEQ ID NO: 439052 - DNA, 103 bp, Homo sapiens
gagcagcccagccagtcagcacaaaggaggacgtgaataaacagccattggactcttcaaacaaaaacgctgtctccatcaagtactgctttcgcaggataag

SEQ ID NO: 439053 - DNA, 100 bp, Homo sapiens
ctgagtctcgctgctcggtgcgaggcggcggagagcgaggcctgcttcagtgaaaggagtccttctgtcactcgtcactagctcgctcgctcactgtggg

SEQ ID NO: 439054 - DNA, 75 bp, Homo sapiens
tagcaatttaaagatcctctccaagtcccctccagggcaggtgactgaggccgtgaaggtggccattgacgtcgg

SEQ ID NO: 439055 - DNA, 100 bp, Homo sapiens
tcaatgcactggaattagatgacagcgacttggcaatatttattgctgtcattattctcagtggagatatgaagacaaacatgcctatcatcacatcaaa

SEQ ID NO: 439056 - DNA, 74 bp, Homo sapiens
tgacatctgggcctacatcttgcagcatgtgcacagtcagaggaaattgacaatggcccttcagctatgctagg

SEQ ID NO: 439057 - DNA, 95 bp, Homo sapiens
caggagttcattgaactcatccggcagaataagagactggacgctgtgaggtgaaatgacaatggatgctctgttggctcgattgaaacttctga

SEQ ID NO: 439058 - DNA, 51 bp, Homo sapiens
cctcttacttcaatttgaacccatttgaggaggtgctcctgtaccctggcc

SEQ ID NO: 439059 - DNA, 87 bp, Homo sapiens
gcagtcgtccgggcctttcgtggaaggctctatcgtccgcatctcgatggagaacttcctgcatttggctttatgtcccgagttgcc

SEQ ID NO: 439060 - DNA, 100 bp, Homo sapiens
gtacattgcttcttatttagcactcacagttcacacaaaagatgttggacaatttctacaattttgcttcatcatttgctgtctctcaggcccagatgac

SEQ ID NO: 439061 - DNA, 110 bp, Homo sapiens
ttcagcaccttccgctgtccgccgctgcagccgcctcctcctccaggatggggcaccaggtagtaagaaggcctttcctgggaggtgttggaaagtaactactctcaagt

SEQ ID NO: 439062 - DNA, 100 bp, Homo sapiens
cttcgcggtggcgatgctcttcttggaaaaccagatccagaaactggaggagtcccgctcgaagctagatgaacacaatgacgtacagaagaaaaccttt

SEQ ID NO: 439063 - DNA, 71 bp, Homo sapiens
aacatgcagattatatcgcatcctatggctcaaagaaagatgattattctgaagttgacaagcagcagcat

SEQ ID NO: 439064 - DNA, 75 bp, Homo sapiens
caactttactgagaattttccacctcctgacacaacaccactcatttcagatacaccacctccaccgccacctgt

SEQ ID NO: 439065 - DNA, 82 bp, Homo sapiens
tcggggatttcctgattggtgctggcatcagcacagacaccgctttgccgataggctcttcttcgtggggtcccgggaaggc

SEQ ID NO: 439066 - DNA, 85 bp, Homo sapiens
ggattcttcttttatatactgattacaagactgacacctatcaagtatgatggccctgaaaaccagaatcagcaacctgcccaca

SEQ ID NO: 439067 - DNA, 90 bp, Homo sapiens
tggggaacaaaaacaggcagaaattcatgtgtgaggtcaggctgccagatgggacctcactgacccagacgttccgggcccgggaacagc

SEQ ID NO: 439068 - DNA, 82 bp, Homo sapiens
cggccaagctatcttctcgctagcaggtttttagaacttcagccataaaaatgggcagaattttccttgatcatatcggtgg

SEQ ID NO: 439069 - DNA, 75 bp, Homo sapiens
tgatcattgagaccatgaagtccaacccaggatgctgaaaacgccattcaacagatgggtggccagtggcttggt

SEQ ID NO: 439070 - DNA, 82 bp, Homo sapiens
gccgcccgggaccgccagctctgtccgctgcccacagcctagcagtcgggaccgtactgagtgcagggctcgcggcctggca

SEQ ID NO: 439071 - DNA, 90 bp, Homo sapiens
caggaaaatcatattatagatggagtaaagatcccagataaacagtatgtgctgacagccctggctgctcgtgccaagcttcgagcctgg

SEQ ID NO: 439072 - DNA, 82 bp, Homo sapiens
tcggctgcagacttggccaaatggacgggactattaaggctgaccccgcactacatctacccaccagccatcgtgcagccca

SEQ ID NO: 439073 - DNA, 98 bp, Homo sapiens
ggaaacccagagctcctgtcaaccagccagtgctggcctgtgggcggccccaagcaacagcagtgtacaaggtgtcagagtatgcacggcgctttggt

SEQ ID NO: 439074 - DNA, 75 bp, Homo sapiens
tgatacaaatgaatttgttagtgctgtgtgctggagggcactaccagatgggattgacgagatgcctgaggctgc

SEQ ID NO: 439075 - DNA, 50 bp, Homo sapiens
tttggaaggccgggtgggccgagtgagagggtccaagcctggtaagaatg

SEQ ID NO: 439076 - DNA, 101 bp, Homo sapiens
tcttgcagacagagtggccatgtatgtgcatgcatatacactctacagtgctgttagaccttttggctgcaggatgaaatctttgacatggtaaaaccaaa

SEQ ID NO: 439077 - DNA, 90 bp, Homo sapiens
ctcaccaacaatcctacaatgatatatactgtgtccagttttagcataaagcagagtttcgtgagtgctcgcagctcatacctgtggctg

SEQ ID NO: 439078 - DNA, 75 bp, Homo sapiens
gccagaagacaaagtcaattccatatcttagcaaagcaatgtctcaagatggtgcttctcagttccaagaagtca

SEQ ID NO: 439079 - DNA, 90 bp, Homo sapiens
accggggcaacctggagttgagacagacgactgggatggaccagatggtctgtcttctgctgatcccaactctgattggaatgcaccagc

SEQ ID NO: 439080 - DNA, 138 bp, Homo sapiens
aaagtgatggacatggtgcagaagttccttggggtgaccaacaccattgactaccacaaaaccttggcattgccccaaagcggcctcacaccagagacgggttaagaagagggattggaggtccaccactccactagc

SEQ ID NO: 439081 - DNA, 75 bp, Homo sapiens
cttgactggtcttacattgctgcatcaagaaacccaagctgctgagccgtgctggtatagaggactctaagaagt

SEQ ID NO: 439082 - DNA, 73 bp, Homo sapiens
tctggataaggaccagtacctgcccaggaaactggtctatcagccacagtctctgcaagtttccaagagcagc

SEQ ID NO: 439083 - DNA, 100 bp, Homo sapiens
cagaccgcggacaggggacagccccacaaacaggtcctgggaactccaacaagggagcaaatcagagaaatgaacccaaactacacagaatttaaattcc

SEQ ID NO: 439084 - DNA, 73 bp, Homo sapiens
tgtgtggattcttcagaaagtgaacttggcattttagatctaattcaagatgaatgaggggtttgagtggcaa

SEQ ID NO: 439085 - DNA, 100 bp, Homo sapiens
aagcagtggtgggttccatgtgatggtggagtaggaggcaggtctccgcggaagatgagaatgtgcctactgctcctgatcctccaagtcaacatttacg

SEQ ID NO: 439086 - DNA, 75 bp, Homo sapiens
cttttaaggtgtctagtaagacagcagtacacattttggaactttatacccaagaatttatttgaacaattcaga

SEQ ID NO: 439087 - DNA, 100 bp, Homo sapiens
ggatacaggctgcctcctccatctgatccccagtaccgagcccatgaattgggcatgaaattggtgcaggccctagcaggtgcaggtggagtagacaatc

SEQ ID NO: 439088 - DNA, 74 bp, Homo sapiens
ccagatgtgcaacaaagtgcgatggtttgacatctacaggaaggtgcccaaggaccttacgcagccaacgtaca

SEQ ID NO: 439089 - DNA, 100 bp, Homo sapiens
gaaaaagatctaaagtcacccggcggccaaaggccagtgactaccaacgtttggaccagaaggccaagtcctgtatctgccatgtctgtggcgtccacct

SEQ ID NO: 439090 - DNA, 75 bp, Homo sapiens
ggcaagtattgctgtgggtgctgggacttcccgtccgcggcgtggagggtcatcttccacgatgttgctgtgctg

SEQ ID NO: 439091 - DNA, 87 bp, Homo sapiens
cggcgacggcggcaaatctaagaaatttgcaaaacccatttatggcggttggctgctcctggctccagatgggaccgactttgacaa

SEQ ID NO: 439092 - DNA, 74 bp, Homo sapiens
ttttggagagtcagagagaaaaggttatatttcacactatgtgctgactgtatctacagaagatatttaaaaaa

SEQ ID NO: 439093 - DNA, 80 bp, Homo sapiens
aacctggatctgcgatctgtttgtgatatcagttttagagaatgtggcgtggagaaattctcaaggaaagagtaaaatgc

SEQ ID NO: 439094 - DNA, 83 bp, Homo sapiens
cagccgcgcgctgagggtctcggggcgggcgccgcgggacctctccgggccatggctgtcgcctggttgggcccggaaatggg

SEQ ID NO: 439095 - DNA, 87 bp, Homo sapiens
tagatatacttgcagaatatttgaaatatcgtcaattcccctttcaaggagcttgtattttgaatatgctcaaggattttctgggtg

SEQ ID NO: 439096 - DNA, 100 bp, Homo sapiens
gagtctccaccaggactgaccgctgccgcccagcacgtccagcactattcctgatcagagaactccagttgcttcaacacacagtatcagtagtgcagcc

SEQ ID NO: 439097 - DNA, 87 bp, Homo sapiens
acttgctcaaggtcacacggaggcaagtgtccagagaatggctgggatgaaagtacacttgaactctttttacatgaacttgcaatc

SEQ ID NO: 439098 - DNA, 100 bp, Homo sapiens
agtgagctggcaacctttgacctttctgttcaagaacattagcagtgttgtggctgcattttccgaccttcttcacgtccgaatccctaacagctatgag

SEQ ID NO: 439099 - DNA, 90 bp, Homo sapiens
ctacttgctaaagagaagaattttggtttgggataaatttatgtggatcttcgctttggtgccataaagttacagaatgtctgaagggga

SEQ ID NO: 439100 - DNA, 98 bp, Homo sapiens
ctctctggcctgacaaccaatgttgtggacattattttggctcatcactttgggcagaatcctgccgcctttgacttcctgctgcagcgggttgagaa

SEQ ID NO: 439101 - DNA, 50 bp, Homo sapiens
gcactagtgtctagaaggcactaagggccctcgggaccaaggatcacgtc

SEQ ID NO: 439102 - DNA, 75 bp, Homo sapiens
agcagcagagatgataacatgtttcagggctatgaagaggtttctcagaagttcacctccatacggcgagtccgt

SEQ ID NO: 439103 - DNA, 97 bp, Homo sapiens
tgtgaggctcgtcttccaggacttcgacctggagccgtcccaggactgtgcaggggactctgtcacaaaaatgggaagcttcccttcatggccatgc

SEQ ID NO: 439104 - DNA, 74 bp, Homo sapiens
agcaacgcggaggaaacgggagtgaacggagagcgtagtgaccatcattagagaccgggtttcaccatgttggc

SEQ ID NO: 439105 - DNA, 75 bp, Homo sapiens
cggggacccaggagtttcctgtgtccagcgctgccggagccgcctgagatggagtcttgctatgttgcccaggct

SEQ ID NO: 439106 - DNA, 100 bp, Homo sapiens
cctggtcatcgagctgtccgacaaccctggcgtccatgagcctggtgctggagaatctggtaaaagcaccattgtgaagcagatgaggatcctgcatgtt

SEQ ID NO: 439107 - DNA, 75 bp, Homo sapiens
gctccccgacccattcactcctaatctaaagtttttccagaaaggaggagtcaaggaagcccttagtgaacgaga

SEQ ID NO: 439108 - DNA, 75 bp, Homo sapiens
gccgtgcggggctccgtggtgctgatcaatgtccgagttaccaccatggatgcagagctggagtttgcaatccag

SEQ ID NO: 439109 - DNA, 100 bp, Homo sapiens
tccagaatccagcagattactcgggatttcagtgttcaaattaaattcccagacagagaggagaacgcagttgcacttgacgctttggctgctggagtac

SEQ ID NO: 439110 - DNA, 83 bp, Homo sapiens
cagagagggaagagattcagccagcacactcctcgcgagcaaggttctcctgaaaagaaagctgaacattcatctataaatca

SEQ ID NO: 439111 - DNA, 98 bp, Homo sapiens
tgtcttgttccgaggcggccccagaggtgaccatggaggaagaagatgagtctcgagggaagacagaggagtcgggggaggatcggggcgatggtccg

SEQ ID NO: 439112 - DNA, 140 bp, Homo sapiens
ggcggccctgggataggggctgtggcagtacgcggggacccggctgcggtggctgcgggactgacgagaagccctctcagggtcagtggccacccctcacttccagagccctgcagaccccacaatgcagtcctggtggc

SEQ ID NO: 439113 - DNA, 74 bp, Homo sapiens
aaagtcattgaggactttccagcaaaggcagcctggcatcctcgctacaacctcattgttgtgggccgataccc

SEQ ID NO: 439114 - DNA, 100 bp, Homo sapiens
gcgaggagaagcgcagcgacggcgtcgggagagcgcgcctagccggctcgcgaacgccatggagttggtgctggtcttcctctgcagcctgctggccccc

SEQ ID NO: 439115 - DNA, 50 bp, Homo sapiens
accaaactatggggaaatccctgttcaagaaccttctgaggaaaggaggc

SEQ ID NO: 439116 - DNA, 100 bp, Homo sapiens
acagcaaacagagattcgggttctgccgcttatcttcaggagcgaagagctgcttctgtatcttaagggccatttctgagcagtggaggtttcaagtaat

SEQ ID NO: 439117 - DNA, 100 bp, Homo sapiens
gagcgaattgtggcagagtgtaatgctgtccgccaggccctgcaggacctgctttcggagtacatgggcaatgatgattatttcagaaactggaatccca

SEQ ID NO: 439118 - DNA, 75 bp, Homo sapiens
cagttagttacttcctgtctagagttgtagcttccacctggtggattcaccaatgaacttgaagcatcctcatga

SEQ ID NO: 439119 - DNA, 100 bp, Homo sapiens
ccgcggagcgccagctcaatgaatgcaacaagaaagccaggcacagtgacattgtcgtcctttatgcccgaaccctgagagctttggacactagtgaaca

SEQ ID NO: 439120 - DNA, 109 bp, Homo sapiens
cctccaagagcactagtgtctagaaggcactaaggaccttcacggcatggtgcaactcccacctgcggaaggcaggcacacagatcgagaacattgatgaggacttccg

SEQ ID NO: 439121 - DNA, 90 bp, Homo sapiens
cagaaaacttggaactaagctggaggacaccgagtactcttatgcagtccccatggtgtccctggccagtgtccttccacctgtccacaa

SEQ ID NO: 439122 - DNA, 101 bp, Homo sapiens
caatggaccaaaatgaacacagtcactgggcaggaagaagatgagccttaggtctgaacgccgaggaattcatgtggatcctgtgcaagaaaggatgtggt

SEQ ID NO: 439123 - DNA, 98 bp, Homo sapiens
gatgggatccggctcctccagctaccggcccaaggccatctacctggacatcgatggacgcattcagaagacccaacatgagtgaagtttcctgcaag

SEQ ID NO: 439124 - DNA, 82 bp, Homo sapiens
gcggcgctttcggcgcgggcccgggccccgagcgcccgaacaggtatcacctcttctgggctcaagatggacaacaagaagc

SEQ ID NO: 439125 - DNA, 100 bp, Homo sapiens
gctgggggtgctgggcgacctgcaggcagcaccggaggcccaggtctccgtgcagcccaacttccagcaggacaagcaaggatggaacattactgtggac

SEQ ID NO: 439126 - DNA, 74 bp, Homo sapiens
gaaggagaatgcagaccctcgacctccagtgcagttcccaagaggctgctggaatcttccctcatttcattatc

SEQ ID NO: 439127 - DNA, 83 bp, Homo sapiens
gattggaccgacgcagccatggagccctctggcacaaatggaagaagaaagaagggagcaagtagctaaaattaagaagatgg

SEQ ID NO: 439128 - DNA, 100 bp, Homo sapiens
gaggaggtcccacaggctcctgccctggactaccgaggagcagtgaggagaatgaataccttccaagaccagagtggcagctccagtaatagagaacccc

SEQ ID NO: 439129 - DNA, 80 bp, Homo sapiens
gaggcaaggagctaaagcagcgtgcgttcagccctgggctgaagaaacacttaaattctggaaatagcgactcagtatca

SEQ ID NO: 439130 - DNA, 100 bp, Homo sapiens
ctgctgtacctacaaggtctccccgattctcatctgcccataatcatggacacagccccaggatgtgcagggatgctccagaccttgtatgattacttct

SEQ ID NO: 439131 - DNA, 90 bp, Homo sapiens
aggaaattgaactaagaaatggagagataaagtcctgtttatgaccacagctgtagatttggtaataacagaagtacaggagcctgttcg

SEQ ID NO: 439132 - DNA, 90 bp, Homo sapiens
cgtttcacaggcgccactggcagagcatttctttttaacaagggaacagaaagaacagcttcaaaagatgaaagacttcgggtctgagcc

SEQ ID NO: 439133 - DNA, 100 bp, Homo sapiens
gtgcatggggaggaccagtcgtgatcctggctctgcagagagaacagcccagaaaagaaagttccccagccctccacattcttccaatggccactcgccg

SEQ ID NO: 439134 - DNA, 98 bp, Homo sapiens
gggggtcgacccgggggctccgggcatgcaggaagccagttgagggaagttctccatgaatgtacgtcacaatgatgatgaccgaccaaatccctctg

SEQ ID NO: 439135 - DNA, 50 bp, Homo sapiens
actcctcctatagtgccaatagatttgtcaaagatgaaagtgaccttatc

SEQ ID NO: 439136 - DNA, 82 bp, Homo sapiens
taggatggaaaacatatccattaaatgggggatcatagacggtatttctatgtaaacgaacagtcgggcgagtctcagtggg

SEQ ID NO: 439137 - DNA, 100 bp, Homo sapiens
agcttgaaatgctacatttccaagtggtccactgtaggtgtgccaagtgtttctgttatcctacaaagcgaagaataaggaggaggccccgaaacctgac

SEQ ID NO: 439138 - DNA, 80 bp, Homo sapiens
tccactttcgccagcccgtgccgcgagcgcggcctgcaggagctggtaggtgagtgctgtcctcggctcactttcctcaa

SEQ ID NO: 439139 - DNA, 102 bp, Homo sapiens
ggaggatgtcgggacaccccggaagctgggaaatgattgctgtgctaaggagacagcaacgtatgataaaaaatcgagaatccgcttgtcagtctcgcaaga

SEQ ID NO: 439140 - DNA, 71 bp, Homo sapiens
ctggtctttctcaacctcatcttctggacgccagcatgtctccggacgccaccaagccgagccactggtgc

SEQ ID NO: 439141 - DNA, 75 bp, Homo sapiens
gcctgggatatggccatcctggattggcttcatcagaggaggctgagcggcaccagaaggatataaccagaattc

SEQ ID NO: 439142 - DNA, 95 bp, Homo sapiens
cgctgattgctatcacttctgcagaatccagtggaatggtggtttggcctggagtgatgatgcagatggaggccggggaagagagatctctcgag

SEQ ID NO: 439143 - DNA, 96 bp, Homo sapiens
tggtatgaaagtacttctcatggataaagagacgactggccaatcacaggcaggaagatgaaggttctgtgggctgcgttgctggtcacattcctg

SEQ ID NO: 439144 - DNA, 50 bp, Homo sapiens
gcaccccttcggaaaaactttaccgcatgattatgatatgagggtggatg

SEQ ID NO: 439145 - DNA, 98 bp, Homo sapiens
atgagattgagcaggtttccaacaaggatgatatgaagacttccctgaagaaagttgtgaaggagctccggaccaaaatttaacagtgccatccgagg

SEQ ID NO: 439146 - DNA, 75 bp, Homo sapiens
tctgagtaacggaggacaattcaccatagttttctttaagggtgcctctgccaactggtggaatcatcgccactt

SEQ ID NO: 439147 - DNA, 100 bp, Homo sapiens
gttgtattgcaatcatggtgcagaaataccagtccccagtgagggtgtacaaatacccctttgaattaattatggctaagcttcactgtatgaagataga

SEQ ID NO: 439148 - DNA, 100 bp, Homo sapiens
gctggtctgcaaaaagttctttggcgagttcacagactcccaagacagctgggctgcgaccaatggaaacaaaggacattccagtagtgcaccagctcct

SEQ ID NO: 439149 - DNA, 100 bp, Homo sapiens
atcccactactctcaagatacgccaatgcgctcaaaggcaaaaaggtgcaattccaaaagccaaggtgagaaagaaatgtatacgctgggaatcactaat

SEQ ID NO: 439150 - DNA, 82 bp, Homo sapiens
cggggtcacccgctacgggaagcaggcctcgccacagatgcgtctgttactagagtggagagtctaccttcgtctcacatgt

SEQ ID NO: 439151 - DNA, 82 bp, Homo sapiens
gtgaaacctggaccatgatgtgaggctgattttgcaagaacgaggctcaaggatgtgagggacacagtattgacagctgaag

SEQ ID NO: 439152 - DNA, 100 bp, Homo sapiens
gttccaccccacctgggccccagaccgtgctgatcttcgatgagctctcggattccttatgcagagtggccgacttggttatcaatactctggctgacca

SEQ ID NO: 439153 - DNA, 75 bp, Homo sapiens
ccagatgttcctgtggaccccagtccaggtagtttctctccctggctcatcttgcatgcttgctctgatggaaaa

SEQ ID NO: 439154 - DNA, 116 bp, Homo sapiens
cggacagaagatggtgcagaagaaaccagccgaacttcagggtttccaccgttcgttcaagttacagaatgtctgaaggggacagtgtgggagaatccgtccatgggaaaccttcg

SEQ ID NO: 439155 - DNA, 50 bp, Homo sapiens
gcctttctcaccagcaacccagataatgttaattcaagactctcgaagag

SEQ ID NO: 439156 - DNA, 82 bp, Homo sapiens
gccccacttggtgaatggagatgcagctcagcagaaaacctcggatcaattctcagctggtggcacaacaagtggcacaaca

SEQ ID NO: 439157 - DNA, 75 bp, Homo sapiens
gtttcatctctctataaagttatccaggagccacaaagtgagggcccaagagatgaggctggtgaggaagccgtg

SEQ ID NO: 439158 - DNA, 75 bp, Homo sapiens
cctccaaggaagccacgtgcagacatctacaaccttcgatctcctgacgagtggaggacttgaagtctcagctgg

SEQ ID NO: 439159 - DNA, 100 bp, Homo sapiens
agctcctacttccagaaaaagtgctcctgggactccaggataccagtcagtacctccgaaatgcttccagactcggaccctgcaccagctgtcactctgc

SEQ ID NO: 439160 - DNA, 82 bp, Homo sapiens
ggacattgaaaataagatggaacccatccacataaggcatgctgcttgcagggtttctcatcagaaatatcccagtcatcaa

SEQ ID NO: 439161 - DNA, 75 bp, Homo sapiens
gaagggaggaaatagtggcaggtgacagtctgcatgtgcagttttcagggctagggcgagcaggtgccacggcgg

SEQ ID NO: 439162 - DNA, 104 bp, Homo sapiens
aatgagagctgcctgcctgctgctgcttggagagccccagacagtcgcttgaagaggccacggaagccctgggtcaccctttcagcctggttctctccggtggt

SEQ ID NO: 439163 - DNA, 75 bp, Homo sapiens
agcatggtcagtgccgtttaacctttattgtggtggagtccaccccgctgtggtccagaaagcagcccaggcctt

SEQ ID NO: 439164 - DNA, 100 bp, Homo sapiens
ccttccacctcccagtggacaccgggaccgagaaccgaacttaccaagcatcctctgcggctttcatggaagatagatgataagcctgtaaaaattgaca

SEQ ID NO: 439165 - DNA, 98 bp, Homo sapiens
ccgtaaattggaaggatgcacaagttccaaggttacgtttcatttgccaaggcacgagtaacaagctcacgcagttgggcacttttgaagatcatttt

SEQ ID NO: 439166 - DNA, 100 bp, Homo sapiens
tagcagctggaaccatgacaggcatgttgtataaatgtacaggatccaaactactggatacaggtgcatcgcttggaacatggagatggaggaatactag

SEQ ID NO: 439167 - DNA, 100 bp, Homo sapiens
aatcaaaaggcagaaccagtcccttgtgtatggcaaagtggatagcttctggaagctttttatgcagattgaagctctctttccacaaaaatttggaaga

SEQ ID NO: 439168 - DNA, 100 bp, Homo sapiens
taggatcagatgctgacattgttatttgggacccaaaaggcacaagctccaaaaggaattcttcatttgtctcctgatgtttatcaagagatggaagcca

SEQ ID NO: 439169 - DNA, 76 bp, Homo sapiens
agagaggctgttcgcagagctgcggaagatgtgttctaagaacggaagcatctgggctggatggaatttagcatca

SEQ ID NO: 439170 - DNA, 51 bp, Homo sapiens
gacccgtattgtctccagattaaaggtgtgagcctcagcagcgatttcatt

SEQ ID NO: 439171 - DNA, 100 bp, Homo sapiens
ttccttttactattagcccatcaagaaatgaagaacgagattcagacacagatacagtttatgtaacttgatggaagaaaatggaattactccaaaaaga

SEQ ID NO: 439172 - DNA, 114 bp, Homo sapiens
ggaccagtgtgaatttggaagggatcgtgtggcatgaaacagaagaagctgatgcttttttcaaagccgctataagccttgttccggaagttccaaagatgattaatattgatg

SEQ ID NO: 439173 - DNA, 98 bp, Homo sapiens
agaacatgaggcagtacgacaccaggaacagcaggatcctggtgcacctgagccgtggaggggctgaagtccagatctttgctcctgacgtccctcag

SEQ ID NO: 439174 - DNA, 50 bp, Homo sapiens
ggtgtggcctacaacgcccgcattggaggcggctgggccctgaacatgaa

SEQ ID NO: 439175 - DNA, 75 bp, Homo sapiens
gagcaaagggcagtcggcggagcttcgccaaggctggcgcagtcggcaatctgaaggcaaatcctgtttagaccc

SEQ ID NO: 439176 - DNA, 97 bp, Homo sapiens
tatgcagagggagatgtccatggatatcagtgctaacatcttccgtacacttcctccaagtgataatccagattttgatccagaagaggatgaaccc

SEQ ID NO: 439177 - DNA, 100 bp, Homo sapiens
ctgggtctccaggcccgcgaccgtccgccagtcgtcccgagtattctaccttgtaaatactgttatttgtatatactgtaaatgatgacatcggtgggca

SEQ ID NO: 439178 - DNA, 75 bp, Homo sapiens
agtaaaccagagcgaatcaggagccataagaaagtgggagccttatggagggaggctgacctcagctggaaggac

SEQ ID NO: 439179 - DNA, 100 bp, Homo sapiens
ggccggagggcgcgggaatggagctcggaggcggcgaggagcgcctgcctgaggagagcagggagtgcatccgccccaacccttttccccctcgtctcct

SEQ ID NO: 439180 - DNA, 100 bp, Homo sapiens
tcgaagggtcaccggagcgacagaaaacttggaactaagctggaggacaccgagtactcttatgcagtccccatggtccagtccaggtgcagcagcaagg

SEQ ID NO: 439181 - DNA, 75 bp, Homo sapiens
aaaagagtctttggaggatgcggctttgatggggtacagccaaagaccggagctttggagagatgaagtttaaac

SEQ ID NO: 439182 - DNA, 75 bp, Homo sapiens
caccaggctgaaggttttagcaagctaaagaattacctccaaagccattgtcaagaccacagcagtcatctgcac

SEQ ID NO: 439183 - DNA, 115 bp, Homo sapiens
ctggaggaggcagaaaaagctgcagatgagagtgagaggaactgtggctgcaccatctgtcttcatcttcccgccatctgatgagcagttgaaatctggaactgcctctgttgtg

SEQ ID NO: 439184 - DNA, 74 bp, Homo sapiens
gtgaatatgatcagatttctccaccaaattctcagcctgataaggccccacaccagtgagaagcatcagcaccg

SEQ ID NO: 439185 - DNA, 100 bp, Homo sapiens
cggcctggcgccgaggcggcggtacgcaaggctggagccgcagcgggagcccccgtcctgccattgactctaccagaggagattcttcaagcttagttgc

SEQ ID NO: 439186 - DNA, 70 bp, Homo sapiens
ggaacaccagctcctttataatgcatgtcaggttaaggctacctttccagataatccaacagctaaatca

SEQ ID NO: 439187 - DNA, 75 bp, Homo sapiens
cggcgatcggccgcggccgctctctgaagaacctccgagtacgaggtgagaagccctaccactgcaactgggacg

SEQ ID NO: 439188 - DNA, 85 bp, Homo sapiens
ataagagcagaggatggaacacttcagtgcattcaagatgagtataggatcaaaccagtggaagaggtcaaatacatgaaaaatg

SEQ ID NO: 439189 - DNA, 74 bp, Homo sapiens
acgtgtacatcatttacggcatgtacttctgcatgaacatctccagccaggggatcatagacggtatttctatg

SEQ ID NO: 439190 - DNA, 75 bp, Homo sapiens
ccaccaccatctccatcacccaccaacaacaccacaataatccacagccaagccaggctatgatgaccttaatcc

SEQ ID NO: 439191 - DNA, 90 bp, Homo sapiens
ggcggagcaggttactcgcacgcggatttggctggcgtcccgccgaaaacagtgttacaccagaagagcagccggcctcctgtaccgatc

SEQ ID NO: 439192 - DNA, 100 bp, Homo sapiens
tgaactggttgtgcaggaaccaggatccgaacccgcctccccaggcaacatgagtgagaatgaggaagaggaaatttctcagcaagaaggcagtggggac

SEQ ID NO: 439193 - DNA, 100 bp, Homo sapiens
ctcggccgatgaagtgcagaggtttttttctgcttggaagtctttttgcatgttactgttccactgaagtcactcaggcaatatgggatggatatctaca

SEQ ID NO: 439194 - DNA, 89 bp, Homo sapiens
caaaaatgtgcatactcacagagttagagagagggatggtgatgaagcccggggcaagaactgtggtgtcttggtacattgcttggctg

SEQ ID NO: 439195 - DNA, 74 bp, Homo sapiens
tgagaatgcaaaggaggaagtgaggcaaatgaagatgtgacacagattgtggagattctccattctggacctag

SEQ ID NO: 439196 - DNA, 100 bp, Homo sapiens
ttttgttcaagataaagtgattttttgcctttgttgattaactggacaaattcagagtttcactctgtcacccaggctcgagtgcagtggcgtgttctcg

SEQ ID NO: 439197 - DNA, 101 bp, Homo sapiens
tctaaacctgtgaccacccctgaagaaattgcacaggttaatgctctggataatcttggtcagacttctctacacagagctgcatattgtggtcatctaca

SEQ ID NO: 439198 - DNA, 75 bp, Homo sapiens
gagtggtttttcggatcatgtctggtggctccgcggattataacagagtgtgaacatggctacgcctcttcattc

SEQ ID NO: 439199 - DNA, 100 bp, Homo sapiens
cacgacctcggtcgagcatgttcaccagggcccagtctcacagaaagttctccgctcccagacatgggtccctcggcttcctgcctcggaagcgcagcag

SEQ ID NO: 439200 - DNA, 98 bp, Homo sapiens
tcgccgccgccgccgccgccgcagcttgggaggtgctgccaccacaggtatgtctccctgcaacacagctgttgtacctcaggggtggtctgtggaag

SEQ ID NO: 439201 - DNA, 98 bp, Homo sapiens
cggcgcgtgaagctggagctctggacagagcgggatgccaccagcttgtccaaagggaagttccaggagctcctggtgggcatcgttgtggagaatga

SEQ ID NO: 439202 - DNA, 75 bp, Homo sapiens
cgagcacagagcctcgcctttgccgatccgccgcccgtccacacccgccgccagaattaaacaaccaccatgtcg

SEQ ID NO: 439203 - DNA, 75 bp, Homo sapiens
agcgccgacggcagccggcacctgacggcgtgaccgacccgagccgatgccttcaattaagttgcagagttctga

SEQ ID NO: 439204 - DNA, 75 bp, Homo sapiens
tttgcctgaatacatgatttaaacaagagatttccacagaagtatttcgggctgctgtggatctggaaatatcat

SEQ ID NO: 439205 - DNA, 75 bp, Homo sapiens
ggtgcccacctcgtggggtgtgtgagggccgagtgaaatcgtgcatttgcggtctcggcgcggaagatggccggc

SEQ ID NO: 439206 - DNA, 90 bp, Homo sapiens
tgaggaagcaggcggagaagagacaagatgcggttcatgctattattcagccggcagggaaaactgcggctgcaaaaatggtacctggcc

SEQ ID NO: 439207 - DNA, 110 bp, Homo sapiens
cagtcttcccgcgtccgccgattcctcctccttggtcgccgcgtccttggctggcgtgtacatccagacactgaaggaccacaggccccggatggtgtgggacagccagg

SEQ ID NO: 439208 - DNA, 101 bp, Homo sapiens
gggatttctgttcttatgacctttccacaacttggaccagttcagcctattccttgttgtcttcaaagcttcacctttctccaaaggcagatgtgaagaac

SEQ ID NO: 439209 - DNA, 100 bp, Homo sapiens
cctcccgagtagctggaactacagtccccagtcaacttctaccgctggaagatagagcagctgcagatccagatggaggctgcccccttccgcagcaaag

SEQ ID NO: 439210 - DNA, 80 bp, Homo sapiens
cttggactgagtcctgcaggacacagtttttgaatcagagccgacaggcacttgaattgaaaatggaaaaccctactgct

SEQ ID NO: 439211 - DNA, 83 bp, Homo sapiens
cgagagacctgcgtacattcggggtgccagaaggaaagcataggtgcaatggatgagcttcatagtctggatccaagaaggca

SEQ ID NO: 439212 - DNA, 76 bp, Homo sapiens
aaactagcagtttagggtgtcaggtattaatctctggagaagacacatccacagttagcactttcttcagatgctg

SEQ ID NO: 439213 - DNA, 82 bp, Homo sapiens
cttctgctgttgctcttctccgccgcggcactgatccccacagggaggagagagcgatggcttttttcacccagaaggccag

SEQ ID NO: 439214 - DNA, 75 bp, Homo sapiens
gtgagatggatgagtccagcattctaagacgaagagggctccagcttgcattgaaaggctctagttacagtggac

SEQ ID NO: 439215 - DNA, 100 bp, Homo sapiens
gcccatctccttctctaagagatgcctgcagcctgccatgggacgtggggtccaccggtacaggtctcagcggcggtggcagccgaggtgcaggatgcaa

SEQ ID NO: 439216 - DNA, 50 bp, Homo sapiens
aacaagtgtctgcttatgtcgggtccagattttggctatgtaactcgagg

SEQ ID NO: 439217 - DNA, 82 bp, Homo sapiens
attctcgacccgtggttcgcggcctcctcctcagtcgggatcaaccgatggaggtcaaaatgcagatcttcgtgaaaaccct

SEQ ID NO: 439218 - DNA, 100 bp, Homo sapiens
ggccctgcgcgcctgatgggtcgaggcggacgcgcggctgcgtcaggcctccccatggccacccatggaccagtcggcattcacttcctcccttctgcgg

SEQ ID NO: 439219 - DNA, 100 bp, Homo sapiens
ccagaattcaaacagatatactaaagcaggctaccaaggacagagtcagtgatttccataaattgaagcaaagcagagtggcatgattccgactggatac

SEQ ID NO: 439220 - DNA, 83 bp, Homo sapiens
agaatatttaaagcgtttggaaaatccacagcgtggatagaaataaatatcaaattcacattccattgcctcctaagattgac

SEQ ID NO: 439221 - DNA, 100 bp, Homo sapiens
accaggacagaaaagacagtgttctgctttcatggagttcacagaagagtcgaggagggtgaggacgcttgagcggaagttagaagcaaaaatgatcaag

SEQ ID NO: 439222 - DNA, 100 bp, Homo sapiens
ctgattcacaattatggagactgtgctgcaggagaaagctgcagacaccatcgaggccctgcagaaggccgggatcaaagtctgggttctcacgggagac

SEQ ID NO: 439223 - DNA, 100 bp, Homo sapiens
tgcacaggagggcagctgccttacagccagactttttttctggatatgccgcagaaggatccgtgccagaagcaagcctgtgagatacagaaatgtttac

SEQ ID NO: 439224 - DNA, 97 bp, Homo sapiens
ctgcaggactcgtccggggactacagcctggcgcacgtccgcgagatggcttgctccattgtcgaccagaagctagatgaggaagaggagcgaagga

SEQ ID NO: 439225 - DNA, 100 bp, Homo sapiens
aggcccaaattgaggcgcaatgatgagaggatgtggtggtctactctgatgtcaatcttgagggctagagtgtcaatccatatctacaaggacagagact

SEQ ID NO: 439226 - DNA, 80 bp, Homo sapiens
caaagccttttatggagacacattagttacaggtataaagattcgacctcacattactactttgcgcaaatacacatacg

SEQ ID NO: 439227 - DNA, 83 bp, Homo sapiens
gacggtgatggtggtcgccgcggcggcgtgtgcgcccctcaggtcaaaatgcagatcttcgtgaaaacccttaccggcaagac

SEQ ID NO: 439228 - DNA, 110 bp, Homo sapiens
tatgtcatcttatcttttaattattaaaacagagcttcctgctgctattgcagaatttttgactggagactatagtaggtatttaaaccatgtcagagctgcctcaccac

SEQ ID NO: 439229 - DNA, 88 bp, Homo sapiens
ctgaggacacttctctgtcgtcacagttaggcctcattgctacgatttcagagtaccctggtaatagctgagcatgcaaatgattccc

SEQ ID NO: 439230 - DNA, 126 bp, Homo sapiens
taagaagccagccctgtgcaagagctaccagaagctggtctctgaggtctggcataagaaacgattcttcagaggaggcccctccagccactcagaacttcatcattccaaaaaaggagatccaca

SEQ ID NO: 439231 - DNA, 100 bp, Homo sapiens
ctgggtggggcatcagtgatgggactgagtactggattgtccggaattcatggggtgaaccatgggaagaggatcacctagcccgggtagaagaggcaat

SEQ ID NO: 439232 - DNA, 100 bp, Homo sapiens
agcggcccttcctcagccgggagtcgctgagcggccaggccgtgcgccggcctttggtcgcctccgtgggcctcaatgtgacaaaatccaaatgcccctc

SEQ ID NO: 439233 - DNA, 100 bp, Homo sapiens
aaagagctcggccttaaagaatctcaactttttgacccgagtgacctccaggatacatccaacagagtaacagtcaaatcgatctctttgggctgcctga

SEQ ID NO: 439234 - DNA, 99 bp, Homo sapiens
gtaaccataatcattccgaagcaagcaataatgacgatgaggacctgacaccagagcagaaggcagagcgtgagaaggagcggaggatggccaacaatg

SEQ ID NO: 439235 - DNA, 88 bp, Homo sapiens
cgccagccaccggcaccaagaccggccacatcccagcactgcccacctctggagctacagaaggcccaaaagaagaaatatatcaaga

SEQ ID NO: 439236 - DNA, 75 bp, Homo sapiens
gtggtgctgacaatcgagcaaggaaacctgggttgctgtagtaaaactaaaaaatgcagataaagtgtttgccat

SEQ ID NO: 439237 - DNA, 83 bp, Homo sapiens
aaaggaacacaagaagtcctaaaatatctacgaagcaagatcaaaggatgggtttgtggagttcttccatgtagaggacctag

SEQ ID NO: 439238 - DNA, 76 bp, Homo sapiens
tggccaccctgtgggcctggcgctggaggcagcggtgcacgtgcagggctctctttacctatgaaggcaacagcaa

SEQ ID NO: 439239 - DNA, 76 bp, Homo sapiens
actgtgacatgtctgatcccttgctcccatccctgcagcatgaacaaggtggaatatgtgatcaagtgtgacatgt

SEQ ID NO: 439240 - DNA, 98 bp, Homo sapiens
tggagttgcactcactgccctggatcaggatcacgtcgcagtcctaggaagtccactagcagcttctaaggttaattgctggccctcggagagtggaa

SEQ ID NO: 439241 - DNA, 100 bp, Homo sapiens
ggtgggaggagccgatactgagcttcttcctatttgccatggattttagtccagtggaacctaattcctcaagtctaatggaaaccaatcctctggaatg

SEQ ID NO: 439242 - DNA, 75 bp, Homo sapiens
ctcaaagagcagcaccacatccgcgggtccatcacacaaggagttgtatcccgcattttgtattcacaacggagg

SEQ ID NO: 439243 - DNA, 83 bp, Homo sapiens
tggatatttacctggagcaaatctgactgcagccatgagcagcaatgagtgcttcaagtgtggacgatctggccactgggccc

SEQ ID NO: 439244 - DNA, 98 bp, Homo sapiens
gcgagggctacgagcgtctcctgaagatgcaaaaccagcgtggcggccgcgctctcttccaggacatcaagatgtacaggtggatcatctgaatctcc

SEQ ID NO: 439245 - DNA, 51 bp, Homo sapiens
ctggaaaaacttcttgccaaccaaaatgcctgaggaagtgcaccatggaga

SEQ ID NO: 439246 - DNA, 82 bp, Homo sapiens
tccatctgtggaaggacctaccaaccagatcgtaaagctgaaaattgaaatcatgaaagtagacaggactaaactgaagaag

SEQ ID NO: 439247 - DNA, 76 bp, Homo sapiens
ttattgggagcctatttgttcatcatttctcgtgttcaagcgatgaagaacgatacagatacagggaatatgcaga

SEQ ID NO: 439248 - DNA, 100 bp, Homo sapiens
gagttgcagactctacaggaggctcttaaagtggaaattcaggttcaccagacttaattcagtgcacaaatgagatgaatgtgaacatcccacagttggc

SEQ ID NO: 439249 - DNA, 98 bp, Homo sapiens
gccaaggagtcacggatcggattcctcagctacgaggaggcgctgaggagagaccattcctcaagaattttgtatccaaggcccaaaagtttgttacc

SEQ ID NO: 439250 - DNA, 90 bp, Homo sapiens
cgacggcctggctttctgcgccatcctgcaccgccaccggcccgacctcatccttcatcccgcgtggagtctacccccaagcccttctcc

SEQ ID NO: 439251 - DNA, 137 bp, Homo sapiens
cgcaaagcggggacccagaccctggagcctcagttggaagcagccgatccagcctgcggagcctgtggggcaggtacatgtcccagagcaagcacacggaggcccgggagctcatgtactcgggagccctgctcttc

SEQ ID NO: 439252 - DNA, 138 bp, Homo sapiens
ctctcgtactggacagattagcaagcaatgtggcaaaacgaaaaagctcaatgcctcagaaattcattgatgggaatgatgaacaaccccaatccttatggttcaccatatactcagaatcctggacagcagattgga

SEQ ID NO: 439253 - DNA, 85 bp, Homo sapiens
gaccgcgcgcagggcctgcagcgggagctggacggcgagcgcgagcggcgcgagaaaattgaggacgagacgcaggtgtcacggg

SEQ ID NO: 439254 - DNA, 98 bp, Homo sapiens
accaccagagcagagacgggcatggcatacagcataagcagtactataatggatgtagacagcacaatttccagtgggcgttcaactccagcaatgat

SEQ ID NO: 439255 - DNA, 75 bp, Homo sapiens
ggcccccacaatgaagcagtcggacgcgtctccccaagaaagggggggccctcagcctcttggccttgaacgggc

SEQ ID NO: 439256 - DNA, 100 bp, Homo sapiens
tttcagacaaagatacagaagcccctcaggctctagaggacaaaatcccagtccttggcacaaactcaggaaatggaagccggagtctgttttttgtggg

SEQ ID NO: 439257 - DNA, 98 bp, Homo sapiens
agaatcctattgtaaaatcacttgctaagacatgcttcagcttatcaacaaccaagacagtgacttccctggcctatttgacccaccctatgctggga

SEQ ID NO: 439258 - DNA, 123 bp, Homo sapiens
cctattttatgaagtagaagtcaataacagccaaactgagacacataatgttttctacgtacattttgaccaatttaaagaagcattaatactcatcttgtccagaactctgtcaaatgaaga

SEQ ID NO: 439259 - DNA, 76 bp, Homo sapiens
acacctcccacctgtcctcaggcatatcaaaggttgactatagtcaatggggccaatggagccaagtgtatggaaa

SEQ ID NO: 439260 - DNA, 90 bp, Homo sapiens
ctccacatccaaatgacctgagcgggcccagcgtgccaggcatgggagatgagctgcttcagaaagagcaaaactattcagatgacgtct

SEQ ID NO: 439261 - DNA, 88 bp, Homo sapiens
taaagagcaggaatcatggactgtgggtttacagagtccacggggaatgggatgcaagccagaagctgtatgtagtcacattattatt

SEQ ID NO: 439262 - DNA, 100 bp, Homo sapiens
gtccccagagaccctatgcaacgggcagctgggctgcagtgaccccgctttcctcacgcccagctggaatgaatggctgaaactaccagtaaaataccct

SEQ ID NO: 439263 - DNA, 75 bp, Homo sapiens
ggaaagaagatgctaattaaagtgaagttttcggctttgtgagaaaccttaccatcaaacacgatggccagcaac

SEQ ID NO: 439264 - DNA, 89 bp, Homo sapiens
gcggaatcggggagcgtccggagctagctggatcctctaggcagcaccatatgaaggcggagtatggaaagttagagtggacctacctg

SEQ ID NO: 439265 - DNA, 90 bp, Homo sapiens
atctctaaatgcagattccagaaaaattacagcacatctcagtgaatttgcaagtggcagcaaatatgaagtctatggaccctgcctcag

SEQ ID NO: 439266 - DNA, 74 bp, Homo sapiens
caagaaggaaaattagagaagatccagaccaaggcaggtgaggcggttggcagcgctaaaccgggccttcagaa

SEQ ID NO: 439267 - DNA, 75 bp, Homo sapiens
gtggacattcctgatgtccccctcctggcagcccagacgtttattcagaggtctaccagccacagtctctgcacg

SEQ ID NO: 439268 - DNA, 100 bp, Homo sapiens
aagagacaagtcctaaatgccgactcagtggaacaatcttttgttggattgaaacagctaatcatcttgatgtggaagaaatggaggactcagaaccaag

SEQ ID NO: 439269 - DNA, 100 bp, Homo sapiens
tcggattaaacgccggagagagcgtgaatttgcctcggggacgcctctccaggtacatgtcccagagcaagcacacggaggcccgggagctcatgtactc

SEQ ID NO: 439270 - DNA, 75 bp, Homo sapiens
agactatcttctgctcaggaaccaaaacgagctgggaggttcctcagtggtgtgctgaatattgtctttccatcc

SEQ ID NO: 439271 - DNA, 74 bp, Homo sapiens
gggtgtttctggccacgtgcttcaacgctctgctgcccgctgtgagggaaaagattatacagatgaacgggaaa

SEQ ID NO: 439272 - DNA, 50 bp, Homo sapiens
gcaggcatcatccgctatgcaattggggtgaatcacaagcctttgagaac

SEQ ID NO: 439273 - DNA, 111 bp, Homo sapiens
ggcgctttagagccgcagtccagtcttggatccttcagagcctcagccactagctgcgatgcatgtgatcaagcgagtgactcgccataatcacctcaaggacttcatgct

SEQ ID NO: 439274 - DNA, 51 bp, Homo sapiens
gcaccatcggggagacaagcaactatttggagatccaattcaggaagcaac

SEQ ID NO: 439275 - DNA, 90 bp, Homo sapiens
ggcgagtgtggaaggactcctgaaccagctcgtcctggagcacctgcagctggcgcctctgcagtgggatcaatgaactgagccatgttc

SEQ ID NO: 439276 - DNA, 90 bp, Homo sapiens
cgacagcgacggctacgccgaagcactcgttccgggggtgaagcctcctgcgccggccttgcctcggaattaaacaaccaccatgtcgag

SEQ ID NO: 439277 - DNA, 107 bp, Homo sapiens
cgcgcgcagggcctgcagcgggagctggacggcgagcgcgagcggcgcgagaaagaggccactgtctgcagctcccgtgaagatgtccactccagacccacccctgg

SEQ ID NO: 439278 - DNA, 74 bp, Homo sapiens
tctgacaaagatgaaggaaattgcagaagcctaccttgggaagttatctccagaagaagaagagaaaaggagaa

SEQ ID NO: 439279 - DNA, 75 bp, Homo sapiens
gtcatgggccttgttaaactgtgccaggacgtgctatgggaagagggcaaggcagccttggagcagctgcttaag

SEQ ID NO: 439280 - DNA, 83 bp, Homo sapiens
gagtatccagttgctggtttctaacagctgaaggctgtgatgcgccgctggctgcctgccggagacgccttgttgcagatgat

SEQ ID NO: 439281 - DNA, 83 bp, Homo sapiens
tgtgaatacaacaatatcattctccttcaagggaataaaattttctaaggaaggtgctcgggtcttcggggcactgggtccca

SEQ ID NO: 439282 - DNA, 75 bp, Homo sapiens
aggagggggaccctgatgatatcaacagcactgctaagtgtatgctgatggtagcatatgtttagatatccttca

SEQ ID NO: 439283 - DNA, 100 bp, Homo sapiens
ttcagatcttcacagcacagttcctgggaaggtggagccaccagcctctccttgatgccttcaattaagttgcagagttctgatggagagatatttgaag

SEQ ID NO: 439284 - DNA, 90 bp, Homo sapiens
agcctttctgctccaggtcaaggaatggaagttggatacactttgtgacttgtacgagacactgaccattacacaggctgttatttttct

SEQ ID NO: 439285 - DNA, 82 bp, Homo sapiens
ctgcggtggtttctgtggcggttgctgtggcggagtttggagttttcggctttgtgagaaaccttaccatcaaacacgatgg

SEQ ID NO: 439286 - DNA, 83 bp, Homo sapiens
aaacagttcctggaaactgccattaacctccagctttttaagcaggaaacttccattttagaagaatacagtatcaattggac

SEQ ID NO: 439287 - DNA, 90 bp, Homo sapiens
cttcagataacttctgtgaagctgatggaatctgaagaactttcttctgatgaagagatgaaaatggcggagatgcgaccaccattaatt

SEQ ID NO: 439288 - DNA, 98 bp, Homo sapiens
aattcagtgatatcattaagtccagatctggaaccttttgaggatggctttgcaaatggggaagaaagtactccaaccagagatgctgtggtcacgta

SEQ ID NO: 439289 - DNA, 83 bp, Homo sapiens
gccttggaaagtcaggaccgcgacggcagcagagcataagtacaaggtggactgtgcatgcctcaaagaaaacccagagtgcc

SEQ ID NO: 439290 - DNA, 74 bp, Homo sapiens
cacctgagactgctccagaagtggagaccagcagaactccaccaggacccttcaaagttgtacaagaaagcaga

SEQ ID NO: 439291 - DNA, 75 bp, Homo sapiens
ttcccgcgcccctcggacggccacgagactcggccaatggagatcttcgtggatgatgagacgaagttgacgctg

SEQ ID NO: 439292 - DNA, 100 bp, Homo sapiens
acctggccaattctgacgccctcaaggtcgccaaggaggtggacccccagggttggatggcaagcatgtggtgtttggcaaagtgaaagaaggcatgaat

SEQ ID NO: 439293 - DNA, 107 bp, Homo sapiens
gctgagtggtttttcggatcatgtctggtggctccgcggattataacagacaatgcagatcttcgtgaagactctgactggtaagaccatcaccctcgaggttgagc

SEQ ID NO: 439294 - DNA, 100 bp, Homo sapiens
ttaacatcagcagatatcctgtctcagatgaagagaagtctgtcaagttgatgaacagattgagaggcaacatcaggatgaccaagataaatgtctgctg

SEQ ID NO: 439295 - DNA, 100 bp, Homo sapiens
acaaacccactggacaccttcgtcccctttgatccctgtgtgctgaagagcctatcaagactcttccacctgctacttctaccgagccatctgtaatctt

SEQ ID NO: 439296 - DNA, 98 bp, Homo sapiens
ggagaagctgcctttggtgcctcctgcctcctccctgctttgttccaataattttgtgctcggtctcagcggcggtggcagccgaggtgcaggatgca

SEQ ID NO: 439297 - DNA, 100 bp, Homo sapiens
ttattggccagtctgtggaagaagctatcaggaaagaccacagcaagattctttcattcgtctcctcctagcctgggggaccaggctcgaactgaccctg

SEQ ID NO: 439298 - DNA, 96 bp, Homo sapiens
tcaaggtggaggtgaagaagtttgtgaagatcggccgcccgggctacaaagctctggacatcctgagcccaagtcccccacactcagtgcagtgat

SEQ ID NO: 439299 - DNA, 100 bp, Homo sapiens
aaagggttgccaccccagttgattggaagatttgtattgaacgatgtcttgagaggggaaagagtagtggtaggagtgatgacaacagagagagcttgga

SEQ ID NO: 439300 - DNA, 88 bp, Homo sapiens
acccgtccatcatagtcaactgcgtggaagagaagatggagtggtttaataattataaaagatctcttgctacttatatgaggtcact

SEQ ID NO: 439301 - DNA, 50 bp, Homo sapiens
tggcagtatcccagccaaatctcggttaaagaactgaatcattatctgga

SEQ ID NO: 439302 - DNA, 83 bp, Homo sapiens
ctggggactgcgggcggcgctgtgtccgtcgccatgacagggcgtctctggccgagcctctttttgtggaaaacgacagcagc

SEQ ID NO: 439303 - DNA, 83 bp, Homo sapiens
cgtcaagtctcccagcgaccccaagcaataccgacagctcagcagctcctcctcctatagtggggacatcagcaggcaccaca

SEQ ID NO: 439304 - DNA, 98 bp, Homo sapiens
acctgaggagccgggggaagctggccttgggctattgacctgaaaagtggttctggaaaagtgtaccaaggccctgcaaaaggtgctgctgatacaac

SEQ ID NO: 439305 - DNA, 100 bp, Homo sapiens
cgcactggcaagtgcagcgcctgtaatgtttggcgagtctgcacaaccagtgtctctgaagaagatgtctcaagtagatattctcgaacagatagaagtg

SEQ ID NO: 439306 - DNA, 90 bp, Homo sapiens
gaagatctgggtctaaccttgaaacagtgagggcgccctgcgtccggcagaggaggcgagcatcccgctcaggtgatgaggaacccctcg

SEQ ID NO: 439307 - DNA, 87 bp, Homo sapiens
tctgaggcgtttgttgcagctacctgcacttctagatgccgccatggcatcagatgaaggcaaactttttgttggagggctgagttt

SEQ ID NO: 439308 - DNA, 100 bp, Homo sapiens
tcgaacttagacttccggaaggactttggcgagggtggttagccagcgtttccctcagaacagcatcggtgcagtaggaagtgccatgttcctcagattt

SEQ ID NO: 439309 - DNA, 100 bp, Homo sapiens
gcctccttctcttgcatgtgcccagaggggaaggcagactttttaacttggagcagcaacgaatgcaacaagcgccaacacttcctgtgcaagtaccgac

SEQ ID NO: 439310 - DNA, 97 bp, Homo sapiens
acaatctttgcaaaatacaattggccagatcgaaaggcaaagatgccttttgatgccaacaaactgtattgcagtgaagtgctggccatattgctcc

SEQ ID NO: 439311 - DNA, 82 bp, Homo sapiens
ggatgcggccaactccaatgggcctttccagcccgtggtccttctccatattcgagttggactaaatgctcttccttcagag

SEQ ID NO: 439312 - DNA, 89 bp, Homo sapiens
agcgaacggaagctcctggaggtcagaggccctttcatcatcagataggatcacgagaccattcaaatctctccattccttcaagagct

SEQ ID NO: 439313 - DNA, 90 bp, Homo sapiens
gtccgcaaggccggagaaggccgccgggcccgggcatggtggtctggggcaacgcggaaggtggttagctcaaccaatggagagctgaat

SEQ ID NO: 439314 - DNA, 100 bp, Homo sapiens
aaagtgggaagccaagcctttcctcccgggaaaccggctcctgaaatcaggtgtcccattccagccttccctgactctgtgaagccagaaaagcctttgg

SEQ ID NO: 439315 - DNA, 75 bp, Homo sapiens
gtcgctgacggcgactgcgggaggccaggtaagaatgattgatgttggctgatattggagtgctcattcacatga

SEQ ID NO: 439316 - DNA, 100 bp, Homo sapiens
cttgcgaccacagccagagcctcagcaggagcctgttctcatcaccatggcaacaggtgacctcacaaagttcggccgtggggatgcctcctccccagcc

SEQ ID NO: 439317 - DNA, 100 bp, Homo sapiens
gccaaggaaatggagagattagctataaggattccattgttgattggaggagcaaccacttcaaagagtgattcgggaaagttacctcaaaggccacgac

SEQ ID NO: 439318 - DNA, 100 bp, Homo sapiens
gccactggcggccgaggtagaggcagtggcgcttgagttggtcgggggcagcggcagttctttatagctccaagctctacagattcttcaaatatattga

SEQ ID NO: 439319 - DNA, 75 bp, Homo sapiens
aaactgaagatgtgaatactctgtgttgacctaaccaatgaagaaacaactgattccaccacttctaaaatcagc

SEQ ID NO: 439320 - DNA, 97 bp, Homo sapiens
cagaaggtgcctgaccagaaaggaactcccaagcgactgcaggcagaagctgagacggctaagatattatcactacctatactcccattacctgcca

SEQ ID NO: 439321 - DNA, 74 bp, Homo sapiens
gagaagcctgaaaagtcgcagcgagctggagccgccggagtgtaagaagaagcttgggaagctgccacctcagt

SEQ ID NO: 439322 - DNA, 75 bp, Homo sapiens
agaagaacaaacagagactgcgaaacgatcctctcaatcaaaataaggtaattccagtggagaagctagtgaaag

SEQ ID NO: 439323 - DNA, 100 bp, Homo sapiens
tcaaagacttcacttgacttcttgatcctgcataaaaccaagaattaaacaaccaccatgtcgagcaaaaaggcaaagaccaagaccaccaagaagcgcc

SEQ ID NO: 439324 - DNA, 100 bp, Homo sapiens
tgagacgtgcctttgaccttctgccatgattgtgaggcctccccagccacgtgaaactgttcgaagtcaacaataccattcttcacccagagatcgttga

SEQ ID NO: 439325 - DNA, 90 bp, Homo sapiens
cggagacagcgtaggctacatggcttaccagagtggtcctacggcttctacctaattcaccttcaaggaaagcagggcttccagtttttc

SEQ ID NO: 439326 - DNA, 82 bp, Homo sapiens
attggaacagggccgcctctcaaggacgctgccaaggtctgcagagaattcaccgagcgtgagcaaggagaagtccgcttct

SEQ ID NO: 439327 - DNA, 75 bp, Homo sapiens
ctgccagaatcagaaagaattcatcacactgttgtggcaaaggagcagagaactttgacaagttcttcacacgag

SEQ ID NO: 439328 - DNA, 82 bp, Homo sapiens
aaaagaacaggaccccgtacgtcactaccactgtctctgctcacagtgccaagatgtgcactcccagcaacacccctgccac

SEQ ID NO: 439329 - DNA, 100 bp, Homo sapiens
acccaggagaaggagcagatcaagaccctcaacaacaagtttgcctccttcatagacaagaggaatgttacggcatccggagtcatccctcagatttctc

SEQ ID NO: 439330 - DNA, 80 bp, Homo sapiens
cgacgacgacgaggaagaggaggtttctgaggtttttgattggtcaaggagcacatgtaggggctgtcaacagtgaagga

SEQ ID NO: 439331 - DNA, 82 bp, Homo sapiens
tcccctcaggcagcaccctcgcattccgggtggcccagctggttattgactctgacttggaggagaaggcagagccccccca

SEQ ID NO: 439332 - DNA, 100 bp, Homo sapiens
catatttgctcaacaaaatgatcaggggtgctgggcctaaacctacagccagagcagccccatgggctctaccttctgccccctggggccccctttatcg

SEQ ID NO: 439333 - DNA, 96 bp, Homo sapiens
taaaatctcgcccggctcatttggctgttttcttacaccatgtagtttcacaatttgaccctgcgactttggttcagacagtaactttaattccag

SEQ ID NO: 439334 - DNA, 100 bp, Homo sapiens
gatgttccacgtaataatgctgcatcccatatcaagatggattgcccgtaatttctatgatagtcctgaaaagatatatgaaagaacaatggccgtcctt

SEQ ID NO: 439335 - DNA, 74 bp, Homo sapiens
ggcaagtcgctgtaccacgacatctcgtgggttgtcttctggcctcagagtatcccttatcagaaccttgggcc

SEQ ID NO: 439336 - DNA, 51 bp, Homo sapiens
ggcctacgcagagctcatcgtccttgagcttgtggacaaatgtataggatc

SEQ ID NO: 439337 - DNA, 82 bp, Homo sapiens
tatcaccacacgactgggtatatttcctctctgtcctacaccacatatggcctggagctgacgcgcgtcacggtggtcgaca

SEQ ID NO: 439338 - DNA, 82 bp, Homo sapiens
gaacgaggcaaggagctaaagcagcgtgcgttcagccctggggcactgccgccctgcactgtagcagatgcctaaataaagt

SEQ ID NO: 439339 - DNA, 83 bp, Homo sapiens
gattttttagtctaaatgatgggcagtcatggtcccagaaacgtcactatcaagaaggccgcatctacaagtgcttgtttact

SEQ ID NO: 439340 - DNA, 90 bp, Homo sapiens
cgcggagctcggcggacgcgggagggcagcaccacgggcggcagtacgtttcaggagacggcagcgaggctaccttgcatggtgtggtgg

SEQ ID NO: 439341 - DNA, 101 bp, Homo sapiens
acttcctacgtgaaatcactgtggcaaccgggggtatgaacgctgccgtccgtgccgtggtgcgcatgggtatctacgtgggggccaaggtgtacttcatc

SEQ ID NO: 439342 - DNA, 98 bp, Homo sapiens
tggtgctcaggtgccagatgcaaagcacttttcaggattagaagaggctgtgtatagaaacatacaagcttgcaaggagcttgcccaaaccactcgta

SEQ ID NO: 439343 - DNA, 100 bp, Homo sapiens
gccaaagaaacaagccgtggaataggtgtatcaagtaatggtgcaaagcctgaaagcccacaggcggttttgtgagctgcttccccaggagcagcggagc

SEQ ID NO: 439344 - DNA, 50 bp, Homo sapiens
gagatatagcccacttagaaatcacaagtatggaagagttggagaagaat

SEQ ID NO: 439345 - DNA, 75 bp, Homo sapiens
cccgctacgagctggctttaatcctgaaagccatgcagcgggaaattatcagttcattgcctagcatagtaaatg

SEQ ID NO: 439346 - DNA, 100 bp, Homo sapiens
gaggcagccaagtgtaacctgctggcagaaaagatctcactgatgaaaaggcctccaggtttttcacctttccgatcatcacgaataggggaaataaaag

SEQ ID NO: 439347 - DNA, 75 bp, Homo sapiens
tggtaatagatgtctgacaaactaaagaaagacttgtgttacgatgttcacggaagaccagggtgtagatgacag

SEQ ID NO: 439348 - DNA, 100 bp, Homo sapiens
caaaggagagtttaaacagccaaaacagttcattcatattcagcatcgagttttggttcgggttagagacttgacaatacaaaaagctgatgaagttgtt

SEQ ID NO: 439349 - DNA, 100 bp, Homo sapiens
ggtctccctggactgaagagagggagaatagaagcccaagactaagattctcaaaatggagcagtgaggagaatgaataccttccaagaccagagtggca

SEQ ID NO: 439350 - DNA, 88 bp, Homo sapiens
ggctgcaagactgtcgacctaaagcctgactggggcaaggggaaggagttcgagacacgactgaaggagaagaagccaggagatctgt

SEQ ID NO: 439351 - DNA, 82 bp, Homo sapiens
aaggactaatctgatcgggtcttccttcatgtattagaaaactactcggatgctccaatgacaccaaaacagattctgcagg

SEQ ID NO: 439352 - DNA, 100 bp, Homo sapiens
gagaggtgttaccggaacggcggcgacaagggtgttcccgaactagagtgggatagtggccaaagcctccaagaacctcatgtccacgcaaagcttgggg

SEQ ID NO: 439353 - DNA, 50 bp, Homo sapiens
gtgtggcaaacctttcttgagctcaggtctcaccaacggctttgggggtg

SEQ ID NO: 439354 - DNA, 100 bp, Homo sapiens
agaagagcatgatcggcatgtccaccaaggcaggcaagtgtcgtggacttcgtactgctaggaagctccgtagtcaccgacgagaccagaagtggcatga

SEQ ID NO: 439355 - DNA, 75 bp, Homo sapiens
acctgaggaccctgctgagccctcaggctgagaagtttggcgactcctttgtctttgaaggcatgttgagtgagc

SEQ ID NO: 439356 - DNA, 88 bp, Homo sapiens
tagatattacagcaatgctttttcagctctcacctgtgcacagttccaccctgacggactcatctttggaacaggaaccatggactct

SEQ ID NO: 439357 - DNA, 75 bp, Homo sapiens
tgacggaatgcctccatacatcacccccaaattcagaaggagtcccagtatatcaagtatctctgctgtgatgac

SEQ ID NO: 439358 - DNA, 101 bp, Homo sapiens
cagtccgtatagtgtagtgtgcaagtattttcagcgagggtactgtatttatggagaccgctgcagaaatatgtgccgtatcacgaatttctaagaaagaa

SEQ ID NO: 439359 - DNA, 50 bp, Homo sapiens
cggacactggcagccgagatggataaacaacttgatgcagatgtttcccc

SEQ ID NO: 439360 - DNA, 82 bp, Homo sapiens
agctggacggcgagcgcgagcggcgcgagaaacccctgtcaaagggaacaggaagcagtccacggagggtgacgccctagac

SEQ ID NO: 439361 - DNA, 74 bp, Homo sapiens
tcatcgacctgcagtccatgcaccagtttcgccaggacacaggaatactcccccagttgcaagaggcgcaggac

SEQ ID NO: 439362 - DNA, 75 bp, Homo sapiens
cccaggcagcgtgtgtcggtcgcctagtctggagaactagtcctcgactcacggccagaacacaaagcgtgaatc

SEQ ID NO: 439363 - DNA, 100 bp, Homo sapiens
ctgggactcgcctgcgctcattctggagctggaggacgccgtgcgcgccctgcgggaccgcatcgaccgcctggagcaccccccggggaaagacattttc

SEQ ID NO: 439364 - DNA, 75 bp, Homo sapiens
gggcggcatgcaccacgcgctgagagccaaaccaaacaggaagcttacttttctctacctagccaatgatgtcat

SEQ ID NO: 439365 - DNA, 129 bp, Homo sapiens
tgtgatatgtcacttgtgaattttgaaccagcagcaagaagagcatccaatatctgagtcttttattcaaaacttcagcgttctctatagtcccttgaaaaggcatctcattggaagtggctctgccca

SEQ ID NO: 439366 - DNA, 51 bp, Homo sapiens
ctctgagcatcggatttgagacctgcagccctgagagcagatggctttgga

SEQ ID NO: 439367 - DNA, 82 bp, Homo sapiens
tgccgctaccagaagtgcctggccatgggcatgaagcgggaagggggatatgagactttctactcggaatatcctgagtgtt

SEQ ID NO: 439368 - DNA, 98 bp, Homo sapiens
gggtgcccacactggccgtcccggccatctcgctgcccgacgatgtccgcaggcggaatactgtatgtctgagtatttgagaatgagtggcatctatt

SEQ ID NO: 439369 - DNA, 100 bp, Homo sapiens
tttgactgctgtggaaagtttcctgactatacattcaggacctgaggacttctgtaacgataagagttatatttcagaagagacaagagtacttctgtta

SEQ ID NO: 439370 - DNA, 90 bp, Homo sapiens
gtaagtgccaacatgactgtgaaggtcatcaagagagagggcacaggtacagagatgcccatgattggggaccgagtctttgtccactac

SEQ ID NO: 439371 - DNA, 90 bp, Homo sapiens
taaaggagcagccctggtgtcacctatcagtaaaagtttttcagaagaagtgaagtcaagatgaagaaccatttgcttttctggggagtc

SEQ ID NO: 439372 - DNA, 78 bp, Homo sapiens
agtgccaggcgccggccggctgcgaagacgcggtgggccgcccctccgaccatgttcctgagtcgtgcacttgaggag

SEQ ID NO: 439373 - DNA, 100 bp, Homo sapiens
caaatacaagaccctgcttgtgaaggagctgacatggacccaaatcctcgggccgccctggagcgccagcagctccgccttcgggagcggcaaaaattct

SEQ ID NO: 439374 - DNA, 75 bp, Homo sapiens
cctggttctggaatcctcagttcaagcatcttcatgatacagttaagaggaatcttgacagcgccacttcccctc

SEQ ID NO: 439375 - DNA, 75 bp, Homo sapiens
tgagtggacggtttatcataactgctcttcctactatttatcatgtttctgaaagatctatccagcactccgatg

SEQ ID NO: 439376 - DNA, 100 bp, Homo sapiens
atcatcctgagcaccttcctgctgattggctgggtggccttcatcatcacctatcccctgggattgtcaatgaggcagatcagattccgatttgacgggc

SEQ ID NO: 439377 - DNA, 75 bp, Homo sapiens
ctccgcaacagaaccatctcaaacaatgcagatcttcgtgaagactctgactggtaagaccatcaccctcgaggt

SEQ ID NO: 439378 - DNA, 100 bp, Homo sapiens
tcgctcctctttctgggcatgttcctctctggcatggtggctcaaattgatgctaactggaacttcctggcaaagtgtttcatggatttcaaagctggag

SEQ ID NO: 439379 - DNA, 85 bp, Homo sapiens
gccttctggggactgtcatctctaaaaagattggcaattgaaggaacagactaaaaatcgtgtcctggaaggaaactacaggtac

SEQ ID NO: 439380 - DNA, 96 bp, Homo sapiens
cgcccgcaggacgccccagccagttgatcctgaaaacgtgtttattggtcgccacttcattattggactttccacagttacctttactctgccttt

SEQ ID NO: 439381 - DNA, 75 bp, Homo sapiens
gccatacagaatttaacccgtctcttatacagccttcagaagtctcaggggatccagaactgcagccagtccttg

SEQ ID NO: 439382 - DNA, 100 bp, Homo sapiens
gctctagttgattatcttgatggaaaagccgtagactacatagaaaaagcactggaatattttacttgaaaaaatgcctgtcttaaaggctgaagcgtca

SEQ ID NO: 439383 - DNA, 83 bp, Homo sapiens
cgcgcgcgaccgccgaatcgctcctgcagcagaggacacagcattgttggttttgccatgtactattttacctatgacccgtg

SEQ ID NO: 439384 - DNA, 100 bp, Homo sapiens
ttcaagaacctggcatctatagcgccgcgcggtgaggttctctagtccacgctcgcagccatgccgtccaagggcccgctgcaatcggtgcaagtcttcg

SEQ ID NO: 439385 - DNA, 75 bp, Homo sapiens
ctagaatcaactgagagagatgcttaaaaatcaccagttactttaatgaggagaacagatcccattccaatcgtt

SEQ ID NO: 439386 - DNA, 89 bp, Homo sapiens
gtctcagtccagctctgccgaacagagcttcctgttctccagggaggaggcggacacgctcagcctgacatttaccccggtaactgctg

SEQ ID NO: 439387 - DNA, 50 bp, Homo sapiens
tgagtcaggacgtaaatggaaccctgaaaatgcttggacagaagagatga

SEQ ID NO: 439388 - DNA, 75 bp, Homo sapiens
aattcttcagattggaaaataccacaggatggagactacgagtttgacaatacatggcttgatatacaacgccct

SEQ ID NO: 439389 - DNA, 100 bp, Homo sapiens
agaacaattagggtgacgtgtgcattgagtaaacaggtgacgttaaaggtgcacatcagcgacgccagcacccaccagcccgtagcagatgcgctcatcg

SEQ ID NO: 439390 - DNA, 74 bp, Homo sapiens
ttacctctcatcattgtgttaatggtgaagcacagcgattcccgttatgaagacagtatggagtttccagacca

SEQ ID NO: 439391 - DNA, 100 bp, Homo sapiens
ggaggaccgaagcttccggacgacgaggaaccgcccaacatggcctcggaggtcgcagcagttgtggtagaaatttctgggttagtggactctcttctac

SEQ ID NO: 439392 - DNA, 75 bp, Homo sapiens
gctggattggaaacggcatcaagtgtattggtgctggagaatctggtaaaagcaccattgtgaagcagatgagga

SEQ ID NO: 439393 - DNA, 75 bp, Homo sapiens
aaacggagcgctgccctgcagcccgagcccatcaaggtgtacggacaggatggttcacatttgagtaaagacagg

SEQ ID NO: 439394 - DNA, 100 bp, Homo sapiens
tgctccagaggaaatccgtgatgctcggcatccccatgttacccgccagagtcaggaggaccaacacaggctttatcctgtggataaacgcagagtgaac

SEQ ID NO: 439395 - DNA, 51 bp, Homo sapiens
gaaaagatacgaggctctaggagagaatgccgggacattctgcttcctgtc

SEQ ID NO: 439396 - DNA, 75 bp, Homo sapiens
cccagtaccaggcggtggtgcccgacttcgaccccggattacatcccagtagaccaagaagagttaagagattat

SEQ ID NO: 439397 - DNA, 98 bp, Homo sapiens
gggatccacacagctcagaacagttggatcttgctcagtctctgtcagaggaagatcccttggactcgctcagcagcagcctgaaaacttgctacaag

SEQ ID NO: 439398 - DNA, 80 bp, Homo sapiens
cttcaatgtccgcatcgcaaccaccgccctggccatctaccatgtggcgccatgtcagaaccggctggggatgtccgtca

SEQ ID NO: 439399 - DNA, 100 bp, Homo sapiens
gcccagcagaatttgtatagagatgtgatgttggagaactacagaaacctggtctccctaggaatggaagttggatacactttgtgacttgtacgagaca

SEQ ID NO: 439400 - DNA, 75 bp, Homo sapiens
cttggaccccggcttctgggacgcgtcagttacagaatgtctgaaggggacagtgtgggagaatccgtccatggg

SEQ ID NO: 439401 - DNA, 100 bp, Homo sapiens
gcctgaccagaaaggaactcccaagcgactgcaggcagaagctgagacggctaagtgtcatccctcacgagcggagaatattaaccatattgcagtggct

SEQ ID NO: 439402 - DNA, 75 bp, Homo sapiens
aagagatggatattgaaatggacagtggagatgaagcctaagaatatgatcaggaaaatggcagacaatttttcg

SEQ ID NO: 439403 - DNA, 98 bp, Homo sapiens
atttttccctctaccttaaggatgtgcaggatcttgatggtggcaaggatgtgacaacatctggggtgatggaaagtatgaagaaagtcaagaaggtg

SEQ ID NO: 439404 - DNA, 75 bp, Homo sapiens
agctgtggcggcgcccaattacaggcacccacctttaccagtaccgaggcagaagctcctcctggggtagagaca

SEQ ID NO: 439405 - DNA, 100 bp, Homo sapiens
ctctgccgccagcacacaccggcacctaccgcacgagcacagactcaagaatgaacaatccgtcagaaaccagtaaaccatctatggagagtggagatgg

SEQ ID NO: 439406 - DNA, 100 bp, Homo sapiens
ggccctgccgcccggcttcaaggcccgcggaacagcggaggacgaagagcgggacccgagccctgcattgacttgggcaaggcaaatgagcccaaccacg

SEQ ID NO: 439407 - DNA, 99 bp, Homo sapiens
cttcaatactacctttatttccaccatagactaccgggccggcgcctgcttctcagtgcttttcgggggccgctgtgctggagacctcgccggccacta

SEQ ID NO: 439408 - DNA, 100 bp, Homo sapiens
tcttttaaagatgacatgccaaagtcagatgtcaacaaagagtactatacacagaatatggagagagagttgcctttccccatcttcctggttctgctcc

SEQ ID NO: 439409 - DNA, 100 bp, Homo sapiens
gccgttcctggctttgtagctcgctcaagatggcggcgcagccaccccgcgggatacgcctcagcgcggtcaaaatgcagatcttcgtgaaaacccttac

SEQ ID NO: 439410 - DNA, 100 bp, Homo sapiens
ctacaatggtgagctgtcttcacatcttagctcagacacttgacacaagataccagtttcattccaggacctgactgtgaacttcacccaagaggaatgg

SEQ ID NO: 439411 - DNA, 82 bp, Homo sapiens
gattcagccagcacactcctcgcgagcaagggagtgcatccgccccaacccttttccccctcgtctcctgtgagaattcccc

SEQ ID NO: 439412 - DNA, 88 bp, Homo sapiens
gaatgcatctaggtaccaatggagccaactgtggtggacaattttcaaaaatgggatttgtggacaacaaacgaattgcaatttgggg

SEQ ID NO: 439413 - DNA, 75 bp, Homo sapiens
aaggattccaagtaactcttatttggttacaccggatgacatcaattgaaagagaagaaaaggagaaagtcaaaa

SEQ ID NO: 439414 - DNA, 50 bp, Homo sapiens
gctgattgactacgggaagctgcggaagggtgaggtggctttgaccccgg

SEQ ID NO: 439415 - DNA, 100 bp, Homo sapiens
taattacttgagaatttataatggaattggagtcagcagaactgaaatagatgaaggaactgagacacagaggttgagacttgtctaaagtaacatgacc

SEQ ID NO: 439416 - DNA, 78 bp, Homo sapiens
ttggcctcacctactaccttgtcaggaagaaaaaatgctgggcatcttggtgcagcacaaagtccggagtggcgtctc

SEQ ID NO: 439417 - DNA, 75 bp, Homo sapiens
agcaggagcagcccaagcgccttccctcacgaacttagtgatttggcccgtgaccctccagcacaatgttctgca

SEQ ID NO: 439418 - DNA, 101 bp, Homo sapiens
gtacagtcctccccagtgtgtgccggagaacacgggctacacgtatgcgctcaggaaagaccacagcaagattctttcattcgtctcctcctagcctgggg

SEQ ID NO: 439419 - DNA, 75 bp, Homo sapiens
gtgacatcatcattgacggaggaaattctgaatatagggacaccacaccaagctctactccaggaagtgaaaatg

SEQ ID NO: 439420 - DNA, 100 bp, Homo sapiens
cgcagggcgatggacggccgaaccccgcgcccgcaggacgccccagccaggtacttggaaaaatggacaaggattgtgaaatgaaacgcaccacactgga

SEQ ID NO: 439421 - DNA, 100 bp, Homo sapiens
catgaagcaaccgcccattcagtctacggctggggccgtcccagttcgcaatgagaaagacgcaaacatgcagatctttgtgaagaccctcactggcaaa

SEQ ID NO: 439422 - DNA, 136 bp, Homo sapiens
ctgctgtcgcccagcgccgccccgtcgtcgtctgccttcgcttcacggcgccgagccgcggtccgagtgctggagaatctggtaaaagcaccattgtgaagcagatgaggatcctgcatgttaatgggtttaatgg

SEQ ID NO: 439423 - DNA, 98 bp, Homo sapiens
agggtgaaaaatatcagcagactagagcagattcttccaaatgcacagcttgtgttcagactcgcaggcggtcagttgctgtgtatgggcagtatgga

SEQ ID NO: 439424 - DNA, 90 bp, Homo sapiens
aagcaactacaggaaatggctttgggagttccaatatcagtctatcttttattcaacgggttgttatctggaatctgatgatgttttgcg

SEQ ID NO: 439425 - DNA, 100 bp, Homo sapiens
tccgctgtgcgcaggatcgcccaggaagtgcagcgctttgcccaggagaaaccccaccaacaactgaacgctttggtcaggctgctacaatggaaggaat

SEQ ID NO: 439426 - DNA, 90 bp, Homo sapiens
tagtagcatcaaacaatgggtcagtgttctcgaattctgcttggtcagaatcgtgatggcattgtgttcagcactgatgactattttcac

SEQ ID NO: 439427 - DNA, 82 bp, Homo sapiens
ggcacgcagccgggaggccgaggactcggagttcacctgcagtgcagagcagagcgggcggaggaccccgggcgcgggcgcg

SEQ ID NO: 439428 - DNA, 95 bp, Homo sapiens
tctggctgcacgctcccctcaaggcctgggtgcttctactgcagaaatatcagctagaaccatgcagtcaagcgttgacccggacgacacctata

SEQ ID NO: 439429 - DNA, 97 bp, Homo sapiens
agaagcaagaaggccctggacacagcaatatctctgggctttcacagggagcccagatgaaggcatccttggcatccctgccccctctgcatgttgc

SEQ ID NO: 439430 - DNA, 100 bp, Homo sapiens
ttcaagatggcggtgcaggagtcggcggctcagttgtccatgaccctgaaggtccaggagtacccgaccctcaagtattctaccttgtaaatactgttat

SEQ ID NO: 439431 - DNA, 98 bp, Homo sapiens
gggagccccgggagccgcacgctctactgagatgaagaaagaaaaagaatacctgctcagctccagagacacgtaaagggacagagattgggggacag

SEQ ID NO: 439432 - DNA, 100 bp, Homo sapiens
ctcagacaagttccatcccacctttgagtcaggattcaagccaaaactcgagaatttagggaacgacaagctcgagagcgtgactatgctgaaattcaag

SEQ ID NO: 439433 - DNA, 100 bp, Homo sapiens
gtagagctgagcgacccagcccgcgagcgaggaaaggccgagggggacggcaagatgcacatcaccctctgtgacttcatcgtgccctgggacaccctga

SEQ ID NO: 439434 - DNA, 101 bp, Homo sapiens
gaagggtcctgggccccgggcggcggtcgccaggtctcagggccgggggtacccgagacaggtgatttggcttctgcacagttaggaggagcaccaaaccg

SEQ ID NO: 439435 - DNA, 89 bp, Homo sapiens
gctgtacctggaggaaggaagtgcggagccagcctgagttgggagaagagctccagagagaccagaggagcgagagcagcaagaaccac

SEQ ID NO: 439436 - DNA, 97 bp, Homo sapiens
ggccaggccccgtgcccgggcatccaccataccgagtgggcacgcctggcgctcttcgacttcctgttgcaggagccaagatggccgaataggaaca

SEQ ID NO: 439437 - DNA, 100 bp, Homo sapiens
catcctcctggccaccgactcctacaaggcactgcaggaaaggaaaaggaaaattttggacgaagctgtggaattaagtcaagatcactttaaaaaatac

SEQ ID NO: 439438 - DNA, 74 bp, Homo sapiens
tatgcaggtggtctgtgaagccacacagtgtccagatacgaggtttgctattggctccctgatggacgattact

SEQ ID NO: 439439 - DNA, 83 bp, Homo sapiens
ggaaaactggatgctgcagacactgaacgaggagccagtggaaggctcccctgttcctttttgctgacgtgtcatttctaagt

SEQ ID NO: 439440 - DNA, 98 bp, Homo sapiens
tctcgctctgggtctccaggcccgcgaccgtccgccagtcgtcccgagacaatgcagatcttcgtgaagactctgactggtaagaccatcaccctcga

SEQ ID NO: 439441 - DNA, 75 bp, Homo sapiens
ccgagagcgtggagcgggctgggccagtggtttgagtccagccaatgacactggagccaaaaagaagaaaaagaa

SEQ ID NO: 439442 - DNA, 104 bp, Homo sapiens
ttcgcattttggcattgacatttaattttagggtcctttatatagaagggagagtagtataccaacagatgttttaaagattgtgtattctgtgggtgctcaga

SEQ ID NO: 439443 - DNA, 75 bp, Homo sapiens
taccaaagtcgggactatcgatgatgtcttctcacaagactttcaggattaagcgattcctggccaagaaacaaa

SEQ ID NO: 439444 - DNA, 98 bp, Homo sapiens
atgcaccaacttttcctcctgctggagtgatgggaagatgttcaatgcactcattcaccgataccgaggcatttcatccttcatgaagccattcagga

SEQ ID NO: 439445 - DNA, 73 bp, Homo sapiens
cgctatgctgctgtaacacagtttgagcttggtgctaacagtggtttgcacatcatcatctttgatgaaattg

SEQ ID NO: 439446 - DNA, 100 bp, Homo sapiens
cagccttctgcatctggatctcttgttggaagagaaaatgagggtgtccgcaatgttgccagtgtctgtctgcagattggctacccaactgttgcatcag

SEQ ID NO: 439447 - DNA, 75 bp, Homo sapiens
gggaactcagaccgtaccttgcaacaagggcagcccaatggatccaatggtgatgaagagacctcagttgtatgg

SEQ ID NO: 439448 - DNA, 100 bp, Homo sapiens
caggctcggcgccggtaggaagagtcagaggggtgaccagagagcccaacgcctggtgctcaagactttctccgagccaaagggaaaggacagtcccaaa

SEQ ID NO: 439449 - DNA, 82 bp, Homo sapiens
gcctccgctgcagtcgctgcgtctccaagcaaattgtggctactaatttgccccctgaagatcaagatggctctggggatga

SEQ ID NO: 439450 - DNA, 82 bp, Homo sapiens
cggccagttttgaaatcgacacacaaagaatagagttgagcctgtgggacacttcggagacaagaggagcagcagcggcacc

SEQ ID NO: 439451 - DNA, 50 bp, Homo sapiens
tagtgaagcaacttaatcgggatatcgagagatgtggtcttgctatgttg

SEQ ID NO: 439452 - DNA, 75 bp, Homo sapiens
aggggtctccatccagatcagctgaatcagagtttgcattgttaacaagttggcaaacatgaattgactgggcat

SEQ ID NO: 439453 - DNA, 76 bp, Homo sapiens
cccggaaactccagcgtgtctccagccgtgatccagacatttaatgtggatgcaccatgccagaccgtggaagatt

SEQ ID NO: 439454 - DNA, 97 bp, Homo sapiens
catcgagatgacggcatggagggatttccatcaccaaggagtaagaagaccttcgggcagagactgttgggtatgctcccttcagaaaacagttcta

SEQ ID NO: 439455 - DNA, 90 bp, Homo sapiens
attacatagtgtatcacgagttggtcatgaccaccaaggaagctgaaaccccacgtagtgttcttgaagaaattggactgacataactct

SEQ ID NO: 439456 - DNA, 74 bp, Homo sapiens
ctgtccatgggcaccatgatctgtggctgggataagagaggccctggttggatggcaagcatgtggtgtttggc

SEQ ID NO: 439457 - DNA, 82 bp, Homo sapiens
ttcgacttgagcgaagttttatgcaagatttgactgatgaattagctcagaagttatttgatgtttcagaaataacttcagc

SEQ ID NO: 439458 - DNA, 98 bp, Homo sapiens
gaccccagcacacagaagccgagacgaatgtttctccatcccagagagatgaagtaattcaatggctggccaaactcaagtaccaattcaacctttac

SEQ ID NO: 439459 - DNA, 100 bp, Homo sapiens
gtatgcactacctcctcctccccagttctactcaagccttattgaagagataggaactcttggttgggataagtcagtatgggaatcctttaaataaata

SEQ ID NO: 439460 - DNA, 83 bp, Homo sapiens
ccaacatggcggcggccgtaaggtgcatgggtagaggtagcccctgaagaagatgaaaggaaaaagaggcgacgagaaagaaa

SEQ ID NO: 439461 - DNA, 83 bp, Homo sapiens
gccgccttggacctcctgggaggcgaggacggtctctgccagtataaatgcagtgacggcatggaagaggagatggttcgtgt

SEQ ID NO: 439462 - DNA, 75 bp, Homo sapiens
caactacaacatcgtttcaggagctgtaggtaaaacttgcctactgatcagttacacaaccaatgcatttcctgg

SEQ ID NO: 439463 - DNA, 82 bp, Homo sapiens
gacaggcagagtgctgatgtgaaaaataccacgacaaaaccaccctaggtccacatatagcctcagttacattagctgctta

SEQ ID NO: 439464 - DNA, 75 bp, Homo sapiens
cctggtggagagccaaagatcaaatttgcagttaacatgtttcgaacattaccaccttcctccaatcctacggga

SEQ ID NO: 439465 - DNA, 99 bp, Homo sapiens
aaggaacgcgacggcggcgcccgcagcaccagtggaacagtgattaacaagctgaaggttgttaagaagcagacatgccctttacagactggggatgtc

SEQ ID NO: 439466 - DNA, 100 bp, Homo sapiens
caccccctgttcctgcagaacacagagagcatcagtgatgtcacgtttggagcaggggtcagttacatcgggacaccacggactccgtcgtcagccaaag

SEQ ID NO: 439467 - DNA, 90 bp, Homo sapiens
cctgagggagaggatctcaatgaatggattgctgtgaacagcccggaggctgtttgatgtcctgcacgagcccttcttgaaagtaccctg

SEQ ID NO: 439468 - DNA, 98 bp, Homo sapiens
ggagagactgtggagtttgatgttgttgaaggagaaaaggggtcaccagtcgttggcacaccaagaagctgccccgcaagacccaccgaggcctgcgc

SEQ ID NO: 439469 - DNA, 100 bp, Homo sapiens
acctgtgttcacaaagatggctgtctggggcaacaagtagggccttgaaggccaggaggtgggatgcagatcttcgtgaagaccctgactggtaagacca

SEQ ID NO: 439470 - DNA, 100 bp, Homo sapiens
ttgcctggctccacgccctgctgggtcctacctgtcagagccccaagatgccgacaaaaggatcaaggtggcgaagcccgtggtggagatggatggtgat

SEQ ID NO: 439471 - DNA, 97 bp, Homo sapiens
tgatgaagagcagatggaaacacatgaaagacttcctcaaggactacagtatgcacttaatgtccctagtgctgcagcagctcccagtccagtgcta

SEQ ID NO: 439472 - DNA, 99 bp, Homo sapiens
ggcgtggccgcctcctgcctcgaagacctgaggagcaaggactgtgccctgtccacggtgcctcctgcatgtcctgctgccctgagctgtcccgagcta

SEQ ID NO: 439473 - DNA, 100 bp, Homo sapiens
cggggcaaccactgcgagtactgcttcaccagatttatcagcaagactgttgaacgcataactgcccaagatgcctgtccctccccctccagcacccccg

SEQ ID NO: 439474 - DNA, 91 bp, Homo sapiens
aacaatgagatcgtggacaagatcatgggcaaaggacagatccaggcataatcaccagcaacacccgggacaataatacgggggccaccta

SEQ ID NO: 439475 - DNA, 88 bp, Homo sapiens
taaggatccccaaagtctcagacttcagatacctccaaaagcagccatactttggagcagttattgggagggtggccaaccgaatcgc

SEQ ID NO: 439476 - DNA, 74 bp, Homo sapiens
gctgctgctcaaagctgctgccgccccttgggctaaaaggttggacgtgataagtatgagcctgcagctgtttc

SEQ ID NO: 439477 - DNA, 83 bp, Homo sapiens
cgctcctgtggagtttcgtcttctggcctcccgcgacgatgcccctcaacgttagcttcaccaacaggaactatgacctcgac

SEQ ID NO: 439478 - DNA, 100 bp, Homo sapiens
aagaagcagccgccagttgggatcaaatgtgagcctatggatcaaggaagtttcagctgatcctactgccacactcacagcagcagaagaaagaaaggag

SEQ ID NO: 439479 - DNA, 126 bp, Homo sapiens
aggctagggaggacctcacttccccggggtgtaataatgttaactgagagcattggggagtcagcaatgtccgttgtgttaaatcagctgctgcccatgattaagcctgtaacccagagaaccaac

SEQ ID NO: 439480 - DNA, 95 bp, Homo sapiens
gcacccaggcgactgcctcatcttcaagagcggttctggtgaggttggaaggatgcagccacccggttgtcatgaaaggcctgtgtgctgaatgt

SEQ ID NO: 439481 - DNA, 100 bp, Homo sapiens
cggatgccctgcagtacctgcagaaggtctctggagacatcttcagcagggtgagaactctgtctcagtcgacgggaagtgcagtgactccacgctactg

SEQ ID NO: 439482 - DNA, 83 bp, Homo sapiens
cctgacagcatggggctgtactgaataccgcagaccattgtaattcatggataacctttttgaatggcacttcacggttagag

SEQ ID NO: 439483 - DNA, 89 bp, Homo sapiens
ccggcggaaaaccgaagttggaagtgtctcttagcagcgcgcggagaagaacggggagccagcctgctgagggatgcccaagaagttcc

SEQ ID NO: 439484 - DNA, 75 bp, Homo sapiens
ggcagccggcccgcagcgcgttctcccgggagaggtgaaatgacaatggatgctctgttggctcgattgaaactt

SEQ ID NO: 439485 - DNA, 75 bp, Homo sapiens
acagaaattgaaaggcttcaaagctagcagtgctgaggaatgtaaacaagtttgctgggccttgcgagacttcac

SEQ ID NO: 439486 - DNA, 94 bp, Homo sapiens
cccagaccctggagcctcagttggaagcagccgatccagcctgcggagcctgtggggcagctgagatctgtatctgtggacctgaatgttgatc

SEQ ID NO: 439487 - DNA, 98 bp, Homo sapiens
atagccaacgcacctacgctgttgttattcatttcctgcttttcacagaaaacaattttgttgcatggaagatcgagacgggatttcgccatgttgcc

SEQ ID NO: 439488 - DNA, 101 bp, Homo sapiens
caagagctttctctccaaaatccccagtgtcgtcacaggatttggaatgccctgacagataattatgggaatgtgatgcctgtagactggaagtcatcgca

SEQ ID NO: 439489 - DNA, 100 bp, Homo sapiens
ctgccccgccggagcagcatcatcaagatctgaacagaattaagacgaacgagctttcacaattgcagcagatgaagatccattggtaaattgatcagga

SEQ ID NO: 439490 - DNA, 83 bp, Homo sapiens
tgaccagtccaggcccagcctctcgaatgggcacacctgtgtagaacctggagctggttgaaaaaggcttcagtaacttgaag

SEQ ID NO: 439491 - DNA, 90 bp, Homo sapiens
atcttgttaacaacacgcccctcaactggctggtgtattttgattacatgagaagctggatccaaatgctacagcaattacctcaagcat

SEQ ID NO: 439492 - DNA, 80 bp, Homo sapiens
gcggccgcgagcagagccgcccagccctgccagctgcgccgggacggaagagcattaagaagttggttttgaagaacctt

SEQ ID NO: 439493 - DNA, 98 bp, Homo sapiens
cctcttcgagcgccgcggacgcgtcatcgagtgtgacgtggtgaaagtttctgccactgccttctacaaagcacaacctgtaattcagttcatgtgtg

SEQ ID NO: 439494 - DNA, 100 bp, Homo sapiens
gcagtcggtgaccgcgcgactcggcgcccgcccgcggagcggtggtgccccccccgggcacggggccatgtacaacgggatcgggctgccgacgccccgg

SEQ ID NO: 439495 - DNA, 96 bp, Homo sapiens
tgacgccgggaccgggaccgccgccgccgccgccaccatgacaagttggatggcttgaggactggtactaaaaggaaacgtgactgggaggccatt

SEQ ID NO: 439496 - DNA, 100 bp, Homo sapiens
cccgaccacttgcggcctgagtatggccgggctctcgccatgggtcactgtcgcctctgccacgggaagttttcctcgagaagcctgcgcagcatctccg

SEQ ID NO: 439497 - DNA, 87 bp, Homo sapiens
tggagtgttgactttaatttgatggatcctaaactcttggcttcaggttctgatgatgcaaaagttcacacaaaagatgttggacaa

SEQ ID NO: 439498 - DNA, 75 bp, Homo sapiens
cattagccaaagaatgccctctctcccagcttgcccaacagaaggtggaaaaaatcactgaaagtaaaaataaac

SEQ ID NO: 439499 - DNA, 100 bp, Homo sapiens
catgacaatgactttgagccctaccttactggacagtcaaatcaggggtcgggccccggctcagtggtcccaggcagctcgggtgtcggaacccccagac

SEQ ID NO: 439500 - DNA, 100 bp, Homo sapiens
cctgcccaagtgcaagctggccagggacctcaaggaagcttatgacaggtgaaacctggagatgacttagaaagtgatcgatacttaatcacagttgaag

SEQ ID NO: 439501 - DNA, 90 bp, Homo sapiens
tttgtatagagatgtgatgttggagaactacagaaacctggtctccctagaaacagcacttcttctcagtctcagacaagtactgcctcc

SEQ ID NO: 439502 - DNA, 100 bp, Homo sapiens
tttccagacgacccgcctcatcctcatagggcaggagcgatttggcaacatgacccgagtatactacaaggaagctgttggtgcttttgtagtctttgat

SEQ ID NO: 439503 - DNA, 75 bp, Homo sapiens
caagtactccttagagccagttgctgtagaactcaaatctctgctgggcaaggtgaagccctcgagcacctgcgg

SEQ ID NO: 439504 - DNA, 98 bp, Homo sapiens
gaggacctggacctggaaggggagactctgctgacacccatcacccacatctcacaaaactggcgatggaatatgagaggagccctctggaaagaaaa

SEQ ID NO: 439505 - DNA, 51 bp, Homo sapiens
cggccactccggtcccgacacctagcctgctataaaagaacgtgtggatca

SEQ ID NO: 439506 - DNA, 101 bp, Homo sapiens
tggcaggcctggaagaagctgatgctgaggccatggatcatctgcagtcattcattgcagattgtgatcgtagaacagaagtggccaagaaaagattagca

SEQ ID NO: 439507 - DNA, 50 bp, Homo sapiens
gtgttgagcaaccacgtttgaaaggcctttgagccctacttagagatttt

SEQ ID NO: 439508 - DNA, 82 bp, Homo sapiens
ctcctggaggcggcgggatggaggcggcggccggaggaacaggaggcagcccggcgccgccagcagcgcgagagcaagagca

SEQ ID NO: 439509 - DNA, 101 bp, Homo sapiens
ccaagaaggaggaggagcggcaggaggcgctgcgccaggtcgtcttcgcggtcatcgtcctactctggctccggctcctcccggtcgcgatcccggtcttc

SEQ ID NO: 439510 - DNA, 83 bp, Homo sapiens
cacagctcggcgctccttcccgctccctcacacaccggcctcagcccgcaccggacagattgattcactttggagctgtaagt

SEQ ID NO: 439511 - DNA, 80 bp, Homo sapiens
caccgaccagagcctggacgaggcacaggccagggggatatgagactttctactcggaatatcctgagtgttgcgtggat

SEQ ID NO: 439512 - DNA, 51 bp, Homo sapiens
ctcagtcctccagtgtttggatattcaggctggagtgcaatggtgtgatct

SEQ ID NO: 439513 - DNA, 90 bp, Homo sapiens
tgtaaagggtatctgatcaagccaacaacagtgacggaatgcctccatacatgtgtgttccagagaacaagccttcagacatttgctata

SEQ ID NO: 439514 - DNA, 100 bp, Homo sapiens
gaagtgcggggctccaatggcgctttctacaagagttgtctgctggttctcagcttgaagaagattctgcagtccttattgatcctttttcttggcgtta

SEQ ID NO: 439515 - DNA, 90 bp, Homo sapiens
tgtgcaagatgagcctcaagtgcttctgcattacagggtgacagtccaaagattgacttggccggcagttcgctatctggcatcctggac

SEQ ID NO: 439516 - DNA, 98 bp, Homo sapiens
ccatcattgatgtggtgcgatcggtggtgctggctagagtgtatacgtttggacccaagcttaacttttccaatgtggaatcctgggccttcattggt

SEQ ID NO: 439517 - DNA, 100 bp, Homo sapiens
tcagatgacaactgtacagatgtcactgacgaagttatacggaagcgtctcctcattgatggagatggtgctggagatgatcggagaattaatctgctag

SEQ ID NO: 439518 - DNA, 143 bp, Homo sapiens
gacttctgaagaacaaatcagcctggtcaccagcttttcggaacagcagagacacagagggcagtcatgaggatttacaagaccagctagaggatatgatggaagatgcaaatgaaatccaagaagcactgagtcgcagttat

SEQ ID NO: 439519 - DNA, 100 bp, Homo sapiens
acaatcaagatgaatatgaccctatggaagcagaagaagctgaggatgaagaagatgatgaagtggctgtaattgatgaaattcaaatgattagagatcc

SEQ ID NO: 439520 - DNA, 98 bp, Homo sapiens
aacacataaagattcacacttgaaacagattaatcaggcctttctgagaaaagtctacagcattctttctctgcaggttctcttaactacagtgactt

SEQ ID NO: 439521 - DNA, 100 bp, Homo sapiens
ttgtagcctcaaactcccaggctcaagcagtcctaccatgtcagccttcccagtagctgggaccacaggcttctccagggaaagtgaccgaggcagtgaa

SEQ ID NO: 439522 - DNA, 51 bp, Homo sapiens
gtatactacatggcaaaatgggaaaggtattctctactgccgctgatggtc

SEQ ID NO: 439523 - DNA, 100 bp, Homo sapiens
cttaacgatttggcgtctccctcgaccaccacctctttgtgcagcagcccccgggcagaccctgttccgaggtatgtgacagggcacatctgggcctgtc

SEQ ID NO: 439524 - DNA, 99 bp, Homo sapiens
caaagcctgaagaccccggagcccctttagccatgtggatacctacggagcacgagaaatacggcgtgggtctggatgtaccgactgcttttggaataa

SEQ ID NO: 439525 - DNA, 107 bp, Homo sapiens
caggggctgccccgcgctcggtcccctggcggctccagccgcgggtcaccctccgtcagaatagcctaacatggcagaccagagacagcgctcactgtctacctctg

SEQ ID NO: 439526 - DNA, 74 bp, Homo sapiens
caccctccaactttgcgacggaaatgtgtcatcgaaagccagatggcggacttccaccacaaatggagggattt

SEQ ID NO: 439527 - DNA, 122 bp, Homo sapiens
tcagcagaggggccactgctgggccctgaggctgcaccaagtggcgaaggagccggctccaagcagaagatggctgtgccacccacgtatgccgatcttggcaaatctgccagggatgtctt

SEQ ID NO: 439528 - DNA, 75 bp, Homo sapiens
tgctgaaatagccagtgccttgggctacctgcattcactgaacatcgtttatagaatggtgaggttctggagaat

SEQ ID NO: 439529 - DNA, 83 bp, Homo sapiens
cctctccttgctgcagccatggagtcagcccaaggccaaccccactgtcactctgttcccgccctcctctgaggagctccaag

SEQ ID NO: 439530 - DNA, 87 bp, Homo sapiens
gcgctccctccgccgccgccgccttgctgctgctcaaagctgctgccgccccttgggctaaaaggattggattcagcatcaaaatac

SEQ ID NO: 439531 - DNA, 100 bp, Homo sapiens
gttggcgtgtccctgcagcgaaggatcctggacagagcgggatgccaccagcttgtccaaagggaagttccaggagctcctggtgggcatcgttgtggag

SEQ ID NO: 439532 - DNA, 100 bp, Homo sapiens
tattgacatccttactcattatgatgcaaaaaagaaagctgcccatgctgcaaaaactgttaaacatggcgtggagcgaatcaaggagcgtgtggaggag

SEQ ID NO: 439533 - DNA, 100 bp, Homo sapiens
ttatgatgatctacttccacttaatgaatatgtgaaactgcagcacaacagaaatttgctgaagaacttcaaaagcgagaacgttttttacttgaaagag

SEQ ID NO: 439534 - DNA, 83 bp, Homo sapiens
tggggtcccggctgccctgtggcctcgctcctcggaggcttcgtgctgaacctgggcaaagacagcaacaacctgtgcctgca

SEQ ID NO: 439535 - DNA, 74 bp, Homo sapiens
ttctacaaatgctagaagctatcaaagcccttgaagtcagatacttggatgatattgatgatgagatggaccca

SEQ ID NO: 439536 - DNA, 83 bp, Homo sapiens
cgagagcgtgaccgagagcgcgaatatcgtcatcgttagaaggtccagacctccccgtcttccggctgccctgaacgtcaggc

SEQ ID NO: 439537 - DNA, 129 bp, Homo sapiens
ttccggtgggctcttctctcaactggcctcatgttcttttatcacttcagcgtcttgcagatcctcggcctgaataacatagctgatccagaagaactgttcacaaaattagagcgcattgggaaaggc

SEQ ID NO: 439538 - DNA, 98 bp, Homo sapiens
gttaacagagagcctgggagctgggcagcctgtacctgtggagtgccggcaccgcctggaggtcaaatttgtattcaggcagaagtcttctgcagggg

SEQ ID NO: 439539 - DNA, 97 bp, Homo sapiens
caggttcaaatggctggtataattataggcaccaggctgagcggaaggaggagaaaaaggcggctgcccctgctcctgaggaggagatggatgaatg

SEQ ID NO: 439540 - DNA, 100 bp, Homo sapiens
cgacgaaggcaaagggaaggtggtggacctgctggcgcaggacgccgacatcgtgtgccgctgccagatctgaaatagctcaactcagtcaagaaaaaag

SEQ ID NO: 439541 - DNA, 96 bp, Homo sapiens
ctactatccatttcaactacagatactttgaagtagaagaagctgatgtttctattgctccaccccctccccctatgcctcagttgactccacaga

SEQ ID NO: 439542 - DNA, 97 bp, Homo sapiens
ctgtaattggaagaccagattttgaacatgccgtggaagcttctaaactttctagtcaagatgcatcatctgcagacatcagaaaagcatatcgtaa

SEQ ID NO: 439543 - DNA, 121 bp, Homo sapiens
gatgtctgacatggaggatgatttcatgtgcgatgatgaggaggactacgacctgggagttctgggaaatcgttcattcatttacagatgaacagaaaagactcttcttgcagtttacaac

SEQ ID NO: 439544 - DNA, 100 bp, Homo sapiens
cccaaactggcacgagagtgccgagggcaaggagtacctggcttgcattctgcgcaagaaccgccggcgggtgtttgagatggagtttcaccatgttggc

SEQ ID NO: 439545 - DNA, 83 bp, Homo sapiens
gtctcaatatctgtcttcggtggactccttcggcagtccacccaccgccgccgcctcccagcacttgcacctcctgcgccgcc

SEQ ID NO: 439546 - DNA, 100 bp, Homo sapiens
atccaatcatcgaatgggctgagaaaaggttttttgcatgtctgacacccatgactccacctggaccttatggctccacccagaagcaattcagcccaac

SEQ ID NO: 439547 - DNA, 90 bp, Homo sapiens
gaaaataatcagctctttcaaaaacaagcctagatattatcctactgaagatgtgcctcgaaagctgttgagccacggcaaaaaaccctt

SEQ ID NO: 439548 - DNA, 74 bp, Homo sapiens
cttagctgtgctcgcgctactctctctttctggcctggaggctatccagcgagcgagcccagggcgtggtgctg

SEQ ID NO: 439549 - DNA, 89 bp, Homo sapiens
aaagttggaacctctgacaagaccaagtactaccttcaagagctgggggacctccctctggtccgcctggatttctcctgtaaccgcgt

SEQ ID NO: 439550 - DNA, 100 bp, Homo sapiens
taatgtacaggcagaaaacgagaggctcaccgcagtcgtgcaggatctgaaggaggaagtatatattcaagcccaggactgtatagtaaaacaatgaccc

SEQ ID NO: 439551 - DNA, 75 bp, Homo sapiens
agcgcaaggtcgccctcaaggccatgatcaaaacagagcagggctttggcggagtcacagatgccattggagcag

SEQ ID NO: 439552 - DNA, 82 bp, Homo sapiens
tcgcctgggtggttgttggcgtgtccctgcagcgaaggatcctggtggtggtgaagtttattaagaaggagaaggtcttgga

SEQ ID NO: 439553 - DNA, 75 bp, Homo sapiens
ccgggcgccgtgcgctcctccccgcgctgtctcggcggcccaggacaatgcagatcttcgtgaagactctgactg

SEQ ID NO: 439554 - DNA, 74 bp, Homo sapiens
aaccagagagtcggagggagtccatctggagcggccaatctgaagatgatgagaaactgaaaaagaggaaggag

SEQ ID NO: 439555 - DNA, 100 bp, Homo sapiens
aacgaagcaacatttacacaagatggacattacattattagtgcatcctctgatggcactgtaaagggcggcgactggcggcgcgatggacctgaccggg

SEQ ID NO: 439556 - DNA, 96 bp, Homo sapiens
atccgctcccgccgagacatccgctccttgcccgagaacatccagtttgatgtttactacaaggtggtccgtactgagaagaacagtttgaacaac

SEQ ID NO: 439557 - DNA, 97 bp, Homo sapiens
gccagatgcagatctgaagacctattttactgataagaaaacacatctttacacactaaaacctgcacttgttgccaagtcttccatcttactagat

SEQ ID NO: 439558 - DNA, 120 bp, Homo sapiens
ggaacagggacagcacctcatcccctggatgggggaccacaagatcctcatcgacaggtcaaaatgcagatcttcgtgaaaacccttaccggcaagaccatcacccttgaggtggagccc

SEQ ID NO: 439559 - DNA, 100 bp, Homo sapiens
tcttcccttacaagggttatatatggaattatggtaccctccctcaggagttgatccctgaattttattatctccctgagatgtttgtcaacttcaataa

SEQ ID NO: 439560 - DNA, 100 bp, Homo sapiens
ggaaaggctctcagtgaaaaagtcactctccagttcttcaagaaatattcaacaaatgttggcagattcaatcaatcgtatgaaggcatatgcatttcac

SEQ ID NO: 439561 - DNA, 75 bp, Homo sapiens
attcgtcagcgatcagaaccgttcttccctaatattgggactggtgattgcagctggaagtgcccatgaccgagc

SEQ ID NO: 439562 - DNA, 83 bp, Homo sapiens
gcttagtgctatcattgacttggtctgttccactttggggatgaagctgatcttgcatctttaatggataaaacatttgagag

SEQ ID NO: 439563 - DNA, 100 bp, Homo sapiens
tgaatgatgaatacttttactactgtgacaacattaacgtgtgaagccccaggaggcccccaaggaactcgtcatccctttgatccagaatggccatcgc

SEQ ID NO: 439564 - DNA, 82 bp, Homo sapiens
ctttcgccttctgccatgattgggaggcctccccagccacatggaactgtggaatgaatcttacttgttgaatatcttctgg

SEQ ID NO: 439565 - DNA, 101 bp, Homo sapiens
gaggaggacagttcgctacacagcaatgcatcgaggttggtcaaagaaaaagtgatgtatgaaaaagaggcaaaacaacaagaagaaaagattgaaaaaat

SEQ ID NO: 439566 - DNA, 113 bp, Homo sapiens
ccggcggctaccggcggcggcgcgcagcgtgtcaggcggagagacccgccgccagacaatgcagatcttcgtgaagactctgactggtaagaccatcaccctcgaggttgagc

SEQ ID NO: 439567 - DNA, 82 bp, Homo sapiens
ctaactgcactccgagacttaataaaatcctctcttcaactggatcagaaagaagcaccgcatcagcctgctcaacccttta

SEQ ID NO: 439568 - DNA, 74 bp, Homo sapiens
ggcggatcacttcaagatatttaccatgatgactgtccaagtgcctccaaagtgtacaaagcatcagattcagc

SEQ ID NO: 439569 - DNA, 100 bp, Homo sapiens
gggaagttggattatcaattcttttgtaaatgtgtatggtgatatttgctccgagaacgtttgtctgcctgatgagagccacttgggttaagaaactacc

SEQ ID NO: 439570 - DNA, 74 bp, Homo sapiens
tagacacttcattgttccagcttctcgcttcaagctcctgaagagtggcagaatttagtgacatttggaagctt

SEQ ID NO: 439571 - DNA, 82 bp, Homo sapiens
attaccttatcagtgcaggagaggattgtgtctgcttggtgtggagccatgaaggatggataaggtgggggatgccctggag

SEQ ID NO: 439572 - DNA, 100 bp, Homo sapiens
tccggaacgtggcctacgacacgctccccattgtggtccatggaaacggtcccactaagctatccgtggtcctgaaccagttatgtgtgttgcatgagaa

SEQ ID NO: 439573 - DNA, 76 bp, Homo sapiens
gtgactgcttgcgaaccagttcagcagtgcctcagtgaacagagtatctgccaagcccgggcttccgtgatggtct

SEQ ID NO: 439574 - DNA, 100 bp, Homo sapiens
ctgatcaataaaaggcgacgggatggctaccttttccaattgctgcggattgctgatgcccacttggacagagtgattacagaagtagagccaccagggc

SEQ ID NO: 439575 - DNA, 50 bp, Homo sapiens
gttttcatcatctaagtgaaagaataactgaagtgaagtgatggactccg

SEQ ID NO: 439576 - DNA, 75 bp, Homo sapiens
ccagttcaagtggttctcctgcctcagcctcccgagtagctgagattacagataagtttataccatggatagcac

SEQ ID NO: 439577 - DNA, 100 bp, Homo sapiens
caatctgccttcatgaagaaaagacagaggcagaaaggaagatggcttactgcctgacaaattgttatcaggtcattacacctactctgagaatcgtgtg

SEQ ID NO: 439578 - DNA, 87 bp, Homo sapiens
tggttctggaatcctcagttcaagatccgcatttgctaccagcggcggccgcggcggagccaggccggtcctcagcgcccagcaccg

SEQ ID NO: 439579 - DNA, 100 bp, Homo sapiens
ttagctttagtgaaatgggctaataatgctggcaaagtggaaaaatgtgcgatagccttggataccagttactggactttcattaatcacgtcttcatct

SEQ ID NO: 439580 - DNA, 90 bp, Homo sapiens
cttcgccttcggagagcagagtcaacacggaggttcccccgcctgcacagcgcggtgatcaggacctttgttctcgtgcagcactacgcg

SEQ ID NO: 439581 - DNA, 75 bp, Homo sapiens
tttttctacagaatcaatgtctttgatcctgcagctcctgaaaggcaagctggtggtgggtcatgacctgaagca

SEQ ID NO: 439582 - DNA, 88 bp, Homo sapiens
ctggagtgcgtgggggaccggctgttggcggcctcccgcgacgatgcccctcaacgttagcttcaccaacaggaactatgacctcgac

SEQ ID NO: 439583 - DNA, 76 bp, Homo sapiens
ctcagatgctgtttccttgccccaggatccaggtgcacaaatggagtccagaggaggctgtaagagccatcgccaa

SEQ ID NO: 439584 - DNA, 100 bp, Homo sapiens
cttcggagggtagcttgcacctgtcccaactgtaaagaaggtggtggaagtttggctgtagcagcaattcctgaaggtctccccattgtggtcacagtga

SEQ ID NO: 439585 - DNA, 97 bp, Homo sapiens
tccatgttcgaggactctgtgaatctgtggtggaagcagacctcgtggaagcgctggaaaaatttgggacaatatgatgaagaagatgactttatgt

SEQ ID NO: 439586 - DNA, 75 bp, Homo sapiens
gtgaacagtacgcagtgaatgttgcctttgaactggccacaggtgactatttgtttgaacctcattcaggggaag

SEQ ID NO: 439587 - DNA, 90 bp, Homo sapiens
ctaccatttttaataacctgttgctgggagagacaccgccagttgaggtcttgagtcagacagagcaccagccttggggaccctggacca

SEQ ID NO: 439588 - DNA, 100 bp, Homo sapiens
attaaagataccagatcatgtcagagagagagcttggttaacttgggagaaagtttcatctgtggatggagtattgagacgagttgtactgctgtcacag

SEQ ID NO: 439589 - DNA, 75 bp, Homo sapiens
gccttcaatccaggacgagacttaaattcagattatcttagaagacctaggactccaaaaatgtttcccctgaag

SEQ ID NO: 439590 - DNA, 75 bp, Homo sapiens
agccacagcctcccgcgcctcgctcagctccaacatggagcaggacatcgagactttacatggctctgttcacgt

SEQ ID NO: 439591 - DNA, 74 bp, Homo sapiens
acagttagtcacccacctacatgttgagatgtgatgaatatgtcacccagttggatgagatgcagagacagtta

SEQ ID NO: 439592 - DNA, 75 bp, Homo sapiens
gtggatcaaagatggcccttcctcaaaaagagatcacaaaatggctcttcttcagatggcaacagtggaagaagc

SEQ ID NO: 439593 - DNA, 108 bp, Homo sapiens
gtgaggcccaaagaagatttatgttcaggaccatttagtctcctctacggcagacacatgcaggccaacccagaaccaccgaagaagaataatgacaaatcgaaaaag

SEQ ID NO: 439594 - DNA, 83 bp, Homo sapiens
atccttgaatgttgaagatgtccttaccagctttgacaatacaggaaatgttttacgagctcaactggaggcagtcctgtgcg

SEQ ID NO: 439595 - DNA, 116 bp, Homo sapiens
ccgccgcccgctgcctgcgccgccggccgggcatgagttagtcgcagacatggacaccaaacatttcctgccgctcggctactgcagcactggggtgtcagttgttggtccgaccc

SEQ ID NO: 439596 - DNA, 100 bp, Homo sapiens
aaaattatcaccaaagaagaccgcctgaaaggtgacaggccgctgcggctctgtgctggtacgcctcatccctgcacccaggggcactggcatcgtctcc

SEQ ID NO: 439597 - DNA, 100 bp, Homo sapiens
tggagaactacagaaacctcgtctccctggaaccagcctttcaaacagtttccagagatggattatcctactttacttttggctcttcttcatgtataca

SEQ ID NO: 439598 - DNA, 90 bp, Homo sapiens
agaggatctggtgtaccaggcgaagctggccgagcaggctgagcgatacgacggatttcagatgcatgccaggtttccactgattgccag

SEQ ID NO: 439599 - DNA, 83 bp, Homo sapiens
tcatccgttctggaaactgagaagcgagggtgacaatattcctgacattcagacaactgacttgtaactgacttataactgac

SEQ ID NO: 439600 - DNA, 97 bp, Homo sapiens
ccgggcccgggcatggtggtctggggcaacgcggaaggccttgaaccggggcattgctgctgtcaaggaggatgcagtcgagatgctggccagctac

SEQ ID NO: 439601 - DNA, 75 bp, Homo sapiens
caacaaagaagaccacacactgggaaacatcattaaatcctctctgatgtaaaggatggagtaaatcaagcagca

SEQ ID NO: 439602 - DNA, 76 bp, Homo sapiens
gctgcgagaccctagaggcctgcggcctgcggaacccaagacagaccaggatgaggagcattgccggaaagtcaac

SEQ ID NO: 439603 - DNA, 80 bp, Homo sapiens
caggcgtgagcctccgcgcccggccggtctctaattaacagaagatggcaaagcccagccacagcagctatgtccttcag

SEQ ID NO: 439604 - DNA, 98 bp, Homo sapiens
cgctggccacagccatgtgctgtatgcagatggtctcctccgatgtcctgcagatgaattctgagggggatgcccagacgctgacggaagtggacctc

SEQ ID NO: 439605 - DNA, 90 bp, Homo sapiens
ctgcagttggaggtgacgttggacactacagcttggccagagtggtagaaatgttgttgcatagggcagagcggcttgggtaaatccacc

SEQ ID NO: 439606 - DNA, 75 bp, Homo sapiens
gggcgcggggagctgcgcgaagccggggcggagcacgcgagctatgggactgttgacatttagggatgtggccat

SEQ ID NO: 439607 - DNA, 102 bp, Homo sapiens
ggaggggctccggctggtctgtggtgagagtcaccggcctgagaaggagtggcctattaagagtctcaaagtctacctgggagtgaagaagaaactcaggcc

SEQ ID NO: 439608 - DNA, 83 bp, Homo sapiens
cccaagctcccagtgtgggtggtggaggatcatcaggaggagcagtttttgcaagaaaggatcaaagtgaacggaaaagctgg

SEQ ID NO: 439609 - DNA, 100 bp, Homo sapiens
agattctctttgtggccagatgggtttgtatggacaggcttgtccatctgtaacttcattaagggcactgtgaggtgaatgctattgtacacgttttata

SEQ ID NO: 439610 - DNA, 100 bp, Homo sapiens
catcacagtcactgcttcagaaattgatggccctgctgtggcaccagtgaccaacgggaacacaacggtgccacccctgaacgatgatctggacatcttt

SEQ ID NO: 439611 - DNA, 101 bp, Homo sapiens
accccaagaatcctcatgctcctactatccatttcaactacagatactttgaagtagaagaagctgatgatgctgagatgaatcgtcacctgtgtgtttgg

SEQ ID NO: 439612 - DNA, 100 bp, Homo sapiens
atctaaaatttttggtattgcagatgacgttgactatagtcaatggggccaatggagccaagtgtatggaaacccacaacagtatggacagtatatggca

SEQ ID NO: 439613 - DNA, 101 bp, Homo sapiens
cgaggagaatggagaccaaacctgtgataacctgtctcaaaaccctcctcatcatctactccttcgtcttctgggctggtgtgcaatggcgtgatctcagc

SEQ ID NO: 439614 - DNA, 74 bp, Homo sapiens
gccacgcctggaacaaggaccgcacccctccagtcactgaaagggctaaactgatttccttgccaactagtaaa

SEQ ID NO: 439615 - DNA, 98 bp, Homo sapiens
cgacgcaaaccaaggatctggggatcttcgcactatcccaaggtaatacattgcatgcaactggatcctgcaagaatcatttatcaggaaattctctt

SEQ ID NO: 439616 - DNA, 82 bp, Homo sapiens
ccctgcagtacctgcagaaggtctctggagacatcttcagcaggctctgacgcccgctctgcggcttcggtgtttgaacagg

SEQ ID NO: 439617 - DNA, 75 bp, Homo sapiens
atcctgagacccggacagtggcagtgaaacaggtctctggacctctgactgacactgtgcctgcccaggtccctg

SEQ ID NO: 439618 - DNA, 100 bp, Homo sapiens
ttctacagcaccatggggcgccttacccaggagatgctagagaatgatcttctgcaaagccatgaactcatgcaggttttgggatttgagattgacgcgg

SEQ ID NO: 439619 - DNA, 75 bp, Homo sapiens
gggtgccgaaaatcgctgaatttacgtggacagaggactgcagaaaatcaacctatcctccttcaggaccaacgt

SEQ ID NO: 439620 - DNA, 106 bp, Homo sapiens
tgcttattgaaatgaagagggagtttgcaagctgaaaagtggatatgagctaccctggaggaattttttcttggttaatttggagtggcccctggagtcagtttcc

SEQ ID NO: 439621 - DNA, 51 bp, Homo sapiens
tccgcgcccggccggacccgggcccgagtggagatggggtttcaccatgtt

SEQ ID NO: 439622 - DNA, 100 bp, Homo sapiens
gacgcatcaggggtccagctcaaggctcctgacagagatcatcaatgctgtggtactgttgattttattgagtgccctggctgatccggatcagtataac

SEQ ID NO: 439623 - DNA, 75 bp, Homo sapiens
ttgggcgccccggacgagagctccgtgcgggtggctgtcaggtatctgcagttttcaggacctggcagaaattct

SEQ ID NO: 439624 - DNA, 100 bp, Homo sapiens
aaagacgatggagggcagcgaagagagtcaccgaccatgacgggttgtgaactaaaggccgacaaagattatcactttaaggtggataatgatgaaaatg

SEQ ID NO: 439625 - DNA, 99 bp, Homo sapiens
ctctcctgatctggcctcatctgttccagggaggtgggattgaacgttttggaataatgggactctacaaaggccttgaagccaaactgctgcagacag

SEQ ID NO: 439626 - DNA, 83 bp, Homo sapiens
gggacgcgggtcgcgtcgttgtcctccgcgagcgtccggattgcaggtcagcccaaggccaaccccactgtcactctgttccc

SEQ ID NO: 439627 - DNA, 83 bp, Homo sapiens
caataagagcagaggatggaacacttcagtgcattcaaggcattttttactgtctacagaaacttattgtaattcatttttcc

SEQ ID NO: 439628 - DNA, 83 bp, Homo sapiens
cctagctatccagacagagcagctaccctcagctctagctgatactacagacagtacaacagccccgacacgtctctgctact

SEQ ID NO: 439629 - DNA, 80 bp, Homo sapiens
tgggaaggccatttgatctcaggagaatcgttggtatttcatctgaaggaaaacgccacaggtcatcatctggatcatcc

SEQ ID NO: 439630 - DNA, 90 bp, Homo sapiens
ctctctcatcgaggcccaaaccgccaagcacccaccaaggctccggatgtgttccccatcatatcagggtgcagacacccaaaggataac

SEQ ID NO: 439631 - DNA, 82 bp, Homo sapiens
gcctgttggaggaactggcccggaaacaggaggacatagcctgggctggaagctcttctacgtcacaggctgcctgtttgtg

SEQ ID NO: 439632 - DNA, 75 bp, Homo sapiens
cttatggcggcgctggagagggggcgctgagctgttggggactctggactgtcttcacactaggtggtgtgggca

SEQ ID NO: 439633 - DNA, 83 bp, Homo sapiens
ccgttaagtcccccaaagatgagatttacctgtgagatgtttcatcccaacaggtcatgaaactagtgccttgttaatactgg

SEQ ID NO: 439634 - DNA, 100 bp, Homo sapiens
gaaggagctggcggacatcactttagaccctccacctaattgcagatgcctgtgaggagccaccaacatttgaagctatggagctcattggtaaaccaaa

SEQ ID NO: 439635 - DNA, 75 bp, Homo sapiens
accgctcctgggacgtgccacagatcccatcagaggcaccccagacacaggcctacttggaagtgcaccagcagg

SEQ ID NO: 439636 - DNA, 82 bp, Homo sapiens
tcgcggtgggtcctcgcttgcagttcagcgaccacggtggatccataaagaacccagccaacccgcagagggaggggagggg

SEQ ID NO: 439637 - DNA, 50 bp, Homo sapiens
gacgctaagcggggtaggggaaggagcggcctattgccaattcatggaca

SEQ ID NO: 439638 - DNA, 50 bp, Homo sapiens
cctagccctaccggactacgagtatctggaaaagagtagttgaacagcta

SEQ ID NO: 439639 - DNA, 100 bp, Homo sapiens
agacaccagctccgaaatcaccaccaagtaaaatgtttattggaggcttgagctgggatacaagcaaaaaagatctgacagagtacttgtctcgatttgg

SEQ ID NO: 439640 - DNA, 74 bp, Homo sapiens
ataatgagtgtgttgcacagacatggtttcgctttttacacatgttaaggctaaagtaaataatgccagcctga

SEQ ID NO: 439641 - DNA, 101 bp, Homo sapiens
gaaattcctcggagctttcgtcacctgtccttctacattttcgatagagacgttttccggagggattccatcataggggcagtggaagccgttggagggcc

SEQ ID NO: 439642 - DNA, 50 bp, Homo sapiens
ccagaagctacatgacccctaaacgtagagacggagtttcaccgtgttag

SEQ ID NO: 439643 - DNA, 88 bp, Homo sapiens
actcgtgcctcatggatccaaattaaagtgtcgagttatagcagtgctggattgggagctgtcaaccattggtcatcctttgtcagac

SEQ ID NO: 439644 - DNA, 75 bp, Homo sapiens
agtgaccgagaccgcggccgggaccgaggtatgacgccgtgcccatccagtccagcgtggtgttatgttcctgcc

SEQ ID NO: 439645 - DNA, 74 bp, Homo sapiens
gtgtggtagaagttgtggaggagacaattaaagactggatgttgaatttgttctctcagcacctatttctgaat

SEQ ID NO: 439646 - DNA, 75 bp, Homo sapiens
cctgggttgctgataaaactaaaggatgcctttgtggaactgtacggccccagcatgcggcctctgtttgatttc

SEQ ID NO: 439647 - DNA, 98 bp, Homo sapiens
gtcgcagttcttgtttgtggatcgctgtgatcgtcacttgacaccattcgcttttcacccaagatgatttgatgtcttataaaactctgatgaaccat

SEQ ID NO: 439648 - DNA, 100 bp, Homo sapiens
ccggagtacgtcgttcccgctgcgctaggggaagcgggcagtccagttacaacacagggatcacaacaaacacaaccgccacagaagcactatggcatta

SEQ ID NO: 439649 - DNA, 87 bp, Homo sapiens
gaaggtgctcaattcccatacatgcactagaggagcctccagaagatgatgcaaacatcattgagaagatcctggcatctaagactg

SEQ ID NO: 439650 - DNA, 74 bp, Homo sapiens
gattggccatttcaagagagcgagacatctgggccctcacagctctggatgagggggatattgccttgttgaaa

SEQ ID NO: 439651 - DNA, 75 bp, Homo sapiens
tggagttgccatctatgttaatggatacacagagtcttcctaatattctcaccgatgatcgatttaaagttatgt

SEQ ID NO: 439652 - DNA, 113 bp, Homo sapiens
agacaaacagcccgcccgaccccgtcccgaccctggccgccccgagcggagcctggaggttttaaaatcaaagatgggaaaatcggagaaaattgcccttccccatggccagc

SEQ ID NO: 439653 - DNA, 102 bp, Homo sapiens
ctccgagcccggcgggaccatgttcaccagcaccggctccagtgggctctgtgttacacataatattgcattacttcgagaggtgataatcaactcacgctt

SEQ ID NO: 439654 - DNA, 100 bp, Homo sapiens
cggacatgctgccaacgacgcgagggtgaggtggctttgaccccgggttgcccggccagcacgaccgaggaggtggctggacagctggaggatgaacgga

SEQ ID NO: 439655 - DNA, 77 bp, Homo sapiens
tccctgacctggtcctcatgctgccgaggctgttgctgttgatctgtggtcaatgacgctacctatgagattccaga

SEQ ID NO: 439656 - DNA, 100 bp, Homo sapiens
gaggaagaacatgcatatttgggtccaactgtgaagccagatgataagggtgactatgaccagagcaggaccaaagtgctgcacatgagcctgaacccca

SEQ ID NO: 439657 - DNA, 100 bp, Homo sapiens
ccttcaaagatgtgagagagaaaagtgagtttattctgaagagcatccaggaacagcatctgttgcagttgcaggtctccttgcagctcttcgaataacc

SEQ ID NO: 439658 - DNA, 75 bp, Homo sapiens
cggcggtgaagaaggaagggggtgctctgaggaaatgattgaagccatccgcgaagcggtggtctacctggcaca

SEQ ID NO: 439659 - DNA, 75 bp, Homo sapiens
gcagagtcggcacctgaaggacatggagaatgatatggaacctagcaaagctgttccactgaatgcatctaagca

SEQ ID NO: 439660 - DNA, 75 bp, Homo sapiens
atatgggcatacagagggacacacggaggtctgttttgatgattctgggaggtagaacctctgctagccagacaa

SEQ ID NO: 439661 - DNA, 50 bp, Homo sapiens
caaaaatttccacccaaatttgtgcaggatcattttacttctccagatga

SEQ ID NO: 439662 - DNA, 83 bp, Homo sapiens
aggcgcctctgccctgcacgtggctgctgccaagggctacattgaggtgatgagaaatgaagctgttgtcatttctggaagga

SEQ ID NO: 439663 - DNA, 85 bp, Homo sapiens
cgtgccctcccgctcggccccgccagcagcactgtggaggccgtcctcggtttggtgcacctcgatttggaggaagtagggcagg

SEQ ID NO: 439664 - DNA, 75 bp, Homo sapiens
tgagcgcccatatgggggttctggagagcggggtgtggggcagcctgccgcctctcattgtgtatgaccggaatg

SEQ ID NO: 439665 - DNA, 75 bp, Homo sapiens
acgaggcaaggagctaaagcagcgtgcgttcagccctgggctggtactcctggttaatcaacagcttcgtcaacg

SEQ ID NO: 439666 - DNA, 50 bp, Homo sapiens
tctgagtaaggagtttgtggctgatgaagggctttgttatgcacctaaag

SEQ ID NO: 439667 - DNA, 100 bp, Homo sapiens
cagcgaagagaaggagctgaccctcacagccaccagcgtaccctctttcatcaaccatccactgggcatgaaagatggccagaagataacattccatggt

SEQ ID NO: 439668 - DNA, 82 bp, Homo sapiens
cctgccctctcgctttccctctcgcgtctctggctgcaggaatactcccccagttgcaagaggcgcaggaccgtggaagact

SEQ ID NO: 439669 - DNA, 80 bp, Homo sapiens
gcaaactgggagacagctgccatccactgactcgtaaagtaccttaacatggggaatcttcttaaagttttgacatgcac

SEQ ID NO: 439670 - DNA, 50 bp, Homo sapiens
agaaaaggcctaagaattttggcattggaacgacaatcgagtggttagaa

SEQ ID NO: 439671 - DNA, 90 bp, Homo sapiens
caaacatcttccaccacagcttagagaataatccagaatggctactctgatctatgttgataaggaaaatggagaaccaggcacccgtgt

SEQ ID NO: 439672 - DNA, 101 bp, Homo sapiens
cttggtttcccgcacaaggcagcaggattgcccatgaatgaacatgggtgaaatcgttggatacaggctggagtgcaatggtgcgatctcggctcactgca

SEQ ID NO: 439673 - DNA, 88 bp, Homo sapiens
agacacgggtgaatgctgctaaaaacaagactggggctgctcccatcattgatgtggtgcgatcggtcgccccacggctgaattctcg

SEQ ID NO: 439674 - DNA, 50 bp, Homo sapiens
attaaagttactgctgttaaaaagccaaagggaaaggacagtcccaaacc

SEQ ID NO: 439675 - DNA, 99 bp, Homo sapiens
atgacatgaccaagatgcccgagtgctacttctactccaagttcgatgacttcctgctgtacctggaccctcactactgccagcccactgtggatgtca

SEQ ID NO: 439676 - DNA, 103 bp, Homo sapiens
ctcagacctgccaatttaccagagataattgataacaccctgtaacagctgattccactcttgtcctggggacccagctttaactttagcatctggtatgttg

SEQ ID NO: 439677 - DNA, 100 bp, Homo sapiens
gaaggctgttcttcagtggaccaagcatgatgattcttcagataacttctgtgaagctgatgactggcacagcctccaggttggcgggctcatctgcgct

SEQ ID NO: 439678 - DNA, 83 bp, Homo sapiens
cgcggggggaggcgggcaggggcccatgcccagggtcagatactatgcaggaactgtggctgcaccatctgtcttcatcttcc

SEQ ID NO: 439679 - DNA, 99 bp, Homo sapiens
ccgtatgctgagaacctggagcaggaatgcggggaagctggtagcagcaattgcagagacagatgaatctgcagaatcagaaggtgtaattgattctca

SEQ ID NO: 439680 - DNA, 100 bp, Homo sapiens
gctgcctggacgacgtgaaggagaaattcgactatggcaacaagtacaagcggcgggtgccccggatccagcacacggaagacatggagaacgagatcga

SEQ ID NO: 439681 - DNA, 75 bp, Homo sapiens
tccagcgggcctggactgtgggctggtgtgtggaactggcatctcgtccccggtgaagaagacagagatggacaa

SEQ ID NO: 439682 - DNA, 100 bp, Homo sapiens
tttttattacagaagaagattatcaggcccatttgtctcccctgcaccgagggaacaactcgagctttgaggcttcctccaactaccacttgccagcaac

SEQ ID NO: 439683 - DNA, 100 bp, Homo sapiens
ctgttccttggccatcccaaagctattctgggggcaacagaggaacttgacctgccaattttgaaagtggctgctccagagattgtgtctggagtatccg

SEQ ID NO: 439684 - DNA, 75 bp, Homo sapiens
gtgctgtctgggcttcatagcattcgcctactccgtgaaggtcaaaatgcagatcttcgtgaaaacccttaccgg

SEQ ID NO: 439685 - DNA, 99 bp, Homo sapiens
agcacagcaggacaccaggacctggcctgaagacatttcctctcctcccctctggatttctcagagataatatcgtctactgcattatttttggctgca

SEQ ID NO: 439686 - DNA, 82 bp, Homo sapiens
agtggaataaatggcgtccaaagtcacagatgctatagtctggtatcaaaagaaggtatttgtaccgcatctacaccttttg

SEQ ID NO: 439687 - DNA, 75 bp, Homo sapiens
atgtgatgttggagaactacagaaacctggtctccctagggatcatggcccaagttgcaatgtccaccctccccg

SEQ ID NO: 439688 - DNA, 83 bp, Homo sapiens
ctcgcttgcagttcagcgaccacgtgagagggtccaagcctggtaagaatgtccagcttcaggagaatgaaatcagaggactg

SEQ ID NO: 439689 - DNA, 74 bp, Homo sapiens
tgagatgaaggaggacgagccgtggtacgaccaccaggacctccagcaaggtgcagcagtaccgcgtcgccatg

SEQ ID NO: 439690 - DNA, 74 bp, Homo sapiens
gacagaacagttaatcctcaatttaagcctgatctaacccctagaaacaggagaagatggtataaactggtcca

SEQ ID NO: 439691 - DNA, 73 bp, Homo sapiens
ttgagacggaccactggcctggtcccccctcatttgctgtcgtaggacttcctcgttctgcccatcttcctaa

SEQ ID NO: 439692 - DNA, 82 bp, Homo sapiens
acagtctcggagctcctggagctcttcctgcagagcccgctggtgacctggcaagagtgagccatggagctacgtgtgggga

SEQ ID NO: 439693 - DNA, 100 bp, Homo sapiens
gcattctctcctgactcttctatgctgtgttcagtcggagccagtaaagcagactctcaaattgcagacatactgtcaacatctgggactgtagttacta

SEQ ID NO: 439694 - DNA, 80 bp, Homo sapiens
aaggccatcaccacgcagaacgtcaacaccaagtgcatcaccatccccaggtggagccgccaccaaaatgcagattttcg

SEQ ID NO: 439695 - DNA, 51 bp, Homo sapiens
atgagacagggcacaccaaactccatctggattgtcagtggcttcgccccg

SEQ ID NO: 439696 - DNA, 100 bp, Homo sapiens
cactaactccctctgctaggatatcagcactaaacatcgtgggggatctcttacggaaagtaggggcgcagacggggaagcggagccaacatgccagtgg

SEQ ID NO: 439697 - DNA, 75 bp, Homo sapiens
ccctggagaccatcgacatcaacaaggatgatcggctgaatgtaacagaggaactaacgtccaacgacaagacga

SEQ ID NO: 439698 - DNA, 98 bp, Homo sapiens
aggaagatggcggatctggaggagcagttgtctgatgaagagaagatgagagaattctgtatacgactgcggaacctggtacacagtggagcaaccaa

SEQ ID NO: 439699 - DNA, 100 bp, Homo sapiens
gccgagcaacttaagaaccagattcgagtaaagagaaatgtgtatgaccttacaagtatccccgttcgccaccaattatgggagggctggccaacttctg

SEQ ID NO: 439700 - DNA, 100 bp, Homo sapiens
gtcgtgagggagtgcgccgggagcggagatatgtagcataatggcagaacctgtttctccactgaagcactttgtgctggctaagaaggcgattactgca

SEQ ID NO: 439701 - DNA, 100 bp, Homo sapiens
cggagcggtggcgtcggaggcgcgggaccgcggggagcgcgggtttgacccggagccgcgagggacgaccgggacgggacgaccctgggacagtctccac

SEQ ID NO: 439702 - DNA, 74 bp, Homo sapiens
agcccctcagcgactcagaccctgacagtgacaaagggcagctgcaatgactctccgcacggtattattgtcat

SEQ ID NO: 439703 - DNA, 75 bp, Homo sapiens
cctggctggtgcggacacaacccaatagagctccaaacgagaatggaagccgctggaggaccgtagctgcacaga

SEQ ID NO: 439704 - DNA, 121 bp, Homo sapiens
gagtatcaagaatgggtaataaaacttcaccaagacctaaaaaaccccaacaacagctcccttaggatttggaatgccctgacagataattatgggaatgtgatgcctgtagactggaagt

SEQ ID NO: 439705 - DNA, 96 bp, Homo sapiens
gagaaaagttccctcaaacagcactgaaactgtaatagaatctgagtgtgaacatggctacgcctcttcattcccgtccatgccgagcccccgact

SEQ ID NO: 439706 - DNA, 74 bp, Homo sapiens
aagaaatttccaaggtgtgccgaaggctatgcactatacgcccaggatggggaaggccaacgcattgacatcca

SEQ ID NO: 439707 - DNA, 100 bp, Homo sapiens
cctgcagtacctgcagaaggtctctggagacatcttcagcaggttgtgaccgagattcccgacgagagagactgaggggaagagaggaaggaggggcggg

SEQ ID NO: 439708 - DNA, 90 bp, Homo sapiens
gtccaagttcaaccaagccattgccttatgatgggaaatggagtaaaacaatggtgggatttgggcctgaggatgatcattttgtcgcag

SEQ ID NO: 439709 - DNA, 100 bp, Homo sapiens
gtgccaccgtcgcccgcccagcctccgcccggtttggtgcacctcgatttggaggaagtagggcagggcccttatctggaaagaagtttggaaaccctgg

SEQ ID NO: 439710 - DNA, 83 bp, Homo sapiens
ggaggagctgctggcgcccgcagatgcgggctgacgcacgaggcacacaggaaggaggtggagcaggtgtatctgcgctgtgc

SEQ ID NO: 439711 - DNA, 95 bp, Homo sapiens
taactcctccataaaaacaagtgtgtgcatctggctgttagaagaattcatgctcatccggtttggtgccctggttgtcagatgttggaaagcag

SEQ ID NO: 439712 - DNA, 87 bp, Homo sapiens
atcaaacagatgactacccagggagaggaattacgggaacagaaagaaaagtccgaaagagctgatgtattgctgtccttgaatatt

SEQ ID NO: 439713 - DNA, 82 bp, Homo sapiens
ggctgcgcggcggggctgaggcggccgcggggcccgagcgcagaggactaccccaatggcacctggctgggcgacgagaaca

SEQ ID NO: 439714 - DNA, 75 bp, Homo sapiens
cccaggtttattctcccatagcatgtgatccctttgttgatctagcaagtggccaagttcctttgcctcctgcta

SEQ ID NO: 439715 - DNA, 97 bp, Homo sapiens
accgccgcggacttcgctttgggccatgaccagcctatatatgcaaacagatttgcagtaccaacctatgcagccaagcaacctcagcagttcccat

SEQ ID NO: 439716 - DNA, 100 bp, Homo sapiens
gggaaagagccctggatggttgtgagggatgagaaaagaagatggactctaggatcgtagggcatcagaaaaacaaaaagaaatagagagagtaaaagag

SEQ ID NO: 439717 - DNA, 100 bp, Homo sapiens
agtggaggtgtcactggccccggcctttgccccaatcttgtgtgggcactgaagggggactacaggttcgagatgtccaagacaaagattttggccacag

SEQ ID NO: 439718 - DNA, 52 bp, Homo sapiens
ctggaggtgcagggccaggaggaacatgagaaaacggtattttgtctccgag

SEQ ID NO: 439719 - DNA, 80 bp, Homo sapiens
tggatccaagatggcgacggcgatgcctttctgagaaaagtctacagcattctttctctgcaggttctcttaactacagt

SEQ ID NO: 439720 - DNA, 75 bp, Homo sapiens
gacattccaggaacctctgttgccatcagcaactgtgatggtctggtacctcaataataatgagttgacagcggt

SEQ ID NO: 439721 - DNA, 90 bp, Homo sapiens
gatgaaaaccccgtagtccacttcttcaagaacattgtggtaaattcactccagcagcaacctcaggctgcatccccttcagtaccagag

SEQ ID NO: 439722 - DNA, 90 bp, Homo sapiens
ctgaggtccgcggcagggtcccgcatggcggcgcacaggaagcacggagctccttcccttaacagagctgagagaggcatctggagctgc

SEQ ID NO: 439723 - DNA, 100 bp, Homo sapiens
caggggctatttgtttggatatcctgaaagatcaatgcaagtaactggcagaagttttggtgataaagattttcggacaggtttagaaaatggaatcctc

SEQ ID NO: 439724 - DNA, 110 bp, Homo sapiens
agagacgtccaggaattcatcgataaccccaagtggtacactgacagaggtcgtggccctgaagttcatcccaaaattggggcgctcagagaaggagctgaggaatttgc

SEQ ID NO: 439725 - DNA, 50 bp, Homo sapiens
tgtgacttgactcttcaaacacaaaggtgtcgtgaaaactacccctaaaa

SEQ ID NO: 439726 - DNA, 100 bp, Homo sapiens
gttcacgaggagctgcggaacctggggctgtatgttaaaacccgggatggctctgactatgagggctggtgctggccagcctgcaagaggacctccgggg

SEQ ID NO: 439727 - DNA, 100 bp, Homo sapiens
gcctcctaagtagctgggattacagctgatgtagcccagcagttccagtatgctgtgcgggtgattggcagcaacttcgccccaactgttgaaagagatg

SEQ ID NO: 439728 - DNA, 100 bp, Homo sapiens
tggcagattctaaaacaatgaaggcaatggtggaattccgagaacacacaggttactgtgcagtatatgcaggatcgaggtgctgtgcttcccatcagag

SEQ ID NO: 439729 - DNA, 90 bp, Homo sapiens
aagttttccttcttacagagatgtgactctgtttgagttgttgaatgttgggtcacgaagatctcaacctggccaaagaagagaacccag

SEQ ID NO: 439730 - DNA, 100 bp, Homo sapiens
cacacaccacaggggatgggcaccagcagacacgcctgctcgctccaggtattaaaggtggaagaaggtccatatctttttctgtgggtgcttcaagtgt

SEQ ID NO: 439731 - DNA, 83 bp, Homo sapiens
cggactcatacagagattgaaatgttccttagaaaggagcagcagtgttatagttttgccgctggactcttccctcccttccc

SEQ ID NO: 439732 - DNA, 100 bp, Homo sapiens
gggtgcagtgtgtctggtcttatgagacatgattaacaagcaggactgtaagtacggggataactgcaccttcgcctaccatcaggaggagatcgacgtg

SEQ ID NO: 439733 - DNA, 82 bp, Homo sapiens
gctatcgtggacgtcactggccctggtggggattgacagccacgggaaggtggtgcgcgtgggcagggcgcggggacatggg

SEQ ID NO: 439734 - DNA, 50 bp, Homo sapiens
cccacggacaccacctcaacggacattctcactattctatgccttaaagg

SEQ ID NO: 439735 - DNA, 83 bp, Homo sapiens
agtaccacaacagggacacctggttccagctgcagcacgtggacgctgactcggaagtgcagaatcatattctaagaactcag

SEQ ID NO: 439736 - DNA, 49 bp, Homo sapiens
tcacgattgagtgtcaaagaaggctcccgctgctcctctccctgctggc

SEQ ID NO: 439737 - DNA, 83 bp, Homo sapiens
gtcagcaaagtgagccagcttatccaccatttacttaacagattacaggctggaacctatttgcctcagtcctatctgattca

SEQ ID NO: 439738 - DNA, 100 bp, Homo sapiens
cttacaccagatttgccaccaccttcatcatctagtcatgctgggagggctctgagagatttcatttctgtcctgctgatgaagtctacgttcattcagg

SEQ ID NO: 439739 - DNA, 100 bp, Homo sapiens
agaaggggagaagcacagaggaaggagactgtgaaagtgacttgctggaggctttccttaaagtttcccatgtctcaatggactcctgaatataacgagc

SEQ ID NO: 439740 - DNA, 74 bp, Homo sapiens
cagatttgtcatgaagaaactcaatgatcgtgtcatgagagatgaaaactttcggaagagaaagttgcctgtgg

SEQ ID NO: 439741 - DNA, 100 bp, Homo sapiens
tggcggacggggagctgaacgtggacagcctcatcacccggctgctggagggtttacccaaggtccagcctagcccctaggcaccatgtcggacagtgat

SEQ ID NO: 439742 - DNA, 98 bp, Homo sapiens
tcaaagggaatacattgccagaacttggaatactctactggacaaacatttcctccaagggttctccaaaaaatgtggaatcctttgcatctatgctg

SEQ ID NO: 439743 - DNA, 100 bp, Homo sapiens
tgtatggagaatggctggtctcctactcccagatgcatccgtgtcagtacaccaggggttggaaaaaccacactaggcaaagaacttgcgtcaaaatcag

SEQ ID NO: 439744 - DNA, 119 bp, Homo sapiens
tccgacctccggctagtgggaaaggccgcgcgaccgcccgtcctccaactacagggaccgcacggaacagatgttgttattgtaaagaatggaagaagaatatgtggaacaggaggttg

SEQ ID NO: 439745 - DNA, 98 bp, Homo sapiens
gggttggaagtcagagctgcacaaagggaaaggggtgtgctgatctgcaaaccctggacacaatgcagccaattgagaggaaaagacagggctatatt

SEQ ID NO: 439746 - DNA, 100 bp, Homo sapiens
caccaacatctagtcccttccggagagaatgggcagccctgggaaacatgtctaaagaggatgccatggtggagtttgtcaagctcttaaataggtgttg

SEQ ID NO: 439747 - DNA, 100 bp, Homo sapiens
ttatgaagtttctcaggcacataaatcctgtgaagttattattgtgttggctgcaccaattctagaagtaagctctccaagttcagactccattcttgtg

SEQ ID NO: 439748 - DNA, 100 bp, Homo sapiens
caagcgcctctactacctctggatgtgaaacatactggggagaaaccctttgagtgtcccaaatgtgggaagtgttactttcggaaggagaacctcctgg

SEQ ID NO: 439749 - DNA, 109 bp, Homo sapiens
aaattttttgctgatggagagctggaatctatgggattttcagctcgatacaatttcacacctgtgccggtggtggtgtgcacattgagccccggtatagacagttccc

SEQ ID NO: 439750 - DNA, 78 bp, Homo sapiens
cagaggaacatctgtaccctctcaacccttgtcagacccaagcagtagactttcaacttctcctcctcctccagcaat

SEQ ID NO: 439751 - DNA, 100 bp, Homo sapiens
acttcccagccttcagaactaaacgagaggtgaataccgttttggcagatgtcatcaagcacatgactccagatcgtgcatttgaagattcctaccccca

SEQ ID NO: 439752 - DNA, 82 bp, Homo sapiens
ggaggagctgtgcagccgcgaggaggcgcgggaggtgttcgagaacgaccccgagacggggttgtgtccactgtggtccccg

SEQ ID NO: 439753 - DNA, 74 bp, Homo sapiens
gacttggccaaatggacgggactattaagcacaggaagtcctggagaacctgaaggaccgctggtaccaggcgg

SEQ ID NO: 439754 - DNA, 75 bp, Homo sapiens
tgctgtcaggctacatcagcaaagggctctatcaaggcttgtcaagcagtgtgctcatcacatggtaaatcatgc

SEQ ID NO: 439755 - DNA, 75 bp, Homo sapiens
gaggaggttgcccagaagaaaaagaggatggcattccctgtggatatgctggaaaattgcagccatgaggaattg

SEQ ID NO: 439756 - DNA, 98 bp, Homo sapiens
ctacagagaactgaaatttcttcttgaagacacgtttcagcagtatgtaagaccagagattaacacacagctgtctgatttctgcatcagtctaactg

SEQ ID NO: 439757 - DNA, 50 bp, Homo sapiens
tcaacaccacctgtgatctcaaggttgataacactgatgctgaggggagg

SEQ ID NO: 439758 - DNA, 112 bp, Homo sapiens
agaatttcagcagttctctgatttttatattttattcctcttcctatccaatccctgccttttgagtccaggtgggacagccaaggggcgttgttttctgaccgtgtcttgc

SEQ ID NO: 439759 - DNA, 98 bp, Homo sapiens
cagaccctggagcctcagttggaagcagccgatccagcctgcggagcctgtggggcaggaagaagccatggatttaataaatagagaaacaatgtctg

SEQ ID NO: 439760 - DNA, 74 bp, Homo sapiens
aaccagccgaacttcagggtttccaccgttcgttcaaggaaggtgctcgggtcttcggggcactgggtcccatc

SEQ ID NO: 439761 - DNA, 98 bp, Homo sapiens
cacaagtgtcccgccgcatctccttcagcgcgagccaccgattgtacagcggccttgcaggccactcgagccctaatggtggtctccctggtgctggg

SEQ ID NO: 439762 - DNA, 96 bp, Homo sapiens
aaattagactcaaaaattggagtccttataggaaaaggccttgtacctaatagcaactaatggaaccccagaacttcagaatccagagaaactttc

SEQ ID NO: 439763 - DNA, 83 bp, Homo sapiens
catcatcctgaaacttggcagccttcgtggagtaaggggtgtttgatgcttccctcaaaatggctggcttctatggattgtat

SEQ ID NO: 439764 - DNA, 80 bp, Homo sapiens
caaatgaaagtgaaaatgttagaagaactcgtgagccggattgatgatagcagactccttgaaagcagggtccttgttta

SEQ ID NO: 439765 - DNA, 100 bp, Homo sapiens
agggttcctccttgcagccggccctggctgcccaaggtgtcccgcatgagatgtctgcagaatgagacttacagtgcgctgagccctggcaaaagtgagg

SEQ ID NO: 439766 - DNA, 98 bp, Homo sapiens
gtcattaagttgagtacagtgttggttcgacaagtggcaacagcgaacccatcctacgtgcctccaccccagtgccagccaggcgagtttgcctgtgc

SEQ ID NO: 439767 - DNA, 75 bp, Homo sapiens
gccaggctggtttcggaaatgcccttacagcagcaggttaaccccaaagattggctttccttggagtgaaatcag

SEQ ID NO: 439768 - DNA, 50 bp, Homo sapiens
ccacatttgcagctcattgaaggaaaggaggaagaacgtgcaaaacgtga

SEQ ID NO: 439769 - DNA, 83 bp, Homo sapiens
agccgcgaggaggcgcgggaggtgttcgagaacgaccccgagacgtctcacagaaagttctccgctcccagacatgggtccct

SEQ ID NO: 439770 - DNA, 100 bp, Homo sapiens
atttaattttagggtcctttatatagaagggagagtaggttgaatgatcctaaaatgtctgaaacggagcgccagtccatggaaagcgagcgtgcagacc

SEQ ID NO: 439771 - DNA, 80 bp, Homo sapiens
agaggctttgctgctgaggaaatttatttggtagattgaagtaatctcaggggcgatataatcaatgaggtggtcctaaa

SEQ ID NO: 439772 - DNA, 101 bp, Homo sapiens
ctcagtacatattcaccttgaagaggaagacggggcggaagaccaagatcatcgagatgattgctcatttagaaagtggatgtgtgggataacatgtccaa

SEQ ID NO: 439773 - DNA, 51 bp, Homo sapiens
agaggagcgtcaacagcagcaccatggctcttcacccagatcttcggggtc

SEQ ID NO: 439774 - DNA, 78 bp, Homo sapiens
gcctcccgaatagctgggattacaggtggccactaacacggacaccagccgaaatgccggaaatgcggtcctgtttga

SEQ ID NO: 439775 - DNA, 73 bp, Homo sapiens
aaattcaggatttcttaaaggatagccaattgcagtttgaggcttctctagtgatccctgaaaagttccagca

SEQ ID NO: 439776 - DNA, 75 bp, Homo sapiens
gagcaacttgatgaaggtacacccaatagagaggctgaccggttccctgatgtgttacctgcttctgctactgat

SEQ ID NO: 439777 - DNA, 98 bp, Homo sapiens
gaggacttggggaaaaaggaccacatagtccatcgaagaagagtccttggaacaagcaactggctattgaaaagattgccacggcagtgaagtttcta

SEQ ID NO: 439778 - DNA, 101 bp, Homo sapiens
agcgccgcgcgtcccgagcatggcaggctccctgcctccctgcgtggtggactgtggcaccggtatgtgcagaagcttataatcctgatgaagaagaagat

SEQ ID NO: 439779 - DNA, 90 bp, Homo sapiens
ggaggggcgaaggcgggcggcagaggcgatcaggttaatttggagtggcccctggagtcagtttcctacaccatccgaggccccacccag

SEQ ID NO: 439780 - DNA, 100 bp, Homo sapiens
gcatgactccacagtttctgcaacaacagagccggggaaaggaggacgcagcaagcgctgaatattaaccagcaaaggtcaaaatgcagatcttcgtgaa

SEQ ID NO: 439781 - DNA, 100 bp, Homo sapiens
tggatatgacttgctcgggcaaaagttgtgcattggcccgatcaagcctgacttctagccaaggagaataaaggcagccccgttgatgactgaaaatgac

SEQ ID NO: 439782 - DNA, 126 bp, Homo sapiens
ctttaattcgccaggatcttataaaacaaatgctgctgctatgaatatgggtcgaccattccaaaaaaatcgggtatttgaagtataccatacaactgttttgaaaatccagcgtggacaatggct

SEQ ID NO: 439783 - DNA, 82 bp, Homo sapiens
gcggttgggctcgcggcgagcggacggggtcgagtcagtgcgttcgcgcgagtgcagagcagagcgggcggaggaccccggg

SEQ ID NO: 439784 - DNA, 75 bp, Homo sapiens
gcaagatgtccagtaatgtcccggcggatatggtctaccctgaactgcagatcaccaatgtggtagaagccaacc

SEQ ID NO: 439785 - DNA, 82 bp, Homo sapiens
gggtgattcacgtgtgcccaggccctgaggtgggccggacctgggagtggcagaatgttgtaccatctttgggtaggcagac

SEQ ID NO: 439786 - DNA, 90 bp, Homo sapiens
cctggccccgcgcgggcggacggcggaggcgcctcccagatgccttcaattaagttgcagagttctgatggagagatatttgaagttgat

SEQ ID NO: 439787 - DNA, 102 bp, Homo sapiens
caattggagaaatctccattcaaatgggtattgatgaagatgaccctactgctgatgataccagtgctgctgtaactgaagaaatgccaccccttgaaggag

SEQ ID NO: 439788 - DNA, 82 bp, Homo sapiens
tcaggggaaggaagagcttgaggggacagtggagaagcaggagctgtgtcagcgtgttatgatgccgtcccgtaccaacctg

SEQ ID NO: 439789 - DNA, 51 bp, Homo sapiens
ggacagcctcatcacccggctgctggaggggcgacataccttctgttgaat

SEQ ID NO: 439790 - DNA, 74 bp, Homo sapiens
cgcaggcacccggcacgcgccttccccgccgccacgatgcccaagaggaaggagttgtaagacgttcatcgccg

SEQ ID NO: 439791 - DNA, 98 bp, Homo sapiens
gaaaccaccggtggccactccttctggaccccactctaacagaacccccagcctccaggaggtgaagattcaagagccactggtgtttgcggagcagc

SEQ ID NO: 439792 - DNA, 74 bp, Homo sapiens
attatgcgtgttttgacaacggagctgtgtcagagcacactgaccgaaatggaaagccagaagcagctctgccg

SEQ ID NO: 439793 - DNA, 76 bp, Homo sapiens
tgtgaagatgctgtaaaaagattgaaagctgtggatccataaagaacccagccaacccgcagagggaggggagggg

SEQ ID NO: 439794 - DNA, 85 bp, Homo sapiens
cactccccagacgtggtcagcaacgcacagctatcttgacccacccttgattcagtttaaggagaaagtgctgtggaccgctatc

SEQ ID NO: 439795 - DNA, 86 bp, Homo sapiens
gtctgccgtggacagcgaagctgctgcggttcctgagccggaggatggtgctgctccactggtgcctgctgtggctcctgtttcca

SEQ ID NO: 439796 - DNA, 75 bp, Homo sapiens
ctgcgctctgcccggcgagtcgggctctggaggaaaagaaaggcattgaatgccccagaggagcccgaaacctcc

SEQ ID NO: 439797 - DNA, 90 bp, Homo sapiens
ataccatcttcctatgcatggaaactcattatgagaaggtgtcccgacccaggctaagcttgagcatggctgagcaggagcccacagccg

SEQ ID NO: 439798 - DNA, 82 bp, Homo sapiens
gcggatctcaccgccgctcagggtggtccccaaaaagaaagagcgtaaggtggcttccgatgatgacatctctgagcaggac

SEQ ID NO: 439799 - DNA, 83 bp, Homo sapiens
gcgtgggggaccggctgttggcggcccagctcaacattggcaatgtgctccctgtgggcaccatgcctgagggtacaatcgtg

SEQ ID NO: 439800 - DNA, 95 bp, Homo sapiens
cttcatcaccatctccaccatcggcttcggtgactttgtggccgcaattctgtggtgttcttggtcacacatttatggagtttctgaagggcagt

SEQ ID NO: 439801 - DNA, 82 bp, Homo sapiens
tgaacttttcgaggcatttgacttgtttgatgttcgtgactttggaaagatctgtctatggcagtgcagaaattttcccagt

SEQ ID NO: 439802 - DNA, 83 bp, Homo sapiens
aacaaattcatcccagaaatctaagagagtgggaggctaagcaaagaactggatttagtaagtcaccatgtgaggacaaaact

SEQ ID NO: 439803 - DNA, 90 bp, Homo sapiens
cctccgggagcacttcgagaagctggagaaggtggaagttaaacgagctgagcctcgggacagcaagagccaagcgccgggacagccagg

SEQ ID NO: 439804 - DNA, 100 bp, Homo sapiens
aactgccaaagttcaccatcctccaaacaagtgaagctggttggaaggaaaatcatgcaacattcatgagcgaactaaaaaatcttcaggcttctggact

SEQ ID NO: 439805 - DNA, 100 bp, Homo sapiens
ctctgagcctcgatagctctgatagcatggagaccagcatctctgcttgctcaccagacaacatctctagaattcttccatctctatgacaacaagccca

SEQ ID NO: 439806 - DNA, 100 bp, Homo sapiens
aaacaatgaagattatttacaatgctaccctgctttttctggtgtcctgaacctggaagttgtgctttttaaggccttcactattctgtgtgatattttg

SEQ ID NO: 439807 - DNA, 100 bp, Homo sapiens
ccacaataaaagagacctctacttagctcagcaattcttaccttgaatgcttccggatcccaagaacactcacatcgtcatcagctggatgatcgcacag

SEQ ID NO: 439808 - DNA, 80 bp, Homo sapiens
caaaaccagcgtggcggccgcgctctcttccaggacatcaagatcatgtttgagaccttcaacaccccagccatgtacgt

SEQ ID NO: 439809 - DNA, 83 bp, Homo sapiens
cactgctccagattactatgtcggaacagctggatttacctgtgagacaggcagagagtggttagatacattctcaaacaaga

SEQ ID NO: 439810 - DNA, 83 bp, Homo sapiens
ctgcagaaggtgatcaggaggttttagacagcgtgtgccaagcagatgagaattcagggagccaagagaaaggctgtatcagg

SEQ ID NO: 439811 - DNA, 75 bp, Homo sapiens
gcgcctccatctgggccatggatggctgaagtgagtagtgaatatagtatggacaaggcaatggttgaatttgct

SEQ ID NO: 439812 - DNA, 75 bp, Homo sapiens
gatattatagatattcagaagaaggatgctgttaaaaggggtgctacatccattgtgtacagatgcaaacagaag

SEQ ID NO: 439813 - DNA, 100 bp, Homo sapiens
agcttttgattaacaccttaataaccagcggagctgacacagccaaataaccacctgcctcaaagataatctgctcaaaagacttccatttcattctcca

SEQ ID NO: 439814 - DNA, 83 bp, Homo sapiens
gtactctttgccgtacccaccggagcctggcgcagcctccctctattaccaggtgatgatgaacagtctacacagatggctgc

SEQ ID NO: 439815 - DNA, 90 bp, Homo sapiens
tctactttgcctccttcattctactactgagagagtctcatataatggcagcaaaggctgtagcaaatacaatgagaacatcacttggac

SEQ ID NO: 439816 - DNA, 71 bp, Homo sapiens
gcatttcatccctcgtcgaaaggattggattggcatctttagagtgccgtgagcgatgtggagatgcagga

SEQ ID NO: 439817 - DNA, 75 bp, Homo sapiens
caccattggctccggtatcgtcaacacggccttcactgtcgtgtcggtcgccatgggctactcacactccttggt

SEQ ID NO: 439818 - DNA, 87 bp, Homo sapiens
caaacaccctggagacgaattcctcatttcagatctgctcggtagacctggtgcaccaccaccatgttggctgcaaggctggtgtgt

SEQ ID NO: 439819 - DNA, 103 bp, Homo sapiens
atctggaccttcagcagaaaagtatagcgtggcaacccagctgttcattggaggtgtcactggatggctaatgtaatgcttgaatatgatattgatgaagctc

SEQ ID NO: 439820 - DNA, 100 bp, Homo sapiens
agaggtgtggggtggaagtcaccagcatgaaggcgatggaggtttttgccaatccagaagactgtgtagcatttggcaaaggagaaaatgccaagaagta

SEQ ID NO: 439821 - DNA, 100 bp, Homo sapiens
tgtgcatggagctggcggagatcgaggccatccaggaaagcctgcagccctctgccattgagacccagagcagcagttctgaagagatagtgcccagccc

SEQ ID NO: 439822 - DNA, 75 bp, Homo sapiens
taaggaccgttacgtttcccggagacgagttgtactgctgtcacaggaaatggacgctggattacaagcatggca

SEQ ID NO: 439823 - DNA, 50 bp, Homo sapiens
tggcggccccacaggctctcacagctcaatctgaaattgaagtgtctgtc

SEQ ID NO: 439824 - DNA, 89 bp, Homo sapiens
cgaccgagagtcctggtgactttgaacatgctggtgccgctagccaagctgtcctgcctggaacggtggcagccgaagttaggaagcag

SEQ ID NO: 439825 - DNA, 75 bp, Homo sapiens
ctccaagacaagctcagccgaggtcaccatccagcaagccctggatgaaaacatggacctcttggaaggtataac

SEQ ID NO: 439826 - DNA, 98 bp, Homo sapiens
agagcctcagtttgtgcaggacaccgacatggaacagggactcactggggtcgacttgggaataagtgtcaagacggataatgtggccacttcttccc

SEQ ID NO: 439827 - DNA, 96 bp, Homo sapiens
aggggaacgtgtaccaccacccctctgccagttagtctacaaaccattgcagcagcaccatcaaaccagagtctgccacctttgcccagcaatcat

SEQ ID NO: 439828 - DNA, 98 bp, Homo sapiens
agagtggcagaaaggctgatgcagcaggtgattgtagagaaggctccaaaagccagggtgcctgatctggacaagaggaagtacctagtgccctctga

SEQ ID NO: 439829 - DNA, 119 bp, Homo sapiens
gctccacgaaaggcagccgcggatcgccgcgctcagcgacaaacaactccaccgggggacggctacgtgcaggcggacgcccggggccccccggaccacgaggagcacctgtatgtcaa

SEQ ID NO: 439830 - DNA, 100 bp, Homo sapiens
cacaggcgcctctgccctgcacgtggctgctgccaagggctacattgaggtgatgagatccagacatttaatgtggatgcaccatgccagaccgtggaag

SEQ ID NO: 439831 - DNA, 100 bp, Homo sapiens
tacaaatatgaagaggcattatttatgaccttttctatggaaaggttctgacaacaaaggagattgtgacatattgctgggcctaacactaaggtgatgt

SEQ ID NO: 439832 - DNA, 90 bp, Homo sapiens
gccggttatctctgtgaatctcaggcagaggtggaggagacactgaagcgactgcagagccagaagggagtgcagggaatcatcgtcgtg

SEQ ID NO: 439833 - DNA, 75 bp, Homo sapiens
tggagctcagccctccacctccacagcctgagttctaccaagtatgccacaccaaaaaggattatgaagaaattg

SEQ ID NO: 439834 - DNA, 100 bp, Homo sapiens
gtacctggacaagcacatggaggctcagcgggccgaggagtgccctctggtggtcagaagatgctgtgctgtctcgttaggatgaatggattaaaatgta

SEQ ID NO: 439835 - DNA, 83 bp, Homo sapiens
tggaccttggacattcagacttcagaatgtctcgtttcctctcagtccatccacccttcatggggccagagccctctctccag

SEQ ID NO: 439836 - DNA, 83 bp, Homo sapiens
ctcgctctccgccgcccgcaccgccgcccgcgccctcaccagatgtgaagttcatttccaatccgccctccatggtggcagcg

SEQ ID NO: 439837 - DNA, 98 bp, Homo sapiens
actttgaaaaaacaattgcagagcaagcagttgcagcagatgatccagtattcctggaagaagcagggaaagcagaaaaaattgtgatttccagatcc

SEQ ID NO: 439838 - DNA, 83 bp, Homo sapiens
ggcttacccaggggatggacattcagtgggatgaaaactttcggaagagaaagttgcctgtggtaagttcagttgttaaagta

SEQ ID NO: 439839 - DNA, 82 bp, Homo sapiens
tcgatctccgccctggggtcattgtcaggccgccatggcatcagatgaaggcaaactttttgttggagggctgagttttgac

SEQ ID NO: 439840 - DNA, 98 bp, Homo sapiens
gatgagcacttggtggcgtctgatgctgaactggatgctaaacttgaggtacctcaataataatgagttgacagcggtaccatccctgggcgctgctt

SEQ ID NO: 439841 - DNA, 82 bp, Homo sapiens
gcgtcaagaagaggaggaagccatgcgtaggacatgaagagtatttctggagaagaatcatcccatggagtgattatgacaa

SEQ ID NO: 439842 - DNA, 100 bp, Homo sapiens
gctggccttctttccccaagatttgttgatgttcagccttccagtttaagccaagtccaatgatgcatcagcagcctccttctcagcaatacaatatgcc

SEQ ID NO: 439843 - DNA, 82 bp, Homo sapiens
ctctccctgcagatcggcgatgtggtgcgaatacaggagacgtgtggagaagccccatgtgccactcccctgatctgcagct

SEQ ID NO: 439844 - DNA, 73 bp, Homo sapiens
tcattgaccctattgatggaacaactaactttgtacatagacctcagttggatgaacccattccactgtatga

SEQ ID NO: 439845 - DNA, 74 bp, Homo sapiens
taagagaagcaatgggaatttacatcagcaccctcaaaacaggaattcctcctgatcagcagagactgatcttt

SEQ ID NO: 439846 - DNA, 82 bp, Homo sapiens
aggtggagcagcagaacaagaggcagctggaacggcgggaactgtggctgcaccatctgtcttcatcttcccgccatctgat

SEQ ID NO: 439847 - DNA, 83 bp, Homo sapiens
attagaagccttacagagtgaaaaatcacgggaatggccaaatccagtgctattgaaacagcctgaagaatgcaatcttaatt

SEQ ID NO: 439848 - DNA, 100 bp, Homo sapiens
ctttgagaaattttgagtcctcgagtgaatgggcggatctcatatcttcacttggcaaactcaacaagaaacaagtggaagccggtgtctgtgttaccat

SEQ ID NO: 439849 - DNA, 95 bp, Homo sapiens
catcgatgggcggcggaaaatagcctttgccatcactgccattaaggcagcacgctggctcttctcctgaacttcctcgcctgcctggccagctt

SEQ ID NO: 439850 - DNA, 74 bp, Homo sapiens
ggcgaacggggcgagcctggaggattgtcactccaacctcttttcgctgggttacacatcattttggaatgact

SEQ ID NO: 439851 - DNA, 90 bp, Homo sapiens
cctggatgggggaccacaagatcctcatcgacaggtgtggccgacgacgatgccctcgctgaggagcgcatgcggagaggccagaacgcc

SEQ ID NO: 439852 - DNA, 98 bp, Homo sapiens
ttacagaaagagtcaacagcagtggcaacagaccatgtcgcctgaagaatggacgtatctagtggttcttcttatctccatccccatcggcttcctct

SEQ ID NO: 439853 - DNA, 75 bp, Homo sapiens
agtgaccaccagatgaaccacagcatggacgcagcttttagtttggatgctgaacagcctgattatgatttggat

SEQ ID NO: 439854 - DNA, 71 bp, Homo sapiens
gattccttatgcagagtggccgacttgccatgaagatggacctacagctaaaaaattaaagactgagcaag

SEQ ID NO: 439855 - DNA, 104 bp, Homo sapiens
cacaatgatgcccctgtgcccatcatccaccgggacctcaagtccatcaacacccaagaagatgaaaggattgttcttgttgacaacaaatgtaagtgtgcccg

SEQ ID NO: 439856 - DNA, 101 bp, Homo sapiens
atgacatcgccgccgtctcctatgttcgggatgacgctgcacacctggtggtcctgaagacaggcaacgcggtaaaaatattgcttcggtgggtgacgcgg

SEQ ID NO: 439857 - DNA, 100 bp, Homo sapiens
ggcccccgggactccctgtgccttgcttggagctgacgccgacgggtgtggaagatttccttacaagggccgtgttacatgacactgttaatgattgcat

SEQ ID NO: 439858 - DNA, 75 bp, Homo sapiens
cagcagttttcatcatctaagtgaaagctccaactaccgtgaatgtaacacatcgtccagtaactcaggtgacca

SEQ ID NO: 439859 - DNA, 50 bp, Homo sapiens
aagaccttcaagcagcgccgcaccttcggcgacgttgtggacgtttacca

SEQ ID NO: 439860 - DNA, 95 bp, Homo sapiens
tctccactgttcctggaggaatccgagaagagcagagcggagggagccccagacacggtattgttgcagcatctggcagtgagactgaggatgag

SEQ ID NO: 439861 - DNA, 90 bp, Homo sapiens
aagcgatccacaatctgttagaaagacacgatgaggcgagtggtacgacagagcaagtttcggcatgtatttgggcaagcggtgaaaaat

SEQ ID NO: 439862 - DNA, 112 bp, Homo sapiens
agacccagtgcaaagacatcaccatgaacactagcagagaatccatatgctacactgaccatgactttggcacagaccaacttctgcaagaaacatggatttgatccacaaa

SEQ ID NO: 439863 - DNA, 100 bp, Homo sapiens
ttccgtcccggacagagcccgtggtcgcgcaggcatcatggccgccctcagaccccttgtgaagcccaagatcgtcaaaaagagaaccaagaagttcatc

SEQ ID NO: 439864 - DNA, 74 bp, Homo sapiens
caccatcctggggtttgtcagcaactttggacaggtgcccaaacaggttcgagaacttgtcttggacaattgca

SEQ ID NO: 439865 - DNA, 83 bp, Homo sapiens
cgggggagcgactcatggagctgccgtaaggagctgtgactgatgagaattaaaggccatggatgaagatgggcttgaattac

SEQ ID NO: 439866 - DNA, 107 bp, Homo sapiens
ggcgggtggcatggcggagaaggatgacaccggagtttgacgaagaggtggtttttgaggtgctggagaatctggtaaaagcaccattgtgaagcagatgaggatcc

SEQ ID NO: 439867 - DNA, 75 bp, Homo sapiens
gaacacggtgctactcaaggcccgggaagatgtgaagttcatttccaatccgccctccatggtggcagcggggag

SEQ ID NO: 439868 - DNA, 75 bp, Homo sapiens
gatctaacaggactagatgtttccacagcagaggaattacagttctcaaaagtctatggtcctgtgttcaccgtg

SEQ ID NO: 439869 - DNA, 100 bp, Homo sapiens
gcgacgttggcgacgcagccaaacaacaagtttggaaaatggggtatttcctagatgagtttgtcctctcacttctggagaagatgcagacacaggagat

SEQ ID NO: 439870 - DNA, 90 bp, Homo sapiens
cttcccctttccagagagccagaaagaacatcgagagtaaacatgaggttacgatcctgggaggacttaatgaatttgtagtgaagtttt

SEQ ID NO: 439871 - DNA, 76 bp, Homo sapiens
agcagctccagcaggcgctggctcctgctcaggttgaagccatccttgtcaatatatttggtggtatcgtcaactg

SEQ ID NO: 439872 - DNA, 98 bp, Homo sapiens
ggcaaggatgtggtcgtggaactaaagaatgacctgagaaaccagcctggacaccaagtctgtgtcagaaggccacctcaagaggaacatcgtggtga

SEQ ID NO: 439873 - DNA, 100 bp, Homo sapiens
cgtgtccgagggcaccaaggcggtcaccaagtacaccagctcgaaatatatttttgccatcatggatcagtttggagatatattagaaggtgaagtggac

SEQ ID NO: 439874 - DNA, 114 bp, Homo sapiens
tattgttcagttacaagagaaactttatgtgcctgtaaaagaatacccagatttttctgaatttccagatcccatgtggggttcagattatgtgcagttgtcaaggacaccacc

SEQ ID NO: 439875 - DNA, 90 bp, Homo sapiens
ctcgatgagatcttgcagcagcacaagctgaagatgacctgatggccaaaagaaaggaagaaaatttttcctctcctaaaaatgccaaaa

SEQ ID NO: 439876 - DNA, 82 bp, Homo sapiens
aagtttctcagaatggagacattctcattgaagaaatgatagagaagctcaagaagtactttgtattgccccccaaaataga

SEQ ID NO: 439877 - DNA, 74 bp, Homo sapiens
cgagaatgaagccatccaatggatgcaggaaaactgctgtgttgttggctacatcggggagcgatgtcagtacc

SEQ ID NO: 439878 - DNA, 75 bp, Homo sapiens
ttgtttgtttgaaattgcattgacgactgattgatatcagtaaatgccattatttagtggatttggacaccatga

SEQ ID NO: 439879 - DNA, 100 bp, Homo sapiens
gggtgggagtgacccgattttccaggtggaagttgatgggtcgaaactaaatgtgaccagcacgtggaacctggcttcgcccttattgtctgtcagcgtt

SEQ ID NO: 439880 - DNA, 100 bp, Homo sapiens
cggaagtgcagctgcctcagttcttagcgcagagagaagaagaaggaggttcctgctgtgccagaaacccttaagaaaaagcgaaggaatttcgcagagc

SEQ ID NO: 439881 - DNA, 90 bp, Homo sapiens
gggctcccttcgccaaactcttcattttctctatcaggatcctcatgaccagccaaagagaagaagaattaggaagcataaatcaaagaa

SEQ ID NO: 439882 - DNA, 100 bp, Homo sapiens
gtgggtgccgtggaggcctccttcaagtgctgcagtggggccataatcgtcctcaccaagtctggcaggatgtctcagtggtacgaacttcagcagcttg

SEQ ID NO: 439883 - DNA, 101 bp, Homo sapiens
ttcagttcttctatgaatgaatctgctcccactggtattactgatcatattgtccaagaaagggataaacagcacttccagggggagaaaaaaaatcatgt

SEQ ID NO: 439884 - DNA, 75 bp, Homo sapiens
agaaaggaaaattctggaaaacgcccagagatttaatcagatatggatcagaaactttcgaagttggtagaagag

SEQ ID NO: 439885 - DNA, 75 bp, Homo sapiens
aggaatctgagggctctgacttacttgaggacccagatgatgtggtaccagttggccaaagaagagcctggtgtt

SEQ ID NO: 439886 - DNA, 100 bp, Homo sapiens
gcagcacatgcaccggcagaagccgcccatcatccacagggacctcaaggtgtgagatgcacaatgcgaaacctaggccccagcttttacaccatgatgc

SEQ ID NO: 439887 - DNA, 98 bp, Homo sapiens
aattccaatcccagttcatttttgcagttatttggcagaaaagcagagtatcagatcacaagatggctctcatgtcagttctggggactgctgttatg

SEQ ID NO: 439888 - DNA, 75 bp, Homo sapiens
gttggtgtgattagcttcgcagtctggaaagctttaggagttcacagtgtaatctgtaagtcagatgctccaaca

SEQ ID NO: 439889 - DNA, 115 bp, Homo sapiens
tgcgagccttcttcccggggcgccataaacgcccccaatttcccagctgctaaaggaagaggaagcttccatgaggcaggctgaacctgcagatatgcgcccagagatatggatc

SEQ ID NO: 439890 - DNA, 90 bp, Homo sapiens
atgaatttcctccgcggggtaatggggggtcagagtgccggaccccagcacacagaagccgagacgagtcccctttacttggtaaatcac

SEQ ID NO: 439891 - DNA, 90 bp, Homo sapiens
cttctgtgcagacgctcctcaccaaacaggaaactttaccctcccagaggtagctgagtgctttgatgaaataacctatgttgaacttca

SEQ ID NO: 439892 - DNA, 75 bp, Homo sapiens
cagcttctctcattttctttccctgcaccaactagcaggtcacaaagcctactgcctgctaatcggcaagtggac

SEQ ID NO: 439893 - DNA, 100 bp, Homo sapiens
ggtcctgctgtgcgcgctgctcagctgtctgcttctcacagatgaagaggaagatgatgatgtagtggctcctaaaccacctattgaacctgaagaagag

SEQ ID NO: 439894 - DNA, 75 bp, Homo sapiens
ttctgctgggcctgcccttcaccctctacatgctctctgatccttctgacttaccaaggaatgccttcagaattt

SEQ ID NO: 439895 - DNA, 100 bp, Homo sapiens
ctctgaagcgcacgacctccgactactttctccttcaagaatccagggcctgaaaacccagaatgaacttgtgtccatcccagagatcactgcagatgtc

SEQ ID NO: 439896 - DNA, 75 bp, Homo sapiens
gctagccggcgacttgagtgacgacgtcgagggcgaggcccccagcagtgagactggcacatccctggacagccc

SEQ ID NO: 439897 - DNA, 101 bp, Homo sapiens
aagacgatctgcacttcgcattttggcattgacatttaattttagggtcctttatatagaagggagagtagattgctgctctctgaacactatagtcgtcg

SEQ ID NO: 439898 - DNA, 76 bp, Homo sapiens
gtcattttgaagcaaattatatacacattagatcattgcatttcgccgggtttatttccgcctctggaatgcagca

SEQ ID NO: 439899 - DNA, 83 bp, Homo sapiens
cctgagcccgcccttgatcttcgctgtggcatggcggacgaggggaagtcgtacagcgatcttcgtgaagactctgactggta

SEQ ID NO: 439900 - DNA, 100 bp, Homo sapiens
gtgaggagctagagcgaatactggaagagaataaccgaaaaattgcagaagcacaagccaaactggtcctggatgcctcatcccttagtttcaacaccag

SEQ ID NO: 439901 - DNA, 83 bp, Homo sapiens
gcagtttgccatccagcaaagtctgctggagtccagcaggagccagacctgcgtcatgcgggcctgggaccgcagcaagcccc

SEQ ID NO: 439902 - DNA, 98 bp, Homo sapiens
tcggggaggagtttcatgaagagcccaaaacctattacgaactcaaaagtcaaccgctgaagagcaggtttaccgacaagactgtgaaactttcggga

SEQ ID NO: 439903 - DNA, 83 bp, Homo sapiens
ctggggcaaaaacattcaagaatgagagcgagaacacctgtcaaggtctatcagccacagtctctgcaagtttccaagagcag

SEQ ID NO: 439904 - DNA, 101 bp, Homo sapiens
atcagctctagaaagggtgtggccgttttacattggctgttttcctcacattcctcaagcaggtactccaaagattcaggtttactcacgtcatccagcag

SEQ ID NO: 439905 - DNA, 74 bp, Homo sapiens
ggagaccccgcgccgacggctgctcaaacatcagggcagttgtgaaaaacttcaggacaaaaatgtttcattta

SEQ ID NO: 439906 - DNA, 87 bp, Homo sapiens
gagagggaaaaggacgccgcggtcttcccaggcgtcgcggagagcagagaaacagcacccaggactatcttccaaagagttctggat

SEQ ID NO: 439907 - DNA, 98 bp, Homo sapiens
cgtggaggtcgacgactccgtcgcagactacggacctgtctgggtctcagccgccaaagaccccgtccgcctgccctcaagtatgtgttgtatacatt

SEQ ID NO: 439908 - DNA, 99 bp, Homo sapiens
caacgaatcatccacgcacctgcagctctgctgagagagtgcaagccgtgggattattcagagctgggagagcttcccccacgatctcctttagaacca

SEQ ID NO: 439909 - DNA, 82 bp, Homo sapiens
atgtgcatcggtacatgaagatagaggtggagaagagcgagtacttgagaaagaagaggaagaagatgatgatgaagatgaa

SEQ ID NO: 439910 - DNA, 82 bp, Homo sapiens
cagcagcatcagacacatgatccgcaagaacaagtaccgccccgacctgcgcatggaacctcactctggagcctgagatcat

SEQ ID NO: 439911 - DNA, 75 bp, Homo sapiens
tggaaatgaaaatggagagttctacctacgaggttattggggctgtgccatcggcaaagccaggcaagctgcaaa

SEQ ID NO: 439912 - DNA, 100 bp, Homo sapiens
agcagttgtctgatgaagagaaggtctgtacctcctgcgttcccaacagggagtacgtgcgggtgttcgatgtgacggagcgcactgccctccacagaca

SEQ ID NO: 439913 - DNA, 100 bp, Homo sapiens
tgatgccacaaacattctcaacaagctgcgggctcggcatgcccaggtttacatgttccaatatgattccacccatggcaaattccatggcaccgtcaag

SEQ ID NO: 439914 - DNA, 73 bp, Homo sapiens
aaagtccaacagtcagtttaattatggatttggagttccatggagtgatgagattttattttcaagataaagc

SEQ ID NO: 439915 - DNA, 49 bp, Homo sapiens
ctttgtgagcctcagcctgcagttctgcctgagctacccggtgttcaaa

SEQ ID NO: 439916 - DNA, 75 bp, Homo sapiens
aggtgttcccctgcagtttgacataaacagtgtcggaaaacagtggtaaatcatccctgtgcaacaagggctaat

SEQ ID NO: 439917 - DNA, 75 bp, Homo sapiens
ccgcctgcctccgccggctacagcgggaagagcgtaatctatgccagcaattatgacaatgttagcagaccatgc

SEQ ID NO: 439918 - DNA, 101 bp, Homo sapiens
accccttcatgcccaaatcccggaaactccagcgtgtctccagccgtggctggagcattggatttgctaaaggagcttaagaatattcctatgaccctgga

SEQ ID NO: 439919 - DNA, 82 bp, Homo sapiens
aacggatctgtgtgcccacagctcctggagccccacagacaatgcagatcttcgtgaagactctgactggtaagaccatcac

SEQ ID NO: 439920 - DNA, 50 bp, Homo sapiens
cactgtcaccaagactgacaagaagcggagaacagccttgggagtcatct

SEQ ID NO: 439921 - DNA, 75 bp, Homo sapiens
cttcttgaggttctgggggccagaggagaactggacataagtgtgtgcttcactttaaaccgtgtggattatttg

SEQ ID NO: 439922 - DNA, 73 bp, Homo sapiens
tttactattgatggccccctgtgcttgaagaatgtacagtctatgtttggtggcagcatggaacctgcatttc

SEQ ID NO: 439923 - DNA, 100 bp, Homo sapiens
aaggtctggtcggatggggcaggatggctgcgttgacacgtcttatttaatccacatcataggaacgtgttgtgggctttcacgtactgggtccaaatgc

SEQ ID NO: 439924 - DNA, 75 bp, Homo sapiens
gtttgcgacgttccctcagcctctgcccaaagaaagaaggaggtctgcaaagaaagcagagttggaagaaaatca

SEQ ID NO: 439925 - DNA, 83 bp, Homo sapiens
cctggaaagagagtttccagcagttggaattcctcctgatcagcagagactgatctttgctggcaagcagctggaagatggac

SEQ ID NO: 439926 - DNA, 74 bp, Homo sapiens
ccagctgtccgtgcagcccatggtcatcgctggccagacagatctgaacagaattaagacgaacgagctttcac

SEQ ID NO: 439927 - DNA, 82 bp, Homo sapiens
cggagttggcgtcccttctccctctccgagtgctgctcctgtcattgtggccatggacggagggtgtgaagacagagaatga

SEQ ID NO: 439928 - DNA, 101 bp, Homo sapiens
ggcgaaaggaagcaagcagttcagaagagccaaggaataaacatgcaatgaacccaaaaggaagaagctgggaccactctgaagagttacctagaagcacc

SEQ ID NO: 439929 - DNA, 74 bp, Homo sapiens
cccgggacgacgagtacgactacctattcaaagcattttgaaagcgaagcagaagccgtagaatcagcggcgag

SEQ ID NO: 439930 - DNA, 75 bp, Homo sapiens
ctgtgcgagagcctcctcacttggacccaacatgagtgaagtttcctgcaagaaacgggacgactatttggaatg

SEQ ID NO: 439931 - DNA, 82 bp, Homo sapiens
caatcctcacgattgagtgtcaaagaagggttttcagagaaagatgctgatgaggtgaaaggaatttttgtagataccaact

SEQ ID NO: 439932 - DNA, 51 bp, Homo sapiens
aagtttgaagattggctttgtaacaaggtgaaagcaaacctcgagaaggca

SEQ ID NO: 439933 - DNA, 75 bp, Homo sapiens
tgcgggtcgcttggaggggaaggagccgcgggagctgggatctagcaattgggaggcagcagacttgggtaatga

SEQ ID NO: 439934 - DNA, 75 bp, Homo sapiens
ttcgttgcttgcttgcctgtgcgcgcgtgcgcggacatggcctcaaacggtggccatggtggaggtgcagctgga

SEQ ID NO: 439935 - DNA, 129 bp, Homo sapiens
tgctgagctggttggccctgtgatccctcaagactggtccacggagtgtatgaccacaaacagccatcaaggtttccaatacttatctacaggaatcgccatgaccccagctctgagggaggcaacagc

SEQ ID NO: 439936 - DNA, 80 bp, Homo sapiens
tccccatgatgcttcaggagcagtatgcctatgaaaagtcggaattgagatgggcgattggcaggaagtctgggatgaga

SEQ ID NO: 439937 - DNA, 101 bp, Homo sapiens
gccggatagacctattggatatggagcctttggtgttgtctgtttagaaacctgctgaagtggtatgctaaggagttcaaagacccactgctacaggagcc

SEQ ID NO: 439938 - DNA, 100 bp, Homo sapiens
agattgtgttactcatgatctgcttgactgtgagtgtacaggagaagaagttcatacaggactcaacgatgactctgaataatgtcaccatgcgccaggg

SEQ ID NO: 439939 - DNA, 100 bp, Homo sapiens
ttgatattacaaccagtgacactgcaggtttcccaggcagctgcagacttgaaacagttctgtctgcagaatgctcaacatgaccctctgctgactggag

SEQ ID NO: 439940 - DNA, 82 bp, Homo sapiens
gccggagcgggcggctgagacaaaggcgacggtatgatctcgtgaaatcttgagagaaactgaatgacgaatgaaactattg

SEQ ID NO: 439941 - DNA, 100 bp, Homo sapiens
tgcctccccagttcaagtggttctcctgcctcagcctcccgagtagctgagattacagtaatgtgtgtggctggtattggacttgttgtattattcttca

SEQ ID NO: 439942 - DNA, 82 bp, Homo sapiens
aggagctgtgcagccgcgaggaggcgcgggaggtgttcgagaacgaccccgagacgccgaggcctgcctggagccccagatc

SEQ ID NO: 439943 - DNA, 82 bp, Homo sapiens
gaaattctgtattgctggtcagcaacctcaacccagaggaatgtctgatcacagatacggggatggtggctctactttccag

SEQ ID NO: 439944 - DNA, 101 bp, Homo sapiens
taggcgtgagccaccgtgcctggctgaaggaactgcaagcacatgttgaccagataactgaaatggcagcagtaatgaggaaagccattgaaattgacgag

SEQ ID NO: 439945 - DNA, 82 bp, Homo sapiens
gtcctcctagaaattccccccgaagaagactcccccacatctggagtaatcaagtcagaggattatatgacttttatctgcc

SEQ ID NO: 439946 - DNA, 75 bp, Homo sapiens
acttttgaagtgcctttgatttctgggtacaggtttgcagattccgccagcagcacagcaagctctacagatgag

SEQ ID NO: 439947 - DNA, 131 bp, Homo sapiens
cttattcttacagaaccagagcctgaacacactgggaaatgccgtgtcagtggggttgttttgggatcaccccttctgtgtcattctctgaggaaaacaagttcttctcaaggaggaaagtctgaacttgt

SEQ ID NO: 439948 - DNA, 99 bp, Homo sapiens
ttgtgtcatcctccacagctccagggaaggcactcaaaagtggggggcaggaaaggttgcttctagaactgctggagttactgtttgacaagtttaatg

SEQ ID NO: 439949 - DNA, 98 bp, Homo sapiens
gagagtggcagaggagctggcggagagcggcctgcgggcgatcgggccgagatgcctgtgaggagccaccaacatttgaagctatggagctcattggt

SEQ ID NO: 439950 - DNA, 75 bp, Homo sapiens
cctctgcccccccggcaagacctcaacgcccctgacctctatatccccaatcaccggggaacccttgatccgtcg

SEQ ID NO: 439951 - DNA, 100 bp, Homo sapiens
caaccgcgaagcacccagcggctggcgcctggagcgtcttttgattcccaacttcttctggagcctggggatcggtcacactggtgcgtggtggcatact

SEQ ID NO: 439952 - DNA, 100 bp, Homo sapiens
gcagcgcctagatggctttggtcacggtccagcggtcacctacccccagcaccacctccagcccctgcgcctcggctggagcattggatttgctaaagga

SEQ ID NO: 439953 - DNA, 96 bp, Homo sapiens
cggaggttgagccgggcacagaaacacagcagcgggagcagcaacaccagcactgccaacagctgtgctccattgaagtgacttgtgaatcagcca

SEQ ID NO: 439954 - DNA, 100 bp, Homo sapiens
ggcgcctcggagcgggcggcccgggctgtagtgccggcgccgccgcgtcttcccggtctcctttcccggccgcacagggccctcgggaccaaggatcacg

SEQ ID NO: 439955 - DNA, 75 bp, Homo sapiens
gtagaagaccagaagtggatggagaaaacctctgtagaggagcaggatgcaaccgacaggctgtggccggacagc

SEQ ID NO: 439956 - DNA, 100 bp, Homo sapiens
gacaacaccgtgctcctcgaccccccactgatcgcgctggataaagatgcgcctctgcgatttgcaggtatccagctcacatagaagacattgactacga

SEQ ID NO: 439957 - DNA, 85 bp, Homo sapiens
cccacctgcccggtgcccgaggaggcagccaagctcgtagcctgccactccgtgccacatggattaattgatgtatgttgagttt

SEQ ID NO: 439958 - DNA, 98 bp, Homo sapiens
aagagccctggaatatgaagagacatgagatggtggatgaacccccaggtttgatgatcgtggacggagtgattacgatggcattggcagccgtggtg

SEQ ID NO: 439959 - DNA, 75 bp, Homo sapiens
ggaaggcaagaagcagtataagatgatctgccatgtgttcgagtcggaggatgaagccaaattggcagagaatgc

SEQ ID NO: 439960 - DNA, 100 bp, Homo sapiens
ggaaaaggagttcgagcagatcgacaagtccgggagctgggcggccatttaccaggttatagaaacattatcacgactttctcgaacacctatagcattg

SEQ ID NO: 439961 - DNA, 100 bp, Homo sapiens
ctgaggctttctaccaatgcaggccagtggaaggaagcagctagcaaggtgacccatgcattggttaatatcagcaaaacaagctatcgatcagggaaga

SEQ ID NO: 439962 - DNA, 98 bp, Homo sapiens
cagctctgctcatggctctcaaagaaccagcggacctgagtcttcaatgaaagcaaggacacccaggcccattattttcctccagcctccatggacca

SEQ ID NO: 439963 - DNA, 80 bp, Homo sapiens
gtgttagcctttcgctactgggctaagatgtgtcttgctgaatcagggctctcttatccctgccatcgacttacagtggg

SEQ ID NO: 439964 - DNA, 72 bp, Homo sapiens
aatgcaaagagtgcaaatgcacctcctgcaagaaaagcaaatcctgatcctaactgttgtcttggagtattt

SEQ ID NO: 439965 - DNA, 83 bp, Homo sapiens
cagaagccggcgtcgtcggatgttgtgttgcccgccaccatgagctacacaggtgcgcgcggagccatggttatcatgtcgga

SEQ ID NO: 439966 - DNA, 83 bp, Homo sapiens
ggaaatcgggctgaagcgactgagtccgcgatggaggaaactactttgcttcgcactttttcatgggaggagagaaattcgac

SEQ ID NO: 439967 - DNA, 51 bp, Homo sapiens
atactcaaaacatagattcatggtttgggatcttcattgccttgctgctgc

SEQ ID NO: 439968 - DNA, 75 bp, Homo sapiens
cgaggccgccgctgccgcagccttcgcaggaagttattgccagcgccattttaaacaacaaaataccagaggcac

SEQ ID NO: 439969 - DNA, 90 bp, Homo sapiens
cccccaagaaggaagtcatcatgggccggcctggaacagggagtgcatccgccccaacccttttccccctcgtctcctgtgagaattccc

SEQ ID NO: 439970 - DNA, 97 bp, Homo sapiens
ggaggtcctgccgtccatgcggaagatcgtcgccacctggatgctggagggggatatgagactttctactcggaatatcctgagtgttgcgtggatg

SEQ ID NO: 439971 - DNA, 75 bp, Homo sapiens
tttcgctatgaagagagcgacctggagcggggatacacggtaatactgcattgcatgattgtgcagaatctggaa

SEQ ID NO: 439972 - DNA, 100 bp, Homo sapiens
cagtttgacaatcagggttacttcaactcatgcaccatgaaaagctgctgttttgcaggagatcgtgaccagtcaagctacaacttcaagcagaagagag

SEQ ID NO: 439973 - DNA, 75 bp, Homo sapiens
caggaaacacaggctggaagcaagacctgacctgagggaggagatgcgctctgtgctgcggaaggcgggctcccc

SEQ ID NO: 439974 - DNA, 75 bp, Homo sapiens
ctcagagagggaagagattcagccagcacactcctcgcgagcaaggttttcccatcatatgattcccggtcctcc

SEQ ID NO: 439975 - DNA, 76 bp, Homo sapiens
ctttgtctttgcagtggtcatctatttccagtatttcagacaacttttaagaggtgcagaatcaccaacacgcaat

SEQ ID NO: 439976 - DNA, 73 bp, Homo sapiens
tggccgttttacattggctgttttcctcacattcctcaagcagagttgtaaagatgtggcacctgtggagaag

SEQ ID NO: 439977 - DNA, 101 bp, Homo sapiens
gccctgcctgggaagccgcccttcctgacccagctccactcctgcttccagaccatgcttaacagagcgttccaaaaagaggactctccagctacttttta

SEQ ID NO: 439978 - DNA, 75 bp, Homo sapiens
caccatgggactctacctggggatatacatgcatgcaccaaaacgaggacagcttagtgaaactatgaaacaggc

SEQ ID NO: 439979 - DNA, 80 bp, Homo sapiens
ggttgcggtaacctggcctgggcctgaagtgagtgagaggcacatgaagacaatgcagatcttcgtgaagactctgactg

SEQ ID NO: 439980 - DNA, 83 bp, Homo sapiens
tatcgaacagagccgggagttcaagaagaacactccagaggacccttgaacatctgtgaagaaatgactattctgcatggagg

SEQ ID NO: 439981 - DNA, 100 bp, Homo sapiens
gttccttccatcacagaggatcaatgaaggggaacaaagatttgggagcatctactttgtgccaggtgcccctcccagggtacatcgaggcctacccccg

SEQ ID NO: 439982 - DNA, 74 bp, Homo sapiens
gcggatggaagggaggagactcctgaccctcagaatgagagatggctgcccaaagattgtcaatctggggagct

SEQ ID NO: 439983 - DNA, 98 bp, Homo sapiens
caacatgcaggataagacggaatggaaactgaatgggcaggtgctggtcttcaccctcccactcacggaccaggtcttgagtcaccacgtccgaatat

SEQ ID NO: 439984 - DNA, 75 bp, Homo sapiens
ctttggttacctatgtacctgttaccactttcaaaagtaagaaccttgatgctgtccatgatatcactgtggcgt

SEQ ID NO: 439985 - DNA, 100 bp, Homo sapiens
ggcaccatgtttgttatgcagcctgcagaaccatctgcgatttccttctggttggctgtcctgcgtgggtgccaagttccacacatgatttaatgaataa

SEQ ID NO: 439986 - DNA, 101 bp, Homo sapiens
cctttatgaaccagtgtatcccaatttggctctacagcatgaccaaatggaatttatgccaggaatgcaaggttggtttaacagaaagttggccaggtgca

SEQ ID NO: 439987 - DNA, 82 bp, Homo sapiens
gtgtgatctagtaggtggaatagtcctctccaaactttgacctgagtttggatgctcttccaagagtcacatgtccaaacca

SEQ ID NO: 439988 - DNA, 75 bp, Homo sapiens
gaagaaggcccagaactctgaaatgagaatgaagagagctcagattcttgctcacttgtggcatctgggctactc

SEQ ID NO: 439989 - DNA, 100 bp, Homo sapiens
gcctacctctacaaacagggctttgccatccccggctccagcttcctgggtggccattcagggcaactggggccttcgtcagttgccccttcattccgcc

SEQ ID NO: 439990 - DNA, 98 bp, Homo sapiens
gatgaccagacaagcccggcgcctctacgtgggcaacatcccctttggcatcactgaggaatagccaggtctggctgggtcggcacaacctgtttgag

SEQ ID NO: 439991 - DNA, 75 bp, Homo sapiens
gaaagaccagatcccaggaaaatattacggggaaagttggggacatgctgctacaatacggctaatctttcattg

SEQ ID NO: 439992 - DNA, 113 bp, Homo sapiens
aaaagttgaatgatgtatttgatcctgattctacccaagtacatatgatttcagctgcaatggcagatccatccttttacaatccctgctattattcgtccattcagcgtatt

SEQ ID NO: 439993 - DNA, 100 bp, Homo sapiens
ctatcataccacactcttcagcgaccacgcaggcactttcccggtccccagacattgacgaatgccaggagttaccaggtctctgccagggtggaaactg

SEQ ID NO: 439994 - DNA, 80 bp, Homo sapiens
agatagcggagctgaagctgcgggaggcccccagccccggactggtgattgcagctggaagtgcccatgaccgagctggc

SEQ ID NO: 439995 - DNA, 82 bp, Homo sapiens
gttggtacagagggctggggagaggatgcagagctgcagttggatgaagcaattctggggtcagaagccatggagtcagcat

SEQ ID NO: 439996 - DNA, 97 bp, Homo sapiens
tctgtgtcaatgagccctgaagaacgagccagatacctggagaactatgattggtggacttgctttgtgaagagacagttcatgaacaagagtcttt

SEQ ID NO: 439997 - DNA, 100 bp, Homo sapiens
gccggagacgagaccagaggccgaactcgggttctgacaagatggccgggctgccccgcaggatcatcaaggagattcctgtcaacgtccgattctgcct

SEQ ID NO: 439998 - DNA, 75 bp, Homo sapiens
cgggccaaaggagctttcgaggagagaacggaacagatggagtcggataactgttcaggaggagatgatgactgg

SEQ ID NO: 439999 - DNA, 90 bp, Homo sapiens
atcaccttctgtggaaaggaagctgcacaggaagccgtgaaactgagccctatgagtttgtctctctggaatggctgcaaaagtggttgg

SEQ ID NO: 440000 - DNA, 90 bp, Homo sapiens
cccagctctgcagccacatactatccgtttgttcaggaaccaccagtgacagatggggttgcccagactctcaagaaaggagaagttttt

SEQ ID NO: 440001 - DNA, 90 bp, Homo sapiens
agtgaaggtcgcaccgcggcgacttggagtgtgtgtgggtgaccaaatcattatctttaaaccaggatatttatgaagaaaaattacccc

SEQ ID NO: 440002 - DNA, 98 bp, Homo sapiens
atcagcctggtcaccagcttttcggaacagcagagacacagagggcagtcatgaggatttctctgcctcttccaaacttttcctccctgaacctgagg

SEQ ID NO: 440003 - DNA, 98 bp, Homo sapiens
tcggacgtgcggggcctgggcctcccggtccgcaagcagaagcacctggaggagccgctgtccctgcaggagctggacaccagcagcggtgtcctgct

SEQ ID NO: 440004 - DNA, 100 bp, Homo sapiens
agacctgccggagccatggaggacgaagtggtccgctttgccaagaagatggacaagatggtgcagaagaagaacgcgctttatcttcaagccaggatga

SEQ ID NO: 440005 - DNA, 87 bp, Homo sapiens
aggagtacagggaagtctataagctttgcaacagaattacagagtatgataatggacagcaaattatggatgaacctatgggagagg

SEQ ID NO: 440006 - DNA, 100 bp, Homo sapiens
gcagtggcgtcctggagccctcctcagattcatgacagatgctgcccgccgagagcaggagtccctaaagaagaagattcagccgaagctctcgctgact

SEQ ID NO: 440007 - DNA, 97 bp, Homo sapiens
aagaagagcaccgacgcagacctggggcatgaccattcggcccctggtagacctgttggctgtgaagaaaaagcaagagacgaagcgctccatcaac

SEQ ID NO: 440008 - DNA, 100 bp, Homo sapiens
gatgatacttgttcgtcttttctgtccattgattctcagcctcagcaaaaagtggatgactgtgagcggtgccgggaatttttcaacaaagaagggcgtg

SEQ ID NO: 440009 - DNA, 100 bp, Homo sapiens
cccggcgccgtcgcgccactcctccgagctgcagttcatggagctcgtttcaaagggcaagatctaaaactggcatggaataaaccagtaactaatattt

SEQ ID NO: 440010 - DNA, 100 bp, Homo sapiens
tggacacggtctttcttattcaggaagctgcagtaaaggaagatgaagaagaagtttcagataagggcagtgattctgaagaagaagaaaccaatagaga

SEQ ID NO: 440011 - DNA, 90 bp, Homo sapiens
gaccaacaaattcatcaaggagctcatcaaggacgggaagtcactcataagcgcgctcaagatgatatcagaacatactgatcctcagcc

SEQ ID NO: 440012 - DNA, 100 bp, Homo sapiens
caggaaccaccagtgacagagtagcctggtagactcgtctggtcatatcctggtccctggaatctatgatgaagtggttcctcttacagaagaggaaata

SEQ ID NO: 440013 - DNA, 82 bp, Homo sapiens
gctgatgaagcttctgaaccatccacacatcataaagctttaccagatccacatctcaaagaagtggggcttcaccaagttc

SEQ ID NO: 440014 - DNA, 83 bp, Homo sapiens
tcggcgtaactatcgcctgacagggtatctgaagtaaaaggggggggatatgagactttctactcggaatatcctgagtgttg

SEQ ID NO: 440015 - DNA, 75 bp, Homo sapiens
tggccacaacttttgagcacttctatcactcctagagtggcctcagctaggtaaccaacgggagtcgacttatct

SEQ ID NO: 440016 - DNA, 83 bp, Homo sapiens
ggccgtcttcctcatccttccttttctcggggctcccgtggattgacgagatgcctgaggctgccgtgaaatcaacagccaac

SEQ ID NO: 440017 - DNA, 75 bp, Homo sapiens
tgcctgagctgagtgaggccgaggccgggaggccgtgcccggaggtggatccataaagaacccagccaacccgca

SEQ ID NO: 440018 - DNA, 136 bp, Homo sapiens
aagatgaaacaattcacatttatgacatgaaaaagaagattgagcatggggctctagtgcatcacagtgtgacgtctcagtatgttgcccaggctgatctcaaactcccagatttaagcaattcactggtctcagc

SEQ ID NO: 440019 - DNA, 100 bp, Homo sapiens
ttccctgtgtgcctgcagtttttcaccctcacgctgatgaacttgtacttcacgcagaagcacctgggttcagcaatacgtcactgattatccttcacca

SEQ ID NO: 440020 - DNA, 75 bp, Homo sapiens
caggtgtaagcgcagaaagcaggcgaacccgcggcgcaataacgaaactagatgatggccatttaaacaactctt

SEQ ID NO: 440021 - DNA, 90 bp, Homo sapiens
ccttcttcccttgcttcgacacgcctgctgttaaatacaagtattcagctcttattgaggttctactggaaggactacatcatcaaagac

SEQ ID NO: 440022 - DNA, 100 bp, Homo sapiens
tgctctctctatgagaacgactgcatctttgacaagtttgagtgttgctggaacggttcggatagacccaacatgagtgaagtttcctgcaagaaacggg

SEQ ID NO: 440023 - DNA, 102 bp, Homo sapiens
aagaaaaactttgagtgggttgcagagagagtagaggacccctatggtgtagccgtgggtggaactgtggggcactgcctgtgcacgggattggcagtaatt

SEQ ID NO: 440024 - DNA, 95 bp, Homo sapiens
tggagtggaagccttactgcataggcagttgaaggaacggagaatgctggccacagatggtgctgcccaacagataaatatcattcagggaattg

SEQ ID NO: 440025 - DNA, 83 bp, Homo sapiens
gaacaatataatgctgggcatttatcaactgctttccacttagattcagacctggtgatgcttttccttggacgatcagcttg

SEQ ID NO: 440026 - DNA, 90 bp, Homo sapiens
ggcctgtgtgcctggaaaggaattgttttggcctaggatcatccagatgaataatacggcagctagtccaatgtctactgcaacttcaag

SEQ ID NO: 440027 - DNA, 93 bp, Homo sapiens
gggcggcttcctggcctgggcgctccggtggcggcggagatagcctgggctggaagctcttctacgtcacaggctgcctgtttgtggctgtgc

SEQ ID NO: 440028 - DNA, 100 bp, Homo sapiens
caggaccccgggacaccctggaagccaggaaatgggagctgagcacataacgacttacacgttcaatactcacaaagcccagcataccttctgtaagaga

SEQ ID NO: 440029 - DNA, 100 bp, Homo sapiens
ctggggggcggcgggagctgagcgagttggtctacacggatgtcctggaccggagctgctcccggaactggcaggagtacctgcagagcttatttgtctg

SEQ ID NO: 440030 - DNA, 75 bp, Homo sapiens
tggaaaaccagttattgaatatcaagaggaggagttgttgttccggaaccccaaggcatccttgcgtgtgcggct

SEQ ID NO: 440031 - DNA, 96 bp, Homo sapiens
atcgccgctcagctttccctaaggcagccatcaaaagggccataggaaaaggatacagagtagagtttcatgaacctgaaacttggtggaaatttg

SEQ ID NO: 440032 - DNA, 80 bp, Homo sapiens
actttggagagaccatacacaatgtgagaacccagagaagaatgaggcctttctgtctattatcctcccagtccacaacg

SEQ ID NO: 440033 - DNA, 74 bp, Homo sapiens
aaagttaggattgaagcctgcatgtgggcaatgatagtaagaaatgctaaagatacagctcatacaaaagcaga

SEQ ID NO: 440034 - DNA, 83 bp, Homo sapiens
aagcgaagccttgaaaaagctgccctgagacggtgtcccgccgaaagacgcaggaggagggagacgcactgatgacatcgggc

SEQ ID NO: 440035 - DNA, 83 bp, Homo sapiens
ccgagggcaactttggaggccccctggaaggctttaggatccaggtgacttaagagattaaaattaatttggttgctgttggt

SEQ ID NO: 440036 - DNA, 75 bp, Homo sapiens
ccatgaccacctccagagctaatcaggagcagacgcctccgcctagacctgaagcctaccccatccccactcaga

SEQ ID NO: 440037 - DNA, 90 bp, Homo sapiens
gtcccctagtccctacagcagcagcagctggcgccgctctcgcagtccctacagccctgtgctcagtctcttgtccttctgcctgctgtt

SEQ ID NO: 440038 - DNA, 87 bp, Homo sapiens
gatatggcgcaactgcggcgcgacacaactcagatgggaagttcatcgcccgggcacagcggatagagtacgactgtgaactagttc

SEQ ID NO: 440039 - DNA, 100 bp, Homo sapiens
tgcccaggtccggcgacagggtctacaagaacgagtgcgccttctcctacgactctccccatcccatatcaagatggattgcccgtaatttctatgatag

SEQ ID NO: 440040 - DNA, 100 bp, Homo sapiens
ctgggagcagaagggaggctccaagacctcatcaacaattaagaatgacatctctgaaaaggagcaacgatggggagccaagaccatcgaggggtctgga

SEQ ID NO: 440041 - DNA, 99 bp, Homo sapiens
tatagtccggaggacagccccagggcagaggcctctgggggcgaatctatcagacaacctatcaattgggctgatgatgtcagtgttccagtggcttct

SEQ ID NO: 440042 - DNA, 100 bp, Homo sapiens
ggagacaggtacatgctggtcacctacgacgaacccccgtactgcatcaagccaggcgggcaccacggcaggggctgagctaccctcatggaagggagag

SEQ ID NO: 440043 - DNA, 102 bp, Homo sapiens
tattgtaaaaatacggaaaagaatggcagcggaaacgcagacactgaactttgggcctgaatggtcacggtctagatcacattctcgatccagaggaaggcg

SEQ ID NO: 440044 - DNA, 74 bp, Homo sapiens
cgtgagcatcggcgcttaccgggattaaagcctgtggtttccacagaagcaccacctatcatatttgccacacc

SEQ ID NO: 440045 - DNA, 50 bp, Homo sapiens
cccgagcagcggtggaagctgcatcaagatggtgctcatgtggaccagtg

SEQ ID NO: 440046 - DNA, 100 bp, Homo sapiens
catttgaggagaccaaccgcaccctccgagacctcctgagggaacagcactgcaaagaggattacagtcagacaatgaaattctcaaagcagctgttgaa

SEQ ID NO: 440047 - DNA, 90 bp, Homo sapiens
cccggagtccgactcgctacgcgggtcttgcgagatatctggccgcctctgccgcagctggagcaggttggcaacattgtacaagtcacc

SEQ ID NO: 440048 - DNA, 90 bp, Homo sapiens
ttgcctcatcccaggttgccttggaaaatgccaacgccgtgtctgaagaacagatacagcacgggcagcggcagtgcaagccacccacag

SEQ ID NO: 440049 - DNA, 75 bp, Homo sapiens
tgagatcgtggacaagatcatgggcaaaggacagatccagatccagacatttaatgtggatgcaccatgccagac

SEQ ID NO: 440050 - DNA, 82 bp, Homo sapiens
agccagtgtttggagaaggaggaatatttggtccctggtcagtttctgctttggtaatctgtaagtcagatgctccaacagg

SEQ ID NO: 440051 - DNA, 100 bp, Homo sapiens
cgggcagcgtgggtgagcggcgcagcggcggcagcggagagcgagagaggggagcagggtcatgtaggtacaacagcaaccaagaagatcgatgtctacc

SEQ ID NO: 440052 - DNA, 98 bp, Homo sapiens
tctgtgagtgaagacgtccacgtgcactccctgcactgctactttgttcgggcaggtatctacgagaccccagcaggcaccatcctttaccatgctca

SEQ ID NO: 440053 - DNA, 100 bp, Homo sapiens
cccgccgctggagcgcgaggacagtgggaccttcaggtgaccagccaagataaggctccggctgtaatccgcaaggccatggacaaacacaacctggagg

SEQ ID NO: 440054 - DNA, 100 bp, Homo sapiens
aagggctacattgaggtgatgagttcaaaaggtgatgacctatcaacagccattctcaaacagaagaaccgtcccaatcggttaattgttgatgaagcca

SEQ ID NO: 440055 - DNA, 100 bp, Homo sapiens
tgaagttacacccatcacagaattttcatagagctggactattggaaggttcctgggggaagccaaggtcccactccgagaggtcctcgccacccctagt

SEQ ID NO: 440056 - DNA, 108 bp, Homo sapiens
tggaaacatgagcattcagtttcttggtacagtgacaaggcgcctctgtcgaagagccttctgctggtccccagtgccctctccctcctgctcgccctcctcctgcct

SEQ ID NO: 440057 - DNA, 82 bp, Homo sapiens
cagcacactcctcgcgagcaaggaaaatgtttataggaggccttagctgggacactacaaagaaagatctgaaggactactt

SEQ ID NO: 440058 - DNA, 74 bp, Homo sapiens
tgctttgagaagagcaatgacattgggggcctgtggaaattttcaaaaaatggagtgctggcatacattgggaa

SEQ ID NO: 440059 - DNA, 75 bp, Homo sapiens
gggagagatgaagaacctgagtcaggacgtaaatggaaccctgttttttgtagcatcagatccaacagttaaaac

SEQ ID NO: 440060 - DNA, 97 bp, Homo sapiens
tcagtcccatcactccaaggagagaagagaaaatattctctttggaatgggaaatcctctgcttgacatctctgctgtagtggacaaagatttcctt

SEQ ID NO: 440061 - DNA, 90 bp, Homo sapiens
agtcggaccagtgctccgagggctcgattgttcagattccattctgtggggaaattgactgtgaggactggatcaaaaagaccactgcca

SEQ ID NO: 440062 - DNA, 114 bp, Homo sapiens
tcaatatctgtcttcggtggactccttcggcagtccacccaccgccgccgcctcccaggttaacacagaaatctgcctcctgggccatgccgcttctaaggcctgtttcttctc

SEQ ID NO: 440063 - DNA, 83 bp, Homo sapiens
cggcggcgagcccttccttataggcgtcagcgggggaacagctagcggcaagtttggtgccctggttgtcagatgttggaaag

SEQ ID NO: 440064 - DNA, 83 bp, Homo sapiens
gctgggtgtcttctccctcgccagctggtaagactttgaccccgacgcaggcttcagtgattgccgcggatcagaagcctgag

SEQ ID NO: 440065 - DNA, 101 bp, Homo sapiens
attatattccctccaattcctgatcctggcaagatttttaaagaaatgtttggagaccagaatgatgatactctgaaaaatagtagtctagtcattcaagt

SEQ ID NO: 440066 - DNA, 100 bp, Homo sapiens
ttggtctggggcaaggagtacttacggagtgacaaagggaaaagtctgctttgaggcaaaggaaaactaggtgtctgtgttcactccaggctgaagttac

SEQ ID NO: 440067 - DNA, 78 bp, Homo sapiens
tgccaggtgtccatccccgtgctgaggtatgtgacgcattcccagactcttcagccaactgagcatcagcttcttcac

SEQ ID NO: 440068 - DNA, 73 bp, Homo sapiens
tcttttgtgcaagatgagcctcaagtgcttctgcattacagtaatggagagtgaagagttcatgttgcttcca

SEQ ID NO: 440069 - DNA, 95 bp, Homo sapiens
aaggatcccgatgtgaacatgctgcacgtgtttgttctgggcgaatggcagcccatcgagacgctgaccggaaaggagattgagattgacattga

SEQ ID NO: 440070 - DNA, 100 bp, Homo sapiens
aaggccttgactatggaggcgttgccaggaaactactttccagagaaaaacagccccccatagacaacataatccgggctggtttgattccgaaatttgt

SEQ ID NO: 440071 - DNA, 75 bp, Homo sapiens
aagtcctgcgcttggggatcctctgtacgcccgttcactgatcttggccctgattgcattcatctgcatagagac

SEQ ID NO: 440072 - DNA, 76 bp, Homo sapiens
gccaagaacccccaggagcagaagtccttcttcgccaaatacgtggaagttaaacgagctgagcctcgggacagca

SEQ ID NO: 440073 - DNA, 82 bp, Homo sapiens
gtcttttgagggctaaaaaggtcctgtaagaagcggcatagcacccgtggtgcatgatgagtgatgtgtctgcaggaggagc

SEQ ID NO: 440074 - DNA, 75 bp, Homo sapiens
aaggaaggactgcagtttatacaatattgatgatgttaagaagttcaaaccgggttacctggaagctactcttaa

SEQ ID NO: 440075 - DNA, 75 bp, Homo sapiens
taaggaaagaattttctccttttggatcaattaccagtgctaagcatattggaccagctatcccagaagtcagct

SEQ ID NO: 440076 - DNA, 100 bp, Homo sapiens
tggatagatgttattcgactccttcaggcaatctgaaagcaaatcctgtttagatgcaggcgaaggttcctggtgacccaggctctcaccttaccgtccc

SEQ ID NO: 440077 - DNA, 74 bp, Homo sapiens
tgaagcctcctgcgccggccttgcctcgggtcagcccaaggccaaccccactgtcactctgttcccgccctcct

SEQ ID NO: 440078 - DNA, 96 bp, Homo sapiens
cagggaactggatgtcagcaagaatgtcttcagccaatgacttgcttgcatcagacatctttgctcctcccgtctcagaaccttcaggccaggcgt

SEQ ID NO: 440079 - DNA, 50 bp, Homo sapiens
cagccggccacggagcgcctgcagtcctgcagctcattaagtcacagaaa

SEQ ID NO: 440080 - DNA, 74 bp, Homo sapiens
atatcatttaaaccacatggctatctaaagagattataagcgccatggctatggctagtgttaaattgcttgcc

SEQ ID NO: 440081 - DNA, 135 bp, Homo sapiens
cctccaggcgctgtgcccccaggagctcgctttgacccctttggacccattgggaccagcccacccgggggcaagctctgtgtgattgattggaagacatcagagaaaccaaagccttttattcaaagtacattt

SEQ ID NO: 440082 - DNA, 51 bp, Homo sapiens
acagaacttggtggtttttgtatccatccctaccagggactcagcagggcc

SEQ ID NO: 440083 - DNA, 75 bp, Homo sapiens
ccggtgccctgctcaatgggcctccacagttcagcaccgccccagaaatcaagagtcttgctctgtcgcccaggc

SEQ ID NO: 440084 - DNA, 74 bp, Homo sapiens
gtcgcggagccgcgcagccctcggagcacgttcccagtgacctgacagcagaggagcgtcaagaactggagaac

SEQ ID NO: 440085 - DNA, 83 bp, Homo sapiens
agaacatccacagaatagacctgaagacaaaaatccagaagtacaagcagtctgagcttgtggacaaatgtataggatcaaga

SEQ ID NO: 440086 - DNA, 100 bp, Homo sapiens
accatccaggtgcccgagcccatcctccgcaagatagagaccttcctgaaccatgtcacccctcctaatttctcagtgtcacaagtgcccaacatgccca

SEQ ID NO: 440087 - DNA, 100 bp, Homo sapiens
gttgccctggaagacatttatgaaagcccaaatcacctgtacttggtcatgcagctgcattggaatggatacttgtgtcattcctttgaggcacggtggg

SEQ ID NO: 440088 - DNA, 90 bp, Homo sapiens
cggttcgggcggtcggcgaagcggccggcagtgtactaatggtcacttgatgtgcgctggctgttttatccacctactagcagatgcccg

SEQ ID NO: 440089 - DNA, 100 bp, Homo sapiens
aagagagagagtttcaagaagtgtaattgtggcttgtatcaacactgttactttcgtacattgtttttgtccagaagtgcttatagaaaagatggctaat

SEQ ID NO: 440090 - DNA, 100 bp, Homo sapiens
tcgtgttagtgaacctaaagcacccaagatagaagatggtgagatttttgcaagtattaaccagaaggacggtatggtcagtttccatgataaccctgaa

SEQ ID NO: 440091 - DNA, 50 bp, Homo sapiens
gacagatacttctcaggagtcaaagacttttttgtataacgagctctatg

SEQ ID NO: 440092 - DNA, 74 bp, Homo sapiens
ctcaaatcaaccacaagctggaggttcaaaaaggcatttgaatctgagccaacactacagtcaggaattaatta

SEQ ID NO: 440093 - DNA, 101 bp, Homo sapiens
aaagtggaagagtcctgtgccattaaaaacaacaaggaagctttcagtaagaatggatcatggcagaatacagaaaatgagctcatgtgtgcaagcctcct

SEQ ID NO: 440094 - DNA, 82 bp, Homo sapiens
ttacaagttattttctcttcttctgaaaaagagatcttggtgtgatgaatgcagactctgctaccattttggctgtttggat

SEQ ID NO: 440095 - DNA, 76 bp, Homo sapiens
tgggcgaatagctctgaccacccggcgaaggagccatgtggctagaaatcctcctcacttcagtgctgggctttgc

SEQ ID NO: 440096 - DNA, 97 bp, Homo sapiens
aacgaaagcagtgacggaggagcttgtaccaccgcacctgtgagaatatgaacttctcttggaggaatgaatgcaaccagtgtaaggcccctaaacc

SEQ ID NO: 440097 - DNA, 76 bp, Homo sapiens
gaggcacccacgctcctacaatgactggaatgtcacgtggaataccagcaaccccgacttcaccaagtgctttcag

SEQ ID NO: 440098 - DNA, 75 bp, Homo sapiens
tctggttatgatagtcgttctgcacgtgcatttccatatggcaatgctcagccagacgtccaggatcccacccct

SEQ ID NO: 440099 - DNA, 82 bp, Homo sapiens
ggaagaccgcgcgcagggcctgcagcgggagctggacggcgagcgcgagcggcgcgagaaatgtcggagatgtatgcagtgt

SEQ ID NO: 440100 - DNA, 90 bp, Homo sapiens
gatttgaccaaatttctggaagaggcttcaggcagtgatgtgtatcatcagtactatcatggagtcctgcccctccacctccagcttcta

SEQ ID NO: 440101 - DNA, 100 bp, Homo sapiens
cgcagacctctcggttcagatattcacggttccttcacttgtgtcatggagaaactccagctgggcccagagattctgcagcgggaaaatccaaggctta

SEQ ID NO: 440102 - DNA, 100 bp, Homo sapiens
atcgcctcgcgccggctgctctttccgggatgctgggcagttttatgctaaatataaagaaacaagattgaaggaaaaggaagatgcactgactagaact

SEQ ID NO: 440103 - DNA, 90 bp, Homo sapiens
agttcggccatgtcagaaggtgcattttaccttttagacagatggtcagtctggaggatgacgtggcgtgaacatctgcctggagtcccg

SEQ ID NO: 440104 - DNA, 98 bp, Homo sapiens
tggcctccctcaccttggacacctcgcttggaaaatggtgtgaatggaacattaacttcaaatgtagcagactctccccggaataaaaaagagaaatc

SEQ ID NO: 440105 - DNA, 100 bp, Homo sapiens
ccgggtgggaagaggaacagcctatgtgggcttccacggaggggctgcttgctctcggtgactacatgaatgtccagtgccatgcctgcattggaggcac

SEQ ID NO: 440106 - DNA, 50 bp, Homo sapiens
ccgcagaccccttcaagttctagtcatgtggaagtatgcgagacttaaga

SEQ ID NO: 440107 - DNA, 75 bp, Homo sapiens
gttggcctggagcctccccaggatggttgctccttgagggcaggacagttcttatggctttatccgttgcgtaag

SEQ ID NO: 440108 - DNA, 75 bp, Homo sapiens
gaaagattctggaggaaaggtttacaagcaggccacgattgaatctctgaagggggagaagcgagcggacatcca

SEQ ID NO: 440109 - DNA, 73 bp, Homo sapiens
ccctcctccagaaccgatgagtgaggagagcatgggcatgtgtttcatcgggaagaggaattttgaacatttc

SEQ ID NO: 440110 - DNA, 100 bp, Homo sapiens
gctgctggaagcccggtcctggctggcggcacctgccaggagaacaggcagtggcagtgtgaccaagaaccatgcctggtggatccagacatgatcaaag

SEQ ID NO: 440111 - DNA, 83 bp, Homo sapiens
cctgcatcaacctgatcaccagccaggagtacgccgtcaagaggagcaggagcggcttcgcttggagcaggagcgagagcagg

SEQ ID NO: 440112 - DNA, 100 bp, Homo sapiens
cggggccctctcagcaagaacgggaacaaaactctgctgtatttaaacttgaaacagatagaagtatatggcccttgataagaatctatcggggtggctt

SEQ ID NO: 440113 - DNA, 50 bp, Homo sapiens
tcccgttaaccttagccacaaagtcaaagcatttgacattgtgcagcaaa

SEQ ID NO: 440114 - DNA, 74 bp, Homo sapiens
gcaccgcaccgagggcgagctccaggtactccaaagattcaggtttactcacgtcatccagcagagaatggaaa

SEQ ID NO: 440115 - DNA, 100 bp, Homo sapiens
atcaaagtggacgaacgactactccatggtgttgacaggagctgctatttaccacaagtcattccagtagtggctcggatgatctacgagatgttttctg

SEQ ID NO: 440116 - DNA, 50 bp, Homo sapiens
agaagtcccttctgctaggacaacgagaatcggcaaggttggaaaccaga

SEQ ID NO: 440117 - DNA, 51 bp, Homo sapiens
gccggtcaggctcgccgccgagctgatgaggagcgggaaggcctcctgcac

SEQ ID NO: 440118 - DNA, 75 bp, Homo sapiens
actcattcgtcatcttctgttctccaagaaaattggctgctttgactctcccgcgaagacctttccttcactgtt

SEQ ID NO: 440119 - DNA, 101 bp, Homo sapiens
agagcaagaggaggacatggagatgaagaagaagattaacctggagttaaggaacagatccccggaggaggaagctcttcgtgggcggtcttgactggagc

SEQ ID NO: 440120 - DNA, 50 bp, Homo sapiens
caggaagtggatgcctccatttttaaggcaacacttccccagatcaaaag

SEQ ID NO: 440121 - DNA, 75 bp, Homo sapiens
ctccgcaccccggggtcccaggaagggcggcccaggtacaccaggggttggaaaaaccacactaggcaaagaact

SEQ ID NO: 440122 - DNA, 100 bp, Homo sapiens
gcactcgctgccgccgccactcacgctccactgcaacatcacgaaggatatggccctgaagccacatgagcggaaggagaagtgggagcgtcgtctcatc

SEQ ID NO: 440123 - DNA, 103 bp, Homo sapiens
agtgccttttgcctcccaccgtgattctgaggcctccccaaccatgtgcaattacaatgcagatcttcgtgaagactctgactggtaagaccatcaccctcga

SEQ ID NO: 440124 - DNA, 99 bp, Homo sapiens
cccacagtgggggtgtgcaaacccgagagaactggggtgaggtggctttgaccccgggttgcccggccagcacgaccgaggaggtggctggacagctgg

SEQ ID NO: 440125 - DNA, 75 bp, Homo sapiens
ttggaattcaagaatgatgaaactgtactaagaaaaatggctttgtcagcccaacagatacccagatggtttaac

SEQ ID NO: 440126 - DNA, 83 bp, Homo sapiens
ctcatcttcgtggggcgtgaggagtgtgagctcatgctacaggtgtccctggccagtgtccttccacctgtccacaagcatgg

SEQ ID NO: 440127 - DNA, 82 bp, Homo sapiens
cccacctgcccggtgcccgaggaggcagccaagctcgtagcctgccactccgtgcgttatcaatactctggctgaccatcat

SEQ ID NO: 440128 - DNA, 98 bp, Homo sapiens
actttagagaagacgttcatatcattgtcttccacagatgtgtcaccaaaccagtcacaaactcgcagaaccccaagtctttcgagtctcaattccca

SEQ ID NO: 440129 - DNA, 90 bp, Homo sapiens
ctgacagatgccagcgtagctgaatccagtaccaaaaacgtcaacaacagttttacgacgccaaggacttattgttgtgctaacactgaa

SEQ ID NO: 440130 - DNA, 98 bp, Homo sapiens
ggcgcttcgctgatggtgtcggtgagcgcgtttcccgcctgagcgcaactagcggcgggtcgtgggcacctccaggcaaaggaaaatgacaggccctt

SEQ ID NO: 440131 - DNA, 83 bp, Homo sapiens
ccgcatcccctcttattcaagaagcatctatagatcctgataacttaagtgactctctcttttccggtgatgaagaaaatgct

SEQ ID NO: 440132 - DNA, 98 bp, Homo sapiens
atcagtttaaccttatggccagtgatttgattgcccttaatagaagtctgccagatgtaagattagaagggtgaagccttgaaaggaaaggtcacagt

SEQ ID NO: 440133 - DNA, 102 bp, Homo sapiens
gagagaagtggatttgggagacatttaggagtttaggggaggaattgacctgggcattgaggagccatttccagggagctggggagcacagcaggaacagag

SEQ ID NO: 440134 - DNA, 100 bp, Homo sapiens
tttctgcgtcataacaaagatctagttgcgcaaactgcacagccagaccaacccaattatggatgggtcatcagttaaggaagttgaaacctaccaccgg

SEQ ID NO: 440135 - DNA, 100 bp, Homo sapiens
tgaaatgagtcttctccgaggtacaagagaaggacccattactgagattcaaccctatgaaaagataaaggccaggggcttgcctgataatatatcttcc

SEQ ID NO: 440136 - DNA, 100 bp, Homo sapiens
tgtatgccagaagaagggtttaaaggtgccacacctccctggatgatccaagatgaagaatacattgctgggaaccaagaaataggaccatcctatgaag

SEQ ID NO: 440137 - DNA, 100 bp, Homo sapiens
caggccctcgttgcccagatccctccagaatacccatcatatagcccctgaggtggcatggtgatgtctccatgagggaaccccttcccactcatcctgt

SEQ ID NO: 440138 - DNA, 90 bp, Homo sapiens
ccggaggcaggttcggctggaaggaaccgctctcgcttcgtcctacacttgcgcaaatgtctccggtgctggagaatctggtaaaagcac

SEQ ID NO: 440139 - DNA, 75 bp, Homo sapiens
ggctgcaaagtgaaaagcttgaacgaccgccgggagagcctgcccacctccccaccctggacgccgggcgcgtcc

SEQ ID NO: 440140 - DNA, 147 bp, Homo sapiens
aagtgggtgacctgcctgcgggactactgcctaatgcctgacccacacagtgaggagggagcccaggactgccagggacctggtgagcaaagagggcttccggcgggcccggcacgtggtgggggagattcggcgcacggcccaggc

SEQ ID NO: 440141 - DNA, 75 bp, Homo sapiens
ctaagaggctgctgcactgaaatatctcatcctggccttgggtgtcctggcccaaagccggccggtgtccaggca

SEQ ID NO: 440142 - DNA, 82 bp, Homo sapiens
cggaggcgttcagctgcttcaagatgaaggttggtcaaagaaaaagtgatgtatgaaaaagaggcaaaacaacaagaagaaa

SEQ ID NO: 440143 - DNA, 51 bp, Homo sapiens
cagcctggaggcacttttccagaattatatccagatcgagagacagaagat

SEQ ID NO: 440144 - DNA, 100 bp, Homo sapiens
ggaaaataccagaaagatttttagtggccccaaacggcatctaacattcacaagggaatttgattcagattctcttagacattacagctgggctgcagac

SEQ ID NO: 440145 - DNA, 100 bp, Homo sapiens
aaagtgctgggattataggcgtgagccaccgtgcctggctgaagaaaagaggcacagttagatgaagaaggacagtttcttgtcagaataatatatgatg

SEQ ID NO: 440146 - DNA, 99 bp, Homo sapiens
acggttttctgaatggaaatcaggaacaaactgctcatcactgtctggtacctgagctgcagagagaagtcagagccatgcagcaagtcctggacaact

SEQ ID NO: 440147 - DNA, 80 bp, Homo sapiens
agccgatccagcctgcggagcctgtggggcaggtcctgatgaagttgtagggccagaaggaatggaaaaattttgtgaag

SEQ ID NO: 440148 - DNA, 74 bp, Homo sapiens
acggcaggggcaggcctagtttgactctgacagtcctcccactaaggctaagtcctatcagccatggaaacacc

SEQ ID NO: 440149 - DNA, 75 bp, Homo sapiens
atgtcatccacttcgcccaacctccagattacttcagattaccaagcaacccagaaaatcacctaccgaatctct

SEQ ID NO: 440150 - DNA, 75 bp, Homo sapiens
tggagcactatgagaaggggagcagtcaggtgagagaggacagaaaaatggttcgtattgttcttacaaagacaa

SEQ ID NO: 440151 - DNA, 51 bp, Homo sapiens
tcagtctgttgatgaaactatgtctcggtccagctcgacttccagctcagg

SEQ ID NO: 440152 - DNA, 51 bp, Homo sapiens
gaggactgggtcattgtccacagaagcttcttggacacttaatgattgttg

SEQ ID NO: 440153 - DNA, 100 bp, Homo sapiens
agtcagcaactacaaggctatattccttctaactacgtggctgaggacagaagcctacaggcagagcctagccggatcgagctgggagatgtgacaccac

SEQ ID NO: 440154 - DNA, 73 bp, Homo sapiens
gttagctgaggaggtcaatttaaatggttctggcaaactgctcaagatcccgcccaatgacccccgcatcaag

SEQ ID NO: 440155 - DNA, 101 bp, Homo sapiens
gggcgaggaggctgcgagcgagccgcgaaccgagcgggcggcgggcgcgcgcaccatgggggagaaacccgggaccaggccccctcttctctcctggaggt

SEQ ID NO: 440156 - DNA, 100 bp, Homo sapiens
gggccaatatcacagccatccgcagagtccggaagacagacaataatcgcattgctagatatttgaatggtggtacttccataagcatggcacatctttt

SEQ ID NO: 440157 - DNA, 51 bp, Homo sapiens
taacggcatcctcttcattcctctcagggtttttaatgaccacaacaagca

SEQ ID NO: 440158 - DNA, 73 bp, Homo sapiens
tcaaaatggagttgccggagagacagcccaggtgtacccaggaaggatgtgggaaacactttgcatcacccag

SEQ ID NO: 440159 - DNA, 76 bp, Homo sapiens
ttccggagtcagggcgctgagggagcgttgacagggaagcagccggatggtaagaatgattgatgttggctgatat

SEQ ID NO: 440160 - DNA, 100 bp, Homo sapiens
ccgcgccgcgcctcagctctggcctctggctgtacctggcagggagcagcctgccctgtctcacgctgattggctctcctaattttgggtacaggtcagt

SEQ ID NO: 440161 - DNA, 90 bp, Homo sapiens
cgaccccagtcggtgctccggggaggtcacctgacgaggaggagagcgacttgcagttgtggaggtacagtgtgaacggctgaggatgct

SEQ ID NO: 440162 - DNA, 75 bp, Homo sapiens
ttaaaccaaagcccaaacagccaagcaaggcagactgccagattcacttacagccccagctaattccaccaaaca

SEQ ID NO: 440163 - DNA, 90 bp, Homo sapiens
gatttcatcgctgaggtggatggagaagcagctgggggccttggctgtaaggacccctaagggcaccgtctgcgtcctgctgtccttccc

SEQ ID NO: 440164 - DNA, 100 bp, Homo sapiens
tctgatggcaactgtatgatagaagctatataaagtcaagtgtccattttctttcaactatatttgagcatacccagctacttttccaggtatgtgggag

SEQ ID NO: 440165 - DNA, 100 bp, Homo sapiens
gtcactccagagaaggccatcaagctggcggccaacgactttttccggcggctgctcatggaagatgggcttctgggaacttggcagacgcagcttagag

SEQ ID NO: 440166 - DNA, 87 bp, Homo sapiens
ttgaaagtctggttaataacgagttctctagcgctagtgatgtggaatatcgttcagaaaaatctcttgaagaattgagtaaacttg

SEQ ID NO: 440167 - DNA, 80 bp, Homo sapiens
agaccctggagcctcagttggaagcagccgatccagcctgcggagcctgtggggcaggtgtccagtgtgaggtgcagctg

SEQ ID NO: 440168 - DNA, 74 bp, Homo sapiens
atcactccagctctcctggaagcagcctgcctagggtagttaaaagacgagtgaatgctctcaaaaacctgcaa

SEQ ID NO: 440169 - DNA, 132 bp, Homo sapiens
tggccgggcagcacctcccggtaccccggctggagggcgtttctcgggagcagttcatgcagcacctctacccacagggcctattccactagaagcaagatggctgaactcaatactcatgtgaatgtcaag

SEQ ID NO: 440170 - DNA, 48 bp, Homo sapiens
aactgtcaggtacctcaaagccactcactgaaaatgaccgagacagcc

SEQ ID NO: 440171 - DNA, 82 bp, Homo sapiens
gcggagggcaccccgggcgggcggcggctgctccctgggcgctgcctatggcacagccaagagcggtaccggcattgcggcc

SEQ ID NO: 440172 - DNA, 75 bp, Homo sapiens
cacaggtgtttccctctttgaatatgtcaatagtgatggattcctggatgaacaagaattagaagccctatttac

SEQ ID NO: 440173 - DNA, 100 bp, Homo sapiens
acaagatatgtgcctggatgcagctcacctccgggacctaccagggccagtgggtcggtggcatgcgccagggctacggcgtccggcagagcgtcccgta

SEQ ID NO: 440174 - DNA, 83 bp, Homo sapiens
ccattattaatctaaaagaatatgatccagatgatcatctgatagaagaggcatcgccgaatggaggctgtgcgactgcgaaa

SEQ ID NO: 440175 - DNA, 75 bp, Homo sapiens
atctctctcgctgtgagacatgtctgagactcctgctcagtgtagcattaaggactgcatcgacgtaggctggtg

SEQ ID NO: 440176 - DNA, 101 bp, Homo sapiens
tcttgcaaaccttgctttggattttatgtgctacagtctgcggaacggagcagtatttcaatgtggagcctatacggttcagacatccgagagcatgaccc

SEQ ID NO: 440177 - DNA, 75 bp, Homo sapiens
tcccttttggccagggttgaaccacctttaaaagcagtaatggaacaagctagcctgtcaactacttggtcccag

SEQ ID NO: 440178 - DNA, 50 bp, Homo sapiens
gacggaaccgccacagcactcaatgacttttttgaacgaaccattctgtg

SEQ ID NO: 440179 - DNA, 80 bp, Homo sapiens
gttttttgatgctgaggagctcctggtcgatgaagaggatgatgtttttggtgaagaatgaagaagcagtacgacgtctc

SEQ ID NO: 440180 - DNA, 50 bp, Homo sapiens
gtgacaaagttggaagtactcctaatggaggaaggaacagagccacagag

SEQ ID NO: 440181 - DNA, 75 bp, Homo sapiens
ttcttgtacagttgagatgtgcagtgttacaactccttgttatcctacgcggagagccaggtaccaatgggtgcg

SEQ ID NO: 440182 - DNA, 51 bp, Homo sapiens
aagcaagcatgcagcttactgcttgaaagttccgagagaaatatggggacg

SEQ ID NO: 440183 - DNA, 89 bp, Homo sapiens
accaagaagttcctgtagcaccttcacagtccaggcaagcgggtccatatggaatatttgctggtagggatgcctccagaggactggcc

SEQ ID NO: 440184 - DNA, 100 bp, Homo sapiens
ggagtttgacgaagaggtggtttttgagatccagtccttctgtggaacttctgaacatcttttattagtggaaatattttctacacaatgaagtcaacaa

SEQ ID NO: 440185 - DNA, 75 bp, Homo sapiens
atagatggacaagagacgatcattctgcaagcaggcaacctgaatacagctggccaaatttcgcagtctcctgtg

SEQ ID NO: 440186 - DNA, 100 bp, Homo sapiens
agtaatgtgtttgttcgtctgctgagactcggctccaaggtcacagctcgtaacactggaagtggttctgaaagatggaagaattgaaagactaaagtta

SEQ ID NO: 440187 - DNA, 75 bp, Homo sapiens
caagtctgcagagtcaccccaggacggtttggtaactgatttgaagggccattttgtaactcaggtagctatggg

SEQ ID NO: 440188 - DNA, 50 bp, Homo sapiens
tagaagacccagaggacactaaccaagcctcctgacaaggtgatccgggc

SEQ ID NO: 440189 - DNA, 98 bp, Homo sapiens
tcgtcctgtctgggtgtcgcgggccggccccgcggggagcgcccccggcgcgatgcccttcaggaaagacaaatttacatgtattggagaccagacca

SEQ ID NO: 440190 - DNA, 80 bp, Homo sapiens
gtgggaaccaactgcctcttattgccttggtctcctaaagcgtgcttttcaaaagtcggcatcagtccggaatattctca

SEQ ID NO: 440191 - DNA, 100 bp, Homo sapiens
acgccggaattgtcctttccaacatccagagctgcatcattccttggggcaaaatgtggacaagggtgtctcaatgcttgtacctactgcaaaactaaac

SEQ ID NO: 440192 - DNA, 97 bp, Homo sapiens
agaccatcaccaagcggtgagactatcacctatcgccaagtggaagctgaatatggtgggcatgatcagatagatttgtatgacgatgtcatatctc

SEQ ID NO: 440193 - DNA, 90 bp, Homo sapiens
cagcgagcgctggacggagaggaaagcggaccaagaatcgccttcagccctgtctggtgcatccttggcagaaagtgaggaggaaaacac

SEQ ID NO: 440194 - DNA, 75 bp, Homo sapiens
cacctgcgaagatgcttccctgtgcaagaggatgccaagtttgtggaggaacggagaaagcagctccagaattac

SEQ ID NO: 440195 - DNA, 96 bp, Homo sapiens
ctgggcaccagcaggacccgaggccaggagccaggggcccagaagtactatactggcaattgctggagaagattttgcaattgttgcttctgatac

SEQ ID NO: 440196 - DNA, 90 bp, Homo sapiens
ggccttcgaggctctggagtcctccacggctacggggccagcagcctcccccgatgggtcgtcagcaacgagggtgcctcaggatgtgac

SEQ ID NO: 440197 - DNA, 75 bp, Homo sapiens
cacagcgggcgccgcgtgaatgagggaataaacattcgcagaaccagtaagagatttcttcgcaagactatggaa

SEQ ID NO: 440198 - DNA, 50 bp, Homo sapiens
caaattcatcccagaaatctaagagatctcccttgagtttagaaatctgg

SEQ ID NO: 440199 - DNA, 74 bp, Homo sapiens
ttcaggagcgaagagctgcttctgtatcttaaggccatcatctctcagcaaggtgacatatttgtttttgacct

SEQ ID NO: 440200 - DNA, 105 bp, Homo sapiens
ctttgggaggctgaggcgggcggatcacgaggtcagagttgatgtccatttctgtggagttaactttggtgatattttgatctgccgtgatcaatatcaggaaag

SEQ ID NO: 440201 - DNA, 100 bp, Homo sapiens
caactttaaacagaatgacaccaaggtcctgaggtctaagagcttactcaatgagattgagagtatctatgatgaggcaacagcattattgagaaaagcc

SEQ ID NO: 440202 - DNA, 82 bp, Homo sapiens
gaggactctatacagggacgtgatgctggagaattataggaacctggtctccctggctatttgcatgcaaagaacatcatcc

SEQ ID NO: 440203 - DNA, 104 bp, Homo sapiens
caatctggtggacccctggactcctcatctgtatgctcgggagaaaatccccttcaacattcctgggatatatatctaatagtcccatatattgtgaaacttcc

SEQ ID NO: 440204 - DNA, 98 bp, Homo sapiens
caatgatgtgaaccttcgcattcagaatttgaccatcttggtgagaaacattaagacctactaccagactgaaagagcatattccttttgtggaacta

SEQ ID NO: 440205 - DNA, 84 bp, Homo sapiens
gttggaagcagccgatccagcctgcggagcctgtggggcagatgataccacgagtcaacccaaaagttgctggggagaagttgc

SEQ ID NO: 440206 - DNA, 100 bp, Homo sapiens
ctgaggactggggcctcattttggatatctgtgataaagttggtcagtctcgcactggacactacccgaagcagtccttcaccacggtggcagatacacc

SEQ ID NO: 440207 - DNA, 101 bp, Homo sapiens
ggcaaagtagaaaaacactatctcttctatgacggagaatccgtttcaggaaagagagacaagagagacacctccaacttcgacaaagagttcaccagaca

SEQ ID NO: 440208 - DNA, 98 bp, Homo sapiens
gcgtggccaccgtcaaggccaacatcacgcccttcggcgccgaccagatcaatgtccgagttaccaccatggatgcagagctggagtttgcaatccag

SEQ ID NO: 440209 - DNA, 80 bp, Homo sapiens
gaccagagtattgccgcggtggaaatggagaaattcggaactatccgggcagatttgattgaacagatgagattcaaaca

SEQ ID NO: 440210 - DNA, 98 bp, Homo sapiens
gaggcaaggagctaaagcagcgtgcgttcagccctgggagaggtggagaagagcgagtacttgagaaagaagaggaagaagatgatgatgaagatgaa

SEQ ID NO: 440211 - DNA, 75 bp, Homo sapiens
cgcggctctaacggggctttctacaaggctgttcttgccttagctgcatcttggacctcaagacaagtaggagaa

SEQ ID NO: 440212 - DNA, 51 bp, Homo sapiens
gaccccgaccccggcccggggaacaacctccctcctagcatgatgacccgc

SEQ ID NO: 440213 - DNA, 75 bp, Homo sapiens
actgaagttcttcagcttctcagccccccaggtgtttggagtagatgacaatcaggattataataggcctgttat

SEQ ID NO: 440214 - DNA, 100 bp, Homo sapiens
agtgaatgtctctagtcgtatggacagcacgggggtccccgaccgaatccagtacaatgcttgcacactgcacggtggaaaaggccaggagcagcgagag

SEQ ID NO: 440215 - DNA, 83 bp, Homo sapiens
cgctcaccttagccccgcgcccgagggctgggttacgacccctacaaccctgagctgcccaagccccccgcgcagagggagaa

SEQ ID NO: 440216 - DNA, 75 bp, Homo sapiens
gagagtttgaggtggaaacagaacggctgaataggtaatactgcattgcatgattgtgcagaatctggaagtttg

SEQ ID NO: 440217 - DNA, 51 bp, Homo sapiens
agccattcgggttggagtaattgcgagtgatagacagccaagcagagaaac

SEQ ID NO: 440218 - DNA, 83 bp, Homo sapiens
ccggtcgacgccggggaagcagccgccattgtccgcggctgaggaactgtggctgcaccatctgtcttcatcttcccgccatc

SEQ ID NO: 440219 - DNA, 100 bp, Homo sapiens
gccagagtactggtttgctgttcctcgggagaggtctacttccccagcaggacagcatcattctcctatatcttctagacatcactcatcttcctcacaa

SEQ ID NO: 440220 - DNA, 100 bp, Homo sapiens
gttggttactccattcgatttgaagactgcagtagtgcaaaaaccattcttaacatggcggacaccgacctgttcatggaatgtgaggaggaggagttgg

SEQ ID NO: 440221 - DNA, 50 bp, Homo sapiens
tcaaatgcactgtccagacggagatccggattcgccttttacaagtccac

SEQ ID NO: 440222 - DNA, 98 bp, Homo sapiens
taccccacggacagcatcctggaggaccagtcagaccagcgcgtcatcatcaagacaggtgcagttcaggagcagatgagatccaagggaaaccgaga

SEQ ID NO: 440223 - DNA, 80 bp, Homo sapiens
gcgctgcagcgtctccttcccgttctccaggttctgcttccttcggtgctgcggctgtgtgttttctgagcgagccttga

SEQ ID NO: 440224 - DNA, 98 bp, Homo sapiens
ctatcacgacgaaaacggacaaaacctccaccaccggcagcatcctgaatcttaacctggcacttgcacctcctgcgccgccgccccccatccaagga

SEQ ID NO: 440225 - DNA, 74 bp, Homo sapiens
acaccttaaacctcctctggattcaagttaaaggaaaaagcagttgatcctaagacacgtttacttatgtataa

SEQ ID NO: 440226 - DNA, 100 bp, Homo sapiens
gccggagtccgtccgagggctcccgcacctcgggctgcgggaaagaccacagcaagattctttcattcgtctcctcctagcctgggggaccaggctcgaa

SEQ ID NO: 440227 - DNA, 108 bp, Homo sapiens
gatcctcactctctccgatactttctcccaagctcttttgaaacagatggtcaccatgtttagatattagcagtcccgtatgtgcatgtctgcatttgaaaatggaag

SEQ ID NO: 440228 - DNA, 100 bp, Homo sapiens
acaaactgatccagagcattgtcagacaggtcaaaatgcagatcttcgtgaaaacccttaccggcaagaccatcacccttgaggtggagcccagtgacac

SEQ ID NO: 440229 - DNA, 74 bp, Homo sapiens
actgcgatgcttttttcactgctaggaaaggatccaaacaggtcttcattgagtccaaagtgtttgatgtcatc

SEQ ID NO: 440230 - DNA, 100 bp, Homo sapiens
agagggagtcaccactggacctccaaggaagccacgtgcagacatctacaaccttcgatctcctgacgaatccccgtcgaggtcaagatcaagatccagg

SEQ ID NO: 440231 - DNA, 95 bp, Homo sapiens
ttctcagagcctacggtggtcacagcagcattgaactgtgtggggaagggcatggacaagaagaaggcagccgaacacagatatgtagaactctt

SEQ ID NO: 440232 - DNA, 98 bp, Homo sapiens
tgataccaatgatcctgaaaacagaaggaaattgaaggaacttggagttaatggtctaatttatgataggtcatcactccccaaaatggacgttacca

SEQ ID NO: 440233 - DNA, 100 bp, Homo sapiens
atagggtatcatttttacgggccttctggagatgcttccgaactgtgggcaaaaatggcggcattgctcatcgtgatctgaaaccagaaaatatattgtg

SEQ ID NO: 440234 - DNA, 83 bp, Homo sapiens
acgatgcacacgccggacttcgcaggcccagacgacgcgcgcgcacattttgaaagcgaagcagaagccgtagaatcagcggc

SEQ ID NO: 440235 - DNA, 100 bp, Homo sapiens
cctcaacccaggagttaaaaagatggctgccagcaacaggaaggagggggagagaataccaactccatcagttccaacggagaagattcagatgaggctc

SEQ ID NO: 440236 - DNA, 74 bp, Homo sapiens
ccgccgtgagcgcccggagcggtccgcgagccaccgaggcccagcccccaaatacatcaagatgtttgtactgg

SEQ ID NO: 440237 - DNA, 51 bp, Homo sapiens
ttcctgcctttgagcggactcccttttaagcttggaacatcacccctccac

SEQ ID NO: 440238 - DNA, 51 bp, Homo sapiens
cagctcccagaggatcaccagcgtgggatatccattaccaaaacttgacat

SEQ ID NO: 440239 - DNA, 90 bp, Homo sapiens
cccttagaggctgaaggtgcccagctgcagggcggcagtaatgaggcatctgtagaggcattgacatggagaagcggctgtaccacatcc

SEQ ID NO: 440240 - DNA, 90 bp, Homo sapiens
ggggcattggtctgtgcacgcgcattgcgcgctcacctgcaccccggactgcaagatggaggaaggcgggaacctaggaggcctgattaa

SEQ ID NO: 440241 - DNA, 100 bp, Homo sapiens
gaagacgaggatgatgcggaaattaaccccaagctcttggagtttgacaaggagttgtctgtctttaaggacagactgtatgaactggacatctcgttcc

SEQ ID NO: 440242 - DNA, 100 bp, Homo sapiens
ctacagaaatcttggcaattgcttcagaaaaaatgaaagaagcagtcagattgaaaaatgtgatgagccacttgtctctggactcccccatgtggctttc

SEQ ID NO: 440243 - DNA, 100 bp, Homo sapiens
agccaggccagcggaagatcgtcatgcataagagaaagatgctggtttcgagttttggagatccttgttttttatggaacacagttctgtaaaattttca

SEQ ID NO: 440244 - DNA, 101 bp, Homo sapiens
gaccttacctcacaggacagtggccacgggatcctcatgttcactacccttcatgcatgaaagacaaagctactcagtttgtgtattgccaagtctgttgt

SEQ ID NO: 440245 - DNA, 75 bp, Homo sapiens
cgccactgtgacttgcagtcatcatccattaccacaaaattaggatcaaagttctgatcgtaccagtctttcttc

SEQ ID NO: 440246 - DNA, 134 bp, Homo sapiens
ggaaaaaacctgagaacttcctgatctctctcgctgtgagacatgtctgagactcctgctcagtgtagcattaagttggagtcattcgttgcccagtttgcagccaagaatgtgcagagagacacatcatagat

SEQ ID NO: 440247 - DNA, 100 bp, Homo sapiens
cgtcggtttgctatcgggactcggcgaggacgccggcctcagaaagtgtgtttgtgtccatttctcccagcgcaccctctgcatatctctacccacttgt

SEQ ID NO: 440248 - DNA, 83 bp, Homo sapiens
cctggttcttgtgtctcttggtggccaatgttcctgatagttttaatgaaggagtgtctctgaagatacagtccaaagaaagt

SEQ ID NO: 440249 - DNA, 74 bp, Homo sapiens
cggacttctcacccccaggatgtcatcgaggccagtatcttgaaaattatctctggatgaattattctcctgag

SEQ ID NO: 440250 - DNA, 50 bp, Homo sapiens
gaggtctccccaacgcaggacatcaggtattgttgcagcatctggcagtg

SEQ ID NO: 440251 - DNA, 98 bp, Homo sapiens
aagggaagaaaagttttgggtgatggggacaacaagccaaagagaagggaatttgggtgtcatggagaaactccagctgggcccagagattctgcagc

SEQ ID NO: 440252 - DNA, 50 bp, Homo sapiens
ccgcgggggagccccgggagccgcacggagctggccaagaggactcccgg

SEQ ID NO: 440253 - DNA, 74 bp, Homo sapiens
gacgccgtgtacgagcgcaccagcgaccacaagatcgtcttctttaaagacattgccaatctagctgatgaatt

SEQ ID NO: 440254 - DNA, 75 bp, Homo sapiens
tgggagtaagaaatgaccagggtccgggtggaaacttcagaacattttcgtatagatggtccagtaatttcagag

SEQ ID NO: 440255 - DNA, 100 bp, Homo sapiens
tcatttgaggagtgggaacaggcttcggcgaacacaaagagttttgattcatcatggataatctgtcatcagaagaaattcaacagagagctcaccagat

SEQ ID NO: 440256 - DNA, 75 bp, Homo sapiens
catgcacttgttgcagaaacagccaagaatgtcttactaccctatcagttaatcctatacattgctcaaggctca

SEQ ID NO: 440257 - DNA, 95 bp, Homo sapiens
gtcacctgtctggagcaaataaaagagccctgcaatttgaagatacatgagacagcagccaaacccccagattatgtctactttgagaattcctc

SEQ ID NO: 440258 - DNA, 90 bp, Homo sapiens
tcttatccaaccttgcgctgcatccgctcgacctcgtgaagatccgcttcgccgttaatggagaatcatcctcatttgcaccaactgata

SEQ ID NO: 440259 - DNA, 82 bp, Homo sapiens
cggtggccgccgcgcaggagcctcccggagctggggcccagatcattgatctgatgatgctggtcatcgatgtgaccaaggg

SEQ ID NO: 440260 - DNA, 101 bp, Homo sapiens
acccatcccagaactactccagtggatcctattgaccgaagctgtcaaaaggccctggattattgtcacagcatgggaattatgcacagagatgtcaagcc

SEQ ID NO: 440261 - DNA, 74 bp, Homo sapiens
gaaaggagattacttggggaaaactgtccaaggtgctggagaatctggtaaaagcaccattgtgaagcagatga

SEQ ID NO: 440262 - DNA, 75 bp, Homo sapiens
cttttggctttcttggcctgatgctgaactctcgaggtacgtaggaagcctggacgtgccaaggcccaacagcag

SEQ ID NO: 440263 - DNA, 76 bp, Homo sapiens
cgggctgaagcgactgagtccgcgatggagaacaccaatcagggtcttcaggcctggaagattgaagacattccag

SEQ ID NO: 440264 - DNA, 83 bp, Homo sapiens
ctgtcgtccgttctctcaggctcccgttcagaatctatctaccgccggggagccagaagatggaggaagctgtaccgtgccaa

SEQ ID NO: 440265 - DNA, 74 bp, Homo sapiens
tcgctgcttcaggaggacctgcaggaggacgcagacggatgagctctgccagtgccggccgggagaaggcaatt

SEQ ID NO: 440266 - DNA, 88 bp, Homo sapiens
gaaatcctacaaaggaccttaagttggtgagatggcaaagcagtatatagagaaaagtcttttggttccagaccatgtgatcacacgc

SEQ ID NO: 440267 - DNA, 90 bp, Homo sapiens
gaagccctctgccatccagcagcgagccattctaccttgtatcaaggacaatgcagatcttcgtgaagactctgactggtaagaccatca

SEQ ID NO: 440268 - DNA, 89 bp, Homo sapiens
ggaacctctatgccgacatcgacgccgcctggcaggccctgcgcaccagcgggacgaccctgggacagtctccactggggcagatccag

SEQ ID NO: 440269 - DNA, 50 bp, Homo sapiens
ctgagagtcaccacaaggccaaggatcttcccagacccgtcagattttga

SEQ ID NO: 440270 - DNA, 89 bp, Homo sapiens
cgcagacctgggtgctggctactaccgcaaatacttctatggcaaagggtggactccattatgctggtggaagagggcttcagtgtgac

SEQ ID NO: 440271 - DNA, 75 bp, Homo sapiens
tttttacttcccgacttctgggtatctagaagagcagaagacagagaatggaaaagataaggaacagaaacaaac

SEQ ID NO: 440272 - DNA, 100 bp, Homo sapiens
cacaaatgcaaatacttgtgcactgggagagggcagagcggcttgggtaaatccaccttaatcaacaccctcttcaaatccaaaatcagccggaagtcgg

SEQ ID NO: 440273 - DNA, 75 bp, Homo sapiens
tctctattgtttacgtagctacagatgaatctgagacctcaggagtgttcagcctgggtgttcctgtagatgctc

SEQ ID NO: 440274 - DNA, 83 bp, Homo sapiens
ctaatttgaaccatgtttggattgaagccgcctctgtattacttaccagcggaaggagagttttacatggaagtggcttacag

SEQ ID NO: 440275 - DNA, 75 bp, Homo sapiens
ctggattctaaggcaacacttccttgaagaaacaagcttacagatggtgaccctgataactatattgcttattat

SEQ ID NO: 440276 - DNA, 100 bp, Homo sapiens
ccctaatgaggctgtgagggaatttgcaaaagagatcgatgtctcctacgtcaagattgaagaggtgattggtgcaggcggtcaagaagcagatcgagac

SEQ ID NO: 440277 - DNA, 90 bp, Homo sapiens
ggaccaggctatcatatcatgttgcctttcattactacgttcagatctgtgcaggttttctgtctcaactggtctctgacaagcctctga

SEQ ID NO: 440278 - DNA, 75 bp, Homo sapiens
gggccttactccttcacagatcgctaagtttggtgcgaacgccattctgggggtgtcccttgccgtctgcaaagc

SEQ ID NO: 440279 - DNA, 96 bp, Homo sapiens
cggctgccgcggagtgcgatgtggtaatggcggcgaccgagccggagctgctcgacgaccaagaggcgaagaggtctgcggatcaatggagagcta

SEQ ID NO: 440280 - DNA, 89 bp, Homo sapiens
ctaaactggttaatagtggcatggaagatccatttgctccaaagacaacaggccctccctctgccctcccgtctgtgagctccctgccc

SEQ ID NO: 440281 - DNA, 75 bp, Homo sapiens
gaggaaacagtgacagacctggagactgcagttctctatccttcacacagaaaaggtggccattaagatcctgga

SEQ ID NO: 440282 - DNA, 75 bp, Homo sapiens
tgaatagtattaaaataaaatacctggatgaggaagatgaagagggcatgagccagaaggagagctctaagtctg

SEQ ID NO: 440283 - DNA, 83 bp, Homo sapiens
ctgagaaggaggggtatgagccacacatccccgaccacttgcggcctgagtatgcctcaggcccagagccagcacgagacatc

SEQ ID NO: 440284 - DNA, 75 bp, Homo sapiens
ccgcttcttcagctctgagaccaccgcagcccactccctagatgtttgagacggaggcagatgagaagagggaga

SEQ ID NO: 440285 - DNA, 100 bp, Homo sapiens
cgcccagcgaaccatcaactggcagaaattctgcatcaaagatgactgcctctactgcagcggctgggtgaagagaggacctacaggtgtcatagccaca

SEQ ID NO: 440286 - DNA, 100 bp, Homo sapiens
ctcgggctcggaacgagactgcacggtaaaaagatggcctatcagaaggtccatgcagatcaaagagctccaggacactcacagtacttagacaatgatg

SEQ ID NO: 440287 - DNA, 100 bp, Homo sapiens
aggagaacgtcccgctggatctgacccgaggatggaaaggcagatgtaaagtccctcatggcgaaatataacacggggggcaacccgacagaggatgtct

SEQ ID NO: 440288 - DNA, 82 bp, Homo sapiens
cgactgtgacgaggacgaggaggcagccacggggcccctggttaacaagcacaagccctggctggagcccacctaccacggc

SEQ ID NO: 440289 - DNA, 51 bp, Homo sapiens
acatcagcgaccgggagaacatagacgattggcagtatggagttactcagg

SEQ ID NO: 440290 - DNA, 75 bp, Homo sapiens
ttctacttaataacgtgcacctttctcatcctgtttatgtccgacgtgcagctgccctagactggagctggttac

SEQ ID NO: 440291 - DNA, 83 bp, Homo sapiens
tttttggttggggaaactcggagtacctgcagctggcctctgtcactgactccacacagcaattctgtggtgttcttggtcac

SEQ ID NO: 440292 - DNA, 83 bp, Homo sapiens
cacagttgaacctcagcacattccatgtgtactaatcgggaggagtgcacttgtgacctcctcttcatctctgccttccttcc

SEQ ID NO: 440293 - DNA, 90 bp, Homo sapiens
gccaagttgaaaatggacgagtaatcgcctgctttgattcattgaaagatgctttggagtctgcaatgaagaatggcctgtggggtcacg

SEQ ID NO: 440294 - DNA, 83 bp, Homo sapiens
acaagggctatctggtatctgtagatggctacatgaacatgcaggaaaaccgtcttcagatacagtccctaagcccaagagag

SEQ ID NO: 440295 - DNA, 89 bp, Homo sapiens
gtcctttcttttctgactttccagttgactgaacctggaaaagagccgaaatgtgatacctcaaagcacaaagtgctggtagtgtctgt

SEQ ID NO: 440296 - DNA, 98 bp, Homo sapiens
ccacatctcaggcgctctgccagcaacgaaaccatcatagcctttgcctgggaaccaaatggaagtaagtttgctgtgctgcacggagaggctccgcg

SEQ ID NO: 440297 - DNA, 87 bp, Homo sapiens
ccacccagccaacgcggtcgccatggagacgccggcaacatgagtgagaatgaggaagaggaaatttctcagcaagaaggcagtggg

SEQ ID NO: 440298 - DNA, 98 bp, Homo sapiens
actttccttacctgtttttccagctcacccactgccagcagaggtgtgacagtttgggagttgatgaccttcggggcagagccctatgcagggctacg

SEQ ID NO: 440299 - DNA, 100 bp, Homo sapiens
ggctgcttggccaccgccaccgccgtccgaagggctcgagcccgtctcctctgagcctccggcctccataagacccaaaacagatgacacctcttcccag

SEQ ID NO: 440300 - DNA, 100 bp, Homo sapiens
gttgcttgaacacaaggagatcgacggccgtcttaaggagttctaggtgatggctgctcctttccaacttgccttgttaaccaggatcctgaacaagcat

SEQ ID NO: 440301 - DNA, 82 bp, Homo sapiens
tgcggtgtgcaagtccgactggaacagagccaaatctcctcagccacctgttgaagaagaagatgaacacttcgatgacaca

SEQ ID NO: 440302 - DNA, 80 bp, Homo sapiens
ctctagccagctaggttcctggtgctttggggttttcggctttgtgagaaaccttaccatcaaacacgatggccagcaac

SEQ ID NO: 440303 - DNA, 51 bp, Homo sapiens
tcattggatgaagtggctccggagatacgcccagcggcagcaggatgagtg

SEQ ID NO: 440304 - DNA, 100 bp, Homo sapiens
aaggaccgggagctgcaggccctgcgggaccgcatgctccgcatggagagggtcatccccctggcccagggtgaccatcgggatgaggaggaagagaccc

SEQ ID NO: 440305 - DNA, 100 bp, Homo sapiens
gcgtgggaacccaggccccgccgaggcggccaggggtttgttaaagttgttaagaataaggcctactttaagagataccaagtgaaatttagaagacgac

SEQ ID NO: 440306 - DNA, 83 bp, Homo sapiens
ctcgcggccccttagcgcggtcaggccgccctccttttccaggcagaagtcaattcatctggaaagactatctctgagtcaga

SEQ ID NO: 440307 - DNA, 82 bp, Homo sapiens
atactatggaatgcattttgaaacttaaggatgggatacaggctgtcaagtcaccaaaccggatgtgatattcaagttggag

SEQ ID NO: 440308 - DNA, 100 bp, Homo sapiens
ggagtgtgcgtgcgcgccgagcggctgcctgctgtttcccggggagatcatgaaacgaggtcgccttcccagcagcagtgaggattctgacgacaatggc

SEQ ID NO: 440309 - DNA, 89 bp, Homo sapiens
tccaactggtccctcagtcacacatgccagagattgctcaggaagcaatggaggtgttggagagcacaatggctgaacaagtccttcct

SEQ ID NO: 440310 - DNA, 99 bp, Homo sapiens
tctgaagatgggggtgaccggctctccacacacgagctgacctctctgctcgagaaggaggtcaaaatgcagatcttcgtgaaaacccttaccggcaag

SEQ ID NO: 440311 - DNA, 76 bp, Homo sapiens
gcagatgccagcaccataattccagtacagcctatcaaacttttataggcaagcaataaacagcaagatgtttgag

SEQ ID NO: 440312 - DNA, 97 bp, Homo sapiens
cagcacatcagcgaccgcgagatgcccgaaggacagtgtgcagttaaaagacctgtggaaaaaaatctgccatcacagcagtggaatggagtttcag

SEQ ID NO: 440313 - DNA, 100 bp, Homo sapiens
ggagagtcgtgcggacagcattgggagcggccgagccatcccaattaaacaggtcacatgtgccaatttaacgaacggtggaaagtcagaacttctgaaa

SEQ ID NO: 440314 - DNA, 74 bp, Homo sapiens
cccccattcacagcctcctcggcctggtacttgcaagataatatagttggatcaaacaaaaacaacacaatttg

SEQ ID NO: 440315 - DNA, 98 bp, Homo sapiens
tctcttagtccagcaagtcctcatagccagggattctcaaagttggattggtggaaacaatgaaccattgacaggctttacatggcgaggtggctgtg

SEQ ID NO: 440316 - DNA, 75 bp, Homo sapiens
cctcatcccctggatgggggaccacaagatcctcatcgacaggtatgtgaggagcagcgctgtgaggaggaagtc

SEQ ID NO: 440317 - DNA, 51 bp, Homo sapiens
tggctgtgctgcgcggcccccgcgcatggggaacgcccttttgcttgtgac

SEQ ID NO: 440318 - DNA, 100 bp, Homo sapiens
atcctctcaggacattgtgtagcctatggtgatcatttgaagatctgtccccagggttctacctgctgctctcaagagatggaggagaagtacagcctgc

SEQ ID NO: 440319 - DNA, 100 bp, Homo sapiens
cacagcaggaccagagtggaccagcacaccccaggagagaggactggggtcccaggagtaggaggaggccaggtcagagcagcccaccatgggatgggga

SEQ ID NO: 440320 - DNA, 97 bp, Homo sapiens
acgccgtggcagcctgaacggagtgtgcgacggattgggaggttcctttgcccaaagactcaacaggtgcagcagatcccccccagccccacatcgt

SEQ ID NO: 440321 - DNA, 140 bp, Homo sapiens
aacaacgacgccgaattacatctgtccagccacctacaggcctccaggaatggctaaaaatgtttcagattgggaaaatgaggtacgttagtgttcgcgattttaaaggcaaagtgctaattgatattagagaatattgg

SEQ ID NO: 440322 - DNA, 82 bp, Homo sapiens
cttgatcaggtggaacagattcagaaggagcaggattaccaaagggaactgtggctgcaccatctgtcttcatcttcccgcc

SEQ ID NO: 440323 - DNA, 97 bp, Homo sapiens
agctggacgtgggatccacacagctcagaacagttggatcttgctcagtctctgtcagaggaagatcccttgtcttttagagattcctgccaaaaat

SEQ ID NO: 440324 - DNA, 98 bp, Homo sapiens
tacacaaaggctgccggactcagcacacaccctgggccgatgggacggagtgcgagcctggaaaggaagctgcggatctgtcctccctgaaaagcatg

SEQ ID NO: 440325 - DNA, 100 bp, Homo sapiens
gtaacccgagaatacaccatcaacattcacaagcgcatccatggagtttttaagacaattatctcctatattgatgagcaatttgagaggtacctgcatg

SEQ ID NO: 440326 - DNA, 74 bp, Homo sapiens
gcatctcaccaagaagctgctaaaccgggatatccagatcagccgcatcgagtatatccactccaagaacttca

SEQ ID NO: 440327 - DNA, 82 bp, Homo sapiens
cgatgaaaggaatgggtctgggaccttaacagggagccatgacagaagatatgttgtgggatcatctataaaggccgttttg

SEQ ID NO: 440328 - DNA, 100 bp, Homo sapiens
cgggcggcagggcgcggcctctccgccgggtgtaccacctgtcgcggcgcgagacctctgacctgcccttcgtgcggaatcacatttgctcccaaatctg

SEQ ID NO: 440329 - DNA, 98 bp, Homo sapiens
agctgatttacagctcattgactttgagactgaatgtggatgtcagttcacgtcaaaactggaaggaatgtttagggatatgagcatctcaaacacaa

SEQ ID NO: 440330 - DNA, 100 bp, Homo sapiens
ttaccccggggtctatggaagtaatggaaggacccctcaacctggtgtatgtggaatttgatgatcttgaatgggataaacgagagtgggttaaagttta

SEQ ID NO: 440331 - DNA, 82 bp, Homo sapiens
atttttcattatccttttctgggtgctatgggtgatcattccaagaatgccatggacaatattaccaggcagaaccaattct

SEQ ID NO: 440332 - DNA, 100 bp, Homo sapiens
gcagccatttatttgtcccgtgacagccagctaaaggtgtggatgagcaaatacggctggagtgccgacgagtcggggcagatcttcatctgtagccaag

SEQ ID NO: 440333 - DNA, 110 bp, Homo sapiens
ggatcgacaagaccatgctggcaagtctgaaggtcaagtactaggttttgacaagcttgcatcatgcgtgagtataagctagtcgttcttggctcaggaggcgttggaaa

SEQ ID NO: 440334 - DNA, 129 bp, Homo sapiens
acgccgccttggacctcctgggaggcgaggacggtctctgccagtataaatgcagtgacgtgtcaactgttagccacgcagatgccgattgctttgtgtgtgtcttcctgagccatggcgaaggcaatc

SEQ ID NO: 440335 - DNA, 75 bp, Homo sapiens
gtctactcggccactccggtcccgacacctagcctgctgggtaattccagaattgattggccataccattgtcac

SEQ ID NO: 440336 - DNA, 75 bp, Homo sapiens
gcaaggaggagatagaagcgcagatcaaggccaactatgacgtgctggaaagcccgcttacaaacacgcagatgg

SEQ ID NO: 440337 - DNA, 75 bp, Homo sapiens
gagagaccttggagtaattcgtcgacaggttctttcagagcacggcttcggccccatcactaccgacatccggga

SEQ ID NO: 440338 - DNA, 82 bp, Homo sapiens
gtttctggaagaagaagaagagcatgatcggcatgtccaccaaggacggggaggtttactgcatcgacgcgcggttctacgg

SEQ ID NO: 440339 - DNA, 100 bp, Homo sapiens
aaacaggttcttctgcagaatgaaaggtctttcaatcctcttgaagatgatgattgcagatggacagagagagcttattgagtcatacagtgtcaaaaag

SEQ ID NO: 440340 - DNA, 83 bp, Homo sapiens
ctgggaacctcaacaccctgagcagcctccacccaatgggaggtgctccatctcgaaaagcgagaaaggcctccagaccacca

SEQ ID NO: 440341 - DNA, 115 bp, Homo sapiens
gggcagacggattcatttagagctgcggaacaggacgccctctgatgaactgtggctgcaccatctgtcttcatcttcccgccatctgatgagcagttgaaatctggaactgcct

SEQ ID NO: 440342 - DNA, 83 bp, Homo sapiens
ctttcgcatttgggaccctgcaggcaaccatgtccaagggacctgcagttggtattgatcttggcaccacctactcttgtgtg

SEQ ID NO: 440343 - DNA, 101 bp, Homo sapiens
aggagccaactagcatggaagtgcagttgtggtcagaaatgagaagacatgaaatgttgagggaggagctgcgacagagaagaaagcagcttgaagctctg

SEQ ID NO: 440344 - DNA, 97 bp, Homo sapiens
tgcttccccagaggggtggcctcgctgttcccatggacatggcccagcagaaaacaacagccttgacacagatgatcactttaaaccatcacctcgg

SEQ ID NO: 440345 - DNA, 75 bp, Homo sapiens
caaaccctctctctaccacgagcagcgccctgggagccctcacgagtcccggtaagaaggtgttttaccctgtgg

SEQ ID NO: 440346 - DNA, 99 bp, Homo sapiens
gctggcggagctggagctggagctctcggagggtggatggaagcatgcctaggggaagatctgcctcccaccacagaactggaggaggggcttaggaat

SEQ ID NO: 440347 - DNA, 149 bp, Homo sapiens
cggtagggacgggaggcgagcaagatggcgcagacgcagggcacccggaggaaagtctgttactactacgacggtttttcgttggaatatacgttgcacatttatggcgattctgagtgtgagggcagacttctgccaggctcagcaca

SEQ ID NO: 440348 - DNA, 76 bp, Homo sapiens
ggagcgcagaaccggccgcgcccggccggatcacctcaacagtcacgtcagacaagtgcactcaacagaacggccc

SEQ ID NO: 440349 - DNA, 75 bp, Homo sapiens
tcggaggagccgcgggcggcgcggcccagctcgttccaggagccttcacgtaaatgggtccagtcatgcctccca

SEQ ID NO: 440350 - DNA, 100 bp, Homo sapiens
gccacgcgacatctgcaaggacagttgtttggtgttttgcttcaggttatagatggagagacctataaaggacacaactcagatgggaagttcatcgccc

SEQ ID NO: 440351 - DNA, 83 bp, Homo sapiens
tatctgtaaagggtatctgatcaagccaacaacagtgacggaatgcctccatacatgttgatgataattagaagcatgctttc

SEQ ID NO: 440352 - DNA, 100 bp, Homo sapiens
tgcggctccgtggtgaagctactcaatacgcgccacaacgtccgactgcactcacacgacgtgcgctatgggtcagggacaagaatccttcaagaaacag

SEQ ID NO: 440353 - DNA, 100 bp, Homo sapiens
gacaaagttcttctcaagtatacagaatataatgaacctcatgaaagcagaaccaactcggatattgttgagatgaagctactgaatctttacatcaaac

SEQ ID NO: 440354 - DNA, 90 bp, Homo sapiens
cttttcttaacctgggaagtggaaccggatatttaagtacaatgctggaaagtgaaatttcaaccacagcagatgactgcagttcagagg

SEQ ID NO: 440355 - DNA, 96 bp, Homo sapiens
tctgtgagtgcctcccaggattctctggagctctctgcaaccaagatgaggacggggacttggttgccttttccagtgacgaggaattgacaatgg

SEQ ID NO: 440356 - DNA, 100 bp, Homo sapiens
ctacattgaatatcagaatcttgttgactacataaaggcccggattgcatttctacaaggcgaaagaaaaggtcaagagaacctgaagaaggacttagta

SEQ ID NO: 440357 - DNA, 90 bp, Homo sapiens
gtcaactgcagccactgcaagcggcccatgagcagccggggctgggtctgcgacaggaattgaatgatctggcacgggaccctccagcac

SEQ ID NO: 440358 - DNA, 100 bp, Homo sapiens
ggggccctctgtaccccttcccgcggacggtgaacgactacacgcacgccctgctccgccacgaccccctggctgctcctatcagtgacaaatcagcgta

SEQ ID NO: 440359 - DNA, 73 bp, Homo sapiens
tcagcctcccgccggccgtctccttaacaccgaacaccggggattcccgaagtcttccgttttctgagaatgt

SEQ ID NO: 440360 - DNA, 71 bp, Homo sapiens
aatggaacaaaccttacctttattggagacaaaaccggtcatgtaggtacaacagcaaccaagaagatcga

SEQ ID NO: 440361 - DNA, 75 bp, Homo sapiens
gatgccatatgaaatttcagctgggactcagtgctgtgaaggtttggcagttctctaccagtggaccaatctttt

SEQ ID NO: 440362 - DNA, 98 bp, Homo sapiens
tgatgttggagaactatagcaatctggttttcttggtattctaccttgtaaatactgttatttgtatatactgtaaatgatgacatcggtgggcacta

SEQ ID NO: 440363 - DNA, 97 bp, Homo sapiens
ttctctagctggccttgctgttgggacactagactttcagggatgtggctatagatttctctttggaggagtggaaatgcctgaaccctgcacagag

SEQ ID NO: 440364 - DNA, 100 bp, Homo sapiens
gctgagctggcctgtcgggaacctgatgtcctcatcttgacaaaggactggtggacatatgaattctgttatggacgccacatccagcaataccacatgg

SEQ ID NO: 440365 - DNA, 75 bp, Homo sapiens
ctgcactaacgcaggatccggctgccgaaggtcctcgccaggttatcctacgcggagagccaggtaccaatgggt

SEQ ID NO: 440366 - DNA, 50 bp, Homo sapiens
gggccactcagagtcgcccgagaaaaacattgcagcggcccgtgtggaac

SEQ ID NO: 440367 - DNA, 100 bp, Homo sapiens
gtatgcctcaatttgctggatttaagcactgctgcactttatgagggcgcaaaccagaagaagagggtgtggaagataacgggctggaggaaaactctgg

SEQ ID NO: 440368 - DNA, 97 bp, Homo sapiens
gaaaggtgaaactggttccaaatactaaaatccagatgtcatattcactgaaccagaagaatatgacactgagcaatcggtgccaggtgtttgatcg

SEQ ID NO: 440369 - DNA, 83 bp, Homo sapiens
atcagctcctggttcaacgaggccattgacttcatagatgtgaagttcatttccaatccgccctccatggtggcagcggggag

SEQ ID NO: 440370 - DNA, 90 bp, Homo sapiens
tttggatcagacttttgtgttgcagttcgggtgagatcggactggaactgttcggctgcgaccagaaatttattttcctgagtaaattgc

SEQ ID NO: 440371 - DNA, 82 bp, Homo sapiens
tcttgttcctcctgtcccaaaagaccatcctgctctcaactacaacatcgtttcagggaagatgttaccgagtacttcagtg

SEQ ID NO: 440372 - DNA, 97 bp, Homo sapiens
cgggtttgtcagactcccaggtcagagcttttaggcatacaagtaccctggctggtggactgtgcattgtcacttattcgacttgggatggagcgga

SEQ ID NO: 440373 - DNA, 88 bp, Homo sapiens
aaatgctccttctcctggagacgcaactcaagaatgtaaaaagggcagctctctggcatgttcctgactgaggatctcataacattta

SEQ ID NO: 440374 - DNA, 98 bp, Homo sapiens
gagggcaaacctgtgaacccacccgagagcaacaaagcaggcgactacagccacgtgaagaaaaacacaccttgactttagtcagatacatcactgtc

SEQ ID NO: 440375 - DNA, 101 bp, Homo sapiens
attattgaagaagattttaatattgcactaggagtttttgctttagctggactaacagatttggacactggggttgggaaatcaagcatcgtgtgtcgatt

SEQ ID NO: 440376 - DNA, 87 bp, Homo sapiens
acgccgcaccaggtcttgtagcagcgcctcctcgttctgcctcctgggggcattgctggcccccatccgagtgcttctggcctttat

SEQ ID NO: 440377 - DNA, 89 bp, Homo sapiens
cagttggagttggaatttgtgcaatgtttagccaacccaaattaccttaattgttttgacctgtagcagagaaccaattctggagaaca

SEQ ID NO: 440378 - DNA, 98 bp, Homo sapiens
cgcagcccccgcacctcccaccccaggcgcagtatctgccgtcccagtcccagcagaggtaccagccgcagcaggtttgtgggggagagaaaccttat

SEQ ID NO: 440379 - DNA, 99 bp, Homo sapiens
gccccctggcagtggccgctgtgctatatcacaagatgaacaatgagaagcaggcagaagattgcatcacacggttataaacaacttgtgaaatgagtg

SEQ ID NO: 440380 - DNA, 96 bp, Homo sapiens
gcagaaggaggcattggccaaggacagagcgggatgccaccagcttgtccaaagggaagttccaggagctcctggtgggcatcgttgtggagaatg

SEQ ID NO: 440381 - DNA, 100 bp, Homo sapiens
ctccggctggaggccggactcaaccgcgtaaaagaaatcatcgagttccccatcctaaagctaaatggccggaccatggagattgagtctacctttcaca

SEQ ID NO: 440382 - DNA, 101 bp, Homo sapiens
ccgagcatggcaggctccctgcctccctgcgtggtggactgtggcaccggcaatggctgccatccggaagaaactggtgattgttggtgatggagcctgtg

SEQ ID NO: 440383 - DNA, 99 bp, Homo sapiens
cggtgcgcagacagagctattccagcaccagcagagattcaaccctatgaaaagataaaggccaggggcttgcctgataatatatcttccgtgttgaac

SEQ ID NO: 440384 - DNA, 88 bp, Homo sapiens
agggaatggtgcaggcaggcgctgagaaggacgcgcagtccatctctctcaggtaaaataccatgaagattttgaaaaaacaaagggg

SEQ ID NO: 440385 - DNA, 100 bp, Homo sapiens
gcgccagcaagcggggccggtggcgcccgtgtcggagaccccgcgccggaccctgaggcagcgactcatgatggagcagtccaagaagtcctccctcatg

SEQ ID NO: 440386 - DNA, 100 bp, Homo sapiens
cctcgattcattcaactctttcagggggatggtttagacaacagtgtagcttcacctggtacaggtgacgatgatgatccggataaggacaaaaaacgcc

SEQ ID NO: 440387 - DNA, 100 bp, Homo sapiens
gaacaatggcgctgtcttcagtggcacagtggagcagctctgaagatgcaaaggtagctacagcaagctgggtagcaggcagatccaaaggatatcatga

SEQ ID NO: 440388 - DNA, 113 bp, Homo sapiens
gtgttaaggaagttttgaacattttaacaaatgagttccacacttccatggcccttacagccctcttctgggtcacgctagaatcagatctgctctccagcatcttctgtttc

SEQ ID NO: 440389 - DNA, 100 bp, Homo sapiens
aatgccatgtcaactttgttcggaagagttgctggaattgtggccgtaaagcgagtgaaacctgcagtggctgtaacacagcccgatactgtggctcatt

SEQ ID NO: 440390 - DNA, 75 bp, Homo sapiens
cggcaggcagccacggggtgcagtgcgcacacagcccccggtccctgagaagcggccccctgaaatacagcattt

SEQ ID NO: 440391 - DNA, 94 bp, Homo sapiens
ctatgctggagtctgtatttctgtcttggtgcttcttgctcttttgggtgtcatcattgccaaaaatggagtcttgctgtgtcacccaggctgg

SEQ ID NO: 440392 - DNA, 51 bp, Homo sapiens
acccacagctgttaaagcaacaggcatgcatatcattctgtttcaactccc

SEQ ID NO: 440393 - DNA, 98 bp, Homo sapiens
cgaggagaaaacagcaggcacccaagcgggcggcagttggtgatggagttttgtggtgctggctctgtcaccgacctgatcaagaacacaaaaggtaa

SEQ ID NO: 440394 - DNA, 101 bp, Homo sapiens
agtgatgtaccatcatgggtagcctttgataaacaggattacctgagctggaattggaagcaattgataaccaatttggacaaccaggaacaggcgatcag

SEQ ID NO: 440395 - DNA, 100 bp, Homo sapiens
cgagggctaccacgttctgcggtccctcctcctatgtctccatcctccaaatctgtgagcactccaagtgaagctggaagccaagactctggagatggcg

SEQ ID NO: 440396 - DNA, 100 bp, Homo sapiens
ctcaagtgatcctcctgcctcagcctcccgagtacctgagattagcccaggaattacatgaacgacagccttcgcaccgacgtcttcgtgcggttccagc

SEQ ID NO: 440397 - DNA, 100 bp, Homo sapiens
agaaggatttcttgaaaaccgtggaagggagggagctgcagaggagccgggtgtgggctgagccctgcctgattgatgctgccaaggaggagtacaacgg

SEQ ID NO: 440398 - DNA, 75 bp, Homo sapiens
tgttttagagctggcagcagcatctcagcccaagagaagggatttcccagatgacccaggcatgcagtgggacac

SEQ ID NO: 440399 - DNA, 74 bp, Homo sapiens
agaaacaataggacggaaacgccgaggaacccggctgaggcggcagggtgtcaaattgagaaccaggtagatcc

SEQ ID NO: 440400 - DNA, 74 bp, Homo sapiens
cctcctggaccgtccaagaagaggctgtgaagagcggcattcaccgtactgtccacgccggggaggtgggctcg

SEQ ID NO: 440401 - DNA, 75 bp, Homo sapiens
agttccagggtctctgggagtggctgccagagtcgtgccccaatttctgcaaaacttgtggccaatatgctgtcg

SEQ ID NO: 440402 - DNA, 74 bp, Homo sapiens
tttggtggcccaacctcgtgtggcaaccatccagcaggtattttttgcatccgtgcgatctggaggaagtagcc

SEQ ID NO: 440403 - DNA, 76 bp, Homo sapiens
atgcagttggatggcggtgactgcgtgcactgctgatggttcttcagaactcaggaatcgtgttgcatgcattgtt

SEQ ID NO: 440404 - DNA, 97 bp, Homo sapiens
tgctgcccatgcttataaacaagtggatccgtctattactgggccacagttacatttcatcttcctcatcatgtgttgaagtccattgccagtgcca

SEQ ID NO: 440405 - DNA, 96 bp, Homo sapiens
gagtttcccacttgattacccgttaagtcccccaaagatgagatttacctgtgagatgtttcatcccaacatgatgatgatgatgattttgatgat

SEQ ID NO: 440406 - DNA, 100 bp, Homo sapiens
cttcctgtgcctgaacctctctttcgcttttgtggaactactctacggcatctggagcaactgggaggtggggaagacagggctccagctaccacaggac

SEQ ID NO: 440407 - DNA, 100 bp, Homo sapiens
cgtcccgataagaagaaaatacttttcttcaatgataagagctgtcagttttctgtggatgaaggacagtctcatcgaactcaaggaatcttcagcaaag

SEQ ID NO: 440408 - DNA, 100 bp, Homo sapiens
ccattcagatgggatctttccggatcaatccagatggcagccagtcagtggtggaggctccgtatgtggatgtgatctgtttgaacagctactactcttg

SEQ ID NO: 440409 - DNA, 50 bp, Homo sapiens
cggcttcctccagacctctcggcgcggtggttctatagatggtaataacc

SEQ ID NO: 440410 - DNA, 100 bp, Homo sapiens
gactgccctcgctgcgcaccgtgtcctcctccgtcatcgagcagctcttcttcgtccgtttggtggagccgccaccaaaatgcagattttcgtgaaaacc

SEQ ID NO: 440411 - DNA, 71 bp, Homo sapiens
cgttggggtgagaccctcacttcatccggtgaagtcagcactgtgcttaagctggataacacagtggtggg

SEQ ID NO: 440412 - DNA, 100 bp, Homo sapiens
tccaactcaacctctgttccagcttggcagattgaagtggatattcctcgctgtcatcagtacgatgaactgttatcatcaccagaaggtcatgcaaaat

SEQ ID NO: 440413 - DNA, 100 bp, Homo sapiens
gacacctttcacagctatcagggaaggagccctctggcacaaatggaagaagaaagaagggagcaagtagctaaaattaagaagatggagatggagatgg

SEQ ID NO: 440414 - DNA, 96 bp, Homo sapiens
ggcaaagtttgagaacctctgcaagctcatgaaagaaatcttagataagaaggttgagaagtataggacatactctattagagacgggaaagatgg

SEQ ID NO: 440415 - DNA, 100 bp, Homo sapiens
gagagcggcctgattgggaagaaactcttagcgcaatggactgaaagaggtgtccccactgcctctaaatctcaaacgtttatacaaagagacactggaa

SEQ ID NO: 440416 - DNA, 76 bp, Homo sapiens
ttattgacgatggacaatttggaatccacaagttcctcagcagaagggcataccgatgctgtccttgacctttcat

SEQ ID NO: 440417 - DNA, 83 bp, Homo sapiens
cgaggcccagagatgaccccttatgaaggtttttagaacttcagccataaaaatgggcagaattttccttgatcatatcggtg

SEQ ID NO: 440418 - DNA, 75 bp, Homo sapiens
gagaaactgcggaaagaattgcatgaaggcctgtgatacttgggctgtgatcctctagagccagcttggactcac

SEQ ID NO: 440419 - DNA, 85 bp, Homo sapiens
atgaactatgataagctgagcagagccctgcgatactattatgacaaggcttgcatgcttgtctttcaacccgatctcgatgtcg

SEQ ID NO: 440420 - DNA, 75 bp, Homo sapiens
cggaagcgcagggagaaggaagaggtgtttgaaaagggcacttgatgacattagtgaaagcatcaaagagcttca

SEQ ID NO: 440421 - DNA, 100 bp, Homo sapiens
gaaaggccagcacctgaagaattgatgataggaaccaaggctttagccttctcaactcattgactggaacaaaccatagcattgggtcagcagatccctg

SEQ ID NO: 440422 - DNA, 98 bp, Homo sapiens
tgaagccagagatggcgatgctctacccggagctgtacaaggacctcaccaagaaaatgagttccgaggtgagctgttaaatcagaggtggacacacg

SEQ ID NO: 440423 - DNA, 98 bp, Homo sapiens
cctacccattggtctaaacttgatccaaagacaatgaagggcactgtgtttagtcttgagtcagaggaggaggaataccctggaatcactgcagaaga

SEQ ID NO: 440424 - DNA, 100 bp, Homo sapiens
aattctggaagcgcagcaacagcaagctcccgggcaggctgaccccgcactacatctacccaccagccatcgtgcagcccagcgtggtgatcccagccgc

SEQ ID NO: 440425 - DNA, 97 bp, Homo sapiens
ttcatcccactattattttggcacaacaggaaggtttgtcctggttgtggtcaagactggatgatgtaactggctctctaggaagcctcacttggcc

SEQ ID NO: 440426 - DNA, 107 bp, Homo sapiens
cgagcgggccctggctcaggaacagggacagcacctcatcccctggatgggggaccacaagatcctcatcgacaggttttaaaatcaaagatgggaaaatcggagaa

SEQ ID NO: 440427 - DNA, 73 bp, Homo sapiens
ccctcacaccccttccagctacatcgaaacaatgtactcaagactgatcttctaagttcactggaaatgattt

SEQ ID NO: 440428 - DNA, 100 bp, Homo sapiens
aaactcagccactggttgccttggtaggcaataaaagtccccattttgcagctgtaaatagcaataatgagattattattacagatttccataatcattc

SEQ ID NO: 440429 - DNA, 50 bp, Homo sapiens
ccgcatggcggcgcacaggaagcacggtgctgtacttctttgcagtatac

SEQ ID NO: 440430 - DNA, 80 bp, Homo sapiens
gacggcactgcggatgtttaacaggacctacaagctctattcctacaggcgatcagtgggtgaccgcggctgcgagggac

SEQ ID NO: 440431 - DNA, 95 bp, Homo sapiens
atcgactcagtcagtctcttggtttggtctctaaaagtaaaggagcctggagaaagttcttgtggaattcagtcacaaggagttgtttgatttct

SEQ ID NO: 440432 - DNA, 75 bp, Homo sapiens
gcgaatatcgtcatcgttagaaggtgtcccgacccaggctaagcttgagcatggctgagcaggagcccacagccg

SEQ ID NO: 440433 - DNA, 100 bp, Homo sapiens
caggaagcagcccccagcctcggacgccgtggcccttgggagagaggtggcggccaaagccctggagatgggcgtgtttggcgcatatttcaacgtgctc

SEQ ID NO: 440434 - DNA, 94 bp, Homo sapiens
gccgagcgcggcccgggcgccatcgagccttggcggcggacgtgcagggagtggggaaggccagggccagattctgcagcgcttcccagagaag

SEQ ID NO: 440435 - DNA, 80 bp, Homo sapiens
ctcagccatttactaactgtgtgaccttagggcagtgccaaggagctgtcccctgccgccttggagaaaaggcggcggag

SEQ ID NO: 440436 - DNA, 82 bp, Homo sapiens
cctcggctggtggcaagtattgctgtgggtgctgggacttcccgtccgcggcgtggaggggttacacatcattttggaatga

SEQ ID NO: 440437 - DNA, 75 bp, Homo sapiens
ctaaggagctcaaaacatcctgaggacagtgcctggagggttgtgagtcccggcccagcccctccacccccctgc

SEQ ID NO: 440438 - DNA, 100 bp, Homo sapiens
ggtggacacgcccatccttggacttcctgaaaatgacccaggcgtccgacctccgatcatgaacgggcccctgcacccgcggcccctggtggcattgctg

SEQ ID NO: 440439 - DNA, 100 bp, Homo sapiens
aaaccagcaagacgtcccagataagtttaaggtggtggtggtgctgcagcaggtcttccagcttatccagaaggtgctgagcaaatggttgaatgatgcc

SEQ ID NO: 440440 - DNA, 100 bp, Homo sapiens
agattcgcagtggtcgcttcttctccttggcctccaagactgcagagaatgccaccagtggggaaacattagaagaaaatgaagctggggactgaggtgg

SEQ ID NO: 440441 - DNA, 100 bp, Homo sapiens
gcatctacatgttatccaccaacatcctgctggtcaacctgctggtcgccatgtttggtgccggtggtggtgtgcacattgagccccggtatagacagtt

SEQ ID NO: 440442 - DNA, 100 bp, Homo sapiens
ctttgaggatctggaggacggagaggacctgttcaccagcactgtctccaccctagaggtccagagggggcaaacctctttatttaccaccttccacagg

SEQ ID NO: 440443 - DNA, 83 bp, Homo sapiens
cacaaaagttatcaaacccggtggaccatatgtaggtgtaatctagctcctgtggtggagtttgctgcagatgtgggaactaa

SEQ ID NO: 440444 - DNA, 113 bp, Homo sapiens
ggggcacctggccaagatctacgccatgcactggggcacagactccaggagaacatgatcgtgtatgtggaaaagaaagtgctagaagaccctgccatcgccagcgatgaaag

SEQ ID NO: 440445 - DNA, 90 bp, Homo sapiens
atcaaggctgtcacacatcaagttaaatttggtcaacaaaatccacgtcaggaacggaaaacagttcttccttcaaagcatgcagtacct

SEQ ID NO: 440446 - DNA, 90 bp, Homo sapiens
agaaatgcttctttgtgaaattttttggaacagaagatcagtgtgatccctcacatccacaaatctctgattggaaagaagggacagcag

SEQ ID NO: 440447 - DNA, 80 bp, Homo sapiens
ttccttactgtctataacacacagaccttctctttggctccactttgaggctctgatgaacattccagtgctggtgttgg

SEQ ID NO: 440448 - DNA, 82 bp, Homo sapiens
cttggacgactcggagagccgaccaaatacacgctgatcgatgagcaggacatcccgctggtggagagctactcctttgagg

SEQ ID NO: 440449 - DNA, 100 bp, Homo sapiens
acagatgatacctttgatccagaacttgcagcaacaataggtctgtatgagctgttggctgctctgccagcccagctgcagccacatgtggatagccagg

SEQ ID NO: 440450 - DNA, 100 bp, Homo sapiens
gcggggaccgctgtgctctcgaaaccgaccagagggcaaagtgttggagacagttggtgtgtttgaggtgccaaaacagaatggaaaatatgagaccggg

SEQ ID NO: 440451 - DNA, 100 bp, Homo sapiens
cacatccgcacccacacgggcgagaagccctacgagtgcaacatctgcaaggtccgcttcaccagatacggtccgagaactcctgtgtctgatgacgcag

SEQ ID NO: 440452 - DNA, 76 bp, Homo sapiens
gctgggaatcgtgcagggattcttcgggcaagaggattatgacagattacgaccgctgagttatccacaaacagat

SEQ ID NO: 440453 - DNA, 75 bp, Homo sapiens
gcttttgaaaaacactacttacttaaagtatcagtggttgagaagagcttttcggacctgttactaccccaagct

SEQ ID NO: 440454 - DNA, 101 bp, Homo sapiens
gcctggggctctgcacccagcggcccacgcgagatcagcctcccacttttccctggagcaccccacggactccaacctgtctgtgcacacagaaaacccgg

SEQ ID NO: 440455 - DNA, 126 bp, Homo sapiens
cggccctccctttcatcagtcttcccgcgtccgccgattcctcctccttggtcgccgcgtccttggctggcgtcacctgcttcctgctcctgcaccatgaaagtcctgctttgtgacctgctgctg

SEQ ID NO: 440456 - DNA, 75 bp, Homo sapiens
agaacagaatgctaaggaagctgtggcaaaacactcgtgaaactgctcaggccatcaagggtatgcatatacgaa

SEQ ID NO: 440457 - DNA, 50 bp, Homo sapiens
gcggccacggagaagggcgcgatcaagtctcgggttctcatgactccctt

SEQ ID NO: 440458 - DNA, 89 bp, Homo sapiens
agcccgaggcgggagccatgccggagaagcgcgcgggcgcgcaggccgcggggagcacctgggacttcattgacttaactagagagacc

SEQ ID NO: 440459 - DNA, 100 bp, Homo sapiens
ggcctctggaatttagcgctcgcccagctagccgcagtgtctttggtgcaacactaacaaggcttgtctggactacccagttacaagcgtcttgccaccg

SEQ ID NO: 440460 - DNA, 75 bp, Homo sapiens
caactgccttcaccaaaatccactatcccagttgcaggacgaggagcggaggcggcagcagcagttagaagagat

SEQ ID NO: 440461 - DNA, 75 bp, Homo sapiens
gtcctgcaccgctcatgctcgcccggctttggggtcaagcagattggcaaaatggcaatacctgtgctttggaag

SEQ ID NO: 440462 - DNA, 99 bp, Homo sapiens
agccgggcgggggctggggccgtacacctggcggctggaacggaaccgcttagaaaatgtgcctgagtgggtatgtgaaagccgaaagctagaagtttt

SEQ ID NO: 440463 - DNA, 100 bp, Homo sapiens
agaaaaaaataaactcctatttgtttatggcaagattcacaatgacatcctttcaagaagtcccattgcagacttccaactttgcccatgtcatctttca

SEQ ID NO: 440464 - DNA, 82 bp, Homo sapiens
tcccagccgcgcggcttcctccagacctctcggcgcggggtcctgccctccggaggagcagcctcgaggctggtggttttca

SEQ ID NO: 440465 - DNA, 82 bp, Homo sapiens
ccaagatgagcagggcccttgcggagttccgcgtccgaggtgtgaaggccgactcgcgggccgctgcacccaccgccaagga

SEQ ID NO: 440466 - DNA, 100 bp, Homo sapiens
ccataatggagaaatgaacaggtatctaaagaatagagtgaaacccttctcagaaaatgaagtttgaaagtctctcaagcatattgaaacttcctggaaa

SEQ ID NO: 440467 - DNA, 100 bp, Homo sapiens
cgaattcagaaggatatcgacgtcgtgatccagaagtccagagctgaggactgcctgtttgcaggtttttctatatgagtggagaagacagctgttacca

SEQ ID NO: 440468 - DNA, 100 bp, Homo sapiens
ggcggcgcccagtggcgtccacctgctcgtccgcagagccatcatcgtctacagactgccgtggacctggaaatgcagcaagctcctgatgaaatccatc

SEQ ID NO: 440469 - DNA, 89 bp, Homo sapiens
gtcaggggcacagagagatggagagagacctagttaggtttgatgaacttgtgaaaaaattcaaagtcgaatatcatgctggtggctct

SEQ ID NO: 440470 - DNA, 90 bp, Homo sapiens
cagtcacagaaacatcatccagttttatggagtaattcttgaacctcccaactatggcattgtcacaggaaacaatgtgatgagaaccat

SEQ ID NO: 440471 - DNA, 97 bp, Homo sapiens
aaagccccggccacctcggcctcttcctgttgcaccaggttcttcgaaaactgaagcagatgttgaacaacaaggaccaagaatcgccttcagccct

SEQ ID NO: 440472 - DNA, 82 bp, Homo sapiens
tccttctccactttcgccagcccgtgccgcgagcgcggcctgcaggagcccgcgggaggactcagactccagcacttccagc

SEQ ID NO: 440473 - DNA, 75 bp, Homo sapiens
cccagggcagccgccccgccgagtcgcaggtcgcaatggaagaagagatcgccgcgctggtcattgacaatggct

SEQ ID NO: 440474 - DNA, 112 bp, Homo sapiens
tcacgaaatggattggagtgaaccggagaccccgaaaacggaagcgcagggagaaggaagaggtgtttgaaaaggtgaccaagaatatggcccaggtgaccaaagccctgga

SEQ ID NO: 440475 - DNA, 101 bp, Homo sapiens
ttacagtgtttccaacatcttctcataaaaggggaaagcttcatagcctcaaccatgaaggaaaccagctgcatcccatatctatcaaaatcaatttgttc

SEQ ID NO: 440476 - DNA, 75 bp, Homo sapiens
gacctggccagctgccgcgactgggaggagcgccggaacgccgaggcccagacccatcagccacaccccgtctta

SEQ ID NO: 440477 - DNA, 86 bp, Homo sapiens
gcgagctagccgggagttacaccgccaccgccaggtcagcccaaggccaaccccactgtcactctgttcccgccctcctctgagga

SEQ ID NO: 440478 - DNA, 83 bp, Homo sapiens
ctagtcgtggccggaggagtctcagagctgtcagaaaggtcatcatcagatttgaaatatttaaagtggatacaaaactattt

SEQ ID NO: 440479 - DNA, 98 bp, Homo sapiens
cagggggccatgcagcacttcagccaaagattcctctaccagctccattttcagtccggcagcacacattactctgcgtacaaaacgattgaacacca

SEQ ID NO: 440480 - DNA, 90 bp, Homo sapiens
gcgcctggcctgcgcgccgctgcccgcgccacagtgtttgtggagaaggtgctgcagagactttttcctcctgttccaagtggccaagga

SEQ ID NO: 440481 - DNA, 82 bp, Homo sapiens
ggcttcaaagagaaaaggcaacatcctgtcacaggccatgctctggcaaaaacgattttttatcaagcagaaatgcatcgaa

SEQ ID NO: 440482 - DNA, 75 bp, Homo sapiens
gttttcgtgatcttcagaccccaggttctttggactgggcgttcatcaacaccaacatctttgccaggaccaaga

SEQ ID NO: 440483 - DNA, 90 bp, Homo sapiens
ggctgggcgttcatctaccacgcctacgtaacaacctccctcctagcatgatgacccgcagaaacacctacgtttgcacagaacgcccgg

SEQ ID NO: 440484 - DNA, 82 bp, Homo sapiens
gaaattctgtattgctggtcagcaacctcaacccagaggtgcatctgcagacgcagcaggaggtgaagctgcgcatgacggg

SEQ ID NO: 440485 - DNA, 88 bp, Homo sapiens
tggcgctcctgctcctccaggcgctgcccagccccttgtcagccagggctgaacccccgcagtgagaaagatcagtctaaagaaaagg

SEQ ID NO: 440486 - DNA, 98 bp, Homo sapiens
accatggagctcgcccccaacttccaggaccagaagcccctggtccctctgtctccctttcccctatgccaccctcagaggtcaaactccaaagtggg

SEQ ID NO: 440487 - DNA, 104 bp, Homo sapiens
tccgggaggcgcttccacctctccaccaccgaccgcgtcatcaaaggtctcagctgagtctgctctgatcacccaacaagacctagctccccagcagagagcgg

SEQ ID NO: 440488 - DNA, 88 bp, Homo sapiens
gagaccaccctggccaacatgggtccggacgttcccacgggactcaccactggggcacgacacggtgcgtgcactcatgtactacgcc

SEQ ID NO: 440489 - DNA, 99 bp, Homo sapiens
gccagtcttggggacagtgtcagcgcatggaagaggagatggttcgtgttacgcagtggccgtttaactggagatccagatgttttggaatattacaaa

SEQ ID NO: 440490 - DNA, 82 bp, Homo sapiens
gtctctctgctgcggcgcggggaccgctgtgctctcgcaaattgtggctactaatttgccccctgaagatcaagatggctct

SEQ ID NO: 440491 - DNA, 75 bp, Homo sapiens
tgatttaaacaagagatttccacagaagattttctggcatccttaaatcttgtgtcaaggattggttataatata

SEQ ID NO: 440492 - DNA, 98 bp, Homo sapiens
gtgaggcttcatgaagatggcgccagaacgaagaccctactaggcaagtttccccctcactgtgctggagggagaagaccctgggatttctgagcgag

SEQ ID NO: 440493 - DNA, 100 bp, Homo sapiens
ttgggattagatccttgactccttgcgtcagtagttaaggacccttctgcagaggggctgtcggaggaggttcctgtggtgtttgaggagctgccggtgg

SEQ ID NO: 440494 - DNA, 101 bp, Homo sapiens
ggtcaccaggaaggggacgggacggacggtgatggtggtcgccgcggcggcgtgtgcgcccctcagacagaaccaagttgtattgttagacacactggaac

SEQ ID NO: 440495 - DNA, 76 bp, Homo sapiens
gagtgcttctttcttggagctgaccatgagagcctgttacctatccataaacccccaaaaggatgagacgctagag

SEQ ID NO: 440496 - DNA, 100 bp, Homo sapiens
cagtttgaggacctcctggtgcgcatcctgctgctggctgcccttgtctcctttgtggaacggcacatgtgtgatggggacattgttatcttcaaccggc

SEQ ID NO: 440497 - DNA, 75 bp, Homo sapiens
gcggacctgcggactagcgaacccggagacctatgaggaccagcacagcagtgaggaggaggaggaagaggaaga

SEQ ID NO: 440498 - DNA, 75 bp, Homo sapiens
ctgagcgggcggtcattcgcatcgcaggtggaacacctgcagcaggagactgctgctctgaaaaagcaaatgcaa

SEQ ID NO: 440499 - DNA, 127 bp, Homo sapiens
cgcggacctccagtggccggctccggaggcttggtgactccagtggcccaggctgctctttggcgtaaattgcaatcgattagggatcgtttctcagaatcaagttagaagtgagagttcagataag

SEQ ID NO: 440500 - DNA, 74 bp, Homo sapiens
tacaaaagaagcagctcaggaggctgttaaactggcagctggtgatgctatttctgacatgctggtgattgaag

SEQ ID NO: 440501 - DNA, 100 bp, Homo sapiens
acaagtgacatcaactctttttcagatctcactaggggaaggactcatcacagctggggctcagctggtggagctggacttaagcgacaacgcattcggg

SEQ ID NO: 440502 - DNA, 100 bp, Homo sapiens
cagctgtcggccaagctcatcgccaacgggccgagaactactggtggcgtggccagaacacacggacgctgtgtgtggggcccttccctcgcaacgtggt

SEQ ID NO: 440503 - DNA, 97 bp, Homo sapiens
aggaaagcatccgggctcacgtgatggcctcccaccattccaagcggagaggccgggcgtcttctgagagtcagctgtcggaaaaggtaacagaaga

SEQ ID NO: 440504 - DNA, 50 bp, Homo sapiens
ggaggcagaggcacttatgcttgtcagatggagattgtaaaaaacttacc

SEQ ID NO: 440505 - DNA, 50 bp, Homo sapiens
tatttatccaacagctcctcccaggccaagaataaaatctttatgaacta

SEQ ID NO: 440506 - DNA, 74 bp, Homo sapiens
ctgccaggcaaggccatcttagaggttaccacattctcatctggagccaggaggaagccaggacacggaagtga

SEQ ID NO: 440507 - DNA, 140 bp, Homo sapiens
gctcagcaacatcgctatgcaggtgcggaagctggtgggcactcagcaccctctgcttaccacagccagttggaaaatggatataccttatttgattatgatgttggactgaatgatataattcagctgctagttcgccc

SEQ ID NO: 440508 - DNA, 100 bp, Homo sapiens
ctgcagcggagcccacgagaggcagcgccatggcggagcagacctactcgtgactgtgccctgtccacggtgcctcctgcatgtcctgctgccctgagct

SEQ ID NO: 440509 - DNA, 100 bp, Homo sapiens
gatggtgttgtgagagatttctgcagtgaagattgctgtaaaaaatttcaggattggtactacaagaaatccgcgaggaggagcgtcggatattggaaaa

SEQ ID NO: 440510 - DNA, 100 bp, Homo sapiens
atagtgatacactcaagctgttgaaaatgagcagctgtcctcatgtctctccagcaggcatggatcctgaaaaattagagcgaatccagctccccgtgcc

SEQ ID NO: 440511 - DNA, 98 bp, Homo sapiens
agatttgcactacccagcaccagctgaccatgcacattcgccagagctgaagaagcaggtggagagtgccgagctgaagaaccagcggctcaaggagg

SEQ ID NO: 440512 - DNA, 100 bp, Homo sapiens
tgaagcctcaggaccatccaagaaaacagcaaaacttcacgtagcggtgaaggttcatatccagctttcagagtggcaccgtgcaatttttcttccacag

SEQ ID NO: 440513 - DNA, 97 bp, Homo sapiens
atgggccctggcggtggacgagcaggaagctgcggctgagtcggttcacaataaaggtgctaagaaagagaatgtaagacaggaaaataattaaata

SEQ ID NO: 440514 - DNA, 90 bp, Homo sapiens
tgaaggaagaatatggagagagccctttgcaggatgcagaagaagccaaaaacattctggatttaaggaacagtgacaccccaccccagt

SEQ ID NO: 440515 - DNA, 75 bp, Homo sapiens
acgaggatgatgcggaaattaaccccaaggacccccgcagcaaacacaagtttaagatccacacgtactccagcc

SEQ ID NO: 440516 - DNA, 101 bp, Homo sapiens
aaggaatgattgagattgtggaggaggaatatcaacttgcaaggccttctgatgcaaacagaaaggaaatgttgtttggaagccttgctagacctggacat

SEQ ID NO: 440517 - DNA, 100 bp, Homo sapiens
aaaggttgaagttcaagagctcagaccctaaaagacagggtctcactgcattgcctagtctggtcacggactcctggcctcaagtgatcctcctgcctca

SEQ ID NO: 440518 - DNA, 74 bp, Homo sapiens
gggcactcagagagaaggcatgtctttggggagtcagatgagctgattgccatcgcaacaggagggcggatcgt

SEQ ID NO: 440519 - DNA, 50 bp, Homo sapiens
ctaacctcggggaccgagatgcagtgtgcagctgtgtgcacggagtgtgc

SEQ ID NO: 440520 - DNA, 90 bp, Homo sapiens
caagtaccgcctgggacggaagatcgggagcgggtccttcggagatatctacctggctccgtaatgggaggaatcctttagatctcattg

SEQ ID NO: 440521 - DNA, 100 bp, Homo sapiens
gccgcaagacattgtttctctccctctgcccccccttccccacgcaaccccagatccatttacactttacagcttctgaattcccttctgagttaatgtc

SEQ ID NO: 440522 - DNA, 100 bp, Homo sapiens
cagctagccatcttctaattttcattccttcaaagaaccccagctcaaagggattgtgacaaggttattcagccagcagggatacttcctgcagatgcac

SEQ ID NO: 440523 - DNA, 96 bp, Homo sapiens
aagtaagcaagcatgagaagagagggcagcactggtctatgaaggcctagacatcatcaccaacaaggtttctgcccaagagcagagaatctgccg

SEQ ID NO: 440524 - DNA, 90 bp, Homo sapiens
attaccttcactctgggaaaaggcactgaagttgccgagcccaggaagtgcgtcccctccgtggtcgtgggcgtcgtgggcatgggccac

SEQ ID NO: 440525 - DNA, 100 bp, Homo sapiens
ccgtgctttcccaagcctggaagaactcgtcatgctctttgtagcgtggtgcttctgttgctcacagtcgtgagatggagaataaagaaactctcaaagg

SEQ ID NO: 440526 - DNA, 75 bp, Homo sapiens
ctcgacctgctaacagaactggaccttttcggaatttaaactttgggataatgagctgcagtatgtggaccaact

SEQ ID NO: 440527 - DNA, 82 bp, Homo sapiens
tttgttaaggattccaagtaactcttatttgacgcaggaggagggagacgcactgatgacatcgggccgctcctgcagctcg

SEQ ID NO: 440528 - DNA, 75 bp, Homo sapiens
ggggaccgcgcccgcctcatttgcgccttgcagcactgctggaccaggacttaaacaggcacaatcaaaaccatc

SEQ ID NO: 440529 - DNA, 75 bp, Homo sapiens
cgggagcccgccggcggtggcgcggcggagacccggctggattcaaccctatgaaaagataaaggccaggggctt

SEQ ID NO: 440530 - DNA, 90 bp, Homo sapiens
acctgctacagccgtgaaacagggactcccatctggacgtctcgcctgccccactgcgtttccttatttagtgtctctgacaaaaccggc

SEQ ID NO: 440531 - DNA, 98 bp, Homo sapiens
atggacgaagccttcaaatccatcaagctcatcaaaagggcagctgtgcggagggtagtggcagccatgaaccggatggaccagaagaagcacgagaa

SEQ ID NO: 440532 - DNA, 97 bp, Homo sapiens
gagctggagaacctgaagtagcaaaggcaagaaggcaacgacgttccatctgtggaaggacctaccaaccaggagtgattggggcagatgtgagagg

SEQ ID NO: 440533 - DNA, 90 bp, Homo sapiens
ggataacatccctccagaagatgagtaatcaagtcagaggattatatgacttttatctgcctagagaagaactatggatctacaacatgg

SEQ ID NO: 440534 - DNA, 100 bp, Homo sapiens
gcctgcatgccaattctaagctcttcaggatcaaattcctctgtgacgagggtgcaggtatctctggggactacatcgatcgcgtggacgagcccttgtc

SEQ ID NO: 440535 - DNA, 74 bp, Homo sapiens
ttgccgcggcctgccgcaatggaaacatctatattctgagaagtgcagctctccggctgggatcctggttgacg

SEQ ID NO: 440536 - DNA, 75 bp, Homo sapiens
agaggaatagtctacaaaggaagacttgtaacctggagaagagcaatggctgccatccggaagaaactggtgatt

SEQ ID NO: 440537 - DNA, 90 bp, Homo sapiens
gccaagccaagctcaacctcaaatcagtactgaggggtgctggagaatctggtaaaagcaccattgtgaagcagatgaggatcctgcatg

SEQ ID NO: 440538 - DNA, 101 bp, Homo sapiens
gaccgcagccctggacacatcctggagatgcccaaagatgagctgcccaaccataactgcattaagcacctgcgctcagtggtacagcagcagcagacacg

SEQ ID NO: 440539 - DNA, 100 bp, Homo sapiens
ttcgccaaagccttaatttatctgaaagtaatggaggggaaagttccagtcgcagcgctgagaagcgatcagctgaagaagaagctgccgacctcccaac

SEQ ID NO: 440540 - DNA, 100 bp, Homo sapiens
ctggagtgtacgggcccgcgggccacggccatgcagcccctggaggccctggccaacgtcaacattgggagcctcatctgcaatgtaggggccggtggac

SEQ ID NO: 440541 - DNA, 75 bp, Homo sapiens
gtcagccagaacgtggacgggctccatgtgcgctcaggcttccccagtacttgctggaaaataaccggatggtga

SEQ ID NO: 440542 - DNA, 139 bp, Homo sapiens
cctcgagaggtattaggcagtgctacaagggatcaagatcagctccaggcctgggaaagtgaagaaaatggactgactccaaagaaaaaaattcaggtgaattcaaaaccttcaattcagcccaagcctttattgcttc

SEQ ID NO: 440543 - DNA, 78 bp, Homo sapiens
aaatcttccaaagaaaatcggaagagaagtcaacatgaatctgggagaatagggtacacatctttctggaatgactgc

SEQ ID NO: 440544 - DNA, 50 bp, Homo sapiens
tgcgacaacgcggcgcagaagaacaagatcactcaaggtgaaggataatc

SEQ ID NO: 440545 - DNA, 83 bp, Homo sapiens
cggcaaccaccatcggaaataaagggtcaccatgaagttcaatcccttcgttacctcggaccgcagtaaaaaccgcaaacgtc

SEQ ID NO: 440546 - DNA, 98 bp, Homo sapiens
tcgtggggctgcagtactcgggcaagaccaccttcgtcaatgtcatcgcggtgctggagaatctggtaaaagcaccattgtgaagcagatgaggatcc

SEQ ID NO: 440547 - DNA, 75 bp, Homo sapiens
cgaatcggtggccatgatctctaggatgctgaaatttctggaaaagacaatggaaatcaggggcaggaagagaac

SEQ ID NO: 440548 - DNA, 76 bp, Homo sapiens
gtgacacagttcacatcctggagatgtacgagggtggcatccttagctgggcctggagggcaagtggaaatagaac

SEQ ID NO: 440549 - DNA, 49 bp, Homo sapiens
ttggagacggacttgcttccgctgcatcttcctcccgtgaggctggccg

SEQ ID NO: 440550 - DNA, 51 bp, Homo sapiens
ggactggaacctctgggcccacacatggatgggtgcaaaaaagagctgccc

SEQ ID NO: 440551 - DNA, 75 bp, Homo sapiens
caactttttgcggattgttcttgcttccagaactgaagcgctgcggcatggcgcgcgcctgcctccaggccgtca

SEQ ID NO: 440552 - DNA, 100 bp, Homo sapiens
tgtcgcgccgtgacctgtacaggtcgcgggagtcgtagggaggacgccgggacacctggaagccgagaaatgatggagtttgacgagaaggacttacgac

SEQ ID NO: 440553 - DNA, 100 bp, Homo sapiens
cccagaggtcgtggaggtggccgtggaggcagaggtggcatggggaagtgtttggattgtgagctatttcagaactgttctcaggactcattattttaac

SEQ ID NO: 440554 - DNA, 90 bp, Homo sapiens
gatgaagtgcagaggtttttttctgagatctggttggagttggagggtgagagaaaatgaattctaatttacctgcagagaacttaacca

SEQ ID NO: 440555 - DNA, 75 bp, Homo sapiens
gcgaaggccgccgaacctgcctggctagccggcgacttgagtgacgatacggcaagaagaagctgaaatacctgc

SEQ ID NO: 440556 - DNA, 83 bp, Homo sapiens
tgataaaaagagatgtggggggattctcgacctgctaacagaactggaccttttcgaaataaacggtgactggcaaagagctg

SEQ ID NO: 440557 - DNA, 100 bp, Homo sapiens
ctgccactgcttcgccacctacaccttctgctcaggctcctggtagctcatatccccctcacatgcagggtatgttagagcccaccaaggaaccactgaa

SEQ ID NO: 440558 - DNA, 100 bp, Homo sapiens
tctcctgaagaagattccactcgtggtatgagagtggataatataatcaactcctctgcctgaagggcgctatattcctcctcatttaaggaaccgagaa

SEQ ID NO: 440559 - DNA, 83 bp, Homo sapiens
gccagatgcctggaagatcagaggctcacattccagtggaatggatatgaaagcatacctgagatctatgatcccacatctgg

SEQ ID NO: 440560 - DNA, 100 bp, Homo sapiens
ggcaatcgagctgttggataaagtaaataatccagatcattccacttaccatgatttcgatgatgatgatcctgaggtcctgaggcacgtgaatggccag

SEQ ID NO: 440561 - DNA, 76 bp, Homo sapiens
ttttcctaagctcaactctagccagctaggttcctggtgctttggggcaggggaaatgctgtctgtagctgagcac

SEQ ID NO: 440562 - DNA, 88 bp, Homo sapiens
tcagcgccctcgccgccacgctgtgcttctcgcttcagaacattttctccaaaaaggaggagatgttaaagtaacccatcttgcagga

SEQ ID NO: 440563 - DNA, 50 bp, Homo sapiens
tggatcaacaccggggagtctgcgggcaatcttgctgccaatgatctctc

SEQ ID NO: 440564 - DNA, 100 bp, Homo sapiens
ctaagtttattcctccaaagcaaaccaactgagaatgcagattctgtgtgagctgtgcccgtctggctgagatgaggcaaaaagaaatccccagggtcct

SEQ ID NO: 440565 - DNA, 88 bp, Homo sapiens
ggcggccaagatgtccgtgcctctgattgggcagaaagtggcccatgctctggcagagggactcggagtaatcgcctgcattggggag

SEQ ID NO: 440566 - DNA, 90 bp, Homo sapiens
aaaaagtatcgtcgagaagcctatcatcggtatcactggacaggccatggctccacggtcccggcgacgaaggcacaagaaacctccctc

SEQ ID NO: 440567 - DNA, 100 bp, Homo sapiens
taagcagctggccagcggacttctggagttagcctttgcttttggaggactggcatctatcgagctgtgcctattcgagtcaatccaagagtgagtaatg

SEQ ID NO: 440568 - DNA, 75 bp, Homo sapiens
tcctgggatattctttgttgagagatcacagattctgctggccatattctctactccaaagaggatgcaaccaag

SEQ ID NO: 440569 - DNA, 50 bp, Homo sapiens
catgtatgaaggtgtaggaagaatatatggtttggagtgcctttttcgat

SEQ ID NO: 440570 - DNA, 76 bp, Homo sapiens
ttctctggtccacaaaatgcttcatctcttattggctctaccagtgcacctggacagggaggaatcctggctcagc

SEQ ID NO: 440571 - DNA, 100 bp, Homo sapiens
tcaccgctgtcacctgcacggtgtggctggcggcctacggactcttcaccctctgcgagggtacgccattaagtcgggctgatttaagggctgtcaacat

SEQ ID NO: 440572 - DNA, 100 bp, Homo sapiens
ggaagaactggcccagcggaggttcccgcttctgaagcgtgggaggcggaagagactgcagccagcagtacccctggaccagaggaggtagacagcgcct

SEQ ID NO: 440573 - DNA, 101 bp, Homo sapiens
cgaggacttcacggagctctggagaaacatgaagttcgggactatcttctggtaaaagctgctgaaacatgtcaagagccgaaggaattcagattgccgaa

SEQ ID NO: 440574 - DNA, 100 bp, Homo sapiens
cacaagcagatctactactcggacaagtacttcgacgaacactacgagtaccggaaagaacagcagtgtttcaggaattttcacattccagaagaggcgt

SEQ ID NO: 440575 - DNA, 90 bp, Homo sapiens
ggcttattcaggcccctgcagactttgccccagaatggtttatgctaaaactatcgatgggcaacagactattattgcatgtattgaaag

SEQ ID NO: 440576 - DNA, 75 bp, Homo sapiens
acaaacactgggttgaccctctgcctgatggggagacaatccagggtctgagggcgaatctcaccagtgccatag

SEQ ID NO: 440577 - DNA, 82 bp, Homo sapiens
gtcagaagtgtattgataaatggcaagataacccctgtgacagaaggctactgttgctgtaacaaagggcatacatacattt

SEQ ID NO: 440578 - DNA, 100 bp, Homo sapiens
tgtgaagaagctgtaactcttttaaagtatatgtatgacttttaaaagagagagcttgtgaaactgagggaatagcatctgcaaacatagagaattctgg

SEQ ID NO: 440579 - DNA, 50 bp, Homo sapiens
caagaaattactgtctcaagtgatacgcatgatgccttcttctgtagagt

SEQ ID NO: 440580 - DNA, 75 bp, Homo sapiens
atgcaattatggttggcagcactgtaacctttatagctggagtttatcagacctcccagctaactggaacctgtg

SEQ ID NO: 440581 - DNA, 100 bp, Homo sapiens
acaatcataaagaaatccaacttaccttgtcaaatgatgccaatgggtggaatgatgccacctggaccaggaataccacctctgatgcctggaatgccac

SEQ ID NO: 440582 - DNA, 75 bp, Homo sapiens
ggagaaaccaccgtgctggaccgcttttacaatgcaggctcgggttatgtatgattttgctgctgaacctggaaa

SEQ ID NO: 440583 - DNA, 75 bp, Homo sapiens
cgcgagctgggaccagcgtctcggaggcgccgcagtgacaaccatgagtggaaaaaactaattatggttcagcac

SEQ ID NO: 440584 - DNA, 90 bp, Homo sapiens
cggtagcgaaggccgccgaacctgcctggctagccggcgacttgagtgacgagtctcagtggcccttagcagcagctccattcgtgtggc

SEQ ID NO: 440585 - DNA, 80 bp, Homo sapiens
aaggcggcgcccggctcccagaggcacttaaggaaagcttcataaaagccattggtgttggactaggatttgaattgcag

SEQ ID NO: 440586 - DNA, 75 bp, Homo sapiens
aatccacacgtccgtgtgggcgggacagaagcgtttggggcagggagtactgatggtcggcccacctggcacggg

SEQ ID NO: 440587 - DNA, 95 bp, Homo sapiens
ttgagctcgagcgacggcgctggcggagacgccggctgctcctcccctccccgccgctgtcaggaatgacaggaacaagaaaaagaaggagactt

SEQ ID NO: 440588 - DNA, 100 bp, Homo sapiens
cttcacagcacagttcctgggaaggtggagccaccagcctctccctgtgtttctaagacctcagagaaatttggaatctatagacccgcagtttacaatc

SEQ ID NO: 440589 - DNA, 100 bp, Homo sapiens
aagcccaactaaagccccacatttgcagctcattgaaggaaagaaactgctctttgagcgcgggaaggaggccctggagtccgaatttcgcagcctgatg

SEQ ID NO: 440590 - DNA, 75 bp, Homo sapiens
ggccgacttcgatgatcgtgtgtcggatgaggagaaggccaagctataacatcagaaatggtgaatgaatacaag

SEQ ID NO: 440591 - DNA, 82 bp, Homo sapiens
caggacgcccacgagttcctcatcgcggccctggacgtgctccaccgacactgcaaaggatgcttgaagcccacatgcagag

SEQ ID NO: 440592 - DNA, 115 bp, Homo sapiens
cacttttactacaagatttgtaagaaacaaatttatttccaaggatcccctaacaacagtgagagagcaatgcgagcagttggagaaatgtgtaaaggcccgggagcggctagag

SEQ ID NO: 440593 - DNA, 74 bp, Homo sapiens
ctgggcacaagccagcgtcacccatggagcacatggagatgttgaagtctgagcgggaattggacaagataaag

SEQ ID NO: 440594 - DNA, 90 bp, Homo sapiens
ctttcccctgagcctcagcacctgcttgtttggaagttctgaagttgttgataagaagatagaagagtttctttctagctttgaggagaa

SEQ ID NO: 440595 - DNA, 100 bp, Homo sapiens
accacagacgcagtgctactcaacaaactgcacgttgtctgcattcaaaagagcattctattaaagctaccttaatttggcgcttatttttcttaatcat

SEQ ID NO: 440596 - DNA, 83 bp, Homo sapiens
ctcctcgccagcagccgtccggagccagccaacgagcgcaaaatgatgcttcaacacccaggccaggtctctgcctcggaagt

SEQ ID NO: 440597 - DNA, 100 bp, Homo sapiens
cgccgcagtcacggagcgcactgtggcaaaggagcagagaactttgacaagttcttcacacgaggacagcccgtcttaacaccacctgatcagctggtta

SEQ ID NO: 440598 - DNA, 51 bp, Homo sapiens
tccggattccctggaaacatgcaggtgcctttcctgaagactatcttctgg

SEQ ID NO: 440599 - DNA, 98 bp, Homo sapiens
ggaaaccagtggccacagcatctttgtctagccccagtgcagattactgtggcatgatcctccaccattcacactctaccctggactctgggaaggga

SEQ ID NO: 440600 - DNA, 101 bp, Homo sapiens
ggcagggaggagaccggcacccagacaggtggcgacggcagaggaacaatgcagatcttcgtgaagactctgactggtaagaccatcaccctcgaggttga

SEQ ID NO: 440601 - DNA, 100 bp, Homo sapiens
gcagccccaacccatctccagagagaccaagtcttaggaaaagtcctcagtgctgtgggcagtgcccagctactgatgtcccagaaattccagcagttcc

SEQ ID NO: 440602 - DNA, 75 bp, Homo sapiens
agtttttcaccctcacgctgatgaacttgtacttcacgcaggtcaccacaaatggcatcattgctacgagtgaac

SEQ ID NO: 440603 - DNA, 100 bp, Homo sapiens
caggagcggggccggaactggagccgaggcgcaggtggcgctgggttcgatacaagaggctgttttcctagcgtggcttgctgcctttggtaagaacatg

SEQ ID NO: 440604 - DNA, 80 bp, Homo sapiens
gggcgtcaacgccagctgcccaggcgcaagtctgtgtggtccaggtacactaagatgaagacggccaccaacatctacat

SEQ ID NO: 440605 - DNA, 101 bp, Homo sapiens
aggcgctggcccggaggctccagaaacgggtcctgctgctcaccaaggccggtctaattgaagccaacggagaactcaaggtcttcatagaccagaacctt

SEQ ID NO: 440606 - DNA, 74 bp, Homo sapiens
cgccgcgccccgccatgccgctctactccggacttgattattcttagaaatgcacttgacctgcttttgccaaa

SEQ ID NO: 440607 - DNA, 74 bp, Homo sapiens
cctggagcatgatgagcactcttcctggatcagtgacattcgagcaggaaccgccccttcatgcaggaaccaca

SEQ ID NO: 440608 - DNA, 100 bp, Homo sapiens
tagtggattaaaatctcccaagaggaatgacaaacaaccagctcttcaggtcttaaagaaagtgcagaagagatggtcaaaaacaaattggaaggaaagg

SEQ ID NO: 440609 - DNA, 87 bp, Homo sapiens
ggctccggcgtctccgcagcagatcagggaccggctgctgcaggccatcgacccccagagcaacagatcctgaaggagctagacgag

SEQ ID NO: 440610 - DNA, 100 bp, Homo sapiens
acgagagtctcgggtgaaattagagaagacctccaagaagctggtgaactcggtggctggctgtgctgatgacgctcttgctggcctggtggcctgcaac

SEQ ID NO: 440611 - DNA, 82 bp, Homo sapiens
gagctgagtggttgtgtggtcgcgtctcggaaaccggtagcgcttgcagcatggtccagcaccatgtgctaggtcactccca

SEQ ID NO: 440612 - DNA, 83 bp, Homo sapiens
ccaagggagcttctgtcccgaggaccaggggatgcgaaggctctcgtgctcattcccccatgatcgccgtaggaagtgatgac

SEQ ID NO: 440613 - DNA, 75 bp, Homo sapiens
tccatcactcggattggcaggacctggggccaaaagccaagaatttcagaaactgtggaggagtgtcactgtaga

SEQ ID NO: 440614 - DNA, 83 bp, Homo sapiens
gagagctggtacaggaacatgcaaagaccaacatctcttccctaaatggaaacctgataaaaccagaggaggccaaagtctat

SEQ ID NO: 440615 - DNA, 75 bp, Homo sapiens
cgtcactggccctggtggggattgacagccacgggaaggagcatcagatccatgctgctgctgactcggagcccc

SEQ ID NO: 440616 - DNA, 85 bp, Homo sapiens
gtctcgctcgggagcggaaacagcggcagccagaggaaggttatagagatggaatagatgctggcaaagcagttactcttcaaca

SEQ ID NO: 440617 - DNA, 75 bp, Homo sapiens
ggacattctgaagggaggcaaggaggcggactgagcgctcccaattgggggacccagacatggagctgcgggaag

SEQ ID NO: 440618 - DNA, 51 bp, Homo sapiens
ttccggacagcttcgtgctggggcgaccctggacatctttgactacatcta

SEQ ID NO: 440619 - DNA, 82 bp, Homo sapiens
cctggagcctcagttggaagcagccgatccagcctgcggagcctgtggggcagatcatggaagggaagtggttgctgtgtat

SEQ ID NO: 440620 - DNA, 74 bp, Homo sapiens
cacatcttgaaagagaagctcttcctgtgagagttactgaaagctctcgaaattacggttacaatccttctcct

SEQ ID NO: 440621 - DNA, 75 bp, Homo sapiens
cttaaatgctgtgcgctggcaccctcagaacaagactaaggtgtcagtatgttcttcaagctgctctgctcctgg

SEQ ID NO: 440622 - DNA, 74 bp, Homo sapiens
ctggaatggaggctctctggaccctttagaaggaatcctgttcactggggagctctgggagttcttgagctttg

SEQ ID NO: 440623 - DNA, 95 bp, Homo sapiens
gcatcctgcccagccgacgtggggagactttagaagacagctttccatcgacactaggccctttagaccagcctctgaagggaatcctagcgatg

SEQ ID NO: 440624 - DNA, 80 bp, Homo sapiens
ccagacaagatggacaccgcggaggaaggttaatttggagtggcccctggagtcagtttcctacaccatccgaggcccca

SEQ ID NO: 440625 - DNA, 100 bp, Homo sapiens
ctggtcaccgacagggatcacttcatccgaaccctcagcctcaagccgctgctcttcgatatacgagaacgccatgattgctgctggacttgttgacgac

SEQ ID NO: 440626 - DNA, 83 bp, Homo sapiens
tcaccaaggctggctcctcaagaaagaaggtaaggctggcctctctgcagtcagaggtctgagctctgccatggggatagggg

SEQ ID NO: 440627 - DNA, 73 bp, Homo sapiens
tttacaaactggccaagaagggccttactccttcacagatcgtctgcgaaacttgtatctgttttaaagaagg

SEQ ID NO: 440628 - DNA, 116 bp, Homo sapiens
ccgagttcgctgccagccccaagaaggagaccctcatccagctgatgcccttcttcgtgtgtggacactgccagcggctgcagccgacttggaatgacctgggagacaaatacaac

SEQ ID NO: 440629 - DNA, 80 bp, Homo sapiens
accccaagcacgcgtctgtgttggcagaaaggcatgtcagagcgggagcgacaggtgatgaagaagctgaaggaggtggt

SEQ ID NO: 440630 - DNA, 87 bp, Homo sapiens
acttgatagctcaaatttgaaaacaacctttcaggggcaccaccacgaggcgatttgtgggccataccaaggatgtgctgagtgtgg

SEQ ID NO: 440631 - DNA, 101 bp, Homo sapiens
gggctgcctgactgcttcgacaagagtgatgagaaggagtgccataaacaggggtcacatgacgacagaagccaagagggctgcaaagatggaaaagaaga

SEQ ID NO: 440632 - DNA, 94 bp, Homo sapiens
cggagctgggcgcggattcgccgaggcaccgaggcactcagaggagcttccccgggcgctgcctggacaggcctgcctgcgtgctgggacatgt

SEQ ID NO: 440633 - DNA, 100 bp, Homo sapiens
gcgagagtgaacgattcaacccgggggagctcagataaccgtctcctcaggaggaatgttggttcagaaactgaacaccaatgatctccagtccgaaaga

SEQ ID NO: 440634 - DNA, 88 bp, Homo sapiens
tgatcctgccatccgacgtccagtgacctgaaaaaaatgtctggatttctagagggcttgagatgctcagaatgcattgactgggggg

SEQ ID NO: 440635 - DNA, 100 bp, Homo sapiens
ggaaggacgtgctcccgtggttgcgggcgcagcgggcagtgtcggaggccagcggggccggaagcggcggcgcaggtttgaagaagaactgaccagcaag

SEQ ID NO: 440636 - DNA, 80 bp, Homo sapiens
gcccccgtaacctgcgcgctgccctagggcccggccgacccgcggcccggaagctcttcgtgggcggtcttgactggagc

SEQ ID NO: 440637 - DNA, 75 bp, Homo sapiens
gattcagtccttcacacagttccctggaaatatacaagaaaggtggctacaagataaccttactttaagaaaaag

SEQ ID NO: 440638 - DNA, 85 bp, Homo sapiens
gagcaatgacattgggggcctgtggaaattttcacccatgactgaagagttgctgaaacaacaaaagctgaattcacatgagacc

SEQ ID NO: 440639 - DNA, 98 bp, Homo sapiens
ccagaatatacagaaccagatgctgcagaggaagaagccattagatggtggagaaaggtgatgatgaacagtctacacagatggctgcaagttgggaa

SEQ ID NO: 440640 - DNA, 90 bp, Homo sapiens
cgggagagaagatgccgcagcccgagtcccagaaggcggcgatcctgggctgcgggcaaggcggttcctgatgttattagcagcataagg

SEQ ID NO: 440641 - DNA, 100 bp, Homo sapiens
aaagctgatagagaagattcttctcaacatttctgcagactgcctcaacagagtgataggagccaaaaacctgtatatcatctccgtgaaggggatcaag

SEQ ID NO: 440642 - DNA, 100 bp, Homo sapiens
gcggcctgtgtgtcaacgacctggcggtggggctgcggcgcctgggactgcaccgcaccgagggcgagctccagaaatggtggagtcaatgaagaaagta

SEQ ID NO: 440643 - DNA, 95 bp, Homo sapiens
gatgttgctaaatgtagacaatggttagagaagaattttccaaatgaatttgcaaaacttactgtagggttattggggctgtgccatcggcaaag

SEQ ID NO: 440644 - DNA, 100 bp, Homo sapiens
ctgaccctgcagcatctaccgctcactgtagaccatctcaagcagggtgtgggccgaagatatgctcatgtggtgttgaggaaagcagacattgacctca

SEQ ID NO: 440645 - DNA, 98 bp, Homo sapiens
gcagctgccatggccagaaccaaagtggaaatagcaaattcaaggagaatcctcattgacactggagaaccagcaattccagaatacatcagctgttt

SEQ ID NO: 440646 - DNA, 96 bp, Homo sapiens
agccaggcactgggaaacaaggtttggtgccagagattttggtggcttccaagactgctttttcagagacaggacgaaaatgatgatgacgatgac

SEQ ID NO: 440647 - DNA, 100 bp, Homo sapiens
ctttatctatggttatgtggatgcagcatataagccaggcatgtctcccgaggagtgcaggcgcttcaccacagacggttgcaaaagcttctcatttcag

SEQ ID NO: 440648 - DNA, 74 bp, Homo sapiens
ggagaagtgctggaagctcatggacaagcttcctgcctgacacagctcacttcaagaagtgcacaatgtcagaa

SEQ ID NO: 440649 - DNA, 95 bp, Homo sapiens
aaatagacgcaccattgaagttaaccggtgtaggagaagaaatccgcagaagcttattaaagttaaggctgccaaacgagggattctttcatctg

SEQ ID NO: 440650 - DNA, 100 bp, Homo sapiens
acatgacccaggcctatgccaatcagcatttcacattcctcatggttggttcaaaggcagttccggcgaggggggagcctcagcaggattgctgtgtgaa

SEQ ID NO: 440651 - DNA, 78 bp, Homo sapiens
ggacctagacctggaatcgcccaagtccctctactcgcgaggctgcatgttaaatggccaagaggtgaggcttactat

SEQ ID NO: 440652 - DNA, 98 bp, Homo sapiens
ccaaacgcacgagtattacccctatctcagcagtgatggggagagccatagcgggagtctccggtggactgcagcgttagcaaatgcagcaagctggt

SEQ ID NO: 440653 - DNA, 82 bp, Homo sapiens
actggtgaaatcgcaaactgggcgtctgttccggcgccggacccctatttgcaaagaaaaccagtctatccaagaccaggca

SEQ ID NO: 440654 - DNA, 50 bp, Homo sapiens
tatgtgattgatcaaggagagacggatgagctgccgttatactgttctgg

SEQ ID NO: 440655 - DNA, 100 bp, Homo sapiens
caaacttgggaataaaaagtattgtaacagctgaagtgtcttcaatgcctgcttattcctcgaggtctgaacaagaaccactgacgcagaacgtgaaaac

SEQ ID NO: 440656 - DNA, 75 bp, Homo sapiens
ccgccgctctcgctcctctggccaccgcccctgggaagcccttttggaaaggtgactgctacattgagaaacttg

SEQ ID NO: 440657 - DNA, 100 bp, Homo sapiens
cagttcaccaccaccgtgcaggtcgtcatcttcataggctcgctgctcggtgacttaagagattaaaattaatttggttgctgttggttctgaacaaata

SEQ ID NO: 440658 - DNA, 98 bp, Homo sapiens
tcggcggccaagcccccgaccgggactcacaccacccggcaagaactgctcactacggctccctgccccagaagtcacacggccggacccaagatgaa

SEQ ID NO: 440659 - DNA, 100 bp, Homo sapiens
tcgcctcctccagctgttgttgctgctgggccatttctgagcagtggaggtttcaagtaatccactaacaaccagttccaaattctgtcatcaaatcctg

SEQ ID NO: 440660 - DNA, 83 bp, Homo sapiens
ttcaccttcggcagccggctgtacgcacacaccatcgcaggagcccccacgccccgtgcacccagcacccttaccagaagctc

SEQ ID NO: 440661 - DNA, 97 bp, Homo sapiens
tcttctggctcagtggggatgaagtcatgtacacccactggaaccgggaccagcccggtgaccctggcagcaaccccaacaaacgccagaggcagcc

SEQ ID NO: 440662 - DNA, 95 bp, Homo sapiens
aaaggccaatttcatgaatttcaagagagtaccattggggtttatcatgcaatctacttggaagaaatgattgcctcagaagttgctcgaaaact

SEQ ID NO: 440663 - DNA, 100 bp, Homo sapiens
gagaattacgggaatgtgttctcactgggtggtgaaaacaggaatgagaacgaggagtcaacctcaaaggctgaaacctcggaagattcagcatcacgcg

SEQ ID NO: 440664 - DNA, 82 bp, Homo sapiens
tgcctgtgcgcgcgtgcgcggacatggcctcaaacgcaaaatgatgcttcaacacccaggccaggtctctgcctcggaagtg

SEQ ID NO: 440665 - DNA, 82 bp, Homo sapiens
ggacgacgacgacgaggaagaggaggtttctgagaactgccattggatgtccagaatcccctgtagttgataatgttgggaa

SEQ ID NO: 440666 - DNA, 100 bp, Homo sapiens
agagaaagagtggatttcagcctgcacggatggtcttgaaacacaaatggtttttggaacagctggaggaaatggaagaacgccagaggcagttaagaaa

SEQ ID NO: 440667 - DNA, 96 bp, Homo sapiens
cttgggcccagccacacaggtggttcctgtccagccccctcacctcatatctcagccatacaatactttcattcagaaaaccaagaagctctacat

SEQ ID NO: 440668 - DNA, 75 bp, Homo sapiens
ctggcagcattcagccagtattttaggtgaaaggtgtagcagtcactcggcctacacccacagcatcgaccttgt

SEQ ID NO: 440669 - DNA, 74 bp, Homo sapiens
ggcctggtgggcccagtcctcggtgcggcgcggccaggtgagatttgtggatttaaaattcacgggcagaatgt

SEQ ID NO: 440670 - DNA, 83 bp, Homo sapiens
cggtgagcgcgtttcccgcctgagcgcaactagcggcgggtcgtgggcacctccagaccattaaaaatctcaagtgacgactt

SEQ ID NO: 440671 - DNA, 48 bp, Homo sapiens
gaagctgagaggacaaagctcactgggtgttgctaacaaccacaagca

SEQ ID NO: 440672 - DNA, 100 bp, Homo sapiens
tttgctgccaaaagggaagcaaagcatctcaaaggacaaattgatggccaggagatcactgccaccgccgtgctggccccctggcctaggccacccccca

SEQ ID NO: 440673 - DNA, 83 bp, Homo sapiens
atgcagcatttttgataggtgcctatgcagtcatgcaagacaagataatctgccttccgaaaagagtgcagcctgctcagaac

SEQ ID NO: 440674 - DNA, 90 bp, Homo sapiens
aatcctactcagaagaacttgtacagagatgtgatgttggagaactatagcaatctggttttcttggtgagagccacgagccaaggtggg

SEQ ID NO: 440675 - DNA, 75 bp, Homo sapiens
caacattcagacccatttccagtcatgagtatctgctgtgcgtttcagtcaacaatacagcttgtgttcgacaat

SEQ ID NO: 440676 - DNA, 75 bp, Homo sapiens
tgtcctgggccggcatgcttctggactatttccaggttgcacgttttcaaaaaatacctaatggtgaaaatgaga

SEQ ID NO: 440677 - DNA, 132 bp, Homo sapiens
gtctgtgaagctaaactcaatgctgctgtgtgggaagaagatttgtaaagaaaactcttaggacacattcagctaacgtattttagcaggtggagtgaggttgaagattcctgtgacagcgatgccatagag

SEQ ID NO: 440678 - DNA, 75 bp, Homo sapiens
aacaccacaataatccacagccaaggtaagaatgattgatgttggctgatattggagtgctcattcacatgaagt

SEQ ID NO: 440679 - DNA, 75 bp, Homo sapiens
cccaggagtttcctgtgtccagcgctgccggagccgcctgaggtgtccacttgcgaaagcagcattcctatattg

SEQ ID NO: 440680 - DNA, 74 bp, Homo sapiens
tttttacccggccaaagtcactgctgttaacaaggatgacttattcgtctaatggaagagatcatgagtgagaa

SEQ ID NO: 440681 - DNA, 101 bp, Homo sapiens
ggggactacagtttaccttaggaacttcagccaacccggtcattgtggacaccattgttatggccaatctgctgatgactatcagccagttcgtctgctca

SEQ ID NO: 440682 - DNA, 74 bp, Homo sapiens
gctgactgagagcgtctgcttgatgagagctattgttcacataactcaacagttagtgattgtcaagtggggaa

SEQ ID NO: 440683 - DNA, 100 bp, Homo sapiens
cagaagagcggaccagggctgctgccagcacctgccactcagagcgcctctgtcgctgggacccttcagctttcaccctggtgagactgtccagatctag

SEQ ID NO: 440684 - DNA, 74 bp, Homo sapiens
acatgaagaggaggatccacctggagctgaggaaccggaccccggcagctacctgcctagagctggaacgttac

SEQ ID NO: 440685 - DNA, 83 bp, Homo sapiens
catgaacgaggagtacgagacgaggttcctgtgcaactcttcacagatgtgtcttgctgaatcagggctctcttatccctgcc

SEQ ID NO: 440686 - DNA, 90 bp, Homo sapiens
ccccgaacgggggtcttcctcctccgccgttgacagcttcatggcggctgaagagatgcattggcctgtccctatgaaggccattggtgc

SEQ ID NO: 440687 - DNA, 75 bp, Homo sapiens
aaaaatcccttattgatgctgccaaatttcctcttccaatggaagtgtttaaggagaactgtgtttatgaaactg

SEQ ID NO: 440688 - DNA, 100 bp, Homo sapiens
atctgttctgccctggctgcctcagccctaccagcactggtcatgtctaaaggtgatcgtgcagtccggccgccaccccacagtgctgcagaagctctgc

SEQ ID NO: 440689 - DNA, 133 bp, Homo sapiens
gttccaggtagacatggaggccgtcggggagacgctgtggtgtgactggggcaggaccatcaggttcatctgcagaagccagcggacgcctctgttcaacttgtgggttacctggctcatgagaccttgccgg

SEQ ID NO: 440690 - DNA, 75 bp, Homo sapiens
ggtagcttgcacctgtcccaactgtaaagaaggtggtggaagtgggttggcagctggagaagataatggacagag

SEQ ID NO: 440691 - DNA, 60 bp, Homo sapiens
gagccatgcaagcgcagttctcttcggacagctcactgaaaactgaagctaatttggaag

SEQ ID NO: 440692 - DNA, 100 bp, Homo sapiens
cggcatgctcacccgcctctacaacatcaagaaggactatgctgagaaggaaaataccatagcaaaagctctggaagatctgaaggcaaatttttactgt

SEQ ID NO: 440693 - DNA, 83 bp, Homo sapiens
gggggcttctttaaaggcctgacggaagtgaaaatgtgacaggattggacctttcagatttcccagcattagcagaccgaaac

SEQ ID NO: 440694 - DNA, 98 bp, Homo sapiens
ctggaaggagaactaaatgggagaagaggaatgttccctgacaatttcgttaaggcatatctttttcttgcacatcaaggaggccctcttggcaggcc

SEQ ID NO: 440695 - DNA, 80 bp, Homo sapiens
agaagctccttccattcagatccagatgcttgtttgctactgatgggtgtgagcaagttagatattctataccggagact

SEQ ID NO: 440696 - DNA, 99 bp, Homo sapiens
ctgctggttagtgtgctctgagggagggtccgagccagccgctgttttgccggaggagcccctcaggccggtgaagagggaacagaaatctttgccccc

SEQ ID NO: 440697 - DNA, 83 bp, Homo sapiens
cggccgcccagacgctgcccgcgggcccggccacggcggagccaagctacgagttccagggagctctgtcctggtgaccgtgc

SEQ ID NO: 440698 - DNA, 75 bp, Homo sapiens
tcattggccacctacagaaacaaaatgtcaacaaattgatggtcgtccctggggatgagcccagggagaagatgg

SEQ ID NO: 440699 - DNA, 100 bp, Homo sapiens
attttcctatacgtggattccagaggggtgacagcgaaacgtgactgtgagaccaaagacctggttgtgcaacaggcaggcacaaacaagactgatgttg

SEQ ID NO: 440700 - DNA, 94 bp, Homo sapiens
cctttagccatgtggatacctacggagcacgagaaatacggcgtgggatattagaaatggctactccccagtcaattttcatctttgcaatctg

SEQ ID NO: 440701 - DNA, 100 bp, Homo sapiens
ctgcagattttggtgtatcctggggtgggaggctccggctctgtcagctgccgctgccctctcggagtgtgcctgaatactatgactacggtcatggagt

SEQ ID NO: 440702 - DNA, 100 bp, Homo sapiens
gttaatccaggtgagactttcacaataagagcagaggatggaacacttcagtgcattcaaggttcagccaggcccaccaccatgtccggtattctaccca

SEQ ID NO: 440703 - DNA, 83 bp, Homo sapiens
gaggaaggaacgaggcaaggagctaaagcagcgtgcgttcagccctgggattggtttatcttggaagctaaagggcattgctc

SEQ ID NO: 440704 - DNA, 155 bp, Homo sapiens
cgactggccttgagggagagctggggcctgctcccggagagatacggctatgtcgatcgaaatcgaatcttcggagcgggagacactatattcaatcgtgctaagctcctcaatgttggctttcaagaagccttgaaggactatgactacacctg

SEQ ID NO: 440705 - DNA, 100 bp, Homo sapiens
agcatttgtggagcaatcttttctacagaaggttaaaagcatcttgactcctgaagcagagctgtcagaagatgacctgttgagtcagtattctctttca

SEQ ID NO: 440706 - DNA, 98 bp, Homo sapiens
caagaactgcaccagagtgtccgggcggctgctgaagaggcccgcaggaaggaggaggtctataagcagctgcaaagccttctagacaagctcagtgg

SEQ ID NO: 440707 - DNA, 100 bp, Homo sapiens
ctttactctggggtcccggctgccctgtggcctcgctcctcggagggtgtttgctgactagcactttggagagtgtatgcttatctgccatgtccataac

SEQ ID NO: 440708 - DNA, 74 bp, Homo sapiens
gctctcgtcagcctcccgccggccgtctccttaacaccgaacaccgtcaaaatgcagatcttcgtgaaaaccct

SEQ ID NO: 440709 - DNA, 98 bp, Homo sapiens
gggcccagaccctggcccaggaagatccactaaaggaggccatccttccgccttcttctgcaggagtcagtcatgcggaggaatccctttggtgtgga

SEQ ID NO: 440710 - DNA, 82 bp, Homo sapiens
aggaccgatgactcggaaagcgctcagaagaacgcttcgcccgttggtgctatgccccctcttctctcctggaggtcagccg

SEQ ID NO: 440711 - DNA, 90 bp, Homo sapiens
cttcaccgtgcccctgcccgcgaccatggcctcctccgaggtggcgcggcacctggtcccttcaccgatgttgtcaccaccaacctaaag

SEQ ID NO: 440712 - DNA, 83 bp, Homo sapiens
ttggctccttccctgggctcttttatattgctggcaaaatagtgtggagacctttggcgacttggcctttggcgacatcttcc

SEQ ID NO: 440713 - DNA, 75 bp, Homo sapiens
ctgcggattttattcctgcgcatgtggcctttgacaaaaaggtcacagccaagactgcctttctatttattttac

SEQ ID NO: 440714 - DNA, 96 bp, Homo sapiens
tgttctgaagcaactatacttctttgctatttccacctatgtgcagaggtgtctattttagaaaggcgcaacacagcaggaagggtggtgtataaa

SEQ ID NO: 440715 - DNA, 80 bp, Homo sapiens
gtgctgagccccgacgcccctgacagggccacgcacctgatcgccgcgcgagctgacaatgcagatcttcgtgaagactc

SEQ ID NO: 440716 - DNA, 82 bp, Homo sapiens
aaattaaagttttacaagatttaacctgtcatcaagacctgggattttggtggatctaagcattgaagaacagtcagagtgt

SEQ ID NO: 440717 - DNA, 50 bp, Homo sapiens
gaatgagatagccgtcctgagaaattacagaatgtctgaaggggacagtg

SEQ ID NO: 440718 - DNA, 88 bp, Homo sapiens
gaaaagatcatcattgctgaagtcgtgaacaaaattaaccgtgctaatgggaaggaaagaacatggcctgtgtgcagcggacgctgat

SEQ ID NO: 440719 - DNA, 75 bp, Homo sapiens
acgacgacaggggcatccgcttcctggacaatcggacagctccctggggtacatccccctaatgagggtggtgca

SEQ ID NO: 440720 - DNA, 83 bp, Homo sapiens
gagccgcgggccctttgcagctgcgattttcgccctacgttttcaacggagggttccatcataatgaatggatccaatatggc

SEQ ID NO: 440721 - DNA, 98 bp, Homo sapiens
gacacctgccgcagaacagggagctctttctgacagctggaggcgccggcggccttcacctctggaagtacatccggaggggtttccaggtatataag

SEQ ID NO: 440722 - DNA, 82 bp, Homo sapiens
atgtaccatttaaagttaaagttggtcacatagaaacgcctagctcaatctgtccgaaacacctctggctcagaacctgtgg

SEQ ID NO: 440723 - DNA, 100 bp, Homo sapiens
cccgccaggatgtggaagccctgtgggagaacatggctgtcatcgactgctttgcctcagaccatggttttcggtattctggagaaagccaaggaaaagt

SEQ ID NO: 440724 - DNA, 100 bp, Homo sapiens
tggaaaacctggccctcttcaatttctgacaaaaggggcaagattcttgccaagagaattaatgtgcgtattgagcacattaagcactctaagagccgag

SEQ ID NO: 440725 - DNA, 75 bp, Homo sapiens
gccgcgcgccggcggcaccatgaagtcagcggaggaaggtttttagaacttcagccataaaaatgggcagaattt

SEQ ID NO: 440726 - DNA, 100 bp, Homo sapiens
ctcggtcctggccgcgattttctgcaggccccacgagtgggaggtgctgagccgctcaggcctcgaaaaagcccaagacagcagaagcagacacctccag

SEQ ID NO: 440727 - DNA, 75 bp, Homo sapiens
agtggcagagagtatgcattaaaggcctcagtggctttagaggatgtggctgtgaacttcacccgagaagagtgg

SEQ ID NO: 440728 - DNA, 74 bp, Homo sapiens
atccagcgctcattgggaatttagttaagagccctcaggactgcccccggaccctgctctcacccctggcaccc

SEQ ID NO: 440729 - DNA, 90 bp, Homo sapiens
cgccaccatgttcctgggcaccggggagccggccttggacacggaacctcggagagctgatagatcggtttgtggctgatttcaaagccc

SEQ ID NO: 440730 - DNA, 101 bp, Homo sapiens
tgagagctcatctgaacctgagcctgtagtgccccgaagcaccccacgaggatctacttcagggagccctcaggactgcccccggaccctgctctcacccc

SEQ ID NO: 440731 - DNA, 51 bp, Homo sapiens
cgtcaataatgaaagctcttcagaggtattcaagagacgatatttttactt

SEQ ID NO: 440732 - DNA, 82 bp, Homo sapiens
caggcggtgacagagtggagccatggctagaggcgccatgtcagaaccggctggggatgtccgtcagaacccatgcggcagc

SEQ ID NO: 440733 - DNA, 115 bp, Homo sapiens
caaaagcacaaggattctcgctgtgacagagacaacaccgagtatgagaagttaagtagcctgtcttctctgggagattctgcaccagagcgcaagtccccttcccaccatcgcc

SEQ ID NO: 440734 - DNA, 75 bp, Homo sapiens
ggcacagatggaggaggaatacctccgctcccctctctcagggttgtcaggaggaagaagacctagctttagcac

SEQ ID NO: 440735 - DNA, 96 bp, Homo sapiens
aggactgtgacctgagctgtcagatcaccattcccaaagattcactgcgtgctgtcctcacttgttctacaatgagtgccaaatctgctatcagca

SEQ ID NO: 440736 - DNA, 95 bp, Homo sapiens
aaggagtttaagcaggagcatcgcattggaggctacaaggtgttgacttcaaaatcaaaactgtagagctaagaggaaagaaaattagattacag

SEQ ID NO: 440737 - DNA, 98 bp, Homo sapiens
gctgagctagtgaaaattgagccaaagcacattggagttggaatgtatcaggttgaagttcatgagttcgcccagcctcagtgacctgggcaagagag

SEQ ID NO: 440738 - DNA, 75 bp, Homo sapiens
tagacatccttatcagcacagcacttattccagcaaatgcagccctgaggatttggctactgcatataacaacag

SEQ ID NO: 440739 - DNA, 100 bp, Homo sapiens
gcggcggcggcgacgtggtgtgcaccggctggctgaggaaatcgcctcccgagaagaagttgaggcgctattttccgtgggttatgaatatgaatcctgc

SEQ ID NO: 440740 - DNA, 82 bp, Homo sapiens
cttgatggaaaagaactctgtagtgaaaggtggatcagtacaagggaaagcgggatttggagtcactgagggagtacgtgga

SEQ ID NO: 440741 - DNA, 75 bp, Homo sapiens
gctcagtctgttcttgtgaggctgagggtctgggtaagactttgaccccgacgcaggcttcagtgattgccgcgg

SEQ ID NO: 440742 - DNA, 101 bp, Homo sapiens
gctacatatgtacagcctagaagaaaacagagagatgagcagcttctgagtcatactccctgtcacaaactccagctgaactaacttggaggaggatcttc

SEQ ID NO: 440743 - DNA, 83 bp, Homo sapiens
gtcttccacttgcacgaaagctttcctaggccaaaaagagagaagagcgttcctctttgcatcctctatgagaaataccgtga

SEQ ID NO: 440744 - DNA, 82 bp, Homo sapiens
ggcaggggcaggcctagtttgactctgacagtcctcccactaaggttcgtgctggccgtgggcagcgccgtctttgatgcca

SEQ ID NO: 440745 - DNA, 100 bp, Homo sapiens
cagagagggaagagattcagccagcacactcctcgcgagcaagttaacagccaggtccttgcctgctgtgcagtctgatgaaagacttcagcctctgctc

SEQ ID NO: 440746 - DNA, 51 bp, Homo sapiens
cgtcaaaattatccgaaaccgcctcactggatacttggtgttagatgaagc

SEQ ID NO: 440747 - DNA, 82 bp, Homo sapiens
gtcagacgcagccgtagacaccagctccgaaatcaccaccaagagctccacgcaggagatcggtgaggagctgatcaacgga

SEQ ID NO: 440748 - DNA, 75 bp, Homo sapiens
gcaccgggcgccgggagcaggcggcgcagcaccaggtgctggagaatctggtaaaagcaccattgtgaagcagat

SEQ ID NO: 440749 - DNA, 98 bp, Homo sapiens
aagaaccggaagctctttgaccttctggatgtccttgagttcaaccagagtacaggggctcaggtccaggtggcaggggatatgctacccaactcaac

SEQ ID NO: 440750 - DNA, 75 bp, Homo sapiens
acttcatgaatgtcatctttgcagcacagaaacagaaggtgttggaagtgacagtgaggtggaagagaggtctgg

SEQ ID NO: 440751 - DNA, 100 bp, Homo sapiens
cacctcagcctcacgagttgctgggaccacagcacttttcaggattagaagaggctgtgtatagaaacatacaagcttgcaaggagcttgcccaaaccac

SEQ ID NO: 440752 - DNA, 82 bp, Homo sapiens
gtcgaccagctcctcccacacggattctgtgtagaaatccacgctagagttgggaagacatcactgattatgtctctggtca

SEQ ID NO: 440753 - DNA, 100 bp, Homo sapiens
agcaaagattagcagaggtgctaaagggaagaaggaggaaaagcaggaagctggaaaggaagaggcaaccagaaggatgaatgatattctgaatcacaag

SEQ ID NO: 440754 - DNA, 87 bp, Homo sapiens
cagttgtccatgaccctgaaggtccaggagtacccgaccctcaagctttaccactcctgaaggccctaaaccccgttccagatgctc

SEQ ID NO: 440755 - DNA, 99 bp, Homo sapiens
ctcctccacaccccccgccgcagcagcaccggcgacagggcgggcaggtccggacgcgctgggccctggtcccttcggccgcaaacggcgcaagtcacg

SEQ ID NO: 440756 - DNA, 75 bp, Homo sapiens
tctgaagatgaatttctacaagggaaattgtttatccattacaacacaagctagcatggagtttcgacggaaagg

SEQ ID NO: 440757 - DNA, 97 bp, Homo sapiens
tgttacattctctatctgcgcaccttggagtccaagcttgtgctctttgcttcgagcaaatgctctcatcaaaagaggcagcatgtacatgcaacag

SEQ ID NO: 440758 - DNA, 100 bp, Homo sapiens
ttacaagatggacagggatgataattgggcctccaagaaatgtttctccatcccagagagatgaagtaattcaatggctggccaaactcaagtaccaatt

SEQ ID NO: 440759 - DNA, 83 bp, Homo sapiens
gagctgttttgcatcagaagcccgagagatcactgagagagacgccacaggtcatcatctggatcatcccattctggttcccg

SEQ ID NO: 440760 - DNA, 98 bp, Homo sapiens
tgacaactccaatgttgactgttcgccatcggtggtgtgaactcattgttaagcacaagttcacgaaagcctacaaaagtgtggagaggttccttcag

SEQ ID NO: 440761 - DNA, 100 bp, Homo sapiens
caacttcaaagacgttctcaaggagaaggcagacctgggtgcaggagaacccggggaggaggcccaggctctgctggagggcttcgagggtgagatggac

SEQ ID NO: 440762 - DNA, 100 bp, Homo sapiens
tcccttccctatccccgacgaccggatcctgaggaggcagctgcggtggcagctgctgagttctcggtgaaggaatgtatcctgtcaggtataatgtcag

SEQ ID NO: 440763 - DNA, 100 bp, Homo sapiens
cttagaagcccactcaactgatgaatttaaagatgtttctgcaacagaaccacacaatgcagatcttcgtgaagactctgactggtaagaccatcaccct

SEQ ID NO: 440764 - DNA, 85 bp, Homo sapiens
tacaagatggacagggatgataattgggcctccaagagtattctcatgggagcagttataaaaattatagagtttaaaaaactgg

SEQ ID NO: 440765 - DNA, 100 bp, Homo sapiens
agatttagaagaggctggaaaagagggtggaaaaagcagggaggttatgaggcttaataaagaaggtctgccgcaaattccgagacgaagccacgtgcaa

SEQ ID NO: 440766 - DNA, 100 bp, Homo sapiens
ggtttggagggcagaaattcatggaagatatgatgccaaagttgccagagtctgccctccgagacctcatcgtagccaccattgctgtcaagtacactca

SEQ ID NO: 440767 - DNA, 98 bp, Homo sapiens
tgcccaacatccaggctgtactgctccccaagaagactgagagtcaccacaaggccaagggtgaggaaaatagcagctgaatactatgacaacctccc

SEQ ID NO: 440768 - DNA, 49 bp, Homo sapiens
ctgagactgaagcgcggccatggggaaaactaaagcagctgcccccggc

SEQ ID NO: 440769 - DNA, 100 bp, Homo sapiens
ataaagttgatctgtaatgttcaggccatggaagaaatgatgatggaaatgaagtataataccaagaaagccccacttgtttgagaaggccggtgataca

SEQ ID NO: 440770 - DNA, 82 bp, Homo sapiens
gaaggacctgagcctgacgcgggccgcgcgggtttacccaaggtccagcctagcccctaggcaccatgtcggacagtgatct

SEQ ID NO: 440771 - DNA, 90 bp, Homo sapiens
tacaagggaagctgagttttggagcaaactaatgttttctgaatttccagatcccatgtggggttcagattatgtgcagttgtcaaggac

SEQ ID NO: 440772 - DNA, 90 bp, Homo sapiens
gattgaaggaaaaggaagatgcactgactagaactgaacttgaaacacttcaaatgtgtattctgggcaccagtccatcctgatcccgcc

SEQ ID NO: 440773 - DNA, 135 bp, Homo sapiens
caagaacctgctggccggcggctttggcggcgtgtgcctggtgttcgtcggtcaccctctggacacggtcaagaacggtgtgctgctgaggactgtcttggaccctgtcactggggatttgtctgatactcgcac

SEQ ID NO: 440774 - DNA, 51 bp, Homo sapiens
tgaagaggcacgtccgcacacacacagatgaggaaattgaggcacagagat

SEQ ID NO: 440775 - DNA, 83 bp, Homo sapiens
tacttggtgcaggaaggcagtctttgctacgtacagcaaaaggaccaggaagaaacaggctcctgccagcaccgacagcaacg

SEQ ID NO: 440776 - DNA, 50 bp, Homo sapiens
ggcgtgcgcggacggtgtgcggtgagaaagatcagtctaaagaaaaggag

SEQ ID NO: 440777 - DNA, 75 bp, Homo sapiens
acgcaccgttcctcctgatgttatctcattgctcaaagtgctgacaaataaagcttctgtgatgctctttatgaa

SEQ ID NO: 440778 - DNA, 101 bp, Homo sapiens
gctgagccgtcgcggagccgcgcagccctcggagcacgagaaccatggagtctggcagtaccgccgccagtgaggaggcacgcagccttcgagaatgtgag

SEQ ID NO: 440779 - DNA, 99 bp, Homo sapiens
ccgaattttaagtcatcgttctaggataggagcggatcccagagagtccttctcctgctccttctctagaagagaatcatcgtcctgggagccagacct

SEQ ID NO: 440780 - DNA, 96 bp, Homo sapiens
tggaattgggcaaagttgctgccaaattatctgagactggataagatgaccttcagtgtgctgctcaaaaacagatatgattctataacagactct

SEQ ID NO: 440781 - DNA, 100 bp, Homo sapiens
ctccccgctgccctgagctcggcgggctggcattcggcccggggaaaagcggagcagcacatcccgctctgggctttaaacgtgacccctcgcctcgact

SEQ ID NO: 440782 - DNA, 83 bp, Homo sapiens
gaaggaataaccttcatcaagttttatgctccatgccatgtgatgccaagaggctcaggaactggcatttacagcaatgctgc

SEQ ID NO: 440783 - DNA, 100 bp, Homo sapiens
gcgatgcagaggggtgcgcagtccagcgtgaactacagtcagggcagcctgaaggatgcaccagtttcaagcgcccggtagtgatcctgggacccgtggc

SEQ ID NO: 440784 - DNA, 100 bp, Homo sapiens
cccaaagatcgtgcagctcttggcaggagtagctgatcaaaccaaggatgggtgtggaggcacagttggtgctattttcacttgtccactagaagtcatt

SEQ ID NO: 440785 - DNA, 90 bp, Homo sapiens
cactccagaagagaggtatcagaagcttaaaaaggagacggtggctcagggagtaaaggaaggccagttgagcaaacagaagtgttcctc

SEQ ID NO: 440786 - DNA, 75 bp, Homo sapiens
aagaagtttctaggaaaggccggacaccaggtgaccagaagtcagcagcttcccagaagccccgaagccggggca

SEQ ID NO: 440787 - DNA, 100 bp, Homo sapiens
atggaacaggggaaaatggaagaaaatgttccaatatttccattggagatgagcgcatggatttaggagaatgtaccaaaatccacgacttggccctccg

SEQ ID NO: 440788 - DNA, 75 bp, Homo sapiens
attcagccagttcttgaagcaaggtaccatctacctgttcatgtaattggacaccatgctgtgagtccttactcc

SEQ ID NO: 440789 - DNA, 100 bp, Homo sapiens
gaggaactaaggcggaggaactgagacgtttcgaattccagggcaaggcaatacagaagcgttccacacagggacattgcaaagacaagcaagtcatcac

SEQ ID NO: 440790 - DNA, 100 bp, Homo sapiens
ctattcccagaggcaggtggtgctgaccctgtaacccaaaggaggaaacagctggctaagctcatcattgttactggaggaagttaagtcttcagagcct

SEQ ID NO: 440791 - DNA, 83 bp, Homo sapiens
cgcagccaccgccgtcaccaatctctacaaaggagtgcctgtgaagaaaacggggtattgccctgaggcttatattctgcctc

SEQ ID NO: 440792 - DNA, 50 bp, Homo sapiens
ctgcttcccaataaggaaacagtgtaattgaaaagtgatcctctcttcag

SEQ ID NO: 440793 - DNA, 71 bp, Homo sapiens
aggacccagctcaagtttaaacacacctgggagcttcagacgtggcaacgccctgctgcggcggctggtcc

SEQ ID NO: 440794 - DNA, 75 bp, Homo sapiens
gtttgtattttggctgctgcaggagccattttaggtatctgaaaaggtttaaagtgatgaagatcaaagttctaa

SEQ ID NO: 440795 - DNA, 82 bp, Homo sapiens
tgactggtgagggccccgggccctcagcctctcttgttgcaataaattgacagaccagaccctgatctacctacggcgcatt

SEQ ID NO: 440796 - DNA, 78 bp, Homo sapiens
gactcttacatgatgaacaaagtactgatgacaggcaggaagttatgttcgtgatgatgcagtccccaatttaatcca

SEQ ID NO: 440797 - DNA, 75 bp, Homo sapiens
agccagagctctcctgtatcaggtgtctgtcggtccaagctagaagatcatgagcgtcttgttgttcatcgagca

SEQ ID NO: 440798 - DNA, 75 bp, Homo sapiens
cgtcgggtggacccagtctacatccacttggctgagcgattggatactctgaagaaggattttctgaggaagcag

SEQ ID NO: 440799 - DNA, 97 bp, Homo sapiens
ccagcagggaccttgggtcacatgacaatctctctccaccttttgtcaattccagaatacaaaaagacttgcactatctgccagatgctgcttccta

SEQ ID NO: 440800 - DNA, 97 bp, Homo sapiens
aaaaagaaactgaagagtatcgtaaaggggatccagacccatttgatgatcgacatcctgcaccaatagctgcaggaactggcccaaatttttctct

SEQ ID NO: 440801 - DNA, 75 bp, Homo sapiens
agcggggcgggcgggagtgccgggagtctgggagtgagcaggaccattctggctgctgtctggacaagaagtcgt

SEQ ID NO: 440802 - DNA, 82 bp, Homo sapiens
ggcaccgaggcactcagaggaggagggagccatggatttgctgcgggagctgaaggccatgcctatcacgctgcacctgctc

SEQ ID NO: 440803 - DNA, 74 bp, Homo sapiens
cagaatctaatcaagcgagacccgccggcctacatcgaggagcttggagaccctctggaggctttcccagtgtt

SEQ ID NO: 440804 - DNA, 100 bp, Homo sapiens
cgaagcttatatcccaccattgccacgggcattctccatctccttgcagccagtgacaactacagatcccaattggccatgctgatgttaaacgttaaag

SEQ ID NO: 440805 - DNA, 75 bp, Homo sapiens
cgaagaaacagacattcaacatgattgcatttgaaagaaagagatgacttgatgtctgcactagtttccgtaagg

SEQ ID NO: 440806 - DNA, 75 bp, Homo sapiens
tcactgcaggaccaggcacgaaatatctggagtccatctttcaccatcttctcctgagattgtactggaccgtga

SEQ ID NO: 440807 - DNA, 114 bp, Homo sapiens
cgacccccaggcagctcgccgctccctagcaccttctccagtcgacactctcgcgcccggagatagtgacgagaggctgcgagactgtggaaatgaccctgaggaggaacgggc

SEQ ID NO: 440808 - DNA, 101 bp, Homo sapiens
ggaaagaagaattttcatcatcccaatctgactcatctcctgagatccatactagtagtagtgacgatgagggcctgttacatgaacagaatatggcaaaa

SEQ ID NO: 440809 - DNA, 98 bp, Homo sapiens
ccttcctaaggccgccgcttaccccggggtctatggaagtaatggaaggacccctcaacctggcaaatggcatcttggacaccacggctcttatcacc

SEQ ID NO: 440810 - DNA, 86 bp, Homo sapiens
tgcgtgttcgcgggtgtgtgctgcgttcacaggtgtttctgcggcaggtgtcgtgaaaactacccctaaaagccaaaatgggaaag

SEQ ID NO: 440811 - DNA, 100 bp, Homo sapiens
cgcgccttcattgctgccaggacctttgtccaggggctgactgtgggcagagaagttgcaaaccgagtttccaaggtaaaataccatgaagattttgaaa

SEQ ID NO: 440812 - DNA, 83 bp, Homo sapiens
gagccacagtgtgatcccagctttaaaggagatgcaggagaaaatacggcattgctaggtttccaagcaacaatcagtgctcc

SEQ ID NO: 440813 - DNA, 100 bp, Homo sapiens
gttgaaggctgcagtgagccctgtttttgccaccacactccagcttgggacctggcctgggccgtcagctactacatccggttcttcatcacctacatcc

SEQ ID NO: 440814 - DNA, 100 bp, Homo sapiens
ccaaacatgcaggactctagtaacccgcgaaatgatgggatagcgttgcaaatccttaaaagagtcttaacgagctggaaaggtgctggcgaagctcgcc

SEQ ID NO: 440815 - DNA, 100 bp, Homo sapiens
aagaaacattccctattcctaaagctttcgttggcaatcaactaccttttgtaggatttacatattatagcaatcgtagctgaagaaatcaggggagaaa

SEQ ID NO: 440816 - DNA, 83 bp, Homo sapiens
cccgggtggcttacagacgctgccagcatcgccgccgccagctacgagttccagggagctctgtcctggtgaccgtgcccggg

SEQ ID NO: 440817 - DNA, 100 bp, Homo sapiens
ttgcataaacatggagaaaagctctacactggactaagagaagttgttaccgaacatctcataaataagccttcaaaagtatgttcgggaacagattcta

SEQ ID NO: 440818 - DNA, 100 bp, Homo sapiens
ctccaggttaggccgagctttgcgggaaagcagcgattgacgagatgcctgaggctgccgtgaaatcaacagccaacaaataccaagtcttttttttcgg

SEQ ID NO: 440819 - DNA, 100 bp, Homo sapiens
ccttgtacagggacgtgatgttggagaactacaggaacctgctttctctcgatgaggataacatccctccagaagatggaccttaaaggctttgatccag

SEQ ID NO: 440820 - DNA, 100 bp, Homo sapiens
cacatggaaattggactaaattaccagaatgcagggttgatcatggccttgccaggttggtgacagtatattgtgagcatggtcataaagctgccaaaat

SEQ ID NO: 440821 - DNA, 82 bp, Homo sapiens
gtggaacagattcagaaggagcaggattaccaaaggcagtttggcaaaatcctagatgtagaaataatctttaatgaacgtg

SEQ ID NO: 440822 - DNA, 100 bp, Homo sapiens
gcggagggctccgacggcgcggacggagcgaagcgccgagccatggcgcaccaaacgggcatccacggtgctggagaatctggtaaaagcaccattgtga

SEQ ID NO: 440823 - DNA, 50 bp, Homo sapiens
agcgaagccgaaaaaggcagcagcgaagttccccctgcagtggtttggag

SEQ ID NO: 440824 - DNA, 50 bp, Homo sapiens
ttctccaaacatgatcgtttactgcaaaatggagtctcactctgtcgccc

SEQ ID NO: 440825 - DNA, 82 bp, Homo sapiens
gagagatggagatgggcagacggattcatttagagctgcggaacaggacgccctctgatacggccgaagccctgcagcccac

SEQ ID NO: 440826 - DNA, 86 bp, Homo sapiens
gccttgtctgtcaagatccgcagttatgaagaacacttggagaaacatcgaaaggacaaacgcccctgccctgccagaatccggcc

SEQ ID NO: 440827 - DNA, 83 bp, Homo sapiens
gagcggacgggccatacccaataaccaggtgcttggcaaaatcgagcgggccattgcggagcccatcgtggtgaggcttaagg

SEQ ID NO: 440828 - DNA, 100 bp, Homo sapiens
ctgatcacattgagagagtctatagaagagctggcagccaaaaactttggaatttatcatggcatccagcattgaccactacaagtaaaatgcgaattcc

SEQ ID NO: 440829 - DNA, 100 bp, Homo sapiens
atgttaggacactacccaatgcctcaaccgtggacaatattcgctccatctttggaaatgctgttagtcgctggtagccggtctgggtctccaggaagag

SEQ ID NO: 440830 - DNA, 89 bp, Homo sapiens
gggagctgccacttcccctagtacaaatggtgcttctccagtgatggataaaccaccagaaaactatgtgcaagctgtggaggagttcc

SEQ ID NO: 440831 - DNA, 78 bp, Homo sapiens
gtacccattctccttgaaggcaaatggtgattaaagtatacagtgaagatgaaaccagcagggctttagatgtaccca

SEQ ID NO: 440832 - DNA, 85 bp, Homo sapiens
ccgggcaccgcggccatggagggtcaacgctggctgccgctggaggccaatcccgaggtggtgaaggcatttgtgatcctggcct

SEQ ID NO: 440833 - DNA, 74 bp, Homo sapiens
ctgaaggcctcgctggagatcgagtaccaacttcatgattgtatccaaaaaaccttgaatgaatggagttccca

SEQ ID NO: 440834 - DNA, 90 bp, Homo sapiens
gtcctgtcgcatttcacgaagcacttccccgagttcaggttggcaaaagcagcttttgatgatgcaattgcagaactggatacgctgagt

SEQ ID NO: 440835 - DNA, 74 bp, Homo sapiens
acttcatcatcatctacttcacaggaattgccatttacaaatttacatgtattggagaccagaccagaagccct

SEQ ID NO: 440836 - DNA, 83 bp, Homo sapiens
tccgatagctctctgcttattaatggaaggaaaatcacctcggcagtgtttgaaggaaggatactgcaactctttgaagtacg

SEQ ID NO: 440837 - DNA, 82 bp, Homo sapiens
aagtatttgacgaaaatagactgacaatgcagatcttcgtgaagactctgactggtaagaccatcaccctcgaggttgagcc

SEQ ID NO: 440838 - DNA, 75 bp, Homo sapiens
cgagatgagaggagaagagcccagcacaacgaaggtgcagaccccgcagtcgatgccccctcccccccagccgtc

SEQ ID NO: 440839 - DNA, 100 bp, Homo sapiens
tagacacagcttcatcccatggaccacaaatgcaagatgccttcttgtcacctttatctaataaagatgttggggatcagccaggtgaggtaggttattc

SEQ ID NO: 440840 - DNA, 82 bp, Homo sapiens
taacaggtgccaaagtggtggtatctggtggtaccagttcaacccagccttctttcagaccacggtcaccgcccagatcctg

SEQ ID NO: 440841 - DNA, 83 bp, Homo sapiens
gcatccccgaggaggaagacgaatcgttaaacatctgaaagggtcaggaggagatgttaaagtaacccatcttgcaggacgac

SEQ ID NO: 440842 - DNA, 103 bp, Homo sapiens
gtaatgtcaagctaccgttggccaagacagtttcaaaatggaaacgattgttaaaatgagtcttcggaagcaaacccctagtgacttcttaaagcaaatcatc

SEQ ID NO: 440843 - DNA, 75 bp, Homo sapiens
ttgtcttaacttccaaacatcatgaaggggaaagctctggcaatttaaatgacccaaataaggaggcactggcta

SEQ ID NO: 440844 - DNA, 50 bp, Homo sapiens
agaaggtctctggagacatcttcagcaggaagatggatgttttgaaagct

SEQ ID NO: 440845 - DNA, 90 bp, Homo sapiens
gacgcgcgcagcccgcccgcccggcgaccagcaaggtgattgtagagaaggctccaaaagccagggtgcctgatctggacaagaggaagt

SEQ ID NO: 440846 - DNA, 82 bp, Homo sapiens
tttggtagatgagactaacatgtatgaaggtgtaggaagaatgttaaagcggcaactggggaagaagtatctgctgaggatc

SEQ ID NO: 440847 - DNA, 100 bp, Homo sapiens
acctacagaaacaaaatgtcaacaaattgatggatacagtctcgctgtgatgcccaggctggagtgcaatggcgtgattttggctcactgcaacctctcc

SEQ ID NO: 440848 - DNA, 80 bp, Homo sapiens
aagtgaaacatcgtactccaatggaaaattgcctaagaattatgacccaaaagttaccccagatccagaaagatggctgc

SEQ ID NO: 440849 - DNA, 90 bp, Homo sapiens
gcctcgtgtgactgatggcagccacggagactgcagctcgacaggagtgagccaaatgtgtgatccccctccagaaaagacttgagtctt

SEQ ID NO: 440850 - DNA, 75 bp, Homo sapiens
ggttgagcggcggcgaacatgcgcttttgacacattggaggtgctggagaatctggtaaaagcaccattgtgaag

SEQ ID NO: 440851 - DNA, 83 bp, Homo sapiens
ttaccaaggaatctgcttttcaagtatgccaccaacagtgaagaggtatggtttaggaatgatttattacaagcaagaaaaat

SEQ ID NO: 440852 - DNA, 100 bp, Homo sapiens
ttttgttggcaacatttccgagaaagcttcagacatgcttataagacaactcttagctaacctggagctggttgaaaaaggcttcagtaacttgaagaaa

SEQ ID NO: 440853 - DNA, 100 bp, Homo sapiens
gctattctaccttacacaaaagtaccagacactgatgaaataaggggccgtgagggcctccagcattttcccaatcctgagtgtgattctgcttttcatg

SEQ ID NO: 440854 - DNA, 101 bp, Homo sapiens
ggccgagcgggcggcttcctggcctgggcgctccggtggcggcggaggccaccagcttgggctccccacggagggcagcaagtgggacttggggaacccgg

SEQ ID NO: 440855 - DNA, 75 bp, Homo sapiens
ctcaaagcaataccaggatagctgttgtttcagagaaaggtacaggtttgcagattccgccagcagcacagcaag

SEQ ID NO: 440856 - DNA, 99 bp, Homo sapiens
aattacttaaaacaccacgatgaaaagaaatacctgtgatttgctttctcggagcaaaagtggcataattggaatatcatttggagaaagtgtcatgga

SEQ ID NO: 440857 - DNA, 82 bp, Homo sapiens
ttccaacaacaattccgatggcaaagccgttgccaaggagtaagactgctgctgctgctgctgatgtgaatggatttaaacc

SEQ ID NO: 440858 - DNA, 80 bp, Homo sapiens
acttcctgcagtgggcattagccacgtccagggttatatcaagtaatagatcacatattgtgaaactgccagttaacagg

SEQ ID NO: 440859 - DNA, 97 bp, Homo sapiens
ggctccaagccaagggccatcgtggtggatcctgttcatgggtatgagccagagcgggatgagtggcacttggtggccccaatgctgacacgaagga

SEQ ID NO: 440860 - DNA, 82 bp, Homo sapiens
cttggtgagaaacattaagacctactaccagaaactatgttccaacttcctgtcaacaatcttggcagtttaagaaaagccc

SEQ ID NO: 440861 - DNA, 100 bp, Homo sapiens
caggacagtgggaagagtggctggaggaattcagtttcttgggggtgtgggttgctgaccgaggaaataaaagaatccaagtatttgataaagacactgg

SEQ ID NO: 440862 - DNA, 88 bp, Homo sapiens
gaaactgctggcagaactacctggcatccccggcaccagcccaggcccagacccccacccctgctccagccccagcctcctcccaagc

SEQ ID NO: 440863 - DNA, 102 bp, Homo sapiens
gtgatgccactttgaaatttgaaccatttgttcttcatgtgcagtgtcgacaattgcaggatgcacagattctggcaatttgaatcaacccatagaagtgac

SEQ ID NO: 440864 - DNA, 83 bp, Homo sapiens
ctcagtcagaacctagcgaacaagaatccacactggtgatagaccatacaaatgtgcacacccaggctgtgagaaagccttca

SEQ ID NO: 440865 - DNA, 101 bp, Homo sapiens
catgagcgagtgcctgacatgcagacctatccaccactcccagatatattcttagacaggaattttcaacgtccggttcatctaatacagacactggtaaa

SEQ ID NO: 440866 - DNA, 75 bp, Homo sapiens
ggcgggagggttcgaggccaatgatgggagaccaccgggatgggcagttccgatgaagttaaattccgtcaagat

SEQ ID NO: 440867 - DNA, 99 bp, Homo sapiens
gtgtgtctcctgtatttgttggagcccatttctggttagccaatatacctttgctatgtgcagttatagagaaaagaagtctgaaccacaagaattaat

SEQ ID NO: 440868 - DNA, 83 bp, Homo sapiens
cccagaactccggacgtgtgcggcgacctgcctagagctggaacgttacctccagagcgagccctgctatgtttcagcctcag

SEQ ID NO: 440869 - DNA, 89 bp, Homo sapiens
atttgctgctaggggaccaaggatggcaaaacgacgacaggagagtcaagccctacccgtcgagaagctgtgaagagaagaacagccga

SEQ ID NO: 440870 - DNA, 83 bp, Homo sapiens
cgcaagatggcggacagtgcggaactaaaggctactgcagcactggggtgtcagttgttggtccgacccagaacgcttcagtt

SEQ ID NO: 440871 - DNA, 96 bp, Homo sapiens
atgtttggattgaagccgcctctgtattacttaccagacatttatgcagtgtgtgattctttctaaaacaactccctggaagagaggacatttaat

SEQ ID NO: 440872 - DNA, 80 bp, Homo sapiens
acatcgacgccgcgtggcaggcgctgcgcacccgacaatgcagatcttcgtgaagactctgactggtaagaccatcaccc

SEQ ID NO: 440873 - DNA, 100 bp, Homo sapiens
gccgccgagctggacccggaccggttttgggatgcacatgatggggaagtcaacgctgtgcagttcagtccaggttcccggttactggccactggaggca

SEQ ID NO: 440874 - DNA, 101 bp, Homo sapiens
cctcggaggcgttcagctgcttcaagatgaagggactttgaacatgtcggggatcgccctcagcagactcgcccaggagaggaaagcatggaggaaagacc

SEQ ID NO: 440875 - DNA, 100 bp, Homo sapiens
cagtcctcgcccggttttaacaacctggatcttcgaacttttgacacggctttggaaacgacgtcatgtgttaggtgaaatgacaatggatgctctgttg

SEQ ID NO: 440876 - DNA, 98 bp, Homo sapiens
ttgaatgtccctgatctttctgacagcatccactctgctaatgcctctgagagagacgtaaagaagaagcggacctggcacaaacacggcccggggca

SEQ ID NO: 440877 - DNA, 100 bp, Homo sapiens
cccccaggtgagccccatgcactgcctggacgaggaaggcgatgactcagatggggtggtgaaggcatttgtgatcctggcctcgcagttcctatcccat

SEQ ID NO: 440878 - DNA, 75 bp, Homo sapiens
agtcagcctcagaggttgacttctacattgataaggaaccactcgttttgactattattttatcactctttgtga

SEQ ID NO: 440879 - DNA, 82 bp, Homo sapiens
gcaatagaagctgtggatgaatttgcttttctggaagtacctgttcctgacttttccacggattgtcttcatgctgggcttt

SEQ ID NO: 440880 - DNA, 100 bp, Homo sapiens
ggcactgtggccactgccagcactggggtggcagcctgccacatcgggggcaccaccctccatgcctttgcaggcaatctgaaagcaaatcctgtttaga

SEQ ID NO: 440881 - DNA, 75 bp, Homo sapiens
cagaatactacgttcagctaaattaagccaccaaaaccctcaacaggggcatctctgagttcatcgtgatggctg

SEQ ID NO: 440882 - DNA, 139 bp, Homo sapiens
gaatctctgagtcaggatgtaatgcggagtttcaccaacttcagaaatggcaccagtatcattcaggccttggacaagattcgctatgagagcctgacagacccttcgaagttggacagtggtaaagagctgaaaattg

SEQ ID NO: 440883 - DNA, 90 bp, Homo sapiens
gccagatcatcggtcaggccaagaagcatccgagcgttaattatagaaaatgccaagtaggaaatttgccgatggtgaagtggtaagagg

SEQ ID NO: 440884 - DNA, 76 bp, Homo sapiens
caaacctgtgcacctccacatctgggacacagcaggtctgtctctcctgccagagtgtatacaccagttggacaag

SEQ ID NO: 440885 - DNA, 100 bp, Homo sapiens
aggaaagcagatgttattaaggcagctcacctttgtgctgaagctgccctacgcctggtcaaacctggaaatcaggtatccacaagtgaaaatccacaac

SEQ ID NO: 440886 - DNA, 59 bp, Homo sapiens
aaagggcaggcacggcagcaaacgcctgagcattccagttggcttttgagtggatacgt

SEQ ID NO: 440887 - DNA, 100 bp, Homo sapiens
gagccaagatggcggcggcggcggcagcgacagcagcagcagcagccagtattcgggaaaggcagacaggcggcaaagatctgcaacaacatgctgttag

SEQ ID NO: 440888 - DNA, 100 bp, Homo sapiens
agaacacatattctggcctacagcttattatcgtcatcctgccggggaagacaccagtgtatgagtgatagattcgtgtggcctttcaaatgattgtgaa

SEQ ID NO: 440889 - DNA, 50 bp, Homo sapiens
gacatgctctacagtgctcagtctttgagaaactggcgatggaatatgag

SEQ ID NO: 440890 - DNA, 74 bp, Homo sapiens
ccgctggcagccgcggatctcaccgccgctcaggatcatgcatgccccgcggtccagggacaggttcacagcgc

SEQ ID NO: 440891 - DNA, 128 bp, Homo sapiens
gccacggttatactctgcaaggtggtgttccagtggcaaacagctgtataaactcttgtaaacaggctgatttacttctcctatcaagtagtgagccacatggtctctgttatgttgaaactgctgag

SEQ ID NO: 440892 - DNA, 50 bp, Homo sapiens
ccacaccccctccgtgggtgtgtgaaactggcgatggaatatgagaggag

SEQ ID NO: 440893 - DNA, 100 bp, Homo sapiens
ttccccggcccacagtgggggtgtgcaaacccgagagaactggatattaataaggcagcggaaagaagaaatatgaatacggctccatcaagacccagcc

SEQ ID NO: 440894 - DNA, 51 bp, Homo sapiens
atgtacatcaaggcatttatatgagtccagacttgatgtggcgtatggagc

SEQ ID NO: 440895 - DNA, 100 bp, Homo sapiens
cagagaccggcttcaatatcttcacccagcatgctcaatgtacttctccagttcctacccttcctcaagtggggaactcaggagaccaagcaggggcaac

SEQ ID NO: 440896 - DNA, 82 bp, Homo sapiens
cgtccctcaaaccttgcttctaggagataaaaagacgagccaaactcaggctgtaccttgagcagctcaagcaactggtgcc

SEQ ID NO: 440897 - DNA, 90 bp, Homo sapiens
ctgaaacccatgggattggggaacacaatttctgcagaaccccagaatatcgaagatgaagcaaaagaacaaattcagtcccttctccat

SEQ ID NO: 440898 - DNA, 82 bp, Homo sapiens
ggcggcggcggcggcggcagtgacgtcgccgggttttaaaatcaaagatgggaaaatcggagaaaattgcccttccccatgg

SEQ ID NO: 440899 - DNA, 74 bp, Homo sapiens
aatctatagttaatcttggcgacattgacaatgatggctttgaagggtctgggggtggtggcatctcccctaaa

SEQ ID NO: 440900 - DNA, 119 bp, Homo sapiens
agagtgctgttttagagctggcagcagcatctcagcccaagagaagaatgattacggacctgaagccaaagaacaagatgcgctagtggacagattgctgaccaggggcttgagagctg

SEQ ID NO: 440901 - DNA, 98 bp, Homo sapiens
ggggaacatggacatgaagaggaggatccacctggagctgaggaaccggaccccggcagctcaaattgtggctactaatttgccccctgaagatcaag

SEQ ID NO: 440902 - DNA, 50 bp, Homo sapiens
acggatccgtacttcctatcagagtgaacatgtcaaaccttttaagccag

SEQ ID NO: 440903 - DNA, 90 bp, Homo sapiens
cgtaccctgtgcgttagtcaccagctgctcctccgtcttctcaggagaccagctggtccaacgtgaccattgtgaggtagatattttgtt

SEQ ID NO: 440904 - DNA, 74 bp, Homo sapiens
cagaagccatgcccctcaggctggaacttgccctgtctcctcgcagatgagtatgactatgaatatgatgaaaa

SEQ ID NO: 440905 - DNA, 74 bp, Homo sapiens
ttttccccaaccataagccaatgactcagaaccgtgctgcatactatcctcctagccaaattgctcaactaaga

SEQ ID NO: 440906 - DNA, 50 bp, Homo sapiens
cctggacccctactattgcaacaaggatgccatgcgctcagtgactaagc

SEQ ID NO: 440907 - DNA, 90 bp, Homo sapiens
gtccactgaagtaacagcagcaatgaccttccctcgggaattccacctctgcgtttttccctccagatggagtctcgctctgtcacccag

SEQ ID NO: 440908 - DNA, 80 bp, Homo sapiens
cgacagagctgagccaagcgtttactgggcagctgttacggcatttttagatgaattcactaactggtcaagaataaatc

SEQ ID NO: 440909 - DNA, 127 bp, Homo sapiens
caaaatccaccaaagaaagtgacctctgagaaagtgagccagaaacatgctgagcctttgacaggaatgtatcctgtcaggtataatgtcagtgaatggcaagaaagttcttcatatggatcgaaac

SEQ ID NO: 440910 - DNA, 75 bp, Homo sapiens
ggttcccagtgctcctgggatgtttataactggaggttattcacagtcctatggtggttatgagaatcaaaagca

SEQ ID NO: 440911 - DNA, 82 bp, Homo sapiens
ctgcaggaggccaaggacggcgttctggatctcaaagcgcggagctggagtttgttcagatcatcatcatcgtggtggtgat

SEQ ID NO: 440912 - DNA, 83 bp, Homo sapiens
aagtgagagccggacgggcactgggcgactctgtgcctcgctgaggcgggagatacagatgacccaccaagaattactcagaa

SEQ ID NO: 440913 - DNA, 75 bp, Homo sapiens
cggctgcccttcaagtaccatgcatacattcccttgaataattacttggtgtttaatgatgtagatgggctgtat

SEQ ID NO: 440914 - DNA, 75 bp, Homo sapiens
tctttgtggctgtgcttgccaggcctggctccaaaatgactgctgtccatgcaggcaacataaacttcaagtggg

SEQ ID NO: 440915 - DNA, 82 bp, Homo sapiens
tctgatcagctgaggcctgagacacaggaccagctcttttaaaggatctgtcttctcaaggagcctagttggctatgcacaa

SEQ ID NO: 440916 - DNA, 101 bp, Homo sapiens
tagctaaagaactccctcaagtttcatttgtgaagggcaagctgcctgtcctgctgcttggccgctcctcagagctgcggccgggagagttcgtggtcgcc

SEQ ID NO: 440917 - DNA, 75 bp, Homo sapiens
tgctgctgtgtgcggtgctgctgagcttggcctcggcgtcctcggatggtgaccacagccctggcaaccatgagc

SEQ ID NO: 440918 - DNA, 101 bp, Homo sapiens
ggggaggcagcgcgggatcccagcctcaggcgtgcgcggacggtgtgcgggggctgctccttcctctccaagactcgggtggtccaggagcacggcgggcg

SEQ ID NO: 440919 - DNA, 50 bp, Homo sapiens
ttcacctcctggaaatgaagaggaggtgaaacataggtacccccattttc

SEQ ID NO: 440920 - DNA, 80 bp, Homo sapiens
gagagcgacccgtggccttgtgtttcagaataccctctaccatctgctttggtcagggtgccgctcgaggatttaaaagc

SEQ ID NO: 440921 - DNA, 75 bp, Homo sapiens
ggaagagggttggaggcaaagttccgaatagggatgaggcatacgtgcagcctcgtcttacagcgtgactgcaaa

SEQ ID NO: 440922 - DNA, 100 bp, Homo sapiens
gcaagaggcgtttctataagaattgtggacctggccagtgtgctgacgccggagataatggctcccatcctcgccaacgcggatgtccaggagcgcctgc

SEQ ID NO: 440923 - DNA, 100 bp, Homo sapiens
cacagagctaaacgttttagagtaccaaccattgtgtgctgtgaggtaaaggttatgcaatggtctctgcaagatggtttattcttgaattggacctttt

SEQ ID NO: 440924 - DNA, 90 bp, Homo sapiens
gaagaggaagaactgaccagagctgatcccgagcagcgtcatgtacccctgactcaagagtagccttcctcgaggacctgcctttcccat

SEQ ID NO: 440925 - DNA, 75 bp, Homo sapiens
cagtggatgctaagccagaccggtcctcgtttgtaccgtccctcttcagattcccgtcgtaacttaaagggaaat

SEQ ID NO: 440926 - DNA, 101 bp, Homo sapiens
cgtgggcatgctcattaaagcagagagatactacgcctggagagagtatgtgccaagagttgtaacctctgcacaacagaaagcaggaagaactattacag

SEQ ID NO: 440927 - DNA, 83 bp, Homo sapiens
ctgtgtgctgcagaacccccagaccatcattaccatggggcgcaagttggaccctacgaaggagaagcgggggccaggccgaa

SEQ ID NO: 440928 - DNA, 101 bp, Homo sapiens
cgcgaccagaggacagctctgtgctgatccccaccgacaattcgaccccacacaaggaggatctaagcagcaagaagagtcatcagaatttgatgtgaggg

SEQ ID NO: 440929 - DNA, 90 bp, Homo sapiens
gcgtgagccaccacgcctggcctcactcaaacagtaaacgagctatggacattttgaattatgtcgggagagctgatggaaaaagaggct

SEQ ID NO: 440930 - DNA, 100 bp, Homo sapiens
cttgtcctgagctggttgccggggcaggggcggaggcggaggcagaggtggaggcgctttgaaagacagccgctgtactgtgttaaggaaacaagatagt

SEQ ID NO: 440931 - DNA, 98 bp, Homo sapiens
gccgaggagcgcaaagtggaaatcgccttctaccggaaagatggaccccgagacagacaagcacacagaggaccagagtccttcgacacccttgcccc

SEQ ID NO: 440932 - DNA, 83 bp, Homo sapiens
cctcaaactcccaggctcaagcaatcctaccatgtcagccttcccagtagctggaactacagtcatgctgcaaagcttggagc

SEQ ID NO: 440933 - DNA, 75 bp, Homo sapiens
ccctggatgggggaccacaagatcctcatcgacagggagaccctgcagcgtcatggtgctggagctggtggcacc

SEQ ID NO: 440934 - DNA, 102 bp, Homo sapiens
ctgatgacaagggccgcacagctctacactttgcctcatgcaatggcaatgaccagattggttgtctccaaacaccatggtgacacctcacaagaagagcat

SEQ ID NO: 440935 - DNA, 98 bp, Homo sapiens
gccgccgtcgcccaggatgggctgggaatgaagcgatgtagccttttaatcactgcttcaaccacctgtgagaaattagaaaaagccaggaatgagtt

SEQ ID NO: 440936 - DNA, 83 bp, Homo sapiens
aaaggattgcatagcaagaaggaagtgcctatccaccgtgttgcagatatatctgggacaatgcagatcttcgtgaagactct

SEQ ID NO: 440937 - DNA, 54 bp, Homo sapiens
tgtggaaagaagttgcaaaacactggaacctcaagaaggcatgaagccagcccc

SEQ ID NO: 440938 - DNA, 80 bp, Homo sapiens
ccatgagcgacgtggctattgtgaaggagggttggctgcacaaacgagacaatgcagatcttcgtgaagactctgactgg

SEQ ID NO: 440939 - DNA, 100 bp, Homo sapiens
gaaaacgtgttgctggcatcagcagacccatttcctcagatgcttgctctgtcaaggcacagcctattgtctcctttgctcagtgtgacatcattcagac

SEQ ID NO: 440940 - DNA, 75 bp, Homo sapiens
ccgagaccgcggccgggaccgaggatctattaatgagatgaagcggttggaagaaatgtcaaatatgtttcagag

SEQ ID NO: 440941 - DNA, 101 bp, Homo sapiens
gatcaccatgtcggctttcgacaccaaccccttcgcggacccagtggatgtaaaccccttccaggtcactcctggaagcaaggcggctctagctaatttat

SEQ ID NO: 440942 - DNA, 101 bp, Homo sapiens
ctatctcgggagaaacaacaactgctacatctgttggaggagccaactagcatggaagtgcagggccccctggacggcgcggcaagcctgggagaagaggc

SEQ ID NO: 440943 - DNA, 100 bp, Homo sapiens
ctgcccaccttcatgtgaagtttgccgccttgatgcagcatcaggtggagccttacaaagtaaacctctctcaagatttagagcatcagctgcaaaacat

SEQ ID NO: 440944 - DNA, 82 bp, Homo sapiens
gccgggcccacctccccaccaaggaagcaggttacgggcaggacttgagtggcttcggacagggcttctcagaccccagcca

SEQ ID NO: 440945 - DNA, 75 bp, Homo sapiens
cttcaactcatgcaccatgaaaagctgctgttttgcaggagatcgtgaccaggttactcactataaacaatatcc

SEQ ID NO: 440946 - DNA, 83 bp, Homo sapiens
cgcgtcccgctcgctgggagagaggctttaccgccagcacctgttcagaatcacacaaataagcatcaggtattcaatgcatc

SEQ ID NO: 440947 - DNA, 100 bp, Homo sapiens
ttcctgcttctttcttttccgtccagtgtcggcaaggggttgtcaccggcttccgcatccaagatgaagagtgcagacatggccaagtccaagaaccaca

SEQ ID NO: 440948 - DNA, 101 bp, Homo sapiens
gtctgcgaaggccgggacccggttccccggcccacagtgggggtgtgcaaacccgagagaactggctgcattaatactacattgtcaaagacaaagacgaa

SEQ ID NO: 440949 - DNA, 82 bp, Homo sapiens
ggaggtgaccaaggaggagtacaaggacatcctgcgcaaggccgtgcagaaggccaccagcttgggctccccacggagggca

SEQ ID NO: 440950 - DNA, 101 bp, Homo sapiens
caccgctctgcaggctgttcctcctcggttttttgctccactcaagcctgttagaatcaccatggaatacagctccagtgggaaggccactggagaagctg

SEQ ID NO: 440951 - DNA, 100 bp, Homo sapiens
cactcccatggttcaagctttgactacaaccagaattcagaggcaggcagaaggattccagtgctggagaggaccagctttatccagggactctaccatt

SEQ ID NO: 440952 - DNA, 75 bp, Homo sapiens
gaggccaagcgaccacccaaagaaggtgccagcgagatttcagattcctgtaaacctctaaagaaaaggagtcgc

SEQ ID NO: 440953 - DNA, 100 bp, Homo sapiens
ggcaaaggggaggttacgcagcaaaccatccagaaggctttagtaccacctgtatttcaaaatgggggacccaaactcccggaagaaacaagctctgaac

SEQ ID NO: 440954 - DNA, 75 bp, Homo sapiens
cgaaacagacgtttgagtcggaaaccttggagtgcagtgaacccgctgctcagtggggcccagcagtgtacctgt

SEQ ID NO: 440955 - DNA, 98 bp, Homo sapiens
agatgccaaccttcccgccagactacggcttccccgaacgcaaggagcgcggcctgaggggagagccacggaggagcaggctgcggcagcacacctag

SEQ ID NO: 440956 - DNA, 50 bp, Homo sapiens
tcataacagttgatgaaaaattgtcttttagagattcctgccaaaaattc

SEQ ID NO: 440957 - DNA, 75 bp, Homo sapiens
tctgagctccagggtcaggcagtatgattgaagtttctaagccaggtgttggagcgggccggagagaagtagagt

SEQ ID NO: 440958 - DNA, 128 bp, Homo sapiens
gccggggccgggcggcaccgcggtgcgcaagcgcaaccgtcggtgggtcggggatcggtcgcctgagaggctaaccttgccgcgggccgagccctgcctcgccatggaccaggactatgagcggcgcc

SEQ ID NO: 440959 - DNA, 100 bp, Homo sapiens
gtcccccgagaaggcctgtctcgccagcatgtccttactagaattggtgttatgtctttgattcgcaagaaggcactttcccacacaggatggagccggg

SEQ ID NO: 440960 - DNA, 83 bp, Homo sapiens
cggcggcggcaagacctctccccctcggaggcggcgggcggaggcggcggtcccaggggcagccactggcctcccagcccccg

SEQ ID NO: 440961 - DNA, 50 bp, Homo sapiens
ggaatgttaaccttagaaagtttccagctggagaagaagcaggcgctccc

SEQ ID NO: 440962 - DNA, 83 bp, Homo sapiens
gccagctcccggcactgctacctctgacccaaagcaggtgagccctattcccagaggcaggtggtgctgaccctgtaacccaa

SEQ ID NO: 440963 - DNA, 98 bp, Homo sapiens
cgccctgcaccgcgcctcgcaaactcatatgttagatttgatatcattcgaaggatcctaaccaaggtttttggatgcagcatagtcatggtgatggg

SEQ ID NO: 440964 - DNA, 74 bp, Homo sapiens
ttacatgttccacaagaagtgcagcttataatccaagctattactcaggttgaaaggattgttgacaaaaggaa

SEQ ID NO: 440965 - DNA, 74 bp, Homo sapiens
gtggtggagtgtagagatatagttggcaacctcactgagttagaatcagagcttttgcctctaatgacagagca

SEQ ID NO: 440966 - DNA, 75 bp, Homo sapiens
cgcctccctgcgactcctggaccaccgggcgctggtctgctcccagccgggtaagcaggaagagaacgacgtggt

SEQ ID NO: 440967 - DNA, 90 bp, Homo sapiens
atctatgaggagaccaaaataaaactaacagtctatgatgtcaaggataagtctcatgacaccagttacactgttagaccttatgatagc

SEQ ID NO: 440968 - DNA, 98 bp, Homo sapiens
gtttcacctccccgtacaagcttcccttgtggagcatgtgcagtggagcagactttgagaatcactacaagaaaaactccttgtggtgaaggttctaa

SEQ ID NO: 440969 - DNA, 83 bp, Homo sapiens
tactctctctttctggcctggaggctatccagcacatttatgcagtgtgtgattctttctaaaacaactccctggaagagagg

SEQ ID NO: 440970 - DNA, 99 bp, Homo sapiens
gcaggaagaacccatcgggcagctacacatcttgaaagagaagctcttcctgtgaggtgaaaaaccttttgaatgtccaaattgtcatgaacgatttgc

SEQ ID NO: 440971 - DNA, 123 bp, Homo sapiens
cgcgaaccgcagtatcatgctggccaagaagatcatcattaaggacggaggcacgacatcccagttaccagtgtccttgaattgatagtggcttctgtttgtcagtctcatataagaactaca

SEQ ID NO: 440972 - DNA, 82 bp, Homo sapiens
gctgccgcctgaagtgcgggcgcagctggcggagctggagctggagctctcggaggacaatgcagatcttcgtgaagactct

SEQ ID NO: 440973 - DNA, 100 bp, Homo sapiens
aagaaaacaagcagcttctgcacgacgcactggcccaggacctgcacaagagacgagttgtactgctgtcacaggaaatggacgctggattacaagcatg

SEQ ID NO: 440974 - DNA, 100 bp, Homo sapiens
ccaatcaggagcaggcgactatttttgaagaggttcagccaagtgcaagatctgtgaatgggcgtttgaaagtgagccactatttctccagcatatgaag

SEQ ID NO: 440975 - DNA, 97 bp, Homo sapiens
ggcgagtatctgctggcggcgcagctgggcaagaattacatcagcgcctgggagctccagcggaagccaaaatgaagtttaatccctttgtgacttc

SEQ ID NO: 440976 - DNA, 96 bp, Homo sapiens
aaagtcatcagccggtgccaaaggcacacaagccatgccccctcttttctctttgggataccaccagtgccgctggaactatgaagatgagcagga

SEQ ID NO: 440977 - DNA, 75 bp, Homo sapiens
ggatgctggattctaaaatttgaatgtgcagatcccaagtctgtagtatgtgcattcttcaagcaaggacagtgt

SEQ ID NO: 440978 - DNA, 50 bp, Homo sapiens
gactctcggctatggagtccccatgttggacatggaggagtgaatcagct

SEQ ID NO: 440979 - DNA, 83 bp, Homo sapiens
agcctttgctgaattggagagctgatgcttgggatggaagaagtttgagtgacctatcctgtgtttatcctccttgccgtagc

SEQ ID NO: 440980 - DNA, 74 bp, Homo sapiens
catcctcagaaggccaatcattgtcatttcagaagaacatgtgatcatccaggccgagttctatctgaatcctg

SEQ ID NO: 440981 - DNA, 88 bp, Homo sapiens
tcctttctattttaaagagccaagcctcagagagattctggactctacttataatatccctaactgctggattctcctgttgcagctt

SEQ ID NO: 440982 - DNA, 121 bp, Homo sapiens
ctctgaatggctttggtgggatgtgtatgaccttcacctcattaacagggtgagcccctccagactccgaataggagatcaagagtttgattcattgcctgctttactggaattctacaaa

SEQ ID NO: 440983 - DNA, 100 bp, Homo sapiens
gccatttcaggagtacctggaggctcaacggcagaagcttcaccacaaaagcgaaatgggcacaccacaggtaaagtcagtgataaatcttttgtttgct

SEQ ID NO: 440984 - DNA, 96 bp, Homo sapiens
ccttgcaccactggctgggaggccgctgcagctcatggtagctacagcaagctgggtagcaggcagatccaaaggatatcatgaagtttccagggc

SEQ ID NO: 440985 - DNA, 100 bp, Homo sapiens
cagggttttctttactctggggtcccggctgccctgtggcctcgctcctcggaggttgtattccctgaatgactataaaccacccatttcgaaagcgaaa

SEQ ID NO: 440986 - DNA, 83 bp, Homo sapiens
atgccttatcaggacatacttccaacaatatttacgaggcagtcaattacttcaatgagaatcaatacccagatgaagcaaag

SEQ ID NO: 440987 - DNA, 100 bp, Homo sapiens
tgaagatcaatttcaagaagcatgcacttctcctcttgcaaagacccatacatcacagactgatccgtcaatcttgggtggaatgattgtgcgcattggc

SEQ ID NO: 440988 - DNA, 75 bp, Homo sapiens
agaagctaaacaaccagctcctgagcctcccaaaccttacagacaaagccacagacccaagcatgtcggaacagg

SEQ ID NO: 440989 - DNA, 98 bp, Homo sapiens
tgtcttcctgtctcaacgatacctattttctagtgctgagatcctgagacaatgatagggccagatttgagtgtgtgaatttttgagtgaaacctgga

SEQ ID NO: 440990 - DNA, 100 bp, Homo sapiens
cgagagatggcagaaaagaagactcgagccctccagcgaggcaacaggcaccattcaggaagattacctaagagagctgctgacaaccatgggggatcgg

SEQ ID NO: 440991 - DNA, 82 bp, Homo sapiens
gccgcgcacttcgtcatgttcttcgcgccctgtactatactggcaattgctggagaagattttgcaattgttgcttctgata

SEQ ID NO: 440992 - DNA, 76 bp, Homo sapiens
ggtagttaaaggcccagatgataggaatcccatctcatttaggactggggacaaatgtgtgttgaattttaagcca

SEQ ID NO: 440993 - DNA, 75 bp, Homo sapiens
gccctcaagtcctggctggccaagttactggagccgatattgcagcgtcttatggaaatgttatctccatttttg

SEQ ID NO: 440994 - DNA, 100 bp, Homo sapiens
atggggtcctcctgagcccagaagacgaggaggagctcacagcaccagggcccaggagacaccagcgggggctgccgctgcagggtaaatgggattcctt

SEQ ID NO: 440995 - DNA, 100 bp, Homo sapiens
gattcctgaggatgacgggaatgacctgacccacaccttcttcaacccggaccgggagggctggctcctgaagctgggcctgacctctcgggacacaccc

SEQ ID NO: 440996 - DNA, 75 bp, Homo sapiens
acacagacagaggaggccatacagacccggatttttgcacgagaacatggatcaaataagaaattggcagcacag

SEQ ID NO: 440997 - DNA, 87 bp, Homo sapiens
atcctgaaagccatgcagcgggagtcagagtcagaagcaaaggtagatggagagactgcatcggacagtgagagccgggcagaatcc

SEQ ID NO: 440998 - DNA, 100 bp, Homo sapiens
attgtttaccttggaagaactccgtgcccagatgctcataaggattgtcctctttctacaaaagctgaaacgctcacgagagaccgaggttcagctgaag

SEQ ID NO: 440999 - DNA, 83 bp, Homo sapiens
ccaggtgcttggcaaaatcgagcgggccattgatggagtttcactatgttgcccaggctgatctggaactcctgacctcaagc

SEQ ID NO: 441000 - DNA, 85 bp, Homo sapiens
atgggtgcatgttagtgctcaagagcctcattatctaccacccgagatgccccaaggtggtcgagatatccagtctgacggagca

SEQ ID NO: 441001 - DNA, 87 bp, Homo sapiens
taaagagaccagttagcagatgcttgacggagtctcacactgtcactaggctggagtgtcgtggcatgatctcggcttactgcaacc

SEQ ID NO: 441002 - DNA, 75 bp, Homo sapiens
gcgggtcttgggtcctccgagagcagcagcgaccaagatcactccatggatgaaatgacagctgtggtgaaaatt

SEQ ID NO: 441003 - DNA, 114 bp, Homo sapiens
gctgccgacccctggcacctggcgcccagcgcgcccgtggccgctgccgcctccgccccagacaatgcagatcttcgtgaagactctgactggtaagaccatcaccctcgaggt

SEQ ID NO: 441004 - DNA, 51 bp, Homo sapiens
catgggtaccgcttgccaactttggagggtaatacctgcctggagaatgga

SEQ ID NO: 441005 - DNA, 75 bp, Homo sapiens
acatcgacgccgcgtggcaggcgctgcgcacccgcttccttcaaaatgtctactgttcacgaaatcctgtgcaag

SEQ ID NO: 441006 - DNA, 74 bp, Homo sapiens
gcatgggctcgcctgtcaacgcgcagatttggcagctgatcggaagctctttcgtcttgtctccaatgactcct

SEQ ID NO: 441007 - DNA, 75 bp, Homo sapiens
tcccttcgcctccttcaccgccgcagaccccttcaagttctagtcatggtcctgtggcggtacactggaacccga

SEQ ID NO: 441008 - DNA, 127 bp, Homo sapiens
accacatgccagtggtactgatggagatgaaagtgaggaagacccacctgagcataagccaagcaaactgaagaggagagagaagaagaaggaggttcctgctgtgccagaaacccttaagaaaaag

SEQ ID NO: 441009 - DNA, 75 bp, Homo sapiens
cacccgctgccccagctcaaaggtttttcgttggaatatacgttgcacatttatggcgattctgagtgtgagggc

SEQ ID NO: 441010 - DNA, 100 bp, Homo sapiens
actaaccttgatgagacttcggagatcctttctattcaggataacacaagtcccttgccgggcggcaccttcctacttctgcccagccacagccctcccc

SEQ ID NO: 441011 - DNA, 82 bp, Homo sapiens
gttggaggctattttttggggggggtgtgaacccacatccctgcccccagggccacctgcaggacgccgacacctacccctc

SEQ ID NO: 441012 - DNA, 75 bp, Homo sapiens
ggattcccagccatggcagattcctccgggcagcaggggcaagaatatcacggcatgggcatgagtagcttgaaa

SEQ ID NO: 441013 - DNA, 100 bp, Homo sapiens
tccttagaacaccaaagattgtctctggcaaagatgaaacgactacaaagtgccatgacagaaggtggtgtggttctacgggaacctcagagaatctatg

SEQ ID NO: 441014 - DNA, 80 bp, Homo sapiens
atcctgataagaactgctttgggcataaggaaatggtggcaggcacttcctcctaacaagaaggaagtagttaaagaaaa

SEQ ID NO: 441015 - DNA, 96 bp, Homo sapiens
acatgcaagaaacatatactgcttacctcattgaaacaagctgctggttgcgcagccacctcgggatactgcacacggagaggagggaaaataagc

SEQ ID NO: 441016 - DNA, 51 bp, Homo sapiens
ccctgaagagggaagacacgcggaaacagctgtgccctcctggctgaagaa

SEQ ID NO: 441017 - DNA, 95 bp, Homo sapiens
ttctccagcacctgcagacatagctcagacagtacaggaagacttgagggaccgccgggagagcctgcccacctccccaccctggacgccgggcg

SEQ ID NO: 441018 - DNA, 90 bp, Homo sapiens
ctttccagaatttatatcgttgccctggggatgacaagatggagtctcattctgtcgctcaagctgaagggcagtgccgtgatcttgacc

SEQ ID NO: 441019 - DNA, 75 bp, Homo sapiens
gtgagcgagtgctgtgctttcatgggcctcttctttatgaagcaaaggaagctgccctctgtcgacagctcccca

SEQ ID NO: 441020 - DNA, 74 bp, Homo sapiens
gggtggagctgggaacattcctcataaagcgagtcgtcaaggagttgcagaattctctggtggttgagatcccg

SEQ ID NO: 441021 - DNA, 97 bp, Homo sapiens
agctgagaaagtcatcgatggcaccccctgtgaccagaacggcacggccatctgtgtgtctgggcagtgcaagaccaaatgtcaccagtactggcca

SEQ ID NO: 441022 - DNA, 50 bp, Homo sapiens
gaggttatgaggcttaataaagaagcaaagctcatcgtggagacggacac

SEQ ID NO: 441023 - DNA, 108 bp, Homo sapiens
tctgtcttcggtggactccttcggcagtccacccaccgccgccgcctcccagcgtccgtctccaagagagtatgaagagagtgcgtctgtagggcagggaagatggcg

SEQ ID NO: 441024 - DNA, 90 bp, Homo sapiens
tggggatttaaagcactgaaacaaatgattaagattaacttcaagttggcacagcactttgggaggctgaggcgggcgtgagattgggag

SEQ ID NO: 441025 - DNA, 100 bp, Homo sapiens
ccttcaatggtggcgggtcgccggagctctgatcgccgggaacccttgccgctgctgtcctgcgaccccaagcaggagcccagcagccggggccgcccta

SEQ ID NO: 441026 - DNA, 98 bp, Homo sapiens
gacagaagcgactttggtgagactctgttcctgagactggcccagacgctgcggcactatggctacttgcgctttgatgcctgtgtggctgacttccc

SEQ ID NO: 441027 - DNA, 83 bp, Homo sapiens
gacaacgacggcggtggtgacgggcaccgggctcgcggggggatatgagactttctactcggaatatcctgagtgttgcgtgg

SEQ ID NO: 441028 - DNA, 100 bp, Homo sapiens
aggagtgtttgacatagacctggaccagccagaggacgcgggctctgaggatgagctggaggagggggaatgaatctgaagtctgctgcagtaaaacaca

SEQ ID NO: 441029 - DNA, 75 bp, Homo sapiens
gccgccgccaccgagccgccgcggcggcgactggcggcgcgatggacctgaccgggctcctgctggacgaagaag

SEQ ID NO: 441030 - DNA, 83 bp, Homo sapiens
tcacatgctgacagcacaagaaggaaggatttgatgccctggatccctttattcccatcctggtttccaactataacccaaag

SEQ ID NO: 441031 - DNA, 73 bp, Homo sapiens
agatggccgggctgccccgcaggatcatcaagcccttcctggatctggagagagcagctgctgctgccccacc

SEQ ID NO: 441032 - DNA, 74 bp, Homo sapiens
gaattttccaaatgaatttgcaaaacttactgtagagatgcgggccttggcagaactcctgggcccctatggca

SEQ ID NO: 441033 - DNA, 100 bp, Homo sapiens
actgatccaggctggacccacgtctgtctggtgataccaggggcagagggaccactctgacagttttcggctttgtgagaaaccttaccatcaaacacga

SEQ ID NO: 441034 - DNA, 86 bp, Homo sapiens
ctttcttcagccgaggccgccgccgcctctccttgctgcagccatggagtttggtgcacctcgatttggaggaagtagggcagggc

SEQ ID NO: 441035 - DNA, 100 bp, Homo sapiens
ggaggacagttcgctacacagcaatgcatcgaggtgaaagtgacgtcctgcatttcacctccaccaccacgtcgaagaatcgcatcatcataacctggca

SEQ ID NO: 441036 - DNA, 90 bp, Homo sapiens
gaaagcagaaactcatgtctgattaaaaggggaagtccacagtatgttctgcaaagccagtttagatgaaaagcaaaatctggttgatcg

SEQ ID NO: 441037 - DNA, 82 bp, Homo sapiens
agcagatggcggatgccctgcagtacctgcagaaggtctctggagacatcttcagcagagccagcagccacccccgcccagc

SEQ ID NO: 441038 - DNA, 83 bp, Homo sapiens
ggcgggactgccacgtccaagcaaaccgggaaaggagaggatcccggagccgggggatatgagactttctactcggaatatcc

SEQ ID NO: 441039 - DNA, 73 bp, Homo sapiens
tgctagtgaaaaataagattacgttgcaggaccttcgagagattgaaaatgaagatatgagagtgcaactaaa

SEQ ID NO: 441040 - DNA, 75 bp, Homo sapiens
tcgcgccgctgctggttgctgtccctgttcaaacttctcatggaacatctggaccctgatgaagaagaagaagaa

SEQ ID NO: 441041 - DNA, 100 bp, Homo sapiens
ggcagcggccgcgcggcgctggactggagcagaaccccaggactgcgcccccgggagcgggcgcccagagaccatggtgaatccgggcagcagctcgcag

SEQ ID NO: 441042 - DNA, 75 bp, Homo sapiens
ctcctccgctgtctccctggagttcttgcaagtcggccaggatgtctcaggaaaatggaaggtatgggcgccgca

SEQ ID NO: 441043 - DNA, 100 bp, Homo sapiens
ccccatggctcactatgtgcctgatatcatgccaattgaatctgttattgcaagaattcggttccctcaaaattataaaggcaggaaagctcaagacaaa

SEQ ID NO: 441044 - DNA, 100 bp, Homo sapiens
cagtttctttgtgttcagtggcgctctgaaatcctcttctggataccttgccaagtccagtattgtggaaggaaggggaacagtttgtgaagaaaatcgg

SEQ ID NO: 441045 - DNA, 90 bp, Homo sapiens
agcgagctgagtggttgtgtggtcgcgtctcggaaaccggtagcgcttgcagcatgacagcccacctgaggatattgaccataaggactc

SEQ ID NO: 441046 - DNA, 100 bp, Homo sapiens
acaggagctgcacaagctgctggacaaggaccctgacctgcctgtcgtcgtggtggccaacaagcagcatgttgacatagcggctttattgataaaatac

SEQ ID NO: 441047 - DNA, 97 bp, Homo sapiens
aggcttccacactcaaatctctaagctattgagggcacctacattgacaagaaatgccccttcactggtaatgtgtccattcgagggcggatcctct

SEQ ID NO: 441048 - DNA, 82 bp, Homo sapiens
ctctgaggctgatatgcaatgtcacttacaacattaatcagatactgcatttaaggttatggaggttttgatgactatggtg

SEQ ID NO: 441049 - DNA, 100 bp, Homo sapiens
aagtggtgaatcccctgtttgagaaaaggcctaagaattttggcattggctcgcgggattgatgtgcaacaagtgtctttggttataaattatgatctac

SEQ ID NO: 441050 - DNA, 100 bp, Homo sapiens
ctaccacagccagacctatggcaatgggtccaagtgcgaccttaatgggaggccccgggaggccgaggttcggagtctcactgtgtcacccaggctggag

SEQ ID NO: 441051 - DNA, 75 bp, Homo sapiens
caaatggggcaggaaattgggaatgaattggatgaacaaaatgggaaagaatatggcaaagctgatgcaagatgg

SEQ ID NO: 441052 - DNA, 88 bp, Homo sapiens
gccaaacgtagaccaaaggctcagcccacaactcttgtcctaccacctcaacacagaatgttcagcttaacaaagaaatgacacttgc

SEQ ID NO: 441053 - DNA, 100 bp, Homo sapiens
cagcattttcggcaaccgctgctggcagttttgccaggtgtttgttaccttgctggatgaaaaagaaagtcggcgtctgttccaacagatcctttctggt

SEQ ID NO: 441054 - DNA, 50 bp, Homo sapiens
catagacaagtttgtacatccaaacttaatcttctccatacagagctggc

SEQ ID NO: 441055 - DNA, 100 bp, Homo sapiens
ccggccggtgccagcacctttcggcttctgagacggcggcagcagcggcattcagaaaagagtctcatcgtggaaggcaagagggaaaagaaaaaagtag

SEQ ID NO: 441056 - DNA, 100 bp, Homo sapiens
gttcgtccttactgcggaaagcttgtcctggtataaagatgatgagaataactgaagtgaagtgatggactccgatttggagagtagtaagacgtgaaag

SEQ ID NO: 441057 - DNA, 89 bp, Homo sapiens
gtaggagcatggcttggagcacttcctattccactggattgggaaagaccatggcaggcgtctactagaaaaatctcagagggtagaag

SEQ ID NO: 441058 - DNA, 100 bp, Homo sapiens
gtctcgtactgtcgccgtcaccgccgcggctccggccctggccccgatggctctgtgcaacggagactccaagaatgtcgtactctcaggaggctccacc

SEQ ID NO: 441059 - DNA, 73 bp, Homo sapiens
cacatttcctgcaaggactccaaagtggtgagagcccagctgcaggggtaagggccttggcactgaggccgtt

SEQ ID NO: 441060 - DNA, 50 bp, Homo sapiens
actgctggagatggtggagtccgtcagtaacacgtacacagacctctcgg

SEQ ID NO: 441061 - DNA, 100 bp, Homo sapiens
gtgcgcgtctggtggcggcggcgtgatgttctcggcaggagcggagagtttgctccaccaggccaggccttttctgatgccattaaaaaatggcaggagc

SEQ ID NO: 441062 - DNA, 74 bp, Homo sapiens
cggcccctgcctgtggagtatctcatcatagacgctgcgctgaagaaataccagactgagcaaaggagcaaagg

SEQ ID NO: 441063 - DNA, 112 bp, Homo sapiens
agcgccagcggccgagcgggcggcttcctggcctgggcgctccggtggcggcggaggctgaccccgcactacatctacccaccagccatcgtgcagcccagcgtggtgatcc

SEQ ID NO: 441064 - DNA, 75 bp, Homo sapiens
caggcgggcgccagtgcatcttctaggcttgaagaaaatttgcctacacgttgtggattttgtcatataccatat

SEQ ID NO: 441065 - DNA, 97 bp, Homo sapiens
gctttttgagcggtcccgcatcaaggctctggcagggaaatcctcattgacgattcaatttgttgaaggccaatttgtggactcctacgatccaacc

SEQ ID NO: 441066 - DNA, 75 bp, Homo sapiens
acagacaaactgaaggagctttatggacaagtgcctcatgatgatcctgagacttgtcttgttgctgctctgagc

SEQ ID NO: 441067 - DNA, 101 bp, Homo sapiens
aactgaagattcatacgcagctggcagatattatcatagttgctgcaggtgctggagaatctggtaaaagcaccattgtgaagcagatgaggatcctgcat

SEQ ID NO: 441068 - DNA, 100 bp, Homo sapiens
agtttgccacacagtcatggtggataggactgatggggacatccggaacctgctcatctggatcaagaagaatttgctaaaagagcggccagagttgttc

SEQ ID NO: 441069 - DNA, 98 bp, Homo sapiens
cctcaaactcccaggctcaagcaatcctaccatgtcagccttcccagtagctggaactacaggcatcttgacagcagtagcaatgagcgtccagacat

SEQ ID NO: 441070 - DNA, 98 bp, Homo sapiens
accaggaatggagacgccattggatgttttgtccagggcagcatctctggtgcatgctgatgacgaaaaactggaagatagatgataagcctgtaaaa

SEQ ID NO: 441071 - DNA, 82 bp, Homo sapiens
cttggccaaatggacgggactattaagggtttccaggcctgaggtgcccgccctggccccaggagaatgaaccagccgcaga

SEQ ID NO: 441072 - DNA, 90 bp, Homo sapiens
gggcaatgaggccaaaatacccagcactattcctgatcagagaactccagttgcttcaacacacagtatcagtagtgcagccaccccaga

SEQ ID NO: 441073 - DNA, 50 bp, Homo sapiens
tgtaatacatcatgaactgcaggattgtaaaccatggctgtgtggataca

SEQ ID NO: 441074 - DNA, 100 bp, Homo sapiens
actgttccttcagccaaagaaacaagccgtggaataggtgtatcaagtaatggtgcaaagcctgaacttcgccgacacgaggtgaccatctgcaattacg

SEQ ID NO: 441075 - DNA, 97 bp, Homo sapiens
agccgtggaataggtgtatcaagtaatggtgcaaagcctgaagctaccacatactgttgattgtgatgaaatgccagttgaagcacctgtcctgcga

SEQ ID NO: 441076 - DNA, 75 bp, Homo sapiens
gaagcgctgcgctcgcgcccggatccctcaggaatcagagatcattgatttcttcctgggggcctctctcaagga

SEQ ID NO: 441077 - DNA, 97 bp, Homo sapiens
ccctactcccctgctatccccaacaagaggaaagacacacctaccaagaagccagtcaagcggccagccaatgaatttccctgtttgccaaagcaag

SEQ ID NO: 441078 - DNA, 100 bp, Homo sapiens
gcgaagtcgggaccatcgtcgtgaggatcgtgtgcattacaggagtcctccacttgccactggtgcagacttccctgctttggttgtgaaggccagtggt

SEQ ID NO: 441079 - DNA, 75 bp, Homo sapiens
tcgcaacaagatcccctatgagagtcccatcttcagcagagggtatttgtggtgcagcagattcccaacagtaac

SEQ ID NO: 441080 - DNA, 98 bp, Homo sapiens
ttccccggggagtcagttcctccccgggcccctgagccatgcccatcgcagccgccccgaaggagccagggaaacagaagtacctgtgcgccagcaga

SEQ ID NO: 441081 - DNA, 80 bp, Homo sapiens
ggcagctttgcaaggcatccgtgtccagaggcacatttaactggacggtccccttcctttcatctctggcctgtttgatt

SEQ ID NO: 441082 - DNA, 100 bp, Homo sapiens
gatgcctccattgcacacagattccacatcatgagagaaaaacacccagagaaattcaacagtaggtgaatctggattgggaaagtcgacattaatcaac

SEQ ID NO: 441083 - DNA, 75 bp, Homo sapiens
gcaggctgactatgtgccgagcgatcaggaccagtccatgatgtttggaaatgataggagccgatttttagaggg

SEQ ID NO: 441084 - DNA, 97 bp, Homo sapiens
tgcgcagggcctgccaggtggcgctcgggaagtggcactaaggtccaaaggaagctacatatgggtggtccctgctacaccagcctcccaagcctcc

SEQ ID NO: 441085 - DNA, 75 bp, Homo sapiens
agcacctttcggcttctgagacggcggcagcagcggcattcaggctctgttccatgggaaattcatagacacggg

SEQ ID NO: 441086 - DNA, 82 bp, Homo sapiens
cccaggagccggcgcccccgccctgtagacgccaaggacttattgttgtgctaacactgaagacttggagacagttattcac

SEQ ID NO: 441087 - DNA, 124 bp, Homo sapiens
gaggacccgcgtgggcaccctgcaggtggtcagacatgtcatcaactcagctgagtgtgaacatggctacgcctcttcattcccgtccatgccgagcccccgactgcagcattcaaagccccca

SEQ ID NO: 441088 - DNA, 108 bp, Homo sapiens
ctctgctgcaccgacctcgacgtcttgcctgtgtcccacttgttcgcggcctataggaccaagaatcgccttcagccctgtctggtgcatccttggcagaaagtgagg

SEQ ID NO: 441089 - DNA, 82 bp, Homo sapiens
gcaggagattatagctctgtatgagaaggacaacacctacttaggtctatcagccacagtctctgcaagtttccaagagcag

SEQ ID NO: 441090 - DNA, 100 bp, Homo sapiens
cttccatgtggactttggtggtacctctgtttggtatcacatccatcaagggggaaaggcatccgtgtcattctggaccttactcccaactaccggggtg

SEQ ID NO: 441091 - DNA, 78 bp, Homo sapiens
tcagttcctactggagagccttcaagatgtgtatatctcatgattgatatggagaaactagtcatgggccaaaggtca

SEQ ID NO: 441092 - DNA, 50 bp, Homo sapiens
cagaacgccatcaaccagctattattccttgggcctgaatgacttgaatg

SEQ ID NO: 441093 - DNA, 83 bp, Homo sapiens
tcctcaaggcccaggctgctttcttcggtagctaccgaaacgctctgaaaatcgagccggggggaggttctagccaaagctgg

SEQ ID NO: 441094 - DNA, 83 bp, Homo sapiens
cttgtgtcctaccatggtatttgctaacgtttagagagtgcttccccttgccgagcactgggaattctcaagaaatttgagga

SEQ ID NO: 441095 - DNA, 83 bp, Homo sapiens
gaaggagttgttgtctcggcagcgcccgcggagacgtgaagagagtttacccctcaatcccaaacctttcctcaatggactaa

SEQ ID NO: 441096 - DNA, 82 bp, Homo sapiens
tgacttctcggaatggaaggatgacgaggctgaaggtgatgtggccgccctcaaccgacgcatccagctcgttgaggaggag

SEQ ID NO: 441097 - DNA, 88 bp, Homo sapiens
tgtcaatgcggcgctcccgctgaaggagggaaacgcggcgcgtccaggctaggcagctggaagagaaagaccgagtgctaaagaagca

SEQ ID NO: 441098 - DNA, 125 bp, Homo sapiens
tcggctgcggtttgctgggaacggagggctgcagcgcccaccctgcgccagagaccagataaaactcctgggagagttggctctcaaggttctgatttagattcatcagcaactcctataaacac

SEQ ID NO: 441099 - DNA, 96 bp, Homo sapiens
ctacaatgaagtatatgcagaggaggtcccacaggctcctgccctggactaccgagatggaggaaaggaagtgctgtccatgcaccagattctcct

SEQ ID NO: 441100 - DNA, 100 bp, Homo sapiens
gacactgatcgaccagcaggtggtctatatccatccttccagtgccctcttcaacagacagccagaatgaacaccttccaccatgaccacctcagcaagt

SEQ ID NO: 441101 - DNA, 50 bp, Homo sapiens
ggatcagttgaaggcacactgtaaaggctcgaaacgccggtctcagtggc

SEQ ID NO: 441102 - DNA, 105 bp, Homo sapiens
ctctgccgaattcctgtgccacctcctcctttagaaaactgatcttaatacaggacagtatttatgatgaaatggaagagaagtggtcaaaacagaaggcgaaat

SEQ ID NO: 441103 - DNA, 51 bp, Homo sapiens
gaaacaccggtaggagcggggaggtggagccgccaccaaaatgcagatttt

SEQ ID NO: 441104 - DNA, 74 bp, Homo sapiens
gcggccctggtggggaagaggccaccaacatctggacggcaggaacatcgtcttgagcaatcccaagaagagga

SEQ ID NO: 441105 - DNA, 50 bp, Homo sapiens
tcgagatcagccagccgaccgaggtgaagactgatgagaagagtctgtgg

SEQ ID NO: 441106 - DNA, 99 bp, Homo sapiens
ggaaaactcgccaagggttatgtctggaatggaggaagcaacccacagaacattcagaagattctcggccttgccccttcacgagccgccaccaagcag

SEQ ID NO: 441107 - DNA, 100 bp, Homo sapiens
actcaagtcctggctcagcaagactctcgagcccataatagctctccagacccccagctggccatgtggtgagttcagggcccaaatcaagtagtaccag

SEQ ID NO: 441108 - DNA, 73 bp, Homo sapiens
aaaacttggtctggtcaagtgttgaagacaactgtagacgcacagaaaactgaatctgtagataacgagggag

SEQ ID NO: 441109 - DNA, 82 bp, Homo sapiens
tcatgttctgcacctcaggagggaattcagcctcagtgatgtccatgaggtgcagtcgctttcaatctgaaatcaaacgctt

SEQ ID NO: 441110 - DNA, 75 bp, Homo sapiens
agaagaggaaaactctaccggtgcagagcacaaagttatcattgttgggctggataatgcagggaaaactaccat

SEQ ID NO: 441111 - DNA, 100 bp, Homo sapiens
actatgatgggctgcttcccaagtctggaaagcgtcacttggggaaaacaaggtggacccgggaagaggatggagatgaagatgaggaagctgagtcagc

SEQ ID NO: 441112 - DNA, 73 bp, Homo sapiens
tctggcgcggggcttcacggccgcagtaatccttcccctctaccaccggatatggctcctgggcagagttatc

SEQ ID NO: 441113 - DNA, 100 bp, Homo sapiens
aaggggacactctgaagattattgagcggctggaccacctggagaatgtcatcaagcagcacattcaagatgagcgtgaagccgtgcagaagaagacctt

SEQ ID NO: 441114 - DNA, 50 bp, Homo sapiens
agagtccgcggccggggcgcgggagatgtcactaatgatgaccattatca

SEQ ID NO: 441115 - DNA, 82 bp, Homo sapiens
tcaagtagtgtttgccagagttgattgtgatcagcactgtgtgttccagagaacaagccttcagacatttgctatattgacg

SEQ ID NO: 441116 - DNA, 89 bp, Homo sapiens
cccggagccgggccctggcgaggcaggaatggccccgaggcctccgaccgccgcgccccaggcgatatgaaaggtgaggtctatccatt

SEQ ID NO: 441117 - DNA, 100 bp, Homo sapiens
cacctgttcagcgggcacctcagcaccctcagattgagcttccccaacctctttaagaaaatggacccaagtggggtcaaagtgctggaaacagcagagg

SEQ ID NO: 441118 - DNA, 74 bp, Homo sapiens
tcctccagggaggacctcattaaggcacagtatgaaaacccaccacatatctatgcccttgcagataatatgta

SEQ ID NO: 441119 - DNA, 100 bp, Homo sapiens
accctgagcgggcgccccgtcaaaatccgaaagattcgggccagagacgacaacccgggcctccgagaatgttttctctcttcaagattctcttttgaaa

SEQ ID NO: 441120 - DNA, 74 bp, Homo sapiens
gtgcagctgcctcagttcttagcgcaggtcacccctcctaatttctcagtgtcacaagtgcccaacatgcccag

SEQ ID NO: 441121 - DNA, 107 bp, Homo sapiens
ctgggctgtgctctccggctcccgccgccacccccgccctcgccttcgcctccgcctccggtggaaaaggattattcatacctgaaggagatatgtgatcaccaagc

SEQ ID NO: 441122 - DNA, 100 bp, Homo sapiens
cctgcatctgcccctcggccttccgacgtgggcggtgggccccagccccacagaccagcccagcattcaggtggcaagggctctggaacagccacataaa

SEQ ID NO: 441123 - DNA, 75 bp, Homo sapiens
agactagtctcttccaaggaagatcttgcaggtctctaattaacagaagatggcaaagcccagccacagcagcta

SEQ ID NO: 441124 - DNA, 75 bp, Homo sapiens
agcctcagttggaagcagccgatccagcctgcggagcctgtggggcaggtcacgaacgagatcacgccggtgctg

SEQ ID NO: 441125 - DNA, 100 bp, Homo sapiens
gggagacatcagcttaatgaacaactacgatgacttgtctcccacggtcatccgctcagggctgaaagtttaattggttggggtcagataagaagaggag

SEQ ID NO: 441126 - DNA, 50 bp, Homo sapiens
ctggatccaggataacggaggctgggattctaacattttcagagaacctt

SEQ ID NO: 441127 - DNA, 100 bp, Homo sapiens
gttcctgcccggcgcctggcggggcctccgcgaggacgagttccacatcagtgtcatcagactgacaaagtgaagctgacatggagagatcggttcccag

SEQ ID NO: 441128 - DNA, 101 bp, Homo sapiens
taaaaggaggacctctcgccaagggccccaatgagtggcacacagtctactatcaccgacaggaagatcccagtgtctgagtgaactaacagtcctgcttt

SEQ ID NO: 441129 - DNA, 75 bp, Homo sapiens
gaatgtgttactccattgctgaggagtggtttccacttgagcggcacagtgacagaacctgcaatacaatcggag

SEQ ID NO: 441130 - DNA, 100 bp, Homo sapiens
atgagaggttccgtcagtgtctgatgtcagatttatctcatgctgtgcagctgggaatggaggaagaagatgtgattgaagtttatcaggaacaaacggg

SEQ ID NO: 441131 - DNA, 83 bp, Homo sapiens
ccagaagaaactgcaccggaaatgtgcctaccagtggaagatagatgataagcctgtaaaaattgacaagtgggatggatcag

SEQ ID NO: 441132 - DNA, 98 bp, Homo sapiens
tttaaactacacaaaagtggaacagctttgttcagcttcgagagctgtgcccaggagtgaacaaccagccctacctctgtgagagtggtcactgctgc

SEQ ID NO: 441133 - DNA, 75 bp, Homo sapiens
ccgcccgcgaagcccgccgaggcatcagagccgctgcgacggtgacgccagaccattcctcaagaattttgtatc

SEQ ID NO: 441134 - DNA, 97 bp, Homo sapiens
cagcccttgtgcccgggctgccagggacagaggccagcgcgctgcaacacaagatcaagaactccatctgatggccgccctgctcccccaatgaaag

SEQ ID NO: 441135 - DNA, 101 bp, Homo sapiens
acttcatctcattgctcagcgcggacctagacctggaatcgcccaagtccctctactcgcgaggttatcaatactctggctgaccatcatcatcgtgggac

SEQ ID NO: 441136 - DNA, 100 bp, Homo sapiens
cagcattaccaagacacgctgattagagcgaagagagagaaagcccaggggcatagaaggaaaaactggaaagtgaggaagttcatcttgagagaagacc

SEQ ID NO: 441137 - DNA, 51 bp, Homo sapiens
cccgctttcggctcgggcctcaggagtctaccatggctcaagaatctccca

SEQ ID NO: 441138 - DNA, 98 bp, Homo sapiens
gtgcctgaacaacggattgagctatatcaggtggaggagttactgatggccatggagaaggtaaagcaggaactagaatccatgaaagcaaagctgtc

SEQ ID NO: 441139 - DNA, 82 bp, Homo sapiens
ggaggagaaaaaccagctggagattgagagactggaggagcagatgataccacgagtcaacccaaaagttgctggggagaag

SEQ ID NO: 441140 - DNA, 100 bp, Homo sapiens
caaaaacacaggaagcaaaattgaagaggattttccacacatcagatctttctttcaagatggcttgaaaacagctgataagttgaaacagtacattgaa

SEQ ID NO: 441141 - DNA, 50 bp, Homo sapiens
gggccactcagagtcgcccgagaatttacagacaaggatcagcagccctc

SEQ ID NO: 441142 - DNA, 75 bp, Homo sapiens
cctcggagcgcggtccctgtattggtctcctgctcctagagatgaataatacggcagctagtccaatgtctactg

SEQ ID NO: 441143 - DNA, 88 bp, Homo sapiens
atcgacacggggcccatgcggttctactacgtcgtgggctggggcatcccggccattgtcacagcccaactcctctttccgaccgccg

SEQ ID NO: 441144 - DNA, 90 bp, Homo sapiens
ctcttctccaccacaccgggagctcctcagagaaattttgaaattgccttcaagatgtttgatttgaatggagatggagaagtagatatg

SEQ ID NO: 441145 - DNA, 90 bp, Homo sapiens
ggaggagctccccagctggtggctggagcgaccccttgttctttggtggcgctgatgaacgacaatctccttgagagctggagcgacctc

SEQ ID NO: 441146 - DNA, 111 bp, Homo sapiens
ccaaggacagtgaggagctgggtggtcccagcctggagctgtgccagcctgacatggacaatgcagatcttcgtgaagactctgactggtaagaccatcaccctcgaggtt

SEQ ID NO: 441147 - DNA, 74 bp, Homo sapiens
caggagcctcaaggcggcccggcgggcgactggacggccggacaggttatgccaaggacgccctgaatctggca

SEQ ID NO: 441148 - DNA, 100 bp, Homo sapiens
gggacagcgcggcggggagcgacgaccaaatttgtatcctactgtggggcttcaaacaccaggagaagtggtcgatgccaattttgggcaacatcctttc

SEQ ID NO: 441149 - DNA, 50 bp, Homo sapiens
gatcatgggcaaaggacagatccaggtgctggagaatctggtaaaagcac

SEQ ID NO: 441150 - DNA, 74 bp, Homo sapiens
agcaacaccagcactgccaacagatacgtaggtaacctttccagagatgtgacagaagtccttatacttcagtt

SEQ ID NO: 441151 - DNA, 100 bp, Homo sapiens
accaggaatccgcccgcaagagcgagccgcctgccccggtgcgcagacagagctattccagcaccagcagagacgcaaacatgcagatctttgtgaagac

SEQ ID NO: 441152 - DNA, 98 bp, Homo sapiens
aaaaattcaagaagttgaaaaacgcttttcacgtcacctggagagatgcacaggtcttgggcgtctttggtactggcttttttaggggtctgcctggg

SEQ ID NO: 441153 - DNA, 74 bp, Homo sapiens
gagatgtgatgttggagaactatagcaatctggttttcttgggaatacggttggacagaatgaactgaagatta

SEQ ID NO: 441154 - DNA, 90 bp, Homo sapiens
tcgacgaggacacgacagtcacaatcccctcggccgtgtgcaacccagtttatgcctgaccccaagctcatggatcacgggcagtcccac

SEQ ID NO: 441155 - DNA, 98 bp, Homo sapiens
ggacgcaaagttctccggcgaggatgttggcaaaggatgaactgatgaccatacttgagaaatgtttcaaggtttttaagtcttattgtgaaaaccac

SEQ ID NO: 441156 - DNA, 75 bp, Homo sapiens
ctgcacgaaataaagctcctgggcaaggggacgtctgcagctgatttgacggtgagaacatgtatatgagcatga

SEQ ID NO: 441157 - DNA, 96 bp, Homo sapiens
ggaacggaaaatgagggagttcaactctggtattagcaactatccagaaagcaccatagcaaccagtgatgtcatgtctgaaagcatggtggagac

SEQ ID NO: 441158 - DNA, 80 bp, Homo sapiens
gggtggacgaccccgaactccaggacagcatccaggcctcattggacagcattcgaggcaaagatcatgccaagttttca

SEQ ID NO: 441159 - DNA, 74 bp, Homo sapiens
cagcggctcctcaacacccctcgaagaagctgaacatggttatgcctccatgttaccatacaataacaaggaca

SEQ ID NO: 441160 - DNA, 87 bp, Homo sapiens
atggttgaggagcacatgtggtcgccagcctcccatctccagagtcccctaaggcccagatggtacaggaagacttggagaagaccc

SEQ ID NO: 441161 - DNA, 100 bp, Homo sapiens
acccagcccatgggctccctgaggcccgcccagccgacacctcggcccctgcagtgaggaggaggagtttcaacaagatgtcatggcccgcgcctgcttg

SEQ ID NO: 441162 - DNA, 102 bp, Homo sapiens
cctggcatgaacttgcagaactttacatcaatgaacatgaagtgcctggaagagctgggatgtctggttgagtcctatggcatgaatgtttgccaaccaacc

SEQ ID NO: 441163 - DNA, 97 bp, Homo sapiens
cacctgaggttcagattaagaaatctgccccaaagtcttagaactggaaggcccttttgtctacttgtctttagtaggaaacgttgcaaattccgat

SEQ ID NO: 441164 - DNA, 96 bp, Homo sapiens
catggagctctcagcataccgtgcaacagcaaagtggaagatgctttctacaaaggtgaactcaggctgaatgaggaaaaattatggaagaaaagc

SEQ ID NO: 441165 - DNA, 82 bp, Homo sapiens
actcttgcggcagggtttgcagtgtaaagtcagcaaactgaaacttcaggccaaattcaaggagttgctgtgacatcttcag

SEQ ID NO: 441166 - DNA, 75 bp, Homo sapiens
ggccatggtgccccactatggtggcatcaaccgagttcggcacttttcaggattagaagaggctgtgtatagaaa

SEQ ID NO: 441167 - DNA, 83 bp, Homo sapiens
aggagctgtgcagccgcgaggaggcgcgggaggtgttcgagaacgaccccgagacggacccatggatgaaggaccagatcttg

SEQ ID NO: 441168 - DNA, 100 bp, Homo sapiens
aagagtcacctaaagttaggcggcactccagccccagctcggaccgtataatagacgctggccccaaaggaaactactctcgatttatgaatcacagctg

SEQ ID NO: 441169 - DNA, 80 bp, Homo sapiens
gccgctcctaagcctgcacagccgcggcggcagcagcagtgagaggcaacatgagtgagaatgaggaagaggaaatttct

SEQ ID NO: 441170 - DNA, 50 bp, Homo sapiens
gcaaggacgagccggggcgctgaaggacagtcattttgtttactcattca

SEQ ID NO: 441171 - DNA, 100 bp, Homo sapiens
gcgcgatgcgtcaagtacactgaaattcatcctgagatgagactggggctgtggctgagatgtcacatggcagataggatcacaaatttctgttgtatct

SEQ ID NO: 441172 - DNA, 80 bp, Homo sapiens
agcgcccctccgagctggggttggacgctgccagtttgcacagcagcagctacgagttccagggagctctgtcctggtga

SEQ ID NO: 441173 - DNA, 83 bp, Homo sapiens
gagcctgtcccaagccctggtgccaggtgtccatccccgtgctgagtatgccgagattttgctgtcctggaggaccacaccct

SEQ ID NO: 441174 - DNA, 100 bp, Homo sapiens
ggactgctcagggtgccagacctcatcgaccgggactttgtagccaagcagaaggaggacctggagctggccatgaagaggctcaccaccgacaacaggc

SEQ ID NO: 441175 - DNA, 100 bp, Homo sapiens
gacccggcctgggagaagcagcagcgcaaggtggtgatctttgtgaagtctgtgcagcggtgcattgccttggcccagctactagtggagcagaacttcc

SEQ ID NO: 441176 - DNA, 101 bp, Homo sapiens
gccagccgggaggacatctacaagcggcttgcattcacaagagatgggctctgtggtctgtggaatgaaatggttaaagatggagaaattgtatacactgg

SEQ ID NO: 441177 - DNA, 75 bp, Homo sapiens
gcgcgaggcggcggcagcgagccgggtcccaccatggccgcgaatctgtgagccgtgagctttgaggcggtggga

SEQ ID NO: 441178 - DNA, 100 bp, Homo sapiens
ttgccactggacatacttgaaacaaaataggaaaatggcagcaaactcttcaggacaagagtattgttacaatcacatttgacgtaccaggaaatgcaaa

SEQ ID NO: 441179 - DNA, 100 bp, Homo sapiens
gctgtctcaaacattcaagaaaacacacagactccaactgtacaagaggagagtgaagaggaagaggtcgtcagtgaggccacacagcagcagcatgaag

SEQ ID NO: 441180 - DNA, 112 bp, Homo sapiens
cgcctcttcccggttccgggctcagggctcgttctggtctgcctagtcctgggttcaggtgtgggacacagcaggtcaggaacgtttccgcaaaagcatggtcgagcattac

SEQ ID NO: 441181 - DNA, 83 bp, Homo sapiens
catttggagatcttgacaaagcctcttctgtttccaatggggaatacaggagtttccagaaaatataaaaaattgtaaagttt

SEQ ID NO: 441182 - DNA, 75 bp, Homo sapiens
cggcgctcctcagcctccgtcttggctcagacgctcatgaatcggacagtagcaacaccgagccatggagtatgg

SEQ ID NO: 441183 - DNA, 74 bp, Homo sapiens
cgggagctctgaccgaggcgcctcgctggggcggggaccttgccttgcccgggagcatgtaacttctaatgcca

SEQ ID NO: 441184 - DNA, 75 bp, Homo sapiens
ctgaaacatgaaaacatcgtggccctgtacgacttccaggaagctcttcgtgggcggtcttgactggagcacgac

SEQ ID NO: 441185 - DNA, 90 bp, Homo sapiens
caacagctcacaaaggagaaagagcactaccaggtgttaggggctttgttatgcacctaaagccatattggaagctccagaagaaagagc

SEQ ID NO: 441186 - DNA, 83 bp, Homo sapiens
cttgggcaaaatatatgccatgaaagtcctaaggaagtttgctaatccagactttacacaacctatctcagaagttgtagatg

SEQ ID NO: 441187 - DNA, 113 bp, Homo sapiens
tgaaagaccggcatgccctattctgtgggcttccgcgaacggacaaggcaaaatctcagcaagttcggacctctagtacaataaggcgaacctcctctttggatacaataaca

SEQ ID NO: 441188 - DNA, 98 bp, Homo sapiens
aattgaagtaactgaagaagaacttaagaaacacaacaaaaaagatgattgttggatatgcataagagaaaagagtctcatcgtggaaggcaagaggg

SEQ ID NO: 441189 - DNA, 74 bp, Homo sapiens
aactggaaactatttagctgcagaggatgtcactgattttatcagtcatttgttcatgcagctgggaactgtgg

SEQ ID NO: 441190 - DNA, 82 bp, Homo sapiens
cgccccccaccgccgccccctccggcgtgttcatgcccccggggcaccgtctgcgtcctgctgtccttccccttcatcttca

SEQ ID NO: 441191 - DNA, 83 bp, Homo sapiens
cgagacttcggcggcgcagcaatggccagagcttctccaaggagaagtacatcctggactcatcgccagagaaactccacaag

SEQ ID NO: 441192 - DNA, 49 bp, Homo sapiens
ctgacctggcctatcagcttcagatcgtgctctcctctctcaagcacgg

SEQ ID NO: 441193 - DNA, 90 bp, Homo sapiens
ccccatcgcgttttgccagcgataatacgcctcaggcctggcatgcgtgggcagtgatgaacttcgaagctgtgctacactacaaacatc

SEQ ID NO: 441194 - DNA, 100 bp, Homo sapiens
agaaggcttacctgaatatatagatgatattttttctggtgttagtaatgacattggaacagagagatgccaaaggccagtacctgtttgaccttctttg

SEQ ID NO: 441195 - DNA, 100 bp, Homo sapiens
catgaagctcagcactcgcctctgtggggacaacaaaaaccagggtggttatgaccgctactcaggaggaaattacagagacaattatgacaactgaaat

SEQ ID NO: 441196 - DNA, 100 bp, Homo sapiens
taagggaattggccaatatgatatacaagacaaggtgaagcctcggaagggcccttatattctcaagaccgaatccttcaagccatgggaaacatcgcac

SEQ ID NO: 441197 - DNA, 74 bp, Homo sapiens
ttgagccgcctgagcgactaactcctgcgcccctgagggaaaccagctctaccactccctgctgtgtattgtgc

SEQ ID NO: 441198 - DNA, 98 bp, Homo sapiens
acacagcaggactgagtgaagaagaacagctcgagagagcattacaagccagcctctgggaccgagatatttagcttcctgtggtatactgatgagca

SEQ ID NO: 441199 - DNA, 50 bp, Homo sapiens
gttcgtcacccgcaggatacccgccgaggaaagttcgtcgctgcttcctg

SEQ ID NO: 441200 - DNA, 50 bp, Homo sapiens
gtgactcctcgatcttcagttgagatcaacaggcggtccttcgggtcgga

SEQ ID NO: 441201 - DNA, 100 bp, Homo sapiens
ctggtactctgacatgcaatgtaatgcagtttaagaagtgcaccatagcgggagttgcttatgggtccctccttgtggtccatttctgggcaccatgggc

SEQ ID NO: 441202 - DNA, 82 bp, Homo sapiens
taagaagtactccagggaaacctcccaggttttaaaatcaaagatgggaaaatcggagaaaattgcccttccccatggccag

SEQ ID NO: 441203 - DNA, 145 bp, Homo sapiens
actgagaagtgtatatcaagccacaatttccatcaaaaagtgattaagcagagaatggagaagaaggttgattccagccaccaaaaccctcaacaggggcatctctgagttcatcgtgatggctgcagacgccgagccactggag

SEQ ID NO: 441204 - DNA, 82 bp, Homo sapiens
cgacaagccgctggcagccgcggatctcaccgccgctcagggctggcctgccactcctcctgctatgatgcctgggcagatc

SEQ ID NO: 441205 - DNA, 96 bp, Homo sapiens
cggcctcggctacctggtgcaggtgaagcccatggcagcacacagcaagaaggaggccatcagcaaactgggaagaggaccctcaccaggaaccac

SEQ ID NO: 441206 - DNA, 100 bp, Homo sapiens
tcagcactgactttcagctatggaatcgatctgcttggctttgaggaagagtggcagtactgcctcactgcataagggatgggatcagagaacagtgctt

SEQ ID NO: 441207 - DNA, 97 bp, Homo sapiens
ctgcatttcaggaaagttgtatggggaactgctgacatcatgattggctttgcgcgaggagttattcattttggacctggagaaagttcttcagaag

SEQ ID NO: 441208 - DNA, 101 bp, Homo sapiens
gcggacgagcggggcacgcagcagcgccgggcctgcgccaacgccacctggaacaggccagaaccaactggatttcttttaaagtttaatccttctctcaa

SEQ ID NO: 441209 - DNA, 110 bp, Homo sapiens
tccttgtggagccggagctgggcgcggattcgccgaggcaccgaggcactcagaggaggagccttcacgtaaatgggtccagtcatgcctcccagtaagaagccagaaag

SEQ ID NO: 441210 - DNA, 99 bp, Homo sapiens
cccctgggcggccgtggacaacatgatggtcagaaaaggggacacggcggtgcttagaacccattaaaagagccagtaaatcctgtggaaaatggcctt

SEQ ID NO: 441211 - DNA, 75 bp, Homo sapiens
gtgcaggccgttggggcggctcagaggcagagagagctccattcccgtggacgtggctcggcagcgggagctcaa

SEQ ID NO: 441212 - DNA, 74 bp, Homo sapiens
gctgcggaacaggacgccctctgatggaggaaataatgctggccatacagttgttgtggattctgtggaatatg

SEQ ID NO: 441213 - DNA, 102 bp, Homo sapiens
cttctctctcttctcagggtaaagtcgagtatctggtgaagtggaaaggatggcccccaaaaattcggttccctcaaaattataaaggcaggaaagctcaag

SEQ ID NO: 441214 - DNA, 83 bp, Homo sapiens
caaccatgggaggccgcgtctttctcgctgtgagccgtgagctttgaggcggtgggatgtgtcagcagaatgtctcctgcccc

SEQ ID NO: 441215 - DNA, 75 bp, Homo sapiens
cagttcgcccgtccccctgccccgttcacaatgttaatttggagtggcccctggagtcagtttcctacaccatcc

SEQ ID NO: 441216 - DNA, 75 bp, Homo sapiens
cagagctgcatcattccttggggcaaaatgtggacaagggttgatgataattagaagcatgctttccactgaact

SEQ ID NO: 441217 - DNA, 105 bp, Homo sapiens
cacgcgccccgcgcggcccgcccggatcgtggcctctcgagagcaagggggatatgagactttctactcggaatatcctgagtgttgcgtggatgtaaaacccat

SEQ ID NO: 441218 - DNA, 100 bp, Homo sapiens
tcagccctgtggctgggggcagagctcagttgcggtccagcacagagctccatccagacctgctcacagattgcctcaccgtgcagtccctgcagccggc

SEQ ID NO: 441219 - DNA, 75 bp, Homo sapiens
gcggcgcccgcgggtggtataaaatggcggatttcgaagagttgagggtactttgaattttatgaggggcctttt

SEQ ID NO: 441220 - DNA, 100 bp, Homo sapiens
aagggaaagaggcctggagtatgaagagacatgagatcatggtggccaaacccacagggcggcgactggcggcgcgatggacctgaccgggctcctgctg

SEQ ID NO: 441221 - DNA, 101 bp, Homo sapiens
aaaccttatcagcactatttgaaacttttatctcatctggcttggcgcctgaggttctcccattaggtctcacatgagtacttcacaatggggaaactgaa

SEQ ID NO: 441222 - DNA, 100 bp, Homo sapiens
agggagacaaagttgaaaacaaagtgctggggcctttacaacaactaaacggacaggcattccagccccacgggaattttcagtaactgtctcaagagag

SEQ ID NO: 441223 - DNA, 96 bp, Homo sapiens
ctgggaagagctggaagataatgagaaggaacagataacccagcacattgcaggtttctcagtttgggtgcagatcatttgctttgctttttgatg

SEQ ID NO: 441224 - DNA, 100 bp, Homo sapiens
acacagatatttgagcatgtgttcctgggccatgctatgatagtggaagcttatccaaaataatagatccagaagaagtgacctgaagtttctgtgcaac

SEQ ID NO: 441225 - DNA, 100 bp, Homo sapiens
ggaagacccacctgagcataagccaagcaaactgaagaggaggtggcatttttctgaagttgttcattaagacttcccagcattcctacagatataaata

SEQ ID NO: 441226 - DNA, 100 bp, Homo sapiens
aactattacagaattctgcactgaagcaagctgtccagtcatgtctgcaggtccgagaaaccgaaacttcattgccccttcaatgtgggaatccagccag

SEQ ID NO: 441227 - DNA, 83 bp, Homo sapiens
ggctgaccgagtgagcctgcggaacctgcgcggctactacaaccagagcgaggacgagatccaggtgatgatgggcagcctgg

SEQ ID NO: 441228 - DNA, 96 bp, Homo sapiens
attatagacaacaagcagcctattatgcccagacaagtccccagggaatgccacagcatcctccagcacctcaggaagagttacaggccaacctgg

SEQ ID NO: 441229 - DNA, 100 bp, Homo sapiens
tggacttgttcttaatcgaggggcttcagccccaggaaatcagcccccctcctactgccaacctggaccggtcgaatgataaggtgtacgagaatgtgac

SEQ ID NO: 441230 - DNA, 100 bp, Homo sapiens
gttcttttgacctgagggctgctattgtatatcacactaaaggtggtggctaatgccgtagcggcattatctgaaatcagtgagtctcacccaaacagca

SEQ ID NO: 441231 - DNA, 80 bp, Homo sapiens
tccgacagcgctccggagggaccgggggagctcccaggcgcccggcattttgaaagcgaagcagaagccgtagaatcagc

SEQ ID NO: 441232 - DNA, 75 bp, Homo sapiens
gaaacccagatggatgggaatggatcaaagctgtgatcacaggaagccagcagacctgcagaacttggctcccgg

SEQ ID NO: 441233 - DNA, 100 bp, Homo sapiens
atctgatgggtcattatgaccagagtattgccgcggtggaaatggaggaatacggttggacagaatgaactgaagattacaagtgatcaagtgataaatt

SEQ ID NO: 441234 - DNA, 100 bp, Homo sapiens
gcctgcttcccgtctgcgcgagtccacgcagctccccaggatgccaggccaaggtggagcaagcggtggagacagagccggagcccgagctgcgccagca

SEQ ID NO: 441235 - DNA, 146 bp, Homo sapiens
gaaggaggacttgcagaagtaccacaacagggacacctggttccagctgcagcacgtggacgctgactcggaagtgcagttccagggtctccctccactgctgtagtaacccgggtccggggcctcggtggtgctcctgatgcccc

SEQ ID NO: 441236 - DNA, 100 bp, Homo sapiens
aggctctgaaaggcctgtctgtggaattcgcgctgctcgccgacaaggctgcacaacaggtttcattgtttgcggaacttttcaacgaaatgcttcaaag

SEQ ID NO: 441237 - DNA, 97 bp, Homo sapiens
gactggtccacggagtgtatgaccacaaacagccatcaagattagtgacaagagctggggttaggatccggttggactctgacatcggatgccctca

SEQ ID NO: 441238 - DNA, 100 bp, Homo sapiens
caccccatacacccaatgaaaagtttgaaggtgcaactgtcctgaaagcactcaaaactcagattgatggacaacttttcttaattaagcaccttttgat

SEQ ID NO: 441239 - DNA, 50 bp, Homo sapiens
tgcagcagctgtgtcccctatgcaggaaggatatggagtaatagtactaa

SEQ ID NO: 441240 - DNA, 98 bp, Homo sapiens
agcaagctgggatctatgagtggaaaggtgaccaagcccaaagaggagaaagatgcttctaagggaatactcccccagttgcaagaggcgcaggaccg

SEQ ID NO: 441241 - DNA, 90 bp, Homo sapiens
ggcggggggaaaatggagcccttcaccaatgcatgtcagtgaaaaaaccagtgaatcgccttccaaaccaggagaaaagaaaggatcaga

SEQ ID NO: 441242 - DNA, 101 bp, Homo sapiens
ccccgccagcgccggcccccgctcctgctgctgacggcgcccaggtttttcgttggaatatacgttgcacatttatggcgattctgagtgtgagggcagac

SEQ ID NO: 441243 - DNA, 51 bp, Homo sapiens
acactgtgagccgctcacagtgtctaagggttctcatgtatcagccatctt

SEQ ID NO: 441244 - DNA, 100 bp, Homo sapiens
ttctgcagcaccccagctgagaaaatggctgaaacgtgtgcagtttcctcaagggcagagattttgtccatcttgtccactactatatgccaagtgtttg

SEQ ID NO: 441245 - DNA, 115 bp, Homo sapiens
aacacttcaccctctcgcctcgggtctcgggggccgctctgggatcccggccaccagcaattgtccggaactgtggctgcaccatctgtcttcatcttcccgccatctgatgagc

SEQ ID NO: 441246 - DNA, 98 bp, Homo sapiens
tcgtgcgagccttcctgtggtgaggtcaaccaaccagacgaaagaaagatctctggatgccatggacaatattaccaggcagaaccaattctacgata

SEQ ID NO: 441247 - DNA, 50 bp, Homo sapiens
ggaggttacgcagcaaaccatccagaagtggtctcacgtgtgaaacatgg

SEQ ID NO: 441248 - DNA, 100 bp, Homo sapiens
cgccctgccctttgtcgccagcttgatccgccactatacgatggtggcagtcgcccagcagtgtggtgtgtcaaggatgccacaatgccatcgacccaga

SEQ ID NO: 441249 - DNA, 100 bp, Homo sapiens
ggtcgagtaccttccctgtcccatcgcaaacccaaagatccccgttcctggagattctgattgagctgtgctgggttctggcgtccctctccccaaaatc

SEQ ID NO: 441250 - DNA, 101 bp, Homo sapiens
gcctaagcagctaccatggcccaggtggccggcgcggcgttgtcccaggcgggttgggtattacttatgaccatgtcgaattaaatgtatacttgaatgga

SEQ ID NO: 441251 - DNA, 75 bp, Homo sapiens
tggaccttccggagcttctcagaagacagagggttttcttttgaggacctgatgaccttcgaggatgtggccgtg

SEQ ID NO: 441252 - DNA, 100 bp, Homo sapiens
acttgatgtcatcacgcagaaggggtgaaagagactcggtgacagatacagcatcagccactatgtgattgtcatgtccatgaccatctttttggtgttc

SEQ ID NO: 441253 - DNA, 75 bp, Homo sapiens
cgaagcctcccgggtggcttacagacgctgccagcatcgccgccgccagctgtcccctttcctccaacccaacgg

SEQ ID NO: 441254 - DNA, 50 bp, Homo sapiens
cctggttcaccatgttttaaccgtagagacggggtttcgccgtgttagcc

SEQ ID NO: 441255 - DNA, 88 bp, Homo sapiens
gctgcagatttgtggtgcgttctgagccgtctgtcctgcgccaaggtcatcatcagatttgaaatatttaaagtggatacaaaactat

SEQ ID NO: 441256 - DNA, 100 bp, Homo sapiens
ctcccaggctcaagcagtcctaccatgtcagccttcccagtagctgggaccacagagctgccacgaaggccgctgcccgctcatgctgaccgaatgtccc

SEQ ID NO: 441257 - DNA, 100 bp, Homo sapiens
gtcccatcgcaaacccaaagatccccgttcctggagattctgattgaggtctcggcgcggaagatggccggcggcgtggacggccccatcgggatcccgt

SEQ ID NO: 441258 - DNA, 100 bp, Homo sapiens
cctcgcttcacttctccatacatggctgttatagcaggtgaatcaggtctaggaaaatcgactctcataaacagcctattcctaactgatctgtacccag

SEQ ID NO: 441259 - DNA, 87 bp, Homo sapiens
gctaagaaagcagaggttaatacaatccctggctttgatggagtagtcaagtgctgcaggtggagaaattttcagcctgtgtttacc

SEQ ID NO: 441260 - DNA, 100 bp, Homo sapiens
aggcgcttttcaccgcggccatcctgcaggcacagttgccgattacaggaggagatgttaaagtaacccatcttgcaggacgacattgaagattggtctt

SEQ ID NO: 441261 - DNA, 78 bp, Homo sapiens
gcaaatctgagcgttctcaacttggttattgtaaaaaaaggaaggaggaagaggagcgaaggcggcgtgaagaggaag

SEQ ID NO: 441262 - DNA, 90 bp, Homo sapiens
ctgctactggccctgctgggctggctgctgctggccgaagcgaagggcgacgccaagccggaggccttttccccacgactctgaaagagg

SEQ ID NO: 441263 - DNA, 100 bp, Homo sapiens
aaatcagagagaaggaatccaccttcttacgctatggcagaacccccagaggacatgactactgaaggctgtgctggcaggatcacaggtaaggatctag

SEQ ID NO: 441264 - DNA, 75 bp, Homo sapiens
tacaacaggaagcccctcatcctcgaagaattacctgtacttgcgagtgccggtggtggtgtgcacattgagccc

SEQ ID NO: 441265 - DNA, 83 bp, Homo sapiens
gggtctggagtgcgtgggggaccggctgttggcggctggaggctctggcattcatcgccctgtggccaagaaggctatgcctg

SEQ ID NO: 441266 - DNA, 127 bp, Homo sapiens
caaaacagatcttgactgcatttttgggaaaagacagagtaagaagactcccgaggttctttcagagcacggcttcggccccatcactaccgacatccgggagggacagactttctactatgcggaa

SEQ ID NO: 441267 - DNA, 82 bp, Homo sapiens
gtcgggttttgagctgccgcggtcccgggactgaggtgacttaagagattaaaattaatttggttgctgttggttctgaaca

SEQ ID NO: 441268 - DNA, 75 bp, Homo sapiens
cttggcaacccccaggatgtgacctattttgtggcctatcagagatccaagaaaacattcttggccaaaatctag

SEQ ID NO: 441269 - DNA, 75 bp, Homo sapiens
gcggcctggcaggggaaggatcgaggcgagaaccactgtctctgatcaacgtgcggaagaggaacgtggaatctg

SEQ ID NO: 441270 - DNA, 74 bp, Homo sapiens
tgggaagtggaaccggatatttaagtacaatggtgggcttaattttaggtatgtatttaatttccaagtatatt

SEQ ID NO: 441271 - DNA, 90 bp, Homo sapiens
tcgatgatgactgtaaccagacagggcagatgacagctggatttcttgactggccacaggccatcgaagacggcaatttggaggaaatgg

SEQ ID NO: 441272 - DNA, 100 bp, Homo sapiens
ccaggctcaaagaaccaccagtaccatcccgtgccaaccctgggggacagggctagccccttgagcagtccaggtttttcgttggaatatacgttgcaca

SEQ ID NO: 441273 - DNA, 100 bp, Homo sapiens
gttccaccttcagagcgtcacggcgtacgccctcatggggaaaatctccccggtgactttcaggtttcggctgagtccagctcctccatgaactccaaca

SEQ ID NO: 441274 - DNA, 100 bp, Homo sapiens
ctgaaccccaaacccaaattcttcgttctgtgcggcgacctcatccacgccatgccagctattgacctgttgtattggcgggacatcaagcagacgggca

SEQ ID NO: 441275 - DNA, 100 bp, Homo sapiens
attgtacacatttccaccgtgcagatcctcacagaaggcttccctcctggagattccacagtggtgtgtggagtacatgcgatcattaccaggacccaag

SEQ ID NO: 441276 - DNA, 50 bp, Homo sapiens
tcaccaccggatcaacttcgacaaataggaaacccccatcagcacctccc

SEQ ID NO: 441277 - DNA, 82 bp, Homo sapiens
ggagatgcagcatcccagtttttggtcttctgtcaaaaacacagggatgaggttcaacagagtttggaaaagatttctaaac

SEQ ID NO: 441278 - DNA, 75 bp, Homo sapiens
aactgctgtattgcagaacagcctcagccttgtggcttcctgttgtggtgcatggccccgagcccttctaatggg

SEQ ID NO: 441279 - DNA, 98 bp, Homo sapiens
cgacatccaggcgaactcggcctatcgctaccctccgaagtccgaaaagtacgaagatctgagctcttctgacgagtcctgccctgctcctcagagac

SEQ ID NO: 441280 - DNA, 100 bp, Homo sapiens
gggagcgctgttttcgtgatcttcagaccccaggttctttgttttgtaccaatggctagaagcagatcgtcatggcaagagccaaggtgctgcaaatacg

SEQ ID NO: 441281 - DNA, 100 bp, Homo sapiens
atcagtcatcagagcatgtatggaggaaatgcaccaggttgcaactgtccagaccaaaacgaagaagacgttagccaaacccaatataaggaatgttgtg

SEQ ID NO: 441282 - DNA, 51 bp, Homo sapiens
gtgcattttggacaaagcttccaaccagatgtatcggcaagcagtgtaaac

SEQ ID NO: 441283 - DNA, 100 bp, Homo sapiens
gtcttatctttagagattgggaagaccctgatggaggaaatagctcgtctgctggccctggaggaggctaccctgagtaccgatctgcagcagggttatg

SEQ ID NO: 441284 - DNA, 78 bp, Homo sapiens
tgtgagaaccaaaacccatgttttcccatacaaacatagggcctgattacattccaacagaggaagaaaggagagtct

SEQ ID NO: 441285 - DNA, 75 bp, Homo sapiens
ctggggctgcctgccgggcggccgggcgcggcgagcccaggtgtccctggccagtgtccttccacctgtccacaa

SEQ ID NO: 441286 - DNA, 83 bp, Homo sapiens
ctcggagcttatactcctcccagtgacgggtctggagtgcgtgggggaccggctgttggcggcaattctgtggtgttcttggt

SEQ ID NO: 441287 - DNA, 100 bp, Homo sapiens
aggatgctcctgcctcccagagaggggagccggcgaggatcaaaatcttcgaaggagggttgaaatcacaaagattagacacctttttagataggtgttc

SEQ ID NO: 441288 - DNA, 98 bp, Homo sapiens
ctttgctaaacctgtgcctgaacattgtgcctcggggctgctggagtcctctgcagagaaggcccctgtgtcggtgtcctgtggaggtgagagccccc

SEQ ID NO: 441289 - DNA, 100 bp, Homo sapiens
attgtggtcaataacccagatttgttgatgttttgtgaccaaggtctcctctgagcctccggcctccataagacccaaaacagatgacacctcttcccag

SEQ ID NO: 441290 - DNA, 101 bp, Homo sapiens
gacagaaggttcaagatgtaaagaagactattcagaaaaagatgattgacgctgtgagatgtcccatcatgatactttggatgctgcttcccaaggaataa

SEQ ID NO: 441291 - DNA, 82 bp, Homo sapiens
tgaagctatcactgtcagtgctgggctcaaaatctccttcgccaagaccaaacatgcctgttcgatacttcataatgaagag

SEQ ID NO: 441292 - DNA, 100 bp, Homo sapiens
tggtgtgttaccaagaggggattgatctgctcctgcaggttctgaaagtgaaacaaagagtcctcttcgtggaaaagaaaaaaatacgctccctttaaac

SEQ ID NO: 441293 - DNA, 74 bp, Homo sapiens
agcaaaaattcccgtaccaatgtcagtgctaggggaaagtacggtggccagactttaaccaggaagcttatgtt

SEQ ID NO: 441294 - DNA, 90 bp, Homo sapiens
aaatgattcatttctggaagcattctactacctgtggatatctgggctttgggctgtatgatcattgagatggccactggaaatccctat

SEQ ID NO: 441295 - DNA, 80 bp, Homo sapiens
aactcttggcatttggctttgcctttctggacacagaagtatttgtgacagtcaggtcaattcagtgaagatatgatacc

SEQ ID NO: 441296 - DNA, 97 bp, Homo sapiens
gaaattagccagctccgcctgtatgatcttagctttgataaatgactgaagctggagaagccgtggttgaagtcagcctacactacagtgcacagtt

SEQ ID NO: 441297 - DNA, 100 bp, Homo sapiens
agagggccgagaaggacaggatcaggttccagcaacagatagaaatgctttaagttcactctggggaaagctggcctctgaaatcttaatgcagaattgg

SEQ ID NO: 441298 - DNA, 90 bp, Homo sapiens
gcgggaggcggcggcggtaggaagccggagacagcagggtgacaggtgcttttgaagatgatgatatcacgcacgttgaaggaagtgtag

SEQ ID NO: 441299 - DNA, 120 bp, Homo sapiens
ccgctccctagcaccttctccagtcgacactctcgcgcccggaggaatactctgaagatagtaactccgagccaaatgtggatttggaaaatcagtactataattccaaagcattaaaag

SEQ ID NO: 441300 - DNA, 100 bp, Homo sapiens
ggggcctgggtccacgccgagggcaggacgaacttcaccagagaggtggagaagagcgagtacttgagaaagaagaggaagaagatgatgatgaagatga

SEQ ID NO: 441301 - DNA, 73 bp, Homo sapiens
gtattacaaccacttctgcagtcctggccaaggtgaccatgctccctgccaaacaggcagaactgacccggcg

SEQ ID NO: 441302 - DNA, 74 bp, Homo sapiens
cagagggatggctgctcagctgctgactgatgaggcactgactacatgaggaaataattgacttttataacttc

SEQ ID NO: 441303 - DNA, 75 bp, Homo sapiens
tggccatggcataaggaactctatcccaggaatacagctttgcattaggccctgtctctgcccctggtggtcatc

SEQ ID NO: 441304 - DNA, 100 bp, Homo sapiens
cttaccgagctcccagactggtcatatgcggtttgcctgagaatacagatcaacccacagaacaaagcggatttccaaggcatctccccagagcgagcct

SEQ ID NO: 441305 - DNA, 100 bp, Homo sapiens
ataaaggtgctaagaaagagaatgtaagacaggaaaataattaaatattcttaccgaggtatgaagaaattgatttggaaactggaattttggagtctag

SEQ ID NO: 441306 - DNA, 100 bp, Homo sapiens
gagggcctcgccatgtcctgctgcccggccggagcctcaacagaaagctcctttagttcctcctcctccaccgccaccaccaccaccaccgccacctttg

SEQ ID NO: 441307 - DNA, 97 bp, Homo sapiens
cagtactcctctgcccaacactgtacctcagttcattgccagagagccatttagagatgtttatgattacttccgagctgtcctgcagcgtgatgaa

SEQ ID NO: 441308 - DNA, 83 bp, Homo sapiens
aggtgcatttcacagcactctgggcgaaaattggatgtgaaaatgaagccagaccgaggttcattttccagacactgaaagag

SEQ ID NO: 441309 - DNA, 75 bp, Homo sapiens
ctcacggtcaagctaaggcgaagagtgggtcagatgtaccaacagtaccagcaacaggccggctatggtgcacag

SEQ ID NO: 441310 - DNA, 75 bp, Homo sapiens
tcagcgcgacgtcgtgtcgagttcccaaaaagctccgcaggggctgtagggagttcagacttggttccttcaacc

SEQ ID NO: 441311 - DNA, 100 bp, Homo sapiens
gcaggatccgagcgttctgcacaccgaggaaatgcgcttcctgagggagtgggtggagagatgcagaaactgaggcccagcagagattgagtaacttatg

SEQ ID NO: 441312 - DNA, 100 bp, Homo sapiens
ttatttgcacccagtcctgcagcgccagcagctggactatggcatctatgttatcaaccaggcagttgcagtggtgcagaatggctgacctcagtcttgc

SEQ ID NO: 441313 - DNA, 98 bp, Homo sapiens
atctggaaaggctggattgatctccaaagactggatggtatgggctgtctggagtttgatgaggagcgagcccagagacggggtttcgccatgttggc

SEQ ID NO: 441314 - DNA, 100 bp, Homo sapiens
tcctgtacagcctgcagaactccgccgccatgtctgcgcatctgcaatggatggtcgtgcggaactgctccagtttcctgatcaagaggaataagcagac

SEQ ID NO: 441315 - DNA, 75 bp, Homo sapiens
aaaatgaattcaacataccattaggatcttaccgccctggggctggatggtgagattggaaactttgaagtgggc

SEQ ID NO: 441316 - DNA, 83 bp, Homo sapiens
gaggcaagcgcagggggacggggaccagcagctgtcgccgccgctctcaggtggcctgtgagaagaccgtgtctaccttgcac

SEQ ID NO: 441317 - DNA, 83 bp, Homo sapiens
aggacatccagcgctttttcagtggctatggccgcctcctcgaagtagacctcaaaaatgggaactgtggctgcaccatctgt

SEQ ID NO: 441318 - DNA, 100 bp, Homo sapiens
tctgatcaaacaccagcagctgtcagacctgcacaagcaaaagacgatgccacattgtcaggaaaacgaatgcagtcactctccctgaataagtaactgc

SEQ ID NO: 441319 - DNA, 100 bp, Homo sapiens
agagagatatgccaccagcatttattaagaaacttggatttaactggccagaagcaggtattcaaagcagagaacaatccctgggtgacccccattgcag

SEQ ID NO: 441320 - DNA, 96 bp, Homo sapiens
tgtgaggcctacagctctgccggggaggaggaggaggaggaagaggaggagaagtattctaccttgtaaatactgttatttgtatatactgtaaat

SEQ ID NO: 441321 - DNA, 83 bp, Homo sapiens
gctctagccaacatgcagttacaacagcatacagcatttctcccaccaggattaacgacatagccaatttctcctctgagctt

SEQ ID NO: 441322 - DNA, 75 bp, Homo sapiens
gaatcacgccttgtgaagagatcatccctaagcaggagagaagctactaaagcctcccggcatggtgctcaaggc

SEQ ID NO: 441323 - DNA, 90 bp, Homo sapiens
acgccagccatcaccctcgagagcccggacatcaagtacccgctgcggctcatcgaccgggaggtcccagtcatgcagggaacaggaatg

SEQ ID NO: 441324 - DNA, 50 bp, Homo sapiens
ggggccacagcgacgacatcatcagagtattgggaaagggtcgttgtggt

SEQ ID NO: 441325 - DNA, 83 bp, Homo sapiens
ccaacccttgagggaagagaattatctctaagattgagaggatccagaatccagatctctggaatagctaccaggcaaagaaa

SEQ ID NO: 441326 - DNA, 100 bp, Homo sapiens
cctcgggtctcgggggccgctctgggatcccggccaccagcaattgtccggtgggtttggaggatttgggacaacatctacaactgcaggttctgcattc

SEQ ID NO: 441327 - DNA, 50 bp, Homo sapiens
aagctattcctttggccttacaaggcaatgaatggctacttcaaggacag

SEQ ID NO: 441328 - DNA, 98 bp, Homo sapiens
aaacctgagaacttcctgatctctctcgctgtgagacatgtctgagactcctgctcagtgtagcattaagaactctctttgctcacaagttaccaaaa

SEQ ID NO: 441329 - DNA, 74 bp, Homo sapiens
gcccagctcacagccaccggtaccttcttccaggtgaaaggtgtagcagtcactcggcctacacccacagcatc

SEQ ID NO: 441330 - DNA, 100 bp, Homo sapiens
atttgttaaggattccaagtaactcttatttggccaataacggaaaactgcctgacaacaaagtcattgctagtgaactaggcagtatgccagaactgaa

SEQ ID NO: 441331 - DNA, 74 bp, Homo sapiens
cagaaagcaggcgaacccgcggcgcaataacggaaggatgataaagactatgctttaaaacaaatagaaggaac

SEQ ID NO: 441332 - DNA, 98 bp, Homo sapiens
tcagaaagaagagtggcatgctttgacagcaagtggactccgagtccagggcagagcctcagttagggcatgaagaactcttgactgacagaaacgga

SEQ ID NO: 441333 - DNA, 82 bp, Homo sapiens
cggggccgggccccctcgccgctgccccgggaaggagacaatgcagatcttcgtgaagactctgactggtaagaccatcacc

SEQ ID NO: 441334 - DNA, 83 bp, Homo sapiens
gggcgccccagccgaggaagagccgggaaagggcgtcgccgctcatgtagatgaggagcgggaaggcctcctgcaccctggag

SEQ ID NO: 441335 - DNA, 102 bp, Homo sapiens
accttgtggccctgggctttaccatctttgtggctgtgcttgccaggcctggctccaaccgagacatgggtgcccggcaccgcgcccgagcccactccattc

SEQ ID NO: 441336 - DNA, 103 bp, Homo sapiens
caaccattgacgccatgtcgggttattcgagtgaccgagaccgcggccgggaccgagggactggagactgatgcatgagggggctacggaggcgcaggagcgg

SEQ ID NO: 441337 - DNA, 90 bp, Homo sapiens
ggtctgtaagccgcggagctaattggagatggtttcacagcacgcagtggcttcgggccaaggctaagtcgaaatgtggcccaaccttct

SEQ ID NO: 441338 - DNA, 95 bp, Homo sapiens
gttcgcaatcctcagcaacatcttaatgcacagccacaagttacaatgcaacaggtgtcgtgaaaactacccctaaaagccaaaatgggaaagga

SEQ ID NO: 441339 - DNA, 98 bp, Homo sapiens
tggattttcacgtgctcttgctaaagaggtagcaagaaagaaaattagagtgaatgtagttgcaccagattggattatggaagtgggaagtgaagaag

SEQ ID NO: 441340 - DNA, 73 bp, Homo sapiens
aagcttttgtccccaaaccagagcatctgtgggtcttgcagatatgatgtctcctggtgaatccaaactgccc

SEQ ID NO: 441341 - DNA, 75 bp, Homo sapiens
ccctggctctgaatggctttggtgggatgtgtatgaccttcacctcattaacacaaaatgatgcttcaacaccca

SEQ ID NO: 441342 - DNA, 73 bp, Homo sapiens
ctagcgctatgcctgcggcggagactgcatcaggctctcggccacggcatatgcctccaaggacggggtcctc

SEQ ID NO: 441343 - DNA, 97 bp, Homo sapiens
cttcatccagtactaaatatgatcccgatattttaaaagctgagatctccactacaagattaaggagcagcccgacggccatggaggctgaagagac

SEQ ID NO: 441344 - DNA, 98 bp, Homo sapiens
ccgagtgcagtttcgatggaaaatgaagggaatgacagaggaagaggaagacaaacttctggcactgaaagacttcatgatgaaatctaataaagcaa

SEQ ID NO: 441345 - DNA, 95 bp, Homo sapiens
taagactacctttttcagaaatgcgcagagcaaacatctttcaaaggcaagtgaaccggagcaaacgacttccgatccagtctgcgctgttgcgg

SEQ ID NO: 441346 - DNA, 90 bp, Homo sapiens
atgtctgtacctactgatggtgctgtaaccacctcacagattccagcttcggaacaagagaccctgagtctcactctgttgcccaggctg

SEQ ID NO: 441347 - DNA, 75 bp, Homo sapiens
tcaggacacggcctacaacaccaagagatctctgttgaggagctggcgcggaatctggtcatcaaggtcaacagg

SEQ ID NO: 441348 - DNA, 119 bp, Homo sapiens
ggaagaccgcgcgcagggcctgcagcgggagctggacggcgagcgcgagcggcgcgagaaacccgtggaccgggagcccgtggaccgggagccggtggtgtgccaccccgacctggagg

SEQ ID NO: 441349 - DNA, 90 bp, Homo sapiens
cggaatcccgctcggagccagccagccgtcccgagctaccagcagaaactcgcattgtctactggatcaaggacagacagctcaccaacc

SEQ ID NO: 441350 - DNA, 90 bp, Homo sapiens
cttgaacttaatacagcaagaaagaccatcaagtttaccagaatacttgctggctggggcagatatcattgaaacaaatacttttagcag

SEQ ID NO: 441351 - DNA, 100 bp, Homo sapiens
cctccaacacagttctccaagctctagaaatctctgacacatcttgaccatgagaccacggctggtttttggcagtggcttgatcatgaactactgcagg

SEQ ID NO: 441352 - DNA, 75 bp, Homo sapiens
ctcaaaccttgcttctaggagataaaaagggggggccctcagcctcttggccttgaacgggctgttcatcttgat

SEQ ID NO: 441353 - DNA, 101 bp, Homo sapiens
cccgagaatcactccagctctcctggaagcagagaaactggtagtctgggtagattcaaagcatctttaagagaaaatgtcttggggagccccaaggaact

SEQ ID NO: 441354 - DNA, 76 bp, Homo sapiens
gctgaattataatttgaaagtcaaagtcttatttgataaaattgaagaggagctgggcagcaaggctaagtttgcc

SEQ ID NO: 441355 - DNA, 100 bp, Homo sapiens
gagggcatagatccggccaagcatcaggtattctctactgccgctgatggtcaaacgcaagtggaaattaaagtgtgtcagggtgaaagagagatggctg

SEQ ID NO: 441356 - DNA, 75 bp, Homo sapiens
aggggaagcagttgatgaaggagaaattgctgaaaatctccctgaacaagagaccatggcaaaagttataaccac

SEQ ID NO: 441357 - DNA, 100 bp, Homo sapiens
aaatggaacttgctgtattgctgacctgggcctggctgttaaatttattagattcccaaatgctggaaaatcctctttgctaagttgtgtttctcatgca

SEQ ID NO: 441358 - DNA, 82 bp, Homo sapiens
cctgtcctagctctgtaactgtttacatgatgcagccaacacgaacggttgtcatgtgtaacacaactttcgatcaccgcga

SEQ ID NO: 441359 - DNA, 100 bp, Homo sapiens
gctagtctcagaactgttccttcagccaaagaaacaagccgtggaataggtgtatcaagtaatggtgcaaagcctgaatactgacttttttgacaaggat

SEQ ID NO: 441360 - DNA, 82 bp, Homo sapiens
ctgcctccttctctgcccagcagcacaagggcagtttgcagggggatatgagactttctactcggaatatcctgagtgttgc

SEQ ID NO: 441361 - DNA, 87 bp, Homo sapiens
cttatattcgatccttggcacccagcctcctggacagaaataaaactggagcagcccgacggccatggaggctgaagagacgatgga

SEQ ID NO: 441362 - DNA, 105 bp, Homo sapiens
cctcagttggaagcagccgatccagcctgcggagcctgtggggcagaggactactgagcccagccaggctgtatgccattgctgccaaagaaaaagatattcaag

SEQ ID NO: 441363 - DNA, 82 bp, Homo sapiens
gcagaaggtgctgagggagtctgcgcgggacaaaatcattttcctacacgggaaggttctggaggacacgtgccggcggcag

SEQ ID NO: 441364 - DNA, 98 bp, Homo sapiens
ctactcgtgctcgggcaagctgctggagagggagatcaaggcgccaaaagaatgcaatggtgtaaagattccagttgatgccagtaaacctaatccaa

SEQ ID NO: 441365 - DNA, 74 bp, Homo sapiens
ggaagctccatccgaatgtgtctgccccccagggaggtatggaaacattggaacttcaaaaggacatcaaagaa

SEQ ID NO: 441366 - DNA, 111 bp, Homo sapiens
gccagcgtagctgaatccagtaccaaaaacgtcaacaacagttttacgtgacctacggcatgatgagctccaatgtgtactactacacccggatgatgtcacagctcttcc

SEQ ID NO: 441367 - DNA, 98 bp, Homo sapiens
gatcctgaccagtgcaaccacgggatgaacattctagtatgccagtagaaaaaaatatcactttagaaaggccttctaatgtaaatctcacatgccag

SEQ ID NO: 441368 - DNA, 98 bp, Homo sapiens
agagtaggagggagcctttggtgggggttcacacctccaggaatggatagatcctctccagataacagcccagtgcacgggatgttacgtcaaccatc

SEQ ID NO: 441369 - DNA, 101 bp, Homo sapiens
ctttaaaagatcaaccttgagtagcagaggccctcacaccttcctcagaatggacccccaggaactttatattgctgttggaatatctggagccatccaac

SEQ ID NO: 441370 - DNA, 75 bp, Homo sapiens
catattgtactggcctgctgctggcccgcaggcccttgccctgttggatgaataggcacctctggaagagccaac

SEQ ID NO: 441371 - DNA, 100 bp, Homo sapiens
atggctttgtacggcttagaggacttccctttggatgtagcaaggaagaaattgttcagttcttctcaggtttggtgcacctcgatttggaggaagtagg

SEQ ID NO: 441372 - DNA, 90 bp, Homo sapiens
atcctaacaaccaccagtcagaacagactttattgttgaacagataaatacgaaactgccatcatcatttgtagaaaaactgtttatacc

SEQ ID NO: 441373 - DNA, 100 bp, Homo sapiens
ggacagcgtgcggtctgggccttttgggcagcttttccggcctgacaacttcatctttgaaagtgaagtcactgcttttgctgtcttggatcaagaccag

SEQ ID NO: 441374 - DNA, 100 bp, Homo sapiens
gaccccgcccagttggcccagaggatctcttctaacatccagaagatcacacagtgttgaaacttggatttaactggccagaagcaggtattcaaagcag

SEQ ID NO: 441375 - DNA, 90 bp, Homo sapiens
aaaaccacaaatgtttttctgttttgcctgaatacatgatttaaacaagagatttccacagaagtggtagacggaggagaagtccatccc

SEQ ID NO: 441376 - DNA, 50 bp, Homo sapiens
tttgtctggggacacccgaccaaagagagcaggatgaatggacagtacca

SEQ ID NO: 441377 - DNA, 100 bp, Homo sapiens
tgcccgttgtgtttgtgaaacagagaaagataggcggccatggtccaaccttgaaggagctcgaggccatgagcagatataccagcccagtgaacccagc

SEQ ID NO: 441378 - DNA, 100 bp, Homo sapiens
gcacttgctacgaaacagaaatttcatgttgcaccctgacattgccgagaatggctgcgcccccaccccagaagagcagctgccaaagactgcaccgtcc

SEQ ID NO: 441379 - DNA, 96 bp, Homo sapiens
ctagcggcggcgggagcggcgccgagaggccgtgcgggacgcgggcgccaggaccggccgaacgcagagaaatggtggagtcaatgaagaaagtag

SEQ ID NO: 441380 - DNA, 83 bp, Homo sapiens
tcaggcacactacagaactaaatatgcatgtttttaccacctcatacccaagcttacagcaggaaaggttctttaaacttgtg

SEQ ID NO: 441381 - DNA, 98 bp, Homo sapiens
gaggaatttgagaagctgatggtccaacagggaccatgcctggccggatgctgccgcctggcttcagtgccatctgcatgtcctcagggatgacaaag

SEQ ID NO: 441382 - DNA, 98 bp, Homo sapiens
tgaaactcagtgagagcccagagcctggcaggagtccagaaagccagatggctgaacatcaggcaatgaacaccagggaaagtggcaaagcttcatcc

SEQ ID NO: 441383 - DNA, 100 bp, Homo sapiens
cttccattcatcagcaaacacatcggatcgatgctacgctaacctatcgggttctctctccgcgcgttcaggctaagaaatggcatttcaaaaggcagtg

SEQ ID NO: 441384 - DNA, 90 bp, Homo sapiens
ctgaaaaggaacgagcagtgatggctgaaaaggatgctttagaaaaacacgatcagctcttagacagcattcccatggtttggcatggac

SEQ ID NO: 441385 - DNA, 101 bp, Homo sapiens
ggtactacccgtcttctatctgatcaatgcaatgtcccggaatggcttccatttgccaggcctaccaacctaactgatgactttgagtttcccattgggac

SEQ ID NO: 441386 - DNA, 50 bp, Homo sapiens
cggctccctaggcgtcccatctcgacctgcctagagctggaacgttacct

SEQ ID NO: 441387 - DNA, 100 bp, Homo sapiens
aggcatctctgggtgggcaacttacccgagaacgtgcgggaagagaagatcatcgagcatttcaaacggccgagacgcatccagagctttcgtgaccggg

SEQ ID NO: 441388 - DNA, 100 bp, Homo sapiens
catgacgtctccagccaaattcaaaaaggataaggagatcatagcagagtacgatactcaggtcaaagttgcaggacgaggagcggaggcggcagcagca

SEQ ID NO: 441389 - DNA, 100 bp, Homo sapiens
gcccagatgcaaaagtgatgaaacagtccatttgtcataaagtaagatgcagctgtggcatgtcaaccagcttggtttggctctttaaccatggatggtg

SEQ ID NO: 441390 - DNA, 75 bp, Homo sapiens
caagcatctgggccatcttcaatattatttctcaagatgaagctgacagaagagggaaagtgtatgataaataca

SEQ ID NO: 441391 - DNA, 75 bp, Homo sapiens
gcaggctgtaccatcgccactgcttccggcttgccgagggaccgagcttgatgatggcatccaggccgactcggg

SEQ ID NO: 441392 - DNA, 75 bp, Homo sapiens
ggataacgggaggtgaatttccatgtcaacatagtcctgggtcagatgacttgtctgcaaagctgtgggatgtga

SEQ ID NO: 441393 - DNA, 100 bp, Homo sapiens
aggagtttcatgaagagcccaaaacctattacgaactcaaaagtcaaccgctgaagagcagacctactgaacgtgaacgaacagaaaggctaattaaaac

SEQ ID NO: 441394 - DNA, 100 bp, Homo sapiens
cctaatgacagtctccaaattcgcctccatctgtaccatggttgcacttcccccagctggccctgaggcggaggctggggcagctgagctgcatgtccag

SEQ ID NO: 441395 - DNA, 98 bp, Homo sapiens
tgaagagtacacacggacctcccagggcaagtgtccagagaatggctgggatgaaagtacacttgaactctttttacatgaacttgcaatcatggaca

SEQ ID NO: 441396 - DNA, 90 bp, Homo sapiens
gaaggagaagcccatgaagagatggtggattctcactgagttttgactagcggaagaaaaggccaactgcattgactccacagcctcagc

SEQ ID NO: 441397 - DNA, 78 bp, Homo sapiens
gcctgggggcaccgctgccgttccgagaacttccttcacaagtgggacccccgcagccacctgcagccccttgctggg

SEQ ID NO: 441398 - DNA, 100 bp, Homo sapiens
gtttttgtcatttgcaccagcttctttctccaggaaagatcaaaacgatgcactgcaaggtactaccccagtggagatgcctttgcttcagggtcagatg

SEQ ID NO: 441399 - DNA, 75 bp, Homo sapiens
tctacatcgccttcatcctgggcagcggccctgggagagcctcagctctgctatatcctggatgccatcctgttt

SEQ ID NO: 441400 - DNA, 98 bp, Homo sapiens
atttggagttcttacaacatggcagacattgacaagttccagcaacagatagaaatgctttaagttcactctggggaaagctggcctctgaaatctta

SEQ ID NO: 441401 - DNA, 98 bp, Homo sapiens
tcaaccctctgcatacagtaaagctggtctgatccggatggaggaggaggagttcttcatcgaacccttggagaaggggctggcggcgcaggaggctg

SEQ ID NO: 441402 - DNA, 82 bp, Homo sapiens
tcccagaggttgtgaagcctccacgggtgggaagaagagcgctatcctgaaggcatcaagtggaaattcctagaacataaag

SEQ ID NO: 441403 - DNA, 100 bp, Homo sapiens
gttcaaccatgctcggtcatctgtggcagtatatcaagcggaacggaagccgccccttttcaacatgaatgcaatgagtgccttatatcacattgcccag

SEQ ID NO: 441404 - DNA, 101 bp, Homo sapiens
aaaggggtcagctttagcctggcaggctcttactctctgtcagtccgcctcagccgccctgcatcctgggaccggatcagacactacaggatccactgcct

SEQ ID NO: 441405 - DNA, 50 bp, Homo sapiens
gcacagatttgcttttacaccaactggttggtggagaatttgaactggag

SEQ ID NO: 441406 - DNA, 50 bp, Homo sapiens
tcaactatcgacttggagtactcggcacagtgtggatacaagtccaggat

SEQ ID NO: 441407 - DNA, 74 bp, Homo sapiens
ccaagcagccaaccatgctcaacttcggtgcctctctccagcagactgcgcccagctcaacattggcaatgtgc

SEQ ID NO: 441408 - DNA, 75 bp, Homo sapiens
ctacttagctcagcaattcttaccttgtaagaatgattgatgttggctgatattggagtgctcattcacatgaag

SEQ ID NO: 441409 - DNA, 83 bp, Homo sapiens
tgtctttccacctttggatccgcagaaatcgaggtgacttaagagattaaaattaatttggttgctgttggttctgaacaaat

SEQ ID NO: 441410 - DNA, 100 bp, Homo sapiens
aagctcggggccgagcgggaggcagccgtggccgagatcgggctggtggtcatcctggcttccacggtggtggccatgtcggccgtggcccagctgtggg

SEQ ID NO: 441411 - DNA, 90 bp, Homo sapiens
gccctcaacctgctttacaccgcagtgtagccaatcaagtattccacccagtgatgtttgacaaatgcattcagactctaaagaagagct

SEQ ID NO: 441412 - DNA, 100 bp, Homo sapiens
actggcggtgcgcgacctgggctggctccgggggtggcgggcgcagctgctgtgacaggtccagtggctcctggacaactatgagacggctgagggcgtg

SEQ ID NO: 441413 - DNA, 100 bp, Homo sapiens
tgcaaatgaagcattacttactaaagaaggcgacatgccaattcatgaacttctcagcctttatggttatggtagtactgttcgactacctgaagaagat

SEQ ID NO: 441414 - DNA, 100 bp, Homo sapiens
ggaatttgttacgcaagtatcgccatggcgacagattatgactgctggaaggagcacgaggaagcagcacacaacctcccaagctgccccatgctgaaga

SEQ ID NO: 441415 - DNA, 90 bp, Homo sapiens
gccgcgtcttcccggtctcctttcccggccgcacaggggagatgcacttatttacatggaaccagagaaacaagtgatgtccaggtcgtc

SEQ ID NO: 441416 - DNA, 71 bp, Homo sapiens
aaaaagtggcacacactggagagatatcaggcgaactttctgaccaagtatacaactacccagagggccta

SEQ ID NO: 441417 - DNA, 120 bp, Homo sapiens
tgggttcgtgagatttcatgaagatggcgccaggacgaaggccctactgggcaagagacatattgatgtctttgactgttggaaaccttgcagagcaagaatttgtaaccattgcacgtc

SEQ ID NO: 441418 - DNA, 82 bp, Homo sapiens
gccgggatagccccggcggagcccgcagcttccctgccgaagccccatgtgccactcccctgatctgcagcttcggtaggcc

SEQ ID NO: 441419 - DNA, 96 bp, Homo sapiens
ggcggcggcagcggcggcgctgagggttgaagccatccttgtcaatatatttggtggtatcgtcaactgtgccatcattgccaatgggatcaccaa

SEQ ID NO: 441420 - DNA, 95 bp, Homo sapiens
cagcgggagggtctacgtgctgaagttcaaggcagggtccaagcggcttttcttctggatgcaggaccccaacgcagacactgaatggaatgaca

SEQ ID NO: 441421 - DNA, 71 bp, Homo sapiens
gggcgctggcagaagaggcgagaagaggtggaatccaggcagttcccagtgactgtgcatttcaacaagcg

SEQ ID NO: 441422 - DNA, 96 bp, Homo sapiens
cagcactggttgtttctggtgggatcgttggctatgtaaaaacagagccagcccctgggcaacaaagtggaaatggagattgtgagcatgttggaa

SEQ ID NO: 441423 - DNA, 108 bp, Homo sapiens
gatccaggcgttctccgccccggagaatgcagtgcgcatggacgaggctcgggataacgcctgcaacgacatgggtgctggagaatctggtaaaagcaccattgtgaa

SEQ ID NO: 441424 - DNA, 100 bp, Homo sapiens
acccggagccgaaacaccggtaggagcggggaggctattgagggcacctacattgacaagaaatgccccttcactggtaatgtgtccattcgagggcgga

SEQ ID NO: 441425 - DNA, 75 bp, Homo sapiens
cggaagtgaattcggattgtttgctggtttattgggcacttcctagcaccaggcactgcaataagaaatggaggt

SEQ ID NO: 441426 - DNA, 75 bp, Homo sapiens
cccactgatgaggatcagcccatgacttaattcagtgcacaaatgagatgaatgtgaacatcccacagttggcag

SEQ ID NO: 441427 - DNA, 75 bp, Homo sapiens
gaatattggctcactatttttcctctgggcatgaattccttacagtgaacacagcagctacctagaaatgaagcg

SEQ ID NO: 441428 - DNA, 75 bp, Homo sapiens
agaagtcccgccgcttaaagggcaaattgcaacttgatctgtggtgatgaatatggtccagaaacaaggttgagc

SEQ ID NO: 441429 - DNA, 80 bp, Homo sapiens
gcgggcccggccacggcggagccaaggtaactaggatttctacctcaaccgcgagacctatgcaaggacggtgtggacca

SEQ ID NO: 441430 - DNA, 90 bp, Homo sapiens
aaagcgttgaggatcctgcagaatgagcccctgccagagaggctggagctgtaagagctcattttggaggaataatggatgaaccatctc

SEQ ID NO: 441431 - DNA, 100 bp, Homo sapiens
cacaaagggaggagctggactccatcctcttcctttttgaagcaacagcattattgagaaaagcccttacagaagagtgtggccgtaggtcagctattca

SEQ ID NO: 441432 - DNA, 100 bp, Homo sapiens
ttcagaaccagtggtaattaccatcaatactatggaatgcattttgaaacttaaggatgggatacaggttctgtacagagtaatgagatgtgtgacggct

SEQ ID NO: 441433 - DNA, 100 bp, Homo sapiens
cccagaggactttcttccagcttctgctgtccttctttgtggagagcaaggacttggatgttgtgggtgatggtatgcagtgtcctccttcacctttgct

SEQ ID NO: 441434 - DNA, 74 bp, Homo sapiens
cgagcgaggaggatggcggagtcggggctcctgacgacatatgtagagtgtgtcggtcagaaggaacacctgag

SEQ ID NO: 441435 - DNA, 80 bp, Homo sapiens
gattccctgctcagtgccctgagtctcaatgaagagccccaggagatgggcactgagaaagtgattgaccgaaaagtgga

SEQ ID NO: 441436 - DNA, 88 bp, Homo sapiens
aacttctgcccagctctccttgggttatgtaccgaaggactctaccgtgtcagcgggaataaaactgaccaagacaatattcaaaagc

SEQ ID NO: 441437 - DNA, 101 bp, Homo sapiens
ggaacagcaagaactgcaccgaaccaggttgcacgttttcaaaaaatacctaatggtgaaaatgagacaatgattcctgtattgacatcaaaaaaagcaag

SEQ ID NO: 441438 - DNA, 98 bp, Homo sapiens
taacccaaggaagtgactcaaactgtgagaacttcaggttccatgcctctgcagcggtgcctcatgtttgctgtgtagttgctgtcctaacagtaaga

SEQ ID NO: 441439 - DNA, 100 bp, Homo sapiens
ggacaatcgaattcttgttattacatccaaagcaggttgaatacaaagacttccccaaaaacaacaagaacgaatttgtatctcttatcaattgctcctc

SEQ ID NO: 441440 - DNA, 51 bp, Homo sapiens
cgaatctcttctccctccccttcttgagagatgcggtggactttgatgttc

SEQ ID NO: 441441 - DNA, 112 bp, Homo sapiens
ggcaagggctactacgagtgggcccttctggtcgccgtggagatgggccacgtggagagtgtggacactgccagcggctgcagccgacttggaatgacctgggagacaaata

SEQ ID NO: 441442 - DNA, 100 bp, Homo sapiens
tctgtcgctcttgtgccctagcaccccgagaaccgtcagtttgagccagatgtaagactttgaccccgacgcaggcttcagtgattgccgcggatcagaa

SEQ ID NO: 441443 - DNA, 71 bp, Homo sapiens
aggagctggacctctacctggcctacttcgtgcgtgagcgaggccggaaggtggtggtcgtacgctgtgaa

SEQ ID NO: 441444 - DNA, 100 bp, Homo sapiens
aaaattcacccttgtagagtcattcctgcctttgagcggactcccttttaaggttatgcctccgcctcgttgccctgaaagccgcagcgacagcgaaaag

SEQ ID NO: 441445 - DNA, 50 bp, Homo sapiens
cctagagtggttcagccacaaggagagtgaagacatttccacctggacac

SEQ ID NO: 441446 - DNA, 96 bp, Homo sapiens
ccaacacctttccccagctctgcgcgtaccgcgctctttggaaacgaattaggctgggaggcggcagaatgcagccagaggagggcacaggctggc

SEQ ID NO: 441447 - DNA, 75 bp, Homo sapiens
ctatttggctgttgcttctgctgcctctgagggagctgcaaatcttggagcaaaaaccagagacattgccagagc

SEQ ID NO: 441448 - DNA, 74 bp, Homo sapiens
tcttcaagatctcttgttcttccccagtgatgacttttcagtatatctcagagatgttgcaggtcttgttccag

SEQ ID NO: 441449 - DNA, 75 bp, Homo sapiens
tttatacggggtcagcttgaaaatgctccttctcctgaaaaagccgaggaggagagtgagaggcttctgagggaa

SEQ ID NO: 441450 - DNA, 83 bp, Homo sapiens
cctcccaaagtgttgggattacaggaaactggagaggcgtggctggaccaagacctccccccatgtgagcaggcttcctcctc

SEQ ID NO: 441451 - DNA, 83 bp, Homo sapiens
cccgtgcagacatggcctctggcaccaccaccaccgccgtgaagccacgccgcaatgaagagcttcttacagtgaaagcaaag

SEQ ID NO: 441452 - DNA, 98 bp, Homo sapiens
ggagtgtaggaagaggcactgctgagggggcgcgaggggaacggaggccagagctgcggaattcctcctgatcagcagagactgatctttgctggcaa

SEQ ID NO: 441453 - DNA, 101 bp, Homo sapiens
ttcagaaaacagttccccctgcatgaaaagatatccttggtggatgaattaaaaacctggtgcatgttaaagattcagaatctggagcagaagctttctgg

SEQ ID NO: 441454 - DNA, 100 bp, Homo sapiens
ggcccacgtccctggcacgggctgtctgattctccttcgctgtggcgggaagatggccggatttgaaggtttcccggtcctctggcgaggatcctccaag

SEQ ID NO: 441455 - DNA, 90 bp, Homo sapiens
ttccgatcgacccggtaccaagaaggggagtgcccgcggcaggtgctggagaatctggtaaaagcaccattgtgaagcagatgaggatcc

SEQ ID NO: 441456 - DNA, 75 bp, Homo sapiens
catcctcggcggcggtggccgctagctccaaggaagcatcacaagaggcaacaccaggagccaacatgagctcgg

SEQ ID NO: 441457 - DNA, 90 bp, Homo sapiens
gcactacaacaggaaaatcatattatagatggagtaaagcctctacaaccccacgtcagagtgtgggattctgttactctatccacactg

SEQ ID NO: 441458 - DNA, 100 bp, Homo sapiens
tggtgaagaatcgtggaaaaggtggagcgattagaatggaactttatagtggtagcagagactgcaacattctggcttgggttccatccttatatgaacc

SEQ ID NO: 441459 - DNA, 96 bp, Homo sapiens
ggggactgcagagtgccaaagcgagagtggtcacggctgaacaatttcaagaagcgagtcgatgtctcatctccctatcttatcttgaaaaacccg

SEQ ID NO: 441460 - DNA, 100 bp, Homo sapiens
cacggaggcaccatgaagaagtcttactcagaatgtccctcttccagtggaaagcccaaccatgcagacatcttgctcataaacttacagtatgtttcag

SEQ ID NO: 441461 - DNA, 82 bp, Homo sapiens
cggagaggagcatgaatggagcaaaatggcggatcatgtgcaggcattatattgtacttctagcaagtgcaccaacagaaaa

SEQ ID NO: 441462 - DNA, 50 bp, Homo sapiens
agatgttccacgtaataatgctggttctgcggcatgaggaatttgaagaa

SEQ ID NO: 441463 - DNA, 90 bp, Homo sapiens
tgggtggctgcttctgcatccccagggagcggagtctgacccggggcccaggacatctacgagaacctggacctccggcagagacgggcc

SEQ ID NO: 441464 - DNA, 75 bp, Homo sapiens
ctgaagctcaagggactgtgtccaccctcagcgtcgagggcgaggcccccagcagtgagactggcacatccctgg

SEQ ID NO: 441465 - DNA, 116 bp, Homo sapiens
ccagaccctggagcctcagttggaagcagccgatccagcctgcggagcctgtggggcaggacagagcgggatgccaccagcttgtccaaagggaagttccaggagctcctggtggg

SEQ ID NO: 441466 - DNA, 75 bp, Homo sapiens
ctcagggtgccagacctcatcgggggtacatggtatggagtagacatcaacaacgaggacattgctgacaacttt

SEQ ID NO: 441467 - DNA, 82 bp, Homo sapiens
caagtacctgcagatcctgacctctctgatgagatggatcggattttttatcaagcagaaatgcatcgaacaacgagaatca

SEQ ID NO: 441468 - DNA, 100 bp, Homo sapiens
gcagcggcggcggcgggagcctgtccgcctcctcccgggctggcgtgcgccagaggatccgcaaagtgctgaacaggtgttcctggctctatgccaaatg

SEQ ID NO: 441469 - DNA, 101 bp, Homo sapiens
cagcctcccaagtagctgggaccacagctacctggaacgggcaggaaagaaaaatgcagataagaaaattaaaaccacagactcctgggcagcgaacaaga

SEQ ID NO: 441470 - DNA, 100 bp, Homo sapiens
attagccagtgtgaagacctccgaaggaccatagatcagtgtgcgtgtgaccaccatggatgcagagctggagtttgccatccagcccaacaccaccggg

SEQ ID NO: 441471 - DNA, 100 bp, Homo sapiens
aattaccttggagaggctgtgagccacaatgcatcgctggaagtagccatgttacgagatgacttccgacaaaaccccacagatgttgtagtggcagctg

SEQ ID NO: 441472 - DNA, 75 bp, Homo sapiens
gaccttgaatagaggaaatgggatatcatctggttcatgcatgggagatctcagaccagttgttacagatccggc

SEQ ID NO: 441473 - DNA, 100 bp, Homo sapiens
acccaaggaggactcttctaggagacgagagagcgaacgccagggaccctgtgcaggcctgctcctccgtttgcaagatgttcctcctgctgatcaagag

SEQ ID NO: 441474 - DNA, 83 bp, Homo sapiens
gatgtttgttcatacttgcagagttggacagattcaattagcagagcctcacagacaatggccaaatgtgtcaaagctgtcac

SEQ ID NO: 441475 - DNA, 75 bp, Homo sapiens
ctacaacgtgctggagcggccgcgcggctgggcgttcatctaccacgcctacgtacttcccaagtaagaagcgga

SEQ ID NO: 441476 - DNA, 85 bp, Homo sapiens
gaaggtggatcccgccgggaggtactttgctggcccacccccagagattgttatctatcaggagcttcgcatggaagcttttgtc

SEQ ID NO: 441477 - DNA, 75 bp, Homo sapiens
aaaacgcttttcacgtcacctggagagatgcacagcctagaacattccatattctgcttcacacacggtgactca

SEQ ID NO: 441478 - DNA, 75 bp, Homo sapiens
cagcaaatctacttttgggttacaaaaatccagaccagggaggtggggaagacagggctccagctaccacaggac

SEQ ID NO: 441479 - DNA, 100 bp, Homo sapiens
gttctccctgccctccttcaagattgacttctcggaatggaaggatgacgagatgcctgggaaccactcacctccttctgtgccatgaggccacctcagc

SEQ ID NO: 441480 - DNA, 95 bp, Homo sapiens
ccaacaagaaaaccttgggaaagaacaaatacaatgaatggcagcaagtcacctgttatctccaggtcccctcttgctgttggctgcacatcagg

SEQ ID NO: 441481 - DNA, 83 bp, Homo sapiens
ctgaaggatcacagttacaaggctgctcccgtcagctgtttcaagcacgttgtgattcagagtagtgacgagattgctaacag

SEQ ID NO: 441482 - DNA, 75 bp, Homo sapiens
ttctctgtcagctctttccccgtcagcatcccagccgtgctcacgagtgcagccgtagcagagcgggagagggtg

SEQ ID NO: 441483 - DNA, 75 bp, Homo sapiens
ctcatcttcaggctgctgctgcccatctgcctggcagtaggaaatctatacctttggaagaatattgggaaaagg

SEQ ID NO: 441484 - DNA, 90 bp, Homo sapiens
cacgttcatgggcgagggaacagatgagaaacccggcaatgaaaagtattgggaaagggtcgttgtggtgcatagacccagagtatagac

SEQ ID NO: 441485 - DNA, 75 bp, Homo sapiens
caatggggccgatgtcaatatgaagattgtcagattagaccgaacaatggaacagatagtctttcccgtgcccag

SEQ ID NO: 441486 - DNA, 100 bp, Homo sapiens
gagatgatccttcaaccgttaatggtgcagaagttttaatgttgggagaaatgctgactttaccacagaattttggggctgctgctcagagcaaattagg

SEQ ID NO: 441487 - DNA, 98 bp, Homo sapiens
gacccacgtctgtctggtgataccaggggcagagggaccactctgacaggctggagcattggatttgctaaaggagcttaagaatattcctatgaccc

SEQ ID NO: 441488 - DNA, 87 bp, Homo sapiens
gagctgcgggagctgcggcagctgcggcctctggggcgatttgatgaaactgttatcgaagagagaagacaatgtgctgaagacctg

SEQ ID NO: 441489 - DNA, 98 bp, Homo sapiens
cacactgctaatgtgtctgatccacatcttcaagtctgatatggagttaccagtaaggagctccaccgtgactctcctccctgctccgttgccccgac

SEQ ID NO: 441490 - DNA, 100 bp, Homo sapiens
cctaatcattggagagctgctgaaacaggcggatctctacatttctgaaaacagtccacaggaagaggttgaactaaagaagttgaaacatttggagaag

SEQ ID NO: 441491 - DNA, 90 bp, Homo sapiens
cccaggtgtaagcgcagaaagcaggcgaacccgcggcgcaataacgccagagactgctgctactttgaaacgtacgatagaggccctgat

SEQ ID NO: 441492 - DNA, 83 bp, Homo sapiens
ctggagacggtcgtagctgcggtcgcgccgagaaagctgaatgcaatatccatacatctccttctccgggaattcaagtaagg

SEQ ID NO: 441493 - DNA, 75 bp, Homo sapiens
ttgagtatatccgttctgagacatacaaatagtgtaccttgaaagacttttaacatacgcagagatagatatctg

SEQ ID NO: 441494 - DNA, 80 bp, Homo sapiens
atgctgcatatcagagtattcagaactacttaagaagaggatgcctaatcattatgatctagactgccctacagccccaa

SEQ ID NO: 441495 - DNA, 100 bp, Homo sapiens
agtgtttctcgggttggaaaagccattgataaggtggaagttgatgggtcgaaactaaatgtgaccagcacgtggaacctggcttcgcccttattgtctg

SEQ ID NO: 441496 - DNA, 82 bp, Homo sapiens
ctccagcagtgccaagtggtcaggattttttatcaagcagaaatgcatcgaacaacgagaatcaagatcactgagctaaatc

SEQ ID NO: 441497 - DNA, 99 bp, Homo sapiens
cgcggacgcggaacccggcgcggcggcggcacgatggtcatggcgtatttcgtcgagaatttttggattattcttggagaaaccctgtctgtttactgt

SEQ ID NO: 441498 - DNA, 100 bp, Homo sapiens
actccggacagcacatacagcgagagcttcaaggacgcagccacagaggaggaggaagccaagaatctggtgagcgaagccatcgcagctggcatcttca

SEQ ID NO: 441499 - DNA, 82 bp, Homo sapiens
gcaggctcaggtgcagccgctgatgtggacgagtgctcactagcagaaaaaacctgtgtgaggaaaaacgaaaactgctaca

SEQ ID NO: 441500 - DNA, 75 bp, Homo sapiens
ggctatttcgccgctggcgtcaggactattttcacgttttaatgccgagagatttggagcaagaggtggtggtgg

SEQ ID NO: 441501 - DNA, 82 bp, Homo sapiens
caaggagatcgtctctctcatcgaggcccaaaccgccaaggagccttggtcatcatttgatatatacacccggaaagggccg

SEQ ID NO: 441502 - DNA, 100 bp, Homo sapiens
cttcaaccccatctgctgcttcctcctcttcaacatcatggactggctgggacggagcctgacctcttacttcctgtggatattgtgacccccaatgggc

SEQ ID NO: 441503 - DNA, 82 bp, Homo sapiens
gtcttcggtggactccttcggcagtccacccaccgccgccgcctcccagaaaaagagccgggaggagtctagtggtgagggc

SEQ ID NO: 441504 - DNA, 75 bp, Homo sapiens
aaaggagtcagggatggctcttcctcaggtgaccaagaatatggcccaggtgaccaaagccctggacaaggccct

SEQ ID NO: 441505 - DNA, 95 bp, Homo sapiens
tgcccggctgctgctggaggaaatctacaggggtggttgagtttgcctcttatggtgacttaaagaatgctattgaaaaactttctggaaaggaa

SEQ ID NO: 441506 - DNA, 100 bp, Homo sapiens
gggcaaggcggcggacggctgcgtcgcccgaggcgaggaggagcgctggcgctgtcgcctggttgggcccggaaatgggacgtcgcgctttctcagggag

SEQ ID NO: 441507 - DNA, 75 bp, Homo sapiens
tgtagaaataagaagaagcaactgtacaaaccataaaatgacagatggcgagacctggacaggaaatgccctctt

SEQ ID NO: 441508 - DNA, 51 bp, Homo sapiens
acagtatggtagccacacccccaggagaaatggcatgattcacgacgctgg

SEQ ID NO: 441509 - DNA, 83 bp, Homo sapiens
caccaggccggcaggctgagaaaagcgagaccgcgtgcgaggaccggtttgggccgacacgcggaaggccgggtggagcccat

SEQ ID NO: 441510 - DNA, 51 bp, Homo sapiens
ctgaactaggatgtcccgacatgaaggccaagatgctgaattatcagggac

SEQ ID NO: 441511 - DNA, 100 bp, Homo sapiens
tgcacggtgaacctggaccaggaggaggttttcaggaccaaaattgtggaaaagtcactctgggtaagcttgatgattaccaggaacgaatgaacaaagg

SEQ ID NO: 441512 - DNA, 100 bp, Homo sapiens
agaaggccaagaacccccaggagcagaagtccttcttcgccaaatacgtactggtcttcttggacattaatctttgaatacttgctgactgctaagaaat

SEQ ID NO: 441513 - DNA, 100 bp, Homo sapiens
caccatgtcctcatggagatccagctgagcaagtctattatcctcccagtccacaacgctgaaccgtggctggacgaatgtttgaggtctgttttgcaac

SEQ ID NO: 441514 - DNA, 75 bp, Homo sapiens
ctcaaattgatcaagcagatatgccaggttttgatgatgatggttcagaatttcatgaacatatatttctggaga

SEQ ID NO: 441515 - DNA, 75 bp, Homo sapiens
tagatgatgacagagaagatctttttgcagaataactgaagtgaagtgatggactccgatttggagagtagtaag

SEQ ID NO: 441516 - DNA, 74 bp, Homo sapiens
caaatatgctgtgggagaagagtgtgacttcgaggctaaagtaaataatgccagcctgattggactgggttata

SEQ ID NO: 441517 - DNA, 101 bp, Homo sapiens
gccggaaggacggctctatcagcatgggaaacttacactgctgcataatggagaacctctctacattccagtaacccagattcttcagaaaccaaccccag

SEQ ID NO: 441518 - DNA, 100 bp, Homo sapiens
gccggcaagagctcggtgctggagaacttcgtgggccgggccaattcctgtccccccagcagcatggcatcgtgtgctgaaccctctgagccctctgccc

SEQ ID NO: 441519 - DNA, 82 bp, Homo sapiens
tgtggacgcggaactcagcggagaaacgcgattgagacccgaccgcatgtctgtcatggacctcgccaatacttgctccagc

SEQ ID NO: 441520 - DNA, 97 bp, Homo sapiens
ccgaactgctgtatgggctctgagtccttcaataatgttaaacagtggctgcaggaaatagatcgttatgccagtgaaaatgtcaacaaattgttgg

SEQ ID NO: 441521 - DNA, 83 bp, Homo sapiens
gtttttctcaggtgaaaggagcagtagatgatgatgtagcagaagatgcagacagacatgctgaactatctggaagtccactg

SEQ ID NO: 441522 - DNA, 75 bp, Homo sapiens
cagccacatactatccgtttgttcaggaaccaccagtgacagattttaattgataaagaccagagtccaaaatgg

SEQ ID NO: 441523 - DNA, 100 bp, Homo sapiens
gttgggagatgtgattgaggtgcatggaaaacatgaagagcgccaggatgagcacggattcgtcgcgcgcgagttccaccgtcgctaccgcctgccgcct

SEQ ID NO: 441524 - DNA, 74 bp, Homo sapiens
atattagtgaagatgagccactgtggaagaagtatatttctcagattcttcctttatacccctgggacacatgc

SEQ ID NO: 441525 - DNA, 90 bp, Homo sapiens
atcccaatgaaccttgggtgatttgttctgtatcagaagacaatatcatgcaagtgtggcaaatgaaacgcttcgttaagggactcaggc

SEQ ID NO: 441526 - DNA, 100 bp, Homo sapiens
ggcgcggcaggagcgcgttgagggactagacacctatggctgccgatgaaggctcagcagagaaacaggcaggagaggcccacatggctgcggacggtga

SEQ ID NO: 441527 - DNA, 75 bp, Homo sapiens
cgggaactgctgacgcttgatgagaaggacccacggcgtctgttcgaaggtgcagcttcaagcttaggaccaccc

SEQ ID NO: 441528 - DNA, 80 bp, Homo sapiens
ttcgcttcatcatctcattctccagggatcagtgtatttagcgtggactacaatgatgaactggatatcttggtgagcgg

SEQ ID NO: 441529 - DNA, 90 bp, Homo sapiens
tttttctcatggatgttcttcttcgagtatttgtagaaggtgtatgctgatggtagcatatgtttagatatccttcagaatcgatggagt

SEQ ID NO: 441530 - DNA, 98 bp, Homo sapiens
caatctctgtctcccaggtttaagtgattctcctgcctcagcctcctgagtagttgagattacagggctgaaagaatcaggattcctgaaccttggat

SEQ ID NO: 441531 - DNA, 75 bp, Homo sapiens
cagtaagttgatccatccagatgaggatatatccctgatgtgtggagttggctgttacgacatccctgtgtgatc

SEQ ID NO: 441532 - DNA, 96 bp, Homo sapiens
tcttcctttctcatgttttggctttggggctaggttactgcaacaaggaggtatacaataaggagaatcttttcaacagcctgaactatgatgttg

SEQ ID NO: 441533 - DNA, 89 bp, Homo sapiens
cattcctgaaatacatccaggaaagacatggagattctcttaaaaaggttctgtacagagtaatgagatgtgtgacggctgcaaaccag

SEQ ID NO: 441534 - DNA, 75 bp, Homo sapiens
ccgtgctctaccacgtgtattccttccgcaacgtccagcaggcccctcgggaggcattggcacagaccgtgctcg

SEQ ID NO: 441535 - DNA, 100 bp, Homo sapiens
gatcctctcatcaggcagtgcccagaggtcttcccgctgctccaggaagccaggatgtaccacctttctggcaatgagtgtgcaacttgctttggtgttt

SEQ ID NO: 441536 - DNA, 100 bp, Homo sapiens
ccagcctatattgttacaattttttttcaagaactgccgtcttctttgcctgcactaatggtattgtgttggctgcgtgccaggccttggagaacagcac

SEQ ID NO: 441537 - DNA, 87 bp, Homo sapiens
ggcaggggccgcgctctgctgcttcctcgtcctagtgatccacgcgcagttcctcaaagaagactacgtctactttgagaactcctc

SEQ ID NO: 441538 - DNA, 82 bp, Homo sapiens
ggggaaacccaaattgtagctgacgaagcattttgcaacgcagttcggagttattatgagataacaacgaacttgatgcaag

SEQ ID NO: 441539 - DNA, 75 bp, Homo sapiens
gcctcagcctccagagtagctgggattacagtggtactgctggactttgctgcagctggaggggagctcggctgg

SEQ ID NO: 441540 - DNA, 100 bp, Homo sapiens
gcctcgtacgggacacgatcgccagggtgcacggaactttcggcgcagccgcctgctccatcggcttcgcggggcccagcgtgtgaggcggccgatacca

SEQ ID NO: 441541 - DNA, 120 bp, Homo sapiens
acctgctgcacccacgaatctgcccacccctcctgtaacccagcctgtttcacttcttgctggcaaaactcaaggctcagaaactgcagggcccccaaaaaagaaaaggaagaaaacaca

SEQ ID NO: 441542 - DNA, 100 bp, Homo sapiens
accagtttgataagcctggcgcggaacggtcgtggagaagaagagctgctgatgaggactgggacagctggagaatgctggaggagaccttaaggatggc

SEQ ID NO: 441543 - DNA, 98 bp, Homo sapiens
gttgactagtgctgctccaaaagtggaaaccacgacgctgaatatacagaacaagatacctgctcagacaaaggagccagtctacttgatgacttata

SEQ ID NO: 441544 - DNA, 88 bp, Homo sapiens
ctcagttggaagcagccgatccagcctgcggagcctgtggggcagctgatgttctaatcatgtcagataaagatgatattgagactcc

SEQ ID NO: 441545 - DNA, 100 bp, Homo sapiens
ctgccgctgccctacggcttctccgccatgcaaggctggcgcgtctccatggaggagaactacgatgacccgcacaaaacccctgcctccccagttgtcc

SEQ ID NO: 441546 - DNA, 75 bp, Homo sapiens
cgctacgagctggctttaatcctgaaagccatgcagcgggtttggtgcacctcgatttggaggaagtagggcagg

SEQ ID NO: 441547 - DNA, 80 bp, Homo sapiens
gggaaccctggtcaccgtctcctcagctcagagcccgggcgctgtggaagagattctagaccgggagaacaagcgaatgg

SEQ ID NO: 441548 - DNA, 51 bp, Homo sapiens
tgagcaaatctcaaacggatggtcccgttcaagaagttcttccagttcgca

SEQ ID NO: 441549 - DNA, 80 bp, Homo sapiens
acattatacgaaggtttccagaggggaatacaggtgtcaagaaagtgaaaaggtttctgaatatccagcagtgattgtgg

SEQ ID NO: 441550 - DNA, 100 bp, Homo sapiens
tactgcaccatccccacctaccccagcggccagatcggcttcatgctgtgcagcaagaacccgactcagtggttctccatccttccggacttcagcctgg

SEQ ID NO: 441551 - DNA, 82 bp, Homo sapiens
cggccgccatgttaggagcgcagtggcggcgcaaccagccttctagggcggcggaggctgatcagctgaccgaagaacagat

SEQ ID NO: 441552 - DNA, 100 bp, Homo sapiens
cggcagctctcccacctccagcagcacaccaggtctccgtgaggccgggtgacgctccagaatgggagacaagccaatttgggagcagattggatccagc

SEQ ID NO: 441553 - DNA, 100 bp, Homo sapiens
tgccccctacaaatacgcctccagtgtccgcagccctcatcctgccatacagcctctgcaggtcctggtgaacgccatcatcaacagtggtccccgggag

SEQ ID NO: 441554 - DNA, 125 bp, Homo sapiens
ctcagatgttgttgatgaagtaatacagaactgccccatcgatgtgcggcgtccgctgtataagctttcggaaaatgtgattgatcgaatgaaggaatcctctccatctggttcgaagtctcagc

SEQ ID NO: 441555 - DNA, 74 bp, Homo sapiens
cgctccgcagccccgggcacggcggaggcagcggagccctgggccatcgtatgtgccaagagttgtaacctctg

SEQ ID NO: 441556 - DNA, 75 bp, Homo sapiens
ctgcggacactgagctcacccacagagcccgtgaagaggtctctctcctcctgggcgagccgttcttcactacca

SEQ ID NO: 441557 - DNA, 80 bp, Homo sapiens
cccagcgccccggtttgcaaagcaggtgttgacttcaaaatcaaaactgtagagctaagaggaaagaaaattagattaca

SEQ ID NO: 441558 - DNA, 100 bp, Homo sapiens
tttccacagggaattgagttgtttggaaattttagcattcaggtgccaggaatgcagatgggacagccagtgccagaaacaggcccagctatactcctcg

SEQ ID NO: 441559 - DNA, 90 bp, Homo sapiens
cgaaaaaaagatggagccctgcatatgattggctctttagctgaaatacttctgaagggcttccgagtggacctgccaatcaagtcggcc

SEQ ID NO: 441560 - DNA, 75 bp, Homo sapiens
gcgacaacttctcctgtgccaggaacaagggagtcctctgctcaggaaagttcacatccttggctccttccaaaa

SEQ ID NO: 441561 - DNA, 75 bp, Homo sapiens
ccagcaggagcaggagcgggagcgggctccataaaaatacagactcaccagttcctgctttgatgtgacatgtga

SEQ ID NO: 441562 - DNA, 101 bp, Homo sapiens
ctacatttggagcctggacacgcagtacagcaagatattccaatggagacagttggaaaacctgtacttcagagaaaagaagttttccgtggaagttcatg

SEQ ID NO: 441563 - DNA, 78 bp, Homo sapiens
acagcctggtcaatttgtacctgcaggcctcctacacctacctctctctggtcatgttctctttcgaggccggccgcc

SEQ ID NO: 441564 - DNA, 75 bp, Homo sapiens
tgaaaagtcgcagcgagctggagccgccggagagtctccgggaccattatggcagtcaagtggacgggtgggcat

SEQ ID NO: 441565 - DNA, 75 bp, Homo sapiens
ctgagaaacaggacatacctttcgtagagctcgatgcattctatttctcatcatttggctcataactggaggaag

SEQ ID NO: 441566 - DNA, 98 bp, Homo sapiens
ccagtggtcacagctggatgtttgcgacatcccagagagcttccagagcctccccatggccacccatggaccagtcggcattcacttcctcccttctg

SEQ ID NO: 441567 - DNA, 82 bp, Homo sapiens
accgcgggccctgccctgggctggaacgaccctgtaagactttgaccccgacgcaggcttcagtgattgccgcggatcagaa

SEQ ID NO: 441568 - DNA, 74 bp, Homo sapiens
tgaagttctttaagcccccatatctaagcaaaggaactgaatgtgacagtgatgataacatgggtgccaaaaat

SEQ ID NO: 441569 - DNA, 51 bp, Homo sapiens
cttgaaatgctacatttccaaggtgctgtttcaggtactgggaatatggca

SEQ ID NO: 441570 - DNA, 100 bp, Homo sapiens
gacatcctcattgatgttaatgaatggtgctatacttgaattttctaaggtgtcattagattgtcagattagaccgaacaatggaacagatagtctttcc

SEQ ID NO: 441571 - DNA, 101 bp, Homo sapiens
tcgcatccggaaaaccattcctaggccagatcctaatcttacccccatgggccttcctcgacccaaaaggcagccaatcctttctttaagttgttgactat

SEQ ID NO: 441572 - DNA, 101 bp, Homo sapiens
tggtatatttgcagccagtactctatatgaacaatccgtctggatcacggatgtaggaagtgtgtgaagcagtattctggaaagtttttctaagactagtg

SEQ ID NO: 441573 - DNA, 100 bp, Homo sapiens
agaggaaacctaaccaatgactgtggaataatatggaagaagatggaaaaaacttgtttaatggggcatttggtccactttggtgccatgaagacatcac

SEQ ID NO: 441574 - DNA, 100 bp, Homo sapiens
gtgacgtggagcaggcgcagaacagtcggaggggctgggaaccgacgaggactctctcattgagatcatctgctccagaaccaaccaggagctgcaggaa

SEQ ID NO: 441575 - DNA, 80 bp, Homo sapiens
caaggccttctgagactggatctgatgatcacagacgcagtcttcagcaaggaagtgctgggaacgccctggagtgaacc

SEQ ID NO: 441576 - DNA, 100 bp, Homo sapiens
ccccccagacaccgaccccacaggccgtcccggatctcagcggacacaggcaggagcgccccatcatttgacgcttcgagagctgtgcccaggagtgaac

SEQ ID NO: 441577 - DNA, 100 bp, Homo sapiens
cttcagtccgaaggaggaagggaaccaacccactttctcggcgccgcggctcttttctaaaagtgttttgaacgaagaatgtgatcagaactggtacaag

SEQ ID NO: 441578 - DNA, 131 bp, Homo sapiens
tcccatcaggtggggaaagatgctgttccaggcgcacactagtctacaaggccagagctttctggaagggggcaatcgcccaggaccacaccgcagcgtaactgcaggcctctcagcgaaaaagggggaaa

SEQ ID NO: 441579 - DNA, 100 bp, Homo sapiens
ttcgcagtggtcgcttcttctccttggttaatttcacctaccagtttttgaaaaagaagttctatatatttagccaatttatgtatgatgaacacatcaa

SEQ ID NO: 441580 - DNA, 50 bp, Homo sapiens
gccaggatacagatcttaaatttgtcaggaaaaatgaggaagctgtgagt

SEQ ID NO: 441581 - DNA, 76 bp, Homo sapiens
tgcgtgctggtacgtgcttttcctcctgcagcccaccgtctacttggtaagaatgattgatgttggctgatattgg

SEQ ID NO: 441582 - DNA, 82 bp, Homo sapiens
aggacggacaagcacagtcttcggaagaccatggcaaaagttataaccaccgtactgaagttccctgatgatcagactcaga

SEQ ID NO: 441583 - DNA, 75 bp, Homo sapiens
caaggagctaaagcagcgtgcgttcagccctgggattctttggatgggaagagaccttgaaaggacctctagttt

SEQ ID NO: 441584 - DNA, 119 bp, Homo sapiens
tcatccagcaactctgggacagaaggaaagctgtgggaagaaaagcagggtgctggtttctaggacactaaacctcatgctggcaaacttccccagactctgcgaggaaacggaaagga

SEQ ID NO: 441585 - DNA, 98 bp, Homo sapiens
cagactggcgcgtccaggtggccgtgaagcacctgcacatccacactccgctgctcgacagtccaatatcagatggaaatgatgcggagccttcgcca

SEQ ID NO: 441586 - DNA, 110 bp, Homo sapiens
cctcgcactgtgtccagcccgatcccttacacaccttctccgagttcaagcaggcctatatcacctggaagcatatgtgcctcttttcttacccaaagttaccaattgcc

SEQ ID NO: 441587 - DNA, 90 bp, Homo sapiens
aaagtcgagtatctggtgaagtggaaaggatggcccccaaagctgctccagttacagcaccacccggccgctgcacccggctgctcccag

SEQ ID NO: 441588 - DNA, 73 bp, Homo sapiens
tgaaactggttggtgaagaaggatttgtagggttggaaatcgtgccaaatgggataacattgacgatggacta

SEQ ID NO: 441589 - DNA, 82 bp, Homo sapiens
ctccactttcgccagcccgtgccgcgagcgcggcctgcaggaggttggatttggtctagggagtcccagaaagaagtagaaa

SEQ ID NO: 441590 - DNA, 75 bp, Homo sapiens
ctctcgtcagcctcccgccggccgtctccttaacaccgaacaccatcctgaggaggatgaaggggctggccctgg

SEQ ID NO: 441591 - DNA, 78 bp, Homo sapiens
tcattcctgcctttgagcggactcccttttaaggttatctgtgctacaattgcatttggaatggggattgacaaaccg

SEQ ID NO: 441592 - DNA, 75 bp, Homo sapiens
ctcagctttttatgactgttgtggttcctctcatcattggacaggttaaagtattgcacaatcagctggtccttt

SEQ ID NO: 441593 - DNA, 103 bp, Homo sapiens
cgggtggcgcggcgggacgcgagcggcgagccggagcgcggagcccggctcccgcaccatggaggaggacgacagctacgtagagacgggggttcaccatgtt

SEQ ID NO: 441594 - DNA, 75 bp, Homo sapiens
atcaaaggaagacagtgtggagcagataagaaatgttttagcaagtgcatcagctgacaacactgtaattctgtg

SEQ ID NO: 441595 - DNA, 75 bp, Homo sapiens
acgcggaggccgcctggggtagcggcggcgggagtcctggcgctctgcagtattggtaaaggttttcaaggtgtc

SEQ ID NO: 441596 - DNA, 111 bp, Homo sapiens
cccagaccctggagcctcagttggaagcagccgatccagcctgcggagcctgtggggcagggcctgtcctcccaaagccaactctaaggagaggagaggaagagcagttct

SEQ ID NO: 441597 - DNA, 100 bp, Homo sapiens
atgaatcatacaatatttcagaggtcatgtcaaaagagaaagcgtggatacccatcaacgaagttttgatattggaattcagattggctatcagcgacgc

SEQ ID NO: 441598 - DNA, 100 bp, Homo sapiens
gaggaagaagccattcagcgtgaagcagaagaagaagcagttgcaggacaaacgggagcggaagagaggtcgtcaaagtcctacattttagctttcagtg

SEQ ID NO: 441599 - DNA, 100 bp, Homo sapiens
gccttgtgctcacccaccaacaatttagtaggaacggcagagtcgaaacaaacaatgagggcgaaccagtttcttacatgttctaacgtttgactttgaa

SEQ ID NO: 441600 - DNA, 73 bp, Homo sapiens
ggccttcgaggaggtcatgaaggacctgagcctgacgcgggccgcgcggcccctggcgaagcggtgctgcctc

SEQ ID NO: 441601 - DNA, 100 bp, Homo sapiens
ttcaattcctgggctcaagtgatcctcctgcctcagcctccccagtagatggaactacagagcacttaaagaacctaaggaactgaattttgtttttggt

SEQ ID NO: 441602 - DNA, 75 bp, Homo sapiens
ccttccagctgtttgaccgaacagtatacacgtacatccaaagccggttctaccgatccccagaagtgatcctgg

SEQ ID NO: 441603 - DNA, 83 bp, Homo sapiens
actcctgctctcttccatccccatcttacagatgtattaagaagcctcagccaagacaatgcaaactccagtgaacattcccg

SEQ ID NO: 441604 - DNA, 100 bp, Homo sapiens
cgcggcctgaagccagcccgggggcggcaggagagggacgcgcggcggcagcgagcgcaggatgaagtcattgctgtttccgaaaaggtgattgtgaagc

SEQ ID NO: 441605 - DNA, 50 bp, Homo sapiens
ctgcgcgccgctgcccgcgccacagggccgcgatgggcctcttggaacat

SEQ ID NO: 441606 - DNA, 90 bp, Homo sapiens
cgaccagatgcagcactggaaggagcagcgggccgcgcaggaaattggccttgcctctctgggtgcacctgatgaatacattgaaaagct

SEQ ID NO: 441607 - DNA, 74 bp, Homo sapiens
tgaccgagtgtctgcacacctgtgtattccgaacttaagtaccacccagagatgagattcttccactggttcag

SEQ ID NO: 441608 - DNA, 75 bp, Homo sapiens
atcttttccccagaggcgtcggaatggacctgtgccacccaggtgaccctgagagtgtggctggggagtatgggc

SEQ ID NO: 441609 - DNA, 101 bp, Homo sapiens
gccgacaaggcgttcaagcgaaaacatgaccgctgagcccatgaggcagagacatttgtttgggtgaacaatgcatctgcacattcccagagtgttgccaa

SEQ ID NO: 441610 - DNA, 98 bp, Homo sapiens
agccggagtgagaagcaagaaggccctggacacagcaatatctctgggctttcacaggtgtcatggagaaactccagctgggcccagagattctgcag

SEQ ID NO: 441611 - DNA, 77 bp, Homo sapiens
agccctggataaagatgcaccggttccttttgcaggaccccctggaacagctgtccctccacctactggctacccag

SEQ ID NO: 441612 - DNA, 96 bp, Homo sapiens
ctcagttggaagcagccgatccagcctgcggagcctgtggggcagtgtgtggaccagttgacaaagatccaaactgaattacaagagacagtgaaa

SEQ ID NO: 441613 - DNA, 101 bp, Homo sapiens
ttacttgagaatttataatggaattggagtcagcagaactgaaatagtgctgaagctgctgaaagatggcagaagaagtggtggtagtagccaaatttgat

SEQ ID NO: 441614 - DNA, 100 bp, Homo sapiens
aaatgagctgaagaccattcacaggtttcgaccaaatactagagagctgtggtgttacaatgcggtggttgctgatgccaggcttccctctgcagcagac

SEQ ID NO: 441615 - DNA, 80 bp, Homo sapiens
cggggtctatggaagtaatggaaggacccctcaacctgtttggaagccgaggcaccatcactgatgctcccggctttgac

SEQ ID NO: 441616 - DNA, 100 bp, Homo sapiens
tggagatgaacctctaacacagtggaaaggaaccgttctggatcaggaggctgcattgaggcgtgagcaaaagaagttggaaaagaagcaaatgaaaatg

SEQ ID NO: 441617 - DNA, 86 bp, Homo sapiens
aggggccttcgccaccacgcactgggtcgtcacggaggacgggaaaatccagcagcagcatggcttctcgctgtttctgggatgct

SEQ ID NO: 441618 - DNA, 100 bp, Homo sapiens
gcaactactttggattcacccacagcggggcggcggcggcggcggctgcggcccaatatagcttcagaggatgattccgaagaagacggagaccataaca

SEQ ID NO: 441619 - DNA, 90 bp, Homo sapiens
accggatcctgaggaggcagctgcggtggcagctgctgagttctcggtgaagtaaaatgtttatcggtggactgagctggcagacctcac

SEQ ID NO: 441620 - DNA, 83 bp, Homo sapiens
cggagaggagatgcacacggcactcgagtgtgagatagcctgggctggaagctcttctacgtcacaggctgcctgtttgtggc

SEQ ID NO: 441621 - DNA, 100 bp, Homo sapiens
ctattccaaaaagtaagaagaataagagatgtcagttgcactccttagatacgcacaagccaaaacctttgggaaaagcagcatctgttatagcaaaata

SEQ ID NO: 441622 - DNA, 109 bp, Homo sapiens
ggaagcgtctccgttgggtccggccgctctgcgggactctgaggaaaagctcgcaccaggtcaaaatgcagatcttcgtgaaaacccttaccggcaagaccatcaccct

SEQ ID NO: 441623 - DNA, 100 bp, Homo sapiens
gacgagcggaaaaacggagcctacggctgtattcatcaccaaagaaaaaacttacaccaatgcagaaatcggttagtccattagtttggtgcaggcaagt

SEQ ID NO: 441624 - DNA, 98 bp, Homo sapiens
ggctcagcccacaactcttgtcctaccacctcagaaggagctcattgccaagttagatcaggcagaaaaggagaaggtggatgctgctgagctggttc

SEQ ID NO: 441625 - DNA, 83 bp, Homo sapiens
gtccaagaggaccttctgattagtccacagtcttcctctatagggtgagcagggcagcatttccttctcccactgctgctgag

SEQ ID NO: 441626 - DNA, 74 bp, Homo sapiens
aaaacacagctcgacagtacgcctacttctataaagtcatccagcggacaaggcaaaatctcagcaagttcgga

SEQ ID NO: 441627 - DNA, 98 bp, Homo sapiens
gtaaagcaatatttcgagcagtttggcaaggttcgatacaagaggctgttttcctagcgtggcttgctgcctttggtaagaacatgtcgtccatcttg

SEQ ID NO: 441628 - DNA, 75 bp, Homo sapiens
accaaaagtggcatgatcctttgcagaaatgactacattagtttggatgctcttccaagagtcacatgtccaaac

SEQ ID NO: 441629 - DNA, 75 bp, Homo sapiens
attatgacaaatcacaacttgtagagagacccaagaagccaccgcctccatccgctcctgtcatcaaacaagggg

SEQ ID NO: 441630 - DNA, 96 bp, Homo sapiens
agcacatacatggcagcaacaggtctgagcgctgtgcccagccaggagcactcccagactgccttttcaaggtgtgccctatgaacagatattctg

SEQ ID NO: 441631 - DNA, 74 bp, Homo sapiens
tctgaggaagcccaactcctatgagctcctctctggcaggtgcccaaaccagtagattattcttgccaaccctg

SEQ ID NO: 441632 - DNA, 75 bp, Homo sapiens
ccagctgttcttccattaatagaagataaacttcaacattctaagtggataattactgtaccttcctcatggaaa

SEQ ID NO: 441633 - DNA, 74 bp, Homo sapiens
tgggaggccagccattcccaaatgccccaaggatgaagaacggagacgctgctctgttaaaagcgaaaatgaaa

SEQ ID NO: 441634 - DNA, 138 bp, Homo sapiens
caaatagagaaatggttgttcaactactagatgactttaaaatatcaggagttaatggaacacatatggccatttctgatgaactgcactacttggaggtctacctgacagatgagtttgctaaaggaaggaaagtgg

SEQ ID NO: 441635 - DNA, 51 bp, Homo sapiens
taagaaatctgccccaaagtcttagaactgatggagcctcgctctgtcacc

SEQ ID NO: 441636 - DNA, 100 bp, Homo sapiens
ccgaattaaaatttatacttcgcaaaactcagcaattttttgatgaggccagtactaaagtggaagtggacatggagaaagcagaaagcctgcaagtgac

SEQ ID NO: 441637 - DNA, 127 bp, Homo sapiens
tgagagccgagcgggcggcgcgggcaggtccacgggaagcctacacgcccaagatgcagtggcagaacgtggagcacgttggtgaccagagcccctacgtcacctctgtcattctgcacatcaagca

SEQ ID NO: 441638 - DNA, 86 bp, Homo sapiens
cggccgcggacgaagatggcgaccgccatgtacttggagcactatctggacaggatgtttcagcagcccctgagaaggaagaggag

SEQ ID NO: 441639 - DNA, 100 bp, Homo sapiens
agaagcaaaggagaagatatatctaaaaggattttatgagggtgaaagcttcctgctgactcaaaaggatttttcttcttctgaactcctattatgggaa

SEQ ID NO: 441640 - DNA, 50 bp, Homo sapiens
cggcagctgagacggccttggccggagaagaaataccacttgcaggagag

SEQ ID NO: 441641 - DNA, 75 bp, Homo sapiens
gctcaagcagtcctaccatgtcagccttcccagtagctgggaccacagaagaagttggattccatgggttccaag

SEQ ID NO: 441642 - DNA, 74 bp, Homo sapiens
cagcatttaccacacaatggcctgttttgacacaagggcgcatatcttcaaagcacctagtacctcctaccatt

SEQ ID NO: 441643 - DNA, 50 bp, Homo sapiens
gcgaggcccaagagcagtgataaagtgaaattcgttattctacatggaag

SEQ ID NO: 441644 - DNA, 100 bp, Homo sapiens
acaagtgcgcattggtgggaaagtacgtcttattcaggttatgaagcagcagtgtattcagctgcatcttcctactatcaacagcagcagcagcaacaga

SEQ ID NO: 441645 - DNA, 74 bp, Homo sapiens
cgctggtgtggggaagacgtgcctcgtccgaagattcactcagaattatgatctagcccttaagtatttccaga

SEQ ID NO: 441646 - DNA, 101 bp, Homo sapiens
gttctctgtgttctcagaagacgttctgtatttcagcttcctgctatgtgccctctttgttcctaaaggtgaattcatcattggccgagttatcaaagcca

SEQ ID NO: 441647 - DNA, 95 bp, Homo sapiens
gaaccggagaccccgaaaacggaagcgcagggagaaggaagaggtgtttgaaaagactactgtcagaggatgtaggaatggacatcccctttgaa

SEQ ID NO: 441648 - DNA, 100 bp, Homo sapiens
cacctgtccttctacattttcgatagagacgttttccggagggattccatcataggttgggggccgtcccgctcctaaggcaggaagatggtggccgcaa

SEQ ID NO: 441649 - DNA, 80 bp, Homo sapiens
ggacacccctgaagccgagaaatgggctgcttccccaagcccacagtctgtaagaagggtctcatcctcccgatctgtct

SEQ ID NO: 441650 - DNA, 82 bp, Homo sapiens
cccaggcccggaagctggtggaacagctacgcatagaagccgggattgagcgcatcaagtaagactttgaccccgacgcagg

SEQ ID NO: 441651 - DNA, 100 bp, Homo sapiens
gcagccacagcatcctgagaccttcggggcccggagcagcactccagccccaccccagggtcaatttttgcccccttccatctgagcagtgttaccaggc

SEQ ID NO: 441652 - DNA, 115 bp, Homo sapiens
ttgcctgcgaggctggccgagaaatcccgtgtggactctgcattgcccagtccgtgagaatcccccaggaacgcaaagacaggaccattgactttgatagaattatcaaacagct

SEQ ID NO: 441653 - DNA, 83 bp, Homo sapiens
ggcgtgcgctggtcactgaggcccaggtcgccgccgcggcgcggcttatggctatgggccatacggtggtgcgtacccgccag

SEQ ID NO: 441654 - DNA, 80 bp, Homo sapiens
tgtgtggcgcgcccagagccccgcgtttcagccctagggaagtgccctctggtggtcagaagatgctgtgctgtctcgtt

SEQ ID NO: 441655 - DNA, 75 bp, Homo sapiens
agacttggaacgcacagaggaacgagctgagctggcagagtcgtacctggtgacctttagccccctgatggacac

SEQ ID NO: 441656 - DNA, 96 bp, Homo sapiens
atttatctttctttgagtctaaagaatcccttgaagaaagtattggcaaggatctgttccggtctactatgaagcccgtccagaaagtgttggaag

SEQ ID NO: 441657 - DNA, 98 bp, Homo sapiens
gtttttccttgagctgaacgtcttgcaacagtggccgcacgcataggccaccagcttgggctccccacggagggcagcaagtgggacttggggaaccc

SEQ ID NO: 441658 - DNA, 75 bp, Homo sapiens
gtgaagtgtggcaagtgtgacccacaaaattctcgcccatattcagagaacggagaccaacctgggctgaagaaa

SEQ ID NO: 441659 - DNA, 75 bp, Homo sapiens
gtcgattcaggaacatggtgcaaactgcagtggtcccagtcaaggaacgtcaaggtcgtgggaaataaaaggcag

SEQ ID NO: 441660 - DNA, 100 bp, Homo sapiens
ctttacagcaatcacaacagaatgggccgccacaaaccccatttggccctcaaacaggcacggacacttgctagtatgttgagagaagttgagagaaaaa

SEQ ID NO: 441661 - DNA, 75 bp, Homo sapiens
ctgaagacctcctcggattccctgtattctgaagggggtccactggacggggcctgagctacaacttcacccacc

SEQ ID NO: 441662 - DNA, 82 bp, Homo sapiens
caagaggcaaaggggaggttacgcagcaaaccatccagaaggagtgtggccatctggggccgtgtggtatttgccactcagg

SEQ ID NO: 441663 - DNA, 100 bp, Homo sapiens
gcccggctaatttgcaatacggaaattttaatagggaacagaaagaacagcttcaaaagatgaaagacttcgggtctgagccacagatggctgaccatct

SEQ ID NO: 441664 - DNA, 75 bp, Homo sapiens
gctgcggcaccgcggcggcctttctcctgggaagacgcggctggctgtcggcaattggattcttccagtacagcc

SEQ ID NO: 441665 - DNA, 100 bp, Homo sapiens
aagttctgcatttctgctgtttcagttgtactactacaagcactatttatcaacaaagtttgcagaaaaaacttcagcatgtgccaggaacacaacctca

SEQ ID NO: 441666 - DNA, 98 bp, Homo sapiens
ttaaggggcatgttggtgcatttaactacaaaaccagttcaattttgtggggaaattgcttggaccaagaggaaactccttgaagaggctacaggaag

SEQ ID NO: 441667 - DNA, 100 bp, Homo sapiens
tcttgtcctacctgaagtatgccattagttcccagctgactggaaataccggcatgcaggattgatggccttatctgccattggtgaagggtgccaccag

SEQ ID NO: 441668 - DNA, 83 bp, Homo sapiens
ccaaggcgaggcaggactgtgtcaaggagatcggcctcttgaaggtcagcccaaggccaaccccactgtcactctgttcccgc

SEQ ID NO: 441669 - DNA, 101 bp, Homo sapiens
gtcttccatgtattcacttcctaatgcacccactctggcagacctggaggacgatacacatgaagaaaccagcctggacaccaagtctgtgtcagaaggcc

SEQ ID NO: 441670 - DNA, 100 bp, Homo sapiens
gctgcgttaatgtttgcaaatgcagaggaagaatttttctatgagatgggaatgatgaacaaccccaatccttatggttcaccatatactcagaatcctg

SEQ ID NO: 441671 - DNA, 48 bp, Homo sapiens
gacatccaggtctgcaccatgaaacatgtcattcaggtttatcaaaag

SEQ ID NO: 441672 - DNA, 100 bp, Homo sapiens
ccttgttgggaactgagaagtgtatatggggcccaagctactggtgccagaacacagagacagcagcccagtgcaatgttgggcccgaaggcatcctgca

SEQ ID NO: 441673 - DNA, 82 bp, Homo sapiens
tgttacagaggtctccagagccttctctctcctggcttatgcaagcaaagatctggaggagcagttacggtctgtgtccagt

SEQ ID NO: 441674 - DNA, 103 bp, Homo sapiens
cccaggaaaagactcaggacggacaagcacagtcttcggaagagacgagttgtactgctgtcacaggaaatggacgctggattacaagcatggcagctcaggc

SEQ ID NO: 441675 - DNA, 101 bp, Homo sapiens
gtttagcagggcccaggagaaggagttgatccctgaattttattatctccctgagatgtttgtcaacttcaataattataatcttggagtgatggatgatg

SEQ ID NO: 441676 - DNA, 75 bp, Homo sapiens
cgagaagtccccgaccgactggttcaagggcagcaggaaagacgagatcctgggcatcgccaacaaccgactgat

SEQ ID NO: 441677 - DNA, 100 bp, Homo sapiens
aataggacatgatccaggaagagcagtaagggactgagctgctgtctaacaggcaaccagccaagttgaaccttctcacctgccaagtaaaacctaatgc

SEQ ID NO: 441678 - DNA, 75 bp, Homo sapiens
cttcatgtgtgagaggctgggtgaggtgagaagccctaccactgcaactgggacggctgcggctggaagtttgcg

SEQ ID NO: 441679 - DNA, 100 bp, Homo sapiens
tccatggaagtgaagatgcaaatgttccaggtacttgaactggcaggaaatgcatcaaaagacttaaaggtaaagcgtattacccctcgtcacttgcaac

SEQ ID NO: 441680 - DNA, 80 bp, Homo sapiens
gcgagctgggagggagccgcgcgcctttgtgcgcgcgccgagcctgactggctcatggagaaagcctacctaagaatgaa

SEQ ID NO: 441681 - DNA, 50 bp, Homo sapiens
actctgagaagtcgtcctcttcagaaagccttaaagatggagatgacaga

SEQ ID NO: 441682 - DNA, 100 bp, Homo sapiens
ggagactcctgcgtcctccgacttttcatgattatggtgacaagctgaacatggagctgagtgagaaatacaagctggacaaagagagctacccagtctt

SEQ ID NO: 441683 - DNA, 90 bp, Homo sapiens
aactgaaacctggaaagcttacaacagtgactttgaggaatcaggaagtcctggctgagcaaggttggaagccctagttctcgcattgac

SEQ ID NO: 441684 - DNA, 100 bp, Homo sapiens
cgccttcctgcaggccatcctggagcacgaggagcaggatgaggatcttaagattgaaagtgatgttcaagaaccaactgaaccagaggatgaccttgac

SEQ ID NO: 441685 - DNA, 100 bp, Homo sapiens
ctgatatccctgaccacttcctgtgtctgtgggagcactgtgagtttaattggttggggtcagataagaagaggagtgacaatcaagccaacagtagatg

SEQ ID NO: 441686 - DNA, 82 bp, Homo sapiens
gagagaggaagcgaagggcaccatctttggtgctggagaatctggtaaaagcaccattgtgaagcagatgaggatcctgcat

SEQ ID NO: 441687 - DNA, 119 bp, Homo sapiens
agtgtgtgaacgtgaaaattccacagttccgtggtttgtaaagcaatgcattgaagctgttgagaaaagaggaaaaagaccacatcagtgtcagatttgtaagaaagcgtttaaacaca

SEQ ID NO: 441688 - DNA, 75 bp, Homo sapiens
tgataggattcacagcttgagctcaaataagatgtgtggagttggctgttacgacatccctgtgtgatcccagag

SEQ ID NO: 441689 - DNA, 75 bp, Homo sapiens
gatatccttctcaaccttgtgggatgtgaaaactctgttactgaagtgattctgccccacattggcagtgccacc

SEQ ID NO: 441690 - DNA, 100 bp, Homo sapiens
ttaacatctatatccaccttcattaaaggagacctcaccatagctaatcttgggacatcagagggtcgcttcatgcagctgatattcagcaatgagtata

SEQ ID NO: 441691 - DNA, 90 bp, Homo sapiens
aaaatctggtagaacagcacattcaggacattgtggacctatttcccattttcctgctcttgcctgaaccagttattggctgtggtttcg

SEQ ID NO: 441692 - DNA, 100 bp, Homo sapiens
gatcaccgacaagatcaccacggacgagatgatcaaacgcctgaaggtataattgaaatcctcaaaggaatgcaagaattgggagtacatcctgatcagg

SEQ ID NO: 441693 - DNA, 75 bp, Homo sapiens
gatgagaggatgtggtggtctactctgatgtcaatcttgagggctagattgcagctcagatctgtcgccaggctg

SEQ ID NO: 441694 - DNA, 95 bp, Homo sapiens
cagcggccagatgatgctggcacagggccttctgctgcatttcctgcccagaggtgtaggccctgcttccgtgatggttgggaatctggttgctg

SEQ ID NO: 441695 - DNA, 75 bp, Homo sapiens
gcctccccagccatgtggaactctacacggtgggcaccgtccaggagaacaatgaccaggtctggaagttccaga

SEQ ID NO: 441696 - DNA, 100 bp, Homo sapiens
ctccttctgccccaccctggtcacttccccaccggaggtttatcacaagggaaatgtttcaacgtgcgcaagcgttgcggcggcgggcagaggactacta

SEQ ID NO: 441697 - DNA, 75 bp, Homo sapiens
gacgcctcccagccgtgcttcctgttaagcctgtgaaactgaggaaatgaacacatggatccaggctatctcttc

SEQ ID NO: 441698 - DNA, 100 bp, Homo sapiens
ctccaagtaaggaagaaattgagaaagaatgtgaagataccagtttgcgtcaggagacacaggtgagagcacagtaaggactattgctatggatggtaca

SEQ ID NO: 441699 - DNA, 99 bp, Homo sapiens
ctggagaagagtgctgttttacaggagtctcggaagggtgctgacctggaccgggagaagaaggctgccgagtgcaaggtggacagcatcgggagcggc

SEQ ID NO: 441700 - DNA, 75 bp, Homo sapiens
gcaacgctcgccacacccttgttttgagatcctctctaagaggagaaggcagagcccccccaggctatgaatgcc

SEQ ID NO: 441701 - DNA, 100 bp, Homo sapiens
acttccagaacatctgggagaatatttaatggaaaatcgcttggttaaaacctgacacttttaacagaaagatgtagcacttaagcctcaggaacgtgtg

SEQ ID NO: 441702 - DNA, 89 bp, Homo sapiens
atagttttggaactagcagatgctggcgacctatccagaatgatcaaggaaagcttagtgatcgaccgacctcgcgtgagaaagcagac

SEQ ID NO: 441703 - DNA, 100 bp, Homo sapiens
ccagagtccgcggccggggcgcgggagggcgccatgttttggaagtttgacctgcacacaagctcgcacctggacacgctgctggagcgggaggacctga

SEQ ID NO: 441704 - DNA, 101 bp, Homo sapiens
ctgtggggcagacaatgtatttatctgaggccgtgtacctcaacgactccacctatgacggacataccgtgggcggataccgactgcattttgagagagac

SEQ ID NO: 441705 - DNA, 98 bp, Homo sapiens
gatgaatacacagacactgacctgtacacaggtactataagatctccgtggtgctcatgtgctttgtggtccccacgctggtgccctggtacatctgg

SEQ ID NO: 441706 - DNA, 88 bp, Homo sapiens
gcaggtttaaaattttacataagaagttacctttttcaggtccagtggtttacgtcttggatcttgcagatagactgatctcaaaagc

SEQ ID NO: 441707 - DNA, 97 bp, Homo sapiens
gtgcttctctaccttacagatttggatcaatttttacaccactgggatgtaacagaggtggagccgccaccaaaatgcagattttcgtgaaaaccct

SEQ ID NO: 441708 - DNA, 88 bp, Homo sapiens
tcagtttctggaagaagaagaagagcatgatcggcatgtccaccaaggcagggactggtgattgcagctggaagtgcccatgaccgag

SEQ ID NO: 441709 - DNA, 90 bp, Homo sapiens
cgagacgaggttcctgtgcaactcttcacaggtgaaaggaaagcaagccaggatggatatttacgacactcaaaccttgggggttgtggt

SEQ ID NO: 441710 - DNA, 80 bp, Homo sapiens
agccgttattggctgccgttaaggaccgttacgtttcccggccctctctatgatatgctaagaaagaatcttgtcacttt

SEQ ID NO: 441711 - DNA, 90 bp, Homo sapiens
ggcggcgccgctcatccccctctcccagcagacgcaaacatgcagatctttgtgaagaccctcactggcaaaaccatcacccttgaggtc

SEQ ID NO: 441712 - DNA, 83 bp, Homo sapiens
gtcaatttatactgattcttcagatcagttaatcactgcctccatcttccaagaagagcgatggttctgggacatatactaag

SEQ ID NO: 441713 - DNA, 138 bp, Homo sapiens
tctcggcacaagcatgtacggcaaaggcaagagtaacagcagcgccgtcccgtccgacagccaggcccgggagaacagttggaattgatcacaccttttcagttgtacttcaatcctgaattaatctttaaacacttt

SEQ ID NO: 441714 - DNA, 90 bp, Homo sapiens
cggcggcctgcctccgggcacacccggctccccggacgcctcggaataactcaagtcacctgtactggaaatcagtttgctgaaattaat

SEQ ID NO: 441715 - DNA, 100 bp, Homo sapiens
cgggacaccccggaagctgggaaatggtactggaagatgctcacagagatgccaacctgcaccatgtagcttgtaatatagtgaaaaaacctggcaacat

SEQ ID NO: 441716 - DNA, 127 bp, Homo sapiens
gtttggtttaaagaattaaaaggaagaacaacttaagagcttcttcaaaggtgcttttgaagatgatgatatcacgcacgttgaaggaagtgtagatcctattcgagatatagaaataatacatgaa

SEQ ID NO: 441717 - DNA, 83 bp, Homo sapiens
gcaggactccaaggtcattttcgtggagaaagccccaggatgctccagaccttgtatgattacttctggtgggaacgtctgtg

SEQ ID NO: 441718 - DNA, 73 bp, Homo sapiens
aggaggaggcttgggcttgcgccgttgaagactgtgccctgtccacggtgcctcctgcatgtcctgctgccct

SEQ ID NO: 441719 - DNA, 100 bp, Homo sapiens
gtcagcttttggactccctattgtatttgccagagcacatctggccctgtctctgcccctggtggtcatcgtccatggcaaccaagacaacaatgccaaa

SEQ ID NO: 441720 - DNA, 101 bp, Homo sapiens
atctgtttttagctatcaagtggcatccacgcttaaacaggtgaaacatggtagctttggatatgttaaatcctcatgttactttgcctgttttttaccca

SEQ ID NO: 441721 - DNA, 75 bp, Homo sapiens
cccagccgagacggagccggacccgccgcctcccgggaaatcatcgagttccccatcctaaagctaaatggccgg

SEQ ID NO: 441722 - DNA, 75 bp, Homo sapiens
ctacgaatacgtgagcccggagcagctggctggctttgataagtacaaggccatgttcgagctggtcacttccga

SEQ ID NO: 441723 - DNA, 100 bp, Homo sapiens
ttcttcgtgtatggagcataacctgagtattctaccttgtaaatactgttatttgtatatactgtaaatgatgacatcggtgggcactaaccgagcccgg

SEQ ID NO: 441724 - DNA, 100 bp, Homo sapiens
gtggatgtgaaatgagtcaagcggaactttgattacaaggaatttcatatacttgtactaaaggaagtataccaagcctttaatcccaaagcagtggtct

SEQ ID NO: 441725 - DNA, 88 bp, Homo sapiens
tacaacagatacagagactattacagacaatacaatcgggatatttgttcccgacaaggagttttctggttcagaccgtagacagaga

SEQ ID NO: 441726 - DNA, 97 bp, Homo sapiens
tgtcccgagcgcccgagcactgtgagttagtggtggacctgtttgtgcgcacagtgctggtctgcctgacatgtgttggggatgtcctttgcactga

SEQ ID NO: 441727 - DNA, 100 bp, Homo sapiens
gattttagaagatcacaataaacagctggagtctcagctccaccgcctccgacagctgctggagcagttcgaaaagatataatccgcatcctccccagtc

SEQ ID NO: 441728 - DNA, 120 bp, Homo sapiens
gataattcaaaaacactatcccagggagtgcaagcttagagcgtctggccaagaatcagaggaagtgggctttggtgaagcacgtgcagtctaaaggatacccaaatgaacgttttgaac

SEQ ID NO: 441729 - DNA, 90 bp, Homo sapiens
tccaggagttcgtctcttacgtctgcggaagtgcagctgcctcagttcttagcgcaggtcgagcccttctctataacggtcattacaaac

SEQ ID NO: 441730 - DNA, 100 bp, Homo sapiens
aagcatgttttcttggtgcaacagtgaagtatcttcaaaaattcatccctgaaattactatcagtgatatacttagggtaccagaacatctcgtgaagag

SEQ ID NO: 441731 - DNA, 101 bp, Homo sapiens
gattgccatgaacggaagcgtctttgctcaaggatcccagttttctctggatgacgtggagctcgaggccatgagcagatataccagcccagtgaacccag

SEQ ID NO: 441732 - DNA, 101 bp, Homo sapiens
agatctgacaccaaacaacattatgttgggggataaggacaaagtaaccgttactactgcagccgtggaactaagtgttgctaatgaattgtgaatggaag

SEQ ID NO: 441733 - DNA, 83 bp, Homo sapiens
caccaagatgcggatccgggcctttccggttggtcaaagaaaaagtgatgtatgaaaaagaggcaaaacaacaagaagaaaag

SEQ ID NO: 441734 - DNA, 114 bp, Homo sapiens
gagcagtatgccgatcgggcgcggtactcagccttttaaagcttgagttatttatcgagaaagctgatgctgaggaaaaatggttcaagagattaattgctctccgacaagaaa

SEQ ID NO: 441735 - DNA, 96 bp, Homo sapiens
gatctattgcttttcatagtgcagtaaggtgttacagttcgagtgcctcaaacaaccacatatgttgtaaacaatggactaaccctgggatcaaca

SEQ ID NO: 441736 - DNA, 96 bp, Homo sapiens
gggtgagatcgtgctggccctggaacacctgcacaaggaggaagaaggcacctacgatcaaactctggagttccgtaggggaggtgatggccagcc

SEQ ID NO: 441737 - DNA, 100 bp, Homo sapiens
aaatggcggtgtgaagagagttcgcctgagccagatcccagtatgccaccacgggctgttccctgaccctgcaccatacggagaaaccagaacatgaaga

SEQ ID NO: 441738 - DNA, 83 bp, Homo sapiens
ggacatcgtctcctgtgtggcgatggtcttcctgctggggctcatgtttgagatttggaggccaatcactgccaccttttatt

SEQ ID NO: 441739 - DNA, 50 bp, Homo sapiens
ttttgtgtttcttgccatcttacaagaggctgctggtttgcctagaagag

SEQ ID NO: 441740 - DNA, 83 bp, Homo sapiens
ggctaagcaaaaccctgcagaacggctgcctaatttacagcaaccatgagaggctgttggaagctgcttgggagaagtgggtc

SEQ ID NO: 441741 - DNA, 96 bp, Homo sapiens
gtaaaaacaatagctcaaggaaacctttccaacacagatgtccaagctgccaaagttaaacatgaagtttctggagagacagtggtatttcaaggg

SEQ ID NO: 441742 - DNA, 76 bp, Homo sapiens
gctgcagaaagaaggtgtgattggagtgacagaggaggtggagcccagtgacaccatcgaaaatgtgaaggccaag

SEQ ID NO: 441743 - DNA, 100 bp, Homo sapiens
atgaactctcccaacgagtcgggctcctggctggtgccccccgggagctcgctgtgcccgatggctacaccaaccggactggtgctgtgtacctgtgccc

SEQ ID NO: 441744 - DNA, 50 bp, Homo sapiens
cttcggatggtgaactcattagaaggcaagttaaagtcttcagagccctg

SEQ ID NO: 441745 - DNA, 90 bp, Homo sapiens
aataaggctaaacttgcaatatggacctgcctagagctggaacgttacctccagagcgagccctgctatgtttcagcctcagaaatcaaa

SEQ ID NO: 441746 - DNA, 88 bp, Homo sapiens
gcccagaggactttcttccagcttctgctgtccttctttgtggagagcaagaattcaaagaagctttttcactatttgacaaagatgg

SEQ ID NO: 441747 - DNA, 98 bp, Homo sapiens
actctcgccaaagccgctctgggcaagatctcagtcatagtggattggcagatcattatgaaaattcccactggggacagcagcctacttacagaagc

SEQ ID NO: 441748 - DNA, 75 bp, Homo sapiens
ctttgacagcaggttgcaaaaggctgataaaataccagtaatgcgtggacagtggtttattgacggcacttggca

SEQ ID NO: 441749 - DNA, 100 bp, Homo sapiens
cttatataatcccaaaattacctcagaattatcagatcccttggccaagcaggagggaaccattagcagcctgaggagctggctggctgggagcctcggg

SEQ ID NO: 441750 - DNA, 99 bp, Homo sapiens
gagcaagatcaccgtgacatccgaggtgcctttctccaaaagaaatctgcaactcgacctagcccctctccggaaaggagcagcacaggcccagaacca

SEQ ID NO: 441751 - DNA, 83 bp, Homo sapiens
cctcctgagtagcgggactacagtgctattatctaggagccacaaaagacgcagccacaaagatcctaagtgaagtcactcgc

SEQ ID NO: 441752 - DNA, 100 bp, Homo sapiens
accgaagaagaggcccggactcatacagagattgaaatgttccttagaaaggagcagcaggctttacaggaagtatggtgctggcatctgcttggcttct

SEQ ID NO: 441753 - DNA, 123 bp, Homo sapiens
tcggcacaagcatgtacggcaaaggcaagagtaacagcagcgccgtcccgtccgacagccaggcccgggagaacaatacgagaattggagacccaaccagccagacagcttcttttctgctgg

SEQ ID NO: 441754 - DNA, 100 bp, Homo sapiens
tgactctgactctcggactgagaaacgcaagaccatggtgaatccgggcagcagctcgcagccgcccccggtgacggccggctccctctcctggaagcgg

SEQ ID NO: 441755 - DNA, 131 bp, Homo sapiens
cgcgggacggctctgtaggaaggaacttggttccccctccctcagcttccgccccaaaagtatctggagtccatctttcaccatcttctcctgagattgtactggaccgtgaccactcttcttccattggc

SEQ ID NO: 441756 - DNA, 98 bp, Homo sapiens
cctgactaaagcttgaaatgctacatttccaaggcccttctgcgatgttttacctggctgcggctgtgtcagatttctatgttcctgtctctgaaatg

SEQ ID NO: 441757 - DNA, 95 bp, Homo sapiens
gatttgactcccttcctggttttgaaagcaagaaagaaacaaaagttcacctctgcgaagtcatccctttcaagccctgatatcttcgactcccc

SEQ ID NO: 441758 - DNA, 100 bp, Homo sapiens
cagataatgaaggaagaaaacacaggagccggagcagaagcaaagagaataacctgaagcccccacaagcaaaaaggaagatacaacatgttacttggcc

SEQ ID NO: 441759 - DNA, 76 bp, Homo sapiens
aaagaagtggagcgtgtcctgaaggagttccaccaggccgggaagcccatcggtgtcctcagcctgcgggggctgc

SEQ ID NO: 441760 - DNA, 83 bp, Homo sapiens
cgaacgaccaagagggtgttcgactgctagagccgagcgaagcgtgcatggctgcctcctaatcccatagtccagaggaggca

SEQ ID NO: 441761 - DNA, 101 bp, Homo sapiens
agcaatcccagacctaagtttgaagattggctttgtaacaagcaatggctgccatccggaagaaactggtgattgttggtgatggagcctgtggaaagaca

SEQ ID NO: 441762 - DNA, 100 bp, Homo sapiens
ggcctgtggccgctgcacatcgtcctgtggacgcgtatcgccagcacgatcccaccgcacgttcagaagtcggttttcggctttgtgagaaaccttacca

SEQ ID NO: 441763 - DNA, 82 bp, Homo sapiens
tgtcttcggtggactccttcggcagtccacccaccgccgccgcctcccagatggagaaggaggagacaacccgggagctgct

SEQ ID NO: 441764 - DNA, 82 bp, Homo sapiens
gcgcgtggaacggctgcttttggaagcgtgagtgcatctccatccacgttggccaggctggtgtccagattggcaatgcctg

SEQ ID NO: 441765 - DNA, 74 bp, Homo sapiens
aactttatcttaagctaagtcggaaggaaagatcttcagcttatagcaaaagaaaatgtttataggaggcctta

SEQ ID NO: 441766 - DNA, 51 bp, Homo sapiens
cgcagagtgggcggcggtggtgttggaatcaactggactcggccttagtag

SEQ ID NO: 441767 - DNA, 90 bp, Homo sapiens
acactggaaacttcgaaaagttggagataaaattctcggagatctgagctacagaagtgcaggtgaaatacatatgggaggtcaagaaca

SEQ ID NO: 441768 - DNA, 75 bp, Homo sapiens
tttgttaaggattccaagtaactcttatttggcaccaccaggaccagctgatcattccagcccacagcaatggag

SEQ ID NO: 441769 - DNA, 75 bp, Homo sapiens
gccgaaagggttgtagacatggcggccatcaggaaaacctggaatcagattactttggcaagcttgaatctaaat

SEQ ID NO: 441770 - DNA, 75 bp, Homo sapiens
attttattcctcttcctatccaatccctgccttttgagtccaggtgtgaccaaagacttgaccactcaaagtcca

SEQ ID NO: 441771 - DNA, 50 bp, Homo sapiens
gtgaagtggaaaggatggcccccaaagcgtccgagctgggccacagcctg

SEQ ID NO: 441772 - DNA, 100 bp, Homo sapiens
gccggacccaccggatgaccgggatgcctcagggtggttctcttcccaaagtggaagccaaattcatcaattatgtgaagaattgcttccggatgactga

SEQ ID NO: 441773 - DNA, 98 bp, Homo sapiens
gttctgatcactactgacttgttgaaattttatgggagagagactctttgagagtgcagaaggtagtcagtgtggagaaactttcacccaggttccgg

SEQ ID NO: 441774 - DNA, 83 bp, Homo sapiens
gtggcgcctaaagtctgcgaggaggaagtcgcctctgtgctcgtgagtccagggatctaagggtttccaggcctgaggtgccc

SEQ ID NO: 441775 - DNA, 99 bp, Homo sapiens
attgaggcttcaaattggcatggattttttcttccagagaaaatatcttcaactctcaaagtagaaccctggccagagatcctcagcaggagcctatgg

SEQ ID NO: 441776 - DNA, 51 bp, Homo sapiens
caggacatggagtatgaaagacggttgcgagttataaggactcagcatcat

SEQ ID NO: 441777 - DNA, 100 bp, Homo sapiens
tatacctgtgaacgaaatgatcaactctgtctttgctatgacctactagaatgtctgccagaaagaggatatggagagaaggctgcaaagctgggaagcc

SEQ ID NO: 441778 - DNA, 96 bp, Homo sapiens
accactgccccaccaggaggcgactcctcgggcctccaaaggggcccaggctggcatttacaagagcagctggacttagatctctcacctttggag

SEQ ID NO: 441779 - DNA, 100 bp, Homo sapiens
tggatgattatcatgccttccagactctgacacatattactgattttgggcactccaagattttgggagagacctctctcatgagaaccttatgtggaac

SEQ ID NO: 441780 - DNA, 100 bp, Homo sapiens
tcccggccgtttccgaccacacggatggggcggacccatacaaaacttgccaatggcacttccagtatgattgtgcccaagcaacggaaactctcagcaa

SEQ ID NO: 441781 - DNA, 80 bp, Homo sapiens
ctactggggccagggaaccctggtcaccgtctcctcagccgccgccatgtctgcgcatctgcaatggatggtcgtgcgga

SEQ ID NO: 441782 - DNA, 97 bp, Homo sapiens
cagagccctggatgtcatttggaaaaacactagagacagacggctggcagatgccatggacaatattaccaggcagaaccaattctacgatacccaa

SEQ ID NO: 441783 - DNA, 82 bp, Homo sapiens
ttgaagcatgctctggaaatgttcccagaacattgcacgatgcctcctggtgttggataaatacaaccctccagaccacttc

SEQ ID NO: 441784 - DNA, 74 bp, Homo sapiens
gaggaggctggagattccacccaaatcctcttctccaagaaggtactgaacgacacctgggtctccttcccttc

SEQ ID NO: 441785 - DNA, 88 bp, Homo sapiens
tgcgggacaggaagtggccgtagcggcttgttggataagcctggggaccagcggctggcacagagcgcggagatgtaccactaccagc

SEQ ID NO: 441786 - DNA, 101 bp, Homo sapiens
gacgtggataccttggcctttgacgggcggacctttgtcgagtacctcaacgctgtgaccgagagccgaattaagaaagtggtttccatctacggaagcag

SEQ ID NO: 441787 - DNA, 100 bp, Homo sapiens
gtttgtcaccacaaaaaggacagccaacaagtcccaaatttggaaaagctgactcatatgaaaagctggaaaaactaggggaaggatcttatgctacagt

SEQ ID NO: 441788 - DNA, 100 bp, Homo sapiens
cttcatccagcaaagagcacacatcatcatctgctattccaggaggtgtggatattatatccccaagtaagcccttggcacggaaattaatggattggga

SEQ ID NO: 441789 - DNA, 101 bp, Homo sapiens
tccagtcttcctcttgatccatatgtttcagtgagaaagatcagtctaaagaaaaggagaagaaagtgaaaaaaacaattccttcctgggctaccctttct

SEQ ID NO: 441790 - DNA, 100 bp, Homo sapiens
tcctgattagctgagactacagaacaaggacagggggacatccctacattttacacctatgaagaaggattatcccatctaacagcagaaggccaagcca

SEQ ID NO: 441791 - DNA, 75 bp, Homo sapiens
gaaaaacaagaattacagcagccaacctatgttgccctgagttacataaataggagtctcagcagtccaattttg

SEQ ID NO: 441792 - DNA, 98 bp, Homo sapiens
caagaagagaggcccaagatggagacggcggcggctgtagcggcgtgacagagagtggacccttggccactgttcagggcaaggaggggcctccacgt

SEQ ID NO: 441793 - DNA, 75 bp, Homo sapiens
aacagtttgtggcaagacaagctcagaactgagaagctgtcaccacagagatatgaatcaggttcttgatgccta

SEQ ID NO: 441794 - DNA, 75 bp, Homo sapiens
aaactggctgtgaataatatagctggtattgaagaggagtcagccagcctgaaagagcaggatggatcttgatgt

SEQ ID NO: 441795 - DNA, 100 bp, Homo sapiens
cggtgagcgcgtttcccgcctgagcgcaactagcggcgggtcgtgggcacctccagctctacgtctcctccgagagccgcttcaacaccctggccgagtt

SEQ ID NO: 441796 - DNA, 100 bp, Homo sapiens
ggaccggctgtatgattaggccacaatcttcaatgagtaaacatattcctgtgatggctggaccggcggaggaggcgggagcccattgtcccgagagcct

SEQ ID NO: 441797 - DNA, 83 bp, Homo sapiens
gccgtgccctggggctgagccctcagatgagcgggatcgtgtgcagaagaaaaccttcaccaagtgggtcaacaagcacctca

SEQ ID NO: 441798 - DNA, 82 bp, Homo sapiens
tgctcgagcaaccagaaccggagcatggaggcgcacaacatcctcagtgtccttgaatccgacccctactttgggtttgaag

SEQ ID NO: 441799 - DNA, 82 bp, Homo sapiens
attaaccaccattcttcagtgggctgtgattttcagaggggaatactaagaagccaagtcatcaaggcatgggacattgggg

SEQ ID NO: 441800 - DNA, 83 bp, Homo sapiens
atccagcaaggtcggcagagcaaggggcttacgcagaaggacctggccacgggtgcttcaaggatgaccgcatcgtcttctgg

SEQ ID NO: 441801 - DNA, 82 bp, Homo sapiens
atcccagttctttggcttttactaaaaatggacgcctggcaaccaaacatcttcatttgattgtacaccatctcccagcaag

SEQ ID NO: 441802 - DNA, 99 bp, Homo sapiens
ggcaatgctccccggggccgcgggatgagccagatgatatcatcaagttgaatcgaaaggaagggaagaagcagaattttccaagactaaatagaagac

SEQ ID NO: 441803 - DNA, 100 bp, Homo sapiens
caagcagactctgaagatgatcagacaaggcaaagcgaaattggtcattctcgctaacaactgcccagctttgaggaagcagtcaattatagatttcttc

SEQ ID NO: 441804 - DNA, 80 bp, Homo sapiens
cagacggattcatttagagctgcggaacaggacgccctctgatgtaaagatgagccttccagctacatttgcacaacatg

SEQ ID NO: 441805 - DNA, 90 bp, Homo sapiens
tgcgcaggctcaacatacccgtactacaggatgatggctttctcttcctctgggtcacaggcagctgaccgtcctttccgaggagagagc

SEQ ID NO: 441806 - DNA, 97 bp, Homo sapiens
gcgccgcagcccgggcccaggccccggcagcgcctgggacaaggtatgatctcgtgaaatcttgagagaaactgaatgacgaatgaaactattgttc

SEQ ID NO: 441807 - DNA, 89 bp, Homo sapiens
cccagagacctgagcagctctgcaaggttctaacagtattctgaagtctcaggaaactggaccatttaaatgtgcatggcccatgagaa

SEQ ID NO: 441808 - DNA, 97 bp, Homo sapiens
gagcgtgcaacaagacagccctggagcacaggaaggctgtgggcctgggcgacaggcaagagaagttgaatataccggcaattttgcgagcacccaa

SEQ ID NO: 441809 - DNA, 83 bp, Homo sapiens
ggaggataagcaagtcgaatttttgtcttacgacaatgcagatcttcgtgaagactctgactggtaagaccatcaccctcgag

SEQ ID NO: 441810 - DNA, 75 bp, Homo sapiens
ttcccagaggactttggagaccagatgccttcaattaagttgcagagttctgatggagagatatttgaagttgat

SEQ ID NO: 441811 - DNA, 100 bp, Homo sapiens
tcccggaagatcgcgatcctgggctaccggtctgtggatggggtcgaggatttggtcttttgggttccatttttggaaaggatggtgtattaaaccagcc

SEQ ID NO: 441812 - DNA, 51 bp, Homo sapiens
aattaattgatccccagctagactaggtgctggagaatctggtaaaagcac

SEQ ID NO: 441813 - DNA, 83 bp, Homo sapiens
cggacatggtcatgagctttgtgaacctgggagaatggggtactaagagaaaagcacgaagctgtggatcatagttcccagca

SEQ ID NO: 441814 - DNA, 75 bp, Homo sapiens
ctccactccccagctgtgaaaggatgcttgtggttggtggcatcgaccgggtttatgaaattggacgccagttcc

SEQ ID NO: 441815 - DNA, 98 bp, Homo sapiens
atgggaaggtggatcccgccgggaggtactttgctgaaatttctgaataaattggcagaagaacgcagacagaagaaggaaacttaagatgtgcaagg

SEQ ID NO: 441816 - DNA, 96 bp, Homo sapiens
cttgctagcaaaacaggcagaaatggaagtcaagagggaatcttatgcaagagaaagaaggtgatcagactctgagaatatgggatgtgaaggcag

SEQ ID NO: 441817 - DNA, 51 bp, Homo sapiens
aatcaatgaaactgacactccagcacaggcacttaagtattcatcgaagag

SEQ ID NO: 441818 - DNA, 100 bp, Homo sapiens
accagtcccaagtcgtccccctctccgccccccaggaggggcgagagggagccgcagctgatgtcagagaaagtctattcgtgtgaccaggagaggcaga

SEQ ID NO: 441819 - DNA, 90 bp, Homo sapiens
ctggccgagcaggaggcgccatcatggccatctggctgctgtgcacaggcgctcgtgaggctgccttccggaacattaagaccattgctg

SEQ ID NO: 441820 - DNA, 75 bp, Homo sapiens
tgccacagtccacatgtcccggagctctgtggatagcaactggatcgtgggtgccacgctggagaagaagctccc

SEQ ID NO: 441821 - DNA, 73 bp, Homo sapiens
ggtggtcccagcctggagctgtgccagcctgacatggtgattcataatcttcactgctcacgccaactgtcat

SEQ ID NO: 441822 - DNA, 83 bp, Homo sapiens
gagatctccgaccagtctgggggcgctggcggcctgcgcagccacctcaaggttctccagcaagtagataacaagtttattgc

SEQ ID NO: 441823 - DNA, 82 bp, Homo sapiens
cacctaccaagaagccagtcaagcggccagctcctgtccaaatatgacccccagaaggaggcagagctccgcacctggatcg

SEQ ID NO: 441824 - DNA, 75 bp, Homo sapiens
agcaggtcacgaggacggagggccatgtgttgggtcagcaccatcagtcgagtaatcctgcctgtgtctgtagat

SEQ ID NO: 441825 - DNA, 90 bp, Homo sapiens
ctgctggatggaggggattttgtcagcttgtcgtcaagcagtgtttggccagcgcttggatgagactgtggcctatgaacagaaattcgg

SEQ ID NO: 441826 - DNA, 76 bp, Homo sapiens
ccgacctcctcgccttggaggaagaatataaattgtcagaagcttcagttctggtaaaagagaaggtggggacttt

SEQ ID NO: 441827 - DNA, 74 bp, Homo sapiens
tttttcggatcatgtctggtggctccgcggattataacaggaggctggtggcatgttgtcctcaatctcgacac

SEQ ID NO: 441828 - DNA, 98 bp, Homo sapiens
gggcgcgccatgttcgcgcgtgggtcccggaggcgccgctccgggcgtgcggtaattcagaggtccgtggggccagccagcctgagcttgctcacctt

SEQ ID NO: 441829 - DNA, 75 bp, Homo sapiens
gtttgaacaaactcgaagaacagctgtggaaagaagttgcaaaacactgggtattggcaagcttgccagtgtacc

SEQ ID NO: 441830 - DNA, 100 bp, Homo sapiens
gagtaattgtttctgtgaatgtagaaacatgccctccagcatggagaatttacatagtacatgacgaagttaaggataaagcttttgaactagaactcag

SEQ ID NO: 441831 - DNA, 75 bp, Homo sapiens
ccggcctggagctcccagggccgagcagccgctcttctaaaacattcaaaccaaagaagaatatccctgaaggat

SEQ ID NO: 441832 - DNA, 100 bp, Homo sapiens
tcatcattctgttgaagaaacgcttaacccacacgctgcagacttggaaaagaagcagaatgagacagaaaacaggaaattgctggggaccgtaatccag

SEQ ID NO: 441833 - DNA, 99 bp, Homo sapiens
caaacctgtgagttcaacatgatagagcagagtggaccaccccatgaacctcgatgaggaaaatgaagctcgggctggttaactgacttgctcagcgtc

SEQ ID NO: 441834 - DNA, 100 bp, Homo sapiens
ctcgccggagcccaactcagcaacagccacaacagagggttactataacaacagtaccaaggtggctgtgaaaaccctgaagccaggaactatgtctgtg

SEQ ID NO: 441835 - DNA, 76 bp, Homo sapiens
gaactgaacaaagacaacattgttcctggaacgccctctttttaaaaaaggtttcctttggatcctaaaagaagaa

SEQ ID NO: 441836 - DNA, 75 bp, Homo sapiens
atgaccagggcaaggatcgtgatttggtaactgaagacactggtgtgagctaaggcaggaacggatccaaattca

SEQ ID NO: 441837 - DNA, 100 bp, Homo sapiens
tcctgagacccggacagtggcagtgaaacaggtggagttctacttcctttcccagtacgtgtcgccagccgactccccgttccgccacatcttcatgggc

SEQ ID NO: 441838 - DNA, 140 bp, Homo sapiens
cgccccgctgcctcgccgccacactttcctgggagcggcggccacggaggcaccatgaagaagtcttactcaggctctgacgcccgctctgcggcttcggtgtttgaacaggccacagtccaggagcgcttacattcagg

SEQ ID NO: 441839 - DNA, 75 bp, Homo sapiens
ccacaaccatcacatccaccatgaaagctaagctgctgaaggcttgcagtaaggttgggctgctggcacgaccct

SEQ ID NO: 441840 - DNA, 75 bp, Homo sapiens
caggtttcgagatttgctgctaggggaccaaggatggcaaaacgacgacagggttacacatcattttggaatgac

SEQ ID NO: 441841 - DNA, 101 bp, Homo sapiens
ctcctgagcagctgggactacagactgcgccatggggctcagcgacggggaatggcagttggtgctgaacgtctgggggaaggtggaggctgacatcccag

SEQ ID NO: 441842 - DNA, 100 bp, Homo sapiens
gtgctgcccgagaaggtggacgtgctggtgtctgagtggatggggacctgcctgctggccccccggacagaccacccagccctgtacagggacctgctga

SEQ ID NO: 441843 - DNA, 100 bp, Homo sapiens
gtgaccagtattcaagagaggatcatgtctacacctggaggagaggaagctattgaacgtttaaagcatatgcaggaagcggcaggaataaggaaaagca

SEQ ID NO: 441844 - DNA, 49 bp, Homo sapiens
gggaagccatagctctgcatgggcccttatattctcaagaccgaatcct

SEQ ID NO: 441845 - DNA, 100 bp, Homo sapiens
tctttgcaaagttgataacatttcaaaccctgaaggacagtgacttattatggatgtccaaaagaagatatactggtcacactgaatgacctgattaaaa

SEQ ID NO: 441846 - DNA, 98 bp, Homo sapiens
agaaatcaccttcagctgtttcctgagttgctgtttcttgggactgcgaagctatacaggctgtaccttgtggtctataatcctttagaacaagaccg

SEQ ID NO: 441847 - DNA, 100 bp, Homo sapiens
gggggattctcgacctgctaacagaactggaccttttcgtcctcctcgccctctgactaatatgaatgacaccatggttagccacatgtcctctggagtg

SEQ ID NO: 441848 - DNA, 87 bp, Homo sapiens
ctgcatgcacagtggctttaagatcctcaactgccaaaaggcaatggaaatggctgcaagcaactgacctcactagagaagtgtacc

SEQ ID NO: 441849 - DNA, 100 bp, Homo sapiens
acccattcaaaactctgctttaccctctgcatctattacatccaccagtgcagctgcagaaactggcgatggaatatgagaggagccctctggaaagaaa

SEQ ID NO: 441850 - DNA, 96 bp, Homo sapiens
gagagaatcaaacttacagggttgccaccaggttggagtcagttagctgctatgcactgtgttatgctgccagacctactgggattggataaattt

SEQ ID NO: 441851 - DNA, 100 bp, Homo sapiens
cttttgcaagggcgaggtcagccccaaactaccggttgccaaggaaagtgtactgcagttttacccgaaagctaatatcgttgcctaccatgacagcatc

SEQ ID NO: 441852 - DNA, 83 bp, Homo sapiens
tacgtggattccagaggggtgacagcgaaatgtcccagccgtcggttcaagcgagtggtggagaccatccaggcacagctcct

SEQ ID NO: 441853 - DNA, 59 bp, Homo sapiens
tgtggctctggatagcaccttatggacagcagcctcccgcgacgatgcccctcaacgtt

SEQ ID NO: 441854 - DNA, 74 bp, Homo sapiens
aagaactgctgggaggatgacaatctcaggaaattttctgatggaatttcaagtgaaaaatgttccttcagaaa

SEQ ID NO: 441855 - DNA, 100 bp, Homo sapiens
gccctccccgcgccagtccccccgcaccctccgtcccgacccgggccccgccatgtccttcttccggcggaaaggatagtaatgatgacactgaagatgt

SEQ ID NO: 441856 - DNA, 100 bp, Homo sapiens
tagaagataatgatgtctcagacattttaaaattactagcattacaggtgtctgacttccagcaactgctggcctgtgccagggtgcaagctgagcactg

SEQ ID NO: 441857 - DNA, 101 bp, Homo sapiens
atctgcaggacttggtccgcggcatccgtaaccacaaggaggacgagggacctcaggatggaaaccagcagcctgcaccgcccgagaaggtcggctgggtc

SEQ ID NO: 441858 - DNA, 100 bp, Homo sapiens
tcagggtatgctatctggaggcctggacactgtcacactcaacatcacctctcagccgctgcagagggagcgtcgcgccggggcggagtgcgggcttgcg

SEQ ID NO: 441859 - DNA, 75 bp, Homo sapiens
tggtgatcatgctaagggtcttcatataccacgattaacagaggttcaaaccttgtactactcagctgatcacaa

SEQ ID NO: 441860 - DNA, 82 bp, Homo sapiens
tcttgtgggagcaaaaccaacgcctggctcggagcagcagcctctgaggtgttggagagcacaatggctgaacaagtccttc

SEQ ID NO: 441861 - DNA, 89 bp, Homo sapiens
tcgacaaaagaaccattgaaaaatttgagaaggaggctgctgagagctcacaatgtctctctgcaccaagctccatgactcaggatttg

SEQ ID NO: 441862 - DNA, 100 bp, Homo sapiens
ccagaccaagtgcatcttcagcctccacggtgccaggtctgtggaaagacttttatctataagcatggtctaaaattacatcagagtcttcatcaatcac

SEQ ID NO: 441863 - DNA, 100 bp, Homo sapiens
ggcattacctgtacccattcaccggcggctaccggcggcggcgcgcagcgtgtcaggcggagagacccgccgccaggctaccaagcagtttctcgaagag

SEQ ID NO: 441864 - DNA, 95 bp, Homo sapiens
cggaagtgcagctgcctcagttcttagcgcaggttattaatgctgcactggctttagcagcaaaaccacagagtaaactggcccaagagaacatg

SEQ ID NO: 441865 - DNA, 82 bp, Homo sapiens
gccaggagaggagcactttgaggacatggcctccgacgaggacatactcggtgaaatacctggagtgctcagctctcaccca

SEQ ID NO: 441866 - DNA, 83 bp, Homo sapiens
gtatgcaccagaagcagaggctcagaaacctggagcagtttgcccgtctggaagaggaaaaagacctcgatgaagttctgcag

SEQ ID NO: 441867 - DNA, 75 bp, Homo sapiens
ggatttgttaaggattccaagtaactcttatttggatccattctggaacagaatgaagaagccactgcacctttt

SEQ ID NO: 441868 - DNA, 100 bp, Homo sapiens
cgcgagggaggacccgacgcgcggcgtttacccagcgcagcgttccaccgctcgggtttggctgggcctttctgtatagagcccacaaacatcgtgaatg

SEQ ID NO: 441869 - DNA, 82 bp, Homo sapiens
cacagccaaggaacagaattagaagaaaaggaaccctggcctgagctcttcacagatggaatcacaaataaacttattggct

SEQ ID NO: 441870 - DNA, 50 bp, Homo sapiens
ccgtccgacagccaggcccgggagaagagctcttggagtccaggctgagg

SEQ ID NO: 441871 - DNA, 82 bp, Homo sapiens
attggacccatcagggcatcgctaagctgtaccataaagtgagccatgaagtacctggctttcctccgcaagcggatgaaca

SEQ ID NO: 441872 - DNA, 82 bp, Homo sapiens
aggacttcatgcccgccagcaaagccctgggcgctgcctatggcacagccaagagcggtaccggcattgcggccatgtctgt

SEQ ID NO: 441873 - DNA, 74 bp, Homo sapiens
gtcaccctgggccagttcaaggagctgctgaccaaaaagggcagctacaggctcgcgatgcctctacacaagta

SEQ ID NO: 441874 - DNA, 98 bp, Homo sapiens
agcagaagggaggctccaagacctcatcaacaattaagattttgaacaaagtagaggaaagaatgaaagaattgagtcaggacagtactgggcgggtg

SEQ ID NO: 441875 - DNA, 83 bp, Homo sapiens
tgctgctaccacggtgctgagacaactagacatggaattggtttcagtcaaacgacagagctgtaactgaagttcgtgaagtc

SEQ ID NO: 441876 - DNA, 83 bp, Homo sapiens
tgaaaaagacccaccttctatggcatgtaccagtgagaagccctaccactgcaactgggacggctgcggctggaagtttgcgc

SEQ ID NO: 441877 - DNA, 96 bp, Homo sapiens
tcctaccgggccaagctgcctctgaggatatttctggctgtcgccaactccatggctttccagggcacctttcacagccagcaggcattggaatat

SEQ ID NO: 441878 - DNA, 50 bp, Homo sapiens
gctgctgctcgggctgctcttggaggttattaaggatcctccaccaccac

SEQ ID NO: 441879 - DNA, 75 bp, Homo sapiens
agagggcgggaaagatttgagctacgcctgcgcagaggggtgagcccctccagactccgaataggagatcaagag

SEQ ID NO: 441880 - DNA, 96 bp, Homo sapiens
tctgcattcataactttgattggagaataaatggtatacatggtgctgtctttggaaaagggttctcatgtatcagccatcttctgtaagggtgcc

SEQ ID NO: 441881 - DNA, 75 bp, Homo sapiens
tgtgaagacgcacggtgccaggaccaagtatctggtggagaggtagtgaaaatagctcagctggcatccatcaca

SEQ ID NO: 441882 - DNA, 100 bp, Homo sapiens
tttggagcccctcctcatgctggtggaggcattggaaactgactggacattctttccacatgggctatagcatggcgattttgaatggcatcgtagctgc

SEQ ID NO: 441883 - DNA, 100 bp, Homo sapiens
ctgacttccggtggctgagcctctccgcagcttccggccaagttggactgcagctcgcggtttcctggcttctagagagtggatctttcctacaattgct

SEQ ID NO: 441884 - DNA, 75 bp, Homo sapiens
atgaaatgaagagttattctcaagctgtcacaggagagctctttgttcaatgcctagccacctattcctacagac

SEQ ID NO: 441885 - DNA, 116 bp, Homo sapiens
ggcgtgcggccctctctccgcgcggagccgagccggaactgcggcagtctctccctgccaggctcttcatccaagttttcggctttgtgagaaaccttaccatcaaacacgatggc

SEQ ID NO: 441886 - DNA, 90 bp, Homo sapiens
tgactattcagatcatccaagtggaggttcctacagagattcatatgagagttatggggtccctgtgaaggtgaccaacgtcaaggatgg

SEQ ID NO: 441887 - DNA, 100 bp, Homo sapiens
gtcaagatgaagacatggatgtcaaatactttgcacaggaagctataagtggtacaggatttgatggggatcagtgccttggagttcaactgctagagct

SEQ ID NO: 441888 - DNA, 90 bp, Homo sapiens
caaaaacaagagtccctctaaagcagctcaaaaggtcacgagaagagaatgccttctagatgcaaaatcacctccaaaccagaccacttt

SEQ ID NO: 441889 - DNA, 75 bp, Homo sapiens
atattattcttagatccggattcaccattgttcaggtctcctctgagcctccggcctccataagacccaaaacag

SEQ ID NO: 441890 - DNA, 89 bp, Homo sapiens
cgatgatcacgagtatatctttgaaggattttctatgtttgcacatgcccccctgaccaatggttacacatcattttggaatgactgta

SEQ ID NO: 441891 - DNA, 82 bp, Homo sapiens
ttccatctgtggaaggacctaccaaccagctgcctgtggaggaaccgattgtgtccacagatgaggtcatcttcccactcac

SEQ ID NO: 441892 - DNA, 90 bp, Homo sapiens
gcatattgcgagggctgctacgtgacccccagggtggccagcggcagagccagcagacacagcatttctccttgagcgggtctccatctc

SEQ ID NO: 441893 - DNA, 78 bp, Homo sapiens
cctgaagaagcctcctgcctccaaatgcccccatcgctatacaaaagccgcatctacaagtgcttgtttactggctcc

SEQ ID NO: 441894 - DNA, 100 bp, Homo sapiens
gaataatgcccagcggcccgccaggtcccggtcctagcagaagatgtgactcagactgcctctgggtggggctggctggcccacagatcctgccaccatg

SEQ ID NO: 441895 - DNA, 82 bp, Homo sapiens
gggaggacctcacttccccggggtgtaataatgttaactgagggccatcgatgcacccctcggagctaatagcggagatgag

SEQ ID NO: 441896 - DNA, 90 bp, Homo sapiens
cgggctcctgcgagaagcaagcggaacttcctgaggtatggcctcacaagtcttggtctacccaccatatgtttatcaaactcagtcaag

SEQ ID NO: 441897 - DNA, 90 bp, Homo sapiens
tctacatctcccacaggaagtgtcacacagcagtcaagtatgtcccaaacgtctggagtaactattcccagtcagaggcgctatgtgtat

SEQ ID NO: 441898 - DNA, 100 bp, Homo sapiens
tgcacaacagagggacaacaaaagcctcctacaagagtcctaccaaaaggaacagatgctgcttgtgttgctcagagtcacggaatctgtactgaagatg

SEQ ID NO: 441899 - DNA, 50 bp, Homo sapiens
tactacaaccagagcgaggccggatctggtggaacgagactgcaatgggg

SEQ ID NO: 441900 - DNA, 100 bp, Homo sapiens
tagacttctcacatctttttgtcacttcatcgtttgactggacagtaaagctttggacaactaaggaaaatcctgccttgcttcgttgggcctatgcaag

SEQ ID NO: 441901 - DNA, 100 bp, Homo sapiens
ccccagcccaggttcaggagaatcagcagataatcacatttttgcctggggcaatggtggtaatggccgcctggcaatgacccccacagagagaccacat

SEQ ID NO: 441902 - DNA, 100 bp, Homo sapiens
ctggttgttccgttgcgagctgcagctgcgatctctgtggtaggcccaggtcatcatcagatttgaaatatttaaagtggatacaaaactatttcagcaa

SEQ ID NO: 441903 - DNA, 100 bp, Homo sapiens
tcgccagtcctgctcgggacatttgccctcagtggtggggttactgctgtttcggaggcatcctgtacacgtcaaagaagagcccctcgatccagaggaa

SEQ ID NO: 441904 - DNA, 75 bp, Homo sapiens
tcctatccagagattagttttagttgcagcatggaacaattacagatcaatgaactgagccatgttcaaatccct

SEQ ID NO: 441905 - DNA, 100 bp, Homo sapiens
gtctgacattagcccctgtgcagatgactttccatgctattggaagctccattgaagccagccatgatcaggacatggatttgattgacatactttggag

SEQ ID NO: 441906 - DNA, 90 bp, Homo sapiens
cggcaacaatgatggagaaaaggaaccttcattaacagatgccattccctctcacccaagaggaggagatgttaaagtaacccatcttgc

SEQ ID NO: 441907 - DNA, 96 bp, Homo sapiens
ctggcgctacggtctggccgtcggctgcggcgccatcggttacttcttgctgcagattctgcgcaggatcggagctgtgggccaggctgtgtccag

SEQ ID NO: 441908 - DNA, 100 bp, Homo sapiens
atggtttccagtgcagcgcggagtgggcgatgccagcgtgccagctttgaaaagtccagccgcatttcatgagcagagaaggagcttggagcgggccagg

SEQ ID NO: 441909 - DNA, 101 bp, Homo sapiens
cttaccctccgggggtaaaagagatcaccgacaagatcaccacggacgagatgatcaaacgcctgaagacttcctctgctaaattacctcgctgccgacag

SEQ ID NO: 441910 - DNA, 100 bp, Homo sapiens
gagcagaggaaccacacgctgatcatggacccagatgatgtggtaccagttggccaaagaagagcctggtgttggtgcatgtgctttggactagcattta

SEQ ID NO: 441911 - DNA, 129 bp, Homo sapiens
ggaccacatctcgtctgtctctgttcccagtgagcacaggacatacgcccaacactaacagaaaaggcaacagatggctccctgcaaagtgaggattggacgttgaatatggagatctgtgacatcatc

SEQ ID NO: 441912 - DNA, 100 bp, Homo sapiens
aaggacaggcagcccagtctggtgtttggaatgacgacagtatgctcctgggcaacgtgctggtctgtgtgctggcccatcactttggcaaagaattcac

SEQ ID NO: 441913 - DNA, 124 bp, Homo sapiens
attgtgcagaaacacccacatacaggagacaccaaagaagagaaagacaaggatgaccaggaatgggaaagccccaggaattacagtttgaaaggctgacccgagagctggaggctgaacggca

SEQ ID NO: 441914 - DNA, 100 bp, Homo sapiens
caaaggtacttctttagaaaatctcatcatggaaatcacagcacctgattcccaaggcaagacagtatttgattttcatcaagcagctgatggtatccag

SEQ ID NO: 441915 - DNA, 100 bp, Homo sapiens
cagctgttgatagtggaatccctctcctcactaattttcaggtgaccccactcacagccttgaagtttgcagagctgacattaaaggccggcattcccaa

SEQ ID NO: 441916 - DNA, 75 bp, Homo sapiens
tcgctctgggtctccaggcccgcgaccgtccgccagtcgtcccgaggggccttcctgctgtgctggacgcccttc

SEQ ID NO: 441917 - DNA, 83 bp, Homo sapiens
cagtgtcagcgacagcagcggcttcagcgactcggagagacatttctactgcctccagcacctgccccagacagaccacaaag

SEQ ID NO: 441918 - DNA, 100 bp, Homo sapiens
gggttatggtgggaggagccgatactgagcttcttcctatttgccatgggaactgcaagcacatgttgaccagataactgaaatggcagcagtaatgagg

SEQ ID NO: 441919 - DNA, 82 bp, Homo sapiens
gtggcgcaactggtcttggtagcggaggcacccgaatgctgcccgggtgaggaacaagatcactcaaggtgaaggataatct

SEQ ID NO: 441920 - DNA, 100 bp, Homo sapiens
cgcggccaggcgattcggtgaagcgattcctgcaggcgttggttcccctctttgacctgaccactttacctgcattgtgaaggtactttttaccctactg

SEQ ID NO: 441921 - DNA, 100 bp, Homo sapiens
cacctcatgaaaatgatacgtgatttcagcattctcttttacagggaagaagatgaagtaccggacgatgagactctgaaccaaatgattgctcgacgag

SEQ ID NO: 441922 - DNA, 75 bp, Homo sapiens
caagcagattgtgtccgagtatgcagagaaggactgtgcatgcggcgcctgtggccctgcacctggaagctgggc

SEQ ID NO: 441923 - DNA, 75 bp, Homo sapiens
tggagatccaggattacgacctgttcaagcagagctattggaatcacaggcctgggccgaggccactggtgcata

SEQ ID NO: 441924 - DNA, 50 bp, Homo sapiens
tttccgccgccgccacagcggcaaaaaacatttaatccttgccttttgtg

SEQ ID NO: 441925 - DNA, 101 bp, Homo sapiens
ctgtgggtctggactgatctccatgtcctgttgtggggcttttacagcctttggggatcaagcatgaattgcaagcaaactgctacgaggaggtcaaggac

SEQ ID NO: 441926 - DNA, 100 bp, Homo sapiens
ctggatgacttggtggtggagtgtagagatatagttggcaacctcactgagttagaatcagagaggagaggagacgccgtgagcgggacgaccagatgta

SEQ ID NO: 441927 - DNA, 83 bp, Homo sapiens
agaaggtctctggagacatcttcagcagggggcgacgatggccttctgaggggctgggacaccagggtacccggcaaatttct

SEQ ID NO: 441928 - DNA, 76 bp, Homo sapiens
acaatattcctcagtaaatctcagacggacgcttttagtttggatgctgaacagcctgattatgatttggattctg

SEQ ID NO: 441929 - DNA, 100 bp, Homo sapiens
ggatttatgcaaactcgggccaaatgacaatgatacagttagaggacagatagtagaatcatctcccctgccccacaaacatgaaagaaaagacaagaga

SEQ ID NO: 441930 - DNA, 103 bp, Homo sapiens
cctcgctactcgcttgcctacccgccggcccgcgggtctacttcctcaaagcctacagacctggtacctggatttttgcccgagatgattcctaccaccttac

SEQ ID NO: 441931 - DNA, 100 bp, Homo sapiens
agaaaatatggatctttacatgttgaatccttgcagcactaaaatttgctcctgccagcagctgctccctgccacgggagtccccgttacccggcgccag

SEQ ID NO: 441932 - DNA, 75 bp, Homo sapiens
taggggaggattacccctctggcaagaagcgtgcggggaccgatggaattaaacaaccaccatgtcgagcaaaaa

SEQ ID NO: 441933 - DNA, 96 bp, Homo sapiens
gaagaatataacctggaccaagagggcaattgaaggaacagactaaaaatcgtgtcctggaaggaaactacaggtactaccagggattttcagtct

SEQ ID NO: 441934 - DNA, 100 bp, Homo sapiens
tggaagaagaccaagacccatcatgccccagtgagggccccaaggctgttgcagctcctcgacctgatcggttggtcaatcgcttgaagaatatcactct

SEQ ID NO: 441935 - DNA, 100 bp, Homo sapiens
ctgtacacacagagataagttggaaagcagatggcaaaatcatggctcttggcaatgaagatggatgcaagcctcccctatccagccccattctagaact

SEQ ID NO: 441936 - DNA, 50 bp, Homo sapiens
cttcaagcagcgccgcaccttcgcttcctgcagatttcacaaaactgcat

SEQ ID NO: 441937 - DNA, 89 bp, Homo sapiens
ccctggcgaccactgcttctccgtgggcagcattggcgaccagcgcttcacggttgccaacttggcctgttccatctcaaataatgaag

SEQ ID NO: 441938 - DNA, 98 bp, Homo sapiens
cggaactcaaaacagacccatctttggatcttcattcattaagcagtgcagaaacacaggaatgtatcctgtcaggtataatgtcagtgaatggcaag

SEQ ID NO: 441939 - DNA, 74 bp, Homo sapiens
gggaaaatctccccggtgactttcagagttgaagtattgataacaccaaggaactctatcacaatttgaaaaga

SEQ ID NO: 441940 - DNA, 75 bp, Homo sapiens
caaagggcagttccatgagtaccaggagagcaccattggagcggttcctcagtgactatggcctgcagtgggtgg

SEQ ID NO: 441941 - DNA, 87 bp, Homo sapiens
caagatgtgcttcgacatgctcaacagcctcatctccaacaattccaagctgtgaccaaagacttgaccactcaaagtccagctccc

SEQ ID NO: 441942 - DNA, 100 bp, Homo sapiens
tgaagcttgtgaccagttgggatggacaaaacccaccaagatccagattgaagctattcctttggccttacaagggatatcccagagaaggaaggaaata

SEQ ID NO: 441943 - DNA, 100 bp, Homo sapiens
actctgggccagtgcggggtggaggccctgactaccctggaagtagcaggccgcatgcttggaggcatcttccttgacttgatgcacctgaagaaacctg

SEQ ID NO: 441944 - DNA, 100 bp, Homo sapiens
acttgggctcgggaagccggcggaccgcgtcctgcgccggagcaggtagtaaacctattgatggcaattttgctgactgtggaagtgactcatccaaact

SEQ ID NO: 441945 - DNA, 100 bp, Homo sapiens
tctgaagacctattttactgataagaaaacacatctttacacactaaatgcacgaaggagagagagtgagaagtctctagaaaatgaaacactcaataag

SEQ ID NO: 441946 - DNA, 100 bp, Homo sapiens
gcagagctgaagtgagcggagccaccagagcaaacgaggcccctgagagctccacctagttcacaggataaaatcccacagcagaactcggagtcagcaa

SEQ ID NO: 441947 - DNA, 75 bp, Homo sapiens
gccaccaggtcaccctggaagagtcgctggccgaagctgttccatttcctccaagtcaccggcttacagcaaaag

SEQ ID NO: 441948 - DNA, 80 bp, Homo sapiens
gtacgtctgacccctgacgagcgcagcaaagagggctctatctggaaccaccagcgacctggcatgtcaccagggaaccg

SEQ ID NO: 441949 - DNA, 100 bp, Homo sapiens
gaattctaaagcaatgtgtgttcttgctggctcagaccactcagcttcattaacaggaaactttgaaaagcaccccaaagaactgatcagggggcccata

SEQ ID NO: 441950 - DNA, 100 bp, Homo sapiens
taccagcatccattgcaaaccttattaatctcagggaactggatgtcagcaagaatgaggaagaagcccctccagatggtgctgttgccgaatacagaag

SEQ ID NO: 441951 - DNA, 50 bp, Homo sapiens
tgcccagcggcccgccaggtcccgggcataattggaatatcatttggaga

SEQ ID NO: 441952 - DNA, 75 bp, Homo sapiens
taggttccacccttttctgggaacgtgagtatcaaccaagatttttacataccgttgctcaaaagagggctgcaa

SEQ ID NO: 441953 - DNA, 75 bp, Homo sapiens
gagtgttgggaagaggagcgcgtccccggggaaatgagggcgtgttggagagtttcctgggcactgctgtctctg

SEQ ID NO: 441954 - DNA, 75 bp, Homo sapiens
agatccttgagtgataaaggagtagagagctccaaacgagaatggaagccgctggaggaccgtagctgcacagac

SEQ ID NO: 441955 - DNA, 83 bp, Homo sapiens
ccgagcagcgccagcggccgagcgggcggcttcctggcctgggcgctccggtggcggcggagaaatgagccgtcagactgcta

SEQ ID NO: 441956 - DNA, 90 bp, Homo sapiens
ctttgtcgtcttcctctcagaatatgtgggtttatgcatgtatgatggttttcttcttgagcaacatgattgagaaccagtgtatgtcaa

SEQ ID NO: 441957 - DNA, 98 bp, Homo sapiens
gaaaatcgcttggttaaaacctgacacttttaacaggttgcgtaggaggctctgtctggtatcttgaaagaagaactatacaggactcccctcacaag

SEQ ID NO: 441958 - DNA, 75 bp, Homo sapiens
ccgggggatacaatcactacggacacaggattcatgcgggcgcaaaccagaagaagagggtgtggaagataacgg

SEQ ID NO: 441959 - DNA, 83 bp, Homo sapiens
ccattttctgccgctggacgcaagcgaagggagcaatctgaccccagcacatcactacccagactttagatttaagacatacg

SEQ ID NO: 441960 - DNA, 74 bp, Homo sapiens
agattcgcagtggtcgcttcttctccttggcgtgtgctcgcccactgatatcggtgtactccgaaaagggggag

SEQ ID NO: 441961 - DNA, 100 bp, Homo sapiens
cgagtgtggcctgtgtggactcgcatcttgcccgaagccgggcggaggagagctcaagctaagaggctattttagcctgcaaaaccccaaagaagactgt

SEQ ID NO: 441962 - DNA, 75 bp, Homo sapiens
gggaacattcctcataaagcgagtcgtcaaggagttgcaggtttctttacctccagaaagaagaatattggcccc

SEQ ID NO: 441963 - DNA, 84 bp, Homo sapiens
gtcaacttcctcaagtcgcccaaagcatgatgccttcttctgtagagtgggcgctttgcagaatacgtgttgaatgaaatcact

SEQ ID NO: 441964 - DNA, 89 bp, Homo sapiens
caagccaagctgaccaagaagccaaagaactggctaggcaaataagctttaaggggaaggagttcgagacacgactgaaggagaagaag

SEQ ID NO: 441965 - DNA, 78 bp, Homo sapiens
ttccctcagcctccggccttgtgtgtccgactcggcagcagtgtgcaaacttggatgaggaggcacaggctggtacca

SEQ ID NO: 441966 - DNA, 101 bp, Homo sapiens
taatggtgttcctggactaaaaggtggtcgaggaacccaaggtccgcctgagcagtatgtgtttatccacgatgcgatcctggaagcctgtctttgtgggg

SEQ ID NO: 441967 - DNA, 101 bp, Homo sapiens
ggaggccgagccgggatctcaggtcctcgggggcggcggccacgccaaggacgggtcattgagactgcctcttctcaaagggacactgtcctcagcacttt

SEQ ID NO: 441968 - DNA, 75 bp, Homo sapiens
ctgtcgatactgcatgcaccagcacctcaagactctgcagtctacacttctcctgttactgcttgtgcctctgat

SEQ ID NO: 441969 - DNA, 74 bp, Homo sapiens
acctttgtttcctagtgagaaccgagtcagtgctcttacccaggtctctaattaacagaagatggcaaagccca

SEQ ID NO: 441970 - DNA, 100 bp, Homo sapiens
agggagagggtgaccgacatcccaactaggtaaaataccatgaagattttgaaaaaacaaaggggagaggctttactcccgtcgtggacgatcctgtgac

SEQ ID NO: 441971 - DNA, 98 bp, Homo sapiens
gtttgaggagtctgccaaagcctaccatgagctcttggaggcgagcctgctgcgggaggctgcgggcctctcgggtgcttcttgtcggcttgaaagga

SEQ ID NO: 441972 - DNA, 89 bp, Homo sapiens
cagacatgatcaaagccatcaaccagggcaactatggcatcaacctgtgggaaatggcggagttcctgctgaaacaggacgtggtcaac

SEQ ID NO: 441973 - DNA, 75 bp, Homo sapiens
tacccgcacgtgtaccctgggcgcagggtccctgaaaaacagctgaatgatattgaagattgtgacctcaatgtg

SEQ ID NO: 441974 - DNA, 100 bp, Homo sapiens
attccaccacctccgccagttaagaggaaaaaggtcttccccagggaggtcctgaactacacagctgagaacatctgtaagtgggccttagaaaaccagg

SEQ ID NO: 441975 - DNA, 75 bp, Homo sapiens
ctcacctttaactctccttatgctgggtgaaaacaaaggtcctaggcctacttacaagcctccagtctcaaatta

SEQ ID NO: 441976 - DNA, 82 bp, Homo sapiens
tccttcagcctcctggcgcccatccgcagcaaggacgtccgcagcagggcgaccattgacgaggtggagacggacgtggtgg

SEQ ID NO: 441977 - DNA, 98 bp, Homo sapiens
tgggacaggtgacccggggcggtagcgagccggacggccttgcagactcattctgatgaaggaaagagcgtccctgtgcagctgcgtgtccttcagtt

SEQ ID NO: 441978 - DNA, 101 bp, Homo sapiens
aggaaaatacacctgttgttgagtaatctatgccagcaattatgacaatgttagcagaccatgcagctcgtcagctgcttgatttcagccaaaaactggat

SEQ ID NO: 441979 - DNA, 100 bp, Homo sapiens
gttcaaatatacaaagatctcctgagaaattgctgcaacacagaaaaccctccaggttgttaccgttacgcgcataccctttttggagacaaattatgca

SEQ ID NO: 441980 - DNA, 90 bp, Homo sapiens
cgttggtgtttggcacgcgccaccctctcttgctttggttccgccatgccgatgtaccaggttttgagcaaaattttggactgtgaagca

SEQ ID NO: 441981 - DNA, 90 bp, Homo sapiens
cagcaagatcggcaggcgagattgcctgacccaggcctgctcggccctcacaggtccttcagtgaatctacagacctattttctcaggag

SEQ ID NO: 441982 - DNA, 100 bp, Homo sapiens
aaagatggcgacggctccgcgacgttgaggccgcgttgggcggttcagactcagggtggtgttgctctcttgccattcgtggatgagcgaaggctacgag

SEQ ID NO: 441983 - DNA, 75 bp, Homo sapiens
ctcccagtccctgaaagcattaccgggttcgctaggctcacagctggggggtcccgttggtcatcactgtggcag

SEQ ID NO: 441984 - DNA, 75 bp, Homo sapiens
ccggcccttcctccccaactggcagcccgtgcagtgctgagatctgtatctgtggacctgaatgttgatccctcg

SEQ ID NO: 441985 - DNA, 82 bp, Homo sapiens
gtgtttttcgggagagcaaaggctgtgtctacggcagcctggggatataatggtgtcggacggcatgacaggcagcaatcct

SEQ ID NO: 441986 - DNA, 142 bp, Homo sapiens
gaggtgatggcaacggccaacttcggcaagatccagatcgggatttacgtggagatcaagcgcagcgatggtttttcgttggaatatacgttgcacatttatggcgattctgagtgtgagggcagacttctgccaggctcag

SEQ ID NO: 441987 - DNA, 75 bp, Homo sapiens
ggaatcctggtgtcctacagggtcaaggtgaagctggtggtgtctcgaggcggtatttcactggccttgaatgtg

SEQ ID NO: 441988 - DNA, 75 bp, Homo sapiens
aatgtggcaaaacgaaaaagctcaatgcctcagaaattcattgccgttggacataccagatggtcgaagagctcc

SEQ ID NO: 441989 - DNA, 82 bp, Homo sapiens
ccacgataacatttagcctggaacagagcggcactcggcctgagcggctggttgtcttcttgcctgccctgtgtcgtaaaat

SEQ ID NO: 441990 - DNA, 82 bp, Homo sapiens
agaagaagaagagaagaaagatgaaacttcgagctcctctgctactcccgagcccggagaggacccacgcgtgacccgggcc

SEQ ID NO: 441991 - DNA, 82 bp, Homo sapiens
ccacacgggcgagaagccctacgagtgcaacatctgcaaggtccgcttcaccaggtcagcccaaggccaaccccactgtcac

SEQ ID NO: 441992 - DNA, 78 bp, Homo sapiens
aaaacctcgctccggaaaggggacacctgccaccaaagtccttggcactgtcaaatggttcaacgtcagaaatggata

SEQ ID NO: 441993 - DNA, 100 bp, Homo sapiens
ccaaacgtcatcattaagttggagcagggagaggagctgtggataacgggaggtgaatttccatgtcaacatagtcctgttaacaagcacaagccctggc

SEQ ID NO: 441994 - DNA, 43 bp, Homo sapiens
gcgacgacttactggcttcatgttggaaaatggatatacctta

SEQ ID NO: 441995 - DNA, 75 bp, Homo sapiens
ccgctttggagggagaaaggagattgcctcggattccgacagcaggaatactcccccagttgcaagaggcgcagg

SEQ ID NO: 441996 - DNA, 88 bp, Homo sapiens
ccgacaagtgagactgtttgatatgtcaggagtgcgcctggcgcggcttccccggagcagccgacagtttcagagcgtcctcagccaa

SEQ ID NO: 441997 - DNA, 96 bp, Homo sapiens
tggcctccgaccacaaagacatccacagcagtgtttctcgggttggaaaagccattgataaggttttgacacaagggcgcatatcttcaaagcacc

SEQ ID NO: 441998 - DNA, 50 bp, Homo sapiens
ctgggcagcctgagtcccagtgatcaaagccttctagacaagctcagtgg

SEQ ID NO: 441999 - DNA, 97 bp, Homo sapiens
gaccccaagaagaccattcagatgggatctttccggatcaatccagatggcagccagtcagtggtggaggtttttgaagaggatgctctcagctggg

SEQ ID NO: 442000 - DNA, 90 bp, Homo sapiens
cttcaaagttatggcaagagatgagttaattctaaggtttgcctgcaatgagatttcattctctacatttaaaggacatcctttctgagc

SEQ ID NO: 442001 - DNA, 98 bp, Homo sapiens
aaactcttgggtccaaagaatagtgaaggattgcattctgcacgtgatttgctgggcatattggattttacccatcataggcgctgttctcttaggtt

SEQ ID NO: 442002 - DNA, 100 bp, Homo sapiens
ggaaggctctgcagggtctctccagaacctctctgctggcaactggaagttctcctctacctctttgccctccatgactatgaccagagtggacagctgg

SEQ ID NO: 442003 - DNA, 74 bp, Homo sapiens
gtctctctgctgcggcgcggggaccgctgtgctctcggttttcagctgctactaaagataatgagcataagcgt

SEQ ID NO: 442004 - DNA, 100 bp, Homo sapiens
actggatttcttcatggtgtccattttatttagcaaggttcaatacttcttcaagatcttggataattagtggtgtggaaagtaaagaagtcacaggttg

SEQ ID NO: 442005 - DNA, 75 bp, Homo sapiens
tgatgccagaggtcaacaaggttctggacaagatgaagtctttctgccagtggagacagggtttcaccatcttgg

SEQ ID NO: 442006 - DNA, 100 bp, Homo sapiens
tcaacgtctggatcccctcagtgtttctccggggcaaagcagcaaatgcattccacgtgtatcagatcaccgaagtggccttggagtacaacaactgtca

SEQ ID NO: 442007 - DNA, 75 bp, Homo sapiens
accatctccaagccctgtggcaaactgaccaagcccaaacctcaaggtgctggagaatctggtaaaagcaccatt

SEQ ID NO: 442008 - DNA, 100 bp, Homo sapiens
cgagaccggagcgccgctcgccgcagacttacttccccggctcagcagggaaaggtactccaaagattcaggtttactcacgtcatccagcagagaatgg

SEQ ID NO: 442009 - DNA, 120 bp, Homo sapiens
aaccttggagagaggagaacgaacatcttctggacctttgtccagtttatgcaaataccgtatacgtgataaacgtccctacaacatgatctttggaatgaactaagacaaaggaaactc

SEQ ID NO: 442010 - DNA, 50 bp, Homo sapiens
gctggctaagctcatcattgttactgtgaaaatgcctcgtgtaaaagcag

SEQ ID NO: 442011 - DNA, 75 bp, Homo sapiens
aagaaacccgcggcgaccacagccaaagcgggcgaaattgaagttggtggtggtcggaaagctatcataatcttt

SEQ ID NO: 442012 - DNA, 100 bp, Homo sapiens
aaggatttcaacatgcctctgacaatctctagtgaagaaccttttgtgatggtctctgaaaatgtcttgggtaagccgaagaaataccagggcttctcca

SEQ ID NO: 442013 - DNA, 90 bp, Homo sapiens
aaataatccagagatttccacagaaggactgggatgatacaccttttccacagggaattgagttggcatgtaatgaatttactacacatg

SEQ ID NO: 442014 - DNA, 85 bp, Homo sapiens
gccaagaagatcatcattaaggacggaggcacgttggaatcgaagcctcttaaaatggcagatgacttggacttcgagacaggag

SEQ ID NO: 442015 - DNA, 74 bp, Homo sapiens
ctgctggagttccgcgacaccatcttcgacaacatcctcaagaatcctcactatggatgggctcattgaggaca

SEQ ID NO: 442016 - DNA, 100 bp, Homo sapiens
cggagccatcgaaattcctatggatcgtgactcgaaaagccctgtttcctggtgactctgagattgaccagctctttcgtatctttcgtatgctggggac

SEQ ID NO: 442017 - DNA, 83 bp, Homo sapiens
ccgcagcactggatgaaaacaaggatggcaaggtcaacatcgacgacctcgtcaaggtatgacctggacgcgtgtgacattca

SEQ ID NO: 442018 - DNA, 100 bp, Homo sapiens
aatattccagaagataatgctgacatggccagacttgatttcaatcttataaggcatcagaacacaccatgatggctgtgacctaagaccctcaggaagc

SEQ ID NO: 442019 - DNA, 98 bp, Homo sapiens
ttcagcttttagagcaggtgtatgatcttttggaggaggaggatgaatttgatagagagaagaagctcattcacacagaagacccatttaatgatgaa

SEQ ID NO: 442020 - DNA, 100 bp, Homo sapiens
agcaatgagtgggctaaagtgaaacattcagcatccctgtctggtatgccttctcgaagcctggaatggtcccccctccgccgggagaagaaagccagac

SEQ ID NO: 442021 - DNA, 94 bp, Homo sapiens
ccgactcggtgattgaggacaagaccatcgagctcatgaaaaggcgacggcggattgacagaagtatgattggagagcccacaaactttgtgca

SEQ ID NO: 442022 - DNA, 50 bp, Homo sapiens
aggaatttgtggctggctggatctctggagaagtacagcatcggggagcc

SEQ ID NO: 442023 - DNA, 113 bp, Homo sapiens
cagcctctatgcccaccgctaccgggctgactttgctgacatcagcatcctcagcgatttctgacccaggggacaaactgggaagattgagcctgtggtcctgccgctgctct

SEQ ID NO: 442024 - DNA, 83 bp, Homo sapiens
gaagagctgccgtcgctgcagagaccccgctatggctatgtccagaaggcttcttgggggaatattgtcaacatcgagacccc

SEQ ID NO: 442025 - DNA, 75 bp, Homo sapiens
aagcagcatggggcgcaggaagcccctcccttctgcttccgaaatatgcgagccacccctctggctgctcctgcg

SEQ ID NO: 442026 - DNA, 73 bp, Homo sapiens
ccattcccaccaccacaaccagaaagtcagatcagtggaagcctctaaacctagaggagaaaaaacgttacga

SEQ ID NO: 442027 - DNA, 100 bp, Homo sapiens
attcaaaaacactatcccagggagtgcaagcttagagcgtctggccaagaatcagaggaagtgggaattgaatgatctggcacgggaccctccagcacag

SEQ ID NO: 442028 - DNA, 90 bp, Homo sapiens
ttttggtgctgaacctccacatcagaatgctggaagaagaactgagacagcagaaagaagcagcttgtttcaaggctcgtccaaacaccg

SEQ ID NO: 442029 - DNA, 75 bp, Homo sapiens
gatgccgagagcgagtatctgtgccatcagacaagatcagttgatcagaacagaaagctagctcggaaaatccta

SEQ ID NO: 442030 - DNA, 75 bp, Homo sapiens
cccatccttattgctacagatgtagcctcccgtgggctagacccccccaagacacatatgacccaccaccccatc

SEQ ID NO: 442031 - DNA, 75 bp, Homo sapiens
aagctggagtattttgagattggagaattaaggtatcattgcccagtgcctaagatcttttatgttcagctcact

SEQ ID NO: 442032 - DNA, 88 bp, Homo sapiens
aggatctggtgtaccaggcgaagctggccgagcaggctgagcgatacgacggtctgctcaccaggtggccagataccgcccacgtgcc

SEQ ID NO: 442033 - DNA, 51 bp, Homo sapiens
cacagagttagagagagggatggtgatccccgtcgaggtcaagatcaagat

SEQ ID NO: 442034 - DNA, 100 bp, Homo sapiens
caaggaaggcatcctgcagtattgccaagaagagccatgtctgaccaggacgtttggaagatcatatccatgccagaggctcttgtgaggagatgagttg

SEQ ID NO: 442035 - DNA, 75 bp, Homo sapiens
ctgacaccgaccaaggttttcaactcacctataccagtggagccgccaccaaaatgcagattttcgtgaaaaccc

SEQ ID NO: 442036 - DNA, 74 bp, Homo sapiens
atgggggaccacaagatcctcatcgacagatccggagttctgtaactcacttgttgtgtgcatcaaaagatttc

SEQ ID NO: 442037 - DNA, 97 bp, Homo sapiens
tgacttttggacagtccaagctatatcgaaggtttattcttcagtccaaggaagcaattcacagtcagctgttagagaagcagaaaatagcagaaga

SEQ ID NO: 442038 - DNA, 82 bp, Homo sapiens
ggaatcgtatcgtatgtccgctatccagaacctccactctttcggtcagcccaaggctgccccctcggtcactctgttcccg

SEQ ID NO: 442039 - DNA, 101 bp, Homo sapiens
agaagaagaggaggaggcactgcctgagcagtcagaaggcaaagaacagaagatcctccttggtttctggaggaacaagtttgacccgagccttacccaga

SEQ ID NO: 442040 - DNA, 88 bp, Homo sapiens
ttttcttcatactgcattaaaggttttagaaatactacataggaaactagaaaaactgcttttggaattatctctacagtgaagaaac

SEQ ID NO: 442041 - DNA, 100 bp, Homo sapiens
tttgttgagtcgaaagtgaaattttcctttggccaacgtgacagatgccttcaattaagttgcagagttctgatggagagatatttgaagttgatgtgga

SEQ ID NO: 442042 - DNA, 73 bp, Homo sapiens
gaacctctatgccgacatcgacgccgcctggcaggccctgcgcaccaggtatggacctgtctgccaatcagga

SEQ ID NO: 442043 - DNA, 75 bp, Homo sapiens
aggagaggcctctgagaaggaacccttgaaaatgatcttccaaaacccaagactactgaagtaattaggaaaggc

SEQ ID NO: 442044 - DNA, 100 bp, Homo sapiens
taatttggttatggccaaggaccgcttacaacttctagctaaaccaggtggacaggtgaaatgtcagtatatctctgctgtggataaagttatatttgtg

SEQ ID NO: 442045 - DNA, 100 bp, Homo sapiens
cagcaaccctatcatcgtctcctgtggctgggacaagctggtcaagattattttcgaaataccagtatttcgactccagggggatgttcatttctatagt

SEQ ID NO: 442046 - DNA, 100 bp, Homo sapiens
aaactaagtccagaaacccaatctgccatcgaacaagaaataagaatccttctaagggacttaaccaccaccatgtcgagcaaaagaacaaagaccaaga

SEQ ID NO: 442047 - DNA, 116 bp, Homo sapiens
gacacctcctggcttggcaagagaagactggaaaattataagagcactctctgagcttggaccaatcagccttgtgtttataggaattatttctgttcactgtatgcacatattgg

SEQ ID NO: 442048 - DNA, 75 bp, Homo sapiens
aagatcctggtcccctgctttaaccatcgaaaatgagggagctgcagtccatggctgaccaggagcaggtgtcac

SEQ ID NO: 442049 - DNA, 50 bp, Homo sapiens
ggcgaatgcaacccgaagagagagtgaggacatttcattaccatccagaa

SEQ ID NO: 442050 - DNA, 90 bp, Homo sapiens
gtgccttcgagtgcgaggcgaggtggctcctgacgctaagaggctacgaggaacaccggcaagagtatcgccaataagaacatcgccaac

SEQ ID NO: 442051 - DNA, 101 bp, Homo sapiens
ggcgccagccactcggagctaatccacaatctccgcagaatgaatctgaagtctgctgcagtaaaacacagaaggctttaaaatgttttcttgcataaaat

SEQ ID NO: 442052 - DNA, 121 bp, Homo sapiens
gttccggctgaccagttgcgtgtgattttcgcagggaaggagctgaggaatgactggactgtgcaggcagaaggagaagacagcctgaagaagatgcagctgatggagcttgcgattctga

SEQ ID NO: 442053 - DNA, 83 bp, Homo sapiens
gagaaggataagtcgaaggggaaggcgcctgaagaggacgaaggcttacctatttctactccatgtaccaccataaacaaagt

SEQ ID NO: 442054 - DNA, 76 bp, Homo sapiens
cagccatggagattagctgccgtctcaacgaggaaattacagaagacatccccgtgaagactttgaatatgaagac

SEQ ID NO: 442055 - DNA, 51 bp, Homo sapiens
gttatatcctccaggaatactggccagtggacgtgatgctgaatccaggca

SEQ ID NO: 442056 - DNA, 101 bp, Homo sapiens
atgttcatgaagattcaataacagttgcatttgaaaacaactctacattaatcatactcctccaccactgtccaagagtaaggagagagaaatggacaaga

SEQ ID NO: 442057 - DNA, 82 bp, Homo sapiens
gtactctttgccgtacccaccggagcctggcgcagcctccctctattaccaggagaaccaggtgcatcagcgcattgcggag

SEQ ID NO: 442058 - DNA, 50 bp, Homo sapiens
agcttccaccatgcccctggaaaaactgactatgaattgcaactgatgac

SEQ ID NO: 442059 - DNA, 74 bp, Homo sapiens
tggacatcgatagggatgcagaggatcagaaccggtacctggatggcatggtgaaatgacaatggatgctctgt

SEQ ID NO: 442060 - DNA, 74 bp, Homo sapiens
ctggtgttggaggaccctccctgcttcaggtaactcaactggacccaaataaatcattattggaggtaaagttg

SEQ ID NO: 442061 - DNA, 74 bp, Homo sapiens
gctgaatccagtaccaaaaacgtcaacaacagttttacggcccagtgacctggggaagaacgcaggggacacgc

SEQ ID NO: 442062 - DNA, 74 bp, Homo sapiens
gaacgtcaagcagaaaaagcttttcaacagggattaaagcctgtggtttccacagaagcaccacctatcatatt

SEQ ID NO: 442063 - DNA, 74 bp, Homo sapiens
atcaaagcagagatgatggggaatatgggagtgcatccgccccaacccttttccccctcgtctcctgtgagaat

SEQ ID NO: 442064 - DNA, 100 bp, Homo sapiens
aggtttcagagggaccgcaggaacatccgccccaacatcatcctggtgctgacggacgaccaggatgtggagctgggatttggtggcttttgaacatcag

SEQ ID NO: 442065 - DNA, 100 bp, Homo sapiens
cgtgggccccgtatgctgccgtggatctgatcagctgaggcctgagacacaggaccagatcatcacgaagtatgtatatgagctcctggaaaaggattgt

SEQ ID NO: 442066 - DNA, 88 bp, Homo sapiens
gccgtagacaccagctccgaaatcaccaccaaggcttgggcactgtttaaaggaaagttccgagaaggcatcgacaagccggaccctc

SEQ ID NO: 442067 - DNA, 90 bp, Homo sapiens
agttgctgcttttccaggaatgaaagacattcaggatcaacttgaacgaatatttctggttggtcatcattttatccaagcttgactgtg

SEQ ID NO: 442068 - DNA, 97 bp, Homo sapiens
ctttggaagcctctatgttgtgactccacttgataagtattctaccttgtaaatactgttatttgtatatactgtaaatgatgacatcggtgggcac

SEQ ID NO: 442069 - DNA, 99 bp, Homo sapiens
tagatcttgtggccaagagttcagaccgtggcgaagtggagagtgacatgcagttggatggcggtgactgcgtggtttgtttgtaaaaacaatggtgtg

SEQ ID NO: 442070 - DNA, 74 bp, Homo sapiens
ctgcttttgatgtctgacaacgtggatcgttgttttgaaacggactaaataggaatagtttgccaactccacag

SEQ ID NO: 442071 - DNA, 112 bp, Homo sapiens
cctgtatccccttttgtgaaaacaacaccagaagaaattgccaacccttgcagcagtctctggtcccagcccaccccatggcccctcccagtcccagcaccaccagcagtaa

SEQ ID NO: 442072 - DNA, 90 bp, Homo sapiens
cattcttgcagctgcctacaaattcaagagtgaccagggatggaagcttccctcatgctgcccttctggaaggtgccttcccctgtgctg

SEQ ID NO: 442073 - DNA, 88 bp, Homo sapiens
cctgaggaggatcataaggcctgagctcaggccttacctcgtgcacatacctagggctgacaggacaactggatcagtttcattaaaa

SEQ ID NO: 442074 - DNA, 100 bp, Homo sapiens
agaagaagcacccagatgcttcagtcaacttctcagagttttctaagaagtgctcagagaggtggaagctgaggcggcacctggagctgaaagagaaggg

SEQ ID NO: 442075 - DNA, 100 bp, Homo sapiens
gagtgaggccgaggccgggaggccgtgcccggaggtctgtagcatctctgtctgttggagaaggcacaggtgtcagagcaccagtcagaacagcaacaga

SEQ ID NO: 442076 - DNA, 80 bp, Homo sapiens
agttggaagcagccgatccagcctgcggagcctgtggggcaggagtgagctgagtcgacagaaacttcatacccaagagc

SEQ ID NO: 442077 - DNA, 75 bp, Homo sapiens
cacagcattcctgaaatacatccaggaaagacatggagattctcttaaaaagagtggctacacacttataaggaa

SEQ ID NO: 442078 - DNA, 96 bp, Homo sapiens
ggcacacatggttaaggaacaggaggaaaccattcagaggtggctgctgccaaggtggaagccgggcataaccgccgccacttcaaggcggcctcc

SEQ ID NO: 442079 - DNA, 74 bp, Homo sapiens
ggaagctctttgaccttctggatgtccttgagttcaaccagatttcaggtatgctgctgaaagtgggaatcctc

SEQ ID NO: 442080 - DNA, 75 bp, Homo sapiens
tcagtggtgttaaggattccaacaacaattccgatggcaaagccgttgccaaggccactgaaggaccttgtaaca

SEQ ID NO: 442081 - DNA, 100 bp, Homo sapiens
cggcagacgggcgtcttctacctgacgctcgtcctcatcctggtcactagcggactcttcttcgccttcgagtatcgagaaccttccctgcgaacttcag

SEQ ID NO: 442082 - DNA, 82 bp, Homo sapiens
tgaatgttgtgaccactaatttgaaatatggctacacacacctttctgcaggagagctgcttcgtgatgaaaggaagaaccc

SEQ ID NO: 442083 - DNA, 100 bp, Homo sapiens
cgctacggaccttaaaatacccgcaacagccccttcgtcccaagggccccaaggaccaaaagggcagaaaggtgagccttatgcactgcctaaagaggag

SEQ ID NO: 442084 - DNA, 100 bp, Homo sapiens
aagaatatctggttattatcaggttcacgccaacagtacctcattgctctttggcgactcttattgggatttcccagatgacccaggcatgcagtgggac

SEQ ID NO: 442085 - DNA, 89 bp, Homo sapiens
atggaatcggtcctggaggacagatttgcaagtaccatccctttttggggccttactttgcacctccagcatctgggaaacaatgtttt

SEQ ID NO: 442086 - DNA, 82 bp, Homo sapiens
gagagttttctagaagcctgtcgaaaaatgggggtgcctgagagctccacgcaggagatcggtgaggagctgatcaacggag

SEQ ID NO: 442087 - DNA, 96 bp, Homo sapiens
ctgcctctgttgtagaagacatgtggtgtatataaagtttgtgatcgttggcggacattttgctcatcatgtcactacagtgaacagtacaaattg

SEQ ID NO: 442088 - DNA, 100 bp, Homo sapiens
cacggacaaagtggggcgcgtgaagctcctttctccttccatcctgaagccctttccgctgtggacaggaaaacaggaagtaccattggcacaaactgca

SEQ ID NO: 442089 - DNA, 100 bp, Homo sapiens
tgcttcaccttcccctgacctgagtagtcgccatggcacaggatattatcaactcactggtaacaacagtattcatgctcatcgtatctgtgttggcact

SEQ ID NO: 442090 - DNA, 50 bp, Homo sapiens
gatcatcctgctgctccccggaagaatatttcactgctacatggagtact

SEQ ID NO: 442091 - DNA, 93 bp, Homo sapiens
ccgccgcgccgcgctccaaccgcctcctcctcctcagtaacgcgggatcatcatgcctagggttcataacataaaaaagtctcttacacctca

SEQ ID NO: 442092 - DNA, 75 bp, Homo sapiens
ctcacccacgaaaggcatctgtcccaagcaggagaacattgcaggctgaccaactgactgaagagcagattgcag

SEQ ID NO: 442093 - DNA, 100 bp, Homo sapiens
gactagacctgaagtttcaaagtgcatgcaagatatgggaaatactaaagcaagactactctatgaagccaatcttccagagaactttcgaagaccacag

SEQ ID NO: 442094 - DNA, 80 bp, Homo sapiens
gattattgagcataagattgtcatagctgatgtcaagttggttgctgatttccaaaggtgttggatcctgaacaaaacca

SEQ ID NO: 442095 - DNA, 75 bp, Homo sapiens
caaactgctagttaccaagctgaagcacttccagctccggagaaagaccatttatctgcgaattatgtggaaatt

SEQ ID NO: 442096 - DNA, 146 bp, Homo sapiens
aaatcttaaccttcaaccatctggggaaaaggcaaaaatcccatctaccgcaactctcagttcgagagtaaagaatctctaggactgcgtagtaaagtgctgaggaaaattgaagagctcaggaccaaggttaaatccctttcttc

SEQ ID NO: 442097 - DNA, 90 bp, Homo sapiens
gcgtcatgcgcagcatgcgcaaggtctgctcaccaggtggccagataccgcccacgtgcccccatcattgctgtgacccggaatccccag

SEQ ID NO: 442098 - DNA, 101 bp, Homo sapiens
cgggagcggagacctcgctgcgctcatggcgtcgcccgggtgactacacttgtcaacacaagcaacaaaggcccatctggtaaaaagaaagggaggtcaaa

SEQ ID NO: 442099 - DNA, 74 bp, Homo sapiens
atgccgggaccccttagaagcctagaaatgaacctgcaaccatggtcgtgccactagccagctcggaagcccag

SEQ ID NO: 442100 - DNA, 75 bp, Homo sapiens
tcgtcttccggacagactatggtcagggtatttgaagtataccatacaactgttttgaaaatccagcgtggacaa

SEQ ID NO: 442101 - DNA, 75 bp, Homo sapiens
tcgggagctggctgaagatggctactctggagttgagtctctagtgatccctgaaaagttccagcatattttgcg

SEQ ID NO: 442102 - DNA, 88 bp, Homo sapiens
aaggtgaagaccagtttgatgatactgtggaacactccctagacaataaagatggtcctgtctgccttcaggtgaagccttgcactcc

SEQ ID NO: 442103 - DNA, 100 bp, Homo sapiens
gccctcaccgccctcaccacccctatccagacggctgcccttcaagtaccacatggcctgtatgagaagaaaaagacctcaagaaagcaacgaaaggaac

SEQ ID NO: 442104 - DNA, 100 bp, Homo sapiens
gtcctgacagattcagcaacactgagtttgacctggatgtggttgctgtggtgaacgacacagtcggaactatgatgacctgtggctttgaagaccctca

SEQ ID NO: 442105 - DNA, 98 bp, Homo sapiens
gcaaaagcacaaggattctcgctgtgacagagacaacaccgagtatgagaactacccaggtggatttagacaagtaacagctgctcagcttcacctga

SEQ ID NO: 442106 - DNA, 75 bp, Homo sapiens
tttaaatgcagcatctgcgatgtgaggaaaggcacctccaccagtttgcgtgtgaacttggacatgggcaaagcg

SEQ ID NO: 442107 - DNA, 75 bp, Homo sapiens
gggaaacaaggcttccagtgccaagatgccttcaattaagttgcagagttctgatggagagatatttgaagttga

SEQ ID NO: 442108 - DNA, 112 bp, Homo sapiens
tgtttctgttcactgtaaaaagaaacacaagcgagaggaggaggaggatgatgaatgactttgaagaagccaaggaaattttgacaaagatgagatacttttcaaatataga

SEQ ID NO: 442109 - DNA, 100 bp, Homo sapiens
gaaataatgtataaccaggctgtgcagttattccacgtgtgaatatatcacctagcatgaccttgaggatagattccctataaggagcccctgctggtgc

SEQ ID NO: 442110 - DNA, 100 bp, Homo sapiens
cctggtgggaatgaaggttctacagaaagtcaccagaggaagcaagctgtgtaatgttcttgatcgactaaatgtgattgcagaaagtgtggtgaagaaa

SEQ ID NO: 442111 - DNA, 98 bp, Homo sapiens
ccggctcagcgtctggctgctgctgctgcccgccgcccttctgctccacgaggagcacagccgggccgctgcgaaggagcagcagccaagctggacag

SEQ ID NO: 442112 - DNA, 83 bp, Homo sapiens
gtttttcctgtcgtacgtgggacaggccacgctgtccgtccgcagtaccgacgcctgcaggttttaaaatcaaagatgggaaa

SEQ ID NO: 442113 - DNA, 75 bp, Homo sapiens
accacagaagcaaaagttctcactcaaactgattcccaggactccggctctctctgcttctgtttccggtggctg

SEQ ID NO: 442114 - DNA, 50 bp, Homo sapiens
aggaggtatgcctggactgggccagaggaggaaaaccttgagaccctgag

SEQ ID NO: 442115 - DNA, 98 bp, Homo sapiens
acgaggacctgcaggtggaagtgatgaaggaggaattaattccaatgagtgtgaaaatgtatcaagaaaaaagaaaatgtcagaggaatttgaagcca

SEQ ID NO: 442116 - DNA, 83 bp, Homo sapiens
gtctcagtcagcatgtctatgagcagttcctgctgcagcttcagattataagcgccatggctatggctagtgttaaattgctt

SEQ ID NO: 442117 - DNA, 83 bp, Homo sapiens
ctttgccgatccgccgcccgtccacacccgccgccaggtgctcttacagcctgttccaagtgtggcttaatccgtctccacca

SEQ ID NO: 442118 - DNA, 98 bp, Homo sapiens
ggaatataatcctgaggtgtttgacaaaacataccaattcttgaatgacatccgagcgaaagagaaagaggtggataatattaatgcagctgtgatgg

SEQ ID NO: 442119 - DNA, 101 bp, Homo sapiens
ggagcggcaggacgagcatggctacatctcccggtgcttcacgcggaaatacacgctacctgggctacagctccgacagccctcggccccatccctacgac

SEQ ID NO: 442120 - DNA, 98 bp, Homo sapiens
ttttgagccttacggagccgtctaccagatcaacgtcctccgggaccggagtcagaaccctccgcagagtaaagtgaaaatgcctcgtgtaaaagcag

SEQ ID NO: 442121 - DNA, 75 bp, Homo sapiens
tcctggctgaagccacggctgggacaggaagccacaaaaaccatgagctgttttccaagagcttcatctccatgg

SEQ ID NO: 442122 - DNA, 75 bp, Homo sapiens
gcaacaggaaagtctaagggatatggctttgtctcctttttcaacaaatgggctgaacataacttctttttttca

SEQ ID NO: 442123 - DNA, 75 bp, Homo sapiens
gctgttgctgccgccatacgcgctctccctgtttagcttttgtctgatccaaactatggggtccatcttccggct

SEQ ID NO: 442124 - DNA, 97 bp, Homo sapiens
ttgacagttgaggagtcctggtgaggttttgctgttactgctcagtgtagtcacaccttgaataagaaatggaaaaccttgggatgttgataaagct

SEQ ID NO: 442125 - DNA, 100 bp, Homo sapiens
tcgctgcttcccagagctttcacgaaggcaccgacgtcatcatgctgaccaccaatcagatccgtaagggtttacactgtgattttgcttgcctgatgtt

SEQ ID NO: 442126 - DNA, 100 bp, Homo sapiens
ccaattcctcaaaagcaggaaatactggtggaaccagaaccattatttggtgaaatgggatttgaccgatacaaaatggtggtgcaagtagtgattggag

SEQ ID NO: 442127 - DNA, 51 bp, Homo sapiens
caataatgaaagctcttcagagtcttctcacaagactttcaggattaagcg

SEQ ID NO: 442128 - DNA, 83 bp, Homo sapiens
aaaagagaatgtaacatcatgcttccggcctatggcatgtctgcgttacctttaaatctgataaaaggcactagaagcgctgc

SEQ ID NO: 442129 - DNA, 76 bp, Homo sapiens
gtcgctgctgatggtcttcgccgatggggccttccccgagggccagctcttccgaggctccagcctgcttttccgc

SEQ ID NO: 442130 - DNA, 98 bp, Homo sapiens
gcagctcggccagagtggtagaaatgtcctggtgtagattattcagctgattgaaggcaaagcctctgcttatgtatttgcaagtcctggttgtaaga

SEQ ID NO: 442131 - DNA, 82 bp, Homo sapiens
tgagtaccaggaaaaggagatccagcggctcaacaaggccacactggtgtgtctcataagtgacttctacccgggagccgtg

SEQ ID NO: 442132 - DNA, 89 bp, Homo sapiens
gtgatgcttccgtctcagccttctgagtagctgggacaacagcggtcacagagatctcagcatcatcaaggaccaactgaacgtgtcca

SEQ ID NO: 442133 - DNA, 95 bp, Homo sapiens
cctcgccatgccggcccggcggctgctgctgctgctgacgctgctgctgcccggcctcggggccaagtcctgtatctgccatgtctgtggcgtcc

SEQ ID NO: 442134 - DNA, 75 bp, Homo sapiens
agaaaatcaaaagaaacttttgcccttatcagtaacacctgagggccacctgaatacctgcagcttcaatgtcat

SEQ ID NO: 442135 - DNA, 99 bp, Homo sapiens
acgaaaggcatttttactgctgaactgtcaagtaatccacctctggctaccatccttattcctcctcatgctcggattcaagcagctgcttcaaccccc

SEQ ID NO: 442136 - DNA, 100 bp, Homo sapiens
agactattcttctgcaggtggatcagaactgtgttcgcaattcttacgatgtcttctctttgctacgatacagtttatgtaacttgatggaagaaaatgg

SEQ ID NO: 442137 - DNA, 50 bp, Homo sapiens
gaagcactgaaattacctctcagtttgctatgaagattatggaatcagag

SEQ ID NO: 442138 - DNA, 90 bp, Homo sapiens
aaattgagctggaatttggtgaactccttcccagtccatctggttggtattgacatctttactgggaagaaatatgaagatatctgcccg

SEQ ID NO: 442139 - DNA, 100 bp, Homo sapiens
cttgccatctttcttacaacgggcattgtcgtgtcagcttttggactccctattgtatttgccagagcacatctgagtcaagaaattggagcatggctat

SEQ ID NO: 442140 - DNA, 97 bp, Homo sapiens
agggcgtgcgcggcacctgcgaagatgcttccctgtgcaagagtgatccgggccaaggtggtggggaagaagctggtaaaggaggggcccttcggca

SEQ ID NO: 442141 - DNA, 101 bp, Homo sapiens
caccctggccgtgctggtcatgcaggatcccagcatgaaccttcagcaggttcccagtgcccccgacaagcccctgctggtgtctccatctcctgccaagc

SEQ ID NO: 442142 - DNA, 100 bp, Homo sapiens
cagagatactggatatgactggtttgagcaactgcttcaaaacgtacgacaacaattccacgatgccaaattcatggcagacattgatctggatccaggc

SEQ ID NO: 442143 - DNA, 82 bp, Homo sapiens
agaaattagaccattttcttcgtgagaaagaaatcgacgtgctgttttcatagggcagaggtggaggagacactgaagcgac

SEQ ID NO: 442144 - DNA, 101 bp, Homo sapiens
tctcagtgccattgtgatgatgaagaaccgcagatccaagactctccaacatgtgccttctgaccatacaaatgaaacttccaacagtactgtgaaaccac

SEQ ID NO: 442145 - DNA, 90 bp, Homo sapiens
gatgttcagcagcgcggcagagtcatggggaacggtgtgctgctgaggactgtcttggaccctgtcactggggatttgtctgatactcgc

SEQ ID NO: 442146 - DNA, 75 bp, Homo sapiens
cagcagcactgtggaggccgtcctcggtgctggagaatctggtaaaagcaccattgtgaagcagatgaggatcct

SEQ ID NO: 442147 - DNA, 75 bp, Homo sapiens
gcgagccctagcgctgcggccccgcttcctggcggccgggtcccaggctttgatgagaaatccagaagaaagagt

SEQ ID NO: 442148 - DNA, 51 bp, Homo sapiens
agtgatggtcccaccgcagcgatatctcttgtaaatgtgtaaacacggatt

SEQ ID NO: 442149 - DNA, 100 bp, Homo sapiens
agccttgtggccctgactgggatggggttactgagccggctgtggcgactcacctacccgcgggctgtggtgatcatccagcagctcgtcaacggcatca

SEQ ID NO: 442150 - DNA, 90 bp, Homo sapiens
gcttctgcaccggcctcaagttggctacattcgcggtggagacacagagcaccagctcagaggagatggtgcccagctcgccctcgcccc

SEQ ID NO: 442151 - DNA, 100 bp, Homo sapiens
tttaaagccctaaatgccatgcgtatctttaagaaattttatcttttgaaacacgttctgattaaccaagggtgaccaagaatatggcccaggtgaccaa

SEQ ID NO: 442152 - DNA, 80 bp, Homo sapiens
agaagtcagaaaacaaggtgtctgcaggaccaacctctcctctggatgctctaggtgaccaagaatatggcccaggtgac

SEQ ID NO: 442153 - DNA, 100 bp, Homo sapiens
ccgaagaagaggcccggactcatacagagattgaaatgttccttagaaaggagcagcaggtactccaaagattcaggtttactcacgtcatccagcagag

SEQ ID NO: 442154 - DNA, 75 bp, Homo sapiens
ccggagcgtcccagctgcgaggaggcgcctgtgtctggcagagctggtgtgagacgagacaatcctgccccgccg

SEQ ID NO: 442155 - DNA, 90 bp, Homo sapiens
gattaatgataaaatttcatggagaagaaggccttgactacggaggggttgccaggtcaatgagtggtcattgaagataagaaaggaaat

SEQ ID NO: 442156 - DNA, 100 bp, Homo sapiens
gtggtcagtggctagactgtagcagccgagaacctcggcatcaccagtggcttcgtgaagcccaagctgggaattgaatgatctggcacgggaccctcca

SEQ ID NO: 442157 - DNA, 74 bp, Homo sapiens
gattccaagtaactcttatttgccatctgtgagaaagacacactgcagtggaaggaaacacaaagagaatgtga

SEQ ID NO: 442158 - DNA, 75 bp, Homo sapiens
tcatctgtaaacctgataacactgcatgaaatgttagaggtacatcaggaacgtctctatcaagaatacaatttc

SEQ ID NO: 442159 - DNA, 75 bp, Homo sapiens
ttctcagaaagcagaggctcagagcttggagacagacgctcaatctgaaattgaagtgtctgtctctgcaaggaa

SEQ ID NO: 442160 - DNA, 100 bp, Homo sapiens
caacgtctctctgccgtgaatcattcctgcagatgaaaaagtgtgacttggcagctggacgagattgaggagctgcgggccgagatgctggagatgcggg

SEQ ID NO: 442161 - DNA, 103 bp, Homo sapiens
cctcagcctcccgagtggctgggactacaggcagcccttggctggtccctgcgagcccgtggagactgccagagatgtcctctttcggttacaggaccctgac

SEQ ID NO: 442162 - DNA, 85 bp, Homo sapiens
cgcccccccagacaagatggacaccgcggaggaagggcacgctatcatcactaactacttgttgaactatttccctggtcttgac

SEQ ID NO: 442163 - DNA, 83 bp, Homo sapiens
cagagccggtgatatgatctgtcctgaatgtggcttggttgtagattattcactgaccagcgctgacctgtcagcccttcaag

SEQ ID NO: 442164 - DNA, 88 bp, Homo sapiens
cgaagtaccgacccgagttatgcccaccctccaactttgcgacggaaatgtgtcatcgaaagccagtttgtgaagtgtggatatgcag

SEQ ID NO: 442165 - DNA, 75 bp, Homo sapiens
atgacataggtcacctcattcatgaaggcctacagaagggcaagaatatcacggcatgggcatgagtagcttgaa

SEQ ID NO: 442166 - DNA, 96 bp, Homo sapiens
aagtgatgctggagaattacaggaatcttctctcattggactgtaggatgccaatgggactaagcactggtatcatatctgattcacagatcaagg

SEQ ID NO: 442167 - DNA, 80 bp, Homo sapiens
gaaaagccgcagaattagatcgtcgggaacgagaaatgcaaaacctcagtcaacatgactgtcttctgaagattgatgtc

SEQ ID NO: 442168 - DNA, 96 bp, Homo sapiens
gggcaagctgcgtccgcccaccccgcccatggtcatcctggagccgtacgtcctctctgagctctcctccaggtcccggggctctgcatcctgagc

SEQ ID NO: 442169 - DNA, 80 bp, Homo sapiens
ccagggaaccctggtcaccgtctcctcaggctccaccaaggacctgatcgagacttgctgcgcagccggacagcagtggg

SEQ ID NO: 442170 - DNA, 98 bp, Homo sapiens
cagcaccacgtggagaacgttcgagtgagggcttccacaactaccaccactcctttccctatgactactctgccagtgagtaccgctggcacatcaac

SEQ ID NO: 442171 - DNA, 90 bp, Homo sapiens
ctcggagaaacaggcgccgcgggctccgcgcccggccggacccgggcccgagctacgagttccagggagctctgtcctggtgaccgtgcc

SEQ ID NO: 442172 - DNA, 138 bp, Homo sapiens
attaaagataccagatcatgtcagagagagagcttggttaacttgggagaaagtttcatctgtggatggagtattggcatccggcaccccgaggagctgtccctgctccgggctcctgagaagaaggagaagaagaag

SEQ ID NO: 442173 - DNA, 50 bp, Homo sapiens
caagtgcattgcctttggaaacgaggtctgcactacagagcttacacaag

SEQ ID NO: 442174 - DNA, 80 bp, Homo sapiens
gccttctgcccctgatcgcttggttttccttgcagtcgcctgctgctgtcgtcgggagggggcgccctgctctggctcag

SEQ ID NO: 442175 - DNA, 100 bp, Homo sapiens
ttatacaaaaagctcccacttaaaggcccaccagaggactcacacagggaaggagattacagcagaaacttttatggagaagttggacaatggtgccttg

SEQ ID NO: 442176 - DNA, 74 bp, Homo sapiens
ggacccggttccccggcccacagtgggggtgtgcaaacccgagagaactggctggcccccaagaggaccctttc

SEQ ID NO: 442177 - DNA, 100 bp, Homo sapiens
tggcgctggtggggggagtcctcatcatcatcgcctcctgcgtcatcaacttaggcgctgtcgcctggttgggcccggaaatgggacgtcgcgctttctc

SEQ ID NO: 442178 - DNA, 88 bp, Homo sapiens
tgctttcaccttctaaaactctacagtgacagagtgggtgcagtggaccccatcatggagaagttcaacacatccagcctacgaccag

SEQ ID NO: 442179 - DNA, 75 bp, Homo sapiens
acacctgttgtttgaaagctctcagcgggacaatgctgacccagcatgtgcagtctttgccaacaaaaaaaatta

SEQ ID NO: 442180 - DNA, 100 bp, Homo sapiens
ccttcagaacctatacattgcatcgtttgggcaaagtacttgttcaagaatctttgtctgaagtggaagaaaaatacaagaaagccatggtttccaatgc

SEQ ID NO: 442181 - DNA, 74 bp, Homo sapiens
cttggtccccgcgcagccccagctcaacgtgtgcaactgggcggtcatggagcatcagatccatgctgctgctg

SEQ ID NO: 442182 - DNA, 50 bp, Homo sapiens
ccggcacggtggccacgctggaaaataaacagagttgtctttgttggaaa

SEQ ID NO: 442183 - DNA, 80 bp, Homo sapiens
ggactgagtcctgcaggacacagcaggaagaaccggacccggcgaacctggaagtggaccatgatttcttccaggacaag

SEQ ID NO: 442184 - DNA, 51 bp, Homo sapiens
gcactttgacaccctgctagatgaagagtcaagtaccattggccaggatca

SEQ ID NO: 442185 - DNA, 90 bp, Homo sapiens
caactctccgggcggccgcacctgccaggccaactgtgatttgagacggcagattgatgaacagcaaaagatgctagagaaatacaagga

SEQ ID NO: 442186 - DNA, 75 bp, Homo sapiens
ctgagggcacgtgtttgcggttcagccctttgatgaccgcagcagaaggaccctctattgtcccaggcctgtgtt

SEQ ID NO: 442187 - DNA, 51 bp, Homo sapiens
gccggagtcgtcatcggtcctgacggagggctccaaacgaatcctgcggtc

SEQ ID NO: 442188 - DNA, 74 bp, Homo sapiens
gaggtaaaggtcaatgcgtaggggtagagtaaggcactacctggcagcaccatctaaacctgtatcatctgctg

SEQ ID NO: 442189 - DNA, 100 bp, Homo sapiens
gactttgatgatgtggaggaggatgaagggctagatgacttggagaatgccgaagagctccaaagacaacaggccctccctctgccctcccgtctgtgag

SEQ ID NO: 442190 - DNA, 90 bp, Homo sapiens
cttaaatctgtcgtttgaatttaggaccacctcggttttgtgatgaaggaacctgtacagataaagccaatattctgtatgcctgggcga

SEQ ID NO: 442191 - DNA, 101 bp, Homo sapiens
tttttattaaggctgttcatgtgaaagataattctaaggcactgatagcatttctggcatttctgattattgtgacatcaatagccctgcttgttgttctc

SEQ ID NO: 442192 - DNA, 95 bp, Homo sapiens
gtactacacaaccgtctccagccttggtctgagtggactgtcctgcaggcagagatctggctccacaaggaggcccagaaggagggctggagcaa

SEQ ID NO: 442193 - DNA, 76 bp, Homo sapiens
ctctctcccattctgttttgccagcaagaaagtacgactatcagcagccacaaaaccaagctgacagtgtgcaact

SEQ ID NO: 442194 - DNA, 101 bp, Homo sapiens
caggcgggacgcgcacagtccctccacgcggaaagaagtaccttcgccggtcaccggctcctgcaggaggtggggacctcaggcgacggcagctgggtgag

SEQ ID NO: 442195 - DNA, 50 bp, Homo sapiens
cttgtggaccacagtgttaccagcatttgagtctcagtgccttcgctgac

SEQ ID NO: 442196 - DNA, 82 bp, Homo sapiens
ttggaccgagccgatcgccgcggggcagttcgggccggctgtcctggcgcggctacagcatgctggccatagggattggaac

SEQ ID NO: 442197 - DNA, 83 bp, Homo sapiens
cataagtggaattttggagatattcaaagcttcaaaagcagtggactgtcttttggattcaaagtgggcaaaggccaagaaag

SEQ ID NO: 442198 - DNA, 95 bp, Homo sapiens
tcttacaacatggcagacattgacaaggacaatgactcattcttcccaggacactggttcttgtggcattcaggaagatggaaagctttatgtgg

SEQ ID NO: 442199 - DNA, 51 bp, Homo sapiens
aagacgatgaagccccctctgatgaaagaatcttcaagagggagacatagg

SEQ ID NO: 442200 - DNA, 82 bp, Homo sapiens
gggaggctcccgggcttgcgtggagaggtggagaagagcgagtacttgagaaagaagaggaagaagatgatgatgaagatga

SEQ ID NO: 442201 - DNA, 88 bp, Homo sapiens
gggcagacggattcatttagagctgcggaacaggacgccctctgatataggaaccaaggctttagccttctcaactcattgactggaa

SEQ ID NO: 442202 - DNA, 75 bp, Homo sapiens
atagccatgatcatgctcatggacatggacactttcattctcatgggccatcgatgcacccctcggagctaatag

SEQ ID NO: 442203 - DNA, 100 bp, Homo sapiens
gctgcacctcagtaccagaaggctttccagaatgtctttgcaccaagaaacaagaacttcaacatccatggaacgaataccgtgactgatctaaccgttc

SEQ ID NO: 442204 - DNA, 82 bp, Homo sapiens
tgatcggcctgtccagtttgaaattctcagtgatcagtcagtcaactttggttttagtaaggcacaggagctgcaagttttg

SEQ ID NO: 442205 - DNA, 74 bp, Homo sapiens
gcggttcccgagttgctgcagcagcaggaggaggaccgcagcaagacttccttgccgtccaggaagggatttcg

SEQ ID NO: 442206 - DNA, 51 bp, Homo sapiens
tggagcacagaggctcagaagcaagtccagatccagatgcagaggtgtgcc

SEQ ID NO: 442207 - DNA, 76 bp, Homo sapiens
gctccgtcgtggaagcaggactgcgccgcgtcttcctcaaggagaacatattgtgatgttcgtgcctcagagctaa

SEQ ID NO: 442208 - DNA, 50 bp, Homo sapiens
gcggccaagactccgtcctgcaaggagtcctggagatggagcgcttacac

SEQ ID NO: 442209 - DNA, 50 bp, Homo sapiens
ttactatgaaagtcaacatggaaggccgaattggcagagggggtcgattt

SEQ ID NO: 442210 - DNA, 74 bp, Homo sapiens
aggcacactgctaatgtgtctgatccacatcttcaagtctggagaccaagacacattccaccccagtggggggt

SEQ ID NO: 442211 - DNA, 100 bp, Homo sapiens
cacatttgttcagtctcctgcagatgcctgcacacctcctgcttcttctcagcctgttgataaccatgttagcccatcttccttcttgggccagacacca

SEQ ID NO: 442212 - DNA, 82 bp, Homo sapiens
cagcaaggtcggcagagcaaggggcttacgcagaaggacctggccacggagaacatattgtgatgttcgtgcctcagagcta

SEQ ID NO: 442213 - DNA, 75 bp, Homo sapiens
ccaaaggtctcgtacctctcagagcttccagctgatcttaccaagatgcatctcacagaaaaccctcatccacag

SEQ ID NO: 442214 - DNA, 51 bp, Homo sapiens
caacatctttcctcaccccaaggacttaaccaccaccatgtcgagcaaaag

SEQ ID NO: 442215 - DNA, 50 bp, Homo sapiens
cagccttcccagtagctggaactacaggaaacccctcctggagtttcccc

SEQ ID NO: 442216 - DNA, 96 bp, Homo sapiens
atcatcagtgtggacggagccaagaccaaggaattcatcttcttggagctgctatccaacctgtactcgcatggggaccagaacacgctgatggag

SEQ ID NO: 442217 - DNA, 95 bp, Homo sapiens
gaagataacaatcaagatgaatatgaccctatggaagcagaagaagctgaggatgaagaagatgtgcctttactttcccgaattctgccttccga

SEQ ID NO: 442218 - DNA, 100 bp, Homo sapiens
ccaaagtgaaatgtaaaatagagagtttcaatattgatcactatagaagcagagacaaagcatggaggacacaagaatgggaggaaaggcggactctcag

SEQ ID NO: 442219 - DNA, 83 bp, Homo sapiens
cgccgccgcgcgaggaaatggccgaggagccggagccgcagcaaaatgatgcttcaacacccaggccaggtctctgcctcgga

SEQ ID NO: 442220 - DNA, 82 bp, Homo sapiens
catgatgctgccatctttccaggaggctttggagcggctaaaaaccttttctccttggaccaagatgactgatggaaaactc

SEQ ID NO: 442221 - DNA, 83 bp, Homo sapiens
gtgtccgcgaggatgcgtgttcgcgggtgtgtgctgcgttcacaggtgtttctgcggcaggcaaagcgaaggctggagctagg

SEQ ID NO: 442222 - DNA, 75 bp, Homo sapiens
cttctctcccctccactttctcccgggagaactacgatgacccgcacaaaacccctgcctccccagttgtccaca

SEQ ID NO: 442223 - DNA, 100 bp, Homo sapiens
cctccctccaccatcacagttgccctctgcacgggagcgcaggaggaacaaatggaaaggactagacattgtcgtggagggcccccaagacccaacagag

SEQ ID NO: 442224 - DNA, 112 bp, Homo sapiens
tatgttgatgccagatgacttcaaagcctattcaaaaataaaggtggacaatcacctttttaacaaaaaaccatgagctgttttccaagagcttcatctccatggaagtgcc

SEQ ID NO: 442225 - DNA, 75 bp, Homo sapiens
cagacctgcaagctctttgacacacagcagttcttgtcagtaagactttgaccccgacgcaggcttcagtgattg

SEQ ID NO: 442226 - DNA, 83 bp, Homo sapiens
cggtacctcgcctcggtgcagggctccgccccgtcgcctggaaaggtcaaacgatcaaggagcaaaggcgggctggccggccc

SEQ ID NO: 442227 - DNA, 80 bp, Homo sapiens
atggaaacagcctggtggagttccgcaacctggaaaacttcaagcaaggtcaactcttctgccttctcccctgatggcca

SEQ ID NO: 442228 - DNA, 100 bp, Homo sapiens
accctcagaaacccagaggagatgtgttcagtaattattcgaggtggaggacatattttaccctatgaccagcctctgagagcttttgacatgattaatc

SEQ ID NO: 442229 - DNA, 88 bp, Homo sapiens
gcaggagtgtggtttgctcagatgtggagcaacaagtgaaaatgatgcatcctgttgccagcagtaatccagctttctgtgggcctgg

SEQ ID NO: 442230 - DNA, 92 bp, Homo sapiens
ctcagatgctgccagggtccctgaagagggaagacacgcggaaacaggagccaagccgccatggcctaccacagcttcctggtggagcccat

SEQ ID NO: 442231 - DNA, 101 bp, Homo sapiens
acaaagctttggatcacctgcggaatggggtagatattaacacctgtaaccaggttccaattgtggacaagataaggaccattgctcaggctgtctatgga

SEQ ID NO: 442232 - DNA, 83 bp, Homo sapiens
gggagctggacggcgagcgcgagcggcgcgagaaagaaccctcagtgctgcgtctagattctgcaggggaggtttgctgggac

SEQ ID NO: 442233 - DNA, 106 bp, Homo sapiens
gtcatggcggcagcagccgctctgagggcgcctgctcaggttctgcagctgattcatgagagagataacatctgtaaacagatccacctgccagcccagagtggaa

SEQ ID NO: 442234 - DNA, 90 bp, Homo sapiens
acccaggcacatgaagaatagaaggagcctgtttcctacttcgccctggggagatcttgtgcgaaaactcaaagaagataaagcacccca

SEQ ID NO: 442235 - DNA, 83 bp, Homo sapiens
gatcattttccatacgctgcacataagtgtccgtttgcattccagaagtatggtttgaagtggtgaacatggatttttctcgg

SEQ ID NO: 442236 - DNA, 102 bp, Homo sapiens
ctatcagggcggtcggcagtctgagccagcagcgccccctctagaagtttctgaggaacaggtggaagttgatgggtcgaaactaaatgtgaccagcacgtg

SEQ ID NO: 442237 - DNA, 75 bp, Homo sapiens
gggcatccaggggggtcagtccgagtgcctcagcctggccagaggagaagcacatgattaagtaccggtacatcc

SEQ ID NO: 442238 - DNA, 100 bp, Homo sapiens
tgtttgcaaagcacctgaactggaacttaagaagtatggagttaccacaatagtaagagtatgtgaagcaacttatgacactactcttgtggagaaagaa

SEQ ID NO: 442239 - DNA, 101 bp, Homo sapiens
ccctacccacagccaggcgggacgcgcacagtccctccacgcggaaagaagtaccttcgccggtcaccggctcctgcaggatgtgaggtgaggatgagccg

SEQ ID NO: 442240 - DNA, 73 bp, Homo sapiens
tacagagatgcactgagatacaaacctaggtttgtgaagaaaattcaacctcagcaacttcagaaactgcccc

SEQ ID NO: 442241 - DNA, 138 bp, Homo sapiens
gccaaatatgaataacgacccatacatgtcaaatggatctctttctccacccatcccgagaacaggaatgcagagagcaaccaatgtcacctaccaagcccatcatgtcagcaggaacaagagaggtcaggtggtggg

SEQ ID NO: 442242 - DNA, 76 bp, Homo sapiens
gagctgaataagcggggccgtgtgctggtcaatgatgcccaggacctcttcttccattatgtcttcaacaacttct

SEQ ID NO: 442243 - DNA, 98 bp, Homo sapiens
agaagtacagttttatctagccacatcttggaggtgtaatctagctcctgtggtggagtttgctgcagatgtgggaactaaatcagattttattacca

SEQ ID NO: 442244 - DNA, 51 bp, Homo sapiens
gcagaagaatatgcaaattttaggttgggggccgtcccgctcctaaggcag

SEQ ID NO: 442245 - DNA, 90 bp, Homo sapiens
aagaagcagaaatggaaattgacagaattctctttgaaattacagcagggtgtactctgtgtgaccgcgcctatccctcggactgtcccg

SEQ ID NO: 442246 - DNA, 75 bp, Homo sapiens
cttgcgtacaagaggtgtaccagccccagcaataaccaggaagctattttgccagccacttcattatgggaggag

SEQ ID NO: 442247 - DNA, 83 bp, Homo sapiens
tcaggaaagccccgtggctatgccttcatcgagtacgaacacgagcgagacatgcactgtccagttgagtcacaagagaagcc

SEQ ID NO: 442248 - DNA, 75 bp, Homo sapiens
gtcacctacagctgttggagcttctcaatttatgctcccactatctcatccagcttattcagctgattctgaatc

SEQ ID NO: 442249 - DNA, 100 bp, Homo sapiens
agatgcagcccttggttccagagcggggtgagcctgagctggcggtcaaggggttaaattctccaagcccaggtgctgacggtggatgctcgtaaccacg

SEQ ID NO: 442250 - DNA, 88 bp, Homo sapiens
ttggatgaaaatgtctgtttctctgtcgggagggagacggctgttgtaaaatggcagctgagtatgtcccagagaaggtgaagaaagc

SEQ ID NO: 442251 - DNA, 82 bp, Homo sapiens
tttccccaattcagcagagaatattttcaaggggggattttttatcaagcagaaatgcatcgaacaacgagaatcaagatca

SEQ ID NO: 442252 - DNA, 82 bp, Homo sapiens
aaggcaaaccccagcacttaagcaaacgggaattctcgcgtgctggagaatctggtaaaagcaccattgtgaagcagatgag

SEQ ID NO: 442253 - DNA, 100 bp, Homo sapiens
ccggcgccagcccgggccctcggcagggaggatgacggagctgcagtcggcactgctactgcgaagacagctggcagagctgaagaagcaggtggagagt

SEQ ID NO: 442254 - DNA, 100 bp, Homo sapiens
gaaaaaaggaagttgtgtttcgctattgcacgaagttcagcccagaggagaaactcgctcgccttcagaagacagataacgaaggaggcccaacttcatt

SEQ ID NO: 442255 - DNA, 100 bp, Homo sapiens
accgtctccatgcccgagttcatggccaacctcaggctcaggtctcctctgagcctccggcctccataagacccaaaacagatgacacctcttcccagtc

SEQ ID NO: 442256 - DNA, 75 bp, Homo sapiens
gcgctcggggtgactcttctcaaatgccttctcatccccacataggagtcatcaagctttggtgtatgtgttggc

SEQ ID NO: 442257 - DNA, 136 bp, Homo sapiens
gaaaatcatgcagtgttaagttatgctgtggaggaagaacatgcatatttgggtccaactgtgaagccagatgataagaaaaagcttgtggtgaaggggggcaaaaaaaagaagcaagttctgaagttcactcttg

SEQ ID NO: 442258 - DNA, 75 bp, Homo sapiens
ctgatgcctctaagctgcaattcatcctagcaggacatgcggaagcacgtggccatgaccctgctggacacagag

SEQ ID NO: 442259 - DNA, 75 bp, Homo sapiens
cgggaccatgttcaccagcaccggctccagtgggctctgatatacgtggcatttcaagtgatcagttgcatagag

SEQ ID NO: 442260 - DNA, 100 bp, Homo sapiens
gttacagcacagctgcccctgcctatgataacgaaggaggcccaacttcattcaataaggagcctgacggatttatcccagacggtagaacaaaaggaag

SEQ ID NO: 442261 - DNA, 82 bp, Homo sapiens
aactggtcgccatcaagaaagtattgcaggacaagagatttaagccattctgtagtcttattcagatccatggacataacag

SEQ ID NO: 442262 - DNA, 106 bp, Homo sapiens
aatcatgtcaagcgaagccttgaaaaagctgccctgagacggtgtcccgccgaaagtgttatagttttgccgctggactcttccctcccttcccccaccccatcag

SEQ ID NO: 442263 - DNA, 75 bp, Homo sapiens
aacgatcctctcatctcagcctccaaaagtgctggcattacaggacctcctctgtcagagagagcagctttgtgg

SEQ ID NO: 442264 - DNA, 51 bp, Homo sapiens
tatcctccgttgcagacatggttcaaaggaaggtgtcttgctgcaggtaac

SEQ ID NO: 442265 - DNA, 50 bp, Homo sapiens
atcccagcactttgggaagccaagccaggatggtctcgatctcctgacct

SEQ ID NO: 442266 - DNA, 75 bp, Homo sapiens
gcggaagaccaaagaggatgagaaggacgacaagcccatccgagggaattcacaattgaaactgaagggaaaaca

SEQ ID NO: 442267 - DNA, 95 bp, Homo sapiens
tgtgcgcgctggcgctgagcctgcagccggccctgccgcgccgtgccgtccctgcagtgacaccgaggtgctcctagccgtctgcaccagcgact

SEQ ID NO: 442268 - DNA, 100 bp, Homo sapiens
tgtggatttccgaggcaagaaggtgatcgaactgggtgcggggacaggcatcgtggggatcttggcagcgctgcaggaaagtggagctgttccaaaaaga

SEQ ID NO: 442269 - DNA, 145 bp, Homo sapiens
attacgacctgttcttgaatacattgatctggtcagcagtgatgatgaagagcctagcacctcttatactgatggttgaagctttgagagaagcagcaactgctgttgagcaagagaaagaaatccttctggaaatgatccacag

SEQ ID NO: 442270 - DNA, 82 bp, Homo sapiens
gaaagtttcatctgtggatggagtattggtgagttgggaatcagactcttgagttgacagctggcctatggtttctgcattt

SEQ ID NO: 442271 - DNA, 90 bp, Homo sapiens
aggaaacatcacgcaaatccaggtgcccctgggcgctgggattgctctagcctgtaagtataatggaaaagatgaggtctgcctgacttt

SEQ ID NO: 442272 - DNA, 89 bp, Homo sapiens
gtccaactcagaggacgaggcctccttcaagtccgaggtgagaagccctaccactgcaactgggacggctgcggctggaagtttgcgcg

SEQ ID NO: 442273 - DNA, 74 bp, Homo sapiens
ctacagaaacaaggtcgtcggctggcggagcggcttctgacacttcctccatggcccatctatcgccggcatcc

SEQ ID NO: 442274 - DNA, 96 bp, Homo sapiens
cttctttgcccggctgttcgggtttcagttgctgacggtgcacggacgcaccaaggagcagaaggggcccctgtcgggtgcagcgtcctgggagca

SEQ ID NO: 442275 - DNA, 82 bp, Homo sapiens
ccagcaatcacagaagccgacaaggcgttcaagcgaaaacatgaccgctgagcccatgagtggaagatagatgataagcctg

SEQ ID NO: 442276 - DNA, 82 bp, Homo sapiens
tgacaccaacattctggacacgtgggcgattttaccaaatgttgcaagaactctggagttcttatggtagtaaaatgccgga

SEQ ID NO: 442277 - DNA, 100 bp, Homo sapiens
tcaaatccgaagttttggacagactccttctcaactactcatagagccccatcctcccagaggttctgccatgcaagtgaaattgcatctgatggtctca

SEQ ID NO: 442278 - DNA, 46 bp, Homo sapiens
ggatgctccccatggagttgcttagctaaattacaagatcgagaat

SEQ ID NO: 442279 - DNA, 83 bp, Homo sapiens
ccaggcccgcgggctcagctctcgccgccagcgggccgcagatatgggtaagtgtcaccttaccaaaggcaaacaggctctag

SEQ ID NO: 442280 - DNA, 75 bp, Homo sapiens
gtgattcacgaaaacgcaaattgccatgtgatactccaggacaaggctgtctgtgatcctggaaacatacgtgtg

SEQ ID NO: 442281 - DNA, 101 bp, Homo sapiens
tcgccccaaggggattgcctggcaggacgtgaaggggaagaggcccaccctggagtaaccctcactggagaatccagagtatgtgcagaagcttataatcc

SEQ ID NO: 442282 - DNA, 96 bp, Homo sapiens
agaaaatgataagaccgaagaaatgccaaatgattcagtccttgaaaacaagccttccttgaatccagaagctggcaaacagcatcagccatgcag

SEQ ID NO: 442283 - DNA, 100 bp, Homo sapiens
tctgacatggaggatgatttcatgtgcgatgatgaggaggactacgacctggaaagaagcacttgtaaggaaatatagcatccattgtgaaagtggaaaa

SEQ ID NO: 442284 - DNA, 100 bp, Homo sapiens
gtaagaagaaatcacctagtacatttgcctgaaggactctgtctactagtgacgatgtcgaagacagggaaaatgaaaagggtcgccttgaagaagccta

SEQ ID NO: 442285 - DNA, 82 bp, Homo sapiens
aaaatctgctggaaatgatggcctgtgaccgactgagccaatcagggaaaaagacctcgatgaagttctgcagacccactca

SEQ ID NO: 442286 - DNA, 88 bp, Homo sapiens
aagcagtattaagagtaaatgaaaacccctgcagagtcgagggagcacaaccgggactgcatcctcctcgacttctttgacgaccacg

SEQ ID NO: 442287 - DNA, 90 bp, Homo sapiens
ggacacccggaagccggaaatggcctgtgatacttgggctgtgatcctctagagccagcttggactcacatcattctatggggttgaaga

SEQ ID NO: 442288 - DNA, 90 bp, Homo sapiens
cacgcggatttggctggcgtcccgcaaggaagaatcctgctcaaaaatgaggtgaattaatacttgggcgctcaggaaccctggacagct

SEQ ID NO: 442289 - DNA, 73 bp, Homo sapiens
actgcctcgactggcagcgcgggaaacgtcaaactcgaggtattttggcctctccccagtctgctcctggaaa

SEQ ID NO: 442290 - DNA, 97 bp, Homo sapiens
aacaccttgcgtactcagtgtggacacctgtatgcctacgactggattagtatcccactggtgtatacacagaggacttctggctgactgctgcccg

SEQ ID NO: 442291 - DNA, 75 bp, Homo sapiens
cagagtggctagtctcaaagcgcatattatgctacatgaaaaggaagaggaacggaaaacagttcttccttcaaa

SEQ ID NO: 442292 - DNA, 100 bp, Homo sapiens
ctacttcatattttggaaagcagtttttaagacaaaaatcatgaccaccccaggaaaagagaactttcgcctgaaaagttacaagaacaaatctctgaat

SEQ ID NO: 442293 - DNA, 96 bp, Homo sapiens
caggaatgcagtcagtctgttgatgaaactatagctcaaagcatgcctgtttttaaggaagtaaaggtacatctgttagaagatgcaggcatagag

SEQ ID NO: 442294 - DNA, 73 bp, Homo sapiens
cgggcaccatcccaaagaagcggcataatagtggatccttgaatgttgaagatgtccttaccagctttgacaa

SEQ ID NO: 442295 - DNA, 75 bp, Homo sapiens
gaaaccagtggccacagcatctttgtctagccccagtgcagattatcaacgcctgatgactgtggcagaaggcat

SEQ ID NO: 442296 - DNA, 101 bp, Homo sapiens
ccggtttctcccacatcgacctgggtgctggtgacagctttgtgggagctctggccttctacctggcttactatccaaatctgtccttggaagacatgctc

SEQ ID NO: 442297 - DNA, 51 bp, Homo sapiens
gaagtgggcccccccggaccaccaggggttcggtccgagcccggtgggagg

SEQ ID NO: 442298 - DNA, 100 bp, Homo sapiens
gggacctcctggaagccaaaaatgactattgcccagaagaaaagatgtttggttttcacaagccaaagatgtaccgaagtatagagggctgctgtatttg

SEQ ID NO: 442299 - DNA, 75 bp, Homo sapiens
ctaatgactcaggcacagttggaagagacaaggtctttactaggtgtatttgaagaagatgccacagctatttcc

SEQ ID NO: 442300 - DNA, 75 bp, Homo sapiens
ggcggcggcgggtcaggagcagccgcagcgacggcggcgacagcaggtacatgtcccagagcaagcacacggagg

SEQ ID NO: 442301 - DNA, 82 bp, Homo sapiens
tgtctccccgatctacggggctgacatcagcggctctttgtatgatgacgtttttcgttggaatatacgttgcacatttatg

SEQ ID NO: 442302 - DNA, 82 bp, Homo sapiens
gtccaactcagaggacgaggcctccttcaagtccgagggcgtgatggtgggcatgggtcagaaggattcctatgtgggcgac

SEQ ID NO: 442303 - DNA, 88 bp, Homo sapiens
caccgaggaccagctcaatgacagcaggatgaagttaaaggaagtagatcgtacagccatgcaggcatggagccctgcccagaatcac

SEQ ID NO: 442304 - DNA, 98 bp, Homo sapiens
gcgcgcgcgaccggccggtgcgccgcggcccgcggtttttcgttggaatatacgttgcacatttatggcgattctgagtgtgagggcagacttctgcc

SEQ ID NO: 442305 - DNA, 83 bp, Homo sapiens
tggagcctcaggcggcagcgcttctaggcactttgaggtgaatgaccggaaggacccccaagagacggccaagctcttttcag

SEQ ID NO: 442306 - DNA, 74 bp, Homo sapiens
gtggaggaatttgtggctggctggatctctggagaagagcatctttctcgtggcccacaggaaagatcctacag

SEQ ID NO: 442307 - DNA, 100 bp, Homo sapiens
acagcgggaggcagagggaggaacctggacgccggaagccgggaaatggatgaacgtgaagccagagaaaatgtgaagagagagcaagatgaggcctatc

SEQ ID NO: 442308 - DNA, 83 bp, Homo sapiens
ctgacgtggagcggtacatcgcctcggtgcagggctccaccccgtcgcctcgacaggcagcaatgaatgtggatcacgaggtt

SEQ ID NO: 442309 - DNA, 100 bp, Homo sapiens
agggccgtgccgcagatgcccaccggaatggagaaggaagaggagtcggtatgcagagaaggagaagaaaaatcttagatacgtcagtggcatatgtgcg

SEQ ID NO: 442310 - DNA, 87 bp, Homo sapiens
cggaggcggaaggggaaagcctggagtcctggctcagttttgaacgaagaatgtgatcagaactggtacaaggcagagcttaatgga

SEQ ID NO: 442311 - DNA, 51 bp, Homo sapiens
tgggaagtgaagtcagtgcctcagttgctgcctatgaaagagacaaccagc

SEQ ID NO: 442312 - DNA, 90 bp, Homo sapiens
catgtggtacaggcgttgctgaaccagaaggggctggtggcagcagcgtcgtcataggtaatattggtgccctgatgggctacgccaccc

SEQ ID NO: 442313 - DNA, 137 bp, Homo sapiens
cggaagaccctggaccctacctacatcctgagctacatggccccctggtttagggaggtgtgccccctaccaccggagccagagaatggtggctacatctgccacccccggccctgcagagaccccctgacagcagg

SEQ ID NO: 442314 - DNA, 100 bp, Homo sapiens
ggaaattaactgcctccattacactgctgagtcacacacaacgcttgttatgttttcatcacttctctccagaagaaatatggacagacttcttagactt

SEQ ID NO: 442315 - DNA, 50 bp, Homo sapiens
gatgaccaggaatgggaaagccccagcattcagctttgtatgcttacttt

SEQ ID NO: 442316 - DNA, 96 bp, Homo sapiens
aaggggagtttccacagtgattgatgctgcctcagatggagggagcgaggaaccaccggatcgaagacagtcaagtgtagactctcgccaaagccg

SEQ ID NO: 442317 - DNA, 96 bp, Homo sapiens
ggcctggtttgatactgacctgtaaatcatcctttagtgtggcaaaggagcagagaactttgacaagttcttcacacgaggacagcccgtcttaac

SEQ ID NO: 442318 - DNA, 75 bp, Homo sapiens
gggcaccaccaaaagtgaggtcttctacccagagttgaaactgtgggacagccagacagaagagatagcatagga

SEQ ID NO: 442319 - DNA, 75 bp, Homo sapiens
gctgcgtcgggctgcaggagaagatggcggtctccacagatgaaaggttgtatcaaagttcttaaggaccaacct

SEQ ID NO: 442320 - DNA, 83 bp, Homo sapiens
ctcagattgaggaaacaatggaagaggaccaagaatcgccttcagccctgtctggtgcatccttggcagaaagtgaggaggaa

SEQ ID NO: 442321 - DNA, 100 bp, Homo sapiens
gatgacaagcttacattattttgtgagtgatgtgaactccatgtatctgtcttccacggagccgccagccgctgctgaatgggcatgtctgctgcgccct

SEQ ID NO: 442322 - DNA, 85 bp, Homo sapiens
gaaagcagcaaagaaggaggcgtcactttcacttgggtggagaaggacatcagcgtgcacttgttgagctcgtgaaacacaagcc

SEQ ID NO: 442323 - DNA, 74 bp, Homo sapiens
tgctggacacctggatcgggtctgtcatacacggaggaagcggctgttctacttctccccagccacacatgtgg

SEQ ID NO: 442324 - DNA, 74 bp, Homo sapiens
gggtgttcccgaactagagtgggtgctccatacttgcttgcagtgcctacgtggctctggctttgggtgataac

SEQ ID NO: 442325 - DNA, 100 bp, Homo sapiens
gctgtccctgctggaggagcgcttccggctattccaaactgtggcggttacctggataccttggaaggatccttcaccagccccaattacccaaagccgc

SEQ ID NO: 442326 - DNA, 102 bp, Homo sapiens
gccgaaaaagagaagacgctttacccgactctttgggccgttatctcacttgaccacgttgttcctgagcctgggacaagcctgctcgctgcctttgaccag

SEQ ID NO: 442327 - DNA, 100 bp, Homo sapiens
gcaggtttggatgcatctgctcagactacttctcatgaactcaccattccaaacgatgtgggctctaccatcatgcccatgtccccagatggactgttcc

SEQ ID NO: 442328 - DNA, 75 bp, Homo sapiens
cttcagagcactgacccaggggacactgaatatgtgaaccagccagatgttcggccccagcccccttcgccccga

SEQ ID NO: 442329 - DNA, 82 bp, Homo sapiens
cagcctgcggagcctgtggggcaggattcagtggtcccaatttaaaggctattttattttcaaactggagaaagtgatggat

SEQ ID NO: 442330 - DNA, 100 bp, Homo sapiens
cggaaggatgggaagaccacccgagaggaccacatgaagctgaaggtccagggcatggaggtgcacagcgacttcaccgcggcagccaccaggggcgcca

SEQ ID NO: 442331 - DNA, 100 bp, Homo sapiens
gccggagcagccgcgggcgcccgaggggccgagcgagaaccaccgggaggaactgggccattctaacacccgttgctaccatgctggccacccgcctctc

SEQ ID NO: 442332 - DNA, 50 bp, Homo sapiens
agagctggatctcgtctttctggactgttgacatttagggatgtggccat

SEQ ID NO: 442333 - DNA, 97 bp, Homo sapiens
atggtctcaatgttgccaaaatgtttcctaaagttcgtgaatctcaacttcccccatgacaacaaatgggttgcctgagagcacagacagcaaagag

SEQ ID NO: 442334 - DNA, 75 bp, Homo sapiens
tgtagacgcccccgcaggcgcccgcggcagcgaacgcgtctgcttctgcgctttgcctgggagaggccctggtgg

SEQ ID NO: 442335 - DNA, 98 bp, Homo sapiens
cccccacgtgcccatggaccgacacaccactcttcctgttggcccaagatgaggaactaagttgctgagagataggaggaccaacaagaacagtgcct

SEQ ID NO: 442336 - DNA, 51 bp, Homo sapiens
gcagaggcacccacgctcctacaatctctttcgacgtgtagcagcagcttt

SEQ ID NO: 442337 - DNA, 90 bp, Homo sapiens
gtggagaacattctggccaagcgcctgctgggcgtccccctggataccagtaaactgtccactgaccagcggttacccccatacccatac

SEQ ID NO: 442338 - DNA, 75 bp, Homo sapiens
gttgcagaggcgcttcgccaagggggtgcagtacaacaatgaaggtcaccgtgtccaaagggggcgaccgggaca

SEQ ID NO: 442339 - DNA, 75 bp, Homo sapiens
aaaccacgcaggcaaacgagaattaaatgccgagaaggccagtacgatccagtttgctgaccagaagcaagaatt

SEQ ID NO: 442340 - DNA, 75 bp, Homo sapiens
cctccatgtgggacagcctgggagaggaacagaagcagatgagtcagccttgaagatggaccacgtggcgcacgt

SEQ ID NO: 442341 - DNA, 50 bp, Homo sapiens
gcctccatccacgaggcctggactgacggagtcgttcacgcctactgagg

SEQ ID NO: 442342 - DNA, 100 bp, Homo sapiens
cagattcgcagtggtcgcttcttctccttggccatcgaggagggcacgctggaggagatcgaagaggaggtccggcagaagaaatcatcacggaagcgca

SEQ ID NO: 442343 - DNA, 49 bp, Homo sapiens
tgggctccggagcctcagcgccgcgcagaacacccatctcggctttctc

SEQ ID NO: 442344 - DNA, 90 bp, Homo sapiens
gcagatgaaaaacatcttacagcagcattttgacaaggaacaagcacatcatgattgacttggggactggcaacaacaacaagattaact

SEQ ID NO: 442345 - DNA, 75 bp, Homo sapiens
gcgccatcttcgaacttagacttccggaaggactttggcgaggatcctaatgtggctcttacttttctggaaaag

SEQ ID NO: 442346 - DNA, 75 bp, Homo sapiens
gctacgccagcggcgtcgagaggaccatcctgggtgctggccctgtgctggaggccgtatctgaggaacagcagc

SEQ ID NO: 442347 - DNA, 100 bp, Homo sapiens
tgcccaggctcgcctcgactccaaatggttgaaaacagatatacaggtggatctccttacgtagcagccaaaataaatgaagcaaaagacttgctagaaa

SEQ ID NO: 442348 - DNA, 75 bp, Homo sapiens
tcggcagtcgcgaagcagcaaccatgtcaggatggctaaaggtgaccccaagaaaccaaagggcaagatgtccgc

SEQ ID NO: 442349 - DNA, 100 bp, Homo sapiens
gtgaatacactaaggatgttggatccaaaagtcagttagtgacagctaatcccagcataattcggcaaagcctttctgagaaaagtctacagcattcttt

SEQ ID NO: 442350 - DNA, 100 bp, Homo sapiens
agccgagatgccgggggagcggggccttccacaccccctccgtgggtgtgtggcctccggtgtggctgtctctgatggtgtcatcaaggtgttcaacgac

SEQ ID NO: 442351 - DNA, 100 bp, Homo sapiens
tcaagcacaattcggggatgcaatgacggacgtaggtgaagacactgcgggaacttacagacaaaatccagtttgagaataatgaagatcaagatgtaaa

SEQ ID NO: 442352 - DNA, 101 bp, Homo sapiens
aaagtatggagcatgtatcgccagcgcttcctgtattccttgtatcgacatacacactgggtacgctgtgccaagttgctgatcagctctgtgccaagtat

SEQ ID NO: 442353 - DNA, 100 bp, Homo sapiens
ctgcccaccgaaggcagtgtgcccccaccactctcctccagcccaggggggaccagcccctcaccacctcccagatgatcccacctgacttcagtctctt

SEQ ID NO: 442354 - DNA, 98 bp, Homo sapiens
ccaaacccaggcagcttcgtggcgtgtgcggtttcgacccggtcacacaaagcttcagcatgtcatgtgtgtgctggaattgatgttcgtctgtgtga

SEQ ID NO: 442355 - DNA, 100 bp, Homo sapiens
acgagttccagctctttgttgctcagctgcctcaagggctacgtcaaccacagcctgtccgtcttccacaccaaggacttccaggaccctgatgggattg

SEQ ID NO: 442356 - DNA, 82 bp, Homo sapiens
agagcctgaagcaccaccacctcgggatgtggcccttttgcaagggagggttctccccatgacaccacctgaacgtctcttc

SEQ ID NO: 442357 - DNA, 100 bp, Homo sapiens
tccgaaccgccggcgcccggccatggcggtctccagctatgagggcactggccggtcactgtccctcaagctaattcagcagctccgtcaacagagcgcc

SEQ ID NO: 442358 - DNA, 98 bp, Homo sapiens
gctctgattcttccagcagttcttctgattctgaagatgagatgtctggcgataaagggatttctgccttccctgaatcagacaaccttttcaaatgg

SEQ ID NO: 442359 - DNA, 90 bp, Homo sapiens
ggccggcgtccggagcatggcggacccccagagctggtgcccgcctggctgggtgggtgagcggtgtcagctggaggacccctgtcactc

SEQ ID NO: 442360 - DNA, 83 bp, Homo sapiens
ccccacgcaaccccagatccatttacactttacaggggaagcgagtagcattatctgatgatgagacaaaggaaactgaaaac

SEQ ID NO: 442361 - DNA, 75 bp, Homo sapiens
caccgtgacatccgaggtgcctttctccaaaagcacagtgtcaccggctctgccgtatccaagacagtatgcaag

SEQ ID NO: 442362 - DNA, 83 bp, Homo sapiens
ccacaggctgctgggaggagagcataagaatgcgtcaacctttgaggatgtcacccaggtgtcctctgcctaccagaagacag

SEQ ID NO: 442363 - DNA, 89 bp, Homo sapiens
gcctcctcagccatgtggaactgtggctttctagaagatgaccatagaggaccttccagattttccattagaaggaaatcctttgtttg

SEQ ID NO: 442364 - DNA, 83 bp, Homo sapiens
ccgggtgcccacactggccgtcccggccatctcgctgcccgacgatgtccgcaggcgaatccacattcatctcaatggaagga

SEQ ID NO: 442365 - DNA, 98 bp, Homo sapiens
cttcaatggcatgtatgcagacctcctgcagctggtgaaggtatgggtatggcccttatcagccagttccagaacaaccactatacccacaaccatac

SEQ ID NO: 442366 - DNA, 98 bp, Homo sapiens
cttttacactgttacttcagtcaggtctctaattaacagaagatggcaaagcccagccacagcagctatgtccttcagcagctaaacaaccaaagaga

SEQ ID NO: 442367 - DNA, 49 bp, Homo sapiens
ccttggaccacaggccattcctcagggaggaaagatccctatccgttgg

SEQ ID NO: 442368 - DNA, 90 bp, Homo sapiens
caagcagaaaattacctaaatgcactctttcgaaagaaagggttttgactctgggaggagggctgccttatttggagcaccttaatctct

SEQ ID NO: 442369 - DNA, 76 bp, Homo sapiens
tatgcatgctgcttttgatgtctgacaacgtggatcgttgttttgaaacgggtattattgaagctcgttttgttta

SEQ ID NO: 442370 - DNA, 96 bp, Homo sapiens
agaatcccaagtggatgaactgaatatctggatgaggacaagatctgtggggagagactgtaaggagatcatgaatcagacagataaaaatcaaca

SEQ ID NO: 442371 - DNA, 100 bp, Homo sapiens
tctgaaacttcttgacaatttgcttgcgcttataagaggtcctgctgtactagccaccaaagcagctgctggtactaagaaatatgatcttagtaaatgg

SEQ ID NO: 442372 - DNA, 51 bp, Homo sapiens
aacatacgggcaagtttataaggacctgctgaagttcccatgatgtcaccc

SEQ ID NO: 442373 - DNA, 75 bp, Homo sapiens
ggacaagcgcgacgcccggcgcgagctcaagctgctgctgctcgccacccaggtcgatccgtgcaacctccagga

SEQ ID NO: 442374 - DNA, 100 bp, Homo sapiens
gaggaatatggcgctcttaggcagccgagcggagctggaagcggacgagtaattcgccaaaatgacgaacacaaagggaaagaggagaggcacccgatat

SEQ ID NO: 442375 - DNA, 75 bp, Homo sapiens
actatttaaggatccaggtgttgcaaggcgccgcttacaaacacgcagatggcaagaagattgatggcaggaggg

SEQ ID NO: 442376 - DNA, 100 bp, Homo sapiens
ggaaaggctctcagtgaaaaagaatggctattcaagtggacaagttcaactttgagagtttcccggagtcccctggggagaaggggcaatttgcaaaccc

SEQ ID NO: 442377 - DNA, 100 bp, Homo sapiens
gtggatcagcgcctacccgagtgtgcgaagctagccaaggttggagtgcaacggtgcgatctcggctcactgcaacctccgcttcccaggttcaagcgat

SEQ ID NO: 442378 - DNA, 101 bp, Homo sapiens
gtgaccgagagcgtgaccgagagcgcgaatatcgtcatcgttagaagctttttaattaaatgaagccaagtgggatttgcataaagtgaatgtttaccatg

SEQ ID NO: 442379 - DNA, 95 bp, Homo sapiens
gtgaagcttcatccccatgaactaaataatctcctgtctaaattggatcgactggttgtggatgcagcaaaggagaaaagagaaatggagcaaaa

SEQ ID NO: 442380 - DNA, 101 bp, Homo sapiens
ccaacctagtgggtgtaatacatcatgaactgcaggttggttgaatctggcgatgtggaacccatggatatggagggctgactatatacaccatgtttttt

SEQ ID NO: 442381 - DNA, 100 bp, Homo sapiens
ctgaaggagtgtggactttttgaatttcaagaacagtaaagttggaacacagcagagggtgtgtaataaaatacagagtgtcccactggtccagacatca

SEQ ID NO: 442382 - DNA, 74 bp, Homo sapiens
agacactaaatgggtctgaaatggcatctgccacattatttaagaagagctcatctcctgtcctgggtgtgaac

SEQ ID NO: 442383 - DNA, 90 bp, Homo sapiens
cgagtaccagcactccaatttgtatgccatatcaggcatgtaatgaatttactacacatgtgatgaaccttctccgagaacagagtagaa

SEQ ID NO: 442384 - DNA, 136 bp, Homo sapiens
gacctttttggagggaaagaaagagccctggactgtgaagagtgaggagaccatagctgcacagccagagcaaggtccgtggtcctgtcagtggaagcccggatagcatgaatgcctctcgacttagccagcctgg

SEQ ID NO: 442385 - DNA, 98 bp, Homo sapiens
tgaagcagtaacacctcttacaaaggcagcagatatcagcttagaataatccagaatggctactctgatctatgttgataaggaaaatggagaaccag

SEQ ID NO: 442386 - DNA, 99 bp, Homo sapiens
gctgctccgcgcgctcctgctcctgctgctgctcagtcctttgccaggaacttaagagatttgagaacttcataaaatctcgtcctccttttgatgttg

SEQ ID NO: 442387 - DNA, 75 bp, Homo sapiens
ggaaaatggagcccttcaccaatggagcagaggtttaataggcaagagaaagagaaaggaaaacagctctctctc

SEQ ID NO: 442388 - DNA, 83 bp, Homo sapiens
caagagcttccgcggtgtcattctgacctcgcctaacaggacgtattatctgatggaccccagcgggaacgcacacaagtggt

SEQ ID NO: 442389 - DNA, 75 bp, Homo sapiens
gtgacgtcaccccgctgtgacgcgcacgctgtaggaaaactactattgggaagaagttacctgcaactacagcaa

SEQ ID NO: 442390 - DNA, 100 bp, Homo sapiens
cgggattcccagccatggcagattcctccgggcagcagggctactgcagcactggggtgtcagttgttggtccgacccagaacgcttcagttctgctctg

SEQ ID NO: 442391 - DNA, 100 bp, Homo sapiens
tccatttctaataactatctcaacctcacatttccaaggaagaggactccacgggatcaggagaaggtctggggaaaataatccagagatttccacagaa

SEQ ID NO: 442392 - DNA, 90 bp, Homo sapiens
cttccatacattgactacttacacactggtgctgactgcatttgcaattctgtggtgttcttggtcacacatttatggagtttctgaagg

SEQ ID NO: 442393 - DNA, 75 bp, Homo sapiens
ggatcttgctcagtctctgtcagaggaagatcccttggctgggtccgatacgccgagcgggtgctgggtcgcccc

SEQ ID NO: 442394 - DNA, 100 bp, Homo sapiens
gtgggagaaccagccgactggagcaggcagcagcccagcatgaacaggctgaacactttgccacgaggcttcggctccctgccagctcttgaggttctgg

SEQ ID NO: 442395 - DNA, 75 bp, Homo sapiens
ctggagctgagcaaagtgcgtgaggagtttaaggagctgaaagcgcgtaatctcaggggcgatataatcaatgag

SEQ ID NO: 442396 - DNA, 100 bp, Homo sapiens
gaccctggagcctcagttggaagcagccgatccagcctgcggagcctgtggggcagttgctctaggtcgtaaccagcctttgaaaaaggagaaaccaaaa

SEQ ID NO: 442397 - DNA, 97 bp, Homo sapiens
gaagaattatggagagaacccagaagcctacaatgaagaactgaagaagctggagttgctcagacagaatctatgtactttcatcagcgcggccagt

SEQ ID NO: 442398 - DNA, 100 bp, Homo sapiens
aaggcgattggcatcgatctctccatcccttccgaggcccgacttcggagctgtgcggtcttatgcattggaacttaatttgacagattcagaaaatgcc

SEQ ID NO: 442399 - DNA, 50 bp, Homo sapiens
cggagagcggctgatcgcagtccggagcggaaatgagaaagcagagggag

SEQ ID NO: 442400 - DNA, 137 bp, Homo sapiens
gttgccatgaggcgaggctagggaggacctcacttccccggggtgtaataatgttaactgagggacatgagagatggctttagaagaaaaagtttctactcttcccattatgcgagagagcggtctccttataaaag

SEQ ID NO: 442401 - DNA, 96 bp, Homo sapiens
tccagagctcagcgagctcagcaggagctggctgcggagcggcgagggacctcgcagggagccatccgatgttcgagaacttgtcttggacaattg

SEQ ID NO: 442402 - DNA, 82 bp, Homo sapiens
gctacagcgagggcctcggccatccaagggtctcccaggggcaacaccctccactaaagagtcaagccagccggacgcattc

SEQ ID NO: 442403 - DNA, 100 bp, Homo sapiens
gcaccttatcacccggaacctgcaggacagagcgggatgccaccagcttgtccaaagggaagttccaggagctcctggtgggcatcgttgtggagaatga

SEQ ID NO: 442404 - DNA, 75 bp, Homo sapiens
gaaggaaattctgacatgttagtggtgaccacaaaagcaggccttcttgaggtgtttggagaagagggattgacc

SEQ ID NO: 442405 - DNA, 100 bp, Homo sapiens
ctctttctcccttcactcactggctgcaggaagctgagaattatccttggacttacataaagcattttggactttattttacagaagcacttgcagaact

SEQ ID NO: 442406 - DNA, 75 bp, Homo sapiens
ttggcattgaacctgtatttccggagaacacaggattctgctatgtagaattcgatgaagtggattcccttaagg

SEQ ID NO: 442407 - DNA, 90 bp, Homo sapiens
gacgcatggcaacaccggattcagtggagccaaaaacctgtatatcatctccgtgaaggggatcaagggacggctgaacagacttcccgc

SEQ ID NO: 442408 - DNA, 74 bp, Homo sapiens
ttcagggatgagtcatgtggcagtggaaaatgcgctcgggctggaccagcaggagtccaaaactacttacctgg

SEQ ID NO: 442409 - DNA, 75 bp, Homo sapiens
aaaaattcatctgggcggtatctggaacttggctggatctccagaactgttctctggaggaccctggtccaaact

SEQ ID NO: 442410 - DNA, 96 bp, Homo sapiens
tcctggcttcttacgccgtccaggccaagccctgggcgctgcctatggcacagccaagagcggtaccggcattgcggccatgtctgtcatgcggcc

SEQ ID NO: 442411 - DNA, 129 bp, Homo sapiens
ccaaggacaactgcaagggggaagtagagagataacaaaagctgctcagagtctcaatgaacttggtgtgctgggcatcaaggtgaagatcatgctgccctgggacccaactggtaagattggccctaa

SEQ ID NO: 442412 - DNA, 50 bp, Homo sapiens
tgctgatgtggctttatgaaagaaagaactggttgtcttcttgggcggtg

SEQ ID NO: 442413 - DNA, 50 bp, Homo sapiens
cacaggaattggatctactagtgcagacccatctctgacagttagagccg

SEQ ID NO: 442414 - DNA, 88 bp, Homo sapiens
ctggcattggaacttcctgttctgatagcgtggaagtttcctgttttccagcacccaacataacttgtaaggattccagtggcaatga

SEQ ID NO: 442415 - DNA, 90 bp, Homo sapiens
ccgtcactccccagggcggcatcgtcgtctatgggggctactcgaaacagcttctagaggccacccgcatcccctgcctcctggccccat

SEQ ID NO: 442416 - DNA, 75 bp, Homo sapiens
cgctcgctccggcgccggcctcgcctcctcgcagcagcgccatgagaggtggagaagagcgagtacttgagaaag

SEQ ID NO: 442417 - DNA, 98 bp, Homo sapiens
accgcatgatggtacccaaagtcaggcgtgatgggaaggctctggagaggttcctgcaggattactttgatggcaatctgaagagatacctgaagtct

SEQ ID NO: 442418 - DNA, 73 bp, Homo sapiens
ggcgatatgatgatcctgaagtacagaaagacatgttgaagctgtctccaagcccttcttcccgtgtgacagt

SEQ ID NO: 442419 - DNA, 100 bp, Homo sapiens
ccttccacctcgacctctggttctacttcacactgcagaactgggttctggactttgggcgtcccattgccatgcaacacagtcactcctggcggcaaac

SEQ ID NO: 442420 - DNA, 75 bp, Homo sapiens
acagaaattgaaaggcttcaaagctagcaggcagagctgcaaccctcttgtcctctttgaagcagaaattgaaaa

SEQ ID NO: 442421 - DNA, 75 bp, Homo sapiens
ttcattatgaacaaagaagtctcccaggattttgaatgtggaaatgacgtggaactgtcttttaccaagaatgga

SEQ ID NO: 442422 - DNA, 50 bp, Homo sapiens
ttctgtgtcccacttcatctttaataagaaacttgtggtggagaatgttg

SEQ ID NO: 442423 - DNA, 73 bp, Homo sapiens
aaaaatttaaacaagaatccactgttgctactgaaagggtgtgatccctcacatccacaaatctctgattgga

SEQ ID NO: 442424 - DNA, 83 bp, Homo sapiens
aaaaagatggccaagaactaagtaacgatctggatgcccaggccgccatggcatcagatgaaggcaaactttttgttggaggg

SEQ ID NO: 442425 - DNA, 100 bp, Homo sapiens
ggctcagaggggagtcatcatgagcgatgttaccattgtgaaagaaggttgggttcagaagagggaataagaccacagcttgccaaagagaagattgaag

SEQ ID NO: 442426 - DNA, 83 bp, Homo sapiens
ctcctcgtcgggaagaatcgtttggtctcctgccgtgcccgatgaaggatttgggggcagagcacttggcaggtcatgaaggg

SEQ ID NO: 442427 - DNA, 101 bp, Homo sapiens
cctcatgtacttcgcctttaccagatgctcagccagcattgggcagcccccgcttcctgctcccctacccccttcacatggcagtagttctgggcacccca

SEQ ID NO: 442428 - DNA, 75 bp, Homo sapiens
ggaggattcattgaggaagaaaaagaagacttgcttcagcatttctcacctgactcaattatgaatgcttcatgg

SEQ ID NO: 442429 - DNA, 100 bp, Homo sapiens
cagtgacaatgacattcggaagtatgagatgtttgcccagacccttcagcagagtcggggctttggcagcttcagcccgcctgcacccaggtgaaataaa

SEQ ID NO: 442430 - DNA, 75 bp, Homo sapiens
gatgccttctcagtatcctggaggacaacctacttaccctagtcagcctgaaaggatttcaggggagcagtatgg

SEQ ID NO: 442431 - DNA, 75 bp, Homo sapiens
tgtttatgttctatgctccctaatgaagatgctattaaggagccaatggagatcttcgtggatgatgagacgaag

SEQ ID NO: 442432 - DNA, 102 bp, Homo sapiens
ctagtcatgagcaggcagcagctgcattgaaaaatgctggccaggctgtcacaattgttgcacaatatcgacctgaagactccaagaatgaaaaggctctgg

SEQ ID NO: 442433 - DNA, 74 bp, Homo sapiens
aaaatggacatccctttccttggggaaatgcccgcagaggccaggacgactggaatgggaccaggccgtcgctg

SEQ ID NO: 442434 - DNA, 50 bp, Homo sapiens
cccagctgggcgagtatctggaggagtgtgtactgtaagcacggtcacct

SEQ ID NO: 442435 - DNA, 74 bp, Homo sapiens
cagtggaagatgatcacatcccagagttttgccgaattgacaagcccctgtgtcacagtgaggatgagaaactc

SEQ ID NO: 442436 - DNA, 100 bp, Homo sapiens
gcagggaggaaatggaagcacgttctatgctggttccaccccaggatgaccgagtgggagacagcagcaccagcggtggcagagaccccagacatcaagc

SEQ ID NO: 442437 - DNA, 100 bp, Homo sapiens
gcggacagcagcctcgggtgcaatcctggagccccccagtgaggccaagacttggacaatcttattaaagtgaaaccttcagctcttagaaacactaatc

SEQ ID NO: 442438 - DNA, 82 bp, Homo sapiens
attccagagctctcatgttctgcacctcaggagggaattcagcctcagtgatgtccatgagatgacagtcatgtccctttcc

SEQ ID NO: 442439 - DNA, 83 bp, Homo sapiens
ggatgcggccaactccaatgggcctttccagcccgtggtccttctccatattcgagagcaatggtggaacaaagcggcaaaag

SEQ ID NO: 442440 - DNA, 100 bp, Homo sapiens
cgcagatgtggacttgaaagaagctgcagcggaggaaggcgaggcatcctgtacacgtcaaagaagagcccctcgatccagaggaagctgaagggcccct

SEQ ID NO: 442441 - DNA, 88 bp, Homo sapiens
ccgagatgcggttttcctcgcagaacgcctttatgcagaaggactctgacaccaccataccaatggacgaatcactgcagtttaactc

SEQ ID NO: 442442 - DNA, 73 bp, Homo sapiens
tggagtggttgttgaggaagaacttttccaccagcaggaaaccagtcggggaagaatgtgatggtggagccgc

SEQ ID NO: 442443 - DNA, 80 bp, Homo sapiens
ccagccggggggcactgcccgcccgggctctggagtggagtcaacatatcaatggagcaagtcacagtcgtcgatgccag

SEQ ID NO: 442444 - DNA, 75 bp, Homo sapiens
aggatggctgcaagactgtcgacctaaagcctgactggggcaagcaacacagtcactcctggcggcaaaccaaac

SEQ ID NO: 442445 - DNA, 100 bp, Homo sapiens
gattgacaaagtgcgcattttcttattaggactggctgataacgaagcagctattgtccaggttgaaccctcggatacgatagaaaatgtaaaggccaag

SEQ ID NO: 442446 - DNA, 74 bp, Homo sapiens
cgagttaaagctattcctagaagaagagttaacagtggagacactggctgccgcgggcggacacgccagaggag

SEQ ID NO: 442447 - DNA, 74 bp, Homo sapiens
gagaagcaagaaggccctggacacagcaatatctctgggctttcacagatcctttttactgggcctggttgccc

SEQ ID NO: 442448 - DNA, 99 bp, Homo sapiens
cgagccttggcggcggacgtgcagcggagtttaagagagctgtgaaagtagcaacaggacaagaactctcaaacaatattttggacactgtctttaaga

SEQ ID NO: 442449 - DNA, 82 bp, Homo sapiens
ctcgagtgcacggagcgtcccttccatcaggagaggttgacatcatggacatatgtgagtccatcctggagaggaagcggca

SEQ ID NO: 442450 - DNA, 100 bp, Homo sapiens
gaggggagccggcgaggatcaaaatcttcgaaggagggtttacccaaggtccagcctagcccctaggcaccatgtcggacagtgatctaggtgaggacga

SEQ ID NO: 442451 - DNA, 98 bp, Homo sapiens
ctagcccgaagaatgcagatcaaggattgttgggctttgattaggcgacagttattcgaagccaggaacacgactctgagatttgcccacctgatgac

SEQ ID NO: 442452 - DNA, 75 bp, Homo sapiens
agaaatctcaagatattaaagttactgctgttaaaaaggagggtttgcatttgtgtatgaagctcaagatgtggg

SEQ ID NO: 442453 - DNA, 97 bp, Homo sapiens
ctgacagtgttaatggaagtgaaccaagcattcctcagaaaccatctgcttatactctgaataaaattcaagaaagcatagattctacataaacagg

SEQ ID NO: 442454 - DNA, 91 bp, Homo sapiens
agctgagtggttgtgtggtcgcgtctcggaaaccggtagcgcttgcagcatggtttggtgcacctcgatttggaggaagtagggcagggcc

SEQ ID NO: 442455 - DNA, 50 bp, Homo sapiens
cgacgacgaggaagaggaggtttctgaggttttgcgtgtgaagctgtgtg

SEQ ID NO: 442456 - DNA, 110 bp, Homo sapiens
gaaaatgcaagaagactgatggagcaggcttgcaatattaaagaaatgagtggcttatactctcctgtcagtgaggatagcacagtgcctcaatttgaagctccttctcc

SEQ ID NO: 442457 - DNA, 98 bp, Homo sapiens
caccgccaccatggggaagggggccaccaccacctatcatgacagatggtgaagatgcggattacactcattttacaaaccagcagagttccacacgg

SEQ ID NO: 442458 - DNA, 82 bp, Homo sapiens
gaaaattaagcagatgctccagtttgagaaacctggatctgcgatctgtttgtgagctcaaagcatgcctgtttttaaggaa

SEQ ID NO: 442459 - DNA, 73 bp, Homo sapiens
agaaaatcctcactctgagtacggtctcacagacaacgttgaggatccagccgcagaagccaggatgaaggta

SEQ ID NO: 442460 - DNA, 100 bp, Homo sapiens
cgagaccgtgaccgagagcgtgaccgagagcgcgaatatcgtcatcgttagaaggtggatgaaaatactaggaaaagtttatttaagttacgttctacat

SEQ ID NO: 442461 - DNA, 100 bp, Homo sapiens
ctgagaatgaaattgctttggcaagctaaaatgatatgatttggctatcaaagaccttaaagaagccttgattcagcttcgagggaaccagctgatagac

SEQ ID NO: 442462 - DNA, 82 bp, Homo sapiens
tcccagttggagagggaagaaaagctttggatgaaggagcttcaaacccaaagagtttcagaggcggagcacagagagctgc

SEQ ID NO: 442463 - DNA, 83 bp, Homo sapiens
gtggactactctcagcctactatctgtctggagaagaggaagaggcgcttcagcgggcacgtgaggaagaagagaaaaggaag

SEQ ID NO: 442464 - DNA, 50 bp, Homo sapiens
ggttgaggcagggccaggagccatgttttgcacactagggaccaagaagc

SEQ ID NO: 442465 - DNA, 74 bp, Homo sapiens
gaaatgggcatgccagatgcctggaagatcagaggctcacattccaggtatattacagctaatactgacacaga

SEQ ID NO: 442466 - DNA, 82 bp, Homo sapiens
cgaccaagagggtgttcgactgctagagccgagcgaagctgtgccgtgcaggtgaagctggagctggggcaccgcgcccagg

SEQ ID NO: 442467 - DNA, 90 bp, Homo sapiens
cagacggtgcgcctgtgcagccctcccaggtggagtacacggcagactgatttcaaatatgcgtgcattagagaatgattttttcaattc

SEQ ID NO: 442468 - DNA, 75 bp, Homo sapiens
cggtgatgaagaatccccccgaaaggaccccccagcggagctggagtttgttcagatcatcatcatcgtggtggt

SEQ ID NO: 442469 - DNA, 82 bp, Homo sapiens
acagtgccatccaccctggcagaggagtttacctacaaccccttcatgagagtgagggaagagaaggaacggtggatccgtg

SEQ ID NO: 442470 - DNA, 98 bp, Homo sapiens
ccagtggagcccccgcgcgcccggccggcccggagcaccgagctcgcggcacggtaggagggtgaggtggctttgaccccgggttgcccggccagcac

SEQ ID NO: 442471 - DNA, 100 bp, Homo sapiens
gctacccattccagggaccctgccgctgcccctctgaggggtctgcacctcctgggagcagtgtcacaccatgtctgaccggaaggcagtgatcaagaac

SEQ ID NO: 442472 - DNA, 83 bp, Homo sapiens
ccatcctgccgtccttctccactttcgccagcccgtgccgcgagcgcggcctgcaggagaagaagaaaggagggcgcgggcta

SEQ ID NO: 442473 - DNA, 82 bp, Homo sapiens
ttcagggaccctgagcaccgcctggtctctttcctgtggccagcccagaagtcccgggcccagagcccggccagcaggagca

SEQ ID NO: 442474 - DNA, 74 bp, Homo sapiens
tttctgctcccattcatacccagatgcaacagaaggaggtattcagagaggaaaagtatctctgtgatgcctat

SEQ ID NO: 442475 - DNA, 100 bp, Homo sapiens
cggctatacaaggatcagaaaggactccagcacctgggctggattctagtgacatttataacgaattgaaagaaacatatcctaattatcttcctctgta

SEQ ID NO: 442476 - DNA, 100 bp, Homo sapiens
gaaggggtttctctgatgtatttgaagaagagatcacttcaggtggcttttgtggaggcggcaaagatctgcaacaacatgctgttagctattagtatga

SEQ ID NO: 442477 - DNA, 82 bp, Homo sapiens
ctgagcagagccctgcgatactattatgacaagccatcactggtgcaagctatatttaacggagatcctgatgaagttcgag

SEQ ID NO: 442478 - DNA, 100 bp, Homo sapiens
aaaggctacaaagctgctttcattggaatagttcagggcgacagctcagtgaagtcttcattcagttaccttcaaggaaagaattaccagaatactatga

SEQ ID NO: 442479 - DNA, 75 bp, Homo sapiens
aggttgacttctacattgataaggtgatgtaaaattctcaaacaatgagatagataaaaagtacgcagccaaaaa

SEQ ID NO: 442480 - DNA, 82 bp, Homo sapiens
aaatgtcttgaaagaggcacgcatttttgacagagcttcatagcaagtgaagtactcaagttgttcagtcttaaaaaggagc

SEQ ID NO: 442481 - DNA, 83 bp, Homo sapiens
aacaagagagaaagagtggatttcagcctgcacggatggtcttgaaacacaaatggtttttgatgttgatgcctaagaagaac

SEQ ID NO: 442482 - DNA, 98 bp, Homo sapiens
taaggaacaggaggaaaccattcagagttgattatggaagattcccacaagagtaccacgtcagagacagcacctcaacctggttcagcagttcaggg

SEQ ID NO: 442483 - DNA, 100 bp, Homo sapiens
gaatgacagcggcgaggagaacgtcccgctggatctgacccgaggtgaatgaaaactttgccattgatttgatagcagagcagcccgtgagcgaggtgga

SEQ ID NO: 442484 - DNA, 75 bp, Homo sapiens
agcgctggtaggccttggagaggcgggttaggaagaaagatggatactatgatgctgaatgtgcggaatctgttt

SEQ ID NO: 442485 - DNA, 90 bp, Homo sapiens
ctctgattgaattttttgacagaaaagagatcccagaagacccacttgtggctgaagagtactacgctgatgcatttgattcctattgtg

SEQ ID NO: 442486 - DNA, 101 bp, Homo sapiens
gcgcccgaaggccgacacgctggccctgaggcaacggctcatcagccattttgcagactctgatcacagtgaaacgttccatgggaacttgggccatgaga

SEQ ID NO: 442487 - DNA, 82 bp, Homo sapiens
gaaaacggcgagagtgggcgagaacgtccactgcgggccggcgaaagctgagaaccatggagtctggcagtaccgccgccag

SEQ ID NO: 442488 - DNA, 100 bp, Homo sapiens
ctcacctcgaaattcctgaggcgctgggagccgcaccacctaacgctggccgacaacagcctggcgtccgccacgacatgctgctgctgaagaaacacac

SEQ ID NO: 442489 - DNA, 83 bp, Homo sapiens
cttggagctgttttaaaagttaggcaagatctggtcaaagtatttgattttcatcaagcagctgatggtatccaggaacaaca

SEQ ID NO: 442490 - DNA, 100 bp, Homo sapiens
ccctcttctacggaggaaggaacgggcacagcaggcagcctggcatcctcgctacaacctcattgttgtgggccgatacccagatcctaatttcaaaagt

SEQ ID NO: 442491 - DNA, 51 bp, Homo sapiens
tcttctgccgtgcagtacttccaggggctggctgtgggcaatggactctcc

SEQ ID NO: 442492 - DNA, 82 bp, Homo sapiens
agaagattccgataagaaacacgccgttggacataccagatggtcgaagagctccacttcctgctcattaccggagcagtag

SEQ ID NO: 442493 - DNA, 50 bp, Homo sapiens
cacgcagctggctggcttcagtggaccaatgcctaccttaatgcctctga

SEQ ID NO: 442494 - DNA, 74 bp, Homo sapiens
cagtgggcgagggagtcagcgaccgcaaggtcctcagccctcgctctcgctggcggagcagcacctggagtcgc

SEQ ID NO: 442495 - DNA, 82 bp, Homo sapiens
aggattccaagtaactcttatttggactggaaggatcaccagcacatatgcggccagtcagcagctgtcaccgtccaggcag

SEQ ID NO: 442496 - DNA, 99 bp, Homo sapiens
tgatcaggttcccatccaacatgaactctttgaaagatttcttctgtatgaccagacaaaaggtggggaagctgaggcaggaagccctttagtcacttg

SEQ ID NO: 442497 - DNA, 100 bp, Homo sapiens
ccttatcggagagaaccccgatctcctcgtaaatctcgacagccttcaggaggattcactccttctccagttgcacagccacacccttcagctggcctta

SEQ ID NO: 442498 - DNA, 82 bp, Homo sapiens
tggggactacgacgtccctcaaaccttgcttctaggagataaaaaggttttaaaatcaaagatgggaaaatcggagaaaatt

SEQ ID NO: 442499 - DNA, 79 bp, Homo sapiens
ctctgcgtgagtgtggtctacgagctgtttctcatctttatactcttccagaaggtagaagatagcaccatgccgattc

SEQ ID NO: 442500 - DNA, 100 bp, Homo sapiens
ccgagggcggggaccggcggcgctggaggagcgaggcagctgtactaggactgggaacgggttatgatgtgattgctcaagcccaatctgggactgggaa

SEQ ID NO: 442501 - DNA, 100 bp, Homo sapiens
gacgtggtggacagtgaggcgctgcaggtatacatgaaacccccagcacacgaagaggccaaggcgaacctagacaagaataagcagacgctggagaaag

SEQ ID NO: 442502 - DNA, 97 bp, Homo sapiens
gtgagaagcccaactaaagccccacatttgcagctcattgaaggaaagattgtgttcacctattgaaaattaaaaagacattttgtttatgtaaaag

SEQ ID NO: 442503 - DNA, 97 bp, Homo sapiens
ggacacgcgaatttgaagatagagacaggtctcatcgggaggaaatggaggaaattgaagctcaagaaggtgaagatgatacctttctaacagccca

SEQ ID NO: 442504 - DNA, 74 bp, Homo sapiens
aaaaagcattgctggtatttcgaaggactctatccaacctattatatgtgggcctcatgagagatgtggagtcc

SEQ ID NO: 442505 - DNA, 50 bp, Homo sapiens
attgaatagatgtctccctattggcagaagctcctcctggggtagagaca

SEQ ID NO: 442506 - DNA, 100 bp, Homo sapiens
ctgagtgctaaactgtgtggggcgcggatgggatccagctgttagtcggtatcgtcagtgaagcaggagcatcaatctacagtgtcagccctgaagctaa

SEQ ID NO: 442507 - DNA, 74 bp, Homo sapiens
ggcatctgccggctgctccgcaccccggggtcccaggaagggcggcccagataaacattgacgatcttgaggat

SEQ ID NO: 442508 - DNA, 50 bp, Homo sapiens
ggtcggaatcagatttgaaaatgaaagtcagccaacagggaagagtgtcg

SEQ ID NO: 442509 - DNA, 100 bp, Homo sapiens
agtcacagaggggaacagatttcagtgtcctccttagctctgcagcgctgctgggacatcgccttgggtcccctcaaacagattcccatgaatctcttca

SEQ ID NO: 442510 - DNA, 98 bp, Homo sapiens
tggccctggagcggctctgctcggtcctcaaagattcgtgtgagggatgacaagatgcctttggcgcaccttgcaatagctgttgaagctgttggttg

SEQ ID NO: 442511 - DNA, 90 bp, Homo sapiens
cgcacaccctgcaggcccatccaggcccatccagacaataaacactgaatttcaatatgctgaaaccgtatttcgagataagtctggtcg

SEQ ID NO: 442512 - DNA, 50 bp, Homo sapiens
accggaatgtcatccagcgagtgattaggcaactcatgcagcaattccag

SEQ ID NO: 442513 - DNA, 100 bp, Homo sapiens
atgagcgatgttaccattgtgaaagaaggttgggttcagaagagggtagctgctgctggtggtgacaatgtcaaataacggcctagacattcaagacaaa

SEQ ID NO: 442514 - DNA, 83 bp, Homo sapiens
tctgctgcaccgacctcgacgtcttgcctgtgtcccacttgttcgcggcctataggaggatacgaagcgttttcggcttcctg

SEQ ID NO: 442515 - DNA, 74 bp, Homo sapiens
aaggattccaagtaactcttatttggaggcctttgagtctgtggtggagtacttcggagagaaccccaagacca

SEQ ID NO: 442516 - DNA, 50 bp, Homo sapiens
ctcaagcatccggcctatttcagaaaggggtttaaagccaatttgtctct

SEQ ID NO: 442517 - DNA, 82 bp, Homo sapiens
tcacaacatccgccgccactgtgacttgcagtcatcatccattaccacaaaattaggatattggtgctggaaaaggcaaata

SEQ ID NO: 442518 - DNA, 100 bp, Homo sapiens
ggaccctggacaccatccagctggctttcaagatgcagtgagtgaggggggggccatggcggaggagcggcccccccggctggtggattacttcgtggta

SEQ ID NO: 442519 - DNA, 82 bp, Homo sapiens
cggccggagcttctctcagccggtgcatggcggcctgctgcagatcttccctgagggccggcccgtggtagccaacatcgag

SEQ ID NO: 442520 - DNA, 98 bp, Homo sapiens
cgtgatcgactcggacacagaggacagcggcagcgacgagaacctggatcaggtaatcattaccaaatgaggaggaaaggacgatgtcatcgaggctc

SEQ ID NO: 442521 - DNA, 83 bp, Homo sapiens
ctctgcagctgaataacccttttaacgagtattccaaatttgatggcaaggtaacttgggtttttactcctgtaacaactgaa

SEQ ID NO: 442522 - DNA, 90 bp, Homo sapiens
atgtgctctgcgtgttgctgggtggacgccctgcttcatctggcccgccagaatcgggctgtggcccgcacagcccagaatgaacggtca

SEQ ID NO: 442523 - DNA, 100 bp, Homo sapiens
gagtcagctgcaacaggaagacccaatggatagatacaaggctttgataaaattcaagagttatttgtattttgaggaaaaagactttgtggataaagca

SEQ ID NO: 442524 - DNA, 75 bp, Homo sapiens
gtggggaccataactgatgatgtgcgggttcaggaggtacccaaactgaagatccggcactccacccagagcctc

SEQ ID NO: 442525 - DNA, 98 bp, Homo sapiens
cgcatgggcgctgggatagctgtcctctttaagaagaaatttggaggggtgcaagaacttttaaatcaacatttgagagggaagatctgatctcctag

SEQ ID NO: 442526 - DNA, 82 bp, Homo sapiens
ctgcgttgtaaatattgctttaccaaacaggtcatgcatttagaagattttaatgaaggtgcttcattttcaaatttgactg

SEQ ID NO: 442527 - DNA, 75 bp, Homo sapiens
cgccggccgtctccttaacaccgaacaccgtatttgtggaaacattagacaaatgttttgaaaatgtctgtgagc

SEQ ID NO: 442528 - DNA, 99 bp, Homo sapiens
gcaacggcggcctccaggcctcaggccccctcaccatcctagaggtcaagatcagctctggctagcccgatctgctcaacttcaagaagggatggatgt

SEQ ID NO: 442529 - DNA, 75 bp, Homo sapiens
tggcttgcagactcttggagcagagacgaaatggagaaggtagaggagatgccacataaaccacagaaagatgaa

SEQ ID NO: 442530 - DNA, 50 bp, Homo sapiens
aatataatcaactcctctgcctggagaaactcccatgtatggaatcccac

SEQ ID NO: 442531 - DNA, 98 bp, Homo sapiens
cccccggggcaagagcaggagcccggcaccccccgccgacaaggaggcaggcctagcgtcttggcagtcatggtgacaatgacgttgaaggtggggac

SEQ ID NO: 442532 - DNA, 83 bp, Homo sapiens
gggacgacgagtacgactacctattcaaaggtttttagaacttcagccataaaaatgggcagaattttccttgatcatatcgg

SEQ ID NO: 442533 - DNA, 80 bp, Homo sapiens
gaggcccacgtgggagcagtgagcggctggggatatgagactttctactcggaatatcctgagtgttgcgtggatgtaaa

SEQ ID NO: 442534 - DNA, 75 bp, Homo sapiens
acaacaggcgagacctggagatggacctgtgatctggaccgttccccagcacaccccaccccactcagccgctca

SEQ ID NO: 442535 - DNA, 90 bp, Homo sapiens
gtgggtactgcattcctaccggtgtgacagggcagagcggcttgggtaaatccaccttaatcaacaccctcttcaaatccaaaatcagcc

SEQ ID NO: 442536 - DNA, 100 bp, Homo sapiens
ccagttctacgagctgctgatcaaaggtgctggagaatctggtaaaagcaccattgtgaagcagatgaggatcctgcatgttaatgggtttaatggagag

SEQ ID NO: 442537 - DNA, 97 bp, Homo sapiens
tatacatctctcatcatttcagcaacaaggaaataaattagtggcagagtaagggtgacttgaccttgccaccatggaagaaagagtacaaagacga

SEQ ID NO: 442538 - DNA, 90 bp, Homo sapiens
ctggtcctgctgctcggggtccgcgcggcctccgcggagccaggagggagccatggatttgctgcgggagctgaaggccatgcctatcac

SEQ ID NO: 442539 - DNA, 83 bp, Homo sapiens
agggcggcctgagcccggcgcaggtgaccggcgcgcgggagcgctacggccccaacggacgccaacaaggagagcagcaagac

SEQ ID NO: 442540 - DNA, 82 bp, Homo sapiens
ggagcagctggctctgggccttgaacattccgaaactgtcaagattggcaaggttgcagattatattcctcaactggccaaa

SEQ ID NO: 442541 - DNA, 74 bp, Homo sapiens
cggaggccaactggggtccccggcctcgtgcccggccagggtggggaccaatgccatggacagccccctcctca

SEQ ID NO: 442542 - DNA, 82 bp, Homo sapiens
tctcctggagacaaccaagcccaggactggaaaatgagagtcccacgaactggctgggtatacagaaatgtccagaggccgg

SEQ ID NO: 442543 - DNA, 75 bp, Homo sapiens
caccagtaacaggagactgcagcagacccaggcccaggtggatgagattatgtttgagaccttcaacaccccggc

SEQ ID NO: 442544 - DNA, 75 bp, Homo sapiens
cagctctggattaccttgcaccttatgccaagtgtggcgtccagaacttcaaacgccgagagaagtgcttcaaat

SEQ ID NO: 442545 - DNA, 75 bp, Homo sapiens
gacagagacacacggtcactgcagctgaagccgctgcccctgctacagaaacagtatctcacctccctaaactgg

SEQ ID NO: 442546 - DNA, 98 bp, Homo sapiens
aacaaatcggaaaagaagaccatctcaccagagcatgtcatacaagactaaatgtgttaaatgggcttgccaacaatatggatgatttgaagataaac

SEQ ID NO: 442547 - DNA, 100 bp, Homo sapiens
aggtctttgctgccatcctttcttctctaaaattgactggaacaacattcgtaactgcaatgattcgtgtgaataccttctctcaagtggcagatttctt

SEQ ID NO: 442548 - DNA, 139 bp, Homo sapiens
gagcaagagcccgtggacacagtgagcagcttgtttcacatgctggtggactcacccatcgacccgagcgagcaggaacgaatgcaggaatttgggaactgagctgtgcaagtgctgaagaaggagatttgtttggagg

SEQ ID NO: 442549 - DNA, 100 bp, Homo sapiens
ggtcaattccagggagataactttcgtatcacaaaagcagatgctgctgaattctggagaaagttttttggagacaagagcattgggagcgccatttttg

SEQ ID NO: 442550 - DNA, 113 bp, Homo sapiens
cccgggaggaaggaacgaggcaaggagctaaagcagcgtgcgttcagccctgggttggaatcgaagcctcttaaaatggcagatgacttggacttcgagacaggagatgcagg

SEQ ID NO: 442551 - DNA, 103 bp, Homo sapiens
gttggcgcttggacggcgggaaccggctccggagcgagaacgcgcaacactctgctccagccaaggtggtgagggcagctgttcctaaacagcgcaaaggcag

SEQ ID NO: 442552 - DNA, 75 bp, Homo sapiens
gaaacacaaagcagcccaaccaaaggcctgattcggactccaccaaacactcaactccatcgaatagctccaacc

SEQ ID NO: 442553 - DNA, 75 bp, Homo sapiens
acacctgccatcatggagggttatccagcacctggaggatacctgctacctctgacatagcccagagatacagga

SEQ ID NO: 442554 - DNA, 82 bp, Homo sapiens
atcgggagtacacagacatcatccgcttcctgcctgacacagctcacttcaagaagtgcacaatgtcagaacgtggaattaa

SEQ ID NO: 442555 - DNA, 97 bp, Homo sapiens
caaacctgtatctgtgcaggcaatgtggtctatgttaacaatgaatgggcaaccagtgttggggaaggagggagctttggagaacttgctttgattt

SEQ ID NO: 442556 - DNA, 85 bp, Homo sapiens
ggcattgaggactttccttacctgtttttccagctcacccactgccagcagaggaacaaaacataaccctttcatttgtactgcc

SEQ ID NO: 442557 - DNA, 82 bp, Homo sapiens
caaacagacgctccctgtgatttatgtcaaggtatcatgaactgatcactaaatatgggaagttggagcctttggcagaagt

SEQ ID NO: 442558 - DNA, 74 bp, Homo sapiens
gtttaacacaggaatgagaagtagagcacatagctgctaagataaggattggcctaatgaagaagttcaacctg

SEQ ID NO: 442559 - DNA, 100 bp, Homo sapiens
aggaaccaattccggacacataacaagcagcagtgaggacaccaaagggaaaagtccggcatttacagaaggcttttgcttcaagagtagataaatccac

SEQ ID NO: 442560 - DNA, 99 bp, Homo sapiens
cagagatcagaacaatggcctaatgtgtgttaaaagagctagaaacattgggaaaggacttatatggggcaaaactgattgcacaaaaatgccaagttc

SEQ ID NO: 442561 - DNA, 73 bp, Homo sapiens
gcgtggactgcaacacccagcagcgcgtcttcccaagggattgttgaagaaacttctgaagagggaaactctg

SEQ ID NO: 442562 - DNA, 96 bp, Homo sapiens
gacgtggagaggggccgaaccgtgaagggctggaggccccggcggctaggagtacgaccccagcaaagcgacctttgtgaaggtggtgccaacccc

SEQ ID NO: 442563 - DNA, 114 bp, Homo sapiens
cgagcgcccggattggggatgagtatgcggaggacagctctgatgaggaggaccaagaatcgccttcagccctgtctggtgcatccttggcagaaagtgaggaggaaaacaccc

SEQ ID NO: 442564 - DNA, 75 bp, Homo sapiens
tccaaggtggcacgcgtggcggcggccgaggagagcaccgggaaagcctctgccagtacgggatccctgaaccat

SEQ ID NO: 442565 - DNA, 100 bp, Homo sapiens
gccacggtggataacgacaagaaaaacaatcgcttcaatgatgggaaggtggatcccgccgggaggtactttgctgaaaccatcatagcctttgcctggg

SEQ ID NO: 442566 - DNA, 100 bp, Homo sapiens
cgtctccgccggctactgccgcttcagttctcccggtgtggccacgagtcggatgcagacagacatgctgaactatctggaagtccactgaaaagcaaaa

SEQ ID NO: 442567 - DNA, 50 bp, Homo sapiens
cttgtccataaggctgaaccggcaaatatctacccaaggccaaagccacg

SEQ ID NO: 442568 - DNA, 100 bp, Homo sapiens
ccttgccagatcattttgaaccagggatttacaagaccagctagaggatatgatggaagatgcaaatgaaatccaagaagcactgagtcgcagttatggc

SEQ ID NO: 442569 - DNA, 83 bp, Homo sapiens
atcaatgactgcaagcacctattatgggagaaacacatctcatctttcctaaaaaagcttcagtggagcagctgcaaaaaatt

SEQ ID NO: 442570 - DNA, 98 bp, Homo sapiens
cccgcgcctctcttcgcctcgcctcgggacccgcggtccccgctcttgctgctccggagaaggggtctggtcgaaccacggctgtgcgctcacgagag

SEQ ID NO: 442571 - DNA, 98 bp, Homo sapiens
cccaggctcaagcagtcctaccatgtcagccttcccagtagctgggaccacagtcctggaaagacaagcatcatgcctctgaccagtgccttcagggc

SEQ ID NO: 442572 - DNA, 74 bp, Homo sapiens
cccgaacgggttgcttcccccgctgcgagggtaaaggcagcagtaatgctaacgctagcaagtaaactgaagcg

SEQ ID NO: 442573 - DNA, 100 bp, Homo sapiens
cctatcagagtctgcatcccaatatcaagtacgctgggagcggactcttggagctattgtaagacaaaagaatcacccaatgactcctgaggcagtcaag

SEQ ID NO: 442574 - DNA, 99 bp, Homo sapiens
atcatcttcaacttgtagacacagccgggcaatgtgaagctcatctaggtcacgtgtttcctgatggacctgggcccaatggtcagaggttttgcatca

SEQ ID NO: 442575 - DNA, 101 bp, Homo sapiens
gccaaacagcccagctcgcgcttcagcgtcccggcgccgtcgcgccactcctccgagtgaaattattttggcccttcatcaattagatcttcttcagaaaa

SEQ ID NO: 442576 - DNA, 153 bp, Homo sapiens
tgtgtacccacgagagaacccccgcatcctgtttttcctgagcaaccagagaaaccacttgaccttgcacatatagtgttcgtcacaaggcatcgcagaaggtttatgctatgaagcttcttagtaagtttgaaatgataaaaagatcagatt

SEQ ID NO: 442577 - DNA, 113 bp, Homo sapiens
gcgcgcagggcctgcagcgggagctggacggcgagcgcgagcggcgcgagaaagaaggtgctcgggtcttcggggcactgggtcccatcggtccctcctcacctgggctcacc

SEQ ID NO: 442578 - DNA, 98 bp, Homo sapiens
tcatacatggctattgatggcagtgctcttaggaccttatcatgtccttcactgtatccatggcaatcgggctggtacttggaggatttatttgggct

SEQ ID NO: 442579 - DNA, 80 bp, Homo sapiens
acggtttgagctcagatatcgggctgaacggtcaaagacattcacaacatggatgtctattatcctcccagtccacaacg

SEQ ID NO: 442580 - DNA, 82 bp, Homo sapiens
cctgcagcgaaggatcctggttgagctgccatcagtcatgctcttaaacggggactgcccagagagcctgaagaaggaggcg

SEQ ID NO: 442581 - DNA, 98 bp, Homo sapiens
tcttgttctgtggagaataacggctgcacctggagattgacgcagagtgggcggcggtggtggcatcagtgtttttctgaccgaagttctcatttcct

SEQ ID NO: 442582 - DNA, 100 bp, Homo sapiens
acaaagcctttgaactgatgcattctggaaagaggtcagaggacatgccttttagccccaaagcatctgttgctgctatggaagcaaaagaacagttgtc

SEQ ID NO: 442583 - DNA, 100 bp, Homo sapiens
tgggggaggaagccctttctcctcggcactgtattctttacctgcttcccaatcccactgatgaggatcagcccatgaaagcacacctgagctgctctta

SEQ ID NO: 442584 - DNA, 50 bp, Homo sapiens
aaagcctcctctcatcctcagaaggacattctgagcatgtgagacctgag

SEQ ID NO: 442585 - DNA, 100 bp, Homo sapiens
cctcatcccacacttatggaaaaagatgacagtgcacagacgagatgaaatccacgatgggatgaacctggagctttattatcaatagatgagaatcctc

SEQ ID NO: 442586 - DNA, 100 bp, Homo sapiens
agttcaagtacagatcacacgcccactaaagcccagaagaatgtggctaccagcgaagattacactagatgtgttggctgatatgggtcatgaagagttg

SEQ ID NO: 442587 - DNA, 50 bp, Homo sapiens
ggaaaagtctttcagaataaaatgccacatgaaatgaagatcacctctgc

SEQ ID NO: 442588 - DNA, 99 bp, Homo sapiens
aaaaagatgctgtaaatgatgatgattttgagccatacttaagtagccagacaaatcagatgtggaaactgatgtctagagaagctaagcaatttgctt

SEQ ID NO: 442589 - DNA, 100 bp, Homo sapiens
gggatcgaggcctcccctggccagaagcggcccctgtggctgtgtaagatctgcagtgagcaaagagagatgcagtggcagaacgtggagcacgttggtg

SEQ ID NO: 442590 - DNA, 75 bp, Homo sapiens
ccttatttaaacaggttcattttggaaaagcattctcctggtgtgcagcctgcagatgtgaaggaagttgttgag

SEQ ID NO: 442591 - DNA, 100 bp, Homo sapiens
ttgttttgtggggactggagagacaagtaaactctcagagtaactgtcccctctgactaccatttctaagcctcggccaccttcgaggacttccagatcc

SEQ ID NO: 442592 - DNA, 75 bp, Homo sapiens
ggttcgccgcggagacaagtgagcactctggcaggctgccctgagcacgctcaaccccaaccccacggacagctg

SEQ ID NO: 442593 - DNA, 85 bp, Homo sapiens
ggtcacagataccagcagcatcagtacactcaccaacatgtcttcaagtaaacaggtgaccattgtgaggtagatattttgttct

SEQ ID NO: 442594 - DNA, 96 bp, Homo sapiens
cactgaggaggcggcggccgacggtggcggcgggatgcaggaatggaagattgcgaaacaatggaagatgtatacatggcttcagtagaaacagac

SEQ ID NO: 442595 - DNA, 75 bp, Homo sapiens
ctatacacgtggcttccagcacacaggcatctacagtgtcatgatccagaagagaatgctctcatcactcagtca

SEQ ID NO: 442596 - DNA, 98 bp, Homo sapiens
gttgcgttgagtgcagagttcagtgtggtttcttcaagagaaataagaaagatcattatgatgccacatatcacaaggctgagatccatgctcagcca

SEQ ID NO: 442597 - DNA, 75 bp, Homo sapiens
atgtccaaaagttaaatctactacagggacaagtttcagagctgccactcagaggctgacccgcggctgattgag

SEQ ID NO: 442598 - DNA, 100 bp, Homo sapiens
gttggcacgggctgtgaaacctcatcagatttatgatattcagactggcaacaagctgttgactctgtttaacccagatcttgccaacaactacaagagg

SEQ ID NO: 442599 - DNA, 75 bp, Homo sapiens
ttaatcctcaatttaagcctgatctaacccctagaaacagctgagatgagtgaactgagtgtggcacagaaacca

SEQ ID NO: 442600 - DNA, 98 bp, Homo sapiens
acagcaatgatagccattctcactcaccagtttcctgaaatcatgggtatttttgctaaagctgtgctgatgggaagggtgcctgacaggggaggccg

SEQ ID NO: 442601 - DNA, 100 bp, Homo sapiens
tgagcagcttcagatagctgaagacaatcttcgggccctcctcatttatgccatttcagctacagtgttcacagcccttggactggacagtgccaatgag

SEQ ID NO: 442602 - DNA, 83 bp, Homo sapiens
cgcaaacaagccaatcccaggaggaaaaacggtgcgcgcggagccatggttatcatgtcggagttcagcgcggaccccgcggg

SEQ ID NO: 442603 - DNA, 74 bp, Homo sapiens
gaatccattggctctgaagtggggtctctggtgaattttgaagattgcaccggtcgacaaaggacagcctattt

SEQ ID NO: 442604 - DNA, 100 bp, Homo sapiens
aagcctttcagtgaatgaaatgactcttagcactttgaaagaaaaaggctacaaagctgctttcattggaataggcatccaaagcctctgggatgtgttc

SEQ ID NO: 442605 - DNA, 82 bp, Homo sapiens
tcaacgccatcgcagtgctgcacgaggagcgattcctcaagaacaatggtgtcctactcttctgtcctcacagccatcagta

SEQ ID NO: 442606 - DNA, 100 bp, Homo sapiens
cgaggaaatgcgcttcctgagggagtgggtggagagaggcacagttgaatgctgttgatgctttgattgactccatgagcttggcaaagaaagatgagaa

SEQ ID NO: 442607 - DNA, 90 bp, Homo sapiens
cccacagagcagtgcttgctgctttttctaactatttcaagatgatatttattcaccaaacaaggttatgaagacagtatggagtttcca

SEQ ID NO: 442608 - DNA, 83 bp, Homo sapiens
tgggtctctgatcattgtcgtcagtaccatatcccatgtccttatcagatgcatgttcctggtcattcgggatttataggcaa

SEQ ID NO: 442609 - DNA, 50 bp, Homo sapiens
ttcatatggaagaggacagcagaggtgttaaaccgcctgacttttgcgtc

SEQ ID NO: 442610 - DNA, 82 bp, Homo sapiens
cctcgactccctgcagaggctcttcctcatcatctcagccacgaagtacagccggaggagcccagcagccggggccgcccta

SEQ ID NO: 442611 - DNA, 98 bp, Homo sapiens
tcgctcgcatcgctgccgccaacgggaaacgaggatgcagtcaatcagatggccgttactccctttccagtgccatcaagttctccatcttctattga

SEQ ID NO: 442612 - DNA, 103 bp, Homo sapiens
cccgttcttgcctcaggccagtcgcctccaggccaagagggatccttcacccgtgtctgcccaggatccggttgtggccgtggctgaggatggccgggagaag

SEQ ID NO: 442613 - DNA, 80 bp, Homo sapiens
caagggcatgatgcctccactagatgtaatccctgttcattactacttaatacctccaccaacaaagactaagaatggca

SEQ ID NO: 442614 - DNA, 51 bp, Homo sapiens
ggcggcggcactgagggccccgacccaggatcttgaaaatatttgtgcagc

SEQ ID NO: 442615 - DNA, 50 bp, Homo sapiens
cggcgccctggggccccggagaggagtgagagcgcagagagccctgagac

SEQ ID NO: 442616 - DNA, 100 bp, Homo sapiens
agccggccttcgggtcgggcgtctccgccggctactgccgcttcagttctcccggtgtggccacgagtcggagacctttggccagagcaagacataaaag

SEQ ID NO: 442617 - DNA, 82 bp, Homo sapiens
agcaagcgggagaccaggagctcctccaccaggccaaagacttcggcaagctcaggccccggggcctccagcggcaccagcg

SEQ ID NO: 442618 - DNA, 50 bp, Homo sapiens
tattctctgtactatgtcgattcgacaggatactggtatcgggatgacac

SEQ ID NO: 442619 - DNA, 97 bp, Homo sapiens
gggattataggcgtgagccaccgtgcctggctgaagatagccttctggcaggcattcctcagagagtcaagttcactgtcactaccggccattatac

SEQ ID NO: 442620 - DNA, 125 bp, Homo sapiens
gcagccttggcaagaaaacttgctgcataatcttacatggactaaagatgaaactttaaaccgcaagtttgagggcctgtgtctgctgtccctgctggtaggggagagccccacagagctattcc

SEQ ID NO: 442621 - DNA, 113 bp, Homo sapiens
cgaaggagtcgccagggctgcgtaggcttgtggcgcgcccgcggagaggccgggagtgaagacatttccacctggacacctgaccatgtgcctgccctgagcagcgaggccca

SEQ ID NO: 442622 - DNA, 75 bp, Homo sapiens
atcccaggaccctcttcgcgggcgattcgcgtagcctcagacctcgcgacctgtgtcagcagagccgccctgcac

SEQ ID NO: 442623 - DNA, 100 bp, Homo sapiens
tggaggagacgtgcagctacgaggaggccttcgaggctctggagtcctccacggctacggttgtgtccaagtacatcgaaagtcccgtgttgttccttcg

SEQ ID NO: 442624 - DNA, 100 bp, Homo sapiens
gaggggaggattttgaggacacttgtggagagctcgaattccagaatgatgaaattgtggtcggaccgatacctggagagccgcgatgcctctcgactga

SEQ ID NO: 442625 - DNA, 101 bp, Homo sapiens
aaagactttctggagagcatccgcaaacattcagacaaaattggagagactgccatgaagcaaatatattcgactttatgggagaaaatttagcaaagaag

SEQ ID NO: 442626 - DNA, 100 bp, Homo sapiens
gcctcctatgttgcctggggacacagcaccgtggtgaacccttgggacaggccttcagtatttggcatcacctttacatggagcacaaagatgatgatga

SEQ ID NO: 442627 - DNA, 100 bp, Homo sapiens
cctctgtcttttctgtgacgggagcaatgctgacctcggtttcctggacccattccgactcagacacgttggtcgtcattgcctccgagcccactttagc

SEQ ID NO: 442628 - DNA, 80 bp, Homo sapiens
gcgaagacgcgaccgcggcgcgagtcaccatgacttaattcagtgcacaaatgagatgaatgtgaacatcccacagttgg

SEQ ID NO: 442629 - DNA, 75 bp, Homo sapiens
gcaacatcttgtccataaggctgaaccggcaaggcatcttcccttccaaccagatatggtatcccaattggaagc

SEQ ID NO: 442630 - DNA, 108 bp, Homo sapiens
gtccggcccgggactcgggtttgggcgaccaggaggtgccggtggccgcgctcggacccgacaatgcagatcttcgtgaagactctgactggtaagaccatcaccctc

SEQ ID NO: 442631 - DNA, 100 bp, Homo sapiens
ctcacagctgcccagctgaaagccaaggagacacaccctgagccggcgccgtgtcatcccgctgccccagtggaaggccaacccggagacggaccctgag

SEQ ID NO: 442632 - DNA, 51 bp, Homo sapiens
aactacaacaagttcatctcagccacagccctggtacctgacagtgtaaag

SEQ ID NO: 442633 - DNA, 96 bp, Homo sapiens
ggaaaggaaccgttctggatcaggtgcctgtcctgagacccatggacctgatggtggaggccaccccacgaagagtatttgccaacgcacacacat

SEQ ID NO: 442634 - DNA, 100 bp, Homo sapiens
gggagaaaggcgggcccgggaacagttcgtgccctcgtgaggctggcatgcaggatggcaggacagcccggccacatgccccatggagggagttccaaca

SEQ ID NO: 442635 - DNA, 75 bp, Homo sapiens
gaccaacttaagctaaccagcaacttctattatcctcccagtccacaacgctgaaccgtggctggacgaatgttt

SEQ ID NO: 442636 - DNA, 83 bp, Homo sapiens
gctccagagcccagacttgcagaggaaaggagcagtggcttccggttgaagccaccaacgctgatccacggccaagcccccag

SEQ ID NO: 442637 - DNA, 83 bp, Homo sapiens
gcggcgatatggaagaggagggcaagaagggcaagaagcagcccctgtcaaagggaacaggaagcagtccacggagggtgacg

SEQ ID NO: 442638 - DNA, 104 bp, Homo sapiens
aagtaaaaagctttcgtttcactccaagagtccagcgcctgaatgaacttgagtgatggctcctgcacccaggccggtgggggcatggaggactccgtggtggc

SEQ ID NO: 442639 - DNA, 60 bp, Homo sapiens
ttgctcggccgatgaagtgcagaggtttttttctgcacggaagttatggaagatctgcag

SEQ ID NO: 442640 - DNA, 83 bp, Homo sapiens
gtccgcaccaggggccctcagggaagagaccctgcaaagatcctgggagaccaaggtgccacgtgtgccaacgcatacacttg

SEQ ID NO: 442641 - DNA, 100 bp, Homo sapiens
tcctgtccctgctgctaatggagcaatacgtttccattgtgatcccaccttctgggcaaagaatgtagtcaatttagagttcattccttgcatggacaag

SEQ ID NO: 442642 - DNA, 75 bp, Homo sapiens
ggtgtggacatgtgggctgttggctgtatattagcagagttacttctaaggttacccagcatgccacaatctgat

SEQ ID NO: 442643 - DNA, 82 bp, Homo sapiens
gaagctcaccgacagtgccctgagggccttcgagagctaccgcgccagacaggatagtggctacccagagacgctggtcaac

SEQ ID NO: 442644 - DNA, 100 bp, Homo sapiens
attcttactctgaacaatccaagtagaatgaatgccttttcagaatcaagattagaaggatggctttcattgcctgtacgaaacaacactaagaaatttg

SEQ ID NO: 442645 - DNA, 75 bp, Homo sapiens
gccagcacctttcggcttctgagacggcggcagcagcggcattcaggtgacaccggctccgacacgccgctaacc

SEQ ID NO: 442646 - DNA, 77 bp, Homo sapiens
tggcatcgacaaaagaaccattgaaaaatttgagaaggaggctgctgagggtcgctggtcatcctctggcacagaac

SEQ ID NO: 442647 - DNA, 100 bp, Homo sapiens
tgttctcaaatagtgatgaagctgtaatcaataaaaaacttcccaaagaactcctgttacgaagaggaatctcttgttggcatttgaagcggctgaaagt

SEQ ID NO: 442648 - DNA, 88 bp, Homo sapiens
gcctccatcttctgtgcttaaggatccttccctctcaacctccaaggtagctgagactacagatcactggccatcaacctgaccaact

SEQ ID NO: 442649 - DNA, 74 bp, Homo sapiens
tactcggagcgctgtcgcggccatgtctgccaggtggtcattgcattttccctgaagatgagatcccagagaag

SEQ ID NO: 442650 - DNA, 101 bp, Homo sapiens
aattttggaaaggccactgtaagctccactagtgactgacattttacagatgacagattggtgttgctctctttaactcagacctgatcacctgtttggag

SEQ ID NO: 442651 - DNA, 83 bp, Homo sapiens
attccattggagaacccaaaggaaaagcgaccaggacttttcatatgtgcacaaagttccatcctttcaaccttttgtgggat

SEQ ID NO: 442652 - DNA, 74 bp, Homo sapiens
gccaaatggacgggactattaaggggacggcaaaacagaacagaaaggcggagataaaaagaggggtgttaaaa

SEQ ID NO: 442653 - DNA, 74 bp, Homo sapiens
ccggcggccaatcacagtccactttggacagacccaacatgagtgaagtttcctgcaagaaacgggacgactat

SEQ ID NO: 442654 - DNA, 75 bp, Homo sapiens
tcacgggcactagtgtggctctcctgttccagcaattggtttcagaatggcttcggttattgcctttccttggtg

SEQ ID NO: 442655 - DNA, 100 bp, Homo sapiens
aagatcacctgcatcagtgtgcagaggccgttgcttttgaccagaatgctttggttaaacgaatcaaagagaatgtggccccgtcccagagcaccacccg

SEQ ID NO: 442656 - DNA, 83 bp, Homo sapiens
ggccaagggaccaaggtggaaatcaaacctcggggtgtggttttctctcggttgtgcctatttggccttggaagactatcaag

SEQ ID NO: 442657 - DNA, 101 bp, Homo sapiens
gagcaaaagaaaaaagaatgggtcaaccaagaacgtcaaacactccaacgattgagagcatttaaagatatatgaaaaacagtagctccgtatcgaataca

SEQ ID NO: 442658 - DNA, 78 bp, Homo sapiens
gcagattgtgcttgtagatgactgaggacggtcgggccctggaaggaacgctctcggaattggccgcggaaaccgatc

SEQ ID NO: 442659 - DNA, 118 bp, Homo sapiens
gcctgaatggcgggaagtgtgaagcggccaatggcacggaggcctgcgtgtttggtgcacctcgatttggaggaagtagggcagggcccttatctggaaagaagtttggaaaccctgg

SEQ ID NO: 442660 - DNA, 96 bp, Homo sapiens
gtacagggacgtgatgttggagaactacaggaacctgctttctctcgatgaggataacatccctccagaagatgtgctggcagctgccgtgtttgc

SEQ ID NO: 442661 - DNA, 100 bp, Homo sapiens
ggctgtggtggccccgagcgcgagtgtgtaggtgacaggacagcggccaggcccgcccctcccctcgatgaacaagagaactgggcaacccatgatccac

SEQ ID NO: 442662 - DNA, 74 bp, Homo sapiens
tttccactggctggctgaggaccgtgtggactttgtaatagcctgcagctggtgttttgagaagccctactgct

SEQ ID NO: 442663 - DNA, 83 bp, Homo sapiens
cgcagatcagaggtagtcggacctttcccgctggcgcgcagcctcagctaggtccctgtgcgttttattgcgacctgccggtg

SEQ ID NO: 442664 - DNA, 90 bp, Homo sapiens
gcaacggcggcctccaggcctcaggccccctcaccatcctagaggtcaagatcagctctggctaggcggcccctccacagggcccctctc

SEQ ID NO: 442665 - DNA, 88 bp, Homo sapiens
aaaacggcgagagtgggcgagaacgtccactgcgggccggcgaaagctggagtcctaagcagacttaaagccaagaaaataagaagag

SEQ ID NO: 442666 - DNA, 100 bp, Homo sapiens
atcaccggcgtgccccaccatgtcagacgcagccgtagacaccagctccgaaatcaccaccaaggtgcagaggccaagaccgttttgcccaagaaggaga

SEQ ID NO: 442667 - DNA, 80 bp, Homo sapiens
agcggcatacagaatgcctatgaccggcgtcgagaatttcaactgatcttcaaagctgctgcgggcattctatgtcccct

SEQ ID NO: 442668 - DNA, 100 bp, Homo sapiens
tccaactctcggaaccatgtttgcagacttggattatgacatcgaagaggataaactgggcccgggagctggcagaccctggcccaatcctaacagtgct

SEQ ID NO: 442669 - DNA, 100 bp, Homo sapiens
tgtatgctcatcagtattatatgcagtagtatggcatttcaaatatagatacaaccattgaaggaacgtcagatgacctgactgttgtagatgcagcttc

SEQ ID NO: 442670 - DNA, 100 bp, Homo sapiens
aagaaactggcctctgagttaagttttgattttcgcattgaatctgtaggtctctcaggcagctgcagagcttcaacagtactgtatgcagaatgcctgc

SEQ ID NO: 442671 - DNA, 75 bp, Homo sapiens
cgcgtacttccgcgttccggcatcgtcgcctggtgcgtgggtcttgctctatcgcccaagctggagagcagaggc

SEQ ID NO: 442672 - DNA, 75 bp, Homo sapiens
acaaaaggaaggaggaagtgatctgggaatgtctggcaactctggtggttgaccagattgacaccctgacctctg

SEQ ID NO: 442673 - DNA, 75 bp, Homo sapiens
ggatggaggaagactcgatccgcctgcctgcgcacctgcgaaggaaatctcagatggaggaagtgcaagatgaac

SEQ ID NO: 442674 - DNA, 51 bp, Homo sapiens
gatccagcctgcggagcctgtggggcaggatgtgatggagctgcttgaaga

SEQ ID NO: 442675 - DNA, 50 bp, Homo sapiens
ttaccatgctgccctagcaacaacagatttcaccaaaagaattgtgagag

SEQ ID NO: 442676 - DNA, 82 bp, Homo sapiens
ggaagacgcgtgccgcggcgcctggttgcctgcagcggcccggacccgagagagcactacaaacaccactggtttcccgaaa

SEQ ID NO: 442677 - DNA, 98 bp, Homo sapiens
tttcctggcccttttgaagaggaaatgaagggtattgccgctgttactgatatacctttagctcctgggcaacgtgctggtctgtgtgctggcccatc

SEQ ID NO: 442678 - DNA, 76 bp, Homo sapiens
caggtgacacctattattttggagttcgatcctttggtacagaagacagaccgacagatcgtccaataccacctcg

SEQ ID NO: 442679 - DNA, 74 bp, Homo sapiens
tcgctgacgacgacaacacctatagtctggagctcttccaggagagcttcctgcggctgagggagggatgaaac

SEQ ID NO: 442680 - DNA, 74 bp, Homo sapiens
ttgcctcgctcactgcacgccagaacctgaggagagaatggcatgccagcaattaccagctctggctgggtcgc

SEQ ID NO: 442681 - DNA, 100 bp, Homo sapiens
gaattagactggtgtttagaccagctagagaccatacagacctaccggtctgtcagtgagatggcttctaacaagcggagctggagtttgttcagatcat

SEQ ID NO: 442682 - DNA, 98 bp, Homo sapiens
tggacccaccacagcctgcacactggatgccggtggtggtgtgcacattgagccccggtatagacagttcccccagctgaccagatcccaggtgttcc

SEQ ID NO: 442683 - DNA, 80 bp, Homo sapiens
ggaaatgaggaggagatggtggaggaggctgaagtcccgcagcgtggacaagcagcatgccgtcatcaactacgaccagg

SEQ ID NO: 442684 - DNA, 83 bp, Homo sapiens
tgaaaaagcaatgacaaatcactgcaagagtacacgtcataagcaaaatactgagatctccagtctatgtgctgaagaagcag

SEQ ID NO: 442685 - DNA, 75 bp, Homo sapiens
tcactcgctcccttgatgatcttgaggacctgaaggagaagaaggagaaggtggaggagaaggcaagccggaaag

SEQ ID NO: 442686 - DNA, 82 bp, Homo sapiens
ggagggcagcatgtcgcggcggcggcacagcgacgagaacgacggatcttcaagatgaagttcaaagggagaatactaatct

SEQ ID NO: 442687 - DNA, 88 bp, Homo sapiens
gcccccttgagcctgtcccaagccctggtgccaggtgtccatccccgtgctgagagtttgtttctaatggaagaggttcacatgataa

SEQ ID NO: 442688 - DNA, 96 bp, Homo sapiens
ctttcacctatgaaagcaaacgtatgggcatcatcgtgcggaaatgcactcggtgatggaaagagagccactattctgaagaacacttggccaaag

SEQ ID NO: 442689 - DNA, 75 bp, Homo sapiens
tggcataaggaactctatcccaggaatacagctttgcattagatcaggaaattttacgtaaattagagaaggaga

SEQ ID NO: 442690 - DNA, 100 bp, Homo sapiens
agatggctgcacagtcagcgccgaaagttgtgctaaaaagcaccaccaagatgtctctaaatgagcggcgaggaaacgagacctctttcgttccttctag

SEQ ID NO: 442691 - DNA, 100 bp, Homo sapiens
ccaaactcggtaactctcatataaatagtaattccatgactcccaatggcaccgaaggacatttgtgaagatatttctgatcatgttgagcaaatccatg

SEQ ID NO: 442692 - DNA, 82 bp, Homo sapiens
cctgccatccgggagcagacggtcaagctcactgaccaggcatggctcccagctggggttcgagtgcccctccaccaagtgc

SEQ ID NO: 442693 - DNA, 90 bp, Homo sapiens
ctgttccaccttcagagcgtcacggcgtacgccctcatggggaaaatctccccggtgactttcaggtggccatggtggaggtgcagctgg

SEQ ID NO: 442694 - DNA, 100 bp, Homo sapiens
tttgctcgcatgcttacagagcttctctttgaattacatgtggcggccacacctgacaaactcaataagatctggcagtgtggtggggttctggaaacac

SEQ ID NO: 442695 - DNA, 100 bp, Homo sapiens
ccagagactgctgaaaagctggcccgtgacctgaaggctgtcaagtatgtggagtgttctgcacttacacagaatgccagaggattcaacatgagcatac

SEQ ID NO: 442696 - DNA, 100 bp, Homo sapiens
taatgaccaataagaagatggtcacaccatatgcaaatggtcgcttataccaagttgaatatgccatggaagctattggacatgcaggcacctgtttggg

SEQ ID NO: 442697 - DNA, 96 bp, Homo sapiens
aggttcttctctgtgtacctgcgcaggaagtcgcgctccaagagctccagcctgagccggctcgaggtcctggatgcctcatcccttagtttcaac

SEQ ID NO: 442698 - DNA, 100 bp, Homo sapiens
cttgcttttgcttcagcgttctgtggttgtcaacaggtgaatgcagaacattgacacaagaatcatgtgacgtatctccagtattgacacaggcaatgga

SEQ ID NO: 442699 - DNA, 100 bp, Homo sapiens
caggccgtgcgccggcctttggtcgcctccgtgggcctcaatgtgagtgatagttgcttcaggaatcttgcagaagaccgcagtgggataaatctcaaag

SEQ ID NO: 442700 - DNA, 100 bp, Homo sapiens
agttgtggcgaggcagatcctgccccgtggccgcggccgtctcccgccaagctgagccaccaaagaaggaggctgccaccacggggccgcaggtgaagag

SEQ ID NO: 442701 - DNA, 100 bp, Homo sapiens
ttcgggaatgctgagaaaacagacagatttgtcatgaagaaactcaatgatcgtgtcatgagataacaacatgctgtaccccaaggaagacaaggagaac

SEQ ID NO: 442702 - DNA, 87 bp, Homo sapiens
gacccggaggaggttcgaagctgagtatgtgacagtaataagaaacctgactcagaagcaagtgctttgaagaaaaaggtcaacaag

SEQ ID NO: 442703 - DNA, 96 bp, Homo sapiens
gtggacagtagttctgctgttgggctctttccaaattttaacacaggttcaggataagtttgaggtgctgaattacacaagcattcctatctttct

SEQ ID NO: 442704 - DNA, 100 bp, Homo sapiens
aggacatcctggaacctgggaaagggtgtcatggagaaactccagctgggcccagagattctgcagcgggaaaatccaaggcttatttatgccaggctga

SEQ ID NO: 442705 - DNA, 50 bp, Homo sapiens
gggggtgtgcaaacccgagagaactgggtggtggcacctccgtgttcagg

SEQ ID NO: 442706 - DNA, 133 bp, Homo sapiens
caccaccgaatggacgagttctcccggggaaatgtaccgtccagcgagttgcagatctacacttggaagtcaacttcaagcagattgacttgaaacgggatctcatttaggaagcataagtgtccaatcaaaa

SEQ ID NO: 442707 - DNA, 100 bp, Homo sapiens
aaaaaactttaaggctaaaaacaaagcaaaaccagttaccactaatcttaagaagccgtttccctggggagatggtaaccatactctattccataaccct

SEQ ID NO: 442708 - DNA, 75 bp, Homo sapiens
tagctcagcaattcttaccttcattccatattggaagaagagatttctacacatgaaaaaaatgcctttgtttag

SEQ ID NO: 442709 - DNA, 99 bp, Homo sapiens
tggagcgcttcaccgacgacaccttctgcgaggcctgcaagtccaccgtgggatctatcttgggatcccatggctttctttactgggctctggggcccc

SEQ ID NO: 442710 - DNA, 98 bp, Homo sapiens
ggccttggtggaggatttgaaataggaattgaggtgaccaagaatatggcccaggtgaccaaagccctggacaaggccctgagcaccatggacctgca

SEQ ID NO: 442711 - DNA, 100 bp, Homo sapiens
aactcaagctccatgaggagatgtttcattgtcgcataccataaagtctccaaaggatggcacagtaaagaaagtgttctacagagaaggtgctcaggcc

SEQ ID NO: 442712 - DNA, 101 bp, Homo sapiens
ggcctatcgctaccctccgaagtccgacggttgatgatgaagcgccggccgtgtaaatgaagatcgggtgaggagcaggacgatgcccaagggtgggtgcc

SEQ ID NO: 442713 - DNA, 90 bp, Homo sapiens
atcacagtggtggtggtgggggtagcaggtgtgatgaatgcagactctgctaccattttggctgtttggatcctcctttgaaaaagtctc

SEQ ID NO: 442714 - DNA, 82 bp, Homo sapiens
cacagatctcttagcaaacagttcggatccagatttcatgtatgaactgcatcaaagctggacgactcctctcctacattcc

SEQ ID NO: 442715 - DNA, 110 bp, Homo sapiens
cccgggaggaaggaacgaggcaaggagctaaagcagcgtgcgttcagccctgggacctcctgccccccgaggtctgcagtctcctgaacccagcagccatctacgccaac

SEQ ID NO: 442716 - DNA, 100 bp, Homo sapiens
cggagcccggcgctttccccgcaagatggacggtttcgccggcagtctcggttttctaaatagctttgaggagttacaggctgaggaatgcggcatcctc

SEQ ID NO: 442717 - DNA, 94 bp, Homo sapiens
gcaccatcagagaggaaggaagagtgtttgtgtacatcaactctggctcgaactctgcagccattctttgaaggattattaccccgagataatc

SEQ ID NO: 442718 - DNA, 95 bp, Homo sapiens
caacgccaggcgccgctcctttacagctccattgatatcttgatgatggggtatacctgagaggacagcagggaggtgagaacaatgaagtagct

SEQ ID NO: 442719 - DNA, 76 bp, Homo sapiens
cttccgcatcctccacaagggcgaggagctggccaagcttgagggaaacactactatgaagtatcctgtcatgacc

SEQ ID NO: 442720 - DNA, 90 bp, Homo sapiens
aggggcctgggccctcccgcgactacagccactactacacgaccatccaggacctgcgggacaagcactgtgtcctaacctacctccgcc

SEQ ID NO: 442721 - DNA, 82 bp, Homo sapiens
atttcggaccaggaccaggaagtaactttagaggaggatctggttgcagatatcaagaaagtcaacaacttcatcagagaac

SEQ ID NO: 442722 - DNA, 88 bp, Homo sapiens
aggctgttcgcagagctgcggaagatggtcccgcagcccccggaagccaatagactccctcagggactctcggtccctcagctactcg

SEQ ID NO: 442723 - DNA, 100 bp, Homo sapiens
aaaatggagaaattgctgctatcatccatcctaatctgcaggtcttggcatggtcacacctatcaatgaccttcctggtgcagatacatcctcatatgtg

SEQ ID NO: 442724 - DNA, 90 bp, Homo sapiens
gcaatttatccgtgtgcagccccaaactggaaagaagatgctaattaaagtgaagagggctgtgctgaagtttgctgctgccactggagc

SEQ ID NO: 442725 - DNA, 76 bp, Homo sapiens
gcgacggcgcgctgggctggcgcggcctgggtgccatgcctctgcaactcctcctgttgctgatcctactgggccc

SEQ ID NO: 442726 - DNA, 82 bp, Homo sapiens
gtggggatcagaacattgccatgttctatccaacctccacccaaatgtggaagtagtggaggaagtggaagtcgagaaaaca

SEQ ID NO: 442727 - DNA, 90 bp, Homo sapiens
ccagcagacaaagactatggtttaatgaaaatagatgaaccaagcactccttaccataggtgagctgtcagggagaaatgtcgaaacagg

SEQ ID NO: 442728 - DNA, 76 bp, Homo sapiens
gaaggtgcgtgtggggctgggtctcggagtgggagacgtggagtgcagtttcccggttggaggagcgggagtcgga

SEQ ID NO: 442729 - DNA, 100 bp, Homo sapiens
cggcaagggcgcgcccgggccgggcggcgcgctgcccacttgcccagcctgccacaagagtatggtgtttgcgaaaacttgcggaagctggagatcacag

SEQ ID NO: 442730 - DNA, 98 bp, Homo sapiens
ggctgtgctggctctggctgtggcaaatgtgactgccatggagtgaagggacaaaagggcagctgcaatgactctccgcacggtattattgtcattgc

SEQ ID NO: 442731 - DNA, 74 bp, Homo sapiens
ctcccacctgctttggaggcaggccgtccacaacaagggttatcagtgagctgaatggaaaaaacattgaagac

SEQ ID NO: 442732 - DNA, 82 bp, Homo sapiens
tctgctcaacgacgaggacctgacgcagcgtcgagggcgaggcccccagcagtgagactggcacatccctggacagcccctc

SEQ ID NO: 442733 - DNA, 100 bp, Homo sapiens
gttcggccatgtcagaaggtgcattttaccttttggtaatacctgcctggagaatggatctttcttactgaactttacaggctgtgcagtgtgcagtaag

SEQ ID NO: 442734 - DNA, 50 bp, Homo sapiens
cttcctcaaatgttagcattacaacgggtcccttcagtgttgtacgacga

SEQ ID NO: 442735 - DNA, 98 bp, Homo sapiens
tcccgggaccatgtccgcgctggcgggagcctcacagtctactcagagaaaaataaaagaaggcaaaatgagtcctccccatttccatgcaagccaga

SEQ ID NO: 442736 - DNA, 89 bp, Homo sapiens
gtggaacggggctcccaggacctccactaatcaccagaacaaaatgtgcagaatcgggaccagtattcacatctgctaagtgatcattt

SEQ ID NO: 442737 - DNA, 99 bp, Homo sapiens
gtcaactggagacaactctgaaggagcttcagaccctgaggaacatgcagaaggaagctattgctgctcacaaggtggcagatcatattggaagtgaac

SEQ ID NO: 442738 - DNA, 89 bp, Homo sapiens
gatttccggagtcagtcattttactgtcaagacatttcttcggcattctgcaacagcgtttgctgccaattgatggggcaaatgatctc

SEQ ID NO: 442739 - DNA, 100 bp, Homo sapiens
agcagatccgtggttccctgcagactggcaggagcagattccaaaggcacaggaagaagcttgcaggttcagcttgttggtttagatgaggagagttcag

SEQ ID NO: 442740 - DNA, 83 bp, Homo sapiens
agcgaagtttctgcttcctgctgcgggaatcggacgccccaggatctctctttcctcatcatggtacatttgaagtaataaag

SEQ ID NO: 442741 - DNA, 96 bp, Homo sapiens
tgctccgacgcggaccccagtaccaaggacatgtctcaggaaggctatggaactagatctcaacctcctctggcccccggaaaacctaaccatgaa

SEQ ID NO: 442742 - DNA, 50 bp, Homo sapiens
cttcgcctttcgctgcagtccgtcggtgatgggcagaggcttcagtgtcc

SEQ ID NO: 442743 - DNA, 100 bp, Homo sapiens
ggagaagcatcatggttcaacgaacatgcttgccaactcagccagcgtgaggatcctcatcaagggaggcaaggtggtgaacgatgactgcacccacgag

SEQ ID NO: 442744 - DNA, 100 bp, Homo sapiens
ccagggccgacccgggccggaccgaccccaggcggcggacatgcggaagcacgtggccatgaccctgctggacacagagcagtcgtatgtggagtcgctg

SEQ ID NO: 442745 - DNA, 90 bp, Homo sapiens
cacacaccaacaccaggcatctacatgggcagaccaactcatgagaaagatcagtctaaagaaaaggagaagaaagtgaaaaaaacaatt

SEQ ID NO: 442746 - DNA, 115 bp, Homo sapiens
gcggagcggaggggaggccgtgccaggcagggccggttcgtgcggaaccgccatggccgagccggcttcgctaacaacctgagagaagattacaaatttcaccacactttcagca

SEQ ID NO: 442747 - DNA, 75 bp, Homo sapiens
aaaacaccagatgatgaccctgagcaaggaaaatctgaggcaattgcagagcctgtttttgctgtggtcaaagct

SEQ ID NO: 442748 - DNA, 101 bp, Homo sapiens
acagtgaaatacaggcctggctttcagacttgatgatgctgtgtatctggacaatgagaaagaaagagaagagtatgtcctgaatgacatcggggtaattt

SEQ ID NO: 442749 - DNA, 98 bp, Homo sapiens
gacaagcttctggaagctctttgcggtggcgttggtgctgtttgcggatgctgatgcaggtggacgtctgatttatgaagctccccatccacctatct

SEQ ID NO: 442750 - DNA, 98 bp, Homo sapiens
gcccgtcagcagcgccaatatgatgtcagaaagatcaactgaaatcggcaaacttctgagttcctacttgcaaaagaaaagtgacgtggaggatcact

SEQ ID NO: 442751 - DNA, 82 bp, Homo sapiens
ctcctgatacagcaggcgctcaccatgttccctggaggaagccatcttcgacaagagcacagggaaggttgttttgaagacg

SEQ ID NO: 442752 - DNA, 49 bp, Homo sapiens
gcagaagagtgggatcattgacctaaagtgtgaagagtgccagtgctgg

SEQ ID NO: 442753 - DNA, 90 bp, Homo sapiens
tcggcttcgaggagaataagtgcagtatgagctacatgtttgagtacccggagtatcaggtggactgtgcattgtcacttattcgacttg

SEQ ID NO: 442754 - DNA, 74 bp, Homo sapiens
aagccaagttcttgagaagaagagaaacaactgttttgttgtactatactggcaattgctggagaagattttgc

SEQ ID NO: 442755 - DNA, 75 bp, Homo sapiens
ggaaccgggctcagtcctgtccaacagttgcatatggccaagtccttggagttataggatattcattacttcctc

SEQ ID NO: 442756 - DNA, 100 bp, Homo sapiens
actacaaagcagacataaatacacaggctgatccctacaccaccaccaagcgctacaacctgcaaatctatcgttatacattggctcttcaaagacgttc

SEQ ID NO: 442757 - DNA, 76 bp, Homo sapiens
aattgacagaattctctttgaaattacagcagggcaattgaaggaacagactaaaaatcgtgtcctggaaggaaac

SEQ ID NO: 442758 - DNA, 98 bp, Homo sapiens
gcacctactgcaggactgagtaccagcaggagagctgctgaggagcttgatatggaaaatgaatttttattaccacctgtttttggcgaagaatatga

SEQ ID NO: 442759 - DNA, 74 bp, Homo sapiens
ctgcattgcaggcacagggcccgatgagccagagaagcttgaaacgaagtctcactgtgttgtccaggctggtc

SEQ ID NO: 442760 - DNA, 95 bp, Homo sapiens
agatccgtagggaggacaccgtgacttcccggacgctgggaaatgggaccattgcaatttagagatgtggccatagaattctctctggaggagtg

SEQ ID NO: 442761 - DNA, 50 bp, Homo sapiens
cttggactgagtcctgcaggacacaggtttgcatcactggttgctgttta

SEQ ID NO: 442762 - DNA, 150 bp, Homo sapiens
tgttgtggttccgactataaacagtacgtgtttggcggctgggcctgggcctggtggtgtatctccgacactcagagtaaccctccactgagtgaagaaatgttgcctcctggagagtggatgtgtcaccggtgcactgttcgccgaaag

SEQ ID NO: 442763 - DNA, 83 bp, Homo sapiens
ccgtgggcgtaggaccctccgagccagaatcttttagctgaaaaagtagagcagctgatggaatggagttccagacgctcaat

SEQ ID NO: 442764 - DNA, 100 bp, Homo sapiens
tctggtaccattacacaatgcctgttcttatggtcattatgaagtaactgaacttttggtcaagtctatgactttgaaagaagccatcaagtcttcactc

SEQ ID NO: 442765 - DNA, 93 bp, Homo sapiens
tgacggtggcgccgcccggggcgaggcagggccagcagcaggcgggaggtgtccctggccagtgtccttccacctgtccacaagcatggggaa

SEQ ID NO: 442766 - DNA, 96 bp, Homo sapiens
aatggacctccgtgaaggcgtccgtcctgcgcatcgcagtacactgaggaggggacggctccgtcttcacattgtgcacagatctgaggatgggat

SEQ ID NO: 442767 - DNA, 108 bp, Homo sapiens
tccggaagaaacggcgtttagagcaacagatcgtggatctgaaagtgacaagcattttagaaagatagtgtgtgtaccatatcagtggcgtgtaactatgctcatcat

SEQ ID NO: 442768 - DNA, 82 bp, Homo sapiens
gacgctaaacgtgccctactctgccccgggggagaggacctcagcagccatgtcgaagccccatagtgaagccgggactgcc

SEQ ID NO: 442769 - DNA, 100 bp, Homo sapiens
gtggaattggagaatatgatgtcaagtatccagccttgatacccattaccactgcctcctttattgcagcaggaatttgagggaatctggaaaaattgca

SEQ ID NO: 442770 - DNA, 100 bp, Homo sapiens
cgccagggtctgcagggcctgggccgccgctgctacctgcagcgccgtgtggcacgacacaaaaatcagcttccgcaactttgacgtggaggagtcccac

SEQ ID NO: 442771 - DNA, 83 bp, Homo sapiens
ggtgtaccaggcgaagctggccgagcaggctgagcgatacgacgatgtgaagttcatttccaatccgccctccatggtggcag

SEQ ID NO: 442772 - DNA, 99 bp, Homo sapiens
ccgctcttccccacctgcccggtgcccgaggaggcagccaagctcgtagcctgccactccgtgcgcctcatgcattgtgcgtcagcagcaatgtttatg

SEQ ID NO: 442773 - DNA, 50 bp, Homo sapiens
cgggaacacagagagcgaagccagtgataccatgtgtgggaagttgttct

SEQ ID NO: 442774 - DNA, 75 bp, Homo sapiens
agtgagagagatgccatctacaaagaattctccttccacaattttaatcaggcggcaaagaagtttgtttctggc

SEQ ID NO: 442775 - DNA, 99 bp, Homo sapiens
agcagatgctccagtttgagaaacctggatctgcgatctgtttgtggcatatcacacctgaaaaattttatgtggaagcttgtgatgatggagcagatg

SEQ ID NO: 442776 - DNA, 80 bp, Homo sapiens
gcctgcagggcgccttcctctacctgctgcactgcctgctcaacaagaagattccaactccacagagtgaccagagagag

SEQ ID NO: 442777 - DNA, 117 bp, Homo sapiens
ctgcagaggacacgaggcggcgggctggagacatggaccgcggcgagcaagtgatgtcttggcattgcccattttcaagcaggaagattccagccttccattggatggtgaaacaga

SEQ ID NO: 442778 - DNA, 75 bp, Homo sapiens
acgcggtgcgcgaccgggagctggacctccggggtttggtgcacctcgatttggaggaagtagggcagggccctt

SEQ ID NO: 442779 - DNA, 100 bp, Homo sapiens
cgaccccagcgtgttcagcctccctgactccaaggttccattacagcttatagaaagtgttgaatgccgagatatatttcagcttcatttgacttgcaaa

SEQ ID NO: 442780 - DNA, 109 bp, Homo sapiens
ccgctgtgtggttgcaacggagataaattcccggaaccgcgattcggcgtgtcaggcaatgaatcgctccctggctaatgtgattcttggaggctatggcaccacttca

SEQ ID NO: 442781 - DNA, 100 bp, Homo sapiens
caagatctccaagctgggccgctccttcacacgcgcccgcgactacgacgctatgggctcccagagtccaccctgcacctggtgttgcgcctgcgaggtg

SEQ ID NO: 442782 - DNA, 100 bp, Homo sapiens
gctgtgggctccctctcgggggcggagggggtgcctgtgagctctcagccacttccctcccaaccctggtggtctttgggaagaagcttcctgcctttgc

SEQ ID NO: 442783 - DNA, 50 bp, Homo sapiens
ttactgaaatcctggagtaatacttggtgatccagctatttttcctgccg

SEQ ID NO: 442784 - DNA, 83 bp, Homo sapiens
actgctgcagagactcttcagtcgccaagtccagcaccatgtgctaggtcactcccagcgcgaggccacacctgggccgtcgg

SEQ ID NO: 442785 - DNA, 110 bp, Homo sapiens
atgaaggcctgttttgaagagaaggggaataagactgcatctgttcatatgaggttacttcctcagaatgttggcctcctgtatgttggaggttatgaaagaccctttgc

SEQ ID NO: 442786 - DNA, 100 bp, Homo sapiens
ggtgtcagaggcaatcgtcagcatccgaagaatccaggagaacccatacgtcatgcgccggcccaacttccaggccctgtcggggaacgaacgcttcgag

SEQ ID NO: 442787 - DNA, 100 bp, Homo sapiens
ctcggaactcgggcatcatggcctcaggacctatatccagactttgcctgacactgcagggtccaagagaattaaagaaatatggaatgacatgaagaag

SEQ ID NO: 442788 - DNA, 100 bp, Homo sapiens
ctcaaccaggcctaccaggacaacgtcactgtttttgccaacatgcggcgggatgtgcaggagatcttccgcctgacaccacacgagaagcagtgcatga

SEQ ID NO: 442789 - DNA, 75 bp, Homo sapiens
attaatggatgttccagtatttaaagctattcaaccagatgaaaacctcctgatgagaattcacttccacattgc

SEQ ID NO: 442790 - DNA, 83 bp, Homo sapiens
taaacactgcattgtgttgctgcagattgccaaatatgccaccacgggctgttccctgaccctgcaccatacggagaaaccag

SEQ ID NO: 442791 - DNA, 101 bp, Homo sapiens
aggagagcccttcagcgaggaagctacacttttcaccaaggaactggtgctgcagcgagagggtgcaggttcgcagccctgtcaaccagctccgagccggc

SEQ ID NO: 442792 - DNA, 78 bp, Homo sapiens
ggaggattgtcactccaacctcttttcgctggggtgctgtgcctaccagacagcctgaatcttcacagagacccacag

SEQ ID NO: 442793 - DNA, 103 bp, Homo sapiens
gagaccgtgaccgagagcgtgaccgagagcgcgaatatcgtcatcgttagaaggtcactctgtgagactgctgggtcagaaaaaggataatggaaggcggctt

SEQ ID NO: 442794 - DNA, 100 bp, Homo sapiens
ggatggccccaggtgtaagcgcagaaagcaggcgaacccgcggcgcaataacgggaactctaatgatccaggacaaagaagttaccctggagtatgtatc

SEQ ID NO: 442795 - DNA, 100 bp, Homo sapiens
ttggagctccacttttctcattgtgccgccatgggagctgctctgttgatgcttatcggtgctaaaatgatgtattttctggacaagtcaaggcaggaga

SEQ ID NO: 442796 - DNA, 74 bp, Homo sapiens
gacagcatgcctcaccaagtcacatgacaagcagaaagaaaggagaggctatccaaatttgaatctattcgtca

SEQ ID NO: 442797 - DNA, 100 bp, Homo sapiens
tgaggcctctccagccatgtggaactgtgtggatgaggtcaccattgtcaacattttgaccaaccgcagcaatgcacagagacaggatattgccttcgcc

SEQ ID NO: 442798 - DNA, 100 bp, Homo sapiens
gcgccggctgctggggctgctgaggcggtacctgcgcggggaggaggcgcggctgcgggacctgactaggtgagctgtcagggagaaatgtcgaaacagg

SEQ ID NO: 442799 - DNA, 100 bp, Homo sapiens
ttttttgctaagacactccagcactggccacacattattcgaataggagaccttaaacctacagctggtaagcgggcccctcagtgctaccccagttccg

SEQ ID NO: 442800 - DNA, 90 bp, Homo sapiens
attcaaaagaccaattaaacattacattatccaaatgtggtcttgtaatgttaaacaatttagtcaagttgtgtgacttcattgagacac

SEQ ID NO: 442801 - DNA, 75 bp, Homo sapiens
atcgcgacgctgctcaaaacctcgctccggaaaggggacacctgcaccctgatatgtatgagagagcagtgctaa

SEQ ID NO: 442802 - DNA, 101 bp, Homo sapiens
ccgacgtgggcggtgggccccagccccacagaccagcccagcattcagaaaatgcttggacagaagagatgagtactatttccactaaggcctagaattgc

SEQ ID NO: 442803 - DNA, 75 bp, Homo sapiens
gatgaagcgttctgtcagccaccctggttcttgcagttcagagagcgagaactttcaaaggcttccaaatctgat

SEQ ID NO: 442804 - DNA, 82 bp, Homo sapiens
ctctccctctgcccccccttccccacgcaaccccagatccatttacactttacagaccctaataggagtattcataccagca

SEQ ID NO: 442805 - DNA, 101 bp, Homo sapiens
tgggcagaaggcagaaaaccagcagagtcacagaggagatgacatccacgacagcgatggcagttccagcagcagccaccagagcctcaagagcacagcca

SEQ ID NO: 442806 - DNA, 78 bp, Homo sapiens
tgggtatcgaggcggacgacgaccggctcaacaagaggcggggtttcaccatgttgcccagactggtcttgaactcct

SEQ ID NO: 442807 - DNA, 80 bp, Homo sapiens
ctcccgcgccgcacggtggacgaggccagctgcgggccgtccagcggctgtgccacttctacagcgccgtcatgcccagc

SEQ ID NO: 442808 - DNA, 99 bp, Homo sapiens
gtgctgatagtcggtgccctcagtgacggccaggtgccctgcaatgcgatacctgagctacatgtcaccaagccagagatggggtttcgtcatgttggc

SEQ ID NO: 442809 - DNA, 75 bp, Homo sapiens
gaccggagggcgtgggctgggacgcccctaccttggtctttcaggtctgcgctcctcagaccaccggcaggtgaa

SEQ ID NO: 442810 - DNA, 80 bp, Homo sapiens
ctcccgaatacttcagaagtggggaaatgtctctgctttctatccgtcaagatgataaagtcgtgtgcccgagaaccaaa

SEQ ID NO: 442811 - DNA, 90 bp, Homo sapiens
gagaaatgaacagctgaccctacatgatgagaggtttgagaagaaagatgtagcacttaagcctcaggaacgtgtggagaaacgccagac

SEQ ID NO: 442812 - DNA, 62 bp, Homo sapiens
aaatgatagaaacaactttagatatggatcagatgattccaatgtacagccaatgatgagca

SEQ ID NO: 442813 - DNA, 99 bp, Homo sapiens
accatgttcggaatgctgctgttcgctggtgggaagtacgtcatgtccattgacagcctccagctgggctatgcggaggatgggcactgcaaaggcgac

SEQ ID NO: 442814 - DNA, 51 bp, Homo sapiens
tttgtcgtcgtcggggtcctgctgcagccaccagctctgcccacttggaag

SEQ ID NO: 442815 - DNA, 98 bp, Homo sapiens
tctgaactggatcataaatgacagcctttctgagaaaagtctacagcattctttctctgcaggttctcttaactacagtgacttcaacagttttttta

SEQ ID NO: 442816 - DNA, 74 bp, Homo sapiens
tgtcctagatacttgccgcaaagcaaatgccattccagatggtccccgaggttggactaaatgctcttccttca

SEQ ID NO: 442817 - DNA, 117 bp, Homo sapiens
gagctaaagattttgtccgacacttacactgttgagaaagtggaagttcatcgtctgattagtgagaaagatcagtctaaagaaaaggagaagaaagtgaaaaaaacaattccttcc

SEQ ID NO: 442818 - DNA, 100 bp, Homo sapiens
gagggagggcgggcggcgcgagtgggcgcgggcccggtgggccagagctaaaaaagtccctgtacgccatcttctcccagtttggccagatcctggatat

SEQ ID NO: 442819 - DNA, 88 bp, Homo sapiens
ggatggatatcagcagaatttcaagcgaggctctgggcagagtggaccacggggagccccacgagaaaaggcaacagatggctccctg

SEQ ID NO: 442820 - DNA, 83 bp, Homo sapiens
caagagcgcaggcagtggccacaagagcgaggagaagcgagaaaagatgaaacggaccctgataatttcttgagaggagataa

SEQ ID NO: 442821 - DNA, 90 bp, Homo sapiens
gtgccttggttcatccctaagggtcctaaccgggggtttgggagcagcagcaacaccacatccttcggcacgctcgcgagtcagaatgcc

SEQ ID NO: 442822 - DNA, 75 bp, Homo sapiens
cgtcagctgtgccgtcgcgcagcacgcgccgccgggtatttgaagtataccatacaactgttttgaaaatccagc

SEQ ID NO: 442823 - DNA, 90 bp, Homo sapiens
gctgtacagacttctcgtgggcagcctcccctcggaactcgggcatcatggcctcaggtgctgcgcccttgtccgcgccagccttctcct

SEQ ID NO: 442824 - DNA, 90 bp, Homo sapiens
gcatgaggcaggaggagcgctacctggacgaccctgtcaccaacctgaacaatgccttcgaagtggctgagaaatacctcgacatcccca

SEQ ID NO: 442825 - DNA, 100 bp, Homo sapiens
gttgaatgagaaccctacttgcctaaatgaggaatgtctttcctaccatctaaaatacgaaggtttctggctgggcaatctgaaagcaaatcctgtttag

SEQ ID NO: 442826 - DNA, 105 bp, Homo sapiens
caatgaagcagccgatcatggcggatggcccccggtgcaagaggcgcaaacaagccaatcccaggaggaaaaacgatccagacatttaatgtggatgcaccatgc

SEQ ID NO: 442827 - DNA, 75 bp, Homo sapiens
agagggactgccataacattcccaaaggaatatcttgtaccggaattatcaagtgaagtacagtctctttggtcc

SEQ ID NO: 442828 - DNA, 80 bp, Homo sapiens
gctctggccagggtgcttttggaaacctccagagaaagatggaggagcgccggctgcggctccaggaggccgccaacagg

SEQ ID NO: 442829 - DNA, 75 bp, Homo sapiens
gcctcggggtccggaaccagacgatgagacagagttgcgaccgcgcggcagtacctgcagatgaaatggcccctc

SEQ ID NO: 442830 - DNA, 74 bp, Homo sapiens
tgcgctgccgccgctctgaggagttaaagaggcacagttgaatgctgttgatgctttgattgactccatgagct

SEQ ID NO: 442831 - DNA, 74 bp, Homo sapiens
gcagaaactccctctggtgatgatttcagtgaagcgtgacattcaggaaaacgatgaagaggcagtgcaagtca

SEQ ID NO: 442832 - DNA, 75 bp, Homo sapiens
cagcaggtctggtgtgctggtgtttggggcacgtccagcctctttggaggagataccccggctctgacaggatca

SEQ ID NO: 442833 - DNA, 82 bp, Homo sapiens
cttgaacctggtcctcggcaatgtgaacgtgaccctcctcagcaaccaggccaaacaatgcagatcttcgtgaagactctga

SEQ ID NO: 442834 - DNA, 82 bp, Homo sapiens
ctaaggtattcctggaagcagagtaaataaagctcatggcccaccagctagaaagcaaaattcctgcctttctaaatgtggt

SEQ ID NO: 442835 - DNA, 103 bp, Homo sapiens
caagcagaatgtccagcgggtcctggaggctgctaacctcttccaggtatgtgaggagcagcgctgtgaggaggaagtcttccccctggccatgaactacctg

SEQ ID NO: 442836 - DNA, 98 bp, Homo sapiens
gaagaccttcatatttcccaagatgccactggtgaagaagacctcgaagtagggggaaaactgcagtggaagatgaggacagcatggatgggctggag

SEQ ID NO: 442837 - DNA, 80 bp, Homo sapiens
cccccggaggtgcccacgcagctgcctggacaaggaagcagtttaagtgcacggtgtgtgactacacagcggcccagaag

SEQ ID NO: 442838 - DNA, 100 bp, Homo sapiens
ttcagctactctagccaccaaactgattatgaattgccctgaaatctgaaaaatttcaattccaatcgttccatgcctctgcagcggtgcctcatgtttg

SEQ ID NO: 442839 - DNA, 50 bp, Homo sapiens
aaagttttgtgaagggtaaagatggaggtcccttaatatggactttgaaa

SEQ ID NO: 442840 - DNA, 100 bp, Homo sapiens
gtttgcgacatcccagagagcttccagaataaaaatgaatgccatttcccatccagtactgaagtgttaaagttagaagacatttgctaagtcaaatcac

SEQ ID NO: 442841 - DNA, 94 bp, Homo sapiens
cgaacctgaaattccgctttgacaagctcagccatgccagctctggtgcggattttttatcaagcagaaatgcatcgaacaacgagaatcaaga

SEQ ID NO: 442842 - DNA, 100 bp, Homo sapiens
agaacttagccaagagtctgggtctccgggccaacctgaggatttctgacttacacaagagcctagaacagaaagaaagtaaaatccagcagctagcaga

SEQ ID NO: 442843 - DNA, 89 bp, Homo sapiens
gcccctttcccggcgggacgctttgagccgccccgaactaagcagggcggtcgggggcatggctaatgtaaaagcagccccaaagataa

SEQ ID NO: 442844 - DNA, 97 bp, Homo sapiens
attccaaccctcttctgcctctgccggtttatgtgaaagccaggtcccccagagccaatctgccccctctctatgctcttgaacttctaaccatcta

SEQ ID NO: 442845 - DNA, 100 bp, Homo sapiens
cccctcttcatcgtgctgctgcctcccgaaacgagggttcatcagaggtgcacaggcctctagtggatccccagcactgcctcgaaagcaaagagacaag

SEQ ID NO: 442846 - DNA, 82 bp, Homo sapiens
ctggaggacggctgggacagcgagcccttcaccctggtggagcgagacgagtatctttagaagatctgtataatggcaagac

SEQ ID NO: 442847 - DNA, 98 bp, Homo sapiens
ccacctttgcctacagatggtgttcacagtgttggtgtggagtcacagcttgacttttgcattatcctgtagcgtgggtaaatacgatggtttttgac

SEQ ID NO: 442848 - DNA, 100 bp, Homo sapiens
ccacgatgcttcagtggattgaactgttgacgaaacagtttaataatagtcaggcagcttgtgaggtagaaaaactggcacggacacttttcttgtggaa

SEQ ID NO: 442849 - DNA, 95 bp, Homo sapiens
gaaaagtcagcatggcttatatggtgataatgtggaggagatggactggctcataggttttggcacaaataccagtgggaatagtatttttggaa

SEQ ID NO: 442850 - DNA, 100 bp, Homo sapiens
agaagatgaagatgcttacaagaaacagttctctcaatacataaagaacagcgtaactccagacatgggtttgaacatcctcatccctgtgttagaccgg

SEQ ID NO: 442851 - DNA, 100 bp, Homo sapiens
aattgccaaggaactgggatttcaacctgaaagtggaggctgcgaaaataggtttattgggcacttcctagcaccaggcactgcaataagaaatggaggt

SEQ ID NO: 442852 - DNA, 75 bp, Homo sapiens
tgacgatgagccagagacctacgtggcagctgtgaaaaaagccatttccgaagacggagtctccctctgtcgccc

SEQ ID NO: 442853 - DNA, 100 bp, Homo sapiens
gcgagcttcggagaagcagtggtgggttccatgtgatggtggagtaggaggcaggtctccgcgatgtaaagcaattatagatcagtttggtcagagaata

SEQ ID NO: 442854 - DNA, 98 bp, Homo sapiens
cacgatgggccagctgtacggggagtttgacctcctcacccatgagtggggaatgagtttcagaatattccaggggagcaggtgacagaggagcaatt

SEQ ID NO: 442855 - DNA, 75 bp, Homo sapiens
aggactttgtctctgatgagctgagaaacaaagccacccagccaatgaagtcaccagaagcgtgtctttgagaca

SEQ ID NO: 442856 - DNA, 100 bp, Homo sapiens
gtgcatgcacttacggatttactggaccccagtgtgaaagagattgaaaaggaagatcaggccaaccccaaagaagaagtgaccaaggaggagtttaaac

SEQ ID NO: 442857 - DNA, 74 bp, Homo sapiens
cgtgagcaagcataagctgccaaaccaagcaattaccagctctggctgggtcgccacaacttgtttgacgacga

SEQ ID NO: 442858 - DNA, 100 bp, Homo sapiens
atggaaagcgctggcagtcctgcctggcccccagccagttccctgctgaagatggccagatccccttgtctggcatcaagcatgatggaaccatgtgtga

SEQ ID NO: 442859 - DNA, 82 bp, Homo sapiens
aaggtggactgcttgctcagctcagtatcaacacttatgggttggttctggacattacacagcatacgcaactcacgaaggc

SEQ ID NO: 442860 - DNA, 75 bp, Homo sapiens
taatacctcagtgttcacataactgaatttagataatgggctgtgtgcaatgtaaggataaagaagcaacaaaac

SEQ ID NO: 442861 - DNA, 80 bp, Homo sapiens
acaccaagggtcaactgtccagagaaagtgacgcatcttctctccagactgccgatcccagaaagccaggtgatcaccat

SEQ ID NO: 442862 - DNA, 74 bp, Homo sapiens
ctgcggacgctgtcctctcagcacgggttgactatagtcaatggggccaatggagccaagtgtatggaaaccca

SEQ ID NO: 442863 - DNA, 49 bp, Homo sapiens
gccgcgggcaaactcagactcgaagccctaggcggcgtcgccgcagccg

SEQ ID NO: 442864 - DNA, 50 bp, Homo sapiens
ctcaacccaaccggctccagggcactgcatatagcactttctacattgtg

SEQ ID NO: 442865 - DNA, 100 bp, Homo sapiens
ttctatttttttttttctctcttattccaggaagagcaaccgaggtttcaatctgcgcgcaaatctgtccaaggctgcctggggagcattggagaagaat

SEQ ID NO: 442866 - DNA, 82 bp, Homo sapiens
ctttatggatacattaagtcaaatataagagtctgactacttgacacactggctcggcttgaagtagaaaatgccatgatga

SEQ ID NO: 442867 - DNA, 100 bp, Homo sapiens
tggcaccgacggcttcggggaggttgcgggccgagacaggccgtggaggatatagaggtcgtggaggctttcaagggagaggtggagaccccaaaagtgg

SEQ ID NO: 442868 - DNA, 90 bp, Homo sapiens
ccgccgcggcactgatccccacagctgctgtgacttactcgaagcctcgattggccacattttggtactacgccaaggttgagctggttc

SEQ ID NO: 442869 - DNA, 100 bp, Homo sapiens
taaaggacagtatggcaagctcacggacgcgtacggctgcctgggggagctgaggctgaaatctgggaagtatggccacggctgcattaccggaaagcgg

SEQ ID NO: 442870 - DNA, 90 bp, Homo sapiens
aaaggagcggggtcgacggtccccactttcccctgagcctcagcacctgcttgtttggaagctcaaagtctccactgcctcctgaagaag

SEQ ID NO: 442871 - DNA, 88 bp, Homo sapiens
gaaggtgacgaggagggagaagacgaggatgatgcggaaattaaccccaagattggtttttcagcagcagatgctgtaacaggactga

SEQ ID NO: 442872 - DNA, 75 bp, Homo sapiens
gggccactgctgggccctgaggctgcaccaagtggcgaaggagccggctccaagttgatattcactgatggactc

SEQ ID NO: 442873 - DNA, 90 bp, Homo sapiens
cgtggtgtggccctgttacgacagctgcccgcgggcccagcctgacgccatctcacgcctgctggagccggcccaggcctttgtggtgaa

SEQ ID NO: 442874 - DNA, 75 bp, Homo sapiens
taaagatcaaaagaattcgaagggagttggtaaacgctgggggattcccgaagtcttccgttttctgagaatgtg

SEQ ID NO: 442875 - DNA, 101 bp, Homo sapiens
tagaaaggagacccgactgcaactgctggattgctgcaaggctgagggacgagaacgagcttctcacctggggcgggtgggttctgcaccaccctcccacc

SEQ ID NO: 442876 - DNA, 101 bp, Homo sapiens
ctccgagccccttcctgagaagatcccagattgtatctgattaccagagggatccagctatcacctccatcttggagaaaatggatattttcttgttgcct

SEQ ID NO: 442877 - DNA, 90 bp, Homo sapiens
ggtccttgtggacgtggagaggggccgaaccgtgaagggctggaggccccggcggctagaactcagcctcctcccaagctccctgtgggt

SEQ ID NO: 442878 - DNA, 88 bp, Homo sapiens
gcgaggcacacctggccgcactgcgcgagcggctgcgcgagaagcacggggtcactctggtgcccattgaggagttcagcccggagtt

SEQ ID NO: 442879 - DNA, 100 bp, Homo sapiens
ctgtgctcgcgctactctctctttctggcctggaggctatccagcggtgctgttggcccaaaggttgccctgaagccccccatccagaggaagcaaggag

SEQ ID NO: 442880 - DNA, 50 bp, Homo sapiens
aaatttacagaaacaaactacatctcaggtagagacggggttttgccacg

SEQ ID NO: 442881 - DNA, 75 bp, Homo sapiens
ttcttcctcaactatctcgctgacacgcaggtgtggacactgccagcggctgcagccgacttggaatgacctggg

SEQ ID NO: 442882 - DNA, 75 bp, Homo sapiens
tcagtattccttaacttgcatgctacaagatattttagcaggaactgtggctgcaccatctgtcttcatcttccc

SEQ ID NO: 442883 - DNA, 75 bp, Homo sapiens
gagaccgcggccgggaccgaggagtttattaaccacttaacctctcagaactgaacaaagacaacattgttcctg

SEQ ID NO: 442884 - DNA, 83 bp, Homo sapiens
atgaactggaggctgagtacgacagcctcaaacaggagctggagcagctcaaagaggctgtgggtgagcgtggaggatgctca

SEQ ID NO: 442885 - DNA, 100 bp, Homo sapiens
caagttgctactcgggacgctgcacctcccgcgccgcacggtggacgagaatatccaaggtatctccaagcacccaattcagattactacacctaagaat

SEQ ID NO: 442886 - DNA, 100 bp, Homo sapiens
tcgcctccggaggcggcgaggagcggcggacacgatgaggcgagtggtacgacagagcaagtttcggcatgtatttgggcaagcggtgaaaaatgaccag

SEQ ID NO: 442887 - DNA, 50 bp, Homo sapiens
ttcagcacaccagtggggcagtgcctcgtcgtccctggggatgagcccag

SEQ ID NO: 442888 - DNA, 75 bp, Homo sapiens
cccaaaatttgctacttaaatcgtacttctctgaagaaggatctgtgccagttcagaagcaggcgagcctcttcc

SEQ ID NO: 442889 - DNA, 73 bp, Homo sapiens
gagcacgacatcaccctcttcgtcaaggctgagaacgggaagcttgtcatcaatggaaatcccatcaccatct

SEQ ID NO: 442890 - DNA, 100 bp, Homo sapiens
ctggtgcacccccagtgggtgctcacagctgcccattgcctaaagaagaagtatctgcgagatgctgaccgccaggtcctggcgcagcgggccttcatcc

SEQ ID NO: 442891 - DNA, 52 bp, Homo sapiens
cagcggagagcgagagaggggagcagctgctgaaatgggttgcggattgaac

SEQ ID NO: 442892 - DNA, 100 bp, Homo sapiens
caagaacaagtaccgccccgacctgcgcatgggcccccaggcctggactccatctcagaccccttcagctggagctggattcctggactggggagagatc

SEQ ID NO: 442893 - DNA, 98 bp, Homo sapiens
cagacccggcacgcaggtgggggccggcggggtccgtggccagattctgaggttgggaccaagaaggaactatctattttaaaccaaaaattttccga

SEQ ID NO: 442894 - DNA, 101 bp, Homo sapiens
gtgcggcggccggcgggaccataagggcttaactcatatatttaacccccctccaaaaaacacgatgaggcgagtggtacgacagagcaagtttcggcatg

SEQ ID NO: 442895 - DNA, 101 bp, Homo sapiens
aagatttttgacaacgaccctacacaggatgaaatgggtggatgctgatatactgcttgacttactgcgtatttgaagattatcctgtttgattttccatc

SEQ ID NO: 442896 - DNA, 90 bp, Homo sapiens
ccctgcccgggccctcctgaagaggcggcgctcagacagggtgcaggttcgcagccctgtcaaccagctccgagccggcagcgaaacctg

SEQ ID NO: 442897 - DNA, 75 bp, Homo sapiens
caaaacgtcttcaggaggagaaggagaaaggcctgtagtggtggagacacgcccagtggatgatcctactgctcc

SEQ ID NO: 442898 - DNA, 82 bp, Homo sapiens
tctggctggtctcccctctgctgggtcgcaatggaagaagagatcgccgcgctggtcattgacaatggctccggcatgtgca

SEQ ID NO: 442899 - DNA, 50 bp, Homo sapiens
gccgggagttcaagaagaacactccagagcctctgaagagccaatccatt

SEQ ID NO: 442900 - DNA, 100 bp, Homo sapiens
ttcacccagaacctgttgtggggagtaagagatgggacgaggagctggccgccttcgccaaggcctacgcacggcagtgcgtgtggggccacaacaagga

SEQ ID NO: 442901 - DNA, 87 bp, Homo sapiens
gacccttcgcgagcggctgctgagcgtgcagcaggatttcacctccgggtgctggagaatctggtaaaagcaccattgtgaagcaga

SEQ ID NO: 442902 - DNA, 98 bp, Homo sapiens
gaggagaacatccgcgtggttcgttgtggcggcagcgagttgaactttaggagagctgtgttctctgcagattctaatggctgctaatttacagaaga

SEQ ID NO: 442903 - DNA, 51 bp, Homo sapiens
ccaaggcttgaccctcgttttggtttacaaaggaggaaaacgacttcttct

SEQ ID NO: 442904 - DNA, 100 bp, Homo sapiens
aggatgatgagatcatcaacccaggtttgctgaaatgaaaatgcgaccttttgcaagggacatgcaagatgaaaccttctatttccttggcagcccagag

SEQ ID NO: 442905 - DNA, 89 bp, Homo sapiens
agtgtgagttcctgcatgagtatgacatgaccaagatgcccgagtgctacttctactccaagttcggccacgtgctgtacgccgacatc

SEQ ID NO: 442906 - DNA, 80 bp, Homo sapiens
cttcacccaggccctggagtgcatgcgcagtggttcgcacagacagtttaaaaggccggagaggtcgtttgccctcgaaa

SEQ ID NO: 442907 - DNA, 50 bp, Homo sapiens
cgcccaactcccagcggagagcaaggcttctcacggcattcagcagcagc

SEQ ID NO: 442908 - DNA, 100 bp, Homo sapiens
gaggcttcgagtgacccgggtgccgaggagcgggaagagttgctggggcgatgtaccaattttgacaactgaagacgacatggtttctcagccagcaaaa

SEQ ID NO: 442909 - DNA, 75 bp, Homo sapiens
caggatccacccgatgaatgtgggaagactgagagttatttataccaaatcctacaggggattgtgttttgtcac

SEQ ID NO: 442910 - DNA, 100 bp, Homo sapiens
gggagtctccgcgtcccgctcgctgggagagaggtacctctccttttccctctccctttccctaagaaacgaagtctcactgtgttgtccaggctggtct

SEQ ID NO: 442911 - DNA, 50 bp, Homo sapiens
ggctactacaaccagagcgaggccggtggcgggacaggcttcattgggac

SEQ ID NO: 442912 - DNA, 90 bp, Homo sapiens
tggccacgctgcagagcctcgcaatggccaatgtacatggtggactatgccggcctgaacgtgcagctcccgggacctcttaattactag

SEQ ID NO: 442913 - DNA, 99 bp, Homo sapiens
agtagatcttcattttattgcattagttcatgtagatgggcatctctatgaattaggtgtggatgaggtcaccattgtcaacattttgaccaaccgcag

SEQ ID NO: 442914 - DNA, 100 bp, Homo sapiens
cagttttatattaatgttgagagagaggagtggaagctggacacactatgtgacttgtatgaaaccctgaccatcacccaggcagtcatcttcatcaaca

SEQ ID NO: 442915 - DNA, 82 bp, Homo sapiens
gttggaagcagccgatccagcctgcggagcctgtggggcagcatttttgaaacattggggttgttggagtggttggattttc

SEQ ID NO: 442916 - DNA, 74 bp, Homo sapiens
gaacttaaatgtacattttgccaacgagctgggaaaataagagcaaacatgaacgttggagttgcccacagtga

SEQ ID NO: 442917 - DNA, 74 bp, Homo sapiens
agaggccctgtgatgatcgtgtcagctgtccctttccccccaacacatcgcttgacatctgaagaagtatttga

SEQ ID NO: 442918 - DNA, 75 bp, Homo sapiens
gggagtggaagttcccgccccggagagcggcgaggcggcagccacagatttaatccagagactgacttcactata

SEQ ID NO: 442919 - DNA, 100 bp, Homo sapiens
ccgcaagacctgtgggcagccaaggcgtggctgatcacggcccgcagcctctacccggcagactttaacatccaggtccagggagtcggtagtaagggat

SEQ ID NO: 442920 - DNA, 90 bp, Homo sapiens
aaaggaaaggggaaaatgtctcagtcgaaaggtgctggagaatctggtaaaagcaccattgtgaagcagatgaggatcctgcatgttaat

SEQ ID NO: 442921 - DNA, 100 bp, Homo sapiens
caggagttggtggtgaccccgcccagttggcccagaggatctcttctaacatccagaagatcacacagtgtttaatagttatgcacgagtgcgagctgtg

SEQ ID NO: 442922 - DNA, 50 bp, Homo sapiens
cccccatggaggccctggcagagcagggcttccgagtggacctgccaatc

SEQ ID NO: 442923 - DNA, 82 bp, Homo sapiens
ctctttggatgattctgccaaaaagggcggaccccacagccagactcagcactcattcgccaggccttggctgagcgctgga

SEQ ID NO: 442924 - DNA, 100 bp, Homo sapiens
cagttcagtatcgctacttcaaagggtactttttagaaccaaaggttgcaaaagcttctcatttcagagagatgccaggatcctaagtgcctgccaaact

SEQ ID NO: 442925 - DNA, 90 bp, Homo sapiens
gtgcagagtccttggctgggaggatcaatgatgctgtttttggaaggaagaaagatggaaagcggtgcagttctgctggaatccaaatcc

SEQ ID NO: 442926 - DNA, 100 bp, Homo sapiens
ggtattggaagaatgaatctggcacatggattcagtatggagaagagaagaagctcattcacacagaagacccatttaatgatgaacatcaggagaggca

SEQ ID NO: 442927 - DNA, 83 bp, Homo sapiens
tcgcttcagtcagtcgggccgcgccgcgcctcagctctgcacatgattaagtaccggtacatcccgttcacacatgggaagag

SEQ ID NO: 442928 - DNA, 90 bp, Homo sapiens
ggcgaatgtggctgataagtctagattcaccaatgtcaaacagtttattgcaccagggaagcggcacagcaccagctaggcagagacgcc

SEQ ID NO: 442929 - DNA, 90 bp, Homo sapiens
tcccaacatcgttaactttttggacaggtgtggaggcacagttggtgctattttcacttgtccactagaagtcattaagacacggttgca

SEQ ID NO: 442930 - DNA, 90 bp, Homo sapiens
gggagtggaccatcgggcggagacgagatctcaattactgtgggactcatcagccgtgtctcaacgggggaacttgtagcaacacaggcc

SEQ ID NO: 442931 - DNA, 74 bp, Homo sapiens
ttcccgtccgcggcgtggaggggaaatcctcattgacgattcaatttgttgaaggccaatttgtggactcctac

SEQ ID NO: 442932 - DNA, 75 bp, Homo sapiens
cggcctgataaagcgcgccgactgggctacaaggccaagcaagatactatggataattgggatgagaaaaagctg

SEQ ID NO: 442933 - DNA, 82 bp, Homo sapiens
agaggattccggcgggaactcgactcttggcgccaccgcctcatgcactgtgtaggtgtggagatgcttgtatctgggaccc

SEQ ID NO: 442934 - DNA, 48 bp, Homo sapiens
gcggtggctgcggttgcgggaccgcgtctgaccaaacacaccaagttc

SEQ ID NO: 442935 - DNA, 51 bp, Homo sapiens
ctgtgtgacaccaagataagtaacaacactctgctccagccaaggtggtga

SEQ ID NO: 442936 - DNA, 76 bp, Homo sapiens
gctgagaacggccaacaggctctttggagagaaaacttgtcagttcctctcacttctcaataggtttggcatggac

SEQ ID NO: 442937 - DNA, 88 bp, Homo sapiens
catcttctcagaggaggacttccggttataccggtccccttcccctgagcccatctacaatagcgaggggaagcggcttaacacccga

SEQ ID NO: 442938 - DNA, 82 bp, Homo sapiens
atagagttcacgatcctgtaactgccaaacccaagttggttggagatgtggattttgaagggaagatcagttttcctgccat

SEQ ID NO: 442939 - DNA, 75 bp, Homo sapiens
gcttcaagtctcatctgcattaaagctctccattgaaccctctcacaaaaatctgacaaagttcccaaagatgtc

SEQ ID NO: 442940 - DNA, 73 bp, Homo sapiens
ccacagatccttaccaacaaggaggcggaaaaggttcatcttccttcctgtacagtattttcaaacttcccag

SEQ ID NO: 442941 - DNA, 100 bp, Homo sapiens
tggcagagggagaggggcaggaaggttctcaacccaaggcatggggttcggtggtgagaggaagcctcgcagaatccagcagaatcctcacagaatccag

SEQ ID NO: 442942 - DNA, 90 bp, Homo sapiens
cgcgcttcgaagccgagaaagcccgctgggaggccgagcgcgccgagttacagactgcaagtttaactgtcacaaacgctgcgccacccg

SEQ ID NO: 442943 - DNA, 100 bp, Homo sapiens
ccggagcaccgagctcgcggcacgggtgaggtggctttgaccccgggttgcccggccagcacgaccgaggaggtggctggacagctggaggatgaacgga

SEQ ID NO: 442944 - DNA, 97 bp, Homo sapiens
ccccgcgagcacagagcctcgcctttgccgatccgccgcccgtccacacccgccgccagtcagcttacccgctggccgcctcctgacaagcgggagg

SEQ ID NO: 442945 - DNA, 75 bp, Homo sapiens
cagcgctgcctggaggagaatcaagagctccgagggggtccactggacggggcctgagctacaacttcacccacc

SEQ ID NO: 442946 - DNA, 100 bp, Homo sapiens
gacggagacttcacggtgtacgagtgcccgggcctggccccggtagagcagagccggagccaggtgcaggccattggagagaaggtctccttggcccagg

SEQ ID NO: 442947 - DNA, 100 bp, Homo sapiens
ccacgcgccccgcgcggcccgcccggatcgtggcctctcgagagcaaggttttaaaatcaaagatgggaaaatcggagaaaattgcccttccccatggcc

SEQ ID NO: 442948 - DNA, 100 bp, Homo sapiens
aggacgagatcttgtctgatgtggcatctagactttggtttacatacaggaaaaactttccagccattgccattgatgcaccatccaacctgcgtttcct

SEQ ID NO: 442949 - DNA, 100 bp, Homo sapiens
agcggatcgcgtggagtgacggtcacaccgcggcggtatgatctcgtgaaatcttgagagaaactgaatgacgaatgaaactattgttcctgtttcacac

SEQ ID NO: 442950 - DNA, 100 bp, Homo sapiens
caagaggcagacctaggaaatggggctcacccacctcattggatctcctttcctccgggcatatatgcatgggtttttcatggatataagactctatcac

SEQ ID NO: 442951 - DNA, 50 bp, Homo sapiens
acagtggacgaggtgttggcggaagaaatcttcccaaggctgcagacacc

SEQ ID NO: 442952 - DNA, 89 bp, Homo sapiens
tccatgagaaaaagcttggagataaagttgctttttactgggcacagtcttttgctgagcgcctgcgcctgggaattgcagtgattcat

SEQ ID NO: 442953 - DNA, 100 bp, Homo sapiens
caagactcctctgctttggactgaaggtctgatgaatacatgtaaagcttattgagcctcagaactctaactacagggtttcaatagcacagaaactctg

SEQ ID NO: 442954 - DNA, 106 bp, Homo sapiens
caaaggtccagagcattcagctgtctcaaatgcagtttgtgaatagcacaatggaagaagctggactttgtgggttaagagagaaagcagatatgttgtgtaactc

SEQ ID NO: 442955 - DNA, 80 bp, Homo sapiens
agccaagctcgtagcctgccactccgtgcgtgaaaggtgtagcagtcactcggcctacacccacagcatcgaccttgtga

SEQ ID NO: 442956 - DNA, 76 bp, Homo sapiens
ctcttccaagcaaggaagtcgacagactctatcaagaagaatatctaatccgtaccttgaacatacgccttcccag

SEQ ID NO: 442957 - DNA, 96 bp, Homo sapiens
aaagacagtgttctgctttcatggagttcacagaagagtcgaggaggtgagtgaagatggcagagaggacgtgaccagcactcacccttgtccacc

SEQ ID NO: 442958 - DNA, 88 bp, Homo sapiens
gcctttctcattattataggctccctcctgctgtcaggctacatcagcaaaggggacaaagtgatggcatctccccttcagatcacac

SEQ ID NO: 442959 - DNA, 99 bp, Homo sapiens
gaaagccccagccacccatcaaatcagagagaaggaatccaccttcttacgctatggcagaactgcatgaacttgcccccagacaaggtccagctgctg

SEQ ID NO: 442960 - DNA, 90 bp, Homo sapiens
gccaggaacccctggaagcctagaaatggaaagatgaatgggagggctgattttcgagagccgaatgcagaggttccaagaccaattccc

SEQ ID NO: 442961 - DNA, 100 bp, Homo sapiens
ggaagacccctggctctataagctgaattatggcagcccagtcaaggtctccgtgaggccgggtgacgctccagaatgggagacaagccaatttgggagc

SEQ ID NO: 442962 - DNA, 75 bp, Homo sapiens
caaccaccgccctggccatctaccatgtggaaaccacccctactcctaatcccccgactacagaagaggagaaaa

SEQ ID NO: 442963 - DNA, 82 bp, Homo sapiens
agccgatccagcctgcggagcctgtggggcaggaagcaggtcctggggaccaaggtggacgcggagcgtgacggcgtgaagg

SEQ ID NO: 442964 - DNA, 90 bp, Homo sapiens
cacgggattggcagtaattggaggaagaatgatagcacagaaaatctctgtcagaactgaactacatcaagatcgttcttctcccccacc

SEQ ID NO: 442965 - DNA, 98 bp, Homo sapiens
gataccaatggaatcacggtttttggaacaaggattttggatgaagaagtttttgaggtccttatgtcgtcagaagatcgagaagctcaggaggatga

SEQ ID NO: 442966 - DNA, 82 bp, Homo sapiens
gatccagctttgttgaaaagcgaagccgttagtcccttaatacaaagggtggatgcccggagcataccagtgttagcaaaat

SEQ ID NO: 442967 - DNA, 100 bp, Homo sapiens
ctgcgtggcttgtcaggaactcgactcagacgtggataaagataatcccggcacttccgttccggcgcccctccggtcatcaacccgctgggcaccagct

SEQ ID NO: 442968 - DNA, 75 bp, Homo sapiens
tctccgttgggtccggccgctctgcgggactctgaggaaaagctcgcaccagcgtttgcctcagcatggagggcg

SEQ ID NO: 442969 - DNA, 101 bp, Homo sapiens
gctggaggtgctggtgcaggacaaagtgccggtggtggtgtgcacattgagccccggtatagacagttcccccagctgaccagatcccaggtgttccagag

SEQ ID NO: 442970 - DNA, 75 bp, Homo sapiens
aaaataccacgacaaaaccaccctaagctgcttatcatccagactttccaacagttctgacagctttagaaatag

SEQ ID NO: 442971 - DNA, 82 bp, Homo sapiens
aacccaaagatccccgttcctggagattctgattgagcttgacaaaagtaagctgaagccaggaacaagagttgctttggat

SEQ ID NO: 442972 - DNA, 82 bp, Homo sapiens
tcgggggccgctctgggatcccggccaccagcaattgtccggcatttgcctggtggcctgatttattggctgaacatgcaga

SEQ ID NO: 442973 - DNA, 75 bp, Homo sapiens
gaagctgggattggagattccacccaaacttgctggtcactgggaggtcaccatcagaaaagctaagtttgctgt

SEQ ID NO: 442974 - DNA, 98 bp, Homo sapiens
ggagaagcgcgcgggcgcgcaggccgcggggagcacctggtaacagtgtatcatgtatgccactgattccaggggacactcccctgctttcctccaac

SEQ ID NO: 442975 - DNA, 100 bp, Homo sapiens
ggttccccggcccacagtgggggtgtgcaaacccgagagaactggggctgcgaataaaggagaccaaggaagtttatgaaggtgaagtcacagagctaac

SEQ ID NO: 442976 - DNA, 96 bp, Homo sapiens
cgagaaagagagtgggagagagagaggcagagagggagagagggagagtgacagcagcgctcggtgaaaggtgtagcagtcactcggcctacaccc

SEQ ID NO: 442977 - DNA, 103 bp, Homo sapiens
gcggatcgggtggagtgtaggtcatatcgccgcgcgtccgtctccaagagagtatgaagagagtgcgtctgtagggcagggaagatggcggacaagcgcaaac

SEQ ID NO: 442978 - DNA, 100 bp, Homo sapiens
gtgaacggggtcctcttctgcaaggtccggctgctggatggaggggattttgtcagcttgtcgtcaaggatgataatgaagataattcaaatgatgggac

SEQ ID NO: 442979 - DNA, 75 bp, Homo sapiens
ggcctcggcctcggcctccgacacgaaagagctgggaacctttgctcaaagctccatcgcccttcaccatcagta

SEQ ID NO: 442980 - DNA, 90 bp, Homo sapiens
ctgcacatcttgttttccctaacatcaagaatggcgattgaccgaggcctggcttttgaacttgtctatagccctgctatcaaagactcc

SEQ ID NO: 442981 - DNA, 75 bp, Homo sapiens
tgtcctatgtcagcaaaaactggagcagaaattggaggctcagcatagagatttaccgcattgtttctcagaagc

SEQ ID NO: 442982 - DNA, 75 bp, Homo sapiens
gtttccttcaagctaaccaggatacagaacttggtggtttttgtgtgttacagggtcttgattatttacatacca

SEQ ID NO: 442983 - DNA, 98 bp, Homo sapiens
ctaaaccaacactcctagccaatggtggtcatggagtagaagggagcgatactacagacagagtctcgttctgtcacccagcctggtgtgcagtggtt

SEQ ID NO: 442984 - DNA, 101 bp, Homo sapiens
atcttattcacttccttaaggaaataggggatcaaaagttgcttttagacctcttcagattatggcatcgtcaaagcattgtggtgtcttttttactgctg

SEQ ID NO: 442985 - DNA, 100 bp, Homo sapiens
tgggcagtcaacagctaaaaccttcctcaccgtgtactagcctggcagagagcaggtgtgtgatacacgtcgtcaggtgactgaccgaggaattcagggc

SEQ ID NO: 442986 - DNA, 100 bp, Homo sapiens
acaggattattctacaggtgaaagagctacagggagctggccgactgcacctggcacatggcggagaagctgggctgcttctggcccaatgcagaggtgg

SEQ ID NO: 442987 - DNA, 74 bp, Homo sapiens
gccgcaagatactgatccggggcctcccgggggacgtgaccaaccagggccattccagttttatcacccacctg

SEQ ID NO: 442988 - DNA, 101 bp, Homo sapiens
aacgtgctcttctgagtgcatttataacctcatacccagtgacttgaaggagcctccccagcctcctagggccggtgcataaacttctcccgagttccatc

SEQ ID NO: 442989 - DNA, 98 bp, Homo sapiens
cattgagtacaagtctgccaaccgagagagccggcaaatactgtggtctggggttgcaaatgaaccattcaattgaatcaaaaggcaatgaaatcaca

SEQ ID NO: 442990 - DNA, 99 bp, Homo sapiens
tgaatatgaatttgaagaaattacactggagaggcagggagaaggttttaaggtgaaaacgaagaaagaaatccggcatgtggaaaagaagagccactc

SEQ ID NO: 442991 - DNA, 51 bp, Homo sapiens
caacaacaaaatgccactttcaacacatataattgacctgctgactgtggg

SEQ ID NO: 442992 - DNA, 88 bp, Homo sapiens
aaactcctggactgaaacgatcctctcatctcagcctccaaaagtgctggcattacagatatgtgcagcgggggctacagcgagtggg

SEQ ID NO: 442993 - DNA, 76 bp, Homo sapiens
gttgaattccactatgcaaggaataacaagcctttgtattcatttgaagataatgcagactatgtttatgatgtta

SEQ ID NO: 442994 - DNA, 78 bp, Homo sapiens
ataattgaacaaatggagatgaaattggatactggcattgataggataagttctgaacgtcgaaaagaaaagtctcga

SEQ ID NO: 442995 - DNA, 75 bp, Homo sapiens
gcaggagcctgttctcatcaccatggcaacaggaccagttgctcttctgtgatgactgcgatcgtggctaccaca

SEQ ID NO: 442996 - DNA, 83 bp, Homo sapiens
tttgccgccaccatgcccaaaacggtcagcccaaggccaaccccactgtcactctgttcccgccctcctctgaggagctccaa

SEQ ID NO: 442997 - DNA, 74 bp, Homo sapiens
cctttgccgccaccatgcccaaaacgaaccaagagccactgagagaggaagactctgatttcatcctgaccgaa

SEQ ID NO: 442998 - DNA, 74 bp, Homo sapiens
ttggattcaaagcataaaaaccattacaagatatacaatctgtctcagccaatttcttctccagtcatcctcca

SEQ ID NO: 442999 - DNA, 90 bp, Homo sapiens
tgttgatcaaaccagtgcagagaatcatgaagtatcagctgttactgaagaaacagtcctgctccagctgtaacagcagcatctgtgacc

SEQ ID NO: 443000 - DNA, 74 bp, Homo sapiens
gagaagaagaagcaggatgaactgaaacggattgccagagaattggcagaagactggaaatagcaaaggctatg

SEQ ID NO: 443001 - DNA, 114 bp, Homo sapiens
gaggaatgatccagcttattgttgcaaggagaataagcaagtgcaatgaggttgaaagaagctcaaaggcaagaatgttacttttgaattcccaaagtttcaattgtaaacaaa

SEQ ID NO: 443002 - DNA, 74 bp, Homo sapiens
atcagctgaggccatgtcaggagacggagccacggagcagccaaggctaagtcgaaatgtggcccaaccttctt

SEQ ID NO: 443003 - DNA, 98 bp, Homo sapiens
cgccaacgcggtcatctcgcagaacgccatcaaccagctggggcgacgatggccttctgaggggctgggacaccagggtacccggcaaatttctcttc

SEQ ID NO: 443004 - DNA, 101 bp, Homo sapiens
tggagcctcagttggaagcagccgatccagcctgcggagcctgtggggcagtttcatgatcaacatgggagactcccacgtggacaccagctccaccgtgt

SEQ ID NO: 443005 - DNA, 100 bp, Homo sapiens
gcggcctaaactctcatctccggccctctcggcgtccgccagcgatggcacaggagccaaccccctgcagaggaatgaaatgggacacacacccttggat

SEQ ID NO: 443006 - DNA, 100 bp, Homo sapiens
actttacacattgtgctattcactctgctttacaagacagccttttgattgattatcaatttaccttcagcttattacaggaagatgatcgccaccatac

SEQ ID NO: 443007 - DNA, 96 bp, Homo sapiens
gccccgcccgcgccggaagagccacgccgggtaaaatacgaagccccccaagcaacagacggcctggctggagccctggacgcccggcagcagagc

SEQ ID NO: 443008 - DNA, 85 bp, Homo sapiens
tcaagttcttaattattcagaatgctgcggttttccaagggtctcactgtcacccaggctggaatgcagtgacgccatcagagct

SEQ ID NO: 443009 - DNA, 83 bp, Homo sapiens
gttgggactaacagctggagagaacagttcattgaagctatcactgtcagtgctgaacaactctgctcatggtgattacatgc

SEQ ID NO: 443010 - DNA, 83 bp, Homo sapiens
atcacatttaagagagctctggacaagctggaatgcatccaagagaatccctcaacatgctgatgggaaagggctccttcaag

SEQ ID NO: 443011 - DNA, 100 bp, Homo sapiens
atcgtcagcatggccccgtcgtggagctgaaccgcatccaggttatcaatactctggctgaccatcatcatcgtgggactgactttggtggaagtccttg

SEQ ID NO: 443012 - DNA, 50 bp, Homo sapiens
ccgcgaccgtccgccagtcgtcccgagtcaccttcaggccattcagagga

SEQ ID NO: 443013 - DNA, 75 bp, Homo sapiens
agaccatggagctcgcccccaacttccagggtgtggatgaggtcaccattgtcaacattttgaccaaccgcagca

SEQ ID NO: 443014 - DNA, 83 bp, Homo sapiens
gcagacattcaacacctttacatttagcaggctaacagagaccctgatgctggaattgatgaagctcaagttgaacaagatgc

SEQ ID NO: 443015 - DNA, 90 bp, Homo sapiens
caaaactgaagatggtttgaaacagcttcacaaggtgctggagaatctggtaaaagcaccattgtgaagcagatgaggatcctgcatgtt

SEQ ID NO: 443016 - DNA, 98 bp, Homo sapiens
ctgaggaagacccggaaacttaggggccacgtgagccacggccacggccgcatagcctgtactgcgagaagcggatcctggaggctgtgggctgcaca

SEQ ID NO: 443017 - DNA, 82 bp, Homo sapiens
catgtctctgaagcatctcaccaagaagctgctaaaccgggatatccaggttcattcagggctcggtggtgcagactcccta

SEQ ID NO: 443018 - DNA, 100 bp, Homo sapiens
cacgcagcgccgccagtccgcccgcccgccctctccccgtggcgcggcggcggggaggcgagtaataatttttcaccatgcatcggaaaaaggtggataa

SEQ ID NO: 443019 - DNA, 50 bp, Homo sapiens
cctcaagatgaaacttcagacactttggaatgggtaccacagaccatgtc

SEQ ID NO: 443020 - DNA, 100 bp, Homo sapiens
gaagacgatgtggaggagcttgggctgaacttcactgtggtgaacaatgacctgggagaggcgcaggaacagatggagtcggataactgttcaggaggag

SEQ ID NO: 443021 - DNA, 100 bp, Homo sapiens
gaaagacaaagacccagtgaacaaatccgggggcaaggccaaaaagaagtcttctcacaagactttcaggattaagcgattcctggccaagaaacaaaag

SEQ ID NO: 443022 - DNA, 50 bp, Homo sapiens
ccggtttctcccacatcgacctggcgttggagaccagggccagccctggc

SEQ ID NO: 443023 - DNA, 100 bp, Homo sapiens
ccgtttgttggtggaggaggtggcaggcctcggcggtctgttgcggttctcccacttttccataagcagaacaagaaccaaatcaaacgtcttaacgcgt

SEQ ID NO: 443024 - DNA, 99 bp, Homo sapiens
ctctgcccctggaccaactccagatcacccacaaggacccgaagacaggaaagctgaggacttcaccagcgctgctcaattcaaccttccaaaattgga

SEQ ID NO: 443025 - DNA, 80 bp, Homo sapiens
tccagttgcagatacaaacttggattttttccagtctgatccttttgttggcagatgctgaaaacgccattcaacagatg

SEQ ID NO: 443026 - DNA, 100 bp, Homo sapiens
tgcgcccccgggagcgggcgcccagagggcgacataccttctgttgaataccttttacaaaatggaagtgatccaaatgttaaagaccatgctggatgga

SEQ ID NO: 443027 - DNA, 82 bp, Homo sapiens
ctggacggcgagcgcgagcggcgcgagaaaaatgaccgaagaagcatgccgaacacggagtcagaaacgagcgcttgaacgg

SEQ ID NO: 443028 - DNA, 75 bp, Homo sapiens
tgagcgtgctgccgggcagccgggcgctgcggccgggcgactgcgaagacctgtcgcgaaatcgcctttcagaaa

SEQ ID NO: 443029 - DNA, 98 bp, Homo sapiens
gctgccatcccaagctctactcggaaggggaccccggggagaagctggagctggtggcaggttacccatgcagttgttactgtaccagcctattttaa

SEQ ID NO: 443030 - DNA, 75 bp, Homo sapiens
gtccagaggaagtacttcaaggaagctcttgatagtgtgaagcctcagtttaggtcatctggtggttcagaacac

SEQ ID NO: 443031 - DNA, 90 bp, Homo sapiens
cttgccctgcaccgccccctgggatccgcaggttccctacacggtctcctgggtcaagttgcagtaccatgcaggactagcatctggcct

SEQ ID NO: 443032 - DNA, 80 bp, Homo sapiens
tcagagcattcaagggatggtgaaatggatgatagtcgagtatttagtgtctctgatccgggacaagctaggatggatgt

SEQ ID NO: 443033 - DNA, 109 bp, Homo sapiens
ttcccgcgtccgccgattcctcctccttggtcgccgcgtccttggctggcgtgagcatcagatccatgctgctgctgactcggagccccacagcttggcacaggctctc

SEQ ID NO: 443034 - DNA, 108 bp, Homo sapiens
ctcaaacagcagtatgatgaactggaggctgagtacgacagcctcaaacaggagctggagcagctcaaagaggcttacgtgtatgaaatgggctcaagcacgttttct

SEQ ID NO: 443035 - DNA, 100 bp, Homo sapiens
ggcttgtaatccccccacagaccctggaagaaagcccctctcacacaggaaccactcgttttgactattattttatcactctttgtgaaacttcacaatg

SEQ ID NO: 443036 - DNA, 100 bp, Homo sapiens
ggaacagctccggtctacagctcccagcgtgagcgacgcagaagacgggtgatttctgcatttccatctgagacttgcaaccttatttctcgaaagaggg

SEQ ID NO: 443037 - DNA, 99 bp, Homo sapiens
gagaccccgacgtggagtgccgagatatggctcgtggacagcagaaaattcagtctcagcagaaaaatgccaaaaagcaagctggacaaaagaagaaac

SEQ ID NO: 443038 - DNA, 100 bp, Homo sapiens
atgaaattctatttgaagaataccagtttcaagcagtattaagagtaaatgggaatcagaggcaatcattccaaacatctttttcttcttggtattacta

SEQ ID NO: 443039 - DNA, 100 bp, Homo sapiens
gctggaacaggagttccgatcgacccggtaccaagaaggggagtgcccgcggcaggataatcgagttcacattggaccaaaaatggaaattcgggtcgtt

SEQ ID NO: 443040 - DNA, 96 bp, Homo sapiens
aatcaggagtgaagtcccagggatattctgtgctgtgacctcttccatcccagtatttgacctccaggatggtggacggaaaatatgtccacgatg

SEQ ID NO: 443041 - DNA, 83 bp, Homo sapiens
gtctgggggcgctggcggcctgcgcagccacctcaaggaattgaatgatctggcacgggaccctccagcacagtgttcagcag

SEQ ID NO: 443042 - DNA, 100 bp, Homo sapiens
gggggactgcaaaggccaatgttggtgctggcaaaaagggtggagagattcaaccagttagcgtgaaagttggagataaagttcttctcccagaatatgg

SEQ ID NO: 443043 - DNA, 98 bp, Homo sapiens
gaagaggaaccacaagaaaatcaaaagaaacttttgcccttatcagtaacacctgaggggcactatgaacgaagaggagcagtttgtaaacattgatt

SEQ ID NO: 443044 - DNA, 100 bp, Homo sapiens
caggccgaggctgaccggagccagcgctctcacggaggacctgcgctgtcgcgcgaggggtctgggagatgggaatgtgaaggctgtgtctgagactcct

SEQ ID NO: 443045 - DNA, 100 bp, Homo sapiens
ccgcggtgaagttctccgccatgaacctgaggggcctcttccaggacttcaacccgaggcaccttggaagttgttttcaaccatatccagcctttgccga

SEQ ID NO: 443046 - DNA, 75 bp, Homo sapiens
ctcgagaacatcgtagcgaacacggtgctactcaaggcccgggaagcctcccgcgacgatgcccctcaacgttag

SEQ ID NO: 443047 - DNA, 96 bp, Homo sapiens
gcggatcgaagtgatggccctgcccaaaccgggcggggcccacagcctagggttttacacaggctggctcctgccagcggcagtggtgggcacact

SEQ ID NO: 443048 - DNA, 82 bp, Homo sapiens
aggagcctggctaagcaaaaccctgcagaacggctgcctaatttacagcaaccatgaggaaactttgagggaaattttgagt

SEQ ID NO: 443049 - DNA, 75 bp, Homo sapiens
taacaatgcagccttttcagttaaccaaatgtatccagagctacagatcacaaatgtgatggaggcaaaccagcg

SEQ ID NO: 443050 - DNA, 83 bp, Homo sapiens
ccctgctcggaggcggtggcggtactccaaagattcaggtttactcacgtcatccagcagagaatggaaagtcaaatttcctg

SEQ ID NO: 443051 - DNA, 92 bp, Homo sapiens
ccctggagcctcagttggaagcagccgatccagcctgcggagcctgtggggcagctgtgagccgtgagctttgaggcggtgggatgtgtcag

SEQ ID NO: 443052 - DNA, 82 bp, Homo sapiens
ccaggtgcctacctccctcaagcctgggaagcatggcggacaccgacctgttcatggaatgtgaggaggaggagttggagcc

SEQ ID NO: 443053 - DNA, 102 bp, Homo sapiens
tttcagcctgcccttgccagtgcctgggccgctgggagccgttattggctgccgttaaggaccgttacgtttcccgggctggagtgcaatggcgcgatctcg

SEQ ID NO: 443054 - DNA, 100 bp, Homo sapiens
gcaaggagggcggcgggactgcactcgagtgtccagacctgctcgatggtcactcctggaagcaaggcggctctagctaatttatgtattggagatgtaa

SEQ ID NO: 443055 - DNA, 100 bp, Homo sapiens
accacaacaccaggaggaccagctggatcgacccccgggacagggacaggagagagtggcaagagtacgtttatcaagcagatgagaatcatccatgggt

SEQ ID NO: 443056 - DNA, 90 bp, Homo sapiens
ttgacataaaacagttgatagcaaagaagataaagttgacagcagaggcagagaacattcagaagattctcggccttgccccttcacgag

SEQ ID NO: 443057 - DNA, 50 bp, Homo sapiens
ggaggagctgagcgctgatgagattctgatggtagaattaaccatgggcg

SEQ ID NO: 443058 - DNA, 82 bp, Homo sapiens
ttcaagaagatcattatggagcagagatcaggccaagtttggaatcactggggagagcctggggatgtacaggagatgcctg

SEQ ID NO: 443059 - DNA, 82 bp, Homo sapiens
gcagccaggccctgggccagtcggcgccctcgctcaccgccagcctgctgatcttgcatctttaatggataaaacatttgag

SEQ ID NO: 443060 - DNA, 75 bp, Homo sapiens
tggagcccaaagacccctggagacatgggaggagtctgctactagtcttatcagctcttaaaaacagaaactcat

SEQ ID NO: 443061 - DNA, 75 bp, Homo sapiens
tgaacatttggcaaaaagggcaagacaaggtgaagaggataatgatgcctccggagccagcgtggtggccataga

SEQ ID NO: 443062 - DNA, 100 bp, Homo sapiens
ttgatacctctcactattctactgctggaagctcaagtgaaaatcggctgtgacggcatcatcgggtctgcagccaaagaggacagatgcggggtctgca

SEQ ID NO: 443063 - DNA, 100 bp, Homo sapiens
ctatttacatcccattccctgaagatgattctaattcaacaaatcataacttgaatcagatgggtgactcaaatatctccagccctgggttacagccaag

SEQ ID NO: 443064 - DNA, 117 bp, Homo sapiens
tcgactggttgatcagcagattggaaagactggaagcttcttcagctcctgttcgacacagtggagaccatgggaaaagactatttgtcatcagaccttctagattctatgacaggc

SEQ ID NO: 443065 - DNA, 87 bp, Homo sapiens
aacagctgtggaaagaagttgcaaaacactgggactcctctgatgatggcctgcacaaggaagaacctgggggtgatccaggagctg

SEQ ID NO: 443066 - DNA, 100 bp, Homo sapiens
cacagatgtccaagctgccaactgccactgcagagccccgccatggaagacacgccgttggtgatatcgaagcagaagacggaggtggtgtgcggggtcc

SEQ ID NO: 443067 - DNA, 100 bp, Homo sapiens
ggcagcggcacctacggcgacgtctacaagaattgccattgccttcagaaagtgttgatattattatttctgacattccatttgggaaaaagtttaagtt

SEQ ID NO: 443068 - DNA, 83 bp, Homo sapiens
actacccaaacgtcagtcgaatcacaggcaggaggagccgggtgtgggctgagccctgcctgattgatgctgccaaggaggag

SEQ ID NO: 443069 - DNA, 121 bp, Homo sapiens
ctcctcccaccctgagcagagccgccgaggatgataaacacccaggacagatttgattagaactatccgggacccagaaaagcccaatactttagaagaactggaagtggtctcggaaagt

SEQ ID NO: 443070 - DNA, 74 bp, Homo sapiens
caaaaggctgcaactactgtggaaatttcagaagaaagtggtagcttcctttccaagaacagttctgagcacag

SEQ ID NO: 443071 - DNA, 50 bp, Homo sapiens
cagcgctgtcgtgctcctctactcgcttggcgagccggccaggggcatca

SEQ ID NO: 443072 - DNA, 49 bp, Homo sapiens
ggaaaatggagcccttcaccaatggaaggatatggagtaatagtactaa

SEQ ID NO: 443073 - DNA, 83 bp, Homo sapiens
accttatcccggccccaaactggcagggtctttatcccaccattagagagaggtagcctttccagtaaatatatgactcaggg

SEQ ID NO: 443074 - DNA, 101 bp, Homo sapiens
aggatccagtgttcaccatcctggccccggaagggatatgatgatacatacgcagaacaaagttacgaaggctacgaaggctattacagccagagtcaagg

SEQ ID NO: 443075 - DNA, 103 bp, Homo sapiens
agggttgaggcgattccagagagcggcggaaaggataagcctcgacttagaagctaccgagttaccctaagaaagcagcagcgtgcagggtcaaagacagccg

SEQ ID NO: 443076 - DNA, 75 bp, Homo sapiens
gctacatggccccctggtttagggaggggatctggacaactctcctctgtccccaccttcaccaaggaccaaaag

SEQ ID NO: 443077 - DNA, 98 bp, Homo sapiens
gggctcagggagcaggagcttcaggttgtccgagcatctgggaagtggagggagcaaagtcctgcacactggagtggtgtactagcggatcaagtatg

SEQ ID NO: 443078 - DNA, 50 bp, Homo sapiens
aggctttgatgaatacatgaaggagctagccagaagatacctgaaattcc

SEQ ID NO: 443079 - DNA, 75 bp, Homo sapiens
aaagtcgcagcgagctggagccgccggagacaggacagctggagcccctgctgtcccggttcactgaggaggagg

SEQ ID NO: 443080 - DNA, 98 bp, Homo sapiens
gacggggcgctgcctggcccaggcgcacacggaagtgggagcctgcacacatgatcctgaccgtcggaaacaaggcagatggagtcctggtgggaaca

SEQ ID NO: 443081 - DNA, 100 bp, Homo sapiens
cccgccgagaggggcgcactcgccgccgcggggcccgccgccgctcaccgcagccccctcctggcgacccgcaatccctgaagaggaaggagaaggaata

SEQ ID NO: 443082 - DNA, 75 bp, Homo sapiens
ccagcctgcggagcctgtggggcagattgtgttcagtgtggacccctccgagggcagccctggttccccagcagg

SEQ ID NO: 443083 - DNA, 82 bp, Homo sapiens
ctcgggagctcatcttcgtggggcgtgaggagtgtgagctcatgctacagggatcctgaaactccgccacatctggaacctg

SEQ ID NO: 443084 - DNA, 100 bp, Homo sapiens
tcctggggggagctgatgaagtccaagtactcagacatcaccatcatgtttgagaagggagagaaggtacccaaagggaaaaagggaaaagctgatgctg

SEQ ID NO: 443085 - DNA, 75 bp, Homo sapiens
aaactattgccacttcgtatctgtggtatgtaaagaattcttgaaccgattctacaagtcactgatagacagagg

SEQ ID NO: 443086 - DNA, 88 bp, Homo sapiens
cattatttatgtcatcaagaagaatgacgatgccgttctggacatacacatgggcagaagatgtagccgccttgtgtgaaaatttgag

SEQ ID NO: 443087 - DNA, 96 bp, Homo sapiens
ggccaggagctccccacagccgggaagattgtcaaggggtccactggacggggcctgagctacaacttcacccacctggacgggtacctggacctt

SEQ ID NO: 443088 - DNA, 100 bp, Homo sapiens
gaaacatctacacgcagaaatcaaagttattgggttcccagtgacctgacagcagaggagcgtcaagaactggagaacatccgacggagaaaacaggagc

SEQ ID NO: 443089 - DNA, 95 bp, Homo sapiens
gtgaggctttcccggctgtggtttggctgcgggcggcttgggcagcccgcgggcgcctcagctgagctgactgctgcccactttggaggaggcgg

SEQ ID NO: 443090 - DNA, 100 bp, Homo sapiens
cctggatgaaatagatctctcggctctgagggggaatcccggaggcaagacacttgaggagaggcgctccagcctggacgctgagattgactccttgacc

SEQ ID NO: 443091 - DNA, 125 bp, Homo sapiens
gaagaacgctatttatttgtggaaagttctcatacttgctttctgtggtactatagagttagggaggaaataatgctggccatacagttgttgtggattctgtggaatatgattttcatctctta

SEQ ID NO: 443092 - DNA, 100 bp, Homo sapiens
aagttccaacaaaagaatgctgccgcagtaatcaacaagatgccacatcagtagcaactgagtcttcagaatcaagcacttcagatttgccttcattcga

SEQ ID NO: 443093 - DNA, 100 bp, Homo sapiens
ggggcttgccgttcgttcgtttccagcctcaggaatttatggtcgcctttttgaatgagacaaatttacatgtattggagaccagaccagaagcccttct

SEQ ID NO: 443094 - DNA, 95 bp, Homo sapiens
aaaggagagcgccaaaccattactgatgatgtggaggttaacagctatctttctaacattctagtatgccagtagaaaaaaatatcactttagaa

SEQ ID NO: 443095 - DNA, 100 bp, Homo sapiens
agcaagagattaaagatgcagtacgccacggggccgctgctcaagttccagatttgtataaccccgttttcacacgaatggccccttcacatatttgaag

SEQ ID NO: 443096 - DNA, 103 bp, Homo sapiens
cttcaggtgttagagtgtgagcgtaaccaacacctggtccagacctcatgatgcgtctgaagaaacatcgctggtataagaaaatcctcaagtcccgagatcc

SEQ ID NO: 443097 - DNA, 98 bp, Homo sapiens
cgcagagccgagtgcagaagatctgggtgcccgtggaccacaggccctcgttgcccagatgttttgagcaaaattttggactgtgaagcaaggcattg

SEQ ID NO: 443098 - DNA, 98 bp, Homo sapiens
gtcctgcatggtttcaagggacgtaccaggaggatggtgcccaggccccagctggacagccacctttgacccagtgcctacagatgccccgaccagcc

SEQ ID NO: 443099 - DNA, 75 bp, Homo sapiens
acataaatgcagctacagctgtggctctacagttgccattgccccaaatggagccttacagttggcaagtccagg

SEQ ID NO: 443100 - DNA, 83 bp, Homo sapiens
cggacggcgtggaccacatagacatttacgcggatgtcggcgaagagttcaaccagctgaaactagaggaccgttctgtggtg

SEQ ID NO: 443101 - DNA, 51 bp, Homo sapiens
ttttattgtgtgtacctgtacaggcaacaagattgacctggctgaaaggag

SEQ ID NO: 443102 - DNA, 100 bp, Homo sapiens
aaacaaggagagcctactgagcagcctgagtggatggcctgatatgaaggagtcacgcctcccgcctcccggagctgcccagtggctgccttgtccttca

SEQ ID NO: 443103 - DNA, 50 bp, Homo sapiens
agcctctcgaatgggcacacctgtgtagattactgtggcatgatcctcca

SEQ ID NO: 443104 - DNA, 100 bp, Homo sapiens
gaagacagcaccaggttccaaatcatcaatgaagcaagtaagtcccaccagcagtaccccccatcgcatgccacgcccctgcccaagaaggcatactcca

SEQ ID NO: 443105 - DNA, 49 bp, Homo sapiens
atgtctggttggatgaatacaaggagctatcgaaaaaccttgaactgag

SEQ ID NO: 443106 - DNA, 102 bp, Homo sapiens
cttagctgtgctcgcgctactctctctttctggcctggaggctatccagcgtgtggacactgccagcggctgcagccgacttggaatgacctgggagacaaa

SEQ ID NO: 443107 - DNA, 90 bp, Homo sapiens
acgggctttctgctgccgcccgcaagcagagtgtactaatggtcacttgatgtgcgctggctgttttatccacctactagcagatgcccg

SEQ ID NO: 443108 - DNA, 50 bp, Homo sapiens
cgaaaacagagttcagaaggggtatgaaccctctcgtgagatgaaaagtc

SEQ ID NO: 443109 - DNA, 75 bp, Homo sapiens
gttcaagaagaacactccagagtgagaactcaacagaggcaaaagcagtagattctaacaatcagtcgaagtccc

SEQ ID NO: 443110 - DNA, 75 bp, Homo sapiens
attctggaggaaaggtttacaagcaggccacgattgaatctctgaagttgtcgagatgtccacagaaggaggatt

SEQ ID NO: 443111 - DNA, 98 bp, Homo sapiens
gctggcgaacccgcggcggacttacgtcacgcctcctggcacagatccaacagttctctaagaaggagattgaagatcttttaagaaaaggagcatat

SEQ ID NO: 443112 - DNA, 100 bp, Homo sapiens
cgcgcgacgcaggtgcccgagccccggcgccgccgccatctctgccttcggtcgagttggacccccggatcaagattgatgtcatgtatgaggaggaacc

SEQ ID NO: 443113 - DNA, 100 bp, Homo sapiens
tggtgatgaacttagcagcagctccactgaacagataaggactcgcctaggaaggaggtgtacttcatggcaattattgacatccttactcattatgatg

SEQ ID NO: 443114 - DNA, 90 bp, Homo sapiens
cgtcctcagcgcgaccctggagctggggttctgaaaatccagaatggcttgatgtttacatgcacattttacaactgcttactacagtgg

SEQ ID NO: 443115 - DNA, 75 bp, Homo sapiens
tgatctacctaccaatcgtgaaaactatattcacaggctggattctagtgacatttataacgaattgaaagaaac

SEQ ID NO: 443116 - DNA, 76 bp, Homo sapiens
ggaccataactgatgatgtgcgggttcaggaggtacccaaactgaaggcgtccgagctgggccacagcctgaacga

SEQ ID NO: 443117 - DNA, 74 bp, Homo sapiens
aatagacctgagccttcatgcaatgatcctgaggaattcttgaatattctgtttcatcatattttaagggtaga

SEQ ID NO: 443118 - DNA, 98 bp, Homo sapiens
gtgctcctgtccgccctccacctggccatcgccctgcgcaccaacgcccaggaccagttcctgctgaagcaggaagagctaaggagcaaatccaagat

SEQ ID NO: 443119 - DNA, 75 bp, Homo sapiens
atcatctccaggctggtggtgatgatcccgtccaccagtcagaccttcctggtgaatgacctggcggcgggccgt

SEQ ID NO: 443120 - DNA, 100 bp, Homo sapiens
gactccaacgaattaggtggtctgactaccagtggctctgcagagtgcacttacatttcaatcgaccaagttccaaggacctatgccataatgataagca

SEQ ID NO: 443121 - DNA, 100 bp, Homo sapiens
gtcgttcccacagccattctggcgttcctggtcaatcatgacttcacccctctggaggccatcaccatcgaggctgagccaagagctgatggcagccgcc

SEQ ID NO: 443122 - DNA, 100 bp, Homo sapiens
ggaaaataaggatctggcatgtttctacacaacaaaacattcatggagggggaagcgcttaaattcctagcgaagtgccgtaagaaaaagaaactatttg

SEQ ID NO: 443123 - DNA, 75 bp, Homo sapiens
tggattgggaaagaccatggcaggaccctgatgcttggtgtgacctgagtaaatttgacctccctgaggaaccat

SEQ ID NO: 443124 - DNA, 100 bp, Homo sapiens
gggccctccgtgccgccggcgccatgggcaattgccacacggtggggcccaacgaggcgctggtggtttcagcgggctgacgcacgaggcacacaggaag

SEQ ID NO: 443125 - DNA, 75 bp, Homo sapiens
ggagaactaccctcccaacacggaggtcaacctcactctgatctgggtctgggggtggtggcatctcccctaaag

SEQ ID NO: 443126 - DNA, 75 bp, Homo sapiens
ccctgagacaaccacttctggtggttgccactcacctgaggataatggacttctatctgcccttccttttattgt

SEQ ID NO: 443127 - DNA, 98 bp, Homo sapiens
ctatggcctgttatttgtctcaacaaaagagcttcagtgtcatttgaggacgtgactgtggacttcagcaaggaggagtggcagcacttggaccctgc

SEQ ID NO: 443128 - DNA, 100 bp, Homo sapiens
aatcatgttgtctcttgtcagcacaggaattcatgcccaagcacaaaacaacccatttaaagaagatgctcggccttaaaggaaatggcggtgcggttct

SEQ ID NO: 443129 - DNA, 138 bp, Homo sapiens
cggagcgagagcgagtgcctgagcaacatccgcgagttcctgcgcggctgcggggcttccctgcggctggaggtacagacagtgtttgtgtgttcctgttgtggctaactttaagaagcggtgtttctcagaattgat

SEQ ID NO: 443130 - DNA, 74 bp, Homo sapiens
aaaaagttgcagctactttgcaagtgccagtaaatgatttaaatgcagggagaagttgatacgagtgagctccc

SEQ ID NO: 443131 - DNA, 80 bp, Homo sapiens
ggagtcgcccgcctcgagccagcccgccagcatgccccagtccaaagggctctgtacacatatgaagatggctccgatga

SEQ ID NO: 443132 - DNA, 75 bp, Homo sapiens
accaggctctgcagcggcaacccccagcggcttaagccatggcatgccccttggtgtggccactgcaaggctctg

SEQ ID NO: 443133 - DNA, 90 bp, Homo sapiens
cttcaaccacctcgagcggctgctggacgaagaaacaaatcattgtggaccccttgagcttcagcgaggagcgctttaggccttccctgg

SEQ ID NO: 443134 - DNA, 100 bp, Homo sapiens
ctcgtctccttcaccgccgacttcaagaaggtgtcatggagaaactccagctgggcccagagattctgcagcgggaaaatccaaggcttatttatgccag

SEQ ID NO: 443135 - DNA, 100 bp, Homo sapiens
ctgggtcgtcttctcggcgacaactgccctgctcttcatcccagagatctaccgcatcgtgtcacagaaacagatcgcagaccgcgctgcccacgacgag

SEQ ID NO: 443136 - DNA, 74 bp, Homo sapiens
tgaagtggtagtaggagctgaaagattacgagttttaggcaaagatgccttttgatgccaacaaactgtattgc

SEQ ID NO: 443137 - DNA, 75 bp, Homo sapiens
tgaacgcagtcttctaccttggaatagtgaatggcactacctggcagcaccatctaaacctgtatcatctgctgt

SEQ ID NO: 443138 - DNA, 100 bp, Homo sapiens
gggagcgcagcggcgttggcggcggcggcggcggcagcggcagcgcggcggggccggatgttgctgctgaggaggaatgtagatattcaggccactgcac

SEQ ID NO: 443139 - DNA, 82 bp, Homo sapiens
cccacccgcgccaggaggccgaacgcggactcgccacccggacgccacagccatggccatgatggtgtttccgcgggaggag

SEQ ID NO: 443140 - DNA, 100 bp, Homo sapiens
gcctgcaggcctcgcgctgacaggatcttttgtgacgctgcaaatgtcctgggtcctccaccagcagcctggccccaggccctgagccaggcccccagcc

SEQ ID NO: 443141 - DNA, 98 bp, Homo sapiens
gagtgcaaggtggacagcatcgggagcggccgcgccatccccatcaagcagagggtgacattgacattttgctggacaaatttcaccaggaaaatcaa

SEQ ID NO: 443142 - DNA, 83 bp, Homo sapiens
tctttgctcctgcgccgcgttctagagcaaggtgagaagccctaccactgcaactgggacggctgcggctggaagtttgcgcg

SEQ ID NO: 443143 - DNA, 80 bp, Homo sapiens
cgcttgaacccgggaggcagaggttgcgttcctcataaccagaggaagcctgaatcaactcatctgttagaaaaccaaaa

SEQ ID NO: 443144 - DNA, 143 bp, Homo sapiens
ggccagtcaccaagacaggcatctcaaatcggctgattctgcatctggaaactgccttcatcttgaaagaaaagatgtctttggtggacttgggaaagaggttgctagaagcagcaagaaaaggccaagatgatgaagtgaga

SEQ ID NO: 443145 - DNA, 100 bp, Homo sapiens
cccgacggtcacccgaatcgcagggagtcgccgctggagaggggctcggcgcccggcggggactgcaggtccagcctgatgagtgaagaggctaagcgag

SEQ ID NO: 443146 - DNA, 51 bp, Homo sapiens
gagttcctgcaacaacaatacagatagctcgtcagcatgtgcaagttccag

SEQ ID NO: 443147 - DNA, 101 bp, Homo sapiens
ccccaaagtcacagaaataatacctaaatatggcagtataaatggagcaacaaggctgactataagaggggaagatatttggagttcttacaacatggcag

SEQ ID NO: 443148 - DNA, 100 bp, Homo sapiens
gcaagcttagagcgtctggccaagaatcagaggaagtggagttcccgattttgaaatgctgggctcactcagaagtggcagccccttgtgctttggagaa

SEQ ID NO: 443149 - DNA, 100 bp, Homo sapiens
ctcgggctgcggaacagggcggcactggcccgccacagcgacgccggcgccgagggacaccgcagtatgaggcagaggtgacagagctgaatgaacctct

SEQ ID NO: 443150 - DNA, 98 bp, Homo sapiens
cttggagagaaaacttgcaaggaaaggaacatgtttgaatttcagatgtgttcctcaatgaatcacgtcctggctataagtcaccatggcacagcaag

SEQ ID NO: 443151 - DNA, 100 bp, Homo sapiens
ttagctgtgctcgcgctactctctctttctggcctggaggctatccagctgcactggtgattgctgcggtgtttgaccgagacataaactgcagaagagc

SEQ ID NO: 443152 - DNA, 83 bp, Homo sapiens
cagcctcagagaacttgaggaagagaacacgagcttgaaggattttttatcaagcagaaatgcatcgaacaacgagaatcaag

SEQ ID NO: 443153 - DNA, 100 bp, Homo sapiens
tctgctcctcctcgcctgcgaagcatcacgtccgcttcccgacgctgagggcagccccgtccagggaatcgggcgcctgattgctgagtgtcatctcaac

SEQ ID NO: 443154 - DNA, 75 bp, Homo sapiens
gccggtgtgttggtggtcccggaacctctcgtaaaccagctccataatgggagaagtaaagaacaaagacttaag

SEQ ID NO: 443155 - DNA, 75 bp, Homo sapiens
ggaagaggaggaggtggcagaggtggtggcagaggcgtggtctcacgtgtgaaacatggctacagattggctggg

SEQ ID NO: 443156 - DNA, 100 bp, Homo sapiens
tgaagttaaccggtgtaggagaagaaatccgcagaagcttattaaagttaagtttggcacatggaagcatgcacggcgatatggaggcatctatgcagcc

SEQ ID NO: 443157 - DNA, 75 bp, Homo sapiens
tgccaactatagagatgaaaattcacagctgaatgattccagcttcctcagtacacttcatgaagtctacttgca

SEQ ID NO: 443158 - DNA, 90 bp, Homo sapiens
attgagaaagaatgtgaagataccagtttgcgtcaggagacacaggagctcgaggccatgagcagatataccagcccagtgaacccagct

SEQ ID NO: 443159 - DNA, 75 bp, Homo sapiens
gagctgagtggttgtgtggtcgcgtctcggaaaccggtagcgcttgcagcatgctatgtgatgatgatgccattt

SEQ ID NO: 443160 - DNA, 100 bp, Homo sapiens
cagcttcactgatagctgtacccgctgtgcttcccagtttcactccatatgtggaagagactgcacgacagccagttatacggagtcttgctctgtcgcc

SEQ ID NO: 443161 - DNA, 101 bp, Homo sapiens
ccgctactttgtaatccggatccaggatggtactggtaccaatgaacaagccattcagagatggatccacaaagatctctggagcaacgaccaggtcctgc

SEQ ID NO: 443162 - DNA, 90 bp, Homo sapiens
cttaaaattaattgcaaatatattaccagtggcaaggttccagcaacagatagaaatgctttaagttcactctggggaaagctggcctct

SEQ ID NO: 443163 - DNA, 75 bp, Homo sapiens
gaaagcctacaaaagtgtggagaggttccttcaggaggatcaggtgaccattgtgaggtagatattttgttctaa

SEQ ID NO: 443164 - DNA, 49 bp, Homo sapiens
ccgttcatgcagacttttttaacgggtaaaccagacttgaatacaacat

SEQ ID NO: 443165 - DNA, 83 bp, Homo sapiens
cattcatcgagggagaagtgattatcgtcacaggggaagaggaccaggagtggtgggaaatctggcattttttaaagtttgcg

SEQ ID NO: 443166 - DNA, 100 bp, Homo sapiens
ccggatgttgcggacagtatgaggcaagcgcagggggacggggaccagcagctgtcgccgccgctctcaggtggggaagaaaacatgacagaaacagatg

SEQ ID NO: 443167 - DNA, 82 bp, Homo sapiens
gacaaagccaaccgatacttttctccaaattttaagcaatattttggtgtttaagcttggaggaacatccttatctctcagc

SEQ ID NO: 443168 - DNA, 98 bp, Homo sapiens
aacagaaaagggagcatctcgaatagtttctcttaaggttctgcagggcaaggctgtctgggacaggcttggccatggatccgctctcagagctgcag

SEQ ID NO: 443169 - DNA, 75 bp, Homo sapiens
accataaatcgcatccaggacctgctggctgaggggactataacagccctgggcgctgcctatggcacagccaag

SEQ ID NO: 443170 - DNA, 75 bp, Homo sapiens
acaccctcaacaaacaccagcgctttgggaaaatatctaaatgtggtcagagagtgtggccatgacgtcacctgc

SEQ ID NO: 443171 - DNA, 101 bp, Homo sapiens
cttggccctaggacttcctcatctgccatcccccaagcagcgggccaagttcaagaggtttttcgttggaatatacgttgcacatttatggcgattctgag

SEQ ID NO: 443172 - DNA, 75 bp, Homo sapiens
gaagatgagctccatatagggagaactgctcagattggccatgtctatcctgcaacagagaagattacagtatgt

SEQ ID NO: 443173 - DNA, 75 bp, Homo sapiens
ctttgattcaaccagtacttctggagtgtatgtctacaaataagaaacctcgaaaatctccaggtgagaagagca

SEQ ID NO: 443174 - DNA, 82 bp, Homo sapiens
ctttcacaataagagcagaggatggaacacttcagtgcattcaaggaaataatgcaaaaggtgtcccaaggctcctgaccag

SEQ ID NO: 443175 - DNA, 76 bp, Homo sapiens
ctcaagactggtccacggagtgtatgaccacaaacagccatcaaggtctgcgcaggcatggcactaagtgtcccat

SEQ ID NO: 443176 - DNA, 74 bp, Homo sapiens
cgcctgtggggactggaggcccagaaacggtctatcatctcatgaagaactgctgggagacagaggcgtccttt

SEQ ID NO: 443177 - DNA, 88 bp, Homo sapiens
tacttttgaatggcaatgtaaacttccagccatcaagcccaagactgaatttcaattggcttcaacattgctttatggcatgtgtggt

SEQ ID NO: 443178 - DNA, 100 bp, Homo sapiens
gaccttaaccgttccaatggggtagcgctccccccattggacaagtggaagacccccttccaatcctcgggcctggacaccagccggaccacccggcacc

SEQ ID NO: 443179 - DNA, 134 bp, Homo sapiens
tcagtggaataaatggcgtccaaagtcacagatgctatagtctggtatcaaaagaaggcttcatagagcccagtgtgcaattaaacagactcaggtaactgttcagaaaattggaaaggaaattgaagaaaaac

SEQ ID NO: 443180 - DNA, 100 bp, Homo sapiens
gacactgaacttacagtgcaaacgatcatgaggatgagaatgaagaaggtggtgaggtcccctgggccccgcctgaaggatcagaggcagcagaggaggc

SEQ ID NO: 443181 - DNA, 101 bp, Homo sapiens
cggctcccttcgcctccaggatgcgctgagccctacaacacccccagcggccgccggctcccccacgagcacgggctgtatattgggagttggacttgttc

SEQ ID NO: 443182 - DNA, 98 bp, Homo sapiens
attcaacccaggacacaagaaactccttcacatctggaagaacttgaagattaataaagaactcttcagaattcctggtgtttcatcatatatacgac

SEQ ID NO: 443183 - DNA, 90 bp, Homo sapiens
ggcccatcgactacaaacggaacttgccgcgtcgaggactgtcggatgacctgagaattaatttatggcacttagaaatcacagatagaa

SEQ ID NO: 443184 - DNA, 115 bp, Homo sapiens
gaggcgctgctggctcacagcttcctggcccggcggccagggggcactcaaggctcgcccgaaggtcacctgtcactttgacaaccagctggtacggaatgcggccctgcgggag

SEQ ID NO: 443185 - DNA, 78 bp, Homo sapiens
gtgaggccgcggagcgccagctcaatgaaagctcgtccgcatggtgctgaatggctgaggaccttcccagtctcccca

SEQ ID NO: 443186 - DNA, 100 bp, Homo sapiens
tctctgttgtctcggtagaaggccagagtcacacacggtcctaagagctgggcaccaggaagcgaaggctgatggcccactgcgtgaccttggttcagct

SEQ ID NO: 443187 - DNA, 83 bp, Homo sapiens
cccgaccccgtcccgaccctggccgccccgagcggagcctggagatcgcaccccctccctccctggcggagcccctgaaggag

SEQ ID NO: 443188 - DNA, 82 bp, Homo sapiens
gccgcagtctggccacccgcttccatgcggttcgggtccaagatgatgccggttcacctttccttgccagtgaagatggcgt

SEQ ID NO: 443189 - DNA, 75 bp, Homo sapiens
ccactgccacaaacgccgcaccaggtcttgtagcagcgcctcctcgccgcttacaaacacgcagatggcaagaag

SEQ ID NO: 443190 - DNA, 75 bp, Homo sapiens
aaagatgacaccacctttgatgagtggatgattcaacagccacacaaagcagcaacattttttggatgcattggg

SEQ ID NO: 443191 - DNA, 100 bp, Homo sapiens
gctgcagaaggtgatcaggaggttttagacagcgtgtgccaagcagatgagaattcagaagtgtcggaggaaggcttccagattccagctacaataacag

SEQ ID NO: 443192 - DNA, 76 bp, Homo sapiens
gtgagaacaagagagaggacggcagcgccaagcaggagctgaaggacttcagcatgccaatgaagatgtggaaaga

SEQ ID NO: 443193 - DNA, 75 bp, Homo sapiens
ggccggccagaagcgggcggcgcgggggagatgttaccttatcccatatcacacaactggtcctcagccataaca

SEQ ID NO: 443194 - DNA, 73 bp, Homo sapiens
ccaggaagtcggagtttgagccccggaggcagagcggctgccatggaagatgttaccgagtacttcagtgaat

SEQ ID NO: 443195 - DNA, 75 bp, Homo sapiens
acccctacattgtgaagctcctgggagcctactatcacgacgggaagctgtgggacggagtaaccaagagcccag

SEQ ID NO: 443196 - DNA, 75 bp, Homo sapiens
gacctctgtcagagaatgaaacactcatcgcatgaatcttatggcaagggccttatatgacaatgtcccagagtg

SEQ ID NO: 443197 - DNA, 82 bp, Homo sapiens
agcctcagttggaagcagccgatccagcctgcggagcctgtggggcaggccctaaaggacagcaaggtggtggagatcgttg

SEQ ID NO: 443198 - DNA, 96 bp, Homo sapiens
gcggacggcgtggaccacatagacatttacgcggatgtcggcgaagagttcaaccaggaaggatcgagatcgagaccgggatcgtgaagatcggtc

SEQ ID NO: 443199 - DNA, 74 bp, Homo sapiens
atcatcattaaggacggaggcacggttgttcctggtcattgagtacgtcaacggcggggacctgatgttccaca

SEQ ID NO: 443200 - DNA, 80 bp, Homo sapiens
tgttccgtggcctcgcccaggccgacgggtatctcccaataagtcaccccagattcgttcgaaccatcccggagctgagt

SEQ ID NO: 443201 - DNA, 74 bp, Homo sapiens
aagcgaagggcgacgccaagccggagggtgatctgtgaaaatggttcgctattcacttgacccggagaacccca

SEQ ID NO: 443202 - DNA, 86 bp, Homo sapiens
gggaaatcgggctgaagcgactgagtccgcgatggaggtgaaatgacaatggatgctctgttggctcgattgaaacttctgaatcc

SEQ ID NO: 443203 - DNA, 90 bp, Homo sapiens
tggaaattcgagtctttccagataaaggatattcatttgttcgggcattgagcaagtgcagcaaagtagaggcctgcaagaaatagaaga

SEQ ID NO: 443204 - DNA, 90 bp, Homo sapiens
cagcaggcaagcttgaatacccagggcatctatgctggtggaggggtctgcattaactgtcagatgaggaaactgaacttgccccaagtc

SEQ ID NO: 443205 - DNA, 98 bp, Homo sapiens
acccagggcgaaagtttagagagtagagtgacccttggatccctgacagcagaatcccaggtgtgtctgacgctgaccgccaagcgcatggcccggaa

SEQ ID NO: 443206 - DNA, 83 bp, Homo sapiens
ttctagtcaaagaacgctttctgttcaagaggcagctgcgtatttaaaagtacatggtgcagtggccgggagcacgcatcctt

SEQ ID NO: 443207 - DNA, 74 bp, Homo sapiens
accaatttcctgcccgggatcccagagctacccttcttggagcccacaggggatgcggaagggagagctgtttg

SEQ ID NO: 443208 - DNA, 82 bp, Homo sapiens
agtgagtgttacagctcttaagaggccacaagaggaagctgaatgaagaggacgccgccagcgagtccagcagggagtccag

SEQ ID NO: 443209 - DNA, 100 bp, Homo sapiens
aaacttcctaagtcgaaaccgcctcatgatcacacatcatgcggtcattctctttgtccttgtgccagtcgcacagattcttggtgccaccattgagaac

SEQ ID NO: 443210 - DNA, 98 bp, Homo sapiens
ttctttgtttctaaagaagaaatgggggattggatatcacttaaggctttcctggggtttgatgtatgctggcttcatccttatcatggccactttaa

SEQ ID NO: 443211 - DNA, 74 bp, Homo sapiens
tagttcgacatcatcatcttttcttgaaatggctctgagagattcctctgcgaatctgtttttagctatcaagt

SEQ ID NO: 443212 - DNA, 75 bp, Homo sapiens
atcggaagcctgcgtaactttctcccttgatccgggagtctttccactggaaacttgaagggtcaaagtgcaaag

SEQ ID NO: 443213 - DNA, 100 bp, Homo sapiens
gaagaatcctgcaaaaatgtctctctatccatctctcgaagacttgaagcctcctgacaaggtgatccgggcgggccccgcaggaattttatcccctcac

SEQ ID NO: 443214 - DNA, 83 bp, Homo sapiens
cctctccttttccctctccctttccctaagctcttggagtttgacaaggagttgtctgtctttaaggacagactgtatgaact

SEQ ID NO: 443215 - DNA, 82 bp, Homo sapiens
cagacacggtggctactctgcctcggggacgaaagcagtgagaaagatcagtctaaagaaaaggagaagaaagtgaaaaaaa

SEQ ID NO: 443216 - DNA, 75 bp, Homo sapiens
caccatcccgttttccagcaagtgcctccggagccagcgtggtggccatagacaacaagatcgaacaggccatgg

SEQ ID NO: 443217 - DNA, 75 bp, Homo sapiens
atgtccaactccaagaagcagtaggacagcgttatcctgaagatagttcacgggcatggtgctgatgtgaaatgt

SEQ ID NO: 443218 - DNA, 75 bp, Homo sapiens
ttggatctctctcgattcagtccctgcaagaacctgcattgacagtgacaataccctcccctcccttgggctgga

SEQ ID NO: 443219 - DNA, 100 bp, Homo sapiens
tagactccggctccaggggagagggctgggctccacagagaggagcagcctaattggcagagggggtcgatttgggaggaaaggtgtggctataaacttt

SEQ ID NO: 443220 - DNA, 100 bp, Homo sapiens
gggcacttccggtctcgtgccgccttcccaggaccctcagggagagcgggcagccttccaggtggacaggttatgatgtgattgctcaagcccaatctgg

SEQ ID NO: 443221 - DNA, 100 bp, Homo sapiens
tcccgggagacaaggcccgcaaaggttatcatagcaacccctgggcgacttctggatataataaagcagagctctgtagaactctgtggtgtaaagattg

SEQ ID NO: 443222 - DNA, 90 bp, Homo sapiens
cgttaagtcccccaaagatgagatttacctgtgagatgtttcatcccaacaccaaaactggacaagccaaggcatctgtagccaaagtaa

SEQ ID NO: 443223 - DNA, 100 bp, Homo sapiens
tggaccgggacgcacgctcagctgaggaggacccccaaagaaatggatgatgaagactgtgaaagaagaagaatggaatgtttggatgaaatgtccaatc

SEQ ID NO: 443224 - DNA, 74 bp, Homo sapiens
aaaagccaagaggaggacagttcgctacacagcaatgcatcgagctacccagaatggaatcctgacaatgatac

SEQ ID NO: 443225 - DNA, 96 bp, Homo sapiens
ggcattgaggactttccttacctgtttttccagctcacccactgccagcagagatcaccggcgtaatcaacccagcgttggacaaatactttccgt

SEQ ID NO: 443226 - DNA, 98 bp, Homo sapiens
ctctggaatctcctgaagattgcttgtgacagagcgggatgccaccagcttgtccaaagggaagttccaggagctcctggtgggcatcgttgtggaga

SEQ ID NO: 443227 - DNA, 117 bp, Homo sapiens
gggagcctcgtggctgcgtcaccgccgcccccccagacaagatggacaccgcggaggaaggatgcctaaatcaaaggaacttgtttcttcaagctcttctggcagtgattctgacag

SEQ ID NO: 443228 - DNA, 75 bp, Homo sapiens
gcatggcatggccccgcaggtcttcacccaggccctggagtgcatgcgcagaaactcccgttattgaaaatcgta

SEQ ID NO: 443229 - DNA, 74 bp, Homo sapiens
acggtcggactcccgcggcgggaggagcctgttcccctgagatgctgtgggccctgagggaaaggatcacagag

SEQ ID NO: 443230 - DNA, 83 bp, Homo sapiens
gaagggcttttcagaaatcggtttgaagttagaaatgtaatctcaggggcgatataatcaatgaggtggtcctaaagttgctc

SEQ ID NO: 443231 - DNA, 82 bp, Homo sapiens
gagcccttcaccctggtggagcgagacggctgcgtccctgctggctgtgctgctgctgctgctggagcgcggcatgttctcc

SEQ ID NO: 443232 - DNA, 125 bp, Homo sapiens
ttccatcaaaaagtgattaagcagagaatggagaagaaggttgattccaggacacattcagctaacgtattttagcaggtggagtgaggttgaagattcctgtgacagcgatgccatagagagaa

SEQ ID NO: 443233 - DNA, 102 bp, Homo sapiens
ttctccactttcgccagcccgtgccgcgagcgcggcctgcaggagcatgatgccttcttctgtagagtgggcgctttgcagaatacgtgttgaatgaaatca

SEQ ID NO: 443234 - DNA, 100 bp, Homo sapiens
ctttcgggctgccgagggtgttcttgacgattaatcaacaggcatgctggaagatggactgccctccaatggtgtgccccgatctacagccccaggtgga

SEQ ID NO: 443235 - DNA, 75 bp, Homo sapiens
tggagctggaaaacatcgtggccaacacggtcttgctgaaagccagggaaggagaccaagacacattccacccca

SEQ ID NO: 443236 - DNA, 101 bp, Homo sapiens
gatgatagccaacctgataaaaaagctgaggagatgttaaagtaacccatcttgcaggacgacattgaagattggtcttctgttgatctaagatgattatt

SEQ ID NO: 443237 - DNA, 98 bp, Homo sapiens
agcgcagtgccaaatttaacgagaaagagatgcgaaacaagttgcagagctacgtggacgcaggaactccaatctcccttgagtttagaaatctggct

SEQ ID NO: 443238 - DNA, 50 bp, Homo sapiens
gagccccttgcagaagacgccgtacgagaggaagaacttgtcgcttttcc

SEQ ID NO: 443239 - DNA, 100 bp, Homo sapiens
gcgatctgaactatatcctgggttccagaaaaggcagaggttcttaccgaaagcagcaatttgagaactggcgagagaaccagccggacaatttcttcgc

SEQ ID NO: 443240 - DNA, 96 bp, Homo sapiens
ggatactacagacaacagagaaaacttgttgaagagattggctggtcctatacaggaaattcgccttattgattatgagaaaatggtggatcatag

SEQ ID NO: 443241 - DNA, 100 bp, Homo sapiens
atgaaggagctggagcggcagcagaaggagatgatcatgggaacagcaatagtagtcatgtaaaaatctttttaccgaaaaagctgcttgaatgtctgcc

SEQ ID NO: 443242 - DNA, 83 bp, Homo sapiens
agaagtggccggagagttctgcatgttgattcgtaaatggtcttaaaatggttgatgagccaatggaagagggagaagcagat

SEQ ID NO: 443243 - DNA, 100 bp, Homo sapiens
ctcaagaggctgatggccgagtacaaacagcgcatcagcgaggaggtggggctgctgcagctccttggggaccccccgccccagcaggtcacccagacgg

SEQ ID NO: 443244 - DNA, 94 bp, Homo sapiens
cttcagtatctcaggcggcaccctgtccccgaggaggggaccatgacacaacaatgcagatcttcgtgaagactctgactggtaagaccatcac

SEQ ID NO: 443245 - DNA, 100 bp, Homo sapiens
tattatgctgcttctggcttctgcagtcatcagtgttttaatgcatcagtttgatgatgccgtcagtatcactgtggcagtgatgagctgaagccagaac

SEQ ID NO: 443246 - DNA, 90 bp, Homo sapiens
tggaggaggacgacagctacggacactcatgaggaccatgatacttccactgagaatacagacgagtccaaccatgaccctcagtttgag

SEQ ID NO: 443247 - DNA, 98 bp, Homo sapiens
tctggttagaccccaatgagaccaatgaaatcgccaatgccaactccctacatccagcagtggtcattcgacaacgaaagtcataccgtagaaaagat

SEQ ID NO: 443248 - DNA, 76 bp, Homo sapiens
acgtgccacagatcccatcagaggcaccccagacacaggccgtgggcaagacctgccttctcatcagctacaccac

SEQ ID NO: 443249 - DNA, 74 bp, Homo sapiens
ggagatatggcgcaactgcggcgcaaggtggtcttctgccctgttaaagaagccctggaggtggactggagcag

SEQ ID NO: 443250 - DNA, 100 bp, Homo sapiens
gagaaggctcactcaaggatcagttggctttagcaattgatttgggaatggatgatgaaggagatgatgacccagttcctctaccaaatgtgaatgcagc

SEQ ID NO: 443251 - DNA, 74 bp, Homo sapiens
tgtttgtggatcgctgtgatcgtcacttggggaacacttaagaatctgtcctcaggaatatacatgctgcacca

SEQ ID NO: 443252 - DNA, 100 bp, Homo sapiens
ctgaaattcatcctgagatgagtactatactggcaattgctggagaagattttgcaattgttgcttctgatactcgattgagtgaagggttttcaattca

SEQ ID NO: 443253 - DNA, 51 bp, Homo sapiens
ctctcgaggctgctaagagactaagtgttgacttcaaaatcaaaactgtag

SEQ ID NO: 443254 - DNA, 100 bp, Homo sapiens
gtacctggaggctcaacggcagaagcttcaccacaaaagcgaaatgggcacaccacagttggggaccctgggagcaggcaaccattatgcagaaatccag

SEQ ID NO: 443255 - DNA, 75 bp, Homo sapiens
cagggctccaccccgtcgcctcgacagccataaggatgagtttaccattattcctgtactggttggagctctgag

SEQ ID NO: 443256 - DNA, 89 bp, Homo sapiens
cttccccaggcctgcgtccgagtctccgccgctgcgggcccgctccgacgcggaaggatcccatgacagattctgttgtcacgtctcct

SEQ ID NO: 443257 - DNA, 75 bp, Homo sapiens
gtagaagaggtgacacttcccaaaacaggtgcagggcgccgcgcacttcgggccggtgtggctagccagctttgg

SEQ ID NO: 443258 - DNA, 75 bp, Homo sapiens
ccgccacctccccgctgggtggggagaggcccttcagatgacaagagcacctcaaaggcagcagcctcaaggagc

SEQ ID NO: 443259 - DNA, 100 bp, Homo sapiens
ttacttttaattttgcaaagaatccaggacaaaaaggattagacacagagattgactggaaggcctacatggccgaggtagaaggcgtcatcaatggtac

SEQ ID NO: 443260 - DNA, 88 bp, Homo sapiens
ttgggtcctccgagagcagcagcggaaattatcagttcattgcctagcatagtaaatgacaaatatggaaggaaggtcctattgtact

SEQ ID NO: 443261 - DNA, 83 bp, Homo sapiens
atcggggtatactggatacactcaagaatttcgctaaggagtttgtgatcagtgatcggaaggagctggaggaagatttcatc

SEQ ID NO: 443262 - DNA, 99 bp, Homo sapiens
gcgcccgtcgccgtctgggccgcgctggccgtcggactggagctctgggctgcggcgcacgccttgcccgcccagctctggaaaggaagagaaatggaa

SEQ ID NO: 443263 - DNA, 100 bp, Homo sapiens
tgccatcacaaaagctggacaagcgaaggttactcactataaacaatatccacccaacacaagcaaagtttattcctactttgaatgccgtgaaaagaag

SEQ ID NO: 443264 - DNA, 96 bp, Homo sapiens
accactctccagcaccagcttccagttagtggatatagcacaccatccccagccatctagatccgtcctggtgccttactgtgcatacagttctac

SEQ ID NO: 443265 - DNA, 50 bp, Homo sapiens
gaacccgggaggcggaggttgcggtcttcaggcaccatggaggacaaacg

SEQ ID NO: 443266 - DNA, 75 bp, Homo sapiens
caacgtcgtcatcaactataaggctatgagatcaccttcagtttactcaacccagaccccaagtcccatgatgtc

SEQ ID NO: 443267 - DNA, 100 bp, Homo sapiens
gcaacctggagaacgccaagcgcttcgccatcgacataggcacattcaggaccccgcgagccagcggctgacgtggaacaagtccccaaagagcgtcctt

SEQ ID NO: 443268 - DNA, 89 bp, Homo sapiens
tcttttgatagatgtcataacagtatttggagaactcactgatgaaagttcacagttaccagccaagaaaacttgaaaatgagcagccg

SEQ ID NO: 443269 - DNA, 78 bp, Homo sapiens
ccatttggcaaagtaactaatcttttgatgttgaaaggaaaaagccaggaaaatgtttataggaggccttagctggga

SEQ ID NO: 443270 - DNA, 75 bp, Homo sapiens
caacgcatcatgccagggagccaagcgtcctgcccggccgtactccaaagattcaggtttactcacgtcatccag

SEQ ID NO: 443271 - DNA, 89 bp, Homo sapiens
cagcagatggcggatgccctgcagtacctgcagaaggtctctggagacatcttcagcagggagaccctcacgcagggcttagagttctg

SEQ ID NO: 443272 - DNA, 95 bp, Homo sapiens
tttatgtgctacagtctgcggaacggagcagtatttcaatgtggaggctgagatcgtcaaaaggctgaacgggatttgtgcccaggtcctgccct

SEQ ID NO: 443273 - DNA, 100 bp, Homo sapiens
ctggagtcgtgagcgcgcgcccgccccgctctgggaggaccgcgaggttgcagagcctgaggcctgtgatcagatgtacgagagcttagcgcgactccat

SEQ ID NO: 443274 - DNA, 99 bp, Homo sapiens
gtcaccgtgtgggagcgggagctgcggaaagaatctgagagaggccgagtggagttcggtccttctctgaacacttttagctgagagtaccagcatcca

SEQ ID NO: 443275 - DNA, 51 bp, Homo sapiens
cgcgaggaagaggcggaaggcgccggaagcttccttcaaaatgtctactgt

SEQ ID NO: 443276 - DNA, 100 bp, Homo sapiens
tcagaaggagctggcggacatcactttagaccctccacctaattgcagatgcagccgctctctgctccctgccccaatgaacatctgcactaggcccaag

SEQ ID NO: 443277 - DNA, 100 bp, Homo sapiens
atttgaagaaaattccttcttggaacaatttatgatagaggacccacagtgcctcgccctgttccgcgtggcagtggacaagcaccaggctctgctgaag

SEQ ID NO: 443278 - DNA, 102 bp, Homo sapiens
ttagaccacagcgacgaggacgactgccgtcacaaacatgtcagacaaaagtgaattaaaggctgagttggaacgtaagaagcagcgactggcccaaatcag

SEQ ID NO: 443279 - DNA, 50 bp, Homo sapiens
gggagccccgggagccgcacggtgtgggaaccgctgagcagaacaccctc

SEQ ID NO: 443280 - DNA, 83 bp, Homo sapiens
agcccaccgacatggcccggaggcagcagaaggaacagcttgagaactatgacttcaccaaattccactcgctgaagcccaag

SEQ ID NO: 443281 - DNA, 50 bp, Homo sapiens
catctaaaatacgaaggtttctggctggaagtgtcggaggaaggcttcca

SEQ ID NO: 443282 - DNA, 100 bp, Homo sapiens
ccgagagcgcgaatatcgtcatcgttagaaggacccttctgcagaggggctgtcggaggaggttcctgtggtgtttgaggagctgccggtggtgttcgag

SEQ ID NO: 443283 - DNA, 75 bp, Homo sapiens
ggcccagcacagccagcaccgcacgccctgcaagggaggggctttgttatgcacctaaagccatattggaagctc

SEQ ID NO: 443284 - DNA, 82 bp, Homo sapiens
ctgtttctctccctggcttttggggcaagctacggaacagagctggactggccattatggaggaggagctgcagcattccca

SEQ ID NO: 443285 - DNA, 100 bp, Homo sapiens
gccacagttcctaccttatgagctcggttttcttatgcttataagagtggaacaggttgaaatcacaaagattagacacctttttagataggtgttcttc

SEQ ID NO: 443286 - DNA, 50 bp, Homo sapiens
ttcattatgtcaagttcaacaaatgaatctacctgttactcgtattttgg

SEQ ID NO: 443287 - DNA, 50 bp, Homo sapiens
ctcatccggaccatcatcggcgcatgtgcagtctttgccaacaaaaaaaa

SEQ ID NO: 443288 - DNA, 100 bp, Homo sapiens
cgaccgcatgctgcgcgaccagaagcgcgacctgcagcagacgcaccggctcctgctgctcggctctccagcagaactatctcctactactctttcccct

SEQ ID NO: 443289 - DNA, 74 bp, Homo sapiens
gttattcgagtgaccgagaccgcggccgggaccgaggagataataattattcaccgaaaccttgaagcatccgc

SEQ ID NO: 443290 - DNA, 75 bp, Homo sapiens
ctccgacgccgccgctcttcagtttgcccgaagcgcggacgcggtttacgtatttcctttgaaagacctccctgt

SEQ ID NO: 443291 - DNA, 100 bp, Homo sapiens
tctatctgaggaacaaccaactagttgctggatacttgcaaggaccaaatgtcaatttagaagctatcagttgagggatttgcagttgataaaatggctg

SEQ ID NO: 443292 - DNA, 83 bp, Homo sapiens
gtcaccaagaaattactgtctcaagtgatacgacttaattcagtgcacaaatgagatgaatgtgaacatcccacagttggcag

SEQ ID NO: 443293 - DNA, 100 bp, Homo sapiens
gtctattcctggattcaatgtcatccagagcccagagcagtattcacaggcctccactgggctctcagtaggtgggatttgtcagcagttctcattgcct

SEQ ID NO: 443294 - DNA, 88 bp, Homo sapiens
aagtgttatgatgcccttcgaaaaatgatcaactattgaccatataggccgccatggcatcagatgaaggcaaactttttgttggagg

SEQ ID NO: 443295 - DNA, 100 bp, Homo sapiens
cacgtgaggttgggccttggccgcctgagcccttgagttggtcacttgaaccttgggaatattgaggaagactatgaccgtctgaggcctttatcttacc

SEQ ID NO: 443296 - DNA, 98 bp, Homo sapiens
ccccgtccattgatagcattcagaaagatcccagggatatcagtatgaacaacattactcagttgccagaagatgcatttaagaactttccttttcta

SEQ ID NO: 443297 - DNA, 100 bp, Homo sapiens
tcctcattctctccttgctctgcccgggtggctggcctccccacgctcctgagaaggtcaaggccttcttggctgatccatctgcctttgtggctgctgc

SEQ ID NO: 443298 - DNA, 100 bp, Homo sapiens
cagaatatacaaaacattgatgaagatgaagatttagaggttgaaggggcccggccaggactcggggaagggtggcctgagagcagcgatgacctctggg

SEQ ID NO: 443299 - DNA, 90 bp, Homo sapiens
cgctgctcatcgtttgcgacgttccctcagcctctgcccaaagaaagaaggagaggacgattatttatcatttctactaaagcaggatct

SEQ ID NO: 443300 - DNA, 96 bp, Homo sapiens
cgctggctcaggagtgaagctgcagaccttcatgtataaccccgttttcacacgaatggccccttcacatatttgaagactaccgtcgtgtccgtg

SEQ ID NO: 443301 - DNA, 98 bp, Homo sapiens
gctggatgaacaacctgctgatgagggaggtgcccctgcgttgtaccatccgcctgtgggacacctaccagggaatgactctactaatgatggggtca

SEQ ID NO: 443302 - DNA, 90 bp, Homo sapiens
cccaccaacaacaccacaataatccacagccaaggttttgcactgattgcaaaaataaagtcctccgagcatacaatatccttattggtg

SEQ ID NO: 443303 - DNA, 50 bp, Homo sapiens
tggggccattgaagacatcatcacagggctcggggacctccagccggctg

SEQ ID NO: 443304 - DNA, 83 bp, Homo sapiens
cgtggccaccgcctccagcttgccaccaaagacctgcgactttgctcaggttagctttatacgtctacgaatatttactgcac

SEQ ID NO: 443305 - DNA, 78 bp, Homo sapiens
tgctgtgtcccgcggcttgcgctccgtagtggactccgcgggccttcggcagctcagtcaaaggcccacggtggaaga

SEQ ID NO: 443306 - DNA, 51 bp, Homo sapiens
ggacgccgtggcccttgggagagagaatagcattcctttcgaacaccacgg

SEQ ID NO: 443307 - DNA, 75 bp, Homo sapiens
ctgagccagagcccacagaagcatggaagaaactatgttccaacttcctgtcaacaatcttggcagtttaagaaa

SEQ ID NO: 443308 - DNA, 73 bp, Homo sapiens
tcggccgctgagattctgtcgtgtcgtcgctgctggcacttcaggctctggatgagcaattcttaggttttgg

SEQ ID NO: 443309 - DNA, 100 bp, Homo sapiens
attgaaaaccctgctgatgtcagtgttatatcctccaggaatactggccaggtttcccaggcagctgcagacttgaaacagttctgtctgcagaatgctc

SEQ ID NO: 443310 - DNA, 100 bp, Homo sapiens
gaagaggaaagcaaaggagtcagggatggctcttcctcaggtgaatgaaaactttgccattgatttgatagcagagcagcccgtgagcgaggtggagact

SEQ ID NO: 443311 - DNA, 80 bp, Homo sapiens
cagatgctatagtctggtatcaaaagaagagtggagactgctgcacggactctggaaccatgaacatatttgatcgaaag

SEQ ID NO: 443312 - DNA, 75 bp, Homo sapiens
atttgacgagctgctagccagcaaatctggtcaaaatgtctttggaagtttcctaaagtctgaattcagtgagga

SEQ ID NO: 443313 - DNA, 50 bp, Homo sapiens
cgtacccacagtgcttcatgagaggttcatcaatgccagaagacgaattc

SEQ ID NO: 443314 - DNA, 82 bp, Homo sapiens
tggagaagaaatagttacctatgatcgtgtcaacaggtgcctataagcgccaggtgcatgaggtccccctggggaagcaggt

SEQ ID NO: 443315 - DNA, 75 bp, Homo sapiens
ggcggcggcggcggcggcggcggcgcagggcttctggtacagttttcactgctactgacgttgcactgggacagg

SEQ ID NO: 443316 - DNA, 100 bp, Homo sapiens
ccaaagcctgcccagacggctcacctgtgcgggatggaacaaaagcacacagcaagaaggaggccatcagcaaactgggaagaggaccctcaccaggaac

SEQ ID NO: 443317 - DNA, 50 bp, Homo sapiens
gtcgccgcggcggcgtgtgcgcccctcagtggtgaaagtggtgctggaaa

SEQ ID NO: 443318 - DNA, 100 bp, Homo sapiens
cggggctgagagcgttacaggctgcgctccggggccagataggccgggcgctcagaagggtcaaaatgtgggtacagctcctgattcccaggatagaaga

SEQ ID NO: 443319 - DNA, 83 bp, Homo sapiens
caagcaccagaaagaggctgaggaggaggagctggagataccccctcagtaccaagggctggatcttcaacgtggttccttgg

SEQ ID NO: 443320 - DNA, 75 bp, Homo sapiens
aacgaggcaaggagctaaagcagcgtgcgttcagccctgggggatcgcttacacctgagacgaactacagaacag

SEQ ID NO: 443321 - DNA, 83 bp, Homo sapiens
cataggacaccataaatcgcatccaggacctgctggctgaggggactataacaggctgcttctgatgcttggaagatatcctc

SEQ ID NO: 443322 - DNA, 82 bp, Homo sapiens
cggagaaaaagttgaagcgttatgtgatcagactctgagaatatgggatgtgaaggcagcaggagtaagaatcgtgattcct

SEQ ID NO: 443323 - DNA, 51 bp, Homo sapiens
agcagagttatggagcttttcttcacagctaacagagaccctgatgctgga

SEQ ID NO: 443324 - DNA, 100 bp, Homo sapiens
gccggagccgggccgggcagctagcagggcgcttcgggtgctggagaatctggtaaaagcaccattgtgaagcagatgaggatcctgcatgttaatgggt

SEQ ID NO: 443325 - DNA, 90 bp, Homo sapiens
aagatgaaacacagcatctgcttttccacaaccagtttataagtgctgttaaatatgtggactcctagaaggaccccatccccctccccc

SEQ ID NO: 443326 - DNA, 100 bp, Homo sapiens
gcatctattacctttgccttggaatacaggagataacgaaggaggcccaacttcattcaataaggagcctgacggatttatcccagacggtagaacaaaa

SEQ ID NO: 443327 - DNA, 100 bp, Homo sapiens
ggaacctactgtggggccgcggccggaccgagcgcctcgacctcggtctgagcggagctggagtttgttcagatcatcatcatcgtggtggtgatgatgg

SEQ ID NO: 443328 - DNA, 73 bp, Homo sapiens
tctcaatgttgccaaaatgtttcctaaagttcgtgaatctcaactttaatagctcttcaagtctgcaataaaa

SEQ ID NO: 443329 - DNA, 51 bp, Homo sapiens
gaccaccctgctccgaaaactaagatatggctcgtggacagcagaaaattc

SEQ ID NO: 443330 - DNA, 82 bp, Homo sapiens
gaatgtacgacgccaaagatgacttccctcttaggaaaacagtgcacagccagagaacaacacatcacacacaggaaacagt

SEQ ID NO: 443331 - DNA, 74 bp, Homo sapiens
aaacagacagatttgtcatgaagaaactcaatgatcgtgtcatgagagttatcaatactctggctgaccatcat

SEQ ID NO: 443332 - DNA, 75 bp, Homo sapiens
gttaagagtggacaggttaagggactcccaggaatatcaggttaaagaagaaggagtttagtttagaagagatat

SEQ ID NO: 443333 - DNA, 75 bp, Homo sapiens
gctgttgtctgcccgcacccgggcccgcaggccagacaaattggagacaatctgattgttcctggaggagtgaag

SEQ ID NO: 443334 - DNA, 136 bp, Homo sapiens
ctggaaagatgatgcctagtaaattacagaagaacaaacagagactgcgaaacgatcctctcaatcaaaataagatgttttcacctcctgtgagcagtgggaaaaatggaccaacttctttggcaagtggacattt

SEQ ID NO: 443335 - DNA, 98 bp, Homo sapiens
agtttgcagcacctccgggactaccccgagaagtattttagctcgtccgcatggtgctgaatggctgaggaccttcccagtctccccagagtccgtgc

SEQ ID NO: 443336 - DNA, 90 bp, Homo sapiens
cttgaggatagttttgtaaaatctggagtcttcaatgtatcagaacttgtaagagtatccagaaagtcacttatttcagcaattcaaggt

SEQ ID NO: 443337 - DNA, 95 bp, Homo sapiens
caaggaaacctttccaacacagatgtccaagctgccaagttcgggatgagtatcggcaggactacgatgctgggagaggaggctatggaaaactg

SEQ ID NO: 443338 - DNA, 87 bp, Homo sapiens
catatctaagaggctgaacatgaatccacagatcaggctccacataaacacggtttccttgaaggccgccatgcagagctgtgcttc

SEQ ID NO: 443339 - DNA, 50 bp, Homo sapiens
tcattcttgacctcatactgaacaacttgagtattcaaagacagtagcca

SEQ ID NO: 443340 - DNA, 98 bp, Homo sapiens
aaaaatgatgagaatgaggacccgggaagaaatgttggttgaatctggcgatgtggaacccatggatatggagggctgactatatacaccatgttttt

SEQ ID NO: 443341 - DNA, 100 bp, Homo sapiens
acgaagtagacaaggatttttctaggagactctgcacattgatgaggatgatagaccagaactggtatggtggaagtgtaagaagtgggcactgcatatt

SEQ ID NO: 443342 - DNA, 100 bp, Homo sapiens
catcaccaggaaagacttcgaaactttgttcaccgattgcaccaatgccaggtgactgaaaactcctgaggcatttcctggactagaatgggtagtgaag

SEQ ID NO: 443343 - DNA, 100 bp, Homo sapiens
gtccggcttcggagcgggagtgttcgttgtgccagcgactaaaaagagattcacaatgacatcctttcaagaagtcccattgcagacttccaactttgcc

SEQ ID NO: 443344 - DNA, 75 bp, Homo sapiens
ttggaactgtgtttgggagcctcatcattggttatgccagacgcaaacatgcagatctttgtgaagaccctcact

SEQ ID NO: 443345 - DNA, 143 bp, Homo sapiens
cggcgcggggagccagcgagcgcgccttcggcattggccgccgcgatgtcagctcagtgctgtgcgggccagatgccttcaattaagttgcagagttctgatggagagatatttgaagttgatgtggaaattgccaaacaatc

SEQ ID NO: 443346 - DNA, 82 bp, Homo sapiens
ccagggtgacgatcctcaagttcccaagtagaggagaggaagcggcagagggagacatctgaatgggactccgagtgcctta

SEQ ID NO: 443347 - DNA, 121 bp, Homo sapiens
ctgaacgtgatgggctgtgatcttgtcgaagtttcaccaccgtatgatctttctgggtgtgggccgaagatatgctcatgtggtgttgaggaaagcagacattgacctcaccaagagggcg

SEQ ID NO: 443348 - DNA, 100 bp, Homo sapiens
cacttatgtttgtaaatgtgagtggaagccatgaggccaaaggcagttgtattgttccatcattttgctacagtccaaaagatgagggactgtgctctgc

SEQ ID NO: 443349 - DNA, 118 bp, Homo sapiens
tatgcactaatggcttatatggaaaatacagcgaccaactgattgtcgacatgcctactgataatcctggtgaccaagaatatggcccaggtgaccaaagccctggacaaggccctga

SEQ ID NO: 443350 - DNA, 96 bp, Homo sapiens
ctttgaaatctgcttgggccagtatgatgatggtgtctgacttccagcaactgctggcctgtgccagggtgcaagctgagcactggagtggagttt

SEQ ID NO: 443351 - DNA, 100 bp, Homo sapiens
agcagccaacctatgttgccctgagttacataaataggtactgtccaagaagctggaacattattatccagcaagaatgttcgtgtcaactgtttggacg

SEQ ID NO: 443352 - DNA, 76 bp, Homo sapiens
gtgatataaaagcagcaaatctacttttgggttacaaaaatccagaccagggatttgtcttggctgttactatgac

SEQ ID NO: 443353 - DNA, 98 bp, Homo sapiens
ccagttcaaagcttgttgtctttgatactacattacaaggaaatcctcattgacgattcaatttgttgaaggccaatttgtggactcctacgatccaa

SEQ ID NO: 443354 - DNA, 74 bp, Homo sapiens
cggggctttggacgccggtggagacgcaggcgagggcatctggcggatccccgtggacgagattgaccggccgg

SEQ ID NO: 443355 - DNA, 100 bp, Homo sapiens
ctggcatggagcagcttgtgaaggagaggaaaggatgaccgagcggccgccgagcgaggcggctcgcagtgacccccagctagagggacgggacgcggcc

SEQ ID NO: 443356 - DNA, 100 bp, Homo sapiens
ccgggatgctattgagttaaatgcagccaattatacagtgtggttgcagcattgcaggaagagaaaagtagtttgttggcagagaatcaggtattaatgg

SEQ ID NO: 443357 - DNA, 100 bp, Homo sapiens
tacaacattcctggggtgatccagtcagtcattggctggaagccagctgaagatgagtggggtaaaaccccagacgccatgaaagctgccatggccctgg

SEQ ID NO: 443358 - DNA, 75 bp, Homo sapiens
caaagatggaaggtgcagaaataaatcagagtctactggctgcgcatattaaatttcctattgactacccctatt

SEQ ID NO: 443359 - DNA, 99 bp, Homo sapiens
ctagcaggaactgaaacctttttccatttggtctcgtggcaaaggcagagattgctccagcagctccacacatatacttcttgatgaagaaggtcacat

SEQ ID NO: 443360 - DNA, 100 bp, Homo sapiens
cgagatgcccctgaggggggctttgatgcagtactccaggcagccgtctgcaagaatcaagaagtggtggactttgaaaagttggatgactacgcctctg

SEQ ID NO: 443361 - DNA, 75 bp, Homo sapiens
ttccaccaggccgggaagcccatcggattccaacaatgtctcacccatcttggctgccacccaaaagcactggtg

SEQ ID NO: 443362 - DNA, 100 bp, Homo sapiens
tgaacagatgcgtctcgctcaagtgatctttgataagaatgattcagattttgaagctaaagttaagcaggaaaggaaacagattcattgtctgtctgag

SEQ ID NO: 443363 - DNA, 101 bp, Homo sapiens
gacactcttattgaaacaacagactatgctgggcttattatgcagctgtcttctcctcagtgctggcgctctgactacccttcccaaagaaccacggccct

SEQ ID NO: 443364 - DNA, 82 bp, Homo sapiens
ccgcccccagcgggatgtgaaggactccgggtgaggccggccacgccccgcacgtgttgcattgatgaatcatagctgttgc

SEQ ID NO: 443365 - DNA, 83 bp, Homo sapiens
atttttcaggcctctggtgccaaatacattgtcttaacttccaaacatcatgaagttatggctgcagcttcgattgccaatat

SEQ ID NO: 443366 - DNA, 98 bp, Homo sapiens
gtccctcaaggcccccgcgtggttcagacagacgccgcagccaggatggttgagctcggggagtacagacagtgaggaaagtacagactctgaagaag

SEQ ID NO: 443367 - DNA, 50 bp, Homo sapiens
ggaggagtcctccacctcgtcgcagaagaacatgtgatcatccaggccga

SEQ ID NO: 443368 - DNA, 51 bp, Homo sapiens
attgttctcttggagcagctggtcatcatgaaacaagtgttgaaaatgtta

SEQ ID NO: 443369 - DNA, 100 bp, Homo sapiens
aagcacagaaatggactatcaaatgatcgattactttggggttgctgcaacagtatattgcatgctctttggcacttacatgaaagtgaaaaatgaagga

SEQ ID NO: 443370 - DNA, 100 bp, Homo sapiens
ttggccttgccagttcatgactgagttatacatgaacagaacaagatcctcatgaaacctctgatatggcggctagccttgatgtaccgaatgcaggttg

SEQ ID NO: 443371 - DNA, 100 bp, Homo sapiens
ggattgatgtgcaacaagtgtctttggttataaattatgatctacctaccaatcgtgaaaactatattcacagggctttgcaccatttatctcgcctgag

SEQ ID NO: 443372 - DNA, 74 bp, Homo sapiens
cgagagcgtgaccgagagcgcgaatatcgtcatcgttagaaggcagtggagctactgctgtggttcaggcagcc

SEQ ID NO: 443373 - DNA, 100 bp, Homo sapiens
ttgatgtggatgatgccaaagttttattaggtgctgtgacatgtatatggatgaatgaacagtgtagcagtatcatcacaggaggggaagacagacaaat

SEQ ID NO: 443374 - DNA, 100 bp, Homo sapiens
tcggaatggacctgtgccacccagcacctgggctgtcccccatgcagaccctgaaggtttctgtgtctgcagtgactctgggcctgggcctcatcatctt

SEQ ID NO: 443375 - DNA, 80 bp, Homo sapiens
ctggccgcgccgaccaccatcccggtcaccacgaggcacctcaagcgggggctcgggaaaaggttgcccgatcctggtac

SEQ ID NO: 443376 - DNA, 75 bp, Homo sapiens
gttgaactctacccctcagacaagagggtccccagccccaccccagccccaaaggaggctgttcgagagggacgt

SEQ ID NO: 443377 - DNA, 100 bp, Homo sapiens
agacaacttctggcagaaacagaggactaattttggcagttctaaatttgaatttgaggtcatgattgtggttggcggccaggcacccaaggcaatccgc

SEQ ID NO: 443378 - DNA, 100 bp, Homo sapiens
cacctggcctccagcctgagccccagccaggacgagaggatgcggagcccgcagaacctccacagtcaagaggacgaggaggctgcggaggaggaggagg

SEQ ID NO: 443379 - DNA, 100 bp, Homo sapiens
ctcttcagcctcaacgagggcgtccgccttgaaaagatcttttgaggtcgaggaggtcgagacacccaactccaccccaccccggagggtccagactccc

SEQ ID NO: 443380 - DNA, 75 bp, Homo sapiens
ctcgagccgcagcacgagctcaaattccgagggaccagttactctccacaagaaaattcacacaaccacagtgct

SEQ ID NO: 443381 - DNA, 83 bp, Homo sapiens
ctcgggggccgctctgggatcccggccaccagcaattgtccgtgacatattcgatgccatgttccctgtcactcacatcgctg

SEQ ID NO: 443382 - DNA, 75 bp, Homo sapiens
gttatccctcttcacacagactcatcagggatacctcagacaatggcagcttttggattgaaatatttgctgaat

SEQ ID NO: 443383 - DNA, 75 bp, Homo sapiens
tctttctgaagagctcaaaaaggaaaatcctttcttgaggcaagagaccagcatgttttggaaatttgatcttca

SEQ ID NO: 443384 - DNA, 100 bp, Homo sapiens
ccatttcccgtgaacacccatgggaggtcatgcctgatctgtacttctacagagatcctgaagagattgctcgagactttaatcccaactggatgagtgc

SEQ ID NO: 443385 - DNA, 73 bp, Homo sapiens
cgtgaccgagagcgcgaatatcgtcatcgttagaaggtgaccatccacggcaagatagcatggatttcagtaa

SEQ ID NO: 443386 - DNA, 83 bp, Homo sapiens
ccaggtccgacccgcgaacccctctgggatccccgccgctctgtctacaacccgaggtcgcaatggaagaagagatcgccgcg

SEQ ID NO: 443387 - DNA, 100 bp, Homo sapiens
tgccttggagaaggacagcagagaataagctggacaccaaatacccgtacgtttgcagctcaccttgtgaagatgaaatatccaagaatctgtattctag

SEQ ID NO: 443388 - DNA, 75 bp, Homo sapiens
gtatccgcatgcaggactcggacctgagtgaccccatgtgggaagacctccgtgtggatggccgtggctgtgagg

SEQ ID NO: 443389 - DNA, 75 bp, Homo sapiens
atgcccagcaccattcctaggctgggagcaaaacgattcttcagaggaggcccctccagccactcagaacttcat

SEQ ID NO: 443390 - DNA, 90 bp, Homo sapiens
agagcttctgtcaaagaacaaggacttcgcaggtgagcagtaacggaaatcagccccgtttattcctcccagcacctgccttatccaact

SEQ ID NO: 443391 - DNA, 75 bp, Homo sapiens
gcgagttcagtgatcgaaggcttttggacaagtgggtggagctgagggccaaacgtaccaagaaagtcgggatcg

SEQ ID NO: 443392 - DNA, 100 bp, Homo sapiens
gaagttctgtacatgctgaaaaacgttcggcctccggtgtggctgtctctgatggtgtcatcaaggtgttcaacgacatgaaggtgcgtaagtcttcaac

SEQ ID NO: 443393 - DNA, 82 bp, Homo sapiens
aaggattcaaatgctagcagacacggtggctactctgcctcggggacgaaagcaggtgaccaagggagacagcaaaaatgct

SEQ ID NO: 443394 - DNA, 74 bp, Homo sapiens
ccatggcataaggaactctatcccaggaatacagctttgcattaggagtggtgacgcctaagctatcactggac

SEQ ID NO: 443395 - DNA, 83 bp, Homo sapiens
atttcccagctgctaaaggaagaggaaggtgtaccttgaaagacttttaacatacgcagagatagatatctgtccggccaact

SEQ ID NO: 443396 - DNA, 75 bp, Homo sapiens
gggcacctactcatggatggcggctacatcaacaatctgccagcccaaggagctggatccctctgctgtgctccc

SEQ ID NO: 443397 - DNA, 100 bp, Homo sapiens
aagcagtccttcaccacggtggcagatacacctgaaaatcttcgcctgaagcagcaaagtgaattgcagagtcagggctaccagggcatggtggacggag

SEQ ID NO: 443398 - DNA, 75 bp, Homo sapiens
gccttccatagggctgagtctgggaccgagactggatacacgtctgtttaactacgcaaaaggtaatgctggcat

SEQ ID NO: 443399 - DNA, 75 bp, Homo sapiens
agatggtgcagaagatggaggaggtaaaaatgtctccatcgtatcatcagtccaaaggggatcccactgctaaaa

SEQ ID NO: 443400 - DNA, 100 bp, Homo sapiens
tcacaagttcctcatctgggacactgctggtcaggaacggatggcccactgcgtgaccttggttcagctgtccatttcctgtgaccatctcattgacaag

SEQ ID NO: 443401 - DNA, 90 bp, Homo sapiens
ggccggtctggtggtggctggttactaccatgccaatgcagctgtgaacgatcagaggtgcagacgccagaagtgagatttcagcagcag

SEQ ID NO: 443402 - DNA, 83 bp, Homo sapiens
ccagagacagaagcagatggattcgtccttttagaaaacgttgtgtgacgtgatcctcatggtccaggaaagaaagatacctg

SEQ ID NO: 443403 - DNA, 101 bp, Homo sapiens
ctgctgccctcaaggtcgtgcgtctgaagcctacaagaaagttccagaaagctgagtctgatctggattacattcaatacaggctggaatatgaaatcaag

SEQ ID NO: 443404 - DNA, 73 bp, Homo sapiens
gagcgctggacggagaggaaagcgggcaattgaaggaacagactaaaaatcgtgtcctggaaggaaactacag

SEQ ID NO: 443405 - DNA, 82 bp, Homo sapiens
gccacagcccacctgctgagggggacccccgcacccaccagtgatgtcttggcattgcccattttcaagcaggaagattcca

SEQ ID NO: 443406 - DNA, 82 bp, Homo sapiens
cgcagacccaaatacgtgtctccccaggatgtgacgaccatgcaaacctggtggtcgtgtgatggtaacagatgctgacagg

SEQ ID NO: 443407 - DNA, 100 bp, Homo sapiens
atcaagcaggttttaaatcaagatttaacattccaacacataaaaattatttatccaacagctcctcccaggtttccaatacttatctacaggaatcgcc

SEQ ID NO: 443408 - DNA, 75 bp, Homo sapiens
cttccccgttagaactcgcgtttccacttcagagatctgatttctaccgcaaagagatcgaagtggactcttccc

SEQ ID NO: 443409 - DNA, 137 bp, Homo sapiens
tttttatcagggcaagctgtgttccatggcagggaacttttggcagagctcccactaggtcctgctgcgtgtccgcatgctgtactacctaagacaagaagtgataggagaccaggcggataagatcttagagggtg

SEQ ID NO: 443410 - DNA, 100 bp, Homo sapiens
ttcttccgggcctccaaggaacttaagcaaagatttgaacatggaattcaatccttcagatcatcctcgggccagcacaatattcctcagtaaatctcag

SEQ ID NO: 443411 - DNA, 75 bp, Homo sapiens
aaggctgctagtgaacagcgacgtggagtccaacctataccttctcagggaggcaaactagaaatagctggcact

SEQ ID NO: 443412 - DNA, 75 bp, Homo sapiens
ctcctgcctcagcctctcgagtagctggaattacagttaattggccttggtcctcacagctccaaaaagaaacag

SEQ ID NO: 443413 - DNA, 97 bp, Homo sapiens
acacacccagcatcaaccaggagctctgccggctcaacacgatggacttactgctgtgcatcccctcggcaattgtgagcttcaccgtctccaggag

SEQ ID NO: 443414 - DNA, 82 bp, Homo sapiens
ctttccaccaccattcaagaggagttctataggtggttgtgagacaacttcaacaagaagtggctgattcccttaaaaaatt

SEQ ID NO: 443415 - DNA, 75 bp, Homo sapiens
tcgtgacatggcattgtctgatgttacagaagaatctgaaatcatttcgaccaaactgcagctggaatacccagt

SEQ ID NO: 443416 - DNA, 75 bp, Homo sapiens
ctgcggcacgggatggcggaggcgcctcctgtctcagtgatatcagtatcaagataaaagtttggaatgggagaa

SEQ ID NO: 443417 - DNA, 83 bp, Homo sapiens
cggcgaatcacttataaatggcgccgaagcaggacccgaagcctaaattccaggagggtgccagaaccctgtggagcatcatg

SEQ ID NO: 443418 - DNA, 82 bp, Homo sapiens
gcagctgtgcccgggcggcacggccagtttgggggcagcccagtgtcctgcgctgtggggctggccgtcctgaatgtcttgg

SEQ ID NO: 443419 - DNA, 98 bp, Homo sapiens
acatctttaccctgttcattgggccagagaagataccatcccacgaacacagatagaaagaaggaaaacaagcctgtatttttccagcaaatataaca

SEQ ID NO: 443420 - DNA, 51 bp, Homo sapiens
gctgaccagcaccagccctgatccagtgggtcctggccttcgagatcttca

SEQ ID NO: 443421 - DNA, 100 bp, Homo sapiens
cgctctggctgtgctgcgcggcccccgcgcatggctgagaggattatggaggctattgagttgtaccgagaagaaactgcaaaaatgaaggaacacaaag

SEQ ID NO: 443422 - DNA, 90 bp, Homo sapiens
gtgcgggtactgacacttcccctgcaagcccaccacgccatggagaagatggaagagtttgtgtacaagattaaagtatggacagccaac

SEQ ID NO: 443423 - DNA, 75 bp, Homo sapiens
ccgtaaagattccagagaagcctgtgaacaaagaggcaaaaccttcaactgaggacttgggggataagaaggaag

SEQ ID NO: 443424 - DNA, 87 bp, Homo sapiens
caggtgtaagcgcagaaagcaggcgaacccgcggcgcaataacgggatcgcttacacctgagacgaactacagaacagcacgtacca

SEQ ID NO: 443425 - DNA, 100 bp, Homo sapiens
tgggagatccacagctaagacgccgggactccctggaaacctagaaatgccagagactgctgctactttgaaacgtacgatagaggccctgatggacaga

SEQ ID NO: 443426 - DNA, 74 bp, Homo sapiens
cgaccgatatagctcgccaggtgtgatgatgatgatgattttgatgatgaggaagctgaagaaaaagcgccagt

SEQ ID NO: 443427 - DNA, 101 bp, Homo sapiens
taccgcagcatgagcgaaagctacacgctggagctatttgtcgtagatgtccagacaagccagatcaccaagatccccattctgaaagaccgggagcctgg

SEQ ID NO: 443428 - DNA, 132 bp, Homo sapiens
aatacctgctgccctgataaaaggaagaaactgtgggacttgctggagaaacctaactcatcagtggctgcaaaggactcattaccagagaagctggctgtgcatgagaagaatgtccgcgagtttgatgcc

SEQ ID NO: 443429 - DNA, 75 bp, Homo sapiens
agaccaatttttattccacgaggaggagtacctggaaattagggcggcgactggcggcgcgatggacctgaccgg

SEQ ID NO: 443430 - DNA, 73 bp, Homo sapiens
cagactctgatggtgatggcaaagagacgagttgtactgctgtcacaggaaatggacgctggattacaagcat

SEQ ID NO: 443431 - DNA, 100 bp, Homo sapiens
gaaacagtcagagccaccagccaatgatcttttcaatgctgcgaaagctgccaaaagtgacatgcaggctgtggacatactcaagacagagcggctggga

SEQ ID NO: 443432 - DNA, 50 bp, Homo sapiens
caggaacattgctgtggattcccaggcttttgctcatgtatccaagttgc

SEQ ID NO: 443433 - DNA, 96 bp, Homo sapiens
ctgtgcctgaactcaaagatgcccttaaaaggtggtatggtcaggaaaaagactacaatgtactagtcatggatcttctgggacctagcctcgaag

SEQ ID NO: 443434 - DNA, 75 bp, Homo sapiens
gcctggtcccgccaagctgccgcactcaataacgtggttagaaggccattcactggcacagacagtatttacgtg

SEQ ID NO: 443435 - DNA, 75 bp, Homo sapiens
caagaagttgagaccgagaatgtggaaacaggaattaaggataacctagacgacataaagaggataattaaagcc

SEQ ID NO: 443436 - DNA, 75 bp, Homo sapiens
ggaagatttggaacctcactgaaaattggtattgttggattgccaaatgttgggagcctcctcaacaagcccaag

SEQ ID NO: 443437 - DNA, 99 bp, Homo sapiens
ccgtgtgcgtccgaagcccgaggcagaggaaccggctcccaggtgtgtgaatatcctgatggaaccaagtctttgaaactgggagactttgggcttgcg

SEQ ID NO: 443438 - DNA, 82 bp, Homo sapiens
gaagattggggccttctgattattttggaatacggggtgctttgcattcaggaatacagaaaaaacagcaaagtggagtcaa

SEQ ID NO: 443439 - DNA, 75 bp, Homo sapiens
tacaacacgattcttctaatggatgggaacatggggatttgcagatttacagaatggctgcacattaatggaaag

SEQ ID NO: 443440 - DNA, 126 bp, Homo sapiens
gccggagtgagaagcaagaaggccctggacacagcaatatctctgggctttcacaggtgtggatgaggtcaccattgtcaacattttgaccaaccgcagcaatgcacagagacaggatattgcctt

SEQ ID NO: 443441 - DNA, 75 bp, Homo sapiens
attttgaggcggtcctcctagcggcctgaatagctctccagacccccagctggccatgtggtgagttcagggccc

SEQ ID NO: 443442 - DNA, 75 bp, Homo sapiens
taccttgggatgtggacacaatttgtaaggctggtcacagtggctcacatctctaattccagcactttgggaggc

SEQ ID NO: 443443 - DNA, 82 bp, Homo sapiens
agagcagcaccagctctctagcagaaaattggcagagggggtcgatttgggaggaaaggtgtggctataaactttgttactg

SEQ ID NO: 443444 - DNA, 75 bp, Homo sapiens
gcttctgagacggcggcagcagcggcattcagcttatggaagtgacagggaaaaatcaggatgaatgcatagtgg

SEQ ID NO: 443445 - DNA, 100 bp, Homo sapiens
ccgggagcctagatcctgtgctttactctgaagactcgcgaggattaaatccaccacacagggtgaaatctatctccatgacaacattcacacaacagga

SEQ ID NO: 443446 - DNA, 74 bp, Homo sapiens
atgaagctgctgctgggcatcgccttgctggcctacgtcgccttactaacattctgagagagcctgtgtgttta

SEQ ID NO: 443447 - DNA, 100 bp, Homo sapiens
tctgagattgcatcaggatattaatgattataaccggagattctcagggcaacccagatctgtcggatcatgctaaaaggagataatattactctgctac

SEQ ID NO: 443448 - DNA, 90 bp, Homo sapiens
ggaccattgagagctactgtcaggatgtcctaagacgccaggaggagtttgagcataaggtgcttgaggaatccaaagccctcgtgcgct

SEQ ID NO: 443449 - DNA, 100 bp, Homo sapiens
tcacactgtaacattattcacactgaggatgggtcatcagttaaggaagttgaaacctaccaccggacacgtgctttaagatctttgagaaaagatgcac

SEQ ID NO: 443450 - DNA, 75 bp, Homo sapiens
tgtgcacccagatgagttcttccagtcccctgaggtgatggcagggtcttgctacgtacgttgcccaggttggaa

SEQ ID NO: 443451 - DNA, 50 bp, Homo sapiens
cagccctccatcttgcagcccagaaggaattgaatgatctggcacgggac

SEQ ID NO: 443452 - DNA, 121 bp, Homo sapiens
cgcgccgcgccctggcggctctagggaccccccccgcgcctgcacttagccccgcgcccgagccctgggcgctgcctatggcacagccaagagcggtaccggcattgcggccatgtctgtc

SEQ ID NO: 443453 - DNA, 100 bp, Homo sapiens
atccagaatgctgttcactgtactgatctgccagaggatggcctattagaggactcagcccaggagagtgttattactcgagatattcatcgtacatttc

SEQ ID NO: 443454 - DNA, 100 bp, Homo sapiens
tcctcattgcgcccagacgggccggcccagagctcccgggtcgtctttcgtgtggccgcgagtccttttcagtggagagggaactacaggataacagcag

SEQ ID NO: 443455 - DNA, 75 bp, Homo sapiens
acactctgccaggtcctgcatgctgtgagccatcaggactcttgtcctgatggccgccctgctcccccaatgaaa

SEQ ID NO: 443456 - DNA, 74 bp, Homo sapiens
tccttgccaggccttcaaccactatctcagtgcaatgggtcctgagggagtctaacaagttagcagaaatggaa

SEQ ID NO: 443457 - DNA, 98 bp, Homo sapiens
gttgttctcagctacttgggactcctctctcaagagaagctgcaagagcaacatctttcctcaccccaaggcctttgaagacctcagcaaactaatga

SEQ ID NO: 443458 - DNA, 75 bp, Homo sapiens
gggacaccgcattcgccatccaggctctgcttgaggaatcagagatcattgatttcttcctgggggcctctctca

SEQ ID NO: 443459 - DNA, 118 bp, Homo sapiens
ctcatgttgaccaagcaagcttccaggttgatgcctttggaacgtcattcattctcgatgtcgtgctaaatcaattatgcggatcaaacctcaccaaggccagcacataggagagatg

SEQ ID NO: 443460 - DNA, 100 bp, Homo sapiens
gcacagaaaggcacacagatgtagtggtgtgcatagcccttgacagcgaataggtgaggcggaaccaaccctcctggccatgggaggggccgtggtggac

SEQ ID NO: 443461 - DNA, 49 bp, Homo sapiens
agacaagacacttttcagaaagacagataaagtggagaattttcatgaa

SEQ ID NO: 443462 - DNA, 75 bp, Homo sapiens
gcataatggatgtcactgaggaggtgtgggacaagtttccaggagactgacaaggcgtggcatgggggatgtctg

SEQ ID NO: 443463 - DNA, 98 bp, Homo sapiens
gagacattgtttctgttattgacatgcccccgaaagtgttaagcacatggtggagaggcaagcacggattccaggctccccttccctgcgggcatatc

SEQ ID NO: 443464 - DNA, 50 bp, Homo sapiens
ggggggaccccggtacggacctgtgcaggccagctgcgggccgtccagcg

SEQ ID NO: 443465 - DNA, 50 bp, Homo sapiens
tgaagaacctgaaggacacactagggagtgcatccgccccaacccttttc

SEQ ID NO: 443466 - DNA, 82 bp, Homo sapiens
atttgatttccggagtcagtcattttactgtcaagacatttcttcggcattctgcaacagaaatgagccgtcagactgctac

SEQ ID NO: 443467 - DNA, 100 bp, Homo sapiens
ggaactgctctgccctcggcgagaagaccgtcttcgggcaagagctccgagtagagctcccagctcctccagcagccgacaggaggcccgtcaagatgca

SEQ ID NO: 443468 - DNA, 100 bp, Homo sapiens
gggaccccactcagtatcaccagatcggaagccagtttctacacacttgcctctcgctacagcgtcctcctcaccggccgaagaggagaaactcattgaa

SEQ ID NO: 443469 - DNA, 100 bp, Homo sapiens
ggagacagcccaaatatcctcggaagagcgctcccaggagaaacaaattttgtacagcagcaatttcttactctctctgcaagttttcttcccagtcacg

SEQ ID NO: 443470 - DNA, 100 bp, Homo sapiens
caattatcggcgctgtgtcagcaggcagacttcagagacagtaaattacagtgctgtcctggcccgacttccccgctgatcccagcagcgaccctgaggc

SEQ ID NO: 443471 - DNA, 50 bp, Homo sapiens
caccccggaagctgggaaatgggtgtcaaattgagaaccaggtagatccc

SEQ ID NO: 443472 - DNA, 95 bp, Homo sapiens
ctgctcggctggtcctactacgcctacgccatccagctgtgcatagtgctgctgcagcacggagctgacccaaacattcggaacactgatgggaa

SEQ ID NO: 443473 - DNA, 97 bp, Homo sapiens
tgagattcggtaacccccttctggtccagaagattaagattgcggccctgcgcatgtatactagctgtgtggagaaaactgacttcgaggaattctt

SEQ ID NO: 443474 - DNA, 98 bp, Homo sapiens
caaggagtggactagggtcgccggggaagcggattgaaaaggaagatcaggccaaccccaaagaagaagtgaccaaggaggagtttaaactgaatgaa

SEQ ID NO: 443475 - DNA, 74 bp, Homo sapiens
ctgcagcctaccaccagtatgttggatttttccaatccttcagctccagtgatccacaagctcagaaatacatc

SEQ ID NO: 443476 - DNA, 98 bp, Homo sapiens
gaagacttttgggagattataggagaactgggcgacggagcctttgggaaagtgtacaaggctatggaaagggcaaatggaatggagctggatggtag

SEQ ID NO: 443477 - DNA, 87 bp, Homo sapiens
ccaccgtgaacggacagtcccccccagacaatgcagatcttcgtgaagactctgactggtaagaccatcaccctcgaggttgagccc

SEQ ID NO: 443478 - DNA, 76 bp, Homo sapiens
caaaactatttcaaaacctcgagcatctagaaaagaaaatggacctgttgtaggtttcagtggcattgataagtct

SEQ ID NO: 443479 - DNA, 82 bp, Homo sapiens
gctggagaaatacacaccttctaacaagcatggttttagctgcaacttgaaaacagtctgaatgaatttggtgaaaagtggg

SEQ ID NO: 443480 - DNA, 87 bp, Homo sapiens
ttttaactaccgggaagatttacacagatggaaccagaaaagatacgaggctctaggagagcatcaggtattatctactgctgtctg

SEQ ID NO: 443481 - DNA, 100 bp, Homo sapiens
ctagcagggctgaagagaagatggaggagctggtggtggaagtgcggggctccaatggcgctttctacaagcctgctggcctgccttcactgtcctgggg

SEQ ID NO: 443482 - DNA, 98 bp, Homo sapiens
cgggatttcctgaaatgttggggggacgtgtgaaaactttgcatcctgcagtccatgctggccaacgcagagagccaacagcagagagaacaactgga

SEQ ID NO: 443483 - DNA, 80 bp, Homo sapiens
tatgtcagaaatgctaagacatcctaggatatcgggaaagcctatattggtacagggaagttggacccccactacccaaa

SEQ ID NO: 443484 - DNA, 100 bp, Homo sapiens
ctggtactggatgatcaaggtcagctggtccacatgaacaggcttccaggaggaaatgagcctgcctagggtagttaaaagacgagtgaatgctctcaaa

SEQ ID NO: 443485 - DNA, 75 bp, Homo sapiens
cggtcctgcacgccctgtctgaaggccaacattgagcgtctggaggaggtccctggccaaagatttatttctctt

SEQ ID NO: 443486 - DNA, 75 bp, Homo sapiens
ggaacaggcaccaggctgaaggttttagcaactgaacaggaagacacccagaagaaagccttcacgtgctggata

SEQ ID NO: 443487 - DNA, 110 bp, Homo sapiens
atgacatcacagcaaaagagaggttctctcccctcactaccaatctgatcactggagatggagctgaagatgctgaagtctcagtccagctctgccgaacagagcttcct

SEQ ID NO: 443488 - DNA, 80 bp, Homo sapiens
agaggaactggcagctcagctgcagatcacaaacaacatcgacccagtgggaagaatccaaatgcgcacgaggaggacac

SEQ ID NO: 443489 - DNA, 100 bp, Homo sapiens
cgtctgcagcgtcccgcacacctggcagcaaaagaggtcagaatggcggcagtggagcatcgtcattcttcaggattgccctactggccctacctcacag

SEQ ID NO: 443490 - DNA, 129 bp, Homo sapiens
ggccgagccgaggcggcgcgggtgcaggagcaggacttacggcagtgggggctgacaggtagagtggaacccccagctattagaggtcccaccccaaactcagtttgattacacagtcaccaatctagc

SEQ ID NO: 443491 - DNA, 95 bp, Homo sapiens
tatcagcatgggaaacttacactgctgcataatggagaacctctctacattccagtaacccaggacagtcattttgtttactcattcagccctgt

SEQ ID NO: 443492 - DNA, 100 bp, Homo sapiens
ttcagccccagtttacctgactctagggacagagaagatcagctgcagacaactgaggaatcctttgcaaaggcctccggtgtggctgtctctgatggtg

SEQ ID NO: 443493 - DNA, 75 bp, Homo sapiens
ctccactttccaacttcgagtcacaccagaattataaggatgaccaactcttggatgatggcaagacactgggcg

SEQ ID NO: 443494 - DNA, 83 bp, Homo sapiens
gatctgcccacctcagccttccaagtagctgggactacagacatgcgccagcacgcctgctgtttgcagacaaggtcccaaag

SEQ ID NO: 443495 - DNA, 51 bp, Homo sapiens
gtgtgttactgaagtgaaatatcaattacgttatgatgatgaagtgaagcg

SEQ ID NO: 443496 - DNA, 82 bp, Homo sapiens
cttctggtgggttcgtggtctcgctggctcaggagtgaagctgcagaccttcatgggggacttgatctcatcttcatgccag

SEQ ID NO: 443497 - DNA, 75 bp, Homo sapiens
tcctacgaggacaaaagcaacgacttcgtatggtacttctcagaacgtggggatgctgtggccaaggcctccaag

SEQ ID NO: 443498 - DNA, 50 bp, Homo sapiens
aagcgactgagtccgcgatggagaaggacaagttctgcgtgtacgaggag

SEQ ID NO: 443499 - DNA, 96 bp, Homo sapiens
gccgtggacacctgtgtcagcatgtgggacctggttctctccatcgccttgtctgtggggtgcactgtactggagaaaatgaaactgggattgacc

SEQ ID NO: 443500 - DNA, 81 bp, Homo sapiens
tgaaaagagaaggtcaaacagctgaagggaagccgtggcggacggagcagacggaggacctgaagcgagtgcttagggcag

SEQ ID NO: 443501 - DNA, 75 bp, Homo sapiens
acctcatggcctgcttttgaaaggcgctttgacttccgtccaaaacctgatccttattgtcaagctaagtatact

SEQ ID NO: 443502 - DNA, 82 bp, Homo sapiens
ctgggattgttgcggtgcgctggagccggtctggccgtgggcctgggcttcggggcactggcagaggtcgccaagaagagcc

SEQ ID NO: 443503 - DNA, 76 bp, Homo sapiens
gcaaacagaggcgctcatccacagagccacatctgttaggtacgcaataactgtttggtattttgatgcagatgag

SEQ ID NO: 443504 - DNA, 75 bp, Homo sapiens
ttactattagcccatcaagaaatgaagaacgagattcagacacaggtatgtgtaatcctcgaaattatagtgaca

SEQ ID NO: 443505 - DNA, 74 bp, Homo sapiens
agcgggcgagcggtggtttggacgccggcggagacgcgggcgaggttagctttatacgtctacgaatatttact

SEQ ID NO: 443506 - DNA, 89 bp, Homo sapiens
gtggttttgcaggaaatgtgaatctcaggagagagcagccagagtggtcaagtacaaaagagattttgaagaaagcaaagggaggggct

SEQ ID NO: 443507 - DNA, 75 bp, Homo sapiens
aggaagccttctttgagccgcccccaggatgctataaaatcaccacggtctttagccatgcacaaacggtagttt

SEQ ID NO: 443508 - DNA, 82 bp, Homo sapiens
gcctgggcgctccggtggcggcggaggcattgaagttgatatcgatgtggagcacggagggaaaagaagccgcctgaccccc

SEQ ID NO: 443509 - DNA, 100 bp, Homo sapiens
gcggcgtgggagcacctctggggctatggaggcccctgagccggagtccctggctgagtcggcagccgcctacaccaaggcaacagcgcggaagtgtttg

SEQ ID NO: 443510 - DNA, 100 bp, Homo sapiens
ggattccagggtcgaacactcggttcttgggtgtctctggggagtccctgggccagaccttcctccagactccagcccacctcttcggagcagctctgct

SEQ ID NO: 443511 - DNA, 83 bp, Homo sapiens
cctcggccgagccgggccgcgccgccgctgccgccgccgcgcgcggtatggtttgaagtggtgaacatggatttttctcggct

SEQ ID NO: 443512 - DNA, 82 bp, Homo sapiens
ttgaaggagcaagtacctggtttcacaccacgcctggcaatattacagatgaaagaaatgacctgccgtgatatcgttaaag

SEQ ID NO: 443513 - DNA, 103 bp, Homo sapiens
cttgtccgcttcacactccgccgccatcatggtgaagctcgcgaagacaatgcagatcttcgtgaagactctgactggtaagaccatcaccctcgaggttgag

SEQ ID NO: 443514 - DNA, 76 bp, Homo sapiens
gcccgaggccggaggaacccggactccggcgtagcgggccctccagaatttccacagcatacacctggacctgttc

SEQ ID NO: 443515 - DNA, 100 bp, Homo sapiens
tctttggaagtctgcatgcttcagtttttctatgcttatattcaaaggtagtaagcattaataatgtctttcatctttgagtggatctacaatggcttca

SEQ ID NO: 443516 - DNA, 73 bp, Homo sapiens
tgctggagctgttccgggccgcgcagctgccgaacgacgtggtcctacaggtgctgggtaggccaggtttcag

SEQ ID NO: 443517 - DNA, 74 bp, Homo sapiens
taacactgtacaagctttcaaagtcaatgtcatcagaagattgagagaaagaggagaaccaatcagactatttg

SEQ ID NO: 443518 - DNA, 100 bp, Homo sapiens
cttgtccagaactctgtcaaatgaagaacactttcaagaaccaggtctctaattaacagaagatggcaaagcccagccacagcagctatgtccttcagca

SEQ ID NO: 443519 - DNA, 50 bp, Homo sapiens
ttcccgctggcgcgcagcctcagctaggctaatttgcgccagaaagttac

SEQ ID NO: 443520 - DNA, 75 bp, Homo sapiens
gcgttgcaaatccttaaaagagtcttaacggaatgtatcctgtcaggtataatgtcagtgaatggcaagaaagtt

SEQ ID NO: 443521 - DNA, 82 bp, Homo sapiens
cccgaagcctaaattccaggagggtctgtctcgttggaaaatccagaacatacccttcctccagagaagcttccgtggatga

SEQ ID NO: 443522 - DNA, 82 bp, Homo sapiens
acagacaaggagctcagtgacctcctggacttcagcatgggacccagacatggagctgcgggaagaagcctggtctccgggg

SEQ ID NO: 443523 - DNA, 100 bp, Homo sapiens
tgcgaccagagatcgtgttggacattagctcccgagcgctggccttctggacatatcaggctttcaaggatatgctgtattcagctcaggaccaggcacc

SEQ ID NO: 443524 - DNA, 50 bp, Homo sapiens
taaaaaagaagggataatgaatccagagcaacgcacctcttgctttttcc

SEQ ID NO: 443525 - DNA, 50 bp, Homo sapiens
gcacacggcactcgagtgtgagagtcctgtgtatggaaactcacatgagt

SEQ ID NO: 443526 - DNA, 83 bp, Homo sapiens
tcaagctcgctatggagaattacgttttaattgactatgacaccaaaaggtatcacctcttctgggctcaagatggacaacaa

SEQ ID NO: 443527 - DNA, 81 bp, Homo sapiens
gaggacggggcgccggcgccgccgcccccgggctcgcggcctgcagaacaccttccaccatgaccacctcagcaagttccc

SEQ ID NO: 443528 - DNA, 100 bp, Homo sapiens
ggtggaagattcttccaaggaaccagtgcgaaggattgtgaaatacagtgagcagttctcatccaacgatgccatcatgtcaggctgcctccccagcaac

SEQ ID NO: 443529 - DNA, 75 bp, Homo sapiens
gggccgaactggccctggactacctctgcagggtaacaagatgctcaactatagtgctcccagtgcagggggttg

SEQ ID NO: 443530 - DNA, 100 bp, Homo sapiens
acctaccagctgcggcggccggaggaccggcctgccggcccccagaacaaggccgcctgggttccacttccagcaacagctcctgcagcagtaccgagtg

SEQ ID NO: 443531 - DNA, 87 bp, Homo sapiens
cgcctggaaaagtttccccgccagggctccccagggtatggacctgtctgccaatcaggacgaggagaccgaccaggagaccttcca

SEQ ID NO: 443532 - DNA, 90 bp, Homo sapiens
cccagcacggagggacttctgcagagagagtgcgcagaaggattccgggagcacagttccgccgacccaagaagatgaaaggattgttct

SEQ ID NO: 443533 - DNA, 90 bp, Homo sapiens
acagaagctcagagaagtgaagcaacttgcccagctatgagagacagagccaggatttgaaaccaggattgtcagctgacctctgtcctg

SEQ ID NO: 443534 - DNA, 100 bp, Homo sapiens
agaaaaggctcgtgatattccgttggccttgtatgaagcaggagaaaggagaaaggggacagacgtaaacgtgttcaataccatccttaccaccagaagc

SEQ ID NO: 443535 - DNA, 90 bp, Homo sapiens
tgtccatccacttatccagacccaatggaacatcagcaatgcttctggaacttagtgatttggcccgtgaccctccagcacaatgttctg

SEQ ID NO: 443536 - DNA, 78 bp, Homo sapiens
tatgtatcaccacccaacatcagcagccagcatcttctttattgaggttaatgactccagagagtaagatcagattcg

SEQ ID NO: 443537 - DNA, 98 bp, Homo sapiens
agtgcgcagaaggattccgggagcacagttccgccgagtgaaatgacaatggatgctctgttggctcgattgaaacttctgaatccagatgaccttag

SEQ ID NO: 443538 - DNA, 104 bp, Homo sapiens
cagctgagaaaggagctcggggactcccccaaagacaaggttgcccccaagtttcctggcagtgtgtgatactgaggaggtgagcttgtttctggagctgtgct

SEQ ID NO: 443539 - DNA, 100 bp, Homo sapiens
taggaactggcatggagcagcttgtgaaggagaggaaagtgttttacctcaatcatatatccacacaagtgcttctcttgacatttctcgaaaatgggag

SEQ ID NO: 443540 - DNA, 80 bp, Homo sapiens
gagcgggagaagcggggtcaacattttgaaagcgaagcagaagccgtagaatcagcggcgagcctgttgaaagaacccac

SEQ ID NO: 443541 - DNA, 101 bp, Homo sapiens
tcggaagatcattttattgacattgctgaagtggagacagggagaagttgtggaatatgtggatgacctcttggaactggaggagaccagctagcccacag

SEQ ID NO: 443542 - DNA, 82 bp, Homo sapiens
aatctttccttgatttgtccctcccagttttagatgatcagcttccatgtaggaagcggctgtaccgatcctgagaccttcg

SEQ ID NO: 443543 - DNA, 83 bp, Homo sapiens
gccgctgagccgtcgcggagccgcgcagccctcggagcacggatgcctaaatcaaaggaacttgtttcttcaagctcttctgg

SEQ ID NO: 443544 - DNA, 86 bp, Homo sapiens
cagggaacgcttaccaatgaaactcgatgcttgaactgtgaaactctctacaagtttcacgctgtttaagtcatgaacctacaaaa

SEQ ID NO: 443545 - DNA, 50 bp, Homo sapiens
cccatcgatacccccactgcaaaaccatgatgactttgacaacgatgtgg

SEQ ID NO: 443546 - DNA, 74 bp, Homo sapiens
cacctcttcctgtacgcctcctgccaacgggacagacagtataatgggaaccgttttgattaaaagtaacagtg

SEQ ID NO: 443547 - DNA, 75 bp, Homo sapiens
atctgccgtcttttgaagcaccctaatattggttgctgcagcaactggtcacacagtagtgttggtagaccagac

SEQ ID NO: 443548 - DNA, 100 bp, Homo sapiens
tattcgagtgaccgagaccgcggccgggaccgaggccactgaggcggctcccagctgcgttggcgacatggccgacacccccagagatgccgggctcaag

SEQ ID NO: 443549 - DNA, 100 bp, Homo sapiens
aggactgccagctggcgctgcaggctcatcagattcaagagatgtttccccaggttccataccatctggtactgcaggacctccagctgacacgctcagt

SEQ ID NO: 443550 - DNA, 101 bp, Homo sapiens
tgtgtcttccattctaacatccatacagcttaacagagcgttccaaaaagaggactctccagctactttttattgcatcagtatgcagtggtttagagaat

SEQ ID NO: 443551 - DNA, 89 bp, Homo sapiens
tttggcattgacatttaattttagggtcctttatatagaagggagaatacaaactggactctcaggacaaaacgacaccagccaaacca

SEQ ID NO: 443552 - DNA, 83 bp, Homo sapiens
ccgcggcgtcctcggcgctgaaggggttaattcaacagttcaccaccattaccgggctgcccttgagatggagttgctgcctc

SEQ ID NO: 443553 - DNA, 74 bp, Homo sapiens
ccgtgggtccgcgctgcttccacccaacttcctgttaggtcccagagaactacttctatgtgccagacctgggc

SEQ ID NO: 443554 - DNA, 133 bp, Homo sapiens
cgagcccagagagcgagtttgaaggcctcttcaccacccacaagggtaacttccaggcttcctgcttttccgaagccttccccgacataccttcggactagtgcagagcaaactcttccccttctacttccac

SEQ ID NO: 443555 - DNA, 96 bp, Homo sapiens
cgagagtttggagccccggagtggggtgtcggcgcctcattcgggtggagctgagccggagacaggtgaccctggcagcaaccccaacaaacgcca

SEQ ID NO: 443556 - DNA, 76 bp, Homo sapiens
cggctgcatgagctgcaagtgtgtgctctcctgacgcaggtgaaagaaatcacccgtgatattaagcaattagatc

SEQ ID NO: 443557 - DNA, 100 bp, Homo sapiens
cgatgctttggatgttgccaacaaaacatttgaagacagtgatttgttccatttgattggtgttatctgtggcttagcaatttataattgtaccattgtg

SEQ ID NO: 443558 - DNA, 98 bp, Homo sapiens
gtctatcaccagccagcacccatcgctcagttgtctccagctgttagccagaagcctcccttccagtcaggggactcagaattcatgattgaagaaat

SEQ ID NO: 443559 - DNA, 74 bp, Homo sapiens
ttgaacgggaaatcggcgccatccttcagaatgcaggttacaggaaatacaggaggcagaggaacaaataaaag

SEQ ID NO: 443560 - DNA, 100 bp, Homo sapiens
ggaggtacgagacctgttccagatgaagctttttgtggatacagatgcggacacccggctctcacgcagagtacgtaggaagcctggacgtgccaaggcc

SEQ ID NO: 443561 - DNA, 75 bp, Homo sapiens
ataatcaaggcaactcgtttcaggcaaagagagctcgacttaacaagattactgttccatacgttttgaagagct

SEQ ID NO: 443562 - DNA, 75 bp, Homo sapiens
gtcacttctttacttggtgcaggaaggcagtctttgctacgtacagcaaaagatattgatgatgttaagaagttc

SEQ ID NO: 443563 - DNA, 90 bp, Homo sapiens
agccatctctgtttcgctaaaggtttctgaagacagtgggtacaacagaatatctcgggaatggactcagaagtatgccatgtgatgcta

SEQ ID NO: 443564 - DNA, 75 bp, Homo sapiens
aagtgaagtcaatgttccgggaagttcttccaaagcaagaagttttcatgggctgagctgctgagttcagcctgg

SEQ ID NO: 443565 - DNA, 80 bp, Homo sapiens
cgaagctggccaaagcctgcccagacggctcacctgtgcgggatggaacaaaagacgctgaccggaaaggagattgagat

SEQ ID NO: 443566 - DNA, 82 bp, Homo sapiens
gattcgttggctgccgtccccgctgctgtgcattgggaagagctaaagatggctgaatttctagatgaccaggaaactcgac

SEQ ID NO: 443567 - DNA, 75 bp, Homo sapiens
ccagagtcggcgtaactatcgcctgacagggtatctgaagtaaaaggggggagttgaccacatttggccatttcc

SEQ ID NO: 443568 - DNA, 98 bp, Homo sapiens
atgaagagaagtttacaggccctctattgccaactgttaagaatgaccatacctgaagaagacgctgatgtgggacaaggcagtaaatattgcctcgt

SEQ ID NO: 443569 - DNA, 75 bp, Homo sapiens
cacggagcagccccggctacgggtgcctggttggaagcattgtcgggcatgtgggtgacggcaacttccactgca

SEQ ID NO: 443570 - DNA, 100 bp, Homo sapiens
cgcgatgagcatagagacgctactggaggcggcccgcttcctggaatggcaagcgcagcaacaacagagagcacgtggctgaccccgcactacatctacc

SEQ ID NO: 443571 - DNA, 75 bp, Homo sapiens
ccttgtcgaaggaccaaaggcgaccggtgcagtgcaccgtccaggtgaggttagagctggggcatcgcgcccaac

SEQ ID NO: 443572 - DNA, 93 bp, Homo sapiens
gtcggaggtctcatctttgaactactgccggagcttctgccaggaattagaaggtgacgaggagggagaagacgaggatgatgcggaaattaa

SEQ ID NO: 443573 - DNA, 104 bp, Homo sapiens
ggcagcgcggacccgcccggagatgagcctgtggacatctctacagcaatgagtgaacgggcacttgctcagaaaagactcagtgagaatgcatttgatcttga

SEQ ID NO: 443574 - DNA, 75 bp, Homo sapiens
aggaactagtcacagtgttgctgcaacatagagctgacattaactgtcagatcatacatctgtcggtggcctggg

SEQ ID NO: 443575 - DNA, 83 bp, Homo sapiens
gcgcggcccgcccggatcgtggcctctcgagagcaaggacatggatttgattgacatactttggaggcaagatatagatcttg

SEQ ID NO: 443576 - DNA, 99 bp, Homo sapiens
ttccaacgctgtaaaaaaggacagaggctgttccctatggcagagtctgtagaagaggcgacaccagggcttccaaatgaacaaccgaaaggaagatat

SEQ ID NO: 443577 - DNA, 98 bp, Homo sapiens
ctgaaatgtggggttaacttggagcaccgtgatatgcatgacgtatcccagactttactcaaggcaacactggacagtgttgtagaagaatgtgtcag

SEQ ID NO: 443578 - DNA, 98 bp, Homo sapiens
gcggcggagccggtatgggcccgcctgaccctgggcgccgcgccgcacgagcaccagcctagagccagctcatgggcctcctgagtgacccagaatta

SEQ ID NO: 443579 - DNA, 82 bp, Homo sapiens
cctggtctccggggccgctggattctgaggaccagcagatggccagtcacgagaacccagatgtccagctcgccgctgtcca

SEQ ID NO: 443580 - DNA, 90 bp, Homo sapiens
gttttctgttgtataatgaacagcagtattatttgaacaaagtccaatatcagatggaaatgatgcggagccttcgccatgtaaacattg

SEQ ID NO: 443581 - DNA, 90 bp, Homo sapiens
gtttctcggaaagtagcctcttctgcaagtggggcattcacacagctccacggagaagaactgctgcgtgcggcagctgtacattgactt

SEQ ID NO: 443582 - DNA, 50 bp, Homo sapiens
aagcagcgtgcgttcagccctggggtgaccctggcagcaaccccaacaaa

SEQ ID NO: 443583 - DNA, 100 bp, Homo sapiens
tgtgaccgaggctttttcagagctgacaacgatgctgcctctatgccctgcacccgtattaatattaaccgaggcctcctatgcttgggaaatgtaatca

SEQ ID NO: 443584 - DNA, 75 bp, Homo sapiens
ggaagcagccgatccagcctgcggagcctgtggggcaggctaccaacctggctcctgcagaccccaatggcaaag

SEQ ID NO: 443585 - DNA, 98 bp, Homo sapiens
ttcctcctctcctttcaagatttaaatgctaatggcggattaaaacctgtagatacgtttggctttaggagtctgatgggacacgagtgggtttggct

SEQ ID NO: 443586 - DNA, 100 bp, Homo sapiens
tggcatctgaagacagagagacttgccactggggtctccagactgtttttgttcacccatctcaggagcctggctggttggaggggactctgaacggaaa

SEQ ID NO: 443587 - DNA, 101 bp, Homo sapiens
aaatgtgccgtgatgtatgtgaacagtgccaaacccaagtctgaaatccacgtgtctatggccactccggtcactgtgtccatggagactgtatccaatca

SEQ ID NO: 443588 - DNA, 113 bp, Homo sapiens
cagcattcagctggagttccgggagctctcccgtctcacaggggataagaagtttcagccatccgggtgacctgcataggttcctgcggggtctccaacaaggctaatgacac

SEQ ID NO: 443589 - DNA, 51 bp, Homo sapiens
atgtggaaccccagggtactgcggtggagtattgctcctggaaaatccaaa

SEQ ID NO: 443590 - DNA, 122 bp, Homo sapiens
ggagtactccacagaggataaatttcaacctccggggccacaatagcgaggacatgtctcaggaaggctatggaactagatctcaacctcctctggcccccggaaaacctaaccatgaagac

SEQ ID NO: 443591 - DNA, 98 bp, Homo sapiens
ttatgagctgctattgaacacggcaggtgctggagaatctggtaaaagcaccattgtgaagcagatgaggatcctgcatgttaatgggtttaatggag

SEQ ID NO: 443592 - DNA, 87 bp, Homo sapiens
tgaacatcctgatctcttcctgctgactgactctgagaaagatgcctgtgaggagccaccaacatttgaagctatggagctcattgg

SEQ ID NO: 443593 - DNA, 100 bp, Homo sapiens
tggcaaacctttcttgagctcagctcctcaagagttactgatctatgaaatggcagagaatggaaaaaattgtgaccagagacgtgtagcaatgaacaag

SEQ ID NO: 443594 - DNA, 75 bp, Homo sapiens
gtttaagccagcaatgccaagatctgttgtgggactcttgacgtttaggtatgtggccatagaattctctctgga

SEQ ID NO: 443595 - DNA, 75 bp, Homo sapiens
ccagaatgtaaatgtgaagaacataatcattgctttaattgataggagttttgagagcaaaatgacaacacccag

SEQ ID NO: 443596 - DNA, 100 bp, Homo sapiens
gacgcaggtgcaggtgtctcttctcgccctggcggggaagacccctcctcctgtagagagtggtgctgccctctcgggatgtacctgcaggtggagaccc

SEQ ID NO: 443597 - DNA, 75 bp, Homo sapiens
gtgtgctggcagtgtgggacacctgcttggaggacctgagggcactcgctttgctcctgtcagtacacactccca

SEQ ID NO: 443598 - DNA, 82 bp, Homo sapiens
ggtccgagccagccgctgttttgccggaggagcccctcaggccgcactgaaagaggacatgagcggctacacaatctacgac

SEQ ID NO: 443599 - DNA, 100 bp, Homo sapiens
ccctacccctatccccagtggagccggagtgcgggcgcgccccaccaccgccctcaccatgtgatcagggccaaagcggtcagtgagaaggaagtggact

SEQ ID NO: 443600 - DNA, 90 bp, Homo sapiens
cagttattgaatatcaagaggaggagttgttggtgtgatgaatgcagactctgctaccattttggctgtttggatcctcctttgaaaaag

SEQ ID NO: 443601 - DNA, 82 bp, Homo sapiens
cgcgggcccggccacggcggagccaaggtgagaagccctaccactgcaactgggacggctgcggctggaagtttgcgcgctc

SEQ ID NO: 443602 - DNA, 98 bp, Homo sapiens
ctctcatcttgtcctacctgaagtatgccattagttcccagccttttgtctgtgggaaaagcaggagacgcttcgatttttctgattctgaccacaac

SEQ ID NO: 443603 - DNA, 100 bp, Homo sapiens
cctgaggtcagctgagcggttaatgcggaaggttaagaaactgcgcctggacaaggagaacaccggaagttggagaagatacctcggatctgcattttca

SEQ ID NO: 443604 - DNA, 100 bp, Homo sapiens
ccctggctagcagccccctgcctccacctgtggctgtccggaagccaagcacacctgagtcccctgctaagagtgagatggagtctcgctctgttgccca

SEQ ID NO: 443605 - DNA, 100 bp, Homo sapiens
aacaggccgagcagtggctgaaggcacatagctggcaacctggaataaaaaatccctatcgtggtgttgttgtgtggcctgttcctgaaaacattgaaat

SEQ ID NO: 443606 - DNA, 75 bp, Homo sapiens
gaataacaaggcttatctctaggatccataaggaacttgtaatagctggcatcgttgagaatgaatggaaaagaa

SEQ ID NO: 443607 - DNA, 88 bp, Homo sapiens
ttccccaggcctgcgtccgagtctccgccgctgcgggcccgctccgacgcggaagtgcagaatacagaaactgcagccatgaccacgc

SEQ ID NO: 443608 - DNA, 100 bp, Homo sapiens
tgttaaagccactcaagcaatctatctgtttgaactctccggcaatcgtgaaggaacatcctccatcagaaacagaagagaagaacaaaatcactgctgc

SEQ ID NO: 443609 - DNA, 51 bp, Homo sapiens
tcatcatctacttcacaggaattgccatttatctattaatgagatgaagcg

SEQ ID NO: 443610 - DNA, 107 bp, Homo sapiens
gacttcggttcgggtgcgctgctcaaggacacggtctacaccgacttcgacggtgcgcgcggagccatggttatcatgtcggagttcagcgcggaccccgcgggcca

SEQ ID NO: 443611 - DNA, 75 bp, Homo sapiens
ggagcgaagagctgcttctgtatcttaaggctgacttatccttgtataatgaattccgattgtggaaggatgagc

SEQ ID NO: 443612 - DNA, 75 bp, Homo sapiens
aaagactagatgccgatccaaaagagagcagaagtgcgaggctgtggggaagttcaccaaggccatggatgacgg

SEQ ID NO: 443613 - DNA, 100 bp, Homo sapiens
tgtgcctccattcccgggaggggggagcggcgttggaggccaccgtttccagatgaagttggagcccttgtttttgacattggatcctatactgtgagag

SEQ ID NO: 443614 - DNA, 98 bp, Homo sapiens
ggcccctgaagttggcactgcagcagacagctccctgggcaccaggcagctaacagaacccttaggagaaatcttgagagtggacagcaattgtgaag

SEQ ID NO: 443615 - DNA, 100 bp, Homo sapiens
caggaagatgaaggttctgtgggctgcgttgctggtcacattcctggcagcatggcaccttgggcagtggccgctcctcggacaaaggcccgtcctggtc

SEQ ID NO: 443616 - DNA, 51 bp, Homo sapiens
agcctccagagtagctgggattacagccctttggaagatcattaagtttca

SEQ ID NO: 443617 - DNA, 51 bp, Homo sapiens
ctcaaggctgcctctctgcaaagttgagagctcagagttctacagagtcac

SEQ ID NO: 443618 - DNA, 100 bp, Homo sapiens
atcaacaccaaaaagctttctgctaggggatattgtacctgtggatgcatcttatgaagtaaaagaactatatgtgccagaaaataaacttcatttggca

SEQ ID NO: 443619 - DNA, 100 bp, Homo sapiens
ccaagggaagtagtgtcctactcaaaggagacccagactcctcttgccacgcatcagtctgaaggaaatacaactggagcacgcaaagcaagcctttgtg

SEQ ID NO: 443620 - DNA, 50 bp, Homo sapiens
cttgggccgcgtctcctttgaggagaggctcgggctgtgctgaagtgggc

SEQ ID NO: 443621 - DNA, 100 bp, Homo sapiens
aagcgttggagaggtgttaccggaacggcggcgacaagggtgttcccgaactagagtgggtatcttgagaattacaaatgctatagaaaaatggaagagg

SEQ ID NO: 443622 - DNA, 75 bp, Homo sapiens
ccatagctaatcttgggacatcagagggtcgcttcatgcaggtattccagcgtcttcaggaaacagtttagactc

SEQ ID NO: 443623 - DNA, 100 bp, Homo sapiens
cttcctggtccaaagtgaaccagggtctcatccgcatgtataaggccgagactgggccagtgccattcgcgtcgcagctctggactgcatggaagagaag

SEQ ID NO: 443624 - DNA, 75 bp, Homo sapiens
gtctgaggccaatgtcagagaaatctttgacaaggttggtgttcatattgctgatgtgagccattttattaggcc

SEQ ID NO: 443625 - DNA, 48 bp, Homo sapiens
tttccggcctgacaacttcatctttggaaaatgttggggcttttcagg

SEQ ID NO: 443626 - DNA, 106 bp, Homo sapiens
ggacatcgtctcctgtgtggcgatggtcttcctgctggggctcatgtttgagatggtctgtcttctgctgatcccaactctgattggaatgcaccagcagaagagt

SEQ ID NO: 443627 - DNA, 76 bp, Homo sapiens
ggtggtgacaagaacggcggtacccgggtggttaaacttcgcaaaatggtacatcaggaacgtctctatcaagaat

SEQ ID NO: 443628 - DNA, 100 bp, Homo sapiens
tgatgaatcagatgtcaaagacttagcttttaaattaaaaaggaagctattcaccattgagatggctttcaaactgggcctgagctatacccccttggca

SEQ ID NO: 443629 - DNA, 100 bp, Homo sapiens
ctgaggctgtgctgaacgggaagggcctcggcactggtaccctttacatcgctgagagaggcatgccaggtggaagtgaggctgctgctggcctacaact

SEQ ID NO: 443630 - DNA, 134 bp, Homo sapiens
ttcgacgcctccgccgccgcctgaggaggcgagctagccgggagttacaccgccaccgccagattggctctaccagtgcacctggacagggaggaatcctggctcagcgggagtttgacaggcgattctcccct

SEQ ID NO: 443631 - DNA, 100 bp, Homo sapiens
ttcgcgaagctgccaaagccttagacaagctaaagaattacctccaaagccattgtcaagaccacagcagtcatctgcaccagtccagctgaactctggc

SEQ ID NO: 443632 - DNA, 99 bp, Homo sapiens
gtgccgacaagatggcggacggggagctgaacgtggacagcctcatcacccggctgctggaggggagagtcccgtattctcagagtaaaagttgtttct

SEQ ID NO: 443633 - DNA, 101 bp, Homo sapiens
acaaaagatattccaggtagcccaagagctatcaggggaagatatgcatcagttccatcgagccattactacaggagtgctaacaggaatgaatgaaactt

SEQ ID NO: 443634 - DNA, 75 bp, Homo sapiens
gggccttttaactttggagaagttgaggaccttgtcgctcatttggcagaagatggcagaaacggtggacacaag

SEQ ID NO: 443635 - DNA, 74 bp, Homo sapiens
tcgctcagacaccatggggaaggtgaaggtcggagtcaacggcacctacaggacttgggctgcttcaggctgaa

SEQ ID NO: 443636 - DNA, 83 bp, Homo sapiens
ccttattacgccgtctccaagatgtagctaatgaccgtggttcccactgaggtgagatcggactggaactgttcggctgcgac

SEQ ID NO: 443637 - DNA, 90 bp, Homo sapiens
gctgcacccacgaatctgcccacccctcctgtaacccagcctgtttcacttcttggcgttgacccggacgacacctataatgagaccccc

SEQ ID NO: 443638 - DNA, 74 bp, Homo sapiens
ggagtacatctacatgcattttggggaggggccggggctgttcctgaggatgcagctggtgccctccatagaag

SEQ ID NO: 443639 - DNA, 82 bp, Homo sapiens
gcagaagccgagttcaacatcctcctggccaccgactcctacaagatgccatggacaatattaccaggcagaaccaattcta

SEQ ID NO: 443640 - DNA, 86 bp, Homo sapiens
gtggtttttcggatcatgtctggtggctccgcggattataacaggtcaaaatgcagatcttcgtgaaaacccttaccggcaagacc

SEQ ID NO: 443641 - DNA, 82 bp, Homo sapiens
atctcaaaaggtgatctggacaaaggaacaggtatctcaggggttcaacagaaatatttggtggttacctgcaactatgaag

SEQ ID NO: 443642 - DNA, 80 bp, Homo sapiens
ggaccacatagacatttacgcggatgtcggcgaagagttcaaccaggcacttctgtctcctgctgccatgtgaagaagaa

SEQ ID NO: 443643 - DNA, 100 bp, Homo sapiens
agagcctatttacccagaagtagtccatatgaggacgtcggtgatgaaggagaagaagaaaaagaattcatttcctataacatcaacatagacattcatt

SEQ ID NO: 443644 - DNA, 101 bp, Homo sapiens
ccccgtcgttgctgccgggattttggaggccggggccgcgctgagggcgcccagctggtgtctcccagtctgctaaagccctaaggccatcaccatggact

SEQ ID NO: 443645 - DNA, 100 bp, Homo sapiens
aaacatcattcacccatactgactagtttcacatctctttggattctccttttacaaatgcaggaatgggatctaatctaaatctgttaggtgaaattga

SEQ ID NO: 443646 - DNA, 82 bp, Homo sapiens
ctcggggcggccactcttgccaggaggcgtaaggggatatgagactttctactcggaatatcctgagtgttgcgtggatgta

SEQ ID NO: 443647 - DNA, 100 bp, Homo sapiens
ctcgtttggaccctccgcagccactcctgcacctccaggggtggacacccctcctccttcacggccagagaagaacatcaagatgctttccagttataca

SEQ ID NO: 443648 - DNA, 75 bp, Homo sapiens
cttgcctgctattggacactgcaaagctatctacccttttgatgggcggcgactggcggcgcgatggacctgacc

SEQ ID NO: 443649 - DNA, 75 bp, Homo sapiens
ctgatttaaacgagatttacagaagcttccagaatggccataaaattttgagtagaaaaatccagaaatttgaaa

SEQ ID NO: 443650 - DNA, 75 bp, Homo sapiens
gatggccatggcataaggaactctatcccaggaatacagctttgcattagctcttttgaaacagatggtcaccat

SEQ ID NO: 443651 - DNA, 49 bp, Homo sapiens
agccgagcccgcccgcgcgccgtcctcctgcatatgcccaagaggattg

SEQ ID NO: 443652 - DNA, 75 bp, Homo sapiens
ccagtcgggcctcacgagaagcatctctgggacccctgctgaaacaccaggcaagttaggaaatcaacattgaat

SEQ ID NO: 443653 - DNA, 98 bp, Homo sapiens
ccatccaggacctgcgggacaaggtgaggaagttccgtacattgacagaattgatcctcgatgctcaggaacatgttaaaaatccttacaaaggcaaa

SEQ ID NO: 443654 - DNA, 98 bp, Homo sapiens
cgccttcctcccggcgtggcagatgctccaggggatgaagattttaccaaggacataacagagctgttttcccagctgcacgtttcctccaaaccaga

SEQ ID NO: 443655 - DNA, 100 bp, Homo sapiens
tgaaaaggcaaaactgactttaagctttaaggaagcctcctatttcagtttctcaacatgaaagtcatcaagcaatctcccatcttccaactggacaacc

SEQ ID NO: 443656 - DNA, 75 bp, Homo sapiens
agcacatcagtgatgaatgcaagaggcgtttctataagaattgacatcagactgcgggttcgggctgaatactgc

SEQ ID NO: 443657 - DNA, 76 bp, Homo sapiens
ggagccggagccgccgggacatggggcttaaaagacaaccttcttgcttctgggacatccagcctgacagccacca

SEQ ID NO: 443658 - DNA, 83 bp, Homo sapiens
cgcccaggcgcagatgcgggccctgctggaccagctcatgggcacggctcgggacgatgatgccatggagagcagcaagcctg

SEQ ID NO: 443659 - DNA, 100 bp, Homo sapiens
aggaggggaggagggccactgggctcccagcagcccaggttcagcatgaacaaggctcagttatgatgtttgagcaccttattaattctaatggaattaa

SEQ ID NO: 443660 - DNA, 98 bp, Homo sapiens
cggcctcggcctggatgggcagcgccagagggtgagaactctgtctcagtcgacgggaagtgcagtgactccacgctactgagcaacttgttagaaga

SEQ ID NO: 443661 - DNA, 100 bp, Homo sapiens
aatttcattctgggagtgaagagagaattcgtgtcacttttgaaaggaagagagaagggcacagttacctaagtatcaacgtaatcttcctcggccagga

SEQ ID NO: 443662 - DNA, 95 bp, Homo sapiens
ggggaatttctcctggggctcagagtttcttaaagaacagcccagacacaaacaaatacgagggatggccagagctgctggagatggagggctgc

SEQ ID NO: 443663 - DNA, 74 bp, Homo sapiens
agcctctgattacgacatggctgagatcaccaatatccgacctagctttgactcagacgatgccctgctgaaga

SEQ ID NO: 443664 - DNA, 74 bp, Homo sapiens
gagcaagaccatcatgctgcgcggccttcccatcaccatcacagagagcgatgatagctggaatggccttagtc

SEQ ID NO: 443665 - DNA, 82 bp, Homo sapiens
ttgcgactcgcggaccggcgtccccggcgcgaagaggctggactcggattcgttgcctgagatcatggaagggaagtggttg

SEQ ID NO: 443666 - DNA, 90 bp, Homo sapiens
attttttctcatggatgttcttcttcgagtatttgtagaaggggcccagtcctatgcggagagactgcgtctgggtttggccgtcattca

SEQ ID NO: 443667 - DNA, 90 bp, Homo sapiens
tgagagtctgaaagagctattcagtcagtttggggccctcctcgccaaagacagcctagagaggacggcaatgaagaagataaagaaaat

SEQ ID NO: 443668 - DNA, 90 bp, Homo sapiens
cgcctgcagtcggtgaccgcgcgactcggcgcccgcccgcgcttctgaaagtacagagaagcttaacaactccactggcctccagagctc

SEQ ID NO: 443669 - DNA, 82 bp, Homo sapiens
ctggcagccaaatgcatcctggcaggaattgaatgatctggcacgggaccctccagcacagtgttcagcaggtcctgttgga

SEQ ID NO: 443670 - DNA, 153 bp, Homo sapiens
cagctcccccagctgcaccctgggcctggtcttgcccctctggagtgacacccaggtgtacttagatggagacggtatgctcaggcttcagaagaggctcgcctctagtgtcctccgctgtggcaagaagaaggtctggttagaccccaatga

SEQ ID NO: 443671 - DNA, 83 bp, Homo sapiens
cgctgacaaaggagcggaggagcagtcgcagctgctttccgaggaagccggtgttgccgaggctgctctttggcgtaaattgc

SEQ ID NO: 443672 - DNA, 99 bp, Homo sapiens
cagaaatacatgcaacatggtgactgacgcaaacatgcagatctttgtgaagaccctcactggcaaaaccatcacccttgaggtcgagcccagtgacac

SEQ ID NO: 443673 - DNA, 98 bp, Homo sapiens
gctaatccctgaatatctgattaattgctggccctcggagagtggaaatggctgtgatgtcaacatagaatatgagctacaagaagataatttagaac

SEQ ID NO: 443674 - DNA, 95 bp, Homo sapiens
aaattcttcttcgttatggacagcatccaaacattatcactctaaaggatgccataggaaaaggatacagagtagagtttcatgaacctgaaact

SEQ ID NO: 443675 - DNA, 88 bp, Homo sapiens
gcggcggaggccagggaggaagatgtcgtaatgagcgagaatggatcttggagaatgtctgaaagtccatgacctggctttaagagcg

SEQ ID NO: 443676 - DNA, 83 bp, Homo sapiens
aaaaaattgtaaagttttgacaattgtggaggccagtgtaaaccctatttccaagtgtacaagggagaagaagccacattcca

SEQ ID NO: 443677 - DNA, 73 bp, Homo sapiens
gtcggttggtcctggagcggcgcagccggagtggggccgtgaggggctgaaagaagtgacacttcttggtcag

SEQ ID NO: 443678 - DNA, 82 bp, Homo sapiens
ggaacgaggcaaggagctaaagcagcgtgcgttcagccctggggctggggccgggctggcggggccctcccgactgacttcc

SEQ ID NO: 443679 - DNA, 100 bp, Homo sapiens
tctactcgaagaagaaagagaagaaacgttttctcaggaccgccgggagagcctgcccacctccccaccctggacgccgggcgcgtcccggccccccagc

SEQ ID NO: 443680 - DNA, 75 bp, Homo sapiens
agatcggaggaccggtaccggaatcccaaagctagatacactgtcagatcctttggcatccggagaaatgaaaag

SEQ ID NO: 443681 - DNA, 100 bp, Homo sapiens
gccagcaaaacactcagctgcaagtccaaagccacaagagtaaatgaatcatcacattatgatctagcctttacagatgtacactttaaacctggtcaaa

SEQ ID NO: 443682 - DNA, 73 bp, Homo sapiens
caatcctaccatgtcagccttcccagtagctggaactacagattgtcactgctgttccaagggcacacgcaga

SEQ ID NO: 443683 - DNA, 50 bp, Homo sapiens
tttgtactcaggtgaaaggaccagccagtttcaagcgcccggtagtgatc

SEQ ID NO: 443684 - DNA, 76 bp, Homo sapiens
tttaaaccattggtccttcgccgtcagtatttgaggagaaagcatttggaatgtatcctgtcaggtataatgtcag

SEQ ID NO: 443685 - DNA, 100 bp, Homo sapiens
gggactaccgctgcacaccagcaggccctgccaattgactgcttttacagtgagtgattgtttgctacatgaggagaacttctcggtgaggtgccctaag

SEQ ID NO: 443686 - DNA, 100 bp, Homo sapiens
atcatctgtgtgttctcacagcaagctaatgaagaatatcaaatactggcgaactcctggcgctattcatctgctttttgtaacaagctcttcttcagta

SEQ ID NO: 443687 - DNA, 116 bp, Homo sapiens
cccatcggcattggcatttttgtcacctccaacaacatccgcgagatcgagtactatactggcaattgctggagaagattttgcaattgttgcttctgatactcgattgagtgaag

SEQ ID NO: 443688 - DNA, 100 bp, Homo sapiens
ctaggggcagctgggctccagagtccctcgggtctcaggtcatggcggtcgcggggcccgcgcccggagctggcgccagcggccctccaggcactgaagc

SEQ ID NO: 443689 - DNA, 75 bp, Homo sapiens
aaaagacagtcctcgtcagcactgactttcagctatggaatcgggcagcacattccccctgttcccaggtgggtc

SEQ ID NO: 443690 - DNA, 90 bp, Homo sapiens
atgcaatcaagttagcccaacaaggaaacctcttagaaaaaagagtagaaaaacacaccttgactttagtcagatacatcactgtctgtt

SEQ ID NO: 443691 - DNA, 73 bp, Homo sapiens
agcgacaagccgctggcagccgcggatctcaccgccgctcaggggacacctgtgaaccgcatccccatcatgg

SEQ ID NO: 443692 - DNA, 83 bp, Homo sapiens
ccggccccaaactggcagggtctttatcccaccattagagagaggtccttcgcaacatggtacactgtgcagacctgagcaac

SEQ ID NO: 443693 - DNA, 82 bp, Homo sapiens
aaatagcagtgcttcaggaatagaaatcttggcaatcgaaagtattgaagctgcttctggtggtaaagctgaagttatcact

SEQ ID NO: 443694 - DNA, 96 bp, Homo sapiens
cgcggctgcagctcgggacttcggcctgacccagcccccatggcttcagaagagtattgaatttgaccgggattgtgactattttgcgattgctgg

SEQ ID NO: 443695 - DNA, 100 bp, Homo sapiens
gataagtgcactaggcttcaaaggcgtgttcagctgctggtgaagaatattcagctggaggatggcaaaatgatcctggcctcgaacttctttaaggggg

SEQ ID NO: 443696 - DNA, 74 bp, Homo sapiens
gtttggaaagacccaggagaagccgcccaaagaactgcaaattgtggctactaatttgccccctgaagatcaag

SEQ ID NO: 443697 - DNA, 73 bp, Homo sapiens
cgacaggtgtgcaggtttcggcacatggagattgatgcttacctatttctactccatgtaccaccataaacaa

SEQ ID NO: 443698 - DNA, 100 bp, Homo sapiens
ttctcgagcccggagccgctgccgccgcccccagctcccccgcctcggggagggcaccaggtgtcatggagaaactccagctgggcccagagattctgca

SEQ ID NO: 443699 - DNA, 100 bp, Homo sapiens
ccggcggcagcacgaaagtaccatgtggataatattaatgcagctgtgatggatttgaaaaaaaagaagatccgcagtctaagtgaagaggtcaaaatag

SEQ ID NO: 443700 - DNA, 51 bp, Homo sapiens
agatgccttctcagtcagttgaggattcttactacagatttaatgacctta

SEQ ID NO: 443701 - DNA, 90 bp, Homo sapiens
aaatcgagcagaaagaatgtctttcaggtggcgacatgtctaagaatgtgagccagtcacagatggcaaaattgaaccaacaaatggcca

SEQ ID NO: 443702 - DNA, 75 bp, Homo sapiens
gttcaacacaatgaacatgaagaccagcacagcctagatttgggttccgccacacttcaccactggcagcagttg

SEQ ID NO: 443703 - DNA, 142 bp, Homo sapiens
ggtccctggagcagccggcgttgggggcgctggaggtcgggaaccgagtacagcgtcgggcgggggacagctcagaaatgtgactggaaacagtaactccacgttcatctccagcgggcaggtgatgaacttcaagggcgac

SEQ ID NO: 443704 - DNA, 75 bp, Homo sapiens
gtgctgtggtctgagctagagggtgaagctggcggagcaggaggatgggcgcagtgtttgcaaaaaattttcatg

SEQ ID NO: 443705 - DNA, 100 bp, Homo sapiens
gaggaaaacaacttcgagggcagattccgatgaagttaaattccgtcaagatttaatgaatattgcgggcacaacattatcctcaaaacttcttactcat

SEQ ID NO: 443706 - DNA, 80 bp, Homo sapiens
ctacttcttccgggctgagagcaagtacacatttgaaaggcaagagacgctacaacatcaaactgtggaaaaccttcact

SEQ ID NO: 443707 - DNA, 80 bp, Homo sapiens
cttccccagctctgcagccacatactatccgtttgttcaggaaccaccagtgacagaaataactgaagtgaagtgatgga

SEQ ID NO: 443708 - DNA, 100 bp, Homo sapiens
actgaccaacctggcagacagggagctggttcacatgatcaactgggcgaagagggtgccagaaatgggacgtcggtcatcagatactgaagaagaaagc

SEQ ID NO: 443709 - DNA, 96 bp, Homo sapiens
ctggcctattacagacttcatggacaggtattcttggctgaacagtttgagttccttcagccacatctggatgctgtgatgcctgcagtcaaaaag

SEQ ID NO: 443710 - DNA, 100 bp, Homo sapiens
tacgtagtcacggtcttgtgctctaagtggttagcaggaagaagatgagccttaagtctgaacgccgaggaattcatgtggatcaatcggatctcctgtg

SEQ ID NO: 443711 - DNA, 100 bp, Homo sapiens
tactggatttccgtagtattgatggcacagcagctacacagaagagatgggagaagaggctaatgatgacaagaagccaaccactaaatttgaactagag

SEQ ID NO: 443712 - DNA, 100 bp, Homo sapiens
ttggaaatggaacatacgggcaagtttataaggttcgatggatgatgtactggattgtttttgctctctatactgtgattgaaacagtagccgatcaaac

SEQ ID NO: 443713 - DNA, 74 bp, Homo sapiens
cagggtccctgaagagggaagacacgcggaaacagactctgaagaactggtggcttcagcagtacagccacgac

SEQ ID NO: 443714 - DNA, 100 bp, Homo sapiens
ggacatcgatagggatgcagaggatcagaaccggtacctggatggcatgtgctggcctacatgcagttgctggaggactactcggagccgcagccctcta

SEQ ID NO: 443715 - DNA, 82 bp, Homo sapiens
tccgagtctccgccgctgcgggcccgctccgacgcggaaggagtcagtggatcggtggggaaaatgctgcttaccctgggcc

SEQ ID NO: 443716 - DNA, 109 bp, Homo sapiens
ccgcccaccatggcttccgaggagctgtacgaggcttgttagcagtggcacaagatcttacagaggatgaagaaacagtagaagattccataattgaggatgaagatga

SEQ ID NO: 443717 - DNA, 87 bp, Homo sapiens
tccagccgccgcctgccctcagccgcccgctggccgggagcggagcccctgtgggtggacgacatccttggagaaggcagcgacgac

SEQ ID NO: 443718 - DNA, 112 bp, Homo sapiens
ggccgccggggccgccatggagcccgactcggtgattgaggacaagaccatcgagctcatggccatttcataattctgaatcatgtctgataacggagaactggaagataag

SEQ ID NO: 443719 - DNA, 100 bp, Homo sapiens
gtcaccaggaaccctcatctcaacaagggtccatcttgctgggatgatgttttaattccaaaccggatgagtggtgaatgccaatccccacactgccctg

SEQ ID NO: 443720 - DNA, 75 bp, Homo sapiens
aggacttgggctttccccagatctgggtgctgacaaccagggtgcaggagaacaaggtagaccagtgaggcagaa

SEQ ID NO: 443721 - DNA, 98 bp, Homo sapiens
gtcgtcttggagacaaggaagcagttctcaacagctccctacaccatcatcaccttccccttcctgtttgctgtgatgttcggggatgtgggccacgg

SEQ ID NO: 443722 - DNA, 75 bp, Homo sapiens
cttcaaaagcccacttggcgatgggttacagtaagaggtatataatgtttacatggcagggaggcagctgtgttc

SEQ ID NO: 443723 - DNA, 87 bp, Homo sapiens
ccacgaactggtactgattgttccccagagtttggggaccccttgtcttgacagtatcatgcacagacttcaggcccgcatagctca

SEQ ID NO: 443724 - DNA, 100 bp, Homo sapiens
aggttttgaaccttttttcacctcgtctgaaatggctgcctcccagtgtctctgctgctcaaaatttctcttccagtggaaagaggcaaaacctgatgaa

SEQ ID NO: 443725 - DNA, 75 bp, Homo sapiens
gatctggtggtcgtgaaactgcttcccgaggagcattggaagtgtcacaccatgtctgaccggaaggcagtgatc

SEQ ID NO: 443726 - DNA, 101 bp, Homo sapiens
tgctgttcatgagtggaatccatgtttctggacgcggatttttggcctcatactctgttatagataaacaagaatagcctaacatggcagaccagagacag

SEQ ID NO: 443727 - DNA, 75 bp, Homo sapiens
ccaacaagaggaaagacacacctaccaagaagccagtcaagcggccagaacccagcgggtgccgcttctccaccc

SEQ ID NO: 443728 - DNA, 100 bp, Homo sapiens
gacaactacatccgctcccgccgagacatccgctccttgcccgagaacatccagtttgatgtttactacaagttcttccctgtggaacagtagagaccta

SEQ ID NO: 443729 - DNA, 83 bp, Homo sapiens
cgtcggtggtgttggcgctgaggacccggacagccgttcctgtgccttaagaacattagaaccttcctgtccacctgctgtga

SEQ ID NO: 443730 - DNA, 98 bp, Homo sapiens
gatactctaacagattgtacacatatgagcctcgggatttacccctatacccatctctgacagttagagccgatatcactggaagatattcaaatcgt

SEQ ID NO: 443731 - DNA, 75 bp, Homo sapiens
gctgtgggtgctgggacttcccgtccgcggcgtggaggaaaggaagctgttgaagttattgaagtacctgttgct

SEQ ID NO: 443732 - DNA, 100 bp, Homo sapiens
tgaagctcaactacctgcgcatctcagaggccaagctgactggcatccccaaagaaccagaaggaccctggtgtccttgaccgcatgatgaagaaactgg

SEQ ID NO: 443733 - DNA, 82 bp, Homo sapiens
ggaaaggcggtagccggtgtgttggtggtcccggaacctctcgtaaaccaggtgctccagctgctgctcctgcccctgcctc

SEQ ID NO: 443734 - DNA, 90 bp, Homo sapiens
aatgtgaagagacatgagacagtagtcaaatactcaggatttccagatgtgacttgcactcagaagatcagtggtcaacttcagaagctc

SEQ ID NO: 443735 - DNA, 90 bp, Homo sapiens
ggaccccagtaccaggcggtggtgcccgacttcgaccccgagacattaaacctgacaatgtccttttggacgtgaatggtcatatccgcc

SEQ ID NO: 443736 - DNA, 49 bp, Homo sapiens
caggaagtggatgcctccatttttaagaatcctcactatggatgggctc

SEQ ID NO: 443737 - DNA, 100 bp, Homo sapiens
ggaggcggagtggcgcccggcgaggtagcgccaggcgaggttacgaaggtgagaatctgatgaaaattctaaaagacattgaaaacagcacagaaatcat

SEQ ID NO: 443738 - DNA, 75 bp, Homo sapiens
ataaagcccgagcccaaaccccgccaccatcatagatctcccttgagtttagaaatctggctgagaaataccaaa

SEQ ID NO: 443739 - DNA, 100 bp, Homo sapiens
ccgggatcgtgaccgagaccgtgaccgagagcgtgaccgagagcgcgaatatcgtcatcgttagaaggaattacatgaatgacagtcttcgaaccaatgt

SEQ ID NO: 443740 - DNA, 100 bp, Homo sapiens
ctggccactgtcaacagtcagctcaagaagctgcaggtgtgtctgacgctgaccgccaagcgcatggcccggaagaactgcctggtgaagaacctggagg

SEQ ID NO: 443741 - DNA, 101 bp, Homo sapiens
cgaccaagagggtgttcgactgctagagccgagcgaagccttttcctccgcaaccatgtctgacaaacccgatatggctgagatcgagaaattcgataagt

SEQ ID NO: 443742 - DNA, 82 bp, Homo sapiens
agaatagagttgagcctgtgggacacttcgggctcacagaacatttcctgcctgttgctcacactctgttgtccacagcata

SEQ ID NO: 443743 - DNA, 74 bp, Homo sapiens
tgaagagggtctggaggagccttctcaagaacagaggagatacaactcgtcaacgaatcaaattcagtgatgac

SEQ ID NO: 443744 - DNA, 75 bp, Homo sapiens
ccgggctaggacgccgagcggtgactccccgccgctcccgggggccgtgacgtattggtaaaggttttcaaggtg

SEQ ID NO: 443745 - DNA, 96 bp, Homo sapiens
ccttgtcaggccagctccagttcccagagaatatgaccattcccggagtaataaatccagttggagcagcagtgatgagaagaggggatcgacacg

SEQ ID NO: 443746 - DNA, 90 bp, Homo sapiens
cagtgtaatcacacctttggatccaactgctcagctacgaatcatgtcccgttcaagaagttcttccagttcgcagtcaagatctcgttc

SEQ ID NO: 443747 - DNA, 141 bp, Homo sapiens
ccagggcttgggaaggggaaggaaacctctctgaaatctgacacctgctctcccggcaaggaaacttcgcaggctggctcatgcacaattagttcgagaagttgatgtggagaaggtgtctgcttttgagaatccatatgt

SEQ ID NO: 443748 - DNA, 95 bp, Homo sapiens
ctcaacaagggccacaaagtgaccaagaacgtgagcaagcccaggcacagccgacgccgcggggttacgggcaggacttgagtggcttcggacag

SEQ ID NO: 443749 - DNA, 100 bp, Homo sapiens
gtcagagcgccccatggtgtggtgctgcctctttgtccgttcgcagatttggagcaagaggtggtggtggccttcccccgaagaaatttggtaatcctgg

SEQ ID NO: 443750 - DNA, 95 bp, Homo sapiens
atctgaggtcttattttgttgagtcgaaagtgaaattttcctttggccaacgtgacaggatgtacagttacccagcacgtgtacctcctcctcct

SEQ ID NO: 443751 - DNA, 82 bp, Homo sapiens
cgccagcggccgagcgggcggcttcctggcctgggcgctccggtggcggcggaggctgaaggggatgctaagggagataaag

SEQ ID NO: 443752 - DNA, 90 bp, Homo sapiens
cagatggcggatgccctgcagtacctgcagaaggtctctggagacatcttcagcaggctgtctgtccccagaccccagagcacgtccggc

SEQ ID NO: 443753 - DNA, 82 bp, Homo sapiens
gctactcaggcgctggagaaatacaacatagagaaggacattgcggctcatatcaagaagcttcgcagaatcaagaacggct

SEQ ID NO: 443754 - DNA, 71 bp, Homo sapiens
cagactttgtatttatgttcctttttggtggattcttaatgacctttgatacaaccaagtcggatgggcag

SEQ ID NO: 443755 - DNA, 75 bp, Homo sapiens
tttttgtacaaaagaagcagctcaggaggctgttaaactgtatttcagacaacttttaagaggtgcagaatcacc

SEQ ID NO: 443756 - DNA, 75 bp, Homo sapiens
ctgaggaggctgcggctaacagggcccaggtatgatctcgtgaaatcttgagagaaactgaatgacgaatgaaac

SEQ ID NO: 443757 - DNA, 98 bp, Homo sapiens
ggttccaagggccacaagaagataagttggccctaccctcaggtgctttactccatgaactgtctaatgacggtgctcataagcagtttgatcactac

SEQ ID NO: 443758 - DNA, 100 bp, Homo sapiens
ggaggatcgcaagctggatgagcttctaggcaaggaccacacgcaggtgaaaaagcttgagtctccacccccatctaccaatcccttcctggaagatgag

SEQ ID NO: 443759 - DNA, 51 bp, Homo sapiens
tgaatccttctagagacgtccacggggaaggtgtggctcattgactttaat

SEQ ID NO: 443760 - DNA, 83 bp, Homo sapiens
tgctgttttctgccggctgtaaagtcatcacctcctgggatcagatgtgcattgagccgcggcccatggagcccgccggcccg

SEQ ID NO: 443761 - DNA, 78 bp, Homo sapiens
ggctctttatgcattctactttgaccctatgagaacctcatttctcttccaagtgcaaattgggaatcgtgaaattca

SEQ ID NO: 443762 - DNA, 100 bp, Homo sapiens
ctgtgaagacgcacggtgccaggaccaagtatctgaacatggctctctatgctgacgtcggtggaaaacaattccctgtcactcgaggccaggatgtggg

SEQ ID NO: 443763 - DNA, 75 bp, Homo sapiens
gcctcccgagaagaagttgaggcgctatgcttgggcactgtttaaaggaaagttccgagaaggcatcgacaagcc

SEQ ID NO: 443764 - DNA, 88 bp, Homo sapiens
gatggcgcagaaaccccgttgacaaggcactgctttttcatgacgggcattcttagcagggttacagaatctgttaagaatattgtgc

SEQ ID NO: 443765 - DNA, 100 bp, Homo sapiens
attggaggctctggtgatggaatgataaaagtgaagaatcagctccgcttccttgcagtgaatctacagacctattttctcaggagctcagcctggcctt

SEQ ID NO: 443766 - DNA, 75 bp, Homo sapiens
aactgggccggaagctctgccggagagactatctcaggattgttcaagtttagaagaatacaacattgccgcagc

SEQ ID NO: 443767 - DNA, 74 bp, Homo sapiens
acaatccaccaagcttctgggccttgctgagctgctgagggttgcagctttccctggacctctatcacactgaa

SEQ ID NO: 443768 - DNA, 100 bp, Homo sapiens
catttgaaggcctgctatccctccagtatttgagcagtatgtgtttatccacgatgcgatcctggaagcctgtctttgtggggacacctctgtgcctgct

SEQ ID NO: 443769 - DNA, 98 bp, Homo sapiens
tcagagcctggacggtggagaggaagcgcccaggcaggcttttacgaactgaccggcagccactcagctatgatttaggcatagagaatcgtgatgcc

SEQ ID NO: 443770 - DNA, 100 bp, Homo sapiens
caatgcagcgcttccacaaccgcgtgcgtcagattctcatggcctctgggtccaccaccttcaccaaggtgtgatccctcacatccacaaatctctgatt

SEQ ID NO: 443771 - DNA, 75 bp, Homo sapiens
gaccgaccccccaagaaaccccgccatggaggcttcattctggacgaggctgcctttgacgacccctatgccctg

SEQ ID NO: 443772 - DNA, 100 bp, Homo sapiens
ttggtcatgatctaccagttcattgttcaggattttatagctaccttgggaaaactttcaggattacatggccaggacctttttggaatttggagtaaag

SEQ ID NO: 443773 - DNA, 98 bp, Homo sapiens
ggcgagagatggtcaggtctggagctcgaccgggccaggctaggcagctggaagagaaagaccgagtgctaaagaagcaggatgcattctacaaagaa

SEQ ID NO: 443774 - DNA, 51 bp, Homo sapiens
cgccatcgttgctgccttcttcgtcaagggaagacatgtaaggaatttgca

SEQ ID NO: 443775 - DNA, 50 bp, Homo sapiens
aaatcgagcagaaagaatgtctttcaggtgctttacaaggccaagtacgg

SEQ ID NO: 443776 - DNA, 90 bp, Homo sapiens
attattcagagcgcgtatggagtggaaacgcttgtagggcttcaccagttatttctcaaactctgaggctgcggagttcacacattgaaa

SEQ ID NO: 443777 - DNA, 101 bp, Homo sapiens
tctaacaaattaataaaccttccagaggattacagcagcctcattaatcaagcatccaatttctcgaacttgatactaaatttgggactctttgctgcggg

SEQ ID NO: 443778 - DNA, 82 bp, Homo sapiens
cggaaaaggacgcaaagttctccggcgaggtaactaggatttctacctcaaccgcgagacctatgcaaggacggtgtggacc

SEQ ID NO: 443779 - DNA, 82 bp, Homo sapiens
atttaattttagggtcctttatatagaagggagagtagggtgttgaaagcagcaggggcctagaagacattaaaccgatacc

SEQ ID NO: 443780 - DNA, 100 bp, Homo sapiens
agcagcagagagatgtgtaccaacaagagaaggcacgcatgggctcagcgggactcagagtattggtaaaggttttcaaggtgtcatgaaaagatgggga

SEQ ID NO: 443781 - DNA, 99 bp, Homo sapiens
ggcactgtcaggagttgcccttcccagaggcagcggtttgatgaaatcctggaggccagtgatgggatcatggtggctcgtggtgatctaggcattgag

SEQ ID NO: 443782 - DNA, 82 bp, Homo sapiens
cgtccctggtctaggcggagaaccgcctgggcgatgagtgagaacctcgacaacgaggtaatagcctgcagctggtgttttg

SEQ ID NO: 443783 - DNA, 100 bp, Homo sapiens
ccatgagggcaagagcttccagctgagacaccgtgaggctttttgtcctgggcatcggcttcttcactctctgcttcctgatgacgtctctgggaggcca

SEQ ID NO: 443784 - DNA, 88 bp, Homo sapiens
aacatgacgcaggtgcaggtgtctcttctcgccctggcggggaagagacggggtttcaccatgttagccaggatggtctcaatctcct

SEQ ID NO: 443785 - DNA, 80 bp, Homo sapiens
tggacagaagttagtggttcctggttttaatccaggtgctggtttgccaactgacaaaaagaaaggtgggccatctccag

SEQ ID NO: 443786 - DNA, 83 bp, Homo sapiens
ctcgctgctcatcatgctcaagtcagagggcttttactcctacctgtgtaccgagccagggtgcttcaaggatgaccgcatcg

SEQ ID NO: 443787 - DNA, 126 bp, Homo sapiens
gtaaatattgaaaactccaggcatcgaaaacaagagcagaagcaccttcagccacagccttataaaagggaagacaaaaagtaaccttcctgaagaggacatgtgattggaagttgtcaattgttg

SEQ ID NO: 443788 - DNA, 50 bp, Homo sapiens
cttgagttggtcgggggcagcggcagattttccgcagatttccagtggcc

SEQ ID NO: 443789 - DNA, 90 bp, Homo sapiens
gtttgatgatgccgtcagtatcactgtggacgtggccgctttggagagtcagcctttattaggattcactgttattcaagttaaagatga

SEQ ID NO: 443790 - DNA, 134 bp, Homo sapiens
tcacttgcttgacctacaaggaatctgagggtgccctcaatgagcacatgaccagcttagcttctgtcctaaagcaatggctgccatccggaagaaactggtgattgttggtgatggagcctgtggaaagacat

SEQ ID NO: 443791 - DNA, 96 bp, Homo sapiens
agagcttcgcgagcttgaacagagggtctccctccggagggcactcttagaacaaaagcagcaaagtggggcaccaaggccctgtgctaagcactc

SEQ ID NO: 443792 - DNA, 88 bp, Homo sapiens
ccaagacctcatcaacaattaagatcttcgcaaatactgtggacaatgcccgcatcgttctgcagattgacaatgcccgtcttgctgc

SEQ ID NO: 443793 - DNA, 101 bp, Homo sapiens
gagagttctccaaacatgatcgtttactgcaaacttttctgaagctcagcagcagctatgcaacaccagacaggaagtgaatgaattaaggaagctgctgg

SEQ ID NO: 443794 - DNA, 112 bp, Homo sapiens
gaggaacaaaatttgtctgcaaacctggagccagaaacattaccgtcatattccacccattactaagggtgctgataagactgtgaaaggcccagatggactgaccgccttt

SEQ ID NO: 443795 - DNA, 51 bp, Homo sapiens
ggtgcccaagcctggattaaaaaggtgctgccacgggacctggagaaggag

SEQ ID NO: 443796 - DNA, 90 bp, Homo sapiens
ccttgaagaggaagacggggcggaagaccaagatcatcgagatgccagtaatgttaaagtagagactcagagtgatgaagagaatgggcg

SEQ ID NO: 443797 - DNA, 96 bp, Homo sapiens
gcctatcatgaacatcaggcaaatcttttgcgccaaggtcacacatcccgggtcctgagtctgaccatgagcccagatggggccacagtggcatcc

SEQ ID NO: 443798 - DNA, 96 bp, Homo sapiens
tcagctctttccccgtcagcatcccagccgtgctcacgctccagctcaaggtccctgctgaaggtcggagagcttggcatggccccgtttgtccat

SEQ ID NO: 443799 - DNA, 141 bp, Homo sapiens
tatcttctgaagccaatgagatttgtaacaaatcggaaaagaagaccatctcaccagagcatgtcatacaagggagaaaatgtgtaattcaaagaagatactgatgtgttgaaaaaatggaatttttggtactgtgctgtt

SEQ ID NO: 443800 - DNA, 82 bp, Homo sapiens
gcgaggcgggactcaaatgctggaggaaggagggtctgaaaagccctcaagaaagcctcagtgatcttggtgccatagagag

SEQ ID NO: 443801 - DNA, 82 bp, Homo sapiens
ctccctgtgccttgcttggagctgacgccgacggctcctgccagggccatccaggtgaccgtgtccaacccctaccacgtgg

SEQ ID NO: 443802 - DNA, 124 bp, Homo sapiens
ctgtttcgccacagttcctaccttatgagctcggttttcttatgcttataagagtggaacagactcactgccacaacgacattgtcaaccttctcctggactgtggggccgacgtgaacaagtg

SEQ ID NO: 443803 - DNA, 50 bp, Homo sapiens
aaaatctggaagtcccgctcgtgcgccgctccctgttcagcaatgtccgc

SEQ ID NO: 443804 - DNA, 90 bp, Homo sapiens
catccttcaatgacacttttgtccatgtcactgatctttctggcaagtgcaagctggcccaggccaatggttggggcgtcatggtgtctc

SEQ ID NO: 443805 - DNA, 98 bp, Homo sapiens
acttcaacctgtacatgtggagaattcctgcagatccagaagcaggactggtgaggaatattttaatatctcaagatggtgttaaattgggatcatat

SEQ ID NO: 443806 - DNA, 100 bp, Homo sapiens
cttggactgaagtgactctactaagtgcgtcgggcagcccaaatgtgtggcctgaaggaggtgggggaggatgaagagtggactctgtactggacagact

SEQ ID NO: 443807 - DNA, 75 bp, Homo sapiens
cctgtttgacatcatccctccccagctgtcgcctggttgggcccggaaatgggacgtcgcgctttctcagggagc

SEQ ID NO: 443808 - DNA, 130 bp, Homo sapiens
caaagcgatcctttatttataggaggaccaagaccaaccatggccaagttaatgagcatcttcaagaaagcaatggacatttgatttctaagaccaaagaccttggtaaactgcaagcagcatcatggag

SEQ ID NO: 443809 - DNA, 90 bp, Homo sapiens
atcatggtgcagaaataccagtccccagtgagggtgtacaaatacccctttgaattaattatggctgtagctgcaatcaacccaaatcac

SEQ ID NO: 443810 - DNA, 98 bp, Homo sapiens
gattcttttcaatacatcctaaaacagtgtgccatgcggagctgaatgccatcatgaacaaaaattcgaccgatgtgaaaggctgtagtatgtatgtt

SEQ ID NO: 443811 - DNA, 75 bp, Homo sapiens
tggtggttaaaccatgttaaggaggattttacagagggttatgagtgccagtgagccgccttagatagaagcatc

SEQ ID NO: 443812 - DNA, 90 bp, Homo sapiens
ggcggtgtgaagagagttcgcctgagccagatcccagatcttatgccttcattcatccggcatggtccaacaattccaagacgaactgat

SEQ ID NO: 443813 - DNA, 75 bp, Homo sapiens
gctgcggccgccctgggccgggccccaccggacggttacgggcaggacttgagtggcttcggacagggcttctca

SEQ ID NO: 443814 - DNA, 152 bp, Homo sapiens
agaaccaaggatttccaagtgatttcttccaaagcacaggaatctcactctgttaaagctggtctgttctaactgagcatacatctgtggatggatatactgaaccacacatccagcctaccaagtcgagtagcagacagaacatcccccgg

SEQ ID NO: 443815 - DNA, 87 bp, Homo sapiens
gcaggcgcccgtgcggaatggcaggttatgaagacagtatggagtttccagaccatagtagacatttgctacagtgtctgagcgagc

SEQ ID NO: 443816 - DNA, 83 bp, Homo sapiens
cggcatcgtctttccgtcctctgaggcgacggccgcggctgcacagaaaaggcgacggcggattgacagaagtatgattggag

SEQ ID NO: 443817 - DNA, 135 bp, Homo sapiens
gggcgtgagcggcggcgtcttatccaaccttgcgctgcatccgctcgacctcgtgaagatccgcttcgccgaggactactgagcccagccaggctgtatgccattgctgccaaagaaaaagatattcaagaggag

SEQ ID NO: 443818 - DNA, 101 bp, Homo sapiens
cactggtgtctcctgcggaagggcagctgggcacgccttccagaccgaggtgcaggccctagcaggtgcaggtggagtagacaatctccatgtactggact

SEQ ID NO: 443819 - DNA, 100 bp, Homo sapiens
ccgcgtccctgagccaggccagcgccgacctggaggctaaagaattacctccaaagccattgtcaagaccacagcagtcatctgcaccagtccagctgaa

SEQ ID NO: 443820 - DNA, 90 bp, Homo sapiens
ctgcccaataccaggtcaaccaggctgcagctgcacaggctgcagccaccgcagctgccatggctccaaccaggaatggagacgccattg

SEQ ID NO: 443821 - DNA, 90 bp, Homo sapiens
caaactggccaagaagggccttactccttcacagatcgggacctgctccgaatcggagtcactctggcgggacaccagaagaaaatcttg

SEQ ID NO: 443822 - DNA, 90 bp, Homo sapiens
ggaataggttcgccgaagagagaggaacagcatatgccatatatgagctggctgtggcttcatttcccaagaagcaggagtgacttcagt

SEQ ID NO: 443823 - DNA, 50 bp, Homo sapiens
caaagtttagctgctcgagatcgaggaggctgtgcgtttgtcacattttc

SEQ ID NO: 443824 - DNA, 50 bp, Homo sapiens
cgtcaatcagagcgtcctgtgcggcagttgtgaaaaacttcaggacaaaa

SEQ ID NO: 443825 - DNA, 74 bp, Homo sapiens
cgactccagagtcattccctctcagggcggcgactggcggcgcgatggacctgaccgggctcctgctggacgaa

SEQ ID NO: 443826 - DNA, 100 bp, Homo sapiens
ggcggcccaccgggactcgccgttgtagccacgatggaggtgatgaacctgatggagcagcctatcaaggtgactgagtggcagcagacatacacctacg

SEQ ID NO: 443827 - DNA, 49 bp, Homo sapiens
tgtggacgaaggggccgacctcctagaaaactgtcgctgaaaagcagga

SEQ ID NO: 443828 - DNA, 90 bp, Homo sapiens
gggggccttggctgtaaggacccctaaggccatgtgaagatgtgcttgcttcccctttgccttctgccatgattctaagtttcctgaggc

SEQ ID NO: 443829 - DNA, 100 bp, Homo sapiens
ctcagaaagtgctcgcttcccttcgggggctttcgcgaatcccgaggcaatctcggaggcgaacatgaaaggctcccggagcagcgctgactcctccagg

SEQ ID NO: 443830 - DNA, 98 bp, Homo sapiens
cttcctgttcacggtgaccttcgcttggtgtcctcctggcctcagcaacctgacaattctgtcgtgtcccgattcatgatgttgctatcaaaagttga

SEQ ID NO: 443831 - DNA, 87 bp, Homo sapiens
gtttttgtattttacctaatttatgggtatttacaggttgtctgcattcaaaagagcattctattaaagctaccttaatttggcgct

SEQ ID NO: 443832 - DNA, 50 bp, Homo sapiens
ccaaggtgtacttcatctacgagatgcaaccttaaaatcagtgacaagaa

SEQ ID NO: 443833 - DNA, 98 bp, Homo sapiens
ccaatggtggctattcctgaacatgaagctcttgattccaaagaggttgcttcaaagatggtcaacattatgaagagggatcagtaattaaagaaaac

SEQ ID NO: 443834 - DNA, 50 bp, Homo sapiens
ggaagaacagggtcgaggatcgaggtgccaacatcgcctctggtgaggaa

SEQ ID NO: 443835 - DNA, 100 bp, Homo sapiens
tcgagttgagtacttggatagacttatacctcaggagtgattggggcagatgtgagagggcacggcctcatctgtgaggggcagccagtgacgtcacggc

SEQ ID NO: 443836 - DNA, 88 bp, Homo sapiens
tgcgggtcgcgtcctggccgccgaggactcgctcagcagcagcctgaaaacttgctacaagtatctcaatcagaccagtcgcagtttc

SEQ ID NO: 443837 - DNA, 101 bp, Homo sapiens
aagaccgtgaaaagcttggtgaaaaagaagaaacaattcctcctgattatagattagaagaggtcaaggaattagaaggtgacgaggagggagaagacgag

SEQ ID NO: 443838 - DNA, 75 bp, Homo sapiens
gtttctggaggccaacgtaccccatgcctacctgaaaggaggtgctggagaatctggtaaaagcaccattgtgaa

SEQ ID NO: 443839 - DNA, 83 bp, Homo sapiens
atgtatttgatcctgattctacccaagtacatatgatttcagctgcaatggcagatagaggaaagggtcgccagagacaagcc

SEQ ID NO: 443840 - DNA, 75 bp, Homo sapiens
tgcagcatattgtactggcctgctgctggcccgcaggaatgagtccctggaacgccagatgcgtgaaatggaaga

SEQ ID NO: 443841 - DNA, 98 bp, Homo sapiens
taaatacccgtgtctgaagtcttcaggcgagctcaccacatgctacaggtcaacggcagagacttatccagagcaactcatgaccaggctgtggaagc

SEQ ID NO: 443842 - DNA, 101 bp, Homo sapiens
ttcaagagcagaatgagaagatctatgctccacaaggcctcctcctgacagaccctattgagcgaggactgcgagttacattgtggatatcaagcctgcca

SEQ ID NO: 443843 - DNA, 90 bp, Homo sapiens
tccagtagaaaactggtcaaggaagctatcatgcatgcattttcagttgctccttttgaccagaatttgtcaattgatggaaagatttta

SEQ ID NO: 443844 - DNA, 100 bp, Homo sapiens
gagaaaccagtcccttggacagtctgcaccttctcttactgctggcctgaatcccacgtggcgaagtctcgattttggaattatgccagaccgtcttgat

SEQ ID NO: 443845 - DNA, 100 bp, Homo sapiens
gtgactccttcggagcccctccacaagttccatctaggcctacgagggccccgcccagtgtcccaaggtccacgctgcttttatgagctgtaacactcac

SEQ ID NO: 443846 - DNA, 75 bp, Homo sapiens
ctgctccggccgccggcgacgcggggagaacctccatttctaccagaatcctttgaccgaattcttctggatgca

SEQ ID NO: 443847 - DNA, 75 bp, Homo sapiens
tgaccacttaccgcagcatccaagtcggccctgactaatagggatgccaaaggaaaaatatgatcctccagatcc

SEQ ID NO: 443848 - DNA, 50 bp, Homo sapiens
ctgcttcccaataaggaaacagtcagtttaggggctggtgcaaaggatga

SEQ ID NO: 443849 - DNA, 100 bp, Homo sapiens
tgcctgctgatgagctacgccaacgacgccttcccagaggaatacgtgcccactgtgtttgaccactatgcagtcactcctgaagccattggcttcttgt

SEQ ID NO: 443850 - DNA, 100 bp, Homo sapiens
ctaacagaggagaatctgaaaaaaagagaaacctgggtgaactttcacggacaacctcagaggacaacgaagtgttcgattacatgaagcagatgacatt

SEQ ID NO: 443851 - DNA, 101 bp, Homo sapiens
ggccgagcaggctgagcgatacgacgacatgcgtcgggatgtccaggaaatttttcgcatgaccccccacgagaagcaggtcatgatgttcagtgctacct

SEQ ID NO: 443852 - DNA, 100 bp, Homo sapiens
taaattgcaagcattctatccaaatggacatttacttggcctctcccatgacgattccaaattctgtgaagagacctttggttccacagaagataagcgc

SEQ ID NO: 443853 - DNA, 95 bp, Homo sapiens
ctcctaagtagctgggaccacagaggttttgtcagctatgattagtgtgctgttggtgtatatacttatgggattcctcttatatgaagctgtgc

SEQ ID NO: 443854 - DNA, 83 bp, Homo sapiens
ctggccaagaagctcctggcaaaactgcgctttctggctgaggaggctgtagcaaggtgctgctgaggccacggacgtcggag

SEQ ID NO: 443855 - DNA, 99 bp, Homo sapiens
ctctgtgagcggcgggtggcagcaggggactcctgacacttccccttccccaccgaaccgcgggcaattgaaggaacagactaaaaatcgtgtcctgga

SEQ ID NO: 443856 - DNA, 82 bp, Homo sapiens
cccaatctcctttctgggcaaacgttccaagaactgataaatttcaaacggaagagagtggcagcatttagaaagaatctaa

SEQ ID NO: 443857 - DNA, 98 bp, Homo sapiens
caggaagatcgcttgagcccaggagtttgagaccatcctggacaagcaatatccagattattatgcaataattaaggagcctatagatctcaagacca

SEQ ID NO: 443858 - DNA, 75 bp, Homo sapiens
gagaatgcgctcttcaagcggatcttggattgaatatgatgcatatcgcactgatttggaagaactgaatcttgg

SEQ ID NO: 443859 - DNA, 74 bp, Homo sapiens
tccacagcaagctcccttatatggataaacacacttgttacctatgatatggttccagagcccaaaatcattga

SEQ ID NO: 443860 - DNA, 100 bp, Homo sapiens
gattcaccaaataagctatatactttggttacctatgtacctgttaccactttcaaaaatcaggcctttgtgacactaaccacaaacgatgcctacgcca

SEQ ID NO: 443861 - DNA, 90 bp, Homo sapiens
gtttcttggatcgctgcaaccatctccgccagaacgacaaagaggaggaccaagaactatatttctttcatgaactcagccctggaagtt

SEQ ID NO: 443862 - DNA, 100 bp, Homo sapiens
ggtgcaaggagaaaggattttgaggagggtattgcctaagtgtaatcttgaacatgggcggtgctgtgagtgctggtgaagacaatgatgagctgataga

SEQ ID NO: 443863 - DNA, 110 bp, Homo sapiens
gttggagttgcggcggcgggaacgattgggctgagcagaggacgacatgttgcttttcgtggaggcagcctgcttctgcaaagtggtacgatcgaagggactatgtcttc

SEQ ID NO: 443864 - DNA, 82 bp, Homo sapiens
ctgcggcgcctgggactgcaccgcaccgagggcgagctccagaaagaagatgctgatatgctacaacacggatgaacctgga

SEQ ID NO: 443865 - DNA, 74 bp, Homo sapiens
gaagaggtgatgatagctttggagacagaccgaggctgcgaacgtggagaagatcaccacgaagttgctgaagg

SEQ ID NO: 443866 - DNA, 101 bp, Homo sapiens
gttcttcagtctacaaaggactcttctaaaaggatatgtgttgctaatacccatctttactggcatcctaaagaacagccctcatgcttgcagtacagcat

SEQ ID NO: 443867 - DNA, 88 bp, Homo sapiens
ggaggtgacgagggcgcccgacccgggactagaggacggaagggtctggaaggtataaatgaccaaggattgtacagagttgtggggg

SEQ ID NO: 443868 - DNA, 75 bp, Homo sapiens
cccacctcctgagtcctctcggcacccagcaaggaaccagtgacctttgaggatgtggctgtgtacttcacccag

SEQ ID NO: 443869 - DNA, 80 bp, Homo sapiens
gcgtcttgccaccgggcctgtcagttgacctaccccttgcacacctaccctaagatggagaaggatgaaactgtgagtga

SEQ ID NO: 443870 - DNA, 100 bp, Homo sapiens
gaatgccacaaatgcaaatacttgtgcactgggagagggtcctcactgagcagcgagtcgtcccccgtgtcctctccggccaccaaccacagctcccccg

SEQ ID NO: 443871 - DNA, 100 bp, Homo sapiens
gaagaaacgagtggatgactatgtcagaagacatttggtaccacgaaaggcagtggtagaaaagccagctcgggcagcagagcgagaggcccgggccctg

SEQ ID NO: 443872 - DNA, 82 bp, Homo sapiens
cgctgattggatttccctctgtgggtaaggagcacgtgaattgcctctgcttacgttcaggccctgtcctaaacccagccgt

SEQ ID NO: 443873 - DNA, 83 bp, Homo sapiens
ccgggagatcccaggcggtgacagagtggagccatggctagagggtgaggtggctttgaccccgggttgcccggccagcacga

SEQ ID NO: 443874 - DNA, 83 bp, Homo sapiens
ctcggtgccctctccttttcgtttccggaaacatggttgtgaccgagattcccgacgagagagactgaggggaagagaggaag

SEQ ID NO: 443875 - DNA, 88 bp, Homo sapiens
cacaagattcctttgcagttcacccttggaggctgaacaactttttaaagcaacaatgagttacctccttggagggggcatgaagcag

SEQ ID NO: 443876 - DNA, 100 bp, Homo sapiens
gaagcaagaaggccctggacacagcaatatctctgggctttcacaggccttcctgatgcgcttgcctgctccctggtctctctgcatggggaaggagtgt

SEQ ID NO: 443877 - DNA, 75 bp, Homo sapiens
cctgataacactgcatgaaatgttagagcatggtgttattgctacagaagatgaagagtattttatcgaaccttt

SEQ ID NO: 443878 - DNA, 107 bp, Homo sapiens
ggcaaaggtgtcgtggtggtcattaagcggagatccggctctgcgaacatcaatagatgcttatgacaactttgacaatatctcgcttgctcagcgtttggaaaaac

SEQ ID NO: 443879 - DNA, 49 bp, Homo sapiens
gtgcggactcgcctccgtgaaggtacgagtgcttccatatccatttacc

SEQ ID NO: 443880 - DNA, 50 bp, Homo sapiens
gagccgccgcccgggctggactgcgccattccacagattttgaagtacac

SEQ ID NO: 443881 - DNA, 100 bp, Homo sapiens
cgcgtcccgctcgctgggagagaggtacctctccttttccctctccctttccctaagcttcggaaccaaaaagaagcttcccagagccggggccaggagc

SEQ ID NO: 443882 - DNA, 75 bp, Homo sapiens
gcccagaggactttcttccagcttctgctgtccttctttgtggagagcaagggtcccactccattgcccaagctg

SEQ ID NO: 443883 - DNA, 100 bp, Homo sapiens
gcaattgttgataccaatggaatcacggtttttggaacaaggattttggatgaagaagtttttgagtgacatgaaaaaggttggtgtcaccgtggttggg

SEQ ID NO: 443884 - DNA, 82 bp, Homo sapiens
cggattcgccgaggcaccgaggcactcagaggaggtatataatgtttacatggcagggaggcagctgtgttctaagcggtac

SEQ ID NO: 443885 - DNA, 99 bp, Homo sapiens
gcggggcccaagtccttggctgctgagtggtgacagtagcccagcccgccggccaggactatgatgatggatatggcactgcttatgatgaacagagtt

SEQ ID NO: 443886 - DNA, 100 bp, Homo sapiens
gagacaacagtggccttctgatgaatactttaagatatgaacgagactgccaaacaagaagatattttggaatccacaacagatgctgcagaatggagcc

SEQ ID NO: 443887 - DNA, 100 bp, Homo sapiens
gatgtctacatatatattctgtcctggttatcaatactctggctgaccatcatcatcgtgggactgactttggtggaagtccttggttacatgtcattat

SEQ ID NO: 443888 - DNA, 51 bp, Homo sapiens
ccaaaatatggcaaagaaacctattctgagaaaaatggctacaaacttcct

SEQ ID NO: 443889 - DNA, 98 bp, Homo sapiens
ccggagtgagcggagtagcgagtcggcaacccggaggctgtgacagtgaggaactccatggctaagtctctgtatagtgccctgtttgactggatagt

SEQ ID NO: 443890 - DNA, 82 bp, Homo sapiens
aagccttgaaaaagctgccctgagacggtgtcccgccgaaagattgagaggatccagaatccagatctctggaatagctacc

SEQ ID NO: 443891 - DNA, 90 bp, Homo sapiens
ctcgctccacaactcaggaggcaggatcagcggctccattttacagctcatgatggagcagtccaagaagtcctccctcatggtggcccg

SEQ ID NO: 443892 - DNA, 75 bp, Homo sapiens
cccagcggtcccgcccaacgcccgactcttatctgacgaagcaagtggaacttctacggcagatgaacgaacaac

SEQ ID NO: 443893 - DNA, 97 bp, Homo sapiens
cctatattcataattacattgtggatggctgggtggtatttcaaccaaggacactcaatcacttgtcggaagtccctcaacccgtatagcacctcat

SEQ ID NO: 443894 - DNA, 82 bp, Homo sapiens
tgaacaaatgtttccttaaagtgcctcgatctaaggatgaccctggaaagacagatgtgctggtgctgagctgtgatctgat

SEQ ID NO: 443895 - DNA, 110 bp, Homo sapiens
gctttggctctctgcttatcttttttgccaaatactgatgacttcacagagaatgcagttgtcttgacttcaggtctgtctgttctgttggcaagtaaatgcagtactgt

SEQ ID NO: 443896 - DNA, 100 bp, Homo sapiens
atgggagccctgccccaggggagctttacagctacacggaagggccagaattcctgatgaatcgaaaatgctttgaggaggacttccggatccatggtga

SEQ ID NO: 443897 - DNA, 82 bp, Homo sapiens
ctagaattacctggaacttcatcatcatctacttcacaggaattgccatttgctggagtgcagtggcgggatctcggctcac

SEQ ID NO: 443898 - DNA, 83 bp, Homo sapiens
gcgaattgtgaatcgcttctccaaacaattacctaggaacagtacgatttggggttatcacaaataaacatcttgcgaaactg

SEQ ID NO: 443899 - DNA, 98 bp, Homo sapiens
acgcggcgcggccggctgccggaaagatggaggaagccttgtaggagaagtaaatgaagatggggagatgactggagagaagatagcctatgtgtacc

SEQ ID NO: 443900 - DNA, 82 bp, Homo sapiens
cagcaagctgcggccagagttcgtcatcatggacccgcggacagatagcaaaccagatcttcgtgaagactctgactggtaa

SEQ ID NO: 443901 - DNA, 105 bp, Homo sapiens
acgccgcgtgctcccaacgtcgccccggtttgacgcacacggcaccaaactgtgatggcttggacaacagtgtagcttcccccagcacaggtgacgatgatgacc

SEQ ID NO: 443902 - DNA, 100 bp, Homo sapiens
cgccgctgcctgccgaggtgcgggagagcctggctgagctggagctggagctgtcggaagtgttatagttttgccgctggactcttccctcccttccccc

SEQ ID NO: 443903 - DNA, 100 bp, Homo sapiens
aaggtggagccaccagcctctccttgggcgccaatgcttcggcattagagaaagagattggtccagaacagtttccggtcaatgagcactattttggatt

SEQ ID NO: 443904 - DNA, 100 bp, Homo sapiens
ggcaagaaagggcagaacctggccaaaatcactcagcagatgccaaagctagtgtcagcagtgggatacctgcgcttgaaggacatcatccaccgtgaca

SEQ ID NO: 443905 - DNA, 100 bp, Homo sapiens
gaggaagttacatttcacttcacttcttaataacatagagccctatgagtttgtctctctggaatggctgcaaaagtggttggatgaatcaacacctacc

SEQ ID NO: 443906 - DNA, 75 bp, Homo sapiens
cccaggacaggtggcactctttcaggtaagactgtgccaaaatcccaaacttcagttgaaaaatagcccaccata

SEQ ID NO: 443907 - DNA, 100 bp, Homo sapiens
cacaccctgagcaagaaggagctgaaggagctgatccagaaggagctcaccattggctcgcttgttctcagaacacaaacaaaacctgtgaagagtgcct

SEQ ID NO: 443908 - DNA, 51 bp, Homo sapiens
gtgcccaacatcatcattgcgggtttggatccagctcgagtcaacgtccct

SEQ ID NO: 443909 - DNA, 83 bp, Homo sapiens
gccataaacgcccccaatttcccagctgctaaaggaagaggaaggttgaaatcacaaagattagacacctttttagataggtg

SEQ ID NO: 443910 - DNA, 90 bp, Homo sapiens
cttttccacagggaattgagttgatattcttactgattctccgggctctgcagctcttgacccggctggtattgtctctacagccaattc

SEQ ID NO: 443911 - DNA, 82 bp, Homo sapiens
tgcaaatttacatacgagaatggcttgtgaaatcatgcctctgcaaaggtatatacagagcctgatggatttggtggaattc

SEQ ID NO: 443912 - DNA, 100 bp, Homo sapiens
gcaaaccaggacgtgctggatgacagcgttcagactcctcaagaactacctgaagaagcaggtcacacccctcttcattcacttcagaaataataccaac

SEQ ID NO: 443913 - DNA, 75 bp, Homo sapiens
tgggggtgggcgtcttcacccccaccattgaggcccgcacagcccagtccaatgatccagatcctgatgatggat

SEQ ID NO: 443914 - DNA, 74 bp, Homo sapiens
ttacagccggcgaagaagaagcagtgagaaagatcagtctaaagaaaaggagaagaaagtgaaaaaaacaattc

SEQ ID NO: 443915 - DNA, 75 bp, Homo sapiens
ctgatggtgatggagattttgatgtggatgatgccaaagttttattagcagcaagatgaagagcgacgtcggcag

SEQ ID NO: 443916 - DNA, 100 bp, Homo sapiens
cagaatcctgcactgggaaagagacttatcagatgtagacttcctagatgattcttcaacggagagtttgcttctgagtggggatgaatacaatcaggac

SEQ ID NO: 443917 - DNA, 83 bp, Homo sapiens
cttcaagcccatcttggacttcagaacacctcacaactttgtggctttccttaaagtttcccatgtctcaatggactcctgaa

SEQ ID NO: 443918 - DNA, 97 bp, Homo sapiens
cgatgaccagtgtggttaagacagtgtatagcctgcagcccccctctgcgctgagcggcggccagccggcaggtgtcatggagaaactccagctggg

SEQ ID NO: 443919 - DNA, 100 bp, Homo sapiens
gacttcagaaatatgaatatgttttacatccaagaactacaggctttacttttgtggtagaccgtctaagagaagtgtggcaaaggagcagagaactttg

SEQ ID NO: 443920 - DNA, 100 bp, Homo sapiens
cttacttgtcataataaagatatgctaggaaacattacagtgaataaccctataccttccaatttgaaatcagaagcaaaaaaggctgccaaaatattaa

SEQ ID NO: 443921 - DNA, 100 bp, Homo sapiens
aaacagatgctaaaaatctcttctgaaaacagcaatccagcttctgaaagaccatgcctcatccatgcctaacgcagagtcctggcctgtcgtaggtcag

SEQ ID NO: 443922 - DNA, 78 bp, Homo sapiens
cgcttggttaaaacctgacacttttaacaggtgaaagaaaagatgttgtcccggttaagagtagtttccaccacttgt

SEQ ID NO: 443923 - DNA, 118 bp, Homo sapiens
acccaacatctgtgatgggaactttaacactctagctattcttcgtcgtgagatgtttgttttcaagatcgccaaactgaggcagcaactacaacgcagtaaacagagtagtcgtcac

SEQ ID NO: 443924 - DNA, 100 bp, Homo sapiens
acagcaggaaagctgccatcagctgagcaagtccaccaacagtttctgtgtcccacttcatctttaataagcagatccagtttgctgaccagaagcaaga

SEQ ID NO: 443925 - DNA, 100 bp, Homo sapiens
cttcctcctcctcctccccaccaccaccatctccatcacccaccaacaacaccacaataatccacagccaaggtggctatggaccgccccctgcaggaag

SEQ ID NO: 443926 - DNA, 75 bp, Homo sapiens
tatgtggctcaaatgattgtggtctgcttagtggcctatcttggcttgtttatgctttgtgtctcatatcaggtt

SEQ ID NO: 443927 - DNA, 75 bp, Homo sapiens
tggaaccggatatttaagtacaatgatgtaaagcaattatagatcagtttggtcagagaataatctctgagcatt

SEQ ID NO: 443928 - DNA, 100 bp, Homo sapiens
gggagtcgaagcgagggtctgaagttcacgactactagaaggggaggggagtggaaaggctctcagtgaaaaaggctcttggtgaatttgtcctggtgga

SEQ ID NO: 443929 - DNA, 100 bp, Homo sapiens
tcaagtgtttgagattgcacttaaacggaacttgcctgtgaatttcgagaacccaagcaaacctcactttaatcactacatgtttgaagcaatatgttta

SEQ ID NO: 443930 - DNA, 82 bp, Homo sapiens
gcgagcccgaggacatggagatggaaggaggcagtggagaaggtgacacagcacatccacggcctgtctgggaagaaggatg

SEQ ID NO: 443931 - DNA, 100 bp, Homo sapiens
ctggccgggctgcagttccgggagcaggagaggggaaggcccaccgggagaagctcgagcttgctgcctccttctccttctttggcaacgtcatgtccat

SEQ ID NO: 443932 - DNA, 98 bp, Homo sapiens
aaaatagcagccaggaaccaagaaaacttggggtcaggagagtgctggtattgtgactagtgatgggagttcggtgccaacattcaaatcacacaagg

SEQ ID NO: 443933 - DNA, 87 bp, Homo sapiens
cctcgctccctctgctcttcctcccttcgctcgcaccatgaacccagtgacttgattgtaaaaatttacagagcggaatcatatgct

SEQ ID NO: 443934 - DNA, 50 bp, Homo sapiens
ctgcagtccctcgtccagccacccccagatgatgaggagtctgatgagga

SEQ ID NO: 443935 - DNA, 100 bp, Homo sapiens
gcagtcagctgcagcctctcccaacctgactgcttcacaggtccttccactggaaaaccaaatgaaagaatcaaagcgtttccctcaagcgttgaatatt

SEQ ID NO: 443936 - DNA, 99 bp, Homo sapiens
acggactctggccgcctcagcgtccgccctcaggcccgtggccgctgtccaggagctctgctctcccctccagaccctcaccaggacctagaaaacgcc

SEQ ID NO: 443937 - DNA, 78 bp, Homo sapiens
tgttctcaggactcattattttaacatttgggagaaacacagccagaagcgtggtgatggtggatgaggcacacgaaa

SEQ ID NO: 443938 - DNA, 75 bp, Homo sapiens
cccgccggccgtctccttaacaccgaacaccgcattgaagttgatatcgatgtggagcacggagggaaaagaagc

SEQ ID NO: 443939 - DNA, 90 bp, Homo sapiens
tggctgacgtcgtcctcatctatcaacgtgtcagcgatgtgaagaactgaatgtcatcatgtctggaatcaagcgaaccatcaaagaaac

SEQ ID NO: 443940 - DNA, 100 bp, Homo sapiens
cacaatcccgggttgtccgggtcctgtcaatgtcacgtgacttcatggtcatgacgattttcttcaatgtgagcaggcggtttggctatgttgcctttca

SEQ ID NO: 443941 - DNA, 75 bp, Homo sapiens
cttggaagtccttagctaccaggatgcgttgcacactgacaagaaacagatcagtgttgggttcattggctatcc

SEQ ID NO: 443942 - DNA, 98 bp, Homo sapiens
agggttttctatcagcaccccagtctttacttgaagacaaaaaggaaccattttctcaggttttctgtctcaactggtctctgacaagcctctgactg

SEQ ID NO: 443943 - DNA, 100 bp, Homo sapiens
tccgcctcccaggtccaagcgattctcctgcctcagcctcctgagtagctggcattacagatttcctcgtcctgtgactgtggagcccatggaccagtta

SEQ ID NO: 443944 - DNA, 51 bp, Homo sapiens
ggattccaagtaactcttatttgatggagtcttactctgtcgcccaggctg

SEQ ID NO: 443945 - DNA, 51 bp, Homo sapiens
ggagaaggcttgggctcgcgccgctgaagtgcaaggatgatgctgaaagga

SEQ ID NO: 443946 - DNA, 82 bp, Homo sapiens
tcagcagcgaacggaagctcctggaggtcagaggccctttcatcatcagagtgaagacatttccacctggacacctgaccat

SEQ ID NO: 443947 - DNA, 99 bp, Homo sapiens
ccggcgtcccgggggcgcagggaaggagggcgtccgagtcaacaaccgcttcgagctgggtgacgagaacaagtcagtgcgcgaccgtttcaacgcccg

SEQ ID NO: 443948 - DNA, 100 bp, Homo sapiens
gagccgagtggactaagattcaacaaactatttttgaatgaagatgaaattaaatgcaaccagctcatctgaaggaagcacagttgatgttgttctaccc

SEQ ID NO: 443949 - DNA, 100 bp, Homo sapiens
gttggagagaagccacgaaggctgcaagagaggcgctgttgagttctgcagttgatcatggatccagctccaggtcccacaggggctcttcttccccacg

SEQ ID NO: 443950 - DNA, 50 bp, Homo sapiens
ctggaacaagactcaccatcatacccaccacataaagaagatccctaata

SEQ ID NO: 443951 - DNA, 82 bp, Homo sapiens
cttctgtatgaccagacaaaagtacgtagagaaatcgacactcttaatgaacgtttagctgctgaaggacaagcgattgatg

SEQ ID NO: 443952 - DNA, 75 bp, Homo sapiens
ctgagcctcctcgtctggatcctcactctctccgatactttctcccaagtaaagatgacggcgccttgaggtaag

SEQ ID NO: 443953 - DNA, 101 bp, Homo sapiens
ctcaagacatcacttccacactccaccacctacgaatgctggacttccgtagtgaccagcatctccttggaaacaatgccatctttgaatgtgagagataa

SEQ ID NO: 443954 - DNA, 100 bp, Homo sapiens
ttgccccggtagttgctccaaaacctaagtacaacccatacaaacaacctggaggtgaggggccgttgctccagggagaactgcaaatatcttcatccac

SEQ ID NO: 443955 - DNA, 83 bp, Homo sapiens
atcataaaactttgtaagtggcagaacaaggatttgaagctggcagtctggttccagaatgattcagtggtggctggtggcgg

SEQ ID NO: 443956 - DNA, 100 bp, Homo sapiens
tgcccaggaggaagcaggagcagcccaagcgccttccctcacccaactgggtcctgaagtagctgaaatgcgaaaaaggcagcagtcccaaaatgaagga

SEQ ID NO: 443957 - DNA, 83 bp, Homo sapiens
agtatgggaaagatctaccttctggaagctactactacgtggtgcttggaaagtaatagctcttcaagtctgcaataaaaaat

SEQ ID NO: 443958 - DNA, 75 bp, Homo sapiens
ggtcttccagagcgtgaagatcaagatcggggacggcaaaacagaacagaaaggcggagataaaaagaggggtgt

SEQ ID NO: 443959 - DNA, 100 bp, Homo sapiens
ctggacccggaccggttttggtcctcctccgcctcctcctctctgcatgcgcgtcagagcccgtgccaagaacaagcagcagtcctgaactcgaggtcca

SEQ ID NO: 443960 - DNA, 100 bp, Homo sapiens
accagcggcaattcatggatcgcctggttcgcatgaacatgcccatctccaacgaggacatgactgttcacttcacgtccacgctgatggccctcatccg

SEQ ID NO: 443961 - DNA, 82 bp, Homo sapiens
agcggagcacgggcaaggcggagagtgacggagtcggcgagcccccgcggcgacaggtgagaagccctaccactgcaactgg

SEQ ID NO: 443962 - DNA, 101 bp, Homo sapiens
caggcagctcgccgctccctagcaccttctccagtcgacactctcgcgcccggaggaaaatgtctctctgatcaaggaaattaatgagctccgcagggagc

SEQ ID NO: 443963 - DNA, 80 bp, Homo sapiens
tccacactgcaatgtttttgtggaacatgcaatcatcctcttccagtggtagcgtgtttgggtctggaaacactggaaga

SEQ ID NO: 443964 - DNA, 74 bp, Homo sapiens
atccttctttgataatatttcttgtgatgacaatagatgcatcaaattgcaatttggaggagaggcagcacaag

SEQ ID NO: 443965 - DNA, 74 bp, Homo sapiens
cccattttccagacgaccacgacgaggccggggtcacggaatctggaaacccaggaaaataccaaatccagatt

SEQ ID NO: 443966 - DNA, 75 bp, Homo sapiens
cgcccagaggcgagccctggtggaggaagaggtggccactaacacggacaccagccgaaatgccggaaatgcggt

SEQ ID NO: 443967 - DNA, 75 bp, Homo sapiens
cagccttggtattacagggtcttcatgcactctgtcaagctgagttggaaaatggatataccttatttgattatg

SEQ ID NO: 443968 - DNA, 75 bp, Homo sapiens
ccgggagactggagtcgaaggccgtgaggaggaggaagccaagaatctggtgagcgaagccatcgcagctggcat

SEQ ID NO: 443969 - DNA, 51 bp, Homo sapiens
tcagaggacaacgaagtgttcgggcctgttcacaatgagcttgcattccag

SEQ ID NO: 443970 - DNA, 51 bp, Homo sapiens
cagattcagaggatgacagttgcaaggtcaaagaattgactgtagatccaa

SEQ ID NO: 443971 - DNA, 100 bp, Homo sapiens
ggggaccgcgctcaagaggctgatggccgagtacaaacgcagtagcagaatcccatggtagccaggtgggtgaaggggagcgaggacgttctacctgcct

SEQ ID NO: 443972 - DNA, 100 bp, Homo sapiens
ctcagaaagtcgacccccggaagctcacccggaacttgctcctcagcggagacaatgagctctacccactcagcccaggaaagccatcaccaagtcgggc

SEQ ID NO: 443973 - DNA, 74 bp, Homo sapiens
ttccccacatctacttggaaatctttgggatgctcaatgatatgaagagaaggctactaaagacttggaacgat

SEQ ID NO: 443974 - DNA, 75 bp, Homo sapiens
aggatctggtgtaccaggcgaagctggccgagcaggctgagcgatacgacgaacatccagtcatggataaaaatg

SEQ ID NO: 443975 - DNA, 82 bp, Homo sapiens
aaaagctggcacagaccgccacggtattctaccttgtaaatactgttatttgtatatactgtaaatgatgacatcggtgggc

SEQ ID NO: 443976 - DNA, 82 bp, Homo sapiens
gagtctctgtccgggggcctggctaaggaaaccctattacctccagcccgttttacggagaagacttttactgtgaaattcc

SEQ ID NO: 443977 - DNA, 100 bp, Homo sapiens
tttggactgtgctctcaaactttactttgcctcatttgaggagtgggaacaggcttcggcgaacacaaagcaacgcacctcttgctttttcctccaaagt

SEQ ID NO: 443978 - DNA, 104 bp, Homo sapiens
taagcaaaaaattccagcagatggagtccacaggatcagagtggactttaaggtgcagcagttcctgcggcaagcccagcgggggacagaggaaaaggagagag

SEQ ID NO: 443979 - DNA, 75 bp, Homo sapiens
aatgacagctgtgataaaaaaaaaattcatctgggcggtatctggaacttgaagctgcacacatacatgtaagag

SEQ ID NO: 443980 - DNA, 98 bp, Homo sapiens
aggggcacccgagacagcgcctgggctttttcccgcccgcggttccaccgctctgaaaccgatttctaacagagagtctttgagtgattgcagtatga

SEQ ID NO: 443981 - DNA, 88 bp, Homo sapiens
tccgctggctcagccgcaagtacccgtccatcatagtcaactgcgtggaagagaaggtgatgatggagtcaatgtagaagaagatggg

SEQ ID NO: 443982 - DNA, 100 bp, Homo sapiens
ctgtcaggaggtggcccgagtgtgccccgtgggcttctcgatgacggagacagctgttggcatcaggtgtacagccgtgctggtatagaggactctaaga

SEQ ID NO: 443983 - DNA, 82 bp, Homo sapiens
gaggcggcggccgaggcggcgacggaggaaacagaagatggcgaggaggatggccgagaccagtccaggttggagacccagg

SEQ ID NO: 443984 - DNA, 100 bp, Homo sapiens
aacatacatccataattgtttaaagaatggggagactcctcaagcaggccctgttggaattgaagaagataatggttttgactggatcatctcgtcaaag

SEQ ID NO: 443985 - DNA, 98 bp, Homo sapiens
gggagcgcttcatgtgcaaccttgactgccaggaagagccagattcctgcatcagacaatgcagatcttcgtgaagactctgactggtaagaccatca

SEQ ID NO: 443986 - DNA, 90 bp, Homo sapiens
tgggagtgcgagagctctgcaccaggcaccaggtcctgggctcggacccaactcctggacctttccagcctgtatcaggctgtggccaca

SEQ ID NO: 443987 - DNA, 82 bp, Homo sapiens
ccattgaattctccaacaatggaggccagtggctggtctcaggtgaaagaacttgtcctggacaacagtcggtcgaatgaag

SEQ ID NO: 443988 - DNA, 75 bp, Homo sapiens
cccagaactccggacgtgtgcggcggacaaggtgctgcggatgctgtacgtgtgggcgctctgccgagaccagga

SEQ ID NO: 443989 - DNA, 101 bp, Homo sapiens
ctggagcacaaaagagtctccgcggtggaggtctgcgttgctcttgcttttcctcgctggggtgtacgagaagttggtaagccctccagcctcagccgctg

SEQ ID NO: 443990 - DNA, 75 bp, Homo sapiens
aaaatcaccaaccaaaagattcacctttggatttcatcgcttagagtttcaagaagtttttaaccgaagtgtcat

SEQ ID NO: 443991 - DNA, 100 bp, Homo sapiens
agggaatccgggtgtccctgtacctgcagctgctgcagctgctgcacagaaattaatgcgaacagacagacttgaggtgaactactgagttcttcattat

SEQ ID NO: 443992 - DNA, 82 bp, Homo sapiens
gggaacctgctcaaagccctgggtcgcttggaagaagccaagatggctcagcgacttcttctgaggaggttcctggcctctg

SEQ ID NO: 443993 - DNA, 74 bp, Homo sapiens
caatatgttgagatgtgctattttgacaacacttattcatcttgttcagactgatgctgagaagcactcacagg

SEQ ID NO: 443994 - DNA, 75 bp, Homo sapiens
gtcatcggaagtggtgccttcagcacagtaacaaatgtggcaattattttggatctatcacctgtcatcataact

SEQ ID NO: 443995 - DNA, 100 bp, Homo sapiens
gccaaacatgtgcagctggtggtgagggcttccacaactaccaccactcctttccctatgactactctgccagtgagtaccgctggcacatcaacttcac

SEQ ID NO: 443996 - DNA, 74 bp, Homo sapiens
cgacggcggtggtgacgggcaccgggctcgcggcacagtggagaatttacagtctctctcagtgatgttttatt

SEQ ID NO: 443997 - DNA, 90 bp, Homo sapiens
ggctgtgaaagggtcaaagtctttgaggaatgctcgattgacttggcctctacttcttgttaaggaaattcatctcttgttttatcaggt

SEQ ID NO: 443998 - DNA, 82 bp, Homo sapiens
cacagaaggaaatacccagactgttactacaacctcgggcgtctggtcagaagagatcaattctacagaaatttccagtggt

SEQ ID NO: 443999 - DNA, 74 bp, Homo sapiens
ttgcattggctgctgtgaggcaaataaattggtgatttcggaattgagggtagatatagcacacctatgccttt

SEQ ID NO: 444000 - DNA, 75 bp, Homo sapiens
ctaaaaccacctttgtcaccagaatgaatgaagtgcttcagatttaaatagtggcagatatctacctagcatctc

SEQ ID NO: 444001 - DNA, 51 bp, Homo sapiens
cagggaacggggcatcgcggttccaacggtttggacatatttgactctttt

SEQ ID NO: 444002 - DNA, 75 bp, Homo sapiens
cactggagccccatattttgcagcaatctcagctctcaaagtgcaaccatgtccaagggacctgcagttggtatt

SEQ ID NO: 444003 - DNA, 98 bp, Homo sapiens
caacctctgcctcccgggttcaagcgattctcctgcctcagcctccacagtagttgggattacaggaaagtgggggctcagcaagaactgattaccga

SEQ ID NO: 444004 - DNA, 83 bp, Homo sapiens
aagaaatccgcagaagcttattaaagttaaggtgtttaagatagaagtgctaatgaatggaagaaaacattttgttgaaaaga

SEQ ID NO: 444005 - DNA, 85 bp, Homo sapiens
acagggggtagaacaagtggtactaggattatacattgtaagaggtgacaacgtagacgagttgtactgctgtcacaggaaatgg

SEQ ID NO: 444006 - DNA, 75 bp, Homo sapiens
cctctcaggacaacccagatgtgcaacaaagtgcgatggaatactcccccagttgcaagaggcgcaggaccgtgg

SEQ ID NO: 444007 - DNA, 50 bp, Homo sapiens
tcttctgagatctatggcctaatggataaagtagccaatatttggtgcag

SEQ ID NO: 444008 - DNA, 51 bp, Homo sapiens
acaattatcaccgggtatttagacattaacctctctggccaagctaatgaa

SEQ ID NO: 444009 - DNA, 98 bp, Homo sapiens
atcttagcaggcatttatctttctttgagtctaaagaatcccttgaagaaagtattggcaagagagaagaagaaggaggttcctgctgtgccagaaac

SEQ ID NO: 444010 - DNA, 101 bp, Homo sapiens
gctgaggagaaggaggagcgggccgtggaggcttcgccgcctaggtcacagatgtgacattgatgtgtccactgaagccatgtatgctgcaaccagacgag

SEQ ID NO: 444011 - DNA, 50 bp, Homo sapiens
gttgtcctcaattgcgtaggaccagactagaaggctgggaaaaaaggctt

SEQ ID NO: 444012 - DNA, 103 bp, Homo sapiens
aagttcggttcccactgatggctcagagatctggttggagttggagggtgagagaaaatgaattctaatttacctgcagagaacttaaccattgcagtcaata

SEQ ID NO: 444013 - DNA, 100 bp, Homo sapiens
ctgcacctaactgccaaccagctggagtccatccggagcggcatgttccggggtctggatggcttgaggaccctccaatggagatcttcgtggatgatga

SEQ ID NO: 444014 - DNA, 80 bp, Homo sapiens
ggctgccggtcgacgaccgccccgcgtcatgcggctcctcggctggtgactatgtatagccaggacaggcatgttgatgt

SEQ ID NO: 444015 - DNA, 100 bp, Homo sapiens
gggagagcgggcagccttccaggtggacagtatttgactacagtcattccttatgagaaaaaaaacggaccaccgtctgttgaagatcttcaaatattaa

SEQ ID NO: 444016 - DNA, 58 bp, Homo sapiens
gggagccaagtcacttaaaagtatcaggatgagcacaagcctgggagatggcagtgat

SEQ ID NO: 444017 - DNA, 100 bp, Homo sapiens
agccgctgaggacaagtgcaagcagttgctggatttgtgcgactcggtgaaggatgatgcccggagggtgatctcgacctttaacattccacacacctac

SEQ ID NO: 444018 - DNA, 100 bp, Homo sapiens
tttgttgaaatgatccaaggagttgctgcttttccaggaatgaaagacattcaggatcaacttgaacgaatatttctgggcaagtgtccagagaatggct

SEQ ID NO: 444019 - DNA, 100 bp, Homo sapiens
ctgtacagaaggtatttctccactgtgccatctgcagagtgaaactgactaggagtactacatagactgcaatcaggatgagtgaaaaattgatttgcag

SEQ ID NO: 444020 - DNA, 83 bp, Homo sapiens
cgcagaagtcgcgtgtctaggtgagtcgcggtgggtcctcgcttgcagttcagcgaccacgggcagctgtgcggagggtagtg

SEQ ID NO: 444021 - DNA, 80 bp, Homo sapiens
gacagtgacgacgacagcgtcctcgaagccaccagctcccgggacccgctcagcgatgaagccagttgagggaagttctc

SEQ ID NO: 444022 - DNA, 75 bp, Homo sapiens
agcagacaagccctgggccaggttaacacctgcagacaagaacacccatctcggctttctcgcaagataacatct

SEQ ID NO: 444023 - DNA, 83 bp, Homo sapiens
agtctcgactttcctgggctcagctaatgggaatgacagcaagaaatttaaacgagatagacctccctgttcgccttcccgtg

SEQ ID NO: 444024 - DNA, 100 bp, Homo sapiens
cagatcctctgctcattgccatgaaggaactcaagacaaccctccatatgataagggagccttcagaatcgaaatcaactttccagcagagtacccattc

SEQ ID NO: 444025 - DNA, 101 bp, Homo sapiens
ccgccgcgcccgggatgtattcgtccccgctctgcctcacccaggtcaccttccgcaaccctgtcattgagaggattcctcggctccgacggcagaagaaa

SEQ ID NO: 444026 - DNA, 75 bp, Homo sapiens
ggaaaggaagcattcagggaatttaggtgtagccagaagaaaatcaggaatgtatcctgtcaggtataatgtcag

SEQ ID NO: 444027 - DNA, 75 bp, Homo sapiens
caggagtgcatcaagtgccacatcaacgtgtatccacacaagcagtcctcctccgcctcctcctctctgcatgcg

SEQ ID NO: 444028 - DNA, 90 bp, Homo sapiens
caaaaggactgaagtggggttaagagtgttgacagctcttctaccacaagcagtgcttctccaatgcccaacagttatgatgccctggaa

SEQ ID NO: 444029 - DNA, 90 bp, Homo sapiens
gatggcctaaatgaaaatgctgttgtatgcagtgaaagagttgctgaactacaaagaaaggacgccaggaaagcatgtgcagatgcaact

SEQ ID NO: 444030 - DNA, 100 bp, Homo sapiens
gggcaagcacgggaagaagcagctggacccgctcaccatctacggcatccggtatgacgcactctggtgcagggtcaccaagccggtgcctgcgggggga

SEQ ID NO: 444031 - DNA, 75 bp, Homo sapiens
tgccacgtccatcttctttgaatctatgccctacaagagagcgcctgctcgctgtgcccccgggttatgacgacc

SEQ ID NO: 444032 - DNA, 100 bp, Homo sapiens
ccagttcatgctgcccacatctcatccaaacagggtccccagccccaccccagccccaaaggaggctgttcgagagggacgtcctccggagccaacccca

SEQ ID NO: 444033 - DNA, 73 bp, Homo sapiens
atttgcagcaccatcaacagatgcccctgataaaggatacgttgattgatctggatactattgatgtaagcaa

SEQ ID NO: 444034 - DNA, 74 bp, Homo sapiens
gtcttcaatgacttccttatgctctctaatacccagttcatagagaataagtcagcatccggtattgtagctgt

SEQ ID NO: 444035 - DNA, 90 bp, Homo sapiens
ctctgatgagtgcaatgacaacatcatcttctcagaaggagcccttatattatttggagctatcgcattgaatttggtgccttctagtat

SEQ ID NO: 444036 - DNA, 100 bp, Homo sapiens
gaagcatgtgatggtgcccatgctgttgttatttgcactgagtgggacatgtttaaggccctgtctctgcccctggtggtcatcgtccatggcaaccaag

SEQ ID NO: 444037 - DNA, 98 bp, Homo sapiens
acagcccatgatcaagaaagctcgcaaagtcttcatccctgatgacctgaaggtgtcttataagactttgacacttcctgttttgtctgaaaaaaatg

SEQ ID NO: 444038 - DNA, 75 bp, Homo sapiens
ccctgagaaccgtttacttccagaagattggtggagcttgatctgaagggaactgactcttttttggagtaaact

SEQ ID NO: 444039 - DNA, 98 bp, Homo sapiens
ccagctctgcgcgtaccgcgctctttggaaacgaattttgatattcactgatggactccaaagaatcattaactcctggtagagaagaaaaccccagc

SEQ ID NO: 444040 - DNA, 100 bp, Homo sapiens
ggaaattaactatctgtacttataaggaggctctgtcggtggtgagcgacgaccagtccctctttgactcagcgtacggagcggcagcccatctccccaa

SEQ ID NO: 444041 - DNA, 90 bp, Homo sapiens
cagaagataaacgaggggctggaacacctcgccaaagcagagaaataatggcaccaaaagcgaaggaagctcctgctcatcctaaagccg

SEQ ID NO: 444042 - DNA, 83 bp, Homo sapiens
ggaagtctcagaacgagtgacacttcacatttgtgcttctacaaaaaacacggatgataccatcggggaccttaagaagctga

SEQ ID NO: 444043 - DNA, 82 bp, Homo sapiens
gacgcccgcgcgacgagcaggtggcggcggctgcagggggatatgagactttctactcggaatatcctgagtgttgcgtgga

SEQ ID NO: 444044 - DNA, 75 bp, Homo sapiens
ggatttgttaaggattccaagtaactcttatttgctagtaactgcacagacccatctgaaagccctttgatagat

SEQ ID NO: 444045 - DNA, 80 bp, Homo sapiens
gacagccgcgcgctgagggtctcggggcgggcgccgcgggacctctccgggccatgggctgcaagatcaaggccctgcgg

SEQ ID NO: 444046 - DNA, 75 bp, Homo sapiens
gtgatgatagctttggagacaggtgtgaatctccagaagcttctggaagctggaaactttatctgtcaagccctg

SEQ ID NO: 444047 - DNA, 85 bp, Homo sapiens
tggggactcaatgtgtgggcaacaagtaagactttgaccccgacgcaggcttcagtgattgccgcggatcagaagcctgagcact

SEQ ID NO: 444048 - DNA, 100 bp, Homo sapiens
cgaaaacatggtggccaaagtggatgaggtgaagtccacaatcaagttccaaatgaagaaggttctacttagccaaacacagtggtcgacagctcacact

SEQ ID NO: 444049 - DNA, 101 bp, Homo sapiens
taactcccgcaggatctcagggcctgccgccccattatgatgatgtcgagactgttggtggtggtgctgtgcaggagagagcgcctgagctggatggtggt

SEQ ID NO: 444050 - DNA, 75 bp, Homo sapiens
ccgagcggagaggagatgcacacggcactcgagtgtgaggctcttgcagccaatgccggaacaggatttgctgtt

SEQ ID NO: 444051 - DNA, 98 bp, Homo sapiens
agcagccttctgggaggtgaaggacacttctcaaaggatgtgcacttgccacacaattatcatattgtttacagctcctggatgaaagagcatggagg

SEQ ID NO: 444052 - DNA, 122 bp, Homo sapiens
acatcttggaggtgaggacgtgcctcgtggtctaaagcttcggcacaagggcccaactggaattccacttacggcaatgctggggtgaaaacaacacggctagaagctcattctgaaatggg

SEQ ID NO: 444053 - DNA, 143 bp, Homo sapiens
cagagtcttcaggagcttcttgattttaaggacaaaagtgctgaggatgctaaagctatttatgaatttcagaagaaagtggtagcttcctttccaagaacagttctgagcacaggaatggataaccggtacctggtgttggc

SEQ ID NO: 444054 - DNA, 73 bp, Homo sapiens
ggcagccgaggccgcgaactgcatcatggagatccagagacaatggccccgatgggatggagcccgaaggcgt

SEQ ID NO: 444055 - DNA, 96 bp, Homo sapiens
cggcgggcccggagcagccgccgccgcagcgcgaacatggacgccgtcaacgccttcaaccaggagtgttgttacagatcttataacagtcggttt

SEQ ID NO: 444056 - DNA, 100 bp, Homo sapiens
ctccataaagagaaggttgtttgtattgctgctggactgaggcatgcagtagctgctacaggtatactcccacctcccagcttcgcacgcaagaagatgc

SEQ ID NO: 444057 - DNA, 100 bp, Homo sapiens
tcggtcatcctgaacttggagcagcaagtgcgagggctgcgctggcctcggcacaccagtgccacccgctgccccggacgctgagcgtcctgaagagcac

SEQ ID NO: 444058 - DNA, 100 bp, Homo sapiens
tggacagcgtgcggtctgggccttttgggcagcttttccggcctgacaacttcatctttggtgactctcctattccatctgtttcttcgggatcatcttc

SEQ ID NO: 444059 - DNA, 83 bp, Homo sapiens
atctctctcatctcgctcggctgcgggaaatcgggctgaagcgactgagtccgcgatggagttgcctttccccatcttcctgg

SEQ ID NO: 444060 - DNA, 100 bp, Homo sapiens
atggggccctctccatttctcctctcagcagaagtccaggttcccatgcagaaattgtatgctgctatgcatgaacctgatggagtggccggagtcagtg

SEQ ID NO: 444061 - DNA, 75 bp, Homo sapiens
gaggaagaagaggacgacgacgacgaggaagaggaggtttctgagagtgctgcagcagctcccagtccagtgcta

SEQ ID NO: 444062 - DNA, 75 bp, Homo sapiens
ctcgatccgcctgcctgcgcacctgcgccgttaattaaggaaaagttgagccagggcgtgaccctcgtcgtggac

SEQ ID NO: 444063 - DNA, 110 bp, Homo sapiens
cgacacagcctggatctcctccatcctgctggccatgctctacgggacagacaatgcagatcttcgtgaagactctgactggtaagaccatcaccctcgaggttgagccc

SEQ ID NO: 444064 - DNA, 99 bp, Homo sapiens
ctctggagtagctgggattacagttgatggagaaccttgtgacctgtctttgaatataacctggtatctgaaaagcgctgattgttacaatgaaatcta

SEQ ID NO: 444065 - DNA, 78 bp, Homo sapiens
gcaggcctgctcctccgtttgcaaggaatggttttagggaagactgttgccggatgacaaggctgtcactattgttct

SEQ ID NO: 444066 - DNA, 100 bp, Homo sapiens
tgtgaagaagaatttcgatctccgccctggggtcattgtcagcttctcagatgaccaagatggtgctgcagatggtgctgaggatggagaacccaccaag

SEQ ID NO: 444067 - DNA, 98 bp, Homo sapiens
caatcctaccatgtcagccttcccagtagctggaactacagtgacctcttccatcccagtatttgacctccaggatggtggacggaaaatatgtccac

SEQ ID NO: 444068 - DNA, 75 bp, Homo sapiens
tacaattttttttcaagaactgccgtcttctttgcctgcactaatggaagaactgaaccccattattgttacgcc

SEQ ID NO: 444069 - DNA, 97 bp, Homo sapiens
agtgagggatacttgtacacctcgtcattgaaattatgagactatcattcaaatggaagcattatagttcttcggaaccattatgatctcaaaacga

SEQ ID NO: 444070 - DNA, 82 bp, Homo sapiens
tgatgacctcacatggtgtggtgaattcaacacttccaattgagaacctagatccccgaggaattcagctatcagctctctt

SEQ ID NO: 444071 - DNA, 100 bp, Homo sapiens
aaggacagcctttccgcgcgggactccggggcgccacgggggccatgtaagcagctgagtcagtgctgattctctcaaatagagcttgaaggataaatct

SEQ ID NO: 444072 - DNA, 90 bp, Homo sapiens
gcgcccgggccgccacgctctcgggctctgcctcgggaatggcatttactttacaagaacgacaaatgcttggtcttcaaggacttctac

SEQ ID NO: 444073 - DNA, 73 bp, Homo sapiens
gggagtaggagactcagaatcgaatctcttctccctccccttcttgcctaccgtatgtgaacgggagctgtgt

SEQ ID NO: 444074 - DNA, 100 bp, Homo sapiens
cagacaatgccggtggaggaatttgtggctggctggatctctgggcggaccccacagccagactcagcactcattcgccaggccttggctgagcgctgga

SEQ ID NO: 444075 - DNA, 51 bp, Homo sapiens
cgcggggctgccggagaccggccgcatggatttcttcctgaccactatgcc

SEQ ID NO: 444076 - DNA, 80 bp, Homo sapiens
gctgtctactggaacagcagcaaccccagaacggtggcagccgaagttaggaagcagatctccggacaatatagtggttc

SEQ ID NO: 444077 - DNA, 100 bp, Homo sapiens
gccggaggatgcggcgcggggctgcgctcgctacgtccgctgctgctgcccggctcgggcctgagcgccgagcaggtaagaatgattgatgttggctgat

SEQ ID NO: 444078 - DNA, 75 bp, Homo sapiens
ccatgctcgccatcttcatcctggtgatggcaaatgtcgtggacatgggacttgtcgctgatcaaggtgattgac

SEQ ID NO: 444079 - DNA, 112 bp, Homo sapiens
acctgcgcgaagctggccaaagcctgcccagacggctcacctgtgcgggatggaacaaaagtttcaggtttagctgtgcctcccagtgactataatgacaaggaagctgtaa

SEQ ID NO: 444080 - DNA, 88 bp, Homo sapiens
agcattcaagacttcaaactggtggtcattgggactcccacacttaaacaaagaaaggaaattctgcaagtgattacctcgaagatgc

SEQ ID NO: 444081 - DNA, 75 bp, Homo sapiens
ggaaattaattgctatcaatgcgaatgatcctgaagcctcaaagtttcatgtgaatgatttgggaggggacttca

SEQ ID NO: 444082 - DNA, 88 bp, Homo sapiens
tttacattagcagatatactattgtactatggacttcatcgctttatatcactgtgtgcccagtattctgcagacaaacgagaagatg

SEQ ID NO: 444083 - DNA, 78 bp, Homo sapiens
acttctagcaagtgcaccaacagaaaaacaacgcctggaatgggtggcatggagaaatcgttgtcaaaacagagatgt

SEQ ID NO: 444084 - DNA, 82 bp, Homo sapiens
gaacatcctctttaacccagttcccaccctcacagtcagccctgggcgctgcctatggcacagccaagagcggtaccggcat

SEQ ID NO: 444085 - DNA, 83 bp, Homo sapiens
atacagaatcttgaatcagaaattgagaagctggtgtgcaactgaggaacatggctcaagaaactaatcacagccaagtgcct

SEQ ID NO: 444086 - DNA, 73 bp, Homo sapiens
tggggccggacaagaacctgaccgagagggagagtgctgcagcagctcccagtccagtgctaggaaacattcc

SEQ ID NO: 444087 - DNA, 74 bp, Homo sapiens
gtgacaccaagataagtaacgagctcgaggccatgagcagatataccagcccagtgaacccagctgtcttcccc

SEQ ID NO: 444088 - DNA, 98 bp, Homo sapiens
gcctggaccctgcccagcagaatttgtatagagatgtgatgttggagaactacagaaacctggtctccctaggtaatgcatgtccatggtacacaaat

SEQ ID NO: 444089 - DNA, 100 bp, Homo sapiens
tttgcccttaccatattggtcatttctcccttgttggtttgggatttgaagaacacgtagttcttccaacgtttattcttgaaagaagatctcttttaga

SEQ ID NO: 444090 - DNA, 74 bp, Homo sapiens
ttcctgtatgaagcggttggcaccactgaagtgaccgaatgagaaactaattctgaagcaagcccttatagttg

SEQ ID NO: 444091 - DNA, 100 bp, Homo sapiens
ccccctttgggatgctgggaatggtggacccccaaaagtacaagggcatatttaacggattctcagttacacttaaagaggatggtgttcgtggtttggc

SEQ ID NO: 444092 - DNA, 98 bp, Homo sapiens
tagcggcggcgggagcggcgccgagaggccgtgcgggacgcgggcgccaggaccggccgaacgcagagatgatatcatcaagttgaatcgaaaggaag

SEQ ID NO: 444093 - DNA, 83 bp, Homo sapiens
ggccccgatggccccgaccgcgtgctggagctcttcgacccacccaaggaatgggtaccacagaccatgtcatcgtcctggcg

SEQ ID NO: 444094 - DNA, 75 bp, Homo sapiens
cctgctgctgactggcaagctgacaccggtgggaacctgcactctgtattctgtccgcttgactcacggcgactt

SEQ ID NO: 444095 - DNA, 76 bp, Homo sapiens
ggacatgtgcagaacagattgttgccaaaattgaagaagtatttccgggaccatgtctggagaactaccaccaaac

SEQ ID NO: 444096 - DNA, 97 bp, Homo sapiens
taatcatctttattatctcattgaagcttggaattacatagctggaaaggatcttacagatccttgatatccctgatgggcaccgggccccagctcc

SEQ ID NO: 444097 - DNA, 90 bp, Homo sapiens
ggagacttttggggggaaactaggtcgatggtcggcggcgcccggatgggcagctgaggtggattggtgatagaaaagcagtgctttgat

SEQ ID NO: 444098 - DNA, 90 bp, Homo sapiens
gttgtccatgaccctgaaggtccaggagtacccgaccctcaagggggggccctcagcctcttggccttgaacgggctgttcatcttgatt

SEQ ID NO: 444099 - DNA, 74 bp, Homo sapiens
tcccttctcggtgaacgttcagctgctgcaggaccacggggaaattgccaagacttcttggacacttaatgatt

SEQ ID NO: 444100 - DNA, 82 bp, Homo sapiens
gcagaaggaggagttactagtgaagattatcgcacgtttttacagcgggagatacagatgacccaccaagaattactcagaa

SEQ ID NO: 444101 - DNA, 97 bp, Homo sapiens
tttaaatgcagcatctgcgatgtgaggaaaggcacctccaccaggaggaaggctgaacaaggacctgcgacattttctcaatcagcgattccagaag

SEQ ID NO: 444102 - DNA, 75 bp, Homo sapiens
gggagttcaaggaggtgctgaagagcgaggagattttcagctgaactctcatctctcaacactggcaaatattca

SEQ ID NO: 444103 - DNA, 127 bp, Homo sapiens
cagctcggcgcggagcgtcctgtcaggcggcggccgagggcgtcgcggactctccccgcgatgatgccgtcgcaatgtatctgctgagcaaaaagatgaaaacaaagaagcaaagcctcgatcccta

SEQ ID NO: 444104 - DNA, 74 bp, Homo sapiens
gacaatctcctcagggaaggggcagcacaccgcagcaatggcgctgagttcctctgctggagttcatcctgcta

SEQ ID NO: 444105 - DNA, 100 bp, Homo sapiens
cccagactggtccatccccatcttggactttgtggaacagaaatgtgaaggtgaaatactttggacgtgacccagccgatggaagaatgaggctttctcg

SEQ ID NO: 444106 - DNA, 74 bp, Homo sapiens
gggccgggatcacattctgattgatagcagtgagattcacttcaaagtgaaaatgacaacacatctcaagaaac

SEQ ID NO: 444107 - DNA, 100 bp, Homo sapiens
agtgacggcagccgagctgcaggcttgaagaaaatttgcctacacgttgtggattttgtcatataccatatgatgaactgaatatgccatttccagctca

SEQ ID NO: 444108 - DNA, 75 bp, Homo sapiens
ggttaaaccatgttaaggaggattttacagaggggtgttctaaggatacattttattgaagctcaggatcttcag

SEQ ID NO: 444109 - DNA, 76 bp, Homo sapiens
aactaaagccccacatttgcagctcattgaaggaaagatggggtcgaggatttggtcttttgggttccatttttgg

SEQ ID NO: 444110 - DNA, 74 bp, Homo sapiens
aattaaccagagaaggtgaaacgatcatcgagctaaaatatcgtgttgatttgctatgggatcatttatggaat

SEQ ID NO: 444111 - DNA, 75 bp, Homo sapiens
ttggacaacatgtcccaacattacatcccaatcattcatcgagatataaaacctgagaatattttagtatcccag

SEQ ID NO: 444112 - DNA, 99 bp, Homo sapiens
gaaggatatcgacgtcgtgatccagaagtccagagctgaggactgcctgtttgcaggtcattcactggaactcccccaagaagctccgggtgaagaaca

SEQ ID NO: 444113 - DNA, 100 bp, Homo sapiens
ctgacccgggaagtcggggtctccttcgccttctgtctttctgcgtcctactagcaggagcgtcgctggattttctctgagacaagcccacccgtccagc

SEQ ID NO: 444114 - DNA, 96 bp, Homo sapiens
ggagaatgggtaccgatccctctgtgaacagagagctggcggtcaccatggcaatgcgggagctggtggaggccgaatgcgggggtgccaacccgc

SEQ ID NO: 444115 - DNA, 100 bp, Homo sapiens
aaaactcagtgagacacaatttatcattgaataagtgttttaagaaagtggacaaagagaggagtcaggagtcagaaataccatcagaggaggggtactg

SEQ ID NO: 444116 - DNA, 89 bp, Homo sapiens
gcgccggcccggactcggcgggcatcgccctctacagccatatcaatgatgtcaaacggctgaaacctggctacttagaagctactgtg

SEQ ID NO: 444117 - DNA, 74 bp, Homo sapiens
ggccgagcagttcctggatgactccacagccctgtacactttttccctcaacaccttacactaagtcaaagcgt

SEQ ID NO: 444118 - DNA, 90 bp, Homo sapiens
atgacaaccagaagacatgagctaaggcccctggccccaacatggcccgtcgctctcagagctcctcgcagggggacaacccactggcac

SEQ ID NO: 444119 - DNA, 90 bp, Homo sapiens
tgggagtctccgcgtcccgctcgctgggagagaggtacctctccttttccctctccctttccctaaggctgaccggttccctgatgtgtt

SEQ ID NO: 444120 - DNA, 100 bp, Homo sapiens
ttatgaaccagtgtatcccaagcacgtctgagaatggtggatgtggtggagaaagaagatgtgaatgaagccatcaggctaatggagatgtcaaaggact

SEQ ID NO: 444121 - DNA, 75 bp, Homo sapiens
ctcttctccctgcttaacgagaaccatagggtgatcagcccatgacctaaacctccagacaaaataaaacggaaa

SEQ ID NO: 444122 - DNA, 75 bp, Homo sapiens
tcggatctgctggacgaggtcttcttcaacagcgaggtggacgagaaagtgttggaatcgaagcctcttaaaatg

SEQ ID NO: 444123 - DNA, 100 bp, Homo sapiens
caatcggcggcaacctggcgggggcaccggccctgatggcggccttctgatctgtttaccacgtgagcaagcagctcggttctgtgcagagataaagtcc

SEQ ID NO: 444124 - DNA, 51 bp, Homo sapiens
gtgaactgtgaacagaagcaaggttactaaaaaaagggttgcaaacaaaaa

SEQ ID NO: 444125 - DNA, 82 bp, Homo sapiens
ccgcaaccattgacgccatgtcgggttattcgagtgaccgagaccgcggccgggaccgaggatcatgatgctgccgccaccg

SEQ ID NO: 444126 - DNA, 75 bp, Homo sapiens
caagcgcagggggacggggaccagcagctgtcgccgccgctctcaggaggcaaaaccttcaactgaggacttggg

SEQ ID NO: 444127 - DNA, 100 bp, Homo sapiens
gcggatgaggaccggagcggaaaaccttctgaagaagaaggtagataatgactataatgcccttcgagaaagactcagcaccttgcctgataaattgtct

SEQ ID NO: 444128 - DNA, 90 bp, Homo sapiens
gtgacgactgttgacctgaaaaggacggcccccaagttacatgaactacctgctagactcacaccccagcaaaaatattgatgtccccag

SEQ ID NO: 444129 - DNA, 90 bp, Homo sapiens
gcaacagtacaagttctctagacaggtgttttcctcatacactggaaaggaagagattcatgaagcagactcaatgatgaggcacggcgg

SEQ ID NO: 444130 - DNA, 100 bp, Homo sapiens
agcgcccacttctttgagtttctcaccaaggagctagccctgggccaggaccggtggacccaagtggagagattgtggaactggcgaaaggtgcatgtcc

SEQ ID NO: 444131 - DNA, 100 bp, Homo sapiens
tctgatcaccaaagaggaagcctctggaagttctgtcacagctgaggaagccaaaaagtttcagcatcaggcaagtggctggatggtattcgaaaatggt

SEQ ID NO: 444132 - DNA, 82 bp, Homo sapiens
gtctacccacaggaccccaagcagaaggaggtgagagtgattttccagtgattgctttggcctgtacaaccagagaacagga

SEQ ID NO: 444133 - DNA, 96 bp, Homo sapiens
aggagaccaggaaaatggccacagggctcctgagagccaaaaaagagtgttttccaagcagtgaagcacttgccgtgttgaactgaatgcactact

SEQ ID NO: 444134 - DNA, 89 bp, Homo sapiens
agccgatgcaccgagtccagcccaggaaaatggagaggaactgatgaggagtttcaacagagacaggcggattttttgtgccattctct

SEQ ID NO: 444135 - DNA, 75 bp, Homo sapiens
tcctgcaatgtggaaaacttgcagagaagttcgtgagcacaaccctccggcccacactgatgccctaccccgagc

SEQ ID NO: 444136 - DNA, 90 bp, Homo sapiens
ccaaaagagccaaactcagctcgcccggtttctcggcgaatgacagcacagacttgcacacctacccctgtggagcgtgcaccctataag

SEQ ID NO: 444137 - DNA, 96 bp, Homo sapiens
tcaagctaaccaggcgtccgctacttcagaagagtgtactgtcgcatggggagtctgtaacgatgctcgtcagaagttccgctctgttctggttga

SEQ ID NO: 444138 - DNA, 100 bp, Homo sapiens
cttggaagaaggtaccgaggaaacgtcggaaactttagagaagttaagagaagaattagctatcaaatccggccagcttacagtgctctcggatcagcaa

SEQ ID NO: 444139 - DNA, 75 bp, Homo sapiens
cacgcttcagatcggagaaagttgctaatcagagaagcggcgttctggaggtggcctcaaggggaaggtatatca

SEQ ID NO: 444140 - DNA, 50 bp, Homo sapiens
gcaactctggatgggattgcaaaatgggcttatttcaaaacctttgtccc

SEQ ID NO: 444141 - DNA, 90 bp, Homo sapiens
cgcccggcccggagcccccagcgcagcggccgcgacagcaccagttgcccttgaagcagaaaacagaggtgaaatgaaactagctctcca

SEQ ID NO: 444142 - DNA, 82 bp, Homo sapiens
cggtcccggcgcccggcgagggcgcgcggctggtgtccgccccgcccgaaagataccatgctgtgaagtccaggccacatgg

SEQ ID NO: 444143 - DNA, 103 bp, Homo sapiens
cccgccaggcaccgtgaaggctgaggagcaccagcggcagaacatcaacagctttgtccagggatctgaaaccactttgcagtcgacatactcggataccagc

SEQ ID NO: 444144 - DNA, 82 bp, Homo sapiens
gaacgggtccacgttcgtgctacagaagaagggcatcgtgcgtgccaagcggcgagacttcccaagtaagaagcggaagagg

SEQ ID NO: 444145 - DNA, 100 bp, Homo sapiens
ctcagagaaaataacttgactgaattacacaaggattcatttgaaggcctgctatccctccagtatttgcactggtgaggtggattgatgatgaatcttc

SEQ ID NO: 444146 - DNA, 98 bp, Homo sapiens
cgacgtcaaggtccacagggcacgcaagaccatgccgaagtccgtcgtgggcctgggagagctggtgacggcctccaaggccatcattgaaaaggagt

SEQ ID NO: 444147 - DNA, 100 bp, Homo sapiens
ccctgttcatcaggaacgtcgcggacgccaccagttggttgaatctggcgatgtggaacccatggatatggagggctgactatatacaccatgttttttc

SEQ ID NO: 444148 - DNA, 83 bp, Homo sapiens
gctagcatctctcgggagccgcaaggcgagagctgcaaagtatatttgccttccctccatgatctccaacactatccgataaa

SEQ ID NO: 444149 - DNA, 100 bp, Homo sapiens
cccggattgcccttgctcgtgctgtctaccaggcatttttagatgaattcactaactggtcaagaataaatcccaacaaggccaggattcccatggcagg

SEQ ID NO: 444150 - DNA, 100 bp, Homo sapiens
cacctgacggcgtgaccgacccgagccgggttacacatcattttggaatgactgtatatcatctggattacgtggctgtatgttaattgaattagcattg

SEQ ID NO: 444151 - DNA, 76 bp, Homo sapiens
cactaatcaccagaacaaaatgtgcaggaaagaccacagcaagattctttcattcgtctcctcctagcctggggga

SEQ ID NO: 444152 - DNA, 90 bp, Homo sapiens
cttttgtccctttgcctcatcccaggttgccttggaaaatgccaacgccgtgtctgaagaccaagttttacaggaaaactccagtgattt

SEQ ID NO: 444153 - DNA, 100 bp, Homo sapiens
ctcgtgaaggaaggaggcagctatggcttctctctgaaaactgtccaaggtgcagcagtaccgcgtcgccatgactgccaaggactgctccatcatgatt

SEQ ID NO: 444154 - DNA, 100 bp, Homo sapiens
tccaaacagctggctgtggatcaacttttttcagagaccttggcgataaagaagtggaggagtgtcaacagtcagaaaatgcacctgcagccggatctgg

SEQ ID NO: 444155 - DNA, 100 bp, Homo sapiens
cagctacatcacagccctgttaaaggatggctttggctttgcagacagcacagtcttacaggaagcacaagcctatgcagacgacaacagtttgctgttc

SEQ ID NO: 444156 - DNA, 71 bp, Homo sapiens
tgcctgaaggctggttggggtggtgaggcccgaggcagggccacccgttcatcgtgcagttcaatgatgga

SEQ ID NO: 444157 - DNA, 51 bp, Homo sapiens
gtgctctttgggcctcctctctcatccagagctgctgttggcggattgtac

SEQ ID NO: 444158 - DNA, 100 bp, Homo sapiens
acccgaccaccggagaattcctggggcgcaccgccaagagctggggtccgagtggacagatgaattaaacacgtacagagtggaagcagcttggaaattg

SEQ ID NO: 444159 - DNA, 76 bp, Homo sapiens
ccgacctcccatggcaatttttgagttgttggattacatagtcaacgagggtcctggaaagccactggttcgtgtg

SEQ ID NO: 444160 - DNA, 82 bp, Homo sapiens
cagagagggaagagattcagccagcacactcctcgcgagcaaggtcctccagcagcctgacctgagtgggttagtgatccag

SEQ ID NO: 444161 - DNA, 83 bp, Homo sapiens
gttgttgtctcggcagcgcccgcggagacgtgaagagggctcattgtcatccccaagccaggccagttctccaggtggaactg

SEQ ID NO: 444162 - DNA, 50 bp, Homo sapiens
ctcatgagtgggtcaagtgtattgctaagacgcaaacatgcagatctttg

SEQ ID NO: 444163 - DNA, 118 bp, Homo sapiens
aagatggcggacggcgtggaccacatagacatttacgcggatgtcggcgaagagttcaaccaggttaattatagaaaatgccaagtaggaaatttgccgatggtgaagtggtaagagg

SEQ ID NO: 444164 - DNA, 74 bp, Homo sapiens
gtacgtgtcaaggtgacccctgtccgccatccggcaggctggaagaagccgctttctgaaacaaagactcattt

SEQ ID NO: 444165 - DNA, 100 bp, Homo sapiens
ccccggctttggtgggcctgtgttttcctggagggaccaagctgtgctgcggcaggacggctgctggagccagttctgcttctcggcaaggagcgatttg

SEQ ID NO: 444166 - DNA, 80 bp, Homo sapiens
acagggtattgagaagctggtgttgatcaacaaatcaggggcagctgcaatgactctccgcacggtattattgtcattgc

SEQ ID NO: 444167 - DNA, 51 bp, Homo sapiens
cggccaagccatgctcggccccagactctcagcgttctcatctctcttcct

SEQ ID NO: 444168 - DNA, 90 bp, Homo sapiens
gggaggccattggctctatggaaaacactggtcacgtgttgctgcttgagccctttgaaagcatttttactgtttgccggaacagcgcac

SEQ ID NO: 444169 - DNA, 90 bp, Homo sapiens
caggacccgctttctaccattaaggcttcaacggaccacaccaaaatgccatctcaaatggaacacgccatggaaaccatgatgtttaca

SEQ ID NO: 444170 - DNA, 100 bp, Homo sapiens
tctatgagtggaaaggtgaccaagcccaaagaggagaaagatgcttctaaggagcagcccgacggccatggaggctgaagagacgatggaatgccttcag

SEQ ID NO: 444171 - DNA, 127 bp, Homo sapiens
ctgctgcgaggggagaatctggtctcaatgacagtagagggacctcctcccaaagattacacctgaagcggcacttcatgttccggaaccacctgtgcctggtatttgagctgctgtcctacaacct

SEQ ID NO: 444172 - DNA, 60 bp, Homo sapiens
gcaagtatctggatcttttaccagctaaatttggaggtgaccatgctttgggattttcat

SEQ ID NO: 444173 - DNA, 100 bp, Homo sapiens
gggcacattaaaaaggaatgcccacagtttaaaggctcttcagatgccatggacaatattaccaggcagaaccaattctacgatacccaagtcatcaaac

SEQ ID NO: 444174 - DNA, 83 bp, Homo sapiens
cgctcctcggccgcgcaatgggcacccgcgacgacgagtacgactacctctttaaagcaaattgtggctactaatttgccccc

SEQ ID NO: 444175 - DNA, 75 bp, Homo sapiens
ctcggaagagcgctcccaggagaaacaaaattcagaaggagctggcggacatcactttagaccctccacctaatt

SEQ ID NO: 444176 - DNA, 90 bp, Homo sapiens
ccagctgaacaggccaaagccagactacagctggttcttgaagctgctgaatcgagagctccagatcatgagaaagctagatcactgtaa

SEQ ID NO: 444177 - DNA, 75 bp, Homo sapiens
gcgtcgtcggcctctgggcagcagaaagtgactgagaccgaagatgatagtgatagtgacagcgatgatgatgaa

SEQ ID NO: 444178 - DNA, 50 bp, Homo sapiens
gtcttcgcctatgcctgccaggctgctgggcgttttccactgcgccgtgg

SEQ ID NO: 444179 - DNA, 82 bp, Homo sapiens
atcgaatattcagcaagggtgcatctgagataattctgaaaaagaagaggatcacctagcccgggtagaagaggcaatcacc

SEQ ID NO: 444180 - DNA, 100 bp, Homo sapiens
caggaagcggatagcgtggagtgacggtgccaccgcggcgcggctgaagaagatgcagagcagcctgaagctggtggactgtatcatcgaggtccacgat

SEQ ID NO: 444181 - DNA, 104 bp, Homo sapiens
ccgcgggcccggccacggcggagccaaggacgtggcccagtggaacatcgggagcctccggaccatcctggacatggtggagcgcgagtgcggcaccatcatcg

SEQ ID NO: 444182 - DNA, 100 bp, Homo sapiens
atcctgggaagcagagtgtctggatggaacctgagctgggtctctgactcacttctgactttaggctgacccccagaagcctcctttgttactagtttgg

SEQ ID NO: 444183 - DNA, 100 bp, Homo sapiens
attccctatgtattcagagacggtggatctcatcaaggtaacttctttcaaaatattggttccatcaccctgtttgctgtttttgggacggcaatctccg

SEQ ID NO: 444184 - DNA, 76 bp, Homo sapiens
tgggcccgcgtggatctctaagtttagatgcaaaatccacaagtattcaagtgattgttaaagagggaggcctgaa

SEQ ID NO: 444185 - DNA, 101 bp, Homo sapiens
agactcaccgaagatgtccttgctgatgatcgggatgactatgatttcttgatgcaaacgtccacgaggatgctgtttaatcatattggagacggggcctt

SEQ ID NO: 444186 - DNA, 75 bp, Homo sapiens
ggcttagaactctccacagccatcactcatgtccataaggagcctgtcaagttggctgttgtttgcagagatggt

SEQ ID NO: 444187 - DNA, 74 bp, Homo sapiens
gtgcagacgctggagaacagcggggtcctgaaccgcatcaaggtatgtgcactgcgcgtgaccagccgggcccg

SEQ ID NO: 444188 - DNA, 75 bp, Homo sapiens
ctgagcggagcccggtgacaggatggttattaatgctgcactggctttagcagcaaaaccacagagtaaactggc

SEQ ID NO: 444189 - DNA, 89 bp, Homo sapiens
ctttgggttcgtgagatttcatgaagatggcgccaggacgaaggccctactgggcaaggctggagtgcagcggcgtgatctcggctcac

SEQ ID NO: 444190 - DNA, 75 bp, Homo sapiens
ttcaccacaaaagcgaaatgggcacaccacagcgagttcctggggaaaaccccagggcaaaacgctcagaaatgg

SEQ ID NO: 444191 - DNA, 87 bp, Homo sapiens
cctgcatgtggagctgccgtctcagcagcgattattggagccggaattggtggcacttcagcagcctattacctgcggcagaaattt

SEQ ID NO: 444192 - DNA, 75 bp, Homo sapiens
ggctccaagacctcatcaacaattaaggttctgtcatatgttgaagaatccatacaccattaagaaacagcctct

SEQ ID NO: 444193 - DNA, 100 bp, Homo sapiens
gcgccatgcaggtctccagcctcaatgaggtgaagatttacagcctcagctgcggcaagtcccttcctgagggaaatcctcattgacgattcaatttgtt

SEQ ID NO: 444194 - DNA, 100 bp, Homo sapiens
tgagggcatccagctcattgccaagaagtccaagaaccacatccagtggctctctagaggacaaaatcccagtccttggcacaaactcaggaaatggaag

SEQ ID NO: 444195 - DNA, 100 bp, Homo sapiens
tcagccgactttcatcaacagcgttcttccaatctcagcagtcctgacacagctctccctgaggagcagccacattccagctcccagtgcgcccctctcc

SEQ ID NO: 444196 - DNA, 83 bp, Homo sapiens
cctcgataaacagggccgtgccgcagatgcccaccggaatggagaaggaagaggagtcggtatggagaagatcaacttttcag

SEQ ID NO: 444197 - DNA, 75 bp, Homo sapiens
gtccacggatgatatcaacagacgggagactgaacttgagattgcattcatggcttctctggcaacccacttcag

SEQ ID NO: 444198 - DNA, 100 bp, Homo sapiens
agaaccctggctgaccactttgaaggaggatgctccagcagcaggaggatgcattagcacaacaggcctttgaagaggctcggagaaggacacgcgaatt

SEQ ID NO: 444199 - DNA, 104 bp, Homo sapiens
cacttcgttcaagacaggtgtttaagcgtctctgctgctgatgaagctgtgaccaaacgcacccaacccttggcagccatctgtccctgcagccatagcccaca

SEQ ID NO: 444200 - DNA, 110 bp, Homo sapiens
cgccaagatgccgcagtccaagtcccggaagatcgcgatcctgggctaccggtctgtggtactatactggcaattgctggagaagattttgcaattgttgcttctgatac

SEQ ID NO: 444201 - DNA, 97 bp, Homo sapiens
ctgagatcgtcaagtctcccagcgaccccaagcaataccgcaaacagcactgctcagcattttgaacttctgttcagagcttcagcacctcagttta

SEQ ID NO: 444202 - DNA, 100 bp, Homo sapiens
ctgaagactcctggaaaaagtttcacaaggagtaaggatcaccccttctgtgtcattctctgaggaaaacaagttcttctcaaggaggaaagtctgaact

SEQ ID NO: 444203 - DNA, 100 bp, Homo sapiens
gggtagggccaacggcctggacgccccaagggcgggcgcagatcgcggagccatggattgcactttcgaaggcggtaaccagcgtgagctcgcccgccag

SEQ ID NO: 444204 - DNA, 100 bp, Homo sapiens
aatacaaggtcacctaaaagaaaccagagggttgcaatggttccacaggctcagggccctgtccgggggcggcagcgtggcctccccacccccgtcccct

SEQ ID NO: 444205 - DNA, 75 bp, Homo sapiens
aagtcacaagctgttgaatcagtggaatgagaccgtggagctttttcgtgctaagatgccgttacggaaacatcg

SEQ ID NO: 444206 - DNA, 75 bp, Homo sapiens
tcggactgcaattacaacagcttcaatccgtcgtcatagatggagaagagaagtgtgggatcatgcaaagcagag

SEQ ID NO: 444207 - DNA, 100 bp, Homo sapiens
ctacctctcatgggtagagtggaaaaggagcattggatatgatgatactgatgagtcccactgtgctgagttctcaaaagtctatggtcctgtgttcacc

SEQ ID NO: 444208 - DNA, 82 bp, Homo sapiens
ggagctctggctgctgctgtcaggaaaattgcctaagaattatgacccaaaagttaccccagatccagaaagatggctgcca

SEQ ID NO: 444209 - DNA, 100 bp, Homo sapiens
agcatgagatccaaaggcagggcaaggaaactggccacaagacttctgtaacgataagagttatatttcagaagagacaagagtacttctgttaacagga

SEQ ID NO: 444210 - DNA, 75 bp, Homo sapiens
tgttcaagataaagtgattttttgcctttgttgattaactggacaaattcaggtggatattccatctattataac

SEQ ID NO: 444211 - DNA, 92 bp, Homo sapiens
cagttcttgtttgtggatcgctgtgatcgtcacttgtccctgaagaggaaggagaaggaatatgagcatgaaatggagcggctggcacgtga

SEQ ID NO: 444212 - DNA, 50 bp, Homo sapiens
ggtgaccgaggcctgggccccgggcaattgctggctactttgatatatat

SEQ ID NO: 444213 - DNA, 100 bp, Homo sapiens
gttctgcaccatcttcaggtcctactccaggggcgctcagggggggccctcagcctcttggccttgaacgggctgttcatcttgattcacaaacacaacc

SEQ ID NO: 444214 - DNA, 101 bp, Homo sapiens
acctattagacggcgttactgaagcagccaaacactctattgtacctagtcgatagtcgctggttcaaacagtggaaaaaatatgttggctttgacagttg

SEQ ID NO: 444215 - DNA, 100 bp, Homo sapiens
actccatggaatggattcagactcttcctctcaaaaaggatgttggctctttcacccatcctggcatatgtgtatttataaaagaatgtttgaaagtgaa

SEQ ID NO: 444216 - DNA, 100 bp, Homo sapiens
gcggagtatacaccatgagcaaagctcaccctcccgagttgaaaaaagacgagttgtactgctgtcacaggaaatggacgctggattacaagcatggcag

SEQ ID NO: 444217 - DNA, 74 bp, Homo sapiens
tagagatggttgctacacatgttgggtctgtagagctcggcttaggccataccaaccatgttcgagaaccaacc

SEQ ID NO: 444218 - DNA, 51 bp, Homo sapiens
gtctgcctcgagactgaagaccgggactggtgattgcagctggaagtgccc

SEQ ID NO: 444219 - DNA, 100 bp, Homo sapiens
gtgtgagagtccgtaaggagcagcttccaggatcctgagatccggagcagccggggtcggagcggtccagttacaacacagggatcacaacaaacacaac

SEQ ID NO: 444220 - DNA, 100 bp, Homo sapiens
tttttcccaagctcctctgccagaatgctgaggacttctcctatgtaacttgcccaggagtcgtgcttaaagacaaagaggacatctatcttagcatctg

SEQ ID NO: 444221 - DNA, 116 bp, Homo sapiens
agccccaacggcgagacggtcatctcgagtagcgacgacgactccatcgtgctctatgactgccaggagggcaaggtctccaactgaattccttgaagagaaaatggcctaccagg

SEQ ID NO: 444222 - DNA, 100 bp, Homo sapiens
agcctgtccggctcgtcggtgtcctccgataagctgtcattggaaggaatagtggtacaaagagctgaatgccgaccagctgccagtgaaaactacatgc

SEQ ID NO: 444223 - DNA, 87 bp, Homo sapiens
tgatgtggaggaaaacaacttcgagggcagactgataccccaatgtccttctttgactttgtggttgatcctcattctttcccccgt

SEQ ID NO: 444224 - DNA, 74 bp, Homo sapiens
tcatcgagtgtgacgtggtgaaaggttgatgccggcccaggatggatcagacctgtgaactacccagaagaaat

SEQ ID NO: 444225 - DNA, 85 bp, Homo sapiens
ggatgaacaagtgtcacgctggccatctcaatggagtttattaccaaggtggacattcgcttcccacagagcggagccccagacc

SEQ ID NO: 444226 - DNA, 90 bp, Homo sapiens
gtcttcagtaattacagtctacacaatgtatttgacatggtcagctatgaccaatgaaccagaagatgcaagtggaccaggaggaaccac

SEQ ID NO: 444227 - DNA, 97 bp, Homo sapiens
gaggaattcgccgtgcccgagaatagctccgtccagcaggaattgagttcttctcagactttatcacatgatggaggattcttcaatagactggaag

SEQ ID NO: 444228 - DNA, 100 bp, Homo sapiens
cacggacggtgggtaccatgtgccagctcctggagtccacagtgatccaacctcaaggggacagccccgagttacactgttagaccttatgatagccaag

SEQ ID NO: 444229 - DNA, 100 bp, Homo sapiens
cactccccaaacaggctggctcccgtctccaggccccaaggagccacacctggaccagaccccaggaaagcccccagtgagcctttgctgtgcaaattcg

SEQ ID NO: 444230 - DNA, 82 bp, Homo sapiens
ctgggcttggccaagtccatccaccacgctcgcgtgctgatccgccagcgccatatcagtggcatttctgttaacatccagg

SEQ ID NO: 444231 - DNA, 100 bp, Homo sapiens
gagtccccgtacgcctacagtaacgaacacagaccaccagtgcaaaacaagaaaaagcaccaagtaaaaagccagtgaaaagaagaaaaaagaagagagc

SEQ ID NO: 444232 - DNA, 75 bp, Homo sapiens
cccgcgccctgctccctctcagcacctgggcggacggaccgtataatagacgctggccccaaaggaaactactct

SEQ ID NO: 444233 - DNA, 101 bp, Homo sapiens
gggccctgacacggccaccctactgcctggaggccggggagccgacgcctgcttagaccatgctcagcctccaagcagccttgtcatcgacaaagaatctg

SEQ ID NO: 444234 - DNA, 100 bp, Homo sapiens
cgtcgctagaactcagttgtgcgttgcggccagtcgccactgctagaatttggatggagagacccggaactgccggaagtgattcagatgttgcagcacc

SEQ ID NO: 444235 - DNA, 100 bp, Homo sapiens
cgcggctgcacaactgcaggaacaccgtcacgctgctggaggagtgtatgcagagaatatttccaaaatggtgggaagagaaaagcacttgagaaagatg

SEQ ID NO: 444236 - DNA, 100 bp, Homo sapiens
cgctgatcggattggccgtcatgggccagaacttaattctgaacatgaatgaccacggctttgtggagcagtttttgcaagaaaggatcaaagtgaacgg

SEQ ID NO: 444237 - DNA, 98 bp, Homo sapiens
tcagacctctctgcggccccaagtgttcgtgaaggggacgaactggtagtacctgaaacatcagataatagtcggaaacaaatggttagaaacattaa

SEQ ID NO: 444238 - DNA, 82 bp, Homo sapiens
ctgcgggaaatcgggctgaagcgactgagtccgcgatggagatgaggcctgcctgtgttaatacacctagtgaggagtggag

SEQ ID NO: 444239 - DNA, 89 bp, Homo sapiens
ggagccggaggctgggagccgcggcggcctgggatgatgaaacatgcttgggataactataggacatatgggtggggacataatgaact

SEQ ID NO: 444240 - DNA, 90 bp, Homo sapiens
gggacggcttcagccgcatccacgagatccagagaatagtgacagtggtacaggaaagaaagaaaaagaaaagaaaaacagaaagggcaa

SEQ ID NO: 444241 - DNA, 100 bp, Homo sapiens
ctgctttgccctgggaaatagtaaccctgccaaatacatcagcttgtaggagacagaggtttcaggcacagaactgtatatccaataatagtgaaatgga

SEQ ID NO: 444242 - DNA, 99 bp, Homo sapiens
caggcctgcaggatttggtttcagcatgtccttctctgaatgatgaatacttttactactgtgacaacattaacgctaccaagtcaggattgttacccc

SEQ ID NO: 444243 - DNA, 82 bp, Homo sapiens
gccttccgacgtgggcggtgggccccagccccacagaccagcccagcattcagtccaaaagaaactcttccttcaaaacctg

SEQ ID NO: 444244 - DNA, 100 bp, Homo sapiens
actgtcaactggaggtcctgcacatgcaattcagggaaaaccgtgaaaaagtatcatgagctcaagactgtcggtgattgtggtcaggaagaagtgcatg

SEQ ID NO: 444245 - DNA, 74 bp, Homo sapiens
cagagtccccgtacgcctacagtaacggtgtggaccactacaacgaggtgaagagcgtcaccatctgcgattac

SEQ ID NO: 444246 - DNA, 100 bp, Homo sapiens
gacattgacagggatggaaccatcaacctctctgagttccagcacgtcatctcccgttctccagactttgccagggcctgcttccgcgaggccaacatcc

SEQ ID NO: 444247 - DNA, 100 bp, Homo sapiens
cggaaatatggcctcaatatgtgccgccagtgtttccgtcagtacgcgaaggatatcggtttcattaagcatcaggatactcaaagtggaaaggatcaca

SEQ ID NO: 444248 - DNA, 83 bp, Homo sapiens
ccgggggcgccatggcgaccggagcgaacgccacgccgttggacccgggaaaaggagaagatgaaggaagccaaggatgcccg

SEQ ID NO: 444249 - DNA, 74 bp, Homo sapiens
gttgaaattgtccccgcagttttcaatcatggaatttcttcacatggctcctggagaagtgaccatcacagttc

SEQ ID NO: 444250 - DNA, 96 bp, Homo sapiens
aaaaaattatgatgggaaagtacacggggatagaggcatcatctggggagaggatacactgatggagtatttggagaatcccaagaagtacatccc

SEQ ID NO: 444251 - DNA, 78 bp, Homo sapiens
ggagccgcgggcggcgcggcccagctcgttccaggttgacatcatggacatatgtgagtccatcctggagaggaagcg

SEQ ID NO: 444252 - DNA, 98 bp, Homo sapiens
gtagaggtgacctgactctctgaggctcattttgcagttgttgaaattgtccccgcagttttcaatcatggttcaaaccttgtactactcagctgatc

SEQ ID NO: 444253 - DNA, 75 bp, Homo sapiens
acctaaagcagcacatgctcatccactcagaacatccatgatagcagtcttctgtaaatcgaacttttcaagaat

SEQ ID NO: 444254 - DNA, 50 bp, Homo sapiens
caagcccctcttcaggagtaagtggaatgcagtagccctctgggcctggg

SEQ ID NO: 444255 - DNA, 83 bp, Homo sapiens
cttcctcctcgatgcctacaaacagaacccagcttagactagaaagtctagaagacacacacataatgaagggggaagatgat

SEQ ID NO: 444256 - DNA, 100 bp, Homo sapiens
ctgcttcctacgcatacattggtgcagacccatctggagaacccaacgcgctaccacctgcagcaggcgcgccggcagcaggtgaaacagtacctgtcca

SEQ ID NO: 444257 - DNA, 131 bp, Homo sapiens
agccattgattcttatatcaaagcagatgatccttcctcctacatggaagttgttcaggctgccaatactagtgcgggctacattgagagacctcagctgattcgagcaaaagtgccaattgtgaagttca

SEQ ID NO: 444258 - DNA, 82 bp, Homo sapiens
aacagtacaactgcctccaccagaggaaaatagtatgggaattcctattatggtgctaaaagatgacaccaccacgaaacgc

SEQ ID NO: 444259 - DNA, 95 bp, Homo sapiens
ggagagcaaacttggctcagcccaccttaccaataattctaggatcgtaggactcctggctcaactggagaagatcaatgctgagccttcagaat

SEQ ID NO: 444260 - DNA, 74 bp, Homo sapiens
ctgctaaaaacaagactggggctgctcccatcattgatgtggtgcgatcgcctgccccctgtcatggctcagaa

SEQ ID NO: 444261 - DNA, 49 bp, Homo sapiens
atggcatctaagaaatttgctgttaaatattaattttaaagacccacag

SEQ ID NO: 444262 - DNA, 82 bp, Homo sapiens
tgctgtgggcgctgctggcgctctggctgtgctgcgcgacccccgcgcatggtaaatcaacagactgggaagatgatggttg

SEQ ID NO: 444263 - DNA, 75 bp, Homo sapiens
ccggcggcctctcattctgcagctcatcttctcaaaaacagtaacaattgctcgagcaattgaactaaaacatgc

SEQ ID NO: 444264 - DNA, 100 bp, Homo sapiens
caacagctggagatacaaattatgctccgccgcatgcaagagatgattgcaaggatgcaggcgcagatgcagatgcagatgcagggcggggatggcgatg

SEQ ID NO: 444265 - DNA, 122 bp, Homo sapiens
gcatcgcccactccagaagtagcatggaaatggagggcatcttcaaccacaaagttcctggtccagaactttacacagaaaaggtgctcaaaggatatttgtttaatgaatgtggtatgctg

SEQ ID NO: 444266 - DNA, 88 bp, Homo sapiens
caggacctggacccggacccaaagtgccatgtctttaatacagcaccagttgcccttgaagcagaaaacagaggtgaaatgaaactag

SEQ ID NO: 444267 - DNA, 82 bp, Homo sapiens
acggtccagggaggcggcaggggcggcgggagccgctaggcggagagagaccagatcaccagaagctggagagagaggctcg

SEQ ID NO: 444268 - DNA, 83 bp, Homo sapiens
cttgaattgggaggggggcagctggagcctcaggcggcagcgcttctaggtttcaagatgccctgtcaactccaccaagtcat

SEQ ID NO: 444269 - DNA, 74 bp, Homo sapiens
tacagagattcatatgagagttatgagagaagctgcatgaggccaataatgaactacagaagaagagagccatt

SEQ ID NO: 444270 - DNA, 88 bp, Homo sapiens
attgccttagatccttcaagtggagaaactccagaaaatcttgccaaacttctgaccaggatgtatttaaaatcagaagtcataggtg

SEQ ID NO: 444271 - DNA, 114 bp, Homo sapiens
gagtggttctgtatgaacttttcacatacattgagaagagtaaaagtccaccagcgaaatggtgtcaacctccaacaacaaagatggacaagccttaggtacgacatcagaatt

SEQ ID NO: 444272 - DNA, 83 bp, Homo sapiens
acgtcatccgcggctacgtgggcaaccgggcggccacgttcccgctgcaggtttggtgcacctcgatttggaggaagtagggc

SEQ ID NO: 444273 - DNA, 83 bp, Homo sapiens
gggtggaccactgtcccatcaaatcgcgcaaaggggatgtcctgcacatgcactacacggaatcagagatcattgatttcttc

SEQ ID NO: 444274 - DNA, 80 bp, Homo sapiens
ctacagcttcagaagaccgaagcgttcgtatctggaaggatcatccagcagctcgtcaacggcatcatcacgcccgccac

SEQ ID NO: 444275 - DNA, 82 bp, Homo sapiens
ggcagagcaaggggcttacgcagaaggacctggccacggctgaaggggatgctaagggagataaagcaaaggtgaaggacga

SEQ ID NO: 444276 - DNA, 75 bp, Homo sapiens
cgtgtgggagcgggagctgcggaaaggaatcatatgaagatggcccttgtactataacttcaaataagaattctg

SEQ ID NO: 444277 - DNA, 75 bp, Homo sapiens
tgtagatccagagaaagccaaagcatctccatccagttcctggtgtacaggcgcagcaccgccgcctcggagctt

SEQ ID NO: 444278 - DNA, 82 bp, Homo sapiens
gaatggcaatggcacaaagttctctcgatcagggcatacatctttcttcgacaaaggtttgggatatgagattgaaaatgac

SEQ ID NO: 444279 - DNA, 109 bp, Homo sapiens
gcaccgccctccgcggccgccccctggggatccagcgagcgcggttggacgtgataagtatgagcctgcagctgtttcagaacaaggtgataaaaagggcaaaaagggc

SEQ ID NO: 444280 - DNA, 80 bp, Homo sapiens
ctgactgtgcccctgtggaaggagggtttccaggcctgaggtgcccgccctggccccaggagaatgaaccagccgcagag

SEQ ID NO: 444281 - DNA, 100 bp, Homo sapiens
cagggaaggcactcaaaagtggggggcaggaaaggttcttatagagactgctaagaagctaggactccggtgccactcaaaggggacaatggtcacaatc

SEQ ID NO: 444282 - DNA, 90 bp, Homo sapiens
gcggccgcgagcagagccgcccagccctgccagctgcgccgggacgagttgcatgctgagaatttgaaaaatgaagatgatgtagacact

SEQ ID NO: 444283 - DNA, 101 bp, Homo sapiens
gttccagtatctctgattatgcggtgaagatcgtcaaagccaacaagttagaccacgaggcatttcatccttcatgaagccattcaggattttgaattgca

SEQ ID NO: 444284 - DNA, 90 bp, Homo sapiens
ccatctgcaaactccggaccctggagacgctgtttggaatgtgagatgggcggcttccgttacaagatgaggtctgtgtatgctcacttc

SEQ ID NO: 444285 - DNA, 90 bp, Homo sapiens
ttggctagtgcaagccttgtttattttcctcaccactgaatctacaggaagaagatggactgcggatgaggaagacagtgcagagcaaca

SEQ ID NO: 444286 - DNA, 83 bp, Homo sapiens
cgcccacgcaggagagcgcagtcacgcctgggacccccgaccccacttgtgctggaagcctgtgggccaaagctgaccaactc

SEQ ID NO: 444287 - DNA, 95 bp, Homo sapiens
tgaatttgggaagcagctgcctgctatgctgaaaacccctggaaacttgctaaagagctgtggttctacatggtcagctattatgagcggaatca

SEQ ID NO: 444288 - DNA, 83 bp, Homo sapiens
ggaggattcgatggcaattttttgtggaacagaattggagcagagacgagttgtactgctgtcacaggaaatggacgctggat

SEQ ID NO: 444289 - DNA, 100 bp, Homo sapiens
gcaaactggaggaaatgggctttacagatgtgggcccagaaaacaagccagtcaggtgtcatggagaaactccagctgggcccagagattctgcagcggg

SEQ ID NO: 444290 - DNA, 97 bp, Homo sapiens
agaagttgctatggatacagatagtgaaaccagttctccagaggagaaggggaccagctctccggactatcggcactaccttcgaatgtgggccaag

SEQ ID NO: 444291 - DNA, 101 bp, Homo sapiens
ggaacatgggttatatttggaaccttcgggcaaacaggattccacagtgtcctctggaaaatggcttgtctggagcgggaaagactactgtgagcatggcc

SEQ ID NO: 444292 - DNA, 96 bp, Homo sapiens
gaacaaactggctctacccccaggcagtgtcatttcgtaccctttggagaatttaattggcatgctgctggcctgctgtctgtcccggttcatcac

SEQ ID NO: 444293 - DNA, 82 bp, Homo sapiens
ctcctgagaccctccagcgctgcctggaggagaatcaagagctccgagtttttgaaatcatgaatcctgtttatagtcctgg

SEQ ID NO: 444294 - DNA, 78 bp, Homo sapiens
aaaaccaagtgaaggaaacttcactaagttcagggtgacaagggaggaagtacagagatggcaccgaaagcgaaggaa

SEQ ID NO: 444295 - DNA, 100 bp, Homo sapiens
cgagactccgtgggcgtaggaccctccgagccaggtaaacgctgcatttctacaacagccacctgtgcaggccctgcatgctctgtaacctggggatttg

SEQ ID NO: 444296 - DNA, 75 bp, Homo sapiens
acccggcccgtagtgtggaagcagcttcagagacaatggacctcagatagcctatgttcgggacttcaaagcaaa

SEQ ID NO: 444297 - DNA, 75 bp, Homo sapiens
tctcttttcctgacttcaagattccgtctaatcctaggactcctagaagtaccccaccccacccctgctccttgg

SEQ ID NO: 444298 - DNA, 75 bp, Homo sapiens
ttccagaaaaagtgctcctgggactccaggataccaggtgattaaaaattctggccatctcccaagagacagaat

SEQ ID NO: 444299 - DNA, 100 bp, Homo sapiens
gaaaaaatcccaaggtctgcaaagctcccctactttatgaatgagctcactctgacggaacttgacatgggcgtggctgtgccaaaaatcctccaggcct

SEQ ID NO: 444300 - DNA, 51 bp, Homo sapiens
gttctcgctccggagccgctgcacatttcgtgatgatgatgatgattttga

SEQ ID NO: 444301 - DNA, 100 bp, Homo sapiens
gccaacatcctgaccaagcccgatccaagaaccttctggactaatgatgatccaggtggctgtacttttgatgatggtccaggggcctgtgattaccacc

SEQ ID NO: 444302 - DNA, 82 bp, Homo sapiens
gagggctccaggcatccggtcctggtccctgctggttgcattttgaaagcgaagcagaagccgtagaatcagcggcgagcct

SEQ ID NO: 444303 - DNA, 90 bp, Homo sapiens
cttcgatttggaggacagagactgcaagtttctgcccacttggctatagggaatgtcataatggaaaatgctataggctggaacaaagct

SEQ ID NO: 444304 - DNA, 110 bp, Homo sapiens
ctaagaaagtggtgaatcccctgtttgagaaaaggcctaagaattttggcattgacaggggcaagtgtccgagtggtgaatcagctacttacagagatggatggtctgga

SEQ ID NO: 444305 - DNA, 83 bp, Homo sapiens
cggaccaagcgggcccagaagcgggtgaggaacgcgggaccaggaggacgacaatgcagatcttcgtgaagactctgactggt

SEQ ID NO: 444306 - DNA, 75 bp, Homo sapiens
ggatgaggccggctgtgctacctgcgggtcgttaaccaagctggcctactattcaacggtacagcacaaagtcgc

SEQ ID NO: 444307 - DNA, 82 bp, Homo sapiens
cggccgaggcggcggtgtgggcgcgtcaggccgcgacgagggcgctgagcattttgaaagcgaagcagaagccgtagaatca

SEQ ID NO: 444308 - DNA, 100 bp, Homo sapiens
catttcttcagatagctccccagctgtggaaaatgagcatcctcaagctggacccgcaggccctgcaggacagagactggcagcgcgccgtcatcgccat

SEQ ID NO: 444309 - DNA, 74 bp, Homo sapiens
agaaagggtggatcctgccgtccccctggagaagcaaatctggaaaggcagctcatcatgcagagtgaaatgag

SEQ ID NO: 444310 - DNA, 97 bp, Homo sapiens
ctcccgagtagcttggactacagttccgagagaaatatggggacgtcttcacggtacacctgggaccgaggcccgtggtcatgctgtgtggagtaga

SEQ ID NO: 444311 - DNA, 75 bp, Homo sapiens
cgagaaagaacatcctctttaacccagttcccaccctcacagtcagaggctgggaggcggcagaatgcagccaga

SEQ ID NO: 444312 - DNA, 97 bp, Homo sapiens
cggcatccatctcaggacatgttctggtgacaaccagggcatccccatcatgtccagcatcaagctgaaagaggagcagcgcataaccaccacctcc

SEQ ID NO: 444313 - DNA, 75 bp, Homo sapiens
cgccgcccggatgggaccaccagagtgctcttccttcaaaatgtctactgttcacgaaatcctgtgcaagctcag

SEQ ID NO: 444314 - DNA, 100 bp, Homo sapiens
ctcaaagcaaagaaacttaccagtgatgagcattttgaaagcgaagcagaagccgtagaatcagcggcgagcctgttgaaagaacccacaggtgcatttc

SEQ ID NO: 444315 - DNA, 100 bp, Homo sapiens
ggcggaagccttcgtctcccagattgcaggtggaaaaccatgaattccttgtaaaaccttcatttgatcctaatctcagtgaattaagagaaataatgaa

SEQ ID NO: 444316 - DNA, 100 bp, Homo sapiens
ggtcttggtgtcggttctttcacgcaaagtgtttctccagcaggacctgagaatacaggacaccttacaggaaaacatgagagacatttctccatctcag

SEQ ID NO: 444317 - DNA, 101 bp, Homo sapiens
tcaaggagcaaaaggcctttgagaagaacattttcaacaagacccatcggactgacagtaggttgactatagtcaatggggccaatggagccaagtgtatg

SEQ ID NO: 444318 - DNA, 100 bp, Homo sapiens
gctgaagacattatgttaaaagaaggactgggggcatctgaagcagtggccgacatcaagttttcctctgcagtctctggaatctgttctgcgccacccg

SEQ ID NO: 444319 - DNA, 50 bp, Homo sapiens
gcccgtggtccttctccatattcgagattcagagcattcttcactccaga

SEQ ID NO: 444320 - DNA, 75 bp, Homo sapiens
acatcagtttggtttcactcagaccggatctggtgaagaatcatctgatgtatgctgtgagagaggaggtggaga

SEQ ID NO: 444321 - DNA, 100 bp, Homo sapiens
ggcattgtaacaagacgacctcttgtgctgcagcttgttacttctaaagcagggaataggggagtcttgaaaacgcagcttcggcagtaggaacatgaac

SEQ ID NO: 444322 - DNA, 100 bp, Homo sapiens
gcattccagaatatctcagatgagcaggagccatgtgttcacatgtcatgtggaccagtatttaactgtggaaaccgcgggtggcatggagaaggaggca

SEQ ID NO: 444323 - DNA, 100 bp, Homo sapiens
gggagatgggcctactcgcccgccaccctgcgctgccgccgctctgaggagttaaaggctctggaagaggatctgaaccagaagaagcgggagcaggaga

SEQ ID NO: 444324 - DNA, 80 bp, Homo sapiens
tggcatctcgccagcagcaacagattgaagcccagcaacaattgctggcaactaagagctgtcgatgatgaaatcgaggc

SEQ ID NO: 444325 - DNA, 100 bp, Homo sapiens
tcacctccgctgtgaaaagctaactttcaacaaccccacagaggactttaggagaaagttgctgaaggcaggagggaaatgcatcttctgcagacaccgg

SEQ ID NO: 444326 - DNA, 100 bp, Homo sapiens
aagctgatccccaacgccatccagatctgcacggagagcgagaagaaaccatatcattctacaggaaaatgcacagcatgccacccggtttatagctctg

SEQ ID NO: 444327 - DNA, 100 bp, Homo sapiens
tgaatgacatctacctccatcaggaccccagatgtctgacagccctgtgtgacaccaagataagtaacgacctgggctatcccttggagcttggctatca

SEQ ID NO: 444328 - DNA, 96 bp, Homo sapiens
gatctttggcacattttcctgcaatgatgaacgagtgaggcgggctgggagtgaataaggagacttttagggtattctgagagaagcctcacaaag

SEQ ID NO: 444329 - DNA, 82 bp, Homo sapiens
ccgagtccggaccggagactttggggcctaactagccggaaaactcaaatatatgtgaggtgtgcaacaaatggggacggct

SEQ ID NO: 444330 - DNA, 98 bp, Homo sapiens
gcacgtaccagaggtggaagtccaagtcaaacgcagaaggactgcctcactgagcaaccaagagacagtcattttgtttactcattcagccctgttgc

SEQ ID NO: 444331 - DNA, 74 bp, Homo sapiens
atgctgcaaaacgtgactccccacaataagctggtggatgaccgctgtgtggtggagcccgcggccggggacct

SEQ ID NO: 444332 - DNA, 98 bp, Homo sapiens
ccaaagcctgcttcatccatgtcaagccctgtatcgctgggttgtagggaactggtcgctctgcagccgcagctgcgatgcaggcgtgcgcagccgct

SEQ ID NO: 444333 - DNA, 101 bp, Homo sapiens
cgcgggcgagcggggctttggacgccggtggagacgcaggcgagccgtgattaagatggaaggaggcacggagaatgatcttcgcatcctggagcaggagg

SEQ ID NO: 444334 - DNA, 136 bp, Homo sapiens
ctcggcacgcagcggagatgcctctttttgccaccaatcccttcgatcaggatgttgtctgcagccaggagagcagggacgtcctgtgcgaactgtcagaccaccacaaccacactctggaggaggaatgccaatg

SEQ ID NO: 444335 - DNA, 75 bp, Homo sapiens
caagaaggccctggacacagcaatatctctgggctttcacagtgtgaaatatgagttggcgaggaagatcgacct

SEQ ID NO: 444336 - DNA, 75 bp, Homo sapiens
agccaagatccgagtaccatttttacgtcaggttgttcccattagtaaaaagacaaatgctcttctgtagagtga

SEQ ID NO: 444337 - DNA, 80 bp, Homo sapiens
tgggaggagttcagccgcgctgccgagaagctttacctcgctgaccctatgaaggttcgagaacttgtcttggacaattg

SEQ ID NO: 444338 - DNA, 82 bp, Homo sapiens
tcgcatcaaaccagctgtcattaagtacctcataagccatagcttcagagctgaagccatttattggtatcttggatggtta

SEQ ID NO: 444339 - DNA, 100 bp, Homo sapiens
ttcaggaccagctcattgaaaagactgaggtgaaacgtgtcggagatacactcttgggaatggctacgcagtgtgtgcaggtgaagaacgtggtcaagac

SEQ ID NO: 444340 - DNA, 97 bp, Homo sapiens
ctgtattgccgcagttctagcttcaccttcacgatgtttcccttggtcaaaagcgcactaaatcgtctccaaggttctggcctataggaacaagaca

SEQ ID NO: 444341 - DNA, 100 bp, Homo sapiens
gagcctcagttggaagcagccgatccagcctgcggagcctgtggggcagcgacctggccctgcgcaactgcctgctgacctctgacctgaccgtgcgcat

SEQ ID NO: 444342 - DNA, 100 bp, Homo sapiens
gggcaagccccgcctgaagccccccttccccgcagacgtgggtctgaacgggatgaacagcagcatctgggagcattttgcctctggaagcttctccccg

SEQ ID NO: 444343 - DNA, 100 bp, Homo sapiens
tcttccatatagatgagtcaaccaggcataatgtactctacagaataagagctacagagacttctgaagtggagagtctgcgacctcctcggttcttcaa

SEQ ID NO: 444344 - DNA, 50 bp, Homo sapiens
caactcctgttctcctcagagcctggaggagataagcaaggacctcagag

SEQ ID NO: 444345 - DNA, 100 bp, Homo sapiens
gataggcagcatattcctgatacatatctatgtgaacgttgtcagcctagagtcgtccttgtctactccactaccaaatgttgaagttcttcaagaatca

SEQ ID NO: 444346 - DNA, 97 bp, Homo sapiens
gatcttgctggaaaaagaagctgagactctgaagaagaagctatggagactacaccagccaaaggaaagaaagctgcaaaagttgttcctgtgaaag

SEQ ID NO: 444347 - DNA, 100 bp, Homo sapiens
tgccccggcttcaggatttacacagacgtggggcgatgcttgtgaccctgcagctcctcaaagtaactataactacccaatattgcagccatggagtcca

SEQ ID NO: 444348 - DNA, 80 bp, Homo sapiens
gcagctgagacggcagcggcagcttctcagggttccaagcttgaactacccttgtggctggcaaaaggactttttgacaa

SEQ ID NO: 444349 - DNA, 99 bp, Homo sapiens
tttataccctcactttggatgcactgtgaatcttgaaacaagaaactaaatatattttgccaactttggaaaaagaattattcttggcagagcacagtg

SEQ ID NO: 444350 - DNA, 50 bp, Homo sapiens
aatcttccttcaggatatcaaggtgcgacgagattggtatgtgtatgcat

SEQ ID NO: 444351 - DNA, 80 bp, Homo sapiens
aggtgtaagcgcagaaagcaggcgaacccgcggcgcaataacgatcagttggccttatttcctcagtggaaatctactca

SEQ ID NO: 444352 - DNA, 78 bp, Homo sapiens
tcatgttctgggacttaggagggcaggaagagctgcagtctttgtgggacaaggttcagcagactgtacaggatcttt

SEQ ID NO: 444353 - DNA, 83 bp, Homo sapiens
gccaccaagacctgggaacaagtcaactgagcgggctttggacaccatgaactttgatgtgattaagggaaagccaatccgca

SEQ ID NO: 444354 - DNA, 100 bp, Homo sapiens
cttccggcagcacaagaccaaagacaagcatgagatcgaccgcatgacgctgacgatgggcggcgactggcggcgcgatggacctgaccgggctcctgct

SEQ ID NO: 444355 - DNA, 83 bp, Homo sapiens
tctccctctgcccccccttccccacgcaaccccagatccatttacactttacaaaacgcttcgttaagggactcaggcagtac

SEQ ID NO: 444356 - DNA, 51 bp, Homo sapiens
ctggctgggggaaccactatgatcaatgtgttttcgcattataacaaggac

SEQ ID NO: 444357 - DNA, 96 bp, Homo sapiens
gcttattcgtagaacgtttagaagactggattatggacagaacttggaaatattgagaataatttcttaaagccacttcatataggacttaatatg

SEQ ID NO: 444358 - DNA, 101 bp, Homo sapiens
gaggatcagattttgaagagagatatgccaccagcatttattaaatggtgatggaatttcctgataatgtgttaaatctcgatggacatcagaataatggt

SEQ ID NO: 444359 - DNA, 82 bp, Homo sapiens
acaccaaaagggaactctaaagatttagttggaaaagtagattacctaggaacagtacgatttggggttatcacaaataaac

SEQ ID NO: 444360 - DNA, 76 bp, Homo sapiens
catgaggatgctgaggctgtcctgtcctcgtccgtctcatcaaaggaaggagctgaagagaatgcaggacctggac

SEQ ID NO: 444361 - DNA, 100 bp, Homo sapiens
cgatccagcaccatggggaagcgggacaatcgggtgcttctcttttaaaaggactaaaacatgctaacatagtgctacttcatgacatcatccataccaa

SEQ ID NO: 444362 - DNA, 51 bp, Homo sapiens
tgacacccaggaggcatttgaagttccacctgaaaaagcaactgaaccggc

SEQ ID NO: 444363 - DNA, 133 bp, Homo sapiens
ttgagctccaggagttcgtctcttacgtctgcggaagtgcagctgcctcagttcttagcgcaggaaaatgtttataggaggccttagctgggacactacaaagaaagatctgaaggactacttttccaaattt

SEQ ID NO: 444364 - DNA, 100 bp, Homo sapiens
tctatgtactgcgcctggatgtggccaggctctctatgagaacatgctggtggagctgccctttgcaggcttctttctttccaagttgcttggaaccagt

SEQ ID NO: 444365 - DNA, 89 bp, Homo sapiens
ccccgaacgggttgcttcccccgctgcgagagacaagaggagcagcagcggcaccgcccctcaccctggagggtcctgtacaatctcat

SEQ ID NO: 444366 - DNA, 101 bp, Homo sapiens
acacagccaaccttgctgccttcctcacagtgtccaggatggacaaccccataaggttacacggtgtgggcacacaacctcattgccattgctcgtcttcg

SEQ ID NO: 444367 - DNA, 98 bp, Homo sapiens
ttcggttctctacttccaacagaaggtaaaactggttagcattgatgcagcagaaatagcagatggcaacccttctttggttcttgggctgatatgga

SEQ ID NO: 444368 - DNA, 83 bp, Homo sapiens
atgcaggtgccttgagagcttcaggggaaatggcttcagcgcagtatattactgcaggtactggttttggattaggaattgtt

SEQ ID NO: 444369 - DNA, 50 bp, Homo sapiens
cagaagcgactttggtgagactctggtgccaatgaactggctgtgcagaa

SEQ ID NO: 444370 - DNA, 100 bp, Homo sapiens
attaaacaagacgtgcaaagcaagtggttcacgagagctgaagaagcaggtggagagtgccgagctgaagaaccagcggctcaaggaggttttccagacc

SEQ ID NO: 444371 - DNA, 100 bp, Homo sapiens
ccacagctccagggaaggcactcaaaagtggggggcaggaaagaagagaagctgaatttggacgacagccagtgggaggacatccacgttgtcaccggag

SEQ ID NO: 444372 - DNA, 87 bp, Homo sapiens
ccccttctcgggggtcatgatgggcagcaagatggcgtctgctagtagggtcgttcagagacggagtttcgccatgttgcccaggct

SEQ ID NO: 444373 - DNA, 98 bp, Homo sapiens
cggtctcggtgtagctgccgtggttgccaggagagctgcgccggcgagaagcggccgagccagcagcagtatttcagacaacttttaagaggtgcaga

SEQ ID NO: 444374 - DNA, 76 bp, Homo sapiens
ttgaggaaagaagcagctatgaagaccagggggttcagctttccaagacaaaggtttggacatatttgactctttt

SEQ ID NO: 444375 - DNA, 87 bp, Homo sapiens
ggacgccgggacacctggaagccgagaaatggtattcgtggacaccgtagggatgccagagacataccaggcgcggctgcagcaaag

SEQ ID NO: 444376 - DNA, 100 bp, Homo sapiens
cacaggtgaatttaaaggagcagccctggtgtcacctatcagtaaaaggagctgctgctcttcctccagaacctgcccacagcccactgggatgatgagg

SEQ ID NO: 444377 - DNA, 75 bp, Homo sapiens
gccgagcccatgagtagggaggagaaacagaagcttggtgggtcggaagcagttcatgaggtttgagtgggcaaa

SEQ ID NO: 444378 - DNA, 100 bp, Homo sapiens
gttttctcaccggctggctgggcacacagacactgtcactggagtggccttcaacccatcagcgccccaggtcctggatgcctcatcccttagtttcaac

SEQ ID NO: 444379 - DNA, 100 bp, Homo sapiens
ctgctttaagattctagggttgtacaggcccacgccagacacgacgtctggcaggaacctcggcctcagaggactcctaaatgcaaagtccctggatgtt

SEQ ID NO: 444380 - DNA, 100 bp, Homo sapiens
caattactgatgggagcaagttgactaccaccagtggagtccaggatgagattcttgtagacactgtttgggctctgtcatacttgacagatggaggtaa

SEQ ID NO: 444381 - DNA, 100 bp, Homo sapiens
tactgctctttgccctgatccagtggctggcagtgccagatgaggaagaaggtaattaataaaatgtctccaacatctctaaagatcacactaaggcaac

SEQ ID NO: 444382 - DNA, 100 bp, Homo sapiens
tggatggtgcgttgcgtgccctacttcaaggataagggcgacagcaacagctctgccggctggaaggcctcattgctacgatttcagagtaccctggtaa

SEQ ID NO: 444383 - DNA, 106 bp, Homo sapiens
caaatgtgcaatcttaaaagaaactgtgaagcaaattcgtcagatcaaagaacaagataacggcaaaagcttctatcatttttgttactcttcagtacaatgtcac

SEQ ID NO: 444384 - DNA, 74 bp, Homo sapiens
ccaaagcctgcccagacggctcacctgtgcgggatggaacaaaagggtgaggacgcttgagcggaagttagaag

SEQ ID NO: 444385 - DNA, 96 bp, Homo sapiens
gggagagcagcggcggcggggagcgaccgggagcggcggcagcggcggcgcggaggcggctgaggtgcgagccgatacttggtgcttgaaaaactg

SEQ ID NO: 444386 - DNA, 75 bp, Homo sapiens
ggatccgcccctggacatggaggagaaggtccgcttcaatgcaccaattccagctggacatcactgtgaaaatgg

SEQ ID NO: 444387 - DNA, 132 bp, Homo sapiens
ggccgtcctccaccgtttcctccaggacagcacctagtcgtggccggaggagtctcagagctgtcagaaaggtgctggagaatctggtaaaagcaccattgtgaagcagatgaggatcctgcatgttaatgg

SEQ ID NO: 444388 - DNA, 90 bp, Homo sapiens
tgaccttccggccttgagtccctggtactccaaagattcaggtttactcacgtcatccagcagagaatggaaagtcaaatttcctgaatt

SEQ ID NO: 444389 - DNA, 98 bp, Homo sapiens
cgggatgcccaatgtatctaacgacctctcacagaaactatatgccaccatggagaagcataaagagttgcttccaagatccggtacttgcaggaata

SEQ ID NO: 444390 - DNA, 75 bp, Homo sapiens
aaagctcaatgcctcagaaattcattggtctatgttaacaatgaatgggcaaccagtgttggggaaggagggagc

SEQ ID NO: 444391 - DNA, 100 bp, Homo sapiens
agcgacctacccactacaatacctcttgggactgggctcgatttgaggagctggcagagaagctgcacctccaggctccgcagcactaccccgatgccaa

SEQ ID NO: 444392 - DNA, 75 bp, Homo sapiens
cctgaaccccaaggccaacagagagaagatgactcaggatttaaaaactggaacggtgaaggtgacagcagtcgg

SEQ ID NO: 444393 - DNA, 90 bp, Homo sapiens
gaccatgcagttcatcagccaccgattcccagaagatcatgatcccaccattgaggagtgaatgtcgttccttttctagaactcattggg

SEQ ID NO: 444394 - DNA, 88 bp, Homo sapiens
tttcgacgcctccgccgccgcctgaggaggcgagctagccgggagttacaccgccaccgccaggtcacagggattatggacccagaac

SEQ ID NO: 444395 - DNA, 75 bp, Homo sapiens
ggtgctaccgctgacgacacccctggtggatggcgaggatgagaggttcacgcaaagaatctgctccacaagttt

SEQ ID NO: 444396 - DNA, 83 bp, Homo sapiens
ttaaaaagaagcaacagcagcaggttcatcaggtgtacatcagggcagctctccaatcctgaagtcaaaatggaatgcatctc

SEQ ID NO: 444397 - DNA, 75 bp, Homo sapiens
aaaaagcactgtgaagcccttaaaggagaagaatttggattggtttcctcggatgcgagccatgtccctcgttag

SEQ ID NO: 444398 - DNA, 96 bp, Homo sapiens
cgcatcctatggctcaaagaaagatgattatgattacaaggcagaggaagacccagcaaaatttaaatctatcaaaacaggccgaggacccttggg

SEQ ID NO: 444399 - DNA, 82 bp, Homo sapiens
cccaacctgggattcaaatgaaagtgaaaatgttagaagaactcgtgagccggattgatggcaccatgactcctgtgaggat

SEQ ID NO: 444400 - DNA, 78 bp, Homo sapiens
aacactccaccatatagacccggctttaccttatatcagatcgtcagtatttaaacagatcacatcatgcgtgagtac

SEQ ID NO: 444401 - DNA, 82 bp, Homo sapiens
ggccgcatccgtttccacgactttctgggagactcaacaccttccaccatgaccacctcagcaagttcccacttaaataaag

SEQ ID NO: 444402 - DNA, 75 bp, Homo sapiens
ctgatgcgagtctgggctctgcctcaccacttgtctcagaggatcttcacactatatagcaaatcactaccactt

SEQ ID NO: 444403 - DNA, 82 bp, Homo sapiens
ctcggcggactcgccatggaggaggaggtcccgcagcccccggaagccaatagactccctcagggactctcggtccctcagc

SEQ ID NO: 444404 - DNA, 90 bp, Homo sapiens
tccagtcaagcacatctcaagagcaagtgtataatgactgtgcaaagaagattgttaaagggcatccatcttgcctccaatttacccccg

SEQ ID NO: 444405 - DNA, 75 bp, Homo sapiens
caagatgctgcaaaacgtgactccccacaataaggtgtgggccgaagatatgctcatgtggtgttgaggaaagca

SEQ ID NO: 444406 - DNA, 98 bp, Homo sapiens
cggggacctgacccagtgtgtggactgcgtgattcctccagaggggtccctcttgcaggattgcagaagtggctggctatagtcccgatgacctgatc

SEQ ID NO: 444407 - DNA, 88 bp, Homo sapiens
cagcgctgtcgcaagagaaaacttgactgtatacagaatcttgaatcagaaattgagaagctggcaattaagttggaatatgcaaggt

SEQ ID NO: 444408 - DNA, 100 bp, Homo sapiens
gggacattattgcgcgtggaacggctgcttttggaagcccctgcggatccgccggcttctccgtcccttcttcctgctgcagaactcctctatgatgaag

SEQ ID NO: 444409 - DNA, 82 bp, Homo sapiens
tatatcaactgtggccttaatgagcatgttgacagcatcgatgctagacagacaaaaatatttacaccagcagctccagttc

SEQ ID NO: 444410 - DNA, 99 bp, Homo sapiens
gaaggccgcctatgacatcgaggtcaacacccgccgagcacaggctgacctggcctatcagcttcagaattatatccagatcgagagacagaagattct

SEQ ID NO: 444411 - DNA, 100 bp, Homo sapiens
ccacgttggatgctgccttgtccggtaccctgtcaggtggagccgccaccaaaatgcagattttcgtgaaaacccttacggggaagaccatcaccctcga

SEQ ID NO: 444412 - DNA, 96 bp, Homo sapiens
gccggcttgttcttactggccctgagtctttgggggcagcctgcagaggctgcggcatgctgcagacagacctttccgtccttcatgaacacacgt

SEQ ID NO: 444413 - DNA, 97 bp, Homo sapiens
cattttgtgcgcaccacttttgtgtccaggcataagaaatttgacgtatttaggtcagttaacgtccataccaggatacctgaatccctccagtagg

SEQ ID NO: 444414 - DNA, 101 bp, Homo sapiens
cggctgccggcccccgctctgccctgcagccagactgccttccgggtcactgccatggaggagccgcagtcagatcctagcgtcgagccccctctgagtca

SEQ ID NO: 444415 - DNA, 80 bp, Homo sapiens
gaacgaggcaaggagctaaagcagcgtgcgttcagccctggggttctggaggacacgtgccggcggcaggacttcaaccc

SEQ ID NO: 444416 - DNA, 100 bp, Homo sapiens
tctgcctccccggctgattggattcgttactgctttgcaacgcgcacctaactccaggcagccctgaagcagcttcctaggaacaaggtccccaacatgg

SEQ ID NO: 444417 - DNA, 75 bp, Homo sapiens
ctgagcgaagccaagccgggcggcagagttcctatcagactgagattgggcagaccctggacctcctcacagccc

SEQ ID NO: 444418 - DNA, 83 bp, Homo sapiens
ctgggccggagcaggcgaggtggccggagccgtgtggaccaggaggagcgcttgatgatgatgtagaagaaacacatccaatg

SEQ ID NO: 444419 - DNA, 75 bp, Homo sapiens
cctcagaagaatttaatggatatctgatgttgcttcagagtgtgaagtcaaatgcatgccaacattccagttttt

SEQ ID NO: 444420 - DNA, 80 bp, Homo sapiens
ttttttccttcctaggagaaatcgaggagctgcggctctaccccccggaggacagatctggaagcatctttgctaagttt

SEQ ID NO: 444421 - DNA, 51 bp, Homo sapiens
gacacattttatgttgtgtcatttcgaaggatgccttggttcaagggatgg

SEQ ID NO: 444422 - DNA, 50 bp, Homo sapiens
gcgcggacatggcctcaaacgagtccggcagcgtcttctcttgagggagc

SEQ ID NO: 444423 - DNA, 100 bp, Homo sapiens
cacgggatcccagcctcaggcctgcacggacggtgttggttgggagttttccgtctgatgaaggttggccatttgcaaagtatcttggagcttgtggaag

SEQ ID NO: 444424 - DNA, 101 bp, Homo sapiens
ccgcccagatgatgcggtggtgggggacctgccggcacgcgactccccccgggcccaaaagagcgcctgctcgctgtgcccccgggttatgacgaccccca

SEQ ID NO: 444425 - DNA, 97 bp, Homo sapiens
gtgggcctggccatcctgtggtatgttttccgtctggccgggatgactggaagggaaggtggattcagtgcttttatgtcttgtggcttcaagcact

SEQ ID NO: 444426 - DNA, 107 bp, Homo sapiens
cttcacccgggctccgctcttgccttctccacacttgtttggtgtgatgaatgcagactctgctaccattttggctgtttggatcctcctttgaaaaagtctcctaa

SEQ ID NO: 444427 - DNA, 51 bp, Homo sapiens
cgggcggctggcctcaccgcccactggaatgccagaggattcaacatgagc

SEQ ID NO: 444428 - DNA, 75 bp, Homo sapiens
aaagtaaagaagaagaaaacttcagtgaaacaagaatgggattagccggatcgagctgggagatgtgacaccaca

SEQ ID NO: 444429 - DNA, 100 bp, Homo sapiens
gagaaagtcagctggataaaggacaaacttctgcatatttattatcagaacagcattgacgacaagctggaggaagttttggccctggggctacgcaccg

SEQ ID NO: 444430 - DNA, 90 bp, Homo sapiens
acttctcccttctttgaactggaccccgcgagcaccagagtcggcgtaactatcgcctgacaggctgagctgactgctgcccactttgga

SEQ ID NO: 444431 - DNA, 98 bp, Homo sapiens
tggggatattatcaaatctactactgttcatggcagggtgtgctctgtgcaactcccctcatttttatcattccatcagcctgttatctgaaactgtc

SEQ ID NO: 444432 - DNA, 75 bp, Homo sapiens
gccagtactctatatgaacaatccgtctggatcacggatgtaggaagtgtctctgtagaaacgctggaaaagaat

SEQ ID NO: 444433 - DNA, 95 bp, Homo sapiens
cagactgctgtgctagcaatcagcgagattccgtgggcgtaggaccctctgagccagggaagctgtgattaagcactcattggtgcataaagtat

SEQ ID NO: 444434 - DNA, 100 bp, Homo sapiens
tcaagcgatcctcccaccacctcagcctcctgagtagctggaaccatcatatgcaccagcacgcctggctaagtactccaaagattcaggtttactcacg

SEQ ID NO: 444435 - DNA, 51 bp, Homo sapiens
cagccaatgcattcagaagccaaaatgggggtgaagccagccagttttgac

SEQ ID NO: 444436 - DNA, 90 bp, Homo sapiens
aagaacctttacagagttggctttgagggcatgcatcctccaggacaaatagcaaggaaatacagttcctgctccaccattttcctagat

SEQ ID NO: 444437 - DNA, 100 bp, Homo sapiens
ctagactttttacttcgaggagaagagtctcacgagttgtcctggaagacagtcattttgtttactcattcagccctgttgcaggtcccaataaactctt

SEQ ID NO: 444438 - DNA, 75 bp, Homo sapiens
cccgccactacctcctggctgccgtgaataggcagcctaaagagcaacaagatatggatttggatatagaatttg

SEQ ID NO: 444439 - DNA, 91 bp, Homo sapiens
tatttaatggaaaatcgcttggttaaaacctgacacttttaacaggtgtcagctgtgatgcatgtttaaaaggaaattttcgaggtcgcag

SEQ ID NO: 444440 - DNA, 83 bp, Homo sapiens
agcattaccgggttcgctaggctcacagagagacaagagagacacctccaacttcgacaaagagttcaccagacagcctgtgg

SEQ ID NO: 444441 - DNA, 50 bp, Homo sapiens
gcagccaccgcggcccccgcggctcttcctcagttcactgtgacgcctca

SEQ ID NO: 444442 - DNA, 75 bp, Homo sapiens
cttttattgctagaatggcccaatatagctttgacaacaaattgaaccatctttgtatcctaagttgtttcagaa

SEQ ID NO: 444443 - DNA, 96 bp, Homo sapiens
cgcgactccggctctgcgctcggctgcctgacttcttcctgctgctgcttttcaggggtccagggcatgtccttcatagcagcagtgttgatcttg

SEQ ID NO: 444444 - DNA, 101 bp, Homo sapiens
gacggggcagtgaaacaaggcttcttgtatcttcagcagcagcagacgtttggaaaggcatagaatgtcaagctaaccaggcgtccgctacttcagaagag

SEQ ID NO: 444445 - DNA, 85 bp, Homo sapiens
cagaccctggagcctcagttggaagcagccgatccagcctgcggagcctgtggggcagatggatggagtggaaccctggcttccc

SEQ ID NO: 444446 - DNA, 73 bp, Homo sapiens
tttaatctatctgggatttactccggcttatgatttgaggcggcttcaatgatccatcctaaagaggtgcccc

SEQ ID NO: 444447 - DNA, 90 bp, Homo sapiens
agtcttcccgcgtccgccgattcctcctccttggtcgccgcgtccttggctggcgtggcagcaggatgggtgtggaagcagtgatggcac

SEQ ID NO: 444448 - DNA, 76 bp, Homo sapiens
aaagtggaagagtcctgtgccattaaaaacaacaaggaagctttcagtgcctgggcaatatttaagggaaagtata

SEQ ID NO: 444449 - DNA, 100 bp, Homo sapiens
ccgcgagcgctgggcgggtccgcggcgcggtcggtcggcgcctgttctcgggctgtttggcgggtctcttttattcaaaaccttgtattttgtgtggaaa

SEQ ID NO: 444450 - DNA, 90 bp, Homo sapiens
tcggtacccttgcctttctcacatcaggacaaattgatggccaggagatcactgccaccgccgtgctggccccctggcctaggccacccc

SEQ ID NO: 444451 - DNA, 100 bp, Homo sapiens
ttcgcaacatcaagggagttttccggggccctctcagcaagaacgggaacaaaactctgttcctgttgcagacattaaggccattgtcactgggaaagat

SEQ ID NO: 444452 - DNA, 80 bp, Homo sapiens
gctgaaattggcagatacccatttaaggaaagtaatggaccagtgaaggtgtggggaagcattaaaggactgactgaagg

SEQ ID NO: 444453 - DNA, 75 bp, Homo sapiens
cagaaatgtgccctgaactggacggacataccagtggccatggtgtcctgctatagactatactagacacacact

SEQ ID NO: 444454 - DNA, 110 bp, Homo sapiens
tgtgtacagaaaatccaacccccagactgaaaagagagaagtatttgaaagaaacattagagcagaaggattgcaaatggagaaagagaaggagcttaattccgtcgctt

SEQ ID NO: 444455 - DNA, 50 bp, Homo sapiens
gcaagactggcacccagcacagcagcttggaagctcgaagtctggctgtg

SEQ ID NO: 444456 - DNA, 99 bp, Homo sapiens
gaaggtccggggcttgccctggtcttgctcggccgatgaagtgcagaggtttttttctggctttatcctgtggataaacgcagagtgaacgagtttggg

SEQ ID NO: 444457 - DNA, 98 bp, Homo sapiens
cacgtccagcttcaccacgcggctgcacaactgcaggaacaccgtcacgctgctggaggagtccaatatcagatggaaatgatgcggagccttcgcca

SEQ ID NO: 444458 - DNA, 75 bp, Homo sapiens
gcagcactggggaaacgatccgctcccaaaacggaggaaggctgaacaaggacctgcgacattttctcaatcagc

SEQ ID NO: 444459 - DNA, 100 bp, Homo sapiens
atgcctctgacaatctctagtttaattggccttggtcctcacagctccaaaaagaaacaggatctcgataagctctatgagctgaagtccaaagctcggc

SEQ ID NO: 444460 - DNA, 98 bp, Homo sapiens
aagttccagttcgtggcctgttaccacgagctagtgttggagtgcaccaagaaatgtccacaggcactgaggacccaggccttccaggtccttctcca

SEQ ID NO: 444461 - DNA, 96 bp, Homo sapiens
gggagacacatgtttgtctttcaggtctgtgcagacttttgcagacaaatcaaaacaagaagctctgaagaatgacctggtggaggctttgaagag

SEQ ID NO: 444462 - DNA, 49 bp, Homo sapiens
gagctctcagcataccgtgcaacaggagtccaacctataccttctcagg

SEQ ID NO: 444463 - DNA, 96 bp, Homo sapiens
caagaatctcgtgctcaccggtttctcccacatcgacctggaactcgctttgaacgcttgcttatgagaataggacatcaatcaaagaatgcccca

SEQ ID NO: 444464 - DNA, 98 bp, Homo sapiens
ccaggcccacatcgacagggacgtcctcattgtcctcgatgttcctcctgctgatcaagagaagctttttatccagaagttacgtcagtgttgcgtcc

SEQ ID NO: 444465 - DNA, 100 bp, Homo sapiens
atgatgctggaaatcgacttcggtttcagttggagttggaatttgtgcaatgtttagccaacccaaattaccttaattatacactgcctctaggactggg

SEQ ID NO: 444466 - DNA, 80 bp, Homo sapiens
atcctttcctgcttttggtttccctggcaggggttgaactgtggagtgtgtgggtcctacaacgtgactttaaaaagaca

SEQ ID NO: 444467 - DNA, 82 bp, Homo sapiens
cggaggacgcgcccggcgcccctgagccggccgagcggcgacggaccgcgagatgaggacggggacttggttgccttttcca

SEQ ID NO: 444468 - DNA, 100 bp, Homo sapiens
tagacatttacgcggatgtcggcgaagagttcaaccaggtgacttaagagattaaaattaatttggttgctgttggttctgaacaaataatgagttcttt

SEQ ID NO: 444469 - DNA, 90 bp, Homo sapiens
ggtctcaaggcaagcctattgagttaacacctctgccgctgctaaaaggataagttctgaacgtcgaaaagaaaagtctcgagatgcagc

SEQ ID NO: 444470 - DNA, 100 bp, Homo sapiens
cgcggcgggagcgcggcgcgggagcccgaggctgagactcaccggaggaagcggcgcgagcgccccgccatcgtcccgatgtccagaaggcttcttgggg

SEQ ID NO: 444471 - DNA, 75 bp, Homo sapiens
gaaacactctccttctgccacatttgttttgagctaaatattgaggttggtgagtttgtaagtgatgcccttctc

SEQ ID NO: 444472 - DNA, 99 bp, Homo sapiens
agaattacgcatttccacttctaatgacccagaagtccacattcccctcgagaatctacagcagtttcctgccttcaattcttatacctgctcctctga

SEQ ID NO: 444473 - DNA, 100 bp, Homo sapiens
tgagaatagtgcgcagaagttaatgcacctggtggttgaaagttttccttcttacagagatgtgactctgtttgagtctattatcctcccagtccacaac

SEQ ID NO: 444474 - DNA, 83 bp, Homo sapiens
tgctggtgcatgcgtcgtcggcctctgggcagcaggttggatttggtctagggagtcccagaaagaagtagaaaaagagagag

SEQ ID NO: 444475 - DNA, 75 bp, Homo sapiens
ggacaggcagagtgctgatgtgaaaaataccacgacaaaaccaccctagtgttggtgtctgtccagtcccttata

SEQ ID NO: 444476 - DNA, 82 bp, Homo sapiens
agggaccaaggtggaaatcaaacaatcctgctgcatcacagaagctggaagttctgatgttccactgaaatcacaatggaaa

SEQ ID NO: 444477 - DNA, 100 bp, Homo sapiens
ttcacttacgccaaggtcgtagcgctcattgccatcattgtcatgggccttgttaaactgtgccagggctcgggctcaagttcactacaggtcacaaaac

SEQ ID NO: 444478 - DNA, 98 bp, Homo sapiens
ccagtttatccactagatattgtaagaacaatgagagatcagcgagccatgatgatccaaacaccttgggacacagcaggccaggaaagatttcgaac

SEQ ID NO: 444479 - DNA, 90 bp, Homo sapiens
ggcgggagccctcgcgacgcgcccggcccggagcccccagcgcagcggccgcggtgcaaattgagcatgacccagaattagaaaaagaaa

SEQ ID NO: 444480 - DNA, 100 bp, Homo sapiens
aggatttttaccagtttacttttaattttgcaaagaatccaggacaaaaaggattaggcttcagggatgacttcttagggggcaggggaggtagtcgccc

SEQ ID NO: 444481 - DNA, 100 bp, Homo sapiens
tgcaggctctcggctgcagcgctgggtatctgtaatgcgtgatgaggataaattactgaggattaaaattaatgaactggagaaaaagaaaaaccagtgt

SEQ ID NO: 444482 - DNA, 96 bp, Homo sapiens
atttttagaccctctgtgccagagagccaaggaagtatcgcctggggatgctggaggagaggctagttccgatgggatcaaaggcacgaaaagcaa

SEQ ID NO: 444483 - DNA, 100 bp, Homo sapiens
taagctgctatgtcacctacctcaccttctcagctctgtccagcaaacctgcagaagtagatgtggaagatgtcaagtttgtgatcaactatgactatcc

SEQ ID NO: 444484 - DNA, 97 bp, Homo sapiens
gatggagctttgtctttgaggactttgtctctgatgagctgagaaacaaagccacccagccaatgaagcatgttttagaggttcgtcctctaaatca

SEQ ID NO: 444485 - DNA, 82 bp, Homo sapiens
atctaaaagccacccaggccttggtcctagcacccactcgagaattggctcagcagggtcccagggctggtggttgctttgg

SEQ ID NO: 444486 - DNA, 100 bp, Homo sapiens
tcaagctcgagaggactggctatcaaaggaatggaagttggatacactttgtgacttgtacgagacactgaccattacacaggctgttatttttctcaat

SEQ ID NO: 444487 - DNA, 90 bp, Homo sapiens
cggagcttctcagaagacagagggttttcttttgagctccccaggtgtgtcctggtagacaactgctcccaggagctggcatagaagcaa

SEQ ID NO: 444488 - DNA, 49 bp, Homo sapiens
gccgccatggctctgctccgaggccccttcacagatgtagtcactacaa

SEQ ID NO: 444489 - DNA, 100 bp, Homo sapiens
ttgacactaaaaattgtcttggtgatcaaaaactcgtggaaagacttcatgcagagggcttatcgagacaaattgaagttttggacccattgtgtactag

SEQ ID NO: 444490 - DNA, 101 bp, Homo sapiens
ggggatcaaagagcagtgggggttgctgacccagaggagagttctccaaacatgatcgtttactgcaaactttcagccgtgccccaattccaatggctgtg

SEQ ID NO: 444491 - DNA, 98 bp, Homo sapiens
ccaagaccagcgcgagggccctgggcaaggcccgacagggcagggtgccatttgccgtgcctgacaaagtgctgtggccacagctgtgtgaggcgctc

SEQ ID NO: 444492 - DNA, 50 bp, Homo sapiens
cttccgcaccatcacctccacgaagcggggagaggtggtgagagatgacc

SEQ ID NO: 444493 - DNA, 135 bp, Homo sapiens
gacgatctgcacttcgcattttggcattgacatttaattttagggtcctttatatagaagggagagtaggccgccatggcatcagatgaaggcaaactttttgttggagggctgagttttgacaccaatgagcag

SEQ ID NO: 444494 - DNA, 82 bp, Homo sapiens
ataaacatgcaatgaacccaaaaggctgcttttctaacccaaactgtatgtcttgatgacactacagtaaagtttgaaatat

SEQ ID NO: 444495 - DNA, 75 bp, Homo sapiens
catcccctggatgggggaccacaagatcctcatcgacaggtctcaccaacggctttgggggtgcgaggagcgagc

SEQ ID NO: 444496 - DNA, 100 bp, Homo sapiens
cccgaggtgctgacgtcgcaaaaaaattggatattctgggaggtgatcagtgatgaacatggcatcgaccccaccggcacctaccacggggacagcgacc

SEQ ID NO: 444497 - DNA, 90 bp, Homo sapiens
caagagtaacagcagcgccgtcccgtccgacagccaggcccgggagaagtataggactttcactaaccttggaccatatatttgccagga

SEQ ID NO: 444498 - DNA, 83 bp, Homo sapiens
cggcgcagctattgctggacggccagtgggagagcgaggcctgagcctctgcgtctagccgctgccatggcccagacactgca

SEQ ID NO: 444499 - DNA, 99 bp, Homo sapiens
gctggagcacttgagccacgtgcatgaaccaaacccacttcgttcaagacaggtgtttaagctgaggattatgggaagaactttaaggatattacagat

SEQ ID NO: 444500 - DNA, 101 bp, Homo sapiens
caaaccgtggctgctcgataaatcagacagaacagttaatcctcaatttaagcctgatctaacccctagaaacagaaatcccttccctgcgacatatgcaa

SEQ ID NO: 444501 - DNA, 100 bp, Homo sapiens
ttatgttataaaggttctacgttccatcgtgtggttaaaaactttatgattcagggtggggacttcagtgaagagcctaaaaccattggccaaccgtcac

SEQ ID NO: 444502 - DNA, 100 bp, Homo sapiens
gtgccgttttttaagccggtccgaaaagcgcaatattcgggtgggagtgacctgattttccagggcgtctctggccgagcctctttttgtggaaaacgac

SEQ ID NO: 444503 - DNA, 73 bp, Homo sapiens
ccgggaccgggatcgtgaccgtggaggcagaaaaagtcctacctggagcgaagcgttaaggaagctgaggaca

SEQ ID NO: 444504 - DNA, 82 bp, Homo sapiens
cagctctttccccgtcagcatcccagccgtgctcacggttgaaatcacaaagattagacacctttttagataggtgttcttc

SEQ ID NO: 444505 - DNA, 83 bp, Homo sapiens
gaccaagtacctgcagatcctgacctctctgatgagatggatcggcctgacctctcgggacacacccagccctgtggacccag

SEQ ID NO: 444506 - DNA, 100 bp, Homo sapiens
ggcggagccgctgctcgagctgctgctggattgaactcagagaagccgggaaatgaagctgttgtcatttctggaaggaaactggcccagcagatcaagc

SEQ ID NO: 444507 - DNA, 98 bp, Homo sapiens
tggcacaacggctgggagaggaaacttgatgcttctgggccaccatttgccagggcctcgctcgagtctgtgaatttctggtacgtgctggtgatgaa

SEQ ID NO: 444508 - DNA, 119 bp, Homo sapiens
tcgcagctggctgtggccgctggcgggtccggccgcgcgcggggcgccgacacctgtggctggaggagtacagagtattttaatctttaggggatcaagatgtcagatgcaaacaaagc

SEQ ID NO: 444509 - DNA, 74 bp, Homo sapiens
gctccaggattagggaaagtcaatggtggtctcatggattataaccatttggatatttggttcactaacaattt

SEQ ID NO: 444510 - DNA, 49 bp, Homo sapiens
aagcggagctcccccaagagccggaaagatcttggcatatacagaaggg

SEQ ID NO: 444511 - DNA, 100 bp, Homo sapiens
ccaggtgatgcctgaagctcaagggactgtgtccaccctcaggcatgggcaagaaggacgaccccaagctgatgcaggagtggttcaagctagtgcagga

SEQ ID NO: 444512 - DNA, 75 bp, Homo sapiens
tccttggaaatcctgccgcggacttctctgcacagcatccctgtgacaggtggtccagcatgacccatgtcgggg

SEQ ID NO: 444513 - DNA, 100 bp, Homo sapiens
gcggggctgaagaagcagttctacaaggcgagccagtatgagaataatgttatcactattgatctggttcaaaattcttctcaaaaaactcagaatgatg

SEQ ID NO: 444514 - DNA, 100 bp, Homo sapiens
ggcaggacggccaagaccagcgcgagggccctgggcaaggcccgacaggatcctcagtcttccacaatgaaccctgtttacagccccgtgcagcctgggg

SEQ ID NO: 444515 - DNA, 83 bp, Homo sapiens
ccgaggaaaaggaatcgtatcgtatgtccgctatccagaacctccactctttcggctgaccaactgactgaagagcagattgc

SEQ ID NO: 444516 - DNA, 100 bp, Homo sapiens
ggcgatacaagcaggatgtgtacttgcttcctaagaaaatgggttattgttcaaaactacaactccattttgacactttctcacttgtaccgatcttcag

SEQ ID NO: 444517 - DNA, 83 bp, Homo sapiens
gcaaagtccgcaaagagccagcctgcctttcagacccccactggcatgccatatggaacagtgaacttacttcatggcgtgaa

SEQ ID NO: 444518 - DNA, 90 bp, Homo sapiens
cagacagagctattccagcaccagcagagcccatctacagcaagcagtcggtgttcttcgtctgggaactcaagtggacagaagagcctc

SEQ ID NO: 444519 - DNA, 118 bp, Homo sapiens
agaagagttcttctccagcacctgcagacatagctcagacagtacaggaagacttgaggcgttgggccggagcactagcctcacggagaaggatctgaaagaagccaaggcgcggagc

SEQ ID NO: 444520 - DNA, 90 bp, Homo sapiens
caaggagggcatgatcaacctcgtcatgtcctacgcgcttccccgggcgctgcctggacaggcctgcctgcgtgctgggacatgtctggc

SEQ ID NO: 444521 - DNA, 131 bp, Homo sapiens
tctgaatatctccggggacacacacgagtccatgtgaaagaattaggtgtcgtactggggatctggaaatagtatattcctatttacatggtatggaagccttatcaaacttgagggagcatcaacttagg

SEQ ID NO: 444522 - DNA, 83 bp, Homo sapiens
accaaatttacgccatgaaagtggtgaagaaagagctggtgcatgatgacgaggtttttagaacttcagccataaaaatgggc

SEQ ID NO: 444523 - DNA, 101 bp, Homo sapiens
caagcaaacccccattcggaaaaagaagtggagcttcattcaaggaatgcctctggctcaggcagtagccattcttcagaagcactgtcgcatcatcaaaa

SEQ ID NO: 444524 - DNA, 100 bp, Homo sapiens
gatgaatccagtgggccaaagaccctgaagagcctcaccagccacgaccccatgaagcagtgggaagtcactagcagctgataccccaatgtccttcttt

SEQ ID NO: 444525 - DNA, 100 bp, Homo sapiens
ccatccatgcctacgtgggcttcaccatggacaagctggtgcagaacattgcgcggcaggagcggtggtgccccccccgggcacggggccatgtacaacg

SEQ ID NO: 444526 - DNA, 82 bp, Homo sapiens
cggtgaacctggaccaggaggaggttttcaggaccaaaattgtggaaaagtcactctgcaaattgtggctactaatttgccc

SEQ ID NO: 444527 - DNA, 75 bp, Homo sapiens
ggacactctggacttcagccaacagctgctacaggagctgagagaccctaccctcactttccgtctgcttggctc

SEQ ID NO: 444528 - DNA, 99 bp, Homo sapiens
agaaacaataggacggaaacgccgaggaacccggctgaggcggcagggtatttgaagtataccatacaactgttttgaaaatccagcgtggacaatggc

SEQ ID NO: 444529 - DNA, 75 bp, Homo sapiens
ataatcagttcctacaacccacaggacagatactaatggaccatactaccaaggaccagtccacctgaaccacac

SEQ ID NO: 444530 - DNA, 100 bp, Homo sapiens
ggaccacaggcttccagtacgagctggttaggaggcacagggcgtcggacctgcacgagctgtctgtgtgcaccggcacagacatgaagctgcggctccc

SEQ ID NO: 444531 - DNA, 75 bp, Homo sapiens
cagccgcgtgtcagccagaaggaggggacgctcggggacagagcgggatgccaccagcttgtccaaagggaagtt

SEQ ID NO: 444532 - DNA, 98 bp, Homo sapiens
gcgcctcgacacgagcgacgtcctgcagcagatcatggccatcaccgaccagagcctggacgaggcacaggccaggcggtggtagtgcctcaaggtgg

SEQ ID NO: 444533 - DNA, 75 bp, Homo sapiens
atggcatttacagaaagagtcaacagcagtggcaacaggttacagtcaaaatcatcttcgacaagcacaggtgac

SEQ ID NO: 444534 - DNA, 97 bp, Homo sapiens
gccactccggtcccgacacctagcctgcctaatggcagcattagccgctgttgggcctcctaatcctcgggcagatccagagtgctgcagtattctg

SEQ ID NO: 444535 - DNA, 75 bp, Homo sapiens
ggatgaggagaacacactctccgtggactgcacacggatctcctttgagtatgaacacttccccaagctgctggg

SEQ ID NO: 444536 - DNA, 100 bp, Homo sapiens
gccaattgctcctttcaggtgtttgataaacatccagggatctatttgtttttagtccatcccaatgaaatggttgctccttgagggcaggacagttctt

SEQ ID NO: 444537 - DNA, 82 bp, Homo sapiens
caccgagacggcgatccgggcgctcgagacttaccagagccacaagactacatgaggaaataattgacttttataacttcat

SEQ ID NO: 444538 - DNA, 89 bp, Homo sapiens
ccagaaaccgccccagcgatggaagaggatcaggagctggagagtgccggtggtggtgtgcacattgagccccggtatagacagttccc

SEQ ID NO: 444539 - DNA, 50 bp, Homo sapiens
ggttatggtgcatacttggctcagactgtaccccatctggagacctgagc

SEQ ID NO: 444540 - DNA, 90 bp, Homo sapiens
tggagcccgaaggggacagcttcccgctgatggagatcagcacctgtgagggcccgcccttcatggagagcctgcccgagaacaagcccc

SEQ ID NO: 444541 - DNA, 50 bp, Homo sapiens
cagagactcatcgccacatttccaggaacaggcctttgagagcagccaga

SEQ ID NO: 444542 - DNA, 100 bp, Homo sapiens
aacagattaaaacgagaaattgagaaaaggagaggagcacagattcaggcagcaagtcctcagaatggttggaatgaccctccagctttgaacagagtac

SEQ ID NO: 444543 - DNA, 101 bp, Homo sapiens
tatgacatcgttccaaccagttcaaagcttgttgtctttgatactacattacaagactcacaccacccggcaagaactgctcactacggctccctgcccca

SEQ ID NO: 444544 - DNA, 75 bp, Homo sapiens
taccgccggcttgccacagtccacatgtcccggagtgcagcttcaagcttaggaccacccaccatgcctatccag

SEQ ID NO: 444545 - DNA, 100 bp, Homo sapiens
gctacagctccgcgcccgccagttgcttgatcaggtggaacagattcagaaggagcaggattaccaaagggtagcagggcgccaagcagtgacttctgac

SEQ ID NO: 444546 - DNA, 74 bp, Homo sapiens
gaggagctaaaagcgaaggccgcggggaaggggcccttggcagcagtgttgtactgctacttctataaacggac

SEQ ID NO: 444547 - DNA, 99 bp, Homo sapiens
agcaaactttgaaacaaaaatgggtggagtacagatctctgcagttacaggaacatcgtctgcttcatgcttgccaattctgtaactccttgggatatc

SEQ ID NO: 444548 - DNA, 75 bp, Homo sapiens
agagaatgaattttcaccattgaatatattagaaccattctgccttggtacagagccagatggactccttcggac

SEQ ID NO: 444549 - DNA, 51 bp, Homo sapiens
cgctggcacccaggtgcccataagctccaccatgaggcgaggtggatggag

SEQ ID NO: 444550 - DNA, 82 bp, Homo sapiens
cgcgacctccggatgacccgggcttcggcccccaccagagactcggggatatcattttcaatgcccaatacccagaactgcc

SEQ ID NO: 444551 - DNA, 100 bp, Homo sapiens
ctccaagagggaggtgtccagtctgctaagctacacacaggcctccaccgctatgtctggctggtttacgagcaggacaggccgctaaagtgtgacgagc

SEQ ID NO: 444552 - DNA, 75 bp, Homo sapiens
ctcctctgcgctatgtggacattgccatcccatgcaacaacaagatattgatgatgttaagaagttcaaaccggg

SEQ ID NO: 444553 - DNA, 98 bp, Homo sapiens
cggctggtgggcgctgctggcgctgcagctgcacttgctccgggcgctggcgcaagctcatccaccatacaccatgtgctttagagtgaaattctacc

SEQ ID NO: 444554 - DNA, 82 bp, Homo sapiens
aacaagtgtgtgcatctggctgttagaagaattcatgctcatccggtatttaggtcagttaacgtccataccaggatacctg

SEQ ID NO: 444555 - DNA, 101 bp, Homo sapiens
gagctccccaggggacttctccatctctgtcagatactaatggaccatactaccaaggaccagtccacctgaaccacacactctaaagaaatattttttaa

SEQ ID NO: 444556 - DNA, 100 bp, Homo sapiens
gccctcagagacgcgccccctagtggaagcagagtgggaagcagtgccaccgtgggccttaattgcaatagccatagtcgcagtccttttagtcctgacc

SEQ ID NO: 444557 - DNA, 99 bp, Homo sapiens
aaagaaatacttttgagtcggtggactgaacatgactgatgtatatagtgataagacagaggcaaccacaaagcttcatgacatggtagaccaactgga

SEQ ID NO: 444558 - DNA, 128 bp, Homo sapiens
aacagtatctcacctccctaaactggttaatagtggcatggaagatccatttgcttaacagagcgttccaaaaagaggactctccagctactttttattgcatcagtatgcagtggtttagagaatgg

SEQ ID NO: 444559 - DNA, 78 bp, Homo sapiens
agaaatcctgataagaactgctttgtagaacgtcatgacatgaataccttaagcctgcccctgaacatacgccgaggg

SEQ ID NO: 444560 - DNA, 75 bp, Homo sapiens
gtgttaaccaaagccagcctggcatactttgaagatcgtcatgggttagaacctggcccattagatgaaacccag

SEQ ID NO: 444561 - DNA, 75 bp, Homo sapiens
ttgggatttaccaaagcttgaagcgcttattcgtagaacgtttagaaggagctagaagcatctgaagaactagat

SEQ ID NO: 444562 - DNA, 100 bp, Homo sapiens
cgacgatgcttgctggaggatagaaagactttccgtgacatttctgaagatctgaaatcttcagtaggttgatgtggtttcctctgcagtgatttttcta

SEQ ID NO: 444563 - DNA, 83 bp, Homo sapiens
ctggagctgggtcagtccgccgctcaccccgcggccgcaccttcccgccttctcagaattaaacaaccaccatgtcgagcaaa

SEQ ID NO: 444564 - DNA, 101 bp, Homo sapiens
aactggtacttggagtctggacatctgaaacttggtgctggagaatctggtaaaagcaccattgtgaagcagatgaggatcctgcatgttaatgggtttaa

SEQ ID NO: 444565 - DNA, 100 bp, Homo sapiens
tggcaggagattatagctctgtatgagaaggacaacacctacttaggtgacggccctgctcgggaggccctccagtctctgagccagcggcttcgggtgc

SEQ ID NO: 444566 - DNA, 76 bp, Homo sapiens
gaaagacatctggaatattttcctggagaaaaatgcggtcatctctgaatttgagcaatggtgaaacggaatctgt

SEQ ID NO: 444567 - DNA, 101 bp, Homo sapiens
gggggcatcatgaagcgggctggcggcgctgccgctcccgggcggccgcgggcgggaaactactttgcttcgcactttttcatgggaggagagaaattcga

SEQ ID NO: 444568 - DNA, 100 bp, Homo sapiens
ccccaagccggaggaggccacacccagcccatcacctcctctgaaaaggcagggattccaaaagaagaagtgaaagaagcatacatgggtaatgttctac

SEQ ID NO: 444569 - DNA, 82 bp, Homo sapiens
gggcgcggggactgcaaccctaatcagacaggggcaagtgtccgagtggtgaatcagctacttacagagatggatggtctgg

SEQ ID NO: 444570 - DNA, 50 bp, Homo sapiens
ccgaagcagcatgtgacaccgaccaggaacttgctactaccagcaccatg

SEQ ID NO: 444571 - DNA, 100 bp, Homo sapiens
tgaaggctgtgaaagcgggcatgcccattggctgttatctagccttatctatgacagctgtgggccacaggttgtttcacgaagaaatccagaggatgtc

SEQ ID NO: 444572 - DNA, 83 bp, Homo sapiens
cgcattcagaatttgaccatcttggtgagaaacattaagacctactaccagcaaattgtggctactaatttgccccctgaaga

SEQ ID NO: 444573 - DNA, 75 bp, Homo sapiens
gatggcgaaggtctcagagctttacgatgtcacttgggaaggtctatgctccatcagcaagcactgccgactaca

SEQ ID NO: 444574 - DNA, 82 bp, Homo sapiens
caaaggcctgtgtgctgcagaacccccagaccatcatgttttaaaatcaaagatgggaaaatcggagaaaattgcccttccc

SEQ ID NO: 444575 - DNA, 100 bp, Homo sapiens
gggtcagcaagagggccccgctgaccaggtggctgcagatgaacagactagccactttgcattgactggaaacaatggcatttacagaaagagtcaacag

SEQ ID NO: 444576 - DNA, 90 bp, Homo sapiens
gaaccagcagttggaggaagagaacaatctcttgcggctgaaagtggacatcttattagacatgatttggagcaagaggtggtggtggcc

SEQ ID NO: 444577 - DNA, 82 bp, Homo sapiens
cgcaggctgcggggcgcggagtcgggaggggatatcattttcaatgcccaatacccagaactgcctcccgattttatctttg

SEQ ID NO: 444578 - DNA, 83 bp, Homo sapiens
gccactacagggaagtgcatcacatgtcaggatttctctctgatcaaacggacagttcaggactcagaatctaaggatgaatg

SEQ ID NO: 444579 - DNA, 99 bp, Homo sapiens
ggcggaaccagcctgcacgcgctggctccgggtgacagccgcgcgcctcggccaggtcatcatcagatttgaaatatttaaagtggatacaaaactatt

SEQ ID NO: 444580 - DNA, 51 bp, Homo sapiens
tgcctggcgcgatacaaaaatgttcgatacaagaggctgttttcctagcgt

SEQ ID NO: 444581 - DNA, 96 bp, Homo sapiens
ccataaagagaaagctagtgaatgggaaaatggtagcggttataaacaacttgtgaaatgagtgatttggaagatgatgagacaccccagctttct

SEQ ID NO: 444582 - DNA, 100 bp, Homo sapiens
cagaaacctgaagttagaaaggctcaacgagaacaagctatcagattcatgatgttgctatcaaaagttgagaaattgtcagaagaaatcatggagataa

SEQ ID NO: 444583 - DNA, 95 bp, Homo sapiens
agtggtcactcagcccaagcagcaaagggaaagtggtggagatgcagaattatatccagatcgagagacagaagattctgaaagggttcaatgaa

SEQ ID NO: 444584 - DNA, 100 bp, Homo sapiens
cctcaagtacagtgacctgcagaacttagccaagagtctgggtctccgggccaacctgaggcagtcctgcgttaactgcggccgggaggctatgagcgag

SEQ ID NO: 444585 - DNA, 100 bp, Homo sapiens
ttctcgctaacaactgcccagctttgaggaaatcaaagagcaggaggttgtggacaaagtcatggaaacactggacaatgatggagacggcgaatgtgac

SEQ ID NO: 444586 - DNA, 89 bp, Homo sapiens
cctattcggccatcttggctcctccattctgcttttaaggagttaaatacctgtgcatcccagcagcggattcaccatctcaaaacctg

SEQ ID NO: 444587 - DNA, 100 bp, Homo sapiens
ctacgctatgccctgctgtagtcacaggaggtgtagagaggaccccgggacatctgaaagccaggaaatgttgcagtaccatgcaggactagcatctggc

SEQ ID NO: 444588 - DNA, 75 bp, Homo sapiens
cttagataaaatgacgacgtccttctggaagaggcgaaactggttaaccccaaagattggctttccttggagtga

SEQ ID NO: 444589 - DNA, 83 bp, Homo sapiens
caagggcgcatatcttcaaagcacctagtacctcctaccattgtcaactggtatttctttaaatccagaacaatggagccagc

SEQ ID NO: 444590 - DNA, 90 bp, Homo sapiens
cagaggtgtatgtgcccacagtgtttgagaactatgtggcagatatcgaggtggatggaaagcagtttcaagtgtcgtcagatgtatcac

SEQ ID NO: 444591 - DNA, 123 bp, Homo sapiens
gtctccctgagtctttgaggacacagcctcgctggaggcagtttctgctgggagtgtccactcgccttccaccagcatggcaacgtcttcacagtaccgccagctgctcagtgactacgggcc

SEQ ID NO: 444592 - DNA, 100 bp, Homo sapiens
cttgcttctgtagaccagctccaacaggattccatggtagctgggatgttagggctcaggtccccaggatcggctgagagccctggtggtgatccccatc

SEQ ID NO: 444593 - DNA, 50 bp, Homo sapiens
ccctcaaggccatgatcaaaacgtcccgcagcccccggaagccaatagac

SEQ ID NO: 444594 - DNA, 75 bp, Homo sapiens
agaacttgaggcagctgatgaaagtcgatggtggtgaagtagtgaaggatgcccaggctgaggaagagatcaagc

SEQ ID NO: 444595 - DNA, 75 bp, Homo sapiens
atgtaggactgtgggacccatcacttacgaaaaaccaggtcttctacattaagtccattgagccacagaaagtat

SEQ ID NO: 444596 - DNA, 100 bp, Homo sapiens
cgaaaacatgtactacagccagtcttctatgtttccacatcggtcagaaaaagatgtacagacagtgtttgtgtgttcctgttgtggctaactttaagaa

SEQ ID NO: 444597 - DNA, 100 bp, Homo sapiens
gcggtttttattaaggctgttcatgtgaaaggggtggcactgaatcaacaagacaagcaactcaattgattaatgctttgatcaaggatccagacaaaga

SEQ ID NO: 444598 - DNA, 82 bp, Homo sapiens
gcgctgtatcaagcctaatgacttcaagttcccattcaccaaaagttcaaacagaccctccctcagttccaatatgtgacct

SEQ ID NO: 444599 - DNA, 75 bp, Homo sapiens
aggcatcacatgagcatgaagataaaagtcctgaaacagttttgcagtcggttactcactataaacaatatccac

SEQ ID NO: 444600 - DNA, 98 bp, Homo sapiens
ttgctgctgctggattcagtgtgggagagtttgcagccctagtgtttgccggagccatggaatttgctgaagtccatgacttgcagagctttggcctt

SEQ ID NO: 444601 - DNA, 82 bp, Homo sapiens
tgctcagactggtagcttcaaacagctcacagttaaggatggccaggccatgttatgggatctcaacgaaggcaaacacctt

SEQ ID NO: 444602 - DNA, 90 bp, Homo sapiens
agagaggcgacggagccgctcaagaagtcgagatcgaagatttagaggccgctacagaagtccttagtggcaattttggaggtagccccg

SEQ ID NO: 444603 - DNA, 132 bp, Homo sapiens
actcaagcaacccccgcttggcctcccaaagtgctgggattagaggcgtgagccactgcacctgacctaaggacaggaagatgtcacccaagcgcatagctaaaagaaggtcccccccagcagatgccatcc

SEQ ID NO: 444604 - DNA, 100 bp, Homo sapiens
gtttatgaagcactgagaaatgaaacctcgacctgtctcccagttggttgcacagcaggttactcagcagtttgtgcctcctacacagtcaaagaaagag

SEQ ID NO: 444605 - DNA, 100 bp, Homo sapiens
gcggagtgcaacgccgtgcggcaggcgctccaggacctgctcagcgagtacatgaataatgtactaggttttgacaagcttgcatcatgcgtgagtataa

SEQ ID NO: 444606 - DNA, 100 bp, Homo sapiens
gatcaggaaacggcttcttcctcacttcgccgcctgtgactgcagcagcagcggcagcgcctcggttcctgagcccaccgcaggctgaaggcattgcgcg

SEQ ID NO: 444607 - DNA, 75 bp, Homo sapiens
tttttgggaacttgcgtgcaacatcttaattcttacttagcaaaatcaccaggacagccaatacaagtggtttat

SEQ ID NO: 444608 - DNA, 90 bp, Homo sapiens
ttcttcctaagcaaagcagcatccttcagggcctggagctcctggacacaaaagccatttttgggagatacaaggcagatccaaccatcc

SEQ ID NO: 444609 - DNA, 82 bp, Homo sapiens
cgccgcctcgggaccggctgtatgattaggccacaatcttcaatgagtaaacatattcctgaagagcaaccgaggtttcaat

SEQ ID NO: 444610 - DNA, 100 bp, Homo sapiens
gggcaaacctcgcgaggagaagaggacggccctgagcaaggaggttctgggggaagagaagctgaaggagatactgaaggagcgggaacttaaaatttac

SEQ ID NO: 444611 - DNA, 87 bp, Homo sapiens
agagctgtccagctggcgacacgtgaagaccggctgtgagacagtggatgccgtacaagaaagaacatagggcctgattacattcca

SEQ ID NO: 444612 - DNA, 100 bp, Homo sapiens
cccagttcatcatggcttcaacatccagttaatgaaggagttcccccttctgagtatgttcaatatccatgaaaaccttttagaagcccttctggaacta

SEQ ID NO: 444613 - DNA, 98 bp, Homo sapiens
gccgccactgcccggcgcccgggctcagagcgccgcagtttgatggtgacagtgcctacgtggggatgagtgacggaaacccagagctcctgtcaacc

SEQ ID NO: 444614 - DNA, 101 bp, Homo sapiens
cgaacgccagggaccctgtgcaggcctgctcctccgtttgcaagactgtgccctgtccacggtgcctcctgcatgtcctgctgccctgagctgtcccgagc

SEQ ID NO: 444615 - DNA, 100 bp, Homo sapiens
gcagacatattccttgagagcatttgagaaaccccctcaggtacagacccaggctcttcgagactttgagaaggcaacaagaatgggtgaatcagcaaag

SEQ ID NO: 444616 - DNA, 75 bp, Homo sapiens
gcacgccgtcattgacatcaatgccttcccagggcaagttaaagtcttcagagccctgtatacgtttgaacccag

SEQ ID NO: 444617 - DNA, 102 bp, Homo sapiens
ctttcctccaacttgctgcgggtggatctccgctggacacaccgcctccgaggtccatggaattgtacggcggtccagttcatttaatacgggtcgaattga

SEQ ID NO: 444618 - DNA, 100 bp, Homo sapiens
accacctctctgatctggccttaacattgcccactgatgctgtgtccatctgtcttgccatctccacgggggactccggggggcccctcgtgtgtaagga

SEQ ID NO: 444619 - DNA, 100 bp, Homo sapiens
cgctctcttcatgggccatgcccggtgaccacttttggaccaaaggcctgtgtgctgcagaacccccagaccatcattctgatgaccgggattccaagcg

SEQ ID NO: 444620 - DNA, 75 bp, Homo sapiens
tttcggtagccatggcacaagaatatagatggcactggatctttaaaacgcagtggttcctttagcaaactccgg

SEQ ID NO: 444621 - DNA, 82 bp, Homo sapiens
ctgaatgtttaattaatcaggaatgtgaagaaattctacaggtcatggaaaatggaagatttgcaaaatacaaatattttac

SEQ ID NO: 444622 - DNA, 90 bp, Homo sapiens
cagagaccgtgaagattccaagttcaggagaactcgaccgattccaacaatgtctcacccatcttggctgccacccaaaagcactggtga

SEQ ID NO: 444623 - DNA, 90 bp, Homo sapiens
ccggccggtgcgccgcggcccgcggaacgtcaaggtcgtgggaaataaaaggcagttctacacagactgcagcaacggttgcatctgcat

SEQ ID NO: 444624 - DNA, 100 bp, Homo sapiens
tgtgcaaactggccgtgattcagtataacctagaccagtcctgtttgcctcatgatatcaggcttttacactctgatcgagatcctattccagatgttcc

SEQ ID NO: 444625 - DNA, 90 bp, Homo sapiens
gatgttcctggggttactgtaaatgggaaggacaggcagagctaaacaagaggtaagccagcgattccccacaacacaccccaacgggcg

SEQ ID NO: 444626 - DNA, 100 bp, Homo sapiens
aggtctcagagctttacgatgtcacttgggaagagtgatgatgcgggtgtgctggttggtgagacaggacagccggcaccagcgaatcagacttccacat

SEQ ID NO: 444627 - DNA, 101 bp, Homo sapiens
gaaacatccggaacccttcttcgccctcgccaaggaactctatcctgggcagttcaagaaaggacccaggagcgataacagtaaatcaaataagatatttg

SEQ ID NO: 444628 - DNA, 75 bp, Homo sapiens
ggcttgggtggacccagaagacccccacaaatggcaccctgtgctgcgcacactaaagaaccgcattgaagagaa

SEQ ID NO: 444629 - DNA, 75 bp, Homo sapiens
gacagaacatgcactccatcaggttctcttagaagcacaagatatggcagtgagagaccataacgtggaattcag

SEQ ID NO: 444630 - DNA, 99 bp, Homo sapiens
gaccacacagacctcgccattgagtatgagaggctggtacagttctggtttgccactgggggtgctggcttctgcatcaatcgcaaactggctttgaag

SEQ ID NO: 444631 - DNA, 100 bp, Homo sapiens
gtccaaggatgaatcccagtccctgttacgggtaatgctggaggatggaagaagcaaagggtttggcttcgtctgcttctcatctcctgaagaagcaacc

SEQ ID NO: 444632 - DNA, 76 bp, Homo sapiens
tcatcgaacggctccttcagcagctccaggcctgttgcagtctccaaggcaccatgaatgccatcgtggctctctg

SEQ ID NO: 444633 - DNA, 82 bp, Homo sapiens
aagcccgccacgccgcccagcccggccccgcccgcgccggaagagccacgccgatccagagacaatggccccgatgggatgg

SEQ ID NO: 444634 - DNA, 83 bp, Homo sapiens
gggcgatggacggccgaaccccgcgcccgcaggacgccccagccagtttggtgccctggttgtcagatgttggaaagcagtag

SEQ ID NO: 444635 - DNA, 82 bp, Homo sapiens
agtactggcggaggggctggacgttccacgccaaaggctccccatcaacccgggcagccgggatttaaattcacggtggctg

SEQ ID NO: 444636 - DNA, 123 bp, Homo sapiens
ccagctccatccacagcataaccgggctcttttcaatctggggaatctcctcaaagctaaagttgcagacaagatccagctcatcaataatatgctggacaaagtcaatgagatgattattgg

SEQ ID NO: 444637 - DNA, 75 bp, Homo sapiens
gtacagagagcctggtgtggagcaagataaggatcttttgccagaaatgagggcatactggcctgacgtaattca

SEQ ID NO: 444638 - DNA, 75 bp, Homo sapiens
gctgctgaagacagcactcaaagtctattatcctcccagtccacaacgctgaaccgtggctggacgaatgtttga

SEQ ID NO: 444639 - DNA, 75 bp, Homo sapiens
ggcgatggatccgtttacggagcactgccagtgaaagatgtagaagataaacctgaacaacaaaccagaacaaga

SEQ ID NO: 444640 - DNA, 88 bp, Homo sapiens
ccttcgccgccgcgcacaaccgcacgtgcaggaatactcccccagttgcaagaggcgcaggaccgtggaagacttcaacaaattctgc

SEQ ID NO: 444641 - DNA, 100 bp, Homo sapiens
agatcatcagtcaaggaagacccactggagagtgttgtcagtgctaaagcattcattgctgtcttttaagagacgaagagccatggagactttgaaactt

SEQ ID NO: 444642 - DNA, 51 bp, Homo sapiens
taccaggcatccagccccgatgagattaactgctgaagtactgatcgagtt

SEQ ID NO: 444643 - DNA, 100 bp, Homo sapiens
ctcccgagcagctgggactacaggcgtgccgccgccagacggattactggcagttcgtgaaagacatccggtggctcagtccccactcagcccttcacgt

SEQ ID NO: 444644 - DNA, 97 bp, Homo sapiens
ccgcctctgtcatttcctagagctgtggcctcggtaactctgggtggattttaactacaactcttgtcctctcggtgatggtattgctttggatttg

SEQ ID NO: 444645 - DNA, 98 bp, Homo sapiens
tgaggaccgggggtggaggtggtgcctctggcagtgacgaggacgaagtgtccgaggaatttagataatgggctgtgtgcaatgtaaggataaagaag

SEQ ID NO: 444646 - DNA, 100 bp, Homo sapiens
ggtgcccaccatcgagtccctgatagatgaggaccttgagattgaattggttgaggaagagcctccattcctgagagggcacactaagcaaagcatggac

SEQ ID NO: 444647 - DNA, 100 bp, Homo sapiens
gggcagtgcatgaagccaggggtcatcagccatgctccagacagtgtggttccagaccatagtcttgagtttacttatgaggtcaattggaaataagaac

SEQ ID NO: 444648 - DNA, 95 bp, Homo sapiens
atcactggagccaccagcccaaccgtgttgtatgtgagtggaggaaatacgcagaaatggatgatgaagactgtgaaagaagaagaatggaatgt

SEQ ID NO: 444649 - DNA, 74 bp, Homo sapiens
agcggtggcaccgggatcggttgccttgagcctgcctcctggatgaggaagtgagccgcactctcaacgcggag

SEQ ID NO: 444650 - DNA, 75 bp, Homo sapiens
gattcttcaaggtggggttggcatcccccacatacgatgtgttcagagcaacattgttttgttgacacaagcatt

SEQ ID NO: 444651 - DNA, 100 bp, Homo sapiens
aaaattttcagaagcacatgtattataacagtcaggatctggtgattttgaagagaaaccacaacaacaaagatgaaaacccctgcttcctttacctgag

SEQ ID NO: 444652 - DNA, 90 bp, Homo sapiens
caaaatacaggatctgcctccaggacttgaacgcaactcccaattgcagaaaattggcaacgtctctgaagagcccttgcttttgcctgg

SEQ ID NO: 444653 - DNA, 98 bp, Homo sapiens
gtggagacggacgtggtggagattgaggccaaactggacaaggatggcaatggttatatcagtgcagcagaactacgtcacgtcatgacaaacttagg

SEQ ID NO: 444654 - DNA, 75 bp, Homo sapiens
cgttattcaatgtcaggctgaagctcaagaaggttcgacatggtgcaggcactggacttagggaaattcttaaag

SEQ ID NO: 444655 - DNA, 83 bp, Homo sapiens
aaaagaaggagggacgtatagatgatttgctcaggatatgtgtcacaaagatgtctacacggaactgccagggaatggactca

SEQ ID NO: 444656 - DNA, 100 bp, Homo sapiens
cggggacctgcgctgactaggtccggggaagtactatactggcaattgctggagaagattttgcaattgttgcttctgatactcgattgagtgaagggtt

SEQ ID NO: 444657 - DNA, 109 bp, Homo sapiens
cctggatcatggctgccgcgccgccgctacgggaccgcctgagctttctacaccgggtgtggacactgccagcggctgcagccgacttggaatgacctgggagacaaat

SEQ ID NO: 444658 - DNA, 96 bp, Homo sapiens
cggcggcggcagcagcggcagcggcaagcaccatgatgattattctccaccgtctaagagaccaaaggccaatgagctaccgcagccaccagtccc

SEQ ID NO: 444659 - DNA, 90 bp, Homo sapiens
gtttgaggagcattgcttctcatacagtaaggtgagaagccttataagtgctcatgggagggatgtgagtggcgttttgcacgaagcgat

SEQ ID NO: 444660 - DNA, 75 bp, Homo sapiens
ggagaaagaatggctgtttcagtagcaatgtccaagtgcatctagtgagagtgaagctgaaaatcttgaagcaca

SEQ ID NO: 444661 - DNA, 114 bp, Homo sapiens
ccggcccaccctacatttagcgcatcatgtgatccgggaattggcagcaatgaaacagattctcgttaagatgcatagtaaacattctgagaacagcttacttctcactaaaac

SEQ ID NO: 444662 - DNA, 83 bp, Homo sapiens
gcctctgctcccagccagctgtggtttgctgctgacacgccgaccgcctgctgcttcagctacacctcccggcagattccaca

SEQ ID NO: 444663 - DNA, 101 bp, Homo sapiens
ttcgggtcgggattcggggtggcccattcccaggcaggctgctaccgcccctccgcttccagacattctcagctgtcaggaaggatttgatgccctggatc

SEQ ID NO: 444664 - DNA, 80 bp, Homo sapiens
gaagcctgtacctgttttatacttgcttttgcttcagcgttctgtggttgtcaacaggaagggaaaaggccgaggcatca

SEQ ID NO: 444665 - DNA, 50 bp, Homo sapiens
ttttcagggacgtagccatccagaggtcgtccttggtggaaggaaccatg

SEQ ID NO: 444666 - DNA, 83 bp, Homo sapiens
ggagctgaagccctttgtgactgcaatctcgaggtgagaagccctaccactgcaactgggacggctgcggctggaagtttgcg

SEQ ID NO: 444667 - DNA, 83 bp, Homo sapiens
gagctgtgcagccgcgaggaggcgcgggaggtgttcgagaacgaccccgagacggccaccagcttgggctccccacggagggc

SEQ ID NO: 444668 - DNA, 100 bp, Homo sapiens
cactccaactggcttcgcttcgttcatgaggcaccatctcaggagcagaagaacttggctgccattcaacctccacctcagatatatgacaagcagttgg

SEQ ID NO: 444669 - DNA, 88 bp, Homo sapiens
aggggccttcgccaccacgcactgggtcgtcacggaggacgggaaaatccagcagcagactgacagtgagcgcacggacaccgcagcc

SEQ ID NO: 444670 - DNA, 50 bp, Homo sapiens
aggctggtctcgaactcccgacctcagcttgtcgaccaggtttctacaag

SEQ ID NO: 444671 - DNA, 75 bp, Homo sapiens
tattaatgattataaccggagattctcagggcaacccagatctgtgtatgcagggcctcctccaagtggtgccta

SEQ ID NO: 444672 - DNA, 100 bp, Homo sapiens
ctcgttatcatgtggcagaagcactatgttaagtgggcagaccaacatccacctcagcaaaaacttcttcctgacgaatcgcgccagggagcgctcagac

SEQ ID NO: 444673 - DNA, 90 bp, Homo sapiens
ggattaattagcccaagaaacattatattcatctgtgttccagatcatctccctggtaatttaccccgtgaagtacacccagaccttcac

SEQ ID NO: 444674 - DNA, 100 bp, Homo sapiens
ctgaattgtgctgccttggccaaaagaggcttcagggatgacttcttagggggcaggggaggtagtcgcccaggcgaccggcgaacaggcccccccatgg

SEQ ID NO: 444675 - DNA, 90 bp, Homo sapiens
caacctggcccatgagatgatagctgtggaaggtggagccgccaccaaaatgcagattttcgtgaaaacccttacggggaagaccatcac

SEQ ID NO: 444676 - DNA, 139 bp, Homo sapiens
cgccaagagcgacgccgccgtgtgcccaacggtcggtgtccccggctgaggcagcgcggccgcagcagccctgatcttcagcctgttaaacaagaaaacgaaaaaccccttccagaaaacatggatgcatttgaaaaag

SEQ ID NO: 444677 - DNA, 82 bp, Homo sapiens
aactaaaacccagtgcgtacgcattgctacaaaagagaatatgccttctgcatcctgtgatacactactggatgacatcgaa

SEQ ID NO: 444678 - DNA, 98 bp, Homo sapiens
ggggggattctcgacctgctaacagaactggaccttttcggtttccacttcaagcgtgacccttttgcctgtgggatgagctccagcatggggtgagg

SEQ ID NO: 444679 - DNA, 97 bp, Homo sapiens
gccatgagcaacaaatgcgacgtggtcgtggtggggggcggcatctcagccccactgtgttctccttgcctcaaaagaaaactcggcacctgttaaa

SEQ ID NO: 444680 - DNA, 50 bp, Homo sapiens
cgccagtatctgatgaaggtaagaggggatatcattttcaatgcccaata

SEQ ID NO: 444681 - DNA, 100 bp, Homo sapiens
cagaacctagcctatcagctggggctggatgagtagagagatcatcattgcctgaatttagctttgtgactgcaagagcaagaccagttcctgtctggag

SEQ ID NO: 444682 - DNA, 98 bp, Homo sapiens
cctgttgggtgaaggagcagagcggccggaagcgcggagggagccgcgggatggaccgcagtggagtggcagggtcccagccagtgagtgagaagcag

SEQ ID NO: 444683 - DNA, 120 bp, Homo sapiens
ccttcctgtacctcttgagccaggccgaccccgacccggactcggacaagccctgggcgctgcctatggcacagccaagagcggtaccggcattgcggccatgtctgtcatgcggccgga

SEQ ID NO: 444684 - DNA, 75 bp, Homo sapiens
agctctgctgagagagtgcaagccgtgggagcgtttcccaaagtgtattctgcggaactagcacctactgtgttc

SEQ ID NO: 444685 - DNA, 71 bp, Homo sapiens
agccaacccaaattaccttaattgcaattaagttggaatatgcaaggttggttaagttggcccaagaagac

SEQ ID NO: 444686 - DNA, 74 bp, Homo sapiens
cttttaattaaaaattccttttccaggtcgacttatcaaaggatctccctcactggaacaagcttaaagcagat

SEQ ID NO: 444687 - DNA, 123 bp, Homo sapiens
aaaagacctcggggccggcctcgcaaggcgcttcccctttccagagagccagaaagaaatcgcccaggaccacaccgcagcgtaactgcaggcctctcagcgaaaaagggggaaagcaaagac

SEQ ID NO: 444688 - DNA, 97 bp, Homo sapiens
actgactgtgatagagaaggcgaaaacatcgggtttgagattatccacgtgtgtaaggctgcctatcagcttatcactgtggtgatcgcagccgcgg

SEQ ID NO: 444689 - DNA, 98 bp, Homo sapiens
ggtgagccttctcgtggcggcggggaccgtccagcccagcgattctcagtcaggaagctgacagctgggaaattatagaagggctgaaaataggccaa

SEQ ID NO: 444690 - DNA, 82 bp, Homo sapiens
caacgatggtgaaaagggtcctcctgctcacagtgtgaataacaggtcagcccaaggccaaccccactgtcactctgttccc

SEQ ID NO: 444691 - DNA, 75 bp, Homo sapiens
ggacaccagcaagctgttcaatgaggaggtctctgctgctgatgaagctgtgaccaaacgcacccaacccttggc

SEQ ID NO: 444692 - DNA, 75 bp, Homo sapiens
gatgtgatgctggagaacttttcgcttatggcctcagtaggttactgtgtctccagaaacacatatggacctcac

SEQ ID NO: 444693 - DNA, 83 bp, Homo sapiens
gtctgaactaggatgtcccgacatgaagatagcctgggctggaagctcttctacgtcacaggctgcctgtttgtggctgtgca

SEQ ID NO: 444694 - DNA, 75 bp, Homo sapiens
atccctggatatttttgatgagagatcacatccacttacaaaagaactctgcaacatgatacttgattgctgtgc

SEQ ID NO: 444695 - DNA, 75 bp, Homo sapiens
gctgttttgccggaggagcccctcaggccaataacaagcctttgtattcatttgaagataatgcagactatgttt

SEQ ID NO: 444696 - DNA, 75 bp, Homo sapiens
cgagaaccgtcagtttgagccagatgatcctatagcaatggaactcagcgatgcaaatctgcaaacactaacaga

SEQ ID NO: 444697 - DNA, 82 bp, Homo sapiens
tgctaagactacctttttcagaaatgcgcagagcaaacatctttcaaaggtatgattatcgggaaatgctgcacaatgccac

SEQ ID NO: 444698 - DNA, 100 bp, Homo sapiens
caggacgtgaaggggaagaggcccaccctggagtaaccctcactggagaatccagagggtttccaggcctgaggtgcccgccctggccccaggagaatga

SEQ ID NO: 444699 - DNA, 100 bp, Homo sapiens
atcagaacactcacacccctactgggacatgcccataccccttcgcacttctacacacccctgaagacagagagggcagagcggcttgggtaaatccacc

SEQ ID NO: 444700 - DNA, 75 bp, Homo sapiens
tgaaaaatggcgactgtggcagagttgaaggctgctgcaagctttcttcctggtggcagatgacatcatggattc

SEQ ID NO: 444701 - DNA, 95 bp, Homo sapiens
cagcctcttcgagcgccgcggacgcgtcatcgagtgtgacgtggtgaaagtttttgaaatcatgaatcctgtttatagtcctggatcttctgggg

SEQ ID NO: 444702 - DNA, 99 bp, Homo sapiens
caacgaggctccctggagcccgacgcagagcagcgccctggccgggccaagcagggagtgcctggaaacaacggtttgccaggacagcctgggctcact

SEQ ID NO: 444703 - DNA, 80 bp, Homo sapiens
gtccgactcgctacgcgggtcttgcgagatatctggccgcctctgccgcagctggaggctttcagtccagtgtaaagctg

SEQ ID NO: 444704 - DNA, 100 bp, Homo sapiens
ttcagtgacatcagtgctttgacagggggaactgttcatcttgatgagctgtcggaaaaggtaacagaagatggaactcgaaatcccaatgaaaaaccta

SEQ ID NO: 444705 - DNA, 74 bp, Homo sapiens
ttggatgttgccttaaagaagaaagagcgtgccgaacgaagccgcctgtcttggttagatggctctggattagg

SEQ ID NO: 444706 - DNA, 100 bp, Homo sapiens
gagccgcgaccggctgcgcttcctgcagctgcacaactggctggacaacaggtgcgcgcggagccatggttatcatgtcggagttcagcgcggaccccgc

SEQ ID NO: 444707 - DNA, 51 bp, Homo sapiens
cctgagtccaaacactcaagatgtccaatatcagatggaaatgatgcggag

SEQ ID NO: 444708 - DNA, 74 bp, Homo sapiens
ggcagagggcacccaacttcagcctggagcggacactggcagccgagatgggttgtccaataactgcatcacct

SEQ ID NO: 444709 - DNA, 50 bp, Homo sapiens
agtatactggctggctccttctttaggaacaagaccctgcagatggagaa

SEQ ID NO: 444710 - DNA, 83 bp, Homo sapiens
tgtgggagatcgtgggcgagctgggcgacggcgccttcggcaaggtttacaaggtaagatcctgaggaggcaggagagggaca

SEQ ID NO: 444711 - DNA, 83 bp, Homo sapiens
tcccggccgtctgggcggccgccgcgcttctgctctcagtgtcccggacttcagcaagagtgagccatggagctacgtgtggg

SEQ ID NO: 444712 - DNA, 100 bp, Homo sapiens
tgttcttaaccacctggatttccatctggatgttgctgtgatcagtctgaaatacagtcgtggttcaattccagaattctttcatattatgaaaagaaag

SEQ ID NO: 444713 - DNA, 101 bp, Homo sapiens
tggagtttgatgaggagcgagcccagtctcttcaagaaaatgaggaggaggagattgggaacctagagcttgcctgggatatgctggatttagcaaagatc

SEQ ID NO: 444714 - DNA, 75 bp, Homo sapiens
gctcgctcaagatggcggcgcagccaccccgcgggatacgcctcagcgcgacatgcagagcagttctttgaaact

SEQ ID NO: 444715 - DNA, 100 bp, Homo sapiens
cgctttcttcctggagcggagcgcaggcgccgagactgacaacgcggtcccacagtttcaggtttagctgtgcctcccagtgactataatgacaaggaag

SEQ ID NO: 444716 - DNA, 75 bp, Homo sapiens
aacaaaattagttaaggtgtccaggaagaacatccaaggggcaggttggtctcctcttcatattgcggcttctgc

SEQ ID NO: 444717 - DNA, 83 bp, Homo sapiens
cccgtccgacagccaggcccgggagaacattttgaaagcgaagcagaagccgtagaatcagcggcgagcctgttgaaagaacc

SEQ ID NO: 444718 - DNA, 82 bp, Homo sapiens
cgcagatcctgagacccggacagtggcagtgaaacaggtgctggcccagcagggggagtacagtgaggccatccccatcctg

SEQ ID NO: 444719 - DNA, 50 bp, Homo sapiens
ggagaaggaagaggtgtttgaaaaggcacacaggatatcaccgatgccag

SEQ ID NO: 444720 - DNA, 75 bp, Homo sapiens
acacaggagaatggataaggcaaaacggaggctgggtataatgggtctctcccaaatggcgatagaggaaggagg

SEQ ID NO: 444721 - DNA, 100 bp, Homo sapiens
gcgcagggatatctactgaaggaagctcggacttctcctggggatatggctcatggatttgagatcttatgctccaaatgtagcccacatttttctgact

SEQ ID NO: 444722 - DNA, 83 bp, Homo sapiens
gccgatccagcctgcggagcctgtggggcaggtacggacattgctgcaggagaagaggttgccatcaagcttgaatgtgtcaa

SEQ ID NO: 444723 - DNA, 82 bp, Homo sapiens
gtcgagatgtctacttcgaagactggcaagcacggccacgccaaggagccaggaggaactctctcccagtccgcctttgttg

SEQ ID NO: 444724 - DNA, 100 bp, Homo sapiens
tggccagctgccgcgactgggaggagcgccggaacgccgaggcccaggggcaagattcttgccaagagaattaatgtgcgtattgagcacattaagcact

SEQ ID NO: 444725 - DNA, 100 bp, Homo sapiens
aaaccagttgcgaaatggtctgaggcagagtgtggttcaccaacaagtcccaaatttggaaaagctgactcatatgaaaagctggaaaaactaggggaag

SEQ ID NO: 444726 - DNA, 93 bp, Homo sapiens
acggggaccccggccaacatcagccttgcccagtatctcatcaacgccaggtactaccgctgtgaccgaaacctggtgtggaacgcaggcgcg

SEQ ID NO: 444727 - DNA, 90 bp, Homo sapiens
ggacgactgggaccgggacctgctgctggacccggcctgggagaagcagcagcgcaagatgtccaacatcacagtcacatacagagatgg

SEQ ID NO: 444728 - DNA, 100 bp, Homo sapiens
caaggatatgatatcatggaaccagcagcaaagaagtgctatctggaaagagaggcttctccagggaaagtgaccgaggcagtgaaagaggccattgacg

SEQ ID NO: 444729 - DNA, 82 bp, Homo sapiens
tgaagatttgaagctaacagagctcctccgatactacatgctcaacattgaagctgctaagcttttctgaagctcagcagca

SEQ ID NO: 444730 - DNA, 75 bp, Homo sapiens
tcagttgcacatccccacatcaatgcactgccaatgagagatggaaccatgtaaccaccacgaccaagaggccag

SEQ ID NO: 444731 - DNA, 75 bp, Homo sapiens
caccccggcgcccgcgccatgcggcgggagagttgattatggaagattcccacaagagtaccacgtcagagacag

SEQ ID NO: 444732 - DNA, 83 bp, Homo sapiens
accacatagacatttacgcggatgtcggcgaagagttcaaccagtgtactaatggtcacttgatgtgcgctggctgttttatc

SEQ ID NO: 444733 - DNA, 73 bp, Homo sapiens
gaagctgcaaatgaagcattacttactaaagccggatcacctcaacagtcacgtcagacaagtgcactcaaca

SEQ ID NO: 444734 - DNA, 90 bp, Homo sapiens
ccctttggaacctaaggagccctgccgaggagctgaaggccttcagagtccttggggtgattgacaagatgaggtttatataactttcca

SEQ ID NO: 444735 - DNA, 100 bp, Homo sapiens
cagccagttccctgctgaagatggccagatccccttgtctgggcgtctctggccgagcctctttttgtggaaaacgacagcagcagcagtggcctggaag

SEQ ID NO: 444736 - DNA, 101 bp, Homo sapiens
ctcttccagctacaaactctaggtttgaaaggattttaagcttgactttggcaattcccaaggcaaaacaagtcaaacttggcatggagggatagccacca

SEQ ID NO: 444737 - DNA, 75 bp, Homo sapiens
caccatctccttctttgagattgatggacgtaagaacaagggcaattgaaggaacagactaaaaatcgtgtcctg

SEQ ID NO: 444738 - DNA, 75 bp, Homo sapiens
aggcgggatggagtgatagggaaggcatgtcctagttcagataaacatgctttagtaactccttggctcaaaggc

SEQ ID NO: 444739 - DNA, 75 bp, Homo sapiens
aaggaagccacgtgcagacatctacaaccttcgatctcctgacgagcccagagacggaaagtacaaagactagta

SEQ ID NO: 444740 - DNA, 90 bp, Homo sapiens
tgttatcccacgacccatccttgaagaaggctgctgatactttggctgtgaggcaaaaaaggagaatttatgatatcaccaatgtcttag

SEQ ID NO: 444741 - DNA, 90 bp, Homo sapiens
ggatcaacaccggggagtctgcgggctgaagccgacgtagcttctctgaacagacgcatccagctggttgaggaagagttggatcgtgcc

SEQ ID NO: 444742 - DNA, 97 bp, Homo sapiens
ggatgagagctgcaccgcgcgggacaagtcgccggcggcgcccgacggagcaggttgttcctcaaagtcattcaagctgtactcgccgaaggagccc

SEQ ID NO: 444743 - DNA, 100 bp, Homo sapiens
caaattccagtgacaacatctacacaatgattaatccagtgccgcctggaggcagccggtccaacagctgcccctccaagctgaacccagagaccttcgt

SEQ ID NO: 444744 - DNA, 100 bp, Homo sapiens
aaggtgttcctgctgttgttattgacatgtcaggactgcgggtcgggtcacaaatcttcgaagagtgacatatgttgttttagatgaagcagacagaatg

SEQ ID NO: 444745 - DNA, 83 bp, Homo sapiens
cggggcaacagctgagccgtctgggaagggatgcatctactgtaaattcacctgtcacccagaatgccgcagcctgatccagt

SEQ ID NO: 444746 - DNA, 100 bp, Homo sapiens
cctccaggagcccagacaccagccccccaccatggagagtagttatcttgatggaattagaagttttgaagtcagctgaagcagttggagtgaagattgg

SEQ ID NO: 444747 - DNA, 80 bp, Homo sapiens
tctgaggctgatatgcaatgtcacttacaacattaatcagatactgcatttaaggccgagacgcatccagagctttcgtg

SEQ ID NO: 444748 - DNA, 100 bp, Homo sapiens
gcggcctgacccagagccacttctcaccgagatgattcatgaagaacgggttaacttgtttggtttctggagccgattcaacggatctaacagtaatggg

SEQ ID NO: 444749 - DNA, 75 bp, Homo sapiens
ttgtgagagacaacgactgcctcaggctgaactccagtgcacccagttagacttggagcggaaactcaagttgaa

SEQ ID NO: 444750 - DNA, 101 bp, Homo sapiens
ccgatactgagcttcttcctatttgccatgggccgtatggccacctcctgtcttacccctacaccgagccagcgaaccccggagactcctacctgtcctgc

SEQ ID NO: 444751 - DNA, 75 bp, Homo sapiens
gccgccggagccgcaatgcctaaaggaggtttttctattgggaaagctactgatcggatggatgctttcaggaaa

SEQ ID NO: 444752 - DNA, 51 bp, Homo sapiens
ctgcaatcctggacatgaaatggtggtgctggacaacacagccctgaaccg

SEQ ID NO: 444753 - DNA, 83 bp, Homo sapiens
aaaaccagttattgaatatcaagaggaggagttgttgggaacagagttcagaggcagcagaaactggagttagtgaaaatgaa

SEQ ID NO: 444754 - DNA, 74 bp, Homo sapiens
cagagtattaaagaacactagacatccctttttaacaacatgggagtcccaccgtattgtccaggctggtctcg

SEQ ID NO: 444755 - DNA, 100 bp, Homo sapiens
cgccgtgatgcttggctgggcgcggcagctccgccgcatgcaagagatgattgcaaggatgcaggcgcagatgcagatgcagatgcagggcggggatggc

SEQ ID NO: 444756 - DNA, 80 bp, Homo sapiens
tgggactgaagagggacgggtcccgcggcgagcgagctcctgaggattttttatcaagcagaaatgcatcgaacaacgag

SEQ ID NO: 444757 - DNA, 75 bp, Homo sapiens
ccgctgagcggggcgacccgagatttaatccagagactgacttcactatagaacccacagttgtatcaatggttg

SEQ ID NO: 444758 - DNA, 144 bp, Homo sapiens
cggcagcagccagacactgaggctgtgctgaacgggaagggcctcggcactggtaccctttacatcgctgagagattgatatcagtaaatgccattatttagtggatttggacaccatgagagaaacaccccgggagccaaaat

SEQ ID NO: 444759 - DNA, 83 bp, Homo sapiens
gatcggaagcctgcgtaactttctcccttgatccgggagtctttccactggatctgactgcagccatgagcagcaatgagtgc

SEQ ID NO: 444760 - DNA, 100 bp, Homo sapiens
ccgcacgcaccagatctgcaaactgcgaaaatgtgaggtgctgaagaaaaaagtagggcttctcaaggaggcagctgttgtgctgtgtatggacgtgggc

SEQ ID NO: 444761 - DNA, 95 bp, Homo sapiens
atggtcaccggcttcgtcttcatccagggcatcggtggatcttcttgttccaaccaaagtgactggcatcattacacaaggagctaaagattttg

SEQ ID NO: 444762 - DNA, 51 bp, Homo sapiens
cacgttcagtctggatacctccatgcactggatgtgtgtgagaagtgggga

SEQ ID NO: 444763 - DNA, 75 bp, Homo sapiens
tatcagttgagggatttgcagttgataaaatggctggagaggttaaggttttgcagacattgggtacagaaactt

SEQ ID NO: 444764 - DNA, 90 bp, Homo sapiens
cgcagtggtcgcttcttctccttgtgtgccatgcggagctgaatgccatcatgaacaaaaattcgaccgatgtgaaaggctgtagtatgt

SEQ ID NO: 444765 - DNA, 52 bp, Homo sapiens
tccagcggcaaagccaggctctccccaggttcaacagaagaggtggaaggtg

SEQ ID NO: 444766 - DNA, 116 bp, Homo sapiens
ctaagacttcttgctcatttctgagtattgtctttatatcctgacactatgaatgctacttggatgcctcttaaggctttacaggaagtatggtgctggcatctgcttggcttcta

SEQ ID NO: 444767 - DNA, 133 bp, Homo sapiens
taacatacagcactttgtggagaaagtcgtcttccacttgcacgaaagctttcctaggccaaaaagagggacaggagagagtggcaagagtacgtttatcaagcagatgagaatcatccatgggtcaggatac

SEQ ID NO: 444768 - DNA, 100 bp, Homo sapiens
acggctgaaggccctacgggagaaaaccgggcgcaagaacatccagtcatggataaaaatgagctggttcagaaggccaaactggccgagcaggctgagc

SEQ ID NO: 444769 - DNA, 103 bp, Homo sapiens
ccggcgcatcatggcggctggccgggcccaggtcccttcctccacaatgcagatcttcgtgaagactctgactggtaagaccatcaccctcgaggttgagccc

SEQ ID NO: 444770 - DNA, 100 bp, Homo sapiens
tagcatttgactagacggtatgaatttctaagtaaggcagaggcaaggctggcagcaaaacgggctgcccgggcagaagcaagagatatacgcatgagag

SEQ ID NO: 444771 - DNA, 50 bp, Homo sapiens
gatcaccaccagccgggaagaatttgccttgaaaagatcttttgaggtcg

SEQ ID NO: 444772 - DNA, 100 bp, Homo sapiens
ctggccggcccgacgtggtgtgggccctgcgggccctgggaccgagctgaggggaggctcggagttccgcggccgaggttagctttatacgtctacgaat

SEQ ID NO: 444773 - DNA, 83 bp, Homo sapiens
ggggcacggccaaccgcctgttggggttcgggggcggcggcgaagcccggcagggaggaggtacaggagaactgtgtgcggtg

SEQ ID NO: 444774 - DNA, 75 bp, Homo sapiens
aaacctcctagtagaaaaagttcttgggacaaacttcatttggtatctcattcagttgctaaacttatattagtt

SEQ ID NO: 444775 - DNA, 75 bp, Homo sapiens
atgatgacgatgatgatgaagaggatgatgatgaagaagtggtgtggcgtacattgcggctccctccggttctgc

SEQ ID NO: 444776 - DNA, 100 bp, Homo sapiens
gatgaaccccagtccccaggatacctacccaggccccacacctcccagcatcctgcccagccgacgtggggtcaaggcggataagaaggcggcacaagaa

SEQ ID NO: 444777 - DNA, 50 bp, Homo sapiens
atggaatcccttgcatggctctcagtgaaaactccaaagcttaacattct

SEQ ID NO: 444778 - DNA, 100 bp, Homo sapiens
caaatctcagcaacccctgtgcttctccccaggtccagccaatgcattcagaagccaaaatggcttttaaaaccaaggatggctatattgtagttggagc

SEQ ID NO: 444779 - DNA, 102 bp, Homo sapiens
actccttgattaaagagctccatcacttcaggattctgggagaagagcaggttgtatgactggtcagattctcagaatctgaaaataacaggaaaggcaatg

SEQ ID NO: 444780 - DNA, 100 bp, Homo sapiens
ggcctctcctgggatcggcccaaggccagttctccgcagggagactcatgcatctgtatgccgtgtgcgtggactgcctggaaggggttcacaagatcat

SEQ ID NO: 444781 - DNA, 75 bp, Homo sapiens
ccgagagtgtaactactttatggtggcgacatgtctaagaatgtgagccagtcacagatggcaaaattgaaccaa

SEQ ID NO: 444782 - DNA, 99 bp, Homo sapiens
cggaactcaaaacagacccatctttggatcttcattcattaagcagtgcagaaacacagggtgaagctgacactagaaggcctggaggaagatgacgat

SEQ ID NO: 444783 - DNA, 74 bp, Homo sapiens
cagacacggtggctactctgcctcggggacgaaagcaggaactctccggagtcctttctgtattgttgtgattt

SEQ ID NO: 444784 - DNA, 102 bp, Homo sapiens
cgggcccgggtgcgggcccggcgccgcaccagcagaacggattgttaaaatgagtcttcggaagcaaacccctagtgacttcttaaagcaaatcatcggacg

SEQ ID NO: 444785 - DNA, 88 bp, Homo sapiens
tgatcgcagtccggaggtgaggcggaactctgagggtaacaagatgctcaactatagtgctcccagtgcagggggttgcctgctggac

SEQ ID NO: 444786 - DNA, 75 bp, Homo sapiens
gctcatcaagcagcaggtccttaaggtagagatcttttcctagcaagctgttcacaagattgcctgataagaata

SEQ ID NO: 444787 - DNA, 82 bp, Homo sapiens
acagctgtggaaagaagttgcaaaacactgggtagcatcacgcagattgccatctcagaagagagcatggaagaggcagggc

SEQ ID NO: 444788 - DNA, 80 bp, Homo sapiens
gagcagatcctggtcctcgatccgcccacagacctcaaattcaaagggctgaaatctctttaatgatggagggaagcagg

SEQ ID NO: 444789 - DNA, 136 bp, Homo sapiens
agaaataccagtccccagtgagggtgtacaaatacccctttgaattaattatggcttgcaccaattccagctggacatcactgtgaaaatgggacgggataaagtccgagaaatgtttatgaagaatgcccatgtc

SEQ ID NO: 444790 - DNA, 74 bp, Homo sapiens
tgggacagctaccgcagcatgagcgaaagctacacgctggagggccatgaagcccccaggaggagaatcgagca

SEQ ID NO: 444791 - DNA, 82 bp, Homo sapiens
ccatgtcgggttattcgagtgaccgagaccgcggccgggaccgaggtgtcacaccatgtctgaccggaaggcagtgatcaag

SEQ ID NO: 444792 - DNA, 101 bp, Homo sapiens
caacgatcagcacttcagtcggaaagttggaacctctgacaagaccaagtactaccttcaaggccctccaggccctccaggtggtctgagaatagaagaca

SEQ ID NO: 444793 - DNA, 83 bp, Homo sapiens
ccgccgccgctcaccgcagccccctcctggcgacccgcaagtgatgtgtccaatctagatcccaacttctcatttgaaggcac

SEQ ID NO: 444794 - DNA, 100 bp, Homo sapiens
gaagatcgaggaaggcagaccacctgaagttgggagtttgagaccagcctgaccaacatgagagaagaagaaggaggttcctgctgtgccagaaaccctt

SEQ ID NO: 444795 - DNA, 97 bp, Homo sapiens
gtttcctgaggcctccccagccacgctttctgtacagcctgcagaactggattaaagcctgtggtttccacagaagcaccacctatcatatttgcca

SEQ ID NO: 444796 - DNA, 76 bp, Homo sapiens
acaaaagaccaacccttgagggaagagaattatctctaagtttccacggccactccagtgccaacagccaattcta

SEQ ID NO: 444797 - DNA, 100 bp, Homo sapiens
acaaggcttaccgaaagtggacacccttcttcagatgcctggaaaggaggaagaacgtgcaaaacgtgaggagctagagcgaatactggaagagaataac

SEQ ID NO: 444798 - DNA, 74 bp, Homo sapiens
acccactgaagacgtctgcgtgagaatagagaccaccgaggtgacctgaaacatatcacgaagctgaaaccttg

SEQ ID NO: 444799 - DNA, 83 bp, Homo sapiens
ctccgcacctcggggacattattgcgcgtggaacggctgcttttggaagaggcctgtgggagcaaatctgtgtatgacggccc

SEQ ID NO: 444800 - DNA, 82 bp, Homo sapiens
atctgccttctgcataggccaaacagcctgaactctttgcttccggaatccgggattgttgctgacatagaattagaaaacg

SEQ ID NO: 444801 - DNA, 98 bp, Homo sapiens
gaaacatgagcattcagtttcttggtacagtgtggatggtgatccccactttgttgtggatttccccctgagcagactcaccgtgtgcttcaacattg

SEQ ID NO: 444802 - DNA, 50 bp, Homo sapiens
tgcattcagaggacacacttcagatggggaaagaatcatgtgatgtacag

SEQ ID NO: 444803 - DNA, 50 bp, Homo sapiens
ggagaggagggaactgcggagcgggtttgttgataagccggggcccttcg

SEQ ID NO: 444804 - DNA, 98 bp, Homo sapiens
gacagtacgcctacttctataaagtcatccaggcagtggagctactgctgtggttcaggcagccctatgcaaacccaggcaagaacgtgtagcaataa

SEQ ID NO: 444805 - DNA, 83 bp, Homo sapiens
ggctggcagagtttccccgcaagtctttcttgttataagggaattggctcgggaaaaggtaatgcgagaagttaaagccttag

SEQ ID NO: 444806 - DNA, 100 bp, Homo sapiens
ctgggagaatatttaatggaaaatcgcttggttaaaacctgacacttttaacagtcctcccaaaccgaaggaccctgtatctgcagctgtgccagcacca

SEQ ID NO: 444807 - DNA, 109 bp, Homo sapiens
cgactcgcggaccggcgtccccggcgcgaagaggctggactcggattcgttgcctgagaacacagatatgtagaactcttcttgaattctacagcaggagcaagcggtg

SEQ ID NO: 444808 - DNA, 100 bp, Homo sapiens
gtgagctccggcccgggcgagcgggtgcgtctgccgcagagtcggcacctgaaggacatggagacaaagaaacagccttggtataatagcacgttagcat

SEQ ID NO: 444809 - DNA, 90 bp, Homo sapiens
gtgagacacaatttatcattgaataagtgttttaagaaagtggacaaagagaggagtcaggtttgccaataggattatcctgctgccatc

SEQ ID NO: 444810 - DNA, 82 bp, Homo sapiens
tgctgcagacggcgagacctcctgcacagagcataatggcagcgtctgaggttgctggtgttgtggccaatgcccccagtcc

SEQ ID NO: 444811 - DNA, 83 bp, Homo sapiens
gtcctacaacagtttggcgtgcaacatggggcttgagaaaggcccttcagatatttcaacactcctctcagcatcctccactt

SEQ ID NO: 444812 - DNA, 140 bp, Homo sapiens
cagagctgggcgcgggcaacggcggggtggtcaccaaagtccagcacagaccctcgggcctcatcatggccaggaagctggtcagtgagaaggtcggaggggccgaggggaccaagctggatgatgacttcaaagagatg

SEQ ID NO: 444813 - DNA, 75 bp, Homo sapiens
cagaatatgccaaaaatggagaaatttttggtattggcatactccacacatctgtaccattcttgagtgatcgct

SEQ ID NO: 444814 - DNA, 100 bp, Homo sapiens
acatggctcacgccttcccccaggacgagctcaaccccatccactgccgcggccgtgggcccgaccgcggggacccacctgcaggctgggacaatgaaaa

SEQ ID NO: 444815 - DNA, 100 bp, Homo sapiens
taaggattccaagtaactcttatttgctgtccagcagaaggagatcacacagagcccatccacgtccaccatcaccctggtgaccagcacacagtcatcg

SEQ ID NO: 444816 - DNA, 83 bp, Homo sapiens
cgaagttggaagtgtctcttagcagcgcgcggagaagaacggggagccagggggatatgagactttctactcggaatatcctg

SEQ ID NO: 444817 - DNA, 100 bp, Homo sapiens
tgattacaactatagaagatcgtatagtcctagaaagtctgccatcatggatgttctcgcagaagcaaatggcacctttgccttaaaccttttgaaaacg

SEQ ID NO: 444818 - DNA, 89 bp, Homo sapiens
ctcagaagaaaatgcaaaaaaactaatggaattagcctgcaacatgaaggcaagactggtgtctttgtactttgataccaagaggtacc

SEQ ID NO: 444819 - DNA, 100 bp, Homo sapiens
atatagaacatttcttttatcacaacaagcaaagtggatcagcaaaggctgcagtcaccagcatcttttccaaccttaatgaactgtatcctcaaaagaa

SEQ ID NO: 444820 - DNA, 153 bp, Homo sapiens
gttgtattgcaatcatggtgcagaaataccagtccccagtgagggtgtacaaatacccctttgaattaattatggctgatggatataggaaatcatcaggagccaagtgtgtttatcagctgcggggacacatcactcctgttcggactgttg

SEQ ID NO: 444821 - DNA, 74 bp, Homo sapiens
ccagccactcgcccctggcctcgcgggccgtgtctccggcatcatgtgtggttcgagactataagaggcttacc

SEQ ID NO: 444822 - DNA, 75 bp, Homo sapiens
tccaggagagaatgctgacagtcctgcaggatttctataattggcctgatgaatcctttgatgaaatggacagta

SEQ ID NO: 444823 - DNA, 74 bp, Homo sapiens
gtcgtggaagcaggactgcgccgcgtcttcctcaaggctgagtcatcactagagagtgggaagggcagcagcag

SEQ ID NO: 444824 - DNA, 75 bp, Homo sapiens
gggagccccgcctgaggtgccctaaacacactatgaccggggctttgaccacgacctttgaagagcttcattttg

SEQ ID NO: 444825 - DNA, 101 bp, Homo sapiens
cttcactttggaagcatgacaaggacatggaagaagacagagcttcctcatcctctggaacaattgttcagttttaagacaattatctcctatattgatga

SEQ ID NO: 444826 - DNA, 98 bp, Homo sapiens
actggaccccgcgagcaccagagtcggcgtaactatcgcctgacaggtcctgctgccggccacagagatggcatcgctgctgtcgctgcaggaggaga

SEQ ID NO: 444827 - DNA, 74 bp, Homo sapiens
tctcatgccacggccaaattcagtagcaggtgcttgtgagtgaggattctgacagtgatggcattgtggcccac

SEQ ID NO: 444828 - DNA, 100 bp, Homo sapiens
ggggaggggccgggcccaggagcctcagccccgccggcagccctaagggcaaggaccatggccaacctggagcgcaccttcatcgccatcaagccggacg

SEQ ID NO: 444829 - DNA, 100 bp, Homo sapiens
ccacggtgtggcagctgctctgaaccaggacctggacccggacccaaagtgccatgtctttaatgtgacttgttctcagaacacaaacaaaacctgtgaa

SEQ ID NO: 444830 - DNA, 97 bp, Homo sapiens
ccgccagatctacggagccaagggcttcagcctgagcgacgtgccccaggcggagatctcggcgctgtgcttcgccgtgagccgctcgctgctgctg

SEQ ID NO: 444831 - DNA, 98 bp, Homo sapiens
gggagagcaagccgggcggcctgccccgccggagcagcatcatcaagggaactctaatgatccaggacaaagaagttaccctggagtatgtatcaagc

SEQ ID NO: 444832 - DNA, 96 bp, Homo sapiens
agggttcctggggcatcgacgatctccatatttcattgcaagatttgatggtcctcgaagatttgaggatttagggtcaaggtgtgaaggaccgag

SEQ ID NO: 444833 - DNA, 74 bp, Homo sapiens
gaactgattgccctttaacagtcaatatgttggaggcatgctaaggtgaaggccatggaggtggacatagagga

SEQ ID NO: 444834 - DNA, 95 bp, Homo sapiens
gagttcttcaagaaatgcagagtgatcccatctcaggagcacctgaatggacggaagccttcccagtcctgcagccacctgcagactctcacaag

SEQ ID NO: 444835 - DNA, 96 bp, Homo sapiens
tggcgtccagctccggcctggcgtgaggaccccccaatccgcgtgagacccgggaaaaggagaagatgaaggaagccaaggatgcccgctatacca

SEQ ID NO: 444836 - DNA, 74 bp, Homo sapiens
tgcaagatgagcctcaagtgcttctgcattacagtaaagggagaagatgaggaagagaacaatttggaagtacg

SEQ ID NO: 444837 - DNA, 74 bp, Homo sapiens
agtctctgaaattgccagacaaaaccctcattgacctctatgaacagcctaccttatgttcagtattttggagg

SEQ ID NO: 444838 - DNA, 82 bp, Homo sapiens
acggggaaggagggaaagagctcccgcggttgccccattgcaaagtggcttccatgaggcaggctgaacctgcagatatgcg

SEQ ID NO: 444839 - DNA, 100 bp, Homo sapiens
gtttatgggaagccagtaacactgtggcctactatctcttccgtggtgccatctacatttttgggactcgggaattattgatcctgcagcatatcctgac

SEQ ID NO: 444840 - DNA, 83 bp, Homo sapiens
tgtctgcgagccaggattcccgggcgaccattgacgaggtggagacggacgtggtggagattgaggccaaactggacaaggtg

SEQ ID NO: 444841 - DNA, 102 bp, Homo sapiens
catgactactggctgctagccggcattataaaccaaaagttttggaaggtctccatcaagaaaacaaaattattcatcaaaaaatgaaaactgtgtggaaga

SEQ ID NO: 444842 - DNA, 75 bp, Homo sapiens
gagaggagccgggacacgcctagcgcgggctccagatcatggaagggaagtggttgctgtgtatgttactggtgc

SEQ ID NO: 444843 - DNA, 99 bp, Homo sapiens
cctggcaaccactatttgagtttctgcctctacaaatttgactattctaggtacttcatgaagctgaatatggtgggcatgatcagatagatttgtatg

SEQ ID NO: 444844 - DNA, 100 bp, Homo sapiens
atcgcttgcagcttgctagctgtgtgggctgggaggtctggtagggctgagcttgcaagaggatcaacatgcctgcatcatcctctcactggccctggct

SEQ ID NO: 444845 - DNA, 80 bp, Homo sapiens
agagatgtgattaatgtattccaccacctccgccagttaagaggaaaaagaagtttgcctgcaatggtactgtaattgag

SEQ ID NO: 444846 - DNA, 80 bp, Homo sapiens
cggaggcggcggcggcggggggagccggagccgcctgggatgttcatcccttcagtctgaatatgttcattactaaggcc

SEQ ID NO: 444847 - DNA, 97 bp, Homo sapiens
caaaacgctacatttcagtgcattgccacagggagagatgctgtgcataacaagttatggctccagggaagctgccaaagaatgtcgacgtcgaaag

SEQ ID NO: 444848 - DNA, 137 bp, Homo sapiens
ccctcccgagtgcctggatctcagcaatggggataccattctggaagacttgcccatccaatctgtctccaggtttaaaggagagcaactagaagtcgtccaaacacctgcatctcataaggagaagaaaagtccac

SEQ ID NO: 444849 - DNA, 75 bp, Homo sapiens
cgagatcttccgccactacgacctgacatttaccccggtaactgctgggcatttaaaggctcccaggggtacctg

SEQ ID NO: 444850 - DNA, 90 bp, Homo sapiens
ctccctacagagagatgctgtcccgtgggtgctggagaatctggtaaaagcaccattgtgaagcagatgaggatcctgcatgttaatggg

SEQ ID NO: 444851 - DNA, 76 bp, Homo sapiens
ggtcgcctggaggaccagtatttcccatggagggtttacccaaggtccagcctagcccctaggcaccatgtcggac

SEQ ID NO: 444852 - DNA, 100 bp, Homo sapiens
agtctggggccctcccccagcagtatcctgcatcgggagaaaacaagtccaaggatgaatcccagtccctgttacggactttgccttcaaaagaaacagc

SEQ ID NO: 444853 - DNA, 50 bp, Homo sapiens
aaatttgagcaggattttctcacaattttctcctcaaaaagtgaatcccg

SEQ ID NO: 444854 - DNA, 73 bp, Homo sapiens
tcagatgacctgactgttgtagatgcagcttcactaagacgacagatactgtggaacactccctagacaataa

SEQ ID NO: 444855 - DNA, 51 bp, Homo sapiens
cttcaccgagtaaagaggagtcactacaggcacctctcaagcctcttcagc

SEQ ID NO: 444856 - DNA, 71 bp, Homo sapiens
ggccaccactctcctggaaggtggcttccgagcaccagatactgctacaccatctcatcggcatggaccta

SEQ ID NO: 444857 - DNA, 82 bp, Homo sapiens
ttaccaactacatgttccctcaacagccaaggactgaggatggtataatgggtctctcccaaatggcgatagaggaaggagg

SEQ ID NO: 444858 - DNA, 75 bp, Homo sapiens
ctttagaccctccacctaattgcagctgctgaaatgggttgcggattgaacaagttagagaaacgtgatgaaaaa

SEQ ID NO: 444859 - DNA, 97 bp, Homo sapiens
gcgaacgagcgacggcggaacccgtgggcctgtggactgcagcctcggcggtcagcagattatctcctgctgcatactacgcccagaggatgatcca

SEQ ID NO: 444860 - DNA, 98 bp, Homo sapiens
ttcatgtcaagtcccttggagcaagtccaacagttgctggaatagtaggaatactgtatgtctgagtatttgagaatgagtggcatctattggggtct

SEQ ID NO: 444861 - DNA, 100 bp, Homo sapiens
aaccaaacggatgaaactctgagcaatgttgaggtgtttatggctaccaagcagtttctcgaagagattaacaagtggacagttcagtacaatgtttccc

SEQ ID NO: 444862 - DNA, 51 bp, Homo sapiens
gagtggaaatggagaggtgacatttggatttggtgctatggagaaattttt

SEQ ID NO: 444863 - DNA, 50 bp, Homo sapiens
ccggataccctgaagtcgggaaatggaactcttaacattcagggatgtgg

SEQ ID NO: 444864 - DNA, 83 bp, Homo sapiens
cagacgatgagacagagttgcgaccgcgcggcagatttgctgtcatgaaccgaaaagtccttgatgtttttggtactggtgca

SEQ ID NO: 444865 - DNA, 82 bp, Homo sapiens
gccctcagaggccccggtgctggcagctgagcccgaggctgacaaggatcgccccaggacattcgacatgcactcactggag

SEQ ID NO: 444866 - DNA, 110 bp, Homo sapiens
tacagagactgaagaggactcaggagcaaatcagtaatgtggataagattgtggaccagctgcagcagttaatgcaggtgtatgacttggctgcccttcgggattattgg

SEQ ID NO: 444867 - DNA, 100 bp, Homo sapiens
tatgcagtatttctttggcatcactgcagctagtaatttgccttctggattatggctctgagagattcctctgcgaatctgtttttagctatcaagtggc

SEQ ID NO: 444868 - DNA, 75 bp, Homo sapiens
attacagctctcagatgtcccaaggacctattgctatgcagagctcacaatgtctctctgcaccaagctccatga

SEQ ID NO: 444869 - DNA, 100 bp, Homo sapiens
cgaaagtcttgtggaagatctggaagaaacaggtgcagattcactttataggaacagcttcagcttcagtgatgaaaaactgaattctccaacagactct

SEQ ID NO: 444870 - DNA, 75 bp, Homo sapiens
caacatggcagacattgacaattcattcggctcctaaagaagtagcagtgtccaaggaacaagaagagaaatctg

SEQ ID NO: 444871 - DNA, 100 bp, Homo sapiens
aacgtgaaaaaaaagacctgctttgccctgggaaatagtaaccctgccaaatacatcagcttgtaggagacagaggaggatggactcagacaagttctgg

SEQ ID NO: 444872 - DNA, 100 bp, Homo sapiens
ataaaaccctgcgtctcggagcacttcctagcatgccccgagccctggcctttcaagcaccagtcaatatccagatcatgtttgagaccttcaacacccc

SEQ ID NO: 444873 - DNA, 83 bp, Homo sapiens
agacgctggatttttttcgggtagtggaaaaccaggtgaagtggatcctaaagagaggatagcacgccaacgaaaattattac

SEQ ID NO: 444874 - DNA, 75 bp, Homo sapiens
acagccccgatgactccgagctcttccaggaaaacacgtggtgcaagcacagaagctggcggacgtggacagtga

SEQ ID NO: 444875 - DNA, 83 bp, Homo sapiens
gtggcgactggcttgcagaggaccctcctccacttcccccttgatgagggaggaaaaaaacctatctccacgttgtggcagtc

SEQ ID NO: 444876 - DNA, 100 bp, Homo sapiens
tattagcccatcaagaaatgaagaacgagattcagacacaggagtccaacctataccttctcagggaggcaaactagaaatagctggcactgtggttggc

SEQ ID NO: 444877 - DNA, 73 bp, Homo sapiens
ggagtactcttattttgaaaagaacgcagatgtcatctgctgcacatgtgtgggcgccggtgacccgaggctg

SEQ ID NO: 444878 - DNA, 99 bp, Homo sapiens
ttacttaacacatcatgaaggctagtttggatgtggaggggaatagactccatctatccatatgaggtgtcaccactgtgcttaccatgaccaccttga

SEQ ID NO: 444879 - DNA, 97 bp, Homo sapiens
ccctgctggtctgcctcaggtacagaagggcgacctctgtgccatttctttggtggggaacagatttagcatgtagactgctggggcaatcaatgga

SEQ ID NO: 444880 - DNA, 98 bp, Homo sapiens
gcgaacgagcgacggcggaacccgtgggcctgtggactgcagcctcggcggtcagcagtactgtaagattgatgttaaaggcatggtgttcaccccac

SEQ ID NO: 444881 - DNA, 100 bp, Homo sapiens
gagcagggagcggagtaccagcacttcatccagcagtgcacaggattcgtgaagttttttggaaacctggctgtcatggatagtcctcaacagatctgtg

SEQ ID NO: 444882 - DNA, 75 bp, Homo sapiens
atccgccagtcaataggaagtacgagtgctctgatagccgaggagaccagcagcaggctcgccgagcaggaggag

SEQ ID NO: 444883 - DNA, 96 bp, Homo sapiens
cgaagatcgagtaggaactgcaggggaaatggaaagtgctggagaatctggtaaaagcaccattgtgaagcagatgaggatcctgcatgttaatgg

SEQ ID NO: 444884 - DNA, 100 bp, Homo sapiens
tgggtatccggtcttagaatacattccagaaaatgtatcaagagacaaagcatggaggacacaagaatgggaggaaaggcggactctcaggaacttcatt

SEQ ID NO: 444885 - DNA, 83 bp, Homo sapiens
ccgaggacatggacctgtacagcatcaactacctgcactttggggagcctaagtcctggtgaaagaaaatggcccgaaccaag

SEQ ID NO: 444886 - DNA, 83 bp, Homo sapiens
tttcgccagcccgtgccgcgagcgcggcctgcaggaggtcactatcatatgacaaaggctttgccgcagttcatcttcctccc

SEQ ID NO: 444887 - DNA, 75 bp, Homo sapiens
ttgattctccatatcacctacaggtgtaccttgaaagacttttaacatacgcagagatagatatctgtccggcca

SEQ ID NO: 444888 - DNA, 100 bp, Homo sapiens
gtgaaatcaaaattggatatttggaacattaaatatgggagcagagaatctgtggaattattgctggaagactggcatggaatgggtactgttcaaaaag

SEQ ID NO: 444889 - DNA, 82 bp, Homo sapiens
ttcaagagtcacttctttacttggtgcaggaaggcagtctttgctacgtacagcaaaagtgacaacactgcagctgaaggag

SEQ ID NO: 444890 - DNA, 90 bp, Homo sapiens
ccactccgctccgagtctgtgaacctgactgctctaaacccttcatgagctgcagaggctggagacagagttgggccaacccgctgagcg

SEQ ID NO: 444891 - DNA, 100 bp, Homo sapiens
cctgcctgcccactggtcagccttcagggaccctgagcaccgcctggtctctttcctgtggccagcccagagacactatggacagcgtgaagcagagcgc

SEQ ID NO: 444892 - DNA, 75 bp, Homo sapiens
tcgcagtctggaaagctttaggagttcacagtggagctgtttggaccatgaaattttctcactgtggccgattac

SEQ ID NO: 444893 - DNA, 83 bp, Homo sapiens
cggcaaccagatcggcgccaaggagccttcacgtaaatgggtccagtcatgcctcccagtaagaagccagaaagctcaggaat

SEQ ID NO: 444894 - DNA, 83 bp, Homo sapiens
accatttagtaagaagaattccagtcttataaacaactccgatccaatatccgagaaattgagaaactttgtttgaaagtccg

SEQ ID NO: 444895 - DNA, 100 bp, Homo sapiens
gtacggtctcgtgtggctgctgacagtcctcctggaggggatctctggccaaggagtgtacggtacctggagtacaagagggtccctaacagcagaccac

SEQ ID NO: 444896 - DNA, 82 bp, Homo sapiens
cggagaccgagggggagccccgcgcgcggcgtcggctgacgtgatggcagacagggttccccgctgcccggtctgcaccggc

SEQ ID NO: 444897 - DNA, 75 bp, Homo sapiens
aaggaacgaggcaaggagctaaagcagcgtgcgttcagccctggggttgaattgaccaaagcaatggtgatggag

SEQ ID NO: 444898 - DNA, 82 bp, Homo sapiens
cgaaccttcggggggccgcggctggagcgctcggccggcgtgggagcgccaaggccgcagaaagaaatgaccgcccggatgt

SEQ ID NO: 444899 - DNA, 99 bp, Homo sapiens
agcgggcgctgctggatgccgagcgcctcaagcgcgagcatcctaatgtcctatgatcacgtggaactcacattcaatgacatgaagaacgtgccagaa

SEQ ID NO: 444900 - DNA, 75 bp, Homo sapiens
tgccaggggctccaggaccccaggtggcacgcactacccttcttcctggcctcctgaagaccatagcagcaaatc

SEQ ID NO: 444901 - DNA, 101 bp, Homo sapiens
acccccgcagcgctgaggacgctccggagcccggcgaccgcggtaccgcgcgccactaacagacctaaggattgtcttcggtctattatgagaagagtgaa

SEQ ID NO: 444902 - DNA, 83 bp, Homo sapiens
gacaaaatgcaaaaaaggaggccaaagactttgtggtgtgcggaaggtggaaacttgatttgttgtgacttttgccataatgc

SEQ ID NO: 444903 - DNA, 100 bp, Homo sapiens
acattccttacatgtttgaggcccgggaatttcttcgaaaaaagcttattgggaagaaggcagttgtgaaaaacttcaggacaaaaatgtttcatttaag

SEQ ID NO: 444904 - DNA, 98 bp, Homo sapiens
taaaattaacatcatagagaaacggccggaattattaacaaatgaggacctacagggcagaaaggttatcaatactctggctgaccatcatcatcgtg

SEQ ID NO: 444905 - DNA, 73 bp, Homo sapiens
ccacagtgggcttcaacatgaggaaggtaactaaagcatcccagccatcactcttccacctgctccttagaga

SEQ ID NO: 444906 - DNA, 90 bp, Homo sapiens
cttggcggtttgtgggctaaaggtcttcctgtccatcaaaggcatttactaccaggccgaggtactggggcagcccatcgtgtggatcac

SEQ ID NO: 444907 - DNA, 50 bp, Homo sapiens
gatgaaatacatcgtgagaagagaggtgctttggaaataccagccagctc

SEQ ID NO: 444908 - DNA, 80 bp, Homo sapiens
cgccggttcgcgtctctctgctgcggcgcggggaccgctgtgctctcgcatgatgccttcttctgtagagtgggcgcttt

SEQ ID NO: 444909 - DNA, 75 bp, Homo sapiens
caacgggactgaaccacatgggctggccagagcacacaccaggcactgtgatgcagtttggcaaagggaagtcgt

SEQ ID NO: 444910 - DNA, 101 bp, Homo sapiens
ggaaggaggacgtgcactgctacagcatgcagagcaagtagacgcctgccgcaagggccgccagtgtcgacatgctgctggaggaggttcgcgccggcgac

SEQ ID NO: 444911 - DNA, 51 bp, Homo sapiens
caacctcagcaccatcaagcagtagagacggggtttcatcgtgttagccag

SEQ ID NO: 444912 - DNA, 83 bp, Homo sapiens
gcctcgtgggccgagtggtctcctgagatagagtttcaccatgttgtccagggtggtctcaaaactcctgagctcaagcgatc

SEQ ID NO: 444913 - DNA, 100 bp, Homo sapiens
gcagcaggagctttttgcttagcactgaaaattctggataatggtgaatgggctgagagcacagacaaaacaacaactcttagaatataaatcaatggtt

SEQ ID NO: 444914 - DNA, 74 bp, Homo sapiens
cttataggactgccatgaaactccgaagactgcagaaggccctttgctattcactggatgaaagaaagataaaa

SEQ ID NO: 444915 - DNA, 100 bp, Homo sapiens
gactccggagacagcccaaatatcctcggaagagcgctcccaggagaaacaagaagaattttaaatcgtttctccaaagacattggacacttggatgatt

SEQ ID NO: 444916 - DNA, 108 bp, Homo sapiens
tatacagagcttcataatcagcccaagaccacatagagcaaacatgaatgatatttcccaaaaggctgaggctctcaccacacacttgttcatgggcgcagcaaagaa

SEQ ID NO: 444917 - DNA, 101 bp, Homo sapiens
gtgttatcaacttaaaagatgccacctctaaggaaggagctcattgccaagttagatcaggcagaaaaggagaaggtggatgctgctgagctggttcggga

SEQ ID NO: 444918 - DNA, 75 bp, Homo sapiens
aggttcagttggcaaaccagatatatgacttgcctacagacctggtacctggatttttgcccgagatgattccta

SEQ ID NO: 444919 - DNA, 74 bp, Homo sapiens
aggaaggagcagcctcggcccgacgtgcccatcacaggtaaatttcatctgatttccaagttaggaagagtgga

SEQ ID NO: 444920 - DNA, 100 bp, Homo sapiens
acctcagcctcctgagtagctggaaccatcatatgcaccagcacgcctggctaatgactttctcattctccctgggtacatcgacttcactgcagaccag

SEQ ID NO: 444921 - DNA, 100 bp, Homo sapiens
cggccagggccggcgcggcgatgatgaacaggttccgaaagtggctctacaaacccaagccacataaagaagatccctaatagtcatttctcaacaatta

SEQ ID NO: 444922 - DNA, 74 bp, Homo sapiens
ggcgacatactacctctggccccgagatcagaatgccggcacagttggtggatctgaaatctgaactgacagaa

SEQ ID NO: 444923 - DNA, 75 bp, Homo sapiens
ctggcacccgaatccggcctgccggactcggtgaaatacctggagtgctcagctctcacccagagaggcctgaaa

SEQ ID NO: 444924 - DNA, 100 bp, Homo sapiens
gggtgtccgagttgccgccggagaggagtggcctcgcccgcttgatatatggtacatttgctggagttggctgtgactttcattgagagattagaaaccc

SEQ ID NO: 444925 - DNA, 100 bp, Homo sapiens
caaggccaagttcctgacagcctggaacaacgtcaagtacggagatctataaggacaggcagaaattctcagaacaggttttcaaagtggcctcctcaga

SEQ ID NO: 444926 - DNA, 90 bp, Homo sapiens
agtaccagcagcaaggcagaaccaccccagtgcacctccctggcctggtctgctgatggccagtgccgccaagctcctggacaagaaccc

SEQ ID NO: 444927 - DNA, 106 bp, Homo sapiens
gaggtagacccagagctaacagaaaagctgaggaaattccgcttccgaaaagagacagacaatgcagccatcataagtgctggcccaggccctgactccctgaaga

SEQ ID NO: 444928 - DNA, 73 bp, Homo sapiens
catgcgcttgtggacctctatgggcagtgtgagcagggtggcagtggaggtggtgaccacgatgacctcagcc

SEQ ID NO: 444929 - DNA, 51 bp, Homo sapiens
accacgacttcctgccctattccacagctcctgggcaacgtgctggtctgt

SEQ ID NO: 444930 - DNA, 75 bp, Homo sapiens
atctttagtaaggatgggaccttgtttgcctggggcaatggagaaaattaatgaaggagttcccccttctgagta

SEQ ID NO: 444931 - DNA, 74 bp, Homo sapiens
acctgtgtgatgatgcctgagttcagccctcagcagggtttggaaatcccttgtctccaggttgctgggattga

SEQ ID NO: 444932 - DNA, 98 bp, Homo sapiens
aggtttactggagtaggtgttagtaagctttctacaagttctgattaaagtcagaaatagacacaatgatgtggttcctacaatggcacaaggagtga

SEQ ID NO: 444933 - DNA, 99 bp, Homo sapiens
tgagttgaagcagttttctcagctgcctgctaacatagctgtttgcagttctaagtgagctcttcagcccaggtgggctccctgacactgatgcgcata

SEQ ID NO: 444934 - DNA, 104 bp, Homo sapiens
ctggttgagggtctccagggttctttggggcccgaggtccggtgtctaaaagactatggagaatttgaagttgatgatggcacttcagtcctattaaaaaaaaa

SEQ ID NO: 444935 - DNA, 97 bp, Homo sapiens
aaggttatctcctcagccaacagagctgtggttggtgtggacactgcaagagacttgcacctgagtatgaagctgcagctaccagattaaaaggaat

SEQ ID NO: 444936 - DNA, 75 bp, Homo sapiens
ccctcccctgaagcctctgatgtttgagaaggactccagtgggggtgactcatgtgcttctgaggaggaaccaac

SEQ ID NO: 444937 - DNA, 75 bp, Homo sapiens
cacatggacaaggtggtgcagatcgtggagatcatgcagcaagctatcagctggcccagcggaccttccgcactt

SEQ ID NO: 444938 - DNA, 96 bp, Homo sapiens
aaactgaaagctgaactaagaaatgactctttacttcaaactctgagccctgattctgaacatgtcactttaaagcttttaacctggagacttgcc

SEQ ID NO: 444939 - DNA, 100 bp, Homo sapiens
gcgggtctgctctgtgtgccatggacggactaaatgtgttaaatgggcttgccaacaatatggatgatttgaagataaacaccgatattactggtgctaa

SEQ ID NO: 444940 - DNA, 75 bp, Homo sapiens
gggctatgtgcacccagatgagttcttccagtcccctgaggtgatggcaggcaaaatttggtttctctaatatta

SEQ ID NO: 444941 - DNA, 83 bp, Homo sapiens
cgcgcccctcggacggccacgagactcggtgtgggccaaactgaaattgcagaaggcttcagaacgatggcagcctgacactg

SEQ ID NO: 444942 - DNA, 88 bp, Homo sapiens
tcgctagaactcagttgtgcgttgcggccagtcgccactgctgtaccttgtggtctataatcctttagaacaagaccgaatctcgttg

SEQ ID NO: 444943 - DNA, 83 bp, Homo sapiens
gaaggaagtcatcatgggccggcctggaacaggttgaaccatgattccggtgacagagctccgctactttgcggacacgcagc

SEQ ID NO: 444944 - DNA, 100 bp, Homo sapiens
tgcccagatgttctcagatatggtcttaaaaggaatttgctgattcccttggaattccgtttttggaaaccagtgctaagaatgcaacgaatgtagaaca

SEQ ID NO: 444945 - DNA, 83 bp, Homo sapiens
cgatggcgcagaaaccccgttgacaaggcactgctttttcatgacggatgaaacgaggaggaagagatagtgaccgtaattca

SEQ ID NO: 444946 - DNA, 90 bp, Homo sapiens
cacctccattggatttaaaagacagtcctcgtcagcactgactttcagctatggaatcggcatgagccatgagcccaagtccccttcgct

SEQ ID NO: 444947 - DNA, 72 bp, Homo sapiens
tcccgtctccaggccccaaggagccacacctggaccagaccccaggaaagtggcctggtttgctttcgaccc

SEQ ID NO: 444948 - DNA, 74 bp, Homo sapiens
aaatacacccagtcattttgcggtgaaaacattggcataagaagggactggctgtgttattctgcatattgcag

SEQ ID NO: 444949 - DNA, 76 bp, Homo sapiens
gggatcgacgcggacagcgggctggagcctgacgagctggcgggcttgcattgatgacaatgttgatatggtgaag

SEQ ID NO: 444950 - DNA, 100 bp, Homo sapiens
tggaggcggtaccacaccagatgccaaggagaatggtactgatactgtccaggcacagttggtggatctgaaatctgaactgacagaaacccaagcagag

SEQ ID NO: 444951 - DNA, 100 bp, Homo sapiens
cagggtcttgcagccattgaaaagtgtggagaagctgctttaaataacacacatctggctttttgttagaggtcttcatggaaagagtggtacatggtgg

SEQ ID NO: 444952 - DNA, 50 bp, Homo sapiens
cttatattacatctcatctccacagtgaggcagtggagaaggtgacacag

SEQ ID NO: 444953 - DNA, 76 bp, Homo sapiens
gaacaagacgacgacacagagatggcttcccccaacccagacgaagagtctccatcatcaccagttccagtagtga

SEQ ID NO: 444954 - DNA, 50 bp, Homo sapiens
gtggtgttaatcccttttattgatgagtttgtacatgagaaggaaattat

SEQ ID NO: 444955 - DNA, 83 bp, Homo sapiens
ctgctctccacggtagattctcccgatcacaaaccattatccagagtggaacacatgattctgtgcagatttgcagaccagac

SEQ ID NO: 444956 - DNA, 100 bp, Homo sapiens
ctgctgcagcccccgacgccacctccgctgctgctgctgctcttcccgctgctgctcttctccaggctctgtggtgatatttgtgatcccaatccatgtg

SEQ ID NO: 444957 - DNA, 101 bp, Homo sapiens
ctcctttgggttgtactcatagattgtgtaggcgttggtcttctgatagcaactttaatgtggggttagaattgcaggaaacatcctgtcatactgcagaa

SEQ ID NO: 444958 - DNA, 98 bp, Homo sapiens
ctggatttcctggcgccaatggagagaagggcggcaggatgtcgtgatctcaacagcttgtcacccaacagaaaacatcatcgcctctgctgcgctag

SEQ ID NO: 444959 - DNA, 75 bp, Homo sapiens
gaagtactccagggaaacctcccagagctgaagaagcaggtggagagtgccgagctgaagaaccagcggctcaag

SEQ ID NO: 444960 - DNA, 96 bp, Homo sapiens
caaccagccctccatcaaccttcactcacaggaaaacaatgaagagtcgttatatggaactctatgaccttaatagagacttgctaaatggatata

SEQ ID NO: 444961 - DNA, 101 bp, Homo sapiens
ggccagcgcgcattcggccccggacgaaggtactcgcagcacttggagcgcagaaccggccgcgcccggccggagtcctgaaagtcgagcgagctccgggt

SEQ ID NO: 444962 - DNA, 98 bp, Homo sapiens
ctgaaaaagatgagtatgcctgccgtgtgaaccatgtgactttgtcacagcccaagatagttaagtggggtattgatgaagatgaccctactgctgat

SEQ ID NO: 444963 - DNA, 90 bp, Homo sapiens
cctgcttggagacggacttgcttccggtaaagaacaagcacctttggagatgagtatgcatccagcggcaagcgctccactctcagtctt

SEQ ID NO: 444964 - DNA, 75 bp, Homo sapiens
ttggagaactacagaaacctggtctccctagaaatgagccgtcagactgctacagcattacctaccggtacctcg

SEQ ID NO: 444965 - DNA, 100 bp, Homo sapiens
cacagcgtccatgatccgtttggagacacagattactgattcccagtcaatcacatcaggaattttcccattaatacactgttaaatgtgaaattaagtg

SEQ ID NO: 444966 - DNA, 136 bp, Homo sapiens
ctggaagttataacgctacacgaagaactaagaatattattagcacaagagcaccatactttgagggcacagttggtggatctgaaatctgaactgacagaaacccaagcagagaaagttgttttggagaaagaag

SEQ ID NO: 444967 - DNA, 100 bp, Homo sapiens
tgcagattattttggtgatgctttcaaacagtgtcaatacaaagatactctccccaagaatatcaacacctttgagaacagaatgttaatgcttgatggg

SEQ ID NO: 444968 - DNA, 83 bp, Homo sapiens
aacgaggcaaggagctaaagcagcgtgcgttcagccctgggggggcagctggcattttatgctatgtgggagcctatgtcttc

SEQ ID NO: 444969 - DNA, 88 bp, Homo sapiens
gatttcgcagcccaagtcttttctccctctcccagctactccctcagcggaacgggcaatgacatttaaccaagtaatccagacgggg

SEQ ID NO: 444970 - DNA, 97 bp, Homo sapiens
gcgccgccgctacgggaccgcctgagctttctacaccggggacactggcccagggagagctgaatgagatgaggacccgcctctatctcaacctggg

SEQ ID NO: 444971 - DNA, 83 bp, Homo sapiens
atgcctgagttcagccctcagcaggtggaagttaaacgagctgagcctcgggacagcaagagccaagcgccgggacagccagg

SEQ ID NO: 444972 - DNA, 75 bp, Homo sapiens
gtggaagggactttcttttggccctaggccccttcctgcccctgtcgtcagcagaaagggagtttcgtgctccaa

SEQ ID NO: 444973 - DNA, 100 bp, Homo sapiens
gtcagagtcaaaacagagcttttggaatctgaacaagggtgcttagcgaatgccacagacggcgtgcggctagcagcccgcatcgtggacacaccctgca

SEQ ID NO: 444974 - DNA, 103 bp, Homo sapiens
ctatggcgaggtcggacgcgtcttctttcaggctgaggatgctcagccagcattgggcagcccccgcttcctgctcccctacccccttcacatggcagtagtt

SEQ ID NO: 444975 - DNA, 75 bp, Homo sapiens
accagccagatcaacacaattgataggtaagggactgttctgaagaacctttccatttagtgatcaagatatgga

SEQ ID NO: 444976 - DNA, 75 bp, Homo sapiens
ttgaaatacagactgttggggaacaagagatccctgggtatcagtatgtgtcacctgaaggcaattgtatagaac

SEQ ID NO: 444977 - DNA, 83 bp, Homo sapiens
aagagcgacaagccgctggcagccgcggatctcaccgccgctcaggaggccggtagaggactgtgaaccaaaagttgtccccc

SEQ ID NO: 444978 - DNA, 100 bp, Homo sapiens
agcgcctgggctggaggacagagaagccttttccgttgccggtgccggcctagcgtcctggaattacttcaatcaagttttagatggagcaggattagat

SEQ ID NO: 444979 - DNA, 75 bp, Homo sapiens
gggactacgacgtccctcaaaccttgcttctaggagataaaaagaggcaccttccactagcaacagtctccccag

SEQ ID NO: 444980 - DNA, 127 bp, Homo sapiens
accacctgggcggaggctacagcatcgtggcgctgggcaatgacatctacgtgacggatctctgcactcgtcctaagagcccaggcctccgagatcttacttgaagagttacagcaggggctttccc

SEQ ID NO: 444981 - DNA, 95 bp, Homo sapiens
gtggatgttcctgaattcttggtctattttccattgctaaatgactctcgtgctcattcccccatgatcgccgtaggaagtgatgacagtagccc

SEQ ID NO: 444982 - DNA, 100 bp, Homo sapiens
agaagatgtaactatcagtgctgttatgttacgtgaggatgatcctggagaagctgttgaaatggatgcagtcagaactgaatgttgaagaagtggtaaa

SEQ ID NO: 444983 - DNA, 100 bp, Homo sapiens
actggcttgcagactcttggagcagagacgaagtctggcaagttgatgagcagatagatcactacaaggaaagccaagacaaacttccttggcaagctgc

SEQ ID NO: 444984 - DNA, 90 bp, Homo sapiens
acgaacccccgtactgcatcaaggaagatgatccctatgatcttgaagatgtttctgcacagaaatgagggaaatacaaagaaccaaata

SEQ ID NO: 444985 - DNA, 100 bp, Homo sapiens
gctgcccgagaatgggaattctcttcactagaatatggagactgttcaatcaccaggtgccgcagaatggaattcggcattgttcctacacagcttctcg

SEQ ID NO: 444986 - DNA, 100 bp, Homo sapiens
ctcaaggccatgatcaaaacagaatgcacacgaggcggcttctgcaacttcatgcatttgaagcccatttccagagagctgcggcgggagctgtatggcc

SEQ ID NO: 444987 - DNA, 90 bp, Homo sapiens
cgcggccggagaccgtggggcccccggttgccgccccctcgggaacgtctggtcctaaccagtgagcactggttagtactggtccccttc

SEQ ID NO: 444988 - DNA, 48 bp, Homo sapiens
aggtggttcagctcgcatagtgatgaggaaactgaggatcagagggat

SEQ ID NO: 444989 - DNA, 88 bp, Homo sapiens
cagagaatgagttaatctcctcagaaatcactaaatactactctgaggggcttagaaattaacagggccaagatgctgaattatcagg

SEQ ID NO: 444990 - DNA, 100 bp, Homo sapiens
atggacagcatgcctcaccaagtcacatgacaagcagtatcagacttggtgataattctgaattatgaccgtgctgtagaagcttttgcaaaaggcggaa

SEQ ID NO: 444991 - DNA, 80 bp, Homo sapiens
cgcgtgtctaggtgagtcgcggtgggtcctcgcttgcagttcagcgaccacgcttccccgggcgctgcctggacaggcct

SEQ ID NO: 444992 - DNA, 90 bp, Homo sapiens
ctccttcgtggggctcatcgtgatcccggcgacatactacctctggccccgagatcagaatgccgggcagagcggcttgggtaaatccac

SEQ ID NO: 444993 - DNA, 100 bp, Homo sapiens
cagaagactctgagcccccgaactctgcaaagcctccagaggacataccacctccaggatcaggatgcagagacgaacaggaggcattgaactcaatcat

SEQ ID NO: 444994 - DNA, 100 bp, Homo sapiens
gttaagctgtatgccttcccttattgcccagcagcaacagaatccgcaagtttatgtgtctcagtctgcagcagagcttgatgcattagatgccaatgat

SEQ ID NO: 444995 - DNA, 101 bp, Homo sapiens
ctacagtgtgccctgtacaatggccgccctgtcctgggcacccagaagacctaccagtgggtgcccttccatggggcttctcaataggtttggcatggaca

SEQ ID NO: 444996 - DNA, 51 bp, Homo sapiens
gtctttgctacgtacagcaaaagggatacttgactttcagagatgtggcta

SEQ ID NO: 444997 - DNA, 98 bp, Homo sapiens
ggcgggacgcgagcggcgagccggagcgcggagcccggctcccgcaccatggaggaggacgacagctacggccttctggcggccgcccctggtttctc

SEQ ID NO: 444998 - DNA, 82 bp, Homo sapiens
tcaactcaagcagatcaaagttgttttgagcctgtggacatctctacagcaatgagtgaacgggcacttgctcagaaaagac

SEQ ID NO: 444999 - DNA, 90 bp, Homo sapiens
ggttccgcgccgggcgtggacggtgtggggcggtcccggccccgcagctgtgagccgtgagctttgaggcggtgggatgtgtcagcagaa

SEQ ID NO: 445000 - DNA, 75 bp, Homo sapiens
cctcaacaagttgctgcaatgtctgtgtctaatctatcatggtctttccctagcaactactgggacaagtttgtc

SEQ ID NO: 445001 - DNA, 83 bp, Homo sapiens
ctcggattctctacttctgctataacgaaggaggcccaacttcattcaataaggagcctgacggatttatcccagacggtaga

SEQ ID NO: 445002 - DNA, 101 bp, Homo sapiens
cgtccttctccactttcgccagcccgtgccgcgagcgcggcctgcaggaggtgatggtaatgcccgaaggagcagacacggtgtccaggcccagtcccgac

SEQ ID NO: 445003 - DNA, 96 bp, Homo sapiens
accatccattccaggagccagctatctgagatgtaaaggataactcctttagccgatcacggagttcaagtgtaacaagcattgacaaagaatccc

SEQ ID NO: 445004 - DNA, 80 bp, Homo sapiens
gtggcagctgctggcctctgggccggtgctaaaatgatgtattttctggacaagtcaaggcaggagaaagcaattgctat

SEQ ID NO: 445005 - DNA, 82 bp, Homo sapiens
gcgggagacgagaagcctgaaaagtcgcagcgagctggagccgccggagattgctctgaatgttgcaggaaaaggtgatagt

SEQ ID NO: 445006 - DNA, 80 bp, Homo sapiens
ccgggacccggtgtctgctcctgtcgccttcgcctcctaatccctagccactatggtgtcagctgtgatgcatgtttaaa

SEQ ID NO: 445007 - DNA, 98 bp, Homo sapiens
acagttcccgcaggcggcgacagcagagcgcccactgcctccagcagtttgtgcctgcagatgggaacgcagcctgcgtgaaggtgctccgggacatt

SEQ ID NO: 445008 - DNA, 98 bp, Homo sapiens
tgcgtaccacaatggccacattcaagtgaatgacaaaatagttgctgaaccagcttgagttagaactaaaacaggaaaaagaaagaagattacaaaac

SEQ ID NO: 445009 - DNA, 100 bp, Homo sapiens
gtccagtagtggctgacacactcaagaacccgcagaaacccagctaagttcccagttgagataaaccagtgaaaggtgtagcagtcactcggcctacacc

SEQ ID NO: 445010 - DNA, 100 bp, Homo sapiens
gcaccttcagaaacagtgctgaagcctttaaatgcagcatctgcgatgtgaggaaaggcacctccaccagcactttcatttggacccgtggatacccatt

SEQ ID NO: 445011 - DNA, 90 bp, Homo sapiens
aagaatccagaacttgtgccacagaactacagtggatctccttacgtagcagccaaaataaatgaagcaaaagacttgctagaaacaacc

SEQ ID NO: 445012 - DNA, 90 bp, Homo sapiens
cgagcatcctggcggcgccgggccactgggaggtttgcctgcaatgagatttcattctctacatttaaaggacatcctttctgagctgct

SEQ ID NO: 445013 - DNA, 50 bp, Homo sapiens
cttttacctacgttggcggccccagaagttctaggcctgattcttcacta

SEQ ID NO: 445014 - DNA, 101 bp, Homo sapiens
gaggacgagggccagctgacggagatggtgcagaagatggaggaggtatcagacttggtgataattctgaattatgaccgtgctgtagaagcttttgcaaa

SEQ ID NO: 445015 - DNA, 100 bp, Homo sapiens
tttcaaccatctttggcgaggccttgcttccttccactcgaaagaagaagaggacagtgctccagtgaaagtggaagaacaaaggaagatgagtcaggat

SEQ ID NO: 445016 - DNA, 90 bp, Homo sapiens
catgggacacagcaggtgctggaagaagcacatatttttagtgacaaagactgtgactatggtgactgctggctgctggcagccattgcc

SEQ ID NO: 445017 - DNA, 100 bp, Homo sapiens
tgaatgggatgcaggtcataaaaccaatgtccagcagtgttactgctattgtggaggccctggagattaaagctgatacattcctgtgggtcaactatgc

SEQ ID NO: 445018 - DNA, 75 bp, Homo sapiens
atcgatataggtccaagtcctggcaatgaggtgaattttgattcatcaggcagcggaggaggagaaagagatgga

SEQ ID NO: 445019 - DNA, 100 bp, Homo sapiens
gggcttcctgcccagtcgtggtcctgctcctgggagcaagccggtccagttcatggatgtctggagcccccaactcccttgacagtgtacgctggagcag

SEQ ID NO: 445020 - DNA, 82 bp, Homo sapiens
attttggcattgacatttaattttagggtcctttatatagaagggagagtagggattttgtcagggagaaaaagtatcggac

SEQ ID NO: 445021 - DNA, 85 bp, Homo sapiens
tatatccagaatcatggacggacagaggatgcacttgtccaatcctcaatcctgatcaccatccatcttcaagaagctactttga

SEQ ID NO: 445022 - DNA, 87 bp, Homo sapiens
gatgcacaagaatcccaaggtccaattgtggtctacttatcaagttaggagtcatgatgctatggactcctactacgactacatatg

SEQ ID NO: 445023 - DNA, 50 bp, Homo sapiens
ctctctacattccagtaacccaggttacaattcaacaaacatggtgtgtt

SEQ ID NO: 445024 - DNA, 75 bp, Homo sapiens
tgaagcaacatgagatggtggatgaacccacaggcagtgaaatcaactgtgcagaccatcactgttggaggagtg

SEQ ID NO: 445025 - DNA, 83 bp, Homo sapiens
tctctgaagagtaactttgccctcctcctaaagatatgtgtcacaaagatgtctacacggaactgccagggaatggactcagt

SEQ ID NO: 445026 - DNA, 75 bp, Homo sapiens
cctgccaagagagcccaggccgagttccccacctgcgattgcgtcggtgaaaatttgtgatatgcagatgcgtgg

SEQ ID NO: 445027 - DNA, 83 bp, Homo sapiens
ccgggcgctcgagacttaccagagccacaaggaagactatgaccgtctgaggcctttatcttacccaatgaccgatgtcttcc

SEQ ID NO: 445028 - DNA, 100 bp, Homo sapiens
cacttagaactttggcgactgggatccacagttgcaacagctgactttggtttctgtgcccagatcacccctgagcagagcaaacgcagtaccatggtcg

SEQ ID NO: 445029 - DNA, 74 bp, Homo sapiens
tggcggcgggctcctgcgagaagcaagcggaacttcctgagggccaattcctgtccccccagcagcatggcatc

SEQ ID NO: 445030 - DNA, 75 bp, Homo sapiens
gggtgacaatgccttggtttcaacactatcggaatgatcttgtggagaattttgatgaggcttccaagaatgagg

SEQ ID NO: 445031 - DNA, 90 bp, Homo sapiens
tacaaattcatcatcagatatatgtgttgtgaagttttcttcgaggattttccagatgcccagcctacagagtctgagaaggaaatttat

SEQ ID NO: 445032 - DNA, 139 bp, Homo sapiens
tggggagaagaggattggaggtgtcagtgttaaaggaacctctacaacgaaggtgaagccacggaagataaggtgagccagccatgagagggtatcttgtggccatattcctgagtgctgtcttcctctattatgtact

SEQ ID NO: 445033 - DNA, 90 bp, Homo sapiens
gctcagcaaggagaactgctggtccaagagctgtcgatgatgaaatcgaggccaatcttgaagaggtatttgtaactctttgaatttcac

SEQ ID NO: 445034 - DNA, 74 bp, Homo sapiens
gacgggccatacccaataaccaggtgcttggcaaaatcgagcgggccattggcgtcacaatgtagcagggaccc

SEQ ID NO: 445035 - DNA, 100 bp, Homo sapiens
ctggtgggcactcagcaccctctgcttaccacagccaggtgaccaagaatatggcccaggtgaccaaagccctggacaaggccctgagcaccatggacct

SEQ ID NO: 445036 - DNA, 50 bp, Homo sapiens
ctgatttttagaactccacatttgaggtcctagcagaagatgtgactcag

SEQ ID NO: 445037 - DNA, 82 bp, Homo sapiens
cgccgccgcgtcttcccggtctcctttcccggccgcacaggattatggtgacaagctgaacatggagctgagtgagaaatac

SEQ ID NO: 445038 - DNA, 98 bp, Homo sapiens
ctgaggttcagattaagaaatctgccccaaagtcttagaactggtgaatcagtggctaacctggttagaaactgctgaagaagaagaatcagaggaag

SEQ ID NO: 445039 - DNA, 75 bp, Homo sapiens
tttagcaaaagttcatctccttctgcatccttaactgagaatgaggtaactcgggaccaaatgaagatgtttata

SEQ ID NO: 445040 - DNA, 99 bp, Homo sapiens
ctgagctacggaggaaccctcatttcctcaaaaggtcttacgaatgcggaatctgtggcaagaagtacaagtattacaactgcttccagacccacgtgc

SEQ ID NO: 445041 - DNA, 116 bp, Homo sapiens
cgcggagcgccccttcgcgtcccctgcaccatgagctggggcaccgagctctgggtgagaagccctaccactgcaactgggacggctgcggctggaagtttgcgcgctcagacgag

SEQ ID NO: 445042 - DNA, 98 bp, Homo sapiens
gaaaaactgattgactgggctggcgttaactgtgcggaggcaggaactcgtaacattcagggatgtggccatagaattctcccctgaagagtggaaat

SEQ ID NO: 445043 - DNA, 90 bp, Homo sapiens
gcaaacgctctttgttccagagcatggagatcagtgagccctattcccagaggcaggtggtgctgaccctgtaacccaaaggaggaaaca

SEQ ID NO: 445044 - DNA, 100 bp, Homo sapiens
tgactctcgcgggaatcccactgttgaggttgatctcttcacctcaaaaggtctatgcctctcagcgaatgagagctggcaaaggcaaaatgagaaaccg

SEQ ID NO: 445045 - DNA, 89 bp, Homo sapiens
gccctgatggtgtggcaggctctggactcctaaagctctggagcgcatagtggtaaaatggatgaaaacagatttgtggcagttaccag

SEQ ID NO: 445046 - DNA, 98 bp, Homo sapiens
agagataggagaagagagagatcgctgtctcgggagagaaatcacaagccgtcccgatccttctctaggtctcgtagatggagtctcgctttgttgcc

SEQ ID NO: 445047 - DNA, 100 bp, Homo sapiens
cgaacactgctaggcacagcctggtgccaagctacgaaggagtacacagatcctcatcctccttggggccatgctgttcttggcatctttcacagccact

SEQ ID NO: 445048 - DNA, 98 bp, Homo sapiens
tattccttgtatcgacatacacactgggtacgctgtgccaaatgtgtatatctcatgattgatatggagaaactagtcatgggccaaaggtcaagata

SEQ ID NO: 445049 - DNA, 75 bp, Homo sapiens
ttggactctcaaactcgtacctttattgtgggggcccagcgtctgaccaaacacaccaagttcgtgcgggacatg

SEQ ID NO: 445050 - DNA, 100 bp, Homo sapiens
gcgaggttcgggctggttgttccgttgcgagctgcagctgcgatctctgtggtaggcccaggccatttacaagatggtttcgtccgtgatgaagatgccg

SEQ ID NO: 445051 - DNA, 96 bp, Homo sapiens
aaatcactgagctattgaacaagacagacaaccgccccctaaagaaactggaggcccaagattgcaggatacctatatggggtgagcccaccagat

SEQ ID NO: 445052 - DNA, 87 bp, Homo sapiens
gatctttccctggaggaaattcagaagaaattagaagctgcagaagaaagacgcaagatttcttctggtgaatacattcagatgtct

SEQ ID NO: 445053 - DNA, 82 bp, Homo sapiens
cgcgtctccgcgttcccagcccgggtccccgcgttcacagccccagcgcagggagtaccctgacttctaccggaagctctac

SEQ ID NO: 445054 - DNA, 100 bp, Homo sapiens
acaagccatggaagggtgggtgccactgctgccgtgtacagtgctgcgattctggagtacctcactgcagagcttacagggatcttcagaccagggaaga

SEQ ID NO: 445055 - DNA, 101 bp, Homo sapiens
cttcgacttagccctgctccaggaatgggacctcgagtcactgtgggaaactgaacagccaagactcctataacaattttaccaacaacaaccctggcaac

SEQ ID NO: 445056 - DNA, 49 bp, Homo sapiens
gaatggataaggcaaaacggaggctggcttggacgaaccttgacaggat

SEQ ID NO: 445057 - DNA, 80 bp, Homo sapiens
acaacaagccggaagtggaagtcaggcaaagcctttggttgtgttggagggtacatcgccagcacgagttctctgattga

SEQ ID NO: 445058 - DNA, 100 bp, Homo sapiens
gtctactgcgggctggtccgggctcctcaggttcagacccgaccgttatccagtcggttcgtggagaggagagaaatgactgctgtccatgcaggcaaca

SEQ ID NO: 445059 - DNA, 83 bp, Homo sapiens
atttgaagtctgtgtcaaacatccatatcataagtggaattttggagatattcaaagcctcttgttgctgtaccacatagaat

SEQ ID NO: 445060 - DNA, 82 bp, Homo sapiens
tgacgcttgatgagaaggacccacggcgtctgttcgaagttgaagactgggatagtttccaagctattttggatcataccta

SEQ ID NO: 445061 - DNA, 88 bp, Homo sapiens
gccgctgccgctgccgctgccgcacctccgtagctgactcgtctgaaaggcactttattatgcaggtggtctgtgaagccacacagtg

SEQ ID NO: 445062 - DNA, 90 bp, Homo sapiens
cgaagagcagaagaaacagttagcgcaagacacaggacttacaattctccaagtaaacaactggcattgcttcagagtttggagttcgag

SEQ ID NO: 445063 - DNA, 98 bp, Homo sapiens
cctgctcaagccgctcttccccacctgcccggtgcccgaggaggcagccaagctcgtggcctgcctctgcgtgcccagaccctgccgtctctccctct

SEQ ID NO: 445064 - DNA, 75 bp, Homo sapiens
gatgcaattggaccaagagaacaatgggaaccagtctttcaaaatgaatgaatctgaagtctgctgcagtaaaac

SEQ ID NO: 445065 - DNA, 75 bp, Homo sapiens
ttctggtcctggtggaggtagaggacgtggtagtttattactgaggcacctacaaaggcagcacctaagcaaaag

SEQ ID NO: 445066 - DNA, 95 bp, Homo sapiens
cccctatccctccccctaaaccagctcacagaaatagcaaccctgtcattgatccggccccacatcgcaactcttcgtaagtacacctatggcaa

SEQ ID NO: 445067 - DNA, 82 bp, Homo sapiens
gacgcggacatggtcatgagctttgtgaacctgggcaatctgaaagcaaatcctgtttagatgcaggcgaaggttcctggtg

SEQ ID NO: 445068 - DNA, 101 bp, Homo sapiens
cggggaagtcatgctcgcttcacggaggcaatagctagccgatgacgtccggttgtttgccttcgtgcgcttcaccaccggggatgccatgagcaagaggt

SEQ ID NO: 445069 - DNA, 137 bp, Homo sapiens
gttggaacaaagggaaggcgcatggatgctggagggcgaagacctgcgaagtccctctccagggtcctaaagatcgctctgggaaaagggaaggatgccgctcttcttccggaagcggaaacccagtgaggaggctc

SEQ ID NO: 445070 - DNA, 75 bp, Homo sapiens
acgacttcagcatgagacccgccttcggagtgcaaattttgaggcacagaattctccagggattcaggagaaaga

SEQ ID NO: 445071 - DNA, 109 bp, Homo sapiens
ccggcatgtctatttggaaggactgacagaagcatccatatttgtacacataaccatcaatgaaatctatggaaagcaagttaaggtgaactgcacagctgaagtactt

SEQ ID NO: 445072 - DNA, 98 bp, Homo sapiens
aaccgcagcagtggtggctatgaacccagaggtcgtggaggtggccgtggaggcagaggtggcatggggagtctccccaggacagtgctatcacccgg

SEQ ID NO: 445073 - DNA, 75 bp, Homo sapiens
taagggcgacagcaacagctctgccggctggaagacctgcctagagctggaacgttacctccagagcgagccctg

SEQ ID NO: 445074 - DNA, 51 bp, Homo sapiens
agaaggaatacaaaatcgagggcatggtggtttatgttccatctgagaaga

SEQ ID NO: 445075 - DNA, 74 bp, Homo sapiens
gtcccagcgagggctgagccgggcggtgggaggttgaaaacgaggagctgaggcacctcatgtggtcctcggtg

SEQ ID NO: 445076 - DNA, 100 bp, Homo sapiens
gagtcaggggccttgtgtcctaccatggtatttgctaacgtttagagagtgcttccccttgccgagcactgggaactgatttcatctgaaattgaagaga

SEQ ID NO: 445077 - DNA, 87 bp, Homo sapiens
caagcctctcagcttcggagaatggagtcttccatcaatcatatctcacaggacctataaaaggcatcaccaagcccagtggacaga

SEQ ID NO: 445078 - DNA, 108 bp, Homo sapiens
tcagagaggttaagagactccactgaggtcacacagccggtgctgctacccccgtatgatgatgccactgtgaatggtgctgccaaggagccaccgccaccttacgtg

SEQ ID NO: 445079 - DNA, 83 bp, Homo sapiens
cccgacttccccaccccaggcgtggtattcagattttgcaagaacgaggctcaaggatgtgagggacacagtattgacagctg

SEQ ID NO: 445080 - DNA, 49 bp, Homo sapiens
caggtgttggaaaaacacaattatgacatccccgattgaaagaaccaga

SEQ ID NO: 445081 - DNA, 75 bp, Homo sapiens
cctccatcttgcagcccagaaggtgctcctgacctctgataaagctgcagccaatttctcagatcgttctttgct

SEQ ID NO: 445082 - DNA, 144 bp, Homo sapiens
ccgcccgcggacctgcggcccgacgaggaagttttctactgtaaagtcaccaacgagatcttccgccactacgagtgccagaaccctgtggagcatcatgaactgggaagagtagctgagccccagagcctctctggaagagaa

SEQ ID NO: 445083 - DNA, 100 bp, Homo sapiens
aagaaatgatagagaagctcaagaaggcatgttctctatgggatggccagcttttttgagcattacaccaaacattaaggaagaaggagcgatgaaagag

SEQ ID NO: 445084 - DNA, 74 bp, Homo sapiens
ctggacaggggcccgtgatggaaaatgcccagggctatacacagaatgggattttacatatgctggacagaaat

SEQ ID NO: 445085 - DNA, 100 bp, Homo sapiens
atagcgttgcaaatccttaaaagagtcttaacgacttaattcagtgcacaaatgagatgaatgtgaacatcccacagttggcagacagtttatttgaaag

SEQ ID NO: 445086 - DNA, 93 bp, Homo sapiens
tttgaaatggcttcgatgttagccgggacccgactcagcaaattgtggctactaatttgccccctgaagatcaagatggctctggggatgact

SEQ ID NO: 445087 - DNA, 100 bp, Homo sapiens
tcccctggaatctaaagcctcctcagccttctgagtcagcctgaaaggaacaggccgaactgctgtatgggctctgttgcttttaactttgacagaggaa

SEQ ID NO: 445088 - DNA, 96 bp, Homo sapiens
gctacagtttgtggcctctaaaaagattcgtatgcaccagacttcggctaaagatgacctcttggtacttcatctctctgacctcattcgcatggc

SEQ ID NO: 445089 - DNA, 90 bp, Homo sapiens
ggcgtcagtatctaccaggcaatgaacaaggtgctggagaatctggtaaaagcaccattgtgaagcagatgaggatcctgcatgttaatg

SEQ ID NO: 445090 - DNA, 75 bp, Homo sapiens
ggctggtcccagaagatggcggaggcgggggttcagccgtctgtatatctccccagatacctgaaactgaccacc

SEQ ID NO: 445091 - DNA, 75 bp, Homo sapiens
agcaaaggttcagccctccaagaaaatatttacaccagcagctccagttcataccaataaagaagatcctgctac

SEQ ID NO: 445092 - DNA, 88 bp, Homo sapiens
ctggtctattcaagttcaagtgaatatgggaaagggctccttcaagtatgcctgggtcttggataaactgaaagctgagcgtgaacgt

SEQ ID NO: 445093 - DNA, 100 bp, Homo sapiens
aagaagagaccaaatacaagcagaactggattccaaagttgaagttttgacctataaaaaggcagatactgatctgacggaatcttgctctgtcgcccag

SEQ ID NO: 445094 - DNA, 82 bp, Homo sapiens
accactggaacgccaaccggctggacctgttcgagatcagccagccgaccgagacctgcctagagctggaacgttacctcca

SEQ ID NO: 445095 - DNA, 52 bp, Homo sapiens
cccaaagcagcgtcccgtgctaaaggttgactttggcagaatatcatgaaca

SEQ ID NO: 445096 - DNA, 50 bp, Homo sapiens
catttctcttgcagatgacatagtttgtcactcaagccctatcagaaggt

SEQ ID NO: 445097 - DNA, 100 bp, Homo sapiens
agagacaggctgtgttcgtcccccggcgaccacggatgagcccggcctcccttttcatcaggacgggaagttggatatgtcaagtgaccagatagctgcc

SEQ ID NO: 445098 - DNA, 100 bp, Homo sapiens
aagagcgacgccgccgtgtgcccaacggtcggtgtccccggctgaggcagcgcggccgcagcagccctaagagaagaaggagagtggccacgttgattca

SEQ ID NO: 445099 - DNA, 82 bp, Homo sapiens
ggagaggacctgttcaccagcactgtctccaccctagagttggatatgtcaagtgaccagatagctgccaatctgcaagcag

SEQ ID NO: 445100 - DNA, 100 bp, Homo sapiens
gtggatgaagttgttcattgtttgtcaccacaaaaaggacaggactctgaaaaggaatcttgcccaagcagtgatgaagttgatgaggaggaagaagagg

SEQ ID NO: 445101 - DNA, 74 bp, Homo sapiens
tccgccgctgcgggcccgctccgacgcggaaggtgtgttccggggtggtcatgacatcctggtgcgctcccggc

SEQ ID NO: 445102 - DNA, 75 bp, Homo sapiens
gaccactggaccagcccattgggagttacttcagcgaagccgcacaaccagtgtctctgaagaagatgtctcaag

SEQ ID NO: 445103 - DNA, 98 bp, Homo sapiens
ccttcccagtagctgggaccacaggtacatcaggaacgtctctatcaagaatacaatttcagcaaggctgagggccatctgaaacagatggagaagat

SEQ ID NO: 445104 - DNA, 99 bp, Homo sapiens
cgggatttgggtcgcagttcttgtttgtggatcgctgtgatcgtcacttggtgacttaagagattaaaattaatttggttgctgttggttctgaacaaa

SEQ ID NO: 445105 - DNA, 110 bp, Homo sapiens
cctcttcaggatgatcggaaaatacagctgcattcatcacaggtgctgcgtaacgccaccgggtgcctaaggttattcacatcgaactcctttgatgtgatcagtgatga

SEQ ID NO: 445106 - DNA, 74 bp, Homo sapiens
ttacatccagcagccagaatggtgattgaaatctctgaatatcgaacccagctctatgaatatctacaaaatcg

SEQ ID NO: 445107 - DNA, 98 bp, Homo sapiens
atgcctgcacagtcacctcgagaagatgaagaaagcagcattcaggattactacagcatcccatttcccacacccactactccgctgactgggaggga

SEQ ID NO: 445108 - DNA, 100 bp, Homo sapiens
agcagcacccgagcaaaccccagcaagatgcggaggctgcctcggcggagcagaggaaccacacgctgatcatggatcaactcactatcctgaaggtcca

SEQ ID NO: 445109 - DNA, 75 bp, Homo sapiens
cttggattcagacgccgattcgcccagaattggagcgttattcagtatattaatgtcttattgataatggcagaa

SEQ ID NO: 445110 - DNA, 127 bp, Homo sapiens
tcggctttcgacaccaaccccttcgcggacccagtggatgtaaaccccttccaggacaaagcaggacctcataaggaaatctacccctatgtcatccaggaacttagaccaactttaaatgaactgg

SEQ ID NO: 445111 - DNA, 100 bp, Homo sapiens
aagagtcacttctttacttggtgcaggaaggcagtctttgctacgtacagcaaaagatcagtcgcatcgaatacattcattcaaagaacttcatccaccg

SEQ ID NO: 445112 - DNA, 50 bp, Homo sapiens
caagagcttcttgataaagaaaagatcttttctctgggctactgcccaac

SEQ ID NO: 445113 - DNA, 75 bp, Homo sapiens
ggttgcggtaacctggcctgggcctgaagtgagtgagaggcacatgaagtgtccgagctgcaggaggagggaatg

SEQ ID NO: 445114 - DNA, 100 bp, Homo sapiens
gttctcttctgtgagcagcatgtcttcgcgtttcagagatcgaccttcagaagatgcccttggggaagctgagcaaaaggcagatccaggccgcatactc

SEQ ID NO: 445115 - DNA, 100 bp, Homo sapiens
ggtgaagcctcctgcgccggccttgcctcggaatcagcatgattcttcagaggctcttcaggttctcctctgtcattcggtcagccgtctcagtccattt

SEQ ID NO: 445116 - DNA, 75 bp, Homo sapiens
cacctggggcacaggggcctcagcaggctctggtgtgactgtcaacgccctgcaccccggcgtggccaggacaga

SEQ ID NO: 445117 - DNA, 98 bp, Homo sapiens
gctgtggcacataatggcgaattggtaaatgctgctcgattaaggaaaaaggccatttatgccagtgttcttcctggagagttgatgagggggtacat

SEQ ID NO: 445118 - DNA, 88 bp, Homo sapiens
cgggtctggagtgcgtgggggaccggctgttggcggtacctggagtagaacagaaaaattattatgtctgtgttcccttgggactcat

SEQ ID NO: 445119 - DNA, 80 bp, Homo sapiens
tgagcataggatggaacccatattacaagaatacgaagaagtctatggtctataatgacggatctatactacctcagtca

SEQ ID NO: 445120 - DNA, 90 bp, Homo sapiens
gccatttcctctctccagaggacctttcctgcctaggactcatgattgtcccctccctgggtccccagccccaccccagccccaaaggag

SEQ ID NO: 445121 - DNA, 95 bp, Homo sapiens
ctgacggtggaggttcgcggctctaacggggctttctacaaggccgctgtgctcgctgtggagaaaacgtagttggggaaggtacaggatgcact

SEQ ID NO: 445122 - DNA, 75 bp, Homo sapiens
aagctaaggccgcgttggggtgagaccctcacttcatccgaactgataaatttcaaacggaagagagtggcagca

SEQ ID NO: 445123 - DNA, 98 bp, Homo sapiens
cgggctggccggccggccatggaggctgatggggccggcgagcagatgagaccgctactcacccggcacccctgcagtggaccatgagtcggtaatgc

SEQ ID NO: 445124 - DNA, 75 bp, Homo sapiens
tcggcctcaacatgaatggctactttcacggcttccgttacaagatgaggtctgtgtatgctcacttccccatca

SEQ ID NO: 445125 - DNA, 80 bp, Homo sapiens
gaattttccaaatgaatttgcaaaacttactgtaggcataccaatcccattgtggaaaatggacagactcatccgtgtca

SEQ ID NO: 445126 - DNA, 100 bp, Homo sapiens
aaagccctaccctcaccattcaccaggtgaatcttggaagcaaccagtaccttttctctgtcatagtggatcctaaagaaatgccctgcttctgtttgcg

SEQ ID NO: 445127 - DNA, 98 bp, Homo sapiens
tctaattttcattccttcaaaggacagagcgggatgccaccagcttgtccaaagggaagttccaggagctcctggtgggcatcgttgtggagaatgac

SEQ ID NO: 445128 - DNA, 104 bp, Homo sapiens
ctgcccccttcccccacccccgactcgggcttggcgcggcggccagaggaaccccgaggtcaaactgtgctgaaaatatccgcaaacacattctgcatactggc

SEQ ID NO: 445129 - DNA, 97 bp, Homo sapiens
atgaatgtgagcaggcgctggctgctgagcccaaggccaaggaccccttcgctcacctgcccaagaggttcttccgagggcacaagcttaccacaag

SEQ ID NO: 445130 - DNA, 100 bp, Homo sapiens
cctgttacttccaagtcatcaccagaaagtgtaaacaggaacatcgataagtagtgtaaaaacttgcacaatgaaatccgaagccaaggatggagaggag

SEQ ID NO: 445131 - DNA, 100 bp, Homo sapiens
cggggtccgcctgtgtgcaggagtcgcaaggtcgctgagcaggacccaaagagatgtacggcttttaatcttggaatatgcccgttggtctatgattgac

SEQ ID NO: 445132 - DNA, 98 bp, Homo sapiens
gatgccctgcagtacctgcagaaggtctctggagacatcttcagcaggaccttttaccaatttgaggctgcgtgggacagctccatgcacaactctct

SEQ ID NO: 445133 - DNA, 100 bp, Homo sapiens
gcctgaacttacaagaaggagaattcttattacaggtcgaagaattccatccactgacgccaacctgccatctggcggtaagggcttcaaactccgaaga

SEQ ID NO: 445134 - DNA, 75 bp, Homo sapiens
cgcccgctccccttttcccctcagtcgcctcgcgcctgcagctttatgaaaactttatcagtgaatttgaacaca

SEQ ID NO: 445135 - DNA, 100 bp, Homo sapiens
tctacagcagtggcctgctagtgacactgatagctgacctgcagctgatagactttgagtttggaccattttcagaaaaatgtgatattactacagcccc

SEQ ID NO: 445136 - DNA, 75 bp, Homo sapiens
acaaacaaactacccattttcttttttggaactcatgagacgccatcgaagacggcaatttggaggaaatggaag

SEQ ID NO: 445137 - DNA, 90 bp, Homo sapiens
cgccgtgacccacggccgcctccggagcccgacgcggatttgcctcaaagggcactgcaaaaattgaacagaggaatcccaaggaagctg

SEQ ID NO: 445138 - DNA, 51 bp, Homo sapiens
cagagaccatggagagggacagccacgggagagcatcagtgatgtcacgtt

SEQ ID NO: 445139 - DNA, 82 bp, Homo sapiens
tggaaacatgagcattcagtttcttggtacagtggtgaatggaactctggtgactcattcaaatcatctggaggtggtgaag

SEQ ID NO: 445140 - DNA, 82 bp, Homo sapiens
ccgcccaggcgcagatgcgggccctgctggaccagctcatgggcacggctcgggacgttcagagaagccgaactgggattac

SEQ ID NO: 445141 - DNA, 83 bp, Homo sapiens
gtccacccaccgccgccgcctcccaggcctccccatggccacccatggaccagtcggcattcacttcctcccttctgcggccc

SEQ ID NO: 445142 - DNA, 82 bp, Homo sapiens
cccccttccccacgcaaccccagatccatttacactttacaacctcctgccccccgaggtctgcagtctcctgaacccagca

SEQ ID NO: 445143 - DNA, 100 bp, Homo sapiens
cgtcggagcacttactggagtccaagatgctaatggagatatgtcagtattgaattctcccagacatcagagctgtataatgcatgttgatatggattgc

SEQ ID NO: 445144 - DNA, 87 bp, Homo sapiens
aggcctgcgaaggaaacttacccaaagggaagtctggcttaaaagacaaccttcttgcttctgggacatccagcctgacagccacca

SEQ ID NO: 445145 - DNA, 82 bp, Homo sapiens
gaaaaacgtgtgggtacgaccttgatgagttttgatcatcctgagaaaaatgggccttggcctgcagacccaataaaccttc

SEQ ID NO: 445146 - DNA, 100 bp, Homo sapiens
tctgtggtttatcattgtaatcagcttcttaccaaatacagaagtatgtccgtggttcagaccctgtattaaagcttttggacgacaatgggaacattgc

SEQ ID NO: 445147 - DNA, 75 bp, Homo sapiens
aacatgaccgctgagcccatgaggctgctgatactttggctgtgaggcaaaaaaggagaatttatgatatcacca

SEQ ID NO: 445148 - DNA, 75 bp, Homo sapiens
caccggagcctggcgcagcctccctctattaccagaccaaatacacgctgatcgatgagcaggacatcccgctgg

SEQ ID NO: 445149 - DNA, 75 bp, Homo sapiens
ggcctccattgttcgtgttttaaggcgccatgagatgactccaatgatatgtgggaggaccaggaggaggaagag

SEQ ID NO: 445150 - DNA, 89 bp, Homo sapiens
tcctgagtaactgggattacagggaaggtattcatgtaaatcaagaattactgcaaatatctccttgtatcacagagcagttcattgag

SEQ ID NO: 445151 - DNA, 100 bp, Homo sapiens
ctctcccgccgcggcggccggcgatagcccggcgctcatgacaggacccgtgcatctcttccgactctcgggcaagtgcttcagcctggtggagtccacg

SEQ ID NO: 445152 - DNA, 100 bp, Homo sapiens
tcgttcgattattagctttagtgaaatgggctaataatgctggcaaagtggaaaaatgtgcgattcaaccctatgaaaagataaaggccaggggcttgcc

SEQ ID NO: 445153 - DNA, 113 bp, Homo sapiens
cagcaccgcagccttgggcctcgcgccggctatggccgtgccctggggctgagccctcagcttccccgggcgctgcctggacaggcctgcctgcgtgctgggacatgtctggc

SEQ ID NO: 445154 - DNA, 75 bp, Homo sapiens
cggtgtctgctgctattctccgagcttcgcaatggatgaccagtgtcccagtgaaggaacgagtgaaggtgtctc

SEQ ID NO: 445155 - DNA, 75 bp, Homo sapiens
ccgaaatggcggggactgttggtctcggccctgcggaagcttgtgttttctgtcgaaaacatgatgactgtccta

SEQ ID NO: 445156 - DNA, 96 bp, Homo sapiens
taacgagcggcggcggcggcagcgggtcttgggtcctccgagagcagcagcggaaatggatcagacaatggctgccaatgctcagaagaataaatt

SEQ ID NO: 445157 - DNA, 50 bp, Homo sapiens
ctcaccatctacggcatccggtctcctgcgccgagtgcctgaagttcgaa

SEQ ID NO: 445158 - DNA, 100 bp, Homo sapiens
gtagaagccagtctctgcaggcggccagcggacccctgtaaaagagcccaacagtgaaaatgtagatatcagcagtggaggaggcgtgacaggctggaag

SEQ ID NO: 445159 - DNA, 109 bp, Homo sapiens
ggcgatcgacgccaccgactcttgtatcatgagcattggatttgatcacatgggacccagatgatgtggtaccagttggccaaagaagagcctggtgttggtgcatgtg

SEQ ID NO: 445160 - DNA, 100 bp, Homo sapiens
ttagatcttgtggccaagagttcagaccgtggcgaagtggagagtgacatgcagttggatggcggtgactgcgtgatgccttcaattaagttgcagagtt

SEQ ID NO: 445161 - DNA, 87 bp, Homo sapiens
gatgcatttcatggctatcatctacacgatttccatcaccaaggagtaagaagaccttcgggcagagactgttgggtatgctccctt

SEQ ID NO: 445162 - DNA, 100 bp, Homo sapiens
gggaaaccaggcatctctgggtgggcaacttacccgagaacgtgcgggaagagaagatcatcgagcatttcaaacgaaaggcctaaagaatgtatttgac

SEQ ID NO: 445163 - DNA, 75 bp, Homo sapiens
attcagttgcaaaaggacccgggttttcgaaattcttcttatccagagacagtatctggagtccatctttcacca

SEQ ID NO: 445164 - DNA, 90 bp, Homo sapiens
ccggaaagtacgagtcggctcagcctggagggggggccctcagcctcttggccttgaacgggctgttcatcttgattcacaaacacaacc

SEQ ID NO: 445165 - DNA, 98 bp, Homo sapiens
ccagtacgagttgaatcattgttcaaataagcgggtccatatggaatatttgctggtagggatgcctccagaggactggccacattttgcctagataa

SEQ ID NO: 445166 - DNA, 100 bp, Homo sapiens
atcaaaaggactgaagtggggttaagagatgaaaactttcggaagagaaagttgcctgtggtaagttcagttgttaaagtaaaaaaattcaatcatgatg

SEQ ID NO: 445167 - DNA, 127 bp, Homo sapiens
cagtagtgagttgaaactcttggaggaagcaaccatttcagtctgcaggtcattaggtggctatggaccgccccctgcaggaagaggagcccccccgccacccccaccgttcacctcctacatcgtg

SEQ ID NO: 445168 - DNA, 98 bp, Homo sapiens
ctagccaaattgctcaactaagaccaagtcctcgctggactgctcagggtgccagacctcatctaatccttcccctctaccaccggatatggctcctg

SEQ ID NO: 445169 - DNA, 104 bp, Homo sapiens
cctgagcacgtcttgcctgagtcccagagaatgtaaagctgtacagttatggcgaccccaaagagaaagcatgaaagaacctttagagtagagttcaacactta

SEQ ID NO: 445170 - DNA, 89 bp, Homo sapiens
gcttctcccctacgcgctacacaagtggagctccttttcctccacctaccttcccgagtaaatcaacagactgggaagatgatggttgg

SEQ ID NO: 445171 - DNA, 50 bp, Homo sapiens
cacagctgctgagaggctagagaaggtgcatcgccatctacaggagcaga

SEQ ID NO: 445172 - DNA, 100 bp, Homo sapiens
ggtgaaggaagcttatggtacctgcacaccgacaggctggagcgcgagagcaaaatacatatctcagtgcattgatgagatcaagcaggagctgaagcag

SEQ ID NO: 445173 - DNA, 144 bp, Homo sapiens
ccgccaaccgcaaccattgacgccatgtcgggttattcgagtgaccgagaccgcggccgggaccgaggatgaaggtcaccgtgtccaaagggggcgaccgggacagtgacgacgacagcgtcctcgaagccaccagctcccggg

SEQ ID NO: 445174 - DNA, 100 bp, Homo sapiens
atcaaaggagcagggaagaaggaatcatcgaggcatgggggtccacactgcaatgtttttgtggaacatgctaatcacatatggctctgatagaactgag

SEQ ID NO: 445175 - DNA, 97 bp, Homo sapiens
gtacccggagggcgtcaagcagcatgtgaaggagaccaagggattgtcaatgaggcagatcagattccgatttgacgggcaaccaatcaatgaaaca

SEQ ID NO: 445176 - DNA, 100 bp, Homo sapiens
ccacgaatctgcccacccctcctgtaacccagcctgtttcacttcttgaaatctcctgcaaagaagctgagccatgcaattagtaaatctttggggtgtg

SEQ ID NO: 445177 - DNA, 90 bp, Homo sapiens
gactgatttttagaactccacatttgaggtctgtcagtggcccagcggaagtttgctcattcactcagagactttaagtttgagtttatc

SEQ ID NO: 445178 - DNA, 100 bp, Homo sapiens
gtgtgatgatgatcagatgtctaacgataaggagcggtttgccaggcatgtcggggaaaccagcacgatgtgccagtcattcctttggatgtagtagata

SEQ ID NO: 445179 - DNA, 96 bp, Homo sapiens
gacacaatttatcattgaataagtgttttaagaaagtggacaaagagaggagtcagcaagacttcaaggactgcattcgtaggcaaaggttgaccc

SEQ ID NO: 445180 - DNA, 75 bp, Homo sapiens
cttcgacattgccgtcgacggcgagcccttgggccgcgtctcctttgaggtgtgttaccggcgcaacggccacaa

SEQ ID NO: 445181 - DNA, 100 bp, Homo sapiens
cttcgatcccttctctgatttgctgtcagccatgaacggatggatgtgatgcctgctagccaaaagggtgctggagaatctggtaaaagcaccattgtga

SEQ ID NO: 445182 - DNA, 100 bp, Homo sapiens
gtcactgaggttgcagttggcgtgaaggtttttcgttggaatatacgttgcacatttatggcgattctgagtgtgagggcagacttctgccaggctcagc

SEQ ID NO: 445183 - DNA, 100 bp, Homo sapiens
agctcggctacctggtactgagtgaaggtccagggcatgtccttcatagcagcagtgttgatcttgaacttagatactgcagatgcctttattgcctttt

SEQ ID NO: 445184 - DNA, 100 bp, Homo sapiens
ctgctgcccggccttgaagagggctccgagatctccgacagggaagtcgagataacatgagtattgtactagtttgcttttcaaatgctcccaaggtctc

SEQ ID NO: 445185 - DNA, 112 bp, Homo sapiens
cctggtgttcgccaagatgaagggctacccacactggccggcccgggaagctgtagagaaatatgaagaagtgctacataatttggaatttgccaaggagcttcaaaaaacc

SEQ ID NO: 445186 - DNA, 82 bp, Homo sapiens
gctggatttaagcactgctgcactttatgagaacgctgtaaatgtaagcctattagagctacacagaagacctatttccgga

SEQ ID NO: 445187 - DNA, 100 bp, Homo sapiens
ggcaggagatgagcaaggatctggaggaggaagttggtgaaccatctaaagaagagaaggctgtggccaagtatcttcgattcaactgtccaacaaagtc

SEQ ID NO: 445188 - DNA, 100 bp, Homo sapiens
caagactttgctgtagatgatccacatgatgacaaggacactttgccaccatcaccttgaccttcatcgacaagaacggagagactgagctgtgcatgga

SEQ ID NO: 445189 - DNA, 75 bp, Homo sapiens
cctttggatgtagcaaggaagaaattgttcagttcttctcagcacctggaaatggagatggtggcagtaccagtg

SEQ ID NO: 445190 - DNA, 100 bp, Homo sapiens
agaagagcggaccagggctgctgccagcacctgccactcagagcgcctctgtcgctgggacccttcagccctgtatgatgagattcgtcagtttcgcaag

SEQ ID NO: 445191 - DNA, 83 bp, Homo sapiens
caacgtcaagatgttccaggcacataaggaggcgattagagaggccaggctttaaactccagagaacctcatatgtgtttagt

SEQ ID NO: 445192 - DNA, 83 bp, Homo sapiens
ggaaaagtcattcaactcaagcagatcaaagttgttttgaggtcttagaaaaataccccaatacacccatgagtcataaagaa

SEQ ID NO: 445193 - DNA, 100 bp, Homo sapiens
cctatggtggacccttcatgcatcacacccatccagctggctcctatgaaggtaccttctcaaaccagatttcatgaggcggcctgatcgaacatttgac

SEQ ID NO: 445194 - DNA, 101 bp, Homo sapiens
caataaacgaggaatgatccagcttattgttgcaaggagaataagcaagtgcaatgagaattccctttatcggacgtgaaggacctcttcaaggagaacta

SEQ ID NO: 445195 - DNA, 83 bp, Homo sapiens
tggagtagcaaggatcttcaacactagaagatatttgctgcagcctttagtgagacggtttaagcggaagcatcttactgcca

SEQ ID NO: 445196 - DNA, 80 bp, Homo sapiens
tgtcatcatgtcgcgttacgggcggtacggaggagacgccacagccatggccatgatggtgtttccgcgggaggagaagc

SEQ ID NO: 445197 - DNA, 100 bp, Homo sapiens
ccagacacaagtcttcactccttcctgcgagccctgaggaagccttgagtcctccctcctgaacctgatctcctatagagcgcagtccatccacccggcc

SEQ ID NO: 445198 - DNA, 80 bp, Homo sapiens
cagcctgccacatcgggggcaccaccctccatgcctttgcaggcggcttacagggagaacacagttggcctccaccgttt

SEQ ID NO: 445199 - DNA, 100 bp, Homo sapiens
atccaacatttcctgcatgtccaaaatgggagacaggcgcctgagtaacccggggcaaggtaaaaagatggcctatcagaaggtccatgcagatcaaaga

SEQ ID NO: 445200 - DNA, 100 bp, Homo sapiens
gcagagattgtttcctgacacagccagtggcccctgagagcacagaggcagaggaagagttcaacaaagcccagactgtgtttgaagatctgaaccaaga

SEQ ID NO: 445201 - DNA, 100 bp, Homo sapiens
caaaactcagtgccctcaaggctcggaagaatgtggagagttttctagaagcctgtcgaaaaatgggggtgcctgaggttaatttggagtggcccctgga

SEQ ID NO: 445202 - DNA, 101 bp, Homo sapiens
tcccaatttttttccaaactcagccaggtggttcgaaagacttcaagcaattgggtcgacaagtgcccccaatgatttatggtacaacttcattgaactgc

SEQ ID NO: 445203 - DNA, 100 bp, Homo sapiens
gcacccgcgacgacgagtacgactacctctttaaaggaaacttggatttaactggccagaagcaggtattcaaagcagagaacaatccctgggtgacccc

SEQ ID NO: 445204 - DNA, 100 bp, Homo sapiens
cgggccgggcgggccgcgggagccgcacgcggcgatatggaagaggagggcaagaagggcaagaagcttcgcctcaacagcatcaagaagctgtccacca

SEQ ID NO: 445205 - DNA, 95 bp, Homo sapiens
ccggacccaaagtgccatgtctttaattgaacagagtatctgtcaggcaagagctgctgtgatggtttatgatgatgccaataagaagtgggtgc

SEQ ID NO: 445206 - DNA, 100 bp, Homo sapiens
aaagtgcccaaggagcgcctggctcttctccacaaagacacactcggtgaaatacctggagtgctcagctctcacccagagaggcctgaaaaccgtgttc

SEQ ID NO: 445207 - DNA, 100 bp, Homo sapiens
cagtatgcacttaatgtccctaaaccacaacaaaggtgcttgcccatggctcctcgcttccctctgcctcatgactgatgccaattattccccttgtggc

SEQ ID NO: 445208 - DNA, 96 bp, Homo sapiens
ccttcatcaaggagtaccaggccaagtacatcgtggcgtttgcagccaaggtgttgacaggccaggtgcacgagctgaaggacctgcgggagtatg

SEQ ID NO: 445209 - DNA, 88 bp, Homo sapiens
agctagccaacagcgtctgggaagagagcagccaggggcggacgaaaccatcggtagactccacaagccgctgccatggcccagacac

SEQ ID NO: 445210 - DNA, 75 bp, Homo sapiens
caactttcgtttccctctgagggaattgggaggtcggcggccccaaaagtacaccaggggttggaaaaaccacac

SEQ ID NO: 445211 - DNA, 100 bp, Homo sapiens
tggggggacagtgatgggtgagtctggcatgaaaactgtggaggatgtaggaagccccctcaagtatgaattccagatcatgtcgcacgagctcttctcc

SEQ ID NO: 445212 - DNA, 96 bp, Homo sapiens
ctttgctggagagaagagaatgcctgaagacttggatgaaaatatggattacaggttgatgtgggagggatgactggaaaccatacaagcttagaa

SEQ ID NO: 445213 - DNA, 74 bp, Homo sapiens
ccttattttttctcatggatgttcttcttcgagtatttgtagaaggcagttgcaccaccagcaccaccttccag

SEQ ID NO: 445214 - DNA, 100 bp, Homo sapiens
gtggcttgaggtgttgggaatctggagatgatccatgggtagaacatgccaagtggtttccaagagtatcactacacagccaacaaaatctcatgactgt

SEQ ID NO: 445215 - DNA, 90 bp, Homo sapiens
ggcggatgccctgcagtacctgcagaaggtctctggagacatcttcagcagctcacctccgcctccaggaagaccagactcccacccttc

SEQ ID NO: 445216 - DNA, 90 bp, Homo sapiens
atgtgaaagaccattattccaacggcttctgtactgtttcccaaaccactccttatgatccagtgaatattcaagagagctacatttgaa

SEQ ID NO: 445217 - DNA, 88 bp, Homo sapiens
gcacctccgagcgcaaggacagcgcgaggtccgcgcagcccagcgcagccatgaggccgccgagcggctgaattccgtggagccggtc

SEQ ID NO: 445218 - DNA, 75 bp, Homo sapiens
gcgcgttgctgcggccgtggtccgcgcccttcctcggcgggccggactggattaaactgcaaatatctcatgaag

SEQ ID NO: 445219 - DNA, 75 bp, Homo sapiens
agtgcagggaagcaactgcagagtaagaagactgttagaatgccctcggtaacacagaggctgagagatcctgac

SEQ ID NO: 445220 - DNA, 75 bp, Homo sapiens
acatccagcaacagctcacctcttaacctaaaagctggactgggcagcctttggggtcatgacccttccctccat

SEQ ID NO: 445221 - DNA, 87 bp, Homo sapiens
ccgaagcgcccgcgagccgccggccgggagggatccgggtcctgaaggaggaacagcacagcatgctgggctctggatttaaagctg

SEQ ID NO: 445222 - DNA, 100 bp, Homo sapiens
ctgaaacttgtgggcaacttcaagctgaaagaagccttagcagcaaaagactttgttaacctcagtatgagaataatgttatcactattgatctggttca

SEQ ID NO: 445223 - DNA, 105 bp, Homo sapiens
ggaatgtacacgataattaaagagtaaagttgtgctcaacgtgccggtggtggtgtgcacattgagccccggtatagacagttcccccagctgaccagatcccag

SEQ ID NO: 445224 - DNA, 100 bp, Homo sapiens
gctccgggtcgctggcggcgtggacacctgagtcccggggtaggggtctcccgcgagattctggctgtgactcagtcactgacactgagcctgaggacga

SEQ ID NO: 445225 - DNA, 100 bp, Homo sapiens
gcaagatccagatcgggatttacgtggagatcaagcgcagcgatgcctgaaaactggttttttaaaatggaagccagattatgacagtgccgcttctgaa

SEQ ID NO: 445226 - DNA, 82 bp, Homo sapiens
tttgatagtcgtaccatatgcagaaggaggaatgcaggctcaggttggaatgccaggaagtggaccagtgtccatggaacgg

SEQ ID NO: 445227 - DNA, 100 bp, Homo sapiens
agcgacctacctgaggatgatcaagcggagttcgatgcgctcctccaggtcccggggctctgcatcctgagctatccaacaccactgtactttgggaccc

SEQ ID NO: 445228 - DNA, 100 bp, Homo sapiens
ggagcctgggctgaccagccaggacagcggggtaaacccgaacaattctgcgcgaggaagtggacgttgtggtagcaccatgccaaggcctccggcccac

SEQ ID NO: 445229 - DNA, 83 bp, Homo sapiens
ggaagcatcccagacaccgggaaggatttaagtgccctgtatgctcaaaatttgtatcctcagatgaaatggatttgcatctt

SEQ ID NO: 445230 - DNA, 97 bp, Homo sapiens
acaggctcagtctgcggccaagactccgtcctgcaaggagtacttgattcttcagaaaacctccaaagtagatgtggactcaagtggaaagaaatgc

SEQ ID NO: 445231 - DNA, 96 bp, Homo sapiens
ggggaaactaggtcgatggtcggcggcgcccggatgggcagctgagaggaagtggcttttaggaagaagaggctgtgcattaaatttattccacgg

SEQ ID NO: 445232 - DNA, 89 bp, Homo sapiens
cacagaacggacttttcgtgtcccgctgtaaggaaacaagatggtccttaaaaccgaagaggaggacgtagagacggggtttcgccatg

SEQ ID NO: 445233 - DNA, 96 bp, Homo sapiens
caaagagagttatgactatctcaagactctggctggtgatgttcatattgtgagaggagacttcgatgagactgttgggcgggagctgctgctcca

SEQ ID NO: 445234 - DNA, 98 bp, Homo sapiens
agatgatacaaatgaatttgttagtgctgtgtgctggagggcactaccagatgggggggattcccgaagtcttccgttttctgagaatgtgagtgctg

SEQ ID NO: 445235 - DNA, 100 bp, Homo sapiens
tggccttcgactcgctatgtccactaacaatatgtcggacccacggaggccgaacaaagtgctgagcttcctgcctgacacagctcacttcaagaagtgc

SEQ ID NO: 445236 - DNA, 98 bp, Homo sapiens
acccagcagtacaatgacgtggttaatgccctgctgcaggcccaccctttcctggatgaggatggctgtggcttccaacgaagtaaacgaggaggttg

SEQ ID NO: 445237 - DNA, 75 bp, Homo sapiens
tttataattccctaagcatggctatgcagactctaaacttggtatgtgctgtgagttatacaactcaggctggag

SEQ ID NO: 445238 - DNA, 98 bp, Homo sapiens
caaagctcaagatggcggacaaaacgccaggcggatctcagaaggccagttcaaaggtggggaccaaggcatactgaacacattttttagcagctggg

SEQ ID NO: 445239 - DNA, 98 bp, Homo sapiens
tggtggtggccgtctctgtcaagcctggagacgcgctccagggcccacaacggcagtgtcctacatgtcggtgaaatgtgtggatgcccgtaagaacc

SEQ ID NO: 445240 - DNA, 100 bp, Homo sapiens
ggcaacaggtgtcacagcacgagcagcccgacggccatggaggctgaagagacgatggaatgccttcaggagttccctgaacatcataaaatgatcctcg

SEQ ID NO: 445241 - DNA, 100 bp, Homo sapiens
agaagatcgtgtttgtaacggggaacgccaagaagctggaggagtgactgtgaagtgctgaccacactcaccccagacactggccgtatcctgtccaagc

SEQ ID NO: 445242 - DNA, 75 bp, Homo sapiens
tgcggcccggcgtctcggcccttgcctgcgcgcctaccaggctcgaccccagatgccggtggccgtgggtcccta

SEQ ID NO: 445243 - DNA, 98 bp, Homo sapiens
ttcatttagattggattctgaatatcaggtcaaaatgcagatcttcgtgaaaacccttaccggcaagaccatcacccttgaggtggagcccagtgaca

SEQ ID NO: 445244 - DNA, 98 bp, Homo sapiens
ccgctcaccttagccccgcgcccgaggtgaatgcgtccccgtctctcacgtccagcactgccaatgaccgaatcctcaagtacaacctgattaatgac

SEQ ID NO: 445245 - DNA, 111 bp, Homo sapiens
cgcgtccgccccgcgagcacagagcctcgcctttgccgatccgccgcccgtccacacccgccgccagcggaaggagagttttacatggaagtggcttacagaaacttggcg

SEQ ID NO: 445246 - DNA, 100 bp, Homo sapiens
aattgactgcttgtcccagaagcaatttaaggagcagaatcctgtgaagcagctccagctatgtgtgaagaagaggacagcactgccttggtgtgtgaca

SEQ ID NO: 445247 - DNA, 74 bp, Homo sapiens
caagggaactaatttggagcagacctatggctattcaggcagctatcagccaggcctttaaaaccccagaggtc

SEQ ID NO: 445248 - DNA, 100 bp, Homo sapiens
cacagagaagaatgtgattgcagcattaaattcccgaactggggagatctatggagtctcccaggcgggaatgcaatggtgcgatctcgacttcactgca

SEQ ID NO: 445249 - DNA, 100 bp, Homo sapiens
ggaagaagcagacccagaaggctgacaagctccatgaggagtggaagctggacacactatgtgacttgtatgaaaccctgaccatcacccaggcagtcat

SEQ ID NO: 445250 - DNA, 97 bp, Homo sapiens
acctcgatgcagccagtagcttggatccttgtgggcatgatccataatcggtttcaagtggatcaatcttcctgtcctacaactgacaaaggatccc

SEQ ID NO: 445251 - DNA, 75 bp, Homo sapiens
tgacgagggccacagtgggattaaaaagaccactgaggagcaggtgcagcgtccgtctccaagagagtatgaaga

SEQ ID NO: 445252 - DNA, 100 bp, Homo sapiens
cattgccaaatcctccatcaaaggtagcaaaccatgtgatttcttctgactctatttcctcttctgccagtagtttcctgagctcaaactctactttttg

SEQ ID NO: 445253 - DNA, 120 bp, Homo sapiens
ggatcatggcggatggccccaggtgtaagcgcagaaagcaggcgaacccgcggcgcaataacggacatccaggcagaaattgatgcccacaatgacatatttaaaagcattgacggaaac

SEQ ID NO: 445254 - DNA, 102 bp, Homo sapiens
cgtcccccagcgccgacaccaacaagcgcaagagagacgaagatgccatggacaatattaccaggcagaaccaattctacgatacccaagtcatcaaacaag

SEQ ID NO: 445255 - DNA, 100 bp, Homo sapiens
ttctttcgatcagagatcggcggagaccctcgaagtgcgcaaacttgacactcaccctgaccgaggcacagagctttggcctgctggatcccaaactctg

SEQ ID NO: 445256 - DNA, 83 bp, Homo sapiens
ggaagggatcgtgtggcatgaaacagaagaagcatgatgccttcttctgtagagtgggcgctttgcagaatacgtgttgaatg

SEQ ID NO: 445257 - DNA, 100 bp, Homo sapiens
cggcgggcggcgggcggcaaaggagcagccatgagggccgggcccagtcaccgaccacaagttggatggcttgaggactggtactaaaaggaaacgtgac

SEQ ID NO: 445258 - DNA, 88 bp, Homo sapiens
tttccggagtcagtcattttactgtcaagacatttcttcggcattctgcaacaggtcaaaatgcagatcttcgtgaaaacccttaccg

SEQ ID NO: 445259 - DNA, 82 bp, Homo sapiens
aagggggcccccgaaactctgcactccatggacctgctgaagttcccatgatgtcacccaatggatccattcctcccattca

SEQ ID NO: 445260 - DNA, 82 bp, Homo sapiens
cttccaggagaatgtggggagacaggttaatttggagtggcccctggagtcagtttcctacaccatccgaggccccacccag

SEQ ID NO: 445261 - DNA, 51 bp, Homo sapiens
gacacccctgaagccgagaaatggcctccggtgtggctgtctctgatggtg

SEQ ID NO: 445262 - DNA, 100 bp, Homo sapiens
agagattcccgacgaaaccctgcgaaggcccggaggtgttcgaaatccgcaccactgatgacctcactgaggcctggctccaagaaaagttgtctttctt

SEQ ID NO: 445263 - DNA, 50 bp, Homo sapiens
aaggacaaacccaccttcatcaaagggacagggtctcgctgtgtcaccca

SEQ ID NO: 445264 - DNA, 98 bp, Homo sapiens
gggaccgagcaggaatccgtatctgggaacagactgtgccctgtccacggtgcctcctgcatgtcctgctgccctgagctgtcccgagctaggtgaca

SEQ ID NO: 445265 - DNA, 82 bp, Homo sapiens
gcgaatatcgtcatcgttagaaggcgccccaagttggagaagaaggatgccaaggagatccccagtgccacccagagcccca

SEQ ID NO: 445266 - DNA, 74 bp, Homo sapiens
tctcatattcgcttagcccttggggtggggagaaccttaggagctcttgaaacaacatcaaagtgacaccttgc

SEQ ID NO: 445267 - DNA, 51 bp, Homo sapiens
ccaggagaaattcgccctcaaaaagctggggaaactgtgccccccgacacc

SEQ ID NO: 445268 - DNA, 75 bp, Homo sapiens
ctccggcgtgttcatgcccccgggccctgggcgctgcctatggcacagccaagagcggtaccggcattgcggcca

SEQ ID NO: 445269 - DNA, 75 bp, Homo sapiens
ctcaacgacgcggacatggtcatgagctttgtgaacctgggacagagcgggatgccaccagcttgtccaaaggga

SEQ ID NO: 445270 - DNA, 91 bp, Homo sapiens
tggggccagggaaccctggtcaccgtctcctcagcagcctcccgcgacgatgcccctcaacgttagcttcaccaacaggaactatgacctc

SEQ ID NO: 445271 - DNA, 75 bp, Homo sapiens
ccccaggaggggcgagagggagccgcagctgatgtcagggcgaccattgacgaggtggagacggacgtggtggag

SEQ ID NO: 445272 - DNA, 100 bp, Homo sapiens
ccgtgttcttcgacattgccgtcgacggcgagcccttgggccgcgtctcctttgaggaggaggagaacggggctgaggaggaagaagaagaaactgccga

SEQ ID NO: 445273 - DNA, 83 bp, Homo sapiens
caaggggcttacgcagaaggacctggccacggatgatcggctgaatgtaacagaggaactaacgtccaacgacaagacgagga

SEQ ID NO: 445274 - DNA, 82 bp, Homo sapiens
gaggagctggcattggagcaagccaagaaagaatccgaagatcagaaacggaacattttagtggacaaaccaaatgaccaat

SEQ ID NO: 445275 - DNA, 83 bp, Homo sapiens
gcaacactcgcttggttggggagatcggcgcttggccgcagaaaaatatggctcaggagactaaccagaccccggggcccatg

SEQ ID NO: 445276 - DNA, 75 bp, Homo sapiens
ggggtgctcctgaagattgtggagcagatcagccataaaattttgagtagaaaaatccagaaatttgaaaatcag

SEQ ID NO: 445277 - DNA, 90 bp, Homo sapiens
ggctttgagtgcatctgccccgagcagtgggtgggggccacctgccagctgggctcccaccccgtggccaggtacctaggctccgtggac

SEQ ID NO: 445278 - DNA, 74 bp, Homo sapiens
gtcagatccttgagtgataaaggagtagaggaactggcccaaataaggaaggaggaaaaagagaagaaaagacg

SEQ ID NO: 445279 - DNA, 74 bp, Homo sapiens
gtggcggaagacggggatgagctcaggacaggtgtgatgaatgcagactctgctaccattttggctgtttggat

SEQ ID NO: 445280 - DNA, 100 bp, Homo sapiens
cagcaaaggcaccgtgacaggccaagtgcaggggccagaagacaaagtcaattccatgaacatcatcttcagcgggctatttcagcacagcaggtgtatg

SEQ ID NO: 445281 - DNA, 101 bp, Homo sapiens
ctggagaagaagagattgagctctactcaggtacactgaggaggggacggctccgtcttcacattgtgcacagatctgaggatgggattagcgaagctgtg

SEQ ID NO: 445282 - DNA, 82 bp, Homo sapiens
ccactttcgccagcccgtgccgcgagcgcggcctgcaggagctgtcgcctggttgggcccggaaatgggacgtcgcgctttc

SEQ ID NO: 445283 - DNA, 100 bp, Homo sapiens
gcggcggagtagagcggagcctggcgggcgtgggaacccaggccccgccgaggcggccagattgataagaacctgaagtcgctggagcggtgccagtccc

SEQ ID NO: 445284 - DNA, 98 bp, Homo sapiens
cgggggacttggaaatccttccgttaggcctggaaggcaagagcccagaaattcccaattgagaattgtgttagtgggtaaaaccggagcaggaaaaa

SEQ ID NO: 445285 - DNA, 145 bp, Homo sapiens
ttcaaacagcactgccaaatagcagaagaataccatgaggtcaaaaaggaaatcaccctgcttgagcaaaggaacatcagaggctccttgaaatgctagatacagagaaggaactgttaaaagaaaaaataaaggaagctttgat

SEQ ID NO: 445286 - DNA, 100 bp, Homo sapiens
gaaactgattccaagacagcctccccgtggaaggaatctgtcttgaactatcgtttcgatcctctcggcattgttgatggttttactgccgaggtagggg

SEQ ID NO: 445287 - DNA, 83 bp, Homo sapiens
tggcgatgttggtccaagggaactgggtggtgaagaggctgaccccgcactacatctacccaccagccatcgtgcagcccagc

SEQ ID NO: 445288 - DNA, 109 bp, Homo sapiens
ccggcgtctgcgcttccccatggggctggcctgcggcgcctgggcgctctgagacaatgcagatcttcgtgaagactctgactggtaagaccatcaccctcgaggttga

SEQ ID NO: 445289 - DNA, 50 bp, Homo sapiens
cctctgtacgcccgttcactgctgatgttctaatcatgtcagataaagat

SEQ ID NO: 445290 - DNA, 83 bp, Homo sapiens
cagccgcgcgctgagggtctcggggcgggcgccgcgggacctctccgggccatggaagttccacctggtgccaagcatcaaca

SEQ ID NO: 445291 - DNA, 100 bp, Homo sapiens
gcacggaccacacggagcgccgcggccgcatctacatccaggcccacatcgacagggacgtcctcattgtcctcgcaatgacctcctttggctgcacacc

SEQ ID NO: 445292 - DNA, 83 bp, Homo sapiens
cggcacaaaccaaaccagaggacagatcccacagatactctactatagacccaacatgagtgaagtttcctgcaagaaacggg

SEQ ID NO: 445293 - DNA, 100 bp, Homo sapiens
gaatgccaagcgggcaagagagtcgcgaggtcgctttactacggatagctcacggagctgaaaaactcggattgagcctcatcatttctgtctcctgttt

SEQ ID NO: 445294 - DNA, 82 bp, Homo sapiens
cagagagggaagagattcagccagcacactcctcgcgagcaaggtgcgcgcggagccatggttatcatgtcggagttcagcg

SEQ ID NO: 445295 - DNA, 75 bp, Homo sapiens
tgcccactccccaggatacctcgttaagcgaaccagcagcacaaacactgttggggcaacagtgaacagccaagc

SEQ ID NO: 445296 - DNA, 100 bp, Homo sapiens
gacacgccccacaggtcttgggaggattaagtgaggggacatgagttacagaatgtctgaaggggacagtgtgggagaatccgtccatgggaaaccttcg

SEQ ID NO: 445297 - DNA, 90 bp, Homo sapiens
tagccagtcttgaaagattcagcacatatacttcagataaagatggtacccagcgtgccaatgcccgggctccagccccttacaagcggg

SEQ ID NO: 445298 - DNA, 80 bp, Homo sapiens
agcaggcgaacccgcggcgcaataacgaagatgctcatgaagcagcaggaccggctggaggagcgagagcaggacattga

SEQ ID NO: 445299 - DNA, 83 bp, Homo sapiens
tgagagtctaattaagtacaagaaaacgctgctgggagatggtcctgtggtgacagaacaatgccgcagaagaggttgaagag

SEQ ID NO: 445300 - DNA, 94 bp, Homo sapiens
gaaagatctaccttctggaagctactactacgtggtgcttggaaaggaactgtggctgcaccatctgtcttcatcttcccgccatctgatgagc

SEQ ID NO: 445301 - DNA, 99 bp, Homo sapiens
gaattatgccctgttggttccaatgctgggattggctgcttttcgtttatgatgataaagactacaggagaattcggtttgtaggtcgtcagaaagagg

SEQ ID NO: 445302 - DNA, 100 bp, Homo sapiens
gctgtgccttcatcaacctctgcatcttggcttcacagcatgcttgggctcagctcacattctgggaggccagccagctgcccctgagcctggacctgcc

SEQ ID NO: 445303 - DNA, 100 bp, Homo sapiens
tgattcaagtgttggcggatggaagggaggagactcctgaccctcagaatggttcagcctggagaaggaaataaagctgctttcaatgacatgagagcct

SEQ ID NO: 445304 - DNA, 100 bp, Homo sapiens
gagagcctcacagacccagccatcgttaaggaaagaccacagcaagattctttcattcgtctcctcctagcctgggggaccaggctcgaactgaccctgg

SEQ ID NO: 445305 - DNA, 101 bp, Homo sapiens
ggaagccaatgagatatgggcatacagagggacacacggaggtctgttttgatgattctgggaggaccaggtggacacgctgaccttccagagccagtctc

SEQ ID NO: 445306 - DNA, 100 bp, Homo sapiens
agaggacccacctgtgggtgtcagtggcgcaccatctgaaaacaacatcatgcagtggaatgcagttatatttggcttcttggacacttaatgattgttg

SEQ ID NO: 445307 - DNA, 90 bp, Homo sapiens
ccagcaactaccccagtgccggggagggttctgctgcttcgaaagctgttcgatcctttggtacagaagacagaccgacagatcgtccaa

SEQ ID NO: 445308 - DNA, 100 bp, Homo sapiens
ggcagagatcaggacacttcactttgctgcctgtgcactgaggcctcagaatctgctctacccgacttaacaggaagaagaaattgtcgagacgaataac

SEQ ID NO: 445309 - DNA, 73 bp, Homo sapiens
ctctgcgtacaagtggaaggagacgctattctcagtgatgcccggatgcatcaatctcaaataattctacaag

SEQ ID NO: 445310 - DNA, 90 bp, Homo sapiens
ggaggaactggggttcgcgggagcacgagctgcagcaccacttccggaagtttgcccgctactacctggccaataaatcatcccaggccc

SEQ ID NO: 445311 - DNA, 85 bp, Homo sapiens
cttctgcggctctcggtgccctctccttttcgtttccggaaacatggtgcgcgcggagccatggttatcatgtcggagttcagcg

SEQ ID NO: 445312 - DNA, 75 bp, Homo sapiens
aaaaatcaaggtatttggtcccggaacaaagcttatcattacagtgctccacgctgtgcagcggatcaacaaagc

SEQ ID NO: 445313 - DNA, 75 bp, Homo sapiens
aaaaatattggagatattaatcaagatggctacccagcatgaatacaactttgtctgagagccccttcaagtgtg

SEQ ID NO: 445314 - DNA, 75 bp, Homo sapiens
aaaatacccgcaacagccccttcgtcccaagcctcaggcccaggcccaaggccaagtgagagagcccaggccaca

SEQ ID NO: 445315 - DNA, 74 bp, Homo sapiens
ttccagtacacagacgagcatggggaagattttggaggcaacatcaacgtggagaccatcagtgcctttattga

SEQ ID NO: 445316 - DNA, 75 bp, Homo sapiens
gaaaaatgctcatctctcacacagacttttgatggacaggagcaattaccagctctggctgggtcgccacaactt

SEQ ID NO: 445317 - DNA, 100 bp, Homo sapiens
aggctcccttgacaggcggctttgcatcggaaatcagctctacagttcaggcccgccagctcatcctgcagtatggcttgaccctcagtgatctggatcg

SEQ ID NO: 445318 - DNA, 100 bp, Homo sapiens
cgtgactttcgtccgccattctcaggatgtcctgcgtgataaggtcaatgaggagatgtacatagaaaggttatttgattgaataaccctataccttcca

SEQ ID NO: 445319 - DNA, 100 bp, Homo sapiens
ttgggttcagttttcttcagaagaaggacttcggaatgcactacaacaggaaaatcatattatagatggagtaaaggggaacgcccttttgcttgtgact

SEQ ID NO: 445320 - DNA, 100 bp, Homo sapiens
ccggggacctgcatgtgtgtgcgcgcgaaggagcggaagaatggcagtgctcaaactcaccgaccagttcctgagggaagacctcaattaccatgaccca

SEQ ID NO: 445321 - DNA, 75 bp, Homo sapiens
cgggatttgggtcgcagttcttgtttgtggatcgctgtgatcgtcacttggaaccctaaggactctgcaatatga

SEQ ID NO: 445322 - DNA, 100 bp, Homo sapiens
gtcgccatggggcgaggcagcggcaccttcgagcgtctcctaggagttcatcctttgctgcctggcccgggaccctgcccgccggccctctgcccacagc

SEQ ID NO: 445323 - DNA, 100 bp, Homo sapiens
gtgttgaaagtacacggagccccgaggacgggttaatgttcgtgaagaaattgaagagttttttccaagaatgtggaagataaatcaagataaaagaagg

SEQ ID NO: 445324 - DNA, 75 bp, Homo sapiens
ggccaacatacacgcccatggaagtgcacttaaccccagaaaagcagctgacacaggatgatgatactgatgcgg

SEQ ID NO: 445325 - DNA, 101 bp, Homo sapiens
gcaaagcctccagaggacataccacctccaggatcaggatgcagagacctgcaggctgggacaatgaaaagaaaatagctattttacatgaaaattttaca

SEQ ID NO: 445326 - DNA, 82 bp, Homo sapiens
aggaactgtgagggtgtttgatctcatgggaagtgaactctttgtcatttccccggtatgaaaactttcaaagacgactagc

SEQ ID NO: 445327 - DNA, 100 bp, Homo sapiens
tttacctacgcattttacaagaaatgtgcagaaagccattgataaatatacctgtgtgccatgcggagctgaatgccatcatgaacaaaaattcgaccga

SEQ ID NO: 445328 - DNA, 48 bp, Homo sapiens
cttgtctacaaaagtgggaaaccagtttattaaccttgcaagaactct

SEQ ID NO: 445329 - DNA, 100 bp, Homo sapiens
tgtttgaacaaactcgaagaacagctgtggaaagaagttgcaaaacactggatggaatggggcgagtccttgctcaagatgtatatgcaaaagacaattt

SEQ ID NO: 445330 - DNA, 149 bp, Homo sapiens
gcagaagtaaatcagtgattgtctggagttggagatcagaatctgctgttcacatcccggctgtgacgtcgtgtccgcatttttgaaacgttggggttgttggagtggttggattttccctggaattgagtgagaaattcagaagactg

SEQ ID NO: 445331 - DNA, 83 bp, Homo sapiens
agagtggagtatctggtgaaatggagaggctggtcgcccaaggagcatcgagtacagctgtccggcctccaacgagtgtgaga

SEQ ID NO: 445332 - DNA, 100 bp, Homo sapiens
agccatgcaggacccctgggcagacctcttcagaaatagcaggctggttatgaagaagaaactcaaaataacaggagtggcttatggaactacatggagg

SEQ ID NO: 445333 - DNA, 98 bp, Homo sapiens
tggtacacactcagttaattaatctgctgtgatgcagatccatccgccctagcaaaatatgttctggctttggtaaagaaagacaaaagtgaaaaaga

SEQ ID NO: 445334 - DNA, 100 bp, Homo sapiens
gagagttctcggggtgggggtgtccatggatgaagcaccgaacaaactggagcccgcaaggcccaggctgcaagcacaaaggaagtttgctcagtctcag

SEQ ID NO: 445335 - DNA, 100 bp, Homo sapiens
cggccacagtccgcagggatgaacctcgagttgctggattttcatgttccagctgctccggggcctcgcctactgtcaccaccgcaagatcctgcaccgg

SEQ ID NO: 445336 - DNA, 80 bp, Homo sapiens
gagaacatcgtagcgaacacggtgctactcaaggcccgggaaggttttaaaatcaaagatgggaaaatcggagaaaattg

SEQ ID NO: 445337 - DNA, 106 bp, Homo sapiens
aacaggcccagaaggccaagaacccccaggagcagaagtccttcttcgccaaatacgtacatgtcccagagcaagcacacggaggcccgggagctcatgtactcgg

SEQ ID NO: 445338 - DNA, 101 bp, Homo sapiens
cggggttcgggtgtctcgtgtgtgaacatcacagagtcatcctttttgaacttccatgactcagactgcgaacccaagggatcatcaccctgtgactcctt

SEQ ID NO: 445339 - DNA, 90 bp, Homo sapiens
cgactgccccgggcacgcctccctcatccggaccatcatcggcggttcatgtactggacagactggggagaagtgccaaagatagaacgt

SEQ ID NO: 445340 - DNA, 97 bp, Homo sapiens
taagtgatgtccaggaaggaggaggaataatatttatggagcatatattatggaacacatcactcagcctctgaagaagcttcgggttcagactcag

SEQ ID NO: 445341 - DNA, 100 bp, Homo sapiens
tggccatgattttagttaatagtttccagcttctctatgtggtggatgctctctggaatgaggtgatgatgaacagtctacacagatggctgcaagttgg

SEQ ID NO: 445342 - DNA, 82 bp, Homo sapiens
ccggcgccgcaccagcagaacgcaattctgtggtgttcttggtcacacatttatggagtttctgaagggcagtggagattac

SEQ ID NO: 445343 - DNA, 75 bp, Homo sapiens
cggcgctgcctacggaggtggcagccatctccttctcgtcaagagtttttgaaatttgcaacaactgaggcaatc

SEQ ID NO: 445344 - DNA, 100 bp, Homo sapiens
gccgtgaatcattcctgcagatgaaaaagtgtgacttggcagctgagaatagtgacagtggtacaggaaagaaagaaaaagaaaagaaaaacagaaaggg

SEQ ID NO: 445345 - DNA, 90 bp, Homo sapiens
acagttcttgaaggtgacaacttagagacactcctgaggaagaagagattttaaacaaaaaacgatctaaaaaaattcagaagaaatatg

SEQ ID NO: 445346 - DNA, 96 bp, Homo sapiens
gacaaatgcttgctgacctgggccagagctcttcccttacgcaatatgaaaacccatggacaatcccgaatatgttgtcaatgacgagaattggct

SEQ ID NO: 445347 - DNA, 129 bp, Homo sapiens
cgcgtcccgctcgctgggagagaggtacctctccttttccctctccctttccctaaggtgagaagccctaccactgcaactgggacggctgcggctggaagtttgcgcgctcagacgagctcacgcgcc

SEQ ID NO: 445348 - DNA, 83 bp, Homo sapiens
ccggggacagccagccctcgctggaccagaccatggccgcggccttcggagcaggccgggctctcgccatgggtcactgtcgc

SEQ ID NO: 445349 - DNA, 75 bp, Homo sapiens
gacgatccgttggtgcatgaaagtcttctaaccattccaaaatctctttcagaaatggaccaattttgacaagat

SEQ ID NO: 445350 - DNA, 100 bp, Homo sapiens
tcaacgaactcatgaaaagatactgtcctaattccacgtgaagccctccaatatgctagtaaacacaagaggacaggttaagctgtgtgattttggagtt

SEQ ID NO: 445351 - DNA, 75 bp, Homo sapiens
ggctaaagcagattggagctctgcagtaaccacaggtgagtggcagatcggcttcagctccccaggaatatgatt

SEQ ID NO: 445352 - DNA, 74 bp, Homo sapiens
tgacgaaggggcttcttccagagccaaggaggaagggttgtccggcggcaacctttggcactgcatccatgagc

SEQ ID NO: 445353 - DNA, 75 bp, Homo sapiens
gcaagggctctgtgtgcccaggatgcgccggcctccaggccctggagggacaggaaagccagaaatggacttcgt

SEQ ID NO: 445354 - DNA, 75 bp, Homo sapiens
atgctacaggaggagaggttcaaattgcaatggcttttgatgaggccattgctgaacttgatacactgaatgaag

SEQ ID NO: 445355 - DNA, 98 bp, Homo sapiens
ggaactttgggtcctgaatcttctgggagctgaggaaccagatatcttgaaaagctgccagaaaggtatataacgagttcattctgccttcggagcga

SEQ ID NO: 445356 - DNA, 101 bp, Homo sapiens
gttcgggctcctggaggacgaggtcctgatggggagaatagctggtccaagaagtacccgtcgtgtgggggcctgctgcagtcccccatagacctgcacag

SEQ ID NO: 445357 - DNA, 99 bp, Homo sapiens
gctgccgctcaccgactccttcctgctgcggttcctgcgcgcccgggatttcgatctggacctggcctggcggctccaaaaggaattcttcatttgtct

SEQ ID NO: 445358 - DNA, 100 bp, Homo sapiens
catgcagtggtacaaggaccagaagaaactgcaccggaaatgtgcctaccagtctattgcgtctgcagacatggatttcaaccagctggaggcattcttg

SEQ ID NO: 445359 - DNA, 50 bp, Homo sapiens
tgacatcgtacagtatctccgacgcacatgcttagatgagtacgaagatg

SEQ ID NO: 445360 - DNA, 75 bp, Homo sapiens
tcttgctcggccgatgaagtgcagaggtttttttctgcagcctcccgcgacgatgcccctcaacgttagcttcac

SEQ ID NO: 445361 - DNA, 83 bp, Homo sapiens
tgatcggccgcgggccgctgctgggatttggtgccctggttgtcagatgttggaaagcagtaggacggaacatactcttcgtg

SEQ ID NO: 445362 - DNA, 100 bp, Homo sapiens
aaaaatcgagcagaaagaatgtctttcaggccctggagagtgaatttgtttcctgccagcttcaccaatggattgatctcatttttggctataaacagca

SEQ ID NO: 445363 - DNA, 82 bp, Homo sapiens
tttaaatgcagcatctgcgatgtgaggaaaggcacctccaccagtgctggtcccaaaggcgataacatctatgaatggagat

SEQ ID NO: 445364 - DNA, 99 bp, Homo sapiens
gctggaggccgtgcccgccgtggcgccgcagacctccatcctaacatggtccaagacaattcctgggaaagttcagttcttctcaagtgagggttctga

SEQ ID NO: 445365 - DNA, 100 bp, Homo sapiens
cgacgctaagttgctgatcgtggcggccttgctgtctctaaccctgatctgatctcctgccttgagcaaataaaagagccctggaatgtgaagagacatg

SEQ ID NO: 445366 - DNA, 100 bp, Homo sapiens
gtgaactgcacgataaaggaactcaggcgcctcttcttagttgatgatttagttgattctctgaaggtggtctcatggattataaccatttggatatttg

SEQ ID NO: 445367 - DNA, 75 bp, Homo sapiens
aaactggagaagagcttcaactctgttcacctgcttgcaggtccagaatggctacaacagtccctgatggttgcc

SEQ ID NO: 445368 - DNA, 111 bp, Homo sapiens
cttgaatacattgatctggtcagcagtgatgatgaagagcctagcacctcttatactgatgatgccttcagcctgctggcatactcagacccctggagctgcccagttggc

SEQ ID NO: 445369 - DNA, 50 bp, Homo sapiens
ctgataagaaatgttctcgacagcaaggtggctttgtacaagtcagtgcc

SEQ ID NO: 445370 - DNA, 90 bp, Homo sapiens
cacgcccagaataaagccaagctcatctctgagacccggaggaggttcgaagctgagtatgtgacagtattctgacaagtccctgtacac

SEQ ID NO: 445371 - DNA, 75 bp, Homo sapiens
cgacagccttgctgactatttcaagaagttggtagctggcagtgttgtgatggcttttgaagaagtatgcccgga

SEQ ID NO: 445372 - DNA, 89 bp, Homo sapiens
ggtctgcgttgctcttgcttttcctcgctggggtgtacggttgtggtttctcgatcaggaccatcaacccctcatgtgaattttctcct

SEQ ID NO: 445373 - DNA, 100 bp, Homo sapiens
tctcctcgtgcacgtgctgcagctgaagaacccggcggggctggcggtgaaggaagactgcaaagtgtcgcaatggaagaagagatcgccgcgctggtca

SEQ ID NO: 445374 - DNA, 75 bp, Homo sapiens
ggcatcgtgtctcgaccgcgtcttctgagtcaggtcaaacatgtgttgacatcaaggacaacgtggtggatgaag

SEQ ID NO: 445375 - DNA, 51 bp, Homo sapiens
ctacaacagcagccacaggaaccttgagacatgaagaatgcaaccctctcc

SEQ ID NO: 445376 - DNA, 75 bp, Homo sapiens
attccattgaatgggctgaagtggtgatcaatgtgaacaatattctcaaggcatttataagacgctgtttggcat

SEQ ID NO: 445377 - DNA, 100 bp, Homo sapiens
gcgcgaagctggccaaagcctgcccagacggctcacctgtgcgggatggaacaaaagataagaccatcatcatgtggaaactgaccagggatgagaccaa

SEQ ID NO: 445378 - DNA, 75 bp, Homo sapiens
gcagccttgcgctgctctaatggtccggacttccgtgtgtttacccaaggtccagcctagcccctaggcaccatg

SEQ ID NO: 445379 - DNA, 100 bp, Homo sapiens
tgagaatttatcctcaagagtcagctggcagaaatctcctgcaaagaagctgagccatgcaattagtaaatctttggggtgtgtacccacgagagaaccc

SEQ ID NO: 445380 - DNA, 75 bp, Homo sapiens
ttcagagcactgacccaggggacactgctgccgggccgcaagtacagccctgggtacaacaccgaggtgggagac

SEQ ID NO: 445381 - DNA, 108 bp, Homo sapiens
ccttaataaagtgtttgcatctcagtggttgaatcataggcaagtggtgtgtggcacaaaatgcaacacggtcacccctcctaatttctcagtgtcacaagtgcccaa

SEQ ID NO: 445382 - DNA, 50 bp, Homo sapiens
cggggacctccggcgaataaagatcgcagtcctgcccggagccctggtgc

SEQ ID NO: 445383 - DNA, 108 bp, Homo sapiens
cagaccctggagcctcagttggaagcagccgatccagcctgcggagcctgtggggcagatggcccactgcgtgaccttggttcagctgtccatttcctgtgaccatct

SEQ ID NO: 445384 - DNA, 75 bp, Homo sapiens
ggaatctgcttttcaagtatgccaccaacagtgaagaggctgacgttcctcagggagtgattcgagtgcaagctc

SEQ ID NO: 445385 - DNA, 75 bp, Homo sapiens
cggcggcagcgacggcagcggcggcggctggactaaacaggtcacctgcaggaacccaagacagaccaggatgag

SEQ ID NO: 445386 - DNA, 83 bp, Homo sapiens
cactacccttatcccggagagctgacaatgatgaatctcagtgtggatgaggtcaccattgtcaacattttgaccaaccgcag

SEQ ID NO: 445387 - DNA, 75 bp, Homo sapiens
aaatcagctggagaaggagaagtggagaagaaatcagtcagccgcaggccgaatacatcaagcaatggtaacatc

SEQ ID NO: 445388 - DNA, 50 bp, Homo sapiens
gtcagcatcaccagcaccacatgtccactgaggcggctcccagctgcgtt

SEQ ID NO: 445389 - DNA, 100 bp, Homo sapiens
gaaaccactcaagagtcataggattagatgatccaagtcaccaagaaattactgtctcaagtgatacggctcttctcaaccatctgtgagtccaggggaa

SEQ ID NO: 445390 - DNA, 90 bp, Homo sapiens
cggcctgaaggccggggtgctcagccaggccgactacctcaacctggtgcagtgcgagacgctagaggatactttcattcagaaaaccaa

SEQ ID NO: 445391 - DNA, 83 bp, Homo sapiens
gtgcagaagatctgggtgcccgtggaccacaggccctcgttgcccagatggaacggcaggagcagctgatgggatatcggaag

SEQ ID NO: 445392 - DNA, 96 bp, Homo sapiens
aggctgcaatcacatgcagtgtgctaaggaggacgaatccatgaaccaaccaggaccaatcaaaaccagactggctattagtcagtcacatttaat

SEQ ID NO: 445393 - DNA, 75 bp, Homo sapiens
ctgggaggccactagcagccagttccggcccgaggacaccgactaccagcagaaccgcatgcacgagtctctcat

SEQ ID NO: 445394 - DNA, 74 bp, Homo sapiens
ccagctgcacactcttggggctctacctctttttcaaagcatcacccaagagaaaatcaacgagatgcgggtgg

SEQ ID NO: 445395 - DNA, 98 bp, Homo sapiens
cgacaagaagctcatgagcagcctgcccaacttctgcgggatcttcaaccacctcgagcggctgctggacgaaggcccagtggttctcagcacccctg

SEQ ID NO: 445396 - DNA, 100 bp, Homo sapiens
aaacagcacttcctggcaatgatagatacatcagtgtgggaagccaagcagatacaatgtaacctcacctccagctctcacacccttacatacagctact

SEQ ID NO: 445397 - DNA, 90 bp, Homo sapiens
gagagctctaatattactgatgggagaatcacacctgagccagcagtcagtaatacagaagtttgctgatggccgccaaagttggagttc

SEQ ID NO: 445398 - DNA, 75 bp, Homo sapiens
gtggagacacggccagatctgccctccatgaagcgtgacattcaggaaaacgatgaagaggcagtgcaagtcaaa

SEQ ID NO: 445399 - DNA, 146 bp, Homo sapiens
tttcaaaaattttagaaaatggacctgctgacagagcagatggcctggagattcatgacaaaatcatggagctggattccaatggggaattactaatccgaaatgcgcagctgaaacatgctggaagatacacatgcactgcccag

SEQ ID NO: 445400 - DNA, 98 bp, Homo sapiens
atgacatcagcaccaaaacaggcatcaccctcaagagctgccggagacagctcgtgtgggcgctcgtccacaaacactccgtggctgagaggcagcgg

SEQ ID NO: 445401 - DNA, 98 bp, Homo sapiens
aacaacctcctctctggatccctggaagcactcatccagcacttagtacctaatgtggattactatccagatgtatttctttaaatccagaacaatgg

SEQ ID NO: 445402 - DNA, 50 bp, Homo sapiens
ggacacagagcccggctcctcagctggtgtggccgacgacgatgccctcg

SEQ ID NO: 445403 - DNA, 100 bp, Homo sapiens
atttcagaaattcaacgtttaaattatgaacagactaaaatccacggagtcgggtttgtgaaaatccatgccccctggaacgtgctgtgcagagaggccg

SEQ ID NO: 445404 - DNA, 84 bp, Homo sapiens
gggcaagggttcggccgtgccctccgacagccaggcccgcgagaaacaatgcagatcttcgtgaagactctgactggtaagacc

SEQ ID NO: 445405 - DNA, 82 bp, Homo sapiens
ctccatggtgtcagagcaaggagaagctgttggcctccggtgtggctgtctctgatggtgtcatcaaggtgttcaacgacat

SEQ ID NO: 445406 - DNA, 101 bp, Homo sapiens
cggcgggggagcgactcatggagctgccgtaagtcacgtgaactggaaatttcagtttattggcgtgattggcggtctctgtgtgctgtaaaatttctgag

SEQ ID NO: 445407 - DNA, 98 bp, Homo sapiens
gtgacttcacttttgagtgcaactgccttccagtttttggctttcacccccaaccagtgaccaaagacttgaccactcaaagtccagctccccagaac

SEQ ID NO: 445408 - DNA, 101 bp, Homo sapiens
ccttggatccaggagaacggcggctggaagatggcagtgaacgtatactcaacgtcagtgaccagtgataacctaagtcgacatgacatgctggcctggat

SEQ ID NO: 445409 - DNA, 90 bp, Homo sapiens
gccaaggagtcccagtgccgccctgaactcgtttgagcagctgtgcatcaattacaccaatgagaagctgcagcagctcttcaaccacac

SEQ ID NO: 445410 - DNA, 75 bp, Homo sapiens
cctgggagaagcagcagagaaagaggctacggaaacaggccgagaagaacgtggagaagaaaattgacaaataca

SEQ ID NO: 445411 - DNA, 82 bp, Homo sapiens
gccgccgagctggacccggaccggttttggctggagcagttcaacatgatggagaacgccatcagctccagcagcctgtaca

SEQ ID NO: 445412 - DNA, 150 bp, Homo sapiens
ctaaatgaagagaatgaggatgactgcacagtagatggccacctctacctccacagaggcaaagtcagcctcgtgttcaccacaggcacgtgcagcgactcggtggttcacagctgtgacctgtgtggcaagggcttccgtctgcagcgc

SEQ ID NO: 445413 - DNA, 75 bp, Homo sapiens
tcgggaaatacttgatttagtatgtaaaagatgttttggtctaaatggaggctatcaagatgagttggtagatca

SEQ ID NO: 445414 - DNA, 100 bp, Homo sapiens
ttatctcatctggcttggcgcctgaggttctcccattagatgcacaccggctgcaccatgtcagcagcctggcctggctggacgagcacacgctggtcac

SEQ ID NO: 445415 - DNA, 75 bp, Homo sapiens
ccagcagtaggttattgaagacagcagccccagttggcactctatgtgctttcattcctggaacccaaagacctg

SEQ ID NO: 445416 - DNA, 83 bp, Homo sapiens
ggaaaagaggagtcagacacggggcaggctgagttcctcttgctcacagagctctgtaaagacaatgcagatcttcgtgaaga

SEQ ID NO: 445417 - DNA, 75 bp, Homo sapiens
aatgttcagttcaatcttttggatcctttgaaataccacatgaagagtttcgctcttgttgcccaggctggagtg

SEQ ID NO: 445418 - DNA, 101 bp, Homo sapiens
gtggatgatgccaaagttttattagtcactgatgaacctcaaataaatttgaagagaagtcaagaaaatgaatgggtcaagagtgatcaagtaaagaagag

SEQ ID NO: 445419 - DNA, 75 bp, Homo sapiens
gtctttctatgtttatgataagaatgttttacaaagagatctccgtatagcctctgcgacttgatatcaaaagaa

SEQ ID NO: 445420 - DNA, 90 bp, Homo sapiens
gcttgtacttgcggcgcggcggccgtccggctcatcacctcctcactcgcctccgcgcagagaggcctgcaggacaagctgaacaagagg

SEQ ID NO: 445421 - DNA, 75 bp, Homo sapiens
ttcggatcccaagatgacaagtaacatggaaaaatgccagctgtgggacaaggagtgcaggccgcacaacctcgg

SEQ ID NO: 445422 - DNA, 96 bp, Homo sapiens
aaaatgtaaccaggatggtggtgtgtgaccttgggaaccctatggtgtctggaacaaatgacttggtggggaaacttaaagatgcttcgaaaagcc

SEQ ID NO: 445423 - DNA, 100 bp, Homo sapiens
tggcagttgcaaaatattcaggagaccgtcgttgccttgtatttccagagaacaggtggcagagatgcatggcgagctgattgagttcaacgagcgcctg

SEQ ID NO: 445424 - DNA, 90 bp, Homo sapiens
caaactgccctcctcaagtgaacaggtggagatgttacagccaaaaatatctggttggcagaaagtgttctggatatcctgacagagcaa

SEQ ID NO: 445425 - DNA, 100 bp, Homo sapiens
ggcgtgtgggagtccaggcttcacgcactctttgctgttcaatgtagcttatgttcctgaggaagaattgaaggcagcagaaatagatgaagagcacgtg

SEQ ID NO: 445426 - DNA, 83 bp, Homo sapiens
gcgccgcgcgccggcggcaccatgaagtcagcggaggaaggtgccagaaccctgtggagcatcatgaactgggaagagtagct

SEQ ID NO: 445427 - DNA, 111 bp, Homo sapiens
ggacagtcgcgaggttcgagtgttgcagagcctgcggggcaagatctgcctttgcaagacaatgcttccaattgtttacggttcttctccaaatttgagtcaggaaatctt

SEQ ID NO: 445428 - DNA, 74 bp, Homo sapiens
tacgtctgcggaagtgcagctgcctcagttcttagcgcagatggagtccactttctcatccaggctggagtgca

SEQ ID NO: 445429 - DNA, 100 bp, Homo sapiens
ctcatcgaccccgagcctcagattgctgccctggccaagaacttcttcaatgagctctcccacaaggaggaggagaacggggctgaggaggaagaagaag

SEQ ID NO: 445430 - DNA, 100 bp, Homo sapiens
tcatgcatttggaaattgaatcagcgatatctccggaagaaaattgattttgtcaatgttagctcacagcttttggaagccacttccggctcctgcgtcg

SEQ ID NO: 445431 - DNA, 100 bp, Homo sapiens
cgctggacgaggtcttcggcgcaggccgcgcccagcacacgcaagacgtctcagagaggctgtgcagctgctggaggactataagcatgggaccctgcgc

SEQ ID NO: 445432 - DNA, 100 bp, Homo sapiens
gcctcctgggcagccccttgcccttggacagtgtactaatggtcacttgatgtgcgctggctgttttatccacctactagcagatgcccggctgaaggag

SEQ ID NO: 445433 - DNA, 90 bp, Homo sapiens
ctacatgacatgtgggccaagtggcctcagttgcttgtattactgaaactagatgaagacttacatgtcaagcatcctcgcctcctcacc

SEQ ID NO: 445434 - DNA, 83 bp, Homo sapiens
caagggccacaaagtgaccaagaacgtgagcaagcccaggcacagccgacgccgcgggaaacgcttcgttaagggactcaggc

SEQ ID NO: 445435 - DNA, 88 bp, Homo sapiens
aatgtgagaaacatgtattggttattctaacagacatgagttcttatgctgaagcacttcgagagcactggagaggggtctcctgaaa

SEQ ID NO: 445436 - DNA, 89 bp, Homo sapiens
gaatgtgtcagccgatgcaccgagtccagcccaggaaaatggagagggtcacctctgtccagtcagccagtcttaatcaccgtccagcg

SEQ ID NO: 445437 - DNA, 75 bp, Homo sapiens
cagaatgtgaaggattatttactcgatgatggaactctggtggtttcaggaagcttaagagttggacagtggagg

SEQ ID NO: 445438 - DNA, 58 bp, Homo sapiens
agaggattgtgtctgcttggtgtggagccatgaaggaagaaatgttggctatttggcg

SEQ ID NO: 445439 - DNA, 74 bp, Homo sapiens
atgaagtctacgttcattcagggcctgctgtggaagaccagccccaaaggctagacagcaacaagcagaattgg

SEQ ID NO: 445440 - DNA, 78 bp, Homo sapiens
gatgccaatctgaatatcaaaatagcagctctttcgacgtgtagcagcagctttgccgggaatggaaagcacacagga

SEQ ID NO: 445441 - DNA, 134 bp, Homo sapiens
cccagtttaagcagggtgtcaagtctgtggctgggaaaatggctgtgctggccaatggtgtgatgaattccttgcagctggtggaggccattgtcttgccaatgaaccacaaggagaagtttgagaacttgggg

SEQ ID NO: 445442 - DNA, 75 bp, Homo sapiens
taaagaaaacgtgcacagaatcagatgtttcacaatctcagaattccagattacactagatgtgttggctgatat

SEQ ID NO: 445443 - DNA, 87 bp, Homo sapiens
caaagagaaggagacgtcagctgagaaaagcaaggagagtggctcgaaagccttgagccgggccatgcttctcacatcttacctgcc

SEQ ID NO: 445444 - DNA, 100 bp, Homo sapiens
gccgcgccacttccgcaaacaggtgcagaacaagcgggagcctgtgtcaggaaagcatgtcagagcagagctgccagatgtccgaactgcggctcctcct

SEQ ID NO: 445445 - DNA, 100 bp, Homo sapiens
tccagcaaggtcggcagagcaaggggcttacgcagaaggacctggccacgaccattcccggagtaataaatccagttggagcagcagtgatgagaagagg

SEQ ID NO: 445446 - DNA, 90 bp, Homo sapiens
catgtctacacagacaacaccatcttctgaatgacagaggatcagcggtttgctgtgtttcaaagaagggtgctgaccacagtagtgctc

SEQ ID NO: 445447 - DNA, 75 bp, Homo sapiens
gtgctcccaggtgcccccggcctgcgctcccatccacacgctcggccaggtcagagcagcccaccatgggatggg

SEQ ID NO: 445448 - DNA, 100 bp, Homo sapiens
cttatacagctaaagccatggaaaggtctagcacataccgctccaagggctttgacgtcacagtgaagtacacacaaggaagctggacgggcttcgttgg

SEQ ID NO: 445449 - DNA, 100 bp, Homo sapiens
tggcggatggccccaggtgtaagcgcagaaagcaggcgaacccgcggcgcaataacgggtgaggtggctttgaccccgggttgcccggccagcacgaccg

SEQ ID NO: 445450 - DNA, 83 bp, Homo sapiens
ctggaatgcatccaagagaatccctcaacatgctgtaccatggggcgcaagttggaccctacgaaggagaagcgggggccagg

SEQ ID NO: 445451 - DNA, 101 bp, Homo sapiens
gggatgttgagcactacagacctcacagtgccaaatggagctggaagcagtccagtggatatccttggaacagaagatcttattgtggaagtgacttccaa

SEQ ID NO: 445452 - DNA, 144 bp, Homo sapiens
ttccgcaggccaagtccagcttatagacccaatcaaaaaagaaactagcaaactttttaatgaggaagacagagcgggatgccaccagcttgtccaaagggaagttccaggagctcctggtgggcatcgttgtggagaatgacg

SEQ ID NO: 445453 - DNA, 73 bp, Homo sapiens
cctacatcaggaatttcatggcaaggagtgtgaacatggctacgcctcttcattcccgtccatgccgagcccc

SEQ ID NO: 445454 - DNA, 100 bp, Homo sapiens
ctcaactccaggtctcctgaatacctctcattatttattgatgataagctgaaaaagggagtcaaaggggtgtttggatggactggtgaactaggacctg

SEQ ID NO: 445455 - DNA, 90 bp, Homo sapiens
tctccatgggcttctcccgggaccaggccttgaaagcgctgcgggccacgtgtgaaatggcctttccccgggtcaagccagcacctgatg

SEQ ID NO: 445456 - DNA, 100 bp, Homo sapiens
caaaagtccagaaactcgccagttaatagtattgtgacttaattcagtgcacaaatgagatgaatgtgaacatcccacagttggcagacagtttatttga

SEQ ID NO: 445457 - DNA, 100 bp, Homo sapiens
gcggaggcctagagcttgccctggcctgtgacctccgagtggcagatgctccctcagcaccgagccctccctctggacagctcccccaaccagttcagcc

SEQ ID NO: 445458 - DNA, 88 bp, Homo sapiens
ggacacacctccattggatttaaaagacagtcctcgtcagcactgactttcagctatggaatcgttgcagcatttgcaagaagaagca

SEQ ID NO: 445459 - DNA, 103 bp, Homo sapiens
agattttttagtctaaatgatgggcagtcatggtcccagaaacgtcactatcaagaaggttcattggcatggaaaaatgttcagtgggaggattagagttgac

SEQ ID NO: 445460 - DNA, 75 bp, Homo sapiens
agggaagacttccagtagctccaaggaggttaaggctcctgttctggatgtcagatatgcatctgcctcctgaga

SEQ ID NO: 445461 - DNA, 82 bp, Homo sapiens
cctttagaacttacattagagtgttcaagtcttctgagactccagagtcacctaaggcatccgtgtacaagatttgcagaga

SEQ ID NO: 445462 - DNA, 97 bp, Homo sapiens
gtgcgtttgggaatgtcaagctggtggtccacgactgtcccgtctggaatggattgggatgatgaatattctcataattcttttgacctacattgtt

SEQ ID NO: 445463 - DNA, 83 bp, Homo sapiens
cttcactccagtgcctccgacgcctcctgatggaagctcttcgtgggcggtcttgactggagcacgacccaaggtaggtgggg

SEQ ID NO: 445464 - DNA, 90 bp, Homo sapiens
ggattgggaccagacagttgagacagcacaaaggaaactcattatctgcaatattagagggagaagcacggttaactttcttgaatagag

SEQ ID NO: 445465 - DNA, 100 bp, Homo sapiens
aagattcttctgaattgtgctgccttggccaaaagagattccaactccacagagtgaccagagagaggacgtggctgaagacaccaaagatgggggaggg

SEQ ID NO: 445466 - DNA, 98 bp, Homo sapiens
gcgcttagtgaatatgatcaagttctcgtggagtcagacaatgagtttggaaattttagcattcaggtgccaggaatgcagatgggacagccagtgcc

SEQ ID NO: 445467 - DNA, 75 bp, Homo sapiens
cgtcttcatcggggactccttggtccagctcatgcaccagtgcgagagaatccaggagtcctgccaaagtggcac

SEQ ID NO: 445468 - DNA, 100 bp, Homo sapiens
gcccagtagagaggagtataaaatccagtcctttgatgcagagacccagcagctgctgaagacagcactcaaagaacctatctacaagacctcttgtgct

SEQ ID NO: 445469 - DNA, 101 bp, Homo sapiens
ccaagtcctcgctggactgctcagggtgccagacctcatcctctaagcgaaagacatgaggcctcagcctgaaatgaggttgttttgaggtcatctgattt

SEQ ID NO: 445470 - DNA, 90 bp, Homo sapiens
gcctggaggaactccgaacccaaatcctgagtccaaacactcaagatgccaccaaagtccttggcactgtcaaatggttcaacgtcagaa

SEQ ID NO: 445471 - DNA, 101 bp, Homo sapiens
aggatggaaagaagtattcctcgctcaacctgtttgatacgtataagggcaagtccttagagatccagaaacccgctgatgtcaaggttcgcttcatcgtt

SEQ ID NO: 445472 - DNA, 90 bp, Homo sapiens
atccagcatctctccaccatcgactacgtggaggacgtatgtaaagaattcttgaaccgattctacaagtcactgatagacagaggagtt

SEQ ID NO: 445473 - DNA, 98 bp, Homo sapiens
ccgcgcgcagggcctgcagcgggagctggacggcgagcgcgagcggcgcgagaaaaaaagcacttggttctgcttcgagatggaaggacacttatagg

SEQ ID NO: 445474 - DNA, 76 bp, Homo sapiens
ccctgaagtgagtcaggagctgtatgaccttaacgtggagctctccaaggtactggtgtggcatactcggacagag

SEQ ID NO: 445475 - DNA, 75 bp, Homo sapiens
tccccatcaagggaatgaacttcacaaagctccaccatgaggcgaggtggatggaggaagcgagctgaaaatgat

SEQ ID NO: 445476 - DNA, 75 bp, Homo sapiens
gccatcccaaagctattctgggggcaacagagtggttgaaaaatacgattatgtgtttccagaaaatggcttggt

SEQ ID NO: 445477 - DNA, 76 bp, Homo sapiens
ttcttactcaggttttgacaaaccaacaaaactacaaagatctgacttctggtttgtactacagaaagtgccagtt

SEQ ID NO: 445478 - DNA, 98 bp, Homo sapiens
gcagccctgaagctgcagcagctgcctcccacaagtagctccagcgccgtaagcgaggcctccttctcctacaaggaggagcgatgggcagaaccagc

SEQ ID NO: 445479 - DNA, 96 bp, Homo sapiens
gatttcaaagcgggaggctccttgtgccacattcttgcagctgcctacaaattcaagagtgaccagggatggacagagcgggatgccaccagcttg

SEQ ID NO: 445480 - DNA, 100 bp, Homo sapiens
cgccgacctgcagcgcccggctgcctcgcactccgcctcccccggctcagcccccggccgcggcgggacccgaggatcttgctctgttgcccaggctgga

SEQ ID NO: 445481 - DNA, 146 bp, Homo sapiens
ggaccatgagagggccggagccgggtccccaaccgacgatggagggagacgtgctggacacactggaggcgctgggatgaagtctggcaaactgatgacctaatagagagaatccaggaagaggaaaataaaccttcaaggcaaac

SEQ ID NO: 445482 - DNA, 100 bp, Homo sapiens
tcaatttgtacctgcaggcctcctacacctacctctctctgaacatacatatgatagttgagaaagacacatattctgatcatgaagaaataaacacaag

SEQ ID NO: 445483 - DNA, 100 bp, Homo sapiens
aggaaactccaaggcttgccttcaagaataactgcgaactacttattataagcgccatggctatggctagtgttaaattgcttgccggtgttttaagaaa

SEQ ID NO: 445484 - DNA, 75 bp, Homo sapiens
aatgaacactgtccttcaaaacgactgcaagctttcttcctggtggcagatgacatcatggattcatcccttacc

SEQ ID NO: 445485 - DNA, 100 bp, Homo sapiens
gcagagacaccaggacagaaaagacagtgttctgctttcatggagttcacagaagagtcgaggaggttggtttgttggaccttgaactcaatcggctgac

SEQ ID NO: 445486 - DNA, 100 bp, Homo sapiens
agtctataagctttgcaacagaattacagagtatgataaaaggattatagcagtctttgtgacaagcaaccgataggaagacgtctcttcaggcagttct

SEQ ID NO: 445487 - DNA, 98 bp, Homo sapiens
aagatccgcatggagcctgacgagacgtaatcagttcaagaagttccctcagatgacctcatatcaccggatgctattacaccgggtagctgcctatt

SEQ ID NO: 445488 - DNA, 75 bp, Homo sapiens
gagccagtgatttacaatagagcaagttattcattttggacctggagaaagttcttcagaagatgctgtcatgat

SEQ ID NO: 445489 - DNA, 100 bp, Homo sapiens
caactagaagccagcagtctacaggctggaagaaggccctcaccagaacccaacccttggacttcagcctccagaactatggtctcctgatcctggctga

SEQ ID NO: 445490 - DNA, 75 bp, Homo sapiens
tccaaactgtgttgtttcagctgtattaggggttatgataattcagagagcagtgttcggaaagcttgtgtcttc

SEQ ID NO: 445491 - DNA, 98 bp, Homo sapiens
ccatatatgattttctttaaggatggtttagaaatggaaaaatgtcacccagtcagcttgaagagtttcaaatggaccctaccactgagaaatcaaga

SEQ ID NO: 445492 - DNA, 74 bp, Homo sapiens
tgtgatcacagtcccagcttatttcaatgactcgcagagacaggactttctgtctcttctgaaggcccttctca

SEQ ID NO: 445493 - DNA, 74 bp, Homo sapiens
tttacagaggaatagtctacaaaggaagacttgtaacctggagaagagttaagtatgagagagaagctagtaaa

SEQ ID NO: 445494 - DNA, 100 bp, Homo sapiens
gggagcggtctggcgctcccgccgcagttgctgatgtatattcaagatgagtggattaggagaaaacttggatccactggccagtgattcacgaaaacgc

SEQ ID NO: 445495 - DNA, 75 bp, Homo sapiens
caagccaatgcccaagacattataaacatctgtgccatcattggcgggaccttcaccgtcgccggcatcctggac

SEQ ID NO: 445496 - DNA, 82 bp, Homo sapiens
cgcgcacttcgtcatgttcttcgcgccctggcatgagccatgagcccaagtccccttcgctagggatgctttccaccgcgac

SEQ ID NO: 445497 - DNA, 82 bp, Homo sapiens
cggggcctgccgcgcctgtcctggatcgacaccctctacagcagtacagcctgtacacccgcacctggctcgggtacctctt

SEQ ID NO: 445498 - DNA, 90 bp, Homo sapiens
atggggtctgccgggccctcgagagcttcttccagcacaggaaacctgtaggaagtgtcagggactctggaaagaacataatggcctcac

SEQ ID NO: 445499 - DNA, 82 bp, Homo sapiens
ggtgccggcaacacctgtgaagagagaacgcagtggcacagagtagcagtatgccaccacgggctgttccctgaccctgcac

SEQ ID NO: 445500 - DNA, 75 bp, Homo sapiens
ccgagcacgagctgtgaggggattcacttgtgtgcggaactcctcggaaccatgcctcctgacaaggtgatccgg

SEQ ID NO: 445501 - DNA, 95 bp, Homo sapiens
tcctcagcctcggctacagtagctacagtagcttgagaatgccagactgtcatcagagatgaatacttctactgtcaacagtgccagggaagaac

SEQ ID NO: 445502 - DNA, 100 bp, Homo sapiens
atggtcccagccaggacggagataacaccatcttcaaggtagagcaagaaaagctggacaagatctggcctaagcttcgggtcctggcgcgatcttctcc

SEQ ID NO: 445503 - DNA, 50 bp, Homo sapiens
tcagcagtgatggggagagccatagcggcagccagataagctggtggtgg

SEQ ID NO: 445504 - DNA, 100 bp, Homo sapiens
agctgtgtcaccgggccatgtttcatggagaagactgtgcagtctttgtaactgatgaagagcaaggctttgtctctaattctgcccagttaaagtgcag

SEQ ID NO: 445505 - DNA, 76 bp, Homo sapiens
gcattccagaatatctcagatgagcaggaatagtgctgagcctgctgctgtaattgtggagaagccactgagtgta

SEQ ID NO: 445506 - DNA, 100 bp, Homo sapiens
tttcttgccctagtgacttaactgccgaaggaaaatgtcactgtcccattggccatattttaggtgatgatcctgcaggaagtgcaggagagacccccgg

SEQ ID NO: 445507 - DNA, 98 bp, Homo sapiens
cgcagtgcctggggtactacggctacagcaaggtgcactacatcctccaggaggtggtgatgggtgggatggtgttggaaacaaacatgaatgaaatc

SEQ ID NO: 445508 - DNA, 82 bp, Homo sapiens
ctggagggggcagtcccgggagaacctgcggcggccggagcggattttatgggcagctgcagaagttctgtcccccacacta

SEQ ID NO: 445509 - DNA, 75 bp, Homo sapiens
ggacgtgcttcctgcttcatagataagaggttccaatgattttggttggcaataaatgtgacctggaagatgagc

SEQ ID NO: 445510 - DNA, 80 bp, Homo sapiens
caagaatgtgaaatttgttctcaagcacaaatgacagtcatgtccctttccagggacctcaaggacgactttcacagtga

SEQ ID NO: 445511 - DNA, 100 bp, Homo sapiens
gtggaagagcagctgtcactcatcagtggttgtcccaatatccaagaagcagtagagggtgccatgcacattcagggaccattgcaatttagagatgtgg

SEQ ID NO: 445512 - DNA, 50 bp, Homo sapiens
gggcaagcgctgttcaaacccatgaacgattattggagccggaattggtg

SEQ ID NO: 445513 - DNA, 112 bp, Homo sapiens
cccgtatcggggcctttatttctcgtcggcggcgccctgcaccgcgcctcgcaaaacaatgcagatcttcgtgaagactctgactggtaagaccatcaccctcgaggttgag

SEQ ID NO: 445514 - DNA, 98 bp, Homo sapiens
ccaccatgtgggaggaggaaaatcatcttatcagacgaaggcaaaatgtatggtctaccccgagccccggagcgagagcgagtgcctgagcaacatcc

SEQ ID NO: 445515 - DNA, 75 bp, Homo sapiens
cccgacccagtgccgcgcagctgctggagacttcccaagtaagaagcggaagaggagccgctggaaccaagacac

SEQ ID NO: 445516 - DNA, 97 bp, Homo sapiens
ctgccattgttgatatggttcctggcaagcccatgtgtgttgagagcttctcagactatccacctttgggtctggctattttagttgccacagcatg

SEQ ID NO: 445517 - DNA, 90 bp, Homo sapiens
cctgcgcgaagctggccaaagcctgcccagacggctcacctgtgcgggatggaacaaaaggtgaatgaaaactttgccattgatttgata

SEQ ID NO: 445518 - DNA, 100 bp, Homo sapiens
ccaatggtctctacgtcctggcaggagttgcagaaagcatccacctgtgggagtcgggcgcctccagcttcggggagaagttctcccgagtcaagttctc

SEQ ID NO: 445519 - DNA, 87 bp, Homo sapiens
ccccagggcaagccccgctccggccaacaacaccatatgaaggcggagtatggaaagttagagtggacctacctgataaataccctt

SEQ ID NO: 445520 - DNA, 90 bp, Homo sapiens
gctgcagggcggtaaggatttcaacatgcctctgacaatctctagtaattaaacaaccaccatgtcgagcaaaaaggcaaagaccaagac

SEQ ID NO: 445521 - DNA, 75 bp, Homo sapiens
gcgttcctctggggtggcactttccatagctgtaggactgctggagatgtgttcagagcaacattgttttgttga

SEQ ID NO: 445522 - DNA, 98 bp, Homo sapiens
gcgttccaccagcaaccatgagtggttccatgatgggaagtgacatggatttggagttccatggagtgatgagattttattttcaagataaagctgct

SEQ ID NO: 445523 - DNA, 83 bp, Homo sapiens
gaggccacagacacttctgatagtgaaggacacattcagctaacgtattttagcaggtggagtgaggttgaagattcctgtga

SEQ ID NO: 445524 - DNA, 82 bp, Homo sapiens
cttggactgagtcctgcaggacacaggggcactatgaacgaagaggagcagtttgtaaacattgatttgaatgatgacaaca

SEQ ID NO: 445525 - DNA, 100 bp, Homo sapiens
ccgtgtaccaggaggtgaagcccaacccgctgcaggacgcgaacctctgctcacgcgtgttcttctgaatgtcatacccaggctatcccccaacaggcta

SEQ ID NO: 445526 - DNA, 82 bp, Homo sapiens
ttcggtggactccttcggcagtccacccaccgccgccgcctcccaggtctgggagtgtggcaaataactggattgaaattta

SEQ ID NO: 445527 - DNA, 78 bp, Homo sapiens
actgagctgctggctaagatcaccaacacagacgtgcagtggtctcggaaagagggtcgtggtcccgcacggatgcgc

SEQ ID NO: 445528 - DNA, 100 bp, Homo sapiens
ttcaatgtttcgaagatgctgtctggaataggggctgaaggagaggcgggaggcagcaccgggctcttgatggacttggcagccaatgaaaaggccgttc

SEQ ID NO: 445529 - DNA, 75 bp, Homo sapiens
agaagattgtcaatggctggcaggtcactatcatatgacaaaggctttgccgcagttcatcttcctccctgtgta

SEQ ID NO: 445530 - DNA, 100 bp, Homo sapiens
tggcatccaaatatccagattttaagcagcatgttcagataaatctgaatggaagagtgagggtcctgacttgtcctgggcaagccaagtccattgcttc

SEQ ID NO: 445531 - DNA, 83 bp, Homo sapiens
cttacctttgggagaagttagacaataccctcaaactacctccaacagctactcaggccatcactggtgcaagctatatttaa

SEQ ID NO: 445532 - DNA, 98 bp, Homo sapiens
acaaattgatgcacaaaataagctggaaaaatctgagttctggaactgggaagtccaagatcagggctcctgcccctggacctgaacctggatctttg

SEQ ID NO: 445533 - DNA, 75 bp, Homo sapiens
tcccacttggaggcactgctggatgacagcaaggagttgcagcgctgtttgcagacaaggtcccaaagacagcag

SEQ ID NO: 445534 - DNA, 110 bp, Homo sapiens
taatggagcaggtgaaagtgcagatcgccgtggccaacgcgcaggagctgctgcagggtgagaactctgtctcagtcgacgggaagtgcagtgactccacgctactgagc

SEQ ID NO: 445535 - DNA, 75 bp, Homo sapiens
gcattatccaacggctgctggaagttggtgacaaagttcctgctgatataaggttaacttccatcaaatctacca

SEQ ID NO: 445536 - DNA, 100 bp, Homo sapiens
agtgagagttcaaagattctttgtagcagacactgcaaatgaagctctcgaggctgctaagagactaaagtctttggaacaaattcttccaagataaaga

SEQ ID NO: 445537 - DNA, 100 bp, Homo sapiens
ggcagttgcatcagagctcagagttccatctctaaaaaaaacattgtcttatgccccaaccttctccctgggacggctctacatttggcctgtgccaatg

SEQ ID NO: 445538 - DNA, 74 bp, Homo sapiens
gggctatttgggtgatacccagtgcagtgaactgcagatctttccagttggaagactctcaggactgcagcaga

SEQ ID NO: 445539 - DNA, 98 bp, Homo sapiens
ggcggtttggccccttagcgcccgggcgtcggggcggtaaaaggccggcagaagggaggcacttgagcctcgtgcaagccgaatactggcatgacccc

SEQ ID NO: 445540 - DNA, 83 bp, Homo sapiens
tggaacccgaagaagaaaggattcgttacagccagagattgacaatgcagatcttcgtgaagactctgactggtaagaccatc

SEQ ID NO: 445541 - DNA, 80 bp, Homo sapiens
gtgtctgatcagctgctgcgtgctcagccccagagcagtttggtaactctcattcgacatccatctgaactaatgaatgt

SEQ ID NO: 445542 - DNA, 101 bp, Homo sapiens
gagatgcccctgaggggggctttgatgcagtactccaggcagccgtctgcaagcttgagaattacattgtggaaaacatgaagtcggagatggcccagata

SEQ ID NO: 445543 - DNA, 73 bp, Homo sapiens
gaaggcatatgtttgtatttcagaatccgaatcggaaggtgaggaaaattaaatggctcaacaagcacaatac

SEQ ID NO: 445544 - DNA, 87 bp, Homo sapiens
cggctctcaccaactacctcatcccaaagaaggaaacagagcaaatgcagcgttacaatcaaagacttattgaggaattgaaaaaca

SEQ ID NO: 445545 - DNA, 100 bp, Homo sapiens
cgaggctgcgcggtacctggagcggctaatcaagctgggccggagaaatgggcttcacctccccagagagactcaggaactggtcagtgagaaggtcgga

SEQ ID NO: 445546 - DNA, 100 bp, Homo sapiens
cctctgagctgggatgagccgtgctcccggtggaagcaagggagcccagccggagccatggtaacaattgcttgtgatgcagttctcagctcaaaatctc

SEQ ID NO: 445547 - DNA, 100 bp, Homo sapiens
ctgaagcccatccagactgtttgatgctgaacttcaccgttaaggataaaagaatcagagtgtctcaacccttgacaagaggaccaagtgcctttattcc

SEQ ID NO: 445548 - DNA, 75 bp, Homo sapiens
aggagctggcccgctatggcggggaggaggttctccggggcttggcgtacctccgagagaagcaccagatcatgc

SEQ ID NO: 445549 - DNA, 83 bp, Homo sapiens
ctggaaggaaccgctctcgcttcgtcctacacttgcgcaaatgtctccggacctgctgaagttcccatgatgtcacccaatgg

SEQ ID NO: 445550 - DNA, 75 bp, Homo sapiens
tagtaccggatccccagccgcttctgaccacacagacggggcggacctgtattggtgctgaagacatggacggct

SEQ ID NO: 445551 - DNA, 75 bp, Homo sapiens
aacacggtcaacgtggacggcttgacagccctgcaccagggtagtcagcagagtgcacacagcagctgtcatccc

SEQ ID NO: 445552 - DNA, 100 bp, Homo sapiens
aacattacaggattgtacgcaactgctaaccctgttccaagggcttcctactatgagatttcagttgatgatggtccatgggaaaaacagaagagttcag

SEQ ID NO: 445553 - DNA, 99 bp, Homo sapiens
gaatgagaaactgtggagctttaccaaaaaggcctcgcacattcagttggacagataagccatcaccaaactcagaaaatgaacaaaattctgttaccc

SEQ ID NO: 445554 - DNA, 100 bp, Homo sapiens
atcttgtggccaagagttcagaccgtggcgaagtggagagtgacatgcagttggatggcggtgactgcgtggtgtcatggagaaactccagctgggccca

SEQ ID NO: 445555 - DNA, 90 bp, Homo sapiens
cacgctactacctggtgcagggcctgattgaggactgccagctggcgctgcaggcttattgcagtatattatatctaaagccaagaatgc

SEQ ID NO: 445556 - DNA, 101 bp, Homo sapiens
ggaattcagcgccttcttccaagctctctagagcgctctggtgtatggctggtggcccccctcattgctaaactgcccacctcagtccagggacatgtgtt

SEQ ID NO: 445557 - DNA, 97 bp, Homo sapiens
atgctctcactaagcagttggaggctgtgtctgatgctgtcatcctattgtggaaggtgaatgataacaaggagccggagcagatcgcttttcagga

SEQ ID NO: 445558 - DNA, 90 bp, Homo sapiens
aatgatgatgtgaaaacagaagctgtggctaattaaacaaccaccatgtcgagcaaaaaggcaaagaccaagaccaccaagaagcgccct

SEQ ID NO: 445559 - DNA, 100 bp, Homo sapiens
tgagaatggagaaataggggaaagtcaagtgaaaggtggtgaagagccaattgagtgtggaaaagccactggcagtgattcaagtggtgtcattgatctc

SEQ ID NO: 445560 - DNA, 98 bp, Homo sapiens
agggaattgtcctctgtggaagggactttcttttggccctaggccccttcctgcccctgtcgtcagcagagacagggaagaacgattggcagcactca

SEQ ID NO: 445561 - DNA, 100 bp, Homo sapiens
tgagacggagctatcggcgccgcggcaagagccagtgcaatgtgccaccccaagccctcccacctcccctgcttccccggctcctccagcaaaccccctg

SEQ ID NO: 445562 - DNA, 75 bp, Homo sapiens
gacagagtaagaagactcccgaggaagaagaaatttgatgcctagagattgatctgctttttgtttttaagttct

SEQ ID NO: 445563 - DNA, 73 bp, Homo sapiens
tggtctcatgcgatacaaaaatacttggaaatcccactgaaagatttaaagatagccttggataccagttact

SEQ ID NO: 445564 - DNA, 75 bp, Homo sapiens
cggccggacctcgaccctgagctctatctcagtgtacacgaagctccaccatgaggcgaggtggatggaggaagc

SEQ ID NO: 445565 - DNA, 100 bp, Homo sapiens
gcctactcgcccgccaccctgcgctgccgccgctctgaggagttaaaggttaatttggagtggcccctggagtcagtttcctacaccatccgaggcccca

SEQ ID NO: 445566 - DNA, 50 bp, Homo sapiens
tctggaaactgtacattgaagcagagccatcactggtgcaagctatattt

SEQ ID NO: 445567 - DNA, 82 bp, Homo sapiens
ctaggactctatgacacggccggacaggacgattactgagagccaatcagattagtttcaactgggacaggcttgctagctg

SEQ ID NO: 445568 - DNA, 90 bp, Homo sapiens
ccctgtttgagaaaaggcctaagaattttggcattgagttctcttggaacggttgattgtaaataggccacatccttggggtcttcttat

SEQ ID NO: 445569 - DNA, 98 bp, Homo sapiens
cttaggcagctgaaggcagcaggagatgccctaagtgacgatttcaataacgagagtgacagctgacatttctcttgctaagaggtctgtcctaaata

SEQ ID NO: 445570 - DNA, 83 bp, Homo sapiens
aaagcagcgtgcgttcagccctgggctccttccgcttccagccgttcgagtcctatgactccaggccctgcctgccggagcac

SEQ ID NO: 445571 - DNA, 100 bp, Homo sapiens
gcctgtggactgcagcctcggcggtcagcaggcatggctaatgtaaaagcagccccaaagataattgacacaggaggaggcttcattttagaagaggaag

SEQ ID NO: 445572 - DNA, 83 bp, Homo sapiens
cccgcgctgcccgcactcctggtcctgctcggggctctgttcccaggagaagatggtataaactggtccatcagtgacaaaga

SEQ ID NO: 445573 - DNA, 51 bp, Homo sapiens
ctcttaatcggatgtatcttgtattcatggacctttattgggcttgaggtc

SEQ ID NO: 445574 - DNA, 95 bp, Homo sapiens
ttcgtactgggacgttggggagggggctgtgccgggcggagagaactcagcgaggattctgaggattgacttctaaggactcttggtacatgagg

SEQ ID NO: 445575 - DNA, 50 bp, Homo sapiens
caaatatattaccagtggcaaggctgcaagaaagcgtaagattgccattc

SEQ ID NO: 445576 - DNA, 100 bp, Homo sapiens
aatggcaagtggagcagccaacgtggtgggacccaaaatctgcctggaagataatgttggccagggcagtgaagaaggggaggtgctcctttattactgc

SEQ ID NO: 445577 - DNA, 88 bp, Homo sapiens
tgctctctcatttgctggccatcggattgggatattcaagagaagcttatgtggagttagttcaccatattagagaatctattccagg

SEQ ID NO: 445578 - DNA, 83 bp, Homo sapiens
ttagggacaacaccgggacacccgcgaggccggaaaatgcatgcttttcacttccactgcatctctcgctggctcaaaacacg

SEQ ID NO: 445579 - DNA, 90 bp, Homo sapiens
catcggaaaagccatcgtgaaggagctcctggagctggcgagtaaccagctcataaatcacatcgaacagtttttggatactaatgaaac

SEQ ID NO: 445580 - DNA, 50 bp, Homo sapiens
tcaggaaccaccagtgacagagtaaatctcacctggctatcgtgcagcgg

SEQ ID NO: 445581 - DNA, 106 bp, Homo sapiens
atgattcaggagtgtttgaccagacagcccttgcaattgagcatgtcaggtggatcatccatgccatggagtatgaacttcagatccgtggcggagacaagccagc

SEQ ID NO: 445582 - DNA, 95 bp, Homo sapiens
cttccaaggaaccaaggcggccctggctgggggaaccactatgatcagcggctatgagaggttttcctccgagtacccagaattctgttctaaaa

SEQ ID NO: 445583 - DNA, 75 bp, Homo sapiens
tactattatgaacaacattgttatttggtttccgccagctgtggatgcctttgacattatgaccgcagaggattc

SEQ ID NO: 445584 - DNA, 75 bp, Homo sapiens
aacgatatgataaagacgatgaagccccctctgatgggcttcataaacttcacttaccaaatacttcaagggatt

SEQ ID NO: 445585 - DNA, 76 bp, Homo sapiens
tacatccaggaaagacatggagattctcttaaaaagaaattccaacagaatgggtttcctgaaacggatttgcagg

SEQ ID NO: 445586 - DNA, 82 bp, Homo sapiens
gtgatcaccatgaacgaggagtacgagacgaggttcctgtgcaactcttcacagtggagtacgacaaggagttctcccctcg

SEQ ID NO: 445587 - DNA, 100 bp, Homo sapiens
ctgccacggtctgcccacccaacgcgaagacggtaacccgtgtgactttgactggtgcacttacatttcaatcgaccaagttccaaggacctatgccata

SEQ ID NO: 445588 - DNA, 97 bp, Homo sapiens
gaagtggcaggaggaggaggaggggctccggctggtctgtggtgagataaaagccctggagctcgacagcaatctgtaccgcattggccagagcaaa

SEQ ID NO: 445589 - DNA, 75 bp, Homo sapiens
atgaagtgatgacagctggcataaagaagaagcggacctggcacaaacacggcccggggcaagcgcctgacgtca

SEQ ID NO: 445590 - DNA, 83 bp, Homo sapiens
cgctcgctgggagagaggtacctctccttttccctctccctttccctaaggaggctgaaccgtctgagcccagaagtgctgag

SEQ ID NO: 445591 - DNA, 101 bp, Homo sapiens
ccctgagctgctaaaggtctctggtgtttgtaagaggtggtatcgcctagcgaattacatgaacgacagccttcgcaccgacgtcttcgtgcggttccagc

SEQ ID NO: 445592 - DNA, 74 bp, Homo sapiens
tgccctaaacacactatgaccggtctgaaggggcgtctcgattacctgagctctctgaaggtgaagggccttgt

SEQ ID NO: 445593 - DNA, 75 bp, Homo sapiens
aacagggaatatggacgaagacctgttgggtacagccaaagaccggagctttggagagatgaagtttaaacagtg

SEQ ID NO: 445594 - DNA, 100 bp, Homo sapiens
tctgaaagtaactatgaagctattaaagaaggagtcaacattcgatatttggacttgaagcaaaactgatgtagaagatctttatgaaccggtgtcagta

SEQ ID NO: 445595 - DNA, 90 bp, Homo sapiens
ggaaagccaaagagctgaatgttatgtttattgaaactagtgcaaaagctggatacaatgtaaagcaggcctcccgaggagcccagacag

SEQ ID NO: 445596 - DNA, 83 bp, Homo sapiens
gcttcatcaaaaatagtgatagctttgataaggacttgccatgaggtgttgaagccttgtttcactgagttggagagactgga

SEQ ID NO: 445597 - DNA, 100 bp, Homo sapiens
tgaaaaggggtattacgggaaaggtctgcagtatgaatgcacagagactagtggaaagtcgccgacagcagatcttgagggagtttgaagagcttcatag

SEQ ID NO: 445598 - DNA, 100 bp, Homo sapiens
tctgaactgactgccccgcatcaccggagcgtcccagctgcgaggagcgacatctcgaatcagcgatgcacacttggcagacacaatgattggcaaagca

SEQ ID NO: 445599 - DNA, 100 bp, Homo sapiens
tggcgtccctcttcagttctctggagccccagattcaacccgtgtacgtgcctgtgcctaaaaattctatcgtgatgcagagaagaaagaacggagtgaa

SEQ ID NO: 445600 - DNA, 100 bp, Homo sapiens
acctcaatgaaaccagcattgtgtctggtggctatgggggctctggtgatggactcatccccacagagcataccagaaattcctgatgacctgaagcaac

SEQ ID NO: 445601 - DNA, 98 bp, Homo sapiens
gcatcccagggcctgctgaagctcttccagaaaaactcgcccatggaggaccttggagccaaggggatggggaagggatccttcaagtatgcctgggt

SEQ ID NO: 445602 - DNA, 75 bp, Homo sapiens
agatggagaaaacccacaaagaagtcacagaacaactgcagaataccaagctgctattttacacttgaagaggga

SEQ ID NO: 445603 - DNA, 83 bp, Homo sapiens
ctttctgctgctgaagtaatgcaatggtctcaatctctggaaaaacttcttgccaaccaaaaccctctttcccagctgcccgc

SEQ ID NO: 445604 - DNA, 100 bp, Homo sapiens
caaatatgacccaagcattggtatctacggcctggacttctatgtggctccccaaaaaggccacaaagacagccccacctgccctgcctacaggttatga

SEQ ID NO: 445605 - DNA, 100 bp, Homo sapiens
cccatatgcaaagaccatgcgccggaacaccattcttcgccaggccaggaattggaaattgcaacactaacaagagagaatggaaagacagtaatcagag

SEQ ID NO: 445606 - DNA, 100 bp, Homo sapiens
ggcttcgtggtgactgtcaagcaagagcgcggcgagggtccacgcgcgggcgagaaggggtcccacgaggaggagggtgattctgggggtccacttgtct

SEQ ID NO: 445607 - DNA, 96 bp, Homo sapiens
tctcagcaacccctgtgcttctccccaggtccagccaatgcattcagaagccaaaatggactgttctgatggctacatgtgcaaaatacactttca

SEQ ID NO: 445608 - DNA, 74 bp, Homo sapiens
ttctttactactaagcaccgttggtatcctcatggacgatattaacctggctgcagagccaaaagtgaaccgag

SEQ ID NO: 445609 - DNA, 75 bp, Homo sapiens
gcaaaacttcagtatgcaggatggggccctaaaggccaacagctgtttaaaaagcagaaactcctcctagaactg

SEQ ID NO: 445610 - DNA, 96 bp, Homo sapiens
cggagctcggggcgcgctgctgctggcactgctgctctgctgggacccgaggctgagccaagcaggagttccgattctgaagaggcatttgagacc

SEQ ID NO: 445611 - DNA, 50 bp, Homo sapiens
cgttgccttgtatttccagagaacagctccttcgagaactcatagaacgg

SEQ ID NO: 445612 - DNA, 100 bp, Homo sapiens
tgtttcaacatctgaatcagatggtacagattgctgcagtggaaaatcagggagactgccagactcgggaggaggcagtggcgctcggcgtgggtctgtg

SEQ ID NO: 445613 - DNA, 74 bp, Homo sapiens
ctaaaaagcaccaccaagatgtctctaaatgagcgacctgaaggaaaagattatgcccttcattggctagtgct

SEQ ID NO: 445614 - DNA, 75 bp, Homo sapiens
agaacgttgcaaactctggaaaaaaacttggtactttccaggagcagatgagccattacagtatccttgtcagta

SEQ ID NO: 445615 - DNA, 50 bp, Homo sapiens
cagaagcgctcggaggtggcgctcggccgctactccgccctgttcctcgg

SEQ ID NO: 445616 - DNA, 101 bp, Homo sapiens
aaggaaacatcttttgacaagatgtcacctgaaagtggtcacagccgcatctttgaaggaactaccactgctggaatgaagcatggatgacaaggcctgac

SEQ ID NO: 445617 - DNA, 100 bp, Homo sapiens
gaaccccaggactgcgcccccgggagcgggcgcccagaggtaacttgggtttttactcctgtaacaactgaaataacaagtcttgatacagagaatatag

SEQ ID NO: 445618 - DNA, 51 bp, Homo sapiens
tttcccacccagaatctttaggtaaatgagcctgatcctgcctgaagatgg

SEQ ID NO: 445619 - DNA, 83 bp, Homo sapiens
acaacagaagaactgagctatttttgaaagaacatgaccaccttcgaaaggtatatttcagaaatcgctgggtaaagactgtc

SEQ ID NO: 445620 - DNA, 82 bp, Homo sapiens
ggtgctgatggctcccttggcgaaggagtctgtttttcaacccaggaaggagtttcaccacgaaatagtcttgaagtcgtaa

SEQ ID NO: 445621 - DNA, 87 bp, Homo sapiens
cggcctgagcgccgagcctggggctggggccgcggtgctgaggacgcaaatgtggttgaaatcacaaagattagacacctttttaga

SEQ ID NO: 445622 - DNA, 74 bp, Homo sapiens
agcaaagcagtggccgcccgggcggcgggatccactgtccggcagagggatgtttcaaaaccggaaagatatag

SEQ ID NO: 445623 - DNA, 88 bp, Homo sapiens
accactgggcaaagaaagtatccctttggagtatattaccaaattggtgatgttgtttctgtgattgatgaacaagatggaaagccct

SEQ ID NO: 445624 - DNA, 100 bp, Homo sapiens
gcatgaaggagctggagcggcagcagaaggaggaagggaaaaggccgaggcatcagcgtgtgaagaccgcaaagacgatcccgagtacagttgtgaacag

SEQ ID NO: 445625 - DNA, 100 bp, Homo sapiens
gccctgcagtacctgcagaaggtctctggagacatcttcagcagatttgatggtagagtggtggcaaagcttccttttacccctctttcttacatccaag

SEQ ID NO: 445626 - DNA, 83 bp, Homo sapiens
gcttcataccagctgaagagcgacaagccgctggcagccgcggatctcaccgccgctcaggggccatgatccaaaggaaccag

SEQ ID NO: 445627 - DNA, 100 bp, Homo sapiens
ataactgtcaagacaacagtgatgaggaaagctgtgaaagttctcaagcgggaggaagcactgaaacaacacaaaaccctatctcaagaacttgttaacc

SEQ ID NO: 445628 - DNA, 82 bp, Homo sapiens
ctgctactgcgaagacagctggcagccttgaaaagatcttttgaggtcgaggaggtcgagacacccaactccaccccacccc

SEQ ID NO: 445629 - DNA, 97 bp, Homo sapiens
cgacaggaaccagctcgggggccaactctgaggagtccactgcagcagaaccaatgaggccattcttctggcactttatgaagctgttcatttaaat

SEQ ID NO: 445630 - DNA, 75 bp, Homo sapiens
aagccaggcatgtctcccgaggagtgcaggcgcttcaccacagacggtaactgcgtcattgattggctggtatcc

SEQ ID NO: 445631 - DNA, 82 bp, Homo sapiens
gctgcgcggcgcggcggccgggccctcgagacggggacgacgaggctcctcctgcccgcgtggctgggcctgctgctgggac

SEQ ID NO: 445632 - DNA, 97 bp, Homo sapiens
tcgagtttagccacaccaggctggagaatatggtgcagaggccctccacggggagccttatgtttcataaacttagacctgtagatcaactgaggca

SEQ ID NO: 445633 - DNA, 75 bp, Homo sapiens
cctcaatgtcagcatgtcagtcctggcatgctaggttctataaataggtaaggggcctggataccaagaagtgac

SEQ ID NO: 445634 - DNA, 109 bp, Homo sapiens
catgtttttgagtatatccgttctgagacatacaaatacaacatggccaacgccctggccagcgccacttgcgagcgctgcaagggcggctttgcgcccgctgagaaga

SEQ ID NO: 445635 - DNA, 76 bp, Homo sapiens
ggaccaaaattgtggaaaagtcactctgagcagccatcagcagggaccctttctacgaaatgctcgcagcacggaa

SEQ ID NO: 445636 - DNA, 96 bp, Homo sapiens
atacctgggcttcccttactacctgaagatcaactactcctgcgaggaaaaggaatcgagtcactggcatttacgaactcagcttatgcaaaatgt

SEQ ID NO: 445637 - DNA, 101 bp, Homo sapiens
cgccaatgcgctcaaaggcaaaaaggcaaatgcagccctgaggatttggctactgcatataacaacagggggcaaatcaagtacttcagggttgattttta

SEQ ID NO: 445638 - DNA, 90 bp, Homo sapiens
atgcatttgagtgtatggtgtgcaccaaggtgtgggctaatatcaggcttcaggaaaagggcgaactttctgaccaagtatacaactacc

SEQ ID NO: 445639 - DNA, 100 bp, Homo sapiens
ctgaggtggacgtgtacaacccgacgaggaacgaatgggacaagatcccgtccatgaatcaggtcagagagcttcaaactcgactacagagcgtgcaggc

SEQ ID NO: 445640 - DNA, 80 bp, Homo sapiens
gtaaccacctcacagattccagcttcggaacaagagaccctgtttcgtgaccttgtccagtagaaggctatttaattttc

SEQ ID NO: 445641 - DNA, 100 bp, Homo sapiens
atgcggcccccgcgcagccgggccccacgagtggggatccaagagttgaagattggctcctcatgtcctcgcctctgccacaaaccatcctcctaggatt

SEQ ID NO: 445642 - DNA, 51 bp, Homo sapiens
gtcaaggcaattctttggttgctaaggaaccagggaaaatgtgtagagggc

SEQ ID NO: 445643 - DNA, 100 bp, Homo sapiens
ctccgagcgccgtccgccaggaagactccctgcctcctgagtcccagtacttcacatgatttcaagtatggtttgatgcctggtccttcaaatgatttca

SEQ ID NO: 445644 - DNA, 90 bp, Homo sapiens
gtggggttcggggggccaccgaatcgctgtcacgccggcaggtgaggctccaggttgggctctatgctgtgtaccttctggactggctca

SEQ ID NO: 445645 - DNA, 100 bp, Homo sapiens
ttcctgccaagggaagtagtgtcctactcaaaggagacccagactcctcttgccacgcatcagtctgaagtgccggtggtggtgtgcacattgagccccg

SEQ ID NO: 445646 - DNA, 96 bp, Homo sapiens
aaaaaggacaccagcaagctgttcaatgaggagagctggaatacggctggcatcggagaaaccctcacagatgaactgcccgcctttagtctcacc

SEQ ID NO: 445647 - DNA, 116 bp, Homo sapiens
tccctcaagactggtccacggagtgtatgaccacaaacagccatcaagtccacaggtcctggctaccctgggaagagacaagaagtaaatgaagaaagaggaagattccaggacct

SEQ ID NO: 445648 - DNA, 90 bp, Homo sapiens
ctttcacagacttagaagctaatcagctctttgatcctatgacagaccagcatctcagacatgtcgaaaaagatgttttgatccctaaaa

SEQ ID NO: 445649 - DNA, 82 bp, Homo sapiens
cttctgtcatagaaactcacatgagacaaatgcgctcagcttcaattgatatttagcttcctgtggtatactgatgagcaga

SEQ ID NO: 445650 - DNA, 51 bp, Homo sapiens
caccattctaagaatgaaaggccagcacggctcagaaatacagctcttcat

SEQ ID NO: 445651 - DNA, 97 bp, Homo sapiens
tccctctcttcgcggagcggcgccgcgtagcttccatccgccagctgccatgagcgagcgcctccgtcccaggtgtcatggagaaactccagctggg

SEQ ID NO: 445652 - DNA, 75 bp, Homo sapiens
ggggcctgctcccggagagatacggctatgtcgatcgaaatcgaatcttcggagaatccctgggccactggagtc

SEQ ID NO: 445653 - DNA, 74 bp, Homo sapiens
tgcaaagaccatgcgccggaacaccattcttcgccaggccaggaatagcacgaacttccaggagccggtgcagc

SEQ ID NO: 445654 - DNA, 100 bp, Homo sapiens
tgacctcctgaaatatgagtttgacatcgagtttgacgtgacagagattggcaaagatgtgattggtttaaggatcagtcctctgcagtttcgctaaggc

SEQ ID NO: 445655 - DNA, 50 bp, Homo sapiens
gagctttgtaccaaagacctgggaaaagcctcctacacctacctctctct

SEQ ID NO: 445656 - DNA, 100 bp, Homo sapiens
ggtctcggcaggctcttcgggaaggaacctggagctggttgaaaaaggcttcagtaacttgaagaaacaaattgaaaatgccagaatgtttggaattcca

SEQ ID NO: 445657 - DNA, 83 bp, Homo sapiens
gacaggaacgtggagatctggaagatcaagaagctcattaagagcttggaggcggcccgcggattgctcatttagaaagtgga

SEQ ID NO: 445658 - DNA, 100 bp, Homo sapiens
ctgctgccgctgccgccctgagtcactgcctgcgcagctccggccgcctggctccccatactagtcgccggagacgaaaccagacagagggtcaagttta

SEQ ID NO: 445659 - DNA, 75 bp, Homo sapiens
cagtcacccaggcctccgcttctccggcctccctgctcttaccgggagggggaagtccagccaagcagacgacct

SEQ ID NO: 445660 - DNA, 75 bp, Homo sapiens
tccccctgaagttcatctaagatcttcattcttcaaaggagaacacaaagttatacctcaatttacttgaaatgg

SEQ ID NO: 445661 - DNA, 75 bp, Homo sapiens
atggaaacctggtctcactggttcacagccatgaatgaaccacagtgcttctacaacgagtccattgccttcttt

SEQ ID NO: 445662 - DNA, 135 bp, Homo sapiens
tctcaagaactgttgaaagactgggaatgtatgacagagttgctattagaagaacctgttcaaggagaggaagcctccagggtcgtatagacctccccctcctatgggcaaaccaccaggttcaattgtaagacc

SEQ ID NO: 445663 - DNA, 100 bp, Homo sapiens
agacctggcaaatgacatcatgacactgcatcttcatgatacagttaagaggaatcttgacagcgccacttcccctcagaatggcgatcaacagaatggc

SEQ ID NO: 445664 - DNA, 100 bp, Homo sapiens
ggtggtgcgagtcttcggagcgaccccggcagggccgttgctccagggagaactgcaaatatcttcatccacccccacatttaaaaacgcagttggagat

SEQ ID NO: 445665 - DNA, 83 bp, Homo sapiens
ctgccccagggctgcggggacggtgctgaaggtcgccatcctggctgagaagtacgcggtggactacacctggtatgtggata

SEQ ID NO: 445666 - DNA, 91 bp, Homo sapiens
tcggaggcggcgtgggcggcagagagcggggcggcggcaggtgagaagccctaccactgcaactgggacggctgcggctggaagtttgcgc

SEQ ID NO: 445667 - DNA, 90 bp, Homo sapiens
gccgccagagaggcccgcccaccagttcgcccgtccccctgccccgttcacaatcttcctcatcgtcctggtctgcctcatcttcagcgt

SEQ ID NO: 445668 - DNA, 51 bp, Homo sapiens
ggaatgacaaacaaccagctcttcaggaaaccacccctactcctaatcccc

SEQ ID NO: 445669 - DNA, 75 bp, Homo sapiens
gggcaagacctcaggaggaccctgactcatatcaaggaccagaaaggagtgtccgagttggagagtgctctgcag

SEQ ID NO: 445670 - DNA, 51 bp, Homo sapiens
ctgcaggagaagatggcggtctccacagatctgaaatagctcaactcagtc

SEQ ID NO: 445671 - DNA, 98 bp, Homo sapiens
aaaggaatccttgggacctcttcttttggaggtgagtgctccagttgtaacatctaccactcaggaaaagccgaaggatagcgatcagtttgaatggg

SEQ ID NO: 445672 - DNA, 71 bp, Homo sapiens
gaccccggcgcgctgaatgcaggctcacttatctaaagaatatgaggaggctaatttcagagctatatgtg

SEQ ID NO: 445673 - DNA, 100 bp, Homo sapiens
ctgaccgggacctgtgcaagccggatctctgctgtctcttggatcccatctgcctagatggaagaggatcctatccgaagctaggataaatgttgtctta

SEQ ID NO: 445674 - DNA, 134 bp, Homo sapiens
ccgagatccagtctatgatgagagtactgatgaggaaagtgaaaaccaaactgatctctctgggttggcttcaggtgaacggaagagtccttatgttgcagtatgctgtatagtaatggccttcagcatcctct

SEQ ID NO: 445675 - DNA, 100 bp, Homo sapiens
agacggggcggaagaccaagatcatcgagatgctactctcggaaccgcacgtttgacacgtacattgggcagggctacgtgattcctgggatggatgaag

SEQ ID NO: 445676 - DNA, 55 bp, Homo sapiens
ctgatttctccaaaatttggaaactatttggtctcattctgtcacccaggctgga

SEQ ID NO: 445677 - DNA, 83 bp, Homo sapiens
gacgccgggaccgggaccgccgccgccgccgccaccatgatgtcgacgtacaagcgggccacgctggacgaggaggacctggt

SEQ ID NO: 445678 - DNA, 101 bp, Homo sapiens
atggaaactactatgcatgtaaacaaatgaagcagcgctttgaaaggttttcagatctaggatttgaagtgaaatgctttaatgatcttaaagcagaagaa

SEQ ID NO: 445679 - DNA, 80 bp, Homo sapiens
caggggcgagggctacccgctctttgccgtgacaacaccgttcccccagccgggctggtttttagaacttcagccataaa

SEQ ID NO: 445680 - DNA, 75 bp, Homo sapiens
ccacgggggtcatgggcaacattcaggcaagtagcctgcagtatgaaatgctgctgctgacggattctatctcca

SEQ ID NO: 445681 - DNA, 100 bp, Homo sapiens
cggcaggatgaaagtgagcagtccagaaagcggcttatcgaacagagccgggagttcaagaagaacactccagagttgtgtttgcaatgggaagcaaaat

SEQ ID NO: 445682 - DNA, 75 bp, Homo sapiens
ccgcggcgcgcgcctctcccggaccctgcaggtctccagagaatacagagggcaaagatggatccaaagtaacta

SEQ ID NO: 445683 - DNA, 74 bp, Homo sapiens
gccgcttctagaccctactgcggtctcggatattgccgggggcaatgaaaactattctaggtgatcaacgaaaa

SEQ ID NO: 445684 - DNA, 75 bp, Homo sapiens
acaaatccaagtcgttcttcgacaacatctcttctgaactcaagaccagcccatggaggtgtttgtggacgacga

SEQ ID NO: 445685 - DNA, 75 bp, Homo sapiens
gggaggatgaagttgattgactatggtctctccggctaccagtgggtaattccagaattgattggccataccatt

SEQ ID NO: 445686 - DNA, 88 bp, Homo sapiens
gcctcccggtcaaagtcaactgcaagcgagttatgtggagtttagacccagccagtacataccgagcatcaaatattaaggcacccgg

SEQ ID NO: 445687 - DNA, 50 bp, Homo sapiens
cctccaccacgcagagaatccagcctgggtctgggggtggtggcatctcc

SEQ ID NO: 445688 - DNA, 114 bp, Homo sapiens
ccgacgaggaagttttctactgtaaagtcaccaacgagatcttccgccactacgagcttctggagttacagtgaatgatgaagtcatcaaagtttttaatgatatgaaagtaag

SEQ ID NO: 445689 - DNA, 83 bp, Homo sapiens
gttcgacaagaatctgcaggacttggtccgcggcatccgtaaccacaaggaggacgagaaatgcgtgtactgccggaagcgga

SEQ ID NO: 445690 - DNA, 50 bp, Homo sapiens
cagtatccttggggcactgtgcagggacatcggcagaaactagatgatca

SEQ ID NO: 445691 - DNA, 100 bp, Homo sapiens
gatacaaatacaagctgatgcgacagattcgcatgtgcaaggacctgaagcatctcatctattatcgtttcaacacggatctgtgccagttcagaagcag

SEQ ID NO: 445692 - DNA, 49 bp, Homo sapiens
cctaggagaggagcagctagaaggtttggcaatgaggagcagcagctgg

SEQ ID NO: 445693 - DNA, 100 bp, Homo sapiens
caatgttctcgatgccaatctctgcttgaaaggagaagacttggattctcaggtggtcctggctctgccatatgacacccccgtgcccggctacatgaat

SEQ ID NO: 445694 - DNA, 83 bp, Homo sapiens
agcatggtcagtgccgtttaacctttattgtggtggagtccaccccgctgtggtgattggcgaggacaacgtggcagtcccct

SEQ ID NO: 445695 - DNA, 101 bp, Homo sapiens
cctccctgagtgtgagcagagctctgccaggcagaaggcctctctcctgatacagcaggcgctcaccatgttccctggagaacaccttccaccatgaccac

SEQ ID NO: 445696 - DNA, 82 bp, Homo sapiens
ccgcatccggcctttggcggagaaaaccggcatctgcaaaattcggccgcccaaggcagatttcaagctgatgtgtgataat

SEQ ID NO: 445697 - DNA, 80 bp, Homo sapiens
gtatcaagccaagaacagcccaatctcctttctgggcaaacgttccaagacaaatccgaccgccctgtctgccgacattt

SEQ ID NO: 445698 - DNA, 90 bp, Homo sapiens
gaaatttggagtgtgcgtgcgcgccgagcgtgcatttgcccagtataacatggatcagttcacgcctgtgaagatagaaggatatgaaga

SEQ ID NO: 445699 - DNA, 49 bp, Homo sapiens
gctgagaggacaaagctcactgggaatagcctaacatggcagaccagag

SEQ ID NO: 445700 - DNA, 100 bp, Homo sapiens
accagcaatgagaggacccgcgtgggcaccctgcaggtggtcagacatgtcatcaactcagctgttttagaaagagcgttttcgctacgtaaagcacatt

SEQ ID NO: 445701 - DNA, 83 bp, Homo sapiens
gaaatggccgctgtgtggttgcaacggagataaattcccggaaccgcgattcggcgtgtcagcggccctccaggcactgaagc

SEQ ID NO: 445702 - DNA, 73 bp, Homo sapiens
ccctgcccggcgtggagggcgcggggggcgcggagcttttaacctggagacttgccggcttatggtttcaatg

SEQ ID NO: 445703 - DNA, 76 bp, Homo sapiens
accctatgaacctgactctgtggtcatgaaaaaccatgccacatggatcgtttggatcgaatcctattgtctggca

SEQ ID NO: 445704 - DNA, 74 bp, Homo sapiens
cagagaaattggccatggaagctttggagcagtgtattttaatatatcactgatgtccattcgaatgacctgtc

SEQ ID NO: 445705 - DNA, 83 bp, Homo sapiens
ggccgccgcgccgcccggcagcctcggcagagctccacgcaggagatcggtgaggagctgatcaacggagtcatctactccat

SEQ ID NO: 445706 - DNA, 82 bp, Homo sapiens
agcgaccatgggggacaccatccactacaatgcagatcttcgtgaagactctgactggtaagaccatcaccctcgaggttga

SEQ ID NO: 445707 - DNA, 90 bp, Homo sapiens
ctttggggctcttcctctaatcaggagaaagctgagcggtctgggaggagagcaaagggcaagaagagtgactcgaagaggaagggctgc

SEQ ID NO: 445708 - DNA, 92 bp, Homo sapiens
caaggataagggcgacagcaacagctctgccggctggaagacaccattcgcttttcacccaagatgatttgatgtcttataaaactctgatg

SEQ ID NO: 445709 - DNA, 80 bp, Homo sapiens
cgaggaggcagccaagctcgtagcctgccactccgtgctcattttttgagaccagtactgttataatccctatttacaga

SEQ ID NO: 445710 - DNA, 50 bp, Homo sapiens
gggggtcaaatccacgggaaagagccatgcggctccctgacctgagaccc

SEQ ID NO: 445711 - DNA, 111 bp, Homo sapiens
gcgcggcggggctgaggcggccgcggggcccgagcgcagacaatgcagatcttcgtgaagactctgactggtaagaccatcaccctcgaggttgagcccagtgacaccatc

SEQ ID NO: 445712 - DNA, 99 bp, Homo sapiens
gatatccaaccctgaagatatttagagatggtgaagaagcaggtgcttatgatggacctaggactgctggtaacctggatgaggacatcattgcagaag

SEQ ID NO: 445713 - DNA, 100 bp, Homo sapiens
caccatggtggacacttttcttcagaagctggtcgccgccggcagcaataccaagaaggagggtgacctgatagctgctcaggctcggctgaaggacctg

SEQ ID NO: 445714 - DNA, 90 bp, Homo sapiens
ctgaaagcaaccaggaggcagtaaattcttcagctgctcggacagatgaagctccccaaggagctgcagctcagaattctgcaaatgcag

SEQ ID NO: 445715 - DNA, 75 bp, Homo sapiens
aaacccacagaagttgtattagatgatgacagagaagatctttttgcagacagagtgggaagctttggagctgac

SEQ ID NO: 445716 - DNA, 50 bp, Homo sapiens
cgcacagctatcttgacccacccttgttggagtgcctcaagcttattgcc

SEQ ID NO: 445717 - DNA, 75 bp, Homo sapiens
gagagggccccgctgggctggccctgcagggaccatggaatccagagctgagagctgaacttgtcattctgtgaa

SEQ ID NO: 445718 - DNA, 80 bp, Homo sapiens
cttggactgagtcctgcaggacacagcattgggaatggtaccacctcccgaaaatgtcagaatgaattctgttaatttca

SEQ ID NO: 445719 - DNA, 100 bp, Homo sapiens
ctttgaggacacagcctcgctggaggcagtttctgactgtgccctgtccacggtgcctcctgcatgtcctgctgccctgagctgtcccgagctaggtgac

SEQ ID NO: 445720 - DNA, 100 bp, Homo sapiens
ggagaggggccgtggcccctgcagcggaaccggacccagtccctgagccgcccctacacccacaggttggtcaaagaaaaagtgatgtatgaaaaagagg

SEQ ID NO: 445721 - DNA, 100 bp, Homo sapiens
aagctggccaaagcctgcccagacggctcacctgtgcgggatggaacaaaagggttcttttcctatgactccatcaattccagctaatcctcccatggct

SEQ ID NO: 445722 - DNA, 100 bp, Homo sapiens
ggggacttggtgttcgctaagatgaagggctaccctcactggcctgccaggggcacagactccatcaagatggagaacgggcagagcacagccgccaagc

SEQ ID NO: 445723 - DNA, 101 bp, Homo sapiens
gccatcatatatcagtatatggaagaggctctgtcaacagactcaatagaaagactcccagtgtataacaaagctgcctggaagcattacaacaccaacca

SEQ ID NO: 445724 - DNA, 100 bp, Homo sapiens
cgccgatttggccgcctggattgtgttgtcaacaacgctggccaccggatcagtgacattcagggatgtggccattgacttctctcaggaggagtgggag

SEQ ID NO: 445725 - DNA, 87 bp, Homo sapiens
aagatggggttccttccaaagtgcagcgctgtgcagtgtgcccaccagaagtatgtccgacaagcctggcagaaggcagacatcaat

SEQ ID NO: 445726 - DNA, 74 bp, Homo sapiens
ggcaccaccacagccgcccacttctggaaggttccatcccctgcaggccatggtgcatggggtgaccacagagg

SEQ ID NO: 445727 - DNA, 82 bp, Homo sapiens
catgacccccatgtgctcctggccgtggccaagattttgacacttcatgacatgtcattatttagagcaataatgaatattg

SEQ ID NO: 445728 - DNA, 100 bp, Homo sapiens
cgagactgtgccctggccatcaagcagaggggagcctgttgtgaacagtgcaaagcataaagccaaggtagaagcaatgaccctggacctcgctctgctc

SEQ ID NO: 445729 - DNA, 133 bp, Homo sapiens
cttgggctgagtaccgcggcgggcgcgagcgaggcgccctagacatcttctccctcccttgcctcaggaacaagctgaaagctggatacctaatgtcagtggagtcttctgagtgtttcctggaagaagtcgg

SEQ ID NO: 445730 - DNA, 90 bp, Homo sapiens
aaaagaaaactggctaaagatgctgtgtcgacatgtagctaacaccatttgtaaagcagatgctttggcagatatccctgttacaatctg

SEQ ID NO: 445731 - DNA, 50 bp, Homo sapiens
aaggattccaagtaactcttatttggacatagctcgccttttgcaagaaa

SEQ ID NO: 445732 - DNA, 98 bp, Homo sapiens
ggccacatgaaagttttcagcctcatccagcaggcggtgacccgctaccggaaggccatcgccaagaaaaactgcttaaggttgaaaagagaaattta

SEQ ID NO: 445733 - DNA, 50 bp, Homo sapiens
tgtgcttgctcctcagctctgctgttttagatggggtttcaccacattgc

SEQ ID NO: 445734 - DNA, 83 bp, Homo sapiens
tttggattgaagccgcctctgtattacttaccagtaggagctgtggcgcggggccttccaggagtctgagctatgagtggccc

SEQ ID NO: 445735 - DNA, 75 bp, Homo sapiens
ctgtcccctacgtcctacatgagccgccccgggggaaggtgcggaggacgcagacagcgggcccgagagccgcag

SEQ ID NO: 445736 - DNA, 100 bp, Homo sapiens
cgcagttatgaagaacacttggagaaacatcgaaaggccatctggctgctgtgcacaggcgctcgtgaggctgccttccggaacattaagaccattgctg

SEQ ID NO: 445737 - DNA, 75 bp, Homo sapiens
ggcactaggcagcggaggagcccgaccgacccgccctgggcgctgcctatggcacagccaagagcggtaccggca

SEQ ID NO: 445738 - DNA, 100 bp, Homo sapiens
gcagtcacagtccaggctgtcctgcacgacctcactagtgaacctgtcactgttcgggaagtcacctgccctcgggaccaaggatcacgtcatgactccg

SEQ ID NO: 445739 - DNA, 75 bp, Homo sapiens
agaggcatacaccacttagtaaactaatgaaagcctattgtgaacgacagattttgatccaaacaatatcttcaa

SEQ ID NO: 445740 - DNA, 100 bp, Homo sapiens
cccctgatgggcctcctggagagcattgcggtggccaaagccttcggtctcggcgcggaagatggccggcggcgtggacggccccatcgggatcccgttc

SEQ ID NO: 445741 - DNA, 75 bp, Homo sapiens
cgagtgaggaaaggaggtactgtaggctccccaggaagctctcagtctgggagcaggcacagttctccccgagcc

SEQ ID NO: 445742 - DNA, 100 bp, Homo sapiens
gaacaccccgagatgagaggagaagagcccagcacaacgaaggggtcctgtctttgtgatgtcagcgtgaagtggaattcgcagaatggctaaagtggag

SEQ ID NO: 445743 - DNA, 75 bp, Homo sapiens
gttatctctcaggctgctgtggttcatgccacagccaaagtgacgagtagcacagcccctctatggtttagatgg

SEQ ID NO: 445744 - DNA, 51 bp, Homo sapiens
ccgcagccaccgcggatgcaaaagccaaggccaggaactcccggctgattt

SEQ ID NO: 445745 - DNA, 98 bp, Homo sapiens
acagcagcagcaagttagtggattaaaatctcccaagaggaatgacaaacaaccagctcttcagaaagaatcttcaagagggagacatagggaaaagg

SEQ ID NO: 445746 - DNA, 100 bp, Homo sapiens
ggtggctccgagaagtttttacaaagaacatgctcacatcttcaggtgcctcattcacatacgtcaaggaaattgagcccaggatccggttgtggccgtg

SEQ ID NO: 445747 - DNA, 75 bp, Homo sapiens
gggggcgcagggaaggagggcgtccgagtcaacaaccgcttcgagctgattcctggtcgggtggcttccagtggt

SEQ ID NO: 445748 - DNA, 100 bp, Homo sapiens
cggagaaaaagttgaagcgttatgtgctgactgggttacttttttaaacactaggaatggtaatttctactcttctggacttcaaactaagaagttaaag

SEQ ID NO: 445749 - DNA, 98 bp, Homo sapiens
ggactgggacaatgacagcagctcggcccgcctctttgagaggtctcgcattaaggctctggcagtgccgtgttcacatggaccaacttgcttgtggt

SEQ ID NO: 445750 - DNA, 137 bp, Homo sapiens
ccctttggtgtggacatctgctgccggaaggggtcccgaagccccctgcaggaactctacaacccaatccagagttcttggagtctctgcggagtccctgggccagatctcacagtgaaagctgcaggatcttcctt

SEQ ID NO: 445751 - DNA, 75 bp, Homo sapiens
cgagagtgattgccatttggctgaagtgtggtgtggctctgaggatgaagtttttgctgctgcagcagaagtacc

SEQ ID NO: 445752 - DNA, 96 bp, Homo sapiens
tacctggtgtccttgtggtctttctcaggatggcttccttctcaactgtgacaagtgcaggctattataatggttttagagtcaactggagaaagt

SEQ ID NO: 445753 - DNA, 100 bp, Homo sapiens
taatgaggataatggtatcatcaaggccttcagaaacatccctgaatagcctaacatggcagaccagagacagcgctcactgtctacctctggggagtca

SEQ ID NO: 445754 - DNA, 83 bp, Homo sapiens
cttcaatgagtaaacatattcctgtgattgaattactcagatatgaagatcatcatctaggttttgtgtaaaaggccctggat

SEQ ID NO: 445755 - DNA, 100 bp, Homo sapiens
aggagctgcgctcacctcaggggcgggcccccgcctgcgttcgcggcgccaccccattggatgagaatgacctagaggaagatgtggactcagaaccagc

SEQ ID NO: 445756 - DNA, 100 bp, Homo sapiens
gactgtgctctcaaactttactttgcctcatttgaggagtgggaacaggcttcggcgaacacaaaggcatggctctgtgagcgctgatgaggctgcccgc

SEQ ID NO: 445757 - DNA, 95 bp, Homo sapiens
gtggcggccttgggttgatcatgcttccatggttgaccctgcctgcgttcgctgcaggcctctgactccggaaggcaaacagaggcctcaggggg

SEQ ID NO: 445758 - DNA, 77 bp, Homo sapiens
tgaagagggaagacacgcggaaacagatgtagaaatccctgaaaatcctgaggcatatcttaaaatgaccacaaaaa

SEQ ID NO: 445759 - DNA, 75 bp, Homo sapiens
ccagccctgtgaataaccaccacagcccggacagggggattatgtttcagcagcacagggaattttcctctacgt

SEQ ID NO: 445760 - DNA, 101 bp, Homo sapiens
gaaaaagatctaaagtcacccggcggccaaaggccagtgactaccaacgtttggaccagaaggagatgagtatgatgtatgtgccatttgtttggatgagt

SEQ ID NO: 445761 - DNA, 89 bp, Homo sapiens
agcgctcccagtttacatggaaaatcggattcagagactgtttttgatattcagaatgacagaaatagtatacttccaaaatctcaatc

SEQ ID NO: 445762 - DNA, 100 bp, Homo sapiens
cgtcgacatgagtgatgtggaggaaaacaacttcgagggcagattatcagggaataccaagagcagagagagcatccaggaacctagatctgattactac

SEQ ID NO: 445763 - DNA, 83 bp, Homo sapiens
atgtcatgcctctgaaaatgaaggttcaacagagtttggaaaagatttctaaactggagcaggaaaaagaacattggatgttg

SEQ ID NO: 445764 - DNA, 84 bp, Homo sapiens
gccgcgagcgcggcctgcaggaggtctcctctgagcctccggcctccataagacccaaaacagatgacacctcttcccagtccc

SEQ ID NO: 445765 - DNA, 83 bp, Homo sapiens
cacgcagcccggcgggaggataaagaccaccacggttcagggcggactctccgggagactgtcctggaaagttcgcccatcct

SEQ ID NO: 445766 - DNA, 83 bp, Homo sapiens
tgctgaattggatgaaagataaagcccttaaggacaaggaacgtctggtcctaaccagtgagcactggttagtactggtcccc

SEQ ID NO: 445767 - DNA, 100 bp, Homo sapiens
tgagcataatgttgctctgttcaaacattttgcagacttgctaccgggattcctacaggtacctacagaatactggacatacggattcagaatccataag

SEQ ID NO: 445768 - DNA, 100 bp, Homo sapiens
tgcaggagcaagtgaccaggagcaggactggggacagcgagacggtcatctgttccagccgggccactgtgatgctttatgatgatggcaacaagcgatg

SEQ ID NO: 445769 - DNA, 75 bp, Homo sapiens
aagggaaaccagttccacgtatagctgaactcatggacaagataaacaatcagattctgtatggaagaagtcacc

SEQ ID NO: 445770 - DNA, 143 bp, Homo sapiens
ggcagagagagaaacaggggagcaaggtgcaagagtccacaaagggacctgatgaagcgaagatcaagaacgacaacttactctggaggttgagaggatgagactagaacatggaataaaacgtcgagacaggtcaccttctc

SEQ ID NO: 445771 - DNA, 75 bp, Homo sapiens
caaccacaaagatgaagaaacagaagatgtcttagcttctaatggggtggtgaagcagtattttccaatttgaag

SEQ ID NO: 445772 - DNA, 99 bp, Homo sapiens
caaggaagagttgctaaatgaattcagtgaaggtttcagcaagcagatggtggaaattcttcacaaacataatattcagtttagcagttttgatatctt

SEQ ID NO: 445773 - DNA, 75 bp, Homo sapiens
cagatggccagtcacgagaacccaggtgaaaggtgtagcagtcactcggcctacacccacagcatcgaccttgtg

SEQ ID NO: 445774 - DNA, 100 bp, Homo sapiens
cttggaaagtcaggaccgcgacggcagcagagcaggaaagacattcccggtcaggcatctctggtgtttgatgttgcattattggacctccataacccca

SEQ ID NO: 445775 - DNA, 100 bp, Homo sapiens
aggaaatgtaaaacaatgtgaaatcaattatgtgtgatgatggagtcaatgtagaagaagatgggaaaacaaagaaaagtcagaaggatgatgaagaaca

SEQ ID NO: 445776 - DNA, 100 bp, Homo sapiens
tttcatcatatatacgactaagatatcagggagattagtaatttttaggtattaaagatacactcaaccaaagggacagaatgggaaaggctgaaagggg

SEQ ID NO: 445777 - DNA, 82 bp, Homo sapiens
cgcgacttgtggttgccgaagttggatttctcgcaaaccaattccagttcttcagacaaacaatggtccaagtctaacagga

SEQ ID NO: 445778 - DNA, 88 bp, Homo sapiens
cccaaggaaaccatggaggagcactgcaagcttgagcaccagcagagtggcattctgcatttctgtggcttccaagtcttagaacctc

SEQ ID NO: 445779 - DNA, 87 bp, Homo sapiens
gatgttggagaactacagaaacctcgtctccctgggcactggtgaggtggattgatgatgaatcttctggcacacctggagcaactc

SEQ ID NO: 445780 - DNA, 82 bp, Homo sapiens
ccgggttccccggctcgcggggcccggcgaagggcaggttgacatcatggacatatgtgagtccatcctggagaggaagcgg

SEQ ID NO: 445781 - DNA, 80 bp, Homo sapiens
aaaatagagcctctattaatggacacttctataaccatgaattgctgatagtccaactccaccgccaccacctccaccag

SEQ ID NO: 445782 - DNA, 74 bp, Homo sapiens
tttccaattttgaacactttggagtctgccacctcttccttccatgcctccccgaaacttacctggcattgcac

SEQ ID NO: 445783 - DNA, 75 bp, Homo sapiens
cacccagcgcggcaacgtcgccaagacctcggaactgtggctgcaccatctgtcttcatcttcccgccatctgat

SEQ ID NO: 445784 - DNA, 106 bp, Homo sapiens
ggcattggcaaagcaactgcccttgaaatcgccaagcgagactaactggatcttctgggtttgtgacagatggacctggaaattataaatacaaaacgaagtgcac

SEQ ID NO: 445785 - DNA, 75 bp, Homo sapiens
gttcttcttcgagtatttgtagaaggatactgaagtggatgtagttggcctttgtcaagaaggaaagtttctttt

SEQ ID NO: 445786 - DNA, 102 bp, Homo sapiens
gaaatcagaaacagaaaggatgtgaaggtgtttaatgctctcaccacacacttgttcatgggcgcagcaaagaagagggatccacagagctggagccatgag

SEQ ID NO: 445787 - DNA, 90 bp, Homo sapiens
tggggaagctgctaacccgacccggattggcgctgaggtggcccgtggggcagtctctggatggtcgtcagatccgtgtggatcatgcag

SEQ ID NO: 445788 - DNA, 50 bp, Homo sapiens
agcaagcatgcagcttactgcttgaaagggccgcctgggcagaatgtcac

SEQ ID NO: 445789 - DNA, 129 bp, Homo sapiens
gtttccaaagaattttttcagctggttgtggaggaaatcttcaatccagatattgggtacactctcctacaaaaccagccagttactcagtaaagtggacgatagaagaaaaagagctgtttgaacaag

SEQ ID NO: 445790 - DNA, 100 bp, Homo sapiens
cgaaggccctatcaggacatggagtatgaaagacgaagacgatcaccttctccttattatagtcgatatagatcacgatcaagatctcgttcctacagcc

SEQ ID NO: 445791 - DNA, 83 bp, Homo sapiens
gcacagagcctcgcctttgccgatccgccgcccgtccacacccgccgccagccttatgccagcctggaccatcttggaggcag

SEQ ID NO: 445792 - DNA, 101 bp, Homo sapiens
cttcgaaaagctgccaagttgaaaatggacgagtaatcgcctgctttgattcattgaaaaactgataaatttcaaacggaagagagtggcagcatttagaa

SEQ ID NO: 445793 - DNA, 74 bp, Homo sapiens
ttaacctgccgccgcccctcaccagacagatcgctgtcaaaaccctagattccaactccacagagtgaccagag

SEQ ID NO: 445794 - DNA, 97 bp, Homo sapiens
tgacctctggctataatagcagcccagccttgtcaggccagctccagttcccagagaatatggaaatattctgctgtacgtagagatggctctttcc

SEQ ID NO: 445795 - DNA, 90 bp, Homo sapiens
ctcgggtgcctgcacctcggccgtcccggcgcccctggggacgccgccctcccgggttgcttatggaaccacagagaacagtcccgtgac

SEQ ID NO: 445796 - DNA, 98 bp, Homo sapiens
acaaaaacctatcgttagagtcttcctgcccaacaaacagaggacagtggtatctcagatgaagacatcatcaacattactcttcctactggagtccc

SEQ ID NO: 445797 - DNA, 100 bp, Homo sapiens
caagacccttgtgctcgttgtcgccgcggtcctgctgttggagcaggacatcgagactttacatggctctgttcacgtcacgctgtgtgggactcccaag

SEQ ID NO: 445798 - DNA, 120 bp, Homo sapiens
cgcagaagtcgcgtgtctaggtgagtcgcggtgggtcctcgcttgcagttcagcgaccacgaaaccaaggtgtatgttggtaacctgggaactggcgctggcaaaggagagttagaaagg

SEQ ID NO: 445799 - DNA, 83 bp, Homo sapiens
ctgacttccagttccagcgtacgagaactggagaaccaggagtctcgggtctctgaaatccacagccttgttcatcggctccc

SEQ ID NO: 445800 - DNA, 83 bp, Homo sapiens
aggacattaaggatctgggaggggaacccagtgacaatggacctctttttactgaattaaagttctaccaacgagctgcaaaa

SEQ ID NO: 445801 - DNA, 100 bp, Homo sapiens
tataagaacctggccaacaagattgtccccattgccatccagctggcactgactgctcgacttttccggccacggctcatcatagctggcaccagcgcct

SEQ ID NO: 445802 - DNA, 56 bp, Homo sapiens
agaaagcctgctctcttgcaaagacagcttttgatgaggccattgctgaacttgat

SEQ ID NO: 445803 - DNA, 83 bp, Homo sapiens
atttgcttggaaaaacgtgtgggtacgaccttgaagacttgcactatctgccagatgctgcttcctaaccagtgcagttatgc

SEQ ID NO: 445804 - DNA, 75 bp, Homo sapiens
cccgactcgcgatcaaaatgggtcccgttcaagaagttcttccagttcgcagtcaagatctcgttccagttccag

SEQ ID NO: 445805 - DNA, 98 bp, Homo sapiens
gaagatgcgcgccgtcttccccgaagcttcggaaccaaaaagaagcttcccagagccggggccaggagccccaagcgccctctagcagcaaacacaga

SEQ ID NO: 445806 - DNA, 75 bp, Homo sapiens
tctgaagatcaggtatccaaaacaaggcccagcagtgagaaactttcacaatctgtaatagatggtgtgactgtt

SEQ ID NO: 445807 - DNA, 98 bp, Homo sapiens
agttggaaagaagaaaagaattaaagaaaatacgagtaaaatatggtttacagattcgggtgtacatgtgcaggtctgttacctgggaatactgcgtg

SEQ ID NO: 445808 - DNA, 100 bp, Homo sapiens
ctcaagtgcttctgcattacaaaagatgaggtctatcttaatctggtgctggactatgttccggaaacagtatacagagttgccagacactatagtcgag

SEQ ID NO: 445809 - DNA, 82 bp, Homo sapiens
gcagaggacacgaggcggcgggctggagacatggaccgcggcgagcaagacagaatgttgctgcgggatgtaaaagctctta

SEQ ID NO: 445810 - DNA, 90 bp, Homo sapiens
cgtttccgcaaacagaatcgcgtttggctgtgctggttgctcaagaaacagatgtgagagcccagattcgtctgcaatttcgtgatgtca

SEQ ID NO: 445811 - DNA, 100 bp, Homo sapiens
gagcatgaagagtacatgaagaatcttctcaaagtgggagggatccttgtcatgccactggaagagaagtattctgaagaagccaataatctcattgaag

SEQ ID NO: 445812 - DNA, 89 bp, Homo sapiens
atctggaattttgccgatttcatgactaaccagtttacaggcccaaaaactgcgactggcatacacaaggagctctcattatggtgggt

SEQ ID NO: 445813 - DNA, 75 bp, Homo sapiens
ttgttgatggtgcaaatactggcaagaagttggctggaatgtgatgacttaaaaggcccatgttctgaaaggcac

SEQ ID NO: 445814 - DNA, 83 bp, Homo sapiens
gccagcccgccagcatgccccagtccaaagcaaaaaatcccagaagtgggatgaaatgaacatcttggcgacgtatcatccag

SEQ ID NO: 445815 - DNA, 98 bp, Homo sapiens
tatagcttctgacagtggagacactggcattggaacttcctgttctgatagcgtggaaggttttgaagtacaggaagaaggttatctggcaaaaatcc

SEQ ID NO: 445816 - DNA, 100 bp, Homo sapiens
cggtaccctcgctcctcgatcgaggacgacttcaactatggcagcagcgtggcctccgccaccgtgcacatccgaatggtttgcttcagtgtccccaaca

SEQ ID NO: 445817 - DNA, 101 bp, Homo sapiens
tgccggcctagcgtcctggaattacttcaatcaatgggtaaaggaagaagccccagatatactgtgccttcaagagaccaaatgttcagagaacaaactac

SEQ ID NO: 445818 - DNA, 87 bp, Homo sapiens
gcgggtttcccaggacctggaagtggttccaattgtggacaagataaggaccattgctcaggctgtctatggagccaaagatattga

SEQ ID NO: 445819 - DNA, 102 bp, Homo sapiens
gcactaagatcggaagatgagtgagcttgaccagttacggcaggaggccgagcaacttaagaaccagattcgactgagatgagtgaactgagtgtggcacag

SEQ ID NO: 445820 - DNA, 98 bp, Homo sapiens
cagcccagcgggacccagggagaaacaggggggcgagaagagaaacagacaaggtctttactaggtgtatttgaagaagatgccacagctatttccaa

SEQ ID NO: 445821 - DNA, 99 bp, Homo sapiens
ccggaatgctgcccgatggccctgggtcctcgctgtggggcaatccgggcttgcagacgagctgagcttcagtcattgtctattcctggaacttaccaa

SEQ ID NO: 445822 - DNA, 48 bp, Homo sapiens
aacctttagatgaatttacagaggaaaaggcttctcttttacatcgta

SEQ ID NO: 445823 - DNA, 76 bp, Homo sapiens
gcggctttgaccgagaggctgctggagctcgtgtttggacgcggtttcatcaccttaaatggttttgaaccaatga

SEQ ID NO: 445824 - DNA, 80 bp, Homo sapiens
ggttctgctgcttctgggccctacgcgcggcttgcgcgtcaaaatgcagatcttcgtgaaaacccttaccggcaagacca

SEQ ID NO: 445825 - DNA, 50 bp, Homo sapiens
gctgtggaacattttgaagattagcaggtctctaattaacagaagatggc

SEQ ID NO: 445826 - DNA, 51 bp, Homo sapiens
ttcgcagtggtcgcttcttctccttgaggttggagcaatcactgaagaaac

SEQ ID NO: 445827 - DNA, 50 bp, Homo sapiens
catcattaaggacggaggcacggttcttcacacacccccattcggcgtag

SEQ ID NO: 445828 - DNA, 100 bp, Homo sapiens
ggaaatggttgtggactacgtctgtgcggctgcgtggggctcggccgcgcggactgaaggagactgaaggacaactgtcatctgggaagtaacaacgcag

SEQ ID NO: 445829 - DNA, 97 bp, Homo sapiens
ggctgctgcctcgtgtcacatctgaaactcatctgtacctcacttagaaagtatgacatgatgggaagaaatcagactgctgtgagagaagagatga

SEQ ID NO: 445830 - DNA, 90 bp, Homo sapiens
agaagtcaaggttgcccccaggcggtccttcctgggaacaagcacatcatgattgacttggggactggcaacaacaacaagattaactgg

SEQ ID NO: 445831 - DNA, 100 bp, Homo sapiens
cagccgtccggagccagccaacgagcgttaatgaaattatcaggaaggagttttcaggacctcctgccagaaatcagacgtaaaagaagccattatagca

SEQ ID NO: 445832 - DNA, 100 bp, Homo sapiens
tggtttccgggcatgagctgagagcaccacgccgaggccacgaggtaaagagaaatgtgtatgaccttacaagtatccccgttcgccaccaattatggga

SEQ ID NO: 445833 - DNA, 100 bp, Homo sapiens
acgacggcgccatcaccgagcgcttgatgtgcgcggagagcaatcgccgggacagctgcaagccatggccatgcagaaaatctttgcccgggaaatcttg

SEQ ID NO: 445834 - DNA, 101 bp, Homo sapiens
cccggacgcggaagaactggcccagcggaggttcccgcttctgaagcgtgggaggcggaagagactgcaggcacctctcccagacacctaccggggcccct

SEQ ID NO: 445835 - DNA, 96 bp, Homo sapiens
tgaccacactccaggaatgccagtgcatcttttgcacagctggtggtgattccactgaagcaactgccaaaccaaagagaagtttttatgctgcca

SEQ ID NO: 445836 - DNA, 128 bp, Homo sapiens
gaaaggcactttattatgcaggtggtctgtgaagccacacagtgtccagatacgagggtgaggcaggcgactaatcagattgtgatgaattgtgctgatattgatattattacagcttcatatgcacc

SEQ ID NO: 445837 - DNA, 80 bp, Homo sapiens
gtgcccgaggaggcagccaagctcgtggcctgcctctgcgtgcgtcagccatgtcatctgagcctcccccaccaccacag

SEQ ID NO: 445838 - DNA, 100 bp, Homo sapiens
tggaagtcctctgggattcaaggtacaggggcgattgtggaaaaatgtgacagactcgctgagagaatctgaaattgataaggccacagagcataagcat

SEQ ID NO: 445839 - DNA, 100 bp, Homo sapiens
ccccgcccgacttcggaaggaccgggaggcaaaggtgaggaagttggcgaaggaacggctctcctttgtttgcagcaagtaactggcagaagttttggtg

SEQ ID NO: 445840 - DNA, 50 bp, Homo sapiens
gcggggtccggcagccgccgctggaagagtcctccctgctgctgtgtgga

SEQ ID NO: 445841 - DNA, 73 bp, Homo sapiens
ggaaatagtggcaggtgacagtctgcatgtgcagttttcaggtgtggcagctctcagaaaagaagcaaataaa

SEQ ID NO: 445842 - DNA, 100 bp, Homo sapiens
acactgggatgcatacggtcctggctgagtcatcactagagagtgggaagggcagcagcagcagagaatccaaaccctaaagctgatatcacaaagtacc

SEQ ID NO: 445843 - DNA, 96 bp, Homo sapiens
tccatatcatgatgtcttgcatagtattttaggggcatacacatgctacaggcctgatgttggttatggctgttttgctgcagcttctgaagtgtt

SEQ ID NO: 445844 - DNA, 83 bp, Homo sapiens
ctcggggcggcggactggctcgcggtgcagttgacgaaggatcagagattggtgtattcgggcagactgcttcccgatcatct

SEQ ID NO: 445845 - DNA, 74 bp, Homo sapiens
ttgcataaagccaacattcgcaccgtcatggtcacaggtgctgtgcctgaggaacaataccatttttaagcaag

SEQ ID NO: 445846 - DNA, 51 bp, Homo sapiens
ctggcaaaggtgcttcggggacattccagcttctttttcgggaagtccacc

SEQ ID NO: 445847 - DNA, 100 bp, Homo sapiens
ggaattcgggaccgactgacggccggccggcttcccggaactggaaggccaggagtggtggctcacacctgtaatcccagctctgggaggccaaggccag

SEQ ID NO: 445848 - DNA, 74 bp, Homo sapiens
atgaatttagagccaaactgtccaaggctttggcagctgctaccatgaggttgaatcagaacaccttgctgctg

SEQ ID NO: 445849 - DNA, 100 bp, Homo sapiens
atcagtcaaggaagacccactggagacctctactcttcatggatcttttggatgaaagaacactcgtggcagtagaacggcctctggatgacatcattgc

SEQ ID NO: 445850 - DNA, 100 bp, Homo sapiens
cagggatgtgctctccgcggtgctttccggcatggggaccgcctacccacagggaaaaagacctcgatgaagttctgcagacccactcagtgtttgtaaa

SEQ ID NO: 445851 - DNA, 75 bp, Homo sapiens
cccaccttccccaggcccacggccacatctctgtcaaggtcttgccccagaagctgcgggcacatccacgcctga

SEQ ID NO: 445852 - DNA, 83 bp, Homo sapiens
ccccgtcgtcctggtgctgcagcgcaagagtgagccatggagctacgtgtggggaacaagtaccgcctgggacggaagatcgg

SEQ ID NO: 445853 - DNA, 75 bp, Homo sapiens
gcatcatgaattcgtttgtgaacgacattttcgagcgcatcgcaggagcagatctgcagatggggccaagaatta

SEQ ID NO: 445854 - DNA, 100 bp, Homo sapiens
atggcttccagtggaggcattttggggcagaatacagagatatggaatcaggaatagccaggccagaagaaggaaggcctgtggtgagtgggacaggaaa

SEQ ID NO: 445855 - DNA, 95 bp, Homo sapiens
gcggcgatatggaagaggagggcaagaagggcaagaaggaagagagaagggcacagttacctaagtatcaacgtaatcttcctcggccaggacag

SEQ ID NO: 445856 - DNA, 138 bp, Homo sapiens
agggtctgcaaagcagctaccaaatgcttattttctgcttccaaaggtccagagcattcagctgtctcaaatgcagcaaatccagtttgctgatgacatgcaggagttcaccaaattccccaccaaaactggccgaag

SEQ ID NO: 445857 - DNA, 82 bp, Homo sapiens
cacgatggggccccaggacctcaaggtattcccggatgcaatggaaccaaggttgtacatcctggagacctgaagaattctg

SEQ ID NO: 445858 - DNA, 100 bp, Homo sapiens
tcctggaggcggcgggatggaggcggcggccgatcttgagccagatgattgtgcatccatttacatctttaatgtagatccacctccatctactttaacc

SEQ ID NO: 445859 - DNA, 83 bp, Homo sapiens
gtctgggccgccgaatctccggccgaagagcggcggcggcagcggcgaagtccattggaatattaagcccaggagttgctttg

SEQ ID NO: 445860 - DNA, 82 bp, Homo sapiens
gtgtaccaggcgaagctggccgagcaggctgagcgatacgacggcgtccgagctgggccacagcctgaacgagaacgtcctc

SEQ ID NO: 445861 - DNA, 90 bp, Homo sapiens
ggcgcagccggagtggggccgtgaggtgctggagaatctggtaaaagcaccattgtgaagcagatgaggatcctgcatgttaatgggttt

SEQ ID NO: 445862 - DNA, 51 bp, Homo sapiens
cctgtcaggaatacgagcttctggctctagaggacaaaatcccagtccttg

SEQ ID NO: 445863 - DNA, 100 bp, Homo sapiens
ctcaagtatatcttgaagaaatgtcttggaatgaaggagagccggacagggcagcggccggcactaccgcgctgcgatttgcgcagagctgaagaagccc

SEQ ID NO: 445864 - DNA, 98 bp, Homo sapiens
ggtggagatgcttctggtttattttgtggctaccgctgttactgcttggagtgcctcaccgagccaggaaaaggggaagatagtgatgtactcagtat

SEQ ID NO: 445865 - DNA, 75 bp, Homo sapiens
gcggccgggggctcagagatccaagtgcgcgccctggcgggtccggaccaaggtgctcctggagctgttggtggg

SEQ ID NO: 445866 - DNA, 98 bp, Homo sapiens
ggcgcttctttggcggtgacaggggtgcgcccaagcggggctctggcaaggtcaaaatgcagatcttcgtgaaaacccttaccggcaagaccatcacc

SEQ ID NO: 445867 - DNA, 90 bp, Homo sapiens
cggccggtgactgaaccattgcttctgctttcggggatgcagctggccaagctgatccgacagagaaagtcttatgatgtaatcagcgcg

SEQ ID NO: 445868 - DNA, 80 bp, Homo sapiens
ggcctataaaatgcttcaagtagtcctgtgctcaacattgcttatcgattttaggtgatgggcaagtcagaaagtcagat

SEQ ID NO: 445869 - DNA, 100 bp, Homo sapiens
tgcttccagcccatgcccgaccggagagcggagcgcgagcaggacccgcgtgtcgcccctcagcagtgggttcagtcggctgccgtcaatgtcatctgcg

SEQ ID NO: 445870 - DNA, 96 bp, Homo sapiens
gctgcagttgtgggcaccttgtatgcggtcatcatcagatttgaaatatttaaagtggatacaaaactatttcagcaatgcagacaattaagtgtg

SEQ ID NO: 445871 - DNA, 82 bp, Homo sapiens
ctggagctgggtcagtccgccgctcaccccgcggccgcaccttcccgccttctcagagaggtggagaagagcgagtacttga

SEQ ID NO: 445872 - DNA, 83 bp, Homo sapiens
caggtcgaggacggtcggactcccgcggcgggaggagcctgttcccctgagagctggaagtcgagtgtgctactcaactcagg

SEQ ID NO: 445873 - DNA, 82 bp, Homo sapiens
aacaacaactgcgaggaaaatgagcagtctctgcccccgccggccggcctcaacagtctgagtgtacggtttgcagatatgc

SEQ ID NO: 445874 - DNA, 98 bp, Homo sapiens
cttttctagtcagcctcaccaagtagaacaaacagagcttcagcaagaacagcttcaaacagtggttggttcagcacgtgcacggcccagtcaatttc

SEQ ID NO: 445875 - DNA, 97 bp, Homo sapiens
cccacatcttccggccaacttccattgaacttcccagcactcgaaagggaccgaaatggagagcaaagggctggtggactaggcctcaattttgtcg

SEQ ID NO: 445876 - DNA, 90 bp, Homo sapiens
ggcgtggggaagtatgagttcaccgacccggggcaccccagagggggaacacacctgaaactagaggaacagcttatgtggtctatgagg

SEQ ID NO: 445877 - DNA, 100 bp, Homo sapiens
tgtggtttgtggattgttatctgtggggaaaactgcaattttggagcagctcctttatggaaatcatactattggactcagtggcctttgaggatgtggc

SEQ ID NO: 445878 - DNA, 90 bp, Homo sapiens
tgtttgacttagaatcttcccttttttactccattcaagagcagcattcataaatttccagatctgcgatgagctgggagtgaagcggcc

SEQ ID NO: 445879 - DNA, 96 bp, Homo sapiens
tttcatgggcgtcatgaataacatgcggaaacaggcaatttgaatcaacccatagaagtgacagcgctgtattcatttgaaggacagcagcctggg

SEQ ID NO: 445880 - DNA, 97 bp, Homo sapiens
ccgtacgtggccctcgatgtgctctgcgtgttgctggacttgtgcaccatggacaattttgctgagggagatttcactgtggcggattatgccttgt

SEQ ID NO: 445881 - DNA, 146 bp, Homo sapiens
gcagattgttcgagagactttccatctagtcctcaagcgggatgacaacatctgtaacttcttggagggtggaagaacaaattgcctccctgagtcggaccagctgcccgtggatcctacgctgcagtcacaccagactcctcatg

SEQ ID NO: 445882 - DNA, 82 bp, Homo sapiens
gctgttgcagttgctatgtatgtggttggatttgcagaaaccgtggtggagttgcttaagccttatgtttacacaacaccgc

SEQ ID NO: 445883 - DNA, 83 bp, Homo sapiens
gcttatcagagctctacttgggaaaaaaatgtggtgacctggaagaagaactcaagaatgttactaacaatctgaaatctctg

SEQ ID NO: 445884 - DNA, 85 bp, Homo sapiens
caccaagctcaaacacctgtgggtgacaagtctggtttctctggaaaatgtaaacaagctagaacgagtaaatctgtctgcagcc

SEQ ID NO: 445885 - DNA, 74 bp, Homo sapiens
cgccgctgccctccggctccgcgggcggcccacggcgaggtatacggatccgggtctcagacaagggcgttcca

SEQ ID NO: 445886 - DNA, 83 bp, Homo sapiens
ctgaggctgatatgcaatgtcacttacaacattaatcagatactgcatttaagtgttctaagaacggaagcatctgggctgga

SEQ ID NO: 445887 - DNA, 75 bp, Homo sapiens
ctcagatgctgccagggtccctgaagagggaagacacgcggaaacaggatgaaaactttcggaagagaaagttgc

SEQ ID NO: 445888 - DNA, 108 bp, Homo sapiens
ctactggaggcggcccgcttcctggaatggcaagcgcagcaacaacagagagcacgtgcacttgcacctcctgcgccgccgccccccatccaaggatatgccttcaag

SEQ ID NO: 445889 - DNA, 87 bp, Homo sapiens
gaatgactgcttgtatcgaatgcacgctggaactttatccaccacaggtgggggaccttaggcttgcattgcagcgtacagaacaag

SEQ ID NO: 445890 - DNA, 50 bp, Homo sapiens
cttggagtccggacatctgaaacttgatattctctaagccgctttcatca

SEQ ID NO: 445891 - DNA, 100 bp, Homo sapiens
tgaacatcaaattccagaacatagtggtggaaatactaatcgagcactttggcaagatcagtgtgcgtgtgaccaccatggatgcagagctggagtttgc

SEQ ID NO: 445892 - DNA, 74 bp, Homo sapiens
ctgaggagccgttcgaactgtctcaccacttccctgcagctcccacttaattcagtgcacaaatgagatgaatg

SEQ ID NO: 445893 - DNA, 50 bp, Homo sapiens
gagtcgggatggagccacaggccatgatgccatggacaatattaccaggc

SEQ ID NO: 445894 - DNA, 99 bp, Homo sapiens
gcaagctgaagacatcaagaagatcttcgagttcaaagagaccctcggaacgctcactcgaaagtttggcataactacaacacacatttccgcccacat

SEQ ID NO: 445895 - DNA, 95 bp, Homo sapiens
aaatgaagccactgattagcaatttaaagatcctctccaagggcacaagggatccaatttgtgccataactgcatcagataagatattgattgtg

SEQ ID NO: 445896 - DNA, 74 bp, Homo sapiens
cgaagaccaagccagccacaccgagcctctgatcaaaggcctgtcgtcccttcatcgaggtccaggtttgcctt

SEQ ID NO: 445897 - DNA, 101 bp, Homo sapiens
ctgggaggaagccatggactctaccaagtctgaacccctgaagggatcaccagaggatcacacctcgacacccaacccctgaaccccacacactctgccat

SEQ ID NO: 445898 - DNA, 75 bp, Homo sapiens
ggggcgcgatgcccaggccgcgccgccacgagataacgaaggaggcccaacttcattcaataaggagcctgacgg

SEQ ID NO: 445899 - DNA, 80 bp, Homo sapiens
cgacgggttggggatggcgtgcagcgcaaccacgagacggccttccaaggttccgccaggtgcggctgaaacaccggaag

SEQ ID NO: 445900 - DNA, 100 bp, Homo sapiens
ggaactatgcctgggtcaaccgctcttccatgaccttcttaacccgtcagacgcatcttctctccagactgccgatcccagaaagccaggtgatcaccat

SEQ ID NO: 445901 - DNA, 87 bp, Homo sapiens
gcctgtctgatgtctgtggaggaagagacggagctgctccttagagtgagaagccctaccactgcaactgggacggctgcggctgga

SEQ ID NO: 445902 - DNA, 74 bp, Homo sapiens
ggtcctgtttcgacagcgaacatgtcgcggcctgtcagagactaaggtgtcagtatgttcttcaagctgctctg

SEQ ID NO: 445903 - DNA, 98 bp, Homo sapiens
gcctctgccgcctcctcctcctcctcgtcttcggccggtagctccagcctctgccctgtgccaaggggctgaaagtctctgaagacctgatgacccag

SEQ ID NO: 445904 - DNA, 100 bp, Homo sapiens
cagcgccccatccacccagcaggtatgcagaatctgtgggagcaaaacattatcatacttcagccaaacagaacaaaggaattgaggaactctttcttga

SEQ ID NO: 445905 - DNA, 96 bp, Homo sapiens
tgagcatgatggaagaatccaaattggagaccaaattatagcagtgtttgatttcaccaccatagacttgacatctgagactgatgaaattccaga

SEQ ID NO: 445906 - DNA, 98 bp, Homo sapiens
atgtcatcaaagccctaggatattggaaaaactgattgcttatcaacgagaattccttgctttgaaagaacgtcttcgaatagctgaacacagaatct

SEQ ID NO: 445907 - DNA, 74 bp, Homo sapiens
gattgtgaggcctccccagccacgtgaaactgccatgggtgtatatggagccctcaccaaagccccagtgccag

SEQ ID NO: 445908 - DNA, 98 bp, Homo sapiens
ctggtcttcactgactttcagctagaagaaggatatgatttcttagagatcagtggcacggaagctccatccatatgcttagcagtgtctgcaaaaac

SEQ ID NO: 445909 - DNA, 99 bp, Homo sapiens
cgacaagccgctggcagccgcggatctcaccgccgctcagggcaacatgagtgagaatgaggaagaggaaatttctcagcaagaaggcagtggggacta

SEQ ID NO: 445910 - DNA, 100 bp, Homo sapiens
cttgctggacggaccgcccaaccccaaaagagccaaactcagctcgcccggtttctcggcgaatgacagcacagcgggctgacgcacgaggcacacagga

SEQ ID NO: 445911 - DNA, 100 bp, Homo sapiens
gaagggctggaggccccggcggctagatggcctgatatgaaggagtcacgcctcccgcctcccggagctgcccagtggctgccttgtccttcaagtgcag

SEQ ID NO: 445912 - DNA, 75 bp, Homo sapiens
ccacaatcttcaatgagtaaacatattcctaaaggaaggcagaggaagccacggccactggaccctggcgagggt

SEQ ID NO: 445913 - DNA, 75 bp, Homo sapiens
taccacactaagagttgaccagtcaattctcacaggtgagcaaagagaacatcactgacaggaggaatgtggaca

SEQ ID NO: 445914 - DNA, 100 bp, Homo sapiens
tccccatcatgatgtacagaaccaagtctcttcactaacttttgtgaatgatgtaaggattccggaacagacttatatcaccttgaaacttgaagataag

SEQ ID NO: 445915 - DNA, 100 bp, Homo sapiens
gaatcatgttgaagctaaacccatatgcaaagaccatgcgccggaacaccattcttcgccaggccaggaatggccattatgctgtgatgaacaaccccac

SEQ ID NO: 445916 - DNA, 100 bp, Homo sapiens
aatgatgtattttgtgatcgcagcgatgaaaggacaccatgtaaaattgaacctagtataaaccacatcctaagcaccagaaagcctggaaaggaagaag

SEQ ID NO: 445917 - DNA, 82 bp, Homo sapiens
ctgggatcggcccaaggccagttctccgcagtaccatggggcgcaagttggaccctacgaaggagaagcgggggccaggccg

SEQ ID NO: 445918 - DNA, 74 bp, Homo sapiens
gaaacaatggtaaatgtgccacatattcatgcaaggacagtcattttgtttactcattcagccctgttgcaggt

SEQ ID NO: 445919 - DNA, 100 bp, Homo sapiens
ggggttgtcctcacttctgtgcaacttcactaagtccatggaagaaggcgcagtcatgcaggaaaacctcagatttgcttcatcaggagatgatattaaa

SEQ ID NO: 445920 - DNA, 102 bp, Homo sapiens
ggacttcagaaatatgaatatgttttacatccaagaactacaggctttacttttgtggtagaccgtctaagagaagtgacaaagcataaatcatggacacca

SEQ ID NO: 445921 - DNA, 100 bp, Homo sapiens
tgagcttcggtgggatgaccagcagaaagtcaagaagacagcggaagctggaggagtgacaggtatttacttatgggatgtagaaggcagaaaatatttt

SEQ ID NO: 445922 - DNA, 80 bp, Homo sapiens
gggcgcaccgcggtgcggacccagcacgcctgggccgggggctgcagcatgatatccttggaacagaagatcttattgtg

SEQ ID NO: 445923 - DNA, 88 bp, Homo sapiens
ttgagagtgggaacatgacgcaggtgcaggtgtctcttctcgccctggcggggaagagtttatgtggccgaggcagacaagtggaatt

SEQ ID NO: 445924 - DNA, 83 bp, Homo sapiens
ctgagctgctccaggacttgggtggaaagaggcaaaacctgatgaattaatggattccaaattgagatgcgtatttgaaatgc

SEQ ID NO: 445925 - DNA, 87 bp, Homo sapiens
cttgattggggtcgtgtctgccacgttttcgctctgccagcaaattgtggctactaatttgccccctgaagatcaagatggctctgg

SEQ ID NO: 445926 - DNA, 98 bp, Homo sapiens
tgccatgaggcgaggctagggaggacctcacttccccggggtgtaataatgttaactgaggagcatattaatgaaaagtgccataaactgaaaaacca

SEQ ID NO: 445927 - DNA, 85 bp, Homo sapiens
atccattctcctgccacccccagacctcctcagctccaggccaaagaactgccaactctgaaagataatgatttcattaatgagg

SEQ ID NO: 445928 - DNA, 83 bp, Homo sapiens
gaccgcaattcgagaatcaaagggccgggagcgatggtgtggacactgccagcggctgcagccgacttggaatgacctgggag

SEQ ID NO: 445929 - DNA, 75 bp, Homo sapiens
tatcagctggggctggatgagtggatgcttcctttggaaattgcacttacaatctcaccattctcgactgtttgc

SEQ ID NO: 445930 - DNA, 83 bp, Homo sapiens
gtcggcggctcagttgtccatgaccctgaaggtccaggagtacccgaccctcaagggggatatgagactttctactcggaata

SEQ ID NO: 445931 - DNA, 101 bp, Homo sapiens
gttgcgatggcgcagaaaccccgttgacaaggcactgctttttcatgacggtccagccctgctgggagttttctgccacacagatttgcggaagaacctga

SEQ ID NO: 445932 - DNA, 100 bp, Homo sapiens
ttaaggaaagaattttctccttttggatcaattaccagtgctaaggtgaggaggtgttacttatccaggaaaaactagatggtataaagactcgttacgc

SEQ ID NO: 445933 - DNA, 75 bp, Homo sapiens
gtaacttttgatgatcatgatacagttgataaaattgttggttgtgtgttggatttgacatagatgaagacgcat

SEQ ID NO: 445934 - DNA, 100 bp, Homo sapiens
ggccggaggaaagcgggaagactcatcggagcgtgtggatttgagccgccgcattttttaaccctagatctcggtacagtatatcagaagtatgagccga

SEQ ID NO: 445935 - DNA, 83 bp, Homo sapiens
gtgaggttcagctgatgaagcttctgaaccatccacacatcataaagctttaccagccatcactggtgcaagctatatttaac

SEQ ID NO: 445936 - DNA, 97 bp, Homo sapiens
gaccagctcatgggcacggctcgggacggtgaagctttgttctaagaatatttgtttcatctagtttatgagtccaaatgatatagactgtaaatgt

SEQ ID NO: 445937 - DNA, 88 bp, Homo sapiens
gagaccaaaagtatgttgtaccttgtgacagaatatgccaaaaatggagaaatttttgatttagtacctcaagacaaactcttatgtg

SEQ ID NO: 445938 - DNA, 82 bp, Homo sapiens
ctccagcagccaagatggtgaagcagatcgagagcaagacgccgcaccaggctgcaggccagcccttcaagttcactatccc

SEQ ID NO: 445939 - DNA, 75 bp, Homo sapiens
ataatcaaggaaaccttttccgggtggggatctctgaaattactcaggaagccagttgagggaagttctccatga

SEQ ID NO: 445940 - DNA, 76 bp, Homo sapiens
ctcctgctcagtgtagcattaaggcccgccatgttcatagaggataaagcagtagacaccctggcttacctcagtg

SEQ ID NO: 445941 - DNA, 82 bp, Homo sapiens
aggcacagatggaggaggaatacctccgctcccctctctcagggatttggagtggtatgagaagtccgaagaaactcacgcc

SEQ ID NO: 445942 - DNA, 100 bp, Homo sapiens
ttcttgccagaaaggattctaataactcggtgtcaaagccaagacataaactcaaccccttctcttccaaaaggccggagcctcaacagaaagctccttt

SEQ ID NO: 445943 - DNA, 83 bp, Homo sapiens
ctagaactgaacttgaaacacttcaaagaattacatgaatgacagtcttcgaaccaatgtgtttgttcgatttcaaccagaga

SEQ ID NO: 445944 - DNA, 83 bp, Homo sapiens
tttcagcagacattgattatctgtcccccagctattcaaggccacacgtgtctacacttagcctctatccatggctacctggg

SEQ ID NO: 445945 - DNA, 59 bp, Homo sapiens
tccaccatgtgcttttgcacatccatgaccaggctgaggcccgcaggtctaagaccaag

SEQ ID NO: 445946 - DNA, 101 bp, Homo sapiens
tgaccaatactgctgctctgacgtgctgaagaaatttgtgtggagcgaggaaaggtgtgctgtgcctgaggccaggctctgtgtgctccgggatggagcag

SEQ ID NO: 445947 - DNA, 101 bp, Homo sapiens
ctatgcagaaaatttatcaaacatttgtagctttagcggcacaacttcagtctattcatgaaaatgtaaaggatgttttagaagaatgtatgtctcttccc

SEQ ID NO: 445948 - DNA, 84 bp, Homo sapiens
tggagcctcagttggaagcagccgatccagcctgcggagcctgtggggcagtgggatgccatcactgaaatggatgaacataat

SEQ ID NO: 445949 - DNA, 73 bp, Homo sapiens
tgggatctcagcacagagacaccacatttcacatgcaagggaattagcagcaaaagtggttcagatgttttat

SEQ ID NO: 445950 - DNA, 83 bp, Homo sapiens
ctgaggaggccaccgaagctcggggacgcgaggagccggcgtggccctggatgtggacgagtgctcactagcagaaaaaacct

SEQ ID NO: 445951 - DNA, 82 bp, Homo sapiens
gtcatcggaagtggtgccttcagcacaggtaaaaatgttgtacatcagctctcagtaaccctagaagacttatataatggtg

SEQ ID NO: 445952 - DNA, 90 bp, Homo sapiens
ggaggaggtgaagcagcatgcccaggaactctgggctgcctacaggcgtggtgaccaagatgaagatgcagaggaccattgtcatccgcc

SEQ ID NO: 445953 - DNA, 98 bp, Homo sapiens
aaactatggcttacaacatcacacccctgcgcagggccacagtggaatgtgtgaaagatcaggaggccactgtctgcagctcccgtgaagatgtccac

SEQ ID NO: 445954 - DNA, 100 bp, Homo sapiens
gccgcgggctccgcgcccggccggacccgggcccgagactcttgcaagctggatgccctctgtggatgaaagatgtatcatggaatgaacccgagcaatg

SEQ ID NO: 445955 - DNA, 83 bp, Homo sapiens
tttctggaaacaaatgggaacaaaaagtatactcttcgcatactggggtggtccaggactccgaggaccaaagggccagcaag

SEQ ID NO: 445956 - DNA, 75 bp, Homo sapiens
ccggggtgtaataatgttaactgaggtgcaaggaatatgtagagataattccactatcaaagactgtatatacat

SEQ ID NO: 445957 - DNA, 74 bp, Homo sapiens
cagattcgcagtggtcgcttcttctccttggacataagcagctctatgaccaatagcacagctgccagtagacc

SEQ ID NO: 445958 - DNA, 74 bp, Homo sapiens
caagcagcgacgccagcggcggagaaccgacgaaagtgatgatgatgatgattttgatgatgaggaagctgaag

SEQ ID NO: 445959 - DNA, 90 bp, Homo sapiens
tgtttgagtccttcaatgttccaggcttgtacattgctgtgcaggacacagcattgttggttttgccatgtactattttacctatgaccc

SEQ ID NO: 445960 - DNA, 83 bp, Homo sapiens
ataaggagatcatagcagagtacgatactcaggtcaaagcacctcaatgacctgaagaaggagaacttcagcctcaagctgcg

SEQ ID NO: 445961 - DNA, 96 bp, Homo sapiens
tcaccatgctcaaagtgaatatattaagctctggaggctgccatcgagaacctcaatgaagccaagaactattttgcaaaggttgactgcaaagag

SEQ ID NO: 445962 - DNA, 75 bp, Homo sapiens
aaggcaagtgggactttgccttctcagcccaaagtcagcgaaaatctctgaaggaaatggaaacaccgttgtcag

SEQ ID NO: 445963 - DNA, 99 bp, Homo sapiens
ggtgtcttcgcactgtgcatacaggacgggtccatccatcgcataagagcaaagaatactattgttgccacaggggccgatggtgtaatgaggacaatg

SEQ ID NO: 445964 - DNA, 100 bp, Homo sapiens
tttgacttccagaaagcttacaagctgactgaagaggagggtaaagcatcaagtcgaatatttgggtctgaaagagaacattcgagtgagaagagctggc

SEQ ID NO: 445965 - DNA, 98 bp, Homo sapiens
cagcaagctgttcaatgaggagattggtgctgaagacatggacggcttccaggcagacacggaggaggaggaagaggaggagggcgactgtatgatcg

SEQ ID NO: 445966 - DNA, 58 bp, Homo sapiens
cggcagaggattcgctcccagagcagctgcggccaggacttctccaggcctcggccgc

SEQ ID NO: 445967 - DNA, 99 bp, Homo sapiens
gaaaaccagttattgaatatcaagaggaggagttgttggtggtcttcgagggatagcacgaggtggtctgacaggactaacacttaccagcctctatgc

SEQ ID NO: 445968 - DNA, 132 bp, Homo sapiens
tggatcctgagtacatcgaccgcattgccatacctgatgcctctaagctgcaattcatcctagcagatggctgctcctgtcccgtgggcctgctgtgctgtgcttgccgccgccgccgcagttgtctacgcc

SEQ ID NO: 445969 - DNA, 101 bp, Homo sapiens
agaatatgactctctgcctgaaaatagcgagacagtcaccaggagactaaagtccatcaaaaacatccagaaaattaccaagtctatgaaaatggtagcgg

SEQ ID NO: 445970 - DNA, 90 bp, Homo sapiens
aggtgctaaaattgaaagtggactatttaatagctagttgtcactcagcccagtccatcagtttctcagcccagtacttctcagagtgaa

SEQ ID NO: 445971 - DNA, 100 bp, Homo sapiens
ctgctgcagctgctgccgccgccggaggaaccttgatccccgtgctccggacaccccgggcctcgccatggcgatagatgatgaggaagatcgcttccat

SEQ ID NO: 445972 - DNA, 75 bp, Homo sapiens
gcgtttgaaatctcgccgtcggaggcttattgtgtaacagaacctggagcaggctctgatgtagctggtataaag

SEQ ID NO: 445973 - DNA, 88 bp, Homo sapiens
ctccaaactgcatttccagccctacagctcaaatatctattggtggaacgagaatgcctacacgcagccacaggaatccagtttccat

SEQ ID NO: 445974 - DNA, 75 bp, Homo sapiens
ctggccagtgggccaccgacctctacagtggctatctggcctttgtttgattatggattggatatgtctacttct

SEQ ID NO: 445975 - DNA, 74 bp, Homo sapiens
ctgcgctggggccggaggcgggcgaggaaggaaggatgcctgtggccctcggagagcacagtgtcaggcaacgg

SEQ ID NO: 445976 - DNA, 100 bp, Homo sapiens
agcaaaatataaggagtggttgccacatcttctggttgctggatttgacccactgattctactgtgcaattcttggaagtcctggctgagcaaggttgga

SEQ ID NO: 445977 - DNA, 73 bp, Homo sapiens
ctgagcccaaggccaaggaccccttcgctcacctgcccaagaggtttgatgacaaatacaccttgaagctgac

SEQ ID NO: 445978 - DNA, 100 bp, Homo sapiens
gctcaccccgcggccgcaccttcccgccttctcagggatgatggcgccacttcctcagtttcggcactcaagcgcctggaacggagtcagtggacggata

SEQ ID NO: 445979 - DNA, 100 bp, Homo sapiens
cttacagggaagcatctctgtgcattcagaagagaagaacatttctgagtcctcacgaaactatttcagtgcgttgtagaagacaagaactcaaaggtgg

SEQ ID NO: 445980 - DNA, 90 bp, Homo sapiens
gagaccatggagaccctcacggagctgggcgacgagctgaccctgggagacatcgacgacctcccaggagctacactgcctgatgtgggc

SEQ ID NO: 445981 - DNA, 73 bp, Homo sapiens
ttcagcctcaagacggtgctgctcttggccgaccagatgactctgatgccagtatggactggagatgatggga

SEQ ID NO: 445982 - DNA, 101 bp, Homo sapiens
gacgaaataccaccggaactggtcgaatgaggcacctaaaaattgtataccgcagattcaggtgtgaccaattcagtgaaaggaacgaatgcgattctctg

SEQ ID NO: 445983 - DNA, 90 bp, Homo sapiens
ctgcaagcaggcaacctgaatacaggctcagcaacagcctcaccaaggactccatgaatatcaaagcccatatccacatgttgctagagg

SEQ ID NO: 445984 - DNA, 74 bp, Homo sapiens
tgtcttcaatgctgttaactggattgagtccagctcttgggatgggtgcagacatgaatggattaccaacaaaa

SEQ ID NO: 445985 - DNA, 99 bp, Homo sapiens
accacgaccatcaaatccgtgtcggagtccttacagagacaaagcatggaggacacaagaatgggaggaaaggcggactctcaggaacttcattcttca

SEQ ID NO: 445986 - DNA, 101 bp, Homo sapiens
tgtggagctcaggggccgctctgccgtggagctgggtgctggcacggggctggtgggcatagtggctgccctgctggcccccaaatacatcaagatgtttg

SEQ ID NO: 445987 - DNA, 100 bp, Homo sapiens
caaagagactgcagatgccatcactaaagaaggactgtacatcagaggaagccaaaagccagctggaatacttcctgaatacagttttaatcttgtttgc

SEQ ID NO: 445988 - DNA, 75 bp, Homo sapiens
gggccctggccctgacccagacctgggcggatgatgttgaatttgaagtatcatcggaccgacggactgggaaac

SEQ ID NO: 445989 - DNA, 90 bp, Homo sapiens
tcaaggatcttgagactcaaccccatatgctggtcctggactcccagaagcgagtcttctcctggggctttggtggctatggccggctgg

SEQ ID NO: 445990 - DNA, 83 bp, Homo sapiens
aacctcttttccatcatgtatactggagcaccgtggaaaacaaagtgcatgatgaagtcttcagactgtgtcataaagcatgc

SEQ ID NO: 445991 - DNA, 90 bp, Homo sapiens
agttaaagctcagactaaagcccctcccaaaccaggctgtgagaagacatttatcacagtgagtgccctgttttcccataaccgagccca

SEQ ID NO: 445992 - DNA, 75 bp, Homo sapiens
acaaagttctctcgatcagggcatacatctttcttcgacaaagggcgatgacccaggatgcagccaggggccacg

SEQ ID NO: 445993 - DNA, 98 bp, Homo sapiens
actgacgcagtcactgcagcactggtggaacttgaggttggggcaaacacaatggataatcctttgttgaaatacagtgcaaaggattacttcttcaa

SEQ ID NO: 445994 - DNA, 88 bp, Homo sapiens
ggtaacaagatggcgaccgagacggtggagctccataagctaaagctttacaacaaatacccagatgctgtggccacatggctaaacc

SEQ ID NO: 445995 - DNA, 75 bp, Homo sapiens
caccgcgaccagggccgcaggaagacgcacatttgacattgtgcagcaaagaaatggttatggagaagcccagtc

SEQ ID NO: 445996 - DNA, 82 bp, Homo sapiens
ccggtgcccgaggaggcagccaagctcatggcctgccactgcgtgccttcctgcctgacacagctcacttcaagaagtgcac

SEQ ID NO: 445997 - DNA, 100 bp, Homo sapiens
tatcaaacaagaagtcgtcaccccagacaacatgtgcatggggaggaccagtcgtgagactctccaacatgtgccttctgaccatacaaatgaaacttcc

SEQ ID NO: 445998 - DNA, 75 bp, Homo sapiens
tgggcattcctgaacttgtcaatcaggctgcaaggtgtgactgttgtaaatctcaaggaactcttaaagagcgag

SEQ ID NO: 445999 - DNA, 74 bp, Homo sapiens
ttcggaccatgccacccattaacctgcaagagaagcaggtcatgtacaatgccagggagtactacgaccacctg

SEQ ID NO: 446000 - DNA, 50 bp, Homo sapiens
gcgtcaatcagagcgtcctgtgcggatcttttgccagaaatgagggcata

SEQ ID NO: 446001 - DNA, 80 bp, Homo sapiens
ttggaccaaaggcctgtgtgctgcagaacccccagaccatcatgctcgggacgtgtacgaggaggccatccggacagtga

SEQ ID NO: 446002 - DNA, 82 bp, Homo sapiens
tgagacggtgtcccgccgaaaggatttaggtcctgaatatgaaggtatatttaacacttcattgcagtggatcttagaaaat

SEQ ID NO: 446003 - DNA, 74 bp, Homo sapiens
attgaattcattggagaatgaatgctgttctgaatttgggcatatgtctctcttttcatgcggcatttatgtga

SEQ ID NO: 446004 - DNA, 96 bp, Homo sapiens
cttccatccgccagctgccatgagcgagcgcctccgtcccagggcgccctgcgtccggcagaggaggcgagcatcccgctcaggtgatgaggaacc

SEQ ID NO: 446005 - DNA, 78 bp, Homo sapiens
gccatgcaaggctggcgcgtctccatggagaaatctcctgcaaagaagctgagccatgcaattagtaaatctttgggg

SEQ ID NO: 446006 - DNA, 51 bp, Homo sapiens
atgatgaagacatccggaagaagggccgttgctccagggagaactgcaaat

SEQ ID NO: 446007 - DNA, 89 bp, Homo sapiens
ggcggcaaaggagcagccatgagggccgggcccagtcaccgaccgacagattgattcactttggagctgtaagtactgatgtattaggg

SEQ ID NO: 446008 - DNA, 98 bp, Homo sapiens
cacttttcaaaatgctttggtgggaagaagtagaggactgttaatgctgcctttttatatggtcttggtttggtctacttccattataatgcatttca

SEQ ID NO: 446009 - DNA, 100 bp, Homo sapiens
gcctgtccaggggctgaatggacacaggtgtcagcagggccacctggtaaaggtatggagagcaaagatggtcgacctttgccagcaagggataaacgcg

SEQ ID NO: 446010 - DNA, 51 bp, Homo sapiens
cacagtgttaacaatgcatccacagagatctctctggttaataacttcttg

SEQ ID NO: 446011 - DNA, 99 bp, Homo sapiens
cttactgctggcttattcatgtatgttgctctggttgatatgatggcaggatggtggctggcaaagtgttgatggcaaagcaagaaattgttgaatgtg

SEQ ID NO: 446012 - DNA, 74 bp, Homo sapiens
ctcaacaaggacctaaacccttttacgcctagaccatggcgagcccagggaaagacaattatcgaatgaagagc

SEQ ID NO: 446013 - DNA, 75 bp, Homo sapiens
gccctgtcggccaacagaaagtgctgggtaggccaggtttcagcatcgcagacaagaagcgcaggacaggctgca

SEQ ID NO: 446014 - DNA, 75 bp, Homo sapiens
gctgggcacactccatcacgcagcagaatgtggacacaacatttgcctgcaacaaggacagcggccagtggcact

SEQ ID NO: 446015 - DNA, 89 bp, Homo sapiens
gcaaacagaatcgcgtttggctgtgctgatggcgggtgaaaaagttgagaagccagatactaaagagaagaaacccgaagccaagaagg

SEQ ID NO: 446016 - DNA, 80 bp, Homo sapiens
ggccatccaggaaagcctgcagccctctgggtgaagaaggtgaatacagtgaagaggaaaactccaaagtggagctgaaa

SEQ ID NO: 446017 - DNA, 82 bp, Homo sapiens
cgcgcagccacctggagaaggcggacttgatcatcttccctgacgactgtgagttcaagcgggtgccgcagtgccccagcgg

SEQ ID NO: 446018 - DNA, 101 bp, Homo sapiens
cttttttcgaaagctgggtttcccgggagatcccaggcggtgacagagtggagccatggctagagggagaagaaatgggtgaccgttggtgacacatccct

SEQ ID NO: 446019 - DNA, 75 bp, Homo sapiens
gctgaataacccttttaacgagtattccaaatttgatggcaaggtggacttacagtttctggctactactggtgg

SEQ ID NO: 446020 - DNA, 76 bp, Homo sapiens
ccgacatcgtgtgccgctgccagcttgtacctccttttaaacctcaagtaacatctgagacagatactagatattt

SEQ ID NO: 446021 - DNA, 101 bp, Homo sapiens
aataggaacctctacttccccaccaaaaagtggcacacactggagagatatcaggtttggacagaggagccaaaggccaaatttccactttcagcagtttt

SEQ ID NO: 446022 - DNA, 50 bp, Homo sapiens
tctgaatgttgtgaccactaatttggtacaccaggggttggaaaaaccac

SEQ ID NO: 446023 - DNA, 90 bp, Homo sapiens
tcttctctacagaagagcttctcctcatcaactggggatgattacagttcttcctaaaaaagacaaatttacatgtattggagaccagac

SEQ ID NO: 446024 - DNA, 90 bp, Homo sapiens
gaacttgcagttgaaggagtataacacaggtcacacagcggcagtgataaagagcacagggatgtggagagatctcaagaacaagaatct

SEQ ID NO: 446025 - DNA, 91 bp, Homo sapiens
caacattttgacttggcttcaactactattacaaatattccaatgaaggaactgcaagcacatgttgaccagataactgaaatggcagcag

SEQ ID NO: 446026 - DNA, 50 bp, Homo sapiens
cctcgccaaagcagagaaatagacggggaggtttactgcatcgacgcgcg

SEQ ID NO: 446027 - DNA, 82 bp, Homo sapiens
cggaatcccgcgcgctgcccacgattcgcttctgaggaggaacggctgaagctcccaattctctccgaagaacaagtaatca

SEQ ID NO: 446028 - DNA, 93 bp, Homo sapiens
tgacgacgggcgcccccgagccgccgccgctgtccggagccccacagagggattttatcatacaaactggcgatcctacagggactggccgtg

SEQ ID NO: 446029 - DNA, 101 bp, Homo sapiens
cgtcatccgcggctacgtgggcaaccgggcggccacgttcccgctgcagacctgcctagagctggaacgttacctccagagcgagccctgctatgtttcag

SEQ ID NO: 446030 - DNA, 50 bp, Homo sapiens
gtttgaacctcagattaatgcggaggatccaaaattaacgggacaggctc

SEQ ID NO: 446031 - DNA, 88 bp, Homo sapiens
cgaccacacggccggggcgctagcgttcgccttcagccaccatggggaatgggatgaacaagattacttctctaacaggatcaccagt

SEQ ID NO: 446032 - DNA, 75 bp, Homo sapiens
ctgccaaaattatcaacaccaaaaagctttctgctaggggtgctgactgggttacttttttaaacactaggaatg

SEQ ID NO: 446033 - DNA, 98 bp, Homo sapiens
tgactcagcaggaagatatcaaactgtatgatatggcagatgtatgggtgaagatccaagatgttctacagtgcctgaagacctctcattagaagaga

SEQ ID NO: 446034 - DNA, 98 bp, Homo sapiens
tgggatctgatcacacccacagcggatggccagactcgagccttggtcaaccattccgatgtggaagatgtgaaatttgtcatcaattatgactaccc

SEQ ID NO: 446035 - DNA, 95 bp, Homo sapiens
ctcggagaagatgtggtggcttccgtttgttggtggaggaggtggcaggcctcggcgatcctcttctcatgtagacggctttcttccaagtggtg

SEQ ID NO: 446036 - DNA, 50 bp, Homo sapiens
gccgagtggtctaaggcgccagactcaagcacttttctgtagaaggtcag

SEQ ID NO: 446037 - DNA, 82 bp, Homo sapiens
aagcagccgatccagcctgcggagcctgtggggcagccagatgaaaactcgctggatttttcctcctgtatgttacggcctg

SEQ ID NO: 446038 - DNA, 75 bp, Homo sapiens
tggaaaaccagttattgaatatcaagaggaggagttgttgatggatgcatgcagtttgtcagaacttaaatactg

SEQ ID NO: 446039 - DNA, 96 bp, Homo sapiens
cagatatcaatgctgtcagtgacacagagtctgggatctaataattcagtcattttggatggactaaaaagaagacagaattttctgcaaaatgtc

SEQ ID NO: 446040 - DNA, 90 bp, Homo sapiens
cttcttcaatggaaaagaactgaataagagcatcaaccctgatgaagctgttgcttatggtgcaggacacagatttagacttggagatgt

SEQ ID NO: 446041 - DNA, 100 bp, Homo sapiens
ctggccatcacagatcccgacgtgatcagaacagtgctagtgaaagaatgttattctgtcttcacaaatcgaaggtgagggccccaaggctgttgcagct

SEQ ID NO: 446042 - DNA, 100 bp, Homo sapiens
ctccatggcagcagcgcgggccagagcgcagcgccgagcgcggcccgggcgccatcgagccttggcggcggacgtgcagacttgcacacctacccctgtg

SEQ ID NO: 446043 - DNA, 100 bp, Homo sapiens
gtgaaggtccggggcttgccctggtcttgctcggccgatgaagtgcagaggtttttttctggagagcactgtgaggtggatgcccgctcaggccgctgtg

SEQ ID NO: 446044 - DNA, 146 bp, Homo sapiens
cgcgaagtgaagctgtgggacacgcggttcttctccagcgccctggcctccctcaccttggacacctcgcttggattttgcaagaacgaggctcaaggatgtgagggacacagtattgacagctgaagaaatgatttacgttttcc

SEQ ID NO: 446045 - DNA, 101 bp, Homo sapiens
cctcatcaccatccacgaccgaaaagaattcgctaaatttgaggaagaacgcgccagagcaaaatgggacacagatgatgatgctgaagctatccttgctg

SEQ ID NO: 446046 - DNA, 90 bp, Homo sapiens
ctggaaatgaaaatggagagttctacctacgagaaattagaaatatcttctggaaagctggccagatttgcagatggctctgctgtagta

SEQ ID NO: 446047 - DNA, 82 bp, Homo sapiens
ccaggcctcagaggaggagaaaggccggagccagccgaggccgatacaaagcaggggaaaaggagccagatcccaagacgtg

SEQ ID NO: 446048 - DNA, 100 bp, Homo sapiens
ctttgcggagagctgcaagccggtgcagcagccttcagcttttggcagcatgaaagttagcagaaccttgggtaatgtggaacatgggaaccaatgtcag

SEQ ID NO: 446049 - DNA, 100 bp, Homo sapiens
gctgggcctgcaggtctctgtcgagcagcggacgccggtctctgttccgcaggatgaagaagaagatggtggtcttgaagccttcgatgactttttccct

SEQ ID NO: 446050 - DNA, 100 bp, Homo sapiens
caagaacgtgctcagcaaccggcccgtgcacgcctacaaattcttctttaagtccatggaccaggacttcgggttctctacttttagagtcgaaaataaa

SEQ ID NO: 446051 - DNA, 115 bp, Homo sapiens
gctgagctgggagcactccattctgcctgggtgacaatgccttggtttcaacactatcggaatggactactataaagctttggaagatgcagatgagaaggttcagttggcaaac

SEQ ID NO: 446052 - DNA, 75 bp, Homo sapiens
gtcatcgtcgcggtcctgctgccaaatggcaccttgaaaattatcgaccggaaaaagcacatatttaagctggca

SEQ ID NO: 446053 - DNA, 75 bp, Homo sapiens
gacttggtttgcctatgtcaagatcacaggtgacctaccagttgaagattccgtgtactgctttatgcactgttt

SEQ ID NO: 446054 - DNA, 75 bp, Homo sapiens
gccccacctccggccactgggacggcggcgcggagaaggcagaaacgttcctggatccgaacactgccccctgac

SEQ ID NO: 446055 - DNA, 74 bp, Homo sapiens
ggatctctggagtgttggctgcatatttgcagaaatgtttcgtagaaagttttggtatcaggatgatgctggcc

SEQ ID NO: 446056 - DNA, 90 bp, Homo sapiens
gctcactccctttcctctgctgccgctcggtcacgcttgagcagcccgacggccatggaggctgaagagacgatggaatgccttcaggag

SEQ ID NO: 446057 - DNA, 83 bp, Homo sapiens
gttaaagctggtctgttctaactgagaccttcacggcatggtgcaactcccacctgcggaaggcaggcacacagatcgagaac

SEQ ID NO: 446058 - DNA, 100 bp, Homo sapiens
ctatttccagccagagttcaaattactgagcttcaaacaaaccactgccagattgaaaaggaagatcaggccaaccccaaagaagaagtgaccaaggagg

SEQ ID NO: 446059 - DNA, 97 bp, Homo sapiens
acgggttcagttcgtcatggggctgtttggaaagacccaggagaagccgcccaaagaactgtgccgcagaatggaattcggcattgttcctacacag

SEQ ID NO: 446060 - DNA, 100 bp, Homo sapiens
gaaaataatgatcgattcagtagaaggtcaagcagttgaacattatgctatggaagataaacaacatggagaatttgctttattaacaattgaggaagaa

SEQ ID NO: 446061 - DNA, 99 bp, Homo sapiens
catgagccccctgaggccccagaactatcttttcgtgatccgtatgtgaaactttcattgtacgtagcggatgagaatagagaacttgctttggtccag

SEQ ID NO: 446062 - DNA, 100 bp, Homo sapiens
ttcctgggttcacgccattctcctgcctcagcctcctgagtagctgggattacaggcacccgccaccacgcccagctcctgcttcaggtgcagaaataca

SEQ ID NO: 446063 - DNA, 102 bp, Homo sapiens
cagcaagaggagcagtccagcggcatgaccattttcttcagcctccttgtcctagccctgattgagtccctcaaccagaaaccacagactgccggtgaccaa

SEQ ID NO: 446064 - DNA, 122 bp, Homo sapiens
ctggatgtggaattctccgtccctttccagggagggaacaaagcccacaagcaccggctactgctttacaaaaccagaactgatcttcacattggaacaaggagaagatccatggttattag

SEQ ID NO: 446065 - DNA, 120 bp, Homo sapiens
cgggatcgtgaccgagaccgtgaccgagagcgtgaccgagagcgcgaatatcgtcatcgttagaagagatcctgaaggagctagacgagtgctacgagcgcttcagtcgcgagacagacg

SEQ ID NO: 446066 - DNA, 99 bp, Homo sapiens
ctttggttacctatgtacctgttaccactttcaaaaccttgcccctcttgctcgccttgaaaatggaaaagatgctcgcaggctgctttctgctgatcc

SEQ ID NO: 446067 - DNA, 75 bp, Homo sapiens
ttactgtggatctggattctaaggcaacacttccttgaagaaacaagcttacagacccaacatgagtgaagtttc

SEQ ID NO: 446068 - DNA, 50 bp, Homo sapiens
ctttgacactagtcttgaatacaaagatgggttttcaccaagttgcccac

SEQ ID NO: 446069 - DNA, 100 bp, Homo sapiens
tcctgctcgatctcagagctcagacacagagcagcagtcccctacaaggagacctgtcttctggttacctggatgatactaagcaggaaacagctaatgg

SEQ ID NO: 446070 - DNA, 75 bp, Homo sapiens
tcctcttttccttggagagcctgctatgattgtgccaaggacttgaatggatgatgtcacgacttaagattagat

SEQ ID NO: 446071 - DNA, 75 bp, Homo sapiens
tcatttcttacagttatggaggctgagaagtccaaggtccaggggcataacagattggacgactgattattggac

SEQ ID NO: 446072 - DNA, 95 bp, Homo sapiens
gacctgcgagcgccgcccgggcatgcgaagccgtccctccccgggacattgacaagcagtacgtgggcttcgccacactgcccaaccaggtgcac

SEQ ID NO: 446073 - DNA, 75 bp, Homo sapiens
atctcccttcatgtctgggtcatggcactccagtgcacagaagctcttcagtgccctgagccagcctgctgggga

SEQ ID NO: 446074 - DNA, 82 bp, Homo sapiens
tcctggcggtttttattaaggctgttcatgtgaaagcggacaaggcaaaatctcagcaagttcggacctctagtacaataag

SEQ ID NO: 446075 - DNA, 80 bp, Homo sapiens
cagcgccttcctcaacgacgcggacatggtcatgagctttgtgaacctgggtcaccatggctgaccgggctgctgccgaa

SEQ ID NO: 446076 - DNA, 100 bp, Homo sapiens
aaataaaggatagatgctcactggatgtctgagaactttgagagaccgaaaaagaaggacgtatgctctacaagtgaatggtagtgtctagaaagggtat

SEQ ID NO: 446077 - DNA, 98 bp, Homo sapiens
ccccgcaggatggctgcccgggtcttctacctgctcctggctttcaccagtcgcttaagtggcaaccgtggggtccagtatactcgccttgctgtgca

SEQ ID NO: 446078 - DNA, 90 bp, Homo sapiens
cccaccgatgcttcaaatttaacaggtgttgctctcttgccattcgtggatgagcgaaggctacgagctgccctagaagaggtataccca

SEQ ID NO: 446079 - DNA, 75 bp, Homo sapiens
ggatcctgctcctctgggttgaaacccgggcgccgccaagatgccgaatctgaattatccagaacagaaagttgt

SEQ ID NO: 446080 - DNA, 135 bp, Homo sapiens
agatggaacacggctccatcatcacccaggcgcggagggaagacgccctggtgctcaccaagcaagatagttttgtgccagaataatatccataatcaggcccatatgaacagagtggtcacacacgagcttatt

SEQ ID NO: 446081 - DNA, 98 bp, Homo sapiens
atgcatattcaaaaaaactggaagaagacgtaaagcaggctaccagcaattttgagaacttgcaaaaacagcttgcaaggaaaatgaagcttcctatt

SEQ ID NO: 446082 - DNA, 100 bp, Homo sapiens
ctacctcctcacggctcttcccggcgctctcctggctcccttctgccccagctccgtctcggcggcggcggacgtatgaccttagcagacattgaacgga

SEQ ID NO: 446083 - DNA, 51 bp, Homo sapiens
gagaacaacctctctgaagaaggcaacagagatgcttatttttggaaagaa

SEQ ID NO: 446084 - DNA, 100 bp, Homo sapiens
gggaccgcttgcagcggggacgcgaggacccgggctgggctttcctcacccggaaacatgattcccgtgacagaattccggcagttctctgagcagcagc

SEQ ID NO: 446085 - DNA, 74 bp, Homo sapiens
gctgctgggcacccacggagcctccggggctggcgttgacccggacgacacctataatgagaccccctacgaga

SEQ ID NO: 446086 - DNA, 83 bp, Homo sapiens
gaaggtggcactggccaagaagctcctggcaaaactgcgctttctggctgaggagtctttctctaatacacagaattctagga

SEQ ID NO: 446087 - DNA, 100 bp, Homo sapiens
gtccactgcgggccggcgaaagctgtggtgatcgccgctcgggaatgcgggcgtgaagggtccgagttgccgcccagcggggaggagaccccaggacgcc

SEQ ID NO: 446088 - DNA, 91 bp, Homo sapiens
ccatgccgctcctaagcctgcacagccgcggcggcagcagcagtgagaggtcactatcatatgacaaaggctttgccgcagttcatcttcc

SEQ ID NO: 446089 - DNA, 75 bp, Homo sapiens
acatgctcagcaggagcttcatcaacgatatatgtcagatctaaagctgatcctggagaaactaaaaccttctgc

SEQ ID NO: 446090 - DNA, 75 bp, Homo sapiens
tttaattttagggtcctttatatagaagggagagagccgtgtaaagccagtggaatatagtcagatgtacagtta

SEQ ID NO: 446091 - DNA, 98 bp, Homo sapiens
tactagtacgactggcgggttgacctcagtctcctggagcttccagccagagggggccgacactactgtgtcggccaactgccaaatagccatcttgt

SEQ ID NO: 446092 - DNA, 74 bp, Homo sapiens
tgacagctcattcacatggctagtgccttgaataactgaagtgaagtgatggactccgatttggagagtagtaa

SEQ ID NO: 446093 - DNA, 100 bp, Homo sapiens
tctttcagctatggaggggttgatccttacatgtgggaaccccaggagcttgaaacaccgtgctggacagccagcgtcaacaaaagcattatggaattac

SEQ ID NO: 446094 - DNA, 53 bp, Homo sapiens
cccacccgcctgcccgccatgtctgctggagccagttctgcttctcggcaagg

SEQ ID NO: 446095 - DNA, 98 bp, Homo sapiens
tggccatggtcagcgtgaacgcgcccctcggggctccagtggagagttcttacgggtatttgaagtataccatacaactgttttgaaaatccagcgtg

SEQ ID NO: 446096 - DNA, 75 bp, Homo sapiens
ctacgacaccggcgaggaacttggcagatcagaccaaacattgtctggcttgcactgtaaaactagttagctgaa

SEQ ID NO: 446097 - DNA, 75 bp, Homo sapiens
cggcagccttgcgctgctctaatggtccggacttccgtgtggaaagcaggcaggatgggagagtcgccgatagaa

SEQ ID NO: 446098 - DNA, 100 bp, Homo sapiens
caacgaccgcaaccgcatcgtgctgcctttcagtttcgcctggccggtatctcagcgtttgagtcagccaggagtagcaataggtttggcttggactccc

SEQ ID NO: 446099 - DNA, 90 bp, Homo sapiens
ctggccgttgctgtggagacgcctgaccctggtgggcagcagtgggaccattctgaccacaatgcctgtaatgatggggcaagagaaagt

SEQ ID NO: 446100 - DNA, 74 bp, Homo sapiens
gattactgcgagaacaactacatacagaacatacatatgatagttgagaaagacacatattctgatcatgaaga

SEQ ID NO: 446101 - DNA, 89 bp, Homo sapiens
caggatgctcgccatctatgatggctttgacggcttcgccaagggccaggaattgcttacttaggaggtgtgtgcagtgctaagaggaa

SEQ ID NO: 446102 - DNA, 98 bp, Homo sapiens
ctggcaagaaggatcgtaacaacacggaagtggagaggttttcagaggtatgcccccacctgttccacgtcctggaattcctccaatgactcaagcac

SEQ ID NO: 446103 - DNA, 100 bp, Homo sapiens
gagcccccgacagaagagagagcagaggtgtttgtcagggcagggctgaacacaggccaacgacggcacgcccatatccatcggggacagcatctttgtg

SEQ ID NO: 446104 - DNA, 100 bp, Homo sapiens
aacactcccaaccgcacctgggactgcgtcctggtcaaccccaggaactcacagagtggattccgtgagaaagatcagtctaaagaaaaggagaagaaag

SEQ ID NO: 446105 - DNA, 75 bp, Homo sapiens
cggcatccggctcccgcccgtcttcaggccacggaaaggtatgatatatttgatccaagacagtccattccagtc

SEQ ID NO: 446106 - DNA, 100 bp, Homo sapiens
ctagatttccaagcactagaagaaactacagaatatgacggtggctataccagggactctgttctgattagcattcctctgaatattgatttgctgaata

SEQ ID NO: 446107 - DNA, 100 bp, Homo sapiens
catatctgcaaaatgacagatgtctttgaagcgagtctgacagtgacctagagcctgtgggggcgggaattcagcatctccagaagctgtcccaagagct

SEQ ID NO: 446108 - DNA, 100 bp, Homo sapiens
gatctacgtcatctcagggcagttcctacagatgaagcaagagcttttgcaggagccagtgcatcaatcagatgaaggaggtgaaggaacagtgtgagga

SEQ ID NO: 446109 - DNA, 98 bp, Homo sapiens
cagcaaaagaaggagggtcctctcagtgattaagtgcatgcaagatatgggaaatactaaagcaagactactctatgaagccaatcttccagagaact

SEQ ID NO: 446110 - DNA, 101 bp, Homo sapiens
gctcagtgcttccagcagttcccagaaggactcttctatgagctctagaggacaaaatcccagtccttggcacaaactcaggaaatggaagccggagtctg

SEQ ID NO: 446111 - DNA, 82 bp, Homo sapiens
cggggggtggggtcccgtggcttccccctgcgcctccaggtgtccctggccagtgtccttccacctgtccacaagcatgggg

SEQ ID NO: 446112 - DNA, 50 bp, Homo sapiens
ccgggacagcgctggtagggagtcaggtgcccagtcccctggaaggcagt

SEQ ID NO: 446113 - DNA, 75 bp, Homo sapiens
aagactcaggacggacaagcacagtcttcggaagacaatgcagatcttcgtgaagactctgactggtaagaccat

SEQ ID NO: 446114 - DNA, 98 bp, Homo sapiens
gtcggacggggaggaggagcaggagctggaggaggagccgccgccgccagtcaggccttgaaaagaggatagaccaggctgtggaggagtggaatatt

SEQ ID NO: 446115 - DNA, 100 bp, Homo sapiens
agcgcgcacttcacccgcagttggtggtggagattgtgaagaagctggagtctcgccagcggggctgggaggaggatgaggatcccgagcggaagggggc

SEQ ID NO: 446116 - DNA, 100 bp, Homo sapiens
caagtcccacgcgttcttccgcagcatagactgggacttgatggcccactgcgtgaccttggttcagctgtccatttcctgtgaccatctcattgacaag

SEQ ID NO: 446117 - DNA, 82 bp, Homo sapiens
gtcctccgggacaccgcgctggcccggacctcgcctcctgcctcggggactcgggcaagggtgccgaagatagacaagaggc

SEQ ID NO: 446118 - DNA, 98 bp, Homo sapiens
gagaacgccaagcgcttcgccatcgacatagcactctcgagtggaccctgaggagctcttcaccaagctcgaccgcattggcaagggctcgtttgggg

SEQ ID NO: 446119 - DNA, 88 bp, Homo sapiens
caaagatggcggcagggaccagcagttactgggaaggtggtcctggctctgccatatgacacccccgtgcccggctacatgaataaca

SEQ ID NO: 446120 - DNA, 75 bp, Homo sapiens
cggcggcccagctctctctgacacaggtgtttcagtcacctccagtaacacgggcgtgccagatatctcgggttc

SEQ ID NO: 446121 - DNA, 88 bp, Homo sapiens
tttaaaagacagtcctcgtcagcactgactttcagctatggaatcgatttccatcgttgcatttacaactgctacaaaaatgccagca

SEQ ID NO: 446122 - DNA, 100 bp, Homo sapiens
ccattgtgtgtttcacaagcggcacgacagatcacctctgcagcctgcacagccgggcctttggactcctggatgctagagtgacctgggcgctgaggag

SEQ ID NO: 446123 - DNA, 100 bp, Homo sapiens
ggaaaacctgatcccaaaattattgaaaacactcgaaggatggtggaagagagtgaagagcggctcacggaggagcagattgaagctcttctccacaccg

SEQ ID NO: 446124 - DNA, 82 bp, Homo sapiens
aagaactagcggatttgccaaaagactacctcttgagtgagagtgaagatgagcaaagtgaaaaggagagcttgttgaagga

SEQ ID NO: 446125 - DNA, 74 bp, Homo sapiens
gccctcctggtcatcccgcctgccatcacccccggaaaaatggctacaaacttcctagcacatgagaagatctg

SEQ ID NO: 446126 - DNA, 75 bp, Homo sapiens
ctgggggtgcgcgcctgcgacctgcccgcctggttgcagtaccatgcaggactagcatctggccttttaaatcag

SEQ ID NO: 446127 - DNA, 76 bp, Homo sapiens
cagaactatcagaactacatcttaaggggttcgatacaagaggctgttttcctagcgtggcttgctgcctttggta

SEQ ID NO: 446128 - DNA, 100 bp, Homo sapiens
ggccttgaacattgagaaagaactaccaaagccaagacacgttttcagcggttcaagctctacgttcgtgacatcaaacctcctgttgggccatttccga

SEQ ID NO: 446129 - DNA, 90 bp, Homo sapiens
tggattggagtgaaccggagaccccgaaaacggaagcgcagggagaaggaagaggtgtttgaaaaggtatgatctcgtgaaaccttgaga

SEQ ID NO: 446130 - DNA, 100 bp, Homo sapiens
ctgctaggcatacctctgtaccatggctggcttgttgatccacaggaaactcgaactatctaccagtttcattacaagaattggccagaccatgatgtac

SEQ ID NO: 446131 - DNA, 75 bp, Homo sapiens
gaatattcaagagtggcaacagagagatcactgcagagtttggatcataatacaagagaagcacagggcaaagac

SEQ ID NO: 446132 - DNA, 100 bp, Homo sapiens
ctatcattgaagttaatggcaaaagggtcagaggaaggcagtatccttggggtgttgctgaaggtgtgatccctcacatccacaaatctctgattggaaa

SEQ ID NO: 446133 - DNA, 90 bp, Homo sapiens
agtatcaaaggtgcagaatctgggacaagttgcatgaagagcatatcaatgcaggacgtacagttcagccaaataggaagagctctggtc

SEQ ID NO: 446134 - DNA, 101 bp, Homo sapiens
catggcagtcttattcctcctcctgttcctatgtggaactccccaggctgcagcctctcagggaaccagctggaagatgaaggctgtcggctgatggcaga

SEQ ID NO: 446135 - DNA, 103 bp, Homo sapiens
gaagaaaccagccgaacttcagggtttccaccgttcgttcaagatgtgaagttcatttccaatccgccctccatggtggcagcggggagcgtggtggccgcag

SEQ ID NO: 446136 - DNA, 100 bp, Homo sapiens
tcctttaataagtgttgcgctggttcaaggttgggcattgggtggaggagcagaatttactacagcatgtgatttcaggggcactatgaacgaagaggag

SEQ ID NO: 446137 - DNA, 90 bp, Homo sapiens
ccaaacatgatcgtttactgcaaaaactcctgtagcctgtaataccagctgtgggtactactctcagtgttggagatcatcaaaatacaa

SEQ ID NO: 446138 - DNA, 75 bp, Homo sapiens
cgctcatgatcgacttcctcacccgcgcctgcgacctcgaacatgaaaggctcccggagcagcgctgactcctcc

SEQ ID NO: 446139 - DNA, 83 bp, Homo sapiens
ttcgtggcctgttaccacgagctagtgttggagtgcaccaagaaatggagctctttgttcaatgcctagccacctattcctac

SEQ ID NO: 446140 - DNA, 74 bp, Homo sapiens
ctccagggttctttggggcccgaggtatttcatggaaacttggagagagaaaagtgatgaagtgatgggagagc

SEQ ID NO: 446141 - DNA, 49 bp, Homo sapiens
caagaaaaagcacctggactcctagatctgttgatcttagtaacaatga

SEQ ID NO: 446142 - DNA, 74 bp, Homo sapiens
gcttaggaccacccaccatgcctatccaggcagcaattctgcatttcttcgagtggtaagatgtcgatccttag

SEQ ID NO: 446143 - DNA, 100 bp, Homo sapiens
gaatgccaccaagtatggcaacatgacagaggaccatgtgatgcacctgctccaggttggactggtgctacaataaccagtcaccagtgcgattctggat

SEQ ID NO: 446144 - DNA, 100 bp, Homo sapiens
tcgtgaccgagaccgtgaccgagagcgtgaccgagagcgcgaatatcgtcatcgttagaaggttgggtgtaatcctaatgaagatgtagctatttttgca

SEQ ID NO: 446145 - DNA, 90 bp, Homo sapiens
cagggctggtgatgactggaaccaagtgtggctacaaccatatgtggactttcaccctctccctaaaaagatcaagaacagacgcaagaa

SEQ ID NO: 446146 - DNA, 127 bp, Homo sapiens
gttcctcaggtgcctgctcttccccgtgagggaagcccaggagaccaggcagctgcgctcttgacagccaggtaccagtggtggatctgaaccttctaacagaggaggtaagattatacagctgcac

SEQ ID NO: 446147 - DNA, 74 bp, Homo sapiens
tctttccccgtcagcatcccagccgtgctcacgacacgcagcccaagaaggtccggaaggtcccgccgggtctt

SEQ ID NO: 446148 - DNA, 90 bp, Homo sapiens
cgaatcaacatggaaacctaaggaaaaacgtctgacctgcggagctgccccagagcacatcagctatgtgccccagctctcaaacgacac

SEQ ID NO: 446149 - DNA, 100 bp, Homo sapiens
ccgaagggagcgggcgagcggcgacggcggcggcggcgggcacagaattcagcttgccgagaaatttgtgaaagccgtttccaagcctagtcggcccgac

SEQ ID NO: 446150 - DNA, 100 bp, Homo sapiens
gggaaaccccgtaaagtggttggttgcagttgtgtagtagttaagagattcgtcagcgaactgcagctcaaagaaacctttctccaacaccagcaagccc

SEQ ID NO: 446151 - DNA, 75 bp, Homo sapiens
tgcgaaaggtggttttgatcaccggggctagcagagaaagatgctggtttcgagttttggagatccttgtttttt

SEQ ID NO: 446152 - DNA, 100 bp, Homo sapiens
gtcatcagccactacgccgggcaggatgccacgcacacttccaccctgggcagcgtgtttggggacgcgtactatgagcagcagatggcggccaggcagg

SEQ ID NO: 446153 - DNA, 100 bp, Homo sapiens
gttcatgacaatgactttgagccctaccttactggacagtcaaatcagagctaaagttgcagacaagatccagctcatcaataatatgctggacaaagtc

SEQ ID NO: 446154 - DNA, 50 bp, Homo sapiens
caagaatgaagccgcggaccctcacgggaacctcaggacctgacccaacc

SEQ ID NO: 446155 - DNA, 101 bp, Homo sapiens
ggatcactattcctgaaattgccacctctgagttagatggtggatgcttccaaaagcatcgaagctgtccatgaggacatccgcgtgctctctgaggacgc

SEQ ID NO: 446156 - DNA, 75 bp, Homo sapiens
ggctgccgtacgtggccctcgatgtgctctgcgtgttgctggggaccagttactctccacaagaaaattcacaca

SEQ ID NO: 446157 - DNA, 100 bp, Homo sapiens
atttgttacaagttggcttatgagtggaacatggctagcaggaatgcttactgttgcgtggttcgttattaacaggggaaggggaggagttacagcccgg

SEQ ID NO: 446158 - DNA, 75 bp, Homo sapiens
cggtgacagagtggagccatggctagagcggagcccatcgtggtgaggcttaaggaggtccgactgcagagggac

SEQ ID NO: 446159 - DNA, 75 bp, Homo sapiens
gatccgggacctgtgccaggcagacaaggagtaccttagatccacagaagatgctcttgtcatgggatggagggg

SEQ ID NO: 446160 - DNA, 98 bp, Homo sapiens
ggcagcaaggaggtgaccctgaacctctacgacacggccggcccatcatcctggatccggccgaccccaccctcaacgtggcagaagggtacagatgg

SEQ ID NO: 446161 - DNA, 82 bp, Homo sapiens
ccaggaggaaaagctttctcaggaaaaaggattgactcagtcagcattgacacccttatcttcactttggagtttactaatt

SEQ ID NO: 446162 - DNA, 97 bp, Homo sapiens
gctaccaaagacgtagaaagaaatcttagcagtgcacgatctgattttctggagagatgtgaagaagactgggtttgtctttggcaccacgctgatc

SEQ ID NO: 446163 - DNA, 75 bp, Homo sapiens
gcctgaaggaggacaggaccacgctgctctatttttaccaacaggtggaaccgtcccaaaatgtcccttgctcag

SEQ ID NO: 446164 - DNA, 74 bp, Homo sapiens
gtgacctcatgggcaagaccatgacggaggatgatgacatcactaccggatggtagtgaaaacctttatggata

SEQ ID NO: 446165 - DNA, 100 bp, Homo sapiens
cagaaccccaggactgcgcccccgggagcgggcgcccagaggagccagtgcatcaatcagatgaaggaggtgaaggaacagtgtgaggagcgaatagaag

SEQ ID NO: 446166 - DNA, 100 bp, Homo sapiens
tagtgttgctttggatcttgtggaaagtcagaaatatgacagatacctagcatctagcaaaataatggcagctgcttaccttgaccccaacttgaatcac

SEQ ID NO: 446167 - DNA, 100 bp, Homo sapiens
atggaattgttacttagtgctgccacctgctggatgttaaaagtgtaaacaggaacatcgataagtagtgtaaaaacttgcacaatgaaatccgaagcca

SEQ ID NO: 446168 - DNA, 100 bp, Homo sapiens
ccctcaacagcaaaccggggtctccctcccaggacacaggagtcaagggtcgggtgtgctgacagccggctgttaagccctgcctgccccgcgccaaagg

SEQ ID NO: 446169 - DNA, 99 bp, Homo sapiens
cgtccttcttggagacgactggcgagaggaagagggactaggtccaaacgctaggtggctgggtccagaggacaaggatcctcaccggtggccatgcag

SEQ ID NO: 446170 - DNA, 83 bp, Homo sapiens
agctctggacaagctggaatgcatccaagagaatccctcaacatgctggttatatttcacactatgtgctgactgtatctaca

SEQ ID NO: 446171 - DNA, 101 bp, Homo sapiens
aaaaacaaatcagagagccagtagacttacagaaaaagaagaagcggaaacaacgttctcccgcaaaaacgaaatctcacaaaactgtcccttatcttcag

SEQ ID NO: 446172 - DNA, 75 bp, Homo sapiens
tgtgtattgaaaatttcaaagtaaaggatattattagaattctgccatgcaaattcaattagcagagcctcacag

SEQ ID NO: 446173 - DNA, 100 bp, Homo sapiens
cggcgccgctcccaagatgtcgcagacggccatgtccgaaacctacgggccgttgctccagggagaactgcaaatatcttcatccacccccacatttaaa

SEQ ID NO: 446174 - DNA, 85 bp, Homo sapiens
taaagttttacaagatttaacctgtcatcaagacctgggattttggtggtcctcagaatggttggaatgaccctccagctttgaa

SEQ ID NO: 446175 - DNA, 73 bp, Homo sapiens
tatcattactcgatgctgttgataacagcaagatggctttgaactcagtggaagtagagcttttgtcccggca

SEQ ID NO: 446176 - DNA, 75 bp, Homo sapiens
ttccagaaaaattacagcacatctcagtgaatttgcaagtgcatgcttttcacttccactgcatctctcgctggc

SEQ ID NO: 446177 - DNA, 100 bp, Homo sapiens
tccgtatctgcctaggcattttgctgtctcctcctaatacggtgctggagaatctggtaaaagcaccattgtgaagcagatgaggatcctgcatgttaat

SEQ ID NO: 446178 - DNA, 75 bp, Homo sapiens
gccacagcccggactccatcgactcccccggctcttagactaagaatgtaaagctgtacagttatggcgacccca

SEQ ID NO: 446179 - DNA, 75 bp, Homo sapiens
gttcttctggaaggaaacccagacacggcactggtgaggtggattgatgatgaatcttctggcacacctggagca

SEQ ID NO: 446180 - DNA, 75 bp, Homo sapiens
gccgtgtgaaccatgtgactttgtcacagcccaagatagttaagtggggaactgtggctgcaccatctgtcttca

SEQ ID NO: 446181 - DNA, 100 bp, Homo sapiens
ccatctccttctctaagagatgcctgcagcctgccatgggacgtggggtccaccggtacaggtggcccatggcgccctcagtgatggtgccattgatgct

SEQ ID NO: 446182 - DNA, 88 bp, Homo sapiens
caggccttacggtggccaatgaagcagactcactaacttatgatcaggagcgagaacccgagcagcgccatgagcaacactaccgtcg

SEQ ID NO: 446183 - DNA, 75 bp, Homo sapiens
gcttctggatttcactatggagttcatgcttgtgaaggatgcaaggaagacaactgttagttttgtggcttactg

SEQ ID NO: 446184 - DNA, 100 bp, Homo sapiens
gtgaccctcttgaatgagacagatatcttgagccagtacctggaaaaggagggaaccagcggggaaactgaggctcggggtggagcgcaggattgtggga

SEQ ID NO: 446185 - DNA, 97 bp, Homo sapiens
tgtggtccaaggactcatacctgaagcagctgccacacttcacctctgagcatatcaaacgttgcacagacaagaacctcctcttcattggaaatgc

SEQ ID NO: 446186 - DNA, 50 bp, Homo sapiens
agcttcctttgccgctctgcatcatgttgacagggtctggctctgtcacc

SEQ ID NO: 446187 - DNA, 88 bp, Homo sapiens
ccagcaccaacgggaacagcctgcaagaggctgtcccaagagaagcagacctcagattctgacagcgtgggtgtgggtgacaactgtt

SEQ ID NO: 446188 - DNA, 98 bp, Homo sapiens
aatcactgcaccttaaaaacaaaagattgagctgcactgtattcctgtgcgttgtagaagacaagaactcaaaggtggcctggttgaaccgttctggc

SEQ ID NO: 446189 - DNA, 98 bp, Homo sapiens
tgggtatgaataatgactttcctccaagagcacattgcctggtaagatgatccccgtcgaggtcaagatcaagatccaggtctatttcacgaccaaga

SEQ ID NO: 446190 - DNA, 100 bp, Homo sapiens
agcagctcaaacagtacagggtgaagcgccagcaggagagggacacagcattgttggttttgccatgtactattttacctatgacccgtggattggcaag

SEQ ID NO: 446191 - DNA, 100 bp, Homo sapiens
aagaaatttatcgaacaatgaacattagtccagaacagccccagcattgatcaaacttcagttttactgttaatgaagcagtagttctggcagactaacc

SEQ ID NO: 446192 - DNA, 100 bp, Homo sapiens
caaaggaggagcaaccggatcctgcaacaaacaagtgactgggctgctgtttccccagtgtcactactccatccagaagggagctgcgtttctgggactt

SEQ ID NO: 446193 - DNA, 82 bp, Homo sapiens
atggacatgaagaggaggatccacctggagctgaggaaccggaccccggcagctaaacctctgtagaggagcaggatgcaac

SEQ ID NO: 446194 - DNA, 76 bp, Homo sapiens
gcccagctcaacgtcgtcgcaccagacgagatgatgcctattggccagaaggaaagcgtgtggcaatggaggaccg

SEQ ID NO: 446195 - DNA, 101 bp, Homo sapiens
gggcagtgaaacaaggcttcttgtatcttcagcagcagcagacgtttggaaaggtggtgaagcagtattttccaatttgaagattcatttgaaggtggctc

SEQ ID NO: 446196 - DNA, 95 bp, Homo sapiens
cccaggtcaccggcgacgtggaggcctcccatgatgctgctttggagccggttgtccctgacccacagggtgattctgggggtccacttgtctgt

SEQ ID NO: 446197 - DNA, 115 bp, Homo sapiens
tgggtcagcttcatcctcggcggcggtggccgctagctccaaggaaggcgaccatggccttgctgggtaagcgctgtgacgtccccaccaacggctgcggacccgaccgctggaa

SEQ ID NO: 446198 - DNA, 83 bp, Homo sapiens
tggccgtcagtccggcagcctcacctcaccatttctagcttgttgaaacccaaaactagaatgtctgaatctgaacaggctct

SEQ ID NO: 446199 - DNA, 100 bp, Homo sapiens
attaagaggaaagcgatggaggagctgagcgctgatgaggtattgatgtcaagaaaggccgaggtcgatacattgatacctgcatggtcatctttgcccc

SEQ ID NO: 446200 - DNA, 74 bp, Homo sapiens
tggacatttaagagtgaatcagaccttcaactggaatacaaattacgccttcccatacattatattagtgttat

SEQ ID NO: 446201 - DNA, 98 bp, Homo sapiens
gccgttccctgagctggagcgggtgctgcaggcgccgccgccggacgtcggcaacggagaaggagttgctctgaaacctaccgcatgccagtgatgga

SEQ ID NO: 446202 - DNA, 100 bp, Homo sapiens
tctgaaaacaggaggcaatttcccatacctgtgcagaagtgcagaggtcaatctttatgtacaggctattcaggcagctatcagccaggcctttaaaacc

SEQ ID NO: 446203 - DNA, 51 bp, Homo sapiens
cggggccccccagcctccgccaacccagcccaggatccggttgtggccgtg

SEQ ID NO: 446204 - DNA, 83 bp, Homo sapiens
gtcattctggatgtgggaaccgaaaatgagcagttaggacttcaggaattatttcctcaaggtcatagctgtgctgtttgtgg

SEQ ID NO: 446205 - DNA, 75 bp, Homo sapiens
ttgatccccggcttgctgaagtcaaagttacctgtcctgctgccgattcctggatgacaatcagatcgtcaccag

SEQ ID NO: 446206 - DNA, 82 bp, Homo sapiens
cagcagctgtcgccgccgctctcagcaatggctgccatccggaagaaactggtgattgttggtgatggagcctgtggaaaga

SEQ ID NO: 446207 - DNA, 90 bp, Homo sapiens
tccggggcttgccctggtcttgctcggccgatgaagtgcagaggtttttttctggtatgcaggtgccttgagagcttcaggggaaatggc

SEQ ID NO: 446208 - DNA, 100 bp, Homo sapiens
tttcgggcactccacagattctgttgcgaaggcagccatctttagttcgtctttcctagagaggtggagccgccaccaaaatgcagattttcgtgaaaac

SEQ ID NO: 446209 - DNA, 83 bp, Homo sapiens
cgaggagctcatcgggcagattagcgacatccgagtgcagaacctgcaaggtgacttaagagattaaaattaatttggttgct

SEQ ID NO: 446210 - DNA, 82 bp, Homo sapiens
agacgtctgcgtgagaatagagaccaccgagcctcccgcgacgatgcccctcaacgttagcttcaccaacaggaactatgac

SEQ ID NO: 446211 - DNA, 58 bp, Homo sapiens
caagagcaacatctttcctcaccccaaggtcttgggcgtctttggtactggctttttt

SEQ ID NO: 446212 - DNA, 98 bp, Homo sapiens
gtacagctccatcaagaatgagaagctgcagtgggccatgacagagcgggatgccaccagcttgtccaaagggaagttccaggagctcctggtgggca

SEQ ID NO: 446213 - DNA, 92 bp, Homo sapiens
gcgggcggcttcctggcctgggcgctccggtggcggcggagatacagatcacttggattcagtcgagtttgctttgctccgtgggaactgca

SEQ ID NO: 446214 - DNA, 75 bp, Homo sapiens
gccaccgaaggaagcatcccagacaccgggaaggctttcttctagtcaagatgagtgataaaccagacttgtcgg

SEQ ID NO: 446215 - DNA, 75 bp, Homo sapiens
acagggtcaaaggagagcacaaccatcgcagttggaagcccatggggcagattcttcagaggaggcccctccagc

SEQ ID NO: 446216 - DNA, 90 bp, Homo sapiens
aactgagtgaatatgatcagatttctccaccaaattctcagcctgataagggaaccagagcctgaaacagaagcagtaagttctagccag

SEQ ID NO: 446217 - DNA, 112 bp, Homo sapiens
ggcagcagcccagacgcggcacagagagggcctgggagcttgctgcagcttcagtgtggggatggtggcagatactctggctgctacgtgagaacagtgtgccgatccctgg

SEQ ID NO: 446218 - DNA, 100 bp, Homo sapiens
accatcttctggagcccccaaggacagttcgtggtgttggcgggcctgaggaggtcgtggagggcccccaagacccaacagagggatgccgcaaatgaac

SEQ ID NO: 446219 - DNA, 75 bp, Homo sapiens
tgatctgagggccaaagtttggaaggtatattgaagcaagtcaaagattacattaaacagtgtagcaaatgccag

SEQ ID NO: 446220 - DNA, 88 bp, Homo sapiens
cggagtggggtgtcggcgcctcattcgggtggagctgagccggagacagtctgcgctcctcagaccaccggcaggtgaacagcctgat

SEQ ID NO: 446221 - DNA, 100 bp, Homo sapiens
caggcatcatggactgtgcgcccaagatgccgtagggccaggtgagctgctgtgaaggactcattcttggtagccggcagttactggcaacttgtgagct

SEQ ID NO: 446222 - DNA, 82 bp, Homo sapiens
gtcaagaaagttcctaaaggtgttcccctgcagtttgacataaacagtgtcggaaaacaggagttcatgatcaagtgttgcc

SEQ ID NO: 446223 - DNA, 82 bp, Homo sapiens
gacagaagcagatggattcgtccttttagacatctttccaggaacagcgtgaggaggacagaagcacccaacaggactgctc

SEQ ID NO: 446224 - DNA, 76 bp, Homo sapiens
atgagctgcactttgttgagaaggctgcagcaggtgctaatgtcaatgctaaggacacactgtggctgacccctct

SEQ ID NO: 446225 - DNA, 100 bp, Homo sapiens
cagcttctgtcctccaattttccattgatatgcacttatttggccattacccagcacatgacgacttctatctcgtagtgtgcagtgcctgtaaccaggt

SEQ ID NO: 446226 - DNA, 99 bp, Homo sapiens
agagaagcctgtataaagatgtcatgatggagaattatggaaacctggtctcactgggtgcaatggatgagcttcatagtctggatccaagaaggcaag

SEQ ID NO: 446227 - DNA, 101 bp, Homo sapiens
cagatgctgagaaatccagggtcacagacttcacagagaatgcagttgtcttgacttcaggtctgtctgttctgttggcaagtaaatgcagtactgttctg

SEQ ID NO: 446228 - DNA, 100 bp, Homo sapiens
gcgcaaggcgtccaggagtgacctggggctgtggagagcgacccgtggccttgtgtttcagatccgcatttgctaccagcggcggccgcggcggagccag

SEQ ID NO: 446229 - DNA, 106 bp, Homo sapiens
caccaaatatcggaacccctccttgaagctgatggtgaatgtgtgcggacacactcttaggataagttctgaacgtcgaaaagaaaagtctcgagatgcagccaga

SEQ ID NO: 446230 - DNA, 74 bp, Homo sapiens
ggggatgtggacgaaggggccgacctcctaggctgctctttggcgtaaattgcaatcgattagggatcgtttct

SEQ ID NO: 446231 - DNA, 82 bp, Homo sapiens
tccaggttgatgaagctaatttattgacttggcaagggcttattgttcctgtctttctggatataaggattctagtcatggt

SEQ ID NO: 446232 - DNA, 74 bp, Homo sapiens
gtgaggccagcgggggaggggccttcctggtgctgcccctgggcaagtgcaaagcatctgtgcgacttggtgtc

SEQ ID NO: 446233 - DNA, 50 bp, Homo sapiens
ttataatccaagctattactcagacctgtggatgaagagccagagtcctc

SEQ ID NO: 446234 - DNA, 100 bp, Homo sapiens
gggacattagttcaagtagcaactatatcagtgcacgatctgattttctggagagatgtgaagaagactgggtttgtctttggcaccacgctgatcatgc

SEQ ID NO: 446235 - DNA, 85 bp, Homo sapiens
cagcagggcctatggtggttccatgtgtgctaaatgtgttcgtgacagctggagaatgtcagaatattaataaacagtatatgat

SEQ ID NO: 446236 - DNA, 98 bp, Homo sapiens
aattcagtgcagtaggatactgaaactgacattatttggtatcctgagcatgattatcattcggaccctccggaaggacattgccaactacaacaagg

SEQ ID NO: 446237 - DNA, 74 bp, Homo sapiens
gcgtcctcctccccaggcccgccgcctccctgccaaggtgaaagaacttgtcctggacaacagtcggtcgaatg

SEQ ID NO: 446238 - DNA, 75 bp, Homo sapiens
ctcttccaacaccagtggaagatgatcacatcccaggcatttccggagagttcttttgaagtcacttcagaagga

SEQ ID NO: 446239 - DNA, 100 bp, Homo sapiens
gaaggggcctccagggtctgcagacaaggcaggtattgcggaatgctgcagcactccttactctcttttgggtttggtcttcacggtttcttttgttgcc

SEQ ID NO: 446240 - DNA, 98 bp, Homo sapiens
ctgctgttactgcagcagtaaaggtggtaaagccaaaatctccagaacccgaagcaacgctgacatttccatttctggacaaaatgcctgaagccaac

SEQ ID NO: 446241 - DNA, 101 bp, Homo sapiens
ctcccgatgaagcagctgcagccgcagccgcctccgaagatgggggatttctacgacccggagcacccgacccctgagaatgtatacaaagactatcgctt

SEQ ID NO: 446242 - DNA, 87 bp, Homo sapiens
cctatccagaagaaaatacactactcatcaaggaagaaccaggagtgggaatagctttgcgaaaaatgggcgcaatggccaagccag

SEQ ID NO: 446243 - DNA, 129 bp, Homo sapiens
aaattatcagtctcatgaagctctgctgggaagcgaatccggaagctcggccgacatttcctgggtaaactagcgctcctttccgtaaccacgggaggcacggccgagatgtacacgaagacaggagtc

SEQ ID NO: 446244 - DNA, 82 bp, Homo sapiens
gtaggccgtctcgctctgggtctccaggcccgcgaccgtccgccagtcgtcccgaggaccatggccaacctggagcgcacct

SEQ ID NO: 446245 - DNA, 96 bp, Homo sapiens
ccggtccctggccccggccccggccccggtcccggccctggcccgggcagggaactctaatgatccaggacaaagaagttaccctggagtatgtat

SEQ ID NO: 446246 - DNA, 101 bp, Homo sapiens
cggaaaaggacgcaaagttctccggcgaggcaatggacctcatcatgaccgttgctgtacttacaatgaaaacaacttggtggatggtgtgtattgtctcc

SEQ ID NO: 446247 - DNA, 82 bp, Homo sapiens
cacgacccacgagatcatggggcccaagaaaaagcacctggacttgtaatgaacaagtctggggtgaatcgtgtagtttgga

SEQ ID NO: 446248 - DNA, 101 bp, Homo sapiens
cgccgctgcgcaccccagcggagccaagccccacgctggccggacagggccgcctgtcgccgggcatcctctggtatcacgattccaaaacccccaaagcc

SEQ ID NO: 446249 - DNA, 51 bp, Homo sapiens
gacggcgcagtgcgaagcgaaacaggcagcccatggaggacaggcatctct

SEQ ID NO: 446250 - DNA, 100 bp, Homo sapiens
ggtgtatgcaagtggccaggctgtgaagcagtgtgcgaagatttccaatcatttctaaaagtcttcttcaagatcaaaagccgaaatgcacacatgaaaa

SEQ ID NO: 446251 - DNA, 75 bp, Homo sapiens
gagagactgcctattctgaatcagccatcaactcagcctgtcctgggagctggagaggatgtcagcgagcctgac

SEQ ID NO: 446252 - DNA, 100 bp, Homo sapiens
atgaactgataacggagaatggaactgtatgccagcagcttgttgtacagtcacagtaatgaaaggcagtaatagaaataaggatcattcagcagaagga

SEQ ID NO: 446253 - DNA, 75 bp, Homo sapiens
caccggcagcagcagcaccaccggacgatctttaatctcatgaagtacgacagctacagccgcttcttaaagtct

SEQ ID NO: 446254 - DNA, 90 bp, Homo sapiens
ggaagaggaaagcaaaggagtcagggatggctcttcctcaggaatggtcctcgtccgaagtgagaatgggcagttgttaatgattcctca

SEQ ID NO: 446255 - DNA, 50 bp, Homo sapiens
aggagaaattcgccctcaaatgacacccctggacgtggtgaaggttcgcc

SEQ ID NO: 446256 - DNA, 100 bp, Homo sapiens
tgcagctcttggcaggagtagctgatcaaaccaaggatggaactggcattgcccgccttgtcgaggaatctgcaactgcagtttctgccggcagcgagat

SEQ ID NO: 446257 - DNA, 100 bp, Homo sapiens
atcctgagagagaaatttataaaagattgggaatgaaaagaggtgaagaaattgcttcctcagggccgaattacaaaagtattgaatatgaaacctccag

SEQ ID NO: 446258 - DNA, 99 bp, Homo sapiens
cacggcgccgggccccctagggattttcaggagccgcccaggaggctcctcaggccgaccccagaccctggctggccaggatgaagtatctccggcacc

SEQ ID NO: 446259 - DNA, 83 bp, Homo sapiens
accaccagcacttcacctgcaccatctggagacctgcctagagctggaacgttacctccagagcgagccctgctatgtttcag

SEQ ID NO: 446260 - DNA, 100 bp, Homo sapiens
agacgtttcttccaaggagcagcctccccgctacatccagccagtgtcgcccttacacagctgcatgtcaggtcgacctggccgtctctgtttcccagat

SEQ ID NO: 446261 - DNA, 90 bp, Homo sapiens
cgcccgggtcctcctagaaattccccccgaagaagactcccccacatctggagtgttgttcgctgcctgtggcatccaaagctgaaccag

SEQ ID NO: 446262 - DNA, 100 bp, Homo sapiens
tataagggttcctgctttcacagaattattccagggtttatgtgtcagggtctccctccactgctgtagtaacccgggtccggggcctcggtggtgctcc

SEQ ID NO: 446263 - DNA, 97 bp, Homo sapiens
ccagaacggatagctccctcctggaaaagacaacaagggaggtgtcacagttttccatttagatcaacaacttcaagttcttaccatggaaaattcc

SEQ ID NO: 446264 - DNA, 83 bp, Homo sapiens
ctggagctcacggagaagaaggcctccgaccccgcgggaggactcagactccagcacttccagcagcgcctgccctctatgga

SEQ ID NO: 446265 - DNA, 90 bp, Homo sapiens
gagtggtggatcggttcgtggagtttctgaagaggaatgagaattgtacattacagcctactaagccccagcccccagccaggcctccac

SEQ ID NO: 446266 - DNA, 95 bp, Homo sapiens
aggagtaagcggcgcggtagcgaaggccgccgaacctgcctggctagccggcgacttgagtgacgattgagaagctgatgtctcctcgacttcca

SEQ ID NO: 446267 - DNA, 74 bp, Homo sapiens
agaagaagaagcaggatgaactgaaacggattgccagagaattggcagaagacaaagtagactggtgtaaccct

SEQ ID NO: 446268 - DNA, 74 bp, Homo sapiens
gaaagccaggcaccaggcagagacatcacaaagattgatcgctggcctccccaacgacacactgtcagtggaga

SEQ ID NO: 446269 - DNA, 90 bp, Homo sapiens
gccagcagtaccgctgtctctacccaggcactgtggtccgagatgaccgcacctcgagcaggagtggggatgccacgtctgcccccagcg

SEQ ID NO: 446270 - DNA, 100 bp, Homo sapiens
taatattaatgaaggacaagtacaagttagaactctttatctttctgtggatccttacatggtgtcacatcccggtggctggacatgccctcttgggctt

SEQ ID NO: 446271 - DNA, 100 bp, Homo sapiens
cttgaatctgccgacttttgtaacaaatatttgcggtttcagcctcaacccagaggaatcgttactctttcaggacagtggtgattatcctcttaccatg

SEQ ID NO: 446272 - DNA, 89 bp, Homo sapiens
atctttgacttcactcatccctgcgaccatgaggagattcgtgagaacctgagtctcaaaaatgctgtgctcaagtacatgggcgacta

SEQ ID NO: 446273 - DNA, 83 bp, Homo sapiens
cagtgttcaccatcctggccccggaaggaggctactcacagtcgaactacaactccccggggtccggccagaactacagtggc

SEQ ID NO: 446274 - DNA, 82 bp, Homo sapiens
caactggtggcagagttatgaggtgacttaagagattaaaattaatttggttgctgttggttctgaacaaataatgagttct

SEQ ID NO: 446275 - DNA, 90 bp, Homo sapiens
tattgatatacttcctagtgggctggcttttatctccagtctggagaatgctggaggagaccttaaggatggccaccaccactatgaagg

SEQ ID NO: 446276 - DNA, 106 bp, Homo sapiens
ggagactttagctgtaaggaggagccagaaattgacagcccagggggaggatacgaagcgttttcggcttcctgcccggagctgtgcagcaaacagtcgaccccca

SEQ ID NO: 446277 - DNA, 50 bp, Homo sapiens
ggatgaagtggctccggagatgagtccaatgtgctgattgctgctaacag

SEQ ID NO: 446278 - DNA, 100 bp, Homo sapiens
cttcttgtgtatctggagaaaatagagtgtggactctctgatgggcttcaagacgtgcactctgactgaagcctttaccacactcttcacatttaaagag

SEQ ID NO: 446279 - DNA, 82 bp, Homo sapiens
cgccgccgctgccgctgccgctgccgcacctccgtagctgactcgccctgggcgctgcctatggcacagccaagagcggtac

SEQ ID NO: 446280 - DNA, 75 bp, Homo sapiens
aaggacatgaagactaccacatgatggtttcagccatgccacagagctccggcagtcatgggcccgctatagcag

SEQ ID NO: 446281 - DNA, 100 bp, Homo sapiens
tccaggaacaagccatggagggtcaaagaaactcctggttgagctcaaagttattttacattgtgggctggatgacactttgcacacaattattgattat

SEQ ID NO: 446282 - DNA, 100 bp, Homo sapiens
atggagaccaaacctgtgataacctgtctcaaaaccctcctcatcatctactccttcgtcttctgggtggagccatcgaagcccccacccacaggctgac

SEQ ID NO: 446283 - DNA, 90 bp, Homo sapiens
gcaagcggtttgggaccttgaacaaggcaaatatggttttgtcagcagataagcagagagccctagaagaaaccaaagcctacaccaccc

SEQ ID NO: 446284 - DNA, 100 bp, Homo sapiens
cttttggctttcggggggaagctctgagctcactttgtgcactgagatgaaatcagacatcactgaaggagttgatattccaaagaaacctagattggag

SEQ ID NO: 446285 - DNA, 73 bp, Homo sapiens
atggctataatgggtatggaggaggacctggaggcagcactttatccaagaggaacagatcctggagatcgat

SEQ ID NO: 446286 - DNA, 78 bp, Homo sapiens
cggatggcccccggtgcaagaggcgcaaacaagccaatcccaggaggaaaaacgttttagagaacaacttgtaatgga

SEQ ID NO: 446287 - DNA, 97 bp, Homo sapiens
agggtcgacatgttaaaacgggtcagttggcagccatcaaagttatggatgtcactgaggcgaacagctgcttggagaactacaagtgaagaaaaga

SEQ ID NO: 446288 - DNA, 50 bp, Homo sapiens
ctggagggcaaagcgtggtgcgagcaggcttctcacggcattcagcagca

SEQ ID NO: 446289 - DNA, 75 bp, Homo sapiens
ctcctcgaagtagacctcaaaaatggagcctgtggggcccggatagtcagccgaccagaggaactgagagaagat

SEQ ID NO: 446290 - DNA, 50 bp, Homo sapiens
ggaaaacatccagtgtggtggaaatggagtgtttctcaggagctatcaga

SEQ ID NO: 446291 - DNA, 51 bp, Homo sapiens
ccaggttaccactaaaaatgccatgagtctaattttcacaattacaccttg

SEQ ID NO: 446292 - DNA, 51 bp, Homo sapiens
gttggaatctccccagcttgtggggatgcttgtggttggtggcatcgaccg

SEQ ID NO: 446293 - DNA, 100 bp, Homo sapiens
ccagaggcgcggggcgccgccgctgcagctgccgcgcgtccatccgggtgacctgcataggttcctgcggggtctccaacaaggctaatgacacagcgtg

SEQ ID NO: 446294 - DNA, 76 bp, Homo sapiens
ccctggcctcagcccgccacatcaccctgacctgcttacgcccaggtcatttcttcagatagctccccagctgtgg

SEQ ID NO: 446295 - DNA, 90 bp, Homo sapiens
cagtcttaaatatctacccatggaataaagagctgtatttgatcaggtcactgcttctgttcggaacagagatccccctgagatagaata

SEQ ID NO: 446296 - DNA, 100 bp, Homo sapiens
cgtgagtggctaatcgtgaaccggaatggttcagcactgagtcatgcttgcttctgctacgcactgatttgttctattccagttttcacgtacatcgttt

SEQ ID NO: 446297 - DNA, 106 bp, Homo sapiens
tttaatatctgattgggacaacattcagacccatttccagtcatgaatggcccactgcgtgaccttggttcagctgtccatttcctgtgaccatctcattgacaag

SEQ ID NO: 446298 - DNA, 87 bp, Homo sapiens
gtggtgcagtttttgatgaaattgtagagaactctcactgaaaactgaagctaatttggaagttttgaagtcaattcctagtgaaaa

SEQ ID NO: 446299 - DNA, 97 bp, Homo sapiens
tacaacatcgagatcctgcggctccccaaggctctgcgcgagatgaactggcttgactacttcggctttggcataggatcagaaattctgaagaatc

SEQ ID NO: 446300 - DNA, 127 bp, Homo sapiens
ggcggcggcggtggccgaggcggggaggcggctgggccggggcctgagctgccgcggcggccgctcctcggatggtgccatgacaatggtgtgaactacaagattggagagaagtgggaccgtcagg

SEQ ID NO: 446301 - DNA, 135 bp, Homo sapiens
gggaagtgcagatgggggattttgtgcgctaccactacaacggcacttttgaagatggcaagaagtttgattcaagttcacacaaaagatgttggacaatttctacaattttgcttcatcatttgctgtctctca

SEQ ID NO: 446302 - DNA, 100 bp, Homo sapiens
aacaccattcttcgccaggccaggaatttgccagtagtcatcagagtaccaaaactgatctatttctcagtaatgagtgtgtgcctcatgcctgtttcaa

SEQ ID NO: 446303 - DNA, 98 bp, Homo sapiens
gtgaagacgcctccgaggagcccgaggagaaagacgccaaccagctcaggctgcacgaagaaaaggttattaaagatagacgtcatcatctcaagacc

SEQ ID NO: 446304 - DNA, 88 bp, Homo sapiens
aacttgcagaaatcacattggaccctcctcccaactgtaggtacggggctgatgttgacgtcaaccaccacctgactcctgatgtcca

SEQ ID NO: 446305 - DNA, 95 bp, Homo sapiens
cttatagagttattcacaatgcctccataatgaatgctgtaggctgctgtggtttacaggaatgtttacccttgcggaagttgcatcacttaatg

SEQ ID NO: 446306 - DNA, 75 bp, Homo sapiens
ccggaacatggctgcgtccggtctggtggaaattgaaaccaatcagttacaagatggctcgttaattgacctctg

SEQ ID NO: 446307 - DNA, 50 bp, Homo sapiens
ggacccgtactcgtcccgctacgcgcgggcttatgaaaaaattgcttacc

SEQ ID NO: 446308 - DNA, 95 bp, Homo sapiens
attgccaaggaactgggatttcaacctgaaagtggaggctgcgaaaataggacttgcaattgtgaccaaatatattacaaagggctggaaagaag

SEQ ID NO: 446309 - DNA, 74 bp, Homo sapiens
cagatgctgatgggcaaactagggagtgcatccgccccaacccttttccccctcgtctcctgtgagaattcccc

SEQ ID NO: 446310 - DNA, 100 bp, Homo sapiens
tcttctttaagtccatggaccaggacttcgggatgctccagaccttgtatgattacttctggtgggaacgtctgtggctgcctgtgaacttgacctgggc

SEQ ID NO: 446311 - DNA, 100 bp, Homo sapiens
accagcaacctctataagatccagtaggcgagcaccgtcaggagcgcagagatcggccctactagatgcagagaccccgcagagctgcattgactaccag

SEQ ID NO: 446312 - DNA, 100 bp, Homo sapiens
ctgaagctgaggctggccatccaggagatcatgtcgctgaccagcccgtctgccccgcccacatctagaacgattggagtatcctccttggagaatgttc

SEQ ID NO: 446313 - DNA, 96 bp, Homo sapiens
cagagcagggcggcggcgactcggcaggatggggaagcagaatagcaaactggcccctgaagtgatggaggacctggtgaagagcacagagtttaa

SEQ ID NO: 446314 - DNA, 94 bp, Homo sapiens
tctggctctggaattgctactgctgcctctgtcactcctggtgaccagcattcaaggttacctgtcctgctgccgattcctggatgacaatcag

SEQ ID NO: 446315 - DNA, 100 bp, Homo sapiens
aagggtccctatgaatacctcacacttgaagactatcccttgatgattgatacctacctggtttatattctaaatgaattggctggaaactcctttatga

SEQ ID NO: 446316 - DNA, 100 bp, Homo sapiens
tctggcaaaagaccttggctcagactttcagatcggggctgctagtcgcatacccggagtaacacctgccgccatcatcaatctgctgagatttgtgaag

SEQ ID NO: 446317 - DNA, 75 bp, Homo sapiens
ggggctgctgcgagctcgccgggcgccctttagactatggactttctgtcagattttgagatgatgttgcagcga

SEQ ID NO: 446318 - DNA, 82 bp, Homo sapiens
ttgtccttgctggtgcatgcgtcgtcggcctctgggcagcagacgccctcctgcaaaacggcccaactacgttaagcttggc

SEQ ID NO: 446319 - DNA, 89 bp, Homo sapiens
gccgcagccatggaggccaactggaccgcgttcctgttccagcccctgtccctgccttacccagcaagcttcccacgtttggagccccg

SEQ ID NO: 446320 - DNA, 75 bp, Homo sapiens
agtaaacacatctctcaccgcggagcggctggggaaaagggccacaggatagagctcagctcccactccactcaa

SEQ ID NO: 446321 - DNA, 90 bp, Homo sapiens
ggagcctctcagctttttcgtatttggagattagccgatgaattacatatgccatctctccctgaaatgatgtttggagacaacgtttta

SEQ ID NO: 446322 - DNA, 85 bp, Homo sapiens
attcgcggctcttcccgcccgccttccgccgtctcttcgagttcttcgtgctgctcaaggtttggtgcacctcgatttggaggaa

SEQ ID NO: 446323 - DNA, 100 bp, Homo sapiens
cttctggcggccatggtgttgctgctgtactccttctccgggaatgaaagctactggttgattttaaagtgcctgggcctcacaggtttggagatgtccc

SEQ ID NO: 446324 - DNA, 100 bp, Homo sapiens
cccttcttcctctcagttcctagagtccgaccgccgccgccgccgagagagaggagaaggaggccaagactaaggggctgcagagcggggtggacattgg

SEQ ID NO: 446325 - DNA, 89 bp, Homo sapiens
gaagttggagagagccagcaccaagatgctggacagggttgacgccatggtggacctgctggacctggacccactgaagaggtcgggct

SEQ ID NO: 446326 - DNA, 82 bp, Homo sapiens
cagagattcatctttcatgcagtgacatgttgataaaaaatgatgataacgaaggaggcccaacttcattcaataaggagcc

SEQ ID NO: 446327 - DNA, 75 bp, Homo sapiens
agtgaatcccaactgttatgccaaaggaagaacagttagaagctatattgtcagcagcaattcagactagttccc

SEQ ID NO: 446328 - DNA, 100 bp, Homo sapiens
cttcatctgcccctgcccagatccggaagaacggtgaatttcccccgcaggtgctggagaatctggtaaaagcaccattgtgaagcagatgaggatcctg

SEQ ID NO: 446329 - DNA, 75 bp, Homo sapiens
ctcggacgcacggaccaggcccatttccctttcatctgaacttttcacacctgagtgcaaattcaaagaatcagt

SEQ ID NO: 446330 - DNA, 82 bp, Homo sapiens
ccatttctcctattgaggagtcaacccgaaggagtaaaggtgctgcaatgatgttagctgtggccactgtggatttttcgca

SEQ ID NO: 446331 - DNA, 80 bp, Homo sapiens
ggagtatagatgacataggtcacctcattcatgaaggcctacagaagttctctgattctgagtgtgcccggcgggccctg

SEQ ID NO: 446332 - DNA, 75 bp, Homo sapiens
tggaaacctacaaacatcttttcctggagaagatcaccggcgtaatcaacccagcgttggacaaatactttccgt

SEQ ID NO: 446333 - DNA, 101 bp, Homo sapiens
ggctggagcatctcttgataaagatgttacagtggtttatcaaaatgggttacctgtgatatctgtgaggctaccatcccggcgtgaacgctgtcagttca

SEQ ID NO: 446334 - DNA, 100 bp, Homo sapiens
aaatacatccaggaaagacatggagattctcttaaaaaggttccaccccgatgcaggtggtcacgtgcttgacgcgggacagctacctgacgcactgctt

SEQ ID NO: 446335 - DNA, 73 bp, Homo sapiens
agcactcgcctctgtggggacaacaagctgccttgccggcggggggagcccgaaacagccctttgcagctctg

SEQ ID NO: 446336 - DNA, 74 bp, Homo sapiens
ggtagagccggccgagctgaggcggtcgcggccatgaagaaatgactgctgtccatgcaggcaacataaacttc

SEQ ID NO: 446337 - DNA, 100 bp, Homo sapiens
gaagaagagcgttagtcatggacaacagattcacaatgacatcctttcaagaagtcccattgcagacttccaactttgcccatgtcatctttcaaaatgt

SEQ ID NO: 446338 - DNA, 82 bp, Homo sapiens
aataacttcagagctctgcgcagtgagacggagctgctgctgtctgggaagatggccctggcttctcacggcattcagcagc

SEQ ID NO: 446339 - DNA, 82 bp, Homo sapiens
gagaagcagctgcggaaaatgctagaagcaaaagactgttgaagtagagagcattttgcccagctcactcggattctttgct

SEQ ID NO: 446340 - DNA, 101 bp, Homo sapiens
cagccctccgttaagatcctggttccatgccgcagtaggacagcaggcccaagtctgcacatcccaggttctggctccttggcagcaatggctgtatttga

SEQ ID NO: 446341 - DNA, 96 bp, Homo sapiens
cctcatcttctcctttgtcttcttctacacccgactggtcctctttcccacccacggcttctgcaaccaagcgggtcttacccccggtcctccgcg

SEQ ID NO: 446342 - DNA, 86 bp, Homo sapiens
gaggcggccacccgagacgcggcgcgcacgctccggcctgcgggaaatcctcattgacgattcaatttgttgaaggccaatttgtg

SEQ ID NO: 446343 - DNA, 100 bp, Homo sapiens
gctgcccggtgcccgaggaggcagccaagctcatggcctgccactgcgtgcgcatcctgacatcgaggcccaggagagaggagtccggtgtctacttgag

SEQ ID NO: 446344 - DNA, 83 bp, Homo sapiens
gcgcagcctcttcgagcgccgcggacgcgtcatcgagtgtgacgtggtgaaaggaacccaagacagaccaggatgaggagcat

SEQ ID NO: 446345 - DNA, 82 bp, Homo sapiens
tttcaggaaaacagagaaagaagtgataggagggctctgtagtgtactaatggtcacttgatgtgcgctggctgttttatcc

SEQ ID NO: 446346 - DNA, 74 bp, Homo sapiens
gcgcgagtgaggaaaggaggtactgtagcgggagatacagatgacccaccaagaattactcagaaccctgtgat

SEQ ID NO: 446347 - DNA, 75 bp, Homo sapiens
tccgggtcttccagagcgtgaagatcaagatcgggttgtgagtcccggcccagcccctccacccccctgcccccc

SEQ ID NO: 446348 - DNA, 100 bp, Homo sapiens
cagaaaatacaacttgggctgatatcgaagctatgaccaagatcactccatggatgaaatgacagctgtggtgaaaattgaaaaaggagttggtggcaat

SEQ ID NO: 446349 - DNA, 100 bp, Homo sapiens
gccatggaaaaattaatcaacagagtgggacctaatggtgagagttggaggacgagtaagtcgtgaattaaattatactcgccagaagattggagaagag

SEQ ID NO: 446350 - DNA, 82 bp, Homo sapiens
gcctgtgcagccctcccaggtggagtacacggcagacttgagagggtccaagcctggtaagaatgtccagcttcaggagaat

SEQ ID NO: 446351 - DNA, 51 bp, Homo sapiens
ataatgaagatggccctcagcacacggtggccattaagcagatgaatcttc

SEQ ID NO: 446352 - DNA, 97 bp, Homo sapiens
gagagggggactctgtgtgagggaaagaaaacaatttctcctgctctgcagcttctgttcagatccaggagatggtccactcggaagtggctgccta

SEQ ID NO: 446353 - DNA, 95 bp, Homo sapiens
gcttcccgctcatgaccatcgaggagttcgctgcagccaaaattgcctggaaaagagcagtgagaggagtccgggagatgtgtgatgcatgtgaa

SEQ ID NO: 446354 - DNA, 82 bp, Homo sapiens
caaggagctaaagcagcgtgcgttcagccctgggggccgcctgggcagaatgtcacgatggacgagggcggcacgcccctgc

SEQ ID NO: 446355 - DNA, 101 bp, Homo sapiens
atttgttggggagaagaggattggaggtgtcagtgttaaaggaacctctacaacgaaggtgaagccacggaagataagtcagagcaccataacatggtgtg

SEQ ID NO: 446356 - DNA, 50 bp, Homo sapiens
gagcgatttgccatcgtgctgaaagatgaggtctatcttaatctggtgct

SEQ ID NO: 446357 - DNA, 75 bp, Homo sapiens
gcggtttgaaggccgcccggtgcccgacggtgacgccaagcagaaggggccgtatggggtctttgctggaagaga

SEQ ID NO: 446358 - DNA, 88 bp, Homo sapiens
tgctgtgctgtgtatgaagaggcagtgaagactctgccaacagtttgccccaatgtcagatgacgagagccctacatcatcctcggca

SEQ ID NO: 446359 - DNA, 75 bp, Homo sapiens
tgaagcatgctctggaaatgttcccagaacattgcacgatgcctcctgggctgaagaagatgcagagcagcctga

SEQ ID NO: 446360 - DNA, 100 bp, Homo sapiens
ggaggcttcacctggtgtttgaatattgtgaccacacagttctccatgagttggacagataccaaagaggtcactctctgaaagagaacaaagtaatttt

SEQ ID NO: 446361 - DNA, 75 bp, Homo sapiens
gcggctttcgccgcgctattgcttgccagtaccttaaggcaggttctatgaaagatcctctgctagatgaccatg

SEQ ID NO: 446362 - DNA, 51 bp, Homo sapiens
tgcaggcttgccgaagaagggagttaccgagaaggaggtccagcagtggtg

SEQ ID NO: 446363 - DNA, 80 bp, Homo sapiens
ccaacacaatcaataatggcactcagcagcaagcacagagtatgaccaccactattaaggtcctaacctgattataaaac

SEQ ID NO: 446364 - DNA, 100 bp, Homo sapiens
ctttccttacctgtttttccagctcacccactgccagcagaggtcaggcagttcctgctccgactggggctcctccaggtggtcagccagattatagtgc

SEQ ID NO: 446365 - DNA, 104 bp, Homo sapiens
agctgacaacggccatgtgcctatccagagcaaggtggtgaatatccctgtgagaagtctcatctgagtagcagcttcctgccctccttcttggagataagtcg

SEQ ID NO: 446366 - DNA, 75 bp, Homo sapiens
ggcgaggaactccagaatacaagtgtaaggcaaacattggtgggcaccgatcttcctgttcattctgcaagaacc

SEQ ID NO: 446367 - DNA, 50 bp, Homo sapiens
atgtggctgtcggcagagctggtagagtctctgtagaaacgctggaaaag

SEQ ID NO: 446368 - DNA, 49 bp, Homo sapiens
aaagtgcgattgtggaagctgctcggagaacgccagatcaagtgtccca

SEQ ID NO: 446369 - DNA, 96 bp, Homo sapiens
tcgaaccatggaccaggccctcaagtccctgatggcctcagaggaggagcgctcccagatcagctacaaatgccacctggtgctgcgccccatccc

SEQ ID NO: 446370 - DNA, 90 bp, Homo sapiens
ggtttacagcgaagtccacccagcgtttccgaggagccgggtgtgggctgagccctgcctgattgatgctgccaaggaggagtacaacgg

SEQ ID NO: 446371 - DNA, 100 bp, Homo sapiens
tggtggtgattgcacacgacgtggatcccatcgaggcctctctgctcctgtcttttgtttggatgccggcgctgctgcctgtggcctcccgccttttgtt

SEQ ID NO: 446372 - DNA, 89 bp, Homo sapiens
aaaggatgttggcggtccctgtgacctgtggagacacggccagatctgccctccagtgtggacactgccagcggctgcagccgacttgg

SEQ ID NO: 446373 - DNA, 100 bp, Homo sapiens
ggattaaaatctcccaagaggaatgacaaacaaccagctcttcagggccacccagtgctcctgcagaagatcgttcaggaacacccgacagcattgcttc

SEQ ID NO: 446374 - DNA, 100 bp, Homo sapiens
cagcgtccacacacaaatccacacgccctgtgaagaaggtctccattcttcgcacactcatgggacacaaagccaacatctgcagcctggatttccaccc

SEQ ID NO: 446375 - DNA, 95 bp, Homo sapiens
gcagcgagttacatgttgagccatttcagttactggggcttccggatgcagatgacgatgcgtttgaagagtacagtgctgacgtggaagaagag

SEQ ID NO: 446376 - DNA, 50 bp, Homo sapiens
cgcagatcggagacggggcctggaggtactccaaagattcaggtttactc

SEQ ID NO: 446377 - DNA, 100 bp, Homo sapiens
agaattcaattaaagtggctcagggaggtggggaagacagggctccagctaccacaggacgggctctgggtatagccgttccagtcagggacagccgtgg

SEQ ID NO: 446378 - DNA, 50 bp, Homo sapiens
caacggtggacacgtcattctgagaggtgctgctgatgtagagaaggtgg

SEQ ID NO: 446379 - DNA, 75 bp, Homo sapiens
ttggtcagagctccagaagttcctggggtaccaaagtctgatctcttgcacaccaaatcattaaggggccataaa

SEQ ID NO: 446380 - DNA, 117 bp, Homo sapiens
cgaacatcagggccctccagactcaggcgccccaacatgaaaattgccaccaaggccaacccttgggatggaaaatcactaaagcctgacagtgtccggtcccagctggagacgtca

SEQ ID NO: 446381 - DNA, 100 bp, Homo sapiens
gaaaaattcaagaagttgaaaaacgcttttcacgtcacctggagagatgcacagattgcatcatcagagaaaatacacccagtcattttgcggtgaaaac

SEQ ID NO: 446382 - DNA, 90 bp, Homo sapiens
tgaagatatcttgcgggatgctcaggtgcgagcccctatggttaatccaacattaggtgttcatgaagctgaccttttaaagacatcagg

SEQ ID NO: 446383 - DNA, 100 bp, Homo sapiens
gcgtgaagaggaggcggctgatccccgaggcttaccactcttctctcatggatcctgataccaaactcatcggaaacatggcactgttgcctatcagaag

SEQ ID NO: 446384 - DNA, 89 bp, Homo sapiens
gagccggcgcggggtcggcgctgggctggaggcggcggagcgcgagagcttcgagcggactcagtgtgacttcaccgaagaccagaccg

SEQ ID NO: 446385 - DNA, 100 bp, Homo sapiens
ccaggcaagcggggcgccgacctcgggcggccccggcccgcgcccttgcccctcggccgggcggacggagtctgcactatggaaacaacctgtcaatcca

SEQ ID NO: 446386 - DNA, 83 bp, Homo sapiens
gtagaattggcaaagttattgccagcttcctgcggagctccctgggtcctcagcagtgaggctggcctccctgcgtgacctgc

SEQ ID NO: 446387 - DNA, 48 bp, Homo sapiens
aacgattttgaaatgctaaattaccaaacgattccctggttatgattc

SEQ ID NO: 446388 - DNA, 100 bp, Homo sapiens
ggaacgatgggagacgttctgcacaagctccttaggagaaactaacaagaggaacacggtagatctagtcagctctatggctcttccacatgattcaaac

SEQ ID NO: 446389 - DNA, 95 bp, Homo sapiens
ttgtacaccgggtacaaggtgttttccagcgtgcctcagcaaaatggaaagtgtgatccctcacatccacaaatctctgattggaaagaagggac

SEQ ID NO: 446390 - DNA, 85 bp, Homo sapiens
aagggagaggggagcgaccctggggaccgactctggggaccctcgccgaagaggtggcttgctttggtgaaggtattcatacagc

SEQ ID NO: 446391 - DNA, 75 bp, Homo sapiens
ccggctgctgtgcagagaggaggccgagtcggttccagcaacagatagaaatgctttaagttcactctggggaaa

SEQ ID NO: 446392 - DNA, 82 bp, Homo sapiens
agttccccggcagcgggacccggcgaagacgcgaccgcggcgcgagtcaccatgggtgctttcttctgcgacctggtactca

SEQ ID NO: 446393 - DNA, 75 bp, Homo sapiens
tgttcgaatcatctgatatttatactgaatgagttactgggacggcaaaacagaacagaaaggcggagataaaaa

SEQ ID NO: 446394 - DNA, 76 bp, Homo sapiens
caccactacagccaccctggagggggtggggagcagctggctatcaatgaggtgaatgccacaggccaccagctgc

SEQ ID NO: 446395 - DNA, 127 bp, Homo sapiens
ctattctcagctggctctggatatctacggagggaccatgcttagctcaggatccgcactttcatttggacccgtggatacccattgaacagatgcttgaaacctgcaagtaatcttcagatcctag

SEQ ID NO: 446396 - DNA, 100 bp, Homo sapiens
ctttgctcttccatccgcctttgatcgtcttcctcttcagccatccaggtggctacagtcaacgacttccaaatgcaagtgctctgggaaaaattttcac

SEQ ID NO: 446397 - DNA, 75 bp, Homo sapiens
tcacaacagaatgggccgccacaaaccccatttggccctcaaacagtgttccttgcctgtatctccccttggttc

SEQ ID NO: 446398 - DNA, 75 bp, Homo sapiens
agagagcagagacagctcgtctggatgaatctggttatagatggacaagagacgatcattctgcaagcaggcaac

SEQ ID NO: 446399 - DNA, 51 bp, Homo sapiens
ggccaggccgccaaaaaggccgtcagttaaacacagtgggaatatcacttt

SEQ ID NO: 446400 - DNA, 100 bp, Homo sapiens
ccgccgccgcctccagggtgggcgcctttcgccgtggacgccgaccgtccgggacgagatcctgggtttgagcagtttaaaatgtcagaaagattgcatg

SEQ ID NO: 446401 - DNA, 101 bp, Homo sapiens
gcagcagctgccttcttggacgcctttcagaaagtggctgacatggccaccaacacacgtggctgctgagaactagccctagacctctgcgtgagggttct

SEQ ID NO: 446402 - DNA, 73 bp, Homo sapiens
cggcggcgcactgctttgaaacagccctgggatgcaccggccagaggccatgctgctgctgctcacgcttgcc

SEQ ID NO: 446403 - DNA, 100 bp, Homo sapiens
acttcagtaaaattgcttggttccttgtcacaagaacctccaacatgttctcctcagcagtttacttgtttcacgggggaaattgactgtatccctgtgg

SEQ ID NO: 446404 - DNA, 74 bp, Homo sapiens
ctctccgccccccaggaggggcgagagggagccgcagctgatgtcaggtcctctcagggtgcgccatcattgtc

SEQ ID NO: 446405 - DNA, 87 bp, Homo sapiens
ccaaggtgttcggtccttccgaggaagctaaggccgcgttggggtgagaccctcacttcatccgtgccggtggtggtgtgcacattg

SEQ ID NO: 446406 - DNA, 75 bp, Homo sapiens
gaaagctcagctggtggtgattgcacacgacgtggatcccatcgagagtggtgcacgtatcaacatctcagaagg

SEQ ID NO: 446407 - DNA, 75 bp, Homo sapiens
ctgtttatagtagactgaatccacatagagaaagtgatgggatgcagacagacatgctgaactatctggaagtcc

SEQ ID NO: 446408 - DNA, 82 bp, Homo sapiens
taagcctgcacagccgcggcggcagcagcagtgagaggtctcctccgggctggggctgagcaagccctcggagtgaccgtgg

SEQ ID NO: 446409 - DNA, 89 bp, Homo sapiens
cgcagccgcccgtggcgcttaagaaagaaggaacgagttgaagcagttaatatggctgaaggaatcattcacgacacagaaaccaagat

SEQ ID NO: 446410 - DNA, 100 bp, Homo sapiens
aaagaaaacaatttctcctgctctgcagcttctgttcagccaccattggttcaggcaatcttcagcggtgatccagaggagatccggatgctcatccata

SEQ ID NO: 446411 - DNA, 152 bp, Homo sapiens
aatgtgtggtggatgtggatgcaaacaaggttattcttaatcctgtaaatacgaatctttccaaaggagatgcccgacagaatgttgctgcgggatgtaaaagctcttaccctccactatgaccgctataccacctcccgcaggctggatcc

SEQ ID NO: 446412 - DNA, 117 bp, Homo sapiens
cgcagtcgccgcagcagccgagtctgacggcgccggttcgctgcccggtccgcccgcggtgagagggggcagtacccaaaggaaacgctacgaaagaatacatggagagcttgcagc

SEQ ID NO: 446413 - DNA, 75 bp, Homo sapiens
tttaccaaaagagaggcaccgctggaacactaatgaggcatttattaatacagcaaaagaaatttatgaaaaaat

SEQ ID NO: 446414 - DNA, 83 bp, Homo sapiens
aggcactggaagtggctgagtacctgaccccggtcctcaagcaattctgtggtgttcttggtcacacatttatggagtttctg

SEQ ID NO: 446415 - DNA, 75 bp, Homo sapiens
gaaagagaaacccggagggcgccgggtttctccttggaccaagatgactgatggaaaactctccacctctacaaa

SEQ ID NO: 446416 - DNA, 96 bp, Homo sapiens
acgagaggatgcggagcccgcagaacctccacagtcaagaggacgaaagtttcctacactactgaggtttaggggcactgtgaagcaaaagccacg

SEQ ID NO: 446417 - DNA, 75 bp, Homo sapiens
gggctcctggacttcgcctttcccgagccctggaggtggggagaaaaggataaggaagcctgtgtgggtaccaac

SEQ ID NO: 446418 - DNA, 75 bp, Homo sapiens
ccaaaggcctgtgtgctgcagaacccccagaccatcataatcaagccagggaggacttcaaccaggacatcggct

SEQ ID NO: 446419 - DNA, 82 bp, Homo sapiens
ccccctgccccgcgtccctgccgacagacaatgcagatcttcgtgaagactctgactggtaagaccatcaccctcgaggttg

SEQ ID NO: 446420 - DNA, 100 bp, Homo sapiens
aagaagaggctgcagaatatgctaaacttttggccaagagaatgaaggttccagcaacagatagaaatgctttaagttcactctggggaaagctggcctc

SEQ ID NO: 446421 - DNA, 98 bp, Homo sapiens
gtgaagagtgcctgaagaacgtctccaacggccggtttgtgggcgatgctgaccttgaaagacagaaattttcagatttgaaactcaacggaccccag

SEQ ID NO: 446422 - DNA, 100 bp, Homo sapiens
ttctgttttgcctgaatacatgatttaaacaagagatttccacagaagatggaggagatgtataagaaagctcatgctgctatacgagagaatccagtct

SEQ ID NO: 446423 - DNA, 100 bp, Homo sapiens
gtcgcgtgtctaggtgagtcgcggtgggtcctcgcttgcagttcagcgaccacggcggaaggtgctctaccagcgtgcacccaggaatatccaccgccat

SEQ ID NO: 446424 - DNA, 82 bp, Homo sapiens
tctctggggactctgaacttccctggtcgaacagttttttctaatggctattcaaggattgatctgaagttaaacaaaaaac

SEQ ID NO: 446425 - DNA, 100 bp, Homo sapiens
ccaacgagatcctgcacatgtctttaaacctcaaatatttgttgttaagtgatcttcctggagtaagagaaaaagaaaatcttgtccaagcctttaagac

SEQ ID NO: 446426 - DNA, 82 bp, Homo sapiens
gggtggaggttcgagcgctgttctcgctccggagccgctgcacatttcgtctgaccagtgcacaggacttcagggcttcctg

SEQ ID NO: 446427 - DNA, 116 bp, Homo sapiens
gggatgctggaggacatctgggggccacaaatgctccttctcctggagacgcaactcaagtgccggtggtggtgtgcacattgagccccggtatagacagttcccccagctgacca

SEQ ID NO: 446428 - DNA, 76 bp, Homo sapiens
ccaaggccttagagaagaagtcggagttgaagtaacgaatccagaaaactctggagagcccttcagagcatacaca

SEQ ID NO: 446429 - DNA, 96 bp, Homo sapiens
cagaaggactcccactggaagcgggccatagacctggcgctcttgcagttcctgggggacgcctgatctagttgaatctgaagatgtggacctgct

SEQ ID NO: 446430 - DNA, 100 bp, Homo sapiens
ggggaggaaggcggaggggggctcacaggtattatacctgaagaaccttagccctcgggtgactgaaagagatcttgtgtcattgttcgctcggttccag

SEQ ID NO: 446431 - DNA, 75 bp, Homo sapiens
aaggattccaagtaactcttatttggcatggaggagtgacggcaggaactttctgtgctctgacaacccttatgc

SEQ ID NO: 446432 - DNA, 75 bp, Homo sapiens
tgaagggattggtctatgaaacatcagttcttgatcctgatgagtgcacagccagagaacaacacatcacacaca

SEQ ID NO: 446433 - DNA, 99 bp, Homo sapiens
tttagcaaggattcaaggctttcaggtagcacaggcggagtgcagcggaggcccctgccgctgccgtcatgccgttcccgtttgggaagtctcacaaat

SEQ ID NO: 446434 - DNA, 82 bp, Homo sapiens
ccgaggtctccgcccgcaccatgcggctgggcaggataaagataaagtttctctaaccaagaccccaaaactggagcgtggc

SEQ ID NO: 446435 - DNA, 74 bp, Homo sapiens
tgacacactggccctgccccggggctgttcccgacacagcagtgcccacagaggcctactgactgcaggaagca

SEQ ID NO: 446436 - DNA, 101 bp, Homo sapiens
ttggggggcggctgggtttacccttcgagcaatggctgccatccggaagaaactggtgattgttggtgatggagcctgtggaaagacatgcttgctcatag

SEQ ID NO: 446437 - DNA, 75 bp, Homo sapiens
ctcggggcctccgcagcgacaacatggaggccgtgaagaccttcaatagcgagggcacaagagactatagtcccc

SEQ ID NO: 446438 - DNA, 98 bp, Homo sapiens
gcagcaatttttgccagtgcaatacatgatgtagatcatcctggtgtgtccaatcaatttctgatcaatacaagaaatctggcattttttaaagtttg

SEQ ID NO: 446439 - DNA, 101 bp, Homo sapiens
gatgggaacttgtgtgttaaagtaacagatgatttagttagtttgaggaagaggcaaagaaccctggcctggaaacacacaggaagagaaagagatcaggc

SEQ ID NO: 446440 - DNA, 100 bp, Homo sapiens
ctttgcttactgcagtgtccagacagttacaggacaggctaacaccaatggaggctttacttcagacaagagttgaaactgtgggacagccagacagaag

SEQ ID NO: 446441 - DNA, 86 bp, Homo sapiens
acgggaaaacgtccatctccaggtggattgttgaggggcaggtgtcatggagaaactccagctgggcccagagattctgcagcggg

SEQ ID NO: 446442 - DNA, 100 bp, Homo sapiens
tttgtgaaggagcagggagaagaggagctgctgagggtctgggaggggctgaacgtggtgaagacaggccgagtgatgcttggggagaccaatccagcag

SEQ ID NO: 446443 - DNA, 75 bp, Homo sapiens
cggcgggagctgtatggccgccgtcgcaagaagcttgtccagccggaagccctgagggcagctgttcccactggc

SEQ ID NO: 446444 - DNA, 90 bp, Homo sapiens
acagagacaacaccgagtatgagaatggcaccactgcaagtggaggtgagaacgagcgtgaggacctggagcaggagtggaagcccccgg

SEQ ID NO: 446445 - DNA, 100 bp, Homo sapiens
cctgagcaacatccgcgagttcctgcgcggctgcggggcttccctgcggctggagaaggacagaataacgggctcccagattcacaagccccaccaagag

SEQ ID NO: 446446 - DNA, 100 bp, Homo sapiens
gccgccacctgcagcccaggccagatgtgcggccactacacgcagcgagaattagaactgcagcgtcagcgtgacttgcataagatcaagcagcttcagc

SEQ ID NO: 446447 - DNA, 50 bp, Homo sapiens
caacttaatgcccctttgtggcaggaggagactgcaagcatcgggatgcc

SEQ ID NO: 446448 - DNA, 75 bp, Homo sapiens
cgaggctgatggagcgaagccaggaagaggatgcggagacgcgggatcacgaggaatacaacaccaatgtataga

SEQ ID NO: 446449 - DNA, 87 bp, Homo sapiens
cttctgaaaccaggaagtggacggaaacccgaaccctagcggagattgccaaagtggagctggacaatatgccactccgtggaaagc

SEQ ID NO: 446450 - DNA, 100 bp, Homo sapiens
aagaagctctagtttccagtggagtcttgaacaggaacagcatatgccatatatgagctggctgtggcttcatttcccaagaagcaggagtgacttcagt

SEQ ID NO: 446451 - DNA, 83 bp, Homo sapiens
ggcggccgcggggcccgagcgcaggtattagaaaactactcggatgctccaatgacaccaaaacagattctgcaggtcataga

SEQ ID NO: 446452 - DNA, 97 bp, Homo sapiens
cccaggagaatcaattaaagccattgaaactcagccacctgtgacaaatttgagtgtctctgttgaaaacctctgcacagtaatatggacatggaat

SEQ ID NO: 446453 - DNA, 80 bp, Homo sapiens
acagccctgtgtgacaccaagataagtaactgggttacccagaccaaactttggccatttaacggatccatttgacacac

SEQ ID NO: 446454 - DNA, 75 bp, Homo sapiens
cagaactgcagggaaacagccatcatgagagatggaatttcaccgtgttgcctaggctggtctggagctcttgat

SEQ ID NO: 446455 - DNA, 51 bp, Homo sapiens
gattcggatttattaagcttttttctggatatgccgcagaaggatccgtgc

SEQ ID NO: 446456 - DNA, 50 bp, Homo sapiens
cctgactctgggagcacgcagaaataatgcaaaaggtgtcccaaggctcc

SEQ ID NO: 446457 - DNA, 49 bp, Homo sapiens
aaacatgcaactctgaagaatcaggggtgccgacgccaccgccgagccc

SEQ ID NO: 446458 - DNA, 74 bp, Homo sapiens
ccggccctctcgcgctgcactgtctctccgacgcaagactgtcccggcccgggagcaggacatcgagactttac

SEQ ID NO: 446459 - DNA, 82 bp, Homo sapiens
ctgcgttctgtggtggggataagcagacccttccagatgtccagctcgccgctgtccaagaaacgtcgcgtgtccgggcctg

SEQ ID NO: 446460 - DNA, 98 bp, Homo sapiens
tcatcagagggaagatctttttcctcaattgattactttctatgaagacaaaaattttcaaggccgtcgctatgactgtgattgcgactgtgcagatt

SEQ ID NO: 446461 - DNA, 119 bp, Homo sapiens
ggggacactgcagccggagcccgggaggggccgcgccgccaccgtctgaactaggatgtcccgacatgaagggcacctttcacagccagcaggcattggaatatggcaccaaactcgtt

SEQ ID NO: 446462 - DNA, 97 bp, Homo sapiens
ggacttcaaatgctgtttgtattccagagactaggatccaaggagctggttctgctggttggaccaaacctcgtgagccagccacccctgacccaaa

SEQ ID NO: 446463 - DNA, 75 bp, Homo sapiens
tttggggcaagctacggaacagtgaaagccctgtgtaaggaatgtgtagtagaacgttgtcgcatattgcgtctg

SEQ ID NO: 446464 - DNA, 98 bp, Homo sapiens
actggtccacggagtgtatgaccacaaacagccatcaagggctggagcggctctgggctccggaatcgcccgcagccggtactgcgggacccactgcg

SEQ ID NO: 446465 - DNA, 90 bp, Homo sapiens
catccaggagtcagtttattactggaaagaagctgaatatggtgggcatgatcagatagatttgtatgacgatgtcatatctccatctgc

SEQ ID NO: 446466 - DNA, 100 bp, Homo sapiens
ttggaacaaggattttggatgaagaagtttttgaggaatttgctgattcccttggaattccgtttttggaaaccagtgctaagaatgcaacgaatgtaga

SEQ ID NO: 446467 - DNA, 82 bp, Homo sapiens
actcagcgtcgctggcagccgctgtacttggttcgagaacttgtcttggacaattgcaaatcaaatgatggaaaaattgagg

SEQ ID NO: 446468 - DNA, 100 bp, Homo sapiens
cgccagccatgagctccacgcagttcaacaagggcccctcgtacgggctgtcggccgaggtcaagaaccggttccgatgaagttaaattccgtcaagatt

SEQ ID NO: 446469 - DNA, 82 bp, Homo sapiens
aggctcctccctgcgacagaccttcagcttcctctcgggcatgaccggaaaggccaagggaactactggagaccacgtgccg

SEQ ID NO: 446470 - DNA, 98 bp, Homo sapiens
ctcgccgccgcccgtctcctgtcgcgcagcttcctccttttttgaagaggcgcagtctactgaagcatacctgaaggggctccaggactccatcagga

SEQ ID NO: 446471 - DNA, 100 bp, Homo sapiens
ctatcagcaggctccgggctgaagattgcttctcttctctcctccaaggttcaaaatcaaaggaagcccagaagggaggtcatttttacagtgcaaagcc

SEQ ID NO: 446472 - DNA, 100 bp, Homo sapiens
tcccgccaccctgggcggatggcgctgaattcttgggaaccctctcctgcccctttcactcctgtaccacgtgtgtctcctctgagcctccggcctccat

SEQ ID NO: 446473 - DNA, 100 bp, Homo sapiens
gaggaacgcgctaaggcaaagcacctggtcttcgatgccaagaacatgatggctgcctgtgacccccgccacggccgatacctcaccgtggctgctgtct

SEQ ID NO: 446474 - DNA, 98 bp, Homo sapiens
ctgccatctcccagtcatgtgtgaggaccgaaatttgccctatgtctatatcccctctaagacggatggccaggccatgttatgggatctcaacgaag

SEQ ID NO: 446475 - DNA, 97 bp, Homo sapiens
ttgcctcatttgaggagtgggaacaggcttcggcgaacacaaaggtgaaaggtgtagcagtcactcggcctacacccacagcatcgaccttgtgaac

SEQ ID NO: 446476 - DNA, 100 bp, Homo sapiens
ggaacatggacatgaagaggaggatccacctggagctgaggaaccggaccccggcagctgagctgacatggacccaaatcctcgggccgccctggagcgc

SEQ ID NO: 446477 - DNA, 75 bp, Homo sapiens
acccgtccatcttcgggatcttcgacgggcacgggggagagcttaacaaacaacagttgcagttactgaaagaac

SEQ ID NO: 446478 - DNA, 76 bp, Homo sapiens
gcaaatcccctgctcagggtcttcatccagaaacgagatgatatcatcaagttgaatcgaaaggaagggaagaagc

SEQ ID NO: 446479 - DNA, 82 bp, Homo sapiens
gacgcggacatggtcatgagctttgtgaacctggacatatctgaagagatggattaagaatgctttggattaaggattgtgg

SEQ ID NO: 446480 - DNA, 74 bp, Homo sapiens
aaatgaagccactgattagcaatttaaagatcctctccaagtaatgtgtgtggctggtattggacttgttgtat

SEQ ID NO: 446481 - DNA, 75 bp, Homo sapiens
ttggcaccacacattactctgaatccaacagctggagtaaaagggacattgggaagattagttggaatttttgag

SEQ ID NO: 446482 - DNA, 100 bp, Homo sapiens
cagcccttcccgccccaaagcaggccaaacgtaccaagaaagtcgggatcgtcggtaaatacgggacccgctatggggcctccctccggaaaatggtgaa

SEQ ID NO: 446483 - DNA, 83 bp, Homo sapiens
tggaaaggctctcagtgaaaaagatgtccagaaggcttcttgggggaatattgtcaacatcgagacccctgtgagaagaaccg

SEQ ID NO: 446484 - DNA, 83 bp, Homo sapiens
gaggtgatgctggagaactatgggaacctggtctcagtggtcattatttagaagcaaggtccttgaatgagcgagattatcgg

SEQ ID NO: 446485 - DNA, 100 bp, Homo sapiens
tgctggttggcaatgatgtatcgaactctctttgctcacaagttaccaaaaaaaaaagagccaacatgttggtattgctggctggtatctttgtggtcca

SEQ ID NO: 446486 - DNA, 74 bp, Homo sapiens
tgctccggccgcggccagcggagccctgggctggggcaggagccggtctctggcctatcaggaggacaactggt

SEQ ID NO: 446487 - DNA, 99 bp, Homo sapiens
accgacatggaacagggactcactgggggtctctgagcggcccctgatgttcctgttggacactcctggcgtgctggctcctcggattgaaagtgtgga

SEQ ID NO: 446488 - DNA, 98 bp, Homo sapiens
ctgtggcctgcgcagcttccgtgagctgacctatcagtatcggcagaacattcctgcttccgagttgccaggacccttgaacatctgtgaagaaatga

SEQ ID NO: 446489 - DNA, 94 bp, Homo sapiens
ggaagatgttcagcgtagagtcgctggagcgggcggagctgtgcgagagcctcctcacttgggtcatcatcagatttgaaatatttaaagtgga

SEQ ID NO: 446490 - DNA, 75 bp, Homo sapiens
aattacaggtgtgagccacggcgccgggccccctagggattttcagcaatctgcacatcgtgctgccacacgagg

SEQ ID NO: 446491 - DNA, 82 bp, Homo sapiens
tacagaactgccccatcgatgtgcggcgtccgctgtataaggtaactgtgacatttgatgatgtggccttatatttttcgga

SEQ ID NO: 446492 - DNA, 118 bp, Homo sapiens
atgaggacgtggaggtgggaaggtgtgtccggaggtttgcaggggtgcagtgtgtctggtcttatgaggaatatattattcgagtgcaaagaggaatttctgtggaaaacagctggca

SEQ ID NO: 446493 - DNA, 128 bp, Homo sapiens
tcctgggtggcatggcgctcctgctcctccaggcgctgcccagccccttgtcagccagggctgaacccccgcagttatcagggaataccaagagcagagagagcatccaggaacctagatctgattac

SEQ ID NO: 446494 - DNA, 75 bp, Homo sapiens
aaagacctgtggctattaagataggaaaatgtttataggaggccttagctgggacactacaaagaaagatctgaa

SEQ ID NO: 446495 - DNA, 74 bp, Homo sapiens
agaaagagtggggcgatgatgaagaagctgtttgatgaagacaatccagtacacaagtctggaaccagatacat

SEQ ID NO: 446496 - DNA, 98 bp, Homo sapiens
gaagaactgggcagcccggcagcccgagccgaccaaatttgactacctgaaggaggagcactcctgtaggaggcctgctgatggcatttcagaagtac

SEQ ID NO: 446497 - DNA, 75 bp, Homo sapiens
gaacggctcccacagccgggcgttgggggaaagaaatttgaagatgctaaacttgctgctgccatctctgaagtg

SEQ ID NO: 446498 - DNA, 100 bp, Homo sapiens
cccctcttcagtgcaggaatatgttagcgttgtatcttgggagaaagacacagtctccatcatcccagacatgcacatgatggtgtccaagccagaacag

SEQ ID NO: 446499 - DNA, 74 bp, Homo sapiens
gaaaaagtcgatctggagcttttcccctccccgggagaaattgtcgtaaatgaagtcaattttgtgagaaaatg

SEQ ID NO: 446500 - DNA, 82 bp, Homo sapiens
ctcggagaaacaggcgccgcgggctccgcgcccggccggacccgggcccgaggtacctgccgtgggcagatctgagctttct

SEQ ID NO: 446501 - DNA, 89 bp, Homo sapiens
gaagagctccagcagatcattgattgtctggataccagcattcctgagacaatccaaatccctcactttaaggaggttatcatcatggc

SEQ ID NO: 446502 - DNA, 100 bp, Homo sapiens
gcgcgggggctccagcctccgccacgtagtctactggaactccagtaaccccaggttccggaatgaggactacaccatacatgtgcagctgaatgactac

SEQ ID NO: 446503 - DNA, 74 bp, Homo sapiens
atgatgaagattgaggagtatatcagcaagcaagccaaagcttcagaagatcccagatgcagtgactggttact

SEQ ID NO: 446504 - DNA, 83 bp, Homo sapiens
cgcaaccccagatccatttacactttacacaaacggggattcagcgtccgatcctttggaacagggactcacgtgaagcttcc

SEQ ID NO: 446505 - DNA, 50 bp, Homo sapiens
cctgggacaccgcggaagtcgggaaatgatcaggagaacctcagtctgac

SEQ ID NO: 446506 - DNA, 75 bp, Homo sapiens
cggcggccgcagtggcgtcctggagccctcctcagggacaggccttcagtatttggcatcacctttacatggagc

SEQ ID NO: 446507 - DNA, 99 bp, Homo sapiens
tgagccagagggagttgagccgcggcgtgtgcgccgagcgctactcgcaggaggtcttcgaggctgtggccaggccagctgggctcggggagcgccagc

SEQ ID NO: 446508 - DNA, 75 bp, Homo sapiens
cgaggtgcacttcaaaaacaagccgctccgggaattctgaagttctgggcctttctcagaagactgtaatgtacc

SEQ ID NO: 446509 - DNA, 95 bp, Homo sapiens
agtagataaagctggcagtaagaaatgctaaggaggaaaggtcccggagagagcgagtgcgtcagtctcgaatggacacagatctggaaaccatg

SEQ ID NO: 446510 - DNA, 84 bp, Homo sapiens
agcaaggtcggcagagcaaggggcttacgcagaaggacctggccacggccctgggctgcatcttgtacctgctgtgcttccggc

SEQ ID NO: 446511 - DNA, 74 bp, Homo sapiens
gaaacagcttgaatcccttgaccttactgatgagaaaaaggccaagaataaaatctttatgaactaacaagatg

SEQ ID NO: 446512 - DNA, 100 bp, Homo sapiens
ggccaaagtcagtaaaaaggagctcaactccaaccacgacggggccgacgagacctcaggtctgccatcatggatgttctcgcagaagcaaatggcacct

SEQ ID NO: 446513 - DNA, 114 bp, Homo sapiens
caggaacaagtgtgggagaggaagcggcggcggcggcgccgggcccgggggtggtgacagcaggtctgaggtaagaatgattgatgttggctgatattggagtgctcattcaca

SEQ ID NO: 446514 - DNA, 88 bp, Homo sapiens
gcgggtcaagtgcagtacctggatctcatcaaaaaggacaccagcaagctgttcaatgaggagatacagaaggtggtcatggcactag

SEQ ID NO: 446515 - DNA, 90 bp, Homo sapiens
aggctgacgagctcactcacagagcctgagactcgctctccgtctccagcaatgacgccagtccacccgcatccgtggcttccctccagc

SEQ ID NO: 446516 - DNA, 75 bp, Homo sapiens
ggggcgccggcgccgccgcccccgggctcgcggcctgcagctgatgcttttttcaaagccgctataagccttgtt

SEQ ID NO: 446517 - DNA, 90 bp, Homo sapiens
agggccaccacctgcagcacatcagcgaccgcgagatgcccgaaggagcagtgaggagaatgaataccttccaagaccagagtggcagct

SEQ ID NO: 446518 - DNA, 76 bp, Homo sapiens
cgacgagctgagcttcaaaaggggggacatcctcaagggattgtcaatgaggcagatcagattccgatttgacggg

SEQ ID NO: 446519 - DNA, 100 bp, Homo sapiens
ccagtgaccttgcagccagtgacctcaaaggatttcagccacagagtgcagacatcctcagcaccatcggctatgacaacattatccaacatctgaacaa

SEQ ID NO: 446520 - DNA, 90 bp, Homo sapiens
gggagcctattgtccagcccctcagctaaagatgtgattaaagagattgaagactttgacagcttggaggctctgcgtctggaaggcaac

SEQ ID NO: 446521 - DNA, 50 bp, Homo sapiens
gatttctgcatttccaactgaggctcagttagctctagaggccattcttt

SEQ ID NO: 446522 - DNA, 100 bp, Homo sapiens
gcggcccttctcacgtcccatctcctgcagtcgcgggtccaagcctgtagccccaaatcggataatctctgcagctgataacaagcaaaagagaagccag

SEQ ID NO: 446523 - DNA, 74 bp, Homo sapiens
ggaacatggactgaagtatccagcgctcattgggaatttagttaagttctttccaaatggcaatgcatttgcca

SEQ ID NO: 446524 - DNA, 98 bp, Homo sapiens
gaactcgatgactgcgtgcagactgatgaggaccccatggctgggggttatggagtgatgggtgacgatggttctattgattatactgttcacgaagc

SEQ ID NO: 446525 - DNA, 83 bp, Homo sapiens
ttcgtgtctggctctggaattgctactgctgcctctgtcactcctggtgaccagcattcaagattcttctaacagagaaaatg

SEQ ID NO: 446526 - DNA, 104 bp, Homo sapiens
agtctcagaactgttccttcagccaaagaaacaagccgtggaataggtgtatcaagtaatggtgcaaagcctgaagagccaggtgagaatttcaaggattatcg

SEQ ID NO: 446527 - DNA, 82 bp, Homo sapiens
gcggatctcaccgccgctcagggttggtgaaaaccctgtgtccttggagaaagctggttcccgttttccagagggggagccc

SEQ ID NO: 446528 - DNA, 95 bp, Homo sapiens
cccgtctgtgtgagccccctggggtgtgacgacgacctgccctctctctgctgcatgcactattgctgtaagcatcaagccctttgcacagccag

SEQ ID NO: 446529 - DNA, 100 bp, Homo sapiens
ttttaccacttgtgcccatatgatctgtaacatggaggagctggaaaaggagagaagatgactgaggaggaggtggagaccgttctggcaggacacgagg

SEQ ID NO: 446530 - DNA, 100 bp, Homo sapiens
ttggccagccacctctctcaactgtatagctatcctctttttaagggctgggagaactcaggaagcctggcgcagttgtgtagcagttgagtaatgctgg

SEQ ID NO: 446531 - DNA, 100 bp, Homo sapiens
tgataacgaagaccaggaggcagacggggaagaggacgaaggaaccagctcttctgtccagagagcatttctccttggaccaagatgactgatggaaaac

SEQ ID NO: 446532 - DNA, 75 bp, Homo sapiens
ttcggaccccccaacaccctctacgaaggcggctacttcaagaggctgggaggcggcagaatgcagccagaggag

SEQ ID NO: 446533 - DNA, 100 bp, Homo sapiens
gattctgtgctttggaggaaaagtgtgaaaatatacagaaaccacttagtagtgtccaggaaaatatacagcacttagaccatgctcagcctccaagcag

SEQ ID NO: 446534 - DNA, 98 bp, Homo sapiens
aaatcaagcctttctggcttccgattgttggagaagtggaaacagttaatggagtatgcaatgaggtctcattcaggaacgtcgcctgataacactgc

SEQ ID NO: 446535 - DNA, 90 bp, Homo sapiens
cattttattgcattgattgtgcgttctcgattttacagaggtcggatttgaatccactgcttttcaactcatgaacatcactgctggcac

SEQ ID NO: 446536 - DNA, 74 bp, Homo sapiens
gtcagcaaaggttcagccctccaagccccgtgacccccagcacaccagggagcccgccagtgagtcctgggcct

SEQ ID NO: 446537 - DNA, 100 bp, Homo sapiens
gaggcaccgggatcgtgaccgagaccgtgaccgagagcgtgaccgagagcgcgaatatcgtcatcgttagaaggccctcgggaccaaggatcacgtcatg

SEQ ID NO: 446538 - DNA, 100 bp, Homo sapiens
gaaagacacagtctccatcatcccaggatgaagatgcatcagggggcgatcaagatcaggaagaaagaagatggaacaaaaggactcagcagatgcttca

SEQ ID NO: 446539 - DNA, 75 bp, Homo sapiens
catgttctgccagatgaggtcgagcactgccagatagtgccaatcttggcagcattgagggacagagttcacacc

SEQ ID NO: 446540 - DNA, 51 bp, Homo sapiens
aagtacaatggtgggcttaattttaggaattaaaactgctattttggttgg

SEQ ID NO: 446541 - DNA, 108 bp, Homo sapiens
aatggaaatgagtacatgtgaagaaccaagaagccctaatggcccatcaccaattgcaactgcttcaggacaaaggtgagagaacgccgagccgtcgccgcagcctcc

SEQ ID NO: 446542 - DNA, 75 bp, Homo sapiens
gcagcccatggatagccagccccagagagacctgtcggccatggagcctaatgatagtaccagtaccgctgtgga

SEQ ID NO: 446543 - DNA, 100 bp, Homo sapiens
agacattcaacacctttacatttagcaggcatttctcattgcaattgtggtaccagatgttgagacattatgttcctgggcccaaaagagaggatttgaa

SEQ ID NO: 446544 - DNA, 73 bp, Homo sapiens
catcttggcaggagtgaaaggactgaccatgctggatcacgaacagtaatagctcttcaagtctgcaataaaa

SEQ ID NO: 446545 - DNA, 100 bp, Homo sapiens
cttctagacctggggacctgtgcccgaggaccttagactgatgggtgcccagctctgcttcgaggccagccagctgcgggccgtccagcggctgtgccac

SEQ ID NO: 446546 - DNA, 90 bp, Homo sapiens
gtggtttctacatatatctccaaaatgaaagtaatttatccagcagttgaagaggtctctttattactatccacgatcgagggcatattg

SEQ ID NO: 446547 - DNA, 83 bp, Homo sapiens
tcgcccgggtcctcctagaaattccccccgaagaagactcccccacatctggagtgggcccaacgacctacggcactttgacc

SEQ ID NO: 446548 - DNA, 100 bp, Homo sapiens
gaaagagtcaacagcagtggcaacagtccagatgtcagagcattccttcaaatggacagtccaaaacaccagtcagatccatctgaagatgaggatgaaa

SEQ ID NO: 446549 - DNA, 100 bp, Homo sapiens
cgggtaaagttccagggaggccgcgaaggttccccctaaaggactcaaaacgtctaatccaatggttaaaagctgttcagagggataactggactcccac

SEQ ID NO: 446550 - DNA, 75 bp, Homo sapiens
tggtctggggcttcgcgctcttcttcttcttccagggactcagcacctggcagctgctggagccagttctgcttc

SEQ ID NO: 446551 - DNA, 75 bp, Homo sapiens
accactggaagatgactgtcaagttttagaagaggaatgtgtccttggtctgactgacaggtgtcgctttttcat

SEQ ID NO: 446552 - DNA, 74 bp, Homo sapiens
agaacacgatcacgttctagatcacatactccaagaagacaagtcttttatgacatcaagagaaatgatcccag

SEQ ID NO: 446553 - DNA, 83 bp, Homo sapiens
ctagattgtttttgtaatcttcccagatccaagttatctccagaagaagaagagaaaaggagaatccgaagggaaaggaataa

SEQ ID NO: 446554 - DNA, 153 bp, Homo sapiens
gaacttgaaggccctctacgtggtgcaccccaccagcttcatcaaggtcctgtggaacatcttgaagcccctcatcaggggcagaggcctggcctccaggggtttgtcttaaatatgtcgggggagaccaatttggacatgtgaacatggtga

SEQ ID NO: 446555 - DNA, 75 bp, Homo sapiens
ggcgccgctctccgagctcgatccgctgctcgcacgggagccagctgggtggagtggtgaaaggacataggaagg

SEQ ID NO: 446556 - DNA, 94 bp, Homo sapiens
cctcgttgcggccatcgccctgccggaccgcgcctcaggctcccccagacaatgcagatcttcgtgaagactctgactggtaagaccatcaccc

SEQ ID NO: 446557 - DNA, 100 bp, Homo sapiens
ggggagccagcgagcgcgccttcggcattggccgccgcgatgtcagctcagtgctgtgcgggccaggcatggaagaggagatggttcgtgttacgcagtg

SEQ ID NO: 446558 - DNA, 122 bp, Homo sapiens
ttatgcactttaccctttttaatattggccaatcatcaagacaagccagcagctcgctcagtacaagagcaacatggccaacgccctggccagcgccacttgcgagcgctgcaagggcggct

SEQ ID NO: 446559 - DNA, 74 bp, Homo sapiens
cttcttttggaacagaagaaatatctagaggatgtcaaactccaggcaaggcaatgtggctctgcaaacatctg

SEQ ID NO: 446560 - DNA, 100 bp, Homo sapiens
taaggaccactgggctaaaaatttgcctttcctcatagaagactacgaagagcagccagggttgcaaccccacataaagaaattatctcattcaaagcta

SEQ ID NO: 446561 - DNA, 83 bp, Homo sapiens
ccaatgacatgcaagttggacagacgggaaaaatagtagcaccagtaaatgaaattgcctttataaatacccttgaagcccag

SEQ ID NO: 446562 - DNA, 87 bp, Homo sapiens
gaaactaaattttacaatggtctcttgttttatggagaaggagtggcagttcttggattgaatttctaaataatgaagatgatctta

SEQ ID NO: 446563 - DNA, 90 bp, Homo sapiens
cctgcttgggcaggctcagaaagagactacacatacgaggagggctttgttcgcgggggtcacagctctcatggctgcagctagcgtgac

SEQ ID NO: 446564 - DNA, 100 bp, Homo sapiens
tcacgtctacttcggcatgaagacccgcagcccgaagcccctcctcaccggagtctactcttcatcttgtgttgagacttcgtggtggtgctaagaaaag

SEQ ID NO: 446565 - DNA, 96 bp, Homo sapiens
cagctgtgggagccccgagaacgcctccagcggggatgacacagaaggaagggaaaaggccgaggcatcagcgtgtgaagaccgcaaagacgatcc

SEQ ID NO: 446566 - DNA, 97 bp, Homo sapiens
aagagacatgagatcatggtggccaaacccacagggctgaagaagatgcagagcagcctgaagctggtggactgtatcatcgaggtccacgatgccc

SEQ ID NO: 446567 - DNA, 100 bp, Homo sapiens
ctggattgcccatcaggatgattttaaccagcttctggccgaactgaacacttgccatgggcaggaaaccacagatttatcatagaatccccgactcaga

SEQ ID NO: 446568 - DNA, 100 bp, Homo sapiens
gtgaccgagagcgcgaatatcgtcatcgttagaagaattagacctttacgagaagcacagttttgtcttcagtttcctctccccccacccggaatggcct

SEQ ID NO: 446569 - DNA, 99 bp, Homo sapiens
gctgaagatggctactctggagttgaggtggtgttatcaaggagaagaaattcctgccttgaccagatgtgtggagcatctacaaatgaatgaatagtt

SEQ ID NO: 446570 - DNA, 100 bp, Homo sapiens
aagagggctgcaaggtgggaagtgaagtcagtgcctcagttgctgggtacaggcatccttcacctgctattgttgcaagaacagtcagaattttacatac

SEQ ID NO: 446571 - DNA, 50 bp, Homo sapiens
ctcctcggtatcagaagctctgtaagaatttaagaagaggattacctcag

SEQ ID NO: 446572 - DNA, 76 bp, Homo sapiens
ggcgaagatcgccaagactcacgaaggaatattggtataatagcatatatgttgttaactcacacatcaccatttg

SEQ ID NO: 446573 - DNA, 100 bp, Homo sapiens
aggtgacgaggacctagactgtgacaacgaccacgtctccaaaatgagtcgcatcttcaacccccatctacaatgcagatcttcgtgaagactctgactg

SEQ ID NO: 446574 - DNA, 87 bp, Homo sapiens
tcagaagttcatggatgctgtcaacaagaagagcagttcccaggatctgcataaagaaactggcgatggaatatgagaggagccctc

SEQ ID NO: 446575 - DNA, 100 bp, Homo sapiens
agacacaacctctttataacataaggttttgcggctagttggctattcaagaaacctcgcccctctgaatgtcatactgtaatctttaaggaagaaagct

SEQ ID NO: 446576 - DNA, 100 bp, Homo sapiens
acattaaaaactactcatgtggatcttctaagggtgtgaggatacaggcgtcaaagaccccgtgctgagacagctccataacaacatgcagatatttggc

SEQ ID NO: 446577 - DNA, 98 bp, Homo sapiens
agaatacatgtgcaatgctgacaacttttaatgagattgacatgagttccgccaagacgtcaccaagtgtcttttcctaggtattatttccattccac

SEQ ID NO: 446578 - DNA, 100 bp, Homo sapiens
cgacactctgcaagattctctcctgaagtcccagatacactgaagagatggtgccttggcacccttgcctggaactcgttagcaactgcgagcagaagct

SEQ ID NO: 446579 - DNA, 50 bp, Homo sapiens
gaagccgaaaaaggcagcagcgaaggtgaataaggaatgtgtccgaggtc

SEQ ID NO: 446580 - DNA, 75 bp, Homo sapiens
gcaaaattgactactttttatggagcatttggaccagaaaaattcagggcattgagcaagtgcagcaaagtagag

SEQ ID NO: 446581 - DNA, 100 bp, Homo sapiens
tctgggccttgaacattccgaaactgtcaagattggcaagaatccacattcatctcaatggaaggatcctgccttaagtcaacttatttgtttttgccgg

SEQ ID NO: 446582 - DNA, 73 bp, Homo sapiens
ttggtggtaaaagacccacatttggaaaatcttgacaccattattaagatatgtaactggttcatcaatgccc

SEQ ID NO: 446583 - DNA, 82 bp, Homo sapiens
tgagggtgaggagaagtatgaggtggtgaaactcaagatccccatggacaacaaggagcccgagcgggaagaagttccgcag

SEQ ID NO: 446584 - DNA, 83 bp, Homo sapiens
cggcgctttcggcgcgggcccgggccccgagcgcccgaacaggggacggcaaaacagaacagaaaggcggagataaaaagagg

SEQ ID NO: 446585 - DNA, 51 bp, Homo sapiens
gcaagaggatcgtcctgccggagcccaggacaaccctccatatgataaggg

SEQ ID NO: 446586 - DNA, 75 bp, Homo sapiens
ccagtaccatcgacagagcataagtacctctggcttcccctctcttcaactaaatctcatctgttctgagtgtgg

SEQ ID NO: 446587 - DNA, 100 bp, Homo sapiens
cggcagccgaggccgcgaactgcatcatggagttctgggaggtgatcagtgatgaacatggcatcgaccccaccggcacctaccacggggacagcgacct

SEQ ID NO: 446588 - DNA, 100 bp, Homo sapiens
ccgaaacaccggtaggagcggggaggtgggtactacacaaccgtctccagccttggtctgagtggactgtcctgcaggttggtcaaagaaaaagtgatgt

SEQ ID NO: 446589 - DNA, 100 bp, Homo sapiens
ctggaacgacagccgcttcactgacctaccccctggacctggtcagagcgcggatggccgtaaccccgaaggaaatacctttctgcccgtgaagtggatg

SEQ ID NO: 446590 - DNA, 90 bp, Homo sapiens
acagacgtcccccaaaacccctcgcctggctcggacccacggagccggcagcccagcactccggggtttgttaaagttgttaagaataag

SEQ ID NO: 446591 - DNA, 98 bp, Homo sapiens
cccatcaaatcagagagaaggaatccaccttcttacgctatggcaggacctgaaggagaagaaggagaaggtggaggagaaggcaagccggaaagagc

SEQ ID NO: 446592 - DNA, 90 bp, Homo sapiens
atggactactatgactctgaacagttggcgtgcagtggtgtgatctcagctcattgcaacctctgcctcccggactcaagcaatcctccc

SEQ ID NO: 446593 - DNA, 98 bp, Homo sapiens
gcctataaaatgcttcaagtagtcctgtgctcaacattgcttatcggttttcctcctccaccaggcgctccacctccatctcttataccaacaataga

SEQ ID NO: 446594 - DNA, 83 bp, Homo sapiens
ggagagagcgtgaatttgcctcggggacgcctctccagccttatgccagcctggaccatcttggaggcagtgtaggatcatgg

SEQ ID NO: 446595 - DNA, 83 bp, Homo sapiens
cggcacacgcgcagccccggcctctcggcctctgccggagaaacaggagaatggggtactaagagaaaagcacgaagctgtgg

SEQ ID NO: 446596 - DNA, 100 bp, Homo sapiens
gaaggcatttccagcccgcccacccagttaaacacagtgggaatatcacttttgatgagattgtcaacattgctcgacagatgcggcaccgatccttagc

SEQ ID NO: 446597 - DNA, 75 bp, Homo sapiens
tgcggctgcccccgggcagcaagggggaggcccccaagtcccaggacatcaaagctctgcagaaagaactcgagc

SEQ ID NO: 446598 - DNA, 83 bp, Homo sapiens
cggagatggtgcagaagatggaggaggagccttcacgtaaatgggtccagtcatgcctcccagtaagaagccagaaagctcag

SEQ ID NO: 446599 - DNA, 110 bp, Homo sapiens
cactagtcgcgggagccacgcagaggacgccggaacaccctggaagccgagaaatgattaactgctgaagtactgatcgagttctgcatttcttcaatgaggaactacag

SEQ ID NO: 446600 - DNA, 49 bp, Homo sapiens
gcgagcgccccgccatcgtcccggatgttgcttcagagtgtgaagtcaa

SEQ ID NO: 446601 - DNA, 96 bp, Homo sapiens
gaaaaggtggagatggcgttagaaggcgctggatgaggagaatttctgtgccactgtgcccaaggatggacgttcctattccccaactctctttgc

SEQ ID NO: 446602 - DNA, 86 bp, Homo sapiens
gtttcaaaaagttgctggatcagtgcgagaaccaggagctcgagcaacccaaggagatctgtgcgctggttgggttctgtgatgag

SEQ ID NO: 446603 - DNA, 98 bp, Homo sapiens
tggccatgtgcagccgctacttttgggaggtcatcagtgatgagcatgggattgaccccactggcagttaccatggagacagtgatttgcagctggag

SEQ ID NO: 446604 - DNA, 75 bp, Homo sapiens
aactctgaaatgagaatgaagagagctcagatacaaactggactctcaggacaaaacgacaccagccaaaccagc

SEQ ID NO: 446605 - DNA, 90 bp, Homo sapiens
tgatcgtgctgtattggagagagaagtccagaatagccaggccagaagaaggaaggcctgtggtgagtgggacaggaaatgacatcacca

SEQ ID NO: 446606 - DNA, 100 bp, Homo sapiens
ctctgccaccttctccagcattgtgaaagagcactgcagtttcctcctgaaggctggctccggctctccctcaataatggcagcatcacccacctggtga

SEQ ID NO: 446607 - DNA, 100 bp, Homo sapiens
agaaaagatatatcccacagccactggagaaaaagaagaaaatgttaaaaagaacagatacaaggacatactgccatgatagaagtggaattactgggca

SEQ ID NO: 446608 - DNA, 90 bp, Homo sapiens
gcagggatacggcgcccagcggggagccaagccgccatggcctaccacagcttcctggtggagcccatcagctgccacgcctggaacaag

SEQ ID NO: 446609 - DNA, 75 bp, Homo sapiens
ctctggaaatcagccagatcaagatattacacatttcttccaacagatccagcttatgtccctgatgccaaaaat

SEQ ID NO: 446610 - DNA, 83 bp, Homo sapiens
gcatgatgtgcgatgtgcggaagggcacctccacccgccattgtttgatgtcctgtgactgagaaaccaggctttaaacttta

SEQ ID NO: 446611 - DNA, 51 bp, Homo sapiens
gatcccccacgtggtgcggctcaagattggcccccgccgcatccacacagt

SEQ ID NO: 446612 - DNA, 75 bp, Homo sapiens
gcgcggcttcctccagacctctcggcgcggctatatgaagcaccggctccctcttcattttcccaccatggttat

SEQ ID NO: 446613 - DNA, 74 bp, Homo sapiens
ccttcaatgataaattttgtgatcagatgatgggaaaccctcagggaagaggaggaggagaaaaagcagctttc

SEQ ID NO: 446614 - DNA, 50 bp, Homo sapiens
tgccatgaggaaagaattctccgagaaatgcactcggtgatggaaagaga

SEQ ID NO: 446615 - DNA, 110 bp, Homo sapiens
caaggagcgcgtggaagccttcagcgacggagtctacgccatcgtggccacgcttctcatcctggacatctggacttctcccacgtggaaggccttctttctcaatctct

SEQ ID NO: 446616 - DNA, 100 bp, Homo sapiens
ctgctctccatggagagagtaactctgtccttattatcggaccccgaggatcaggaaaaactatggatgtggacaacaaagtagagaggatttggggtga

SEQ ID NO: 446617 - DNA, 100 bp, Homo sapiens
ctggaaatgtcctggccgcgccgcctcctgctcagatacctgttcccggccctcctgcttcacgagattccatcgtgcctggctcacataagcgcttcct

SEQ ID NO: 446618 - DNA, 100 bp, Homo sapiens
cgccctttcttggcccttgttcccccaaatgtctgactctgactctcggactgagaaacgcaagtttttgaaatcatgaatcctgtttatagtcctggat

SEQ ID NO: 446619 - DNA, 127 bp, Homo sapiens
ggatacaaacaacattgcctacttatttctctcagctgccaacagatggctggaggtcaggacgtctctggctgatgaacttgctcttgtggatgttttggaagataagcttaaaggagaaatgatg

SEQ ID NO: 446620 - DNA, 85 bp, Homo sapiens
tggatccatttctcctattgaggagtcaacgtgatgcagaagatggggaagaatatgatgacccttttgctgggcctccagacac

SEQ ID NO: 446621 - DNA, 98 bp, Homo sapiens
ccaaggtgttcggtccttccgaggaagctaaggccgcgttggggtgagaccctcacttcatccgtgctcactcaaaggaggaaacaatgattcatgga

SEQ ID NO: 446622 - DNA, 100 bp, Homo sapiens
ttgggaatgtcaagctggtggtccacgactgtcccgtctgggttggtcaaagaaaaagtgatgtatgaaaaagaggcaaaacaacaagaagaaaagattg

SEQ ID NO: 446623 - DNA, 75 bp, Homo sapiens
cagaaagaagagaatggcaaagtatgagaaggctgagcatgaatgtcagcatcatcattcaaagaacaagaaaca

SEQ ID NO: 446624 - DNA, 97 bp, Homo sapiens
gtgggtagtcgtggaagcctgagggatctgtctggctccattgatgacctccccacgggaacggaagcaactttgagctcagcagtcagtgcatccg

SEQ ID NO: 446625 - DNA, 100 bp, Homo sapiens
tcacattggaccctcctcccaactgtagatatcagacaccccgaagaactttctctcttaaagaaacccagagatccaacaaagaaaaaaaagaagaagc

SEQ ID NO: 446626 - DNA, 100 bp, Homo sapiens
ggggacggccgccggagccgcgaggccaaacaatgcagatcttcgtgaagactctgactggtaagaccatcaccctcgaggttgagcccagtgacaccat

SEQ ID NO: 446627 - DNA, 75 bp, Homo sapiens
gaatttgtatagagatgtgatgttggagaactacagaaacctggtctccctagatgtgaatttggacattggctc

SEQ ID NO: 446628 - DNA, 80 bp, Homo sapiens
aaaggcacagcgatcctgttctcagattggcaaatacgccatgcgagacctagtccacaggcttccaggagggaacaaca

SEQ ID NO: 446629 - DNA, 100 bp, Homo sapiens
gtaccggctctggaaaatccgcaagaccatcatgcaggggccagcagtttgcccagcagatgcagcagcagaacccagagttgatagagcagctcaggag

SEQ ID NO: 446630 - DNA, 75 bp, Homo sapiens
ctctcggacaccattttctgccgctggacgcaagcggggccttttccgaagtggttttagctgaagagaaggcaa

SEQ ID NO: 446631 - DNA, 100 bp, Homo sapiens
cagccggttgggccggtgtactttcccggagagattaaacagattctagaaaatgaacttcagatacctgtgtccaaaatgctgttaaaaggctggaaga

SEQ ID NO: 446632 - DNA, 83 bp, Homo sapiens
gcccagtatgggaaagatctaccttctggaagctactactacgtggtgcttggaaagggccatgatccaaaggaaccagagca

SEQ ID NO: 446633 - DNA, 100 bp, Homo sapiens
aagaaacaaggggccagggcagagggcacctgagcggctggagagcctgttggagaaacacaaagagatctttgatgtgggtgagaatctaacggtcccg

SEQ ID NO: 446634 - DNA, 82 bp, Homo sapiens
tagacaacaagatcgaacaggccatgggagtgcatccgccccaacccttttccccctcgtctcctgtgagaattccccgtcg

SEQ ID NO: 446635 - DNA, 108 bp, Homo sapiens
aggaaggaacgaggcaaggagctaaagcagcgtgcgttcagccctggggagcaggccgggctctcgccatgggtcactgtcgcctctgccacgggaagttttcctcga

SEQ ID NO: 446636 - DNA, 100 bp, Homo sapiens
acaccctcgacttcttactgtccagcatcctttagaagaatccaggctgtacaagaagcatgatgccagcatctgcttctggtgacaacctcaagaagtt

SEQ ID NO: 446637 - DNA, 100 bp, Homo sapiens
gcccagtggcgtccacctgctcgtccgcagaggtcacaaacatgtcagacaaaagtgaattaaaggctgagttggaacgtaagaagcagcgactggccca

SEQ ID NO: 446638 - DNA, 97 bp, Homo sapiens
aacaatcagtgatgaagatgaatcgaaacacctggattcttatctagctgactgctacgatgccattgctgtttttctctgtatccacattgttctc

SEQ ID NO: 446639 - DNA, 75 bp, Homo sapiens
ggctccttcgtgtgtacctcctgctccggcagcctgttttaaaatcaaagatgggaaaatcggagaaaattgccc

SEQ ID NO: 446640 - DNA, 76 bp, Homo sapiens
tctatggatctgctctaaaccttatagcctgcttatgggggaagaatggacagcaaattatggatgaacctatggg

SEQ ID NO: 446641 - DNA, 98 bp, Homo sapiens
ctgaacttcagaaagccagtgttgatggctgcttcctgcctgacacagctcacttcaagaagtgcacaatgtcagaacgtggaattaagtgggcttgt

SEQ ID NO: 446642 - DNA, 90 bp, Homo sapiens
gcttctccgccatgcaaggctggcgcgtctccatggaggtgaaatgacaatggatgctctgttggctcgattgaaacttctgaatccaga

SEQ ID NO: 446643 - DNA, 91 bp, Homo sapiens
agccgagcccggagcccggagcccgggcaagagctggacaatgcagatcttcgtgaagactctgactggtaagaccatcaccctcgaggtt

SEQ ID NO: 446644 - DNA, 74 bp, Homo sapiens
cgcctcggagcggctgtacgagttgtggctgctctactacgcgcagacggagtctcgctctgtcacccaggctg

SEQ ID NO: 446645 - DNA, 83 bp, Homo sapiens
tcaccgccctgcgcttcaacagctccagcctgcagtgccagaattcctcggagcgcagctcagctgggctggaactgccctcc

SEQ ID NO: 446646 - DNA, 75 bp, Homo sapiens
taaaaagcagcctctggagccagccatgtttggcactgaatcttcatcgatacctctgggtattctagttgtgcg

SEQ ID NO: 446647 - DNA, 100 bp, Homo sapiens
agagctgcctcgtcagtgggactcaggtgttactcaccttgctggaaaccaggcgggttgggtggcgggaaatgttttttaaagtgaagaaaacagttgg

SEQ ID NO: 446648 - DNA, 74 bp, Homo sapiens
tgccattcagcccaatacaactggcaaacaactttttgaccaggttatcaatactctggctgaccatcatcatc

SEQ ID NO: 446649 - DNA, 75 bp, Homo sapiens
accgaaatgagactccctcagatccagtgataattgacagattgtgaaaactgctgagagagacttgcaatccag

SEQ ID NO: 446650 - DNA, 90 bp, Homo sapiens
ccgcctccctggccggggcgcagttcggaggttcagaggtggggctggtgtccgagcacttctcgcaggccccgcagaggctgtccttct

SEQ ID NO: 446651 - DNA, 75 bp, Homo sapiens
ggaagaggcctctctcccttgtgctttctaagaagtatggagtacatgtttgtggagaaggtggagagtatgaaa

SEQ ID NO: 446652 - DNA, 100 bp, Homo sapiens
gcagctgctgctgaccctggccttcaaccccgagccgctggtgctacagctgcagaaccaggagttgctgagggcaatgatgaagaaggccgagctggaa

SEQ ID NO: 446653 - DNA, 100 bp, Homo sapiens
agaatgtgtcagccgatgcaccgagtccagcccaggaaaatggagagaaaccaagctctgtccgtatcgatcaactggatcgtgaacagttcaaccccga

SEQ ID NO: 446654 - DNA, 96 bp, Homo sapiens
tttgctgccagcatgatgtcgtatttataatatgtggaggagagagagctcaccatgctcagtgccctgaaactctaatctcattgcctggccaga

SEQ ID NO: 446655 - DNA, 100 bp, Homo sapiens
atcgtgatgagttcccaatgattttaattggtaataaagcagatctggatcatcaaagacagatatatagatcaaggtcgaaatccccagctctacacca

SEQ ID NO: 446656 - DNA, 75 bp, Homo sapiens
gggaagtgatttgcctcagcttgtactctctaagcgaaagacatgaggcctcagcctgaaatgaggttgttttga

SEQ ID NO: 446657 - DNA, 80 bp, Homo sapiens
cccagctctgcagccacatactatccgtttgttcaggaaccaccagtgacagaggaaatcctcattgacgattcaatttg

SEQ ID NO: 446658 - DNA, 97 bp, Homo sapiens
gaagaagtcaagccgatcttgcagaaattgcaggatttcacgcccctaccatgtcctggcctgtggcagggaccctcatggtggagcccactgagtc

SEQ ID NO: 446659 - DNA, 88 bp, Homo sapiens
accggaattgcagcagtatgtgccacaactgcaaaacaacaccatcctccgccttctgcagcaggtgtgtgagatcatcgagagcccc

SEQ ID NO: 446660 - DNA, 75 bp, Homo sapiens
ttaccctctttggtcttaacttattattcaaaggcggggtttcaccatgttgcccagactggtcttgaactcctg

SEQ ID NO: 446661 - DNA, 100 bp, Homo sapiens
gcgagctgagtggttgtgtggtcgcgtctcggaaaccggtagcgcttgcagcatgggacctgatgcccagaaccctggacgggcagatcaccatggagaa

SEQ ID NO: 446662 - DNA, 100 bp, Homo sapiens
ccaagtatcgtcacatgcaaaccttctacaggtatgtgtatgtgtggcactgcccccagggaccaggcctagagactccgcttgttgcagacaccagtgg

SEQ ID NO: 446663 - DNA, 100 bp, Homo sapiens
gaaactaattctaagccagactgctggagatcaccctgttctagtgtgtggaggcttccaccaggagctgttgtctagcaggtcgtgcctatccccttgg

SEQ ID NO: 446664 - DNA, 100 bp, Homo sapiens
cgttttttgtgtttatggagtcagtggctagattgattgatcctccagaattagacactcacatgttaacaaactcgaaaattaatgctgaaaataaggc

SEQ ID NO: 446665 - DNA, 71 bp, Homo sapiens
agtactttggtggacgagttggagtcatctttcgaggttgataacactgatgctgaggggaggctcatact

SEQ ID NO: 446666 - DNA, 100 bp, Homo sapiens
aaacagattggtgatttctcagaaagataaacatagaactgtcatctgacccagttattccactcccaggtttaagtgacatttctccatctacaagcct

SEQ ID NO: 446667 - DNA, 75 bp, Homo sapiens
tttaaaaatcacagaccaggatggagataaaggaactcaaagaatttggatcatcaatttctacatgaatatgct

SEQ ID NO: 446668 - DNA, 76 bp, Homo sapiens
gtttaatcagacctgctcacacttcagaatagagaagggagaaaactggttgtcctggatgtttgaaaagttggtc

SEQ ID NO: 446669 - DNA, 83 bp, Homo sapiens
catggccctcaccaccctgaaatggccaagaaacttagccagatggaccaggtgatccaatcaggaaacagagctcagtgcag

SEQ ID NO: 446670 - DNA, 100 bp, Homo sapiens
gacagccccaggcccgggttgtggtgctggaaggatttgatgccctggatccctttattcccatcctggtttccaactataacccaaaggaatttgaaag

SEQ ID NO: 446671 - DNA, 100 bp, Homo sapiens
tcttccctcagctccatgagctcagtggcctcctctgtgagcagcaggcccagtcggacaggactactgtatgcaggagctattcttgaagtttgtggat

SEQ ID NO: 446672 - DNA, 75 bp, Homo sapiens
catgttggacgatatctaatattacagctggaaatagggcacagatccagtttgtcccgctggctggaagcctgg

SEQ ID NO: 446673 - DNA, 50 bp, Homo sapiens
gcttgacctcctaaatgcaacagtgaaattaaatggtggcagacatgtcc

SEQ ID NO: 446674 - DNA, 112 bp, Homo sapiens
tatcacttccttccttactttgtcttggtatactacatggcaaaatgggaaagggagtcctcttggtatatgatattacaaattatcaaagctttgagaatttagaagattg

SEQ ID NO: 446675 - DNA, 95 bp, Homo sapiens
cagagcacgaaaggcatttttactgctgttcccagtgacctgacagcagaggagcgtcaagaactggagaacatccgacggagaaaacaggagct

SEQ ID NO: 446676 - DNA, 98 bp, Homo sapiens
ctaccacagagccatcaaaatcacagtggatgggccccgagaacctcgaagtctcttaaccttcattaactgtgcctatgtcaaatggggaaccctgg

SEQ ID NO: 446677 - DNA, 95 bp, Homo sapiens
acttctactgacgaagcttggaagttgcagaaggcaatttgaatcaacccatagaagtgacagcgctgtattcatttgaaggacagcagcctggg

SEQ ID NO: 446678 - DNA, 80 bp, Homo sapiens
tagcagtggaatgggaggaagagccattgacctcatcaacaacctgctgcaggtgaagatgcgcaaacgctacagcgtgg

SEQ ID NO: 446679 - DNA, 100 bp, Homo sapiens
tatcggtaccttgtgaaggctttccgtgcacatcgggatgctataaaatcaccacggtctttagccatgcacaaacggtagttttgtgtgttggctgctc

SEQ ID NO: 446680 - DNA, 100 bp, Homo sapiens
caaacaccctcagctccacattgagagcaaaatctacaagatgatgcagggaggaggttctggaggacacgtgccggcggcaggacttcaacccctgtga

SEQ ID NO: 446681 - DNA, 50 bp, Homo sapiens
gaggcgagcgcggcgcccggaccgcgacttgtgcaccatggacaattttg

SEQ ID NO: 446682 - DNA, 104 bp, Homo sapiens
tggagtctccctcggcccctccccacagatggtgcatcccctggcagaggctcctgctcacaggcccagccccagcccaggggaccccagacgtctccagtgcc

SEQ ID NO: 446683 - DNA, 82 bp, Homo sapiens
agatcaactgcatgatccgggtgaagaagcagggcggcactatcattggcagcgctcgctgcaaggcctttaccaccaggga

SEQ ID NO: 446684 - DNA, 116 bp, Homo sapiens
gtcctgctcgccgtccccgccatgctgtctctagactttttggacgatgtgcggcggatgaacaagcggcagattgatgaactcccagagggcgctgtgaagcctccagcaaacaa

SEQ ID NO: 446685 - DNA, 100 bp, Homo sapiens
catagccatcgacttcggggagcagatcaatgaactgagccatgttcaaatccctgttatgttgatgccagatgacttcaaagcctattcaaaaataaag

SEQ ID NO: 446686 - DNA, 100 bp, Homo sapiens
tctgtagcgacagcggcttggaagtgctctaccagagttgcggccagaacacaaagcgtgaatccggaagaaaagttcaatctggaaacatcaatgctgc

SEQ ID NO: 446687 - DNA, 100 bp, Homo sapiens
gctgctggacaacaccatggaaatatttgacattgagataagatgctcccaagtcccttgcagctctcttcagaagaaaaatcactagtgctctgctctt

SEQ ID NO: 446688 - DNA, 100 bp, Homo sapiens
ctgacgtggagcggtacatcgcctcggtgcagggctccaccccgtcgcctcgacagggacaatggtgacagatccaggcaccgagctccacgcaatgccc

SEQ ID NO: 446689 - DNA, 100 bp, Homo sapiens
ttgtcagcacacagcgttcacaaggtggtgaagcagtattttccaatttgaagattcatttgaaggtggctcctgccacctgctaatagcagttcaaact

SEQ ID NO: 446690 - DNA, 75 bp, Homo sapiens
tctcaaagacttcacttgacttcttgatcctgcataaaaccaagccttttcaggagccaaaaaaacaaatacaaa

SEQ ID NO: 446691 - DNA, 90 bp, Homo sapiens
gccagccgcaccatgccgctcctaagcctgcacagccgcggcggcagcagcagtgagagatgaagatctccttcaacgacaaaagcctgc

SEQ ID NO: 446692 - DNA, 75 bp, Homo sapiens
gcacctgcacacctggatccaggataacggaggctggttgtgtcagtctgtgatgcctgctggtgttgataaaat

SEQ ID NO: 446693 - DNA, 100 bp, Homo sapiens
taaaatcttatcactgcagttgctcttcgaggcagcattggaaggatttctgcccctccaagcttcctttccaggctcaccatggatgatgatatcgccg

SEQ ID NO: 446694 - DNA, 50 bp, Homo sapiens
ctcaagtcgacaggggatgggaccctaggagttttacagcttcagatctg

SEQ ID NO: 446695 - DNA, 71 bp, Homo sapiens
gacagcgagcacattcttgctacctccagtcaagacaattctgtgaaggaatgggtaccacagaccatgtc

SEQ ID NO: 446696 - DNA, 100 bp, Homo sapiens
agatgcatgccagagacttcacagtttctgctctggtcgacgtgttgatgcccaatgttggtgagattgtgggaggctcaatgcgtatctttgatagtga

SEQ ID NO: 446697 - DNA, 90 bp, Homo sapiens
ccctccgccacgcagccggccaccgccgagacccagcacatcgccgaccagatataagagttcggaccgcccagcacacaaggtcagcat

SEQ ID NO: 446698 - DNA, 100 bp, Homo sapiens
ggtgggaggattgactgctgctggggctgggctcgccagtcttggggacagtgtcagcgtctctgtgccttgcggagaatcctgaaaaaacagcctaacc

SEQ ID NO: 446699 - DNA, 100 bp, Homo sapiens
cccaaggtcatcattgtccaggcctgcagaggtggccataggaaaaggatacagagtagagtttcatgaacctgaaacttggtggaaatttgatcctgaa

SEQ ID NO: 446700 - DNA, 74 bp, Homo sapiens
ctatgaacttctgtatgcctttcacatctatcgccacaattaccgcaagggtcaccaggcagcagggattggaa

SEQ ID NO: 446701 - DNA, 100 bp, Homo sapiens
cccttccgggagcctagatcctgtgctttactctgaagactcctggatcagatctgcatttcttttgacgaaggcaagaccacaatgaacttcattgagg

SEQ ID NO: 446702 - DNA, 98 bp, Homo sapiens
caggatctatttgtaaaggccagcagcttgtgatgatgccaaacaagtctcacagaaagttctccgctcccagacatgggtccctcggcttcctgcct

SEQ ID NO: 446703 - DNA, 100 bp, Homo sapiens
gcgagcaggcgcgcagccacctggagaaggcggacccagatgatgtggtaccagttggccaaagaagagcctggtgttggtgcatgtgctttggactagc

SEQ ID NO: 446704 - DNA, 100 bp, Homo sapiens
attccaaaggcacaggaagaagcttgcaggtgttcagtggaaagcgactggaggctgagttcccacctcatcactctcagagcaccttccggaagacctc

SEQ ID NO: 446705 - DNA, 89 bp, Homo sapiens
gcacacttgagttaagcagtagtgtttgggaagaaaaacagaggagttctattaagacgtgtgacaaaattaggcaagaacgagatgaa

SEQ ID NO: 446706 - DNA, 50 bp, Homo sapiens
ctgagatccatctgcaccacggtgctggacatggatttgattgacatact

SEQ ID NO: 446707 - DNA, 100 bp, Homo sapiens
ccacataccctgtgggtcacatgccatacggctggttgacggaaatccgtgctgtgtatcctgctttcgacaagccccccgaatccaagcccaacttcac

SEQ ID NO: 446708 - DNA, 100 bp, Homo sapiens
gctgatgaagatgatgacgatgatgatgaagaggatgatgatgaagaagaggtgagagacttcagaggctgccctttcttttcatctgctgcttgtgaaa

SEQ ID NO: 446709 - DNA, 100 bp, Homo sapiens
ggggtgtcctggtgcacccccagtgggtgctcacagctgcccattgcctaaagaatcaccgagacttggagccagaatctgagcctcagctggagtcaga

SEQ ID NO: 446710 - DNA, 75 bp, Homo sapiens
ccgcgcccgcttcggagagagaaatgctgggtgcctgtgatgatggatgaagctctgagctatctagagaagaga

SEQ ID NO: 446711 - DNA, 99 bp, Homo sapiens
gaagatggctgaatgtgcgcatttccattatgagaatgttgagttcggcagcatacaggttttgctagtggaagactcagaaaaatatgaaatattcag

SEQ ID NO: 446712 - DNA, 83 bp, Homo sapiens
cggcgctttcggcgcgggcccgggccccgagcgcccgaacagagttgcatgctgagaatttgaaaaatgaagatgatgtagac

SEQ ID NO: 446713 - DNA, 100 bp, Homo sapiens
gagagacgtgaaacatgtgaacactcaagtgaagcaaaagccttccatgattacataatatcgtctactgcattatttttggctgcaaaagtggaagaac

SEQ ID NO: 446714 - DNA, 80 bp, Homo sapiens
cttctattcagtgcaagctctatcagtactacttagatcacttaacaggtgcaggaagctgtttggagactctggaaaaa

SEQ ID NO: 446715 - DNA, 90 bp, Homo sapiens
gtggactcagagaccaataaaaataaactgcttgaacatcctttgactggttagccagaaagcataacccctactgtagaactaaatgca

SEQ ID NO: 446716 - DNA, 87 bp, Homo sapiens
ctacctgagcgaggacgaggtgcgccggctgatcgaatataacaccagcaatcctgacttgttgctagtcatatttcaagtgacagg

SEQ ID NO: 446717 - DNA, 100 bp, Homo sapiens
gaaaaccagcgtggttctgagcacacggttaatttcaaagcttttcccatggaggacactcatgaggaccatgatacttccactgagaatacagacgagt

SEQ ID NO: 446718 - DNA, 100 bp, Homo sapiens
cgtcggtgcttccagtgccaaaccaaactggagctggtgcagcaggaattgggatcgtgtcgctgcgggaaatcctcattgacgattcaatttgttgaag

SEQ ID NO: 446719 - DNA, 75 bp, Homo sapiens
gctctgattctccaatgggaataccaaggggcaaatgttctgaaaaagactctgcatgggaatggcctgccttac

SEQ ID NO: 446720 - DNA, 75 bp, Homo sapiens
gagagtcttaaaatcctgctctggccggattccagactcgtgggggaaaggctgatggagtctcgctctgtggcc

SEQ ID NO: 446721 - DNA, 100 bp, Homo sapiens
ctgctgctgccgccggcgaaggaggaggcgttgccgggattttttatcaagcagaaatgcatcgaacaacgagaatcaagatcactgagctaaatcccca

SEQ ID NO: 446722 - DNA, 75 bp, Homo sapiens
aatgctcctaaatgatcgcaaagtggaactctcagactttgataaagatggtgcattgacactggatgagttttg

SEQ ID NO: 446723 - DNA, 100 bp, Homo sapiens
agggacacaagtatccagcctatattgttacaattttttttcaagaactgccgtcttctttgcctgcactaatgagaatgtaactggtcactacatttcc

SEQ ID NO: 446724 - DNA, 100 bp, Homo sapiens
aagaaaaagagcaaagataagaagagaaaaagagaagatgaagaaacccagcttgatatgttgaaaccaatagagccatggcgactccctctgctgcctt

SEQ ID NO: 446725 - DNA, 88 bp, Homo sapiens
ttagaattgaagcctataatatttgtcacctgaactacttcacattttccccaatatatggggtctgaagactatgagactgctctat

SEQ ID NO: 446726 - DNA, 111 bp, Homo sapiens
agcggagatgcctctttttgccaccaatcccttcgatcaggatgttgtggtgccaccgaacatcgcagaactgaagaatttggaggtgctcaacttttttaataaccaaat

SEQ ID NO: 446727 - DNA, 82 bp, Homo sapiens
gcgggatgcgctgcgcagcctggcggtgctggaaggcgccagcctggtggtgggcaacttatctcctggtcgaggaaaagac

SEQ ID NO: 446728 - DNA, 83 bp, Homo sapiens
caagctcctggccctggccctgatcatcctgctgggcttcgtccagatcgggaagggacaggctgcgggaggagctgcaggac

SEQ ID NO: 446729 - DNA, 75 bp, Homo sapiens
gggatctcttcagggtggaatacgtcattgccctactgccaataaagggaaaataagagatgctcatcgacgaat

SEQ ID NO: 446730 - DNA, 83 bp, Homo sapiens
gtaggcgcttggcggagaggctgctgagaaagtgctttggaggtgcagaaggagaggtgagaattatgaagatgatgacctag

SEQ ID NO: 446731 - DNA, 90 bp, Homo sapiens
caaagagagagaggttgttgagtactactgagcgagtgtgcttgatccagggaacggttgaagcactgaatgcagttcatggattcattg

SEQ ID NO: 446732 - DNA, 74 bp, Homo sapiens
ctgaggttcagattaagaaatctgccccaaagtcttagaactggcacttctgtctcctgctgccatgtgaagaa

SEQ ID NO: 446733 - DNA, 90 bp, Homo sapiens
ggcaggaccggttctcagggacagtgcacgcaggatgagagggccttaccaaaaggagatttcttccctcctgagcgtccacaacaactt

SEQ ID NO: 446734 - DNA, 83 bp, Homo sapiens
agaattatggaaacctggtctcactgggtcatatgcaaacacagagctctccttttgctcggggaaatgtatttggtgagcct

SEQ ID NO: 446735 - DNA, 98 bp, Homo sapiens
agaagtcttgaatgactggaaactgattggaaactctttgggaaagccactcgaaaaggtagaagatgacggtgaaatgttccacacactggatgatg

SEQ ID NO: 446736 - DNA, 82 bp, Homo sapiens
atagtgcaaaagtcatggcaacttctggatgtgcagcaatcagatttatcattcggatggctgagagctagcaaggaaaact

SEQ ID NO: 446737 - DNA, 97 bp, Homo sapiens
aagcatttcaacgtgcgtgtcacccacgcagacatcttcagccgctgccagagacacctatggctgccgatgaaggctcagcagagaaacaggcagg

SEQ ID NO: 446738 - DNA, 50 bp, Homo sapiens
ttccatgaaaattgctacaggtgtgaggtccaagacaactttgacaagat

SEQ ID NO: 446739 - DNA, 98 bp, Homo sapiens
gggctgcggcgcctgggactgcaccgcaccgagggcgagctccagagattatgcatgatgtgataaagaaggtcaagaagaagggggaatggaaggtg

SEQ ID NO: 446740 - DNA, 117 bp, Homo sapiens
agatgtctcgctccgtggccttagctgtgctcgcgctactctctctttctggcctggaggctatccagcattggtttatcttggaagctaaagggcattgctcatcctgaagatcag

SEQ ID NO: 446741 - DNA, 98 bp, Homo sapiens
ggaggctcacagcacactcaggaggatggctgccttttaccagtgcatcaggcctgaccccagaggggacagggagctccagcccgagagcctattat

SEQ ID NO: 446742 - DNA, 98 bp, Homo sapiens
acgcggccctgctgaaagtggcgcaaatggggaacgcccttttgcttgtgactggcagggctgcgacaagaagttcgcccgctccgacgagctggccc

SEQ ID NO: 446743 - DNA, 82 bp, Homo sapiens
ctggagtggttccttaaatgtcgaagaaggagtatctttagaagatctgtataatggcaagacaaccaaactacaacttagc

SEQ ID NO: 446744 - DNA, 100 bp, Homo sapiens
gtgctgttgggaggcagccccctgtgatgcggaacaccaggctcagattcatcagttcgagaacagccccagcccaggtgggaaggaggcagaaactcgg

SEQ ID NO: 446745 - DNA, 100 bp, Homo sapiens
ctcatagcagattcaaatccaatgggcagggtgccatttgccgtgcctgacaaagtgctgtggccacagctgtgtgaggcgctcaacatgaaattcaagg

SEQ ID NO: 446746 - DNA, 82 bp, Homo sapiens
ccgcgtcccgctcgctgggagagaggatgaaacgaggaggaagagatagtgaccgtaattcatcagaagaaggaactgcaga

SEQ ID NO: 446747 - DNA, 98 bp, Homo sapiens
aacctgctcagggctctggtgaacaagctgtaggtaatctgtaagtcagatgctccaacaggggatgttcttcttgatgaagctctgaagcatgttaa

SEQ ID NO: 446748 - DNA, 74 bp, Homo sapiens
gaggatgctttgcagaaacttcataaatatatgcaggggtacccgtgctccatctcatctccacgcccttccct

SEQ ID NO: 446749 - DNA, 83 bp, Homo sapiens
ctggatgctgcagacactgaacgaggagccagtgcagcctcccgcgacgatgcccctcaacgttagcttcaccaacaggaact

SEQ ID NO: 446750 - DNA, 51 bp, Homo sapiens
attccaagtaactcttatttggtgctgatgtatggacagccgtatcgtgtt

SEQ ID NO: 446751 - DNA, 75 bp, Homo sapiens
gcatatggaacttgctgcatgccagcaccatgcaattaagttggaatatgcaaggttggttaagttggcccaaga

SEQ ID NO: 446752 - DNA, 78 bp, Homo sapiens
agacgtgtgctacatacgggctgaatgtggagagggtcttccaggacggtgtcagcatttgcaggtatacaggaacag

SEQ ID NO: 446753 - DNA, 90 bp, Homo sapiens
actgccacaaacgccgcaccaggtcttgtagcagcgcctcctcggtctctaattaacagaagatggcaaagcccagccacagcagctatg

SEQ ID NO: 446754 - DNA, 98 bp, Homo sapiens
gctccagtacttgttgccctagcattaattgaaggtggaatgaaatacgaagatgcagtacaattcataagacaaggcatttcatccttcatgaagcc

SEQ ID NO: 446755 - DNA, 98 bp, Homo sapiens
tcggcggagcttcgccaaggctggcgcagtcgggtcagtttgaaaaggaggatcgagctcactgtggagtatccatggagatgtggagccttgtcacc

SEQ ID NO: 446756 - DNA, 112 bp, Homo sapiens
ccttgggtgatttgttctgtatcagaagacaatatcatgcaagtgtggcaaatgggcactccacagaaggatgttattatcaagtcagatgcaccggacactttgttattgg

SEQ ID NO: 446757 - DNA, 90 bp, Homo sapiens
ctggatgcttgctgcccccagcccaccagagctaggcatttcatccttcatgaagccattcaggattttgaattgcatatgagtgcttgg

SEQ ID NO: 446758 - DNA, 73 bp, Homo sapiens
aaagttcatctctttgtggatcaacagtggctggctgttagcatccgtacttcaaacaatagtcaggttaata

SEQ ID NO: 446759 - DNA, 100 bp, Homo sapiens
cagtgcgcatgcgtggctctccggcaccggtccgtactccagcgagcaggttcaggagaagtggcacctggtggaggacctgtcgcgactgctgccggag

SEQ ID NO: 446760 - DNA, 83 bp, Homo sapiens
gatcaggagaaagaagacagccatcatttgaaagactggccttatgggtttctagaaggaaaatcacagaggtaaagcatcat

SEQ ID NO: 446761 - DNA, 100 bp, Homo sapiens
ggccggagaaggtgaaattctgtgtgctccctccggcgagagactttgtcagctcccgcacagtaacgtcactgcagccagaggggtccagaagagagag

SEQ ID NO: 446762 - DNA, 83 bp, Homo sapiens
acaaggctcaagagtttgacattggagtttattttgaagcaaatgggcatggcactattcgcattctcaagtctccacaagag

SEQ ID NO: 446763 - DNA, 90 bp, Homo sapiens
cccgaggaccaggccggcgcagccatgttggttgaatctggcgatgtggaacccatggatatggagggctgactatatacaccatgtttt

SEQ ID NO: 446764 - DNA, 100 bp, Homo sapiens
ctacttgaggggaatttctgcaacccatagtcaacgattacatggtctctaattaacagaagatggcaaagcccagccacagcagctatgtccttcagca

SEQ ID NO: 446765 - DNA, 82 bp, Homo sapiens
gtgcagccaccctcgctccctctgctcttcctcccttcgctcgcaccatggtttttagaacttcagccataaaaatgggcag

SEQ ID NO: 446766 - DNA, 74 bp, Homo sapiens
cttctcctccatccagtcctcatgtagtcggtcttctcttgcccaaccagacactggcatccactgtcttctgg

SEQ ID NO: 446767 - DNA, 148 bp, Homo sapiens
ggctaagggtagctaccatagcctttattattcaattgaaaagcctttgaaattctttcaaactggagccttattggagaccatgggggatgtgaagctggttgcctcgtcacacatttccaaaacctccctcagtgtggatccctca

SEQ ID NO: 446768 - DNA, 50 bp, Homo sapiens
cactggactacttacaaaaatggtcagaagttacgtcaagagagctcttg

SEQ ID NO: 446769 - DNA, 75 bp, Homo sapiens
ggatatggtggcagtggggatggctataatggatttggtaatgatggtggataatattaatgcagctgtgatgga

SEQ ID NO: 446770 - DNA, 75 bp, Homo sapiens
ggggagcggcgttggaggccaccgtttccaggaatatattattcgagtgcaaagaggaatttctgtggaaaacag

SEQ ID NO: 446771 - DNA, 100 bp, Homo sapiens
ctcattgaagcagaggacaacatgaactgccagatttgcttgtaaatgcatcacgaagaggcagcccagaatgaagaaagcaagcaggagtgttggctca

SEQ ID NO: 446772 - DNA, 100 bp, Homo sapiens
ggaatggggaaccgctgattgctgctattcaggattttctaacagggagaccctcacgcagggcttagagttctgtcggcggcagcagagggccgatggc

SEQ ID NO: 446773 - DNA, 108 bp, Homo sapiens
cagcccgcgcacagctgctcccttcgccttcgccctttccacctcgcggcagttcgacctgcctagagctggaacgttacctccagagcgagccctgctatgtttcag

SEQ ID NO: 446774 - DNA, 80 bp, Homo sapiens
aggaattgagagtcacagaggaaggacagtggagtctggcatcttattgggagttcccattagacttgaagttgggccac

SEQ ID NO: 446775 - DNA, 96 bp, Homo sapiens
gctgaagaagcagttctacaaggcgagccaggatcatcttctccacgcccctggccgtcattgcctacttcctcatctggttcgtgcccgacttcc

SEQ ID NO: 446776 - DNA, 50 bp, Homo sapiens
cgcccatgaagccagatttctcccaggtcttagaaaaataccccaataca

SEQ ID NO: 446777 - DNA, 96 bp, Homo sapiens
ctgaaacagaggaggggcaacctgagttatcagaaagtgacttcctggccttcccttctttactgatcagtacagaacctgctaaggccatcaaac

SEQ ID NO: 446778 - DNA, 82 bp, Homo sapiens
cgacagccaggcccgggagaaggtttccaggcctgaggtgcccgccctggccccaggagaatgaaccagccgcagaggatgg

SEQ ID NO: 446779 - DNA, 75 bp, Homo sapiens
tatggcttccagtggaggcattttggggcagaatacagagatatggaatcagccaacacatatctctttatggta

SEQ ID NO: 446780 - DNA, 74 bp, Homo sapiens
tcagatgctgccagggtccctgaagagggaagacacgcggaaacagctgcaagctttcttcctggtggcagatg

SEQ ID NO: 446781 - DNA, 82 bp, Homo sapiens
ccgggccctgggaccccctcgcgtccgcagcagatgacgacaacccccccgtgtcttttgtgaagttctccccgaacggcaa

SEQ ID NO: 446782 - DNA, 100 bp, Homo sapiens
gcgagtgaggaaaggaggtactgtaggctctgcgaacatcaatagatgcttatgacaactttgacaatatctcgcttgctcagcgtttggaaaaacatga

SEQ ID NO: 446783 - DNA, 101 bp, Homo sapiens
caggacctctttctagctctcagaaaagtctgagaagaaaggagccctgcgttcccctaagaagacaatagatgtgcatcttcaaatgcagcatcctgtgc

SEQ ID NO: 446784 - DNA, 100 bp, Homo sapiens
ctggaggtggacaacgtcaagtactgcggctactgcaaataccacttcagcaagatggacatgaacagagaagtggtgaagactgactctgctgccacaa

SEQ ID NO: 446785 - DNA, 90 bp, Homo sapiens
cgctcgcagagcaggtgcagaagatcaatgtccgagttaccaccatggatgcagagctggagtttgcaatccagccaaatacaactggaa

SEQ ID NO: 446786 - DNA, 100 bp, Homo sapiens
ccggaagcttgtggcgctgaaaacgaacgatgttggggatcagccaggtgaggtaggttattcaggctctcctgctgaagctcctccaagcaagtcacca

SEQ ID NO: 446787 - DNA, 76 bp, Homo sapiens
gcttccgtcgaagaggagggggctgcggtggccaccgcggcggagcccgaggtggtcattcctgtggtgtctgtgc

SEQ ID NO: 446788 - DNA, 100 bp, Homo sapiens
tacctgcagaaggtctctggagacatcttcagcaggtatggtggatattgcccgacagacggttgaatttctctacgaagagaatggtggcatcccaaga

SEQ ID NO: 446789 - DNA, 101 bp, Homo sapiens
gggcgggccgcgggagccgcacgcggcgatatggaagaggagggcaagaagggcaagaaggccccttcacagatgtagtcactacaaatcttaaattgcga

SEQ ID NO: 446790 - DNA, 90 bp, Homo sapiens
caaaaactggatatcaacttattagataatgtggtgaattgcttataccatggagaaggagcccaggctgttcggctcttgaatcccagc

SEQ ID NO: 446791 - DNA, 88 bp, Homo sapiens
actatcggaacacgagcgagattcctctggttctggtgggaacccaggggcagagcacatggcaagtggcatgctgactcagacaccg

SEQ ID NO: 446792 - DNA, 100 bp, Homo sapiens
cgttttcactgcaggaccaggcacgaaagtcatagaccttagcaacaatgctctgattaccatcctaccaatgatgatcatagctctagaatttccccat

SEQ ID NO: 446793 - DNA, 90 bp, Homo sapiens
ctgtgtgacaccttccgagaccagtccacctacatcagggctcggggttgcccgctcccggaatcccggagtctccgcggcccgaaccga

SEQ ID NO: 446794 - DNA, 98 bp, Homo sapiens
aaaagatgaagacattctccaagtggaaacttacatgcttgctgtaactttggatgaatggaaaaagaaactggaatctcccaacagagaaattatta

SEQ ID NO: 446795 - DNA, 100 bp, Homo sapiens
ttggcccaggctgaggagcagctagagcaagagaccagagacgagttgtactgctgtcacaggaaatggacgctggattacaagcatggcagctcaggca

SEQ ID NO: 446796 - DNA, 100 bp, Homo sapiens
aagcagcgcccgtctgcttcgggcctctggaatttagcgctcgcccagctagccgcaggtcatgcgcatcgtggataatgttcgtcctgatcgacagacg

SEQ ID NO: 446797 - DNA, 75 bp, Homo sapiens
gccgatccagcctgcggagcctgtggggcaggtggtcctgccatcatggctgtcctctgcaaaggtctcctcgct

SEQ ID NO: 446798 - DNA, 75 bp, Homo sapiens
tttatgaagatgcttatgacaaactttctccagaaaatgttgttctggagaatcatgtagcgacagatgaagacg

SEQ ID NO: 446799 - DNA, 80 bp, Homo sapiens
cattctctacttactgatgttcctcctccttcaggtcccgttcaagaagttcttccagttcgcagtcaagatctcgttcc

SEQ ID NO: 446800 - DNA, 82 bp, Homo sapiens
aaggatggagtgtgaaacagatgaacaaaaacagggctctgatgagaacatgtcagaatggctgatcagctgaccgaagaac

SEQ ID NO: 446801 - DNA, 75 bp, Homo sapiens
ctggacaagtccatcgagttcatcgtgcctccggagccagcgtggtggccatagacaacaagatcgaacaggcca

SEQ ID NO: 446802 - DNA, 100 bp, Homo sapiens
agcctttcgcggagaaaaggctgacatgcccgtcctatatgacagggaaaatatttatccccaaacagaaacctgtacagacttttacagaagaaaaagt

SEQ ID NO: 446803 - DNA, 75 bp, Homo sapiens
ccgccacacactgcagctgtacagatatttctccctcgagtggctgggaaacttggcaagagaccagaggaccca

SEQ ID NO: 446804 - DNA, 74 bp, Homo sapiens
cctctgtcatgcttcttggcatgatggcacgggtccccagccccaccccagccccaaaggaggctgttcgagag

SEQ ID NO: 446805 - DNA, 75 bp, Homo sapiens
caacaatgagagagtggttgtaaaaatcctgaaggtactgagtttgagggtgcagtcatagctctgttccatttg

SEQ ID NO: 446806 - DNA, 83 bp, Homo sapiens
ctcagccgggcagtttgaggagctgctgcgcctcaaagccaaagatgggattttggcatgttgcccaggctggccatgaactc

SEQ ID NO: 446807 - DNA, 74 bp, Homo sapiens
acactggcattggaacttcctgttctgatagcgtggaaggcctgaagacggaagaagggagtgtcagaggcgcc

SEQ ID NO: 446808 - DNA, 90 bp, Homo sapiens
gaaagttctcctcctgatcacagccatcttggcagtggctgttggtttcccagacttgctgaaaccaaattactacttcacactctcctt

SEQ ID NO: 446809 - DNA, 87 bp, Homo sapiens
ttcagggatataaccgactgacctggatagtagttgttcttcagcttggaactgcagttggctttttgctaccaccagttttagtac

SEQ ID NO: 446810 - DNA, 100 bp, Homo sapiens
tgcagccatgatctccttaacggacacgcagaaaaggcctaaagaatgtatttgacgaagcaatattggctgccctggagcctccagaaccgaagaagag

SEQ ID NO: 446811 - DNA, 50 bp, Homo sapiens
ggcggcggccacgccaaggacggatatgaggccccaggattcctggcgag

SEQ ID NO: 446812 - DNA, 85 bp, Homo sapiens
ggcgcccgcgcgcggggaccccacggggaacttgacaagaggagtcggaagatttagagagcttctcagagcagttgaaacaaga

SEQ ID NO: 446813 - DNA, 100 bp, Homo sapiens
ctcttcgccttgccctcttttattaaggagcctcaaacaaagccttccagcatcattgacaaagaagtttcattaatggcagaaatggataaagttaaag

SEQ ID NO: 446814 - DNA, 75 bp, Homo sapiens
gggaaggaaaaacctgtatgtggaaccacctggaatagtgcctaccgatcagctgcatctaaaacaatgaatatt

SEQ ID NO: 446815 - DNA, 98 bp, Homo sapiens
cctacaagttcctgcagttcgcttacttcaaggtggtgagatctgctgaggaagcggcatcagtgttggccacttcaattagtccagagcagtgcatc

SEQ ID NO: 446816 - DNA, 100 bp, Homo sapiens
atatattcggcaaggaagcctctctgctaaaccccctgcggaagcccggctcgctgcaaaacgggcggcccgcgcggaggctcgcgagatccgcatgaag

SEQ ID NO: 446817 - DNA, 75 bp, Homo sapiens
ggaaaactgcttccggaattctcccatcaaagtgatcaaggtggtcaaggtggtctgtttttctggggggccacc

SEQ ID NO: 446818 - DNA, 74 bp, Homo sapiens
cggaacccggccgggagccgcgcgaggcgatagggccagatttgagtgtgtgaatttttgagtgaaacctggaa

SEQ ID NO: 446819 - DNA, 90 bp, Homo sapiens
gaaaggaaggaatatatcctgactgattgattcgggagtgagaatgacgaggagagcccttcacgagaaggggctgaagacagagcccct

SEQ ID NO: 446820 - DNA, 75 bp, Homo sapiens
cctggagcctcagttggaagcagccgatccagcctgcggagcctgtggggcagacctgaaggaaaagattatgcc

SEQ ID NO: 446821 - DNA, 100 bp, Homo sapiens
agctgtactccagacacaacccggccatcgaggccctgctgcacgacctcagctcccagaggatcaccagcgtggtctgcgggccaggcatcgacatccg

SEQ ID NO: 446822 - DNA, 90 bp, Homo sapiens
cccggataggcaccttcaggatggacctgggcatcatcttggaccagccagacagggccaagaggaccttgcctgcccagtccttgggga

SEQ ID NO: 446823 - DNA, 100 bp, Homo sapiens
gaagacctacaggcagagagagaaacaggggagcaaggtgcaagagtccacaaagggacctgatgaagcgaagatcaagcttgccagcaaagcacggaca

SEQ ID NO: 446824 - DNA, 100 bp, Homo sapiens
cgtccgtccttgaggttcatgttcctacctaagtcctgggaatagtgcctaccgatcagctgcatctaaaacaatgaatatttatttccctaaaaaagag

SEQ ID NO: 446825 - DNA, 74 bp, Homo sapiens
cgggatgacaccactctgaatgcactgaacacaatactgggtcgtcaggatggagttttgcaagactgggtcat

SEQ ID NO: 446826 - DNA, 74 bp, Homo sapiens
aatttttggatgatgatggatccatttctcctattgaggagtcaacttctaggtctcgttccagatcatattct

SEQ ID NO: 446827 - DNA, 83 bp, Homo sapiens
ttgtgtcttgttgcgggcaccgcagtcgccgtgaagatggcgtctaccagccggtgagaagccctaccactgcaactgggacg

SEQ ID NO: 446828 - DNA, 50 bp, Homo sapiens
ctcctgattagctgggattacagaggaatgcagtagcatggatagttgat

SEQ ID NO: 446829 - DNA, 90 bp, Homo sapiens
tggttgcgggtcgtggcacataggcctccagaggaagaagtccaagttccgcttgtccaagatctggtcaccaaaaagcaaaagcagccc

SEQ ID NO: 446830 - DNA, 100 bp, Homo sapiens
ccccggagacagcggcacagaggtgcttctgccagtgcatctagtgagagtgaagctgaaaatcttgaagcacaaccccagtctactgtccgtccagaag

SEQ ID NO: 446831 - DNA, 75 bp, Homo sapiens
gctggctcagccgcaagtacccgtccatcatagtcaactgcgtggaagagaagtctgatgcaggctgggaagaat

SEQ ID NO: 446832 - DNA, 100 bp, Homo sapiens
ctggtcaaatctctgcaggaatcagacaggttttgggtctagtaatactggttctgtgtttggtcaagcagccagtactggtggaatagtctttggccag

SEQ ID NO: 446833 - DNA, 100 bp, Homo sapiens
cgctgctgggtccgctgagcggggcgacccgaggaggccgggtgttccctcatccccaagactgtgcccagcatttgatgaatggagacactttgagtgg

SEQ ID NO: 446834 - DNA, 101 bp, Homo sapiens
cggaacagaaggagtggatgaagatataattgtgacccaaagtcagaccaacttcacctgccccattacaaaggtgtttcccattaaacactaccaggaca

SEQ ID NO: 446835 - DNA, 93 bp, Homo sapiens
tctgctgaccgcgggccctgccctgggctggaacgaccctgggggatatgagactttctactcggaatatcctgagtgttgcgtggatgtaaa

SEQ ID NO: 446836 - DNA, 131 bp, Homo sapiens
gcattctccagggaaaggatgacatatttttggacctgaaacagaaattctggaacacctatatggtttacccaaggtccagcctagcccctaggcaccatgtcggacagtgatctaggtgaggacgaagg

SEQ ID NO: 446837 - DNA, 103 bp, Homo sapiens
cgagaccgcttaccgcatctggctggagccctgcattcgcggcgtgtgcaggaactggcccaaataaggaaggaggaaaaagagaagaaaagacgccgcctcg

SEQ ID NO: 446838 - DNA, 100 bp, Homo sapiens
gtttggagatagacttcaagtcccggaccttatccgtgcgccgcttcggtttgcaggtgtctgatgatttgtgagcctcaagtgactactctgtggaatc

SEQ ID NO: 446839 - DNA, 100 bp, Homo sapiens
tcgctcgcgcagcctcctgggagttgtagtcgcgatcctgaggtaacgggttaaagcggcaactggggaagaagtatctgctgaggatcttggaggtgct

SEQ ID NO: 446840 - DNA, 75 bp, Homo sapiens
cagacatacggcgagtggaatcgggctgcatggctggcaaaagtccttcacagggtggtccaggtcctcagtatc

SEQ ID NO: 446841 - DNA, 74 bp, Homo sapiens
gaggattcagggaataggagctggggagcccttctgcgccacagtccaatatcagatggaaatgatgcggagcc

SEQ ID NO: 446842 - DNA, 90 bp, Homo sapiens
attccaagtaactcttatttgacctgtggatgaagagccagagtcctctgaggtcgatgctgctggtcggtggcctggtgtctgtgttag

SEQ ID NO: 446843 - DNA, 100 bp, Homo sapiens
tctccagagcctttgccaccatgggggagaccgtaatgagcgtcaaaattatccgaaaccgcctcactgggacaataacggtgtgattggactgttggag

SEQ ID NO: 446844 - DNA, 100 bp, Homo sapiens
cagacacctcagtttttctggatcaggcattgatgatgatgaagattttatctccagcaccagtctccaccagctcctggccgggttcgaggacaagtca

SEQ ID NO: 446845 - DNA, 75 bp, Homo sapiens
gagagggagaacacagttggagaaaatcggcagctgagacggccttggccggttcagcagcgtggctggaacgcc

SEQ ID NO: 446846 - DNA, 88 bp, Homo sapiens
gtgtatgtctttggagaacttctggagctggccaacgtgcaggaggaatcccgttctgcttccagaagtggaagtgctcacggatcgg

SEQ ID NO: 446847 - DNA, 82 bp, Homo sapiens
caaatccatcaagctcatcaaaagagacaagaggagcagcagcggcaccgcccctcaccctggagggtcctgtacaatctca

SEQ ID NO: 446848 - DNA, 73 bp, Homo sapiens
aggatgacttctctaatcagttacgggcttcttcgctggaatgaggaagaggaggaagccaaggaagacagag

SEQ ID NO: 446849 - DNA, 75 bp, Homo sapiens
caatttacgcgccgtgtaactgtgaatctttcaaaggtgagcgagtgctgtgctttcatgggcctcttctttatg

SEQ ID NO: 446850 - DNA, 78 bp, Homo sapiens
acctggtgcagtgcgagacgctagaggctgacagcagatcccaggtacagagggcacgctatgaggcagctaactgga

SEQ ID NO: 446851 - DNA, 82 bp, Homo sapiens
aaagagcaaagataagaagagaaaaagagaagatgaagaaacccagcttgatacgttggaatctggtggacagtaacaaact

SEQ ID NO: 446852 - DNA, 82 bp, Homo sapiens
acatggtgggggccacaccatttgccgtggccaggctagagggagttcccattagacttgaagttgggccacgtgatatgaa

SEQ ID NO: 446853 - DNA, 82 bp, Homo sapiens
cccaaatgtctgactctgactctcggactgagaaacgcaagcgtccagcctgcatgccgtgcggactgcacccaccagcaag

SEQ ID NO: 446854 - DNA, 98 bp, Homo sapiens
gacgcggaggcagagaagggaacgcccggcccagccccctctaagcgaaagacatgaggcctcagcctgaaatgaggttgttttgaggtcatctgatt

SEQ ID NO: 446855 - DNA, 95 bp, Homo sapiens
cagtcatggatctggaagctgagggcacgtgtttgcggttcagccctttgatgaccgcagcagataaacaacttgatgcagatgtttcccccaag

SEQ ID NO: 446856 - DNA, 83 bp, Homo sapiens
ctgcttcgtcaccccagaccttgccagagacctggcaaatgacatcatgacactgccagagcagctgagttccagataaaaac

SEQ ID NO: 446857 - DNA, 128 bp, Homo sapiens
accaactcagcttagaaggaagccaagacttaaagtttcctagatcccagcttttggtagctggcagtgttgtgatggcttttgaagaagtatgcccggacagaatagatctgattcataaaaattac

SEQ ID NO: 446858 - DNA, 100 bp, Homo sapiens
gacctctgagctgttcctcccagctacgagctgccccagtgttctggacagtcctagccgactggatgaggaacaccgtcttatagctcgctatgctgcc

SEQ ID NO: 446859 - DNA, 100 bp, Homo sapiens
gtttcccgggagatcccaggcggtgacagagtggagccatggctagaggaaatggcaactgctgacaggaagtttggcatccacctcccccagcctcctg

SEQ ID NO: 446860 - DNA, 75 bp, Homo sapiens
gaatggcagtgctcaaactcaccgaccaggtggagccatcgaagcccccacccacaggctgacagaggcaccgtt

SEQ ID NO: 446861 - DNA, 50 bp, Homo sapiens
ggagaggaggagattaacccacaaactgctggtccctgcagacggcttcc

SEQ ID NO: 446862 - DNA, 50 bp, Homo sapiens
cgacaagcacatcaccactctgcaggcactatgctgggccttcctaccac

SEQ ID NO: 446863 - DNA, 87 bp, Homo sapiens
tcgacatcatcaaccctgagattatcactcgagatcatggcctgtatgagaagaaaaagacctcaagaaagcaacgaaaggaacgca

SEQ ID NO: 446864 - DNA, 100 bp, Homo sapiens
ccagaagcgggcggcgcgggggagatgccccaccatggctgcaatccgaaagaagctggtgatcgttggggatggtgcctgtgggaagacctgcctcctc

SEQ ID NO: 446865 - DNA, 100 bp, Homo sapiens
accggagagcaagaagctggcttcccagggagactgtaagcggaagggtacagccaatgcccgaatgccagagaaggtcacatggatgaggagaatgagg

SEQ ID NO: 446866 - DNA, 82 bp, Homo sapiens
atcctggtcctcgatccgcccacagacctcaaattcaaaggactatacaggctccaacccaagttccagtggttgtgtctcc

SEQ ID NO: 446867 - DNA, 75 bp, Homo sapiens
gaggtccgagcctgtagggagaaggaccgtgaccctgaggcccagtactacggggagattggcatcgggacgccc

SEQ ID NO: 446868 - DNA, 99 bp, Homo sapiens
caagtacctgccagagaacgacctgaagtatatgactctcaacccttctactaagaggaagaatactggatccccagacaggaagccctcaaagaaatc

SEQ ID NO: 446869 - DNA, 74 bp, Homo sapiens
ttatccgggaacatttcattttctggcagttaaaagaagatggatgcacagtgttcagccaaggtcaatgcaag

SEQ ID NO: 446870 - DNA, 88 bp, Homo sapiens
tgaattcctggattcaagcaatcctcccatctcagcctcctgagtagctaaggactacagtcttttcgtctgcagatgactatagaga

SEQ ID NO: 446871 - DNA, 76 bp, Homo sapiens
gctgagcgggcaggacacggaggaccggagcggcctgtccgaggcagccgggattgcttaccacctgcagcgtgct

SEQ ID NO: 446872 - DNA, 101 bp, Homo sapiens
cgggagtaggagactcagaatcgaatctcttctccctccccttcttggtcaaaatgcagatcttcgtgaaaacccttaccggcaagaccatcacccttgag

SEQ ID NO: 446873 - DNA, 51 bp, Homo sapiens
gtcaagaatcgctctataagatctgcaaggcagacctgttatcctaaacta

SEQ ID NO: 446874 - DNA, 75 bp, Homo sapiens
tgtccatcgtgtgcctgatgatcacgcagctggctggcttcagtggaccaagagcccgagcccagcacattgtgc

SEQ ID NO: 446875 - DNA, 75 bp, Homo sapiens
caagccctcaaggatgcccggtccccatcaccggcacacattgtcgaatgtatcctgtcaggtataatgtcagtg

SEQ ID NO: 446876 - DNA, 100 bp, Homo sapiens
tggagagaagaaggcatatgttcgactggctcctgattacgatgctttggatgttgccaacaaagagcccaggtgcggcccggagcccactgaagtcttc

SEQ ID NO: 446877 - DNA, 75 bp, Homo sapiens
ctctgctcctcactcaccgcgtggacacgatcgctccagtgtgctgctctgctcgttacaacttagcaattttgg

SEQ ID NO: 446878 - DNA, 98 bp, Homo sapiens
gagaatggagccaatgactgagggtggcagagcagaaagatggacatttgtgaagatatttctgatcatgttgagcaaatccatgccctccttgaaac

SEQ ID NO: 446879 - DNA, 75 bp, Homo sapiens
atctttgggaccctagttcaaagaacaccaccgatagccacaccgaagagttctcccatttgctggttcccggac

SEQ ID NO: 446880 - DNA, 75 bp, Homo sapiens
tgacagttaaagctcagactaaagcccctcccaaaccaggagacacagccttcatcatcctgcgtaagcggccac

SEQ ID NO: 446881 - DNA, 90 bp, Homo sapiens
cgtgcccgcgaggagccgccgcgcgcccgcgccctccgcgcgacgccagagggaatctggaaaaattgcaatcaaaacatcatttctcta

SEQ ID NO: 446882 - DNA, 86 bp, Homo sapiens
ctggatctgtcttgtaataaactgactactctaccgtcagactcagtcacatgcccactcgaagtcgcactgctatggaaagtggg

SEQ ID NO: 446883 - DNA, 87 bp, Homo sapiens
gtggaatattggggggctcggctgcagacttggccaaatggacgggactattaagggtactatttttctgcctggaaataaagtttc

SEQ ID NO: 446884 - DNA, 50 bp, Homo sapiens
catggatgggacgctgcaggccctggagggtgaggacaaaatcttcttaa

SEQ ID NO: 446885 - DNA, 100 bp, Homo sapiens
ctgcagccttgaacgtctggactctagggaccctgctgaatagctggggctacaggcgtgtgtcactgcgcccagggaccacttaatagtgagtcttcca

SEQ ID NO: 446886 - DNA, 100 bp, Homo sapiens
ccatgtcgggttattcgagtgaccgagaccgcggccgggaccgagggcatagaatgtcaagctaaccaggcgtccgctacttcagaagagtgtactgtcg

SEQ ID NO: 446887 - DNA, 100 bp, Homo sapiens
ggcggtgcgtccctgggactctgctccgtgagctgtgagaaacgaccgaaacaagaagaagaaggaggtgcccaagcccgagtgctctgagagctacacg

SEQ ID NO: 446888 - DNA, 100 bp, Homo sapiens
ttgagattgacattgaacctacagacaaggtggagcagctcttcgggctgggtctgcggcccagaggggagtgccacaaagtgctggagatgttcgactg

SEQ ID NO: 446889 - DNA, 100 bp, Homo sapiens
gagagtcgtcagtgccctattccttcacatgtaattcagaaattagggacagacatagggcctgattacattccaacagaggaagaaaggagagtcttcg

SEQ ID NO: 446890 - DNA, 114 bp, Homo sapiens
gctgaaccaagaaaaccttatcagcactatttgaaacttttatctcatctggcttggcgcctgaggttctcccattagtggatccggattggtgccaatgtctccaacttcact

SEQ ID NO: 446891 - DNA, 101 bp, Homo sapiens
ggcggacggcgtggaccacatagacatttacgcggatgtcggcgaagagttcaaccaggagctgtggcgcggggccttccaggagtctgagctatgagtgg

SEQ ID NO: 446892 - DNA, 74 bp, Homo sapiens
caagatcgtgtatcccacggagaaggtgaactgtctggataaggagtaaaagtccctcgcaatttccgactgtt

SEQ ID NO: 446893 - DNA, 75 bp, Homo sapiens
atgaagaatcacatgttcttcatcgcgataacgaagaaacctgagccaaaagaatgcaatggtgtaaagattcca

SEQ ID NO: 446894 - DNA, 99 bp, Homo sapiens
ggaggacctcacttccccggggtgtaataatgttaactgagttgctgtctctgctggccttcatctgtgaagaagttgtatcacaatgtactttatgtg

SEQ ID NO: 446895 - DNA, 100 bp, Homo sapiens
agcgcgaatatcgtcatcgttagaagctaactgccttctatgaaagcagtcattattcaaggtgatcgtattcttccagtgaaaacaagactgaaatatg

SEQ ID NO: 446896 - DNA, 83 bp, Homo sapiens
ccccggcccgcgctgcccgcactcctggtcctgctcggggctctgttcccagaaaccaatagagccatggcgactccctctgc

SEQ ID NO: 446897 - DNA, 97 bp, Homo sapiens
tcagcgccgctcccagccacagcctcccgcgcctcgctcagctccaacatgaatgattacggacctgaagccaaagaacaagatgcgctagtggaca

SEQ ID NO: 446898 - DNA, 83 bp, Homo sapiens
ccatgctcaaggccgacgtcaacctgtcccacagcgaaaggagctctttgttcaatgcctagccacctattcctacagacacg

SEQ ID NO: 446899 - DNA, 98 bp, Homo sapiens
acagcagccatcgaggcgagccagagcctgcagtcccacacggcaagaaactatattcagtctttgactcagatgccgaagatgaactttgcgaatgt

SEQ ID NO: 446900 - DNA, 75 bp, Homo sapiens
aaatcatctccatattctcaggcacagagaaaggttctgaagaaagtctccaaatacattcaagagcagaatgag

SEQ ID NO: 446901 - DNA, 83 bp, Homo sapiens
caaggagctaaagcagcgtgcgttcagccctgggtttcactgttacatgccttgaagtgatgaggaggtttctgttactatat

SEQ ID NO: 446902 - DNA, 50 bp, Homo sapiens
aggatccggaggcgccagctcaaccgatgtggagagcatcttgtgcgcac

SEQ ID NO: 446903 - DNA, 100 bp, Homo sapiens
tgggtggtccaggatgctctggacaacagccagtgggggcccctgaagccactgatggaagccacactaccggggcatcggaccatgaacccctgtcctg

SEQ ID NO: 446904 - DNA, 50 bp, Homo sapiens
gagacgttcttcgaatcctcatggaaggattaaagaaaccttctaccctg

SEQ ID NO: 446905 - DNA, 132 bp, Homo sapiens
cgactaccggcgccagttgcagtccttgacctgcgacctggagtctctgcgcggcacgatctgtgacttcctccgcggagccacagtccatagaatcctcggccagcaggtcccctatgccaccaagggcaa

SEQ ID NO: 446906 - DNA, 80 bp, Homo sapiens
tggtagcccccacccctctccgtccatggccccagatgacacttcaggaagccaaattggcagagaatgcttgtaccctg

SEQ ID NO: 446907 - DNA, 75 bp, Homo sapiens
gcatgagcgaaagctacacgctggaggttgggcccgaaggcatcctgcagaacggggctgtggacgacagtgtag

SEQ ID NO: 446908 - DNA, 75 bp, Homo sapiens
gcttcttcagctctgagaccaccgcagcccactccctaggtgtgaacccacatccctgcccccagggccacctgc

SEQ ID NO: 446909 - DNA, 87 bp, Homo sapiens
ttctccttagatgagtgccgcagcttggtggctctgatggaaccctgaaaagcaaaggcctcatctccatggcacaggtgatgaaac

SEQ ID NO: 446910 - DNA, 98 bp, Homo sapiens
cagtatgcaaggccacgacccacgagatcatggggcccaagaaaaagcacctggactaataccctctaccatctgctttggtcagggtgccgctcgag

SEQ ID NO: 446911 - DNA, 83 bp, Homo sapiens
gggacgggtttagcggcagcctcttcgggctgctgtatgaggagaagggggaacgcaggggccaggtgccgtgcaggtctgtg

SEQ ID NO: 446912 - DNA, 49 bp, Homo sapiens
ctttgatagtcgtaccatatgcagaaggcatccagggcattgtggatgc

SEQ ID NO: 446913 - DNA, 90 bp, Homo sapiens
aaagaggcgaaaggaagcaagcagttcagaagagccaaggaataaacatgcaatgaacccaaaaggatgaaagccttgagggaattagac

SEQ ID NO: 446914 - DNA, 82 bp, Homo sapiens
ctattattcaaggacctcctggaacagaggaaatatcattctgcaaaagaagcttatgaacaacttttgcagacagagaatc

SEQ ID NO: 446915 - DNA, 100 bp, Homo sapiens
gcacagcagctgaagttcagcagcgaggttcccgacctggaccgaattatccccgtgctgctggagcacggcctggaacgtctcccggagcactgcaagc

SEQ ID NO: 446916 - DNA, 75 bp, Homo sapiens
ccgaagttgcggattgcagccgagaacgagctcaaccagtctgcaaaatgaatgttcaccgtcgatgtgagacca

SEQ ID NO: 446917 - DNA, 97 bp, Homo sapiens
actggaaatcccaaagcctcgaatggctgccactcagaaacttgttaaagacattattggtgaccaagaatatggcccaggtgaccaaagccctgga

SEQ ID NO: 446918 - DNA, 100 bp, Homo sapiens
cttccttcgctaacgcctcccggctctcgtcagcctcccgccggccgtctccttaacaccgaacaccccgaccgctgtaaggaggtacagcagatccgcg

SEQ ID NO: 446919 - DNA, 100 bp, Homo sapiens
ctttcctcgtggaatttgaagattctacagataaatcagagactaaggtgtcagtatgttcttcaagctgctctgctcctgggcccaagctattctcctg

SEQ ID NO: 446920 - DNA, 100 bp, Homo sapiens
agttggtcttgagatgaaaagcattggttctccagttaaggttggaaagatggatgctacttcctattctaagagattcaacgtgtatcttatgcctaca

SEQ ID NO: 446921 - DNA, 100 bp, Homo sapiens
agtcctgttctacctactgccaattggaaaggtcaaggaagctgatccgctgagtaatggctcagtcatgatttttaacacctctgccttaccacatctg

SEQ ID NO: 446922 - DNA, 97 bp, Homo sapiens
ttgtggcattgatgaagatcatgacattgtagtacagtatccaagtggcaataggtatgcaggtgccttgagagcttcaggggaaatggcttcagcg

SEQ ID NO: 446923 - DNA, 96 bp, Homo sapiens
agtggggctattggactgacttttcttatgctgggatgtgccttagaggattatggatcaacaggcggtccttcgggtcggagtggacatcggatg

SEQ ID NO: 446924 - DNA, 90 bp, Homo sapiens
acgacttctacgaggtggcctgcaaagatcgcctgcaccttcaaggccaaactatgcaggtgatcatggagctcagcttggtctccatgg

SEQ ID NO: 446925 - DNA, 100 bp, Homo sapiens
tctcctggcagcatgagctgcatcagctcagaaatacaggtatcaggatgaagatacacctcctcaagagcatatttccccacaaatcacaaatgaagtg

SEQ ID NO: 446926 - DNA, 75 bp, Homo sapiens
aagtttcctgacgcctcccagccgtgcttcctgttaagcctgtgaaactattccagttcttcagacaaacaatgg

SEQ ID NO: 446927 - DNA, 98 bp, Homo sapiens
cggcccggagtggggcggcggcacacgtcacatggagatgggcgtcaagaagttacctctcgtaccagccgctcaggagctcggtgtagaaactctat

SEQ ID NO: 446928 - DNA, 75 bp, Homo sapiens
cagccttagactatttttcaaacatcttcccaagggattgttgaagaaacttctgaagagggaaactctgtacct

SEQ ID NO: 446929 - DNA, 90 bp, Homo sapiens
ccacgtcccacgggccggacccgcggccgcgttcgggactatcctattaagtgtaatctcactgcttaatgagcccaacaccttctcccc

SEQ ID NO: 446930 - DNA, 50 bp, Homo sapiens
cctatgatgaagagggcgtccactggagtagggacggggtttcaccgtgt

SEQ ID NO: 446931 - DNA, 98 bp, Homo sapiens
gagagatacagccttcccatagtgaacctcaaggttacaggaggttccagtggcatcgggaagtgcattgctatcgagtgctataaacaaggagcttt

SEQ ID NO: 446932 - DNA, 74 bp, Homo sapiens
ccacagctgtggccccggctcaggcccaggaagtacacgagaagctccgaggatggctgaagtccaacgtctct

SEQ ID NO: 446933 - DNA, 73 bp, Homo sapiens
ggcagatctgtccttaggaaagatatttaccagtggccaagcaagaggagttcttcaacctgtcccactgcca

SEQ ID NO: 446934 - DNA, 75 bp, Homo sapiens
ctcagatgctgccagggtccctgaagagggaagacacgcggaaacaggagcacacatccaccctcctgctcaatg

SEQ ID NO: 446935 - DNA, 90 bp, Homo sapiens
cggatgagtacgataccgaagcgggctgtgtgccccttctccacccagaggcttatcaggagggcagacttcaaaagctactaaaaatga

SEQ ID NO: 446936 - DNA, 100 bp, Homo sapiens
tcataagagcctgagagagatttttctaaggtatcattgcccagtgcctaagatcttttatgttcagctcactgtaggaaataatgaattttttggggaa

SEQ ID NO: 446937 - DNA, 75 bp, Homo sapiens
ccgcagtcggggcagccgctcgcccctcttttccatgtatccgtccaggtgaatgactggcaggaggactgggtc

SEQ ID NO: 446938 - DNA, 99 bp, Homo sapiens
ccttattacagcagcctcagcaaaaagattatggattggatatgtctacttctggatgcaaattttactgttgttgtaatgatgccagaagcaaagagg

SEQ ID NO: 446939 - DNA, 100 bp, Homo sapiens
gctcaagagtttagccttgcgactggcccagtatccaggtcgaggttctgcagaaggttgtgactttagtatacagtacaaacccgtagtgctgatgaac

SEQ ID NO: 446940 - DNA, 75 bp, Homo sapiens
gtgatgaaggcagagagcagagacatcccgatctggggaacatacagtgaagttgttctctgaagttcctcatct

SEQ ID NO: 446941 - DNA, 89 bp, Homo sapiens
agtcaagctgccttaggcttataacatcacatttaaaagcatctcagctgcattgttgtggaattcacaactactcagactgggaaaat

SEQ ID NO: 446942 - DNA, 75 bp, Homo sapiens
cccttctccttggccgtctttgagaactggaagaagttcgggaactcagagtttgacccccccggacccaatgtg

SEQ ID NO: 446943 - DNA, 100 bp, Homo sapiens
gtgggagtcacctgaaaggcaagaaatgatacagaaggtggtcatggcactaggagactacatgggcgcctcctgtcacgcctgtatcgggggcaccaac

SEQ ID NO: 446944 - DNA, 73 bp, Homo sapiens
gctatcccctctgacgtctcccacttccgcttccatgaattgaatgatctggcacgggaccctccagcacagt

SEQ ID NO: 446945 - DNA, 51 bp, Homo sapiens
aactgttgaactcagctgcctgtaggtggagccttacaaagtaaacctctc

SEQ ID NO: 446946 - DNA, 98 bp, Homo sapiens
cgccaataaccacggagccggcagcggcgcgggaggccgtgcgggccagaaatgtacacacaggagagctggctgcagtaaaaatcattaaattggag

SEQ ID NO: 446947 - DNA, 73 bp, Homo sapiens
acggacacctatgaagaccagcagtggaggtatcgtgatttccgatacccacctggacacccccaggagtata

SEQ ID NO: 446948 - DNA, 100 bp, Homo sapiens
tgtaaaagcaatatataattctggtcaaggctttcaacagacctcacatctttcttcttatgaaattataactccttggagattaactagagaaagaaga

SEQ ID NO: 446949 - DNA, 74 bp, Homo sapiens
ctcagcccccacatcctggcgatttcagccttttatgctgagtgttttaacaagaagatacaattcaatgctca

SEQ ID NO: 446950 - DNA, 50 bp, Homo sapiens
cctcgcgtccggagtccccgtggccaggacttggggtggagtcgaaagca

SEQ ID NO: 446951 - DNA, 82 bp, Homo sapiens
ggaagcgccaggacaatggggacccgggacgacgagtacgactacctattcaaaggagcgagcccagggcgtggtgctgaaa

SEQ ID NO: 446952 - DNA, 102 bp, Homo sapiens
ctggcgctggagacatcaaacttactaaagacggcaatgtgctgcttcacgaaatgatcattggttgcagagtgaggagagatccccctaactccaccgaac

SEQ ID NO: 446953 - DNA, 100 bp, Homo sapiens
gtgtggggttggtgtgattagcttcgcagtctggaaagctttaggagttcacagtatgccacctcagtatggacagcaaggtgtgagtggttactgccag

SEQ ID NO: 446954 - DNA, 75 bp, Homo sapiens
gtggattccagaggggtgacagcaaaacttgggagctgaaagtgccgacagcattggtgccgtgttaaatagcaa

SEQ ID NO: 446955 - DNA, 87 bp, Homo sapiens
gaactgcacgataaaggaactcaggcgcctcttcttagttgatgatttagttgattctctgaagtaatcctaaattggagagtcaga

SEQ ID NO: 446956 - DNA, 74 bp, Homo sapiens
ggaactcctgctgcccactcaggaaagtgaaaaggtttctgaatatccagcagtgattgtggagccagttccaa

SEQ ID NO: 446957 - DNA, 51 bp, Homo sapiens
gactatcgggatctaatcaaggcatcttctctgcattcagtttcatccaag

SEQ ID NO: 446958 - DNA, 88 bp, Homo sapiens
gttatctctgtaccgggcgatgctgagagagagcaagcgtttcagcgcctacaattacagcgaccgtggcagccatgtattacagcta

SEQ ID NO: 446959 - DNA, 50 bp, Homo sapiens
ctggtctgtgcacaccccctccctgagacattgtggatatcaagcctgcc

SEQ ID NO: 446960 - DNA, 75 bp, Homo sapiens
ccgagaagttcctgttaccaaactcatagacttggtgtttgatttcaccaccatagacttgacatctgagactga

SEQ ID NO: 446961 - DNA, 75 bp, Homo sapiens
ggcggcggcggctgcggcccaatatagggggatatgagactttctactcggaatatcctgagtgttgcgtggatg

SEQ ID NO: 446962 - DNA, 96 bp, Homo sapiens
cctgaatacatgatttaaacaagagatttccacagaaggattctgataatcctgaccttcgagaccggggctatatttattggcgccttctctcaa

SEQ ID NO: 446963 - DNA, 97 bp, Homo sapiens
tgatgatgctgcctacacacaagaaaaatccagttacactcttaaaggaattgtcagtgataaagtctcgatatcaaactttgtatgcccgctttaa

SEQ ID NO: 446964 - DNA, 82 bp, Homo sapiens
ctgcgtcctcatcgggcttatgttcgaggaagtgttttatctgacttacacccctgaagatgtcgaagggaacgttcagctg

SEQ ID NO: 446965 - DNA, 99 bp, Homo sapiens
cgattatgtccattgttctcttggagcagctggtcatcatgctctgggtgaaccaggaggatgaggtggaggaggggcccagcgatgtgcagaacggac

SEQ ID NO: 446966 - DNA, 96 bp, Homo sapiens
caaaacttggaggaattaacaatgtgcttgtgcctcatcaaagctctagaggacaaaatcccagtccttggcacaaactcaggaaatggaagccgg

SEQ ID NO: 446967 - DNA, 90 bp, Homo sapiens
gccatgtgagacgtgcctttgaccttctgccatgattgtgaggcctccccagccacgtgaaactgcaattcgaagttttcaagtagccct

SEQ ID NO: 446968 - DNA, 101 bp, Homo sapiens
ggctgaaattaagtgaggaattgagtggtggtagattgaaggcgacagaaggctagagagaggcagcagaaattgcttgcggagtttgcttcacgacagaa

SEQ ID NO: 446969 - DNA, 83 bp, Homo sapiens
ctaagcaaaaccctgcagaacggctgcctaatttacagcaaccatgaggatttttagactctgaggagcagttggagctaatc

SEQ ID NO: 446970 - DNA, 83 bp, Homo sapiens
cagagagcccaacgcctggtgctcaagactttctccgagccctgccttgagcttcacctactcttccgcgcccgtctctctcc

SEQ ID NO: 446971 - DNA, 98 bp, Homo sapiens
tgggaggataattgggatgatgacaatgtagaggatgacttctctaatcagttacggttgtaggtcataaagaaggtctggatgttatggagagagct

SEQ ID NO: 446972 - DNA, 83 bp, Homo sapiens
gctcgggtcgccggagccgcgccccaccccgccagctccagagccacgtacgggatgggcgtgttttgggcgtgctagaggtg

SEQ ID NO: 446973 - DNA, 100 bp, Homo sapiens
agagagccgtctcccctctctggagccgagagaggccggtttcccccaccagctacaggcaaccagctgctttcatcgtcacacaataccctctgccaaa

SEQ ID NO: 446974 - DNA, 75 bp, Homo sapiens
tatacatctccttggccatcagaaaaagagtccaggagacaaagtttgggagctgttccaaaaacataaacttag

SEQ ID NO: 446975 - DNA, 75 bp, Homo sapiens
cgcagtcgttcgcccaggctttggcccggcttccggagccaatggagatcttcgtggatgatgagacgaagttga

SEQ ID NO: 446976 - DNA, 100 bp, Homo sapiens
cgtccgaggctcgcgggcggcgggcccggaccatggtgaatccgggcagcagctcgcagccgcccccggtgacggccggctccctctcctggaagcggtg

SEQ ID NO: 446977 - DNA, 100 bp, Homo sapiens
gccaggaagactccctgcctcctgagtcccagacagaggtcagatcaaggccaccccttcaggatgaccttcttttctttgagaaggccccaagcagaca

SEQ ID NO: 446978 - DNA, 100 bp, Homo sapiens
atcgattccgtggctgttctgcggggcatccagaaggtggcgatgttggtccaagggaactgggtggtgaagaggagaactacgatgacccgcacaaaac

SEQ ID NO: 446979 - DNA, 89 bp, Homo sapiens
gggagatcgtgggcgagctgggcgacggcgccttcggcaaggtttacaagatcaggaagcaccatacctcctgcgaaacctcagtgatc

SEQ ID NO: 446980 - DNA, 117 bp, Homo sapiens
gaggccgtccagcagatggcggatgccctgcagtacctgcagaaggtctctggagacatcttcagcaggggaacgcccttttgcttgtgactggcagggctgcgacaagaagttcgc

SEQ ID NO: 446981 - DNA, 100 bp, Homo sapiens
gcttcaaagttccccaagaagaactggaaaatgccagcctagtgtttacagattatcgacatgatggtcgagatcttcaaagctcaacattatcagtgcc

SEQ ID NO: 446982 - DNA, 87 bp, Homo sapiens
gagggtgacctggaggagggctctggaagtcacgtcaggctttcaaggatatgctgtattcagctcaggaccaggcaccttctgtgg

SEQ ID NO: 446983 - DNA, 100 bp, Homo sapiens
ggactatgactttcaacgggactattatgatagatgggacaccaggtccaataccacctccaagccgagtcacttggtggatgcgcacactgccgaagtc

SEQ ID NO: 446984 - DNA, 100 bp, Homo sapiens
tgaaacgctgcctggaaaggaagtaccaggacttgcacaggtacctgtttcccaggcaactactgatcaggcatttctggaccccaaaacaacaaactga

SEQ ID NO: 446985 - DNA, 80 bp, Homo sapiens
gaaaaagctaaggatatctttattgaagctcacctttgtctaaataagtcagcccaaggccaaccccactgtcactctgt

SEQ ID NO: 446986 - DNA, 100 bp, Homo sapiens
ccgagccgatcgccgcggggcagttcgggccggctgtcctggcgcggctctgacgcccgctctgcggcttcggtgtttgaacaggccacagtccaggagc

SEQ ID NO: 446987 - DNA, 100 bp, Homo sapiens
gaggctcaacttcatcactgagtacatcaagggcggcacgctccggggcatcatcaagagcatgaatgcctcggctggggtggagcgcctcttgctgggg

SEQ ID NO: 446988 - DNA, 87 bp, Homo sapiens
gaatcccaaccgcacaatggaaggctttcaccaaacctgaagaagcctgcagcttcattttgaggggccacttagaagatgtgtatg

SEQ ID NO: 446989 - DNA, 100 bp, Homo sapiens
tgatgacatggacagcatcatcttcccaaaggttattctcgttcaagttaatccaggtgagactttcacaataagagcagaggatggaacacttcagtgc

SEQ ID NO: 446990 - DNA, 100 bp, Homo sapiens
cgacaagccgctggcagccgcggatctcaccgccgctcaggagtaatcaagtcagaggattatatgacttttatctgcctagagaagaactatggatcta

SEQ ID NO: 446991 - DNA, 98 bp, Homo sapiens
ccgaggacaccgactaccagcagcctgacatttaccccggtaactgctgggcatttaaaggctcccaggggtacctggtggtgaggctctccatgatg

SEQ ID NO: 446992 - DNA, 75 bp, Homo sapiens
cagaaggcgatcaaggccaagtatccgccagtcaataggaagtacgagtgtgagaattgaatgatctggcacggg

SEQ ID NO: 446993 - DNA, 50 bp, Homo sapiens
ccgggaccggaccctcgcgccgcccgcgcctgatgtgtgagaagcggata

SEQ ID NO: 446994 - DNA, 100 bp, Homo sapiens
ccggtcgtgagctgctacaacgccagcgatcatgtctacaagggctgcttcgacggcaacgtcaccttgacggcagagacggggtctcactatgttgccc

SEQ ID NO: 446995 - DNA, 100 bp, Homo sapiens
ccaagaaaaagcacctggactgagtctaccatggctcaagaatctcccaaaaattcagcagcagaaattccagtgactagtaatggagaagttgatgact

SEQ ID NO: 446996 - DNA, 91 bp, Homo sapiens
caaccattgacgccatgtcgggttattcgagtgaccgagaccgcggccgggaccgaggggtgctttcttctgcgacctggtactcatctac

SEQ ID NO: 446997 - DNA, 50 bp, Homo sapiens
gcctcgccgcgtctcgccacggattttgacacttcatgacatgtcattat

SEQ ID NO: 446998 - DNA, 100 bp, Homo sapiens
caataatggcgtgttccagtccacggccttcctcttcgcttctgggtaaacatcctgaagaaccctcagtttgtctttgacattaagaagacaccacata

SEQ ID NO: 446999 - DNA, 90 bp, Homo sapiens
agatctaaagctaaaattgcctttggacagtctatggatctacattataccaataacgagcttttgggcaacttcaaggataaggaacgc

SEQ ID NO: 447000 - DNA, 80 bp, Homo sapiens
taattgataacaccctgtaacagctgagtactccaaagattcaggtttactcacgtcatccagcagagaatggaaagtca

SEQ ID NO: 447001 - DNA, 101 bp, Homo sapiens
aaactgaccatagccagagaacagccctccatcttgcagcccagaagaactggcatcaaatactcacaacatagctcaggatctgtcaaacaaaagttctt

SEQ ID NO: 447002 - DNA, 100 bp, Homo sapiens
acatcacttatgataaatattaccagactccacgattatggttgtttggctatgatgagggaaagaatcatgtgatgtacagctttatataaagagacaa

SEQ ID NO: 447003 - DNA, 83 bp, Homo sapiens
ctgggcgccaagccgcggagcctccagacgggtgagaagccctaccactgcaactgggacggctgcggctggaagtttgcgcg

SEQ ID NO: 447004 - DNA, 90 bp, Homo sapiens
gagcttcaaggaaatgaagtttcctgcaggtggtcctgctgcaagctcagctgactttggagcggaagcagaagcaggactacatcaccc

SEQ ID NO: 447005 - DNA, 100 bp, Homo sapiens
cccggggaggacggtttcgtcccgtcggcgctggggacccgcgagcagtaactgcgtcattgattggctggtatccaaccagtctgttaggaatcgccag

SEQ ID NO: 447006 - DNA, 100 bp, Homo sapiens
ggaaaaaggaagaggagaaggaaattgtcccgaatccctgcagccgccgccatgtctgcgcatctgcaatggatggtcgtgcggaactgctccagtttcc

SEQ ID NO: 447007 - DNA, 75 bp, Homo sapiens
cctgggagcggcggccacggaggcaccatgaagaagtcttactcagttggaagctgaaggtgttcctgaagtatc

SEQ ID NO: 447008 - DNA, 100 bp, Homo sapiens
caccatgacgtccatccatttcgtggttcacccgctgccgggcaccgaggaccagctcaatgacaggatccaaggattctgtagctacaatgttgtcaag

SEQ ID NO: 447009 - DNA, 83 bp, Homo sapiens
tgggatccccgccgctctgtctacaacccgaggtcgcgtggggcaggcagtggcgctgcgggccaaggccttcggcttcaacg

SEQ ID NO: 447010 - DNA, 83 bp, Homo sapiens
ccagcggctcgtcaacgtgaccctcattcgccgggtgaatgagtgcttctcagcttcacgggaaagggcctgctgtaccacgg

SEQ ID NO: 447011 - DNA, 101 bp, Homo sapiens
ttcacatcctgaaatggctttctgtagaggacatcctggccgtccgagctgcctacccgccgggtccctacgctacacctccggggtacggggcggccttc

SEQ ID NO: 447012 - DNA, 96 bp, Homo sapiens
taccctcaaactgctccctctgctcactggtctctttgccgtctcccgagcctgtggggcccggatagtcagccgaccagaggaactgagagaaga

SEQ ID NO: 447013 - DNA, 90 bp, Homo sapiens
gccaatcccaggaggaaaaacgtctgttatgttctgaacccacacatgttttcggaaggaccagatggctgacactggctaatgggaacc

SEQ ID NO: 447014 - DNA, 75 bp, Homo sapiens
tttctgctgccgcccgcaagcagagccccgacacgtctctgctactggactgtggtgagggcacatttgggcagc

SEQ ID NO: 447015 - DNA, 100 bp, Homo sapiens
ggctaaggacattttctataagaactccttgttccgacatcccaaacaggcagaatccagagaccacatttgaagtatatgttgaagtggcctatcccag

SEQ ID NO: 447016 - DNA, 98 bp, Homo sapiens
gagaatttaggatcttgttgaatccagtccagttggagtcacttctccaattgtggctcacactgagcctgaattctagttcaactggaaacaaagaa

SEQ ID NO: 447017 - DNA, 136 bp, Homo sapiens
ctcagcccttcgtactgggacgttggggagggggctgtgccgggcggagagaactcagcgaggattctgagcccatggaccaagcttctctcaaaaacagcgatgttcttgttctgacagggcttacccagatccc

SEQ ID NO: 447018 - DNA, 101 bp, Homo sapiens
cccggggcggtccctggctgcgtgcacagcgccttgttccagcagggcctgatccaggttgctgcagcaactggtcacacagtagtgttggtagaccagac

SEQ ID NO: 447019 - DNA, 100 bp, Homo sapiens
gagagactggctcaagaccatggcactgctgatggttcttcagaactcaggaatcgtgttgcatgcattgtttctacccacctgagatggttggaaaccc

SEQ ID NO: 447020 - DNA, 75 bp, Homo sapiens
tggcggattatgtgataccagctcagatgtggaagatgtcaagtttgtgatcaactatgactatccaaacagctc

SEQ ID NO: 447021 - DNA, 100 bp, Homo sapiens
ttgaacacatccttcaagcagtagtcccagccacaaatgtgaacacagttttaagaattcctcctaaccttgttagatgacttggataaagaactaaaca

SEQ ID NO: 447022 - DNA, 80 bp, Homo sapiens
agatgcccaccgggatggagaaggaggaggaatcgggagtgcatccgccccaacccttttccccctcgtctcctgtgaga

SEQ ID NO: 447023 - DNA, 98 bp, Homo sapiens
ccaggtgcccagaggactttcttccagcttctgctgtccttctttgtggagagcaagtgagaaagatcagtctaaagaaaaggagaagaaagtgaaaa

SEQ ID NO: 447024 - DNA, 98 bp, Homo sapiens
tattgcatccctagagaaggacctggaagagcaagacggccacgacctgggagcagcaggtctctgagcggcccctgatgttcctgttggacactcct

SEQ ID NO: 447025 - DNA, 60 bp, Homo sapiens
tttgaagaaagtgaattacatcaaaatcttggagatctattgggaaactgattataacca

SEQ ID NO: 447026 - DNA, 120 bp, Homo sapiens
ttttcgttggtggtgttcagttgtggcggttgctggtcagtaacagccaagatgctgcggaatctgctgttgacccaccttcagacttgaattttaaaattatagatgaaaatactgttc

SEQ ID NO: 447027 - DNA, 73 bp, Homo sapiens
gtcaagatggaggagtacgcgcgagagccttggctaccacatactgttgattgtgatgaaatgccagttgaag

SEQ ID NO: 447028 - DNA, 75 bp, Homo sapiens
actggtgacatgcagttgtccaaaagtgaaattttacgaactcagattgttcctgcctgattcataaacatcgtg

SEQ ID NO: 447029 - DNA, 88 bp, Homo sapiens
gcagctcaccaggtctgagctagaggctgcacaccatgccagtgcagtcagattctccaagctgagattggggattttgatgaagcct

SEQ ID NO: 447030 - DNA, 88 bp, Homo sapiens
gggagttcctggatggtctttagattgatacaccaatcctctgaaattgcatgcaaaaataatcatgtcaaccctgccatggacttca

SEQ ID NO: 447031 - DNA, 90 bp, Homo sapiens
cacagctggatgtttgcgacatcccagagagcttccagagttaaacccatccagagtaatggctgcggccttacccaggaccctggggga

SEQ ID NO: 447032 - DNA, 83 bp, Homo sapiens
agggccacctgttcctcagttccaaccacagtttttcagaagaagtgaagtcaagatgaagaaccatttgcttttctggggag

SEQ ID NO: 447033 - DNA, 90 bp, Homo sapiens
cccacaggtgctaaagagagcagtaccctgatggagtcccttgcagatccccataccgagtgtgcctacgttccagccgtctacacctgt

SEQ ID NO: 447034 - DNA, 100 bp, Homo sapiens
ggttaaactacagaacaacatatcgtatcagatggcagacatacatcatttaaaggctgctcagaaagtttgccacctcatgggaattaatgtgacagat

SEQ ID NO: 447035 - DNA, 90 bp, Homo sapiens
atttcccagaaaccagatgcagccctactcaagatgaatttcatcctttcatcgaagcacttctgccccacgtccgagcctttgcctaca

SEQ ID NO: 447036 - DNA, 124 bp, Homo sapiens
aaacctgacagcatggggctgtactgaataccgcagaccattgtaattcatggaaagaccacagcaagattctttcattcgtctcctcctagcctgggggaccaggctcgaactgaccctggac

SEQ ID NO: 447037 - DNA, 88 bp, Homo sapiens
ggtggggggcggcggcactgccggcggggaccgctgggaaggcgaggacgaggacgaggacgtcaagaaaattcatttgcaaattgcc

SEQ ID NO: 447038 - DNA, 100 bp, Homo sapiens
cccggcgtggggcgggacagcggccccctggagggggcagtcccgggagaacctgcggcggccggagcgagtctcaagtcaaagtcgtggccctgtgtgc

SEQ ID NO: 447039 - DNA, 155 bp, Homo sapiens
aagaacaagctttcttactcaggggggaaaacgttttgagcttcaacatggcctcgctgtgatatgtatgacgttgaccaatgatgccttaggagccacctggaattggctgtacttcatccccctcatcatcattggatccttctttgttctca

SEQ ID NO: 447040 - DNA, 96 bp, Homo sapiens
cgatggcggagattctcccgagcacgacactgacattcctgagaattctcccagtccttggctacatcagcccacccctgtgacctcagcagatgg

SEQ ID NO: 447041 - DNA, 75 bp, Homo sapiens
aacaaaggctgggatgggtatgatgtacaggaagtgcttcgggagatccaggatgcagtggccagggcggggcag

SEQ ID NO: 447042 - DNA, 100 bp, Homo sapiens
ttgtcaagattggataaaccatgtatcacattgattgtagagtttttcagaagaagtgaagtcaagatgaagaaccatttgcttttctggggagtcctgg

SEQ ID NO: 447043 - DNA, 100 bp, Homo sapiens
gagacaaccataaagagaaagctagtgaatgggaaaatggtagcggtggggtggcagttgaaaaatttggtgaatgcactacgagaggacccgagtggtg

SEQ ID NO: 447044 - DNA, 82 bp, Homo sapiens
ccaaagaggagccggccgcgcgggccgggaggggacggccgccggagccgcgaggccaaaggcagaagaggcctggaccttg

SEQ ID NO: 447045 - DNA, 75 bp, Homo sapiens
cacttcttttattttcctgtaatatatctgtatcatcggagagccacccagagttccctcactgaagatctgagc

SEQ ID NO: 447046 - DNA, 75 bp, Homo sapiens
tgtgggtctggactgatctccatgtcctgttgtggggcttttacagcctttggaatcatttgctgtttcaaatag

SEQ ID NO: 447047 - DNA, 98 bp, Homo sapiens
gaacatgttgcagaaaagcacatttacagcctaatgctttctcacatggtcatagaggaagttaatttcatgcagaaccatcttgaaatagagaagac

SEQ ID NO: 447048 - DNA, 91 bp, Homo sapiens
tcgcagtggtcgcttcttctccttggtgccttatgcccgctcagaggcccacctcacagagctgctggaggagatatgtgaccggatgaag

SEQ ID NO: 447049 - DNA, 75 bp, Homo sapiens
tacagacgctgccagcatcgccgccgccagacaaatttacatgtattggagaccagaccagaagcccttctgaat

SEQ ID NO: 447050 - DNA, 75 bp, Homo sapiens
gcggcaccaacggcaccaactattcgcggagctggaatgactggcaacccagaaaaatggctacaaacttcctag

SEQ ID NO: 447051 - DNA, 78 bp, Homo sapiens
tgtactgggggattcgcagggaggatgtcgggacaccccggaagctgggaaatggattctggtggaggaaagcaggga

SEQ ID NO: 447052 - DNA, 82 bp, Homo sapiens
gagaaggtctacagagcggcctgcgccagcgaggtggcccagttgaaatccttcccttcctctaccttggaagtgcctacca

SEQ ID NO: 447053 - DNA, 51 bp, Homo sapiens
cggcggcgagcggttccttgtgggctagggttttggccaaattgggcgagg

SEQ ID NO: 447054 - DNA, 100 bp, Homo sapiens
ggaaaacaacttcgagggcagagtcccctgaggccttagagatgaatctcccagaagtggcagccgcggcagggacaccaggatcatgaaggacctggga

SEQ ID NO: 447055 - DNA, 51 bp, Homo sapiens
gcggcccgcgcgcagccggccggccaccagcccctcgggttccaagatgca

SEQ ID NO: 447056 - DNA, 88 bp, Homo sapiens
gtagagactgatttgcaacccttccgggaagccatagctctgcatgcttccttcaaaatgtctactgttcacgaaatcctgtgcaagc

SEQ ID NO: 447057 - DNA, 100 bp, Homo sapiens
ttgcgcgccgcggctcagggaggagcaccgactgcgccgcattgggaaaatgaggtacgttagtgttcgcgattttaaaggcaaagtgctaattgatatt

SEQ ID NO: 447058 - DNA, 88 bp, Homo sapiens
cggctgcagacttggccaaatggacgggactattaagggtgaggtgtgcaatatgattagcaagaagtacagtgaattcctgcctagc

SEQ ID NO: 447059 - DNA, 96 bp, Homo sapiens
ggcgccggcatagtacaatgaggcagccagcggatcttgggtgtcagcggtgcccactgtgctggccatgaagaatggggacgtggtggacaagtt

SEQ ID NO: 447060 - DNA, 76 bp, Homo sapiens
tgatatccttctcaaccttgtgggatgtgaaaactctgttactgaagctgctattaacttagcaaagctgaaactt

SEQ ID NO: 447061 - DNA, 98 bp, Homo sapiens
ccccacgcgcgcgcgctcgcgcaccacgcgccccgcgcggcccgcccggatcgtggcctctcgagagcaagtgaggtcaccaagaattccctggagaa

SEQ ID NO: 447062 - DNA, 75 bp, Homo sapiens
atacaaagaagtgatgctggagaattacaggaatcttctctcattggattggtgctgaagacatggacggcttcc

SEQ ID NO: 447063 - DNA, 83 bp, Homo sapiens
cccccgtccggtccctctctccacgaaaccaaggtgtatgttggtaacctgggaactggcgctggcaaaggagagttagaaag

SEQ ID NO: 447064 - DNA, 83 bp, Homo sapiens
gcctgcacagccgcggcggcagcagcagtgagagagccaaatctcctcagccacctgttgaagaagaagatgaacacttcgat

SEQ ID NO: 447065 - DNA, 82 bp, Homo sapiens
gtccgatggttctcgaaggcccgcggcgccccgtgctgcagccgccaagctgagccaccaaagaaggaggctgccaccacgg

SEQ ID NO: 447066 - DNA, 74 bp, Homo sapiens
tcagtcccaccctgctagcagaatatgcctacgtgctaagagttggggtatggaacctggctaactgcaagctg

SEQ ID NO: 447067 - DNA, 100 bp, Homo sapiens
ttttactctaatgaattgcacaaccccctccagacggttactcgcccaactgcctcagaggacaggaggctggcaggatgtacagtttttatcacaggtg

SEQ ID NO: 447068 - DNA, 100 bp, Homo sapiens
catgcccgtgtggtgctgccgctgctccctggccggtcatttcagtgtttggccagcgcttggatgagactgtggcctatgaacagaaattcggccccca

SEQ ID NO: 447069 - DNA, 82 bp, Homo sapiens
agctataccagccaccctgcccccaagaaggaagtcatcatgggccggcctggaacagatccacctccgacccttaagccag

SEQ ID NO: 447070 - DNA, 51 bp, Homo sapiens
catatcttcacttggcaaactcaacaagagccagccccagtgcctgctgag

SEQ ID NO: 447071 - DNA, 75 bp, Homo sapiens
gaggaggcggagggcgcaaagcgagccgtacggcaagaagaagctgaaatacctgccctacaatcaccagcacga

SEQ ID NO: 447072 - DNA, 98 bp, Homo sapiens
tagacttcaagatcaaaacagttgaattacaaggaaagaagatcaagctacagatatgatctctcatgcagattaatttgacaaatgtttattgagcc

SEQ ID NO: 447073 - DNA, 100 bp, Homo sapiens
ttagatttgactggtttatcaagtctaggactgccatgattagtgatgatgaaccaggttatgaccttgatttattttgcatacctaatcattatgctga

SEQ ID NO: 447074 - DNA, 100 bp, Homo sapiens
gtgatttctgcatttccaactgagggagccatggacaactgtttggcggccgcagcgctgaatggggtggaccgacgttccctgcagcgttcagcaaggc

SEQ ID NO: 447075 - DNA, 145 bp, Homo sapiens
cctcaaccggatcatccaggcgctgaagggcaccatcgacccgaagttgcggattgcagccgagaacgagctcaaccagttatttgaaggattgaaggcatttcgaggagtagataataaaattcgactgtttcagccaaacctc

SEQ ID NO: 447076 - DNA, 98 bp, Homo sapiens
tgtttcctctcacctgggttttcttagccctctacttttcaagacaccaagtgagaggccaaccagtaaaagcagtctgggcgcaggctggggaccca

SEQ ID NO: 447077 - DNA, 100 bp, Homo sapiens
cgattttagtttatgacataacagatgaagattcttttcagaaggtaaaagtgctgtttgtacgcaaccttgccaatactgtaacagaagagattttaga

SEQ ID NO: 447078 - DNA, 75 bp, Homo sapiens
cgtttctgcccggagaggagcagaggccaggctgctgctctgggaggaatgttccggagaatcacagcagctgcc

SEQ ID NO: 447079 - DNA, 89 bp, Homo sapiens
caaatgcacagcagtttccatttcctccaaactacggatacaaatccaatttttctttttaacaaagaaatgatcttatgtgatcgtcc

SEQ ID NO: 447080 - DNA, 100 bp, Homo sapiens
ggcggcctcacgcactcgggcctctggaggatctgctgcctggaaggttttcaaaattcacttctacagatcgtaattccagagaaaatccaaacaaata

SEQ ID NO: 447081 - DNA, 115 bp, Homo sapiens
aggcgtcagcagaggggccactgctgggccctgaggctgcaccaagtggcgaaggagccggctccaaggctcagctgtcgcaggccctggaggagctgggaggccagaaacaaag

SEQ ID NO: 447082 - DNA, 101 bp, Homo sapiens
atgtttacgagagcctctgtcgtggggagggtgtcaaactggctaaagaattacctccaaagccattgtcaagaccacagcagtcatctgcaccagtccag

SEQ ID NO: 447083 - DNA, 100 bp, Homo sapiens
tacttccccagtgttcccgacaacgccgagctggtgctgctcaccttgggccaggcctggcagggcttcaggatggctaaaggtgaccccaagaaaccaa

SEQ ID NO: 447084 - DNA, 75 bp, Homo sapiens
ccgcctgctgagtggacccgggtgattggcctaatgaagaagttcaacctggagagatggaaaatcagctctcat

SEQ ID NO: 447085 - DNA, 80 bp, Homo sapiens
cgaaggaggaagggaaccaacccactttctcggcgccgcggctcttttctaaaagtgttatgaagacagtatggagtttc

SEQ ID NO: 447086 - DNA, 98 bp, Homo sapiens
cgcggcggtggcgacggccgcggggactcggagctgagaggagctgctgctcggaccagcgcggattgatcggaagatgtcaagtactcacaccagct

SEQ ID NO: 447087 - DNA, 98 bp, Homo sapiens
ttggaaattgtacagtgacatcttctgggatttagtctgaaatcttctctacatataccctcagagtcttaattttgccaatcgtcaaggttctgcta

SEQ ID NO: 447088 - DNA, 100 bp, Homo sapiens
tggagagggcccagcatctgcaaagctcccggcaccgccgagccctggacaccaactattgcttcagaactcagcctcctcccaagctccctgtgggtcc

SEQ ID NO: 447089 - DNA, 100 bp, Homo sapiens
cagagggcggtatgcgacacacgggccaaatatcgagagggacgacggcctcgtgctgtgaagcttccctctgtgtgaggaaaggatagaaatgttcagg

SEQ ID NO: 447090 - DNA, 100 bp, Homo sapiens
cgtcaccctgcctcccctgcgtcccgccaccggccgcttctgtcctcgggttcttgtggtgcttgctgggctttcagtgctgtgggggccctggaagcac

SEQ ID NO: 447091 - DNA, 100 bp, Homo sapiens
cagaaatcgacttaaagcctccagagaagtagaatctgtagaccttccacactgccacctgattaaaggaattgcaatcatttggggaagaatctacagt

SEQ ID NO: 447092 - DNA, 80 bp, Homo sapiens
ttaaaccaaactggacaaatccttgtggagcaaatgggaaaagttgtcgagatgtccacagaaggaggatttggtggtac

SEQ ID NO: 447093 - DNA, 100 bp, Homo sapiens
agctgaccttctctgtgatctggacactgactccagagggcaaggttggaagtgtgaatcctgctgaaaacttccgtgttctagtgaaacagaagaaggc

SEQ ID NO: 447094 - DNA, 83 bp, Homo sapiens
accagagataattgataacaccctgtaacagctgaacaaatttacatgtattggagaccagaccagaagcccttctgaattaa

SEQ ID NO: 447095 - DNA, 82 bp, Homo sapiens
ctacagacatgcgccagcacgcctggtgtgaccaattcagtgaaaggaacgaatgcgattctctggacctgtttgggactga

SEQ ID NO: 447096 - DNA, 101 bp, Homo sapiens
ttcaagttcccggctcccaggtttattctcccatagcatgtggagtttctgtgtgaccagaagtacagtgatgaagagaaccttccagaaaagctcacagc

SEQ ID NO: 447097 - DNA, 100 bp, Homo sapiens
gctcttttaccgatgctttaacatacagccactagaactctaagaaggagctgatgtggaggagcagctgagacagttcaagatgacgaccacagtagcc

SEQ ID NO: 447098 - DNA, 75 bp, Homo sapiens
tccataaaaacaagtgtgtgcatctggctgttagaagaattcatgctcatccggatgccttcaattaagttgcag

SEQ ID NO: 447099 - DNA, 75 bp, Homo sapiens
attgaagtttgggacaagatatttatctaacttctgattagtgacaagagctggggttaggatccggttggactc

SEQ ID NO: 447100 - DNA, 100 bp, Homo sapiens
cttcaattccatatttttgctgaagatcagctacatcatagctttaaaggcagagtttaccgacaagactgtgaaactttcgggatggtggtgaaaatgc

SEQ ID NO: 447101 - DNA, 74 bp, Homo sapiens
tacatcctgcgggtgcctttgaaaatcaacgacaacttgagcacaggtctgtgtatgatgaccaaccaaatgcg

SEQ ID NO: 447102 - DNA, 100 bp, Homo sapiens
caaagcctgcgcgagaggagccgggacacgcctagcgcgggctccaggccatcgaagacggcaatttggaggaaatggaagaggaagtacggcttaagaa

SEQ ID NO: 447103 - DNA, 75 bp, Homo sapiens
acgatgccaagcagttgaagaaggccatggagcccatgcagaatgccaccaagtatggcaacatgacagaggacc

SEQ ID NO: 447104 - DNA, 101 bp, Homo sapiens
ccgcgaggaggcgcgggaggtgttcgagaacgaccccgagacgggcaccgcgtccgtgctgcagcgccggtcccccaatgaggagtacgtggaggtggggc

SEQ ID NO: 447105 - DNA, 100 bp, Homo sapiens
ggcgtggtagttaaaggcccagatgataggaatcccatctcatttagaaggccaatgatgaggccaatcagagtgatacaagtgtctccttgtcagaacc

SEQ ID NO: 447106 - DNA, 75 bp, Homo sapiens
cacaaaattaatctcctgcagcaacagatccagatgaggtggaggaccatcctgctacagtattgctttctcttg

SEQ ID NO: 447107 - DNA, 95 bp, Homo sapiens
cattctgaggagatgttctcagtgtggcatcctgcttcccctgccgatcctaaatcaacatcagtactatactggcaattgctggagaagatttt

SEQ ID NO: 447108 - DNA, 75 bp, Homo sapiens
agttagtggtgctcaacgtgtacgacatgaccaatgatgccttaggagccacctggaattggctgtacttcatcc

SEQ ID NO: 447109 - DNA, 82 bp, Homo sapiens
ggtggatgtcatcgagaagaacgagagcgccgccgccatgtctgcgcatctgcaatggatggtcgtgcggaactgctccagt

SEQ ID NO: 447110 - DNA, 102 bp, Homo sapiens
aagggcgagactggagcagagccgctgggcgccggagccgaggcgagcgccgcgcgcaccactggaacttagtgatttggcccgtgaccctccagcacaatg

SEQ ID NO: 447111 - DNA, 100 bp, Homo sapiens
cacgcgcgtcgcgcgggccgggatgagggactgtggcggcgcggcccgcgcgcagccggccgtaagactttgaccccgacgcaggcttcagtgattgccg

SEQ ID NO: 447112 - DNA, 75 bp, Homo sapiens
aggaaatagtggcaggtgacagtctgcatgtgcagttttcagggttagacagactgatatgccttgtcactggat

SEQ ID NO: 447113 - DNA, 101 bp, Homo sapiens
agcgaggacaaggcgcgctggcatacgggccaagctgctgctcaagaagaagcgataccaggagcagctcctggacaggacggagaaccagatcagcagcc

SEQ ID NO: 447114 - DNA, 99 bp, Homo sapiens
tggcagagatgctgaagggcagaattctagtggggcacgctctgcataatgacctaaagcaactttgtaagtgtggctttgagaaatgtcgaggaatca

SEQ ID NO: 447115 - DNA, 100 bp, Homo sapiens
ctgcagcgggagctggacggcgagcgcgagcggcgcgagaaagcgatcagtgggtgaccgcggctgcgagggactttgtcatccgtcctccaggatctgg

SEQ ID NO: 447116 - DNA, 100 bp, Homo sapiens
acgttagcgtgagtgatcactctcaatcccgggcatcagaacacaccatgatggctgtgacctaagaccctcaggaagccccggggtcatggcccagaag

SEQ ID NO: 447117 - DNA, 75 bp, Homo sapiens
tctgaggagggttatgaccatctggcagatgcagaaacaggcccagagagacagcccacctgaggatattgacca

SEQ ID NO: 447118 - DNA, 50 bp, Homo sapiens
atggaatcccttgcatggctctcagtctgctggaatttgctggaggtcca

SEQ ID NO: 447119 - DNA, 50 bp, Homo sapiens
aacaccactgaagcattgccaaggtcagatgggcagacctggaagagaag

SEQ ID NO: 447120 - DNA, 75 bp, Homo sapiens
agctgaatgtgttactccattgctgaggagtggccactgtaggaacttgcaagagttgaatgtctctgactgccc

SEQ ID NO: 447121 - DNA, 90 bp, Homo sapiens
ttcctcatcaccatagaggtgaagtccagtttttaggacgatcttaatatttgccagtgatgcctgcaaaaatgtgacattacatgttcc

SEQ ID NO: 447122 - DNA, 100 bp, Homo sapiens
ctcgctcagaggagatgcaccggctcacggaaaatgtctataaggtcagtcattggcaccatgaactggaataaaggtggtcctggcactaagcgaggat

SEQ ID NO: 447123 - DNA, 89 bp, Homo sapiens
ctgtcattcacaaccccctgaaagccatgtagagcgcatgaagtacaggacaataaagcttcctacacatatcaccaggaggatctctt

SEQ ID NO: 447124 - DNA, 80 bp, Homo sapiens
tctcaaactctatttgccaaaggaaacttgccttatcaccttcttgcttgcagattcttctaacagagaaaatgccattg

SEQ ID NO: 447125 - DNA, 74 bp, Homo sapiens
cctcaccaagagggcgggagaactcactgaggatgaggtggagaagggctatgaggagtggttgctgaatgaga

SEQ ID NO: 447126 - DNA, 82 bp, Homo sapiens
aagtgtttccggaagtgtatagggaaacctgggggctccctggacaactccgagcaggtatataatgtttacatggcaggga

SEQ ID NO: 447127 - DNA, 129 bp, Homo sapiens
tccgaggcctcgcgaccgccgagcctgcagcctgccccgcggccaacatgagcttcttgttgtcaaaatgcagatcttcgtgaaaacccttaccggcaagaccatcacccttgaggtggagcccagtga

SEQ ID NO: 447128 - DNA, 80 bp, Homo sapiens
gcacctcggggacattattgcgcgtggaacggctgcttttggaaggtcagcccaagactaccccgtcggtcattctgttc

SEQ ID NO: 447129 - DNA, 115 bp, Homo sapiens
gacagatgtgtggtgcacccagaggccggggaccttgccaaccctcccaagaagttcagaggatgaatttcatcctttcatcgaagcacttctgccccacgtccgagcctttgcc

SEQ ID NO: 447130 - DNA, 73 bp, Homo sapiens
gccctcagaccctgtaatcattgacagtactatactggcaattgctggagaagattttgcaattgttgcttct

SEQ ID NO: 447131 - DNA, 83 bp, Homo sapiens
cagagcaaggggcttacgcagaaggacctggccacgatcatgatgctgccgccaccgccgccaccacggagcgagaagcccag

SEQ ID NO: 447132 - DNA, 75 bp, Homo sapiens
aagagcgctcccaggagaaacaagtgctccatacttgcttgcagtgcctacgtggctctggctttgggtgataac

SEQ ID NO: 447133 - DNA, 75 bp, Homo sapiens
ttttggctttcggggggaagctctgagctcactttgtgcactgagggtttggagaacattgattaaggaagcatt

SEQ ID NO: 447134 - DNA, 100 bp, Homo sapiens
ctgcacctcggccgtcccggcgcccctggggacgccgccctcccggatgaagactggcccatttgcagagcactccaaccagctgtggaacatcagcgcc

SEQ ID NO: 447135 - DNA, 75 bp, Homo sapiens
ccaaattaagtcattttcgagaatgctgctttgctggctctgcaagaaaatggactagacgcaactacagtgaaa

SEQ ID NO: 447136 - DNA, 98 bp, Homo sapiens
ttctggtgtcatcgtaggtggccacctatggcttttggggtctgtttctgtcgactgtggaccacttatgtgcgatccgtggaccacttgcgtgcgat

SEQ ID NO: 447137 - DNA, 96 bp, Homo sapiens
cccaagcttccaggtgtcccagaaacccaggaaatcgagactcatgactcccagagaggatggcatctagaaggctgtgggtgagcgtggaggatg

SEQ ID NO: 447138 - DNA, 90 bp, Homo sapiens
tcctgctcttctgcggcgcctacctctacaaacagggctttgccatccccggctccagcttcctggttttgagatcaccattgaacaccc

SEQ ID NO: 447139 - DNA, 100 bp, Homo sapiens
gtgtggggcgcggatgggatccagctgttagtcgggtaggcatagggaaaggtggcccagacagcgtgtatgtcagcttgcaagcatttagccacatcct

SEQ ID NO: 447140 - DNA, 90 bp, Homo sapiens
agctggagctgacgctgggcaagctggagcaggtccgcagcctgtctgccatctacctggagaaggggggccctcagcctcttggccttg

SEQ ID NO: 447141 - DNA, 82 bp, Homo sapiens
gagagaagctccccacgtggttccgtgtgaagccaaaaaccttccctcttacccggggccgagcaagatgagggattgctac

SEQ ID NO: 447142 - DNA, 75 bp, Homo sapiens
cgcgagtgaggaaaggaggtactgtaggtactccaaagattcaggtttactcacgtcatccagcagagaatggaa

SEQ ID NO: 447143 - DNA, 83 bp, Homo sapiens
gcggccgctctgcctgcgcgctgctcctgctctgctacctgtgatgtcttggcattgcccattttcaagcaggaagattccag

SEQ ID NO: 447144 - DNA, 98 bp, Homo sapiens
gctgaagacgaacaaacctcacagccagagccagaggttgccatgtcaaatcttagcgaggctgtgcaggatgcagacctgctggtgtttgtcattcc

SEQ ID NO: 447145 - DNA, 75 bp, Homo sapiens
acggaggagaccgacgttgttagagagatcgatgtcttattgtgatgagtctcgactgtcatatcttcttcggag

SEQ ID NO: 447146 - DNA, 82 bp, Homo sapiens
gtgaaacaccactgaagcattgccaagacatatctgaagagatggattaagaatgctttggattaaggattgtggagcacat

SEQ ID NO: 447147 - DNA, 82 bp, Homo sapiens
gcgaaacgaggaggagataacgcggccttgggctctgatgtctttggtggacttgggaaagaggttgctagaagcagcaaga

SEQ ID NO: 447148 - DNA, 100 bp, Homo sapiens
ggcgaccgagggaatgatccttactaaccacgaccatcaaatccgtgtcggagtccttacagtatggaatgctcctttaccagaattaccgaatccctca

SEQ ID NO: 447149 - DNA, 75 bp, Homo sapiens
atgaggaagtactgagcctgttggaggaactggcccggaaacaggaggacgatggatggcaagcggcggccaggc

SEQ ID NO: 447150 - DNA, 80 bp, Homo sapiens
gagctggtggcctcaggtgaaaagtgcagctctgtcatttccactctgctctgctgcacagaaggcagaagccctggccg

SEQ ID NO: 447151 - DNA, 82 bp, Homo sapiens
gttgagcggcggcgaacatgcgcttttgacacattggagggagtaccctgacttctaccggaagctctacggcctcttggac

SEQ ID NO: 447152 - DNA, 100 bp, Homo sapiens
cgggtggagtgtaggtcatatcgccgcggtccaggtgcaggtacagcagtctccgcaacaggtctcggctcagctctccccacaactcaccgttcaccag

SEQ ID NO: 447153 - DNA, 82 bp, Homo sapiens
catggaacccgggttacagcagtgagggggccacggctcaaggagtctactcttcatcttgtgttgagacttcgtggtggtg

SEQ ID NO: 447154 - DNA, 50 bp, Homo sapiens
gcctccaccccagcccccaaccttcccagtgacaatgtcagtgcctactg

SEQ ID NO: 447155 - DNA, 97 bp, Homo sapiens
aaaggctatgcagctatcgtggacgtcactggccctggtggggattgacagccacgggaaggggactctgtgttgatgctctcattgaactgtctga

SEQ ID NO: 447156 - DNA, 91 bp, Homo sapiens
caatgaatggattgctgtgaacagaggttgtggggcgatgtatgaaattaaaattgaatcagaagaatttaaggagaagagaactgtccag

SEQ ID NO: 447157 - DNA, 100 bp, Homo sapiens
ggttcacagatgatacctttgatccagaacttgcagcaacaatagtgtgtattctgggcaccagtccatcctgatcccgccctctgagctggaaaccaac

SEQ ID NO: 447158 - DNA, 87 bp, Homo sapiens
gagtcgtccaggaggcctcctccaagccggccaattccccccgcaccaaattgcatcgtttcccagcaaaccagtccagctacgggg

SEQ ID NO: 447159 - DNA, 83 bp, Homo sapiens
ggaaaacagagaaagaagtgataggagggctctgtaggaccaagaatcgccttcagccctgtctggtgcatccttggcagaaa

SEQ ID NO: 447160 - DNA, 75 bp, Homo sapiens
tcaccacaagaagggctgccaggcagtgctcggaatgtgaccaggcagggagcagtgacatggaagcagatatgg

SEQ ID NO: 447161 - DNA, 80 bp, Homo sapiens
ttccagactttgatgaagagactggcattctccctaaggtggatgatgaagaaggaaaaccagtagattcccagacatcg

SEQ ID NO: 447162 - DNA, 95 bp, Homo sapiens
tttcaagaaatggaattgaaaagtccagaggaagagccctggactttgtctcacaagatgaaatgttgacgcccctggggagattggacaagtat

SEQ ID NO: 447163 - DNA, 100 bp, Homo sapiens
agagatgtgatgttggagaactatagcaatctggttttcttgggttatcttatgatgaggcttttgctatggctaatgatcccttggaaggcttccatga

SEQ ID NO: 447164 - DNA, 100 bp, Homo sapiens
catatgctactgctgactgtgaccttggagctgttttaaaagttaggcaagatctggtcaaagatttcttcggtgcagaaaaaaaatgaagatttaggac

SEQ ID NO: 447165 - DNA, 98 bp, Homo sapiens
tggccgcgggcaacctcggagcttatactcctcccagtgacgggtctggagtgcgtgggggaccggctgttggcgggaaccctaaggactctgcaata

SEQ ID NO: 447166 - DNA, 82 bp, Homo sapiens
gccatggcgtccaacatggaccgggagatgatcctggcggattttcagtttggtgccctggttgtcagatgttggaaagcag

SEQ ID NO: 447167 - DNA, 115 bp, Homo sapiens
cttgatccacctggtggggccttcagactgcaccctgcacggctttgtgcacggaggagcagtttttgcaagaaaggatcaaagtgaacggaaaagctgggaaccttggtggagg

SEQ ID NO: 447168 - DNA, 100 bp, Homo sapiens
ctttggcagctgcgacggggagcggcggagaccgcctctgctcccgcctgggattccagactccatcatttctcgtggtgttcaggtgctcccacgagac

SEQ ID NO: 447169 - DNA, 51 bp, Homo sapiens
gatatagcacaccatccccagccagcgatgacaacctatgcaacactcccc

SEQ ID NO: 447170 - DNA, 73 bp, Homo sapiens
gagcatgagagacaccgggatagagaacgggaccggcaccactgagaaaggaataagttcccctgtcagtgga

SEQ ID NO: 447171 - DNA, 51 bp, Homo sapiens
atgaccggcgtcgagaatttcaactggtacaactgcaaggaggagttccag

SEQ ID NO: 447172 - DNA, 76 bp, Homo sapiens
cggcacggctgaggcccgcaagcgcaaggaagttctactacatcaccctgctacgagaccccgtgtcccgctacct

SEQ ID NO: 447173 - DNA, 100 bp, Homo sapiens
cgccgcacccggtcctcagcgactcttctgacctccgcgcgacgtacccgccgccgccgttggctggagattccattggccgtgacatccccaaaatgct

SEQ ID NO: 447174 - DNA, 97 bp, Homo sapiens
agtgacccagaccctctcctttccctttgagaccgtgaagagaaagatgcaggacagagcgggatgccaccagcttgtccaaagggaagttccagga

SEQ ID NO: 447175 - DNA, 100 bp, Homo sapiens
acagaatcctctgaaacttccacagcataaagatgcctatcaagtgatattggatggtgtgaaaggtggtactaaggaaaagcgattagcagctcaattt

SEQ ID NO: 447176 - DNA, 82 bp, Homo sapiens
agcttcatgatattactgtaccgttagaagtttttgatatttgattttcatcaagcagctgatggtatccaggaacaacaga

SEQ ID NO: 447177 - DNA, 100 bp, Homo sapiens
tgtactcctatgtttgggatatcaagagtataatgtctatggtgaagtcttttgtacagtggttagtcaccaggagactaaagtccatcaaaaacatcca

SEQ ID NO: 447178 - DNA, 75 bp, Homo sapiens
tatgaataatgactttcctccaagagcacattgcctggtaagatggatggctgacttcaggctgcggaaactgaa

SEQ ID NO: 447179 - DNA, 97 bp, Homo sapiens
ccccggggcggcggccgaggctacagagccggcggcaggggatggcaagatagcggcgcgggagcgtacctttccatcttgctgctgcaaaaggaca

SEQ ID NO: 447180 - DNA, 100 bp, Homo sapiens
catgcctaatcttctgaatcattatgaccaacagacagcagctttggcaatggaggagagcaagccctggaggttcactctttcaagaagtcgtgtgctg

SEQ ID NO: 447181 - DNA, 51 bp, Homo sapiens
gaatgatgacccaagtatggaaggaatttacactgggagagtgcttagcct

SEQ ID NO: 447182 - DNA, 100 bp, Homo sapiens
aaaaaatatccaaagctttctcgaagttcaagttctttcttcaaagagtcatcagaataacatggattgaagagacttccgaacacttgctatctcttgc

SEQ ID NO: 447183 - DNA, 74 bp, Homo sapiens
ggagctgttcctattgggccatcttggctccaccaccctgatgcacaagtctggcgttctgaggaaggccattg

SEQ ID NO: 447184 - DNA, 75 bp, Homo sapiens
cggtcggtgccccctgcccgggccctcctgaagaggcggcgctcagacagacctcttcagccaagtggccaactc

SEQ ID NO: 447185 - DNA, 100 bp, Homo sapiens
ttgaaaaacagtattccaaagaactcggagatgcctggaatacagtaagggctgatcccttatccaacatggttctaaccttcagtactaaagaagatgc

SEQ ID NO: 447186 - DNA, 75 bp, Homo sapiens
gtgacatgtctgtgagctgcggaggctgcggcccccagagtgaattactggaactgaaacggcagcagcaagagc

SEQ ID NO: 447187 - DNA, 75 bp, Homo sapiens
ctttgaagtagaagaagctgatggccgctttgtagttcagaatgtttctgcacagaaagatggagaaaaatctag

SEQ ID NO: 447188 - DNA, 98 bp, Homo sapiens
atgcttcccagagcggagacaacagcagtgagcaagcactcactgaaaatgaccgagacagccagtcgccgttgaggaatcctctgttgtcaacatcg

SEQ ID NO: 447189 - DNA, 98 bp, Homo sapiens
tgtgatttggactccacagtgtctgctcttgccctggctttttacctagcaaagtacgtagagaaatcgacactcttaatgaacgtttagctgctgaa

SEQ ID NO: 447190 - DNA, 127 bp, Homo sapiens
ctgctgttgatgctggctttgttcccaatgacatgcaagttggacagacgggaaaaatagtagcaccagctgttgaagctcaaatccgaagttttggacagactccttctcaactactcatagagcc

SEQ ID NO: 447191 - DNA, 74 bp, Homo sapiens
tgaaaacaacatcatgcagtggaatgcagttatatttgggtatatgtggatattcctggagctatggatttatt

SEQ ID NO: 447192 - DNA, 90 bp, Homo sapiens
gccctgcatgacagcctgcatgactgttcacattgatgatagtgaaatgtttcgagggtgaaggaggacattcagcattccagagaatcc

SEQ ID NO: 447193 - DNA, 100 bp, Homo sapiens
aaaacatggaactagaagaaaaggagaaggcagagaaaaagaaacgaggaccaaagccttcaggaagtcgagataacatgagtattgtactagtttgctt

SEQ ID NO: 447194 - DNA, 82 bp, Homo sapiens
cgagtccctggacagcagcaacagtggcttcgggccggaggaaggtctgagcgggaaagttccgaagaataggagtggctga

SEQ ID NO: 447195 - DNA, 99 bp, Homo sapiens
cctgactcggagacggacgaggatgaggaggagggggacgagcagcagcggctcctcaacacccctcgaagctcctggggagtttgcttcacctacggc

SEQ ID NO: 447196 - DNA, 51 bp, Homo sapiens
tgacattctcaggctttgtcacaacattgctgtatatgatttaggtggtgg

SEQ ID NO: 447197 - DNA, 73 bp, Homo sapiens
aaaggctgccagcctcagctatcgccgctgactgtgcccctgtggaaggagggcagcaatgaacttcatcaag

SEQ ID NO: 447198 - DNA, 83 bp, Homo sapiens
gccacccgcccgcccaaggtctctcgcgggcgggagaacggaaaactcccaacttcctggattatatctgtccaagatgcgag

SEQ ID NO: 447199 - DNA, 83 bp, Homo sapiens
ccacaatcttcaatgagtaaacatattcctatcgaagacctgcaggtgaagctgcagcacgcggaggcggaccgggagcagct

SEQ ID NO: 447200 - DNA, 101 bp, Homo sapiens
gatgtgagcaacccgcaaacggtgggggtcggccggggccgcttcaccacttacgaaatcagggtcaagaacaatatgatgcgtttgtgaagtttacgcat

SEQ ID NO: 447201 - DNA, 49 bp, Homo sapiens
gctgactggggagtcggcaggcggcagctatcatggtgaacttacttca

SEQ ID NO: 447202 - DNA, 100 bp, Homo sapiens
tccaagctgattaccctcatagtgtccatcattgaggaagacaagaattcctacactccctgcctcaaccaatgagaacgggattcccagtagtccccag

SEQ ID NO: 447203 - DNA, 97 bp, Homo sapiens
ccccgcctccctcccgcgcgtgctgcgggtctgctcgggggtctacttcgagggaagaaggtggctgagataagaaaggaagcacagaagtcgcagg

SEQ ID NO: 447204 - DNA, 82 bp, Homo sapiens
gtatctcaggcggcaccctgtccccgaggaggggaccatgacacaaatgagtctgcaggtcttaaacgacaaaaatgtcagc

SEQ ID NO: 447205 - DNA, 100 bp, Homo sapiens
gccgagcaggcggcgccgtcttggggcctagcggcgaggcgacccgcacagtttacaagtccttccactttctctctgaggcagaaagagcaagggtttt

SEQ ID NO: 447206 - DNA, 100 bp, Homo sapiens
gatggttgctggattagataatgctgtatcactatttcagcttattgacatgtgtgtgcagaactgtggtccaagtttccagtctctgattgtgaagaag

SEQ ID NO: 447207 - DNA, 75 bp, Homo sapiens
gcggctgcgtagacaacgtcctgcaagtcgacaatgcagatcttcgtgaagactctgactggtaagaccatcacc

SEQ ID NO: 447208 - DNA, 96 bp, Homo sapiens
cacacacaggtgaatttaaaggagcagccctggtgtcacctatcagtaaaagatctggaaagcatgaagactgggctttttttcctatgtctcttg

SEQ ID NO: 447209 - DNA, 75 bp, Homo sapiens
gaagaaactgcaccggaaatgtgcctaccaggggatcatggaagctgataaagatgacacacaacaaattcttaa

SEQ ID NO: 447210 - DNA, 97 bp, Homo sapiens
tatgaccacaaacagccatcaaggtggtccataaggctgtgcttgatgtatttgaggagggcacagaagcatctgctgccacagcagtcaaaatcac

SEQ ID NO: 447211 - DNA, 91 bp, Homo sapiens
gggcaaacaggattccacagtgtcctctggaaaatgtcagcctgggcttctgcccaccacagccctaccgggagccggaaccctctgtggc

SEQ ID NO: 447212 - DNA, 75 bp, Homo sapiens
ggaaaggtttacaagcaggccacgattgaatctctgaagtaactctgggtggattttaactacaactcttgtcct

SEQ ID NO: 447213 - DNA, 98 bp, Homo sapiens
ttcagactttctaagaagatcactaataatattgtttattttcttccaagaaatgctgatattgaccagttgatcgaatctacagatgcagaacccat

SEQ ID NO: 447214 - DNA, 74 bp, Homo sapiens
gagtatctggtgaagtggaaaggatggcccccaaagaactctgcgaccttcaagtcgtttgaggaccgagttgg

SEQ ID NO: 447215 - DNA, 78 bp, Homo sapiens
aaaggctcagaaagatggatttttgcatgagacgcttctggacaggacagtcattttgtttactcattcagccctgtt

SEQ ID NO: 447216 - DNA, 90 bp, Homo sapiens
gttgaatactgagtctgtatcaggataaggaagcctgtgtgggtaccaacaatcaaagctacatctgtgacacaggacactgctgtggac

SEQ ID NO: 447217 - DNA, 80 bp, Homo sapiens
ttgaaagtacaattctattgcacatcaatgatatcatcccagtttgaaggatgacctctaggaagaaagtgttgctgaag

SEQ ID NO: 447218 - DNA, 83 bp, Homo sapiens
tccatgccccggcagagggacggacacgcggacgtctagcggagatcaaggctctcatcaagaagtacatccagaggcagcag

SEQ ID NO: 447219 - DNA, 76 bp, Homo sapiens
ctacaccatcgacaccgaaaactccaccgtagcccttgccaaaggattctaacattttcagagaaccttttggaaa

SEQ ID NO: 447220 - DNA, 97 bp, Homo sapiens
ctgctgcctcctgatgataagcagctgctatacagtgaggccaagaagattgatgatgacgccagtgcccatgaccagctcctctgggcgattcacc

SEQ ID NO: 447221 - DNA, 50 bp, Homo sapiens
cctggggaatgtggggttcatggaactcttaaaacgcctagatgacgtgt

SEQ ID NO: 447222 - DNA, 83 bp, Homo sapiens
cacgctgagagggacacgcagtgacgagcggccgaagcagctttgcgaggctgggaggcggcagaatgcagccagaggagggc

SEQ ID NO: 447223 - DNA, 83 bp, Homo sapiens
gttcgagaacgaccccgagacgaggtcctcaaagagggcagcgggctgttcccagatctcctggtgagggagacggaggccgt

SEQ ID NO: 447224 - DNA, 82 bp, Homo sapiens
cggagaagggcagtggctgtagctgccctttccgtttccagggttccgaccagatacagaagtttacggtgagttttatccc

SEQ ID NO: 447225 - DNA, 99 bp, Homo sapiens
aaaacacaaatgagatgtttgctataaaagccttaaagaaaggagatattgtggctcgagatgaagtagacagcattaacacccttgtgaagatcagca

SEQ ID NO: 447226 - DNA, 142 bp, Homo sapiens
ccttatttacgccctttagagaaaatacagctgaggaaagagggcttgcatgaagaggatggatcttcttgccggtggtggtgtgcacattgagccccggtatagacagttcccccagctgaccagatcccaggtgttccag

SEQ ID NO: 447227 - DNA, 95 bp, Homo sapiens
acgtctctgaagagcccttgcttttgcctggacccccagcatcatggtttcccatttcatggggtctctcaggttgaattcaagctaaataaaga

SEQ ID NO: 447228 - DNA, 50 bp, Homo sapiens
agggtcctgctgaaagaagagaaagtttaatggatcgagaagtggcgttg

SEQ ID NO: 447229 - DNA, 83 bp, Homo sapiens
cttatccagacccaatggaacatcagcaatgcttctggtctctaattaacagaagatggcaaagcccagccacagcagctatg

SEQ ID NO: 447230 - DNA, 80 bp, Homo sapiens
cgcccagttggcccagaggatctcttctaacatccagaagatcacacagtgttacatagggcctgattacattccaacag

SEQ ID NO: 447231 - DNA, 87 bp, Homo sapiens
cacagcatcctgagaccttcggggcccggagcaggcctatgagagctacaagaagaaggactacacccaggtggactacttaatcaa

SEQ ID NO: 447232 - DNA, 90 bp, Homo sapiens
gcgtctgcctgtctgcaacaccgggaggcaaggagcacctggtctggcaggctgtggaatgggagtgtgatgaagctaccaaaaaggcct

SEQ ID NO: 447233 - DNA, 74 bp, Homo sapiens
ttcatgtcctgcatttgcattctcagtgctacggaagagtgacagcatcctgggacaagaatccttcaagaaac

SEQ ID NO: 447234 - DNA, 97 bp, Homo sapiens
ctgggagagaggtacctctccttttccctctccctttccctaaggttaatgttgaagaaggaaaatgcggaagtcgtcatttgacaagttttataaa

SEQ ID NO: 447235 - DNA, 96 bp, Homo sapiens
cgaaaacggaagcgcagggagaaggaagaggtgtttgaaaagatcagacctattgtgaccgcctggtgcaggacacgcctttcctgacaggccatg

SEQ ID NO: 447236 - DNA, 75 bp, Homo sapiens
taatggtgctggggaaaggcagctttggcaagggtgaaaatcctatttataagagtgccgtaacaactgtggtca

SEQ ID NO: 447237 - DNA, 90 bp, Homo sapiens
cctcaaacaggagctggagcagctcaaagagatgcctttggtgcttcatgaagaatatttccagatatctcacagacattaagcctttgc

SEQ ID NO: 447238 - DNA, 75 bp, Homo sapiens
ttgcttcagcgttctgtggttgtcaacaggaacatcgtgatcaattagccactgccaaagatccctgctggccaa

SEQ ID NO: 447239 - DNA, 100 bp, Homo sapiens
gttggagattctccggggacccttccgtatctgcctaggcattttgctgtctcctcctaatacggtcacagtaatgaaaggcagtaatagaaataaggat

SEQ ID NO: 447240 - DNA, 80 bp, Homo sapiens
acttggtccgcggcatccgtaaccacaaggaggacgagggagtggagcttggtttcgggatctcggtgctgcagacggcg

SEQ ID NO: 447241 - DNA, 82 bp, Homo sapiens
cctccacctggcagccaccccgtctgggagcagcctcccgcgacgatgcccctcaacgttagcttcaccaacaggaactatg

SEQ ID NO: 447242 - DNA, 75 bp, Homo sapiens
taagttaacaaacatctacaaacctgtacttggaatttttggaatttcgtaaggcaagaagtgacatgcttctct

SEQ ID NO: 447243 - DNA, 75 bp, Homo sapiens
tcactcagaagatctaggtctggttctataaaaggatcgaggtatttccatcgggctgtgaagtttttgtttgag

SEQ ID NO: 447244 - DNA, 75 bp, Homo sapiens
ttcgacattgccgtcgacggcgagcccttgggccgcgtctcctttgagccgcggcgagtcctttgcacatgttgg

SEQ ID NO: 447245 - DNA, 100 bp, Homo sapiens
cttgccttctacctgctctccttcttctattacctgtacagggagcatgattgagcggatattagtgtcgtgcaacaaccagcaggatctgcaggaatgg

SEQ ID NO: 447246 - DNA, 76 bp, Homo sapiens
ccctgaacctctacgacacggccgccacacctgcatgctgtggcgggcgctggcggtggagcctcgcctagctgcc

SEQ ID NO: 447247 - DNA, 90 bp, Homo sapiens
aaccttgatgagacttcggagatcctttctattcaggataacacaagtcccttgccgggtggagggcagatcctggtacaccccccacag

SEQ ID NO: 447248 - DNA, 100 bp, Homo sapiens
acgtcgcggacaacaccttcgtcttcttcacgtcggacaacggcgctgccctcatttccgcccccgaacaaggatgccggctccaggagcagcagtggag

SEQ ID NO: 447249 - DNA, 80 bp, Homo sapiens
aaatggatgtgaagctccgctcactgatctgcgtggggctcaaatcttgcttctgaaatatctacctgggatggagtgat

SEQ ID NO: 447250 - DNA, 80 bp, Homo sapiens
tggcagcgaccgatatagctcgccaggtggtactccaaagattcaggtttactcacgtcatccagcagagaatggaaagt

SEQ ID NO: 447251 - DNA, 74 bp, Homo sapiens
gcggcggggcagctgccaggaacgagggtagcaggagagtagttatcttgatggaattagaagttttgaagtca

SEQ ID NO: 447252 - DNA, 89 bp, Homo sapiens
atcttcattggtggtatcaactgccatcagggaaagccgttgcctatggtgaaagaactcttttcttctttgggagtcgaatgtaatgt

SEQ ID NO: 447253 - DNA, 100 bp, Homo sapiens
agaagaacataaacaggatgctgagtaccaaatatgccccaacagcggcaagaccagcatcatcagagtgccatgatgcacccagcgtcagcagcgggcc

SEQ ID NO: 447254 - DNA, 50 bp, Homo sapiens
ggaaaacagactggttctagaaaagatgcctgaggaaacccagacccaag

SEQ ID NO: 447255 - DNA, 80 bp, Homo sapiens
caacgccttacccttcgctcccagcccagctgaaggaattgaagaatctgcagcagcaatacttacagattaatcaagag

SEQ ID NO: 447256 - DNA, 75 bp, Homo sapiens
cgcaggcaaggacaaggccacagagtcggggtcttcacgctgcagaaccttggcctgaaaatgctacattatatc

SEQ ID NO: 447257 - DNA, 50 bp, Homo sapiens
gcggggacaggacggcggggcgagccagggcaagaatatcacggcatggg

SEQ ID NO: 447258 - DNA, 90 bp, Homo sapiens
gaggagagtaaaaagaacttcctggagaaactgaagcgggacgttgaggcatggattccgtgaaggaacaacacctaaacccaagagggc

SEQ ID NO: 447259 - DNA, 82 bp, Homo sapiens
ctaccatgtcagccttcccagtagctgggaccacagttgtggacatcggatacccaaggagacgaagctgaagcaggagaag

SEQ ID NO: 447260 - DNA, 51 bp, Homo sapiens
cggccgatgaagtgcagaggtttttttctgatacactactgctgcagctca

SEQ ID NO: 447261 - DNA, 100 bp, Homo sapiens
agaagaaaataagataaattcatcggtgaaattcgcttctggtaatactgtagatggatagctcccagttgatccattgtcgggagcttgtggcacatca

SEQ ID NO: 447262 - DNA, 96 bp, Homo sapiens
ccgccgccgccgccgccgctgccgctgccgctgccgcacctccgtagctgactcggtccccttcccctgagcccatctacaatagcgaggggaagc

SEQ ID NO: 447263 - DNA, 83 bp, Homo sapiens
aaagcctacgggatccgctttgacgtgatggtgaacggcaaggatgatcggctgaatgtaacagaggaactaacgtccaacga

SEQ ID NO: 447264 - DNA, 50 bp, Homo sapiens
cttcggttactcaatttccagcgtcagagcacaatcattgtggagaagac

SEQ ID NO: 447265 - DNA, 75 bp, Homo sapiens
ttggagccaagaaatgagtataggtctcggcgcggaagatggccggcggcgtggacggccccatcgggatcccgt

SEQ ID NO: 447266 - DNA, 82 bp, Homo sapiens
ccgcgtgggcaccctgcaggtggtcagacatgtcatcaactcagctggagtgcctgtgaagaaaacggggtattgccctgag

SEQ ID NO: 447267 - DNA, 106 bp, Homo sapiens
cggcgagccggagcgcggagcccggctcccgcaccatggaggaggacgacagctacggagcatcagatccatgctgctgctgactcggagccccacagcttggcac

SEQ ID NO: 447268 - DNA, 100 bp, Homo sapiens
cttgcattacgtgcacagacgtcagtactatactggcaattgctggagaagattttgcaattgttgcttctgatactcgattgagtgaagggttttcaat

SEQ ID NO: 447269 - DNA, 100 bp, Homo sapiens
cacagctgctcccttcgccttcgccctttccacctcgcggcagttcggaccaggactaaaacctccagaggaacggacaatagaatacctagaagaagtt

SEQ ID NO: 447270 - DNA, 75 bp, Homo sapiens
gctgtcctctcccaagtattcactctatgaagtgcatgtcagcggagggtgccatgactcccggaatccctatct

SEQ ID NO: 447271 - DNA, 99 bp, Homo sapiens
cggacctgtggagggggtgtcagcttccgggagcgcccctgctactcccagaggttggtcaaagaaaaagtgatgtatgaaaaagaggcaaaacaacaa

SEQ ID NO: 447272 - DNA, 97 bp, Homo sapiens
tggctttctaaagcgagtcttcaagcgaaagaagcctcaacttcgtctggagaaaagtggtgacttattgctgccactgcagagccccgccatggaa

SEQ ID NO: 447273 - DNA, 75 bp, Homo sapiens
tcattaacatctgtctgtccgcttagtcatcacatcatttcactgtgacaatgactgatgtggtgggtaacccag

SEQ ID NO: 447274 - DNA, 100 bp, Homo sapiens
cccgctccggccggccctgcgcctcccgccgcgcccgggatgtattcgtccccgctctgcctcacccagggcgccctgcgtccggcagaggaggcgagca

SEQ ID NO: 447275 - DNA, 51 bp, Homo sapiens
tgcggatagctccaaactgggatatgttacaacaacaatattcattgcttg

SEQ ID NO: 447276 - DNA, 51 bp, Homo sapiens
ttcaccagcaccggctccagtgggctctgtattgttgcagcatctggcagt

SEQ ID NO: 447277 - DNA, 82 bp, Homo sapiens
tcgtgatccagaagtccagagctgaggactgcctgtttgcagctgaataccactagaaacatacctgtaaccagagacagct

SEQ ID NO: 447278 - DNA, 74 bp, Homo sapiens
ctcctaccctcgccatgtttcttacccggtctgagtacgacagacaggggcaagtgtccgagtggtgaatcagc

SEQ ID NO: 447279 - DNA, 50 bp, Homo sapiens
gccttctgctgcatttcctgcccagagagacactatggacagcgtgaagc

SEQ ID NO: 447280 - DNA, 90 bp, Homo sapiens
ggccgaaagggttgtagacatggcggccatcagggtgaaaagccatacaagtgtacctgggaaggctgcgactggaggttcgcgcgatcg

SEQ ID NO: 447281 - DNA, 98 bp, Homo sapiens
aggaatgagccagatgtttatgaaactagcgacctacctgaggatgatcaagcggagttcgatgcggtttgagaaatttctgtggttcattagctcag

SEQ ID NO: 447282 - DNA, 107 bp, Homo sapiens
ggtttgagtccgcatcgccacagctgaaggctgcgagggactaagagcagagaatcaaacattttaagtccagtgcaggatggaacaaagaaacctcagattgacag

SEQ ID NO: 447283 - DNA, 100 bp, Homo sapiens
ggaatttcaacttgccaatgtgcaaagctgcagaaaccacagtggtagaggactcagcccaaaaccatgtttgcccaagttgaatctgatgatgaggaag

SEQ ID NO: 447284 - DNA, 97 bp, Homo sapiens
ttattgtggtgctggaaggggccagtctggagacagtcaagaagctgtacattggaatgcgtttacagtcattgtaatggaagcaaaatacatgaag

SEQ ID NO: 447285 - DNA, 83 bp, Homo sapiens
cgaggcaaggagctaaagcagcgtgcgttcagccctgggacgtaaaattcatcctgatcagaaaaatattaatgcctatgttg

SEQ ID NO: 447286 - DNA, 51 bp, Homo sapiens
agtaccatgatagctgtatcaagaatggatcttggagaatgtctgaaagtc

SEQ ID NO: 447287 - DNA, 100 bp, Homo sapiens
ctcgacctgctaacagaactggaccttttcgagcccctgtagccattggagttgcagccatgtccacagctgagatgctcacgtcaggcctgaagggaag

SEQ ID NO: 447288 - DNA, 50 bp, Homo sapiens
ctcactgcaagctctgcctcccgggttcaagcaattctcctgcctcagcc

SEQ ID NO: 447289 - DNA, 75 bp, Homo sapiens
caccttcggccatcgggccaacgagtggcggagtttaagagagctgtgaaagtagcaacaggacaagaactctca

SEQ ID NO: 447290 - DNA, 100 bp, Homo sapiens
agcgggccctggctcaggaacagggacagcacctcatcccctggatgggggaccacaagatcctcatcgacaggactttccttatcccagttgattgtgc

SEQ ID NO: 447291 - DNA, 100 bp, Homo sapiens
gaagaaaaggatcccagaaagtttcagggagacaggagacatcaatatatgtaagatgaacgttggttccctcgggaaaggcgggacaactcgaagcagg

SEQ ID NO: 447292 - DNA, 125 bp, Homo sapiens
cccacgacgaggcggtgcaggcgttgaagcgcgcgggcaaggaagtgctgctggaaggcattgaatgccccagaggagcccgaaacctcccaggcttggtgcaggaaggagagcccttcagcgag

SEQ ID NO: 447293 - DNA, 90 bp, Homo sapiens
ctttgccgcagttcatcttcctccctgtgtactttccatttgccttcctgggccatcgaagacggcaatttggaggaaatggaagaggaa

SEQ ID NO: 447294 - DNA, 100 bp, Homo sapiens
cagacgatggggagcttgcagcccctttgccactcagaccgaatccgggataccttgatccatgaaatgtgccatgctgcctcctggctgattgatggta

SEQ ID NO: 447295 - DNA, 76 bp, Homo sapiens
cgagccgcggaacccggccgggagccgcgcgaggcgtactatactggcaattgctggagaagattttgcaattgtt

SEQ ID NO: 447296 - DNA, 76 bp, Homo sapiens
tccctgttcttccatttccccccactgctcagagacggcgagaatcattgtcattatcggggctatgtggagggag

SEQ ID NO: 447297 - DNA, 100 bp, Homo sapiens
gagagtttcacagctgctggcagtaactgcggagtttaagagagctgtgaaagtagcaacaggacaagaactctcaaacaatattttggacactgtcttt

SEQ ID NO: 447298 - DNA, 100 bp, Homo sapiens
gtggaacaggaggattttgtaatggaagggcatggcaagactccacctcctggtgaagaaagcaaacaggcagatgattctggaccagatgaagcctgag

SEQ ID NO: 447299 - DNA, 102 bp, Homo sapiens
agaaaggagactcacttatgtgcacaatgtctctagtgatccctgaaaagttccagcatattttgcgagtactcaacaccaacatcgatgggcggcggaaaa

SEQ ID NO: 447300 - DNA, 75 bp, Homo sapiens
tttgagaggtcatgtggttggactacgctattacacgggagtacttttctgggagaagaggctacaaggacttag

SEQ ID NO: 447301 - DNA, 85 bp, Homo sapiens
agcttcaaagttccccaagaagaactggaaaatgccagcctagtgtttacagtcaatttgctaatgaagacactgaaagtcagaa

SEQ ID NO: 447302 - DNA, 75 bp, Homo sapiens
ctgacccagtgctcggaaaagctggtgcagctcatcctgcacgaatacaataatggagtgaagaaagtgaagtgt

SEQ ID NO: 447303 - DNA, 100 bp, Homo sapiens
gagccgcagccggcggaggaggcagtagcgggggactcgatggaccgcggctggcaagtgcaccttcgctctgccaggcgtctctgtgagctctgctgtg

SEQ ID NO: 447304 - DNA, 100 bp, Homo sapiens
gtccgcgcccgggctcttccgagaagtggttgctgacagccacaaagtgaaagggagtgaggcggcgtggacgagtaagatggaaaagggatagcagtgg

SEQ ID NO: 447305 - DNA, 100 bp, Homo sapiens
ccgagccgggccgcgccgccgctgccgccgccgcgcgcggatcgggctggtggtcatcctggcttccacggtggtggccatgtcggccgtggcccagctg

SEQ ID NO: 447306 - DNA, 98 bp, Homo sapiens
atttgattcagcaaatgggatcaatatttcacctgatgataagaaggtgtcttgctgcaggtaactaatgaagaagtggtcaaccacagagtcttcaa

SEQ ID NO: 447307 - DNA, 101 bp, Homo sapiens
gcgtgcagtaccccacctcggtcaacatcaccctccgcctagcccaggagttaaagtcactgtttgaaaaaaaatctctcaaagagaagcctccaatttct

SEQ ID NO: 447308 - DNA, 75 bp, Homo sapiens
cacaagaacatgtctgtacacctgtccccctgcttcagaccccatgccacagctggatgtgactgaggccaacaa

SEQ ID NO: 447309 - DNA, 75 bp, Homo sapiens
gtcctggctcttgccctcatcctggttctggaatcctcagttcaagattgttgaacagataaatacgaaactgcc

SEQ ID NO: 447310 - DNA, 132 bp, Homo sapiens
caaggccaagtgctcgcagttctgcaccactggcatggatggcggcatgagtatctgggatgtgaagcaaaagcgcaaaggcgttgaagggctcatcgacatcgagaaccccaaccgggtggcacagacaac

SEQ ID NO: 447311 - DNA, 100 bp, Homo sapiens
aaggattccaagtaactcttatttggtgcgtagtttctctgaaaagcatcacccaggtcagaatgaaaggaaactctctgtgcagaccgctgtatgtggg

SEQ ID NO: 447312 - DNA, 75 bp, Homo sapiens
gcaagatgagttgcagcaagtcatacgggagatacgtttgaaatggtttctgaagatgaagatgggaaattggga

SEQ ID NO: 447313 - DNA, 50 bp, Homo sapiens
ctttgtctgactacaatattcaaaaggaagaaggaccatggaaatctcag

SEQ ID NO: 447314 - DNA, 100 bp, Homo sapiens
gtgcaggtgcctgccggggcagaggccatcccagagcccgtggtgagatgctgtgtgctgtggacccacctggggttcatggagtgggccacggggccca

SEQ ID NO: 447315 - DNA, 98 bp, Homo sapiens
ggggttaattttccactctcctttccaaacctttgcagctgccctttgttaaagaaggggacgaactggtagtacctgaaacatcagataatagtcgg

SEQ ID NO: 447316 - DNA, 100 bp, Homo sapiens
ggagttcatgtgggccctgaaaaacggagacttggatgaggtgaaagactatgtggccaaggcaccgcacgtggtattgttgtctacactggggatcgca

SEQ ID NO: 447317 - DNA, 90 bp, Homo sapiens
cgggaagaagctaaattgttggcgggtttcatgggcgtcatgaataacatgcggaaacagttgcattaaaatcctcccctactgaaagaa

SEQ ID NO: 447318 - DNA, 82 bp, Homo sapiens
tgggcgccgcggatacacattctagatatacaatgcagatcttcgtgaagactctgactggtaagaccatcaccctcgaggt

SEQ ID NO: 447319 - DNA, 82 bp, Homo sapiens
gggagcaatgctgacctcggtttcctggacccattccgactcaggttttaaaatcaaagatgggaaaatcggagaaaattgc

SEQ ID NO: 447320 - DNA, 96 bp, Homo sapiens
tcccggctctcggtccgggacgtgcgcttccccacgtcgcttgggggccacggcgcggacgccatgaaggagaggacttgggtgaggagctgctgc

SEQ ID NO: 447321 - DNA, 51 bp, Homo sapiens
gctattgaaagagagtatgcacaggctgatcagctgaccgaagaacagatt

SEQ ID NO: 447322 - DNA, 100 bp, Homo sapiens
cgaggttaagagattatagaagtcttatcggaaacaatgtgatgagaaccattcatggggtgggagagatgatgacccagatggtactcagtagaggctc

SEQ ID NO: 447323 - DNA, 99 bp, Homo sapiens
aaggagaagatgtagaagatgaccacagagcagaactgctaaaacagctgggagactacaggttggtagctggcagtgttgtgatggcttttgaagaag

SEQ ID NO: 447324 - DNA, 100 bp, Homo sapiens
tgcagatcgatgcggaaggcgagtgccaggagggagagatcctggccacaggcagtacggcatggtgctcggcattgccagtggacctgagcaacagtgg

SEQ ID NO: 447325 - DNA, 82 bp, Homo sapiens
gtgagcacgcatcaggtgctgtttcaggcctggcacgtagtagaggattctgatgagatggaggatgggcctggggttcagg

SEQ ID NO: 447326 - DNA, 90 bp, Homo sapiens
gtcgttctgactagggatggagcctcagaggtgcagaagagaaaccttgtctgcatcagtgtgcgccagggggctgcctgatggagctat

SEQ ID NO: 447327 - DNA, 100 bp, Homo sapiens
tttccagtgcagcgcggagtgggcgatgccagcgtgccaggtacggaatggccacatcaaaagaatcactgataatgacatccagtccctggtgctagag

SEQ ID NO: 447328 - DNA, 90 bp, Homo sapiens
cagagttggcgtcgaggagccctccgaagaggaccagaatgaacaccactggcagtacttcagtgggaacatcattgtggccactccagg

SEQ ID NO: 447329 - DNA, 119 bp, Homo sapiens
cccgcgcgcgcccggcgcttcggctccgctccctgtgcggtactccaaagattcaggtttactcacgtcatccagcagagaatggaaagtcaaatttcctgaattgctatgtgtctggg

SEQ ID NO: 447330 - DNA, 100 bp, Homo sapiens
cctggagccccgagcagcccgggggcggcggccgcgaggcgagcggcgatgagtcctgtgtatggaaactcacatgagtcagctcagtctagaagggtag

SEQ ID NO: 447331 - DNA, 75 bp, Homo sapiens
cccaggaacccctcaccatccccaaggtatccagtagaaaaagcactctccagtgttcatctgtggaactggatg

SEQ ID NO: 447332 - DNA, 90 bp, Homo sapiens
ccgcgcactcggagatgcagccgctggcaatgaccagagtgagattggatttcttggatcaactagcaaaattttgggaacttcaaggat

SEQ ID NO: 447333 - DNA, 86 bp, Homo sapiens
ttatcttgttaacaacacgcccctcaactggctgagagaaaaggaacagttccgtaagctctttattggtggcttaagctttgaaa

SEQ ID NO: 447334 - DNA, 50 bp, Homo sapiens
cggcggcggtgcaggagagcgcgcgaagacttcatagacctcacgttgtc

SEQ ID NO: 447335 - DNA, 83 bp, Homo sapiens
cgtggatttcagtgtcttttctgcctgctcagttccagttgtcacccatcactggtgcaagctatatttaacggagatcctga

SEQ ID NO: 447336 - DNA, 80 bp, Homo sapiens
ggacgccttcaactccacttttatctccaccatagggtttggaaatcccttgtctccaggttgctgggattgacttcttg

SEQ ID NO: 447337 - DNA, 82 bp, Homo sapiens
ttcctggagggggactggaagaccatctcgccttatgccagcctggaccatcttggaggcagtgtaggatcatggaagaact

SEQ ID NO: 447338 - DNA, 50 bp, Homo sapiens
cacggccttcctgtgtgagcccagatcactctgcaactatcgtttccata

SEQ ID NO: 447339 - DNA, 100 bp, Homo sapiens
ctgcactccaaaggtgtatttcaccgcgacctcacatccaagaaactccacttggagatgttggcagaccagccacgaacaactaaataccacagtgtca

SEQ ID NO: 447340 - DNA, 75 bp, Homo sapiens
cgacaatccagtttcctgctaatttgcagcttcctccaggtatcagcagatgttgcacacaaacttggtatacct

SEQ ID NO: 447341 - DNA, 98 bp, Homo sapiens
agatcttcgagttcaaagagaccctcggaacaatgtgaaagatgttgcagaagtgttccagaagtggctgaagatagaaggaaaaaagtgccactgcc

SEQ ID NO: 447342 - DNA, 75 bp, Homo sapiens
ccctgaagtcggtgtctgctgcgttcacggcaggattcggttaggttttaaaatcaaagatgggaaaatcggaga

SEQ ID NO: 447343 - DNA, 100 bp, Homo sapiens
acttttgggttacaaaaatccagaccaggttgctgcagcaactggtcacacagtagtgttggtagaccagacagaggacatcctggcaaaatccaaaaag

SEQ ID NO: 447344 - DNA, 100 bp, Homo sapiens
ctattcctgttgatggtgatgaagacaggctatttagcagacatgacccacaagcagaagaagcattagcaaagaggaggggaagaaacagcccgaatgg

SEQ ID NO: 447345 - DNA, 75 bp, Homo sapiens
tttggaagttgcaatcaaaatgcaggatgaagttaaaggaagtagatcgtacagccatgcaggcatggagccctg

SEQ ID NO: 447346 - DNA, 98 bp, Homo sapiens
ccatcacggtcaagtacacagagagacggcagccgctgtacagattcatcaccacgggttctcatgtatcagccatcttctgtaagggtgcccagtgt

SEQ ID NO: 447347 - DNA, 100 bp, Homo sapiens
cccggcctgagaaagaaggaggagtgggggaggcgaacagtctcgttgctgcctctgtgtacgctgaggggggagatcactggggtgatcctgctggctg

SEQ ID NO: 447348 - DNA, 83 bp, Homo sapiens
gtttctctccctggcttttggggcaagctacggaacaggttagtaacactgaagaaatcacttttgaagcattgaagaaagca

SEQ ID NO: 447349 - DNA, 100 bp, Homo sapiens
tcaacaaacaggccacgacttatggcatggccgacggtgacttcgtcagtcctcgcagtccgcctgagagagtagagaagaccccctcccagaaccttcc

SEQ ID NO: 447350 - DNA, 102 bp, Homo sapiens
gccgccctggaggacgagctgacgcagctaatcctggaggggctgatcagtgcccgtgtggactcacacagcaagaggtccagttccggccgtaccgcacag

SEQ ID NO: 447351 - DNA, 49 bp, Homo sapiens
gtcgcccagagagagcgccgtcggttacaacattaaagcctgaacttgg

SEQ ID NO: 447352 - DNA, 51 bp, Homo sapiens
attccaagtaactcttatttgaaatgggcaagttcatgaaacctgggaagg

SEQ ID NO: 447353 - DNA, 90 bp, Homo sapiens
tttgtcaaactcaacaaattgaaggttaacaccttaagagttgtagttactgaccagcctccttttagaggactcagaagaagaagaagg

SEQ ID NO: 447354 - DNA, 98 bp, Homo sapiens
atactcatcatggggctcctgtacaaggctgaccccgcactacatctacccaccagccatcgtgcagcccagcgtggtgatcccagccgcccctgtcc

SEQ ID NO: 447355 - DNA, 75 bp, Homo sapiens
cctcatggggaaaatctccccggtgactttcagttaagggaagaaagtcggaggctggctttggctgcgaaaaga

SEQ ID NO: 447356 - DNA, 127 bp, Homo sapiens
agaagctgcagatgtcttcagatgacggtgccagtctccttttcctggattttggaggtgctgaaggcgagatcgctgcatggctgagaggttgaaggaggagattctcaacagagagaaaatggta

SEQ ID NO: 447357 - DNA, 82 bp, Homo sapiens
aagaatcaagaaaatggaccagtttgttcgttacgaggtgacttaagagattaaaattaatttggttgctgttggttctgaa

SEQ ID NO: 447358 - DNA, 82 bp, Homo sapiens
tttccgcagacagaagtggggagaagcggagtgtcggagatgtatgcagtgtgacgccaagtttgactttctcaccagaaag

SEQ ID NO: 447359 - DNA, 100 bp, Homo sapiens
atcaacagaagaaaaccatctagagtgtcagacacagtcttctgcaccatggatgggaccaaattatggagtgcaaccgcctcaagggcaaaatggcagc

SEQ ID NO: 447360 - DNA, 100 bp, Homo sapiens
ggcttttgaaaaattcaattctttagacgctcatgaagaaatcagggatttcctcagcaacagggagctgccaccaccgtgtactgtgctgctgtcccag

SEQ ID NO: 447361 - DNA, 100 bp, Homo sapiens
aagagccagatctcggagaagcagaggcactgcctggagctgcagatcattgagaagcagccaggccacattcggagcagggttttcagggaggtggaga

SEQ ID NO: 447362 - DNA, 100 bp, Homo sapiens
acgtcaaccccttcctcccgtatatcaggagcaatttacagcaatgagggatttatacatgaaaaatggacaaggatttgcattagtttattccatcaca

SEQ ID NO: 447363 - DNA, 100 bp, Homo sapiens
tgagggattgctactgcacggtgaacctggaccaggaggaggttttcaggaccaaaattgtggaaaagtcactctggtggacgacatccttggagaaggc

SEQ ID NO: 447364 - DNA, 74 bp, Homo sapiens
tggagcgcctgctccccgggaccatcgagaaagtagaaacctgtgggttcttgttgtggggcggtttccaaagg

SEQ ID NO: 447365 - DNA, 75 bp, Homo sapiens
caaaattcaatccctgctttagctcaggtgtaccttgaaagacttttaacatacgcagagatagatatctgtccg

SEQ ID NO: 447366 - DNA, 98 bp, Homo sapiens
gcagaaatgagcagaaaggagttggggcttgatgaaggcgtggatagcctgaaggcagccattcagccacctgtctttaccagtttccaagactatgt

SEQ ID NO: 447367 - DNA, 100 bp, Homo sapiens
catgcacctggctgacatcctgatgaagaatccggagaagaagtaccacatcggggatgaggtcaagtgccggggccttcatcctagaataatcactgaa

SEQ ID NO: 447368 - DNA, 82 bp, Homo sapiens
cgtgtaccgcatgcagcagtacgacctgcagggccagccctacggcgtccgagctgggccacagcctgaacgagaacgtcct

SEQ ID NO: 447369 - DNA, 98 bp, Homo sapiens
tccttcactccagtgtgtggggcagatggcatcacctacctgtctgcctgctttgctggctgcaacagcacggcggagacagcagccaatcgcatctg

SEQ ID NO: 447370 - DNA, 98 bp, Homo sapiens
ctggacaaccccagcgtgctttcaggccccatgcagcgcggtgtggaggaaactgcagctgagtgccgaaaactaggcgtcactgcgcatgcgtatgt

SEQ ID NO: 447371 - DNA, 75 bp, Homo sapiens
gctcatcgtgggacgcttcatcatgggcatagatggagctttggagtttaacccttctgccaatccagaggcaag

SEQ ID NO: 447372 - DNA, 102 bp, Homo sapiens
gagaagggccaggagaggagcactttgaggacatggcctccgacgaggacatgactcctcctattttgaggacttctccaacatctccatcttctcctcgtc

SEQ ID NO: 447373 - DNA, 75 bp, Homo sapiens
ctctgggatccccgccgctctgtctacaacccgaggctgtctgtccccagaccccagagcacgtccggcaccacc

SEQ ID NO: 447374 - DNA, 50 bp, Homo sapiens
ccgcatcgcccagctgtacatgatacaggcaccatactggacataccttt

SEQ ID NO: 447375 - DNA, 90 bp, Homo sapiens
ggcggtggctgcggttgcgggaccggttaatttggagtggcccctggagtcagtttcctacaccatccgaggccccacccagcacgagct

SEQ ID NO: 447376 - DNA, 101 bp, Homo sapiens
taatccaggggaaccaaacaagtgctataaaagttccaaggaccagcagcctcagatggaactgccactccaaggctgtaacattacgtacatcccgaaag

SEQ ID NO: 447377 - DNA, 75 bp, Homo sapiens
ccgtgtacgagcgcaccagcgaccacaagatcgtcttctttaaagggaaaggtgagaaggagcccccgagcccgg

SEQ ID NO: 447378 - DNA, 82 bp, Homo sapiens
ccaattccaacatggtcattatgcttattggaaataaaaggcactgccaggacttaccgtacaacactccttggcttctgga

SEQ ID NO: 447379 - DNA, 75 bp, Homo sapiens
tttcaaagctattttctacagaaggcctgcactgcccaaagtcttggaaacttgctggatatgatgtaccgggag

SEQ ID NO: 447380 - DNA, 100 bp, Homo sapiens
catctttctggagaatcacttttactacaagatttgtaagaaacaaatttatttccaaggttaatttggagtggcccctggagtcagtttcctacaccat

SEQ ID NO: 447381 - DNA, 100 bp, Homo sapiens
ggtcctcagaaagctctggaaaccatcggtgcaaatttacagaagcagtacgagaactggcagccaagggcgataccagaaattgcagaagatcatgaag

SEQ ID NO: 447382 - DNA, 88 bp, Homo sapiens
ggcccctccgcctcctctctcctctcccagttccgcagtccttcctggcaaacagaggttgacggatatattcagacgttacgacacg

SEQ ID NO: 447383 - DNA, 74 bp, Homo sapiens
agaggaggagcttgctgcagagtatgagcaatggcaggcgctggtgagcgcaaaggcaagaaggatgacaatgg

SEQ ID NO: 447384 - DNA, 82 bp, Homo sapiens
gaacaaagtcatcaagctagtggacatcacggacatccagaagggaacggcaggagcagctgatgggatatcggaagagagg

SEQ ID NO: 447385 - DNA, 75 bp, Homo sapiens
tcgagacatgatgagatcgaatatgatgttccttgtcaccttcaaggtgcaaagttccccatcaagtggacggcc

SEQ ID NO: 447386 - DNA, 50 bp, Homo sapiens
agccagcccgagcaagtaaagattgccatgaaccagagaatcagtcagag

SEQ ID NO: 447387 - DNA, 75 bp, Homo sapiens
aaagacgaaagaagaagaagagcaaagggccttctgcagaaggatatggccctgaagccacatgagcggaaggag

SEQ ID NO: 447388 - DNA, 82 bp, Homo sapiens
cgctggtgaagcccgcggcgcgcgcctctcccggaccctgcaggatctattccagaggggagcttcaccacttcattgacgg

SEQ ID NO: 447389 - DNA, 100 bp, Homo sapiens
ggaggagcgcgcgggcacagggtgccgctgaccgccaggcccagacatgtccgtccttgtaagttaaaagcttccatgggagccttccttcctaatcaag

SEQ ID NO: 447390 - DNA, 75 bp, Homo sapiens
atctcgtacaagatccttctttgacaactacacctttgcccaacctgggattcaaatgaaagtgaaaatgttaga

SEQ ID NO: 447391 - DNA, 78 bp, Homo sapiens
gacggagctgcagtcggcactgctactgcgaagacagctggcaggcagttacaattcatgatacagaaaaatgccaag

SEQ ID NO: 447392 - DNA, 100 bp, Homo sapiens
cagcctgtatatggagcacagcatcctcctcttgacccacggctcaccaaaaagtatctcagatgaagacatcatcaacattactcttcctactggagtc

SEQ ID NO: 447393 - DNA, 100 bp, Homo sapiens
tgactctgacagtcctcccactaagcagctccacagctgggtcctgctcctcagacaagatggggccagaggcggccccagcagccacgcatgctgcccc

SEQ ID NO: 447394 - DNA, 98 bp, Homo sapiens
tatgcagcctatttgaagaaaacctgttttcaggacctttttaattaaatatggcctgttacatgagttaaagcccaatagaatcctgccagaatttc

SEQ ID NO: 447395 - DNA, 75 bp, Homo sapiens
gccccttagcgcggtcaggccgccctccttttccaggtccaggacctacagctggaacgggagatggcactggcc

SEQ ID NO: 447396 - DNA, 100 bp, Homo sapiens
acggtctacaaaggtctggacactgaaaccaccgtggaagtcgcctggtgtgaactgcagatgggccaaggttgctcgggtgattggtttactggcttcg

SEQ ID NO: 447397 - DNA, 51 bp, Homo sapiens
cgtgagtcgtgagctggcaggacacacagctgatgactatcagccagttcg

SEQ ID NO: 447398 - DNA, 100 bp, Homo sapiens
aaggaggggaccgagaatcaaggcgttgagcctcaaggaagaggatcacctagcccgggtagaagaggcaatcacccgtatgcttgtgtgtgccctgaaa

SEQ ID NO: 447399 - DNA, 80 bp, Homo sapiens
ccagcacacagaagccgagacggacccagatgatgtggtaccagttggccaaagaagagcctggtgttggtgcatgtgct

SEQ ID NO: 447400 - DNA, 98 bp, Homo sapiens
aggaggcagccaagctcgtagcctgccactccgtgcaagtctcaggggatccagaactgcagccagtccttgctgggctgttcctgtccatgtgcctg

SEQ ID NO: 447401 - DNA, 74 bp, Homo sapiens
tttctggggagtcctggcggtttttattaaggctgttcatgtgaaagttccaaaagctgagacaagatcttgaa

SEQ ID NO: 447402 - DNA, 90 bp, Homo sapiens
cagcagatatgcctgctaacatggataagcatgccctgaaaaagtatcgtcgagaagcctatcatcggggataaaaacattcagatggca

SEQ ID NO: 447403 - DNA, 100 bp, Homo sapiens
ctcctgagtagctgggagccatcacgcccagctagccatcttctaattttcattccttcaaaggtccgtttattaatggttagtcgaatggctaaaccag

SEQ ID NO: 447404 - DNA, 90 bp, Homo sapiens
gtgaagtcggccagcctgagcaagcggaggacctacgccggcctgggtttacccaaggtccagcctagcccctaggcaccatgtcggaca

SEQ ID NO: 447405 - DNA, 98 bp, Homo sapiens
ttttactggtcatgctcttgcactttacagaactgatgaacgaggagaagaccttttcatgtgtatggacatacagctcgttgaagcactgtgtggct

SEQ ID NO: 447406 - DNA, 98 bp, Homo sapiens
gtcctcgagtgaatgggcggatctcatatcttcacttggcaaactcaacaagataagctgtcattggaaggaatagtggtacaaagagctgaatgccg

SEQ ID NO: 447407 - DNA, 50 bp, Homo sapiens
ctggagctcattggcaactccttaccagaactacaaagagctggagctgc

SEQ ID NO: 447408 - DNA, 98 bp, Homo sapiens
gtggcaaggtctggggattgagaggcccggaaaaccagtagattcccagacatcgcgaagtgaatctgaaattgtgccaaaagttgctaaaatgactg

SEQ ID NO: 447409 - DNA, 100 bp, Homo sapiens
cacattgttgctgatgccacctcatcaagaagcatgatggacaggatgtttgccctcgaggctgctttgtaccgcctcagtggagactggaatcccttac

SEQ ID NO: 447410 - DNA, 98 bp, Homo sapiens
accgatgttgcgcgaggaaaatgcgggacgcccaggtccggtgtctaaaagactatggagaatttgaagttgatgatggcacttcagtcctattaaaa

SEQ ID NO: 447411 - DNA, 100 bp, Homo sapiens
tttgagcggactcccttttaaggttttgcagccactcttgatgatgacaaaccttggtactccatttttcccattgacaatgaggatctggtatatggac

SEQ ID NO: 447412 - DNA, 51 bp, Homo sapiens
ccgttcctggagattctgattgagaaaaggcgacggcggattgacagaagt

SEQ ID NO: 447413 - DNA, 103 bp, Homo sapiens
tcgccggcagcgccgcgaaggcggtgctcgggccagcccttctctgccgtccctgggagtgcctccggagccagcgtggtggccatagacaacaagatcgaac

SEQ ID NO: 447414 - DNA, 90 bp, Homo sapiens
ctgtgccacgaggtggctcccccacggctggtgatgagcatccgggatgggatccacggacccctgctgccgccatggcatcagatgaag

SEQ ID NO: 447415 - DNA, 100 bp, Homo sapiens
gccatgggtaacctgttcggccgcaagaagcagagccgcgtcacggagcaggacaaggccatcctgcattccacgcctacgggaaggcaggcaagatgct

SEQ ID NO: 447416 - DNA, 87 bp, Homo sapiens
aaggcgcgagtgaggaaaggaggtactgtaggagggagcctgcgagcaaacgaggtggaaactggagtgcacaagtgctggaatggg

SEQ ID NO: 447417 - DNA, 110 bp, Homo sapiens
gatggaaatcctaatgacagtctccaaattcgcctccatctgtaccatggattttttatcaagcagaaatgcatcgaacaacgagaatcaagatcactgagctaaatccc

SEQ ID NO: 447418 - DNA, 99 bp, Homo sapiens
aaagctgaactgaatgagtttcttactcgggagctggctgaagatggctactctggagttgaggtggcagcggtgggagcgagagtcaggaggaggaag

SEQ ID NO: 447419 - DNA, 83 bp, Homo sapiens
tatggcttgaacattgaaatgcacaagcaggaggaatgccagctcctgagcaggcctcattggtggaggaggggcaaccacag

SEQ ID NO: 447420 - DNA, 90 bp, Homo sapiens
ccagcccctgagctgggcgagaggtgccaagggagcttctgtcccgaggaccaggggatgcgaaggttgcagatctgatctcttctgaac

SEQ ID NO: 447421 - DNA, 59 bp, Homo sapiens
gaggcctccccagccatgcagaactagggtgttttaaatagcatttccaggaaaggaag

SEQ ID NO: 447422 - DNA, 75 bp, Homo sapiens
gagacaaagcggccattctactgtgtgctacccaacacccaccaggtaatagcctgcagctggtgttttgagaag

SEQ ID NO: 447423 - DNA, 100 bp, Homo sapiens
cactcggtcatgtacccggtggactcggtgaaggagtacgagagggcctccaaagtggaccagtttgtgacgcgcttcctgctgcgggagacggtgagcc

SEQ ID NO: 447424 - DNA, 75 bp, Homo sapiens
gagaaatcgtgctcagttacagttatattgccatggcctactgaacttgacgcactggtatttggccatctatac

SEQ ID NO: 447425 - DNA, 73 bp, Homo sapiens
ggcaacagaatattggtcaagttgctgaccttgaaaaaatttcccaggaacgagaaaaatttgctgatgaagg

SEQ ID NO: 447426 - DNA, 90 bp, Homo sapiens
ctgtgtcctacatcggccactggtgcaatggcaagcggcacgggaaggtctgcagactcgtgaatgacgtctaccgcgtgtataatcgac

SEQ ID NO: 447427 - DNA, 75 bp, Homo sapiens
cactccaaaggtgtatttcaccgcgacctcacatccaaggtattaacaagtaaaggtgacgcgtgggccaagtac

SEQ ID NO: 447428 - DNA, 95 bp, Homo sapiens
ccaggagtcatcggacgccagaatctggtgaggatccagagaggcctaatgggtgtttctgtggcctgggactggttagcaccaacaagtcctgc

SEQ ID NO: 447429 - DNA, 100 bp, Homo sapiens
gaacagactagccactttgcattgactggaaacaatggcatttacagaaagagtcaacagcagtggcaacaggtgaattatgtaacctcattacgctgga

SEQ ID NO: 447430 - DNA, 100 bp, Homo sapiens
cggaggacatgcgggagagagaatgagccagagggacacgctggtgcatctgtttgccggaggcaacaacgaactgtctacagactgatgctcgtgaaag

SEQ ID NO: 447431 - DNA, 75 bp, Homo sapiens
gtggcaagatggtgttggaaagcactatggtgtgctgcaagctttcttcctggtggcagatgacatcatggattc

SEQ ID NO: 447432 - DNA, 75 bp, Homo sapiens
attcctctcaacaggatttcctaagagagctggatgaaaactttcggaagagaaagttgcctgtggtaagttcag

SEQ ID NO: 447433 - DNA, 100 bp, Homo sapiens
cggagattgaggtgtcggttcgtgctgctgagctgcccaggcttcacggagcgaaatctccgagaagcaagggataatgctgtggctgaaaaggaacgag

SEQ ID NO: 447434 - DNA, 88 bp, Homo sapiens
ttggaagcccgggaccgtttaaaaaactggtgacgcatccaaagaagacattgacactgctatgaaattaggagccggttaccccatg

SEQ ID NO: 447435 - DNA, 97 bp, Homo sapiens
gaaatgtccgaaggccgcagtacttgaccctgtattttgggagtcgaacggactctttcgacgtgtagcagcagctttgccgggaatggaaagcaca

SEQ ID NO: 447436 - DNA, 74 bp, Homo sapiens
gaagagggaagacacgcggaaacagctggttgtcttcttgcctgccctgtgtcgtaaaatgggggtcccttact

SEQ ID NO: 447437 - DNA, 100 bp, Homo sapiens
tggcaagcaagattataatcaggaagtggatgcctccatttttaagtgcccaccagaagtatgtccgacaagcctggcagaaggcagacatcaatacaaa

SEQ ID NO: 447438 - DNA, 83 bp, Homo sapiens
atttgtgtgacttgactcttcaaacacaaaggaatgtcggattgcacatcctattgtaaaatgtacttactgcagatcagaat

SEQ ID NO: 447439 - DNA, 80 bp, Homo sapiens
gaattggtttctacacttgtggaaacacttatgactggcaaaaggctcttcttcgtggggtcccgggaaggccacctgcc

SEQ ID NO: 447440 - DNA, 82 bp, Homo sapiens
cattaatcagatactgcatttaagatgatatcatcaagttgaatcgaaaggaagggaagaagcagaattttccaagactaaa

SEQ ID NO: 447441 - DNA, 98 bp, Homo sapiens
agagcccgaggccggggaccaggacagtcgcgaggttcgagtgttgcagagcctgcggggcaagatcttactatactggcaattgctggagaagattt

SEQ ID NO: 447442 - DNA, 100 bp, Homo sapiens
acagaatctagtcgctgcatacctccttccctgtcctcaatcagggaaaatctgcccagtcatttcaagttcaaggagtattgtccccaggtcttcagga

SEQ ID NO: 447443 - DNA, 76 bp, Homo sapiens
gcatgatggaaacaccatggctgcggcggcccagctctctctgacacagcaaactcagtcgtggctttggagatca

SEQ ID NO: 447444 - DNA, 83 bp, Homo sapiens
tcgtggcctgcctctgcgtgcgtattgttgcagcatctggcagtgagactgaggatgaggacagcatggacattcccttggac

SEQ ID NO: 447445 - DNA, 100 bp, Homo sapiens
tctggagctgtcattttagaagattgtagaaggcatgaaacaaaaaatgtggagtattgaaaatattgccttcggttctggtggaggtttgctacagaag

SEQ ID NO: 447446 - DNA, 75 bp, Homo sapiens
ctcgccgggctccagctctgtacccggcgcgtgctggcttgggacaggatgatgatatcatcaagttgaatcgaa

SEQ ID NO: 447447 - DNA, 75 bp, Homo sapiens
caagagcagcggaaaatgatccagtcacagatatcattgaaatggattccaagcgtgtgcctcgagacaagctgg

SEQ ID NO: 447448 - DNA, 75 bp, Homo sapiens
gtgaggtggccggttcttggtgggatctgagcagaaaccgaccagagggcaaagtgttggagacagttggtgtgt

SEQ ID NO: 447449 - DNA, 76 bp, Homo sapiens
ctgaggtcatcggggatgtggacgaaggggccgacctcctaggacgcgccagcggagctccggctccttcgccctg

SEQ ID NO: 447450 - DNA, 96 bp, Homo sapiens
actgtgtggctgacttcaaaagagtagtggattttctgaaagagaaattcatagtgaccacttagtagctagtgagaaacagcatatgctccagtg

SEQ ID NO: 447451 - DNA, 74 bp, Homo sapiens
cggggccgcgggcggggcgcccacgagatgctgatgacgagcaggcagaggacggagtcttgctgtgtcgccca

SEQ ID NO: 447452 - DNA, 74 bp, Homo sapiens
ccagggtccctgaagagggaagacacgcggaaacaggtcctggcattgatgtgcctgctccagacatgagcaca

SEQ ID NO: 447453 - DNA, 100 bp, Homo sapiens
aggatgaggagctgcagccccccaggagcaagaccccttcctcaccctgcccagccagcaaggtgggatgcagatcttcgtgaagaccctgactggtaag

SEQ ID NO: 447454 - DNA, 96 bp, Homo sapiens
ttaaggacattccaggcagaggcaagtcactgtgtgcccagtattctgcagacaaacgagaagatgagaagatgtgtgatcatttgataagagcag

SEQ ID NO: 447455 - DNA, 100 bp, Homo sapiens
ccttttcaagaggaaggatgaaaactctacataggaacacgatgtgaatggaagaaacctgtcattgtctatgttaacaatgaatgggcaaccagtgttg

SEQ ID NO: 447456 - DNA, 100 bp, Homo sapiens
gatcatcaaatccaactatcaaggcctcccagtacgttgtgtgaagagtatcattcgacaggagaagatgtatggtcttatgcaaagggacttcctcaca

SEQ ID NO: 447457 - DNA, 98 bp, Homo sapiens
ggaaggacgcacattcacctggccccaggactgcctggagaccccggtatcatcagtgggcctcatctttgtggtggacagtaatgaccgggagcggg

SEQ ID NO: 447458 - DNA, 100 bp, Homo sapiens
cacagctcttgttcccgctgatcctgcagcccagtggatggagtccagaatctacagacctgccaggaaggagatttccaagattctgagaagttcctgc

SEQ ID NO: 447459 - DNA, 75 bp, Homo sapiens
acagattcgcagtggtcgcttcttctccttgagtgtgacatgttggcgagccaagtttatggaggcctttttttc

SEQ ID NO: 447460 - DNA, 118 bp, Homo sapiens
ccaaacaagagagacatttctggctctgaaggcgaacgcttcgctggccatttaggagctctgctcaaagccagacggtctatgttaacaatgaatgggcaaccagtgttggggaagg

SEQ ID NO: 447461 - DNA, 83 bp, Homo sapiens
tcctcctggcctcagcaacctgacaattctgtcgtgtcccggtggaggtggaggaagcgtccctgggatcgagaggatgggtc

SEQ ID NO: 447462 - DNA, 100 bp, Homo sapiens
gttcaaggaggccttccagctgtttgaccgaacagataaatactgcaacaactgtagctgacttaaagtcaataataaatgaatgctataactaccttga

SEQ ID NO: 447463 - DNA, 75 bp, Homo sapiens
caagactccacctcctggtgaagaaagcaaacagttcgaaaacatggccaaaagaaatgccgagaaggaactgac

SEQ ID NO: 447464 - DNA, 98 bp, Homo sapiens
ctggttggagattctccggggacccttccgtatctgcctaggcattttgctgtctcctcctaatacggttgcaattgtagctcaagacttggcagcat

SEQ ID NO: 447465 - DNA, 51 bp, Homo sapiens
cgaagatgcagtacaattcataagacacgctgcaaactcctgcccctccag

SEQ ID NO: 447466 - DNA, 50 bp, Homo sapiens
gttatatgtcctaaagtaaggtttcagatgccagcttggagagtcacgtg

SEQ ID NO: 447467 - DNA, 87 bp, Homo sapiens
catcagagggaagatctttttcctcaattgacccaacatgagtgaagtttcctgcaagaaacgggacgactatttggaatggccaga

SEQ ID NO: 447468 - DNA, 100 bp, Homo sapiens
caagatcgagttcatcgggcagatcgcttccatgggacttaatgaagagcagaaagaatttcaaaaagtggcctttgactttgctgcccgagagatggct

SEQ ID NO: 447469 - DNA, 74 bp, Homo sapiens
accagcaagaagacggtcatcgactgcagcatctccaatgacaatgggccgaattcattttgttttcctgcctc

SEQ ID NO: 447470 - DNA, 83 bp, Homo sapiens
gaacaggggcagaaaatagcacacttttactctacgcaactgttgctttttcatggaacaagatcactcaaggtgaaggataa

SEQ ID NO: 447471 - DNA, 114 bp, Homo sapiens
gagagactggagaaggacctggaggaagcccatcgagagaagagcaaaggagactgcaccatccgtttctgggaaatgccagtgcaaagtgggtgtcattggctctatatgtga

SEQ ID NO: 447472 - DNA, 100 bp, Homo sapiens
gccgcgagccccgagccccgagcccggcgcctggctgagtatcaacattatgacctggggactccagcatccttcaagcaagccatttccgaagaaggtg

SEQ ID NO: 447473 - DNA, 90 bp, Homo sapiens
cctgagtgccgtagccgagccggggctggagcgcgcgggcagagcggcttgggtaaatccaccttaatcaacaccctcttcaaatccaaa

SEQ ID NO: 447474 - DNA, 83 bp, Homo sapiens
cctcacggtcctcctggctgtgctcatatacacctggaagcggggaagggctcaacagccccagcaccttagaatgcagccct

SEQ ID NO: 447475 - DNA, 73 bp, Homo sapiens
gagtacctggagaaagctttaaacaaaaactggcgatggaatatgagaggagccctctggaaagaaaaggaca

SEQ ID NO: 447476 - DNA, 50 bp, Homo sapiens
gagttctctgtgtctgtgaacttgaatgcaccaaggaaaggccatttgtg

SEQ ID NO: 447477 - DNA, 74 bp, Homo sapiens
tcaatgactgccctctaaaggaagagctcggattctgaaggtaattttgagactcctgaagctgaaaccccgat

SEQ ID NO: 447478 - DNA, 101 bp, Homo sapiens
attcagatgtggtggaatatgccaaggaaaaactggagagcttcatcaaaaatagtgatagctttgataagatttccagatgtgacttgcactcagaagat

SEQ ID NO: 447479 - DNA, 90 bp, Homo sapiens
atacagaagaagcaaggaaattacagttagaggtcggtcggtccccactatgggcctggagctgtacctggacctgctgtcccagccctg

SEQ ID NO: 447480 - DNA, 49 bp, Homo sapiens
cagaggttgacttctacattgataagtcctcctgcaaggagaatccttt

SEQ ID NO: 447481 - DNA, 100 bp, Homo sapiens
gttcgtctcttacgtctgcggaagtgcagctgcctcagttcttagcgcagagaattttctctacatgtgcacccatttaaaggactcggcttcaagggaa

SEQ ID NO: 447482 - DNA, 75 bp, Homo sapiens
cagggaaacgcggagtgtcctggagcttgacgcgctggagcttgagagagcagcccgacggccatggaggctgaa

SEQ ID NO: 447483 - DNA, 100 bp, Homo sapiens
agacccacgcggcgccagttctccggcgggaaggaaaaccgcgcagagagggcgtctctggccgagcctctttttgtggaaaacgacagcagcagcagtg

SEQ ID NO: 447484 - DNA, 100 bp, Homo sapiens
ttcaaggaggccttccagctgtttgaccgaacaggtatttcagtgtctgtagacaagatggaatcatctccatttaatagacggcaatggacctcactat

SEQ ID NO: 447485 - DNA, 80 bp, Homo sapiens
cccaagatgcaaagtttggttcaatgggggttagagccatgtccattggagcccgttcccaatcagctcgtacttacttg

SEQ ID NO: 447486 - DNA, 88 bp, Homo sapiens
tggaccgtcgccttgctcctcgccgcggcggggactgcagattcttctgctgatcgacattgagcagtcctacatcaacacgaaccat

SEQ ID NO: 447487 - DNA, 98 bp, Homo sapiens
gcggaataacatcggaggagaaggaatttagataatgggctgtgtgcaatgtaaggataaagaagcaacaaaactgacggaggagagggacggcagcc

SEQ ID NO: 447488 - DNA, 48 bp, Homo sapiens
cgactcggcggcggcgtcttttgtattcctggagtggagagccactct

SEQ ID NO: 447489 - DNA, 100 bp, Homo sapiens
cgctgtaggcttcctgtgccatgacctccggtcacacagctccttccagggagacacagcaggtccccacagaggaagtgtccttggaagtgctgctcag

SEQ ID NO: 447490 - DNA, 75 bp, Homo sapiens
cactgtccaaattcagaagctcagaacgctggactctccctttgcaggctgaggccaccatggagcagtgtgcgt

SEQ ID NO: 447491 - DNA, 88 bp, Homo sapiens
gtgtgttgatcttggcttgattcagtctgccttgtaacaggctgccttcgaccagcgcatgaagacatggcagcgctggcaggatgcc

SEQ ID NO: 447492 - DNA, 75 bp, Homo sapiens
actaccgagaagcaatgattcaggggtacaattttggatttgagcgtgtgaaggcaaagaagaatgctgctccat

SEQ ID NO: 447493 - DNA, 59 bp, Homo sapiens
tcatccataaaactgaagatgtgaatactctgcaagcagatctgatatcattaggaaaa

SEQ ID NO: 447494 - DNA, 98 bp, Homo sapiens
tacaacagtttggcgtgcaacatggggcttgagaaaggagtcattcaggagagcaggaaagaaaaggccatccctgtggatgtcgcgctgccacagaa

SEQ ID NO: 447495 - DNA, 100 bp, Homo sapiens
gaacacagaaatttgggaaactggactatacttcaggacatcactccattagaatgccgggacattctgcttcctgtcatcaccaaagagctgaaggagc

SEQ ID NO: 447496 - DNA, 100 bp, Homo sapiens
gtgttcctgctcttctgcggcgcctacctctacaaacagggctttgccatccccggctccagcttcctgtttggcctgtcactgctcctcatcctcctga

SEQ ID NO: 447497 - DNA, 50 bp, Homo sapiens
gaaattgaaaggcttcaaagctagcagagtgcctggaagagctgggatgt

SEQ ID NO: 447498 - DNA, 101 bp, Homo sapiens
cgtgtacctgacatggctcccagggcttggcaacccccaggatgtgacctattttgtggcctatcagagggaaacatgcaattttcattgtgagctgcctt

SEQ ID NO: 447499 - DNA, 74 bp, Homo sapiens
ggcaagattcttctgaattgtgctgccttggccaaaagagggctctccaatgtcagatgtggtcagtagggagc

SEQ ID NO: 447500 - DNA, 90 bp, Homo sapiens
caggaagactccctgagaaccccaagatcccacatggagatatgtcttctccgactactatgaagaagcctgaaaagccattgttcagct

SEQ ID NO: 447501 - DNA, 83 bp, Homo sapiens
tgcggctcggacgccagcggacacgcgggcgagttgatcatggccttgccaggttggtgacagtatattgtgagcatggtcat

SEQ ID NO: 447502 - DNA, 88 bp, Homo sapiens
taacaacactgagaacaaagaacggaagtccttccagaaggagcttgtgatggctccagtgatcattctacatatattgtacaaacac

SEQ ID NO: 447503 - DNA, 75 bp, Homo sapiens
ggctcgcagaaccgtgaaaaaggagtggcagggtggattacaggaggtggcagaacagttagagctggaacggat

SEQ ID NO: 447504 - DNA, 100 bp, Homo sapiens
gccggtggtgcgagtcttcggagcgaccccggcaggaaaaacgtggtcttcgagaaatgcgagttcttgaaaatttgaagaacatgatccatgaaacaaa

SEQ ID NO: 447505 - DNA, 100 bp, Homo sapiens
tggagtgttccttccgctagtgatcctttgcaccctgcttggagacggacttgcttccgggatttagtgcaagaagaagaacagttgatggaagaaaaga

SEQ ID NO: 447506 - DNA, 83 bp, Homo sapiens
taagcagcacaatgaggaacagagtggtgacgatgcatttgcccagtataacatggatcagttcacgcctgtgaagatagaag

SEQ ID NO: 447507 - DNA, 98 bp, Homo sapiens
aattggaagctgtacacagcaagacgttgagttacatgttcagaagatgtttgagacggaggcagatgagaagagggagatggccttggaggaaggga

SEQ ID NO: 447508 - DNA, 98 bp, Homo sapiens
ttcaggcgacccgtactgggcctactctgaacacagatatgtagaactcttcttgaattctacagcaggagcaagcggtggtgcttatggtagccaaa

SEQ ID NO: 447509 - DNA, 83 bp, Homo sapiens
gcccggctgccttccacctccagtgctggttgattcttcaccacactgaaaccattaggaaaaatccttgtggttaacagcag

SEQ ID NO: 447510 - DNA, 90 bp, Homo sapiens
ccgatgtcgggaaggtcactgaacctctaatgctgcctaccttgggggccaagaaatgatggaggtggtgaagagagatgacgaaaccat

SEQ ID NO: 447511 - DNA, 75 bp, Homo sapiens
acacaactcatggcaccgtgcacgtggtcgtcaacaaccagctccaaatcttaacttggtgtcaagtttcctggc

SEQ ID NO: 447512 - DNA, 98 bp, Homo sapiens
tcacctatttgccaagaatcaaagaatatctggatcaactaggtatgagtattatagaacaattagaccctgtatcttttagcaattacttgaagaaa

SEQ ID NO: 447513 - DNA, 51 bp, Homo sapiens
atttggcagctgtcctccagtcttaaaagggtcatgtaggtacaacagcaa

SEQ ID NO: 447514 - DNA, 100 bp, Homo sapiens
gttaccaggccctgccctgggttcgctacatcacccagagtggcggtatcactggacaggccatggctccacggtcccggcgacgaaggcacaagaaacc

SEQ ID NO: 447515 - DNA, 115 bp, Homo sapiens
gtggaaaccaagatagatgtgtcctatgaataccgcttcctggagttcacgactctgagtgctggtgactacacttgtcaacacaagcaacaaaggcccatctggtaaaaagaaa

SEQ ID NO: 447516 - DNA, 90 bp, Homo sapiens
cggagccggccgtacgcggtgctgcgagggcagaacctggaatagactgccatcggataaagagtggtccctagcttctatttttccaag

SEQ ID NO: 447517 - DNA, 100 bp, Homo sapiens
atctgctataacctacaagcagttggacagttacagatgtagagctaaaacgactgaaggatgctttcaagaggacctgtggactctcatattacatggg

SEQ ID NO: 447518 - DNA, 51 bp, Homo sapiens
gcttcctccagacctctcggcgcgggtagcagtagctgatgtgcagtttgg

SEQ ID NO: 447519 - DNA, 82 bp, Homo sapiens
gcagtccacccaccgccgccgcctcccaggcgctgagatgcgtctggagagccagagggcctgcctgaaggaatcacctgag

SEQ ID NO: 447520 - DNA, 100 bp, Homo sapiens
atgaaaattgggaaggttccctcaagtccaaggttgctccttgagggcaggacagttcttatggctttatccgttgcgtaagcacagagaggtctgcgag

SEQ ID NO: 447521 - DNA, 89 bp, Homo sapiens
ttgtatacactggaacagaatcaacccagaacggagagctccctcctagaaaagggatcgcttacacctgagacgaactacagaacagc

SEQ ID NO: 447522 - DNA, 82 bp, Homo sapiens
gaaaaaattagagacaatgaaaacagagttcctacatgtgaagaggaccacttcacgtccccagatgaatatgaggagccag

SEQ ID NO: 447523 - DNA, 100 bp, Homo sapiens
ttggagtgaagattggcaatccagtgccctataatgaaggtgtgatccctcacatccacaaatctctgattggaaagaagggacagcagaaaactgctta

SEQ ID NO: 447524 - DNA, 96 bp, Homo sapiens
tggacaggatggattgccagggcttcctggcccgaaaggagagcctgcacagatagatcattatctaggacttgcaaataagaatgttaaagatgc

SEQ ID NO: 447525 - DNA, 100 bp, Homo sapiens
ggatgtcaaatactttgcacaggaagctataagtgcattccttcctagtagcttctgtatgtacactacgttgatagccatgactggatggtatatggac

SEQ ID NO: 447526 - DNA, 101 bp, Homo sapiens
gtgcccagcaagagattaaagatgcagtacgccacggggccgctgctcaagttccagatttgagatccaagcctcctaaaggccaaggagctgagcaccat

SEQ ID NO: 447527 - DNA, 100 bp, Homo sapiens
agatggtgaagcagatcgagagcaaggctacgtgtgccgcctggccattcaaactgtcaattttaggtccagaagtgtccaaaccacaagttctcaaaac

SEQ ID NO: 447528 - DNA, 90 bp, Homo sapiens
aaatggggcggaagaaaatacaaatcacacgcataatggatgaaaggaaccgacaggtggaaccgtcccaaaatgtcccttgctcagaag

SEQ ID NO: 447529 - DNA, 75 bp, Homo sapiens
agagatctagtatagtcaatgaattaaagacaagaaggtttccaatcaggtgtgtgcagtggcctcagggatccg

SEQ ID NO: 447530 - DNA, 75 bp, Homo sapiens
gacctgtttgtgcgcacagtgctggtctgcctgacatgtcacgactgctgaatatgagacgatctgcagcaccaa

SEQ ID NO: 447531 - DNA, 80 bp, Homo sapiens
gagccagcgtggtggccatagacaacaagatcgaacaggccatggttctctccataaatgaagaagggctaaggcgatgc

SEQ ID NO: 447532 - DNA, 100 bp, Homo sapiens
gagggatcagaagaagataaagctcaaagattactcaaagcaaagaaacttaccagtgatgaggagaagtaccagttctaaatgtcagttataagccaca

SEQ ID NO: 447533 - DNA, 83 bp, Homo sapiens
gccggctgcgcgtggctggggaggcgaggccggacgcacctctgtttgggggtcctcagactgctgcagtaagaatgtctttt

SEQ ID NO: 447534 - DNA, 100 bp, Homo sapiens
gactctggcctctgaaacactaccactgctggcgctgaccttcatcacagacaacagcctggtggcagcgctggttgaagccctggacctgtttgagagg

SEQ ID NO: 447535 - DNA, 101 bp, Homo sapiens
gatcaagcaggttttaaatcaagatttaacattccaacacataaaaattatttatccaacagctcctcccagaacaagttgaaatcatcgcagaaggataa

SEQ ID NO: 447536 - DNA, 50 bp, Homo sapiens
aaggagggcagcagccgcggccgaggactggacctacagagacatctggg

SEQ ID NO: 447537 - DNA, 99 bp, Homo sapiens
gtcatgcttcctgaaggggaagatctcaatgaatgggttgcagttaacaagtcttctgaagaggagtctgatgatgaaatagcagataaggattctgaa

SEQ ID NO: 447538 - DNA, 100 bp, Homo sapiens
aaagctgcacagccaggaggaggacttccgtttgcagaacagcacactaatggccgagttcagcaaggcttgcgataggcttttggctcatcgagtggaa

SEQ ID NO: 447539 - DNA, 100 bp, Homo sapiens
acaagatcccgtccatgaatcagtttggaaattttagcattcaggtgccaggaatgcagatgggacagccagtgccagaaacaggcccagctatactcct

SEQ ID NO: 447540 - DNA, 75 bp, Homo sapiens
catgatcaagggtgttacactgggctacttctacaagtccgaacagccagtccagcaaaatgaacagcattgtct

SEQ ID NO: 447541 - DNA, 98 bp, Homo sapiens
ataagaacaaaccaaatatcaaaatttgtactcaggtgaaaggaccaggcttgccttttgtcactgctccgaataaatttgaagctctggctgctcat

SEQ ID NO: 447542 - DNA, 83 bp, Homo sapiens
gaaggagtacaatgccctgcaccagcggcacacagagaaactaatctggattcactccctctggttgatacccactcaaaaag

SEQ ID NO: 447543 - DNA, 90 bp, Homo sapiens
ccatcttgagtctactctgtcgctcttgtgccctagcaccccgagaaccgtcagtttgagccagatgagtccgatgggtggtccttttat

SEQ ID NO: 447544 - DNA, 50 bp, Homo sapiens
ccacgacccatccttgaagaagttgttcagcacttctggtctcttcagtt

SEQ ID NO: 447545 - DNA, 83 bp, Homo sapiens
gggagccggagccgcctgggatgttcagtctgattgatgactacaaaaccctccacggcaatgccccggcccctggtacccca

SEQ ID NO: 447546 - DNA, 75 bp, Homo sapiens
cgcctggctcggagcagcagcctctgaggagcagcggctgcggcagcgcaacactgaaaccgaggagagcctggt

SEQ ID NO: 447547 - DNA, 90 bp, Homo sapiens
cccagtactaccggcccctgcatatggacaatctaaaatatgtaaatcagttgaagaaggaaaatgaacgtgcccaggggaaaatgaagt

SEQ ID NO: 447548 - DNA, 83 bp, Homo sapiens
cgcggcgctctacggcctcgccacctggtacctggaagctgtgtgcccaggcgggcagggctgggcagcggcctgagtctcag

SEQ ID NO: 447549 - DNA, 100 bp, Homo sapiens
tgatcttttcaatgctgcgaaagctgccaaaagtgacatgcagctgaataccactagaaacatacctgtaaccagagacagctgattatagctttctgca

SEQ ID NO: 447550 - DNA, 98 bp, Homo sapiens
ggcactgctcctgctggccgcctggacggctcgggcgctggaggagaactacgatgacccgcacaaaacccctgcctccccagttgtccacatcaggg

SEQ ID NO: 447551 - DNA, 100 bp, Homo sapiens
gcggccgcggcctccgcaagccggctcacagaacatttcctgcctgttgctcacactctgttgtccacagcatacccgcaccctagatggctgactcttg

SEQ ID NO: 447552 - DNA, 112 bp, Homo sapiens
tcggagatcatttgggagatccaagagattcagtatcactcgctcccttgatgatcttgaggcatggaagaggagatggttcgtgttacgcagtggccgtttaactggagat

SEQ ID NO: 447553 - DNA, 75 bp, Homo sapiens
agaggcccctcttctcctccaacccagaactggacaatctgaaagatccccagcaggccctcaaggagctggcta

SEQ ID NO: 447554 - DNA, 75 bp, Homo sapiens
cagagagaaagatgatgatgttgtaagccttagcagccttgatctgaagttccagggtcacccccgagaggacaa

SEQ ID NO: 447555 - DNA, 50 bp, Homo sapiens
cttagcactcttagcctggtgcaggcgcagttgtgtagcagttgagtaat

SEQ ID NO: 447556 - DNA, 74 bp, Homo sapiens
tcagagtaggaaataattttcacaaccttcaagaaattcgggccatgtctgtgattggagacagaaggtcccgg

SEQ ID NO: 447557 - DNA, 138 bp, Homo sapiens
acggcctcctgtattggacgagtcttggattcgtgaacagaccacagtggaccacttctgggattacacagatgaatcttgcactttcaagatatcattgcgaaatttccggtccatcttatcatgggaattaaaaaa

SEQ ID NO: 447558 - DNA, 98 bp, Homo sapiens
caagaacagaatgaagaaagtcagggggactgcaaaggccaatgttggtgctggcaaaaaggaggagatgttaaagtaacccatcttgcaggacgaca

SEQ ID NO: 447559 - DNA, 87 bp, Homo sapiens
gcggaagtgcagctgcctcagttcttagcgcaggtgtactttcggctccatgcttccatcctgaagctcctggggaagcccgattct

SEQ ID NO: 447560 - DNA, 101 bp, Homo sapiens
accagcacaggcggcgttttctccttcggaacgggagcgtctaggagcaggacatcgagactttacatggctctgttcacgtcacgctgtgtgggactccc

SEQ ID NO: 447561 - DNA, 74 bp, Homo sapiens
tgctcttcgctctcttcctggctgcgtccctaggtatgatgatgtcaaacgtgatgctgatgctacagttacag

SEQ ID NO: 447562 - DNA, 100 bp, Homo sapiens
gcgaccgggagcggcggcagcggcggcgcggaggcggctgaggtgcgagccggattcggaaacttcagatacgaaatatcccgcctcatttacagtggga

SEQ ID NO: 447563 - DNA, 83 bp, Homo sapiens
caagcattttcatgaaacaaccccaaataaaggaagtggaaccacttcagctatgtttccagtgtcctctgggtgtttccaag

SEQ ID NO: 447564 - DNA, 76 bp, Homo sapiens
caaaaacagtggataattttgtggccttagctacaggagaggcctactgaacttgacgcactggtatttggccatc

SEQ ID NO: 447565 - DNA, 50 bp, Homo sapiens
ctgaacttcatgcttgacaatctcgcaggctatgcctttctgctgttcca

SEQ ID NO: 447566 - DNA, 83 bp, Homo sapiens
cggagacgaaggacgcagcgcaggtgtctcccagtctgctaaagccctaaggccatcaccatggacttccagcatcgccccgg

SEQ ID NO: 447567 - DNA, 100 bp, Homo sapiens
gcttactcccggtgccaggttcttggagctgtgaggattggtagcttatgtcgatcttgatgaaagagcaattgatgctctcagggaatttaatgaagaa

SEQ ID NO: 447568 - DNA, 75 bp, Homo sapiens
ccccagtgtgcttccgccactggtggaggagaatggtgggcttcagaagggtcctggcggcagagaccacgtccc

SEQ ID NO: 447569 - DNA, 110 bp, Homo sapiens
gagcgtgaccgagagcgcgaatatcgtcatcgttagaagaaggtgacaaagtacaatttgaagaatttgcaaaagtagtaaggaatatgcgtgatgctgccaggttagaa

SEQ ID NO: 447570 - DNA, 75 bp, Homo sapiens
atcaagtcagacgtgaggaaggacctacctccttggtcaaagctgggatgggatgttccatttaagcagacctct

SEQ ID NO: 447571 - DNA, 75 bp, Homo sapiens
gtgcgccagggcctcaagtgcgatgcacctgaactcctggggggaccgtcagtcttcctcttccccccaaaaccc

SEQ ID NO: 447572 - DNA, 75 bp, Homo sapiens
gctccggaaaggggacacctgggcataccaattcaatcaccatgagttggagcttcctgactcgcctgctagagg

SEQ ID NO: 447573 - DNA, 100 bp, Homo sapiens
cttcattggccacctacagaaacaaaatgtcaacaaattgatggtactacaaagtgatcatttcttacatttactgcaagctgacaatgtccaaatagga

SEQ ID NO: 447574 - DNA, 100 bp, Homo sapiens
acgcgcccggcccggagcccccagcgcagcggccgcggtgtttgtgctctgccaaggcctcctgcagctctgccaactcctgtacagcgcctacttcaag

SEQ ID NO: 447575 - DNA, 98 bp, Homo sapiens
ctgtaagccataaggccccagcattcctgtatgatatctacctcaggatgactggaagaagcccaaggttgtgctggtgaggtggaatgagccctacc

SEQ ID NO: 447576 - DNA, 100 bp, Homo sapiens
gtgaaacgcctgtacacgttggatgggaaacaggcaaaaatagacatcttattagttggagatgtcactgtgggctacctggctgatactgtacagaaac

SEQ ID NO: 447577 - DNA, 100 bp, Homo sapiens
gatgccgggaagcaggtcccaggggatatgtgtgtgtcgctgcagacccatcccggaagccggccgggagggccgcgatgggcctcttggaacattggtg

SEQ ID NO: 447578 - DNA, 74 bp, Homo sapiens
gcattttggggattgattctgcttatgatcggaatcggaagttttctggatatgccgcagaaggatccgtgcca

SEQ ID NO: 447579 - DNA, 100 bp, Homo sapiens
ttttgggcttcagaatgcagtgttttcgctgttcgggggtcttgtctggattttggttgcctcctccaatgttcctctacctctactacaaggatgggtc

SEQ ID NO: 447580 - DNA, 100 bp, Homo sapiens
acctaaccatgaagacttgaacttaatacagcaagaaagaccatcaagtttaccaatatgaattgagaattcgttatttgccaaaaggatttctaaacca

SEQ ID NO: 447581 - DNA, 90 bp, Homo sapiens
gaaatagataatatcaaggacatcaggacaccgggagtgggagagattggactgggagactcagcagcgagtgatagacagccaagcaga

SEQ ID NO: 447582 - DNA, 83 bp, Homo sapiens
tacgtgctgttcctcgccgacgaggagttcgacgtggtagtgtgcgaccagctgctgcggactctggagcgtgagaaccagcg

SEQ ID NO: 447583 - DNA, 51 bp, Homo sapiens
gggtcctcatggatctgtccaaaaggagcctgtgtgaaatgcagcaaaggg

SEQ ID NO: 447584 - DNA, 113 bp, Homo sapiens
gcatggcggtggaggacgaggggctccgggtcttccagagcgtgaagatcaagatcgactcagcccacctgcacccaggtgaaataaacagctttattgctcacacgaagcct

SEQ ID NO: 447585 - DNA, 100 bp, Homo sapiens
cgctactgtgtccaacaatgtgccgggttccgatttcagcatcggggcagacaccgccctgaacactatcaccgacttgccaccttccagagaagaggta

SEQ ID NO: 447586 - DNA, 88 bp, Homo sapiens
gggaggttggggtctctgggagctctgcaggcctccaagggctgcagttctacaggctacaccgggaagaaaggcccaactaccgtct

SEQ ID NO: 447587 - DNA, 98 bp, Homo sapiens
ggttagtgtgctctgagggagggtccgagccagccgctgttttgccggaggagcccctcaggccacaaggcgcctctgtcgaagagccttctgctggt

SEQ ID NO: 447588 - DNA, 82 bp, Homo sapiens
gtttctttgtcatgtagccaagactggagaaacaatcggacaaggcaaaatctcagcaagttcggacctctagtacaataag

SEQ ID NO: 447589 - DNA, 100 bp, Homo sapiens
actccaccagcttcctataacttggacgatgaccaggcggcttgggagaatgagctgcagaagatgacccgggggcagagtctcgctgtgtcacccaggc

SEQ ID NO: 447590 - DNA, 75 bp, Homo sapiens
tggagcgtgacgtggacatcaacatctatgattggatccaggatgggggccccgtttgtctgggccttgggcctt

SEQ ID NO: 447591 - DNA, 75 bp, Homo sapiens
tgcttctttggagaatgatatcaaaccagcaacatcagatgctgacctgaaagaacatatggttggaatcatatt

SEQ ID NO: 447592 - DNA, 50 bp, Homo sapiens
tctctgctgtttaaaaagtatccctgtgacatagggcctgattacattcc

SEQ ID NO: 447593 - DNA, 130 bp, Homo sapiens
ctatgccctgctgtagtcacaggaggtgtagagaggaccccgggacatctgaaagccaggaaatgaggcggggtttcaccatgttgcccagactggtcttgaactcctgagcttaagcaatccacctgcc

SEQ ID NO: 447594 - DNA, 74 bp, Homo sapiens
ccgccatccagccaccattccaaggaggaagataccaactagagataaaaataccagaaacatacccatttaat

SEQ ID NO: 447595 - DNA, 107 bp, Homo sapiens
gatggcggcccatcaccggcagaacacagcagggcggaggaaagtgcaggctgtctgtccccagaccccagagcacgtccggcaccaccatgactgggctgttgaag

SEQ ID NO: 447596 - DNA, 100 bp, Homo sapiens
aactgtctcttccagggtcttctaagtcagagacatcaaaacctggaccttctggattacaggccaaattagcaagcgaggattaaatccaccacacagg

SEQ ID NO: 447597 - DNA, 83 bp, Homo sapiens
ttatcgccagcaggcggccaatctgcttcaggacatggggcagcgtcttaacgtgtacctagtcgatagtcgctggttcaaac

SEQ ID NO: 447598 - DNA, 75 bp, Homo sapiens
catcaaggacgggaagtcactcataagcgcgctcaagatgagatggaagattttcgaggtatagcagaagaatca

SEQ ID NO: 447599 - DNA, 71 bp, Homo sapiens
ggcgcaggagactgaccgcaacggcaggacatatgtagagtgtgtcggtcagaaggaacacctgagaaacc

SEQ ID NO: 447600 - DNA, 100 bp, Homo sapiens
tccaggcaggtgacatccttcaccgagtcctgtgtctgagccagagcgaggggcgtgttatgtgtcgtggaggccgaatgtttgcaccaaccaaaacctg

SEQ ID NO: 447601 - DNA, 74 bp, Homo sapiens
aagcccccaaaagcagctattcagggaggtggggaagacagggctccagctaccacaggacgggctctgggtat

SEQ ID NO: 447602 - DNA, 90 bp, Homo sapiens
atttcttacggggtcgtcctaaaaccttcaagtctctggagaatgctattgaatggaggaagggagtgaacaggcaccactaatgagtga

SEQ ID NO: 447603 - DNA, 90 bp, Homo sapiens
tcattctgcacgacgatgaggtgacagtcacggcctcattgctacgatttcagagtaccctggtaatagctgagcatgcaaatgattccc

SEQ ID NO: 447604 - DNA, 90 bp, Homo sapiens
tttcctgtggaagaacagcaggaagtaccaccagggaaatcctcattgacgattcaatttgttgaaggccaatttgtggactcctacgat

SEQ ID NO: 447605 - DNA, 100 bp, Homo sapiens
tctcagttggagttattaattagcccaacctgttcttgcaaacaagcagatatttgtgtggttcaaagtttccttctgcacttttggcaaggaatgccgc

SEQ ID NO: 447606 - DNA, 51 bp, Homo sapiens
ggctttacaatgggttctaaagcagggcaaacttgaagataaatcttttga

SEQ ID NO: 447607 - DNA, 82 bp, Homo sapiens
ccggcggcgggccgaggagccgggcgcaatggagcggaagagggtttccaggcctgaggtgcccgccctggccccaggagaa

SEQ ID NO: 447608 - DNA, 50 bp, Homo sapiens
tctgaattgtgctgccttggccaaaagagagataaggtctcactacgttg

SEQ ID NO: 447609 - DNA, 100 bp, Homo sapiens
tgaggtggtgaaactcaagatccccatggacaacaaggaggccacatccacgtcctccgagcctacatcaagacccaagtgaacaaagagctggagcagc

SEQ ID NO: 447610 - DNA, 75 bp, Homo sapiens
atctctgccagcaccttgggaagagaaagaaaatgccgaaggcactcagacagccagagactgctgctactttga

SEQ ID NO: 447611 - DNA, 75 bp, Homo sapiens
ccagacgcgccagctggagctgaaggccaagaactatgccgatcagagatcaaaaccattcaagtgcaagatatg

SEQ ID NO: 447612 - DNA, 100 bp, Homo sapiens
aaatggcgaccggcaactactttggattcacccacagcggggcggcggcggcggcggctgcggcccaatataggtgtgagcgccactttgaagggcatcc

SEQ ID NO: 447613 - DNA, 100 bp, Homo sapiens
gctcctctgtgtttgccgcctggatgtggacgagtgtgcaacagattcccaccagtgcaaccccacccagatctgcatcaatactgaaggcgggtacacc

SEQ ID NO: 447614 - DNA, 101 bp, Homo sapiens
ctgtccccggcgtgaagaggaggcggctgatccccgagctccttcattcccaaattcatcacccacctcttcaagtgcaagccaattagcatggtgggagc

SEQ ID NO: 447615 - DNA, 83 bp, Homo sapiens
gctcctcccaggtggcctcccgcgtgctggccatgaaggcagtttcccagctacctcgagacggtgacaaaggacatcctggc

SEQ ID NO: 447616 - DNA, 50 bp, Homo sapiens
cgaggagctgcggctctaccccccggaatgggccatcaactgagaaagac

SEQ ID NO: 447617 - DNA, 100 bp, Homo sapiens
tgtccacaagcactcccgcctggcagaggatgcgaccgactttgagtggagcttctggatggaatgggggaagcagtggctggtgtggcttctccttggc

SEQ ID NO: 447618 - DNA, 80 bp, Homo sapiens
gattaattacacaaggtggaagcggccaacagagcacttatggcaaggcatctcgagggggtggcaatcaccaaaacaat

SEQ ID NO: 447619 - DNA, 100 bp, Homo sapiens
gccgaggagacgcgggccttcgagcagctcatgaccgacctcaccctgtcgcgggtttagcatgagctttaacagacataatctgaaatactatgtatta

SEQ ID NO: 447620 - DNA, 75 bp, Homo sapiens
tgcaggcgccgccgccggacgtcggcaacggagaaggtattcaagagacgatatttttacttgacccaacttcct

SEQ ID NO: 447621 - DNA, 96 bp, Homo sapiens
cacagaataatttcgccctgggttacaaggctgcggacttccagctgcacacacatgtgtttcggtctaagtaccacccagatgaggtggggaagc

SEQ ID NO: 447622 - DNA, 75 bp, Homo sapiens
cagatgctgccagggtccctgaagagggaagacacgcggaaacaggagtctcgctctgtcgccagactggagtgc

SEQ ID NO: 447623 - DNA, 82 bp, Homo sapiens
aacgctttgataccaagaattaaaaatgcttgtctacaaacatcttcccttgcgcctcttagcaatgcataccacgagttag

SEQ ID NO: 447624 - DNA, 74 bp, Homo sapiens
tgcagatgccgttaaacaaatcctggaggcagttgctgcgccaagcccatctttgtgtgcttgcatccaactgt

SEQ ID NO: 447625 - DNA, 49 bp, Homo sapiens
cttggccaaaagcaggtgattccaggtctcgcatgaatttgccttgaat

SEQ ID NO: 447626 - DNA, 73 bp, Homo sapiens
ctgcctgaatggcgggaagtgtgaagcggccaatggcacggaggcctgcgtagggagacgctgttgcggcagc

SEQ ID NO: 447627 - DNA, 98 bp, Homo sapiens
gacgcctcactcccgtttccgagccataaaaggtctaggaccgcttcccccgagccagcagttgatattcactgatggactccaaagaatcattaact

SEQ ID NO: 447628 - DNA, 100 bp, Homo sapiens
tacctgtggaccgtgtgctgccactgcgggggcaagacgaaggtgctggagaatctggtaaaagcaccattgtgaagcagatgaggatcctgcatgttaa

SEQ ID NO: 447629 - DNA, 83 bp, Homo sapiens
ctctaattgaaaagagaatccaattacaccttccaaaggctttcctgcagcccgaaggtgtcacagttgtgttcaaataaaaa

SEQ ID NO: 447630 - DNA, 100 bp, Homo sapiens
gtatcactcgctcccttgatgatcttgaggtgagccagccatgagagggtatcttgtggccatattcctgagtgctgtcttcctctattatgtactgcat

SEQ ID NO: 447631 - DNA, 100 bp, Homo sapiens
attcaatccttctggagagcctgtgtgatgcaactgtgaaagttccttttcttaagaaatgcaaggaagcaggacttcttaattacttacttgaagaaat

SEQ ID NO: 447632 - DNA, 75 bp, Homo sapiens
gaccgaggcagcggcggcacctgccggccgaggagagtgcgtagaagggctgcgggaaaatgactatctgctgat

SEQ ID NO: 447633 - DNA, 133 bp, Homo sapiens
tggaggctcaggccctaggccattaaatcctgtaactcaagctcccttgccacctgggcctcctgggatggatgtcacccgcttactcctggccaccctgctggtcttcctctgcttcttcactgccaacagc

SEQ ID NO: 447634 - DNA, 90 bp, Homo sapiens
tggcagctgctctgaaccaggacctggacccggacccaaagtgccatgtctttaattgcctggaaaccttggctgctacaaggatcatgg

SEQ ID NO: 447635 - DNA, 80 bp, Homo sapiens
tcgatggcgagccaacagtcactgggcataaggaaatggtggcaggcacttcctcctaacaagaaggaagtagttaaaga

SEQ ID NO: 447636 - DNA, 75 bp, Homo sapiens
ctcagccaaggccaggggagacctgggtgccttcagcagaggtacttgaactggcaggaaatgcatcaaaagact

SEQ ID NO: 447637 - DNA, 75 bp, Homo sapiens
cctgccggggagggcccagcgcatccgacaggttacgggcaggacttgagtggcttcggacagggcttctcagac

SEQ ID NO: 447638 - DNA, 75 bp, Homo sapiens
gatactgaatctccagtgttagtgaatgactatctgaattcttgccgccaggatggggaaacagaacagcaagct

SEQ ID NO: 447639 - DNA, 95 bp, Homo sapiens
ccgggatggaaggagcaggcgtgcgggccgtgagcggcgccagagggtacctggagctgaaaccaccaatgggtgaggtcgtcacccctacggcc

SEQ ID NO: 447640 - DNA, 100 bp, Homo sapiens
cctcaccgccctcagccagaagggctacgccagcggcgtcgagaggaccatcctgggtgctggccctgtgctggaggatacagttgatatattagttgga

SEQ ID NO: 447641 - DNA, 88 bp, Homo sapiens
ccatcccctggcggaaccgcccccagccaagtcattgttggataagcgagatggtagtacaattgtcagacagcttgactgatcttct

SEQ ID NO: 447642 - DNA, 89 bp, Homo sapiens
taaattatgagaaagaagaagaattcctcactaatgagctctccagaaaattgatgcagtgaacagagtatctgccaagcccgggcttc

SEQ ID NO: 447643 - DNA, 95 bp, Homo sapiens
ttgtccctttgcctcatcccaggttgccttggaaaatgccaacgccgtgtctgaaggcaacaccgtgacaggagagacgactcccttttctcctc

SEQ ID NO: 447644 - DNA, 115 bp, Homo sapiens
acgatctgcacttcgcattttggcattgacatttaattttagggtcctttatatagaagggagagtaggttacctctggaacctccaagtgaaacttgagcccatagtaaatctc

SEQ ID NO: 447645 - DNA, 95 bp, Homo sapiens
cggatgctgcggcgcccgctggccgggctggctgcggccgccctgggccgggccccaccggacggctgaccccgcactacatctacccaccagcc

SEQ ID NO: 447646 - DNA, 75 bp, Homo sapiens
cgccggttcgcgtctctctgctgcggcgcggggaccgctgtgctctcgaccttctttggtaacgtgaacgagtcg

SEQ ID NO: 447647 - DNA, 88 bp, Homo sapiens
tcctggaatacacccacctaccttgaaccagaatcctcactatggatgggctcattgaggacattaagcatcggcggtattatgagaa

SEQ ID NO: 447648 - DNA, 102 bp, Homo sapiens
agtgtggcgaaaagggacattatgcttatgattgtcatcgttacagccggcgaagaagaagcaggacacgcaggagaaagaaggtattctgcctgagagagc

SEQ ID NO: 447649 - DNA, 100 bp, Homo sapiens
caaaaactattacaattgaatcagaaggacgtgggtcaacatttgccaaggtccgaaatctgtgctatatgataagcagacgagagaagctgaagctgtc

SEQ ID NO: 447650 - DNA, 100 bp, Homo sapiens
tggcattccaagtggtatgatgccaaggaaggtgcttctcagcttcacgggaaagggcctgctgtaccacggaaattgtgaccgcttcagaggcaaggct

SEQ ID NO: 447651 - DNA, 137 bp, Homo sapiens
gaggagcgagctgagcgcctccagcgagaagttgagggagaaaggcgggcccgggaacaggtgcccctgggcgctgggattgctctagcctgtaagtataatggaaaagatgaggtctgcctgactttatatggcga

SEQ ID NO: 447652 - DNA, 100 bp, Homo sapiens
cagagctttaattctacccagcaaaatgaaactgagcctaatcagcaaaccaaatctgtttcttccatgtctgagtttgaaagtttgctcgactgttccc

SEQ ID NO: 447653 - DNA, 90 bp, Homo sapiens
agagaaccatgatggtcaattgccatgcacacttctgggtcagtatcattgacagtgttcaacaggaaacagatgatcttactaagcaaa

SEQ ID NO: 447654 - DNA, 89 bp, Homo sapiens
gacccctacacagctggattggctgcagcagcgacactagggacctgatttcccatcgccttctgtccccctaaaggcttcagatcctg

SEQ ID NO: 447655 - DNA, 90 bp, Homo sapiens
ccgggacgcggcgccgcggcaccagggcgcgcagccgggccggcccgaccccaccggccatacggaggacaaagacactgattctaccaa

SEQ ID NO: 447656 - DNA, 50 bp, Homo sapiens
cgcgcggaggcggaggcttgggacaatgcagatcttcgtgaagactctga

SEQ ID NO: 447657 - DNA, 89 bp, Homo sapiens
cctggagtaaccctcactggagaatccagaggaatggctttctaaaggacatggggaatacagagaaatccctagtgaaagagactttt

SEQ ID NO: 447658 - DNA, 82 bp, Homo sapiens
tggagcctcagttggaagcagccgatccagcctgcggagcctgtggggcagcacatcaaagctgcccaatgatctgcttgat

SEQ ID NO: 447659 - DNA, 73 bp, Homo sapiens
gacgacccagcagccgccatggctctgctccgagtgcaccaattccagctggacatcactgtgaaaatgggac

SEQ ID NO: 447660 - DNA, 75 bp, Homo sapiens
tgggagaaagcggggcccgaggaggccaaggcgccagtgagaggcggtgccgacgccaccgccgagcccatgatc

SEQ ID NO: 447661 - DNA, 98 bp, Homo sapiens
cgctctcgattctacagtggttttaacagcaggccccggggtcgcgtctacagagcagaggaagaagtattccaactccaacgtcatcatgcacgaga

SEQ ID NO: 447662 - DNA, 80 bp, Homo sapiens
cagaagtccagagctgaggactgcctgtttgcagtactttaggaagaatcatcaaagtaactcaggaggtgattgactac

SEQ ID NO: 447663 - DNA, 95 bp, Homo sapiens
tggagaagataacactttagtacagtcgccaactgatgtctacaggttttgtatgaacaattcaagtttttcttgaatctctattttctagtaat

SEQ ID NO: 447664 - DNA, 82 bp, Homo sapiens
gctaacatgactgataccactataatttagtgctgcatagagcctggacctgggcactggggtgagctgagccggacaccag

SEQ ID NO: 447665 - DNA, 82 bp, Homo sapiens
gacttttctcagatgttggatatttgcttggaaaaacgtgtgggtacgaccttggttcatcatgcctagtggcgtataagaa

SEQ ID NO: 447666 - DNA, 83 bp, Homo sapiens
caaaaactctttgagtttcggagaggagtaaagaggatctcgaggacctggaagaagcagaggagccagacatggaggaagac

SEQ ID NO: 447667 - DNA, 100 bp, Homo sapiens
gcaatcagcgagactccgtgggcgtaggaccctccgagccagtgtgcccaagcacgtgtgggaagcgggcgtgcaccgagaacaatgagtgctgccaccc

SEQ ID NO: 447668 - DNA, 50 bp, Homo sapiens
cccgcaggatgctttcccacagcttccagctcactgtggagatgtttgat

SEQ ID NO: 447669 - DNA, 75 bp, Homo sapiens
agcaaagcaagttaccaatgtctcttctccatgatcgaatccggcctcatgcacggagtgtgaatgtgaagacac

SEQ ID NO: 447670 - DNA, 50 bp, Homo sapiens
gttccacatgatcattgtaataaggttgagactgagctaaagttaatctg

SEQ ID NO: 447671 - DNA, 100 bp, Homo sapiens
ctggcagattctggaaactgtacattgaagcagagaataactgaagtgaagtgatggactccgatttggagagtagtaagacgtgaaaggaatacacttg

SEQ ID NO: 447672 - DNA, 100 bp, Homo sapiens
ctgctcagagagcaaaatcgcgacgactaaatacccgtgtctgaagtcttcaggcgagctcaccacatgctacaggtatctcttgggtcacagattgatt

SEQ ID NO: 447673 - DNA, 90 bp, Homo sapiens
ggccgcgaaccgcagtatcatgctggccaagaagatcatcattaaggacggaggcacgattcattcctgaatcacctcgttggttatact

SEQ ID NO: 447674 - DNA, 82 bp, Homo sapiens
ctcgagttcctggaccgcgagagcatcaaactggtgtccatcgagggcctgaaggtgcaggagaacgaggacaaccttgctc

SEQ ID NO: 447675 - DNA, 100 bp, Homo sapiens
gagacttcccagaagatggcctgaaggctgtctgcagaagcacctgccggtggcactcagcacctccttgtgctagagccctccatcaccttcacgctgt

SEQ ID NO: 447676 - DNA, 88 bp, Homo sapiens
gaagctgttgcactcaggaatgaaaattcttagccaggtggggaaagatcaagtgcagactgagctgtggccaacgtttgcagaccag

SEQ ID NO: 447677 - DNA, 100 bp, Homo sapiens
cagtcctttcgcccacgcagggaacgatgcctctggaggtggtggtggagctgcagatccgggcggtgtgaaaatgaaaccaagttcaaaacagaagata

SEQ ID NO: 447678 - DNA, 100 bp, Homo sapiens
gacgctgtgtcaagctctgcaccggccatgagtatgcagccaagatcatcaacaccaagaagctgtcagccagaggtagagcagatcctggcagagttcc

SEQ ID NO: 447679 - DNA, 101 bp, Homo sapiens
agatcgccggggaggcagcgcgggatcccagcctcaggcgtgcgcggacggtgtgcgggtgctgaccttaaggaaagagccaaaatgagttccagtgaagt

SEQ ID NO: 447680 - DNA, 51 bp, Homo sapiens
agcacgtggaggactaccgccggatggtggatgcttccaaaagcatcgaag

SEQ ID NO: 447681 - DNA, 96 bp, Homo sapiens
gcatcacatcactcgtcagaacagcgttggtgaaatctacagtttgcaagcttgatgattccctgaatcagatccgtaagctccagaggtctctgg

SEQ ID NO: 447682 - DNA, 80 bp, Homo sapiens
ccctcagctccgagtccagggcgaggctaccaagcagtttctcgaagagattaacaagtggacagttcagtacaatgttt

SEQ ID NO: 447683 - DNA, 100 bp, Homo sapiens
ctaccgccatgggcctcactatctcctccctcttctcccgactatttggcaagaagcagatgcgcattttgatggttgttgaagtccgaagaggattcct

SEQ ID NO: 447684 - DNA, 78 bp, Homo sapiens
tgctgatgtctggaggctgattttcctgttctctgttctccactggaaaggtttgtctacagattttgagcgttcgaa

SEQ ID NO: 447685 - DNA, 100 bp, Homo sapiens
agctaacagaggccttgaagaattcccagggtctggagaagcccctgcaggtggcatctgccaccgtctctgcaggactaagctatacagcggcaccgcc

SEQ ID NO: 447686 - DNA, 80 bp, Homo sapiens
cagccatggccctccacagcccgcagggggatatgagactttctactcggaatatcctgagtgttgcgtggatgtaaaac

SEQ ID NO: 447687 - DNA, 100 bp, Homo sapiens
cgaagggtgcaaagtgggacgcggcacctacggtcacgtctacaaggcgaggcggaaagatggctgtgatgcagatccatccgccctagcaaaatatgtt

SEQ ID NO: 447688 - DNA, 82 bp, Homo sapiens
atacagcggcgtgggcggcatgcaccacgcgctgagagcttcctgcctgacacagctcacttcaagaagtgcacaatgtcag

SEQ ID NO: 447689 - DNA, 75 bp, Homo sapiens
agagcccaagcctaaaaaggcccctgcaaaggccggatcacctcaacagtcacgtcagacaagtgcactcaacag

SEQ ID NO: 447690 - DNA, 78 bp, Homo sapiens
tcgtgctgtgctaggggatgatccgcaactgatgaaggcccatcatcctggatccggccgaccccaccctcaacgtgg

SEQ ID NO: 447691 - DNA, 100 bp, Homo sapiens
ggctgatatgcaatgtcacttacaacattaatcagatactgcatttaaggtcctcttcctgatggatgggaacaagccatgactcaggatggagaaattt

SEQ ID NO: 447692 - DNA, 76 bp, Homo sapiens
ttaaatcttagctgagaagagagacaatcagtgctgaagctgctgaaagatggcagaagaagtggtggtagtagcc

SEQ ID NO: 447693 - DNA, 96 bp, Homo sapiens
ccaagtctaatagacctaaagccacagtcttcaagagcccacggacaccacctcaacggtgtcatggagaaactccagctgggcccagagattctg

SEQ ID NO: 447694 - DNA, 50 bp, Homo sapiens
ccctggccgacaagcacgcaacgccatcatgaccgggtcctataacaact

SEQ ID NO: 447695 - DNA, 83 bp, Homo sapiens
ccgccaagcgcggccgccgcccccgcctcaggtatcgagaaccttccctgcgaacttcagaggaacttccagctgatgcgaga

SEQ ID NO: 447696 - DNA, 90 bp, Homo sapiens
aacgcgagtccggagaggagttccgcatggagaagttgaaccagctgtgggagaaggcccagcgatcggaggcctgcaggactttggcac

SEQ ID NO: 447697 - DNA, 76 bp, Homo sapiens
tcaagcttaggaccacccaccatgcctatccagggtggctttgtccactatggtgaagtgaccaatgactttgtca

SEQ ID NO: 447698 - DNA, 75 bp, Homo sapiens
atcaagagcatgcaaaacgtcgcattgcagagcgggaggccaggaggtgggatctcatcgtgtccgtatgtcaag

SEQ ID NO: 447699 - DNA, 98 bp, Homo sapiens
aggtttctggaaagaaagaagatgttaaagaagccaaggaaatgatcatgtctgtcttagacacaaaaggtcgagtgataaaggggtcctataagttt

SEQ ID NO: 447700 - DNA, 75 bp, Homo sapiens
atggagtctcagacaggagaggcaaggaagattttcagtcaatgacttatggatttaaaatggctaacagtgtga

SEQ ID NO: 447701 - DNA, 101 bp, Homo sapiens
gtcttctgtgaggaatctggattgtcacctttgctgcaaaaaattacgggttcatgaaccatcgagctccagccaatggccgctacaagccaacttgctat

SEQ ID NO: 447702 - DNA, 75 bp, Homo sapiens
ataggaacgatggtagaggaccaccggtcaaattcttaccaggtgggcaaacgcagaggcgggaacaaactagcc

SEQ ID NO: 447703 - DNA, 100 bp, Homo sapiens
tggcctagacctgaactcttcagataatcagagtggaggaagtacagccagcagaagttgaagaccatgtggcgtttctaataacagttccaactgccct

SEQ ID NO: 447704 - DNA, 83 bp, Homo sapiens
ctgctgtgggcgctgctggcgctctggctgtgctgcgcgacccccgcgcatgccctgggcgctgcctatggcacagccaagag

SEQ ID NO: 447705 - DNA, 104 bp, Homo sapiens
caacagatgcgactgcagcaactgcagatggagaaggagaggctgcggctgaaacagcaagaactgcttcggcagttctggaggctgggaagtccaagatcaag

SEQ ID NO: 447706 - DNA, 82 bp, Homo sapiens
gatcgctgatgattacgataaaaagaaactagtgaaggcgtttaagaaaggaatctcggaggaaaacaccggtgatcgtgac

SEQ ID NO: 447707 - DNA, 100 bp, Homo sapiens
ggggactgcacgtagcccggcgctcggcatggctctcctggtgctcggagtccaaaactacttacctggaagaccttccaccaccccctgagtatgaatt

SEQ ID NO: 447708 - DNA, 100 bp, Homo sapiens
ggaaccgcgacttcctcctcgctctggagagaggaagttttattcagtgtatgggtctggtcaaagagcttttgatctattcaatccaaacttcaagtct

SEQ ID NO: 447709 - DNA, 80 bp, Homo sapiens
acccagcagtgccaacacggaggataaaatggaggtggacctgagtgaacacaccattcgcttttcacccaagatgattt

SEQ ID NO: 447710 - DNA, 75 bp, Homo sapiens
caccacatgggatatgtacacaggaatgacgggacagagtttggcggctccatttaccagaaagtgaacaagaag

SEQ ID NO: 447711 - DNA, 74 bp, Homo sapiens
ggctaagctggtggaagctatcaggaccaattacaatgacagatacgatgagcgccctcacaaagccaatgctg

SEQ ID NO: 447712 - DNA, 75 bp, Homo sapiens
ctggaccacctggagaatgtcatcaagcagcacattcaaggtgctggagaatctggtaaaagcaccattgtgaag

SEQ ID NO: 447713 - DNA, 119 bp, Homo sapiens
acctcttccagtggctgtgctcagattccctgaagctctgctgccccgcaggcaccttcgggccctcctgccttcgcatccgtgtcattctggaccttactcccaactaccggggtgag

SEQ ID NO: 447714 - DNA, 83 bp, Homo sapiens
gctatgaatatgggtcgaccattccaaaaaaatcgatgctgcacttaaaaggatgcttgttttgatgtcctgctcattgtttt

SEQ ID NO: 447715 - DNA, 50 bp, Homo sapiens
cagatcggaacggaggcctgtgggacactccggacgcaggcccggccagg

SEQ ID NO: 447716 - DNA, 50 bp, Homo sapiens
ggatgaccaggaatgggaaagccccaggaagaagccatggatttaataaa

SEQ ID NO: 447717 - DNA, 98 bp, Homo sapiens
cgccaagcacgaggtgaagccgctgggggccatgtggaagcagcacaaggtgattttcaaagccaagtcaaaatattctccagaattactcaaatacc

SEQ ID NO: 447718 - DNA, 75 bp, Homo sapiens
ccccagtgcataccctacaccctgcagaatcactattaccgcaacaatagcttttgttaggagtgataaacccaa

SEQ ID NO: 447719 - DNA, 100 bp, Homo sapiens
accccacagaggactttaggagaaagttgctgaaggcaggaggggaaactaaatatattttgccaactttggaaaaagaattattcttggcagagcacag

SEQ ID NO: 447720 - DNA, 120 bp, Homo sapiens
atgacagccaccaaggagatttggagcccattttagaggcatctgttctatcttcccatcataaaaaaagactccttcagggtgagcaaaggcctggaaacctgtatgcagttaaagaaa

SEQ ID NO: 447721 - DNA, 83 bp, Homo sapiens
cgggcggcagcatgtcggtggcggggctgaagaagcagttctacaaggcgagccaggaatcaaccctgcctaccggactgagg

SEQ ID NO: 447722 - DNA, 87 bp, Homo sapiens
ctggaggagccttctcaagaacagagtgccggtggtggtgtgcacattgagccccggtatagacagttcccccagctgaccagatcc

SEQ ID NO: 447723 - DNA, 83 bp, Homo sapiens
cttctatatctacaagggggtccgcaagatcttatgccttcattcatccggcatggtccaacaattccaagacgaactgatat

SEQ ID NO: 447724 - DNA, 80 bp, Homo sapiens
cgatagttcaaacttctatatcacagaaaaggtgagacatggaatccattaaaattgcattatcagttaagaaatgtacg

SEQ ID NO: 447725 - DNA, 98 bp, Homo sapiens
tccctctctggccactatggaattctaatttgaaccatgtttggattgaagccgcctctgtattacttaccagatcatgatgctgccgccaccgccgc

SEQ ID NO: 447726 - DNA, 83 bp, Homo sapiens
cgcgccggctatggccgtgccctggggctgagccctcagactcggtgaaatacctggagtgctcagctctcacccagagaggc

SEQ ID NO: 447727 - DNA, 82 bp, Homo sapiens
ctttgcaatcatgagattcaaaagccacactgtggaattgaactgtggctgcaccatctgtcttcatcttcccgccatctga

SEQ ID NO: 447728 - DNA, 75 bp, Homo sapiens
gaaagataaagcccttaaggacaagctgttcgggggtcttgtctggattttggttgcctcctccaatgttcctct

SEQ ID NO: 447729 - DNA, 96 bp, Homo sapiens
gattgccagaagaagaagaaatcccagcaaataggaaaattaagtttagtagtgctcctattaaggtcacgactgctgaatatgagacgatctgca

SEQ ID NO: 447730 - DNA, 80 bp, Homo sapiens
ccgagccgggcaggatggatcaccaccagccggggactgggcgctaccaggtggagcttactccacgggaacagcctcta

SEQ ID NO: 447731 - DNA, 75 bp, Homo sapiens
tgaggcctccccagccatgtggaactagacgaccttaagtggacagagattctagaacaggagaaataaaacagt

SEQ ID NO: 447732 - DNA, 49 bp, Homo sapiens
aggagaagagaatggatcttggaacaggaattggattcaagtacgtggc

SEQ ID NO: 447733 - DNA, 90 bp, Homo sapiens
aggttcgaagctgagtatgtgacaggtagacgttacatccaagaggaaataatccaggcaaggaagcacaagctgatcaagatgtgtagt

SEQ ID NO: 447734 - DNA, 100 bp, Homo sapiens
agaacatccccgccgggctgcagtccatgaaccaggcgttgcagaggcgcttcgccaagggggtgcagtacaacatgccacggtctctccatcgatggtt

SEQ ID NO: 447735 - DNA, 100 bp, Homo sapiens
ccaaccgacgccacttcgtgttgggaagtgggagcgggagggccgggcaattcccgaccgaaccaaacgactgattttgcacgatttagcggaacaaatg

SEQ ID NO: 447736 - DNA, 101 bp, Homo sapiens
gcctggagaaataccctattaccaaagaggcacttgaggccaggagtggtggctcacacctgtaatcccagctctgggaggccaaggccagtggattgctt

SEQ ID NO: 447737 - DNA, 50 bp, Homo sapiens
ggcatgctgcggcatgagataggcagccgctgcagtcgccacacctttgc

SEQ ID NO: 447738 - DNA, 132 bp, Homo sapiens
tgaaagctttctgcccagagctcctggaccaatgcatcttcccaccaccttaaaccactgagttgagaattatggctgcaggaaaatttgcaagccttcccagaaacatgccggtgaatcaccagttccccc

SEQ ID NO: 447739 - DNA, 75 bp, Homo sapiens
gcagctttggataatgacgacagcaacccgaagacagggaaatttagagcaacaagatatggatttggatataga

SEQ ID NO: 447740 - DNA, 88 bp, Homo sapiens
cggcttcgcggcgcgtcctccgcagaggcccccgacggagacaaggacgggtggttctcttcccaaagtggaagccaaattcatcaat

SEQ ID NO: 447741 - DNA, 115 bp, Homo sapiens
gaacaagctccgggaggggccccaaaggaaggcttcggtgactcaggacattacctgttgattcttgggcaaggcccagaatttggtggacatacttaaagaagaaaggaatctt

SEQ ID NO: 447742 - DNA, 82 bp, Homo sapiens
ccagcgcaccggtcccccagcggcagccgagcccgcccgcgcgccgagctgccatcagtcatgctcttaaacggggactgcc

SEQ ID NO: 447743 - DNA, 83 bp, Homo sapiens
ccagcagatggcggatgccctgcagtacctgcagaaggtctctggagacatcttcagcaggttccctctcccagcctgtgctg

SEQ ID NO: 447744 - DNA, 71 bp, Homo sapiens
aagaaactagcaaactttttaatgaggaaagctccaaacgagaatggaagccgctggaggaccgtagctgc

SEQ ID NO: 447745 - DNA, 98 bp, Homo sapiens
tcaggatggggagatgacatcacttgggtacaaacttatgaagaaggtctcttttatgctcaaaaaagctttaaagaaagtgtttgctgaaaataaag

SEQ ID NO: 447746 - DNA, 75 bp, Homo sapiens
ttccacgtgcggtgctcgtcgggagtgatcacctaccctacagggagtgagttttccgggagtccctacagccac

SEQ ID NO: 447747 - DNA, 75 bp, Homo sapiens
cggcatctagtctttccgcttcttgaatttctctctgtaaaggagatctgaaatagctcaactcagtcaagaaaa

SEQ ID NO: 447748 - DNA, 82 bp, Homo sapiens
gggtctcgggggccgctctgggatcccggccaccagcaattgtccgcaaattgtggctactaatttgccccctgaagatcaa

SEQ ID NO: 447749 - DNA, 98 bp, Homo sapiens
tggggataagtgtcacggtactgtttgacaagatctatgttagcgttcctggatccaagaaggtcatccttgacctgcccctggtaattggcagcaga

SEQ ID NO: 447750 - DNA, 90 bp, Homo sapiens
tcctcgcttgcattcagctcctctgtgtttgccgcctgggtgatgcagaagatggggaagaatatgatgacccttttgctgggcctccag

SEQ ID NO: 447751 - DNA, 100 bp, Homo sapiens
cacagagaccgtgaagattccaagttcaggagaactcgaccgaactctcttgatagagcccaagcagccaagaataaaggcaataaatattttaaagcag

SEQ ID NO: 447752 - DNA, 73 bp, Homo sapiens
tcaaagagctggttacccagcagttgccccatctgctcaaggggaaagcctcctgaagctgatggtgtggata

SEQ ID NO: 447753 - DNA, 88 bp, Homo sapiens
agcatttgccaaggagacatccctcttaggctttatcctgtggataaacgcagagtgaacgagtttggggagtcctacgaggagaagg

SEQ ID NO: 447754 - DNA, 90 bp, Homo sapiens
gtttgcgcggtcggtgagacccgcgcgggtgagacgctggccgagcccctgccactgatggacctgtgccggagatccatccgctcggcc

SEQ ID NO: 447755 - DNA, 101 bp, Homo sapiens
tagcattcgagagaacaaaattaaacaactacctgctgaaattggatgaccatgaaagctgtggttctaattctaccaaccgtagtactgctgagagcaca

SEQ ID NO: 447756 - DNA, 96 bp, Homo sapiens
ccttcacatgctttgtgttttttgacatgttcaatgcactaagttccagatcccaggaaccttaatctcatctttaaaataaggagaattactgag

SEQ ID NO: 447757 - DNA, 75 bp, Homo sapiens
cagaggatggtcagtgtgccccaggtgaaggccagtgctctcaaggaatgtgttccagaagatctagaactgaag

SEQ ID NO: 447758 - DNA, 100 bp, Homo sapiens
aaaattactgcagccaggtgataaaattattcagggtaattaaaaccatggaggcgatcagcgaggttctccaggaccttaggtttgatgcggaatctgc

SEQ ID NO: 447759 - DNA, 88 bp, Homo sapiens
tgcgggtcaacgtcttccacaaaacctcagtcatcgtcacgagtcctgagtcggttaaggcaaagtgtttcatggatttcaaagctgg

SEQ ID NO: 447760 - DNA, 122 bp, Homo sapiens
tcaggaacatctctttcaatgacaaaaagtttgtcattaaacccatcgacaagaaggcacctgtcaaaatgcagatcttcgtgaaaacccttaccggcaagaccatcacccttgaggtggag

SEQ ID NO: 447761 - DNA, 75 bp, Homo sapiens
agcgcgggagccctggaggggaagaccatggtgaatccgggcagcagctcgcagccgcccccggtgacggccggc

SEQ ID NO: 447762 - DNA, 75 bp, Homo sapiens
acagtggtatcgacttatcaaaggttttggggccttgtcacagatgccagatgatttgcatcgaccagcaaactg

SEQ ID NO: 447763 - DNA, 75 bp, Homo sapiens
gggaggccattggctctatggaaaacactggacgcgctccaggagatatataatcagaagggcatgtttccaggg

SEQ ID NO: 447764 - DNA, 83 bp, Homo sapiens
gccgagcacgcgggtctgtcatcatgtcgcgttacgggcggtacggaggaggaaatctggcattttttaaagtttgcgcccca

SEQ ID NO: 447765 - DNA, 87 bp, Homo sapiens
tggatctgacagatgccagcgtagctgaatccagtaccaaaaacgtcaacaacagttttacggtgaaagaacttgtcctggacaaca

SEQ ID NO: 447766 - DNA, 100 bp, Homo sapiens
ctccatgggtccggcagagggcagtgaccggcaccttctgtgcgtcctggactcctctgagaaacaggaattgaatgatctggcacgggaccctccagca

SEQ ID NO: 447767 - DNA, 98 bp, Homo sapiens
ctgcggtctgtgagtcctctcccgccaatgggtggaccgcgctggcggccgcgagctcgcggagctggttgttggaagaggagcctttggagttgttt

SEQ ID NO: 447768 - DNA, 74 bp, Homo sapiens
tgtactgtgacctgctgctggctcggtttggccttatccagtctatgaaggtttttaatgaccacaacaagcaa

SEQ ID NO: 447769 - DNA, 80 bp, Homo sapiens
cagctttgcagcccccgaacgcggcctcgcacagatgtctttggtggacttgggaaagaggttgctagaagcagcaagaa

SEQ ID NO: 447770 - DNA, 100 bp, Homo sapiens
ttcagtggtggagaatggactggacccccaggctgccatcccgagacggggttttaccatgttggccaggctggtctcaaattcaaattcctgacctcgt

SEQ ID NO: 447771 - DNA, 75 bp, Homo sapiens
ccgagaagtagctcagatctctggatggatagaatgacagaagatgctcttcgcttgaatctgttgaagcggagc

SEQ ID NO: 447772 - DNA, 100 bp, Homo sapiens
cctccactcctgctgaggaagatgaagacgcatggggtcctgtcccagcaattcgtggagctcatcaacaagtgcaattcaatgcagtccgaataccggg

SEQ ID NO: 447773 - DNA, 83 bp, Homo sapiens
ccggaaccagacgatgagacagagttgcgaccgcgcggcagaattttgattctgacattagcagtgtgggaatagatggctgc

SEQ ID NO: 447774 - DNA, 87 bp, Homo sapiens
cttttcagctatcttcccatccaatacttggtgactggtctattcaagttcaagtgaatggttctgatgactgtcttgtgaaaatat

SEQ ID NO: 447775 - DNA, 145 bp, Homo sapiens
gcaagaggaggacatggagatgaagaagaagattaacctggagttaaggaacagatccccggaggagctcaggcgctcaggactgccaggacccagaggattcacacgccagccccggctgaagcccagctcctcatcaaccggt

SEQ ID NO: 447776 - DNA, 101 bp, Homo sapiens
tgtcatgaatcaaacatgttgtcctcagtacacaataagatctttaatctcatgaagtacgacagctacagccgcttcttaaagtctgacttgtttttaaa

SEQ ID NO: 447777 - DNA, 101 bp, Homo sapiens
gaagaggactctgtggtctacgagtgggccctgaagaagtggtctccgtgctccaagccctgtggcggagccctgccatcaccctgcgactcggacccctg

SEQ ID NO: 447778 - DNA, 82 bp, Homo sapiens
gttcaacgaggccattgacttcataggaagaggatcacctagcccgggtagaagaggcaatcacccgtatgcttgtgtgtgc

SEQ ID NO: 447779 - DNA, 100 bp, Homo sapiens
caagcagaaagtggtagcgctgctgcggaggttcaaagtgtccgacgagacggccaatgggaacgtggaggccaaagtggtgtgcttctaccggaggcgg

SEQ ID NO: 447780 - DNA, 90 bp, Homo sapiens
actacaagggctacgagaagaagccctactgcaacgcgctaaaacactgtcttatgaaccattatcttcagcaactgtttccactgggag

SEQ ID NO: 447781 - DNA, 75 bp, Homo sapiens
ctgccggaaggggtcccgaagccccctgcaggaactctacaacccaatccaggttttgaacgaagaatgtgatca

SEQ ID NO: 447782 - DNA, 100 bp, Homo sapiens
tgacgctactatgggccgagtggcagggacgacgcccagacatgggtccctcggcttcctgcctcggaagcgcagcagcaggcatcgtgggaaggtgaag

SEQ ID NO: 447783 - DNA, 101 bp, Homo sapiens
accatttattcagcactcagaatgctccaggcagtgtaatctcattccatcttcattcatgactccagacaggctccaaccaggaatggagacgccattgg

SEQ ID NO: 447784 - DNA, 87 bp, Homo sapiens
aggagagacgtcgctgaggggcttgcctgaagcgaggggtcatgccctgaccacagctgcccttcaggaggctggcacggagccacc

SEQ ID NO: 447785 - DNA, 50 bp, Homo sapiens
acgctgagcagctgctccaggaatataaaactgtcgctgaaaagcaggag

SEQ ID NO: 447786 - DNA, 97 bp, Homo sapiens
gaatgggtgcatgttagtgctcaagagcctcattatctaccacccgagatgccccaagtgacagacatcacacctccagtgcaatccctgttcctaa

SEQ ID NO: 447787 - DNA, 110 bp, Homo sapiens
cggggattggaagtaaaagggctaagagacagtgttcttggccttggcaaactttggagattggggtgaccaagaatatggcccaggtgaccaaagccctggacaaggcc

SEQ ID NO: 447788 - DNA, 100 bp, Homo sapiens
ctgattttgtcatcttcccacctcgatggggggttgctgataagaccttcaggcctccttattaccataacagggtctcactctgtcgcccaggctggag

SEQ ID NO: 447789 - DNA, 109 bp, Homo sapiens
gacaggaattgagagtcacagaggaaggacagtggagtctggcatcttattgctgttaaacgtttaatgaaagaagcggcagaattgaaagatccaacagatcattacc

SEQ ID NO: 447790 - DNA, 80 bp, Homo sapiens
ccaagtacctgcagatcctgacctctctgatgagatggatcgatcaggcctttgtgacactaaccacaaacgatgcctac

SEQ ID NO: 447791 - DNA, 50 bp, Homo sapiens
ccaggagtcatcggacgccagaatctggctgaccccgcactacatctacc

SEQ ID NO: 447792 - DNA, 76 bp, Homo sapiens
gtgtaatgcagaagacttgttccatgaaagtacattggggcacccaggcccagacatgtccgtccttgtaagttaa

SEQ ID NO: 447793 - DNA, 98 bp, Homo sapiens
aggactgactggggttctgagactccctgtcccggaccgcaggcagttcaattaacctccagaagatggctgaacctgcaggaataccagagcaagaa

SEQ ID NO: 447794 - DNA, 75 bp, Homo sapiens
cagaaacgtaagaagaagaaaatgccagagatcttggaatatttagatgccatcaagaaattttaccagaccagt

SEQ ID NO: 447795 - DNA, 98 bp, Homo sapiens
gtttgatgaaggtggaggcagcgcggctctcagggtcctcactgagcagcgagtcgtcccccgtgtcctctccggccaccaaccacagctcccccgcc

SEQ ID NO: 447796 - DNA, 100 bp, Homo sapiens
atcagttctaaaaaaccatgccccacaataactgaagtgaagtgatggactccgatttggagagtagtaagacgtgaaaggaatacacttgtgtttaagc

SEQ ID NO: 447797 - DNA, 75 bp, Homo sapiens
gaacggagtgaccaagagcaggtttgagttcccagtgacctgacagcagaggagcgtcaagaactggagaacatc

SEQ ID NO: 447798 - DNA, 82 bp, Homo sapiens
gctggagctgggtcagtccgccgctcaccccgcggccgcaccttcccgccttctcagattgctacgctttacatatggtcct

SEQ ID NO: 447799 - DNA, 83 bp, Homo sapiens
ccgtggaccacaggccctcgttgcccagatgcattctgaaggcaaatcctgtttagacccaggcaaaggttcctggtgaccca

SEQ ID NO: 447800 - DNA, 82 bp, Homo sapiens
ccgcatgcttagagtgcagagataccaaatactgctgaaaggatgcaaaggatgataggatgaaagaatgtcacaaaaagca

SEQ ID NO: 447801 - DNA, 100 bp, Homo sapiens
aagatttgttgcgccaacaagcagataaggaaagtgaagtatctccgtcaagaagaagaaaaatgtcccccttggtgatcaacaagtatggagatctcta

SEQ ID NO: 447802 - DNA, 125 bp, Homo sapiens
gccgctcaggaccgggcctcaaaatggccacacgcgtacccccgtagcggaaaaacggagcctgcacacatgatcctgaccgtcggaaacaaggcagatggagtcctggtgggaacagatggaag

SEQ ID NO: 447803 - DNA, 75 bp, Homo sapiens
atggtcactgctgactccaagtactgctacggcccccaaggcagggtgagaactctgtctcagtcgacgggaagt

SEQ ID NO: 447804 - DNA, 110 bp, Homo sapiens
gctgtgcagccgcgaggaggcgcgggaggtgttcgagaacgaccccgagacggtgtcgtgaaaactacccctaaaagccaaaatgggaaaggaaaagactcatatcaaca

SEQ ID NO: 447805 - DNA, 100 bp, Homo sapiens
ccaaatggagctcagaaagctgtatggacctctgtgtggttatctggaagtattttggatgtgtatagcggtgaacaaggaatttcaccaattaacatgg

SEQ ID NO: 447806 - DNA, 100 bp, Homo sapiens
aagacgatctgcacttcgcattttggcattgacatttaattttagggtcctttatatagaagggagagtaggtccatctcccatttgcagtggttggcag

SEQ ID NO: 447807 - DNA, 50 bp, Homo sapiens
caaagagctggtggcctcaggtgaaaatgagtgtgtccgcttgaaaccaa

SEQ ID NO: 447808 - DNA, 75 bp, Homo sapiens
taacaaattgaaagatatcatcaaacgacatcagatgccagaggaacaagcattctgtgttttggtgaaaatcat

SEQ ID NO: 447809 - DNA, 100 bp, Homo sapiens
gagagggagagcaagaccatcatgctgcgcggccttcccatcaccatcacagagagcgattatgtgggtgccccggtggcttatgtccagcagatatttg

SEQ ID NO: 447810 - DNA, 96 bp, Homo sapiens
catccgaggtgcctttctccaaaaggtgtatttcttacagtgtcgtagggattttggtttgcttcatctagagcagactgaaaaggaatgtctcaa

SEQ ID NO: 447811 - DNA, 100 bp, Homo sapiens
atatgtccttcatatttgattggatttacagtggtttcagcagtgtgctacagtttttagtaatctcaaaagtcctgctagtgatcaacaactaatggaa

SEQ ID NO: 447812 - DNA, 83 bp, Homo sapiens
cgcggattcgccgaggcaccgaggcactcagaggagattttgcaagaacgaggctcaaggatgtgagggacacagtattgaca

SEQ ID NO: 447813 - DNA, 90 bp, Homo sapiens
gtgtgcagaagttctcgaatcattctttgtacagaaattgaaaggcttcaaagctagcagaatgtgacagtgatgataacatgggtgcca

SEQ ID NO: 447814 - DNA, 83 bp, Homo sapiens
ccgccgcgccgcccggcagcctcggcagtcttccgtgtgtgctaagatcgtgcagctcctggggcagaatgaggtggactatc

SEQ ID NO: 447815 - DNA, 100 bp, Homo sapiens
cccagagcattgtgagctccgtattctctgaagcctggaaacgaggcactcagttggaagagtccagcaaggactttgaagaatatcctgaacatagaac

SEQ ID NO: 447816 - DNA, 90 bp, Homo sapiens
aagccatgaggccaaaggcagttgtattgagtgcctggaagagctgggatgtctggttgagtcctatggcatgaatgtttgccaaccaac

SEQ ID NO: 447817 - DNA, 82 bp, Homo sapiens
cgagactgtaggcactgccatggcccctgtgctcagtaaggactcggcggacatcgagcgacatcaccccgcccggagagcc

SEQ ID NO: 447818 - DNA, 50 bp, Homo sapiens
tggcaccgcgcagggcaaccggatgttgtgactgtgacagactcactggg

SEQ ID NO: 447819 - DNA, 48 bp, Homo sapiens
acttccttccagcagctacacagatcttagacgaattttacaatgtga

SEQ ID NO: 447820 - DNA, 128 bp, Homo sapiens
cccacaggtgcatttcacagcactctgggcgaaaattggatgtgaaaatgaagccagaccgaggtcttcaataaactcatcaggagatataagtatttggagaaggcatttgaagatgaaatgaaaaa

SEQ ID NO: 447821 - DNA, 75 bp, Homo sapiens
tccggatcattctagagctttaaggatatcttctaaccataccgatgattctccgtatagctggtcttttccacc

SEQ ID NO: 447822 - DNA, 75 bp, Homo sapiens
cttgccacgcatcagtctgaaggtctgttgccacagttattgggagttgccccagagaaggccataaaacttaca

SEQ ID NO: 447823 - DNA, 100 bp, Homo sapiens
ctggggaactaatcttgtggcaggaagctaaggctgtggccacagcacagggctctgccagcagacagccttggcacacaggcacaagggctggagccca

SEQ ID NO: 447824 - DNA, 74 bp, Homo sapiens
gcagcgcagaggagccgtggaaaaaccaactatctaactccactcagtgagctcacccatggatgaggtgctag

SEQ ID NO: 447825 - DNA, 98 bp, Homo sapiens
atacgctttgttggtggactactctcagcctactatctgtctggagaagagagatggggcctcactctggtcacccaagctggagtgcagtggcacca

SEQ ID NO: 447826 - DNA, 98 bp, Homo sapiens
ctgaaccttcacctagccccaggattacaaggaaaagcaccaggcaaaccaccatcacatctcattttgcaaagggtggccctgaagctgcactatgt

SEQ ID NO: 447827 - DNA, 98 bp, Homo sapiens
caacgatatatgtcagatctaaaggggactccctcagctatcatcaaggacgccctttctccacagaggatagagacaatgatgttgcagtgactaac

SEQ ID NO: 447828 - DNA, 74 bp, Homo sapiens
ctagcaccccgagaaccgtcagtttgagccagatggtggccatcatcgcagggaactttgagcttgcagaggtt

SEQ ID NO: 447829 - DNA, 89 bp, Homo sapiens
aggcggtggtgggcgccgtgaagagccttcaggcgctgggcgagctcatgatggagcagtccaagaagtcctccctcatggtggcccgc

SEQ ID NO: 447830 - DNA, 75 bp, Homo sapiens
agaacgtgcgggaagagaagatcatcgagcatttcaaacggattcaagttcgaaatatggcaactttgaaagata

SEQ ID NO: 447831 - DNA, 75 bp, Homo sapiens
gtctataagctttgcaacagaattacagagtatgatggatcagtgtccttcagtgatgtggctgtgggcttcacc

SEQ ID NO: 447832 - DNA, 83 bp, Homo sapiens
caaatatgtggacctgtacaagaaactgtatgagctgaataaccttcatgcacttatggcagtggtttctggcctacagagtg

SEQ ID NO: 447833 - DNA, 78 bp, Homo sapiens
gccccgctcccgggttcctctgaggattggaattctagtcaggatggctaaaggtgaccccaagaaaccaaagggcaa

SEQ ID NO: 447834 - DNA, 73 bp, Homo sapiens
ggtaacatggcggatgcggaagatggcagaagattttcaagtcccggctggtggagttgttagtgtcctatgg

SEQ ID NO: 447835 - DNA, 104 bp, Homo sapiens
caaaggatcattggtttatgcaggaattaaatcaattgtaaagtcatcgttggtcttcccaagggattgttgaagaaacttctgaagagggaaactctgtacct

SEQ ID NO: 447836 - DNA, 74 bp, Homo sapiens
ggggacattattgcgcgtggaacggctgcttttggaaggggggtcctgtggagatccttcccttcctctacctc

SEQ ID NO: 447837 - DNA, 83 bp, Homo sapiens
gtttcattggcaagccacaattatgggacctgcagaaaccactaatactagcctcttgcaggtgcaactggaatgcagtttac

SEQ ID NO: 447838 - DNA, 78 bp, Homo sapiens
agctacaaaatcaatggccggacgaaagtgctgtacttctttgcagtatacaaggactagcagttaatattgacccaa

SEQ ID NO: 447839 - DNA, 74 bp, Homo sapiens
tatgccagctccaaggacgccatcaagaagaagctgacaggggctgcttgctctcggtgactacatgaatgtcc

SEQ ID NO: 447840 - DNA, 98 bp, Homo sapiens
aagctgagcaaaccaaaaacagtggcactgagcactgtgattccagcagtctcagcagcactgatgctggattgtttaccaatgatgagggaagacaa

SEQ ID NO: 447841 - DNA, 90 bp, Homo sapiens
caaacagcccgcccgaccccgtcccgaccctggccgccccgagcggagcctggaggtcttgaggaccggcccagctcaggctcctggggc

SEQ ID NO: 447842 - DNA, 128 bp, Homo sapiens
ggagaatcttcaagaacttcctcgcactgtgacatgtctgatcccttgctcccatccctgcagcatgaacaagaccattcctcaagaattttgtatccaaggcccaaaagtttgttacccaagatgat

SEQ ID NO: 447843 - DNA, 78 bp, Homo sapiens
tcccttcgccttcgccctttccacctcgcggcagttcgttgagaagctgatgtctcctcgacttccaactggaacctt

SEQ ID NO: 447844 - DNA, 90 bp, Homo sapiens
cataaaaacaagtgtgtgcatctggctgttagaagaattcatgctcatccggatgctattaactgagtacttggatatgaaaaatactcg

SEQ ID NO: 447845 - DNA, 75 bp, Homo sapiens
gaacagctgtggaaagaagttgcaaaacactgggaaataagatatgtggaacggagttatgtatcaaaacccact

SEQ ID NO: 447846 - DNA, 99 bp, Homo sapiens
ctctgagcctggtgggatccccggagcgtcacatcactttccgatcacttcaaagtggaatctttaaccagtttcagtgtagtagtgaaaaagtgcttc

SEQ ID NO: 447847 - DNA, 83 bp, Homo sapiens
ataaagccaagagagaccttggagtaattcgtcgacagaaataaactatcaatcttgcccagactggagaaaggactgcagca

SEQ ID NO: 447848 - DNA, 90 bp, Homo sapiens
gagggctcctccggcgccgccgagctgcgcccgctgccttcacaccccggacatccgcgccacacatggcctgatatgaaggagtcacgc

SEQ ID NO: 447849 - DNA, 87 bp, Homo sapiens
cggagccggcgctgagaggggctgcggccggagcgggcggctgagacaaaggcgacggttttaaaatcaaagatgggaaaatcggag

SEQ ID NO: 447850 - DNA, 83 bp, Homo sapiens
cgttaccagaacctgtctccagtgggctctggcgcctatggctctgtgtgcttcaggatgagttagagaaaggtgaacgggac

SEQ ID NO: 447851 - DNA, 100 bp, Homo sapiens
ggtcctgctgcgagccggcggcccggagtggggcggcggggtttggacagaggagccaaaggccaaatttccactttcagcagttttatttcagctgtta

SEQ ID NO: 447852 - DNA, 98 bp, Homo sapiens
tcacttccctcggtctgggcttctctgaggcggcgagagatggtcaggtctggagctcgaccgggccagtttgagattacgggaaatgatgagacgtt

SEQ ID NO: 447853 - DNA, 82 bp, Homo sapiens
attcgcagtggtcgcttcttctccttgctttgacagtgagaaggctggggaccgggaggtgcagaggacaatgctggagctt

SEQ ID NO: 447854 - DNA, 98 bp, Homo sapiens
agaagctgagcgttgtcgccgccgctatgggggacctccacaaaaagtactcgtacatccgcaagaccaggcctgacggcaactgtttctatcgggct

SEQ ID NO: 447855 - DNA, 95 bp, Homo sapiens
gaaagtggtgaatcccctgtttgagaaaaggcctaagaattttggcattggtctggctctgggagaggagtggacagcagctggttgagatacat

SEQ ID NO: 447856 - DNA, 83 bp, Homo sapiens
gcagaagtggggctgaccctgtgaccagtgtggggaaaagctcggcaagatgtcggtgaaggagggcgcacagcgcaagtggg

SEQ ID NO: 447857 - DNA, 75 bp, Homo sapiens
atgagctgagaaacaaagccacccagccaatgaaggacaatctctatgggaagcagaaggcaaggaccccggtca

SEQ ID NO: 447858 - DNA, 100 bp, Homo sapiens
taagactctgggacactcctgaagtcgggaaatgattcgaagcttcttgagcctgggactgtatcttgatcattgcagaatccttgccacctaatgcatt

SEQ ID NO: 447859 - DNA, 95 bp, Homo sapiens
ggcagagcaaggggcttacgcagaaggacctggccacggtcttaggagggaatgattccccagtaatattccctgccctgacccaaagtgctggt

SEQ ID NO: 447860 - DNA, 75 bp, Homo sapiens
ggttaattcaacagttcaccaccattaccggtctctaattaacagaagatggcaaagcccagccacagcagctat

SEQ ID NO: 447861 - DNA, 50 bp, Homo sapiens
cgccggtggagacgcaggcgaggttgcactagtcgggggttccatgctgg

SEQ ID NO: 447862 - DNA, 100 bp, Homo sapiens
cctgcttcctgctgctggcactggtccttgtcccctcaggatgccgaggaatgtgacagggctgggagtgtggccacctgccaggccgtcatgcgtgccg

SEQ ID NO: 447863 - DNA, 75 bp, Homo sapiens
cgagaactggaaggctatgataagaatgttgtaccatctttgggtaggcagacttccctgacgacatcagtgata

SEQ ID NO: 447864 - DNA, 75 bp, Homo sapiens
agaagaacagctcgagagagcattacaagccagcctctgggaccgagcaactttttacagatgtggcaactggag

SEQ ID NO: 447865 - DNA, 74 bp, Homo sapiens
ggattcccgcgcccctcggacggccacgagactcgggtatgatctcgtgaaaccttgagagaaactgaatgacg

SEQ ID NO: 447866 - DNA, 97 bp, Homo sapiens
caaaaagatataaagtcagcacaactgagctgagctggttttgcagaagggctgatgaggggaaatcctcattgacgattcaatttgttgaaggcca

SEQ ID NO: 447867 - DNA, 75 bp, Homo sapiens
ttatgaagttttaaaggatgatgaacgaaggcagagaaccctggggttattagtaaaacgattggagaaaggtgg

SEQ ID NO: 447868 - DNA, 101 bp, Homo sapiens
tgctgaatcacacgccgccatccgggaggcccagggaagagcttagaaaccaagatagccaagtggaacctgcaatcaagaatgaataagaatgaggctat

SEQ ID NO: 447869 - DNA, 100 bp, Homo sapiens
caacaagcaagcatgcagcttactgcttgaaagttgacatgaagacaatggagactgcagagaaactggctagatttgttgctcaggtgggaccagagat

SEQ ID NO: 447870 - DNA, 75 bp, Homo sapiens
ccaaggtcctgggcaggaccggttctcagggacagtgcacgcaggaaatggccagtgatgaactgagggagttga

SEQ ID NO: 447871 - DNA, 99 bp, Homo sapiens
cagacatcaatacaaaatgggcagccacacgatgggccaagaagattgaagccagagaaagggaaagcagatggtggagctgaatatgccacttaccag

SEQ ID NO: 447872 - DNA, 75 bp, Homo sapiens
gtcctgttgccatggaaacaccctcctggctgttcgatcaaatcagccggcaccaggagcagttcatccagatgc

SEQ ID NO: 447873 - DNA, 50 bp, Homo sapiens
ctctccaagcagcactaccggctggtggaagatggatgcctgaagtgtag

SEQ ID NO: 447874 - DNA, 75 bp, Homo sapiens
gtcacctaggagcttaagtggcttttgatgcatttccaagtagaataaggtaatgctggaggatggaagaagcaa

SEQ ID NO: 447875 - DNA, 100 bp, Homo sapiens
aggtgatagttgggaatggagaccatcaaaggcaaatgaagaggattcttccagttctctagtgaaggatcacctttttcagcaagagacagttgttacc

SEQ ID NO: 447876 - DNA, 75 bp, Homo sapiens
acacaaatgaattctataagaccattccccggttttattatagggcaaagttggccaagaattacggcatgaccc

SEQ ID NO: 447877 - DNA, 100 bp, Homo sapiens
gcgcctcttcgccgtcatccgcttcgaaagcatcatccacgagttcgacccgtgcatgcagcagaactgattaaaacagtggcatctcgctatgatgaat

SEQ ID NO: 447878 - DNA, 144 bp, Homo sapiens
gggagaagaggattggaggtgtcagtgttaaaggaacctctacaacgaaggtgaagccacggaagataagtaaaggcatgacttcctggcaccacagggaaaatcgggtgcaagcccagaaactatttccccaccaccacttgt

SEQ ID NO: 447879 - DNA, 75 bp, Homo sapiens
agagatagaggcagcagaagccagggcagctgaaagacagagaccttcaggcgatgcaaaaactttctggatgga

SEQ ID NO: 447880 - DNA, 88 bp, Homo sapiens
attatcgacgtagttaaagcccactagcctaaagccgggcggactgcgagtcatgtgctgttcctggggcttggatgatgtaggggaa

SEQ ID NO: 447881 - DNA, 82 bp, Homo sapiens
gcagagatattctactccatctcattcattgtacagcaactattggatgattatccgaaatgtttcattgtgggagcagaca

SEQ ID NO: 447882 - DNA, 96 bp, Homo sapiens
catgagcagacgcatgcgatgtatgcaccagaaagtttgatgcaggcattggaagacttagattatctggcagcactggataatgatggaaatctt

SEQ ID NO: 447883 - DNA, 97 bp, Homo sapiens
gccggctactgccgcttcagttctcccggtgtggccacgagtcggatggtatacctcaagtttactatttcggcccttgtggtaaatacaatgctat

SEQ ID NO: 447884 - DNA, 100 bp, Homo sapiens
ccggtgcaagttcaaccagcagcagaggttaaacccatccagagtaatggctgcggccttacccaggaccctgggggagttgcagctgtatagaatatta

SEQ ID NO: 447885 - DNA, 82 bp, Homo sapiens
ctgtcgccttccgctacttccgggagctctttgggatccggccagatgattacttggattttttatcaagcagaaatgcatc

SEQ ID NO: 447886 - DNA, 90 bp, Homo sapiens
ggacaaagagatcatagccgagtatgaaagtcaagtcaaagcttgctgatgaccgtatggcactggtgtcaggcatcagcttagatccag

SEQ ID NO: 447887 - DNA, 83 bp, Homo sapiens
gccacctccccaaaggcaaagtgatgtacagttcattgattatgaatattctggatacaactacctggcatatgatattggaa

SEQ ID NO: 447888 - DNA, 100 bp, Homo sapiens
tgcacaggagagctgctaaaaattactgcggtgaacagaccacgtggccgtgaccatccagctcctccttagacgaggcaacatcttcctcacgtcctac

SEQ ID NO: 447889 - DNA, 90 bp, Homo sapiens
gcggagcgaacccgagagcgtggagcgggctgggccaggtgctgcagggtgcacagctgatcgccgtggcctcctcggaccccgcggcgg

SEQ ID NO: 447890 - DNA, 83 bp, Homo sapiens
tcgcgagcctccttcgccgcgccccacttgctcgtgcactttacacacatgaggttttaaaatcaaagatgggaaaatcggag

SEQ ID NO: 447891 - DNA, 75 bp, Homo sapiens
ggatgacagcagcctttttggtatagatatgtgtggaaccatcagagaatctacaatccctgatggagaagaatc

SEQ ID NO: 447892 - DNA, 100 bp, Homo sapiens
tgacaatacaggaaatgtttagtttgccttctgccaggtggatgcctccatcgctctggccctggccctggccgtcctgtgtgatctgctccagcagtgg

SEQ ID NO: 447893 - DNA, 100 bp, Homo sapiens
agaactggacacaagcaagctcagtcacaagttcaaagaggtctccagaaatgctttgggttcatctttcattgctgcaaggaacttccatgcctctaac

SEQ ID NO: 447894 - DNA, 75 bp, Homo sapiens
ctagaaaccaatggctgtgcggcgtgaggtggagattctggacgcaaagacaagggagaagctgtgtttcttgga

SEQ ID NO: 447895 - DNA, 98 bp, Homo sapiens
gacggggatggggacggtttcgtccgcatcgaggacttcatccagtttgctacggtctacggggcagagcaggccttgtacagctccatcaagaatga

SEQ ID NO: 447896 - DNA, 82 bp, Homo sapiens
cggagaggcacggaggagccgctggggctgccgccacggccgcccggagtgtggacgaatgtggaacctcgctctgtggctg

SEQ ID NO: 447897 - DNA, 90 bp, Homo sapiens
gtgacggggaggtaccaggtatttgagagcaatcgccaccgctttcctggaacttgagaatctgaattatccagaacagaaagttgtgac

SEQ ID NO: 447898 - DNA, 100 bp, Homo sapiens
atccacaagctgactgacgtcatccttgaagccgaccagaatgatagccagtccctggagctggtgcacaggttccaggaaaatgtttataggaggcctt

SEQ ID NO: 447899 - DNA, 140 bp, Homo sapiens
cggtggacttctcgctggccgacgccatcaacaccgagttcaagaacacccgcaccaacgagaaggtggagcccagtgacaccatcgaaaatgtgaaggccaagatccaagataaagaaggcatcccccccgaccagcag

SEQ ID NO: 447900 - DNA, 75 bp, Homo sapiens
ccggtccctcgcctcccggccgagctgacggagaattactggctccagtagccgcagaagccatggaggaaggaa

SEQ ID NO: 447901 - DNA, 100 bp, Homo sapiens
cagttctaaatttgaatttgagaaactggcgatggaatatgagaggagccctctggaaagaaaaggacagaccctgtgctttcatgaaagtgaagatctg

SEQ ID NO: 447902 - DNA, 82 bp, Homo sapiens
aatcctctgcttccaggacaagtcctgcgcttggggatcctctgtacgcccgttcactgtgtgtcccggcatggatatccgg

SEQ ID NO: 447903 - DNA, 100 bp, Homo sapiens
ttccaccatatatgttcaaaaattgctgaatgagcacaaggatttgaaggctgcagagagactaagggcacttcctgaggttcattaccacctggggcag

SEQ ID NO: 447904 - DNA, 82 bp, Homo sapiens
cgccctgttccccgcgctgcggcctggcggcttccaggcgcactaccgcgctggtcctggctgagggtgctcactcggatgc

SEQ ID NO: 447905 - DNA, 98 bp, Homo sapiens
aatgaagaaagctcataaaaagatgcacaagcaccaaaagcaccacaagtaccacaagcatggcaagagattttattccctcaaagttgcccccaaag

SEQ ID NO: 447906 - DNA, 100 bp, Homo sapiens
cccggtactgtcttcgtgatgaataaaaacatttcaactccctacagttgtgccatgcagcaacaagatatggatttggatatagaatttgatgtacacc

SEQ ID NO: 447907 - DNA, 101 bp, Homo sapiens
acactgtggcggccatcgaggagcagcagccgctcttctaaaacattcaaaccaaagaagaatatccctgaaggatctcatcagtatgaactcttaaaaca

SEQ ID NO: 447908 - DNA, 75 bp, Homo sapiens
aaaaaatttgctggatattgatgcgccagtcactgggttccaccaccgcttcaatcccaatgcctccagctcctt

SEQ ID NO: 447909 - DNA, 83 bp, Homo sapiens
ctcataatggagcaggtgaaagtgcagatcgccgtggccaacgcgcaggagctgctgcaggggaacgcccttttgcttgtgac

SEQ ID NO: 447910 - DNA, 105 bp, Homo sapiens
atggaggacgaggagagacagaagaagctggaggccggcaaagccaaggcctatatgaacccaatagcaatggcgagatcaaggggtccaatccagtcttcaggg

SEQ ID NO: 447911 - DNA, 100 bp, Homo sapiens
catcggtcaaggtggccgtgagggtccggcccatgaatcgcaggttcacctttccttgccagtgaagatggcgtgcttggcggagtgattgtcctccgtt

SEQ ID NO: 447912 - DNA, 98 bp, Homo sapiens
tccggaccctgcagtggcgcctaaagtctgagagagggaagtcgcctctgtgctcgtgagtgcatggggtataagtggagaacatgcagctgaccctg

SEQ ID NO: 447913 - DNA, 83 bp, Homo sapiens
gctccgtgatccgctgggccgggagcgacttccaggatatagccctggaggagcatcagatccatgctgctgctgactcggag

SEQ ID NO: 447914 - DNA, 100 bp, Homo sapiens
tgttctgtaaagagtatcgcgtgaccattgtggctgaccatccaggtatagagagcgacagaccagaaggtgcagagtacataaatcctggtgaaagact

SEQ ID NO: 447915 - DNA, 94 bp, Homo sapiens
gaaggaacgaggcaaggagctaaagcagcgtgcgttcagccctggggccgccatggcatcagatgaaggcaaactttttgttggagggctgagt

SEQ ID NO: 447916 - DNA, 75 bp, Homo sapiens
gggtaacaagatggcgaccgagacggtggagctccataagctaaaggaggataagatcaatgccctcattaaagc

SEQ ID NO: 447917 - DNA, 120 bp, Homo sapiens
cgactacgacggcgttgatatcggtggtaacgacggcctcagcaggcggggaagatgaaaggatgtcatttgtcagagtgaaccgctgtggtccccgagttggtgtaagaaagacaccga

SEQ ID NO: 447918 - DNA, 96 bp, Homo sapiens
gaagatgatgacgatatggacctacagcccaataagcagaaagaccaacatgcaggtgccagacaagcaggacctccccaacgccatgaatgcggc

SEQ ID NO: 447919 - DNA, 50 bp, Homo sapiens
tttgtggtcttcatttgtgaatacatagacacgctttcaccagcttcgag

SEQ ID NO: 447920 - DNA, 50 bp, Homo sapiens
cagacttttgtgttgcagttcggttctgggaggtgatcagtgatgaacat

SEQ ID NO: 447921 - DNA, 82 bp, Homo sapiens
ttagctgtgctcgcgctactctctctttctggcctggaggctatccagcggctctctttacctatgaaggcaacagcaatga

SEQ ID NO: 447922 - DNA, 85 bp, Homo sapiens
agcatccgaccaccgaggctggagggggagaacacccaggtgatctgtgaaaatggttcgctattcacttgacccggagaacccc

SEQ ID NO: 447923 - DNA, 75 bp, Homo sapiens
tgcgcatcgatgaggatgagaaaggtgctggagaatctggtaaaagcaccattgtgaagcagatgaggatcctgc

SEQ ID NO: 447924 - DNA, 100 bp, Homo sapiens
gtcttttgatgaaatcaacaaagcctttgaactgatgcattctggaaagagatccccgtcgaggtcaagatcaagatccaggtctatttcacgaccaaga

SEQ ID NO: 447925 - DNA, 100 bp, Homo sapiens
gtggatgaggctctgcggctggtccaggccttccagtacacagacgagcatggggaagggcttccgttacaagatgaggtctgtgtatgctcacttcccc

SEQ ID NO: 447926 - DNA, 100 bp, Homo sapiens
tttgttgtgacatggaggctcaagctgggtctactcaaggatttgtactgtgttcgcagtgacctggggaacctgctcaaagccctgggtcgcttggaag

SEQ ID NO: 447927 - DNA, 50 bp, Homo sapiens
tttcaccacaagaagggctgccagtctttcccagggaactccgatgaagt

SEQ ID NO: 447928 - DNA, 100 bp, Homo sapiens
tggcggccgaggtagaggcagtggcgcttgagttggtcgggggcagcggcagaaatgcactcggtgatggaaagagagccactattctgaagaacacttg

SEQ ID NO: 447929 - DNA, 74 bp, Homo sapiens
tccgaggtgccaccgtggaaggacagaatggtccttgaatgggcaagagggcacatgaagtacggcgtcctcca

SEQ ID NO: 447930 - DNA, 75 bp, Homo sapiens
aagagattcagccagcacactcctcgcgagcaaggggctatcaacagcaggacgcccatgaattcatgcgctacc

SEQ ID NO: 447931 - DNA, 90 bp, Homo sapiens
gttgccatcagcaatcatgtcaccccaccacccattccgaaatctaaccatggaggcagtgatgcagaagaaagtgacttttgaagatgt

SEQ ID NO: 447932 - DNA, 75 bp, Homo sapiens
cgcagcgcgaacatggacgccgtcaacgccttcaaccaggaggcttgccgctgttccgtaacccagtgattccag

SEQ ID NO: 447933 - DNA, 73 bp, Homo sapiens
cgaccagctgctggacatgtcctactatcagttgagggatttgcagttgataaaatggctggagaggttaagg

SEQ ID NO: 447934 - DNA, 75 bp, Homo sapiens
attttggtttaatatctgattgggacaacattcagacccatttccagtcatgaaagaaaaagtcagcactttttg

SEQ ID NO: 447935 - DNA, 74 bp, Homo sapiens
cttcaatgtcctggggttctcggccgcactgtccaccaacatcatggactgggcactccacagaaggatgttat

SEQ ID NO: 447936 - DNA, 82 bp, Homo sapiens
tggtcgtctggtcctactacgcgtacgtggtggagctctgcgtgtaatgcttcagacatgcctgaaacaatcaccagccggg

SEQ ID NO: 447937 - DNA, 82 bp, Homo sapiens
gccgctgctgctgggggccttcccgccggccgccgccgcccgagggccctggcccccgctgcgtccgcatcactctgcatca

SEQ ID NO: 447938 - DNA, 100 bp, Homo sapiens
atgatgtagttattactgtcccgtttgattttggagaaaagcaaaaaaatgctcttgggttaatacaaaagctgaaccagcaaacaatattacaagtttc

SEQ ID NO: 447939 - DNA, 100 bp, Homo sapiens
gcaaaccaaggatctggggatcttcgcactatcccaaggaatttagataatgggctgtgtgcaatgtaaggataaagaagcaacaaaactgacggaggag

SEQ ID NO: 447940 - DNA, 93 bp, Homo sapiens
agctggacggcgagcgcgagcggcgcgagaaagtatcacctcttctgggctcaagatggacaacaagaagcgcctggcctacgccatcatcca

SEQ ID NO: 447941 - DNA, 90 bp, Homo sapiens
gacgcgccgcggccaggcagggaggagaccggcacccagacaggtggcgaaggcagaggacattgtcccagatatagccgttggtacaaa

SEQ ID NO: 447942 - DNA, 110 bp, Homo sapiens
cagaaagacacagctttcctcttcctctccaaaccacctcgaagcagggttatcaatagtctggctgtctatcgtcatcgtgagactgactttggtgtaggagttcgaga

SEQ ID NO: 447943 - DNA, 89 bp, Homo sapiens
ggcgaacgccactcagcttttgcggcacttggagctcaaagttatgaagtttcaggatgaattggaatctgggaaaagacctaaaaaac

SEQ ID NO: 447944 - DNA, 100 bp, Homo sapiens
ccacgctgtccccgcagcccggcagcgggtgtgctgggtgcatcatgtaactggcatgtgggtgtaccctttcctggaacacattggcccaggagccaga

SEQ ID NO: 447945 - DNA, 74 bp, Homo sapiens
acaattttttttcaagaactgccgtcttctttgcctgcactaatgtttaagctatgaagaaggacatccctcac

SEQ ID NO: 447946 - DNA, 100 bp, Homo sapiens
gagctgggaacattcctcataaagcgagtcgtcaaggagttgcaggtttttagaacttcagccataaaaatgggcagaattttccttgatcatatcggtg

SEQ ID NO: 447947 - DNA, 100 bp, Homo sapiens
aaaggagctcaactccaaccacgacggggccgacgagacctcagagacacctatggctgccgatgaaggctcagcagagaaacaggcaggagaggcccac

SEQ ID NO: 447948 - DNA, 74 bp, Homo sapiens
atgatgatgacttttaccaccaggtagacggagtgcaccacccttgaacctcactggcctccctggcacagaga

SEQ ID NO: 447949 - DNA, 96 bp, Homo sapiens
gctgactgtgggcagagaagttgcaaaccgagtttccaaggcgtcctccaattcttcaacaccaacaagaatgaggagcaggacatcttcatttac

SEQ ID NO: 447950 - DNA, 51 bp, Homo sapiens
agttttgccaggtgtttgttaccttgatgcgtctgttactagagtggagag

SEQ ID NO: 447951 - DNA, 75 bp, Homo sapiens
ctacgcgggtcttgcgagatatctggccgcctctgccgcagctggaggtttttctattgggaaagctactgatcg

SEQ ID NO: 447952 - DNA, 83 bp, Homo sapiens
ctcgaggtggactatgaggctatccgcagcgagatggagcagctcaaggaggtgacagagctgaatgaacctctctccaatga

SEQ ID NO: 447953 - DNA, 75 bp, Homo sapiens
gacccagaatatgccaagtatctaaagtttcaggaacttacacctggatgaccaaatgaccctactgcagtactc

SEQ ID NO: 447954 - DNA, 60 bp, Homo sapiens
gcctctcgagtacctgggactgcaggatacagtacgggatcctttctggaatggaggtct

SEQ ID NO: 447955 - DNA, 99 bp, Homo sapiens
cgcaaataccaagtggacctgtccaaggactacctgattgctctgtccctgcagcagcaacagccacgaggcccgctggggcttaccgacttggagctg

SEQ ID NO: 447956 - DNA, 100 bp, Homo sapiens
agcagcttccaggatcctgagatccggagcagccggggtcggagcgggccccttcacagatgtagtcactacaaatcttaaattgcgaaatccatcggat

SEQ ID NO: 447957 - DNA, 90 bp, Homo sapiens
gtggaaacacgtggaagccgtatatatagacattgcagatcgaagccaagtgctcagcaagctggcagcgatcgacccttcacccttgac

SEQ ID NO: 447958 - DNA, 100 bp, Homo sapiens
ggagcctccagagtagacaagccctcaaggatgcccggtccccatcaccggcacacattgtctttctgtgtttgaagaacatacgcaccttcctgaaagt

SEQ ID NO: 447959 - DNA, 99 bp, Homo sapiens
cagtgcgcacgttgtaatcagctgaggccatgtcaggagacggagccacggagcagcagtcctgcgttaactgcggccgggaggctatgagcgagtgca

SEQ ID NO: 447960 - DNA, 100 bp, Homo sapiens
agagaaacttttgttggaggaagaaccaacaaccagtcatggtcagtatcagaagctttgagatcagcagggctaccatctcactcttctgtaatttcac

SEQ ID NO: 447961 - DNA, 83 bp, Homo sapiens
ccgactccttgcagctgctgtcagcatggcccaggctcctgctgacccgggcagagaaggttgagttgttacaacaaaagttg

SEQ ID NO: 447962 - DNA, 100 bp, Homo sapiens
tttggggccttcgcggtgggattaaaagcagcgaacctcgagaccaacgtggaggagctgtgggtggaaggacgccgtggaggaccggctggacaggaac

SEQ ID NO: 447963 - DNA, 98 bp, Homo sapiens
cagcagtaacaacagcgaggaagaagaggacgacgacgacgaggaagaggaggtttctgagagctccaaacgagaatggaagccgctggaggaccgta

SEQ ID NO: 447964 - DNA, 130 bp, Homo sapiens
ggggagggggcggcggcagcgggcggacggccggcgggggcggcgtgcggcctagcgtctcaggtgctggagaatctggtaaaagcaccattgtgaagcagatgaggatcctgcatgttaatgggtttaa

SEQ ID NO: 447965 - DNA, 82 bp, Homo sapiens
ttctctgtcagctctttccccgtcagcatcccagccgtgctcacggcgccatgtcagaaccggctggggatgtccgtcagaa

SEQ ID NO: 447966 - DNA, 75 bp, Homo sapiens
aggatgaagatgaaaaagaaaaagtagctgatgaagatgatggtgaggaagaggatggagatgaagatgaggaag

SEQ ID NO: 447967 - DNA, 82 bp, Homo sapiens
ccggcccagaggccccagggcgtcgcagcgccgcgtgcggcccactcacgggccggtactccaaagattcaggtttactcac

SEQ ID NO: 447968 - DNA, 78 bp, Homo sapiens
tttaatggaaaatcgcttggttaaaacctgacacttttaacaggttatgatgtgattgctcaagcccaatctgggact

SEQ ID NO: 447969 - DNA, 100 bp, Homo sapiens
gaatgtggaaaggagattgacagtcacaattttgtaataaggaaaattctgtttgaagatttccggtcctggctttctgatatttctaaaattgacctgg

SEQ ID NO: 447970 - DNA, 83 bp, Homo sapiens
aagaacatccacagaatagacctgaagacaaaaatccagaagtacaagcagtctgtgagtccattcttgcacaccgagaaaat

SEQ ID NO: 447971 - DNA, 98 bp, Homo sapiens
ccagcacttctgggacgcacagagaccgtgaagattccaagttcaggagaactcgaccggtggaggaactgcaatgtctggtggagaacagaaaccag

SEQ ID NO: 447972 - DNA, 50 bp, Homo sapiens
tcatcaataattacttttccattggcgtgtttacgtttaataagaaggag

SEQ ID NO: 447973 - DNA, 99 bp, Homo sapiens
ttacgtctccaggatacctacaatttggatacagataccatctcaaagggtaatcttccaggagttcatgatcaagtgttgcccacaccaaatgcttca

SEQ ID NO: 447974 - DNA, 100 bp, Homo sapiens
gacgtgaaggagcagatttacaaactggccaagaagggccttactccttcacagatcgtttaattggttggggtcagataagaagaggagtgacaatcaa

SEQ ID NO: 447975 - DNA, 100 bp, Homo sapiens
acttgatggtctggtagaaacaccaacaggatacattgaaaggaccctgatgctcccataagacagaaaatgccccttgatgatctggatagagaagatg

SEQ ID NO: 447976 - DNA, 75 bp, Homo sapiens
aggaaatcatactgtgaccttattctggaaggataaggccaaggtggaaatccggaagctcagcgatcccccaaa

SEQ ID NO: 447977 - DNA, 83 bp, Homo sapiens
caggtcttcatgctgctgtgggtgatattactggtcctggcaagggcatcatagagcctccagaggggacaaaaatttacaag

SEQ ID NO: 447978 - DNA, 87 bp, Homo sapiens
agaacagagatggcggggagagacggccaagcagcaccagcgtgcctttgggtgataagggaatccctgcccagagtccagcgcttc

SEQ ID NO: 447979 - DNA, 96 bp, Homo sapiens
ctggccagctgccgcgactgggaggagcgccggaacgccgaggcccagcaaattatgcgcacagccatgaagtataacctgggattggacctgaga

SEQ ID NO: 447980 - DNA, 88 bp, Homo sapiens
acaacagcacctacctcagaagactgttatgaagagcttacggagttcctatgctagtcagcatagtcagcttgggcaagaccttcgt

SEQ ID NO: 447981 - DNA, 100 bp, Homo sapiens
accttttggcaaaccatgaatcgagaatggaaaggaatagacaggctacgcctggacaaatactatatgtttgctgatggccgccaaagttggagttcgt

SEQ ID NO: 447982 - DNA, 100 bp, Homo sapiens
ataaataggctgcttggagaaaatgatggggaaacaagagctttggcaacaatgattgctgggtgagtaccgggctctacctcctggaaggacaaaatgc

SEQ ID NO: 447983 - DNA, 100 bp, Homo sapiens
gctttaattctacccagcaaaatgaaactgagcctaatcagcaggacctggaagccagagcacagaatgagttcttccgggctttcttcaggttgccgag

SEQ ID NO: 447984 - DNA, 98 bp, Homo sapiens
gtgaaaccattgcactgctctttgagcttgcccgggaccttgaggtgaagaacgaggtggagaagctcccccgacagcagcggaaggaaagcatgaag

SEQ ID NO: 447985 - DNA, 82 bp, Homo sapiens
aaaactgttcggacttccccgttagaactcgcgtttccacttcagagatctgttgtgcatgcctaaagggctatctttcagg

SEQ ID NO: 447986 - DNA, 100 bp, Homo sapiens
cagaactctgtgttgttcctttgcggatcttctccttcttcccagttccaggttaccagccagtcttgtctggtcaacagggattccaaggcctaatagg

SEQ ID NO: 447987 - DNA, 80 bp, Homo sapiens
cgggcccgggggtggtgacagcaggtctgagcaaagcgtagaaggttttcctccaaaccagttgtactcacagaagccca

SEQ ID NO: 447988 - DNA, 100 bp, Homo sapiens
gttcacataagaagttcttcgatgtatctaaacttggcaccaagtatgtaattcgccaaaatgacgaacacaaagggaaagaggagaggcacccgatata

SEQ ID NO: 447989 - DNA, 100 bp, Homo sapiens
ccgccgactcacacaaggcaggtgggtgaggaaatccagcagaaaaagtcctacctggagcgaagcgttaaggaagctgaggacaacatccgggagatgc

SEQ ID NO: 447990 - DNA, 50 bp, Homo sapiens
taaccagaggcaagatgcccgaggcagaaacggaattacagagagctgca

SEQ ID NO: 447991 - DNA, 83 bp, Homo sapiens
cggcgcgcggcgcttcgggagccagcgggtgctggtggagccggacgcgggcgcagacaatgcagatcttcgtgaagactctg

SEQ ID NO: 447992 - DNA, 87 bp, Homo sapiens
cctactgtcttgttttttccctgcaacagaggagaggagacgccgtgagcgggacgaccagatgtaccgagagcggctgcgcacctt

SEQ ID NO: 447993 - DNA, 147 bp, Homo sapiens
atactccaagaaaaaaaccacaaatgtttttctgttttgcctgaatacatgatttaaacaagagatttccacagaaggttgctggtaaaattcctcctagtgtccaagtggaggcagcttgtcttctgtcccagcattttggtgctc

SEQ ID NO: 447994 - DNA, 98 bp, Homo sapiens
ctggtgatggcaaatgtcgtggacatggtgtttccccccgggccggcctgccgtgacgatcacagccctgccgtctcaggtcacggttttggattctg

SEQ ID NO: 447995 - DNA, 101 bp, Homo sapiens
atttcctgcttctccttttcatgagtgttcctgtggtctctgcacctcctttcttgtctaaaaagcacggcaagctcattacgttcttacgaacattcatg

SEQ ID NO: 447996 - DNA, 106 bp, Homo sapiens
cacgataaaggaactcaggcgcctcttcttagttgatgatttagttgattctctgaaggcagccaatcctttctttaagttgttgactatgctaatggagtttgct

SEQ ID NO: 447997 - DNA, 51 bp, Homo sapiens
gagccggaagagctgatgcccggctcctctgcacccgagcactctccccgc

SEQ ID NO: 447998 - DNA, 106 bp, Homo sapiens
gacgcagcaacaacagcagccggcccttgttaactacaacagaccatctgttaaacacagtgggaatatcacttttgatgagattgtcaacattgctcgacagatg

SEQ ID NO: 447999 - DNA, 80 bp, Homo sapiens
ggataaacagctcgttggcagtagcagcttatgaggatggaaggtgggagtcaatcattttgacaagtctcctgaaagga

SEQ ID NO: 448000 - DNA, 75 bp, Homo sapiens
gaaaccatggaggagcactgcaagcttgagcaccagcagaaaccgtccatgtttgatgtgagccgggagctgggc

SEQ ID NO: 448001 - DNA, 130 bp, Homo sapiens
gcctcgaattacttgagtcagtcctcaatgattttccgcaggtctttttacaaggaacgggtatggcaatccccgaaactcaccaggtctgctggtctcacctggtaacttgaacaagaatatgcaagca

SEQ ID NO: 448002 - DNA, 100 bp, Homo sapiens
agaatggagtcttccatcaatcatatctcacagatgccttcaattaagttgcagagttctgatggagagatatttgaagttgatgtggaaattgccaaac

SEQ ID NO: 448003 - DNA, 83 bp, Homo sapiens
caagaacctgcgggaggacggagagaaggcggcgcgggaggtgaagttgctgctgttgggcctgggttctgaggaaaacgcaa

SEQ ID NO: 448004 - DNA, 82 bp, Homo sapiens
gcttcactacccttatcccggagagctgacaatgatgaatctcagaggctgggaagctggaggaggtgatgcaggagctgcg

SEQ ID NO: 448005 - DNA, 90 bp, Homo sapiens
aaaatgagctcgattgttgacaggctgacaggggctgggaacactctggaaacctcacttggcatctagggaagagagcattctttgtct

SEQ ID NO: 448006 - DNA, 82 bp, Homo sapiens
aggctgaccaagacttcagtgatgagaatcgcacctaccaggcttccagcccggatgaggatgttggttcctgcaaacaaga

SEQ ID NO: 448007 - DNA, 100 bp, Homo sapiens
ttcgccgagccgcaggagagacacgctgggccgaccccagagcggcgctggacagatattaacctggctgcagagccaaaagtgaaccgaggaaaagcag

SEQ ID NO: 448008 - DNA, 83 bp, Homo sapiens
ccaggcatctatgcggctgctacaaatgttgttcaggcactgagtcagcatgtagaatatgcttttaaggctattaaccaggg

SEQ ID NO: 448009 - DNA, 100 bp, Homo sapiens
gacatgaaaaagatgagcaggaatgttttgctacaaatggaggaggaggaggacgacgacgatggggatatcggcttgcattgatgacaatgttgatatg

SEQ ID NO: 448010 - DNA, 100 bp, Homo sapiens
aagacctatgtgcgtcagcagcaggagatgaggaacaagtacattagagccgaggttcatggtcagaatggcggcagtggagcatcgtcattcttcagga

SEQ ID NO: 448011 - DNA, 82 bp, Homo sapiens
cagcagcggcccccgctcccgggaaccgttcccgggccgttgatcttcggccccacacgtaaggtacctgccgtgggcagat

SEQ ID NO: 448012 - DNA, 105 bp, Homo sapiens
gtgcgatccatgcccatccgaaaggatgatgaagttcaggttgtacaaacagctttgtctgagactcaggaccctgaagaagtgtcagtaactgtaaaggctttc

SEQ ID NO: 448013 - DNA, 82 bp, Homo sapiens
tggcctgggcgctccggtggcggcggaggaaggagtcaagactgagaacaacgatcatattaatttgaaggtggcggggcag

SEQ ID NO: 448014 - DNA, 76 bp, Homo sapiens
cttcaacatcctcccaaagggacagtaggcaggcatctgtgagtcagacatccccacagtctgcttcttcaccaag

SEQ ID NO: 448015 - DNA, 100 bp, Homo sapiens
aagccctgctactgctggattagcgccagcattccatattggaagaagagatttctacacatgaaaaaaatgcctttgtttagtaaatcacacaaaaatc

SEQ ID NO: 448016 - DNA, 100 bp, Homo sapiens
cggtcatctcgagtagcgacgacgactccatcgtgctctatgactgccaggagggcaagtttgatctgtggatgaaatgaatcatgattttcaagctctt

SEQ ID NO: 448017 - DNA, 54 bp, Homo sapiens
ccagcatagatagcaccgtgaatggtaagcaaactatgggctttccacttctca

SEQ ID NO: 448018 - DNA, 50 bp, Homo sapiens
cctctgaggaagtggagcttgtggagcggaggcggagggacaagatcaac

SEQ ID NO: 448019 - DNA, 99 bp, Homo sapiens
tggggctgggccagaccactcatcctgtcgaatagagcgtttcctgcagagggctctgaactcctacttcgagcctccggtggaggagagcgccttgga

SEQ ID NO: 448020 - DNA, 75 bp, Homo sapiens
gcttcctgttcgcagctgcggcaaccacagagtattcagccatggcctcgctggctggtgggctggacgacatga

SEQ ID NO: 448021 - DNA, 100 bp, Homo sapiens
tgtgaagtaacagaattaaccagagaaggtgaaacgatcatcgagctaaaatatcgtgttgtttgcctgagaatacagatcaacccacagaacaaagcgg

SEQ ID NO: 448022 - DNA, 100 bp, Homo sapiens
cgattgcttagaggagtatttcctgaactgtgtgggtagtgtatgggtttcgacagaccatgatgaaattgagaatgtggccaaacaatttggtgcacaa

SEQ ID NO: 448023 - DNA, 75 bp, Homo sapiens
cagatccgtagggaggacaccgtgacttcccggacgctgggaaatgtgaaggagaacgacctgctcagaatgaga

SEQ ID NO: 448024 - DNA, 82 bp, Homo sapiens
agccaccccagcagaggccttatggatatgaccagggcttaaaagacaaccttcttgcttctgggacatccagcctgacagc

SEQ ID NO: 448025 - DNA, 80 bp, Homo sapiens
atccagcctgcggagcctgtggggcaggacagtcattttgtttactcattcagccctgttgcaggtcccaataaactctt

SEQ ID NO: 448026 - DNA, 127 bp, Homo sapiens
ctcttcgttcgattattagctttagtgaaatgggctaataatgctggcaaagtggaaaaatgtgcggaaattgatgaagcctgtaagagaataaagcgtgaagttgatgatttgggccctgaagttg

SEQ ID NO: 448027 - DNA, 82 bp, Homo sapiens
gactctgcctcgtgccgctgagcctggcgcagatcgatatgatgatatgttagtggtacccattattgagaatacacctgag

SEQ ID NO: 448028 - DNA, 90 bp, Homo sapiens
gcgaaggcagcatcagccatgaggagcagaagtcagtccggctgttattcaagcggagaaatgttgctacagcagaagaagaaacagaag

SEQ ID NO: 448029 - DNA, 100 bp, Homo sapiens
tttgatcgtgctacacccagcaatcgcactgaaggggatggcaactccgatcctgaatctagcaaaaacgtccccgaagccagcagttgtagagactgtt

SEQ ID NO: 448030 - DNA, 100 bp, Homo sapiens
gtttacccctttacattgggcagcacattctggaagtttggaggacatccaggcagaaattgatgcccacaatgacatatttaaaagcattgacggaaac

SEQ ID NO: 448031 - DNA, 100 bp, Homo sapiens
gagcgccaaggtgctggcgctggtggccgtgctgctgctcgcagcgtgccacctcgcctcccgccgctaccgagacctaatctgggagcctgcaagtgac

SEQ ID NO: 448032 - DNA, 50 bp, Homo sapiens
ttttgatgaaattgtagagaactatctcccacaaacaaattttcgtcgtt

SEQ ID NO: 448033 - DNA, 76 bp, Homo sapiens
gtttggggagtacaggtgtgagaagatcctggctgcagctctgaccgaatgtcaccggaaatccagtgcccaaggc

SEQ ID NO: 448034 - DNA, 83 bp, Homo sapiens
ccacgaggtcggagactttgccatcttggtccagtctggctgcagcaaaaagcagaatttatagagcggcagcacgcaaagaa

SEQ ID NO: 448035 - DNA, 100 bp, Homo sapiens
cctggctaaggaaaccctattacctccaggttcccttctttggtcccctttttgatggtgctattgtgaatggaaaggttctacccattatggttagagc

SEQ ID NO: 448036 - DNA, 82 bp, Homo sapiens
cgggagctggacggcgagcgcgagcggcgcgagaaagagggtgaggacaaaatcttcttaatcaacaagcttcactccatct

SEQ ID NO: 448037 - DNA, 83 bp, Homo sapiens
gatctcaagatctggactactgttgaaaaaatttccagtgagacctagaggatcaagacataatgggagcatttttagacaag

SEQ ID NO: 448038 - DNA, 82 bp, Homo sapiens
caaccatcgcagttggaagcccatggggcaggcctgggcggatgatgtggagcggtttcagaaaatgttcagacacccaagt

SEQ ID NO: 448039 - DNA, 75 bp, Homo sapiens
cttggatcttttcatgaactcctgctggagccacccaagcatcaattcctgaagattgccaagcccctctccagc

SEQ ID NO: 448040 - DNA, 83 bp, Homo sapiens
ggagagctcaggaaactgctgttaacctcgtcaaagctgatcagcagctaaggcttcactgtataaataggagaggatgagag

SEQ ID NO: 448041 - DNA, 109 bp, Homo sapiens
aaggatatgctgtattcagctcaggaccaggcaccttctgtggaaggtgctggagaatctggtaaaagcaccattgtgaagcagatgaggatcctgcatgttaatgggt

SEQ ID NO: 448042 - DNA, 75 bp, Homo sapiens
cgtctacaaaagaagatgggaaaggaatctttggactaaatgctcttccttcagaggattatccggggcatctac

SEQ ID NO: 448043 - DNA, 90 bp, Homo sapiens
gtggccgaagccgtagtgggagtattgtggaacttatagactaaagcagcttatgtgctattttaccaacgtcgagatgatgaattttat

SEQ ID NO: 448044 - DNA, 101 bp, Homo sapiens
tctgatgacggcactgttagaatctgggactttcttcgttgccatgaggaaagaattctccgagggagaataccaggttttgctggaactgtacactgaaa

SEQ ID NO: 448045 - DNA, 100 bp, Homo sapiens
aaacacttcttttattttcctgtaatatatctgtatcatcggaggtatatgaatggcacctgcccagaaggaaacagctgtaaatttgcacatggaaatg

SEQ ID NO: 448046 - DNA, 89 bp, Homo sapiens
gggagccaactgtttctttgaacagtaaatcaggttgactatagtcaatggggccaatggagccaagtgtatggaaacccacaacagta

SEQ ID NO: 448047 - DNA, 98 bp, Homo sapiens
gagattactggaaagtatgaaagcacagtatgttgctgggaatggttttcgaaaagtgtcctgtgtggttcgttccaccagtcataaaccagatgaaa

SEQ ID NO: 448048 - DNA, 152 bp, Homo sapiens
aaggcaaaggagtggaagtttgagagaagtttaagagaagaaatggacatgattgcctaaatcagccaaacacagggtaaacactacacgtgaagagtggtgaaagggaacattgattactgaagtgccctggagagggaaagcactggtca

SEQ ID NO: 448049 - DNA, 100 bp, Homo sapiens
gttggagcagctcacagggcagacccctgtgttttccaaagaacgcaggtgctggcgcccgttctgcctgggaccccgggaacctctcctgccggaagcc

SEQ ID NO: 448050 - DNA, 89 bp, Homo sapiens
gggagcggcgttggaggccaccgtttccaggttgggtgattgtgggtgagattgtgcagtaggaataacagctgctggttgagaattac

SEQ ID NO: 448051 - DNA, 136 bp, Homo sapiens
cgctgcctcctcctcaagcgccttgacctcactacatctgctttccactggagtgaccgggcagaggacgatgaggtggtcctgcagtgcagcgctaccgtgctcaaggagcagctcaagctctgcctggccgccg

SEQ ID NO: 448052 - DNA, 96 bp, Homo sapiens
tattaaaaccatttttggtccatggtcaatgagaatacgaggatgtacattccagaggaaaaccaccaaggatcaactcactatcctgaaggtcca

SEQ ID NO: 448053 - DNA, 75 bp, Homo sapiens
ccgggcactatgtgaatttgggacctcctgccccccgaggtctgcagtctcctgaacccagcagccatctacgcc

SEQ ID NO: 448054 - DNA, 96 bp, Homo sapiens
gttggccgcagcttctatatccatggactcagtattatcaagaggtgtgttgcagtcactcattgaaaaacattttcctgctccagacaggaaaaa

SEQ ID NO: 448055 - DNA, 113 bp, Homo sapiens
ttcacaccgtcttcggtctcctggggtcggcgccgagtgggaggatggcggaagttgatgttgaacagcacactttagccaagtatttgatggagctgactctcatcgactat

SEQ ID NO: 448056 - DNA, 100 bp, Homo sapiens
ttaggcatacaagtaccctggctggccgccagatcccacccttggacccccatgaaaatggaaacaatggaacaatcaaagttgagaagccaaccatgca

SEQ ID NO: 448057 - DNA, 101 bp, Homo sapiens
gaaaaagaaaagactaccgcactgaaaggatgaccatgaaagctgtggttctaattctaccaaccgtagtactgctgagagcacaaaatcatcaatcaaac

SEQ ID NO: 448058 - DNA, 90 bp, Homo sapiens
ggagcacggagaaccattaatcatctctaaggacggtgatgaatcatctccaattttaacaagttttgaattagtgaaagttcctgaccc

SEQ ID NO: 448059 - DNA, 82 bp, Homo sapiens
atccaacaagatcccccgtctgaggactgacctttttccgaagctgcagtaaaggaagatgaagaagaagtttcagataagg

SEQ ID NO: 448060 - DNA, 113 bp, Homo sapiens
aagacaccgaaagtaaagaagaagaaaacttcagtgaaacaagaatgggatgctttggaggagaagatacggaccacggagacacaggtgcttgtggcatctgcacagaagaa

SEQ ID NO: 448061 - DNA, 100 bp, Homo sapiens
tggctgcagcagctgccagacctattaatgccagcatgaaaccaggttcaactccaatttgtgaagatattggtaggcaaatgttatgctataatagaag

SEQ ID NO: 448062 - DNA, 143 bp, Homo sapiens
gagccgcggagccggcgctgagaggggctgcggccggagcgggcggctgagacaaaggcgacggtactccaaagattcaggtttactcacgtcatccagcagagaatggaaagtcaaatttcctgaattgctatgtgtctggg

SEQ ID NO: 448063 - DNA, 100 bp, Homo sapiens
cgagccgggatctcaggtcctcgggggcggcggccacgccaaggacgggagttgatccctgaattttattatctccctgagatgtttgtcaacttcaata

SEQ ID NO: 448064 - DNA, 90 bp, Homo sapiens
actcagactccaggtgaagcagccagcagaggtcagagagagacagctcacgttccgggttaaagatcgaggtccggaagccactaggag

SEQ ID NO: 448065 - DNA, 100 bp, Homo sapiens
agcaagttcctgcttctgggacagctctactgacgccagagactgctgctactttgaaacgtacgatagaggccctgatggacagaggagcaatagtgag

SEQ ID NO: 448066 - DNA, 100 bp, Homo sapiens
gctgatgtcagtgttatatcctccaggaatactggccagattacaggctgtgccagccctggaaaaacagttacaattgttgttcgtggttctaacaaac

SEQ ID NO: 448067 - DNA, 74 bp, Homo sapiens
ctcagttgttgtggaaaaacatcatccagtcacagtgtattgaagaatgtcgcaatataatcgtgcagtttggt

SEQ ID NO: 448068 - DNA, 82 bp, Homo sapiens
cttggactgagtcctgcaggacacagcttcatcactggtccagctgtaataccagggtacttctccgttgatgtgaataatg

SEQ ID NO: 448069 - DNA, 50 bp, Homo sapiens
cgtcaccagcaagcttgcggggatgaccagtgtcccagtgaaggaacgag

SEQ ID NO: 448070 - DNA, 148 bp, Homo sapiens
gagccggagaccctcccttgaaaccggcactgggacttctcgatctctggaggcacctgttgcaagtgacaggtgatgcagaagatggggaagaatatgatgacccttttgctgggcctccagacactatttcattagcctcagaacg

SEQ ID NO: 448071 - DNA, 82 bp, Homo sapiens
gaccatggagtccttggaacaggtgcaggcattggagctgcagcttcaggtccctggccaaagatttatttctcttgacaac

SEQ ID NO: 448072 - DNA, 51 bp, Homo sapiens
ttccagatggaatggttggattcagttgtactcgtaaaacaaggatcatcg

SEQ ID NO: 448073 - DNA, 100 bp, Homo sapiens
cgcgggggctgcgccgcgcccgcacccgcgccgcgcgccgaggacctcagcctgggagtggtctggtgaagctgggggttcactgcgtcacctgccagaa

SEQ ID NO: 448074 - DNA, 83 bp, Homo sapiens
ccccagacaagatggacaccgcggaggaagatgaggtggaaagtgagaaatggtacctgtctacagacttcccttcaacatcc

SEQ ID NO: 448075 - DNA, 75 bp, Homo sapiens
ctctgcccggcgagtcgggctctggaggaaaagaaagagccagtcttggtgctctgtgttcacctggttcatctg

SEQ ID NO: 448076 - DNA, 100 bp, Homo sapiens
gcccgtatcggggcctttatttctcgtcggcggcgccctgcaccgcgcctcgcaaaggccgttgctccagggagaactgcaaatatcttcatccaccccc

SEQ ID NO: 448077 - DNA, 98 bp, Homo sapiens
tgtgggtaccctctatgaaaaacagaatggaaaagagtcttctgggttatgatcatagctactacttcattgcaacctttattactgaccacatcaga

SEQ ID NO: 448078 - DNA, 90 bp, Homo sapiens
ggaatatattactccagcccaaattagtaaagaaatgagagatgagctacatgtccgaggtgtgtatgcctggaagggcgaaacggacga

SEQ ID NO: 448079 - DNA, 76 bp, Homo sapiens
ctggaacttgccctgtctcctcgcagatgagcttagcagtgtctgcaaaaacgaatcttttcctacaacctgttaa

SEQ ID NO: 448080 - DNA, 100 bp, Homo sapiens
actgaaggtgcccgcatcccagctctgccaggaagcaaaggaaattaagtgttaaatccattacgaaccctcgatacctggacagcctggggaacccatc

SEQ ID NO: 448081 - DNA, 75 bp, Homo sapiens
ccaagttatattcaaagaccagattatgctgatcatcccttaggtttgaaaagcagagatgatgtcccaaaacta

SEQ ID NO: 448082 - DNA, 75 bp, Homo sapiens
gctaagaagtccatgccaggaggtcgtctgcagtcaggcgaccactttatcaagttcttcgctccgtggtgtggt

SEQ ID NO: 448083 - DNA, 75 bp, Homo sapiens
agggcgcgcggctggtgtccgccccgcccgaaaggtaaagtaccttttattcatgtgggaaatcaagtagtatca

SEQ ID NO: 448084 - DNA, 75 bp, Homo sapiens
cagtggtcatcgatgggagcaacgtggccatgaggcattttaaattatacctgacatcaagtactgaacgttttt

SEQ ID NO: 448085 - DNA, 96 bp, Homo sapiens
aaggaaaagagccctggaatatgaagcaacatgagatggtggatgaacccacagcctcatctagttgaatctgaagatgtggacctgctgatgaag

SEQ ID NO: 448086 - DNA, 82 bp, Homo sapiens
cgctggcagccgcggatctcaccgccgctcaggtgagtgtgtccgcttgaaaccaactgacatacagcccgacatcttcagc

SEQ ID NO: 448087 - DNA, 100 bp, Homo sapiens
cctgcatggtctgcggggcgctcatgtggatcatgctcatcctggtcggcctgggatttccctttatcatgcatggggtcctgtcccagcaattcgtgga

SEQ ID NO: 448088 - DNA, 83 bp, Homo sapiens
gcccgaggaggcagccaagctcgtagcctgccactccgtgcgcccccgaagcttaccctgtctttgagccagtgccacctgtc

SEQ ID NO: 448089 - DNA, 74 bp, Homo sapiens
ggatccagtgttcaccatcctggccccggaaggtgactcatctgaggaagttgacctgaccatggtttatcaag

SEQ ID NO: 448090 - DNA, 100 bp, Homo sapiens
ctgctattccggcgcctccactccgtcccccgcgggtctgctctgtgtgccatggacggagacaagaggagcagcagcggcaccgcccctcaccctggag

SEQ ID NO: 448091 - DNA, 75 bp, Homo sapiens
cgagctggacccggaccggttttgggttccagcataactcacgtctctggtctttggatcaaaccagtggctgat

SEQ ID NO: 448092 - DNA, 100 bp, Homo sapiens
ccaaatggtggaagatcagggatttctggattctctacgggatctcatagcagattcaaatccaatggtcacagggattatggacccagaacagatgctg

SEQ ID NO: 448093 - DNA, 100 bp, Homo sapiens
cagctgctaaatagcaaagaccaggaagtgctgcttcaaacgggcagggctctaggaaacatatgttacgatagccgccggattcagaagccagccagag

SEQ ID NO: 448094 - DNA, 102 bp, Homo sapiens
catgccgctcctaagcctgcacagccgcggcggcagcagcagtgagaggtggtgatgatgtccagcaactctgtgaagcaggagaagaggagtttttggaaa

SEQ ID NO: 448095 - DNA, 82 bp, Homo sapiens
gcatccaacgtcaagtacaccatgcacaaggtcttccagtttctgaacctaggttttaaaatcaaagatgggaaaatcggag

SEQ ID NO: 448096 - DNA, 75 bp, Homo sapiens
ggaatgacaaacaaccagctcttcaggtagatttcgggcagacaacttgaacaagctgaagaacctatgcagcaa

SEQ ID NO: 448097 - DNA, 75 bp, Homo sapiens
cctgtaatcccagcgctttgggaggctacggaaacaggccgagaagaacgtggagaagaaaattgacaaatacac

SEQ ID NO: 448098 - DNA, 96 bp, Homo sapiens
ctttattattcaattgaaaagcctttgaaattctttcaaactggagccttattggagtcattcaatgacaagcgtaaaaagagcttcatcttttca

SEQ ID NO: 448099 - DNA, 78 bp, Homo sapiens
agcaagggtgcatctgagataattctgaaaaagtttttcacgactgaaaacaacatagcaaaataagccaagatgtct

SEQ ID NO: 448100 - DNA, 74 bp, Homo sapiens
acaagcggcgggacgccaggacgcggcgagcaagggaactctgcactaaactttacagcatgagctggggcaat

SEQ ID NO: 448101 - DNA, 123 bp, Homo sapiens
ctggaagcgaggaggctccacacggccgttgcagctaccgcagccaggacctgatcccaaccttgaagaaagtcctaaaagaaaaaatattacatatgaggaattaaggaataagaacagaga

SEQ ID NO: 448102 - DNA, 83 bp, Homo sapiens
gcccagtcgagcccggggcagcggctgccgggccgggactggtgcgcgaggggatgggtttgtggagttcttccatgtagagg

SEQ ID NO: 448103 - DNA, 100 bp, Homo sapiens
tctagaggcatggttgaaattgaattaaattacagaagacatccccgtgaagactttgaatatgaagactgtgtatgtttctgtgttaccaacaacagca

SEQ ID NO: 448104 - DNA, 100 bp, Homo sapiens
ctccaatggcgctttctacaagtaataatttttcaccatgcatcggaaaaaggtggataaccgaatccggattctcattgagaatggagtagctgagcgg

SEQ ID NO: 448105 - DNA, 98 bp, Homo sapiens
gaagccattgctccacaggttggcaatgaacccctcaatggaatgaattgcagccaccgtttaatgcaaaccaccctctgctcctcgctgcagatgca

SEQ ID NO: 448106 - DNA, 75 bp, Homo sapiens
gtcaatcagagcgtcctgtgcggccgacggtcgcaaggtcctacggtcaagcatccgggagtttctatgcagcga

SEQ ID NO: 448107 - DNA, 82 bp, Homo sapiens
cccgcgcctgggctgccggcacttcgcggcaggattttttatcaagcagaaatgcatcgaacaacgagaatcaagatcactg

SEQ ID NO: 448108 - DNA, 100 bp, Homo sapiens
ggctccgcggaagatgccggaccaagccctacagcagatgctggacaggaaacttggatttaactggccagaagcaggtattcaaagcagagaacaatcc

SEQ ID NO: 448109 - DNA, 100 bp, Homo sapiens
ttggcccagtgtttcttctgcttcaaggagctggaaggctgggagccagatgacgaccccatgactgagcacggaaggcatctaccgggtcagcgggaac

SEQ ID NO: 448110 - DNA, 100 bp, Homo sapiens
catctttagttcgtctttcctagagagggaaggtggccatccagaaggaggacttgcagaagtaccacaacagggacacctggttccagctgcagcacgt

SEQ ID NO: 448111 - DNA, 100 bp, Homo sapiens
gtcgctagaactcagttgtgcgttgcggccagtcgccactgctgatgaagtggcacacactctaactgaaagcagagtattaaagaacactagacatccc

SEQ ID NO: 448112 - DNA, 100 bp, Homo sapiens
cggtcacgaggtggaagaggtagaggacgatactctgaccgttttagtagtcgcagacctcgaaatgatagacgacgccacaggtcatcatctggatcat

SEQ ID NO: 448113 - DNA, 100 bp, Homo sapiens
gtttttaagaagaaaaagaaggccctgagtcaaagaagatgcctcgaactaaacaaattcatcccagaaatctaagagagctctccaaatcccagaatga

SEQ ID NO: 448114 - DNA, 100 bp, Homo sapiens
taccctttctgctttggacgaagccctgcatggtggtgtggcttgtggatccctcacagaggcattatattgtacttctagcaagtgcaccaacagaaaa

SEQ ID NO: 448115 - DNA, 83 bp, Homo sapiens
ctcgtattctcctgcccttccccagttcagagtcgtgacacttcaagaggtgggcagattattcatttgtgaatgaacagcat

SEQ ID NO: 448116 - DNA, 75 bp, Homo sapiens
gagaccgtgaccgagagcgtgaccgagagcgcgaatatcgtcatcgttagaaggcggcatattttctaccttcag

SEQ ID NO: 448117 - DNA, 100 bp, Homo sapiens
tatggctgcggtccagaacccggccctcaccgccctcaccacccctatccagacggctgcccttcaagtaccaattgggatttggaattccaacagtggg

SEQ ID NO: 448118 - DNA, 52 bp, Homo sapiens
agaaattgttcagttcttctcagtggaatttgaactccgaagggaaatcaag

SEQ ID NO: 448119 - DNA, 100 bp, Homo sapiens
aaatatgactacctttgaccaccagaactcagaaaatgtgaaacttttcagtgccttctcaggaaattgcccaaggactccagatactccaaataatgac

SEQ ID NO: 448120 - DNA, 73 bp, Homo sapiens
agattgagcatggggctctagtgcatcacagtgatatttgttcagtcgaatcaaggtgaagaggaaacaacaa

SEQ ID NO: 448121 - DNA, 90 bp, Homo sapiens
ctgatttgaacctcacacatgggaagtaggcaaacagggaaactgaggaccagagagggttgtaaacatgttaaaggcatcctgttatat

SEQ ID NO: 448122 - DNA, 99 bp, Homo sapiens
gccggaagatcggcagcggctccttcggagacatctatctcgctgaggaggatgaggacaaggaagatgatttccgagctcccctttacaaaacagtgg

SEQ ID NO: 448123 - DNA, 100 bp, Homo sapiens
acgccttatggagccagcatattccaggaaaatggcagacaatttttcggtaagtgttttatgcctgtttcttccccttgatcagctccacatggttgag

SEQ ID NO: 448124 - DNA, 100 bp, Homo sapiens
gcccacgggccagccccgccgccctcgcaacctggcagccgccgccgtggaaggaagggaaaaggccgaggcatcagcgtgtgaagaccgcaaagacgat

SEQ ID NO: 448125 - DNA, 100 bp, Homo sapiens
acaccggctgttcgaggccttgactgtagttaatgaaattatcaggaaggagttttcaggacctcctgccagaaatcagacgtaaaagaagccattatag

SEQ ID NO: 448126 - DNA, 82 bp, Homo sapiens
cggcgcaggtgaccggcgcgcgggagcgctacggccccaacgaacccagcgggtgccgcttctccacccgaggcttccacct

SEQ ID NO: 448127 - DNA, 53 bp, Homo sapiens
atacttacatagtttttggggaagccaagtggaggaagaagcgaatgcgcagg

SEQ ID NO: 448128 - DNA, 85 bp, Homo sapiens
tcctttttgctgacgtgtcatttctaagtactttctcctactccataaagacttcaaatgttccatttaagcagacctcttccat

SEQ ID NO: 448129 - DNA, 88 bp, Homo sapiens
atcccctgtttgagaaaaggcctaagaattttggcattgatcagaccaaacattgtctggcttgcactgtaaaactagttagctgaag

SEQ ID NO: 448130 - DNA, 82 bp, Homo sapiens
cgcattgactacgtgctttacaagacaatgcagatcttcgtgaagactctgactggtaagaccatcaccctcgaggttgagc

SEQ ID NO: 448131 - DNA, 51 bp, Homo sapiens
gcctccctcaccttggacacctcgcttggggagtggtacgggtatcacttt

SEQ ID NO: 448132 - DNA, 100 bp, Homo sapiens
gggagagtgagagctccccaggggagttctctgtgtctgtgaaatccagacatttaatgtggatgcaccatgccagaccgtggaagatttaacgaatggg

SEQ ID NO: 448133 - DNA, 99 bp, Homo sapiens
gaatcggccgctaccgcatgatcaagcacgaccgcgacaagcataacgaacctaaccctcagagctgtccatgctgttcacagaggagtgtgacaaggt

SEQ ID NO: 448134 - DNA, 100 bp, Homo sapiens
gccacagtcatgccctaccttcaggtgttatcagaattccgagaaggagtgcggaagattgcccgagagcaaaaagattagcctgaggcctgctcagtcg

SEQ ID NO: 448135 - DNA, 100 bp, Homo sapiens
gtctcgctccgtggccttagctgtgctcgcgctactctctctttctggcctggaggctatccagcgagcatattaatgaaaagtgccataaactgaaaaa

SEQ ID NO: 448136 - DNA, 100 bp, Homo sapiens
gttgcagggtgcgggcgagcgtcgacccgggccgctcctggaggaggaggtgggagatgggacgtctagttgcaagaaaacaagcttggggctcccactg

SEQ ID NO: 448137 - DNA, 101 bp, Homo sapiens
tgctgggcacccacggagcctccggggctgagagcgaccccacccccgagatggacagcctcatggacatgctggccagtacccagggccgccgcatggat

SEQ ID NO: 448138 - DNA, 90 bp, Homo sapiens
tccagcactggactcatggaggctgagcatttattcaggtgggcaccatgtccttgaagcttcaggcaagcaatgtaaccaacaagaatg

SEQ ID NO: 448139 - DNA, 80 bp, Homo sapiens
agaactggcagcggttttatcaactgacaaaactcttggattctatgcatgaacttgaactcagtgaaaatagaatcttt

SEQ ID NO: 448140 - DNA, 75 bp, Homo sapiens
cgccccttggcctcatctacttcttcgtccagtttaattggttggggtcagataagaagaggagtgacaatcaag

SEQ ID NO: 448141 - DNA, 50 bp, Homo sapiens
caggcatcatccgctatgcaattgggccttccttgaatccagaagctggc

SEQ ID NO: 448142 - DNA, 83 bp, Homo sapiens
tggagttgctgcaggcagagggagccacagatctggtggctggacccagagctgacctatggctgcgccaagcccttcgtctt

SEQ ID NO: 448143 - DNA, 99 bp, Homo sapiens
gcttgaaatgctacatttccaagcagaagaaggaggaggagtcggcgggcggcaccaagggcagcagcaagaaggcgtcggcggcgcagctgcggatcc

SEQ ID NO: 448144 - DNA, 100 bp, Homo sapiens
acagccttgttcatcggctcccagagaaaaatcggcagatgttacagctgctcatgaaccacttggcaaaagaaccatggagtctggcagtaccgccgcc

SEQ ID NO: 448145 - DNA, 100 bp, Homo sapiens
cgggaggtcaacgaggtcatccaggaaaatggctttgtaaagaagtttgaacctaaatctggctggatgacttttctagaagttacaggaaagatctgtg

SEQ ID NO: 448146 - DNA, 97 bp, Homo sapiens
cagatcttcatgtgtctcttctaagctgaataaagctgttttggaactgtcaggtacctcaaagcaaatgattctggggaccattctgaccacatgc

SEQ ID NO: 448147 - DNA, 99 bp, Homo sapiens
gttttaaacagaatttcgtgaacagccttttatctccaagcggaaagaaagctccacaggctcccaggatggtcccgtgagcaaccccagcagtagcaa

SEQ ID NO: 448148 - DNA, 98 bp, Homo sapiens
cgacagaccgtttgtgtgcaatgccccgggctgtggacagggcagcaggatgggtgtggaagcagtgatggcacttttggaggggaccccagataccc

SEQ ID NO: 448149 - DNA, 87 bp, Homo sapiens
acagtgatgttgatgctagttctgcagacatctggtccctgggcataacagctattgaacttgcaagaggggaaccacctcattccg

SEQ ID NO: 448150 - DNA, 75 bp, Homo sapiens
acgagcagcacttcttttacatccatgtggacaagcaactacactcgagcgtgcggacaggcaacctggagacat

SEQ ID NO: 448151 - DNA, 75 bp, Homo sapiens
agagcgtgaccgagagcgcgaatatcgtcatcgttagaagcgattgtaactgcctatgagaatagctctcagcat

SEQ ID NO: 448152 - DNA, 73 bp, Homo sapiens
gcgaatctataagaaaggtgatattgtagacatcaagttttctgaaaatggtaaccagaagaatttgagaatt

SEQ ID NO: 448153 - DNA, 75 bp, Homo sapiens
cccaagtgcattgcctttggaaacgaggtgaacgccccttccactgtaaccagtgtggagcttcttttactcaga

SEQ ID NO: 448154 - DNA, 110 bp, Homo sapiens
atcacagaagaatttatacagatatgtgatgcaagaaaccatcaggaacctggactgtataagctcgcgggattgatgtgcaacaagtgtctttggttataaattatgat

SEQ ID NO: 448155 - DNA, 83 bp, Homo sapiens
ctagagcaaataaccgttttgaaatttttaatggatcgagaagtggcgttgcttgctgaaatggacaaagtgaaagctgaagc

SEQ ID NO: 448156 - DNA, 100 bp, Homo sapiens
gtaactctgtttttagtcttcttgaacaaaattacgtctagaggagttctccaaaatgaaggaagaggtacccacggccttggtggaggcccatgttcga

SEQ ID NO: 448157 - DNA, 101 bp, Homo sapiens
caggcacagacaaattcattcatctgcccagtgcccgctaactgcggttccaggcgccggcgacgcaattccagaggatcatgcggccagatgatgccaac

SEQ ID NO: 448158 - DNA, 98 bp, Homo sapiens
gagcctcctgtggatatctgtctaagtaaggtgtgatccctcacatccacaaatctctgattggaaagaagggacagcagaaaactgcttagagggat

SEQ ID NO: 448159 - DNA, 74 bp, Homo sapiens
tttatactatcagaccttattttcctaaggatgagaatttttccctagattggtgtaaacagccagacgtgggc

SEQ ID NO: 448160 - DNA, 75 bp, Homo sapiens
ttggattttctttcccttattccagttgatccccaggttctccagctctatcagatcacccagatcaatcatggc

SEQ ID NO: 448161 - DNA, 80 bp, Homo sapiens
agcagaaatacacagacatggccaaggaggctatttagcagacatgacccacaagcagaagaagcattagcaaagaggag

SEQ ID NO: 448162 - DNA, 100 bp, Homo sapiens
caaaaaacaaatcagagagccagtagacttacagaaaaagaagaagcggaaacaacgttctcccgcaaaagcctcaagaaaggagaactagttatgaacc

SEQ ID NO: 448163 - DNA, 83 bp, Homo sapiens
cgccgaatcgctcctgcagcagagcatgatgccttcttctgtagagtgggcgctttgcagaatacgtgttgaatgaaatcact

SEQ ID NO: 448164 - DNA, 88 bp, Homo sapiens
cttggagctcaaggtgacaggccagagcccaggtccccaggacagtgcagtgagacagtacgccgacatctgcctcttcagcaccgcc

SEQ ID NO: 448165 - DNA, 83 bp, Homo sapiens
cacatgcccgctcacctgcgctgtgatgcctgcagagctgtggcttaccaggcaccgttcctgccttgggcgctcatgggctt

SEQ ID NO: 448166 - DNA, 82 bp, Homo sapiens
ggatatgggccggcccccggtgccggcggaggcagagcacaggccggagagcaccaccagatgtggacgagtgccaccgcgt

SEQ ID NO: 448167 - DNA, 100 bp, Homo sapiens
ggagagggagtgatgtcttccagactcggtgctgtacccgccggtccacttcctaacacatgctgccatttctggcttatggtttggcagcagaagacca

SEQ ID NO: 448168 - DNA, 98 bp, Homo sapiens
tcgggggaaccagctggaaagcaccctgggaatcaatcttcctaagctgaagaacctctacctgaatcagttgctcaactaccgttctgccatttcaa

SEQ ID NO: 448169 - DNA, 85 bp, Homo sapiens
cttgagtgagacccaacaagctgcttttcaccaaattgcaatggagcctttcgaaatcaatgccacttctgccccaccaacgttg

SEQ ID NO: 448170 - DNA, 100 bp, Homo sapiens
ttacagaaagagtcaacagcagtggcaacagactggattatggacagaacttggaaatattgagaataatttcttaaagccacttcatataggacttaat

SEQ ID NO: 448171 - DNA, 101 bp, Homo sapiens
ctggactgttgcgggccccgggacctgggctgggaacccgcggtggagcgggacacgaacgtgaggattaccccaatggcacctggctgggcgacgagaac

SEQ ID NO: 448172 - DNA, 101 bp, Homo sapiens
gcaaacaagccaatcccaggaggaaaaacgcctcgaagcggaggatccctgtgtcccagccgggcatggccgacccccaccagcttttcgatgacacaagt

SEQ ID NO: 448173 - DNA, 73 bp, Homo sapiens
cattggctgggaaggaaaaacagaatcagctgttccctgcgaaaggtagtaagcattaataatgtctttcatc

SEQ ID NO: 448174 - DNA, 74 bp, Homo sapiens
gacatcagaagacagtggatctctctggacaagatctacgcagaccccaccaagaggctggagctgtacttccg

SEQ ID NO: 448175 - DNA, 82 bp, Homo sapiens
gatcagaaccggtacctggatggcatgagctagagccggtgcaggccacgcagaacaagacagggaagtatgtgccgccgag

SEQ ID NO: 448176 - DNA, 90 bp, Homo sapiens
tgaaatgctcagctatctgcccggaggcaccacaggactgcagctccccagcacggttcaaaccttgtactactcagctgatcacaagct

SEQ ID NO: 448177 - DNA, 75 bp, Homo sapiens
agaggatgagaaggacgacaagcccatccgagggaagtcgttgcatatgatgatcccaaaattccacttttcaac

SEQ ID NO: 448178 - DNA, 100 bp, Homo sapiens
agccctgggtgatggaggaagaaatgtttgggaggcactgtccagctctgctttcccagcacgctgcctcaccaagaaagaatccagagaaggactggtg

SEQ ID NO: 448179 - DNA, 100 bp, Homo sapiens
atttctttgtggtttatctaaaaaccaaagataagccaatggacacgtcagtgttatctgaagaaggaggagagccttttcagaagaaacttcaaagtgg

SEQ ID NO: 448180 - DNA, 96 bp, Homo sapiens
ggaggacgaggagggattcctttccaaacttaagaaaatgtttacctcatgatatcccagccgaggggaaagttgctcagacagcttgcatgtcag

SEQ ID NO: 448181 - DNA, 88 bp, Homo sapiens
tcctgcttaaagaaatcagtccttcctttccgacttagtcctcgggaagaagtttcagactacaagattctggacaatcaggaagtcc

SEQ ID NO: 448182 - DNA, 100 bp, Homo sapiens
aaggggtggtcggcagcatggagggccccgacgatagcgaggtcacctttgcattgcactcagaacaactctgctcatggtgattacatgcaaaataacg

SEQ ID NO: 448183 - DNA, 74 bp, Homo sapiens
gccgaggcaccgaggcactcagaggagaggtggggctggtgtccgagcacttctcgcaggccccgcagaggctg

SEQ ID NO: 448184 - DNA, 96 bp, Homo sapiens
ggatgatgggcgtcccttcccccaagttatcaaatccaagggcggtgttgtgggcatcaaggcaaatccagatcccaacacttgccttggagtgtt

SEQ ID NO: 448185 - DNA, 83 bp, Homo sapiens
cttacctgtcaccttggctctcccacccaatggagatggctctaatgttcagagaagccgaactgggattaccatgcagaaat

SEQ ID NO: 448186 - DNA, 90 bp, Homo sapiens
gaattttgtctcaacactgctccagattactatgtcggaacagctggatttacctgtgagacaggcaggtcacgagaagagaatgccttc

SEQ ID NO: 448187 - DNA, 82 bp, Homo sapiens
ttatagaaaatatggatctttacatgttgaatccttgcagcactaaaatttgatgtgaagttcatttccaatccgccctcca

SEQ ID NO: 448188 - DNA, 82 bp, Homo sapiens
ctttgatctgggagcgcgatgagcctggaacggaagtgaggatcacctacagcaattctgtggtgttcttggtcacacattt

SEQ ID NO: 448189 - DNA, 82 bp, Homo sapiens
agacagaccccccccggaattctgagcaccaaaagatcacagattctgctggccatattctctactccaaagaggatgcaac

SEQ ID NO: 448190 - DNA, 100 bp, Homo sapiens
tggtaccgtacattttctcagttggcatttgatggagaaaaactcaggcctcgaaaaagcccaagacagcagaagcagacacctccagtgaactagcaaa

SEQ ID NO: 448191 - DNA, 100 bp, Homo sapiens
ccgttccctaccacagccttcggagcgtgctttggacaccatgaattttgatgttataaagggcaagccagtacgcatcatgtggtctcagcgtgatcca

SEQ ID NO: 448192 - DNA, 80 bp, Homo sapiens
ctggagcaggtcacctgttacaagccgctccgggaattctgaagttctgggcctttctcagaagactgtaatgtacctga

SEQ ID NO: 448193 - DNA, 80 bp, Homo sapiens
gctaagcgtcggcaagttctgtagagaaactcgggcaacctttgcttaaagcttttcaagccaggccaagaagctgtgaa

SEQ ID NO: 448194 - DNA, 100 bp, Homo sapiens
gaaagagattccttgcagagacagctcaacacggcacttccacaggtattctctactgccgctgatggtcaaacgcaagtggaaattaaagtgtgtcagg

SEQ ID NO: 448195 - DNA, 101 bp, Homo sapiens
tatgactgcactagctcttcctttgatggatgcctgaaatgtgcagatgccccgtgtcagaagagctgtccaactaatcttgatattaaatcattcatcac

SEQ ID NO: 448196 - DNA, 100 bp, Homo sapiens
agaaaccccgttgacaaggcactgctttttcatgacggtaagtaaggaggtctctgtaccatggctcgtacaaagcagactgcccgcaaatcgaccggtg

SEQ ID NO: 448197 - DNA, 98 bp, Homo sapiens
gcattttggcattgacatttaattttagggtcctttatatagaagggagagtagaagtctgggccaacggtcacaaaagttgtcactgttgtgacaac

SEQ ID NO: 448198 - DNA, 82 bp, Homo sapiens
atccagcctgcggagcctgtggggcaggacccagatgatgtggtaccagttggccaaagaagagcctggtgttggtgcatgt

SEQ ID NO: 448199 - DNA, 100 bp, Homo sapiens
ctgcattgcccgactccgtaggagcgcgggggcggctcctgctcttcctggactcctgagcagagatggctgagagctagcaaggaaaactcaggaccat

SEQ ID NO: 448200 - DNA, 96 bp, Homo sapiens
ccgagccgggatctcaggtcctcgggggcggcggccacgccaaggacggcaggactctggactgtcttcacactaggtggtgtgggcagcaaagcg

SEQ ID NO: 448201 - DNA, 100 bp, Homo sapiens
aagtatggagctcaagttcttaattattcagaatgctgcggttttccaagaattagacctttacgagaagcacagttttgtcttcagtttcctctccccc

SEQ ID NO: 448202 - DNA, 98 bp, Homo sapiens
ttcttggcagtcatggacaagagctattgatagaaggatgtggagagcatcttgtgcgcaccatactggctagagaatgttcacatgctttacaagct

SEQ ID NO: 448203 - DNA, 75 bp, Homo sapiens
gaaccctggtcaccgtctcctcagatgtatcctccactcctcgctggccaccatcctgctgcccaacagaagaag

SEQ ID NO: 448204 - DNA, 128 bp, Homo sapiens
gagtgtttgaatgccatccttatacatggagttgatattacaaccagtgacactgcagccaagaaggatcaagaaggtggagaagaaaagaaatctgtgcaaaagaaaaaagtaaaagagttaaaggt

SEQ ID NO: 448205 - DNA, 87 bp, Homo sapiens
gatcatggctgccgcgccgccgctacgggaccgcctgagctttctacaccggctggagatggagctgaagatgctgaagtctcagtc

SEQ ID NO: 448206 - DNA, 90 bp, Homo sapiens
aagagattaaagatgcagtacgccacggggccgctgctcaagttccagatttgaaggtgggtgcggctgctatttggacgagagttcccc

SEQ ID NO: 448207 - DNA, 131 bp, Homo sapiens
cagaaacagccttcttgcatcatatattcattatgttttccgcctaccaaatacttaccctaattcatcatcaccagactggatacacgtctgtttaactacgcaaaaggtaatgctggcatggcttactg

SEQ ID NO: 448208 - DNA, 88 bp, Homo sapiens
cgtcttctccacgccgctccgactccaggggagccgtggcctcctctccgccctagcgctgagatggcgggtgaaaaagttgagaagc

SEQ ID NO: 448209 - DNA, 100 bp, Homo sapiens
tagtagtcagcccttccctgaactacactgtgctgccttaaaagtgtttacggctccttcctcagagaagcttcctgttatgtaccttatggattctatt

SEQ ID NO: 448210 - DNA, 90 bp, Homo sapiens
cggacactcagctgatgcttggagtcgggctgatcgatggaattgtcagccacttgaagaagcaggcaggaccagcttcagtgcctctca

SEQ ID NO: 448211 - DNA, 83 bp, Homo sapiens
gtccagacaatctccagagctgctgcagaaaagctgtttggcacacagcaagaaggaggccatcagcaaactgggaagaggac

SEQ ID NO: 448212 - DNA, 82 bp, Homo sapiens
catccttcatacgactgaccctggagctgaaggccaggttttgcagtggtctgaggacttgccggagcagccttacttgcag

SEQ ID NO: 448213 - DNA, 87 bp, Homo sapiens
acattgcaatgcattatagcaatcccagacctaagtttgaagattggctttgtaacaaggcagaaggctcgtccactgcctcttcag

SEQ ID NO: 448214 - DNA, 101 bp, Homo sapiens
aggccgaactcgggttctgacaagatggccgggctgccccgcaggatcatcaagtgtgaaaacatctccttaaaagaacaagtggagtctataaataaaga

SEQ ID NO: 448215 - DNA, 83 bp, Homo sapiens
ccaaaccccccatcctctgggatgcttgaagttcagttctgcaagcaagtatgctgctctctctgttgatggtgaagatgaaa

SEQ ID NO: 448216 - DNA, 74 bp, Homo sapiens
gacgctgaacttgccactgagcccccaggggactgtgcgaactgcaggatcactactcttggaatcaaagataa

SEQ ID NO: 448217 - DNA, 101 bp, Homo sapiens
aagacgtcgaggggacgattggaatgacagtacttacagatcatcagtatttggagaggacaccactatgtgccattttgaaacaaaaagctcctcaacaa

SEQ ID NO: 448218 - DNA, 100 bp, Homo sapiens
atgtggtggaataagtgctagtatcggacatgatcctcatcttttatacactcttagtgctgtccagtctctgttggatgaacccaatcccaatagtcca

SEQ ID NO: 448219 - DNA, 98 bp, Homo sapiens
gaacctggactcggagacgtcggccagcaccgagagcctgctggaggagcgggccgggcggggggcctcggaagggacagaagatgagcctgtcggtc

SEQ ID NO: 448220 - DNA, 100 bp, Homo sapiens
aggattctgaaagactaatggagcaacaaggagcactgctgaaacggctggcggaggccgactcagagaaagcggtccaagacaagctgctgctatctgc

SEQ ID NO: 448221 - DNA, 74 bp, Homo sapiens
ctgattccttcattaatgtccagcacggaatgttaacactggtgaattagcagcaattaaagtaataaaattgg

SEQ ID NO: 448222 - DNA, 74 bp, Homo sapiens
cgcgacgctatggcgcactggagtaccctgttcctggcagattggcttccaggtcctcctcagcattggggaac

SEQ ID NO: 448223 - DNA, 100 bp, Homo sapiens
ggcgccgcgtccccggcccaaccatggcgtcctccgcggccggctgcgtggtgatcgttggcagaaacatggcttagttataatccccgatggcactccc

SEQ ID NO: 448224 - DNA, 89 bp, Homo sapiens
cctgatcgagtccctccggaactcacactccagggacagagcagaatgggctgatatagatccggtgccgcagaatgatggccccaatc

SEQ ID NO: 448225 - DNA, 75 bp, Homo sapiens
caacaaaggacactacatcaaggactgcccccaggttaacacagaaatctgcctcctgggccatgccgcttctaa

SEQ ID NO: 448226 - DNA, 75 bp, Homo sapiens
tacattgccagaacttggaatactctactggacaaacatttcctccaaggaaccattaaagagatcctggggact

SEQ ID NO: 448227 - DNA, 74 bp, Homo sapiens
actcacatgagacaaatgcgctcagcttcaattgctggcagcctgataggcagattccatttcatgatgtcaga

SEQ ID NO: 448228 - DNA, 83 bp, Homo sapiens
actcttcagaggaagcaattcgtacgcttgatcagacatatctgaagagatggattaagaatgctttggattaaggattgtgg

SEQ ID NO: 448229 - DNA, 75 bp, Homo sapiens
tgcagaccctcgcagtgagtgttacagctcttaagcgggctgacgcacgaggcacacaggaaggaggtggagcag

SEQ ID NO: 448230 - DNA, 50 bp, Homo sapiens
atgacaggcatgttgtataaatgtacagggccagtatggaaattaccagc

SEQ ID NO: 448231 - DNA, 86 bp, Homo sapiens
agacgccgctgccaacccttcagcctgcgagtttattaaccacttaacctctcagaactgaacaaagacaacattgttcctggaac

SEQ ID NO: 448232 - DNA, 100 bp, Homo sapiens
gatggtgttgatgaaggaatctgtcttgaaaccaatagtggaactgaaaagatctcaaaatctggacttgaaaaggttcggctttccagtttggcagcag

SEQ ID NO: 448233 - DNA, 90 bp, Homo sapiens
ccacagagacaactgcagagctacaaaggtggattacaaagctgacgagtggctgatgaagaacatggatcccctgaatgacaacatcgc

SEQ ID NO: 448234 - DNA, 51 bp, Homo sapiens
tcctattcctggtactccatggccaccaggaaaccctccccgaagaatggg

SEQ ID NO: 448235 - DNA, 75 bp, Homo sapiens
aagaagcagaagcgtctgctcaggttgcagcaggagagaggtcgcaatggaagaagagatcgccgcgctggtcat

SEQ ID NO: 448236 - DNA, 88 bp, Homo sapiens
ttgtgggacacctatgaagatgacatctcggaaatcagagttatgtttaccgaggacctgaagctgcctgcaagcttcgatgcacggg

SEQ ID NO: 448237 - DNA, 75 bp, Homo sapiens
cacgttcaaacagcagtgttagcaagacctgggggagaggctgaagccgacgtagcttctctgaacagacgcatc

SEQ ID NO: 448238 - DNA, 82 bp, Homo sapiens
agggaccgaagaggacctccactcagatcagaacgtgaagaaggttacccatgcagttgttactgtaccagcctattttaat

SEQ ID NO: 448239 - DNA, 82 bp, Homo sapiens
gaaggggccacgggtccagcccagcaaatgggactcggccagctggacacaggggggatatgagactttctactcggaatat

SEQ ID NO: 448240 - DNA, 120 bp, Homo sapiens
aatgatgctagctgctgccacctcaaaaacttgtgccacaactatagcatatccacatggagcttgggcccctgccgcagcccggtagaggctgtggaggtctaccgtccggaagcctgg

SEQ ID NO: 448241 - DNA, 50 bp, Homo sapiens
cccagagcccaggaggcaacatctgttcgtgctggccgtgggcagcgccg

SEQ ID NO: 448242 - DNA, 100 bp, Homo sapiens
agtctctaacgttttagaaaatcataacaagcggttctctaccctgtaaagacaagagatgatttcctaggtcaagtggatgttccactttatccattac

SEQ ID NO: 448243 - DNA, 50 bp, Homo sapiens
acctggcacttatgtcctccctgggaaagaacatggcctgtgtgcagcgg

SEQ ID NO: 448244 - DNA, 100 bp, Homo sapiens
cgaggggctccgggtcttccagagcgtgaagatcaagatcgcctacgagcgggacctggaggctgacatcatcggcgacacctctggccacttccagaag

SEQ ID NO: 448245 - DNA, 83 bp, Homo sapiens
gggcaaactgcttggcacctcttcaataggtgacattcaatgactcctgcttcaggtgcagaaatacagcgatttccagtgcc

SEQ ID NO: 448246 - DNA, 100 bp, Homo sapiens
ggaagcgccctggagagaggagagaaaatgtccactggacctctgtccaggacacattcagctaacgtattttagcaggtggagtgaggttgaagattcc

SEQ ID NO: 448247 - DNA, 83 bp, Homo sapiens
cctcaccatacaggaacagggcagacgttagcgtgagtgatcactctcaatcccggtgctggacccaaaggagacaacattta

SEQ ID NO: 448248 - DNA, 100 bp, Homo sapiens
gaggatggagatgaagatgaggaagctgagtcagctacgggcaagcgggcagctgaagatgatgaggacgacatggataagaatgaaatcgcctctgttg

SEQ ID NO: 448249 - DNA, 51 bp, Homo sapiens
ctcgcagactcacctgatcaccggaacccttaggagaaatcttgagagtgg

SEQ ID NO: 448250 - DNA, 100 bp, Homo sapiens
aagatggcggccaatgtgggatcgatgtttcaatattggaagcgctttgatttacagcagctgcagttttccaagagataacttcaccaagatgtccagt

SEQ ID NO: 448251 - DNA, 83 bp, Homo sapiens
ctttgaggagcactggaggaagcacaccctgtcctatgtggacgttggcactgggaagtgtacttttcccaacactggtgctc

SEQ ID NO: 448252 - DNA, 89 bp, Homo sapiens
ggagggcgcgcggccgagcggaggcggagtcggcgccgagaacatggatccacctctgatgttcactgaagagtaccagaaaagtctgc

SEQ ID NO: 448253 - DNA, 90 bp, Homo sapiens
gaagaatagagccataaagaaagcaaagcgcagaaatgttggatttgaaaatacctcctctgaaaaatggcagaagcagttttccatgcc

SEQ ID NO: 448254 - DNA, 100 bp, Homo sapiens
ttatcaaaatcccaggctgtcggaagcaagcgagtaaccagctcataaatcacatcgaacagtttttggatactaatgaaacaccgtattttatgaagag

SEQ ID NO: 448255 - DNA, 75 bp, Homo sapiens
ggctcccccatcagacactatctggtcaggtaccgagcggtatggcatttcaaatatagatacaaccattgaagg

SEQ ID NO: 448256 - DNA, 82 bp, Homo sapiens
cccatcttccgcacgacctcagcaaggcaaatgcgtcaacctttgaggatgtcacccaggtgtcctctgcctaccagaagac

SEQ ID NO: 448257 - DNA, 75 bp, Homo sapiens
tgatcgtgatggtgccgtcgctcatcaagcagcaggtccttaaggtttctcagtttgggtgcagatcatttgctt

SEQ ID NO: 448258 - DNA, 75 bp, Homo sapiens
acagatgtggcctccagagggctagcaataccaagtttccaggcccgaagagcatcccagactattgggactcct

SEQ ID NO: 448259 - DNA, 82 bp, Homo sapiens
cttttgagccccaagaaaactcagaggcgacatgttagtacagcagaagaggttttggggccttgtcacagatgccagatga

SEQ ID NO: 448260 - DNA, 100 bp, Homo sapiens
aagcatgcccaccactgccacaaacgccgcaccaggtcttgtagcagcgcctcctcgacaccaatgggaatcccaatggggaagtcgatgctggtgcttc

SEQ ID NO: 448261 - DNA, 88 bp, Homo sapiens
cagctgcggggcaagatggaggcgctgattttgggctcagaagcagctagtaaaggagactttctcttcagcagtgatcacctgattg

SEQ ID NO: 448262 - DNA, 75 bp, Homo sapiens
aaggccagaactggctggaaaagaaggacgtggtgggaagagcaagagggtcaactgcaacttggcctcttgatc

SEQ ID NO: 448263 - DNA, 83 bp, Homo sapiens
attctagcaaccatgaaccctgggggtgactttggaaaaaaggaggtagaacaatctccatctagcagcaaactgaaagtaat

SEQ ID NO: 448264 - DNA, 82 bp, Homo sapiens
aaatttggtgaagcacttaagaaatgtcatgagattgagagattgtggaagctgatcgaggaagcctaagcaggctctgtga

SEQ ID NO: 448265 - DNA, 98 bp, Homo sapiens
ttcagggcttggtctcagcattgtgggaggaaaagacacacccttgatctgtctatggcagtgcagaaattttcccagtcattgcaagatttccagtt

SEQ ID NO: 448266 - DNA, 100 bp, Homo sapiens
agtagccaaagagcaactaactgatgctgacaccaaagttttcggctttgtgagaaaccttaccatcaaacacgatggccagcaacgttaccaacaagac

SEQ ID NO: 448267 - DNA, 100 bp, Homo sapiens
gacatgcttgaccgtaccttggaggatggtgccaagcagcacaatctaacagcagtcaatgtccgaaacatccttcatcctgaacagaaacagatggtgg

SEQ ID NO: 448268 - DNA, 51 bp, Homo sapiens
ggatgaactacgagctgttggcatccttggcttcgagagctgtgcccagga

SEQ ID NO: 448269 - DNA, 98 bp, Homo sapiens
actgaaacggattgccagagaattggcagaagcacagacgcagtcttcagcaaggaagtgctgggaacgccctggagtgaacccaggaagatgcctgc

SEQ ID NO: 448270 - DNA, 51 bp, Homo sapiens
agatgcaggatcaggatctggagatggagacatatctgaagagatggatta

SEQ ID NO: 448271 - DNA, 97 bp, Homo sapiens
accgccgctaccacccgctctttggcaaccaggaggagctggacaaggcttgacgatgaaatcgctcagaagaacaatgccctgaagaagatccggg

SEQ ID NO: 448272 - DNA, 100 bp, Homo sapiens
ccgccggagaggagtggcctcgcccgcttgcaatggctgccatccggaagaaactggtgattgttggtgatggagcctgtggaaagacatgcttgctcat

SEQ ID NO: 448273 - DNA, 83 bp, Homo sapiens
tcggggtataggaagagaggtccgaaacccaagcggcttctgctgcagcaaaatgatgcttcaacacccaggccaggtctctg

SEQ ID NO: 448274 - DNA, 82 bp, Homo sapiens
ggcaggaccagcgggcgggggcccacgaaggagcaggagcggcttcgcttggagcaggagcgagagcaggaacagaagaagg

SEQ ID NO: 448275 - DNA, 90 bp, Homo sapiens
gaaaaggggtgattgttgcaaagagcaaagaagaggcctgcaaagctgtacaagagatcatgcagtgtctttggtgcaacactaacaagg

SEQ ID NO: 448276 - DNA, 100 bp, Homo sapiens
gctgaagctggaccagtgcttccagctgaggctgtttgaacaggatgctgagaaggaatggaagttggatacactttgtgacttgtacgagacactgacc

SEQ ID NO: 448277 - DNA, 75 bp, Homo sapiens
cgctgcgaggggactactaggagcgccgaggcaacaagttgggagatacagctttgcatgctgctgcctggaagg

SEQ ID NO: 448278 - DNA, 75 bp, Homo sapiens
cagacgggctcagggaagacatacaccatgggggaggccagtgtggtcctttgagaaacaaggttttcattccgg

SEQ ID NO: 448279 - DNA, 75 bp, Homo sapiens
ctcaccagtgcgcatgcgtggctctccggcaccggtccgtactccagcgaggacggtggccgcagaggtgcggaa

SEQ ID NO: 448280 - DNA, 74 bp, Homo sapiens
gggaccatgtggctgccttgggctctgttgcttctctgggtcccagtgacaaccatgagtggaaaaaactaatt

SEQ ID NO: 448281 - DNA, 75 bp, Homo sapiens
ggcgtttctgtacatggattatctggtgaatgaaaactttgccattgatttgatagcagagcagcccgtgagcga

SEQ ID NO: 448282 - DNA, 100 bp, Homo sapiens
aatttgtattctgcaataaaacccagagtaaactcttagataaaatgacgacgtccttctggaagaggcgaaactgggcgttgaagggcaagattaagaa

SEQ ID NO: 448283 - DNA, 101 bp, Homo sapiens
tccgttgcctgctcccggagggagacgcgctgccgaggagaacccagcggttctctctttccagacgtagtgaactgtatgcagactgacaatctggaact

SEQ ID NO: 448284 - DNA, 87 bp, Homo sapiens
agcctggaagaactcgtcatgctctttgtagcgtggtgcttctgttgctcacaggtctatgctccatcagcaagcactgccgactac

SEQ ID NO: 448285 - DNA, 75 bp, Homo sapiens
tcttcccgcccgccttccgccgtctcttcgagttcttcgtgctgctcaaggacggggaggtttactgcatcgacg

SEQ ID NO: 448286 - DNA, 82 bp, Homo sapiens
tgcgggaggtggagcacctgaagagatgccagcaggtggagattctggacgcaaagacaagggagaagctgtgtttcttgga

SEQ ID NO: 448287 - DNA, 100 bp, Homo sapiens
tctcatcagatatgcccaagaggcagtctttggatctggaaagtgcacttcagaaggagatcacaacgcgttatcaactggatccaaaatttatcacgag

SEQ ID NO: 448288 - DNA, 100 bp, Homo sapiens
ggaagaccctcctgccaaaaggaaatgcatctttatgtcagaaacacaaagcagcccaaccaaagggaatacaggagtttccagaaaatataaaaaattg

SEQ ID NO: 448289 - DNA, 82 bp, Homo sapiens
aaagtgcgcccacagcagcaaccttggagcaggcagactagacgcttgaagcaaagctgccatcccagaagacgacatgctc

SEQ ID NO: 448290 - DNA, 75 bp, Homo sapiens
gggggatggttccatcatggcgtcaatgcagatccgatcacataggacagtatgcaccttaagatcctgaagaaa

SEQ ID NO: 448291 - DNA, 100 bp, Homo sapiens
gcaaacttgctgtaaagagccagagtttgccttctgccaggtggatgcctccatcgctctggccctggccctggccgtcctgtgtgatctgctccagcag

SEQ ID NO: 448292 - DNA, 82 bp, Homo sapiens
cagacggctcacctgtgcgggatggaacaaaaggtatgatctcgtgaaaccttgagagaaactgaatgacgaatgaaactat

SEQ ID NO: 448293 - DNA, 100 bp, Homo sapiens
tccaaaatcttctgttctctgccccaaactaccagttccagcgaggtggtcttttggtgccttaatgaagagtcggattttgaagcagccttcagcgtgg

SEQ ID NO: 448294 - DNA, 100 bp, Homo sapiens
agatccacagctaagacgccaggacccactggaagcctagaaatggcgcattctacattctaaaggggagctcagtgaagatagacataaacagtatgag

SEQ ID NO: 448295 - DNA, 110 bp, Homo sapiens
atcctgtgtaactacaaggccatcgaaatgccctcacaccagacctacggagggagctggaaattcctgacgttcattgatctgattcccagaagttgtgcatgagttcc

SEQ ID NO: 448296 - DNA, 50 bp, Homo sapiens
gaatgttccctgacaatttcgttaaggcacgtggactccctttaatccag

SEQ ID NO: 448297 - DNA, 50 bp, Homo sapiens
attctgagaggcatcagtcaaggcaattgttctcttaactgaattaatta

SEQ ID NO: 448298 - DNA, 75 bp, Homo sapiens
cgccatggcgaccggagcgaacgccacgccgttggttacagaatgtctgaaggggacagtgtgggagaatccgtc

SEQ ID NO: 448299 - DNA, 100 bp, Homo sapiens
ctggattataaggatgtcatccccatggctgatgcagcaggcatcatccgctatgcaattgggtttgctgacctctctgaggctgccaaccggaacaatg

SEQ ID NO: 448300 - DNA, 50 bp, Homo sapiens
cccctccctcagcttccgccccaaaaggatgtggagagcatcttgtgcgc

SEQ ID NO: 448301 - DNA, 75 bp, Homo sapiens
gcggcccagctctctctgacacaggtgcatccactgtggtgtcgtccacctgaccttggccttgctgaaaagcca

SEQ ID NO: 448302 - DNA, 100 bp, Homo sapiens
gagacgtgggcgccctccccgccaaggcccgtgcgagtctgaagatgatgagaaactgaaaaagaggaaggagcgatttgggattgtcacaagttcagct

SEQ ID NO: 448303 - DNA, 75 bp, Homo sapiens
acatctcctgctattccttgggctgcctttcctgcaggctgtggaaaatctctgttctcacaaagtctccccaat

SEQ ID NO: 448304 - DNA, 82 bp, Homo sapiens
gctcgcgctactctctctttctggcctggaggctatccagcgtggatccataaagaacccagccaacccgcagagggagggg

SEQ ID NO: 448305 - DNA, 75 bp, Homo sapiens
aaagtcgcagcgagctggagccgccggagccaatcctgaggcaaaagaaacattttaattcactgcacattccaa

SEQ ID NO: 448306 - DNA, 74 bp, Homo sapiens
taccttgcacagtgacctctgcatctgtggccacagggcagccccatgagggctccagctactcttcgaggaag

SEQ ID NO: 448307 - DNA, 98 bp, Homo sapiens
gtggttctcttcccaaagtggaagccaaattcatcaattatgtgaagaattgcttccggatgactgaccaagagtgatgtggagccaactgcaccgat

SEQ ID NO: 448308 - DNA, 74 bp, Homo sapiens
gaaaatggcggtgtctacagtgttctcgacttcgtcgctgtctccagcttgtacctcatatcagatgactccgc

SEQ ID NO: 448309 - DNA, 73 bp, Homo sapiens
agactacggagcataggaggaaaattcatcatctgaagcctaaagaaactgttccaactcttgctccaaaaac

SEQ ID NO: 448310 - DNA, 75 bp, Homo sapiens
tggagagtcgtgcggacagcattgggagcggccgagccatcccaattaaacagcaaagaagacagtggaatccaa

SEQ ID NO: 448311 - DNA, 98 bp, Homo sapiens
cagcgcttcctgcggatgtgggcagtagaacactctctccccagaaatccaacttctcaagggtgtccgcaatgttgccagtgtctgtctgcagattg

SEQ ID NO: 448312 - DNA, 99 bp, Homo sapiens
agagaaggaaggtttggatcctcattaaatgagatggaagacatcgtccaagaagatggagaggtggtggccgagagtggaaataatactccagctcac

SEQ ID NO: 448313 - DNA, 99 bp, Homo sapiens
ttctcatgaaggaaggaaccgaaggcccagaaggagttattagatactgaactggacctccacaagaggctgtcctcaggagaagacaccacagaatta

SEQ ID NO: 448314 - DNA, 80 bp, Homo sapiens
acccgaagaagaaaggattcgttacagccagagattgagaagcagggccctgagcggaagaggattaagaaggagcctgt

SEQ ID NO: 448315 - DNA, 51 bp, Homo sapiens
atgcattacatcaaagacacactgaggtggaacagaggctgaagttgttca

SEQ ID NO: 448316 - DNA, 100 bp, Homo sapiens
ccccacgcaaccccagatccatttacactttacacaacatggctgacaaggccaagcctgccaaagctgccaacaggacgccccccaagtccccggggga

SEQ ID NO: 448317 - DNA, 51 bp, Homo sapiens
atcccagactgggtttatgaagaggatcgcttcttaacaactttgtccagc

SEQ ID NO: 448318 - DNA, 113 bp, Homo sapiens
caggaaaaggcttatgtggaattccaagattatataaccaaaacatatccagatgacacctacaggacaaatgatgcgaaggttggtacattagtgggggaagacaaatatgg

SEQ ID NO: 448319 - DNA, 83 bp, Homo sapiens
gttgcgatggcgcagaaaccccgttgacaaggcactgctttttcatgacgcggagctggagtttgttcagatcatcatcatcg

SEQ ID NO: 448320 - DNA, 75 bp, Homo sapiens
cttggacttgggaccccctcaggggaacagcgagcagatcaaaggcatagaatgtcaagctaaccaggcgtccgc

SEQ ID NO: 448321 - DNA, 73 bp, Homo sapiens
aaaaaccttcgactatgcagagacatgagatggtagccaacccctcagcttaacattggtatcccttccctga

SEQ ID NO: 448322 - DNA, 101 bp, Homo sapiens
atcctgcggcagaagccgagttcaacatcctcctggccaccgactcctacaaggtgctaacagacatcaaagctgacaaagaccaagccaacgatggtctt

SEQ ID NO: 448323 - DNA, 82 bp, Homo sapiens
ctgccgggacaactcggggcggccactcttgccaggaggcgtaagtaagtaaggaggtctctgtaccatggctcgtacaaag

SEQ ID NO: 448324 - DNA, 100 bp, Homo sapiens
gcagagcgcggaggagccgcgagcgctgagggagatctctttgctgccactttcctcattaagaatggggcctttgtcaacgctgctacactgggtgccc

SEQ ID NO: 448325 - DNA, 96 bp, Homo sapiens
cgccctgcccagaaacgtccacatgtgggtactgcattcctaccggtgtgacagctccagcggcgccatgagcaaatgaaaaagaatttggaagca

SEQ ID NO: 448326 - DNA, 100 bp, Homo sapiens
cctgggccaacatggggcaggagtgcatcaagtgccacatcaacgtgtatccacacaagcaggttgcccccaagtttcctggcagtgtgtgatactgagg

SEQ ID NO: 448327 - DNA, 100 bp, Homo sapiens
agaattgatactcagcagctggaccggcaaattaaagcaattatgaaagaagtcattccttttttgaaggacattaaattgtatgattggacagatgaag

SEQ ID NO: 448328 - DNA, 96 bp, Homo sapiens
gcagcgctgccatggagcccagcagcaagggctttctctacgtgctgttgtctcactgggtttttgtcggagccccacgccctccggcctctgatt

SEQ ID NO: 448329 - DNA, 82 bp, Homo sapiens
accatggagtcaccttttagcccgggactctttcacaggctggatgaagattggggatgaagccccacccgcccttcaggat

SEQ ID NO: 448330 - DNA, 75 bp, Homo sapiens
aggagttgagggcagggcggagagcagttctccaagctgctatcaccagaggcacccagcagctttgcttttgtg

SEQ ID NO: 448331 - DNA, 83 bp, Homo sapiens
gctcggtgaccttggtctgggccgcttcttcagctctgagaccaccgcagcccactccctagtcaccttcaggccattcagag

SEQ ID NO: 448332 - DNA, 50 bp, Homo sapiens
cgccaaatttggtgcctggagtaggaggagctcgaggccatgagcagata

SEQ ID NO: 448333 - DNA, 75 bp, Homo sapiens
tgaatatgttggattcagtaatgcaacgtttgggtacccagaccccacctacctgacccgggtgcaagaggagct

SEQ ID NO: 448334 - DNA, 71 bp, Homo sapiens
tcgccgcggggctggccgccatgcacaagctgcacttcctgcacaggaaatctactttcttcaatgtgtta

SEQ ID NO: 448335 - DNA, 98 bp, Homo sapiens
agcttagtggcaacaacaaataagcattggcctggaaaatccacatcccaacaggctaaacaaggcaggaacttataatcaaaactgtattaagctcg

SEQ ID NO: 448336 - DNA, 51 bp, Homo sapiens
gtgctatgctgtgggccccgctcagcactctcgagtggaccctgaggagct

SEQ ID NO: 448337 - DNA, 100 bp, Homo sapiens
tggaggagggttacttcaacagttccctgtcgctggcagacaagggggtggattactgcctgctgagtgaccatggttgtgaatactcctgtgtcaacat

SEQ ID NO: 448338 - DNA, 74 bp, Homo sapiens
gcgtcacactacgacagtgagaaaggagagccatccaaaactctgtttgtcaaaggcctgtctgaggataccac

SEQ ID NO: 448339 - DNA, 87 bp, Homo sapiens
gaagaagaagtctggaggcttccagtccatggccattggatttaatgtagagacggtgacgtacaaaaaccttaaattccaagtctg

SEQ ID NO: 448340 - DNA, 98 bp, Homo sapiens
tatacaggaacaatattgatgatgtagtaaggacaactgtcatctgggaagtaacaacgcaggatgccccctggggtggactgccccatggaattctg

SEQ ID NO: 448341 - DNA, 50 bp, Homo sapiens
tggaattattgctggaagactggcatcaacaaggcgtgcaggtattttga

SEQ ID NO: 448342 - DNA, 83 bp, Homo sapiens
cgacgaccctagtgctcgtcgccgtggcgccatgggtgttgtccgcagccgcagagcttttgtgctgccttgcaccaggaact

SEQ ID NO: 448343 - DNA, 75 bp, Homo sapiens
tttgtaacttttgatgatcatgatacagttgataaaattgttggtgcaggtggtaccattataacgaattttgag

SEQ ID NO: 448344 - DNA, 90 bp, Homo sapiens
ctgagacccaagcagctcagtaaagaaccctaaggactctgcaatatgaataattccctagagaacaccatctcctttgaagagtacatc

SEQ ID NO: 448345 - DNA, 51 bp, Homo sapiens
agcctcatgagtagctgggattacagctgagcttccaacgcaaggtgggca

SEQ ID NO: 448346 - DNA, 75 bp, Homo sapiens
gagacggtcatccctgtagatgtcatgaggcgagctgggactatcaagaaatccaagtggtaatgggcgaagttt

SEQ ID NO: 448347 - DNA, 75 bp, Homo sapiens
tagaatatgaaaataagagccctgaggatccacaggtcttggataagtgcttttgaagatgatgatatcacgcac

SEQ ID NO: 448348 - DNA, 75 bp, Homo sapiens
aaggggctgacggccgtgcccgaggggctcagcgccttcacccaagcgctctttctgaaacaaagactcattttg

SEQ ID NO: 448349 - DNA, 49 bp, Homo sapiens
ctgagccgcccctacacccacaggtggagtttcaccatgtttcccaggc

SEQ ID NO: 448350 - DNA, 100 bp, Homo sapiens
agtagcagccgcaactggacggaggacatggaaggagatgttgatgatggagacacagtgacagatttcatggcccaagagcgagaaagaggcattacta

SEQ ID NO: 448351 - DNA, 96 bp, Homo sapiens
aaatgagacatgcacataatataggaacagttgggaccctaggaggcagcggcagttgtcaatgagctctgcagacagtgcggacgctaagcggac

SEQ ID NO: 448352 - DNA, 100 bp, Homo sapiens
agccctcaagggctgaaaataaatagggaagatggagacaccctctgggggtcctctctgagtcaaatccagtgagtccgaaattgaagttcagaggaag

SEQ ID NO: 448353 - DNA, 50 bp, Homo sapiens
cgagatttctgttgctctgaagatttcttcctgaccactatgcccactga

SEQ ID NO: 448354 - DNA, 90 bp, Homo sapiens
taagggctgccctgcggacctagtggtgtgtgacggggctcctgatgacgcaaacatgcagatctttgtgaagaccctcactggcaaaac

SEQ ID NO: 448355 - DNA, 100 bp, Homo sapiens
ctgtggaaagaagttgcaaaacactggctggaaactgacaaactagctctcccgatgagccccagcccgcttagcccgagccccatccccagccccaacg

SEQ ID NO: 448356 - DNA, 98 bp, Homo sapiens
cagaagttcgatgagaggctggtatacacctccttctcccaagaaaccagcctggacaccaagtctgtgtcagaaggccacctcaagaggaacatcgt

SEQ ID NO: 448357 - DNA, 112 bp, Homo sapiens
aagaaaaggggccttctgtggattggggaaaaatccagagaccccctgaagattcggttattgttgtgggtaatccagccaataccaactgcctgactgcttccaagtcagc

SEQ ID NO: 448358 - DNA, 82 bp, Homo sapiens
ctctcccgccgcccggagaggctctgcagccatgaagccaaccgtcccgaggaatatgaagacaaggctggaagacctagca

SEQ ID NO: 448359 - DNA, 83 bp, Homo sapiens
cccagatgcccaccgggatggagaaggaggaggaatcggatagtaatgatgacactgaagatgtttcactgtttgatgcggaa

SEQ ID NO: 448360 - DNA, 119 bp, Homo sapiens
ggcggcgccagacccgaggcgctagggaagatcgcaccgcggacgcccgctgagcttggcgcacgggccgaccagcccgtgtccaggagccccgccaggtgcccgcgccaggccctcag

SEQ ID NO: 448361 - DNA, 81 bp, Homo sapiens
tgttaggatattgtggaacggtgaaaagaaatctgttgcttcttgcatgggtagatcgacacttgagaaagctggatcagg

SEQ ID NO: 448362 - DNA, 75 bp, Homo sapiens
aaacaggaacactcaggctctgaggaggcccagaagccaaacctggaagatgttcctcctgctgatcaagagaag

SEQ ID NO: 448363 - DNA, 75 bp, Homo sapiens
tggatgtccttgagttcaaccaggttggtgttcgaggaagagacattgttgttcttggtgtggagaagaagtcag

SEQ ID NO: 448364 - DNA, 74 bp, Homo sapiens
tgcctcagcctcccgagtggctgggattacagtttgaaattggcacaatggaagaagctggaatttgtgggcta

SEQ ID NO: 448365 - DNA, 73 bp, Homo sapiens
ctccatcactcgtcttatggaggtgtctgtaactgagatgggacacgagtgggtttggctggattctgaacaa

SEQ ID NO: 448366 - DNA, 100 bp, Homo sapiens
gtcttaagttgtggtctgacacacactgctgtggttcccctggatttagtgaaatgccgtatgcaggtatactctggttacaggtttatcctcactgcct

SEQ ID NO: 448367 - DNA, 75 bp, Homo sapiens
ccaagctggacgctgtcctggaggaattcaagcgagggaaaggaaaacctcttcagcgcaaggtgaaaccaccta

SEQ ID NO: 448368 - DNA, 83 bp, Homo sapiens
gggaccatcattcctttccggaagcacacagtgcgcggggagcgttcctacagctcagagtcaagatctccactgaagttggc

SEQ ID NO: 448369 - DNA, 100 bp, Homo sapiens
ggagctggaggccaaggtggatgccctgaatgatgagatcaacttcctcaggaccctcaatgagacggaagaggagcaggacttggatggtgagaagggg

SEQ ID NO: 448370 - DNA, 100 bp, Homo sapiens
agcgggagaaggcgctgcgcaagcacgctgaggagttgcgacaaccaccagttaagcgtttgagacttcgtggtgattggtcagatactggacccagagc

SEQ ID NO: 448371 - DNA, 82 bp, Homo sapiens
ggcaagcgcagggggacggggaccagcagctgtcgccgccgctctcagatgaatcagaactccttacggttcctgatggttg

SEQ ID NO: 448372 - DNA, 101 bp, Homo sapiens
ccgttacccggggcaacagctgagccgtctgggaagggatgcatctgctacaagaattagttgatcgagtgctggaacgttttcaggcatctggactaata

SEQ ID NO: 448373 - DNA, 73 bp, Homo sapiens
aaagcagcttatgctggaggcttggttttggaccccaaagttgagatcagcaaggacaactcctgcaaagaaa

SEQ ID NO: 448374 - DNA, 82 bp, Homo sapiens
cctctccccctcggaggcggcgggcggaggcggcgggagcatcagatccatgctgctgctgactcggagccccacagcttgg

SEQ ID NO: 448375 - DNA, 88 bp, Homo sapiens
ccttcgtcacagccctcatgttcagctccatcgtctgcagcgtcccgcacacctggcagcaaaagagacccctctccctcagggccac

SEQ ID NO: 448376 - DNA, 105 bp, Homo sapiens
gtggcttgtggtgcggcctcaccatacaggaacagggcagacgttagcgtgagtgatcactctcaatcccgggttcgagaacttgtcttggacaattgcaaatca

SEQ ID NO: 448377 - DNA, 75 bp, Homo sapiens
gttgggccctgcaggaaggacggacttcaggggcaggttggatggcaagcatgtggtgtttggcaaagtgaaaga

SEQ ID NO: 448378 - DNA, 90 bp, Homo sapiens
agatgtctgtgaggcaagcaaaaacattagtgccagcagtagttcccaagggctgtctcagccatccacccagacgactcagtatctgag

SEQ ID NO: 448379 - DNA, 100 bp, Homo sapiens
cgatggcctactggggataacattcatgcagaacatcagattagcctgaggcctgctcagtcgttcctaatgaataaaaatcaagtgccaaagcttcagc

SEQ ID NO: 448380 - DNA, 87 bp, Homo sapiens
gcgaggagaaccaactggtcccgaaagagtgatgctgcttcaaaagtcatggtggaattgctcggaagttacacagaggacaatgct

SEQ ID NO: 448381 - DNA, 83 bp, Homo sapiens
gcgctgagcacgttcttccaagaaaccaacattcccaacagccaccaccaccaccagatgcaaaatgatgcttcaacacccag

SEQ ID NO: 448382 - DNA, 100 bp, Homo sapiens
ttggatttgatagcacacagtggaagtggtacaccatccccaaaacgaacatctgtaggctccaggccaccagcagtaagaggcagtagagatcgtttta

SEQ ID NO: 448383 - DNA, 98 bp, Homo sapiens
caagggctccatgcgaccgctgcacatccaggctcttgtcaggatggtgaagctgttcatcggaaacctgccccgggaggctacagagcaggagattc

SEQ ID NO: 448384 - DNA, 83 bp, Homo sapiens
ggaattcgccgtgcccgagaatagctccgtccagcagtcctcctgcatatgcccaagaggattgggagtggaatggacaccag

SEQ ID NO: 448385 - DNA, 98 bp, Homo sapiens
ggtagatgagactaacatgtatgaaggtgtaggaagaatgtcaagagcaatctgaatccaaatgcaaaggagtttgttcctggggtgaagtacggaaa

SEQ ID NO: 448386 - DNA, 74 bp, Homo sapiens
ttggagacattgcagaaggctctcaaaggttacacaaaacttccttttaaatggtttgactacctcagggaaac

SEQ ID NO: 448387 - DNA, 75 bp, Homo sapiens
acctgcgacacatcgagcacatggaggcgctggcgtgctggttaccacagtggtggccggaggcattaccatcct

SEQ ID NO: 448388 - DNA, 101 bp, Homo sapiens
tccaccagttgcacgatcctcaccgcaacattccttatccaatcccttaccggtttctgacgtagaagagcttacccctccagagcatctttctgatcttc

SEQ ID NO: 448389 - DNA, 85 bp, Homo sapiens
gaattgtaatggaaagcatatggacaggtctacgccacatcacttaggatttcaaatatgcgtgcattagagaatgattttttca

SEQ ID NO: 448390 - DNA, 88 bp, Homo sapiens
tgcccgctcagaagttctcggcgctcacgactcaccccacacagaccgcgtttctctccagtgtcgacctacacactcactgctctta

SEQ ID NO: 448391 - DNA, 100 bp, Homo sapiens
ctttgagatgcacataggagtcaaccacttggactgtacaatttgttcaaggaatttttgtagaaaaatacgatcctacgatagaagattcttatagaaa

SEQ ID NO: 448392 - DNA, 100 bp, Homo sapiens
gctcctctctccttggcctctcctgggatcggcccaaggccagttctccgcagatatgcacccaatgtccagggagcgtgcaaaatttgtcaaaagtggc

SEQ ID NO: 448393 - DNA, 100 bp, Homo sapiens
cggccaccttcctaggctacttcaagtctggcctgaagtacaaggatgctccaaagtgacctgcatcagcttgacccgggaggcctccattaaactgtca

SEQ ID NO: 448394 - DNA, 100 bp, Homo sapiens
cccgcccggagccccggcccccacagcttcctgcctgacacagctcacttcaagaagtgcacaatgtcagaacgtggaattaagtgggcttgtgaatatt

SEQ ID NO: 448395 - DNA, 99 bp, Homo sapiens
ggaacgatggcgaggagagcacggaccgcacgcctcttctaccgggcgccccacgggccgaagccggtgtgatgaatgcagactctgctaccattttgg

SEQ ID NO: 448396 - DNA, 90 bp, Homo sapiens
gaatcaaatccaaagagtgtctgacatttcttttgtgcaagatgagcctcaagtgcttctgcattacatgttctaagaacggaagcatct

SEQ ID NO: 448397 - DNA, 100 bp, Homo sapiens
ccgtgcggtgagggcggtggcgcccgcgggacctgcggccagcactccttgcccgaggacagagatggcgagcgcccggattggggatgagtatgcggag

SEQ ID NO: 448398 - DNA, 80 bp, Homo sapiens
aagaggactgaagaagcagctgcaggtttgaaattccagagcctgagccaacagaagctgatcgcatagctatagagaat

SEQ ID NO: 448399 - DNA, 100 bp, Homo sapiens
ggggcctccgtattgaatgaaagacccagtgcaaagacatcaccatgaacactagcaattccagaggggtgactaccatattgatgtctgtatcaatgac

SEQ ID NO: 448400 - DNA, 100 bp, Homo sapiens
tgttttaagttctacaatgtctggcagattgaggaacaaagataagggagaacaagcagaaactggtcagaggctatgtggaggagatatagagccaaga

SEQ ID NO: 448401 - DNA, 82 bp, Homo sapiens
cagctttgacaatacaggaaatgttttattctaccttgtaaatactgttatttgtatatactgtaaatgatgacatcggtgg

SEQ ID NO: 448402 - DNA, 100 bp, Homo sapiens
gaaatacatccaggaaagacatggagattctcttaaaaagcaagttaaggtgaactgcacagctgaagtactttacccttcaacgggacaagaaactgca

SEQ ID NO: 448403 - DNA, 100 bp, Homo sapiens
ggcggccgaacgatgtgcgagaactgcgcagacctggtggaggtgttaaatgaaagaggagaaggagaagcggcgcctcgaccagctggaacgtaagaag

SEQ ID NO: 448404 - DNA, 100 bp, Homo sapiens
tctcaagctcatattttgaagtgtttacggactgctcactagaagctcagcccaaatatgttagaggtgggaagcgttacggacgaaggtccttgcccga

SEQ ID NO: 448405 - DNA, 82 bp, Homo sapiens
ggcgtccgtgacgctgagcgaggcggagaaggtgtacatcgtgcatggcgtccagctgtttttggaaggaagaaagatggaa

SEQ ID NO: 448406 - DNA, 75 bp, Homo sapiens
caggatctcagccatgtgaccctgcccttctaccccaagagcccacagttatctaccttgcctgctcctatgcca

SEQ ID NO: 448407 - DNA, 82 bp, Homo sapiens
gcggcgagccggagcgcggagcccggctcccgcaccatggaggaggacgacagctacggttttgggatttgagattgacgcg

SEQ ID NO: 448408 - DNA, 101 bp, Homo sapiens
cgagtgccagtgggagcggatccctgagctcgtcaagcagctgtcggccaagctcatcgccaacgattgctttggattgcccatctgagctctgccgatta

SEQ ID NO: 448409 - DNA, 100 bp, Homo sapiens
ctccaatgggaataccaaggggagtctcgctctcagtcaaaatctccaacgggaactcctgctcgtgtaaaatcggagagcaggtcaggatctcgtagtc

SEQ ID NO: 448410 - DNA, 80 bp, Homo sapiens
aacggctcaagaatttcaagaacaaaggccgcgacttggagagttttccgtctgatgaaggttggccatttgcaaagtat

SEQ ID NO: 448411 - DNA, 75 bp, Homo sapiens
agacccttactgtaaatgtagagggcactaaaacattgccagatgatcattttttgctccactcaagcctgttag

SEQ ID NO: 448412 - DNA, 50 bp, Homo sapiens
ccagcacgtgcacgtgctcccaggagacgcaggtcagaatggaaatgggc

SEQ ID NO: 448413 - DNA, 98 bp, Homo sapiens
gatttcaatggtgatggcatagatgctgtcacgggaagtctttttaggataaacgtaggcctgcgtggcctggtggctggtggcataattggagcctt

SEQ ID NO: 448414 - DNA, 98 bp, Homo sapiens
aagactgttgtccggctgcaggagaagcggcagaaggagctctggaatctcctgaagattgcttgtcatcatggcagaacaggatgtggaaaacgatc

SEQ ID NO: 448415 - DNA, 82 bp, Homo sapiens
gcacaaccatcgcagttggaagcccatggggcagatttggtcgtattgggcgcctggtcaccagggctgcttttaactctgg

SEQ ID NO: 448416 - DNA, 101 bp, Homo sapiens
atggccccaggtgtaagcgcagaaagcaggcgaacccgcggcgcaataacggtgtggacactgccagcggctgcagccgacttggaatgacctgggagaca

SEQ ID NO: 448417 - DNA, 100 bp, Homo sapiens
tttctggatgatgtaaaccttattctggccaacagtgttaagtataatggagcttactccacgggaacagcctctagataatctgagttgttgaaaatac

SEQ ID NO: 448418 - DNA, 74 bp, Homo sapiens
ctgagccgactgcggtggtcaagaggtgtggacactgccagcggctgcagccgacttggaatgacctgggagac

SEQ ID NO: 448419 - DNA, 50 bp, Homo sapiens
gaggccgtgaagaccttcaatagcgaggcagtaacagagaagaattttga

SEQ ID NO: 448420 - DNA, 75 bp, Homo sapiens
ctgatcgccggcagtgctggggccgcgccacttccgcaaacaggtgcaggtccagtggtttacgtcttggatctt

SEQ ID NO: 448421 - DNA, 101 bp, Homo sapiens
taagacgcctttacaggagagtgcgaccatggctgtagtaaaagatctttgaaaacaaaggtgccatgatgggctgttctaacccccacccccactgccag

SEQ ID NO: 448422 - DNA, 74 bp, Homo sapiens
ccaacatataagaaacttgcacctgatgcatataataatcagaacatggtccaagacaattcctgggaaagttc

SEQ ID NO: 448423 - DNA, 100 bp, Homo sapiens
cacactcctcgtcctggtagctttcaaggcaatggacttccactggattgagaccatcctgagtgataagaagcgggttccacttccaaacatgagttcc

SEQ ID NO: 448424 - DNA, 96 bp, Homo sapiens
cctggccagggcgcgctgccccgcgggtgtgcctgagcctccgcgccccgcaggccctggggctccacgtgttccccacgtttgtggcgtacgagc

SEQ ID NO: 448425 - DNA, 51 bp, Homo sapiens
gctacagcatcccacattaagtcaacggactcatcaagcagttctcagaga

SEQ ID NO: 448426 - DNA, 50 bp, Homo sapiens
gggagccaagcgtcctgcccggccgtaagcgaagctgctctcaggggaga

SEQ ID NO: 448427 - DNA, 99 bp, Homo sapiens
gtccatgttcacactgggtgaaggaagctgaaaccacagacatgactgagtcctccatgaagagaaagtatgtgatggtgatgggagtggttcaggcct

SEQ ID NO: 448428 - DNA, 75 bp, Homo sapiens
tcctgcctcccagagaggggagccggcgaggatcaaaatcttcgaaggaggaagctgacgggtcgcctcatgctg

SEQ ID NO: 448429 - DNA, 85 bp, Homo sapiens
gaattttctaaagccgcgcagagcttcagcaacggttatgggacccacctgatgaaccacctgaaggagtatcacatcaagcaca

SEQ ID NO: 448430 - DNA, 90 bp, Homo sapiens
ctgctcgcctggctgattttcctggctaactggggaggtgccagggctgaaccagtctattcttattctgagaaggaacttatatgccac

SEQ ID NO: 448431 - DNA, 100 bp, Homo sapiens
ccggctggctgaggaaatcgcctcccgagaagaagttgaggcgctatctgcctgtggaggaaccgattgtgtccacagatgaggtcatcttcccactcac

SEQ ID NO: 448432 - DNA, 83 bp, Homo sapiens
cttccggctccgtcgtggaagcaggactgcgccgcgtcttcctcaaggtgtacgaagccatcgacagcagagatggagcatct

SEQ ID NO: 448433 - DNA, 90 bp, Homo sapiens
agaacccagacatgacgcatgtcatccacaagctctcctttggggacacgctacagattgggaaaatgaggtacgttagtgttcgcgatt

SEQ ID NO: 448434 - DNA, 99 bp, Homo sapiens
tacattgtgcgctggcagcggcagcctcaggacggctacctttaccggcacaattactgctccaaagacaggccgacggtcgcaaggtcctacggtcaa

SEQ ID NO: 448435 - DNA, 82 bp, Homo sapiens
ccgaaggaaaaggaggaattcgccgtgcccgagaatagctccgtccagcaggttatcctgaatacatgtctaacaattttcc

SEQ ID NO: 448436 - DNA, 51 bp, Homo sapiens
ctggatatcaacgtccagcttaagatgccctgggaggagcggggacactga

SEQ ID NO: 448437 - DNA, 75 bp, Homo sapiens
gtgacgatcggatgaatgagcctccaacctctcttgggcttgtgcctcaccagtgacttttttgaacgaaccatt

SEQ ID NO: 448438 - DNA, 87 bp, Homo sapiens
ccagcgagcgcgccttcggcattggccgccgcgatgtcagctcagtgctgtgcgggccagaattcagaaggagctggcggacatcac

SEQ ID NO: 448439 - DNA, 51 bp, Homo sapiens
ttgcagttcttgtcaatgacctggtgaagatggttctggtaaaacaaccct

SEQ ID NO: 448440 - DNA, 96 bp, Homo sapiens
cgccgggacacctggaagccgagaaatggcagatcgggagcggtgccgagaaaaatttccttactagatgacatttcatcgcaatgtccgatcgtt

SEQ ID NO: 448441 - DNA, 74 bp, Homo sapiens
ctaagaactgctgggaggatgacacttcgcttttttgcaaatgcattcactttgacaccatataatggaacaga

SEQ ID NO: 448442 - DNA, 75 bp, Homo sapiens
tttacaccgccaatccacttcctgtggcaactacagggtgcaaattgggaatcgtgaaattcatagaagctgaac

SEQ ID NO: 448443 - DNA, 75 bp, Homo sapiens
agaagaacattctcgaatacctagaatgggcaacaggataagacctcgtctaacctacatgaagctgcttcggac

SEQ ID NO: 448444 - DNA, 90 bp, Homo sapiens
cgagtcgacctttgtgacctggtgtaaccagctgaggcatcccagctgtcgccttcagaagcttgggatcccctaacaacagtgagagag

SEQ ID NO: 448445 - DNA, 90 bp, Homo sapiens
aagtggaatatgatcatggaaaactcaacctctatttagattctgtgtttcagggtaactctaactttcgggacccagtgcaaaacaatt

SEQ ID NO: 448446 - DNA, 100 bp, Homo sapiens
ggcgaggagagcccgcggctgcagactccgtgggaaggaggcttgtttaaactacggatgcttttcaaagatgattatccatcttcgccaccaaaatgta

SEQ ID NO: 448447 - DNA, 96 bp, Homo sapiens
tactgaaccggtttcatgtggacagggaggagctgtgtattgggaagcaatgcagaaaacaagcctattaaaaatcaacttggattaacccttgag

SEQ ID NO: 448448 - DNA, 101 bp, Homo sapiens
caagaagcagctccacgaaaggcagccgcggatcgccgcgctcagcgacaaacaacgttgacagaaggctacgttggggccctgcacgagaatagacacgg

SEQ ID NO: 448449 - DNA, 100 bp, Homo sapiens
aaacatggcactgttgcctatcagaagtcaattcaaaggacctgcccccagagagattgctctaggtcgtaaccagcctttgaaaaaggagaaaccaaaa

SEQ ID NO: 448450 - DNA, 100 bp, Homo sapiens
ggcctgaggaggcccgagcggcggcggtggcggcgaaggccgaggcggtcgtccttggtggaaggaaccatgaactggcatctccccctcttcctcttgg

SEQ ID NO: 448451 - DNA, 90 bp, Homo sapiens
caccagcaaatcctaggagaccgagtcttggcacgtgaacagatcgaagccgcggtcaaggccgccagagaagcctttcccagctggtca

SEQ ID NO: 448452 - DNA, 50 bp, Homo sapiens
atcacctagcatgaccttgaggatagtcctcaaccactgaagaagaagct

SEQ ID NO: 448453 - DNA, 83 bp, Homo sapiens
cgcgcccgggaggaaggaacgaggcaaggagctaaagcagcgtgcgttcagccctggggtgaatgaaaactttgccattgatt

SEQ ID NO: 448454 - DNA, 96 bp, Homo sapiens
gccttttgtgggctactcctactcctgcatggccctcagctgacagcagccatggcgagcggcagtggagacagcgtcacccgtcggagcgtggca

SEQ ID NO: 448455 - DNA, 99 bp, Homo sapiens
agcaggtgaacactgaccccaatgggtcttgatttcagaaggactggggcagtttgctcaagatcccaagttcatcgaggtcaccacccaggagctggc

SEQ ID NO: 448456 - DNA, 108 bp, Homo sapiens
ccccgccaaccgcaaccattgacgccatgtcgggttattcgagtgaccgagaccgcggccgggaccgaggatgctgtgggccctgagggaaaggatcacagaggcgct

SEQ ID NO: 448457 - DNA, 107 bp, Homo sapiens
cggcaataacatgtcaaccccgctgcccgccatcgtgcccgccgcccggaaggccaccgctgcgatgaaggtcaccgtgtccaaagggggcgaccgggacagtgacg

SEQ ID NO: 448458 - DNA, 90 bp, Homo sapiens
cccttcagcgtcgctgcccccagctcagctcttactgcgggccgctccgacggcggtccatcctgcaggtttggatgcatctgctcagac

SEQ ID NO: 448459 - DNA, 75 bp, Homo sapiens
tcactgaggaagagatcaatcttaccagagggccctcaggacatggtccggcgaggagagatcatcgacaatgac

SEQ ID NO: 448460 - DNA, 97 bp, Homo sapiens
tggggcggcgcgacggctggtgcgcaggtgctggagaatctggtaaaagcaccattgtgaagcagatgaggatcctgcatgttaatgggtttaatgg

SEQ ID NO: 448461 - DNA, 78 bp, Homo sapiens
aaaaggacagaattgaatcacttgaaaagaggctcgagggggtgagtggtgcactgacagtgcttatgaaggacgcaa

SEQ ID NO: 448462 - DNA, 51 bp, Homo sapiens
gttggcaaaccagatatatgacttggtagcatcttggacaaaatattgggc

SEQ ID NO: 448463 - DNA, 75 bp, Homo sapiens
gcaaatcatatcatgcaacatttgccagttgagatttaattctgatgtttacccaaggtccagcctagcccctag

SEQ ID NO: 448464 - DNA, 101 bp, Homo sapiens
ctcacagatgagacttcacgactttttgtaaagaaaacaatagtagtgggcaatgtgtccaagttctcaggggacaggctgaccaggatcaccaggaagct

SEQ ID NO: 448465 - DNA, 74 bp, Homo sapiens
aggtgttcgagaacgaccccgagacggatgaaacaggcgcctatttaatcgacagagaccccacctactttggg

SEQ ID NO: 448466 - DNA, 75 bp, Homo sapiens
cacaaagagcttgctccctacgatgagaactggttctacacgcgagctgctcaagagcaagatgacgttctcata

SEQ ID NO: 448467 - DNA, 74 bp, Homo sapiens
agaaatgtgccctgaactggacggacataccagtggccatgggaggaacatatgcagcagaaaaaagaggagga

SEQ ID NO: 448468 - DNA, 71 bp, Homo sapiens
ccccctcaaggtgctatctcagagaccaggcgccaagcccatctttgtgtgcttgcatccaactgtgatga

SEQ ID NO: 448469 - DNA, 98 bp, Homo sapiens
aatctgaaggtgaaaaacgagctcttcaaaaggctggacaagtttgctgctgaaataactgaagtgaagtgatggactccgatttggagagtagtaag

SEQ ID NO: 448470 - DNA, 123 bp, Homo sapiens
tggccagttggtccattcaacaaatggttattggatgcccattatgtggcaggcactgttccgggggagaggcataagggccatgtgttctgaaattattttgaggcaagaagttttgaaaga

SEQ ID NO: 448471 - DNA, 49 bp, Homo sapiens
agttgttgcagcaagcgattcagagttgagaattatggctgcaggaaaa

SEQ ID NO: 448472 - DNA, 75 bp, Homo sapiens
aagaagtgcttccgggtgggcatgaggaaggagggccctgagcctgtgcaattatttcgagagtcaaaatgtgga

SEQ ID NO: 448473 - DNA, 98 bp, Homo sapiens
acttctttccaggtgatgtcaagagtttttctaatatgggcagtaacacatagcgtcaaagaggcagctgttgtgctgtgtatggacgtgggctttac

SEQ ID NO: 448474 - DNA, 98 bp, Homo sapiens
tgactcctacttcctctgtatagagcaactgttgaactcagctgcctgtagcattttgaaagcgaagcagaagccgtagaatcagcggcgagcctgtt

SEQ ID NO: 448475 - DNA, 51 bp, Homo sapiens
ggacaagcacagtcttcggaaggtgtgacaggatacctgaaaattgatagc

SEQ ID NO: 448476 - DNA, 99 bp, Homo sapiens
aaaaatggacgcctggcaaccaaagaattcggtcaacagtggatgaaaaagaacaaaaacaacttcttatggatttggatgtagtaatgcggagtagtg

SEQ ID NO: 448477 - DNA, 100 bp, Homo sapiens
tttattatatcctacaactgggttatatggctctatctaatgttcctcctctccggaactactttctggaagaagacaattataagaacatcaaacgtcc

SEQ ID NO: 448478 - DNA, 90 bp, Homo sapiens
agatgctcataaggattgtcctctttctacaaaagttctgcaggctgggaagcccaaggtcgaggggctgcctttggtgacttatggtga

SEQ ID NO: 448479 - DNA, 96 bp, Homo sapiens
ggagatgataaaggaagcctgtctttgtgtagtaagcattaataatgtctttcatctttgagtggatctacaatggcttcagcagtgtgctccagt

SEQ ID NO: 448480 - DNA, 95 bp, Homo sapiens
aggaggataagcaagtcgaatttttgtcttacggtagctacagcaagctgggtagcaggcagatccaaaggatatcatgaagtttccagggcctt

SEQ ID NO: 448481 - DNA, 131 bp, Homo sapiens
tgcagaggcggttcgactcatcatggactccctgcacatggcggctcgggagcagcacacctgcctcaagtcccaggtggtggacctcaaggccgaagggtattgggaggagctgatggataccacacggc

SEQ ID NO: 448482 - DNA, 99 bp, Homo sapiens
caaggatcgttgatcagcattactcccacaaggtgttcctgatccaagcagaaccctgttatttgaagagcctgagaaatcttatcccgtttacaaatg

SEQ ID NO: 448483 - DNA, 74 bp, Homo sapiens
gccactgacgtccagacagtgaacctcggagagctgatagatcggtttgtggctgatttcaaagcccaggggcc

SEQ ID NO: 448484 - DNA, 75 bp, Homo sapiens
ccaacatggcggaacgcaggagacacaagaagcggatccagtcaggtcaattcagtgaagatatgatacccacag

SEQ ID NO: 448485 - DNA, 96 bp, Homo sapiens
ggaatcgcaaggctcttccctgaccattttctactgtccctgcgcgaggcccggctggacattttgaagattcattctcggaagatgaacctgacc

SEQ ID NO: 448486 - DNA, 50 bp, Homo sapiens
acctcagatgctcccttctgctcctgcagagagagatcatcattgcctga

SEQ ID NO: 448487 - DNA, 75 bp, Homo sapiens
gcccggagcaggattctgtctattcagaaagacctgttcctctgtgacgagggtgcaggtatctctggggactac

SEQ ID NO: 448488 - DNA, 101 bp, Homo sapiens
caggaagttgggctccctaaagacagcactgccaatgatatgatgcttcctggtgtgtttagtggttggtgccattccaattttctgtgctgaaatcattc

SEQ ID NO: 448489 - DNA, 96 bp, Homo sapiens
ctgaaagctcccaagagtacgttactcttcaaggaatggttatacgccactgcacatcgctgccaaaaagaaccagatggacatagcgacaactct

SEQ ID NO: 448490 - DNA, 113 bp, Homo sapiens
caaactcagatgcgctgaagctagctaaagaagttgatcctcaaggaacaagttccagttccagtctaccacccaacacctagccagactcggctagcaactcagctgactga

SEQ ID NO: 448491 - DNA, 82 bp, Homo sapiens
tctgcaccagcgccttgatcgagtacttgaggtcttgaggaccggcccagctcaggctcctggggcagcggcgaccagagca

SEQ ID NO: 448492 - DNA, 82 bp, Homo sapiens
gctgtcctggaggaattcaagcgaggtccccgttctccgtgtcctgctgtccgctgacctgaaggggttccagtacttctct

SEQ ID NO: 448493 - DNA, 95 bp, Homo sapiens
caagctctactgtgacttcagagacactgccaagcagccttagccctagtgtagagaattggcagagggggtcgatttgggaggaaaggtgtggc

SEQ ID NO: 448494 - DNA, 74 bp, Homo sapiens
ctcatgaaccacttggcaaacctgcttagacgcctggtgactctcatttcgcagcaggccacgctgctggcctc

SEQ ID NO: 448495 - DNA, 104 bp, Homo sapiens
ggggaagtcatgctcgcttcacggaggcaatagctagccggcaattcgaagttttcaagtagcccttcacatctatccaatgaaccctgaaatatggaaagaag

SEQ ID NO: 448496 - DNA, 75 bp, Homo sapiens
ccaaatgtgtttgcatgctgggtaaagtcagtgataaatcttttgtttgctgcatatactggagatgtgtctgca

SEQ ID NO: 448497 - DNA, 96 bp, Homo sapiens
ttttcaactcactaccattcattagtagaagattattctcaaaatgttgctgtgcgcctaggacatatgtttcgtgaccttgtccagtagaaggct

SEQ ID NO: 448498 - DNA, 100 bp, Homo sapiens
agggggttccggctgaccagttgcgtgtgattttcgcagggaaggagctgaggaatgactggactgtgcaggtaaaataccatgaagattttgaaaaaac

SEQ ID NO: 448499 - DNA, 97 bp, Homo sapiens
gaaactggtattgttgaccttcttataccctctcccaatgccaccgcagaagtgggttacaatagggacaggtttcctatcctgggagcaggagagt

SEQ ID NO: 448500 - DNA, 100 bp, Homo sapiens
ctcctgcctcagcctcctaagtagctgggactacagggcacattaaatgatcgcacgaatgcaattgattttctaatggataggaataatgttgtacccc

SEQ ID NO: 448501 - DNA, 83 bp, Homo sapiens
ttgtccttgctggtgcatgcgtcgtcggcctctgggcagcagacatatctgaagagatggattaagaatgctttggattaagg

SEQ ID NO: 448502 - DNA, 101 bp, Homo sapiens
gccggcgagatgcctttgttcaccgccaaccccttcgagcaagacgtgggggagcgtgttcaatacgtggaaacccatgtgggttgtattgttagaagatg

SEQ ID NO: 448503 - DNA, 83 bp, Homo sapiens
ttcattgaacctgtacagtggatggaatctgctttgttgggagtgatggatggacaggctcttttaagacacttactcttcca

SEQ ID NO: 448504 - DNA, 74 bp, Homo sapiens
tggaatgcctggggcagctgttgccatcagcaactgtgacggattgattctggatgaaattgaagaacataaca

SEQ ID NO: 448505 - DNA, 90 bp, Homo sapiens
gagaagatgaaggaagactgtctgccgagttctcacgtgcccatcagtgacagcaagtccattcagaaggacaagaatccttcaagaaac

SEQ ID NO: 448506 - DNA, 100 bp, Homo sapiens
gcccgtgcaggacacgaagctgcatgtgtttgacgcaagtgaaaggtgtagcagtcactcggcctacacccacagcatcgaccttgtgaacccagcgacc

SEQ ID NO: 448507 - DNA, 83 bp, Homo sapiens
ccggaggacaccccatcgtgcaggcttctcacggcattcagcagcagcgttgctgtaaccgacaaagacaccttcgaattaag

SEQ ID NO: 448508 - DNA, 100 bp, Homo sapiens
gggcggcatcggctgcgagctcctcaagaatctcgtgctcaccggtttctcccacatcgacctggtccatccgccatgtggcccctgtggcgcctcgtgt

SEQ ID NO: 448509 - DNA, 75 bp, Homo sapiens
cagcacagcaaacatggttcttaatgaggggagagaccattctaacacaggtaccgtccagacagtgcctctgag

SEQ ID NO: 448510 - DNA, 100 bp, Homo sapiens
gatccccctgggaaactccccatgcagccccctctcagctccatgagctccatgaaacccactctgtcgcacagatttgttattgggcgggaaaaaccag

SEQ ID NO: 448511 - DNA, 100 bp, Homo sapiens
ccggcctgaggtgtcggccggatccctccttctcccggcgcctcaagcggaaggcatccgcgacttggctgctgtcaacctggacagctcactggcggac

SEQ ID NO: 448512 - DNA, 100 bp, Homo sapiens
tcggggacggtaaccgggacccggtgtctgctcctgtcgccttcgcctcctaatccctagccactatggtatcatgatattagctggtttgacatcaagt

SEQ ID NO: 448513 - DNA, 109 bp, Homo sapiens
cttagctgtgctcgcgctactctctctttctggcctggaggctatccagcgttgattcttcaccacactgaaaccattaggaaaaatccttgtggttaacagcagaggc

SEQ ID NO: 448514 - DNA, 82 bp, Homo sapiens
gcagggcctgcagcgggagctggacggcgagcgcgagcggcgcgagaaaatccggaagaccacggccagccaggtgtacgag

SEQ ID NO: 448515 - DNA, 100 bp, Homo sapiens
gggtccctgaagagggaagacacgcggaaacagagttcaaggaggccttccagctgtttgaccgaacaggtgatggcaagatcctgtacagccagtgtgg

SEQ ID NO: 448516 - DNA, 82 bp, Homo sapiens
cccacggcacaggagcctcctggaggcagcaggagcatcagatccatgctgctgctgactcggagccccacagcttggcaca

SEQ ID NO: 448517 - DNA, 130 bp, Homo sapiens
ttggaaatgctcagaagttgcctatgtgtgacaaatgtggcactgggattgtgtggtgaagccccctaatgtcctgactccacagttcctgtcccatgaccagggccagctcaccaaagagctatagcag

SEQ ID NO: 448518 - DNA, 50 bp, Homo sapiens
caaaaatagtgatagctttgataagtcatactccctgtcacaaactccag

SEQ ID NO: 448519 - DNA, 100 bp, Homo sapiens
ccaacttcctcggcgctccggactcccaagtctccgccggaccctcctttggatattcctcgtgtctccgattctgagtaagactttgaccccgacgcag

SEQ ID NO: 448520 - DNA, 83 bp, Homo sapiens
gaagatctgggtgcccgtggaccacaggccctcgttgcccagatactctgaacaggaagtgcctcctggaaccacagagtcgg

SEQ ID NO: 448521 - DNA, 98 bp, Homo sapiens
gaggaagagtactacagattttatacaccaccaaactttgttcttgctcttgttttgccctcaattgtaattctggggtccatgcctttttagagcag

SEQ ID NO: 448522 - DNA, 75 bp, Homo sapiens
ggcggacatcccctaccaggagatcgcagaggaaggcatcaaccacgagtgtaagctgtgcaaccagatgttcga

SEQ ID NO: 448523 - DNA, 74 bp, Homo sapiens
ccggcgcccgggagacccaggaggagcccgcagacatgcttcagcttatcaacaaccaagacagtgacttccct

SEQ ID NO: 448524 - DNA, 50 bp, Homo sapiens
gaccaggggaaccgcagtcccactctggctgtcagcccatcagaatggag

SEQ ID NO: 448525 - DNA, 99 bp, Homo sapiens
gtgatgtcatgaggagacgtattgctaccccagaagaagttcgtcttcccctccaacatggtgagtgagatcattggccgagacctgagtggcttccct

SEQ ID NO: 448526 - DNA, 97 bp, Homo sapiens
gaagcctgaggagcatgccattaagtttgagagcccacagtgcggactgagctgatggaacagattcctcctattgccatttttttacaagaaaaca

SEQ ID NO: 448527 - DNA, 82 bp, Homo sapiens
gacatgctctacagtgctcagtctttgaggtcagtcttcactgtttccaatggaagatggattcttggatgatggccgtggg

SEQ ID NO: 448528 - DNA, 100 bp, Homo sapiens
caaccgcagcagtggtggctatgaacccagaggtcgtggaggtggccgtggaggcagaggtggcatggggtgtcatggagaaactccagctgggcccaga

SEQ ID NO: 448529 - DNA, 98 bp, Homo sapiens
gcccttcatcatcgtcaacaccagcaagaagacggtcatcgactgcagcatctccaatgacaagtttcatggcccccgagctcctgcagggcgaggag

SEQ ID NO: 448530 - DNA, 101 bp, Homo sapiens
gctaaaggtatccaggaaattgctgactctgtaaagagaattcggtcaacagtggatgaaaaagaacaaaaacaacttcttatggatttggatgtagtaat

SEQ ID NO: 448531 - DNA, 99 bp, Homo sapiens
gtccaaagtcgtcactttccacaaactgaaactcaccaacaacatttcagacaaacatggatttgcctcaggagtgcaagtagctgatgaagtatgtcg

SEQ ID NO: 448532 - DNA, 100 bp, Homo sapiens
ttagacacacagctgaagaataagcttataacactgatggatgcctataagaaaatcttagaaaccacaatgactccaactggaatagatactgccaaac

SEQ ID NO: 448533 - DNA, 96 bp, Homo sapiens
gatgagggacaacctctttgaaattgtaacaacgtctcgaactttctatgtgcagatattgatgatgttaagaagttcaaaccgggttacctggaa

SEQ ID NO: 448534 - DNA, 114 bp, Homo sapiens
cctgttccaccttcagagcgtcacggcgtacgccctcatggggaaaatctccccggtgactttcagtccacaggtcctggctaccctgggaagagacaagaagtaaatgaagaa

SEQ ID NO: 448535 - DNA, 100 bp, Homo sapiens
gttggtgacgggacagagcggtcggtgacagcctcaagggcttcagcaccgcgcccatggcagagccagaccccacggacagcatttagtgcttttactt

SEQ ID NO: 448536 - DNA, 89 bp, Homo sapiens
gcgcttcttctttcagctgttcgttcaaggctatgccctgcaactgcaccagttacagagagcgcgccagccttggaaggaatccacgg

SEQ ID NO: 448537 - DNA, 82 bp, Homo sapiens
gacgtgaacggagtgaccaagagcaggtttgagagcaatggtggaacaaagcggcaaaagatatcccatcaaaattatatag

SEQ ID NO: 448538 - DNA, 50 bp, Homo sapiens
ctgagcgcgtggtggagttttcctgtgctgctcaagatgaggaggtgcgc

SEQ ID NO: 448539 - DNA, 100 bp, Homo sapiens
ctgctatcaagtaccaagatgacaattccctggcccatccaaatgccctggccaacgtcaacattgggagcctcatctgcaatgtaggggccggtggacc

SEQ ID NO: 448540 - DNA, 73 bp, Homo sapiens
acatgcagtccctgcttcctgccttggttagtctgctgctaattggaattgctgcgtggggcattggcttcgg

SEQ ID NO: 448541 - DNA, 100 bp, Homo sapiens
ccgccggagtgcgtggtggagggggccctcaacgctgcccgggtagcttcccgacttatcgacatgagcaggcaccaagatccgcctcacggacacgctg

SEQ ID NO: 448542 - DNA, 82 bp, Homo sapiens
cccgagtccgcgggaagatggcggcgccgctcatccccctctcccagcagagcgggaacagcttccacgtgttcgaccaggg

SEQ ID NO: 448543 - DNA, 51 bp, Homo sapiens
tgtcacactaattgccaacaacaatggtgctcttgatgatttcgataaagc

SEQ ID NO: 448544 - DNA, 100 bp, Homo sapiens
tgagcctaaaacaccagggcagagccagaaaagcaagagtttctgtttagatgaccagtctcctggttccttgtagcttggaatactgggatgaactcca

SEQ ID NO: 448545 - DNA, 96 bp, Homo sapiens
cgcccagaataaagccaagctcatctctgagacccggaggaggttcgaagctgagtatgtgacagtgaacagcagagctgaaatggaaattggcag

SEQ ID NO: 448546 - DNA, 100 bp, Homo sapiens
ggcaagggcgagatcctggagagcctgcaggacggcgcggcagagtccccgtacgcctacagtaacgggcaccgcgtccgtgctgcagcgccggtccccc

SEQ ID NO: 448547 - DNA, 100 bp, Homo sapiens
tcgcgtcccctgcaccatgagctggggcaccgagctctgggcgccatgtcagaaccggctggggatgtccgtcagaacccatgcggcagcaaggcctgcc

SEQ ID NO: 448548 - DNA, 74 bp, Homo sapiens
cgacccagacggggaaagcggaaggaatgtcgcgtgctaagtgttaggcggaaaaatactaaagagatgtttgg

SEQ ID NO: 448549 - DNA, 96 bp, Homo sapiens
ctcctgagtagctggaaccacaggttccaagaccaaagattaaattaagagaaggtaaagctggacaaaatctgctggaaatgatggcctgtgacc

SEQ ID NO: 448550 - DNA, 82 bp, Homo sapiens
agtagcaaaggcaagaaggcaacgacgttccatctgtggaaggacctaccaaccaggtactccaaagattcaggtttactca

SEQ ID NO: 448551 - DNA, 75 bp, Homo sapiens
cagcattcagccagtattttaggtggtgaagcagtattttccaatttgaagattcatttgaaggtggctcctgcc

SEQ ID NO: 448552 - DNA, 100 bp, Homo sapiens
cttcattgaccacttcggcttcaatgatgaggagtttggggagcaggaggagagtgtgaaggatctggacaactctcctctgtccccaccttcaccaagg

SEQ ID NO: 448553 - DNA, 144 bp, Homo sapiens
ctcgtttcaggcctccacggtgtgcacctggagtcaggagcgcgcttgtgcgtacagttcggttcaggagccgggtgtgggctgagccctgcctgattgatgctgccaaggaggagtacaacggggtgatagaagaatttttgg

SEQ ID NO: 448554 - DNA, 90 bp, Homo sapiens
aggaactgaagctcttagaaaatgagtccctggaacgccagatgcgtgaaatggaagagaactttgccgttgaagctgctaactaccaag

SEQ ID NO: 448555 - DNA, 50 bp, Homo sapiens
ctggaccaggagacattcagcatacattttgaaagcgaagcagaagccgt

SEQ ID NO: 448556 - DNA, 90 bp, Homo sapiens
tgcctctgtcactcctggtgaccagcattcaagagcaggtctccactccagaaattaaagttttaaacaagacccaggagaacgggacct

SEQ ID NO: 448557 - DNA, 100 bp, Homo sapiens
caggcgtgagcctccgcgcccggccggtacaggtttgcagattccgccagcagcacagcaagctctacagatgagtggctctttggcatttggtgctgtg

SEQ ID NO: 448558 - DNA, 51 bp, Homo sapiens
ttagctcagcaattcttaccttaacactcgtgaaactgctcaggccatcaa

SEQ ID NO: 448559 - DNA, 100 bp, Homo sapiens
tagaaagaaatgagcagctttggataatgacgacagcaacccgaagacagggaaatttagaagctgccagtaactcagattctagccatgaaggtcaaga

SEQ ID NO: 448560 - DNA, 115 bp, Homo sapiens
gcccgtgcagctcctcaccatccgtgtggccagcaccaaccctgctgtgcaggcctttgacatctggaaggatgtgcccgtggaacaggtgacacacgcagacagagagcaaacc

SEQ ID NO: 448561 - DNA, 51 bp, Homo sapiens
gcctttttggcctggcttgtttgcaaagaaagtgactgagaccgaagatga

SEQ ID NO: 448562 - DNA, 100 bp, Homo sapiens
agcactgcctctggcatccccgacttcagtactgaccaagtgccaggaagaggtcagccacatccctgctgtccacccgggttcattcaggcccaagtgc

SEQ ID NO: 448563 - DNA, 100 bp, Homo sapiens
tgtggagtcatcctcttcgccctgctcgtggaactgcctcctgagcgtggagcctgccattagcaccaagcacctcccttaccagagcttccagctcttc

SEQ ID NO: 448564 - DNA, 82 bp, Homo sapiens
gaagtggaaaggatggcccccaaagttttaaaatcaaagatgggaaaatcggagaaaattgcccttccccatggccagcttg

SEQ ID NO: 448565 - DNA, 82 bp, Homo sapiens
gctgtgaattgacgccgctgaaatacaatacagagcgcattcatgttcttagtggcgagcccacagcctcggtgccccccga

SEQ ID NO: 448566 - DNA, 73 bp, Homo sapiens
tttgggggcaagtacggagttgagagggacagggcagacaagttgaaatggatgcagtcagaactgaatgttg

SEQ ID NO: 448567 - DNA, 82 bp, Homo sapiens
gctaaagagccgagcacgcgggtctgtcatcatgtcgcgttacgggcggtacggaggagaataactgaagtgaagtgatgga

SEQ ID NO: 448568 - DNA, 97 bp, Homo sapiens
ctcgctgggagagaggtacctctccttttccctctccctttccctaagggggatatgagactttctactcggaatatcctgagtgttgcgtggatgt

SEQ ID NO: 448569 - DNA, 100 bp, Homo sapiens
cacaccaacaaaaagatcctgtggtacaggtgaggaagatcttctcagtcctccccaggacacaagcacagggttagaggaggtgatggagcaactcaac

SEQ ID NO: 448570 - DNA, 100 bp, Homo sapiens
cgccccctccccagccccagacacggaccccgcaggtgccctgggagctgtcattgccctcctgctctggggacagctttttgcagtggactcaggcaat

SEQ ID NO: 448571 - DNA, 75 bp, Homo sapiens
cgcaaacaaggagagcctactgagcagcctgagtgggacgacgccaggcagctatttgcactgtcctgcaccgcc

SEQ ID NO: 448572 - DNA, 101 bp, Homo sapiens
aaggaaaccattcccttacaggagacctccctgtacacacagcattggggctttccagctctcacagaaccttcagcatccccagctgccggtcttggcat

SEQ ID NO: 448573 - DNA, 50 bp, Homo sapiens
ggatgatgctgactttgatgaaggaaatgctctatgtacagtgaagtgtg

SEQ ID NO: 448574 - DNA, 98 bp, Homo sapiens
caccgccggcggtgatgcggctgtgaagccctagtcgactcagcccacctgcacccaggtgaaataaacagctttattgctcacacgaagcctgtttg

SEQ ID NO: 448575 - DNA, 75 bp, Homo sapiens
tcactgggctcatctgcaggcgttttgaggaggacactttgccaccatcaccttgaccttcatcgacaagaacgg

SEQ ID NO: 448576 - DNA, 100 bp, Homo sapiens
gtaaaagccgaggaaaagtagaaattgatcagcaacaactaactcagcagcaacttaatggaaactaggcaacaagattgacctggctgaaaggagagag

SEQ ID NO: 448577 - DNA, 101 bp, Homo sapiens
ctccaggaccctctggaagcctagaaatggtcactgtattctctgtggctggatttgcgttcagtatcttcgaaagtgatattccatttatcttcactttt

SEQ ID NO: 448578 - DNA, 75 bp, Homo sapiens
caagaacgatggatatgtacacattcacccttcatcagtgaactatcaggtcctggtccgcgccagagcccagcg

SEQ ID NO: 448579 - DNA, 100 bp, Homo sapiens
tgtgtgaaactcataggagttcccgctgacgctgaggccttaagtgaaagaagtggaaacacccctaactctcccaggcacgtgtggttctcaaatatag

SEQ ID NO: 448580 - DNA, 100 bp, Homo sapiens
acggggttgcggatcccgcggccgcggttcggacccgccggcgacatggccagctccggagagctatggcctgctgtgcagttagccaacttctacctgg

SEQ ID NO: 448581 - DNA, 110 bp, Homo sapiens
ttcaaaacatccttgcaacattactgaagaagactatcagccactaatgaagttgggaactcagaccgtaccttgcaacaaggtaaaataccatgaagattttgaaaaaa

SEQ ID NO: 448582 - DNA, 75 bp, Homo sapiens
agcttggatgcccacaagggagtagaatccaagcaaaaatccctggattgaagcgcaaagctgaatgaaaacgcc

SEQ ID NO: 448583 - DNA, 100 bp, Homo sapiens
ggcacatttggaacagagtatgtttttcctgaagtgctacttaccgaaattcatctgtcacctggaaaatttgagctgtgggtcagtcttgcactcccat

SEQ ID NO: 448584 - DNA, 100 bp, Homo sapiens
cctacttcagcaaatgcagaatcagcccattgcaggaatgggataccaagtctcccaacaacagagacaggaattaagtagactggctggacagattcga

SEQ ID NO: 448585 - DNA, 76 bp, Homo sapiens
tgaaagtggtgatggaagacaaggagaagttttccagtctgggaaggataaaggacacagcattgttggttttgcc

SEQ ID NO: 448586 - DNA, 82 bp, Homo sapiens
ctaggatccgggacacagattttaattatgacctttgtgactctatcttcttggacacttaatgattgttggcaagaaatgt

SEQ ID NO: 448587 - DNA, 100 bp, Homo sapiens
gcctgcccccggaggtgcccacgcagctgcctggacaacacatgattaagtaccggtacatcccgttcacacatgggaagagaaggtacagaggcaagga

SEQ ID NO: 448588 - DNA, 98 bp, Homo sapiens
agcagcgggagaagctgtctctgatccgcaagcatgctcagaccttcattgctctgtgtgccaccgggctgacgcgccactatgtagcgggtttcggg

SEQ ID NO: 448589 - DNA, 73 bp, Homo sapiens
agggaggccaagaagacctctgcactggtatcttgccgcccaggttgctgttgcccgtggacccctgctgttc

SEQ ID NO: 448590 - DNA, 83 bp, Homo sapiens
ggctgtacgcacacaccatcgcagttctgcagaatcagaagatttggcagtacatttatatccaggagctgttactattcaag

SEQ ID NO: 448591 - DNA, 96 bp, Homo sapiens
caaaggtagaacatggaggatcgtcaggctctaaacaaaattctggcatctccttggaaacaatgccatctttgaatgtgagagataaacctagtt

SEQ ID NO: 448592 - DNA, 75 bp, Homo sapiens
ggctacacctgcgagtgcttcgaggacttcactgtctgggttctgcccgcacacattcctcgccaccttcttggt

SEQ ID NO: 448593 - DNA, 100 bp, Homo sapiens
tgaaggagcagatttacaaactggccaagaagggccttactccttcacagatcgggaatggccttaagtcttggagataaaatcaacttgtcacagaaga

SEQ ID NO: 448594 - DNA, 100 bp, Homo sapiens
ctgtgtgctacatctgtgggtacaaaaagaagtgtggcgtgaatttggtcctcagcaaccacctactctagatcgaatcatcaatttagttgttggcagc

SEQ ID NO: 448595 - DNA, 82 bp, Homo sapiens
atcgtatcgtatgtccgctatccagaacctccactctttcgtaatagctcttcaagtctgcaataaaaaatggcctccaaca

SEQ ID NO: 448596 - DNA, 89 bp, Homo sapiens
ctttgttattggagaaacatgcagattatatcgcatcctatggctcaaagaaagatgattatcttcttggaagaaattttattttgttt

SEQ ID NO: 448597 - DNA, 83 bp, Homo sapiens
ggaagtcggcaaagccacgggtcggcccgagtgcttcctcacgattctcagtaagttaagtcaggaaatcaacaagaacgaag

SEQ ID NO: 448598 - DNA, 80 bp, Homo sapiens
ggatgagcttggcatttcccaggatgagcagctatccaagtcaactaccaagtcaggattgttacccccaccacctgcgc

SEQ ID NO: 448599 - DNA, 82 bp, Homo sapiens
atccctggctttgatggagtagtcaaggttcactactgtgatagacaaagtggcaaagagtgtgtgacctgtctgacattag

SEQ ID NO: 448600 - DNA, 90 bp, Homo sapiens
cgcccccgactgtggagaagtgtccggggtagccccgttacagctacagaagtcaagattccaaaaccaagaggcagacccaaaatggta

SEQ ID NO: 448601 - DNA, 99 bp, Homo sapiens
tttggagaagaatggaaagagaagactgatagagacttcgttaagaggagatttcaagtgatgaagaggagacaaatgtaactgctcaagcaatgcagt

SEQ ID NO: 448602 - DNA, 95 bp, Homo sapiens
gagttcgggaaaccgtattttatcaaggtacatcaggaacgtctctatcaagaatacaatttcagcaaggctgagggccatctgaaacagatgga

SEQ ID NO: 448603 - DNA, 100 bp, Homo sapiens
ttcggggcatgtacaatcagagccggatcgagctgggagatgtgacaccacacaatattaaacagttgaaaagattgaatcaggtcatctttccagtcag

SEQ ID NO: 448604 - DNA, 100 bp, Homo sapiens
ccccagtcggtgctccggggaggtcacctgacgaggagatgccagaattccagaaaagttcagttcgaatcaagaaccctacaagagtagaagaaattat

SEQ ID NO: 448605 - DNA, 75 bp, Homo sapiens
tccttggatacaggaaaccaacagtcacacatgtacattacaggaattaaggataacctagacgacataaagagg

SEQ ID NO: 448606 - DNA, 105 bp, Homo sapiens
ctgttgcagccatggtgcattgcagttgcgtgttgttcagaaagacatctgaatgggactccgagtgccttacatccctgcagccccttcctcttcctacacccc

SEQ ID NO: 448607 - DNA, 100 bp, Homo sapiens
gggacatattggaagattccaggtttgatatttgacaaattgatctaaaatggctgggtttttatctgaataactcactgatgccatcccagaaagtcgg

SEQ ID NO: 448608 - DNA, 75 bp, Homo sapiens
ggcaaaaacattcaagaatgagagcgagaacacctgtcaagacgcaaacatgcagatctttgtgaagaccctcac

SEQ ID NO: 448609 - DNA, 51 bp, Homo sapiens
cttcaagtccatgaaccacatgggtccaaattccaagcctgtagtgtcctt

SEQ ID NO: 448610 - DNA, 75 bp, Homo sapiens
gtggaacagcctcggccaccaagttgcagaatgaagaagagtctggagaacctgaacaggctgcaggtgatgctc

SEQ ID NO: 448611 - DNA, 97 bp, Homo sapiens
attataccttcacccagcatttcatccctcgtcgaaaggattggattggcatctttagaaatgctgcttctaaattacttgggcaaaattgggtcca

SEQ ID NO: 448612 - DNA, 90 bp, Homo sapiens
ctggccaaagcctgcccagacggctcacctgtgcgggatggaacaaaaggtggagccgccaccaaaatgcagattttcgtgaaaaccctt

SEQ ID NO: 448613 - DNA, 88 bp, Homo sapiens
ctagtttcaaaggagaggagagaagaccagaagcccctggtccctctgtctccctttcccctatgccaccctcagaggtcaaactcca

SEQ ID NO: 448614 - DNA, 75 bp, Homo sapiens
tgtgacatatcactggtccctgcacccaggatgacccgaggtatggaatgtgtcctctcaagggagcaagtggat

SEQ ID NO: 448615 - DNA, 49 bp, Homo sapiens
aacttcagtaactttaccaacagaatgggccgcatcatcgagtgcacac

SEQ ID NO: 448616 - DNA, 80 bp, Homo sapiens
ctcctgtcccggatcattatgaaggagaagcagagcaccaagatgtcagtattgaatatggtggtgaggcgtgaccctgg

SEQ ID NO: 448617 - DNA, 100 bp, Homo sapiens
atgcatcttggcgtcactcaacatcaaatctatgcagtttgatgacagcatcggagtcttgcaggctaattcccaagtctaatgctggcgtgctatgcgg

SEQ ID NO: 448618 - DNA, 98 bp, Homo sapiens
tgtgaaacgtgtttcaagaccaaaaaacacaataccaggcatacatttggcagaataaatgaaccaggtatgctccagaatcactgacagagagcaag

SEQ ID NO: 448619 - DNA, 83 bp, Homo sapiens
gtgcagcagagtttcttcctggcagagacattgaagtaatatatgctttaaacactaaaaatgatgagcatgaatctgcaatt

SEQ ID NO: 448620 - DNA, 75 bp, Homo sapiens
tgcttagacgctggatttttttcgggtagtggaaaaccaggaatcggtgagtttcaaggatgtggctgtggactt

SEQ ID NO: 448621 - DNA, 100 bp, Homo sapiens
cgtcgtgcgcctgggggtgcgcgcctgcgacctgcccgcctgggtgtggccgacgacgatgccctcgctgaggagcgcatgcggagaggccagaacgccc

SEQ ID NO: 448622 - DNA, 98 bp, Homo sapiens
aacatggcaagggcgagtgaagcagtgtcacgcattttagaagaatggctaagaagggcccctggagaagtttgcttccctggaggtaagcgtgaccc

SEQ ID NO: 448623 - DNA, 50 bp, Homo sapiens
ccgggagttcaagaagaacactccagagcaaaagtactttgactcaggag

SEQ ID NO: 448624 - DNA, 75 bp, Homo sapiens
tgttaaccaaagccagcctggcatactttgaagatcgtcatggggcattctttagtggcaggctgaaggccagag

SEQ ID NO: 448625 - DNA, 95 bp, Homo sapiens
gcccccagcatgtcgggcccagacgtcgagacgccgtccgccatccagatctgccggtgccaagtcctgccctgccaacttcttggcagctgccg

SEQ ID NO: 448626 - DNA, 83 bp, Homo sapiens
gttcacgcacgggatccagagcgccgcgcacttcgtcatgttcttcgcgccctgggacaaactctgcctgggcgagtcctttt

SEQ ID NO: 448627 - DNA, 88 bp, Homo sapiens
cagtttatgatggaaaaagaagtctttacaccgccaatccacttcctgtggcaactacagggccaaatttgtatcctactgtggggct

SEQ ID NO: 448628 - DNA, 100 bp, Homo sapiens
ttacgcggagctctcggaggaggacctgaagcagctggtgtttcatgggactcccttccggatgagctgctcttgggaatcttttcctgtctgtgcctcc

SEQ ID NO: 448629 - DNA, 75 bp, Homo sapiens
acacaaacaacttacagacttccacaagcaagtcactaggtatctcagatgaagacatcatcaacattactcttc

SEQ ID NO: 448630 - DNA, 83 bp, Homo sapiens
caggagcttctgggagccaccgtctgaagatggtcagtaggacagaaggtaacattgatgactcgctcattggtggaaatgcc

SEQ ID NO: 448631 - DNA, 75 bp, Homo sapiens
ttcgacataaggtcaaccccaacgtgtttccaacatggctagatccatcagaaactgaagccgtggagaacgctc

SEQ ID NO: 448632 - DNA, 101 bp, Homo sapiens
agaggatggaacacttcagtgcattcaagagatcgagatggtgatcatggagcgtagcaagctctcagagctggccgccagcacctccgtgcaggagcaga

SEQ ID NO: 448633 - DNA, 75 bp, Homo sapiens
ggacggagggccatgtgttgggtcagcaccatcagctcgactttctcaggatactgtccctctcccacagaggag

SEQ ID NO: 448634 - DNA, 100 bp, Homo sapiens
cgcatgtacacagatattcaggaaccaatgctgagtgctgcacaagagcaggttgggggccgtcccgctcctaaggcaggaagatggtggccgcaaagaa

SEQ ID NO: 448635 - DNA, 100 bp, Homo sapiens
gatcctcagaacactgttaaggtccagtcttgtttctggcgctggagacatcaagcttactaaagacacaggagttgacgatcagccctggccaacatgg

SEQ ID NO: 448636 - DNA, 83 bp, Homo sapiens
caccaactgcatcctgcttcgctggagtttgagcctttgctgaagccacacgtggctgtgaagaaggtcccgtatgtggatga

SEQ ID NO: 448637 - DNA, 75 bp, Homo sapiens
aaaagctgacaatggaactgactggaggcaacgcggtaaaaatattgcttcggtgggtgacgcggtacagctgcc

SEQ ID NO: 448638 - DNA, 100 bp, Homo sapiens
atggaaacaccatggctgcggcggcccagctctctctgacacaggttactgatgccaaattttgcccaagaccttttaatgtcttgcctgtgaagacaaa

SEQ ID NO: 448639 - DNA, 82 bp, Homo sapiens
tggagcctcagttggaagcagccgatccagcctgcggagcctgtggggcagggctgaagaagatgcagagcagcctgaagct

SEQ ID NO: 448640 - DNA, 50 bp, Homo sapiens
tccgactcctcggaccagcaggacaggtgcatggctgcctcctaatccca

SEQ ID NO: 448641 - DNA, 75 bp, Homo sapiens
ttgggctgagctgggttttccttgttgctattataaaagtggctagaagtgaccccaggatttttttattatcaa

SEQ ID NO: 448642 - DNA, 100 bp, Homo sapiens
gaaagggcagcagcagccaggtgtggcagtgacagggagatttcctcgtcctgtgactgtggagcccatggaccagttagatgatgaagagggacttcca

SEQ ID NO: 448643 - DNA, 100 bp, Homo sapiens
cttccctggctggacttgcggagtccccgccgaagaacccgagagctggaagtcgagtgtgctactcaactcaggagatttggagacaaactgaacttcc

SEQ ID NO: 448644 - DNA, 75 bp, Homo sapiens
ggagccgtggtggcagccccgggaggagcactggcgtctgtttccttcgggaagatcagttttcctgccatccag

SEQ ID NO: 448645 - DNA, 75 bp, Homo sapiens
tgctgcggcgcggggaccgctgtgctctcggtccggcaggttcggctattccaggacgaggagatctacagcgac

SEQ ID NO: 448646 - DNA, 82 bp, Homo sapiens
agtaggccgtctcgctctgggtctccaggcccgcgaccgtccgccagtcgtcccgaggtgagcatctgcctggagtgtaaca

SEQ ID NO: 448647 - DNA, 121 bp, Homo sapiens
ctgaccctcaaacagcagtatgatgaactggaggctgagtacgacagcctcaaacaggagctggagcagctcaaagagtttggaaattttagcattcaggtgccaggaatgcagatgggac

SEQ ID NO: 448648 - DNA, 75 bp, Homo sapiens
tttcaccattaagaggaaagcgatggaggagctgagcgctgatgaggtgtggaggcacagttggtgctattttca

SEQ ID NO: 448649 - DNA, 100 bp, Homo sapiens
ggggtttggtaccgagcggagaggagatgcacacggcactcgagtgtgaggggccacctacagatgctcctgcagtggacacagcagaacaagtctatat

SEQ ID NO: 448650 - DNA, 83 bp, Homo sapiens
tgggaaggaggccgagccgggatctcaggtcctcgggggcggcggccacgccaaggacggacatgggaaagcggaaccaccaa

SEQ ID NO: 448651 - DNA, 90 bp, Homo sapiens
caagaattttggagaagacatggatgatgagcgccttaaggatctctttggcaagtttgaatagctgaaacctttggacttcaagaaaat

SEQ ID NO: 448652 - DNA, 75 bp, Homo sapiens
cgagtatctggtgaagtggaaaggatggcccccaaaatgatcttccaaaacccaagactactgaagtaattagga

SEQ ID NO: 448653 - DNA, 82 bp, Homo sapiens
tggcttacagacgctgccagcatcgccgccgccagggctgaagaagatgcagagcagcctgaagctggtggactgtatcatc

SEQ ID NO: 448654 - DNA, 82 bp, Homo sapiens
cttcaaccagcctttggtcatcaccaggttttctggatatgccgcagaaggatccgtgccagaagcaagcctgtgagataca

SEQ ID NO: 448655 - DNA, 75 bp, Homo sapiens
ctacactgagtcggaggcgaaggttttgggatttgagattgacgcggtgaactctgtccagttttcaaaccacac

SEQ ID NO: 448656 - DNA, 124 bp, Homo sapiens
ggcgggacaagcgcgacgcccggcgcgagctcaagctgctgctgctcggtatcacctcttctgggctcaagatggacaacaagaagcgcctggcctacgccatcatccagttcctgcatgacca

SEQ ID NO: 448657 - DNA, 98 bp, Homo sapiens
gtgaaaccaacagccagtgatatgctatacatggagacaacaaccggatcccagtcatcgggcccctgaagatccgggagcagcagcggtcagctgtc

SEQ ID NO: 448658 - DNA, 75 bp, Homo sapiens
ggctaactccagaatcccccattgacatgcacatgatggtgtccaagccagaacagtgggtaaagccaatggctg

SEQ ID NO: 448659 - DNA, 50 bp, Homo sapiens
gaacagcaactattatgccatggaccttgtgctcatcaagaatacagacg

SEQ ID NO: 448660 - DNA, 120 bp, Homo sapiens
ccgggatcgtgaccgagaccgtgaccgagagcgtgaccgagagcgcgaatatcgtcatcgttagaaggaggctactcacagtcgaactacaactccccggggtccggccagaactacagt

SEQ ID NO: 448661 - DNA, 75 bp, Homo sapiens
ccgcccgcgggtgccgctcatctccatcgtgaccaaggagaagggcttgtctggagcgggaaagactactgtgag

SEQ ID NO: 448662 - DNA, 83 bp, Homo sapiens
aacggagtcttcaagaacatatgagtattcacacaggggatcatcgtcttgctcttcttttatctcagtttgtgggtagccag

SEQ ID NO: 448663 - DNA, 49 bp, Homo sapiens
cgtggacgctgactcggaagtgcagtgtcaggggaagctgatggagaat

SEQ ID NO: 448664 - DNA, 74 bp, Homo sapiens
cagagataattgataacaccctgtaacagctgaacaggtgatttggcttctgcacagttaggaggagcaccaaa

SEQ ID NO: 448665 - DNA, 80 bp, Homo sapiens
aggaacgaggcaaggagctaaagcagcgtgcgttcagccctggggcattgaagaaaaatttaggcctttttatttaagtc

SEQ ID NO: 448666 - DNA, 100 bp, Homo sapiens
ggggcctcccagtttgaaacaagcgcagccaagctcaagcgcaaatactggtggaaaaacctcaagttcggaggaaatcatgtcttgtgaaggaagtgga

SEQ ID NO: 448667 - DNA, 100 bp, Homo sapiens
gcagaagccatttcaggagtacctggaggctcaacggcagaagcttcaccacaaaagcgaaatgggcacaccacagctgctgcaagtggtcatggcagtt

SEQ ID NO: 448668 - DNA, 100 bp, Homo sapiens
gtgatacagttaatattggagatgtatcctacaagttgaaaattcctaagaatccagaacttgtgccacagaactacaatacactgcctctaggactggg

SEQ ID NO: 448669 - DNA, 83 bp, Homo sapiens
cgacgtcttgcctgtgtcccacttgttcgcggcctatagcatgaagaaagcagtgtcactgataaatgcaatagatacaggaa

SEQ ID NO: 448670 - DNA, 51 bp, Homo sapiens
aatagactccatctatccatatgagacaccattcgcttttcacccaagatg

SEQ ID NO: 448671 - DNA, 100 bp, Homo sapiens
gtcattctggactgcacccctacgggaacccacgaccattatatgctggaatggttcctttatggaagctccaaaaggaaagataccagattgatcttga

SEQ ID NO: 448672 - DNA, 100 bp, Homo sapiens
gcacacagtacaacagagtcaacctcaccttggatctggggcagatggtgagaacaagaccaagattggaaagccagcttcagaggagggaattacagca

SEQ ID NO: 448673 - DNA, 89 bp, Homo sapiens
caaacttgtccccgagcgacgagagatcatccgccagatctggtgggagagactgcagctggcggaggcagtgacctcagactctggac

SEQ ID NO: 448674 - DNA, 97 bp, Homo sapiens
gcgggcagtttcttgcaaacccggaagcagatctcttggagtgaaggctgttagtcgccgctgtcttgggacaaggtgcgcattcctggtgtgctgc

SEQ ID NO: 448675 - DNA, 100 bp, Homo sapiens
tccctgtcgcagccgcgccgccgcgcagcgccccagccacacgccggcgggcagaagccgcccgctctccgggaatacggggtgctttgcattcaggaat

SEQ ID NO: 448676 - DNA, 101 bp, Homo sapiens
ttatggatgtggctgctgggctgaaaatactggagctcataacccctactccacagctgtgagtacctcaggttttcctcctccaccaggcgctccacctc

SEQ ID NO: 448677 - DNA, 83 bp, Homo sapiens
ctccaagacgtagaggaagtggagatcggcagagacaccttctggcccggcctgaccgccgctgcctacagagtcacactcaa

SEQ ID NO: 448678 - DNA, 50 bp, Homo sapiens
acccaggaactggcccggagactaaaagggcccttatattctcaagaccg

SEQ ID NO: 448679 - DNA, 82 bp, Homo sapiens
gaatgatcatcaaacagctatggtgatgattagagacatactaatgtacatggattttttatcaagcagaaatgcatcgaac

SEQ ID NO: 448680 - DNA, 100 bp, Homo sapiens
ccttgacctccagacgcagcacaatcactttgccatgaactccatggaaacggaggtggagctgtacaacgaatttcctgaacctatcaaactggacaag

SEQ ID NO: 448681 - DNA, 100 bp, Homo sapiens
cctcaggcggcagcgcttctagcctacaacacagcagtcccctcaggatgagcaggaaaagctcttggatgaagccatacaggctgtgaaggtccagtca

SEQ ID NO: 448682 - DNA, 83 bp, Homo sapiens
gggacaagcctccccctgctgccgaccatggttgggtgggtgaggccagaagaaactgcctccggcaagaggtagcagccgct

SEQ ID NO: 448683 - DNA, 74 bp, Homo sapiens
accgatccccttctcccggaccccaggagccggcgcccccgccctgtagtaatctatgccagcaattatgacaa

SEQ ID NO: 448684 - DNA, 106 bp, Homo sapiens
ggatttgggtcgcagttcttgtttgtggatcgctgtgatcgtcacttgatttggtcgtattgggcgcctggtcaccagggctgcttttaactctggtaaagtggat

SEQ ID NO: 448685 - DNA, 90 bp, Homo sapiens
gtgagcctgtgcacctgaaagaagggttcaaagtcaagtgttttctgaagcaaactgtgccaatttgatcagcactcttattacaaactt

SEQ ID NO: 448686 - DNA, 88 bp, Homo sapiens
ggattccaagtaactcttatttgccttacccctcgtgaattcaactcttacggagctcgaagaggtaatgatgctgtaatgacaagag

SEQ ID NO: 448687 - DNA, 96 bp, Homo sapiens
ccacccttctactttctgtctctaggaatttcactactctagcagcgtcaccctttacaccagaaagctggcgggcactatggggaaaaaacaaaa

SEQ ID NO: 448688 - DNA, 90 bp, Homo sapiens
cgcgaagacggtaacccgtgtgactttgactggagatggagcagaaggaagggaagctctctgaggatgggaccaccgtctccccagctg

SEQ ID NO: 448689 - DNA, 100 bp, Homo sapiens
ggatgattggtagctaagactcccgaatacttcagaagtggggaaatggagccttcacgtaaatgggtccagtcatgcctcccagtaagaagccagaaag

SEQ ID NO: 448690 - DNA, 101 bp, Homo sapiens
cggcgaggcgcgctccctgcccggcagcgactcggaggaaactgggaagaactggtgaagtacttgcagatggcccgtaagaaggctcgagagtcctatgt

SEQ ID NO: 448691 - DNA, 98 bp, Homo sapiens
ccacagaaactgtccaaacatggatagagctactcactgagtgcactggtatttcccaataagatatcaactgaacaccagtctttggtgttagtgaa

SEQ ID NO: 448692 - DNA, 83 bp, Homo sapiens
ccgatttctatttgactggcaatagtctggctagcttgtcactttctgcaaaggtttccctcagggagcctcctgctgccagg

SEQ ID NO: 448693 - DNA, 126 bp, Homo sapiens
tacctatccttatcctggaaccccaatcactcagcgcttctcgcacagttgttttggaaaccgaaataacaaataagtccgctttgaaactttatgaaaatcttggttttgttcgagataagaggc

SEQ ID NO: 448694 - DNA, 75 bp, Homo sapiens
ctggaccctaatttgagaagtgcagacttaattcagtgcacaaatgagatgaatgtgaacatcccacagttggca

SEQ ID NO: 448695 - DNA, 101 bp, Homo sapiens
gcaggtttaaaattttacataagaagttacctttttcagagaccacctgggaacgtcccagcagttctcctgggattccagccagccctggctctcacagg

SEQ ID NO: 448696 - DNA, 88 bp, Homo sapiens
cgtgagctccggcccgggcgagcgggtgcgtctgccgcagagtcggcacctgaaggacatggagagagaagaagaaggaggttcctgc

SEQ ID NO: 448697 - DNA, 96 bp, Homo sapiens
agcactgactgctctgcttaaaaacgactggagcagcagaagccgacagtgattgcaacttccactacttccccaacaagcagtacaaccagcacc

SEQ ID NO: 448698 - DNA, 54 bp, Homo sapiens
tcaccgagatctacgagttccatgtactgggcctaatcgctacgtgcctctttg

SEQ ID NO: 448699 - DNA, 75 bp, Homo sapiens
ggatttcaacatgcctctgacaatctctagtgtatcacagatgtcgtaagaatctgaatcctccaaaagacagat

SEQ ID NO: 448700 - DNA, 100 bp, Homo sapiens
atccaaacaggccctccagaatgagctggagagactgaaagagatatgcctcttcatgttcgacgcagtagtgacccagctctaattggcctctccactt

SEQ ID NO: 448701 - DNA, 101 bp, Homo sapiens
aagagaagcaccttcagaatgtaactgcccagcaggtgttgacagctcttctaccacaagcagtgcttctccaatgcccaacagttatgatgccctggaag

SEQ ID NO: 448702 - DNA, 75 bp, Homo sapiens
ccaagctgcacgatgtggagccttccttcaaaatgtctactgttcacgaaatcctgtgcaagctcagcttggagg

SEQ ID NO: 448703 - DNA, 82 bp, Homo sapiens
ggaggagaaggtccgcttcaacaagagtgagccatggagctacgtgtggggaacaagtaccgcctgggacggaagatcggga

SEQ ID NO: 448704 - DNA, 82 bp, Homo sapiens
gcggccggaccgagcgcctcgacctcggtctgagataccctcaaaaagttatggataaaatacttagtatggctgaaggcat

SEQ ID NO: 448705 - DNA, 90 bp, Homo sapiens
gtgatgtgagcaaatgcctcattcaggcctgtttcctgccattctcaatcttgccagcaatgctcacatcagcaccaatgccacctgtgg

SEQ ID NO: 448706 - DNA, 101 bp, Homo sapiens
ccaaggatttccaagtgatttcttccaaagcacaggaatctcactctgttaaagctggtctgttctaactgagcaacatgtcatggtttagtggcctcctg

SEQ ID NO: 448707 - DNA, 100 bp, Homo sapiens
atcttcctggtctttttgaatacgatcatattgatggttgaaataggtgtttgacttgctaaacaggaaaacaaaattaagagttctagaagatggaaaa

SEQ ID NO: 448708 - DNA, 74 bp, Homo sapiens
aagctgaccaagaagccaaagaactggctaggcaaataagctttaaggaggagatgttaaagtaacccatcttg

SEQ ID NO: 448709 - DNA, 94 bp, Homo sapiens
cacaagctacagcctgcgtccagccataacccaggagtaacatcaggtctagagacaagatcgctatgtagacacaccgtgaaccatttcccac

SEQ ID NO: 448710 - DNA, 97 bp, Homo sapiens
gaggactccttctatggctggacgcccgtgcactgggccgcgcatttcggcaagtaattcgccaaaatgacgaacacaaagggaaagaggagaggca

SEQ ID NO: 448711 - DNA, 100 bp, Homo sapiens
ctcaaagggtttttcgggaaaaagcacctgacttccttcctcttctgaacaaaggtccctccttgtggtccatttctgggcaccatgggctccacagtgt

SEQ ID NO: 448712 - DNA, 78 bp, Homo sapiens
tcactgtccccccggcttccagggaccccgctgtcagtatgctgcggataaccgtctggtccttgtgcacaaaatccg

SEQ ID NO: 448713 - DNA, 100 bp, Homo sapiens
ctggagttgacactggcagaagctctcaagttcattgatcgtaagagctctctcctcacagagaccggccagccttgcagctgtatgatccaggagctcg

SEQ ID NO: 448714 - DNA, 100 bp, Homo sapiens
cggcagtgctgaggcggaacaggccgggcaccaaggcgcagaacctcaagaaggcatgaagccagcccctgcagtgccgtccacccgcccctctgggcct

SEQ ID NO: 448715 - DNA, 100 bp, Homo sapiens
ctgttgtaccccactgctggggtggtggttccaatgagacagggcacaccaaactccatctgaaggaagaggcccagcagaagggactcgctgagccacc

SEQ ID NO: 448716 - DNA, 50 bp, Homo sapiens
ccatggatacaagtgtatgcgccaggtggaaaacatgctatatccaaagc

SEQ ID NO: 448717 - DNA, 89 bp, Homo sapiens
cggctcacctgtgcgggatggaacaaaaggacaaccctccatatgataagggagccttcagaatcgaaatcaactttccagcagagtac

SEQ ID NO: 448718 - DNA, 98 bp, Homo sapiens
ccccacatcctcccctgagtccggagctaccaaaaccatcctcctgtcatccgtccttggctcaggatttggagagcttgcaccaccaaaaatggcaa

SEQ ID NO: 448719 - DNA, 74 bp, Homo sapiens
ttcctgtacagcctgcagaacttgcacagccagagaacaacacatcacacacaggaaacagttgtgctcatgtg

SEQ ID NO: 448720 - DNA, 50 bp, Homo sapiens
ccgggtggagttcagtgaaagggcaggtcacatatcctggagcaggaaaa

SEQ ID NO: 448721 - DNA, 101 bp, Homo sapiens
agcccgcgcagtccgcgcagccctcatcgcaactgggcccgcgcgcagcagggatggtgagagaaggtcagctaaatggctcatctgcagcacacagtgaa

SEQ ID NO: 448722 - DNA, 115 bp, Homo sapiens
aggacggcccccaggttctgacgggcaggttcatgtatgggcccctggacatggtcaccctgactggggagaagtcactgattgtccctgggaagagccccacgaggaagaagtc

SEQ ID NO: 448723 - DNA, 90 bp, Homo sapiens
tcttctccgccgcggcactgatccccacaggaaagaaccggaggctgaagcaggccaaagaagaagctcaggctgaaattgaacagtacc

SEQ ID NO: 448724 - DNA, 83 bp, Homo sapiens
atcaccgagcgcttgatgtgcgcggagagcaatcgccgggacagctgcaagccttatgccagcctggaccatcttggaggcag

SEQ ID NO: 448725 - DNA, 100 bp, Homo sapiens
ccaaccgcaaccattgacgccatgtcgggttattcgagtgaccgagaccgcggccgggaccgagggttaaataggattgcgaatcaggtggccattcagc

SEQ ID NO: 448726 - DNA, 154 bp, Homo sapiens
ctatgatgttgagacaagttcatccagaaagctttactgatttgcttgtcataaggcagacatcatctgctctaataggaagacccactacgttatctgagacaatggcaaaagctgacatatggcttattcgaaactactgggattttcaatt

SEQ ID NO: 448727 - DNA, 113 bp, Homo sapiens
ctcaaggtccgcgtgagccagagggagttgagccgcggcgtgtgcgccgagcgctactcgcaggaggtcttcgatgcctgaggaaacccagacccaagaccaaccgatggagg

SEQ ID NO: 448728 - DNA, 100 bp, Homo sapiens
caggactgcgccgcgtcttcctcaaggtcatggcaaaaccccaaaagatgccgcgtcagttcgagccacgcatccaataccagcagcctgtgggatttat

SEQ ID NO: 448729 - DNA, 87 bp, Homo sapiens
ggaacatagccctttgggagagttgtgtccaccagacagaatgttgctgcgggatgtaaaagctcttaccctccactatgaccgcta

SEQ ID NO: 448730 - DNA, 82 bp, Homo sapiens
ctcaacgagaacaagctatcagggtattctggaacaagatgcgttccacagatctctcttggcctgctgccttgaggtcgtc

SEQ ID NO: 448731 - DNA, 82 bp, Homo sapiens
agttcacctaccgcggcgtggacctcgaccagctgctggacatgtcctacttgcttggctcaggaacaacagaagagaataa

SEQ ID NO: 448732 - DNA, 80 bp, Homo sapiens
ctaccctgactacgggagttgggaggacccgggacaccgcacagccgggaaatggtggacatcgagcagctggatccccg

SEQ ID NO: 448733 - DNA, 90 bp, Homo sapiens
cagcaagcggggcgctgtgtccccaagctccccgtcctcgggtactccaaagattcaggtttactcacgtcatccagcagagaatggaaa

SEQ ID NO: 448734 - DNA, 100 bp, Homo sapiens
accactcaagagtcataggattagatgatccaagtcaccaagaaattactgtctcaagtgatacgcgatggcaagccggcaggtggatattgcaactcag

SEQ ID NO: 448735 - DNA, 75 bp, Homo sapiens
gggtagagatgatgcgcttctcagaaatgtccagttgatattcactgatggactccaaagaatcattaactcctg

SEQ ID NO: 448736 - DNA, 82 bp, Homo sapiens
cgcgctctgccgcgaggcgcgcgccgcgcaagtcttcttcctcaaagatatgagagatagcacagatggaccaaaggttatg

SEQ ID NO: 448737 - DNA, 100 bp, Homo sapiens
ggagccaactagaggcagggtcatccttgcccttgtcctcccctttcatccctatgtggaaaacgctgagatgattgacaaattgacattgacattcaac

SEQ ID NO: 448738 - DNA, 96 bp, Homo sapiens
gccccggtctctcggacaccattttctgccgctggacgcaagtaacagatcaactcctagcaatcatgatcggatacagcgtctgaggcaagaatt

SEQ ID NO: 448739 - DNA, 75 bp, Homo sapiens
gtttggccaaggagatgtacagaatgggccaagctccactgttcagatgcaaagtatggaagctccaaaaggaaa

SEQ ID NO: 448740 - DNA, 89 bp, Homo sapiens
gccccggggaactagggagcgtctccggctgcacagcgctcaggcattttgttcccaacatcacctttggtcaccctgtggtagaaagc

SEQ ID NO: 448741 - DNA, 75 bp, Homo sapiens
gtggccatgtgcagccgctacaatatatacagccctgctctgggacacacctccattggatttaaaagacagtcc

SEQ ID NO: 448742 - DNA, 50 bp, Homo sapiens
tctgagaacagcacttccctgcaggttcccaagtggggcccaggctcgga

SEQ ID NO: 448743 - DNA, 83 bp, Homo sapiens
agagcaagaccatcatgctgcgcggccttcccatcaccatcacagagagcgatgttgctccttgagggcaggacagttcttat

SEQ ID NO: 448744 - DNA, 100 bp, Homo sapiens
ctcattagtgagaatggtcatgctgccgacaccctgacggccacgaacttccgagtggtgcccagcgggcctccgcggaaggtggaggtggagccactga

SEQ ID NO: 448745 - DNA, 50 bp, Homo sapiens
ctccgcactctggagcataatgtgagtacgagagggcctccaaagtggac

SEQ ID NO: 448746 - DNA, 83 bp, Homo sapiens
cttcggcagtccacccaccgccgccgcctcccagctatacacagaatgggattttacatatgctggacagaaataagagaatc

SEQ ID NO: 448747 - DNA, 101 bp, Homo sapiens
atcacctcaggcaaatggaacgtgaaaggaaataatgaagatgtttcattttcaagaccagcagatcttgaccttattcagtcaactccctttaaacccct

SEQ ID NO: 448748 - DNA, 49 bp, Homo sapiens
caactgaacgtaggggggaccaggagtccaatgtgctgattgctgctaa

SEQ ID NO: 448749 - DNA, 100 bp, Homo sapiens
ttcgatcagagatcggcggagaccctcgaagtgcgcaaacttgacactcaccctgaccgcatggcggacaccgacctgttcatggaatgtgaggaggagg

SEQ ID NO: 448750 - DNA, 100 bp, Homo sapiens
agcaagaaaagcctctgggagcagaagggaggctccaagacctcatcaacaattaagaaatgcactcggtgatggaaagagagccactattctgaagaac

SEQ ID NO: 448751 - DNA, 100 bp, Homo sapiens
cgtcgtgatccagaagtccagagctgaggactgcctgtttgcagctggacagtgccacatcgcttatccaggcagctaaaaacctgatgaatgctgttgt

SEQ ID NO: 448752 - DNA, 100 bp, Homo sapiens
tcgggggtcatgatgggcagcaagatggcgtctgctagtagggtcgttcagacatacactgtcaaacggaagaaattaaagccacatcctcaatattagg

SEQ ID NO: 448753 - DNA, 100 bp, Homo sapiens
gctgccaccctcgttcccccgattggggccgcagcagaagatggctgtgccacccacgtatgccgatcttggcaaatctgccagggatgtcttcaccaag

SEQ ID NO: 448754 - DNA, 139 bp, Homo sapiens
ggggacctgcatgtgtgtgcgcgcgaaggagcggaagaatggcagtgctcaaactcaccgaccaggcataatgattataaagtggtttctcctgctttgcgagctgtgggaaacattgtcacaggggatgatattcaga

SEQ ID NO: 448755 - DNA, 98 bp, Homo sapiens
gaaggaagtgcggagccagcctgagttgggagaagagctccagagagtacatgtcccagagcaagcacacggaggcccgggagctcatgtactcggga

SEQ ID NO: 448756 - DNA, 96 bp, Homo sapiens
atactctgaggctctcaaagatgcccaggagaagctggagctggcagagaaaaaggccaccgatgtccctggatggccggttgcaggtgtcccatc

SEQ ID NO: 448757 - DNA, 100 bp, Homo sapiens
gttgacctgaccatggacgacattcgaaggatggaagaagagacgaagagacagctggatgaagctgaccggttccctgatgtgttacctgcttctgcta

SEQ ID NO: 448758 - DNA, 80 bp, Homo sapiens
tagctgtgtgggctgggaggtctggtagggctgagcttgcaagaggatcaacatgcctggccccctgctgcgctggctca

SEQ ID NO: 448759 - DNA, 100 bp, Homo sapiens
tgatatcctgctttgagcaaataaaagagccctggaatgtgaagagacatgagacagtagtcagcttctcagcgacaagactctgggacgatgaagaagc

SEQ ID NO: 448760 - DNA, 83 bp, Homo sapiens
tgcagacgatgtcttcgatcttctaaaggagaaaagccttacagatgctcatgggaagggtgtgagtggcgttttgcaagaag

SEQ ID NO: 448761 - DNA, 100 bp, Homo sapiens
gagccagtgatttacaatagagcaaggcttgcttccggcgtcatggctcaaagggccttcccgaatccttatgctgattataacaaatccctggccgaag

SEQ ID NO: 448762 - DNA, 48 bp, Homo sapiens
ttcacattggctgttacaagtgcgagaggtggggctggtgtccgagca

SEQ ID NO: 448763 - DNA, 96 bp, Homo sapiens
ctgaaaagctggcccgtgacctgaaggctgtcaagtatgtggagtgttctgcacttacacaggaacattaagccatcatgtaagaagtccagctat

SEQ ID NO: 448764 - DNA, 98 bp, Homo sapiens
tgcccttcaccgcgggcgccaatggggagcagaaggactcggacacagctcttccaccaaagccacctaagccaatgacttcagcagttccaaatgga

SEQ ID NO: 448765 - DNA, 96 bp, Homo sapiens
gcggtctgacatcgcgacgctgctcaaaacctcgctccggaaaggggacacctggtggtttcagacaccctcacaggttttctaccatgcagcaac

SEQ ID NO: 448766 - DNA, 76 bp, Homo sapiens
caccgtgtaccgcatgcagcagtacgacctgcagggccagccctacggaagcaggtcctggggaccaaggtggacg

SEQ ID NO: 448767 - DNA, 75 bp, Homo sapiens
ctctactcccatgaattcacctttgattccagtgtgaactgtcaatcataagggtgttggaactcgccataaggc

SEQ ID NO: 448768 - DNA, 100 bp, Homo sapiens
gacaaccatggagccttcctgtggcaggagagacaacaaagcgctattatcctaaggtctggaacgatttcatgaaccgctccggggaggagcaggagcg

SEQ ID NO: 448769 - DNA, 83 bp, Homo sapiens
ggctgcagggcccaggtgggaagcattctgttgcaacagttgcggagcgcccatgcagatggaatctcgctctgttgcccagg

SEQ ID NO: 448770 - DNA, 80 bp, Homo sapiens
gactttggttggtggaggctgtggcaatggaacaggcttgagaaacaggacatggatttgattgacatactttggaggca

SEQ ID NO: 448771 - DNA, 100 bp, Homo sapiens
gtccgagtcccaggtcaagagcctctgcgagaagttgtatcacggactgattcaccgagcccaaccgtactcaactcacatatttctaccccaaatgtga

SEQ ID NO: 448772 - DNA, 100 bp, Homo sapiens
cttccacaaggacagccatgggagacatatctgaagagatggattaagaatgctttggattaaggattgtggagcacatttcaatcattttaggattgtc

SEQ ID NO: 448773 - DNA, 75 bp, Homo sapiens
tttcagaggatcctgtagccataaagattgcaggaaatgtggctttagataatctacagataaaagaaaatgccc

SEQ ID NO: 448774 - DNA, 75 bp, Homo sapiens
gcttctccgccatgcaaggctggcgcgtctccatggagctcatgatggagcagtccaagaagtcctccctcatgg

SEQ ID NO: 448775 - DNA, 100 bp, Homo sapiens
caagcatctgtaccgttgagtcccaagaaaggcagtgaggccagtgcagctttcaccaacaatcaccagtggtttacacaacattgcaaggagcattgaa

SEQ ID NO: 448776 - DNA, 83 bp, Homo sapiens
ggacgaagcagaaaggcgggtgtcactggggacgttctgagggctaccggctctctgaccagttccacgacatcctcattcga

SEQ ID NO: 448777 - DNA, 80 bp, Homo sapiens
ggaatggcctttttcaaaatgagagaaaaacctctgtagaggagcaggatgcaaccgacaggctgtggccggacagctgc

SEQ ID NO: 448778 - DNA, 101 bp, Homo sapiens
cagttccttcccaatggcaactatgtttggatgttggatctacactttctcaagcactgtgatcttcaaatgtcacttggtacatatgaccgtggtctccg

SEQ ID NO: 448779 - DNA, 87 bp, Homo sapiens
gtgaggaaaggaggtactgtagagtctgaaggaaggcctgacggtgcaagaacggttgaagctctttgaatccagggacttgaagaa

SEQ ID NO: 448780 - DNA, 100 bp, Homo sapiens
ttcatccaattcagaaagtctgtctgcatcttctaaagctctgtttcctagcacagcacaactcatcaaacggatgattgatgagacatccagtggaggt

SEQ ID NO: 448781 - DNA, 75 bp, Homo sapiens
ccaacactcctagccaatggtggtcatggagtagaagggagcgatactacagaaacctgctcctccaaagccaga

SEQ ID NO: 448782 - DNA, 100 bp, Homo sapiens
ctgtggcctcgttacctgcaggtattgggagatccacagctaagacgccaggacccactggaagcctagaaatgctggatctaccatgaaagacttgtga

SEQ ID NO: 448783 - DNA, 100 bp, Homo sapiens
gtcagccttcccagtagctgggaccacaggtggatattccatctattataaccaagaaactattaaaagcagcaatgaagcatatagaagtgatagttaa

SEQ ID NO: 448784 - DNA, 76 bp, Homo sapiens
gtctggaggcctggactagtgctgtgggcaaggtcttctcgtgggcaccctggacgtggtgctggactccagtgcc

SEQ ID NO: 448785 - DNA, 76 bp, Homo sapiens
ctctgagatcccagatcatgaggttacaggaggttccagtggcatcgggaagtgcattgctatcgagtgctataaa

SEQ ID NO: 448786 - DNA, 51 bp, Homo sapiens
ggatggccgtaaccccgaaggaaatatggtggatgcttccaaaagcatcga

SEQ ID NO: 448787 - DNA, 80 bp, Homo sapiens
gcaaggagctaaagcagcgtgcgttcagccctggggtaattaataatgcttgtgctactcaagccatagtgagtgtgtta

SEQ ID NO: 448788 - DNA, 100 bp, Homo sapiens
ctccaaagaaaatgggatccatgaagaacaagaccaagagccacaggatctctttgcagtttggagtttgagaatcagaagactcgcttgggcattcagt

SEQ ID NO: 448789 - DNA, 147 bp, Homo sapiens
cccacaccatgctgaccccgccgttgctcctgctgctgcccctgctctcagctctggtcgcggcggctatcgacgaattacctctctgaacaggactttgtgtctgtgtttggcatcacaagagggcaatttgcagctctgcctggc

SEQ ID NO: 448790 - DNA, 100 bp, Homo sapiens
gggcttgagagctgggttctattttccctcctcaaactgactttgcagccacggagagtgaaggagaacgacctgctcagaatgagaagaggaaggagaa

SEQ ID NO: 448791 - DNA, 75 bp, Homo sapiens
ctagaaagatgtaggcttggagcagaatcaccaagcatcgccagcaccaggttgaatttagtattagtgacaaac

SEQ ID NO: 448792 - DNA, 98 bp, Homo sapiens
ctacaaccttcgatctcctgacgagggcaagattcttgccaagagaattaatgtgcgtattgagcacattaagcactctaagagccgagatagcttcc

SEQ ID NO: 448793 - DNA, 100 bp, Homo sapiens
tccataagttcaaagggaccatcatcctgacagctgtgtactttgccctcagcatctcccttcatgtctgggtcatggtctatgttaacaatgaatgggc

SEQ ID NO: 448794 - DNA, 82 bp, Homo sapiens
ccagatatagccgttggtacaaagaacatccagtcatggataaaaatgagctggttcagaaggccaaactggccgagcaggc

SEQ ID NO: 448795 - DNA, 101 bp, Homo sapiens
accagaccaactacctggtggtggctgccatgatgatttccattgtgggttattctacctatggaaatccaggcagccaaggctatggacaagcatcacaa

SEQ ID NO: 448796 - DNA, 83 bp, Homo sapiens
cagccagtactctatatgaacaatccgtctggatcacggatgtaggaagtggtaagaatgattgatgttggctgatattggag

SEQ ID NO: 448797 - DNA, 75 bp, Homo sapiens
atcagtgagctgaatggaaaaaacattgaagacgtcattgcccagggaacacagcctattggatccctaggctca

SEQ ID NO: 448798 - DNA, 73 bp, Homo sapiens
tcaggtccaaaaacagagacttttccctcccagtccctaagtttaaggttactggagttggctataatcaatt

SEQ ID NO: 448799 - DNA, 98 bp, Homo sapiens
ttggcgttgcacttttccttaacggctctgccatcgggaatgcagtggtgtcttttgaaagaagaggatgtcattcctcgtatcagggcaatggaagg

SEQ ID NO: 448800 - DNA, 75 bp, Homo sapiens
cctgctgatgtcagtgttatatcctccaggaatactggccagtctgaagatgatgagaaactgaaaaagaggaag

SEQ ID NO: 448801 - DNA, 83 bp, Homo sapiens
ccatggggctggcctgcggcgcctgggcgctctgagatatctgtatgcccttggacagaaggtttggaaaagatggaaaaaac

SEQ ID NO: 448802 - DNA, 51 bp, Homo sapiens
ccctactccaccatcatcaacaaaggttatcaatactctggctgaccatca

SEQ ID NO: 448803 - DNA, 96 bp, Homo sapiens
gtcatcaagcagcacattcaaggttcgatacaagaggctgttttcctagcgtggcttgctgcctttggtaagaacatgtcgtccatcttgccattc

SEQ ID NO: 448804 - DNA, 100 bp, Homo sapiens
ctggcaaaggtgcttcggggacattccagttacttgctggacagaagaaaagctcccccttctggacatttgaatactaccaaacattctttgatgtgga

SEQ ID NO: 448805 - DNA, 90 bp, Homo sapiens
ggactgactggggttctgagactccctgtcccggaccgcagcactttcagaccatgctgaagtctaaattgaatgtcttaacactgaaaa

SEQ ID NO: 448806 - DNA, 98 bp, Homo sapiens
tgttacagattcagcagggtttacagacattagcaacggaagccccgggcctcatcccagggtgtcagttgtacccgaggcgttctcagcagcagcaa

SEQ ID NO: 448807 - DNA, 98 bp, Homo sapiens
ggcatcttcccgaggcccagaatccaccgtcaggcataaattgattattcctcgcccacatctgtgccagagtaatcaagtcagaggattatatgact

SEQ ID NO: 448808 - DNA, 50 bp, Homo sapiens
agaaagagacttttttctaaagaatgttcatcatgcctagtggcgtataa

SEQ ID NO: 448809 - DNA, 100 bp, Homo sapiens
acctccgcagcagctccccagggcccacgggccagccccgccgccctcgcaacctggcagccgccgccgtggaaggcaatagagcatatgttctacagga

SEQ ID NO: 448810 - DNA, 100 bp, Homo sapiens
ttgaaagtgaaatgtcatgcctctgaaaatgaagccggccggcgctcacttgtcttcaggaagctcggagcctttggtggagccggggagaggaagggtg

SEQ ID NO: 448811 - DNA, 82 bp, Homo sapiens
cgaagaggaggagattgtgattgggtggcaggagaagctctttagccagcttaaagcttttcaagccaggccaagaagctgt

SEQ ID NO: 448812 - DNA, 90 bp, Homo sapiens
gtcatcacttggacaacagaacccaaaagttctgatgttcggaaggctcagctccctcatgtcaaagtccacgcctactttgctcccgtc

SEQ ID NO: 448813 - DNA, 90 bp, Homo sapiens
tcgcccaagtccctctactcgcgaggttggcgtgcagtggtgtgatctcagctcattgcaacctctgcctcccggactcaagcaatcctc

SEQ ID NO: 448814 - DNA, 90 bp, Homo sapiens
tcgcaggcgccgcacggagttgcgtcccggggacttggggccgcagggagaaaccagactgtgatgactgggagagcgggctgaatgcaa

SEQ ID NO: 448815 - DNA, 55 bp, Homo sapiens
gccgcagccatgcgccgacagcctgcaggtttgcatcgccagcttctatatatta

SEQ ID NO: 448816 - DNA, 88 bp, Homo sapiens
accgcaccgctcccgggatcatggtgttctacttcaccagcagcagcggtggggacccatcgtgaagatggcgtggccctgagaggca

SEQ ID NO: 448817 - DNA, 83 bp, Homo sapiens
aattcatagaatagactcccctggatttaagccagcctctcaacagatggggacacctgtcacaagctcaagtacagcttcat

SEQ ID NO: 448818 - DNA, 82 bp, Homo sapiens
tgaaaaataccacgacaaaaccaccctaaaacgaaatcctgaagttcgacatgtagatttggagatactgtgagtttgatgg

SEQ ID NO: 448819 - DNA, 139 bp, Homo sapiens
ccatcgacggtcagtgcgcacgttgtaatcagctgaggccatgtcaggagacggagccacggagcagggcccaacatctgtaccacgcgaggtgtgagctcctgccagcagtgcctggctgtgagccccatgtgtgcct

SEQ ID NO: 448820 - DNA, 74 bp, Homo sapiens
agcctgcggagcctgtggggcagaatgatcaagtctcggcctctggattatacctttgttcctcgaacttggat

SEQ ID NO: 448821 - DNA, 97 bp, Homo sapiens
acctgggccccagaccgtgctgatcttcgatgagctctcggattccttatgcagagtggccgacttggaattacatgaacgacagccttcgcaccga

SEQ ID NO: 448822 - DNA, 51 bp, Homo sapiens
tcagacagaaaaccagcgaggtgcaggggcttgcttctgacatgtctgatg

SEQ ID NO: 448823 - DNA, 87 bp, Homo sapiens
agcctggagcgcgggccctggggccgcaacccgcgccgggcgagtactttggaagtgttgctgaaatcatcaggaatcatcaacata

SEQ ID NO: 448824 - DNA, 75 bp, Homo sapiens
gatcaatccagatggcagccagtcagtggtggagtgggctcgggatgagtttgaaggcctcttcaagcagccagc

SEQ ID NO: 448825 - DNA, 75 bp, Homo sapiens
ggccagactgaacacgatgaggatgtggacgagtgctcactagcagaaaaaacctgtgtgaggaaaaacgaaaac

SEQ ID NO: 448826 - DNA, 83 bp, Homo sapiens
cccgcccgcctgctcggcgaccagccctcccaggcccaatacttcaaagcatcctacctctgctcaatatatattacttggag

SEQ ID NO: 448827 - DNA, 95 bp, Homo sapiens
agttgaatgatgtatttgatcctgattctacccaagtacatatgatttcagctgcaatggcaggagttcatgatcaagtgttgcccacaccaaat

SEQ ID NO: 448828 - DNA, 100 bp, Homo sapiens
ttacaaattgctgcttgtccaaatcaggatccactgcaaggaacaacagctggaaatctgctcaggccagtccattactacaaggagaaagtcagaaggt

SEQ ID NO: 448829 - DNA, 100 bp, Homo sapiens
ctggagtctgagagagccaggccccgtggttcccaatcatctggatgtgaagttaccccagatgtaaacatttcaggccaaaaatttaacattaaactcc

SEQ ID NO: 448830 - DNA, 100 bp, Homo sapiens
aacatttttcccggctgtggtcctaaatctgtccaaagcagaggcagtggagcttgagattgaaaaggctgtggtgtctcagcgcctgacagaatctccg

SEQ ID NO: 448831 - DNA, 78 bp, Homo sapiens
cctggaatagctcaagttcttaaaagttgcgttgtaataaacctgaggttatcaatactctggctgaccatcatcatc

SEQ ID NO: 448832 - DNA, 75 bp, Homo sapiens
cctgttgacgtgtcaagcactaactgttgattcttcaccacactgaaaccattaggaaaaatccttgtggttaac

SEQ ID NO: 448833 - DNA, 100 bp, Homo sapiens
gacgaaattgaaacaaaatgtaaaattaaagaattcacaagaaaccattccaaatagtggatatttggccttgacattaaaggcagagactgtggcaatg

SEQ ID NO: 448834 - DNA, 115 bp, Homo sapiens
cgacatgttcacgcacgggatccagagcgccgcgcacttcgtcatgttcttcgcgccctggaccaagaatcgccttcagccctgtctggtgcatccttggcagaaagtgaggagg

SEQ ID NO: 448835 - DNA, 98 bp, Homo sapiens
ggccgccgcgctgtggctgctgctgctgctgctgccccggacccgggcggacgagcacgaacacacggaccctttagatcctacaagatcagtgattg

SEQ ID NO: 448836 - DNA, 100 bp, Homo sapiens
ctgatatccctgaccacttcctgtgtctgtgggagcactgtgagcctgtgccatatttcgggaggctgcaaggagggctcacagctcgaagaaccatcat

SEQ ID NO: 448837 - DNA, 98 bp, Homo sapiens
cggggagctatcgtcgtcttcaaactattgggaagaagttacctgcaactacagcaactccagactcatcaaaaacagaaatggacagcaggacaaag

SEQ ID NO: 448838 - DNA, 87 bp, Homo sapiens
atggaatgattttttctgttctctgttctgtttcccaatgcagaaaagaaggggcagctaagaatggagcaacaggcgtggagttgg

SEQ ID NO: 448839 - DNA, 82 bp, Homo sapiens
ctaaagacgggccattttccagacctcatccagggactttgaacatgtcggggatcgccctcagcagactcgcccaggagag

SEQ ID NO: 448840 - DNA, 99 bp, Homo sapiens
gacatcctgaagccaatcctggtgtgtttatctatcgatcatcctcagaaggtcttaattatgggtgaagctcttgacctgggaacctgtaaagccaag

SEQ ID NO: 448841 - DNA, 105 bp, Homo sapiens
ctcgctggcgcctcgtccggtactcagacgctggcgggcgcagtttctcacgacgggccgagcctgccactatgactatgctcagctgtgtaacatccccgtgac

SEQ ID NO: 448842 - DNA, 74 bp, Homo sapiens
ctgcagcgattgcgagaatgaggaggacaacagctacaaccggggtattggtaaaggttttcaaggtgtcatga

SEQ ID NO: 448843 - DNA, 82 bp, Homo sapiens
ccctacttcaaggataagggcgacagcaacagctctgccggctggaagggggagaagcgagcggacatccagctgaacagct

SEQ ID NO: 448844 - DNA, 97 bp, Homo sapiens
tctagaagaaatgaaaaaacaggctgctgtccagtgtcttcgatctgcttctgatgaagacttgaaaatactggaaatctgtccggatccaaattat

SEQ ID NO: 448845 - DNA, 83 bp, Homo sapiens
aacttccgtgccccccaccctcaccaaggtgcagtctttgcaagccacatttggaacttttgagtccatcttgagaagctccc

SEQ ID NO: 448846 - DNA, 97 bp, Homo sapiens
ccatcatcagcacctggcataaggccattgctcagggcatccaggagctgttatgagccagagttatttcctggtttaatctacagaatgatcaaac

SEQ ID NO: 448847 - DNA, 76 bp, Homo sapiens
ggaaaacctccttatgctgatatacatccaatgaggttttctggatatgccgcagaaggatccgtgccagaagcaa

SEQ ID NO: 448848 - DNA, 101 bp, Homo sapiens
agccaggagaccctgaccaggaagcgggtctctgccagttccccaaaatatcctccgaatcctaaatctagagctccaaggatgctggtcattaagaaagg

SEQ ID NO: 448849 - DNA, 90 bp, Homo sapiens
cagcgggcactgcggcgccgaggcgcggcggcaggacgggaaccacgcgagctgcagccagacagaagcattaaaatgcgtggctcaggc

SEQ ID NO: 448850 - DNA, 131 bp, Homo sapiens
caggtggggaaagatgctgttccaggcgcacactagtctacaaggccagagctttctggaagggggcaggagctgctgttgacggaggcaagttggatgtcgggaatgctgaggtgaagttggaggaagag

SEQ ID NO: 448851 - DNA, 75 bp, Homo sapiens
gaggatccgctgcgctcggggaacgcgacagcggcgctcgtggccccgggtggttctcttcccaaagtggaagcc

SEQ ID NO: 448852 - DNA, 75 bp, Homo sapiens
cggcgccccctcccagctcccagcgctgaactagatgcagagcacgcccagaaggtcctggaaatggagcacacc

SEQ ID NO: 448853 - DNA, 100 bp, Homo sapiens
ctagcgtcctggaattacttcaatcaactgatgcttttttcaaagccgctataagccttgttccggaagttccaaagatgattaatattgatgggaagat

SEQ ID NO: 448854 - DNA, 88 bp, Homo sapiens
cggctttgcagcggggacttcggcggcggcgcctcaggcacctcggcccggagcagccttccaaacgcagaagggtcgagaacagcat

SEQ ID NO: 448855 - DNA, 96 bp, Homo sapiens
agttgtgttggtaatgaagaaaaggtgactctgacatcattagaagcatgccagaacagactggtgaaaagtaaaccttttcacctacaaaatttc

SEQ ID NO: 448856 - DNA, 100 bp, Homo sapiens
gtattatagacaacaagcagcctattatgcccagacaagtccccagggaatgccacagcatcctccagcacctcaggtcatcatggtcacaggagaccat

SEQ ID NO: 448857 - DNA, 90 bp, Homo sapiens
gtggaagaagaccaagacccatcatgccccaggctttaaactccagagaacctcatatgtgtttagtaagagatatttcaaactgctggg

SEQ ID NO: 448858 - DNA, 100 bp, Homo sapiens
atgataataagatcatccacagagatctgaaggctggcaacattctctttaccttagatggagatatcaaattggatgatgtgatgccagccacttactg

SEQ ID NO: 448859 - DNA, 49 bp, Homo sapiens
tccccatcaccggcacacattgtcgtggctttctagaagatgaccatag

SEQ ID NO: 448860 - DNA, 87 bp, Homo sapiens
cctcctgagtagttggtattacagcgcaaatctgtccaaggctgcctggggagcattggagaagaatggcacccagctgatgatccg

SEQ ID NO: 448861 - DNA, 90 bp, Homo sapiens
caaccttgtaaatggcatgcttggagacaaaagaagcatttaaatcaaacggtattgagatggattgggttatgaaacataatggtccaa

SEQ ID NO: 448862 - DNA, 75 bp, Homo sapiens
ctcagttggctgcaggagcagctagcacaggcttgcgccgggacgctgcggcggacgagagatctggtcccggta

SEQ ID NO: 448863 - DNA, 97 bp, Homo sapiens
catgaccttccagaattacgggcaagcgctgttcaaacccatgaaagcgtttcccaaagtgtattctgcggaactagcacctactgtgttctcaaca

SEQ ID NO: 448864 - DNA, 82 bp, Homo sapiens
ccgctctgcgggactctgaggaaaagctcgcaccagggagtgcatccgccccaacccttttccccctcgtctcctgtgagaa

SEQ ID NO: 448865 - DNA, 90 bp, Homo sapiens
ggcatcgacgatctccatatttcattgcaagactggcataaggtcccagctggtgatatgaagaggtggctacaactgtaataacaacct

SEQ ID NO: 448866 - DNA, 101 bp, Homo sapiens
gttccctcgccctgccccacaccatccttcctgctgctgcccaggatgtttattaccgggatgagattggcaatgtttctaccagccacctccttattttg

SEQ ID NO: 448867 - DNA, 98 bp, Homo sapiens
tgggtccgtggtcgtttgtttctccaaggtttgaaaagcagctggcctgcaaggcttcacttttggatctgaaagagcatgcttcttctctggcatcc

SEQ ID NO: 448868 - DNA, 101 bp, Homo sapiens
ccacctccagcccctgcgcctcgagatcatgatgcagccgtccttttggatttctttttaataatgtgtgacccttcacctttgatcccctgacctgcatt

SEQ ID NO: 448869 - DNA, 90 bp, Homo sapiens
acttgacacgatattttttgctaagcagaggtgacgttaaaggtgcacatcagcgacgccagcacccaccagcccgtagcagatgcgctc

SEQ ID NO: 448870 - DNA, 75 bp, Homo sapiens
tggtgctgtctgggcttcatagcattcgcctactccgtgaagcccgtgtcccagcccacccaggtaactctgatc

SEQ ID NO: 448871 - DNA, 98 bp, Homo sapiens
gtcctcaagaagttcctaaaaggatgaaaactttcggaagagaaagttgcctgtggtaagttcagttgttaaagtaaaaaaattcaatcatgatggag

SEQ ID NO: 448872 - DNA, 74 bp, Homo sapiens
agcctttgatataccagaatgcagctactagctttcaaggaaactacaagatccccggatcatgaccactctca

SEQ ID NO: 448873 - DNA, 90 bp, Homo sapiens
cacttcaaacattcgtctcggaaaccccgcctcttacagtcacgagcgcccaaccagtgcgacctcaactgcctggctgaggggcacgcc

SEQ ID NO: 448874 - DNA, 82 bp, Homo sapiens
tgcttaaaaatcaccagttactttaatgaatttgaaaaatgtgtgagtgctaaggaagctttggagactgatctttataagc

SEQ ID NO: 448875 - DNA, 82 bp, Homo sapiens
ctcgcctgagcttcgtgaacatctagcacagaaaccagtatttctccccaggttgggaaggagaaaatgctcaaggtgaaga

SEQ ID NO: 448876 - DNA, 82 bp, Homo sapiens
ccggccctgcgcctcccgccgcgcccgggatgtattcgtccccgctctgcctcacccaggcaccgtctgcgtcctgctgtcc

SEQ ID NO: 448877 - DNA, 100 bp, Homo sapiens
ctcacgccatgcagctgctgacggcagataagtaatggaacatcatctgtgatcgtctccagaaagaggccatcagaaggaaactatcaaaaagaaaaag

SEQ ID NO: 448878 - DNA, 83 bp, Homo sapiens
gcgacaagccgctggcagccgcggatctcaccgccgctcagggagaatggggtactaagagaaaagcacgaagctgtggatca

SEQ ID NO: 448879 - DNA, 82 bp, Homo sapiens
gctgcacactcttggggctctacctctttttcaaagaagctgcagtaaaggaagatgaagaagaagtttcagataagggcag

SEQ ID NO: 448880 - DNA, 100 bp, Homo sapiens
gctgcgggccaggggtactcggaaggcgcgggcaggagcctggcgaggatgcaccttcccctgccttggaaagatatcagttttagagaatgtggcgtgg

SEQ ID NO: 448881 - DNA, 75 bp, Homo sapiens
tgtctcctgtgcccagccactggatggtggcgttgctgctgctgctctcaggtgtatgtgctcaagaggccttat

SEQ ID NO: 448882 - DNA, 101 bp, Homo sapiens
cgaggtgacttcccaattgcccttgagcatgattcgaaaggaaacaaaatcgcctggaaggatgaaattctgaaagcagcggtaatgaaatatgggaaaaa

SEQ ID NO: 448883 - DNA, 112 bp, Homo sapiens
ccgcgcgcagggcctgcagcgggagctggacggcgagcgcgagcggcgcgagaaatcaatgatgaatctggtcgagattctgaagtcagtgccagggagcacatgagttcca

SEQ ID NO: 448884 - DNA, 100 bp, Homo sapiens
cgctgctggaagacgaggagcgcgtcgtgcgcctgggggtgcgcgcctgcgacctgcccgcctgggtggaatggatccaacagcaagtggtaaaaaagcg

SEQ ID NO: 448885 - DNA, 100 bp, Homo sapiens
gaaccgctctcgcttcgtcctacacttgcgcaaatgtctccggaagtgaccgcacaatgactcaagctaccacatactgttgattgtgaaatgccagttg

SEQ ID NO: 448886 - DNA, 83 bp, Homo sapiens
aggagaagcagctgcggaaaatgctagaagcagaaagatgaaggtcttagaatcattgattggaatgatccagaaattccctt

SEQ ID NO: 448887 - DNA, 50 bp, Homo sapiens
cagccaggcggagagggagatgcaagaggccagctccaccagggcaaggg

SEQ ID NO: 448888 - DNA, 82 bp, Homo sapiens
atagaaggattcaaatgctagcagacacggtggctactctgcctcggggacgaaagcaggcacctgcggaactcgagtcatg

SEQ ID NO: 448889 - DNA, 75 bp, Homo sapiens
gaactcctctcttgtgcagattgtggcagtagtgttacagatgtagagctaaaacgactgaaggatgctttcaag

SEQ ID NO: 448890 - DNA, 51 bp, Homo sapiens
gaagctgctctctgagaaaaagctgggtgtccgcaatgttgccagtgtctg

SEQ ID NO: 448891 - DNA, 83 bp, Homo sapiens
ccgaagcccgaggcagaggaaccggctcccaggctagcttgtcactttctgcaaaggtttccctcagggagcctcctgctgcc

SEQ ID NO: 448892 - DNA, 88 bp, Homo sapiens
agaagtccagagctgaggactgcctgtttgcagattctccagctatgtatcgggaaccatgatctatttatgaggagaaggaaagccg

SEQ ID NO: 448893 - DNA, 90 bp, Homo sapiens
gtgctgctgcttctccccactcagacttggagccccgtaggagcaggaaatccacctgaacctccacagtcctctacactcttccaggag

SEQ ID NO: 448894 - DNA, 98 bp, Homo sapiens
aagacgatccgggtaaagttccagggaggccgcgaaggtgccaagtcctgccctgccaacttcttggcagctgccgacgacaaactcagtgggttcca

SEQ ID NO: 448895 - DNA, 90 bp, Homo sapiens
cagtgtcgacaattgcaggatgcacagattctgtctccaaaaaaagttggtgatgacattgccaaggcaacgggtgactggaagggcctg

SEQ ID NO: 448896 - DNA, 100 bp, Homo sapiens
ggcctctctcctgatacagcaggcgctcaccatgttccctggagcagcagtgttgtactgctacttctataaacggacagccgtaagactaggcgatcct

SEQ ID NO: 448897 - DNA, 100 bp, Homo sapiens
cagaagggtgatcagcaccgcgaaagccccaggggccattggaccctacagagttgtggaaagtaaaaatgtagccctaccaaaaggaactattgtactg

SEQ ID NO: 448898 - DNA, 75 bp, Homo sapiens
cagcagagatgataacatgtttcagagatggacagagacgtatgtgcgttggtctcctaagggcacctacctggc

SEQ ID NO: 448899 - DNA, 100 bp, Homo sapiens
cgtggatgacaagaagacgtccaatctgagcgtgctgcggacggcgctgcggtacatccagagctgccatcagtcatgctcttaaacggggactgcccag

SEQ ID NO: 448900 - DNA, 90 bp, Homo sapiens
ccgtctccaggccccaaggagccacacctggaccagaccccaggaaagagcctcctgtgaagcctctgctgcccccgctgccccctgact

SEQ ID NO: 448901 - DNA, 98 bp, Homo sapiens
agttgcagtgttggagctaaaccgattacacctcaacaagaaggcaactgacaaacagccttatagcaagctcccaggtgtctctcttctgaaaccac

SEQ ID NO: 448902 - DNA, 90 bp, Homo sapiens
caggatcacgtttgagtgtgctcagatatcggccatccgggatggtgtcattgaggccagcatcaaccacgagaagggctatgtccaatc

SEQ ID NO: 448903 - DNA, 50 bp, Homo sapiens
gcaagaaggtcacgccgtctcagacatgagtttggatcacgatgaggcca

SEQ ID NO: 448904 - DNA, 71 bp, Homo sapiens
ggcccgaggacaccgactaccagcagaacaaaactattgtgagtcgaggtatcattttctgcactcagcgg

SEQ ID NO: 448905 - DNA, 98 bp, Homo sapiens
gcagcgcagtgcagatccgcaggcgcaaggcttcaggcgacccgtactgggcctactctgctgctgaaatgggttgcggattgaacaagttagagaaa

SEQ ID NO: 448906 - DNA, 98 bp, Homo sapiens
gaaccacagctgacccataatggacattaaggcatccgtgtcattctggaccttactcccaactaccggggtgagaactcgtggttctccactcaggt

SEQ ID NO: 448907 - DNA, 50 bp, Homo sapiens
atttctgcattatcacggagtactgtgagacgagatcatcagatgttcat

SEQ ID NO: 448908 - DNA, 133 bp, Homo sapiens
gacgctcattggtggacttttgcttcatgtgtcctggaaactgggctgggtagagatcaacagcagttcaaggtgtagcccatcagtgttatcatggtttcatgaaggctgtccaggaaggaaacattcagtg

SEQ ID NO: 448909 - DNA, 126 bp, Homo sapiens
aggagttatgttactttgccacttcttcacggaccagtttcagttcgccgatgggaaacccggagaccaaatccttgcacctgttcttcccggagcctatcagcaaagccattcccaaggctatgg

SEQ ID NO: 448910 - DNA, 90 bp, Homo sapiens
gcagccagaagaacaagaagtaggcattgaccccttgtccagttactctaacaagtctggagggctttatgattcagactggagatccaa

SEQ ID NO: 448911 - DNA, 115 bp, Homo sapiens
agcgttctcacggctcaccagccccaagcaccagctccacgtgtcgccttacgttgccagcttcctgcctgacacagctcacttcaagaagtgcacaatgtcagaacgtggaatt

SEQ ID NO: 448912 - DNA, 132 bp, Homo sapiens
ccaaacactaaggaatcgaaactcggcggccttgggggcggccctacgtagcctggcttctggggtgctgtgattacaccaaccatggaccatcccatgtcaatgcagccagccaacatgatgggcccactg

SEQ ID NO: 448913 - DNA, 104 bp, Homo sapiens
tggtcttactgggagccactcacggattaatatttctccctgtcttactcagttacatagcccactttccttgtggaactgtccagagtgctggcaaatccagg

SEQ ID NO: 448914 - DNA, 96 bp, Homo sapiens
ccggtgcagcagccttcagcttttggcagcatgaaagttagcagttgcactgctgtgatccatcctcatctcctaaagatgcatcctgacttatct

SEQ ID NO: 448915 - DNA, 74 bp, Homo sapiens
cggggtgcgccggcagaggatccagtgttcaccatcctggccccggaagaggccatgtggaagtgttacatcac

SEQ ID NO: 448916 - DNA, 50 bp, Homo sapiens
cagtatcttggtgttgctgaagagtgggctcgggatgagtttgaaggcct

SEQ ID NO: 448917 - DNA, 100 bp, Homo sapiens
gaatcgtcacccggcggcctctcattctgcagctcatcttctcaaaaacaggcccctcggacgccaatgggctcctgcccgcccccagcgtcaacgggag

SEQ ID NO: 448918 - DNA, 83 bp, Homo sapiens
ggacgcaagatggcgacggcgaccatagctctccccagctcaacattggcaatgtgctccctgtgggcaccatgcctgagggt

SEQ ID NO: 448919 - DNA, 88 bp, Homo sapiens
gagcagccctggtgtcacctatcagtaaaagggcagatgattctggaccagatgaagcctgaggagccttccagctctaagatagcag

SEQ ID NO: 448920 - DNA, 100 bp, Homo sapiens
cagaggcgctggagctgggtcagtccgccgctcaccccgcggccgcaccttcccgccttctcagctcagccagcagatctcctgaaggttctagattttc

SEQ ID NO: 448921 - DNA, 100 bp, Homo sapiens
tctggccatgccagcacctcagtcagcatcagcatggggcatgcagggtcaccgaagtccccacacgctggctctccacacccctcctgttccagaaagc

SEQ ID NO: 448922 - DNA, 103 bp, Homo sapiens
ctgcagcgggagctggacggcgagcgcgagcggcgcgagaaaggacctcaggatggaaaccagcagcctgcaccgcccgagaaggtcggctgggtccggaaat

SEQ ID NO: 448923 - DNA, 97 bp, Homo sapiens
gtccttcggggtgaccctgtatgagctgctgacgcactgtgactccagccagagcccccccacgagctgccactgccagaacctgaggagcagagcc

SEQ ID NO: 448924 - DNA, 87 bp, Homo sapiens
cctttcggcttctgagacggcggcagcagcggcattcaggccccaaggcccagaagaaatttaagcgtcttatgctgcatcggataa

SEQ ID NO: 448925 - DNA, 50 bp, Homo sapiens
tgctatcatccatcctaatctgcaggtcagccccagttgatgctgacagc

SEQ ID NO: 448926 - DNA, 51 bp, Homo sapiens
aagactgtgtaaataatatcaggtgagcatacttgattcagaggaggtgtg

SEQ ID NO: 448927 - DNA, 83 bp, Homo sapiens
ggggaacttgtgagcctgcggtgaaaggctttatcctgtggataaacgcagagtgaacgagtttggggagtcctacgaggaga

SEQ ID NO: 448928 - DNA, 115 bp, Homo sapiens
tccctgtttcgccacagttcctaccttatgagctcggttttcttatgcttataagagtggaacagcttcggaaccaaaaagaagcttcccagagccggggccaggagccccaagc

SEQ ID NO: 448929 - DNA, 101 bp, Homo sapiens
aggacctggcctgaagacatttcctctcctcccctctggatttctcagaggtccaagccttgtcatcggccagtaagtttgaagcagagttgaaagctgag

SEQ ID NO: 448930 - DNA, 75 bp, Homo sapiens
cggccggagcggcggcggtggcggcgcgaggcggcatgagggagccgctcgctggtagcagtgtttgatgagcag

SEQ ID NO: 448931 - DNA, 50 bp, Homo sapiens
gagtttgtggacagatttatattggtgaaaggtgtagcagtcactcggcc

SEQ ID NO: 448932 - DNA, 100 bp, Homo sapiens
caggactcagaggccgccatcaaccgccagatcaacctggagctctacgcctcctacgtttacctgtccatggatcgacgagaacgtgctaggagcccag

SEQ ID NO: 448933 - DNA, 100 bp, Homo sapiens
ggtgtgccccagctttaccgcaaccaccgccaccagtccacggagggcatgagcccgaccctgcccgccctggactggcagctgccgtcccactcaggcc

SEQ ID NO: 448934 - DNA, 101 bp, Homo sapiens
acagatttcagcagcacaatcaacgcaaccacagaaacaagtggtacaggcgcatattaaatttcctattgactacccctattcaccacctaccttcagat

SEQ ID NO: 448935 - DNA, 100 bp, Homo sapiens
ctgaggtggtaaagcaggtggagcaccctttgctgagtggcctcttataccccggactgcagccgcctgccttggcctcccaaagagccgagattgcagc

SEQ ID NO: 448936 - DNA, 90 bp, Homo sapiens
ggcgtcctgaccagcggcggcgacgcgcaaggactggaatgtcacgtggaataccagcaaccccgacttcaccaagtgctttcagaacac

SEQ ID NO: 448937 - DNA, 99 bp, Homo sapiens
gtgagggagagaaccagcacttctgggacgcacagagaccgtgaagattccaagttcaggagaactcgaccgcttccttcaaaatgtctactgttcacg

SEQ ID NO: 448938 - DNA, 90 bp, Homo sapiens
gcccagacgggccggcccagagctcccgggtcgtctttcgtgtggccgcgagatctgcaactatgtgggaccagcaaaggttattgttca

SEQ ID NO: 448939 - DNA, 75 bp, Homo sapiens
ccccgctctcccctgtcccgaaggggctttgttatgcacctaaagccatattggaagctccagaagaaagagcac

SEQ ID NO: 448940 - DNA, 100 bp, Homo sapiens
atccccgctctccaaggagctgcggcagaagtacaatgtccgctccatgcccatccgcaaggacgacgaggtccagagatggggtcttgctatgttgccc

SEQ ID NO: 448941 - DNA, 74 bp, Homo sapiens
tcaactgcgagaccagctgcgttcagcagccgccctgcttcccgctcaagaaccagagctggggtctggggcgg

SEQ ID NO: 448942 - DNA, 95 bp, Homo sapiens
gagatcaaatggcacttcattggccacctacagaaacaaaatgtcaacaaattgatgggaacatcatttacagcgagcaatttcagcacagcaag

SEQ ID NO: 448943 - DNA, 98 bp, Homo sapiens
gaaaacgaggaaagtcccaggatgactactgtgtcaagttttgcacactagggaccaagaagccctcggggacactgctgagaaaagactgccgaagg

SEQ ID NO: 448944 - DNA, 82 bp, Homo sapiens
tctctgtccgggggcctggctaaggaaaccctattacctccaggtcgtgcacacacacaagccgcacttcatggccttgcac

SEQ ID NO: 448945 - DNA, 74 bp, Homo sapiens
aaattttctcctggtagacctcggtccaaacagaaatgttgctgaagtgctgctgaaagggccagagatgcaag

SEQ ID NO: 448946 - DNA, 100 bp, Homo sapiens
aattaatcagaccagggacagacttgccaaattgaaggccttctcaccttctgaagaatggcttctgtttggcagagattgggtttttatgcctctcttc

SEQ ID NO: 448947 - DNA, 100 bp, Homo sapiens
gaccggcgacagcagccaggagtcatgagcgacagcggcgagcagaactacggcgagcggttaatggccagccaagaccccttgaatcaagtcaggtgaa

SEQ ID NO: 448948 - DNA, 100 bp, Homo sapiens
cttaggaattttgtcttctgttgggcttggaacagggctgcacacctttctgctttatctgggtgatgacaactccgtgagggtggagattatacatctc

SEQ ID NO: 448949 - DNA, 82 bp, Homo sapiens
agcacatcgagaccgcttaccgcatctggctggagccctgcattcgcggcgtgtgcagggaaatcctcattgacgattcaat

SEQ ID NO: 448950 - DNA, 100 bp, Homo sapiens
cgccggaggaggaggaccaggcccgcgggctcagctctcgccgccagcgggccgcaggtctcttcagagctgctgtgcccagtggtgcttcaactggtat

SEQ ID NO: 448951 - DNA, 100 bp, Homo sapiens
tgagcatctcaaacacaacgatggatgaattcaggcaacatctacaggcaactggtggtttttaatgaccacaacaagcaagcatgcagcttactgcttg

SEQ ID NO: 448952 - DNA, 75 bp, Homo sapiens
cccgttcttcctggagggaaagtgccgctttaaggagaactgcaggtgtctgacttccagcaactgctggcctgt

SEQ ID NO: 448953 - DNA, 100 bp, Homo sapiens
tcgttttgcctgaatggggggctttgttatgtgatacctactattcccagcccattttgtagcttcgtcagcaattgaagtggttgatatgtgaactctg

SEQ ID NO: 448954 - DNA, 100 bp, Homo sapiens
agcaggagctgaagcaggacaacatagcggtgaaggcgaacgcggtctgcaagctgacgtatgcttcgaacctaatgaacaatccccagattcagcagct

SEQ ID NO: 448955 - DNA, 50 bp, Homo sapiens
ggaaaaagcagtaaagccagaggaagaaactggcgatggaatatgagagg

SEQ ID NO: 448956 - DNA, 100 bp, Homo sapiens
caagttctcgtggagtcagacaatgagtgccggtggtggtgtgcacattgagccccggtatagacagttcccccagctgaccagatcccaggtgttccag

SEQ ID NO: 448957 - DNA, 100 bp, Homo sapiens
cacagggcctcgcctcactatggcagcagcacggcacagcacgctcgacttcatgctcggcgccaaaggaactgtggctgcaccatctgtcttcatcttc

SEQ ID NO: 448958 - DNA, 75 bp, Homo sapiens
atcgacacacaaagaatagagttgagcctgtgggacacttcggaaataccgctaccaagatgaagacacgccccc

SEQ ID NO: 448959 - DNA, 83 bp, Homo sapiens
tcttgcctctgctgacagcgtggccaggcgactgcagtcacgtctccaacaaccaaggccagaagcctgtcttagatgttcat

SEQ ID NO: 448960 - DNA, 90 bp, Homo sapiens
tggccaggccgtgttccgtgtctctggattcaagtcccaggagtcctgaccagagagcagcaaacggggattcagcgtccgatcctttgg

SEQ ID NO: 448961 - DNA, 74 bp, Homo sapiens
tgacggccaggtgctgcagaagctcttggggagatacttcaggggattaccggaagattctgctgaagatctgt

SEQ ID NO: 448962 - DNA, 96 bp, Homo sapiens
cccacagagccatggtccatccgagagaagctatgtttagcatcttctgtcatgagaagtggcgatcaaaattggagctgactaaggctttggaac

SEQ ID NO: 448963 - DNA, 123 bp, Homo sapiens
ctgaaatctgaaatgctccagaatctgaaccttcttgagcaccaacctgacacttaaaggaagtgctcattggaggaccccaccaacaactgaacgctttggtcaggctgctacaatggaagg

SEQ ID NO: 448964 - DNA, 75 bp, Homo sapiens
gcccggctcccgcaccatggaggaggacgacagctacgccatggccatgcagaaaatctttgcccgggaaatctt

SEQ ID NO: 448965 - DNA, 100 bp, Homo sapiens
cggcctggaggagccgcagtgggtcccggacaaggagtattatcagaaaatccacccagcttcaccattactgtgacgtctgaggctggagaaaatgatg

SEQ ID NO: 448966 - DNA, 100 bp, Homo sapiens
gccaagtctagttcattctagggacatgaaaatggagtcttcggaggatgtctcaggaggcttgccctttctggtagacctggctttaggtctgtctgtg

SEQ ID NO: 448967 - DNA, 100 bp, Homo sapiens
ttgtgccaccctgacatcgtccgatctgtcatcaatacctcagacagcgactgtttgagaaccttagaatgctgccgcacgcacctggggtccaaatgca

SEQ ID NO: 448968 - DNA, 90 bp, Homo sapiens
cgtcccgctcctaaggcaggaagatggtggccgcaaagaagacgatctcttccctgaagaacaggctgaaaaaggtctccacaaccactg

SEQ ID NO: 448969 - DNA, 100 bp, Homo sapiens
gtctctctgctgcggcgcggggaccgctgtgctctcgaatcgaattctctgggttgatgagaacaatttgacagctcatgtagaggctggcataacagga

SEQ ID NO: 448970 - DNA, 98 bp, Homo sapiens
agcgacatatgatagatggacgatggtgtgactgcaaacttcctaattctaagggaactcaaccctatgtatgaaggatatctacagcatgatgcaca

SEQ ID NO: 448971 - DNA, 101 bp, Homo sapiens
attgatgacatactcagtgtggcctccgtgcgtccagctgtcttgcaggtctgtgtaattcggctgatagctggatgatagtacccaacatcaagcagaac

SEQ ID NO: 448972 - DNA, 104 bp, Homo sapiens
aggccggctgcagccccaagacagagcgctactcctggcagtgcgtcaatcagagcgtcctgtgcggtgagaagccctaccactgcaactgggacggctgcggc

SEQ ID NO: 448973 - DNA, 100 bp, Homo sapiens
gccgcggaggcgccgttatcccgggcccgccggccctgagctcccggcggcgcagatctaagctggaaccagaaccaaatacaaagacaagagaatccac

SEQ ID NO: 448974 - DNA, 75 bp, Homo sapiens
agaccaaattttgaacctcctcagaagcgtaaaagatgtgttgttttcaatcaaggtgaattggatgctatggaa

SEQ ID NO: 448975 - DNA, 96 bp, Homo sapiens
ctgccctggatcggcctggagccagtgcccaagtacggtttgggttctccaaaaaatgtggaatcctttgcatctatgctgagacattctcctctt

SEQ ID NO: 448976 - DNA, 78 bp, Homo sapiens
cttctatggacagtgtgtttgctcaaagtgatgacctggatagtgaagctttgctgcaagataacatcgctgatgctg

SEQ ID NO: 448977 - DNA, 75 bp, Homo sapiens
ggggcaggagcttctgggagccaccgtctgaagcagaatggggaaatggagagagaacctgaaagagccccaaac

SEQ ID NO: 448978 - DNA, 88 bp, Homo sapiens
gacgctgcactgtagcatacctattttcgggccagtgcaaccaatactgaagttcaaaagtatcgaagaagtgataaaaagagcgaat

SEQ ID NO: 448979 - DNA, 100 bp, Homo sapiens
ctgtctggaagttacttgtggacatgttgaaacattgtagtcggtatatacatgacttatttccttcactcatcaagaatttggatcccgtaccacttag

SEQ ID NO: 448980 - DNA, 83 bp, Homo sapiens
gggaccgccgccgccgccgccaccatgagggtcaccatgaagttcaatcccttcgttacctcggaccgcagtaaaaaccgcaa

SEQ ID NO: 448981 - DNA, 100 bp, Homo sapiens
gactctattatgaaacagcaaaggcacttaagtattcatcgaagagtcaccccagtagcggtgatcacagacatgaaaagatgcgagacgccggagatcc

SEQ ID NO: 448982 - DNA, 107 bp, Homo sapiens
caacatctgctacaatgtactggatcgaaatgtccatgagaaaaagcttggagataaagttgctttttactgtggcaataaaaggggtagcagagcttcctgccctc

SEQ ID NO: 448983 - DNA, 98 bp, Homo sapiens
ggccgccgagctggacccggaccggttttgggttcaagggcagcaggaaagacgagatcctgggcatcgccaacaaccgactgatccgcatcgacttg

SEQ ID NO: 448984 - DNA, 71 bp, Homo sapiens
tttacctgcttcatcgtgaccaccggcctggtattgggatggctgacaaacgggctcatcataatgcactg

SEQ ID NO: 448985 - DNA, 101 bp, Homo sapiens
atgctgcccagtggcttccggaagttcctggtccacaacgtcaaggagctggaagtgctgctgatgtgcaacaaccagaataaaagctacttggccgtaag

SEQ ID NO: 448986 - DNA, 89 bp, Homo sapiens
gtcgccccctacccgcttctcgtagtcctgggagcacagcagaagtgtgactccccggacagctcaacaccaaagctttcgcgggcaca

SEQ ID NO: 448987 - DNA, 101 bp, Homo sapiens
gcgggcgatgagtgccgaggagcggctacgccagtcccgcgtactgagccagaaggtgctgatgtatggacagccgtatcgtgttaccttagagcttgagc

SEQ ID NO: 448988 - DNA, 100 bp, Homo sapiens
cagagtgggacctaatggtgagagtggtgccagtgaagaagaggacacatgaaggcttgctacccccagtggaaaatcatcccctccccttgtgtgtatg

SEQ ID NO: 448989 - DNA, 105 bp, Homo sapiens
gttccactgcccgaagtgtcggcacaacttccgctcggccatcctgatttacctgagctgtaagtaccagacgccggaccactggtatccatctgacctgcaggc

SEQ ID NO: 448990 - DNA, 75 bp, Homo sapiens
ccgggggatacaatcactacggacacaggattcatgcgtgacaaccatgagtggaaaaaactaattatggttcag

SEQ ID NO: 448991 - DNA, 75 bp, Homo sapiens
ctctgcttatcttttttgccaaatactgatgctaaaccaggtggacaggtgaaatgtcagtatatctctgctgtg

SEQ ID NO: 448992 - DNA, 102 bp, Homo sapiens
gtggaaaaaccacagccacgagtccatgggtgtgagatggcagacaggtttgcaggaaaccctcagaaagggggctggaggatttagccactctgtcctccc

SEQ ID NO: 448993 - DNA, 74 bp, Homo sapiens
ccgatgactcggaaagcgctcagaagaacgcttcgcccgttggtgctatgaagaaggtagataatgactataat

SEQ ID NO: 448994 - DNA, 83 bp, Homo sapiens
cccctgggaaggagcgcagcccacccggcccctccgcatccgagcagacctgcctagagctggaacgttacctccagagcgag

SEQ ID NO: 448995 - DNA, 100 bp, Homo sapiens
ttgtcctggctcttgccctcatcctggttctggaatcctcagttcaaggtcaaaatgcagatcttcgtgaaaacccttaccggcaagaccatcacccttg

SEQ ID NO: 448996 - DNA, 100 bp, Homo sapiens
cgccaccatcgcctgtcacctggacccgcgcgtgttcgtggacggcctgtgccgggtacccactgatggtaatgctggcctgctggctgaaccccagatt

SEQ ID NO: 448997 - DNA, 74 bp, Homo sapiens
ggccgccgctgcaccttcaccgcgtacccgggacccgcccgcccgcgggagtgacaccacagccaaagccctat

SEQ ID NO: 448998 - DNA, 75 bp, Homo sapiens
acccgttgcagtttctatgccacggtgatttaccaaaaaccacaggttttacagacatttcaccagaggaattga

SEQ ID NO: 448999 - DNA, 100 bp, Homo sapiens
accactgtcgtttgctgccatcgcagacctgctgctgacttccatccctctggatccggcaaggtgaccaagaatatggcccaggtgaccaaagccctgg

SEQ ID NO: 449000 - DNA, 100 bp, Homo sapiens
agaactagctccaatgcagataaaagcttgcttaacagagcgttccaaaaagaggactctccagctactttttattgcatcagtatgcagtggtttagag

SEQ ID NO: 449001 - DNA, 83 bp, Homo sapiens
agtccccactgcggtccacggccaggtgaacaatggccgagacgcatccagagctttcgtgaccggggactgttctgaagcag

SEQ ID NO: 449002 - DNA, 88 bp, Homo sapiens
aagcaataccaggatagctgttgtttcagagaaaggatgaatttcatcctttcatcgaagcacttctgccccacgtccgagcctttgc

SEQ ID NO: 449003 - DNA, 75 bp, Homo sapiens
gcagtccacccaccgccgccgcctcccaggcacccgagtgtacagccccccggagtggatccgctaccaccgcta

SEQ ID NO: 449004 - DNA, 100 bp, Homo sapiens
cacgttcttaaaaacctcgggcggcatgacggatccagagaaactcatcaggatttatcctgtgcctgaagacctctcattagaagagagagaagaactt

SEQ ID NO: 449005 - DNA, 82 bp, Homo sapiens
gaggtgttcgagaacgaccccgagacggaagtgctctctggcgtggtggtcatatcgagtaaggattcagtccaacaccagg

SEQ ID NO: 449006 - DNA, 75 bp, Homo sapiens
cttcagttccgggttgaagaagaatcaattaccaaaggtgatcttgagacccttttgaggacttctttgggaatc

SEQ ID NO: 449007 - DNA, 102 bp, Homo sapiens
ggcccagactccactccccagctgtgaaagggcgcattctacattctaaaggggagctcagtgaagatagacataaacagtatgaggaatttgctatgtctt

SEQ ID NO: 449008 - DNA, 83 bp, Homo sapiens
acagcaagaaagaccatcaagtttaccacgagaaaatgtcattgaatataaacactgtttgattacaaaaaatgagaatgaag

SEQ ID NO: 449009 - DNA, 82 bp, Homo sapiens
acccctctccgtccatggccccagatgacacttcaggtagagttggctttgtgggacacagctgggcaggaagattatgatc

SEQ ID NO: 449010 - DNA, 136 bp, Homo sapiens
ctggagaacctgatcttaaatgagttttcctatacggccaccgaagccagaaggctttatctgcaaaggaaggtgacagaccatgccaccactgccctgctccactatcagctgccccagatgccggatgtcgtgg

SEQ ID NO: 449011 - DNA, 51 bp, Homo sapiens
tttggctgaagtgtggtgtggctctggtgaaaatggcattacggacatcag

SEQ ID NO: 449012 - DNA, 89 bp, Homo sapiens
ctacaggacacggtgctggccgccggttgcaagcagatactggtgcctgactatgacttgagccagctgcagcagcctgacactgtgga

SEQ ID NO: 449013 - DNA, 82 bp, Homo sapiens
ccgcaaggccggagaaggccgccgggcccgggcatggtggtctggggcaacgcggaagaggagcaggagcggcttcgcttgg

SEQ ID NO: 449014 - DNA, 75 bp, Homo sapiens
agctgttctcaaggcggattaattagcccaagaaacattatattcatgaaatctactttcttcaatgtgttaacc

SEQ ID NO: 449015 - DNA, 80 bp, Homo sapiens
agatcgtatagtcctagaaatgagaaagatcagtctaaagaaaaggagaagaaagtgaaaaaaacaattccttcctgggc

SEQ ID NO: 449016 - DNA, 75 bp, Homo sapiens
cagacttcactgtgaatgatgtcaaaatgtgtgtggaggcggccttagcaacatgctgttccagtgctccctacc

SEQ ID NO: 449017 - DNA, 99 bp, Homo sapiens
gctgtccaggaactgtcggaacagaaccaaaggctattggatcagctcagcaggaacagcacatcccattataatgctggaacttggggcattgtacag

SEQ ID NO: 449018 - DNA, 90 bp, Homo sapiens
gcattgaatgatttatagctaagactccaggacacccctgaagccgagaaatggatgtgatcttcgtggtggaaagctaaattttaaaac

SEQ ID NO: 449019 - DNA, 96 bp, Homo sapiens
ttctccagctacagcagcctgtacgacacgtcctcgctgctccagttctgcaacgtgaaaatgcctcgtgtaaaagcagctcaagctggaagacag

SEQ ID NO: 449020 - DNA, 100 bp, Homo sapiens
gagaagctcaccatgtctctctcagaacttggtgctgctagaatgcaggaacagcagatggtgagaacaagaccaagattggaaagccagcttcagagga

SEQ ID NO: 449021 - DNA, 75 bp, Homo sapiens
cggccctcccccaacagcttctcccccgcggtcgccggagccggtttctagagagtggagcctgcttcctgggcc

SEQ ID NO: 449022 - DNA, 87 bp, Homo sapiens
tatccactcattggcagagaagctggcccaatgtaaaggctgttgctactgctgtggaacagatttacccatttgtgtttgaaagca

SEQ ID NO: 449023 - DNA, 51 bp, Homo sapiens
gtcagttaatgtggtctcccatgtctcatccaacaaatggaattttcttga

SEQ ID NO: 449024 - DNA, 75 bp, Homo sapiens
acccttgatcctcctcctaattgcagcaattctgtggtgttcttggtcacacatttatggagtttctgaagggca

SEQ ID NO: 449025 - DNA, 75 bp, Homo sapiens
gtggtttctgctcctaaccaaccccgacaaaagacatttctcttgggaagttgtgcatctgacaggaatatagta

SEQ ID NO: 449026 - DNA, 80 bp, Homo sapiens
gccacctctgagaagggagacgacgctgctgggtccgctgagcggggcgacccgaggtggtgttcccactgatgaagagc

SEQ ID NO: 449027 - DNA, 88 bp, Homo sapiens
atcagctgcagttcccgcccccggataaggtgacagagctgaatgaacctctctccaatgaagatcgaaatctcctctctgtggccta

SEQ ID NO: 449028 - DNA, 75 bp, Homo sapiens
cgttggaaccgaagagagctctgttgttgcactccagggttccttgaaaagaaaacaggtagttaacctatctcc

SEQ ID NO: 449029 - DNA, 101 bp, Homo sapiens
gcgaggtggacggcaaagccattcctgacctcaccgcgcccgtggccgccgtgcaggcggccgtcagcaacctcgtccggactgtaaaaggtggaatttct

SEQ ID NO: 449030 - DNA, 100 bp, Homo sapiens
ctggcccagcagatggagaatagaccctctgtccaggcagcattaaaacttaagcaggttctgccggagacttccatttggcctcaatgtgaaattaaag

SEQ ID NO: 449031 - DNA, 75 bp, Homo sapiens
tcgccccgccgcgccgcgctccaaccgcctcctcctcctcagtaacgcggagtctcaagtcaaagtcgtggccct

SEQ ID NO: 449032 - DNA, 75 bp, Homo sapiens
gggattcaggtgtggtgccggtgggaactgaggaagcgcccaagtttcttatctcagtcatcactatggtgcttc

SEQ ID NO: 449033 - DNA, 75 bp, Homo sapiens
cagatgaacttacgcagggttacatatattttcacaagacagtacctgtaatgagaaacagtaaagaaaacagac

SEQ ID NO: 449034 - DNA, 95 bp, Homo sapiens
gggtgtcctggtgcacccccagtgggtgctcacagctgcccattgcctaaagaaggaggactcaccaggcttgtggccaggggcaggtaccatcc

SEQ ID NO: 449035 - DNA, 100 bp, Homo sapiens
cgagttagagcggcttcataaacaacaagggaatgtgcagcaatcagttaaccgcaaacagagctggaaaggttctaaagaatccttagttcctcagagg

SEQ ID NO: 449036 - DNA, 100 bp, Homo sapiens
gctcctaggcatgtttctgggacaaatgaggggtatagaacaggctatgcttacaggcatcctctcattcgagagaagcctaggcacaagagtgatgtgg

SEQ ID NO: 449037 - DNA, 100 bp, Homo sapiens
ccagcggcagacagaacgggacctgtgtcaggactttttttatgaagacatggagtccttgacgcagatgcttagggccttggcaacagatggaaataaa

SEQ ID NO: 449038 - DNA, 100 bp, Homo sapiens
tgttttggattacataaaccagtcacccaagtgcattgcctttggaaacgaggtccttatgtcgtcagaagatcgagaagctcaggaggatgaattgctg

SEQ ID NO: 449039 - DNA, 100 bp, Homo sapiens
acccaagcctaggacaaaagcctggaggctccgacttcctcatgaagagactccagaaagggtattggtaaaggttttcaaggtgtcatgaaaagatggg

SEQ ID NO: 449040 - DNA, 99 bp, Homo sapiens
ggaagtcaccattggagctcatcagactgaccgtgtcttacatcagttcagagaggattcaattcgagacgtccacatcaaaggaataatgtacagagc

SEQ ID NO: 449041 - DNA, 109 bp, Homo sapiens
cagtgtcagaaaatggacatccctttccttggggaaatgcccgcagagacaatattgactcacgcctactccagagtggtcctgagagtcctggaagcagccgtggcgg

SEQ ID NO: 449042 - DNA, 82 bp, Homo sapiens
ctacaagagagaagctccccacgtggttccgtgctcacagaacatttcctgcctgttgctcacactctgttgtccacagcat

SEQ ID NO: 449043 - DNA, 50 bp, Homo sapiens
cttcctggtgctgcccctgggcaaggctgtgtgggtatccccccttctac

SEQ ID NO: 449044 - DNA, 82 bp, Homo sapiens
cccagtgagggtgtacaaatacccctttgaattaattatggctgagcatctttccttgaagaagtacattattgacattgtg

SEQ ID NO: 449045 - DNA, 75 bp, Homo sapiens
ctgtggtctctgcacctcctttcttgggtaattccagaattgattggccataccattgtcactgtattactgctc

SEQ ID NO: 449046 - DNA, 98 bp, Homo sapiens
tcgcccactatcctcagaatatagaatggaacccttttgatcaagatgcggtgaacatgaaaatgtgccagaggaacttcaagaaccattttacacag

SEQ ID NO: 449047 - DNA, 90 bp, Homo sapiens
atggacgagttctcccggggaaatgtaccgtccagcgagttgcagatctacacttgattaatgatgttttgcagcagttttctacgtctg

SEQ ID NO: 449048 - DNA, 132 bp, Homo sapiens
cagtatgtctgagacaatgccgctgtacactctttgtaaggaggatttagagagtatggacaaagagtaatctatgccagcaattatgacaatgttagcagaccatgcagctcgtcagctgcttgatttcag

SEQ ID NO: 449049 - DNA, 100 bp, Homo sapiens
ctcgaggctgctaagagactaagcctgggagaagttactgtttggagtttgtttttttcatgcccttgtgcaagagagaaagaaatttggtcctcttggt

SEQ ID NO: 449050 - DNA, 51 bp, Homo sapiens
aggctacagtccactccagcatgggtttcccaaactctcgattgcctcttg

SEQ ID NO: 449051 - DNA, 98 bp, Homo sapiens
aacggccaagcctgcgtgcccatccagcaatgtggctgctaccacaatggtgcctactatgagctgcgccagggccccgcggggctggggcccaaaaa

SEQ ID NO: 449052 - DNA, 82 bp, Homo sapiens
gtggaagcaggactgcgccgcgtcttcctcaagatggtcagtaggacagaaggtaacattgatgactcgctcattggtggaa

SEQ ID NO: 449053 - DNA, 109 bp, Homo sapiens
cgctccgtggccttagctgtgctcgcgctactctctctttctggcctggaggctatccagcgaaacccagaagttctgtgaacaagtccatgctgccatcaaggcattt

SEQ ID NO: 449054 - DNA, 82 bp, Homo sapiens
acaggaggaagaattcccaagccaaagctttccagttttaacaacctgggcatccagtgtgtgaggaagaaggagattgagg

SEQ ID NO: 449055 - DNA, 131 bp, Homo sapiens
cttggaggacaagaagcgaaaccctatcctcaaatacattgggaagcccaaaagctcttctcaaagcagtacagctgctctggaagaggatgctcaaatccttaaagtgatcgaagcctactgcaccagcg

SEQ ID NO: 449056 - DNA, 100 bp, Homo sapiens
actccagagactgctgaaaagctggcccgtgacctgaaggctgtcaagtatgtggagtgttctgcacttacacagtgtgcacacagctcttggtctccag

SEQ ID NO: 449057 - DNA, 96 bp, Homo sapiens
cttatcaatgcctgaaagagacttgtgagaagttgggctatcaatggaagaaaagttgtatgaatcaggatgaaacgaggaggaagagatagtgac

SEQ ID NO: 449058 - DNA, 100 bp, Homo sapiens
gtccattctgtagacgagtatctgatttaggaaagtcctatcggatgctgagatcattcagtgccggtggtggtgtgcacattgagccccggtatagaca

SEQ ID NO: 449059 - DNA, 88 bp, Homo sapiens
tcatcccggtggccgccgcgcaggagcctcccggagctgttggtgacaaagttcctgctgatataaggttaacttccatcaaatctac

SEQ ID NO: 449060 - DNA, 74 bp, Homo sapiens
ggcccaattaaccattaccgaaatatcttcagtttagtcatccaacaagaagaaatatgaaattccagcaataa

SEQ ID NO: 449061 - DNA, 75 bp, Homo sapiens
ctgatcccactcatttttgaagtaactctggtgtcctcatgacttctcttgtggaccatgtccgtgatctttttt

SEQ ID NO: 449062 - DNA, 90 bp, Homo sapiens
tgcgagagttcctggccgagttcatgagcacatatgtcatgatgggaatcaaagccgtcctggccgagagctacgagcgcattcaccgca

SEQ ID NO: 449063 - DNA, 90 bp, Homo sapiens
catgaatgaaatgaagagttattctcaagctgtcacaggaacacctggatttcattagcatcatgacctacgattttcatggagcctggc

SEQ ID NO: 449064 - DNA, 83 bp, Homo sapiens
cctcagtgttgacctatgcctctccgccactcatcaccaatgtcacgctgccagagaaactacgcataggctggaataacaag

SEQ ID NO: 449065 - DNA, 75 bp, Homo sapiens
gagtgaccctcaggaaagagcatggtatttctttaaatccagaacaatggagccagctgaaggaacagatttctg

SEQ ID NO: 449066 - DNA, 83 bp, Homo sapiens
gccggggagggcccagcgcatccgacagatgaaggatttgggggcagagcacttggcaggtcatgaaggggtccaacttctcg

SEQ ID NO: 449067 - DNA, 76 bp, Homo sapiens
cgagcacggaaccacagccaccttccaccgctgcgccaagatcaataagatggagtggtggagccgcttggtgtcc

SEQ ID NO: 449068 - DNA, 95 bp, Homo sapiens
ctggcgtggagtacaccttcagcctcaccgtgtggaaggccggccgcaaggaggaggccaccaaccagacgctgaacagatgggtaaggatggca

SEQ ID NO: 449069 - DNA, 96 bp, Homo sapiens
ggagggaggacctggtccagcttcccttcctcaaataaggaaattgacacctggcgtgatgacacccccaaccatggttgtgaagatgctagcgac

SEQ ID NO: 449070 - DNA, 100 bp, Homo sapiens
tgctggatgctgtgatcgccagcgccggcctcctccgtgcggagaagaagctgcggccgcacctggccaagaaaatggagctggcgctggtgcctgtgag

SEQ ID NO: 449071 - DNA, 97 bp, Homo sapiens
tggagacagatcgcgagcggctgcggaccatttataaccgcgacttcaagatcaggatcagctcagctactatttaataaaacaaaatctgtagaat

SEQ ID NO: 449072 - DNA, 90 bp, Homo sapiens
tctgtctccttgagcaaaaaagaaaagttgtttcctccaacattgatgttcctccagcaaggaaaatcagaggctccttaaaaatatgtt

SEQ ID NO: 449073 - DNA, 100 bp, Homo sapiens
aggtgttcctggtcaacctggtgctccaggacctcctggacatccgtcccacccaggacccgatggcttgagcagggcaggcagtatgacacctaagtcg

SEQ ID NO: 449074 - DNA, 100 bp, Homo sapiens
ccgtcctccgttagctaattaaaacatttttcagggacgtagccatccagaggctttccttaaagtttcccatgtctcaatggactcctgaatataacga

SEQ ID NO: 449075 - DNA, 90 bp, Homo sapiens
gacaaagcagcgcccgtctgcttcgggcctctggaatttagcgctcgcccagctagccgcaggtattgttgcagcatctggcagtgagac

SEQ ID NO: 449076 - DNA, 83 bp, Homo sapiens
gtgctggcgagccgcagtgaggccaacgccgtgttcgacatcctggccgtgctgcaggctgctgtccccaaggcccagcctcc

SEQ ID NO: 449077 - DNA, 82 bp, Homo sapiens
cgccgaggcaccgaggcactcagaggagtgtcaggggaagctgatggagaatcgagctctggatccagggactcgggactcc

SEQ ID NO: 449078 - DNA, 104 bp, Homo sapiens
tgccacacaggtagccctggacggcattcagtgttttgcttatggaagtgacagggaaaaatcaggatgaatgcatagtggccctacatgattgtaatggagat

SEQ ID NO: 449079 - DNA, 104 bp, Homo sapiens
ctaccaccgagccatcaaggtgaccgtggacggaccccgggagcccagacgtgctggagaatctggtaaaagcaccattgtgaagcagatgaggatcctgcatg

SEQ ID NO: 449080 - DNA, 82 bp, Homo sapiens
ggacgcggaggccgcctggggtagcggcggcgggagtcctggcgctctgcagaattcagaaggagctggcggacatcacttt

SEQ ID NO: 449081 - DNA, 83 bp, Homo sapiens
gtttgtggatcgctgtgatcgtcacttggcttgggcactgtttaaaggaaagttccgagaaggcatcgacaagccggaccctc

SEQ ID NO: 449082 - DNA, 98 bp, Homo sapiens
cctcctggaaagaatggtgaaactggacctcagggacccccagggcctactggtccagctggcaatgatggtaccccaggacgggatggtgctgttgg

SEQ ID NO: 449083 - DNA, 100 bp, Homo sapiens
cgagaggctctggccttacaggggtccctggagtttgatgatgctggaggtgaaggtgctgggccccaagccggctctgcctgcaggtaccgaggacacc

SEQ ID NO: 449084 - DNA, 98 bp, Homo sapiens
aagggactgccagaggtggaggggaggattttgaggacacttgtggagagctcgaattccagaatgatgaaattgtctctgactaccacccaaccttg

SEQ ID NO: 449085 - DNA, 51 bp, Homo sapiens
ctcaagtccctgatggcctcagaggaggagatcaccctgggcagagcaacc

SEQ ID NO: 449086 - DNA, 97 bp, Homo sapiens
agttgattgaaattatctctggtgctgcagctctaattcactcgtgaagtaacagacacacagatgccacttgttgctcctgtcattctcccagaga

SEQ ID NO: 449087 - DNA, 96 bp, Homo sapiens
ttggttttctgacttagcaggaaataagccactttctattttggcaaaaaaggtaccgaagacactgggattattaaggatgttaagtgtcaagtt

SEQ ID NO: 449088 - DNA, 100 bp, Homo sapiens
ggcctacttaagaaacgcagctatgggactggaagaagaaacacatgctcattacatcgatgttgccaggacctagatgtgaaggctggtggaggctgtg

SEQ ID NO: 449089 - DNA, 98 bp, Homo sapiens
gcgtttgcccagcgatattgtcagtgcaataatggcgtgttccagtccacgggtcagtcattggcaccatgaactggaataaaggtggtcctggcact

SEQ ID NO: 449090 - DNA, 90 bp, Homo sapiens
agcaggcgcagaacagtcggagatttggattcctagacttgcccaagcacttctgtctgctgtagcagatgtgagactttactcattaat

SEQ ID NO: 449091 - DNA, 97 bp, Homo sapiens
tgaaacactacgcttatgcctggatgaacttaacaggctgaccggttccctgatgtgttacctgcttctgctactgatccaaactgcagaacttctc

SEQ ID NO: 449092 - DNA, 88 bp, Homo sapiens
accaggcgaagctggccgagcaggctgagcgatacgacgaggagcaggagcggcttcgcttggagcaggagcgagagcaggaacagaa

SEQ ID NO: 449093 - DNA, 98 bp, Homo sapiens
aacgattgggctgagcagaggacgacatgttgcttttcgtggagctctctatcaatatcagctcacatcattgaaaagataattttgaagacatgttt

SEQ ID NO: 449094 - DNA, 100 bp, Homo sapiens
aaatgcaaagtgtgtgcaagcaaatgcttttattcagccttatgtttgatcatcggccaaggtcctggcgagaactgcctctgcggctagctgattttgg

SEQ ID NO: 449095 - DNA, 75 bp, Homo sapiens
atggcatccgtcctaccggaaacctaggaaaagtgtctagtgaactagaaaatcacccaatgaatgaagaaggag

SEQ ID NO: 449096 - DNA, 76 bp, Homo sapiens
gaggagccatggactgcagcctcgtgcggacgctcgtgcacagataccctggcacctgtgtttgctctgtttgtac

SEQ ID NO: 449097 - DNA, 83 bp, Homo sapiens
aacatgacctttcaagttcagtggctccagtctctcaggcagctgcagagcttcaacagtactgtatgcagaatgcctgcaag

SEQ ID NO: 449098 - DNA, 75 bp, Homo sapiens
ccgggggaggcgacgctaagttgctgatcgtggcgacccaacatgagtgaagtttcctgcaagaaacgggacgac

SEQ ID NO: 449099 - DNA, 89 bp, Homo sapiens
gagccgccgaggatgataaacacccaggacagacccaacatgagtgaagtttcctgcaagaaacgggacgactatttggaatggccaga

SEQ ID NO: 449100 - DNA, 100 bp, Homo sapiens
cagcggcggcttccagcccgactgggcctgccggggctgccccgcgcacgcgacaaggtgctggggcaaccaatggaaaagacaagacatctggtgaaaa

SEQ ID NO: 449101 - DNA, 75 bp, Homo sapiens
gaaatgagcagctttggataatgacgacagcaacccgaagacagggaaatttagctcgaagagtgtggaaaaact

SEQ ID NO: 449102 - DNA, 101 bp, Homo sapiens
agcaaatctgtttttgagcctgaagattcttcaatagtagataatgaggcaaggcatctttacatatgtgattatcataaaaacttaattcagagtgttcg

SEQ ID NO: 449103 - DNA, 75 bp, Homo sapiens
tgttttatacttgcttttgcttcagcgttctgtggttgtcaacaggcctcaccgccgatgcaaggatagtcatca

SEQ ID NO: 449104 - DNA, 88 bp, Homo sapiens
ggcttcaggatttacacagacgtggggcgatgcttgtgaccctgcagctcctcaaagtgctgggggcccgacatctgccaaagaatgg

SEQ ID NO: 449105 - DNA, 127 bp, Homo sapiens
agtgatattattgtagatctagaagtcactttggaagaagtatatgcaggaaattttgtggaaaattggcagagggggtcgatttgggaggaaaggtgtggctataaactttgttactgaagaagac

SEQ ID NO: 449106 - DNA, 100 bp, Homo sapiens
agaaaatgcaaaaaaactaatggaattagcctgcaacatgaaggttgggtatctacagccattggttgctgttcaggtcagctttgctcctaacaacact

SEQ ID NO: 449107 - DNA, 76 bp, Homo sapiens
gatgatgctggcacagggccttctgctgcatttcctgcccagagcggagccttaaacaacgcagtgagacagacat

SEQ ID NO: 449108 - DNA, 76 bp, Homo sapiens
ccgaataccaagctcggatccctgaatttgatccagttggacatgatataggtcgtggatgtatggggaatctaag

SEQ ID NO: 449109 - DNA, 100 bp, Homo sapiens
ctcctgcccttttaggagtgcaaaaagatatgaaaaacagtagctccgtatcgaatacattgacaaatggatgtgtcatcaatggacatttggacttccc

SEQ ID NO: 449110 - DNA, 96 bp, Homo sapiens
ttaaaagtggaaagatgacggatgaaaagaatgaacactgtccttcaaaacgatttgaggagcagcaggcttttgagaagagccgcaagttccttc

SEQ ID NO: 449111 - DNA, 85 bp, Homo sapiens
gagaggctatgtgaaggctgggctctggactccagaggcagtgatagaacacccagacgcagtgtgtcccggcatggatatccgg

SEQ ID NO: 449112 - DNA, 50 bp, Homo sapiens
cctggacccctactattgcaacaaggctactgcagcactggggtgtcagt

SEQ ID NO: 449113 - DNA, 96 bp, Homo sapiens
gcggttgtagcagctgccgctgcagccatagcagcaggtttctcagtttgggtgcagatcatttgctttgctttttgatgatatagaccataatat

SEQ ID NO: 449114 - DNA, 100 bp, Homo sapiens
gggtcctgaagtcagttgttgcatcaaatacttcatatttggcttcaatgtcatattttgggaagctcttcgtgggcggtcttgactggagcacgaccca

SEQ ID NO: 449115 - DNA, 75 bp, Homo sapiens
ttttattcaggttcctaggaatctcgttgtgagtgatagttgcttcaggaatcttgcagaagaccgcagtgggat

SEQ ID NO: 449116 - DNA, 98 bp, Homo sapiens
tctggcgtattcaccacaggaatcatgactcctggagaacggatcaagtgcttattacaggtaatttatcctcagcattccaaacttactgacagaga

SEQ ID NO: 449117 - DNA, 100 bp, Homo sapiens
caggtctctggaggttgcaggctcaggctctgctcagcgggggaaatgaataagcgtctaacagaagaacaagccagaaaaacatttgagagagccatga

SEQ ID NO: 449118 - DNA, 88 bp, Homo sapiens
tggatatgggaaacatgtctgcctctgatctcgatgttgctgacaggaccaaatttgataagccgattatgtttcgaggggaagtacg

SEQ ID NO: 449119 - DNA, 82 bp, Homo sapiens
cttccaaggaaccagtgcgaagtggatggaagcacagtatatgcagagagtgtgattctgactactgggacatttctgagag

SEQ ID NO: 449120 - DNA, 90 bp, Homo sapiens
gcgcagaaagcaggcgaacccgcggcgcaataacgaaagttgaagttgatggtagtttaagtgatagccacgtatctcctccagccaaac

SEQ ID NO: 449121 - DNA, 87 bp, Homo sapiens
ccggctttgcggctgggtcctaaactgcgcccgagcgggaagaagttccgcagcaagccgcagctggcgcgctacctgggcggctcc

SEQ ID NO: 449122 - DNA, 100 bp, Homo sapiens
aaaatctcaaggaaaagtattgcaagcaacagtagtcgctgttggatcgggttctaaaggaaagatcatggaagggaagtggttgctgtgtatgttactg

SEQ ID NO: 449123 - DNA, 90 bp, Homo sapiens
cgcgcgcacagagctctcagcgccgctcccagccacagcctcccgcgcctcgctcagctccaacatgttctcctgtgcctcctgttggct

SEQ ID NO: 449124 - DNA, 95 bp, Homo sapiens
agccttggatgtgaacattttccaggaagctctgtagatgtgctatacacttttgcaaactgctcaggactggacttgatctttggcctaaatgc

SEQ ID NO: 449125 - DNA, 50 bp, Homo sapiens
cgagctgtgcgaggtgatcggaaagccatgctgctcttcctcctctctgc

SEQ ID NO: 449126 - DNA, 100 bp, Homo sapiens
aggggacattcaacagcccctactacccaggccactacccacccaacattgactgcacatggaacattgaggaatcagagatcattgatttcttcctggg

SEQ ID NO: 449127 - DNA, 101 bp, Homo sapiens
ctgaaaggagagacacttgtgaacattcaagtgaagcaaaagcctttcatgattataggctgataaaataccagtaatgcgtggacagtggtttattgacg

SEQ ID NO: 449128 - DNA, 85 bp, Homo sapiens
caaggacagagtcagtgatttccataaattgaagcaaagtgaccaagaatatggcccaggtgaccaaagccctggacaaggccct

SEQ ID NO: 449129 - DNA, 140 bp, Homo sapiens
ctctttcctcccaagtaagggaataaaccgcgaagaaggagcgccccgggccaccgcgcaaccaagtgttgcctggtgagatcgcccaggaccacaccgcagcgtaactgcaggcctctcagcgaaaaagggggaaagca

SEQ ID NO: 449130 - DNA, 82 bp, Homo sapiens
gtggttttgatcatgttgttaccctcggacgtagcccggcttgtattggttgcatccttaatgtccagtcaaggagtggtga

SEQ ID NO: 449131 - DNA, 88 bp, Homo sapiens
tgaatgtctgccgaaatgttcaagtttaccaaaagagaggcaccgctggaacactaatgagatgccttcaattaagttgcagagttct

SEQ ID NO: 449132 - DNA, 83 bp, Homo sapiens
aggtggcagaaaccagcatgcacaacctcctggagactgaccctggctttggcccttcaaagagactgtgaggaaatgtgccc

SEQ ID NO: 449133 - DNA, 98 bp, Homo sapiens
tgataggcaggttaccatcactggatctgctgccagcattagcctggctcaatatctaatcaatgtcagcaaagaacagtctgaacttgatcaagatt

SEQ ID NO: 449134 - DNA, 90 bp, Homo sapiens
aaacatttgtgggaagttgtattcatcaataatgaaatgctgactaaggaacaaggagaagttgccccagtgcaaggcactgcattcgac

SEQ ID NO: 449135 - DNA, 100 bp, Homo sapiens
ccaaggttgccaaatgcacagccaagcctagcagctcgggcaaggatggtggaggcgagaacactgaggagaaagtttcctacactactgaggtttaggg

SEQ ID NO: 449136 - DNA, 100 bp, Homo sapiens
caccatccttctcgctgcaggattcaccctcatggcttaaatcatggatggcgctggttggcacagatcttaaacatggagcccttgtcagatgtgacag

SEQ ID NO: 449137 - DNA, 100 bp, Homo sapiens
ttagagggctactgcgctgcttaacttggccagatcagaaaagggagctcaggtaccttccagagagtgagacccagcgcccttgtctcgcacccagtag

SEQ ID NO: 449138 - DNA, 82 bp, Homo sapiens
aaacaggcggaggagcccagagcccagctcaacattggcaatgtgctccctgtgggcaccatgcctgagggtacaatcgtgt

SEQ ID NO: 449139 - DNA, 101 bp, Homo sapiens
cttaggtgaaaaggatgatacaccagttcatttctgtgacaagtgtggattgcctattaaaatctatgggagaatggaccacttgtcttatttccactttg

SEQ ID NO: 449140 - DNA, 74 bp, Homo sapiens
gcggcggtggcagccatgttgttcctctgcataagagcctagatccaagcaacctggaacatctcataacacca

SEQ ID NO: 449141 - DNA, 100 bp, Homo sapiens
tagtctcaaagcgcatattatgctacatgaaaaggaagaggagtgcctgtgaagaaaacggggtattgccctgaggcttatattctgcctcagttgtctt

SEQ ID NO: 449142 - DNA, 82 bp, Homo sapiens
gatcagaggtagtcggacctttcccgctggcgcgcagcctcagctagacccaacatgagtgaagtttcctgcaagaaacggg

SEQ ID NO: 449143 - DNA, 100 bp, Homo sapiens
tctggtgcatccttggcagaaagtgaggaggaaaacacccccattgttgtggcagcactgcctgaaggtatgagaccagattctaatctttatggttttc

SEQ ID NO: 449144 - DNA, 100 bp, Homo sapiens
ccggagcaagcggagctcccccaagagccggaaaggtgattgctggcttcaaccgccttcggcaggaacagcgaggcctggcatccaaagcagctgagtt

SEQ ID NO: 449145 - DNA, 108 bp, Homo sapiens
cagaaagccgcctcttggtttgcgtcctgcactgaaaggaaatgacggattttcaaaatgatgcttcaacacccaggccaggtctctgcctcggaagtgagtgcttct

SEQ ID NO: 449146 - DNA, 114 bp, Homo sapiens
cagagattcaggccagagttgtgggccgccgtcggcagcaagaacagagagagaggtggacagatctgagagatactgagatactgcttttgcaaaaaataaagatgatggaaa

SEQ ID NO: 449147 - DNA, 100 bp, Homo sapiens
cttggccaggctggccccgagcggaactggagaaagctgaggaacatggtccaagacaattcctgggaaagttcagttcttctcaagtgagggttctgac

SEQ ID NO: 449148 - DNA, 100 bp, Homo sapiens
tgcttatcccagctaagctccaggatgggcttaggtcacgagcaaggatttggagccccttgtttaaaatgcaaagaaaaatgtgaaggattcgaactgc

SEQ ID NO: 449149 - DNA, 100 bp, Homo sapiens
gcgcctgggggtgcgcgcctgcgacctgcccgcctgggtattcgtggacaccgtagggatgccagagacataccaggcgcggctgcagcaaagttttccc

SEQ ID NO: 449150 - DNA, 75 bp, Homo sapiens
cctcccgagaagctgggattacagcgagaattagaactgcagcgtcagcgtgacttgcataagatcaagcagctt

SEQ ID NO: 449151 - DNA, 83 bp, Homo sapiens
ctctgcgcaagctccgcgcgtaccgcccctccggccaggatgataaggatgccttctatgtggcagacctgggagacattcta

SEQ ID NO: 449152 - DNA, 100 bp, Homo sapiens
tgggcaacctgcacttcctgtattcagaactagcattggggagtcagcaatgtccgttgtgttaaatcagctgctgcccatgattaagcctgtaacccag

SEQ ID NO: 449153 - DNA, 100 bp, Homo sapiens
tgttcatcaattggcggggttccatttttccagattttctggcatccttaaatcttgtgtcaaggattggttataatataaccagaaaccatgacggcgg

SEQ ID NO: 449154 - DNA, 90 bp, Homo sapiens
gccgccgcgcctgcgcagaaggccggggccggccagaagcgggcggcgcgggggagatgggggagctgatcaccttctattactattgga

SEQ ID NO: 449155 - DNA, 50 bp, Homo sapiens
cgttgacaaggcactgctttttcatgacgcgttgacagaaggctacgttg

SEQ ID NO: 449156 - DNA, 98 bp, Homo sapiens
cgtgaccgagagcgtgaccgagagcgcgaatatcgtcatcgttagaaggcccgatgagagaaagggaaagttaaggatgctggagcagaacaatggat

SEQ ID NO: 449157 - DNA, 83 bp, Homo sapiens
ctcctaagcctgcacagccgcggcggcagcagcagtgagaggagcggtggtgccccccccgggcacggggccatgtacaacgg

SEQ ID NO: 449158 - DNA, 90 bp, Homo sapiens
caccgcagatgttgtcaaggtggcctaccaggaggccaggggtgtcgccatgggtcgtctactcaatttgagctgctccacagttcccac

SEQ ID NO: 449159 - DNA, 89 bp, Homo sapiens
ggcccgcgctcggccgcccgccggcctttccgttccgaacgtccacggcgccctggcccccctggccatcccctcggcggcggcggcag

SEQ ID NO: 449160 - DNA, 100 bp, Homo sapiens
tacactgaatatgtcttctaccttcctacaacagcagccagtacccctgatgccgttgacaagtatctcgagacacctggggatgagaatgaacatgccc

SEQ ID NO: 449161 - DNA, 100 bp, Homo sapiens
cgacccgggatgttcagtctgatggccagttgctgcggctggttcaagcggtggcgggagcctgtcaggtcctgggaactccaacaagggagcaaatcag

SEQ ID NO: 449162 - DNA, 96 bp, Homo sapiens
cggagctgttcctattcggccatctttgctcctccctgcaactaactccattcttaattggttccagcaacagatagaaatgctttaagttcactc

SEQ ID NO: 449163 - DNA, 100 bp, Homo sapiens
agaaaaagaagatatgtatgacgagattattgagttaaagaagttcttccctgtggaacagtagagacctagtctgccttctttcacaagataatccttc

SEQ ID NO: 449164 - DNA, 90 bp, Homo sapiens
ggcggggcggagccgagagccacactttcaagtaaaccaggtgtcgtgaaaactacccctaaaagccaaaatgggaaaggaaaagactca

SEQ ID NO: 449165 - DNA, 100 bp, Homo sapiens
ggctgaagaaccagacctggactttcttaggttaatacaatctgttggaatgacactggagaatatattttatctggctcagatgacaccaaattagtaa

SEQ ID NO: 449166 - DNA, 75 bp, Homo sapiens
tcttcattcaagtcaatcagtttgcattggaagatgatccctatgatcttgaagatgtttctgcacagaaatgag

SEQ ID NO: 449167 - DNA, 82 bp, Homo sapiens
ggagaggtggctccatggacacagacctgctgtgtgtgcttctgcgccccagacatccggctccgggttcgagcagagtact

SEQ ID NO: 449168 - DNA, 82 bp, Homo sapiens
gatcatgtctgcgagccaggattcccgcaaattgtggctactaatttgccccctgaagatcaagatggctctggggatgact

SEQ ID NO: 449169 - DNA, 100 bp, Homo sapiens
agtgatgtcttccagactcggtgctgtacccgccgattggccatttgatgatggagctccaccccctaatcagatagtagatgattggttaaacctgtta

SEQ ID NO: 449170 - DNA, 100 bp, Homo sapiens
gagatttccagccttccaagctctactgtgacttcagagacactgccaagcagccttagccctagtgtagaggcaaggggagagccagttgcgcagagcc

SEQ ID NO: 449171 - DNA, 101 bp, Homo sapiens
agactgcgcggccgttgggcgtgcagcggcgccagtcggcggacgaggggcccccgggagagttcaaagaggccttttcattgtttgaccggaccccgact

SEQ ID NO: 449172 - DNA, 89 bp, Homo sapiens
gaccggcacccagacaggtggcgaaggcagaggagctctgacgcccgctctgcggcttcggtgtttgaacaggccacagtccaggagcg

SEQ ID NO: 449173 - DNA, 75 bp, Homo sapiens
ggtgcggatacgacccatgaaccggcgaggcccagtgacgagcaccatccggaagtgaaggctgatgggtacgtg

SEQ ID NO: 449174 - DNA, 90 bp, Homo sapiens
gggggagattctgctcacggaactgcaggttactataacaacagtaccaaggtggctgtgaaaaccctgaagccaggaactatgtctgtg

SEQ ID NO: 449175 - DNA, 115 bp, Homo sapiens
tcgtcctttagaacagcccccacctcccgcacatcatgcagttgcaggttcaatggctactgcttgtcctccagactcgaggagctgaatgatgctgtgggattttctagagtca

SEQ ID NO: 449176 - DNA, 82 bp, Homo sapiens
aaagggtggacaagttccggcagttcatgcagaatttcaggtgggattcaaagaagcacacaggctacgtcggcttaaagaa

SEQ ID NO: 449177 - DNA, 74 bp, Homo sapiens
cgggaggtgaatttccatgtcaacatagtcctggctgttcggctcttgaatcccagcgatgaaaccaggaactc

SEQ ID NO: 449178 - DNA, 110 bp, Homo sapiens
cggactctggccgcctcagcgtccgccctcaggcccgtggccgctgtccaggagctctgctctcccctccaggcatttccggagagttcttttgaagtcacttcagaagg

SEQ ID NO: 449179 - DNA, 75 bp, Homo sapiens
acttttaagccaatagctccgtcaggtcagaacgccacttgcacaagatacagggcaaaattattagaaagtgaa

SEQ ID NO: 449180 - DNA, 98 bp, Homo sapiens
cccccctccccgagacccaccggaccccgaacccagataaaataccatgaggagtttgagaagagccgcatgggccctagcgggggcgagggcatgga

SEQ ID NO: 449181 - DNA, 90 bp, Homo sapiens
cacaatgtgccccagccctgggcctgtgactatcagctctttcaagtccttcctggggaccggggctggagtgcaatggcgggatctcgg

SEQ ID NO: 449182 - DNA, 90 bp, Homo sapiens
gtgattccttcctaggcctccaaccatatggccgacagatcagtgtactgttacccggacatacctattccttcacaagttctggttctt

SEQ ID NO: 449183 - DNA, 75 bp, Homo sapiens
gaaactgtgagctaataaatgtgtgttgttttgagctgctaaacaaaaagctcaggtacctgacaatgatgagca

SEQ ID NO: 449184 - DNA, 74 bp, Homo sapiens
ctgaaccaggtgcgtgagaaggctgccttcaggtggccgggggctccctccagagatgaatgtgaaggtgctgg

SEQ ID NO: 449185 - DNA, 92 bp, Homo sapiens
atcgggtggcggctcgggacggaggacgcgctagtacaatgcagatcttcgtgaagactctgactggtaagaccatcaccctcgaggttgag

SEQ ID NO: 449186 - DNA, 100 bp, Homo sapiens
gggctaataatgctggcaaagtggaaaaatgtgcgattggcagattgctactctggctttactcctgggcggcgctgccatcattctcattgcattcctg

SEQ ID NO: 449187 - DNA, 74 bp, Homo sapiens
tctcattctccagggatcagtgtgatcctgccatgaagcagtttctgctgtacttggatgagtccaatgccctg

SEQ ID NO: 449188 - DNA, 50 bp, Homo sapiens
ctactctgtgaccggggccaagcagcttctttatgaaaaaggcatcagcc

SEQ ID NO: 449189 - DNA, 100 bp, Homo sapiens
ccggggcaggggaggagccgccggagctgtcggagccctgctgtgacttactcgaagcctcgattggccacattttggtactacgccaaggttgagctgg

SEQ ID NO: 449190 - DNA, 75 bp, Homo sapiens
agaaaatcagtgacattccaattcctgaaagagctccaaaacgaccctgatgctcccataagacagaaaatgccc

SEQ ID NO: 449191 - DNA, 100 bp, Homo sapiens
ctcggatgctgatggggctggacctgctggtgttcgcccacgaccatggcacattgcaagcaacccgtgccttgatggtggttggcatcctcctgggagt

SEQ ID NO: 449192 - DNA, 74 bp, Homo sapiens
ggatctcttcgtctttgcagcgtagcccgagtcggtcagcgccggaggtgacttaagagattaaaattaatttg

SEQ ID NO: 449193 - DNA, 100 bp, Homo sapiens
gaggagccatgaggcgccagcctgcgaaggtggcggcgctgctgctcgggctgctcttggaggtcttattagtaggtaagaaacagctgctcctccacct

SEQ ID NO: 449194 - DNA, 75 bp, Homo sapiens
gggcgtggtcgcagctactctagagatcatggaagggaagtggttgctgtgtatgttactggtgcttggaactgc

SEQ ID NO: 449195 - DNA, 101 bp, Homo sapiens
gtgggggcagcctccctgtccggcaccagaattatatccagatcgagagacagaagattctgaaagggttcaatgaaatgagagtcatcttggacaatgag

SEQ ID NO: 449196 - DNA, 100 bp, Homo sapiens
gctcaagaatttcaagaacaaaggccgcgacttggagatccaacttagaaataatgtttcattcaagataaggctcgtggcttaggagattgtgacctgg

SEQ ID NO: 449197 - DNA, 83 bp, Homo sapiens
ctgctagtgaatctgacccgactggattcctccatgactcaaggcacagactctccagttccaggaaggatgttacctttgac

SEQ ID NO: 449198 - DNA, 102 bp, Homo sapiens
ctcagtgacagacactcctgcaacccagttttccagccaccagtgggatgatggaaatccttttgtactattgctcattcatacttgttcatcaaagcctgg

SEQ ID NO: 449199 - DNA, 97 bp, Homo sapiens
tccaatagggatattgtagaaactgtctttaacctgatttataatcgcttagatacaaattgctgtggattcagacctcgcaaggaagatgcctgtg

SEQ ID NO: 449200 - DNA, 75 bp, Homo sapiens
aatgttggagccgtctgcaaagtgtccccggcaagaagcaaagctagagaagatttgctgaaaattcagaaagaa

SEQ ID NO: 449201 - DNA, 96 bp, Homo sapiens
gaaatctgattttgaggtgttcgatgctttaaagttagattctatggaaagttctgagacatcttgtagagctccagcccttctctgagacgggga

SEQ ID NO: 449202 - DNA, 99 bp, Homo sapiens
tggcacggtcgttcggaccagcactatcccagaggaacttgggcgcctggtgtatttattgacagacaaaacaggcaaactcttccacatagactttgg

SEQ ID NO: 449203 - DNA, 96 bp, Homo sapiens
caaggactcacagtggctgcaaggcgaggattaaatccaccacacagggtgaaatctatctccatgacaacattcacacaacaggaaattgaattc

SEQ ID NO: 449204 - DNA, 74 bp, Homo sapiens
aaaagaggatacctctgcgatcccgggtcatctccagatgctagggttatggggtggatccatgctgtgctgac

SEQ ID NO: 449205 - DNA, 75 bp, Homo sapiens
gccctgcaatgcgatacctgagctacatgtcaccaagccagtgtcagagatggctttggattccccgttctgtgt

SEQ ID NO: 449206 - DNA, 75 bp, Homo sapiens
cagacgtgcacaccatggatctgggtgccgtgagcgatgtggagatgcaggaacactatgatgagttttttgagg

SEQ ID NO: 449207 - DNA, 101 bp, Homo sapiens
gggtcccgaagccccctgcaggaactctacaacccaatccagttcaaaagaatgctgaaccgggagctgacacacctctcagagatgagccgatcagggaa

SEQ ID NO: 449208 - DNA, 90 bp, Homo sapiens
catcttcggacgggaggggcaagccagccatcctgggaccccaggcgtgcaggttctctttgaggtactaaggctcgtacgtctgcatcg

SEQ ID NO: 449209 - DNA, 100 bp, Homo sapiens
cttgcattggcctccggcaggcgccccccgggggcgggaagctgcccttgaaggtagtggacccagatcatcccctcgcagcacttgttcgtaaggcaca

SEQ ID NO: 449210 - DNA, 100 bp, Homo sapiens
aattaaagatgcatgctgatggcgataagtcattaccacagaattgacttctctttgaaagataacgaaaagcagatcatcctggaccttgctgtctata

SEQ ID NO: 449211 - DNA, 82 bp, Homo sapiens
ttcggcatcgggcgacagcaggtcacagtggacgaggtgttggcggaaggtgacttaagagattaaaattaatttggttgct

SEQ ID NO: 449212 - DNA, 82 bp, Homo sapiens
gggggcatagacttcaaccagcctttggtcatcaccaggccttatgccagcctggaccatcttggaggcagtgtaggatcat

SEQ ID NO: 449213 - DNA, 75 bp, Homo sapiens
atcacttcgaaaacttgctttcccacactaagctttaggttggtctcagccttgtgatgtttggagcataggttg

SEQ ID NO: 449214 - DNA, 84 bp, Homo sapiens
gttagaactcgcgtttccacttcagagatctgaactgataaatttcaaacggaagagagtggcagcatttagaaagaatctaat

SEQ ID NO: 449215 - DNA, 100 bp, Homo sapiens
actactgtgtgtaccttggatgctgctgtttaaaccattggtccttcgccgtcagtatttgaggagaaagcatttgaccttgccaccatggaagaaagag

SEQ ID NO: 449216 - DNA, 100 bp, Homo sapiens
ccaccgcatcgcgctcaacctgcgggagcagggccgcgggaaggaccagggatctcggggagaccccggtgatgcaggaccccgtggagactcaggacag

SEQ ID NO: 449217 - DNA, 96 bp, Homo sapiens
gatgcgttcctggccgtggctggccacatcttctctgcaggaccatgaatggcacctacaacacctgtggctccagcgacctcacctggcccccag

SEQ ID NO: 449218 - DNA, 82 bp, Homo sapiens
tactacaatcagagcgaggccgggtctcacaccctccagagcatgtacggctgcgacgtggggccggacgggcgcctcctcc

SEQ ID NO: 449219 - DNA, 75 bp, Homo sapiens
gccggcgggatgtggcgactacgtcgggccgctgtggcctggacctcaatacagtctccatcttcatatggtaac

SEQ ID NO: 449220 - DNA, 80 bp, Homo sapiens
aatactcctcctctaacatgtcagcgttattgtaatgcaagtatatgccctcattttgcttaagacctctggccagagca

SEQ ID NO: 449221 - DNA, 75 bp, Homo sapiens
gaccccttctgcccggcgcttcggcccgggccgctcaggtgcagacaaaaagtaaccttcctgaagaggacatgt

SEQ ID NO: 449222 - DNA, 96 bp, Homo sapiens
tgttgctgtgtctcagtttacagatgttaagcaaccatccactgtgggttatgcaagacaaatcattaagaaggaaggctggggactccagggcct

SEQ ID NO: 449223 - DNA, 83 bp, Homo sapiens
cccagatgtctgacagccctgtgtgacaccaagataagtaacttaaacacagtgggaatatcacttttgatgagattgtcaac

SEQ ID NO: 449224 - DNA, 90 bp, Homo sapiens
gacactccccagggcagaaatagcgaccatggcgagaacgtgctggccaaagcgctctatgacaatgtggccgagtccccggatgagctc

SEQ ID NO: 449225 - DNA, 100 bp, Homo sapiens
gccaagaagccaacagcgaggctttcagttctttggaattccattcttttccttattcttctgatgtggatccagggaaacagaagtacctgtgcgccag

SEQ ID NO: 449226 - DNA, 83 bp, Homo sapiens
ccgggagccatggagcgcggccctggggcccgggggcgcgggccggggtggtgctggagaatctggtaaaagcaccattgtga

SEQ ID NO: 449227 - DNA, 97 bp, Homo sapiens
cccaagcggtttcaaacggcttagagcaggccgcttggttctgacccagctgagcagaggctgaccatgtggaggccgccatcctcgaagaagacga

SEQ ID NO: 449228 - DNA, 80 bp, Homo sapiens
ttgttttataaactgcctggccgaatcagccttttcacgctcaaggcgcatattaaatttcctattgactacccctattc

SEQ ID NO: 449229 - DNA, 122 bp, Homo sapiens
cagcgacggggccaggaagcaattctggaagcgcagcaacagcaagctcccgggcaggatatgtgatggcgtccagtttggagctgggataaggttcctgtagccgacacccctacaggaga

SEQ ID NO: 449230 - DNA, 89 bp, Homo sapiens
tccctcaagactggtccacggagtgtatgaccacaaacagccatcaagagcatagcggcctgaccacaggggtggccttcgggcatcac

SEQ ID NO: 449231 - DNA, 74 bp, Homo sapiens
gcaccgcggatctggggccgtcctcagggatcatggcccaagttgcaatgtccaccctccccgttgaagatgag

SEQ ID NO: 449232 - DNA, 90 bp, Homo sapiens
cgcccccacttcctctaagctccctgccgccagaagccagccaagcaagggtcggcccatcggtgccaagacaggacaggcctgtgcgtg

SEQ ID NO: 449233 - DNA, 75 bp, Homo sapiens
tcaccttcaaggccgtcagacaagttcaaatctgaacatcaatgatgtactagggaactactcattgactcttgt

SEQ ID NO: 449234 - DNA, 100 bp, Homo sapiens
gcgtcctcatcagtctgcttgacaagccagaaatagagcccccctccatgcgcctgaaggcccgacccagcagccctggcttttccgtgcttacctgcag

SEQ ID NO: 449235 - DNA, 98 bp, Homo sapiens
ctcactcagctccaacccctacctgctgtctcaccccagtgactccctggagctcatggtctcagatcatcttcatggtgggccgaggatatgcctcc

SEQ ID NO: 449236 - DNA, 145 bp, Homo sapiens
cagcaggcggacgaggcggaagaccgcgcgcagggcctgcagcgggagctggacggcgagcgcgagcggcgcgagaaaacaatgcagatcttcgtgaagactctgactggtaagaccatcaccctcgaggttgagcccagtgaca

SEQ ID NO: 449237 - DNA, 100 bp, Homo sapiens
ctccactccgtcccccgcgggtctgctctgtgtgccatggacggatggaaatcatattatgtagaatacttgggtgacatctgcctgagagatctccaag

SEQ ID NO: 449238 - DNA, 75 bp, Homo sapiens
agcgcgaatatcgtcatcgttagaaggcaaacgaatgcacgtgcagttgtccaccagccggcttaggactgcgcc

SEQ ID NO: 449239 - DNA, 101 bp, Homo sapiens
ctgaccaagacaatattcaaaagcagtttgatcaagagttttaagttgaatgtagacagtcattgtgctctcaaggaagctgtggaggaggaaggacacca

SEQ ID NO: 449240 - DNA, 50 bp, Homo sapiens
cgagaggaagctgagggagaccgcggtaaccagcgtgagctcgcccgcca

SEQ ID NO: 449241 - DNA, 96 bp, Homo sapiens
gagcacctctccgcgcacatcactcccgagtggaggaagcaatacatccagtatgagacgtgccaaatactggtgtaagcaaacctagagtttctg

SEQ ID NO: 449242 - DNA, 96 bp, Homo sapiens
tcgcgctactctctctttctggcctggaggctatccagctttttagaagatgcaactcacatggtatagaggaggaacactgtgaccccccacaag

SEQ ID NO: 449243 - DNA, 88 bp, Homo sapiens
tggtggcgggcccgggctgcggcgtgtgcgcgcccgccagctgctccggagatacggattcggaaacttcagatacgaaatatcccgc

SEQ ID NO: 449244 - DNA, 75 bp, Homo sapiens
tggagaactacagaaacctggtctccctagtttgttgaaattaaaggaagtgttttcaagaagtttgaaaagaac

SEQ ID NO: 449245 - DNA, 82 bp, Homo sapiens
ccggcgtcgtcggatgttgtgttgcccgccaccatgagctacacaggtgacttaagagattaaaattaatttggttgctgtt

SEQ ID NO: 449246 - DNA, 82 bp, Homo sapiens
ccaggagccaggggcccagaagccagagcagctgagttccagataaaaactgtcagacccggcctgtaggctgctccattgc

SEQ ID NO: 449247 - DNA, 90 bp, Homo sapiens
ctctcagtgccgcgtcgccaaatactgtagtgctaagtgtcagtatcggttttatggagaacctgtaataaaagcatgtattgaaaatgg

SEQ ID NO: 449248 - DNA, 74 bp, Homo sapiens
tgggtgctgggacttcccgtccgcggcgtggagggtggaaaacgaagctcattcccaacgtgcaaagccaaggc

SEQ ID NO: 449249 - DNA, 100 bp, Homo sapiens
ggacacacctaaacatgtggaatcccaatgccggactctgaagacctactgggtgagcaaaggcagtgcctttagtaccagcatctccaagcaagagaca

SEQ ID NO: 449250 - DNA, 101 bp, Homo sapiens
tgggctggaggcggcggagcgcgagagcttcgagcggactcagcaagatggaaagttgccttttgttcctccggaggaagaatttattatgggagtttcca

SEQ ID NO: 449251 - DNA, 75 bp, Homo sapiens
catcattatcaatatgtcatctttagcagatttggataagtgaagacagtaataacattgaagcagtgaaccagt

SEQ ID NO: 449252 - DNA, 90 bp, Homo sapiens
ctcccttcctcagcgtttcaagtatgacgccgtgcccatccagtccagcgtggtgttatgttcctgcccatccccatcaatggtgaggac

SEQ ID NO: 449253 - DNA, 98 bp, Homo sapiens
gtctctggagacatcttcagcaggacctcagcagccatgtcgaagccccatagtgaagccgggactgccttcattcagacccagcagctgcacgcagc

SEQ ID NO: 449254 - DNA, 80 bp, Homo sapiens
gagagagaggtggacagatctgagagatactgagggacccagagtttgtcttctacgaccagctgaagcaagtgatgaat

SEQ ID NO: 449255 - DNA, 117 bp, Homo sapiens
tggctcggactccgctccccgccccgccgcggccatggaggacgagcggaaaaacggagcctacggctgaaggtgatgtggccgccctcaaccgacgcatccagctcgttgaggagg

SEQ ID NO: 449256 - DNA, 74 bp, Homo sapiens
ataaacatgcaatgaacccaaaaggagctgaatgaagatgtgtctgctgatgttgaggaaagatttcatctggg

SEQ ID NO: 449257 - DNA, 117 bp, Homo sapiens
ctggatatacagccccaggggggccttcagtgcttcccacagcctcctgtcaaccctctcaagagatcctgatcaaggtgcaggtgtatgtgagcggggagctggtgcccctggccc

SEQ ID NO: 449258 - DNA, 75 bp, Homo sapiens
ggctggctgtggcagatgcaactgcaggaatcgggcgcctgattgctgagtgtcatctcaaccccatcatcctgc

SEQ ID NO: 449259 - DNA, 75 bp, Homo sapiens
cctttttgaagcctttgcaaaagtcttcaatgaaatttatccagtatggacttactcttacctggtgctactgtt

SEQ ID NO: 449260 - DNA, 75 bp, Homo sapiens
caaacagctggcgagattcgccggagcctctatcaagaccccacgcgggaccagtgcttcggggaccgcttcagc

SEQ ID NO: 449261 - DNA, 100 bp, Homo sapiens
ctgcctgcctggcatctctctctcccggtccaggtgcaggtacagcagtctccgcaacaggtctcggctcagctctccccacaactcaccgttcaccagc

SEQ ID NO: 449262 - DNA, 50 bp, Homo sapiens
cgaggagatcaagaaggagaccggctttaacaagcacaagccctggctgg

SEQ ID NO: 449263 - DNA, 100 bp, Homo sapiens
gtaggcccgcggggaaagagagaggctgtgtgtggctgtagtggagagcatgtggagggacttggagccagattgtgaaagatgcataccaagaaaagac

SEQ ID NO: 449264 - DNA, 83 bp, Homo sapiens
ctggccaagaagatcatcattaaggacggaggcacgcaagagtgagccatggagctacgtgtggggaacaagtaccgcctggg

SEQ ID NO: 449265 - DNA, 98 bp, Homo sapiens
ctgtgataatgaggaagatcttcaaatgggcattcacaagccatatgaaggattaaggcctcaggatcttcgtagactaaaagatatgcttattgtgg

SEQ ID NO: 449266 - DNA, 98 bp, Homo sapiens
tggccgagatggctaagaagtccatgccaggaggtcgtctgcagtcaggtcacagtcaaagtgcctcagaagaactcataagaatcatgcaagcttcc

SEQ ID NO: 449267 - DNA, 100 bp, Homo sapiens
tggccggcagcgtcccggacgaggaggccaaacgtaccaagaaagtcgggatcgtcggtaaatacgggacccgctatggggcctccctccggaaaatggt

SEQ ID NO: 449268 - DNA, 96 bp, Homo sapiens
gttggggccactgcgaggccgttttagggtgtattatctcatatactttcagcactcagatttgataaagaagttgctcttttcactcaaggtctt

SEQ ID NO: 449269 - DNA, 98 bp, Homo sapiens
gttgacaaggcactgctttttcatgacgccattgagacccagagcagcagttctgaagagatagtgcccagccctccctcgccaccccctctaccccg

SEQ ID NO: 449270 - DNA, 100 bp, Homo sapiens
ttttcaatgacaccaagttggacgctatgctggaagaatttaagaaaggcccagtgacgagcaccatccggaagtgaaggctgatgggtacgtggacaac

SEQ ID NO: 449271 - DNA, 75 bp, Homo sapiens
ttatggttcttgatatggccaggtgaaggtgataaagtaaagtgctttcactgtggaggagggctaactgattgg

SEQ ID NO: 449272 - DNA, 114 bp, Homo sapiens
cccagagactgctgagcccgtccgtccgccgccaccacccactccggacacaggagctctttgttcaatgcctagccacctattcctacagacacggcagtggaaaggaaaaga

SEQ ID NO: 449273 - DNA, 75 bp, Homo sapiens
acagattgacaatgcccgtctggctgctgatgacttccgcaccaaaagctgcaggatgctgaaattgcaaggctg

SEQ ID NO: 449274 - DNA, 74 bp, Homo sapiens
taggagtgctgagcccgcggaaccgcagccatggtaatcattaccaaatgaggaggaaaggacgatgtcatcga

SEQ ID NO: 449275 - DNA, 75 bp, Homo sapiens
agcctggaaacgaggcactcagttggaagagtccagcaagatccaaaatacggagctggcatatacttcaccaag

SEQ ID NO: 449276 - DNA, 95 bp, Homo sapiens
cggcggcagcagctggaggaggatcgcactgctcatcttggccatcactatacacaacgttccaggtttctaagcatgaattgaggaacagaaga

SEQ ID NO: 449277 - DNA, 97 bp, Homo sapiens
ctctttgggttcgtgagatttcatgaagatggcgccaggacgaaggccctactgggcaaggtctggatgtaccgactgcttttggaataaaaagatt

SEQ ID NO: 449278 - DNA, 71 bp, Homo sapiens
gaaatgtagccttggaccgagacatgatgaagaaagttgactggtctgagtgtctccaatggaaaggacca

SEQ ID NO: 449279 - DNA, 74 bp, Homo sapiens
atttcatccctcgtcgaaaggattggattggcatctttagagttccttttttgccaggagattcagaccttgat

SEQ ID NO: 449280 - DNA, 100 bp, Homo sapiens
tggacctcgttcagcagtcatgtaactataagcagcttcggaaaggagccaatgaggaccctgctctctattccagaggtggtgaggggatgcaaagaac

SEQ ID NO: 449281 - DNA, 82 bp, Homo sapiens
cccagacagagaggagaacgcagccccaggccatttactgcaaggatgttctggacattgaacagttctctacggtcaaggg

SEQ ID NO: 449282 - DNA, 83 bp, Homo sapiens
cgtcaagcacatgttcgtacacacagttactggctgaccaacaaagttcctatcaaaagacccagcacaggtcttctcatgta

SEQ ID NO: 449283 - DNA, 75 bp, Homo sapiens
ggcattgaggactttccttacctgtttttccagctcacccactgccagcagaggccccagctcaggctcgtgccc

SEQ ID NO: 449284 - DNA, 75 bp, Homo sapiens
gtcttcggtctcctggggtcggcgccgagtgggaggatggcggaatcggtcctgaccgccagcctgtcgtacatg

SEQ ID NO: 449285 - DNA, 74 bp, Homo sapiens
ccaggaggccaggggtgtcgccatggggccatttgctacctttaagatgcagtatgatcgaacttgtgagtgga

SEQ ID NO: 449286 - DNA, 101 bp, Homo sapiens
acttctgagttacataaagaagacctaaaactgatggctactaaaaagcagagcatttctgaggaagaatacaagcgattgagtgaagcactagcagagga

SEQ ID NO: 449287 - DNA, 100 bp, Homo sapiens
accggctgcaaggggatcgcctgcgcgtcccgctcgtttcgtgccttgctttccatgacatttcccctcaagcaccaacacattttctggtgatacccaa

SEQ ID NO: 449288 - DNA, 96 bp, Homo sapiens
cagccgtccaccttgccagccccagttctccttgacggagcccatgaaggtcttcctaacagagtacgcggggccccttttcatctacctgctctt

SEQ ID NO: 449289 - DNA, 100 bp, Homo sapiens
gctccagagattatctacagctcactgaacatggcaatgtgaaggaagcccttagtgtatacaaggaagcaattcagaaaatgccaaggcagtttgcccc

SEQ ID NO: 449290 - DNA, 103 bp, Homo sapiens
gggcgtaggcgcgcggggcccgccatggctgcgtcggagctctacacaaagatactctggatgaatattttgaatatgatgcagaggagttcttggtctcttt

SEQ ID NO: 449291 - DNA, 82 bp, Homo sapiens
aaaaccttcaggcggcccatggcactgactcatatattgaagtccttgatggttcccgtgtccaccctgagacttatgagtg

SEQ ID NO: 449292 - DNA, 51 bp, Homo sapiens
tccttagccaacatttacttggagtccaagcttagcagtgtctgcaaaaac

SEQ ID NO: 449293 - DNA, 75 bp, Homo sapiens
gggagcggcgcggcggcgcgggaggatgccaagtttgtggaggaacggagaaagcagctccagaattacctgcgc

SEQ ID NO: 449294 - DNA, 90 bp, Homo sapiens
accctggcgaccactgcttctccgtgggcagcattggcgaccagcgcttcacggtggttgaccagattgacaccctgacctctgacctac

SEQ ID NO: 449295 - DNA, 100 bp, Homo sapiens
cacagctgttcagcccctggtggctgtgctcattgattcaggtgacacctattattttggaggtgccagatgtgacatccagatgacccagtctccatcc

SEQ ID NO: 449296 - DNA, 51 bp, Homo sapiens
aaaggacctgcccccagagagagatacagttgatatattagttggatggca

SEQ ID NO: 449297 - DNA, 82 bp, Homo sapiens
tcgctctacccagtcccaggacgtggcgcgggtctccagtgcttcagattgagaggatccagaatccagatctctggaatag

SEQ ID NO: 449298 - DNA, 74 bp, Homo sapiens
tcaaggctaccatagctgggggtggcccagatagctaataaccgaacacctggaagatggacccagcggtacta

SEQ ID NO: 449299 - DNA, 98 bp, Homo sapiens
cttcaacaagaggacccaggagaaattcgccctcaaagaatttgagagcgtattttgcggtaaaactggccgaaggctaaagctgaccagaccggact

SEQ ID NO: 449300 - DNA, 100 bp, Homo sapiens
tgatgataactatggcaatagcagcggcaatacgtggaacaacactggccactttgaaccagatgatgggacgaaattcctagaggacctgtgcaacaac

SEQ ID NO: 449301 - DNA, 100 bp, Homo sapiens
gatagcacatgtcttcggctacactggtgaaggcatcgtgcctgctccacagcacatttttattcaaggtacagaatgagcacatgttgttggtgtacgc

SEQ ID NO: 449302 - DNA, 100 bp, Homo sapiens
cacaggctctctccgctcgattttgtcaccgttatgtgggaagcgaatccagaatacaaacagaagcttgcacgagtaacccaggtccgcaaggaactga

SEQ ID NO: 449303 - DNA, 50 bp, Homo sapiens
ccagatggcagccagtcagtggtggaggtcccaggtgtgacaccttcagc

SEQ ID NO: 449304 - DNA, 75 bp, Homo sapiens
aaggcttcttgtatcttcagcagcagcagacgtttggaaaggtggcagtccatgtgtcctctgcgccagttccgg

SEQ ID NO: 449305 - DNA, 89 bp, Homo sapiens
ggcagccatcaaagttatggatgtcactgaggtctgtgtatgatgaccaaccaaatgcgcacaagaagtttatggaaaagttagatgct

SEQ ID NO: 449306 - DNA, 124 bp, Homo sapiens
tcaccgtgggtccgattagccttttctctgccttgcttgcttgagcttcagcggaattcgaaatggtttggtgcacctcgatttggaggaagtagggcagggcccttatctggaaagaagtttg

SEQ ID NO: 449307 - DNA, 96 bp, Homo sapiens
gctgctgagacggcagcagaggctgaaccaggcatcccgggcccaaatcctagacaaagccacagaatatatccagtatatgcgaaggaaaaacca

SEQ ID NO: 449308 - DNA, 100 bp, Homo sapiens
tttgtattgggggtgcaattgaaggcggttgatggtgaagccattctgagtttatgtgttgactccggtattcaggagtctccggtgccgaacggccact

SEQ ID NO: 449309 - DNA, 75 bp, Homo sapiens
cgcaaggcgggggaggcggcggcccagccacgatgagttgcatgctgagaatttgaaaaatgaagatgatgtaga

SEQ ID NO: 449310 - DNA, 90 bp, Homo sapiens
ggcttctccaactggacctcaaatttcattgtgggcatgtgcttccagtatgtggaggacttgacacagcaagcaaaagacatacagaac

SEQ ID NO: 449311 - DNA, 100 bp, Homo sapiens
gcttcgtggatgccctgcaccgggtccggcaggtcattgacgagactctggatgttaaggaaatgattttcaatgccgagagagttggaggcctcgagga

SEQ ID NO: 449312 - DNA, 75 bp, Homo sapiens
acagtgtttcttggagatataattttactcacaggtgcttgtttaaactgccaggaaaatagcaaaggaaatcac

SEQ ID NO: 449313 - DNA, 75 bp, Homo sapiens
ttctgctctcactgcggagaggtgtttggtgcagaagtttgggcttcctgtagacacccttttcctgcgcaacag

SEQ ID NO: 449314 - DNA, 75 bp, Homo sapiens
ccgtcagtccctgctctgtgcgcgcctccatctgggccatggatgggcgacattgactacagcaccgtgctcctc

SEQ ID NO: 449315 - DNA, 90 bp, Homo sapiens
ctcttacagtgcactcggcaggcagtacccctcttctctggaccactggaagtagcccaagtgtttttggctgaaattcctgctgatcca

SEQ ID NO: 449316 - DNA, 100 bp, Homo sapiens
agttcttccttgaagaaatacagcttggtgaagagttactagctcaagacgtaaaattcatcctgatcagaaaaatattaatgcctatgttgtgtttaag

SEQ ID NO: 449317 - DNA, 100 bp, Homo sapiens
caaataagctatatactttggttacctatgtacctgttaccactttcaaaagtttaagtggaaaccctgcagatttagaaagaagagaagcagtgtttgg

SEQ ID NO: 449318 - DNA, 101 bp, Homo sapiens
tttgcttttgtaacttttgatgatcatgatacagttgataaaattgttgttgtccctcatatcacagatgcaatccaggagtgggtgatgagacaggcgtt

SEQ ID NO: 449319 - DNA, 100 bp, Homo sapiens
ccttcttctccgaggactgttttcacttctcagaccgcgggcatgccgagatggccatcgcactctggaacaacatggctcccagccaacctctgataaa

SEQ ID NO: 449320 - DNA, 82 bp, Homo sapiens
gaagtcgcgtgtctaggtgagtcgcggtgggtcctcgcttgcagttcagcgaccacgggttcatgtaatcaaagaagtttct

SEQ ID NO: 449321 - DNA, 100 bp, Homo sapiens
gagcgagtggactcctgcgcctccatgtacagccgctccatccagggccaccatgtctgcctcctggtgaaaaagatgcctgaggaaacccagacccaag

SEQ ID NO: 449322 - DNA, 90 bp, Homo sapiens
ctaccatggtctacaagactctcttcgctctttgcatcttaactgcagcctacttctgcttcctcctggccgctctgggtgtgacagctg

SEQ ID NO: 449323 - DNA, 50 bp, Homo sapiens
tccacagtgattgatgctgcctcaggtgccaatgggtcatgtttggttag

SEQ ID NO: 449324 - DNA, 51 bp, Homo sapiens
cttctggacccaactgtggaatatgtgaagcctcaaggaataggttctcct

SEQ ID NO: 449325 - DNA, 115 bp, Homo sapiens
aaagaggggagctgacagacaaccttgtggctatggcaccagcaggcatccccaatggattggacaattgccctaaagtccccaacccactacagacagacagggatgaggacgg

SEQ ID NO: 449326 - DNA, 75 bp, Homo sapiens
aagcccaggaacgtggcgctcatcaccggtatcacaggccagcacatggattaattgatgtatgttgagtttatg

SEQ ID NO: 449327 - DNA, 74 bp, Homo sapiens
tgaaacagaacctgtccaggagctggcatgacgtgcaggtctctagcgcgaccgagtctcctgccattccgagc

SEQ ID NO: 449328 - DNA, 50 bp, Homo sapiens
ctccagcgatcagagcgttaagccccaaggaggcccgcctgacgactgac

SEQ ID NO: 449329 - DNA, 75 bp, Homo sapiens
ggctgcaatctcggcactttgggaggccaaggtggaattctactaagtatcagtcggccctacaagacaaagccc

SEQ ID NO: 449330 - DNA, 75 bp, Homo sapiens
tgcacactcagtccctctgtgctccaggactccctcaataatgatagtggccaaagcctccaagaacctcatgtc

SEQ ID NO: 449331 - DNA, 100 bp, Homo sapiens
ttcacaaattatgtgcttttactgatagtgtgtctaagaaacatggaacagttttcttggaatccagatccaaaattaacgggacaggctcttattccag

SEQ ID NO: 449332 - DNA, 99 bp, Homo sapiens
agcatttatcacttccttccttactttgtcttggtatactacatggcaaaatgggaaagctgcagaaccttggcctgaaaatgctacattatatcagca

SEQ ID NO: 449333 - DNA, 100 bp, Homo sapiens
gtctttctggaaatggaccaatgccaggatccaacttagaaataatgtttcattcaagataaggctcgtggcttaggagattgtgacctggcttgcatca

SEQ ID NO: 449334 - DNA, 90 bp, Homo sapiens
ttgtacattgggagagatcgttggttcacagggaagtcgcctggaaaaaccaatagtgtatgaaattgaaggctgtgaagtgatttgggc

SEQ ID NO: 449335 - DNA, 83 bp, Homo sapiens
ctgttccaaaaacagtggataattttgtggccttagctacaggagagtatgatggctacacatcatgtccactggtgaccggc

SEQ ID NO: 449336 - DNA, 76 bp, Homo sapiens
attgtccgcaggcctaagctaaatcgagagaactttccaggtgccgtgagcgatgtggagatgcaggaacactatg

SEQ ID NO: 449337 - DNA, 100 bp, Homo sapiens
gaggaagagattgcagtgggggctgccagtgctaccctgagaaaggtggacgtgttggtgacatcgtgaaagtcacaaggatgaatataaatggccagtg

SEQ ID NO: 449338 - DNA, 95 bp, Homo sapiens
gcggatggccccaggtgtaagcgcagaaagcaggcgaacccgcggcgcaataacgcacatatctgaatgagaagtcgctccaactgacggagaaa

SEQ ID NO: 449339 - DNA, 96 bp, Homo sapiens
ggctggaagcgaggaggctccacacggccgttgcagctaccgcagccagtgatcagggccaaagcggtcagtgagaaggaagtggactctggaaac

SEQ ID NO: 449340 - DNA, 80 bp, Homo sapiens
ttatactgtactgcccatgaaaaaggatgttgaccggacagctgctggcagaggactggccatttggagctgagatgtgt

SEQ ID NO: 449341 - DNA, 100 bp, Homo sapiens
cttctagtgagcgacaaacagcagacgcccctgctcggctgactacaggtcttgatgcagaactttattatgtgagaaatgaccttattagtcactacgc

SEQ ID NO: 449342 - DNA, 51 bp, Homo sapiens
agatggtgaagcagatcgagagcaaggtggcagtgctccttttggactttt

SEQ ID NO: 449343 - DNA, 100 bp, Homo sapiens
ggtgatcctgcaccgtctctctcagttgctgcctccacctcgagccagcatctttggggcctacagcatggatgtgattactggcacatcatttggagtg

SEQ ID NO: 449344 - DNA, 51 bp, Homo sapiens
gctggagcagttccagaagactggccttcagtggtggctattatagaggtg

SEQ ID NO: 449345 - DNA, 74 bp, Homo sapiens
tcagttcttaggctcagcgtcagttacctgagagccaagagcttctttgatggatcttacacatttgttccatg

SEQ ID NO: 449346 - DNA, 95 bp, Homo sapiens
ggcagactggtagcaaagcccccacgcccagccaggagcaccgccgaggactccagcacaccgagggattatatctgtccaagatgcgagtctgg

SEQ ID NO: 449347 - DNA, 98 bp, Homo sapiens
gacaacttctcctcccctcacgctcgcagaaaagtgctggctggagtcgtcatgacaacagtttgcagaaaaaacttcagcatgtgccaggaacacaa

SEQ ID NO: 449348 - DNA, 75 bp, Homo sapiens
ggcaaaccagattctgtgggactccggaataccttggcaagcagctccagtccgagcagccccagaccgctgccg

SEQ ID NO: 449349 - DNA, 82 bp, Homo sapiens
ctgccgtccttctccactttcgccagcccgtgccgcgagcgcggcctgcaggagtaaaatgtttattggaggcttgagctgg

SEQ ID NO: 449350 - DNA, 74 bp, Homo sapiens
gtcagaccagaccgtccgggtgaaggaaggatctgagtctctccctgcggagacagccctgaagaactcctgta

SEQ ID NO: 449351 - DNA, 100 bp, Homo sapiens
ttcaagcttaggaccacccaccatgcctatccaggtgtggatgtggaagcagccaagcgggcagaagaggaattgctccttcatgacacgaggtgctggc

SEQ ID NO: 449352 - DNA, 74 bp, Homo sapiens
gcgctactctctctttctggcctggaggctatccagcgctccataaaaatacagactcaccagttcctgctttg

SEQ ID NO: 449353 - DNA, 98 bp, Homo sapiens
taaatccatcagaatgacaccttctcaggttgcctttgaaataagaggaactcttttaccaggttttgaggttttgctgaagatattcctgaagaatc

SEQ ID NO: 449354 - DNA, 75 bp, Homo sapiens
attactggcagcatgtatatctttttcgcaatgtatctgctgagcaaaaagatgaaaacaaagaagcaaagcctc

SEQ ID NO: 449355 - DNA, 115 bp, Homo sapiens
cgccgccgcccagagactgctgagcccgtccgtccgccgccaccacccactccggacacaggtttggtgcacctcgatttggaggaagtagggcagggcccttatctggaaagaa

SEQ ID NO: 449356 - DNA, 90 bp, Homo sapiens
tggagatgctgcctggtggggatcagacagagattggagagaaggccagcaggtggccatcaagaagatccctaatgctttcgatgtggt

SEQ ID NO: 449357 - DNA, 100 bp, Homo sapiens
agaaaacacgaggtgcagaagatgaccttaacacagtagcagctggaaccatgacaggcatgttgtataaatgtacagttccagatgttgaagtgaaagg

SEQ ID NO: 449358 - DNA, 75 bp, Homo sapiens
gaacgcttagaaagagatcacatctttcgacttgaaaaacccgtgatgctgatgagcgagagaagtggatccatg

SEQ ID NO: 449359 - DNA, 51 bp, Homo sapiens
aatctctgttccaaatgctttgctggtcaaaatgcagatcttcgtgaaaac

SEQ ID NO: 449360 - DNA, 100 bp, Homo sapiens
tggaatgaaagcactagtcactctttccagtggagacatgcgtagggctctgaacattttgcagagtctgatccaggtgaacactcattctggaaactga

SEQ ID NO: 449361 - DNA, 102 bp, Homo sapiens
tggacactggagtagaagtctctgatattggaagccaaggtggaagatggatgcctgaagtgtagactgctgctagctgaataccatctgggagcataaagg

SEQ ID NO: 449362 - DNA, 131 bp, Homo sapiens
cgacagtgactaccatgacgaaaacatgtactacagccagtcttctatgtttccacatcggtcagaaaaagatgaaacaaatggaagactgctgcgaccctgcccatctctttgctatgactaaaatgaat

SEQ ID NO: 449363 - DNA, 83 bp, Homo sapiens
tgcacatccccacatcaatgcactgccaatgctgaacactttccaggcagttttggcatctgatgggtctgatagctacgccc

SEQ ID NO: 449364 - DNA, 82 bp, Homo sapiens
gccaaagaccccacggacccgttcaggccatgcggaccctcagttggaagcacaccctgggcctggtgaccatggacgtgga

SEQ ID NO: 449365 - DNA, 111 bp, Homo sapiens
gaccagcaagaggatggggccctggatgagggggaagggcctcaaagccagaagagacgagttgtactgctgtcacaggaaatggacgctggattacaagcatggcagctc

SEQ ID NO: 449366 - DNA, 100 bp, Homo sapiens
ccatcaggaccccagatgtctgacagccctgtgtgacaccaagataagtaacgtctgtctgctatcagctatgccgctgcccgttgcgctgcagacccgc

SEQ ID NO: 449367 - DNA, 75 bp, Homo sapiens
tgcctgctttgattccctaaaggtacactgcatcagcacagaatttactccacggaagcacggaggtgaaaaggg

SEQ ID NO: 449368 - DNA, 100 bp, Homo sapiens
aaatgcagcatctgcgatgtgaggaaaggcacctccaccaggactttgtgttttatgccccacgtctgagaatcaacaagcggatcctgcagctctgcat

SEQ ID NO: 449369 - DNA, 82 bp, Homo sapiens
caaaggggaggttacgcagcaaaccatccagaagcaaattgtggctactaatttgccccctgaagatcaagatggctctggg

SEQ ID NO: 449370 - DNA, 100 bp, Homo sapiens
gctcagccaaagtaaatccatgatcctcaccgatgtcgggaaggtcactgaacctgtatctctgcattagccagattggacatatgtaaagggacatcag

SEQ ID NO: 449371 - DNA, 75 bp, Homo sapiens
actccaatgggcctttccagcccgtggtccttctccatattcgaggtaatacctagcaaatacagaaagagagat

SEQ ID NO: 449372 - DNA, 75 bp, Homo sapiens
gcgatgtcaactgctcggttatggggtcgcggagcctcgccggccgccatgtggagctgcagctggttcaacggc

SEQ ID NO: 449373 - DNA, 82 bp, Homo sapiens
gaccacggtcaccgtctcctcaggtcacgcatgaagggagcaccgtggagaagacagtggcccctacagaatgttcataggt

SEQ ID NO: 449374 - DNA, 90 bp, Homo sapiens
cggctgtgcgatgggtcgtgacactgggcctgagctttgtctacatgattcgagtttacctgctgcagatccagcacacggaagacatgg

SEQ ID NO: 449375 - DNA, 90 bp, Homo sapiens
ttcctgatgacttcaagaatgtttttgaccagaaaaccgacaaccttcccagaaagtccaagctcgtggcatttggctttatgtcccgag

SEQ ID NO: 449376 - DNA, 97 bp, Homo sapiens
gtctgtggcaaagagccccgaagctaagagcccccttcagtcgcagcctcactctaggatcttccctgacctcagcagcaacgacatgctcctcttc

SEQ ID NO: 449377 - DNA, 100 bp, Homo sapiens
tggaaaaactccaacagcttcatatggacagatggacttcaaatgctgtttgtattccagagactagagcctttgcactggcgatgccatctgctgcctg

SEQ ID NO: 449378 - DNA, 95 bp, Homo sapiens
caggtggacggcgagcttatccgtggtctggagcaggatgtcaagcaaaccgtggggaactgtgggtcagagactctccagcatccttggaagtg

SEQ ID NO: 449379 - DNA, 90 bp, Homo sapiens
atagaacactaaagtgttacatgacagatgtatgagggagaagatgtcaaccggacactagaaggtggaaggaaacctcttcattatgca

SEQ ID NO: 449380 - DNA, 100 bp, Homo sapiens
aaaagtggtggagattgagaaatgcaagagtgacattaagaagatgagggaggagctggcggccagaagcagcagtgagaaagatcagtctaaagaaaag

SEQ ID NO: 449381 - DNA, 100 bp, Homo sapiens
cctgaatgtagattgtgcagtgctcgactgtgaggatggagtggctgcaaacaaaaagggaggaatgatcaattggaatcgtctttttcctcctttacgt

SEQ ID NO: 449382 - DNA, 100 bp, Homo sapiens
ttgtccctggaggcctctgaggaagtggagcttgctgtgtgagccgctcccatccctggcagagtctagagccttggcccagctgtccctgagccgactc

SEQ ID NO: 449383 - DNA, 98 bp, Homo sapiens
acaaggtgaagactgtctgcagcaagattgtgaaaactgctgagagagacttgcaatccagtcacataagtataataaagaaatattggtcctcatgg

SEQ ID NO: 449384 - DNA, 96 bp, Homo sapiens
ttagcagatgttctggaaggagacagctcaggtttgatgccttctatggggagaggagtactcagcaggacatctatgcaggttcagtgcagccca

SEQ ID NO: 449385 - DNA, 100 bp, Homo sapiens
tacgatcctacagtggagaatagcgcagatcaggcctctataaccgccaggaatcacattcagctggtgaaactgcaggtggaagaggtgcaccagctct

SEQ ID NO: 449386 - DNA, 74 bp, Homo sapiens
ggaccttccggagcttctcagaagacagagggttttcttttgagctgtttgcagacaaggtcccaaagacagca

SEQ ID NO: 449387 - DNA, 83 bp, Homo sapiens
aacacggctgtgctcagggctcgcgggtgaccgaaaggatcatgaactagtgacctggaaagatcatggaagggaagtggttg

SEQ ID NO: 449388 - DNA, 100 bp, Homo sapiens
agctgccgaagtcagttccttgtggagccggagctgggcgcggattcgccgaggcaccgaggcactcagaggagatatttggagttcttacaacatggca

SEQ ID NO: 449389 - DNA, 122 bp, Homo sapiens
ggaagaccgcgcgcagggcctgcagcgggagctggacggcgagcgcgagcggcgcgagaaaggggatatgagactttctactcggaatatcctgagtgttgcgtggatgtaaaacccatttc

SEQ ID NO: 449390 - DNA, 82 bp, Homo sapiens
ggcgactggccggcggggctgaccacttaccgcagcatccaagtcggccctggtgacagagctgaatgaacctctctccaat

SEQ ID NO: 449391 - DNA, 83 bp, Homo sapiens
cagagctccacagaaaagagtccgatcaagagctcagagagtggcaacagtgtgaaaagactgaaaccggaccctgagccaga

SEQ ID NO: 449392 - DNA, 82 bp, Homo sapiens
agaaaacggacggaagaaaaggtctggccgatggcttaagcaaaatcagactaaactatagcgatgaatcacctgaagctgg

SEQ ID NO: 449393 - DNA, 90 bp, Homo sapiens
tcgtacatccttgtgggagagaacctcatcaatttccacatttcttccaagttctcttgccctgagacgatgtccctaaaccaatgactg

SEQ ID NO: 449394 - DNA, 98 bp, Homo sapiens
aggagttctctgctcagcacagccaaggaacagaattagaagaaaaggaaccctggcctgaggttttactgcaatcacagcaaccaaccccatttggc

SEQ ID NO: 449395 - DNA, 83 bp, Homo sapiens
ctgacagctctgcggctcgggccctgaggaactgtggctgcaccatctgtcttcatcttcccgccatctgatgagcagttgaa

SEQ ID NO: 449396 - DNA, 88 bp, Homo sapiens
gctcgacgtgttgcagcacatcctcatccgagcctttgatttgagtgggctttaaaggagatagatgaagttggggacctattgcagc

SEQ ID NO: 449397 - DNA, 82 bp, Homo sapiens
agctcaccgagacggcgatccgggcgctcgagacttaccagagccacaagagacacctatggctgccgatgaaggctcagca

SEQ ID NO: 449398 - DNA, 50 bp, Homo sapiens
gctgaagccgctgcccctgctacagaccattactgggacttccaccccca

SEQ ID NO: 449399 - DNA, 101 bp, Homo sapiens
cagctatatgggaacaacatacagtgacgcttcacaggctggagaatgctggaggagaccttaaggatggccaccaccactatgaaggagctgttgtcatt

SEQ ID NO: 449400 - DNA, 135 bp, Homo sapiens
ctggcggtggacgcaggcagcatggaccacggttgctgggcggatggggagcgtctatggtcagagaccgtccaggctggacttgaactccttcctcggctgaagtgatcctcctgcctcagcgtcctgaatagg

SEQ ID NO: 449401 - DNA, 98 bp, Homo sapiens
agcagtcggcatcatcgagataaagaaagacagtctccatttcatggcaaccatgcagctattaaccagtgtcaggttgggggccgtcccgctcctaa

SEQ ID NO: 449402 - DNA, 74 bp, Homo sapiens
cagcataaaggatttccctcttgaggatccttatcttgacaaattttttgctctggtcaatgctctggatgaac

SEQ ID NO: 449403 - DNA, 48 bp, Homo sapiens
ccgagaccgcgcagccggcggcagatataatttctacagtagaattta

SEQ ID NO: 449404 - DNA, 80 bp, Homo sapiens
tggcaagagcgatgtctactacttcagaaatgcactcggtgatggaaagagagccactattctgaagaacacttggccaa

SEQ ID NO: 449405 - DNA, 100 bp, Homo sapiens
cggctactgccgcttcagttctcccggtgtggccacgagtcgggttaaaaagatcaagtggcatgagcagccttttggggaaaattggtgccaagaagca

SEQ ID NO: 449406 - DNA, 49 bp, Homo sapiens
ccagaatctcagcagctgggaggagaaatacgaatgtgctttaaagcga

SEQ ID NO: 449407 - DNA, 100 bp, Homo sapiens
ccagatcttcccccacgtcgtacatggcttcctggacaccaaccctgccatccgggagcagacggtcaagatgagccttcccagcgtccccgtcttccta

SEQ ID NO: 449408 - DNA, 83 bp, Homo sapiens
cgaagttggaagtgtctcttagcagcgcgcggagaagaacggggagccaggtaaaccaggtgaaatgtcaactacctgaaagt

SEQ ID NO: 449409 - DNA, 99 bp, Homo sapiens
gtggacacctgtgtcagcatgtgggacctggttctctccatcgccttgtctgtggggtgcactgctgctggagccagttctgcttctcggcaaggagcg

SEQ ID NO: 449410 - DNA, 75 bp, Homo sapiens
gtgtggacccgtaaaataaaatgggtcaaaatgcagatcttcgtgaaaacccttaccggcaagaccatcaccctt

SEQ ID NO: 449411 - DNA, 100 bp, Homo sapiens
cagttcgctagtcaaacctgtgagttcaacatgatagagcagagtggaccaccccatgaacctcggccaaaagtgtgatccaagctgtcccaatgggagc

SEQ ID NO: 449412 - DNA, 75 bp, Homo sapiens
ctcggggacattattgcgcgtggaacggctgcttttggaagttcttggccaggctgactgagagatttgtgctgg

SEQ ID NO: 449413 - DNA, 101 bp, Homo sapiens
tcggtcctgctgttgcggccgctgccccagggctgcggggacgagtgatcagcagctggactgtgccttggacctaatgaggcgcctgcctccccagcaaa

SEQ ID NO: 449414 - DNA, 97 bp, Homo sapiens
cgacaggccttggtcaaaaagcatgcccagacctttttggccctctgtgctacagggtcctgcagttctgagcttgggttccctttgcctggacacc

SEQ ID NO: 449415 - DNA, 100 bp, Homo sapiens
catgtctggctacctcgtggacaagtttgcagatcgggagcgcaaggtcgccctcaaggccatgatcaaaacgctgccaagctcctctatgaatctcggg

SEQ ID NO: 449416 - DNA, 75 bp, Homo sapiens
ccgggaccggagtcagaaccctccgcagagtaaaggtgccgacgccaccgccgagcccatgatcctggaacagta

SEQ ID NO: 449417 - DNA, 50 bp, Homo sapiens
gtcatgtacccggtggactcggtgaagctgccttcctatttcaaggaaag

SEQ ID NO: 449418 - DNA, 73 bp, Homo sapiens
gtacttcgccacttactttaatgagaagatctccattcctgaggaggaggtggacccccaaaagtacaagggc

SEQ ID NO: 449419 - DNA, 108 bp, Homo sapiens
gcaagctgaagacatcaagaagatcttcgagttcaaagagaccctcggaacaaaccaaggtgtatgttggtaacctgggaactggcgctggcaaaggagagttagaaa

SEQ ID NO: 449420 - DNA, 100 bp, Homo sapiens
aactcgcccctgcggcacgcccggcccggctgcgcccccactcagcgatggaggtgctggagaatctggtaaaagcaccattgtgaagcagatgaggatc

SEQ ID NO: 449421 - DNA, 83 bp, Homo sapiens
gcctccatggccccccaagactgcctggcccagctgcgcctggcgcaggaggccgcccagggtacatatgagcctgggaagcg

SEQ ID NO: 449422 - DNA, 100 bp, Homo sapiens
acagtgatggggaggcaccggcagctgtgacctctgcccagctgctggagccagttctgcttctcggcaaggagcgatttgctggtgtagacatccgtgt

SEQ ID NO: 449423 - DNA, 83 bp, Homo sapiens
agaagcgccgcgcacggacttcggcagagatgagcgggatcgtgtgcagaagaaaaccttcaccaagtgggtcaacaagcacc

SEQ ID NO: 449424 - DNA, 75 bp, Homo sapiens
tcggaagcccgttcggcctggaggagccgcagtgggtcccggacaaggaggctgaagccgacgtagcttctctga

SEQ ID NO: 449425 - DNA, 50 bp, Homo sapiens
gctcggagatgatccagcgcaaagcttttatcacaaattccttaatgaat

SEQ ID NO: 449426 - DNA, 99 bp, Homo sapiens
agaagaatgtggctaccagcgaagctgggaagttatcaattccaaaccagatgaaagacccaggctcagccactgtattgcagaatcatggatgaattt

SEQ ID NO: 449427 - DNA, 100 bp, Homo sapiens
catggagctcactctcctgtccctggacctcatgcaccatattcacatgttggaagaaggtcgtggtcaaggtttcactgacggggtgtaccaagggaaa

SEQ ID NO: 449428 - DNA, 96 bp, Homo sapiens
ccggttcgtcgcctccttgcccgtgaccgtcgctagaactcagttgtgcgttgcggccagtcgccactgctcccgagcgggaagaagttccgcagc

SEQ ID NO: 449429 - DNA, 75 bp, Homo sapiens
ttctcaactgccattctggattccagaagatttaactacgtggtccggatgagacaccaattattgcggtgatgg

SEQ ID NO: 449430 - DNA, 100 bp, Homo sapiens
gcgacatccagggcctgccccggcacgcagccttgcgcaagctcaacgacctggtgaagagggcccggctggtgcgagcacgtgtggttctcaaatatag

SEQ ID NO: 449431 - DNA, 101 bp, Homo sapiens
ggcatagaagacaggagctccaaggtgctggatggttcccccattgaagtcaccctagcaaaaccagtggacaaggacagttatgttaggtatacccgagg

SEQ ID NO: 449432 - DNA, 95 bp, Homo sapiens
accgccactaccaccgtctgagtctgcagtcccgagacaatgcagatcttcgtgaagactctgactggtaagaccatcaccctcgaggttgagcc

SEQ ID NO: 449433 - DNA, 87 bp, Homo sapiens
caccattccctacctgcacgtgagggaagcctttggccagaagatcggccacttccaggtgatggcatcagctgagaagggaaggaa

SEQ ID NO: 449434 - DNA, 86 bp, Homo sapiens
gaagaaccaggtggccaggttcaacgaccttcgcttcgtgggccgcagtgggcgaggtcatcatcagatttgaaatatttaaagtg

SEQ ID NO: 449435 - DNA, 50 bp, Homo sapiens
attgcttgcaacaattgttatgcttaatcaggaaacccaggcccaacggc

SEQ ID NO: 449436 - DNA, 96 bp, Homo sapiens
ccccagtgagggtgtacaaatacccctttgaattaattatggctgaacgtcaaggtcgtgggaaataaaaggcagttctacacagactgcagcaac

SEQ ID NO: 449437 - DNA, 51 bp, Homo sapiens
ttagctgggatgaaagacagcaagctcagatttcttttatccaagatattg

SEQ ID NO: 449438 - DNA, 75 bp, Homo sapiens
accatgaggtcaaaaaggaaatcaccctgcttgagcaaaggaagtgatggcttggacaacagtgtagcttccccc

SEQ ID NO: 449439 - DNA, 75 bp, Homo sapiens
gtcatgctctttgtagcgtggtgcttctgttgctcacagggcatttttggtcgaagagagctgaagtaatgagaa

SEQ ID NO: 449440 - DNA, 90 bp, Homo sapiens
ctctcggagccggcgcgaatccggcccccgcagcgggacccggtgtttgccagggccagggctgcagctccatgcattatcttctttgat

SEQ ID NO: 449441 - DNA, 100 bp, Homo sapiens
ccctcatgttaagatagaagggaaggacactgatgactggctgtgcgtggattttgattccgtcctatttcagtgttccgggaagccaatgaagatgaga

SEQ ID NO: 449442 - DNA, 51 bp, Homo sapiens
ggccatggccgccgccgatgccgagtttgcctgagaatacagatcaaccca

SEQ ID NO: 449443 - DNA, 51 bp, Homo sapiens
cgcaggttcgggaccatgagctggcgctgcgtacacctgcttggaggctgc

SEQ ID NO: 449444 - DNA, 100 bp, Homo sapiens
cgccacaagctcattcactgtgtaggtgtggacactgccagcggctgcagccgacttggaatgacctgggagacaaatacaacagcatggaagatgccaa

SEQ ID NO: 449445 - DNA, 85 bp, Homo sapiens
tttctacgacccggagcacccgacccctgagtatctcattcagttgctaaacttatattagttaatttccactggcaagtttcag

SEQ ID NO: 449446 - DNA, 75 bp, Homo sapiens
ctgcagcagacagctccctgggcaccaggcagctaacagagcccccctccatgcgcctgaaggcccgacccagca

SEQ ID NO: 449447 - DNA, 98 bp, Homo sapiens
gtccgagtggtggccagctcagacaagacggtggaggtcaagcccgggatgaagtcacgcaaactgtcatcaggagcttaaataggacagattttcac

SEQ ID NO: 449448 - DNA, 97 bp, Homo sapiens
caagcagtggcgaagggaatcgcaaggctcttccctgaccattttctactgtccctgcgcgaggtggaagcagggaaaggcctggagatgaggaagc

SEQ ID NO: 449449 - DNA, 100 bp, Homo sapiens
ccagaggactttcttccagcttctgctgtccttctttgtggagagcaagggctggtgaattaccagatctctgtcaagggcagtaacctgttcaagttgg

SEQ ID NO: 449450 - DNA, 98 bp, Homo sapiens
tgatgatggaaatgaagtataataccaagaaagccccacttggaagtggtaaggctatgtcgcctgtgccaaggtgtgctgggctcggtacggcaggc

SEQ ID NO: 449451 - DNA, 59 bp, Homo sapiens
cctacttctataaagtcatccaggttaatccctatatcctgaagaagaacatgatcctc

SEQ ID NO: 449452 - DNA, 50 bp, Homo sapiens
aaaaccatccatcaattactaccaagttcttccaggttggaaagagaata

SEQ ID NO: 449453 - DNA, 100 bp, Homo sapiens
gttggtctcgaattcctgacctcaagtgatccacctgcctcggcctcccaaagtgctgggattctggtggccacagatgtctttaattccaaaaacctgg

SEQ ID NO: 449454 - DNA, 100 bp, Homo sapiens
agcgtttcacctaccttcccgccaacgattgcccaaggactccagatactccaaataatgaccctcgttgttctactagcaacaatagattgaaggcctt

SEQ ID NO: 449455 - DNA, 82 bp, Homo sapiens
gtgggaacaagactacctcctcctttaccccagaacctcctttacacagtatcagaacgtttggcagttctctaccagtgga

SEQ ID NO: 449456 - DNA, 50 bp, Homo sapiens
gcgtgtcctccgtgggagcccgagatgaggtttatataactttccaagac

SEQ ID NO: 449457 - DNA, 118 bp, Homo sapiens
cgcatcgccacagctgaaggctgcgagggactaagagcagaactcaccccacacagaccgcgtttctctccagtgtcgacctacacactcactgctcttaccagatgatgttgccaga

SEQ ID NO: 449458 - DNA, 82 bp, Homo sapiens
ctgcagcctgcctccactgtgaaaagactttgcagcaggtccaggttatgggatcagccaatcaagtcgactgtcgtcttct

SEQ ID NO: 449459 - DNA, 100 bp, Homo sapiens
cgtcggggagacgctgtggtgtgactggggcaggaccatcaggcatttccggagagttcttttgaagtcacttcagaaggatctacatgaggaaatgaac

SEQ ID NO: 449460 - DNA, 100 bp, Homo sapiens
caagagtagctggtttggcttgagagaagccaaggacccgactcagaaacccagaatgagctgaaagccagtggtggcgaaatcaaaattcataaaatgg

SEQ ID NO: 449461 - DNA, 98 bp, Homo sapiens
tcaaacgcagaaggactgcctcactgagcaaccaagagattataccttaaccatgtattttcaacaatattggagagataaaaggctcgcctattctg

SEQ ID NO: 449462 - DNA, 101 bp, Homo sapiens
aatgcatgctggtccgtgtagttctcagcctgacaccgtcgttcccagaacccagcgcgctctggggggccctcagcctcttggccttgaacgggctgttc

SEQ ID NO: 449463 - DNA, 100 bp, Homo sapiens
cgtaaacatctgggtgtatatcaaacggcaagatgtccagtaatgtcccggcggatatggcgaggattaaatccaccacacagggtgaaatctatctcca

SEQ ID NO: 449464 - DNA, 100 bp, Homo sapiens
gataagtcgaaggggaaggcgcctgaagaggacgaagctccaattgattggtaacagaagatgaagacaacagcataactaaattattttaaaaactaaa

SEQ ID NO: 449465 - DNA, 90 bp, Homo sapiens
cggcgtccccggcgcgaagaggctggactcggattcgttgcctgagacctctcaagctggatccaaggataaaaagatggaccaaccacc

SEQ ID NO: 449466 - DNA, 100 bp, Homo sapiens
tgatgatcggtttcccagacggggtgatgactcaagacctggtccttggagaccattagtcaagccaggagtacgcaggggaagggctgaggaccctggt

SEQ ID NO: 449467 - DNA, 82 bp, Homo sapiens
gtggactccttcggcagtccacccaccgccgccgcctcccagattctggtacaggtcaaagaggtcctctccaagctgagca

SEQ ID NO: 449468 - DNA, 75 bp, Homo sapiens
caaaattgagaccactcatccaccgttgcctccagcccacccacctccaggagatccaaagcaggaccttgctta

SEQ ID NO: 449469 - DNA, 100 bp, Homo sapiens
actgggtttgtcgcaaatgtggatttggggtctgccttgactgttaccggctcaggaaaagccggccacgcagtgaatatatcactgatgtccattcgaa

SEQ ID NO: 449470 - DNA, 83 bp, Homo sapiens
gctcggagaggtgctcggattctcgtagctgtgccggacaatgcagatcttcgtgaagactctgactggtaagaccatcaccc

SEQ ID NO: 449471 - DNA, 75 bp, Homo sapiens
ggcccctggagatgattgagccgcgcacgctacagtacaaggaatactcccccagttgcaagaggcgcaggaccg

SEQ ID NO: 449472 - DNA, 100 bp, Homo sapiens
tcatgtgaactgcacgataaaggaactcaggcgcctcttcttagttgatgatttagttgattctctgaaggttcactattatgaagatggcaatgttcag

SEQ ID NO: 449473 - DNA, 82 bp, Homo sapiens
tgtaatatatgacattgccagtcaagcacacttgcacctaaagcatatgtttgtcccacacaaagaaaatgggcacatgctg

SEQ ID NO: 449474 - DNA, 98 bp, Homo sapiens
cccggcgcaacatggctgcggccgccgcctccgcctcccaggatgagctgactggaaaggcagctcatcatgcagagtgaaatgagggaaagacaaat

SEQ ID NO: 449475 - DNA, 84 bp, Homo sapiens
gtcagacgcagccgtagacaccagctccgaaatcaccaccaagatataacacgtgggaaccggaggagaacatcctggacccca

SEQ ID NO: 449476 - DNA, 73 bp, Homo sapiens
gttcagggagtcccagtctgtggaaaatctagtcatctctctattgcaggtattagtgctttggttgaaatac

SEQ ID NO: 449477 - DNA, 100 bp, Homo sapiens
gatcccaccgcacgttcagaagtcggaaaacatcctgggatggcacgggtccaagtcacattccacagagcagctgaaaaatgggacacttggctctttg

SEQ ID NO: 449478 - DNA, 75 bp, Homo sapiens
ccttgatccgggagtctttccactgggtgtcttctctttagggatggtgaggttggaaaaaggctcctgtaaccc

SEQ ID NO: 449479 - DNA, 82 bp, Homo sapiens
ggaggatggcctagagggctgaactgatgcttgaaggcttgaagtagaaaatgccatgatgagaaaaactattaaaaaacag

SEQ ID NO: 449480 - DNA, 96 bp, Homo sapiens
ggggatggctctgaaacagaaaccacctctgccatcctcgcctcagtcaaagaacaggtaggtagccatccaagcttcctgaaggaggttcgagat

SEQ ID NO: 449481 - DNA, 98 bp, Homo sapiens
cgcgctgaggagccctcgttttcgagatcaggcctgaccgggataagctccagttggttgaatctggcgatgtggaacccatggatatggagggctga

SEQ ID NO: 449482 - DNA, 79 bp, Homo sapiens
tgtcttctgggattatcagaacagcttctgaataattactcatctgaggagattcatatgggacattgtgtaaatctga

SEQ ID NO: 449483 - DNA, 100 bp, Homo sapiens
acagagctattccagcaccagcagagcctcctctattggcccaggaagcccacccagccccgccacgcagagcccagaaggaaagaaagcctcatgcctg

SEQ ID NO: 449484 - DNA, 50 bp, Homo sapiens
attttttttaaaagccacaagagctaaagtctccagtgaatattgaattg

SEQ ID NO: 449485 - DNA, 76 bp, Homo sapiens
ggagacattgcagaaggctctcaaaggtgtaaaatactagacagacatctggcaatattgtccaagaaacacctcg

SEQ ID NO: 449486 - DNA, 100 bp, Homo sapiens
catgatacagttgataaaattgttggtgtctcgaaataatgatgtgtggcagaaccatgaagcagttcctggaagagcagaagacacaaaactctatgct

SEQ ID NO: 449487 - DNA, 95 bp, Homo sapiens
tacacctacccattggtctaaacttgatccaaagacaatgaaggagttaggacctggaaatgtacagaaagaagtctcatcttcctttgaccacg

SEQ ID NO: 449488 - DNA, 75 bp, Homo sapiens
taaaagctcacctgaggactcacactgcccacaagagtgaacagatactgaaagcggccagtctccaggttccca

SEQ ID NO: 449489 - DNA, 76 bp, Homo sapiens
aaggatttcaacatgcctctgacaatctctagtgaaactctttatacagtgaaacaggaggaaagaaaaatgcagc

SEQ ID NO: 449490 - DNA, 100 bp, Homo sapiens
gtggagctgaagctaagaaattgaatgagtccctggaacgccagatgcgtgaaatggaagagaactttgccgttgaagctgctaactaccaagacactat

SEQ ID NO: 449491 - DNA, 134 bp, Homo sapiens
cctgagaaaaggatagcttcagaaatcagaaaaacatttgggaggtgtctagcccagtggaccttctgaaggtcacatgtgccaatttaacgaacggtggaaagtcagaacttctgaaatcaggaagcagcaaa

SEQ ID NO: 449492 - DNA, 100 bp, Homo sapiens
aaggcggagagtgacggagtcggcgagcccccgcggcgacagaaagaatcttcaagagggagacatagggaaaaggaagacataaaaatcactaaggaaa

SEQ ID NO: 449493 - DNA, 83 bp, Homo sapiens
aaggaagtaaaatggcggacctggcgaacgaaggcataatcaccagcaacacccgggacaataatacgggggccacctacccc

SEQ ID NO: 449494 - DNA, 75 bp, Homo sapiens
caggacatcttcatttacagagcaacttgatgaaggtacacccaatagagagatctggccagtgggagcccctca

SEQ ID NO: 449495 - DNA, 100 bp, Homo sapiens
atggaagatatgctgaaagactttctccttggagaacacttattattggttggcaaccagattcactttataggaacagcttcagcttcagtgatgaaaa

SEQ ID NO: 449496 - DNA, 50 bp, Homo sapiens
gggagaactcactgaggatgaggtcatattggaattgctgttcctgatgt

SEQ ID NO: 449497 - DNA, 100 bp, Homo sapiens
tttaatttttctaaagagtcttgttatttcttctttgagaaaaacctgaaagatgtctcagtttttttaacatgtggggatttggaagagtcagcaaaca

SEQ ID NO: 449498 - DNA, 75 bp, Homo sapiens
tccaggaatcctcccaccacagtctctcaaatacttgggactacaggtcatttcattagagaaattgaaggattt

SEQ ID NO: 449499 - DNA, 82 bp, Homo sapiens
gctgggtcagtccgccgctcaccccgcggccgcaccttcccgccttctcagccactcatctctgcccagctgctgccctccc

SEQ ID NO: 449500 - DNA, 98 bp, Homo sapiens
ccgtcgcagccgcgcagccgccgcagagtccgcggcgccaccgctcgccctccaggaggcaggtggaagtcatcataaagtttctgtttcacccgtcg

SEQ ID NO: 449501 - DNA, 100 bp, Homo sapiens
gccctgagaaaagacaaaataatctttcctaatgatgaaaaacatatctgaagagatggattaagaatgctttggattaaggattgtggagcacatttca

SEQ ID NO: 449502 - DNA, 94 bp, Homo sapiens
gtccagccggatccagcatctctccaccatcgactacgtggaggacggtgagaagccctaccactgcaactgggacggctgcggctggaagttt

SEQ ID NO: 449503 - DNA, 148 bp, Homo sapiens
ggctacagcttcggcggcgaaggtcagcgccgacggcagccggcacctgacggcgtgaccgacccgagccggtactccaaagattcaggtttactcacgtcatccagcagagaatggaaagtcaaatttcctgaattgctatgtgtct

SEQ ID NO: 449504 - DNA, 100 bp, Homo sapiens
cagcacatcttacaacaggtgctccagctgaaggtgcgagaagaagtcagaaatctacagttactcacacaagtcgaggtcctcatgggcggagtaatgg

SEQ ID NO: 449505 - DNA, 150 bp, Homo sapiens
gcgaaccgaacagaataacccgcccccagcgggatgtgaaggactccgggtgaggccggccacgccccgcacggtgaccttggagaaggtgctgggaattacagtgtctggaggcagaggacttgcctgtgacccccgatcaggtttagt

SEQ ID NO: 449506 - DNA, 90 bp, Homo sapiens
ctaatattttattgacagaccatggcgatgtaaaattagatatctgttccaaaaacccctgccacaacggtggtttatgcgaggagattt

SEQ ID NO: 449507 - DNA, 100 bp, Homo sapiens
tgaatgactccaacgaattaggtggtctgactaccagtggctctgcagagccatcccaatggaaattgcttcgacaggaactgttgaagtacctggaata

SEQ ID NO: 449508 - DNA, 96 bp, Homo sapiens
ccaaatgttgacctgacgaaattccacaaaacctcttctggaaacaggtgacgcagacttacgatgcaggtgcttgtatctacttctattttgcct

SEQ ID NO: 449509 - DNA, 75 bp, Homo sapiens
gtgctctccgaccaggaagaggacaggtatttctgggaaaagccagcttctgtttgcactggtcttcacaactcg

SEQ ID NO: 449510 - DNA, 73 bp, Homo sapiens
cggcacccagacaggtggcgacggcagaggagtggacctggacatctcatcagcgtcacttcaaggttcactg

SEQ ID NO: 449511 - DNA, 80 bp, Homo sapiens
gggctgagggagctcgggccaatcagagggacggccccagaatggcatgagagcatgctagagaagtcagcactggctac

SEQ ID NO: 449512 - DNA, 51 bp, Homo sapiens
agcatgaagagcccaacaattcaaactggaaactaaatatattttgccaac

SEQ ID NO: 449513 - DNA, 100 bp, Homo sapiens
cagactgctgcttccccggatgagcagaaggtgtttgccctctgggagtctggagacatgagtgatcaggaaaatgtttcaacgtgcgcaagagttgcgg

SEQ ID NO: 449514 - DNA, 90 bp, Homo sapiens
agatgcactgttggcttgcgagacaaatatgatttctgagagagcagacaccatcttatttctgttgaattgtatttagtaactcaaaag

SEQ ID NO: 449515 - DNA, 100 bp, Homo sapiens
ctcacttgcatgtatttggaacaaaaaaaggagatgcctggcagccccgctctctgcagtgatgggctttggcctctacctaatggatggaaatgtcagt

SEQ ID NO: 449516 - DNA, 76 bp, Homo sapiens
ccacgatgatgattctagcaggttcctgagtcctcgagcgcgggaagaaaggtcatcagactagtgctgagtcttg

SEQ ID NO: 449517 - DNA, 100 bp, Homo sapiens
aggagcagttgtctgatgaagagaagcttcagtatcagacacagcacagcagccatctgaagagcaaagcaagtctcttgaaaaaccgaaacaaaaaaag

SEQ ID NO: 449518 - DNA, 100 bp, Homo sapiens
gatggagctaccagccaaggaggccgacaagaacaggtccaagggcatctaccaatccctggagggcacagactccatcaagatggagaacgggcagagc

SEQ ID NO: 449519 - DNA, 106 bp, Homo sapiens
agaacctcacctttgtctccccgatctacggggctgacatcagcggctctttgtatgatgaccccgtggaccgggagcccgtggaccgggagccggtggtgtgcca

SEQ ID NO: 449520 - DNA, 80 bp, Homo sapiens
tgcagcgggagctggacggcgagcgcgagcggcgcgagaaaacggccgaagccctgcagcccacgctacagccggagatg

SEQ ID NO: 449521 - DNA, 75 bp, Homo sapiens
aaacagatctccatccagcacagacagacccagttgattatggaagattcccacaagagtaccacgtcagagaca

SEQ ID NO: 449522 - DNA, 90 bp, Homo sapiens
cctcatctccaggacagtgggaagagtggctggaggaattcagtttcttgggggtgactctgacatcattagaagcatgccagaacagac

SEQ ID NO: 449523 - DNA, 100 bp, Homo sapiens
gcccaacggtcggtgtccccggctgaggcagcgcggccgcagcagccctattcatgatgagatttcagtgtcaagcatggatgcttctagacaactaatg

SEQ ID NO: 449524 - DNA, 90 bp, Homo sapiens
cagggctactacgtggagatgaccgtgggcagccccccgcagacgcccatcatcttcgtttcggacagagcaaacagcaacaaggagctg

SEQ ID NO: 449525 - DNA, 100 bp, Homo sapiens
gccacacaggctatctgaacacggtgactgtctctccagatggatccctctgtgcttctggaggcaaggcttcactgtataaataggagaggatgagagc

SEQ ID NO: 449526 - DNA, 89 bp, Homo sapiens
caccaggtcttgtagcagcgcctcctcggacctcagcagccatgtcgaagccccatagtgaagccgggactgccttcattcagacccag

SEQ ID NO: 449527 - DNA, 80 bp, Homo sapiens
tgcagccagtactctatatgaacaatccgtctggatcacggatgtaggaagtgttttctggatatgccgcagaaggatcc

SEQ ID NO: 449528 - DNA, 82 bp, Homo sapiens
cccctgagcagcctggcctgccatgtccgggagaagacacaaacggggattcagcgtccgatcctttggaacagggactcac

SEQ ID NO: 449529 - DNA, 100 bp, Homo sapiens
cttgaagcaaagctgcaggttttaaaggaccttttttctatcagtgcttatgtttatgctcagaaaccacaaatggacattcacagtttcgaaggcacat

SEQ ID NO: 449530 - DNA, 75 bp, Homo sapiens
ctggatttctcctgccaggagaatctcctgcaggatctcagtgatggacaaccatgtcgtgatgatgatgatgac

SEQ ID NO: 449531 - DNA, 100 bp, Homo sapiens
ggaagatgcaagcggtttgggaccttgaacaaggcaaatatggttttgggattaaagcctgtggtttccacagaagcaccacctatcatatttgccacac

SEQ ID NO: 449532 - DNA, 75 bp, Homo sapiens
ttgatgaattcaaagcacacttttctggccttgtcccgtgctttgaagaagaggagcacttcaaggtgctggtga

SEQ ID NO: 449533 - DNA, 99 bp, Homo sapiens
caagaaaagcctctgggagcagaagggaggctccaagacctcatcaacaattaaggtcatcatcctgaaccacccggggcagattagcgccggctactc

SEQ ID NO: 449534 - DNA, 106 bp, Homo sapiens
ctcaatatctgtcttcggtggactccttcggcagtccacccaccgccgccgcctcccagatcttcgtgaagactctgactggtaagaccatcaccctcgaggttga

SEQ ID NO: 449535 - DNA, 100 bp, Homo sapiens
ttgacaagacgcggctgccgtacgtggccctcgatgtgctctgcgtgttgctgggtcgttgaggacttccacatggagattggcacaggaccagactcaa

SEQ ID NO: 449536 - DNA, 99 bp, Homo sapiens
cacagccatctcacatttccaagtacattctcaggtggagacctcaagtctggaaaagtttgaaattccagtaaaaattcgtttgagtcctgaaccgtg

SEQ ID NO: 449537 - DNA, 80 bp, Homo sapiens
ggtgctcgggccagcccttctctgccgtccctgggaggtgagaagccctaccactgcaactgggacggctgcggctggaa

SEQ ID NO: 449538 - DNA, 100 bp, Homo sapiens
caagatggtgttggaaagcactatggtgtgccccccaatcagccatgagtattatgacccggcggagtttatggagggcggcccgcaggaggcagaccgc

SEQ ID NO: 449539 - DNA, 76 bp, Homo sapiens
ggaatcctgagtgaggacaagctgactatgtatcctccactcctcgctggccaccatcctgctgcccaacagaaga

SEQ ID NO: 449540 - DNA, 74 bp, Homo sapiens
tggctttgggagttccaatatcagtctatcttttattcaacgggtaaaccagacttgaatacaacattgccaat

SEQ ID NO: 449541 - DNA, 74 bp, Homo sapiens
ccaccgggatggagaaggaggaggaatcgttttccaagagataacttcaccaagatgtccagtgataggcaaag

SEQ ID NO: 449542 - DNA, 100 bp, Homo sapiens
cacaagaagaggattggaaccagttccgatacagcacaatgatgcggaaaacgccatgcggtacataaatgggacgcgtctggatgaccgaatcattcgc

SEQ ID NO: 449543 - DNA, 82 bp, Homo sapiens
gccctggaagcagcagctcaccgaggacggggactcgtctggtgagctgtaccttctttctggcagtgaatggtctgtattc

SEQ ID NO: 449544 - DNA, 95 bp, Homo sapiens
gaccagcaccagccctgatccagtataattaatggatttgccttaccactaaaagaagagcacaagattttcttattgaaggtgttactaccttt

SEQ ID NO: 449545 - DNA, 90 bp, Homo sapiens
gcctctttcctttcggccggaaccgccatcttccaggtgtctcccagtctgctaaagccctaaggccatcaccatggacttccagcatcg

SEQ ID NO: 449546 - DNA, 73 bp, Homo sapiens
cactatgtatggggtactcaatcctagtactgtgccctacaacattcagctgctgtccccaaggcccagcctc

SEQ ID NO: 449547 - DNA, 76 bp, Homo sapiens
caacggcttctgcgagcagctcaacgaggactttgagggcttcgtgctgaacctgggcaaagacagcaacaacctg

SEQ ID NO: 449548 - DNA, 83 bp, Homo sapiens
gactgcctggcccagctgcgcctggcgcaggaggccgcccaggccctgggaggagcggggacactgaggacctctctccaaat

SEQ ID NO: 449549 - DNA, 52 bp, Homo sapiens
cctgtgggagaagcacagtccacagaattgcctgaggttctgtccattgagg

SEQ ID NO: 449550 - DNA, 100 bp, Homo sapiens
tcgtagggggtgagggtggaagctgggaaacccacaggaggcaaccacactagtttagggagtggagcttggtttcgggatctcggtgctgcagacggcg

SEQ ID NO: 449551 - DNA, 104 bp, Homo sapiens
ccaaaagagccaaactcagctcgcccggtttctcggcgaatgacagcacaggctccactttgaggctctgatgaacattccagtgctggtgttggatgtcaatg

SEQ ID NO: 449552 - DNA, 82 bp, Homo sapiens
gtgggatccggttccttggtgtcatccagccttagcaaaccagagacattcaggttttgatgggaagccttgtgtacctgag

SEQ ID NO: 449553 - DNA, 83 bp, Homo sapiens
aggcaccgaggcactcagaggagcgtgagtgcatctccatccacgttggccaggctggtgtccagattggcaatgcctgctgg

SEQ ID NO: 449554 - DNA, 83 bp, Homo sapiens
aaggagccccgcgagtggcgcgccggggatgtttggtgcacctcgatttggaggaagtagggcagggcccttatctggaaaga

SEQ ID NO: 449555 - DNA, 88 bp, Homo sapiens
ccagacaatactggtgtgcttttattactttcatctatacacttccagtgtcgaaggctggacagggctgtgcttaagagtaaaactt

SEQ ID NO: 449556 - DNA, 100 bp, Homo sapiens
tctggggagtggggaatgaggcgggggtcggcccggggctcggagaatgggcagagggagaaccgaagattacaggaggccagcatgaggttggaacaag

SEQ ID NO: 449557 - DNA, 100 bp, Homo sapiens
gcatgactcggtggtcatggtcacccaggagagtgacagcagctttctggtcaagccgcccgtctcctcatcagcccggcagccgaggtggtggaaggac

SEQ ID NO: 449558 - DNA, 80 bp, Homo sapiens
gccctgtgccttgacaagagcctcatccacaccgtgttgctgcaaaaggactatcagcctcctccagctggtgatctcgg

SEQ ID NO: 449559 - DNA, 75 bp, Homo sapiens
tcccagatatagccgttggtacaaaggccctgtttgtgctcttcgtcctggcctacatccacatcgtcttctccc

SEQ ID NO: 449560 - DNA, 90 bp, Homo sapiens
acggaacttgcctgtgaatttcgaggtttcccatccacataccaagctgatgaggatcccatcgttcttccccagtcctgaggagccccc

SEQ ID NO: 449561 - DNA, 100 bp, Homo sapiens
catgagaaggaacagcatgttcaagatatcattcctataaatagccacttcagatgtgttcaagtgccggtggtggtgtgcacattgagccccggtatag

SEQ ID NO: 449562 - DNA, 100 bp, Homo sapiens
acagagaaaacctggaaggactttacgataaaacgtgtcaattccttagcattggccgaagagttaagatgaccttgaatgatgccatgaggaacaaggc

SEQ ID NO: 449563 - DNA, 97 bp, Homo sapiens
gccaggtgaagcccaacgatcagcacttcagtcggaaagttggaacctctgacaagaccaagtactaccttcaaggccctcgggaccaaggatcacg

SEQ ID NO: 449564 - DNA, 82 bp, Homo sapiens
taaagaattacgatgccgctctccgaaaaatcacctttccccacacagttgaatttctgaatgaaaagctggaaaaaaggga

SEQ ID NO: 449565 - DNA, 100 bp, Homo sapiens
cattcctgaaatacatccaggaaagacatggagattctcttaaaaagggatagctgggagtatggccaccctgctccacgatgcggtaatgaatccagca

SEQ ID NO: 449566 - DNA, 82 bp, Homo sapiens
ttatgtggtcattggcacgtgtacgtttcaggaggccagatgctccagtgcctgatggcgaaagtgagaaaactgtagaaga

SEQ ID NO: 449567 - DNA, 96 bp, Homo sapiens
ccggagtgcgcagggcgacggccccacctccggccactgggacggcggcgcggagaaggcagggtgtcttttatgaataatcaaaagcagcaaaag

SEQ ID NO: 449568 - DNA, 82 bp, Homo sapiens
ttggaagcagccgatccagcctgcggagcctgtggggcaggcacccgacaggaggatcctttattcgtccgaacaaggtaaa

SEQ ID NO: 449569 - DNA, 100 bp, Homo sapiens
tttattgacttggcaagggcttattgttcctccagctgaggtgggtgtcctggttggcaaagaccggtcaagtttttacgtgaatgggctgacacttggg

SEQ ID NO: 449570 - DNA, 83 bp, Homo sapiens
gtgcagactatatggactgcttatatagggtctctatgctgtcgtagaattttgccaaaaggaaagcataggttcactgcaga

SEQ ID NO: 449571 - DNA, 74 bp, Homo sapiens
aagattgcgtacccactgcagagtgctgaagacggggtagccacgaggcaattaagttggaatatgcaaggttg

SEQ ID NO: 449572 - DNA, 97 bp, Homo sapiens
tgcagcattagctgctatgaatggacggaagataatgggtaaggtctatgttaacaatgaatgggcaaccagtgttggggaaggagggagctttgga

SEQ ID NO: 449573 - DNA, 75 bp, Homo sapiens
gcagatattaatgggagcatatatgatgaggaaaatcagttggagtggaaatgaacacccagaatgaactgatgg

SEQ ID NO: 449574 - DNA, 82 bp, Homo sapiens
cccagcctgcaggccctggctggtctcggcgcggaagatggccggcggcgtggacggccccatcgggatcccgttccccgac

SEQ ID NO: 449575 - DNA, 75 bp, Homo sapiens
accccaccacgcctctgtgacctggcctaggaagcacctaattcttgtgggcaaaggagccatggaagatagagc

SEQ ID NO: 449576 - DNA, 89 bp, Homo sapiens
tggagctggagcaccgtgaggaagaagcgaggttctttttaagagttcagctgcgaggtgatggggaggaagtacatccggctgtattc

SEQ ID NO: 449577 - DNA, 75 bp, Homo sapiens
gtggccggcagggcagccgggggacagctgtagtgaaggtgcttttcagtgggaagaattggaagaagatatcag

SEQ ID NO: 449578 - DNA, 50 bp, Homo sapiens
tactcacagagttagagagagggatggtgctcctcaagagttactgatct

SEQ ID NO: 449579 - DNA, 130 bp, Homo sapiens
ccgcgagcgccacgcagccgcccgccgccagcccgccgcccatgggccgctcgtcccggcgctgagatcatgatgctgccgccaccgccgccaccacggagcgagaagcccagatagacgccccggcggc

SEQ ID NO: 449580 - DNA, 50 bp, Homo sapiens
ccggatcctggatgaggaggtgtttgagttcaggacaaagaggtgtgggc

SEQ ID NO: 449581 - DNA, 58 bp, Homo sapiens
cataaacttggcttcctcgcttctgctcctcagggtgaggtgtgcaatatgattagca

SEQ ID NO: 449582 - DNA, 82 bp, Homo sapiens
ctgggcctgcaggaagcccttccgcggaccgaaagacaatgcagatcttcgtgaagactctgactggtaagaccatcaccct

SEQ ID NO: 449583 - DNA, 97 bp, Homo sapiens
agcacatattcttatcatttaggaaatcaaaatcaccatttgcagtttgcaagcatattttggccaattggtgctttgaaccccaagagagctgtgt

SEQ ID NO: 449584 - DNA, 83 bp, Homo sapiens
gtgtaatagaaaaacaagcaagaaaccttttagatgacagatttgaagatctggaagaggcaaatccattctcttttagagag

SEQ ID NO: 449585 - DNA, 75 bp, Homo sapiens
gttcagtgactgctattgaaccaccaaaagtccattatgaaactgctgtcccctttcctccaacccaacggctta

SEQ ID NO: 449586 - DNA, 75 bp, Homo sapiens
gtaagatgttcgcctgcgccaagctcgcctgcaccccctctctgacccctgacctggagcagctggagccgtctt

SEQ ID NO: 449587 - DNA, 82 bp, Homo sapiens
ctggagtaaccctcactggagaatccagaggggagctctttgctcaggccccggtggatcagtttcctggcacagctgtgga

SEQ ID NO: 449588 - DNA, 83 bp, Homo sapiens
cttgcctgtgcgcgcgtgcgcggacatggcctcaaacgcatgatgccttcttctgtagagtgggcgctttgcagaatacgtgt

SEQ ID NO: 449589 - DNA, 82 bp, Homo sapiens
gaagtgaagaaggcgcatcactcccagctgcgcaaagcttgcgaggtggcgttaggtcatcatcagatttgaaatatttaaa

SEQ ID NO: 449590 - DNA, 75 bp, Homo sapiens
aaactggtacggctgtgtagaaggccagcaacccatcgtcagaaaacaatggctgccatccggaagaaactggtg

SEQ ID NO: 449591 - DNA, 83 bp, Homo sapiens
aaggattccaagtaactcttatttgagctgacaaggaaggtttcgagcgttttgctggcaaagggatttcttacaacctccag

SEQ ID NO: 449592 - DNA, 124 bp, Homo sapiens
ccgagaccgtgaccgagagcgtgaccgagagcgcgaatatcgtcatcgttagaagaggccagtaatagtagccatgagtctcgtattggtctagctgaggggttggaatccgagaagaaggcag

SEQ ID NO: 449593 - DNA, 51 bp, Homo sapiens
tctgaatttctcaaggttgcagaggaagcaagatttccagatgtagcaaat

SEQ ID NO: 449594 - DNA, 50 bp, Homo sapiens
atggaaggggtcctcagagttactggggatgttgacaatgcgtctctggc

SEQ ID NO: 449595 - DNA, 90 bp, Homo sapiens
cgccagcggcggagaaccgacgaaagatcccagcatggtgagtgcctacatgtacccagcaggggccactggggcgcaggcggcccccca

SEQ ID NO: 449596 - DNA, 90 bp, Homo sapiens
agcgtgaaaaccacaagcaggtccaaagagagactctacccttctccaaaagaagagccaagagaaggtccttttctacaaatatcagag

SEQ ID NO: 449597 - DNA, 80 bp, Homo sapiens
cagttttacgatttaaaacttcgccagaattttattttcatctcagcctagtgacgatgaatcaagtagtgatgaaacca

SEQ ID NO: 449598 - DNA, 100 bp, Homo sapiens
tgccttcggaggtctttctgcctgcctgtttcctccagcctggtggtgccctgtccttgcaaaagcagatggaacatgctaaccagcagactggcttctc

SEQ ID NO: 449599 - DNA, 75 bp, Homo sapiens
aagagctgcatcatgaattcaggagcatctggcctgattccaccaagagaaggcccaggaggaagaagagaaaaa

SEQ ID NO: 449600 - DNA, 83 bp, Homo sapiens
cttgccttgagtcagtgcgccgctctccagcccgcttgaacgagttttccgtctgatgaaggttggccatttgcaaagtatct

SEQ ID NO: 449601 - DNA, 100 bp, Homo sapiens
ccaagatcgagcccagcgtcaacttcctcaagtcgcccaaagccagacccggtccgtttggaatgcctgggatggtgccgccgcatgttcctcctcagat

SEQ ID NO: 449602 - DNA, 99 bp, Homo sapiens
cagcttcttcagttccaggaagatgcctttgggaagcatgtcaccaacccggccttcaccaaactccctgtgactctgacatcattagaagcatgccag

SEQ ID NO: 449603 - DNA, 75 bp, Homo sapiens
acaagtgctctcgacaggacaccgtcttcatgaagaagattgactggggcgactttggggtagaggcagtgtctg

SEQ ID NO: 449604 - DNA, 98 bp, Homo sapiens
gagctacagctgcgggagagccgggtaccggccgtggaagcggccaccgactactgtcagcagctgtgccaggagctatcgaaaaaccttgaactgag

SEQ ID NO: 449605 - DNA, 76 bp, Homo sapiens
caaagcccccacgcccagccaggagcaccgccgaggactccagcacaccgagggctgaaggggatgctaagggaga

SEQ ID NO: 449606 - DNA, 98 bp, Homo sapiens
ggaggcggaggtccaagcggaaagaatttttccgagagctcctggagaatgcagaaaagtcactaaatgatatgtttgtacggacctatggcatgctg

SEQ ID NO: 449607 - DNA, 74 bp, Homo sapiens
agaaatctacaggtcattcctggagatcctgcacacgtaccaggctgttcggctcttgaatcccagcgatgaaa

SEQ ID NO: 449608 - DNA, 82 bp, Homo sapiens
tcgtttttcgccgtcatgggcgcctcggccgccatggtcttcagcgcctgcctgctccgcttcagcggactctcgctggtct

SEQ ID NO: 449609 - DNA, 74 bp, Homo sapiens
tcatgtggcagtggaaaatgcgctcgggctggaccagcagctgcactgggtgttcaacagccatcactccttgg

SEQ ID NO: 449610 - DNA, 90 bp, Homo sapiens
cggaagtgcagctgcctcagttcttagcgcagagctgcggtgcaaccctgggcagtttgcgtgtcgcagcggcaccatccagtgcatccc

SEQ ID NO: 449611 - DNA, 88 bp, Homo sapiens
cacttcaggagggaggacagcttcagtaaatgcactaggatccagagaggtggggaccaaggcatactgaacacattttttagcagct

SEQ ID NO: 449612 - DNA, 97 bp, Homo sapiens
aaggaagccatgtttgatgatgatgctgaccagtttcctgacgtctcttgcatggcaccaagaatgttaccaattcaagcagtttaagattgccaag

SEQ ID NO: 449613 - DNA, 100 bp, Homo sapiens
ggcgatcctgccaccgggaggtgtggaagagccgggatccaaactactggatacaggtgcatcgcttggaacatggagatggaggaatactagaccttga

SEQ ID NO: 449614 - DNA, 95 bp, Homo sapiens
ccctcctgtggtaataagttggtggacgctggggaagagtgtgactgtggtactccaaagcatgattatgatatgagggtggatgatttccttcg

SEQ ID NO: 449615 - DNA, 50 bp, Homo sapiens
ctcaaacctgttttggattcatatgaacctcttaaaagcctctgtacaaa

SEQ ID NO: 449616 - DNA, 50 bp, Homo sapiens
atattccaatttatgcagataagatgcgaaagccatggagttgagctgca

SEQ ID NO: 449617 - DNA, 75 bp, Homo sapiens
aaatctgcctggaagataatgtgaaggatgataaagactatgctttaaaacaaatagaaggaactgggatctcta

SEQ ID NO: 449618 - DNA, 100 bp, Homo sapiens
ggtgttgcactgacgggtctgtcctgcttcgtcaccccagaccttgccagagacctggcaaatgacatcatgacactgggtcggcactcttcaccctccc

SEQ ID NO: 449619 - DNA, 50 bp, Homo sapiens
ttttaagtgtggcatacaagaaagggtttttaatgaccacaacaagcaag

SEQ ID NO: 449620 - DNA, 74 bp, Homo sapiens
gtcacctgtcactcagccctgctggacctggagaagctcccagaattcaacagtcaagctgtattagtcgacag

SEQ ID NO: 449621 - DNA, 83 bp, Homo sapiens
ccgcggaggagccgcctgcgcatgctccatcgcctggtttggtgccctggttgtcagatgttggaaagcagtaggacggaaca

SEQ ID NO: 449622 - DNA, 100 bp, Homo sapiens
tctggctgtgctgcgcggcccccgcgcatgttgtatcacggactgattcaccgagcccaaccgtactcaactcacatatttctaccccaaatgtgaatgc

SEQ ID NO: 449623 - DNA, 75 bp, Homo sapiens
gtgattttcctgcatggattgggagatactggttacagatgtagagctaaaacgactgaaggatgctttcaagag

SEQ ID NO: 449624 - DNA, 83 bp, Homo sapiens
ggaaaagactcaaagtaaacccttttccatccaggaactggaactccgttctctggacaatgcagatcttcgtgaagactctg

SEQ ID NO: 449625 - DNA, 100 bp, Homo sapiens
gcgaagacgccttcccacctagctctcctctctttgcagagccatacaaagttggcctgtccttgatagtggtcgggaagcgaagtcccggagaagaacg

SEQ ID NO: 449626 - DNA, 100 bp, Homo sapiens
acaaaatgtcaacaaattgatgggaagtcccgttctcccgcgtgtggtgcagtaaccggcagcccctgcactgtgccttctccctggagcgttatacgcc

SEQ ID NO: 449627 - DNA, 95 bp, Homo sapiens
ccgcgtgtacccggttgtcctcaggcgctgtcaggtatcgagaaccttccctgcgaacttcagaggaacttccagctgatgcgagagctggacca

SEQ ID NO: 449628 - DNA, 100 bp, Homo sapiens
gtgaagtgctccgtcgcccttgcctccaggtgtgatgaatgcagactctgctaccattttggctgtttggatcctcctttgaaaaagtctcctaaacaga

SEQ ID NO: 449629 - DNA, 89 bp, Homo sapiens
gagttgaagccatacacagagcccgaggaggacttcggggacaccaagagaattgatgcagcagcttttttatgagaattacgagcaga

SEQ ID NO: 449630 - DNA, 74 bp, Homo sapiens
gaacaaaaagctgctttccccccacctgaacagaaaactgcatttgacaaggaaagtaatggaccagtgaaggt

SEQ ID NO: 449631 - DNA, 80 bp, Homo sapiens
ggaggaggaagggacaccgagggaccaaagggcgatgggcttccccaaggatttattgacattgctacttgagtgtgaac

SEQ ID NO: 449632 - DNA, 83 bp, Homo sapiens
acatcatgcagttgcaggttcaatggctactgcttgtcctccagactcgaactgtggctgcaccatctgtcttcatcttcccg

SEQ ID NO: 449633 - DNA, 50 bp, Homo sapiens
gtcgcagacctcgaaatgatagacgcgggacgaccctgggacagtctcca

SEQ ID NO: 449634 - DNA, 100 bp, Homo sapiens
cgagatgtctcgctccgtggccttagctgtgctcgcgctactctctctttctggcctggaggctatccagcggtgaggtggctttgaccccgggttgccc

SEQ ID NO: 449635 - DNA, 75 bp, Homo sapiens
gcggctgagacaaaggcgacggatattagaaatggctactccccagtcaattttcatctttgcaatctgcatttt

SEQ ID NO: 449636 - DNA, 96 bp, Homo sapiens
tccgccgcgcggagcccacgaaggggacagcgcagccggcccagagctcgggtctccggggaccgagaccgtccgcagccccccagcaggccgatg

SEQ ID NO: 449637 - DNA, 98 bp, Homo sapiens
gacctttcccttgcggacgcgaaggcgtggtgcccgggaagaacccaccgtccagcaggcacagcgtcggtcagctgtctttctgtcctttaagtccc

SEQ ID NO: 449638 - DNA, 90 bp, Homo sapiens
ggtggaggtggaggttggaggtggtgctgctggggaacgggagctggatgagttgccaccttccagagaagaggtacgagatgacaagac

SEQ ID NO: 449639 - DNA, 50 bp, Homo sapiens
tgaagaaattgagaagctcaaggaaaactctttgaggaaagcacacatct

SEQ ID NO: 449640 - DNA, 100 bp, Homo sapiens
actgctctgccaaaatttgccatccgagggatgctgaaaacctttgggcttcatggagtcgtcttagatgttgattcaagttcagacgatgaagactgtt

SEQ ID NO: 449641 - DNA, 83 bp, Homo sapiens
cgctgctcaaggacacggtctacaccgacttcgacgctattactataacaagcgcattctgcacaagaccaaggggaaacggt

SEQ ID NO: 449642 - DNA, 100 bp, Homo sapiens
aggagaatatcactgtcaagaaacaaaattgcagatctgtgccatactttcatcaaagatggagcgttactgcgtgacttcccagacgagctgagagctg

SEQ ID NO: 449643 - DNA, 100 bp, Homo sapiens
gcaccgggatcgtgaccgagaccgtgaccgagagcgtgaccgagagcgcgaatatcgtcatcgttagaaggacaaaattcttctaagcagtggacgagat

SEQ ID NO: 449644 - DNA, 83 bp, Homo sapiens
ttttggcagagctcccactagaatagaaggacagtctgtggaagtttccaatattgtggacatccgaaaagtatataaccgtg

SEQ ID NO: 449645 - DNA, 90 bp, Homo sapiens
gttgaaggcctttcactgttggacttgggagtatctccgtattctggagcagtatttcatgaagtcagttcaaagatcctagaactcgcc

SEQ ID NO: 449646 - DNA, 97 bp, Homo sapiens
tatcaattttgcccccagtttacttcggattatagtctctgaccatgtggaattcccagtacgacaggcagagagaagaagaaggaggttcctgctg

SEQ ID NO: 449647 - DNA, 100 bp, Homo sapiens
cagggcatcaagatcgagttcatcgggcagatcggggagaagccgcaccagtgcgccgtgtgctggcgatccttctctctacgcgactacctgctcaaac

SEQ ID NO: 449648 - DNA, 100 bp, Homo sapiens
cactgccattggttatagtgagagtacccacaacctaactttacctaagcagttacttgctggacagaagaaaagctcccccttctggacatttgaatac

SEQ ID NO: 449649 - DNA, 80 bp, Homo sapiens
gctaacagaactggaccttttcgattaccagttgaccagtgcagagctctcctccttaccagcctttagttcacctgggg

SEQ ID NO: 449650 - DNA, 100 bp, Homo sapiens
ggaaaaggagttcgagcagatcgacaagtccgggagctgggcggccatttaccaggtgtgatcccctgggcccgtttgttgtcgggggagaagacttaga

SEQ ID NO: 449651 - DNA, 75 bp, Homo sapiens
cgaatgggacaagatcccgtccatgaatcagtgagaagcgccaccttcaagtgaacgtcaccaacccagtacagt

SEQ ID NO: 449652 - DNA, 100 bp, Homo sapiens
ccacgccgcccaggagacccctctgctgcaccacttcatgccctgcaggttgtccctgacctctccaagaaggtagcatcgaccctaaccgaggaaggag

SEQ ID NO: 449653 - DNA, 75 bp, Homo sapiens
ggcggaccatgataatttccccagagcgtcttgatccttttgcagatggcacctacgggctgagcaacgcgctgc

SEQ ID NO: 449654 - DNA, 75 bp, Homo sapiens
atggctttgatgacagaatgagagatggaagagctggagtatcagaggcagcagctcctggccgacagacaagcc

SEQ ID NO: 449655 - DNA, 85 bp, Homo sapiens
tacttaattatgggtaaagaagccctccagataaaatacaatttcagtttcaggaatcgcttaattctgaaagtctggtgagaag

SEQ ID NO: 449656 - DNA, 110 bp, Homo sapiens
gtggccgctgggggttgcggcggcgctgagccagcggggccgtttcagagcgtcctcagccaaggaaataaaaagccacaaaatagaaaagaaaaagaagagaaggttga

SEQ ID NO: 449657 - DNA, 82 bp, Homo sapiens
actgggctctgcagcctcatcctacagccccctaggtgttggagcgggccggagagaagtagagtgggctgcgaggagaagg

SEQ ID NO: 449658 - DNA, 139 bp, Homo sapiens
gggaagagaggggaggagagctctgagtgggaagcggagccgggggcctgggacccgtcgcgtcagagccaggcagtttgaagagaacacatgaagaagaggatgattttggaaccatgcaagtggcgactgcacagaa

SEQ ID NO: 449659 - DNA, 95 bp, Homo sapiens
cctttggggcaccacagagatgcgggtaactgtgacatttgatgatgtggccttatatttttcggaacaagagtgggagatcctggagaagtggc

SEQ ID NO: 449660 - DNA, 82 bp, Homo sapiens
gggaggaggagcaggagctggaggaggagccgccgccgccagattaacagccatgcaacagaatggagtcccagccacccag

SEQ ID NO: 449661 - DNA, 98 bp, Homo sapiens
tggaccacggcgcagacgcgggcgagctgcggctcggacgccagcggacacgcgggcgagagtccgaaattgaagttcagaggaagaattgccttcca

SEQ ID NO: 449662 - DNA, 97 bp, Homo sapiens
cgacatcttcctgcacatctctgaggtggtatttccaacattttggaggaactggttgtccagcctctgttggtatcagtcagtgctctgactcttg

SEQ ID NO: 449663 - DNA, 101 bp, Homo sapiens
ctgcgccatgttcaagaaactgaagcaaaagatcagcgaggagcagcagcagctccagcaggcgctggctcctgctcagcctcccagtgcaacgtcagctt

SEQ ID NO: 449664 - DNA, 100 bp, Homo sapiens
ctctggaccctcgcggccgtgggcagcggctgccgcgcctgtctgcccgagggagaacaagaggaaagtatggggaaggagccaagcaggagacgttcac

SEQ ID NO: 449665 - DNA, 80 bp, Homo sapiens
tttgtagataccaacttatacttcctggcgctgaccttctttgtcgcagcgttccatatctggtggctggacccagagct

SEQ ID NO: 449666 - DNA, 82 bp, Homo sapiens
tgcacgcttcaagctctggtacacgctggacagagcccctgaaggctttatcctgtggataaacgcagagtgaacgagtttg

SEQ ID NO: 449667 - DNA, 82 bp, Homo sapiens
cgtggaggaggcgccccgcgcagctggctggcggagcatgagcgccccaggttgacatcatggacatatgtgagtccatcct

SEQ ID NO: 449668 - DNA, 90 bp, Homo sapiens
atcatggcggatggccccaggtgtaagcgcagaaagcaggcgaacccgcggcgcaataacgagacggtctcgccacattgcccagactgg

SEQ ID NO: 449669 - DNA, 89 bp, Homo sapiens
cgacggggcggccgggggctcagagatccaagtgcgcgccctggcgggtccggaccaaggtttgcatcgccagcttctatatattacgg

SEQ ID NO: 449670 - DNA, 82 bp, Homo sapiens
ctggacaaaggaacaggtatctcaggtttgacatctacaggaaggtgcccaaggaccttacgcagccaacgtacaccggggc

SEQ ID NO: 449671 - DNA, 75 bp, Homo sapiens
gaaaatgccaagaagtatcttcgaacagatgacagagtagaacgtgtacgcagccccaaatccaaggccaggcca

SEQ ID NO: 449672 - DNA, 100 bp, Homo sapiens
ccagcaccagcaggtccctggccctcatgtacgagtccgagaaggttggggtcgcctcttccgaggaaggggaacagtttgtgaagaaaatcggtggtat

SEQ ID NO: 449673 - DNA, 140 bp, Homo sapiens
attttctctagccttaggtaatgcatgaaagcacatgtttcagtgccactcacataagaagtgcccggtgaagaatttcatgacgtggaggatgcagagacctacaaaaagatgctggctcgggacgagcggcgtttccg

SEQ ID NO: 449674 - DNA, 83 bp, Homo sapiens
cgaaaaagaaggacgtatgctctacaaggtataatgggtctctcccaaatggcgatagaggaaggaggaaaagtaggtttgct

SEQ ID NO: 449675 - DNA, 98 bp, Homo sapiens
ccagctcccctgagctccaggaagcacgttctctacgtggagcacagaaaaagtggataattattgctgtgtcagtggttctggttgccataatcgct

SEQ ID NO: 449676 - DNA, 75 bp, Homo sapiens
caccactgaagtgaccgaatgagtgcacttgccggcggtcccaacccagcaggagaagtggacatgaggttggca

SEQ ID NO: 449677 - DNA, 83 bp, Homo sapiens
ctcagccgcttggggcccgcacggaccctctacttcaatccctgaatattgccgagccttagaagagaatgaaatatctgagc

SEQ ID NO: 449678 - DNA, 100 bp, Homo sapiens
atcgtgagctccggcccgggcgagcgggtgcgtctgccgcagagtcggcacctgaaggacatggaggaaaatatatgcagatgatgaacattcttaagcc

SEQ ID NO: 449679 - DNA, 104 bp, Homo sapiens
caagaatgttcgtgtcaactgtttggacgaggtgttcactgttggcagaatttgtgccagccgtaccagaatttatcataaactgaaacattttaaattcaaac

SEQ ID NO: 449680 - DNA, 90 bp, Homo sapiens
gcgacagcagccaggagtcatgagcgacagcggcgagcagaactacggcgagcggcaattctgtggtgttcttggtcacacatttatgga

SEQ ID NO: 449681 - DNA, 100 bp, Homo sapiens
aaaaagggaatttcaacgtggcccatgggctggcatggtcatattacatcggatatctgcggctgatcctgccaggttctgtttggattctgcaaagcag

SEQ ID NO: 449682 - DNA, 83 bp, Homo sapiens
ctgaggatcgaggaacgttgtctggttgatgataattagaagcatgctttccactgaacttcccgacaacatttgttatgcag

SEQ ID NO: 449683 - DNA, 82 bp, Homo sapiens
gatcggcaggcgagattgcctgacccaggcctgctcggccctcacaggtgatgagccctcctcttcagctaggaaaatgacg

SEQ ID NO: 449684 - DNA, 83 bp, Homo sapiens
cgctccgtggccttagctgtgctcgcgctactctctctttctggcctggaggctatccagcatttttggaagtaccagcacag

SEQ ID NO: 449685 - DNA, 75 bp, Homo sapiens
agcgctgcgaggtggcggcctgagactcgctctttactgagcgtgtttgaagaagatgctggcaccctcacagac

SEQ ID NO: 449686 - DNA, 90 bp, Homo sapiens
cagctcagtcacctgagcaccgagtcagagaggtctgaagaatgtgtttgatgaggctatcctagctgccctcgagcctccggaaactca

SEQ ID NO: 449687 - DNA, 100 bp, Homo sapiens
gggtcctggggcccggggtctcctacgtcgtgcggaccatcaacgcactgaaggggaggatctcggaactgcagtggagcgtgatggaccaggagatgcg

SEQ ID NO: 449688 - DNA, 100 bp, Homo sapiens
gaaaacactcgtagtgaagaaaaccttgaatcctgtgtataacgaaatactgcggggtgatgaattagaagacaatggaaagaatttctacgaatctgat

SEQ ID NO: 449689 - DNA, 99 bp, Homo sapiens
gtggggaatgaggcgggggtcggcccggggctcggagaatgggcaggtaatgaatttgggcatcctgaatggttagacttcccaagaaaaggaaataat

SEQ ID NO: 449690 - DNA, 80 bp, Homo sapiens
agaactatagcaatctggttttcttggcccaagaagatgaaaggattgttcttgttgacaacaaatgtaagtgtgcccgg

SEQ ID NO: 449691 - DNA, 95 bp, Homo sapiens
agatgtggtggaatatgccaaggaaaaactggagagcttcatcaaaaatagtgatagctttgataagtatttataacagcaatgatgtagcagta

SEQ ID NO: 449692 - DNA, 98 bp, Homo sapiens
ggccatcttgagtctactctgtcgctcttgtgccctagcaccccgagaaccgtcagtttgagccagatgtccggttccagttgttggcaaaggagagg

SEQ ID NO: 449693 - DNA, 101 bp, Homo sapiens
agagtagaggccgggccttcagcgtttctcactggttcgaggaaggcggcctcagaggagagggaaggaaacatgccctgaactgtcacagaatgaaacca

SEQ ID NO: 449694 - DNA, 100 bp, Homo sapiens
gttaggaaggagtatagatgacataggtcacctcattcatgaaggcctacagaagccaaatttgtatcctactgtggggcttcaaacaccaggagaagtg

SEQ ID NO: 449695 - DNA, 100 bp, Homo sapiens
agaagagcagttcccaggatctgcataaagctgataccccaatgtccttctttgactttgtggttgatcctcattctttcccccgtacagtggaaaacat

SEQ ID NO: 449696 - DNA, 100 bp, Homo sapiens
tggagttcttacaacatggcagacattgacaaggcctgctttcttccccgggcgatgtgcagagatctttgccaggggtcaaagcgtcgggaagcttggg

SEQ ID NO: 449697 - DNA, 82 bp, Homo sapiens
ggattgctggctacagcttcagaagaccgaagcgttcgtatctggaaggtacgaggaacagcaaattcaggaaaaagtggcg

SEQ ID NO: 449698 - DNA, 90 bp, Homo sapiens
ctcgctcggctgcgggaaatcgggctgaagcgactgagtccgcgatggagttccagctattcttcagatgctctggattttgagacggag

SEQ ID NO: 449699 - DNA, 76 bp, Homo sapiens
tatttggagttcttacaacatggcagacattgacaaagctgcttatcatccagactttccaacagttctgacagct

SEQ ID NO: 449700 - DNA, 97 bp, Homo sapiens
ttgctgatgacctcacatggtgtggtgaattcaacacttccacacgctgcagacttggaaaagaagcagaatgagacagaaaacaggaaattgctgg

SEQ ID NO: 449701 - DNA, 89 bp, Homo sapiens
cagtgcagtacttttagacaacctccctggagtccggtggctcacacttccactggaaatcaagcaacttgagttggtggaaccaagtg

SEQ ID NO: 449702 - DNA, 48 bp, Homo sapiens
cgtcctggaattacttcaatcaactctcgtggcattatccttcagtgg

SEQ ID NO: 449703 - DNA, 75 bp, Homo sapiens
caccctttttgtcagattatcaggatgaggcttaagagttggacagtggaggaccttcagaagaggctcttggcc

SEQ ID NO: 449704 - DNA, 101 bp, Homo sapiens
ttcaaaagaattggccaaagaagttgagaaaatgggagcagttttcatggatgcccctgtttctggtggagaaataaagtgtagtccttctgaaagcccct

SEQ ID NO: 449705 - DNA, 90 bp, Homo sapiens
gcgactattctccgggagccgtccgtgtcaccgccggaacctggcgcaggagggtgcatctgcccggaagactcagactcctgcagccca

SEQ ID NO: 449706 - DNA, 145 bp, Homo sapiens
aacagcactgccaaatagcagaagaataccatgaggtcaaaaaggaaatcaccctgcttgagcaaaggaatccagttacaacacagggatcacaacaaacacaaccgccacagaagcactatggcattacttctcctatcagctt

SEQ ID NO: 449707 - DNA, 74 bp, Homo sapiens
tggaccccttctccgggatcccttgggagtggccggagcgggttagatgtcagtattgaatatggtggtgaggc

SEQ ID NO: 449708 - DNA, 98 bp, Homo sapiens
gcactgcaagaaacaagagccaacaagcatctgttatatgagtccttcaataatgttaaacagtggctgcaggaaatagatcgttatgccagtgaaaa

SEQ ID NO: 449709 - DNA, 82 bp, Homo sapiens
ttatttttcagcctactggactgaataccactagaaacatacctgtaaccagagacagctgattatagctttctgcagcaag

SEQ ID NO: 449710 - DNA, 100 bp, Homo sapiens
ttggaacttcgttgcttgcttgcctgtgcgcgcgtgcgcggacatggcctcaaacgtgggtaattccagaattgattggccataccattgtcactgtatt

SEQ ID NO: 449711 - DNA, 82 bp, Homo sapiens
tactcagcccacatgcccgctcacctgcgctgtgatgcctgcagagctgtggcttaccaggcagaggaacgaggacgcctga

SEQ ID NO: 449712 - DNA, 101 bp, Homo sapiens
actgcagggaaacagccatcatgagcctacacctgtgaagccaaactatgctctaaagttcacccttgctggccacaccaaagcagtgtcctccgtgaaat

SEQ ID NO: 449713 - DNA, 100 bp, Homo sapiens
aaaggattcgttacagccagagattgcccccaaatacatcaagatgtttgtactggatgaagctgacgaaatgttaagccgtggattcaaggaccagatc

SEQ ID NO: 449714 - DNA, 105 bp, Homo sapiens
atcaattcggaaccgaagattaaaaaactggagccagtccttttgccagtattaaaggtggaagaaggtccatatctttttctgtgggtgcttcaagtgttgttg

SEQ ID NO: 449715 - DNA, 51 bp, Homo sapiens
ggcgaccgtgtgggatgaggccgagaccgtagctttatgggatctgcgtaa

SEQ ID NO: 449716 - DNA, 75 bp, Homo sapiens
cggatcaggagccgccgccgccatatcaggcaagtgaaaattacatcctgtgtagtgataccaggtcacagctca

SEQ ID NO: 449717 - DNA, 99 bp, Homo sapiens
ggccgtcaacaatcccaagaagcaggaatgaaagtggcgctttctccgccccaggctggcctgccactcctcctgctatgatgcctgggcagatcccgg

SEQ ID NO: 449718 - DNA, 75 bp, Homo sapiens
agaaggcggcgcgggaggtgaagttgctgctgttggggaactctaatgatccaggacaaagaagttaccctggag

SEQ ID NO: 449719 - DNA, 75 bp, Homo sapiens
ccccttctgggcacactcagacccagaggagatgcagcaagaagacagtttcgtggtgggcacagccgagggaac

SEQ ID NO: 449720 - DNA, 100 bp, Homo sapiens
gacgcatcatcactgggaaagtgttcatcaggccaagcataaaagagtactatactggcaattgctggagaagattttgcaattgttgcttctgatactc

SEQ ID NO: 449721 - DNA, 74 bp, Homo sapiens
ggtgaagtacatgaactcagggccggttgtggccatggatcccaaaatggctgggcgaaaacttgctctaaaaa

SEQ ID NO: 449722 - DNA, 100 bp, Homo sapiens
aaaagcctctgctctgcctccggggacaagaaactagagcaaataaccgttttgaaattgatggtagaactgaaggaaatggtttctgatgtcgatctca

SEQ ID NO: 449723 - DNA, 101 bp, Homo sapiens
cacaacatgtaccgggaataccgggacctgaccaccgcaggcgctgtcacccagtgctggactcggagatcatgcagcagaagcagaaaaaggcaaacgag

SEQ ID NO: 449724 - DNA, 82 bp, Homo sapiens
cccttcgccttcgccctttccacctcgcggcagttcggctgaccccgcactacatctacccaccagccatcgtgcagcccag

SEQ ID NO: 449725 - DNA, 100 bp, Homo sapiens
gctctgtggctgctcctggctctgcgcaccggttaatttggagtggcccctggagtcagtttcctacaccatccgaggccccacccagcacgagctacag

SEQ ID NO: 449726 - DNA, 100 bp, Homo sapiens
agcggtcgcgggggcgtggcagccggacctttcccttgcggacgcgaaggcgtggtataagcagtttagccaaattttgaagaacattggagaaaatgaa

SEQ ID NO: 449727 - DNA, 98 bp, Homo sapiens
ccggaccctttgccttcgccactgctcagcgtctgcacatccctacaatggctaaaacagcaatgggcagccttaagtgccttgaaacaattttctga

SEQ ID NO: 449728 - DNA, 75 bp, Homo sapiens
gtcggcctccgacagcgctccggagggaccgggggagctcccaggcgcccggtcaccacgttctgcgcttttccg

SEQ ID NO: 449729 - DNA, 100 bp, Homo sapiens
cgcagctgcgggtccgggattcccagccatggcagattcctccgggcagcaggggtgcctctgccaactggtggaatcatcgccacttccagcaccacgc

SEQ ID NO: 449730 - DNA, 74 bp, Homo sapiens
acgtgtaccctgggcgcagggattttaccaaatgttgcaagaactctggagttcttatggtagtaaaatgccgg

SEQ ID NO: 449731 - DNA, 75 bp, Homo sapiens
gaccttgtaatacgcttacctagatctgagaaggactttcaggatagaacatgatctacaactcttgaaaaagaa

SEQ ID NO: 449732 - DNA, 100 bp, Homo sapiens
ggcgctggttggacagacaaaaaatgatttggtggtcagcttgcctgaggagatgatgaaactgaggcacaaactgcttaatgaacttgtccatggtaaa

SEQ ID NO: 449733 - DNA, 98 bp, Homo sapiens
cagcagaaggatttggcaacagactttgtttcttggagtccacttccaattccaagaaacagaagcctatcagttgctgaagaaggccacccttcagg

SEQ ID NO: 449734 - DNA, 50 bp, Homo sapiens
tggcctttcatgccaaagaggtccagggaggctgccggcgtggaccgcgg

SEQ ID NO: 449735 - DNA, 51 bp, Homo sapiens
cctccagagtagctgggattacagttaacttgagaaagtggaatcgaattc

SEQ ID NO: 449736 - DNA, 102 bp, Homo sapiens
caagggaaaaagtaaataaagctgctgtttttgaagaggacctatacaaatcagccttcttttattttgaaggaacattttataatgataaaagatacccag

SEQ ID NO: 449737 - DNA, 100 bp, Homo sapiens
gcggccgggagcccgccgcgctggtagcgaattcagcggggtgccaagtcgttttctgtgtgggttgagagacaggctgtgcagcccactgttgcatagg

SEQ ID NO: 449738 - DNA, 100 bp, Homo sapiens
caagcttgaatgtgtcaaaaccaaacaccctcagctccacattgagagcaaaatctacaagatgatgcagggaggaggttgatgaaaagcccagaacctt

SEQ ID NO: 449739 - DNA, 75 bp, Homo sapiens
ggccagcaggcagatgattcaacagtatgaaatgtactgcaaagattcacggtggtgagacagcattcaaagcca

SEQ ID NO: 449740 - DNA, 96 bp, Homo sapiens
cgccagcctgcgaaggtggcggcgctgctgctcgggctgctcttggagtcatgtttataactactgtactagtgttcaccagtcaaaccaagcacg

SEQ ID NO: 449741 - DNA, 90 bp, Homo sapiens
caatgagcaactgttgtcaagatatgacaagtcgcctacaggtgacccgaggagggactccgcctccgagcggctgaggaccccggtgca

SEQ ID NO: 449742 - DNA, 101 bp, Homo sapiens
tcctcaatggacaggccttctctggggaggaattccgtcagaaatcgctggactgggagaagcaacgcttgatttatcagcaacaggtatcttcactggag

SEQ ID NO: 449743 - DNA, 74 bp, Homo sapiens
tggcgcgcggaggggaaatggctgccgaaaacaagccggaaggtgaaagaacttgtcctggacaacagtcggtc

SEQ ID NO: 449744 - DNA, 100 bp, Homo sapiens
gaggacataaggaactagtcacagtgttgctgcaacatagagctgacattaactgtcaggtggaggagttactgatggccatggagaaggtaaagcagga

SEQ ID NO: 449745 - DNA, 100 bp, Homo sapiens
tcaagacacaggcataggactagaagcaggagtaggacaaggagtaggagtcgaaagttactgtggcccatgtcctaaaaactggatatgttacaaaaat

SEQ ID NO: 449746 - DNA, 98 bp, Homo sapiens
ctatgcctactgcaccatccccacctaccccagcggccagatcggcttcatgctgtgcagcaagaacccggaaaatgtttcaacgtgcgcaagagttg

SEQ ID NO: 449747 - DNA, 75 bp, Homo sapiens
caggtgtaagcgcagaaagcaggcgaacccgcggcgcaataacgaaggtgggtgcggctgctatttggacgagag

SEQ ID NO: 449748 - DNA, 75 bp, Homo sapiens
agagacaggaggcagtagccaaacacccagctgaaaatgtgtgtctgacatgcaagctcagtggggcagagaccc

SEQ ID NO: 449749 - DNA, 75 bp, Homo sapiens
gtgtagaggaggctgaaaggaggaagagaagcagcagctgaggagacagcttggtgatccagctatttttcctgc

SEQ ID NO: 449750 - DNA, 100 bp, Homo sapiens
cctttggggacaactaaagctgcgggatacaaagtcagcccaggcagacctccagctaaaccatttacttctaaagtgaaacaaatgcgattacatagag

SEQ ID NO: 449751 - DNA, 82 bp, Homo sapiens
cgctccgtggccttagctgtgctcgcgctactctctctttctggcctggaggctatccagcagtcctgtgtatggaaactca

SEQ ID NO: 449752 - DNA, 82 bp, Homo sapiens
ggcctcccagctggaagaggcggtggcggcgggtcggggcgaggatgagacctgcacgcagtggctcacagcagcacgattt

SEQ ID NO: 449753 - DNA, 90 bp, Homo sapiens
ctgggactcctcgctccttggatggcagtggttctgagccagctgcagaaggctgccgacccctgggtcctgaagcactcggagctggag

SEQ ID NO: 449754 - DNA, 50 bp, Homo sapiens
tgataacaccctgtaacagctgagtgaaatgacaatggatgctctgttgg

SEQ ID NO: 449755 - DNA, 75 bp, Homo sapiens
gctgtctctatggcgaggaggaggaggaggagcgcgagctcagcgacacaagtgctgggtaggccaggtttcagc

SEQ ID NO: 449756 - DNA, 100 bp, Homo sapiens
ctctggccagggtgcttttggaaacaaatggtgatttctttgctaacatggtagtagatgctgtacttgctattaaatacacagacataagaggccagcc

SEQ ID NO: 449757 - DNA, 90 bp, Homo sapiens
ctcatcgctctcggcctccgacacgcaataccaagaaggagggtgacctgatagctgctcaggctcggctgaaggacctggaggctctgc

SEQ ID NO: 449758 - DNA, 100 bp, Homo sapiens
tgatgagctgaagactgattacaagaatcctatagaccagtgtaataccctgaatcccatttggcagctgatcggaagctctttcgtcttgtctccaatg

SEQ ID NO: 449759 - DNA, 100 bp, Homo sapiens
gtagacaaagtagctgatggattcaaggttgtggcacgttctggaaacatagtagcagttatgagttgcagaaacgaattgctgaaatggaaactcaaaa

SEQ ID NO: 449760 - DNA, 75 bp, Homo sapiens
aggatgaaggcagagcgtgtggcatctccacctcaaggcatggcttctcgctgtttctgggatgctgacactgac

SEQ ID NO: 449761 - DNA, 96 bp, Homo sapiens
cgagtctgaggcggagggagtaatggtgaacctatgggtcgtggaacaaaagttatcctacacctgaaagaagaccaaactgagtacttggaggaa

SEQ ID NO: 449762 - DNA, 76 bp, Homo sapiens
caactattcaacatggaggcggaggtcgataagctggaactgatggggctgcttgctctcggtgactacatgaatg

SEQ ID NO: 449763 - DNA, 75 bp, Homo sapiens
atggaaagagctttcacaggattcagcaaatgcaatttttccagctagtcaaattacgaaagcttggacttagtg

SEQ ID NO: 449764 - DNA, 101 bp, Homo sapiens
gcttggcgcctgaggttctcccattaggactacaaagctgatgaagacccagcattattccagtcagtcaagaccaagagaggccctttgggacccaactg

SEQ ID NO: 449765 - DNA, 100 bp, Homo sapiens
ccggaccgaccccaggcggcgctgagctgactgctgcccactttggaggaggcggtgggctccttcacaagaagactcaacaggaaggcgaggagcggga

SEQ ID NO: 449766 - DNA, 117 bp, Homo sapiens
gccagacctgctgctgcttcaatgtccgcatcgcaaccaccgccctggccatctaccatgtggtcatcatcagatttgaaatatttaaagtggatacaaaactatttcagcaatgca

SEQ ID NO: 449767 - DNA, 97 bp, Homo sapiens
aaacagatcgtatttatgcaatgaaagttgtgaaaaaagagcttgttaatgatgatgagagacttatttttgagctcgctgtaagactgagaaatca

SEQ ID NO: 449768 - DNA, 75 bp, Homo sapiens
gggtataggaagagaggtccgaaacccaagcggcttctgctgcaggaagctcttcgtgggcggtcttgactggag

SEQ ID NO: 449769 - DNA, 75 bp, Homo sapiens
ccacaggaattggatctactagtgcagtgaaagctggtggaatgcgaattgtgcagaaacacccacatacaggag

SEQ ID NO: 449770 - DNA, 101 bp, Homo sapiens
cgcttccccatggggctggcctgcggcgcctgggcgctctgaggttttgggtcctgctcctcggtggtgttccttcttagacaacttgaccgaagaattag

SEQ ID NO: 449771 - DNA, 90 bp, Homo sapiens
cgacaagtttctggacactctccgagaggtgaaggttcaagtgctggggccggcagtggagagttccacgtgtacagacatctgcgccgg

SEQ ID NO: 449772 - DNA, 83 bp, Homo sapiens
ccgtgaacgaaagcagtgacggaggagcttgtaccaccgttgatattcactgatggactccaaagaatcattaactcctggta

SEQ ID NO: 449773 - DNA, 75 bp, Homo sapiens
agatcatcattaaggacggaggcacgggcatggatttcattggtcgcgacgccctcctgcagcagaagcagaatg

SEQ ID NO: 449774 - DNA, 100 bp, Homo sapiens
gagcggccgggagcccgccgcgctggtagcgatgtacggagcgcaagaggacggcagcgtcggcgaaggtgacctgtcctgcatcctcaagacggccctg

SEQ ID NO: 449775 - DNA, 100 bp, Homo sapiens
ctcatccccccaaaagttgtcaggttgaaaatggaagagtaattgcctgctttgattccctaaagctgccactgcagagccccgccatggaagacacgcc

SEQ ID NO: 449776 - DNA, 101 bp, Homo sapiens
gagaggagcggccggagtcagcgatggtgcccggcgaggagaaccaactggtcccgaaagaggtttttcgttggaatatacgttgcacatttatggcgatt

SEQ ID NO: 449777 - DNA, 75 bp, Homo sapiens
ctcttggactgaacttaaatactgataggcatagttacaccaaaagtgatctatgaggaagcaactgacctagac

SEQ ID NO: 449778 - DNA, 87 bp, Homo sapiens
ttcatgtgggagctgcagcccctgttgtaccccaggcgatgtgttcagagcaacattgttttgttgacacaagcatttagaagaaag

SEQ ID NO: 449779 - DNA, 100 bp, Homo sapiens
cgcggctgcggggcttccctgcggctggagggctttgttcgcgggggtcacagctctcatggctgcagctagcgtgaccccccctggctccctggagttg

SEQ ID NO: 449780 - DNA, 76 bp, Homo sapiens
cgccgaggaggctttcctgctggtggcaaccgcctacgagacactcaagctcaagcctagaacgccacgttgtgcc

SEQ ID NO: 449781 - DNA, 82 bp, Homo sapiens
atcttcctgagcagagctctccgggttccccggctcgcggggcccggcgaagggcaggtggagccatcgaagcccccaccca

SEQ ID NO: 449782 - DNA, 97 bp, Homo sapiens
gaaagacgtcgaggggacgattggaatgacaggtcctggatggtcgccggcccacaggggggcgactggaggtaatggtccggattcgggagccact

SEQ ID NO: 449783 - DNA, 97 bp, Homo sapiens
tactctccagctagaacaagaagtgagaaaccaagatagattcatctcgacactgaaattacagccgattccacgactcttctttgcgggagaacat

SEQ ID NO: 449784 - DNA, 50 bp, Homo sapiens
gcggccacgcctgaaaggcgactctcctagtcaatgcatgtgttgatgtg

SEQ ID NO: 449785 - DNA, 96 bp, Homo sapiens
gtccaggagcatgtatgaaaaccgactacctggagtagaacagaaaaattattatgtctgtgttcccttgggactcattggaaattgtacagtgac

SEQ ID NO: 449786 - DNA, 100 bp, Homo sapiens
cagagagcagccgggctgccagcggggttgcagatggtgtaggaggctggagagactatggagttgatccatctcaattctcagggactttaatgcggac

SEQ ID NO: 449787 - DNA, 83 bp, Homo sapiens
ctcggaggcggcgtgggcggcagagagcggggcggcggcaggcaccgtctgcgtcctgctgtccttccccttcatcttcagcc

SEQ ID NO: 449788 - DNA, 75 bp, Homo sapiens
acatcctggaagctgggaaaaggtggcttgctttggtgaaggtattcatacagccttcctaaaggcaatgctttc

SEQ ID NO: 449789 - DNA, 75 bp, Homo sapiens
cagtacagagccctgggatggactggcagcacaggagccaaaaacctgtatatcatctccgtgaaggggatcaag

SEQ ID NO: 449790 - DNA, 50 bp, Homo sapiens
tgagcccaccagaatatgtttcttgctggtgtccgaatgatctacccagc

SEQ ID NO: 449791 - DNA, 113 bp, Homo sapiens
ccccgacatgattccttacttctccgccaacgcggtcatctcgcagaacgccatcaaccagctacctctgtgagtgaaagccttcagagggaagctgctaagaagcaggccat

SEQ ID NO: 449792 - DNA, 139 bp, Homo sapiens
ttactggtgaaggaatgggacaagacccatctttatgcaaagccagcgttacagtaatgttccaggtaaagagaaatgtgtatgaccttacaagtatccccgttcgccaccaattatgggagggctggccaacttctgc

SEQ ID NO: 449793 - DNA, 74 bp, Homo sapiens
gcactgctgggttctctatgtggatgtgctgcagaagctgttgggatgtagtccagctctgaagaggagccatt

SEQ ID NO: 449794 - DNA, 90 bp, Homo sapiens
cttgaagtcgtagacagcagcggggaaatcattcaccgagtcaaaaagctgacatgtcggattggtggaacgagaatgcctacacgcagc

SEQ ID NO: 449795 - DNA, 75 bp, Homo sapiens
atggacatcctgaagccaatcctgatgtgctcatcttttgctacgggacccagacaatacgatggaatattctat

SEQ ID NO: 449796 - DNA, 51 bp, Homo sapiens
gagggtgctggctgccgcgcggccgagctcaatctgaaattgaagtgtctg

SEQ ID NO: 449797 - DNA, 75 bp, Homo sapiens
tgtggaagagattcctgagaatgacaggaatactcccccagttgcaagaggcgcaggaccgtggaagacttcaac

SEQ ID NO: 449798 - DNA, 87 bp, Homo sapiens
ctttcagccggagaagcgagtttcagctgagtgtcaatccatatctacaaggacagagactggataatgttgttgcaaagaagtctg

SEQ ID NO: 449799 - DNA, 74 bp, Homo sapiens
gaacacaggtccatggaacaatcacaggtgtggatgaagcaaccatcattgacattctaactaagcgaaacaat

SEQ ID NO: 449800 - DNA, 98 bp, Homo sapiens
tcttacaacatggcagacattgacaagaaaagaattccatggcaacatcattaaagtgtcctttgccactagaagacctgaattcatgagaggaggtg

SEQ ID NO: 449801 - DNA, 75 bp, Homo sapiens
taggccttctggagaaacttctgttccacctcctcctgcagctgtttctggcaaagcctgccgtgtcttacattt

SEQ ID NO: 449802 - DNA, 75 bp, Homo sapiens
ttttttcccctggatacagctagacttcgacttcaggggtagcagtggtgggcaacgtggatgctggcaaaagca

SEQ ID NO: 449803 - DNA, 90 bp, Homo sapiens
aggcaccaagtgcatcaaatacctgctgttcggatttaacttcatcttctgggtcaaaatgcagatcttcgtgaaaacccttaccggcaa

SEQ ID NO: 449804 - DNA, 100 bp, Homo sapiens
gcaacaacttcaatgcagtctttagtcgcatttctaccaggctaaagaattacctccaaagccattgtcaagaccacagcagtcatctgcaccagtccag

SEQ ID NO: 449805 - DNA, 100 bp, Homo sapiens
ctaaggacgacctttgaacaatacaaaggatggttggtagctggcagtgttgtgatggcttttgaagaagtatgcccggacagaatagatctgattcata

SEQ ID NO: 449806 - DNA, 74 bp, Homo sapiens
ccagccaccagttcaggagcacttgggagtgatctaggcagcctgcttctgcaaagtggtacgatcgaagggac

SEQ ID NO: 449807 - DNA, 144 bp, Homo sapiens
ggtcgctcggcgcagctgttgcggggccatggcggggaccgcgctcaagaggctgatggccgagtacaaacaatcagcatgattcttcagaggctcttcaggttctcctctgtcattcggtcagccgtctcagtccatttgcgg

SEQ ID NO: 449808 - DNA, 83 bp, Homo sapiens
gcggaggcggtggtggtggcggccgctggccagtggacttgccatgaggtgttgaagccttgtttcactgagttggagagact

SEQ ID NO: 449809 - DNA, 90 bp, Homo sapiens
gccgtctccccaggtggtcaggtggaacccatgcctggagcctcaccgcttcaatgacacagagatctgggacataggaggacaaccccg

SEQ ID NO: 449810 - DNA, 112 bp, Homo sapiens
agcctcgggtgcaatcctggagccccccagtgagggtttatctggcaagactgaggcaaataagactacagaatttcaatgagcgccaacagattaaagccaaacttcgtgg

SEQ ID NO: 449811 - DNA, 100 bp, Homo sapiens
cgctatggcgcactggagtaccctgttcctggcagatagcagtgagattcacttcaaagtgaaaatgacaacacatctcaagaaactcaaagaatcatac

SEQ ID NO: 449812 - DNA, 90 bp, Homo sapiens
cgctgcctgctgatctgagggccaaagtttggaagattgcagccttcttcgctgagtctctgcccagtgtgggagggcagatcattcccc

SEQ ID NO: 449813 - DNA, 82 bp, Homo sapiens
gtgtcagagcaaggagaagctgttgatcagtcgcatcgaatacattcattcaaagaacttcatccaccgggatgtgaagcca

SEQ ID NO: 449814 - DNA, 101 bp, Homo sapiens
catggttgccggctcccctctcaggacaacccagatgtgcaacaaagtgcgatgcggagctgatccccagccacaggatgaagaagaagggccccagcctg

SEQ ID NO: 449815 - DNA, 97 bp, Homo sapiens
ctccagcatccaggagctctacgcccagatcgcgggcgcgtttgaaatctcgccgtcggaggacattatcccctttggcaacaaccccatcttccgc

SEQ ID NO: 449816 - DNA, 90 bp, Homo sapiens
gctggacaagaagattatgacagattacgccccctatcctatccgcaaacagcagatcgggagcggtgccgagaaaaatttccttactag

SEQ ID NO: 449817 - DNA, 100 bp, Homo sapiens
ttaaaacagatctgcgcttccagagcgcagctatcggtgctttgcagatggactagaggcttttaccagatttcttaaaactgaattcagtgaagaaaat

SEQ ID NO: 449818 - DNA, 100 bp, Homo sapiens
gggagccagagggcgggggtcctcgccgggaccctcctgtgggcccaggggagacccaaacatggcaaacctggaagaaagcttcccccgaggaggtaca

SEQ ID NO: 449819 - DNA, 100 bp, Homo sapiens
catccctgcccaatctagtgaaaaaccagctgtgttccagatcatctccctggtaatttaccccgtgaagtacacccagaccttcacccttcatgccaac

SEQ ID NO: 449820 - DNA, 101 bp, Homo sapiens
gatcactactcttggaatcaaagataaatccaaatactgcatatcagaaacaacaggtgatctgtgaaaatggttcgctattcacttgacccggagaaccc

SEQ ID NO: 449821 - DNA, 100 bp, Homo sapiens
catccaaatcttctccctggacctcgtgcatacgaacccttcttcttggcgagaccacgatgatgcaacctcaacccactcagcaggcaccccagggccc

SEQ ID NO: 449822 - DNA, 82 bp, Homo sapiens
aggagctgtgcagccgcgaggaggcgcgggaggtgttcgagaacgaccccgagacgatggagttttaacattgaatgcggag

SEQ ID NO: 449823 - DNA, 82 bp, Homo sapiens
ggcccgggaatttcttcgaaaaaagcttattgggaagaagggagatcttgtgcgaaaactcaaagaagataaagcaccccaa

SEQ ID NO: 449824 - DNA, 100 bp, Homo sapiens
ttctttaatgtgaccacactccagaaggagctgtatgactttgctaaggaaaatataatggatgatgatgagcgcctgctgttactgctgcaagacaagg

SEQ ID NO: 449825 - DNA, 98 bp, Homo sapiens
tccattgcttctaggacctctcagaacacagtggacagtgacaagtctgtttccaggtctggcggggggccgggctgcggtggcggcagcggtgggag

SEQ ID NO: 449826 - DNA, 98 bp, Homo sapiens
cccgctctgtgctgccgacatccaggaccagctaaagaagcgctttgcttacctgtccgaccttccatggctattcacttttaatgtgaagttttatc

SEQ ID NO: 449827 - DNA, 100 bp, Homo sapiens
ctagtgtccgctctgctcggccgcgggctcccggaggactgcagagctttgcagctgccctgatggagatgtccggcccctacaacagctcccctcggcc

SEQ ID NO: 449828 - DNA, 78 bp, Homo sapiens
aatggcaagggagcattccaggagagaaagggaacctcgagtggttggataagagcaagtccagcttcctgatcatgt

SEQ ID NO: 449829 - DNA, 100 bp, Homo sapiens
ttaagacattcttggaagccttaccgattcttgccagctctcattactgcagttctgaccaatcatcttgcctgggttccaacagtcatgccaaatggac

SEQ ID NO: 449830 - DNA, 74 bp, Homo sapiens
ctgccatgtccgcaccggcaccatcctgctcggcgtctggtatctgccaatcctgaggcaaaagaaacatttta

SEQ ID NO: 449831 - DNA, 100 bp, Homo sapiens
cacctgtttgctgggcttcagtttcctgctcctcgtcatctcttctgatggacataatgggcttggaaaggaggaaggcattactgggtaccggccaaga

SEQ ID NO: 449832 - DNA, 90 bp, Homo sapiens
cgaggaacccggctgaggcggcagggatggaagcttcctggcgccaggtggccggtggccgaggccgatcccggggacgggccactgccg

SEQ ID NO: 449833 - DNA, 100 bp, Homo sapiens
tctccatgtagacttccatcttcatgagtactccaagaagatggttcagttgactattgcaaaggagaaggtaaagcttgatgctgaaagggaaaaacta

SEQ ID NO: 449834 - DNA, 96 bp, Homo sapiens
ctgcagaacacgagcctttcctgggtatgtgtgggaggtgtcccaagcccctgaagaaccgtgatgtcatcaccctccgctcctggctccccatgg

SEQ ID NO: 449835 - DNA, 98 bp, Homo sapiens
aattacaagcggacacgggaatatatccgaagcctgaagatggttccaagtattccctatctagatattgatgatgttaagaagttcaaaccgggtta

SEQ ID NO: 449836 - DNA, 75 bp, Homo sapiens
cgacgtcttgcctgtgtcccacttgttcgcggcctatagtccaaagagtcctcgtcagtgcttagctgtgacatc

SEQ ID NO: 449837 - DNA, 100 bp, Homo sapiens
catccatctaaagcaccagtaaaatatggtgaactcattgtcttagggtagatatagttgtaggtactccgggaagactagatgacttggtgtcaactgg

SEQ ID NO: 449838 - DNA, 100 bp, Homo sapiens
agctggagcggcagcagaaggagagtggagcctttcaggctggcatggagagcttaaggggcaactgaaggagacacactggccaagcgcggagttctgc

SEQ ID NO: 449839 - DNA, 100 bp, Homo sapiens
ggagacggaccgagccacgggcccccgcggccgcagcatctcggaggagctcaggccacagggtcaccacatacatcgcccacccatggaggcggccggc

SEQ ID NO: 449840 - DNA, 50 bp, Homo sapiens
tggaacagttgttgcagcaagcgattcagcacctgtggaatcctctcaag

SEQ ID NO: 449841 - DNA, 98 bp, Homo sapiens
caacctgcccagctacaaggccaaggtcatgcttcaccccttcctccatctgctgcacctaccactgattctacagattccataacaggacagaattc

SEQ ID NO: 449842 - DNA, 100 bp, Homo sapiens
gttggcggatggaagggaggagactcctgaccctcagaatgagaagatggcgaattagaagatggtgaaatagacgatgcaggatttgaagaaatacaag

SEQ ID NO: 449843 - DNA, 100 bp, Homo sapiens
cagtcgcgctgagggactcggctcagatgttggtgaccttcaaggatgtggctgtgacctttacccgggaggagtggagacagctggacctggcccagag

SEQ ID NO: 449844 - DNA, 100 bp, Homo sapiens
atttgagctcattcaaagtggcccagtatgtggtacgggaagaagaaatgggggacttggatgttgtgggtgatggtatgcagtgtcctccttcaccttt

SEQ ID NO: 449845 - DNA, 125 bp, Homo sapiens
ctccagggaaaggatgacatatttttggacctgaaacagaaattctggaacacctatatggaactctgtgaatctcttgaagaagattacaaagacatagaacatcttaaagaaaacgttccttc

SEQ ID NO: 449846 - DNA, 100 bp, Homo sapiens
gtgaggtcacattgttggtgcaacgaggagcctgcctagggtagttaaaagacgagtgaatgctctcaaaaacctgcaagttaaatgtgcacagatagaa

SEQ ID NO: 449847 - DNA, 75 bp, Homo sapiens
cagtggtcgcttcttctccttgaagttgattcaagtcagttgagacgccagttgtgtggaggaagtcaggccgcc

SEQ ID NO: 449848 - DNA, 101 bp, Homo sapiens
caaggaccagaccgtcgggaacagccatgcaaaggcaggggaggaagccacctcgagaggaccttatcatgtccttcactgtatccatggcaatcgggctg

SEQ ID NO: 449849 - DNA, 100 bp, Homo sapiens
attgtaccaccttattcactgtgtcagactggggaggacctacctaaagattatggattggatatgtctacttctggatgcaaattttactgttgttgta

SEQ ID NO: 449850 - DNA, 112 bp, Homo sapiens
aatgaaccgtggcaatttcttagagatcaagaataaatttctagctcgaaggtttaaggcaacatttcatacaccatttagtcacctaggccaaagtccggaaggatgctcc

SEQ ID NO: 449851 - DNA, 100 bp, Homo sapiens
gctctgtgcgttgggaaagggaagtggagatacactctgtgcagttttagagagagacacactcagtattcgagaaagtcgactttttggagctgttgta

SEQ ID NO: 449852 - DNA, 100 bp, Homo sapiens
aggctgctttcaggaacattgctgtggattcccaggatttattggatcattcgtgtacatcaggaagtggctctggtcttccttttctggtacaaagaac

SEQ ID NO: 449853 - DNA, 83 bp, Homo sapiens
gagttccgcaccctgatgaaagcctacgggatccgctttgacgtgatggtgaacggcaagacaatgcagatcttcgtgaagac

SEQ ID NO: 449854 - DNA, 100 bp, Homo sapiens
ctcaaaatgaggaaattctgtatgttcttcgccattatattcagaaacttacagcctatttagatcttaacctggataagtgctatgtgatccctctgaa

SEQ ID NO: 449855 - DNA, 83 bp, Homo sapiens
ggtgaatttccatgtcaacatagtcctgattcctggattttgtgaagggggatttaaaatccatgaggctgatataaatgcag

SEQ ID NO: 449856 - DNA, 100 bp, Homo sapiens
cccaggagctgcaaaccacccaagtctgcaatcttaccagggaggccaagcgaccacccaaagaaggtttatggttggctgtgggagatgtgatgactgg

SEQ ID NO: 449857 - DNA, 84 bp, Homo sapiens
taaccacccagtaccaaaggcaaatactcctgtaaatttgagtgtgggtgcaaaaatgcagagtaataaaacttttaacttgga

SEQ ID NO: 449858 - DNA, 100 bp, Homo sapiens
atgacaagaagacgtccaatctgagcgtgctgcggacggcgctgcggtacatccagagtttatgtggccgaggcagacaagtggaattaggccttgctgc

SEQ ID NO: 449859 - DNA, 75 bp, Homo sapiens
ctcggcgacagccctagcagcgaggccaaaacagatgccctccaaatccttggttatggaatatttggctcatcc

SEQ ID NO: 449860 - DNA, 100 bp, Homo sapiens
tccttccttcctccccacccattcctttaaatccggagggggaaaaaatcccaaggtctgcaaaggacgtcctccccaacgtcgccctcaattccaccgc

SEQ ID NO: 449861 - DNA, 101 bp, Homo sapiens
tcaaccattcgctgaatggaaacgcctcgccgggcccgcagccctgtctctccgcagttcccaggtctcttgagaacccaacccctccattcactcccaaa

SEQ ID NO: 449862 - DNA, 101 bp, Homo sapiens
tgccttttcattttacttcatcctccaaggagttcaatcacttggcgtgacttcactacttttaagcaaaagattgtcatggatgcactggtagaagatga

SEQ ID NO: 449863 - DNA, 116 bp, Homo sapiens
gccttctctgtggaactgctctggcagtcatcgtgcctgaaggagtacatgccctttatgaagatattcttgagggcaacagcattattgagaaaagcccttacagaagagtgtgg

SEQ ID NO: 449864 - DNA, 83 bp, Homo sapiens
tggagcaagaaaaagagccctggaatatgaagagacatgagatggtggatgaacccccaggttgtctatcaaaaagaatgtcg

SEQ ID NO: 449865 - DNA, 100 bp, Homo sapiens
gtccagcttcaccacgcggctgcacaactgcaggaacaccgtcacgctgctggaggagatgcttgcacataccacccaggtgttccggtctttcacgatg

SEQ ID NO: 449866 - DNA, 74 bp, Homo sapiens
tgctggttctgatgttcatgaccctccttcactttgacgccagcttcttttctttggctggatctattattggc

SEQ ID NO: 449867 - DNA, 100 bp, Homo sapiens
cttcaacgaagaccgagactttcaggtacatggccacctctggcctagaccaccagctgaagatctttgacttgcgagggacgtaccagcctctgagcac

SEQ ID NO: 449868 - DNA, 73 bp, Homo sapiens
aaatggaagaacaaatatgtctgtcaggtccaggggcaagttcatcctactctcgagtctaatgatgatgctc

SEQ ID NO: 449869 - DNA, 95 bp, Homo sapiens
agaacatctgggagaatatttaatggaaaatcgcttggttaaaacctgacacttttaacagattagaaatgatatttgccaaatttgatgaagtg

SEQ ID NO: 449870 - DNA, 100 bp, Homo sapiens
gaagacgacttcgaccctgcccagcacgaccagctcatgcaggaattcctggtgactggaagggggagtgactcaggccctcaacctctagcaggtaagg

SEQ ID NO: 449871 - DNA, 74 bp, Homo sapiens
taggagaaatcgaggagctgcggctctaccccccggatctttcccagggaactccgatgaagtgttccaacaaa

SEQ ID NO: 449872 - DNA, 100 bp, Homo sapiens
ctacaatgcttctcaagatgtggagctctccttgcagatcggtgacacagttcacatcctggagatgtacgaggacaagttggatggcttgaggactggt

SEQ ID NO: 449873 - DNA, 98 bp, Homo sapiens
ttcgtctcccaggacgccacctactccaagcccccctcgcctatgccttcagacatcaccagccaggtacatgcaccatggaactggcaagtgggcag

SEQ ID NO: 449874 - DNA, 100 bp, Homo sapiens
accattggcaccatcgatgagatccagaagctgcacattcgcacagttcccctctatgagtctccaaggaagagccaatgttttccacccataatccttt

SEQ ID NO: 449875 - DNA, 100 bp, Homo sapiens
gagggagttactaagctgaaggcggataacctctttctagagaaggctatgcagcttgcaaagaggcatgccaatgcccttttcgactacgcggtgacag

SEQ ID NO: 449876 - DNA, 85 bp, Homo sapiens
cagttggaagcagccgatccagcctgcggagcctgtggggcagggcgtctctggccgagcctctttttgtggaaaacgacagcag

SEQ ID NO: 449877 - DNA, 51 bp, Homo sapiens
cgagttccacgcgctgcacaagcggaaagtggaagatgcgaagattgcaat

SEQ ID NO: 449878 - DNA, 90 bp, Homo sapiens
cgttcacagaggaacactgccggggcccaaccacaagacgactcaataggaggaaggtttttagaacttcagccataaaaatgggcagaa

SEQ ID NO: 449879 - DNA, 97 bp, Homo sapiens
atcttactgaaggcagtgaagcgaagaaaaggatcccagaaagtttcaggaaagaccacagcaagattctttcattcgtctcctcctagcctggggg

SEQ ID NO: 449880 - DNA, 100 bp, Homo sapiens
gcaagatggagagggagaagagcattgagatcgagaacctgcagaccaggtatctttttgagcaccttctacaaggaccatccagcacatccataggaat

SEQ ID NO: 449881 - DNA, 88 bp, Homo sapiens
cggaggctccagaaacgggtcctgctgctcaccaaggaaactaaatatattttgccaactttggaaaaagaattattcttggcagagc

SEQ ID NO: 449882 - DNA, 74 bp, Homo sapiens
gaaatgaagtataataccaagaaagccccacttggttggatggcaagcatgtggtgtttggcaaagtgaaagaa

SEQ ID NO: 449883 - DNA, 75 bp, Homo sapiens
cgacgagtacgactacctctttaaaggcgtggtgtccctcgtggccgttcacccctccaccgtcaacccgctcgg

SEQ ID NO: 449884 - DNA, 49 bp, Homo sapiens
tcagctggaacggcaggcctggtgctactatatcggggccacagatgat

SEQ ID NO: 449885 - DNA, 100 bp, Homo sapiens
tccacaaggtgttagtgatgattctagtacgggatcaagagttcatggtatatctatgttgctgacatattggctcatgaaattcatgttttggaaaaac

SEQ ID NO: 449886 - DNA, 85 bp, Homo sapiens
gcccgcccaactcccagcggagagcaagcatgttggcagataaattgaacatgactccagaagaagctgaaaggtggattgtaaa

SEQ ID NO: 449887 - DNA, 90 bp, Homo sapiens
aaagaatctgaggtggctcacgttgaccaactctttgatgatgcatccagcaccacaccccactctggccggagcacgccaagcagctcc

SEQ ID NO: 449888 - DNA, 100 bp, Homo sapiens
cggcgcgtcacgggcctcagctgggattcccgcgcccctcggacggccacgagactcggggatttatttaatggggatgtgttcaaggcaagagcgaatt

SEQ ID NO: 449889 - DNA, 50 bp, Homo sapiens
gttaccacaagggaccagtggtcaaaaagttactgtggcccatgtcctaa

SEQ ID NO: 449890 - DNA, 107 bp, Homo sapiens
tgatgatgaacgtctccggaaagagttttctccatttggtacaatcactagtgcaaagaacatccagtcatggataaaaatgagctggttcagaaggccaaactggc

SEQ ID NO: 449891 - DNA, 75 bp, Homo sapiens
tgccacgcaccttctgccagctgatcctggaccccatcttcaaggctgtgttatatgacatcatcctgaagaact

SEQ ID NO: 449892 - DNA, 75 bp, Homo sapiens
catctctggcacaacagctcacttttcttccaaggataagttgcaagagatcaagtcccagcagagcgaggtgac

SEQ ID NO: 449893 - DNA, 82 bp, Homo sapiens
cgggacgcgaggaccatggctgcctccgagcgccgcgccttcgcgcacaagatcaacagatgaagatgtgtgtgtctttaag

SEQ ID NO: 449894 - DNA, 87 bp, Homo sapiens
tcacgaggctgtcatcaccgccatgcccaagaataaagtttttcagaagaagtgaagtcaagatgaagaaccatttgcttttctggg

SEQ ID NO: 449895 - DNA, 98 bp, Homo sapiens
aaaaatctcaaggaaaagtattgcaagcaacagtagtcgctgttggatcgggttctaaaggaaaggtaccacaagagccaggccatctatctggagtc

SEQ ID NO: 449896 - DNA, 75 bp, Homo sapiens
tctgtacaacgtgaagggctacctgaagatggcaccctctaccgaataaacaggacagagcgggatgccaccagc

SEQ ID NO: 449897 - DNA, 100 bp, Homo sapiens
ttcgaggacttcacggagctctggagaaacatgaagttcgggactatcttctggtaacaactccaagtttcctttggataatacacctgttcgaaatcgg

SEQ ID NO: 449898 - DNA, 96 bp, Homo sapiens
ggaccacatagacatttacgcggatgtcggcgaagagttcaaccagatggggacccagagcctgctcttgggaacagccagagtaagattggaacc

SEQ ID NO: 449899 - DNA, 75 bp, Homo sapiens
gggccggttctgcaccatcttcaggtcctactccaggggcgctcaggtggagcagttctggaggttttatagcca

SEQ ID NO: 449900 - DNA, 100 bp, Homo sapiens
tcaaagaatagataacaagtgcagtcagattgctgttccccgcaatgatgaatgggcacggtttggccgaacacttgcagaaattaatgcaaaccgagct

SEQ ID NO: 449901 - DNA, 100 bp, Homo sapiens
ggctactggctggaggaaagggacaggcctgggatatggccatcctggattggcttcatcagaggaggctcctcctggtcaccagcctggtggttgtgct

SEQ ID NO: 449902 - DNA, 78 bp, Homo sapiens
gcagccgcccgcttcaaccccaggggaccagaggaactcagccctgattgcggataaaggctcactgatggctcagtt

SEQ ID NO: 449903 - DNA, 107 bp, Homo sapiens
gggggaaactaggtcgatggtcggcggcgcccggatgggcagctgaggctcttgtcaggatggtgaagctgttcatcggaaacctgccccgggaggctacagagcag

SEQ ID NO: 449904 - DNA, 75 bp, Homo sapiens
cagccatcatgtgtgtcagcatgagaggagttaagtatgacattgacctgcccaacaagaaggtctgcattgaat

SEQ ID NO: 449905 - DNA, 98 bp, Homo sapiens
gagggctgagttctgcacccagtcaagctcaggaaggccaagaaaagaacgcatgctgattctgcaaaatccacctcttctgaaacagactgcaatga

SEQ ID NO: 449906 - DNA, 96 bp, Homo sapiens
ctttgtacagaaattgaaaggcttcaaagctagcagattctatgcggcagagatttccatcggattgttctttcttcataaaagaggaatcattta

SEQ ID NO: 449907 - DNA, 98 bp, Homo sapiens
ggcagcagcgcgggccagagcgcagcgccgagcgcggcccgggcgccatcgagccttggcggcggacgtgcagtacatcgacgccatcagcaacaagc

SEQ ID NO: 449908 - DNA, 85 bp, Homo sapiens
tttctacaaactctgtgcctcaacaaccatttctaagtgtactatactggcaattgctggagaagattttgcaattgttgcttct

SEQ ID NO: 449909 - DNA, 50 bp, Homo sapiens
ctatgccgccaagaccgtctttgagcagtctgagtccccgcctcgccgag

SEQ ID NO: 449910 - DNA, 83 bp, Homo sapiens
ggcggctgcggaggcgcaggcagcaactgaggcagcggcaggctcaggtgcagccgctggttgctatcaagatcatagataag

SEQ ID NO: 449911 - DNA, 100 bp, Homo sapiens
aactcctactgttgaatacatctgcacccaacagaatattttgttcatgttattgaaaggctgctctgttaaaagcgaaaatgaaacaattgcctgcggc

SEQ ID NO: 449912 - DNA, 100 bp, Homo sapiens
gggatagcctctcttactaccactcacccgcagactccttctccagcatgggctcgcctgtcaacgcgcaggctctattccgttcgctggttcgccacct

SEQ ID NO: 449913 - DNA, 100 bp, Homo sapiens
ggagtttccaagtatggcataaaagtatcaacatcagatcaatatgaaaattgcctaagaattatgacccaaaagttaccccagatccagaaagatggct

SEQ ID NO: 449914 - DNA, 100 bp, Homo sapiens
gtatcattgctgtggaaaaatctctggagtcagaggcctgggcgcagctctggactctgcgtataacaagtgtgaacatggctacgcctcttcattcccg

SEQ ID NO: 449915 - DNA, 82 bp, Homo sapiens
acagactggaaacaatattgaaacactggaccagagacggtaaagaacaggtccaagaaaagctcaaagaaagcaaatacca

SEQ ID NO: 449916 - DNA, 75 bp, Homo sapiens
tgagtactacgcccgctccgaggactacgtggagctggtgcagcggaagcgagtaggcctaacatcgtgtcccag

SEQ ID NO: 449917 - DNA, 83 bp, Homo sapiens
ctcacaatgaggctccctgctcagctcctggggctgctaatgctctgggtctctgctctgcttatgataatgtcaacaaagtt

SEQ ID NO: 449918 - DNA, 87 bp, Homo sapiens
tactactacatggacgtctggggcaaagggaccacggtcaccgtctcctcagccgaggcctgcctggagccccagatcaccccttcc

SEQ ID NO: 449919 - DNA, 104 bp, Homo sapiens
caacttcagacgccggcgctgccgcggcgcccaacccaggtccccgaagcaagcctcctgatttaaagtttgaatcagcttgggtactgacaaatattgcttca

SEQ ID NO: 449920 - DNA, 74 bp, Homo sapiens
ttatcgatattatgagagcagagcatgatcctcttaaggcttctttcatcggaagaaaactactacagcacttc

SEQ ID NO: 449921 - DNA, 100 bp, Homo sapiens
gcccagccggcagccggcggtccatccagctgatgcttttttcaaagccgctataagccttgttccggaagttccaaagatgattaatattgatgggaag

SEQ ID NO: 449922 - DNA, 73 bp, Homo sapiens
ctgggtgctggcgaagcggaggccggaggattcactccttctccagttgcacagccacacccttcagctggcc

SEQ ID NO: 449923 - DNA, 82 bp, Homo sapiens
gccaagatggcggtgctgtcagtttggtgccctggttgtcagatgttggaaagcagtaggacggaacatactcttcgtggtt

SEQ ID NO: 449924 - DNA, 78 bp, Homo sapiens
agacttgatggtctggtagaaacaccaacaggatacattgaaagttgaagatgcccactctggactgcttaaaggaaa

SEQ ID NO: 449925 - DNA, 73 bp, Homo sapiens
gcacgagcagatcctggtcctcgatccgcccacagacctcaaattcaaagctgtgtcagcgtgttatgatgcc

SEQ ID NO: 449926 - DNA, 100 bp, Homo sapiens
tcaaatctcaaacaatttatgagattattgataattctcaaggattctacgtattctacaagggggttgctcctctctggatgagacagataccatacac

SEQ ID NO: 449927 - DNA, 75 bp, Homo sapiens
cgcgcgggccagccacctgggcctggccaggagattcaaggctggctggaggctacgagaatgtgcccaccgtgg

SEQ ID NO: 449928 - DNA, 116 bp, Homo sapiens
gacagtctcttacacctcctcctcagaacactattacatgggaagaatatatatctgctgaaaatggaaaggcggcgactggcggcgcgatggacctgaccgggctcctgctggac

SEQ ID NO: 449929 - DNA, 75 bp, Homo sapiens
aagtccagatctccatctccaaaaagaaggaagggcctgtcccagtcggctttaccctatcgacgcagcgtcccc

SEQ ID NO: 449930 - DNA, 83 bp, Homo sapiens
agggcctccgtctggatttccaaggaagaatttcctctgaagcaccggtatccaaaccttgaaacctttgctctagatgtcag

SEQ ID NO: 449931 - DNA, 97 bp, Homo sapiens
gaggaagagattgcagtgggggctgccagtgctaccctgagaaaggtggacgtatgccatcccgcccactttctacagaccctacttcagaattgtt

SEQ ID NO: 449932 - DNA, 100 bp, Homo sapiens
cgagaggtgcggcgaaggaggcagaggcacttatgcttgtcaggccataggaaaaggatacagagtagagtttcatgaacctgaaacttggtggaaattt

SEQ ID NO: 449933 - DNA, 73 bp, Homo sapiens
tagcaaaaagtcagactgtggagtgcactgtcacatatgaggaagatgacctgcccagaagccgtcgctccag

SEQ ID NO: 449934 - DNA, 102 bp, Homo sapiens
aaggatccctcacagcccagctcgggaagtggacagactgggcgtcatgacccttgaacagcgacatctcactcatgaaaatgtacagcgcaagcaagccag

SEQ ID NO: 449935 - DNA, 75 bp, Homo sapiens
tgatgcgtcttccatttgcaagctgtcaccactgactaaagaagagaaaactgcggcagagcaattcaaatttca

SEQ ID NO: 449936 - DNA, 100 bp, Homo sapiens
ctactacatcccgcagtacaagaactggagagggcgtgttggagagtttcctgggcactgctgtctctggagccatcttttgcctttttgctggtcaacc

SEQ ID NO: 449937 - DNA, 100 bp, Homo sapiens
agctggtgagcctcatcacacaggatccgcccctggacatggaggagaaggtccgcttcaactctctagatgagaccacctatgaaagactagcagagga

SEQ ID NO: 449938 - DNA, 100 bp, Homo sapiens
tctgcacccagtcaagctcaggaaggccaagaaaagagctcatctcctgtcctgggtgtgaacgagtatatcttaccagggatgtaactgaacatttttt

SEQ ID NO: 449939 - DNA, 100 bp, Homo sapiens
gaagaagctgtatcttatctatggaagataaagcatggagttggctaatggatgctgaagcatcaagtgtacctgatttgtgaacctatcttgcttcagt

SEQ ID NO: 449940 - DNA, 100 bp, Homo sapiens
cgccggccccatgaggagggacgtgaacggagtgaccaagagcaggtttgagattcttggtgccaccattgagaactccaggattgtcctgcagatcgac

SEQ ID NO: 449941 - DNA, 98 bp, Homo sapiens
actggaactccccattatatgagtcctgaggctctgaaacaccaaggctatgacacaaagtcggacatctggtgccttagctggaccaattattgtgg

SEQ ID NO: 449942 - DNA, 75 bp, Homo sapiens
aggacctggcttagctattcattgcatgcagagatggacagagacgtatgtgcgttggtctcctaagggcaccta

SEQ ID NO: 449943 - DNA, 82 bp, Homo sapiens
agctcctactcctccctcaactccctcatcggccaagtcctgtatctgccatgtctgtggcgtccacctcaacaggctgcat

SEQ ID NO: 449944 - DNA, 75 bp, Homo sapiens
ccttacctcagactagaggcgatggaaagaaaatagttagttaccagtgctgggctttgacaaacttcctctgtg

SEQ ID NO: 449945 - DNA, 109 bp, Homo sapiens
ggggggtcactgcgacgttcacagaggaacactgccggggcccaaccacaagacgactcaataggaggaaggtatacaaaactaggatatgctggaaatacagaaccac

SEQ ID NO: 449946 - DNA, 82 bp, Homo sapiens
gcagccggcgggtacctgcggccaattcggtggaacgaggacgcggactgcgaaggcaggggcataaggaaatggtggcagg

SEQ ID NO: 449947 - DNA, 97 bp, Homo sapiens
gaactgcgcagcctcttcgagcgccgcggacgcgtcatcgagtgtgacgtggtgaaaggacctgtaattctagaagatgtcctgattgaagtgttta

SEQ ID NO: 449948 - DNA, 100 bp, Homo sapiens
cttcaccaagacctaaaaaaccccaacaacagctcccttaggtcttgatcttagcagtcaaatcaagggctgtctcgtgactgcttcagctgacaaatac

SEQ ID NO: 449949 - DNA, 100 bp, Homo sapiens
gacacaaaatcccagatctacctgacgggcctgcgagggttgaagattgtgaagcaatagcctaagcaacgttggcccagaaaaccccagcaggatctgc

SEQ ID NO: 449950 - DNA, 82 bp, Homo sapiens
ggagcccggctcccgcaccatggaggaggacgacagctacgcttgttctaaagacgaaggggaactccctagtgctacaggc

SEQ ID NO: 449951 - DNA, 100 bp, Homo sapiens
caccaccatcgcatacagcatccggggacagctgagctggcatcagaagacctacgccttcaggaaaaggacccactctccgtcctctaaggatgagcag

SEQ ID NO: 449952 - DNA, 100 bp, Homo sapiens
aacagctggccacgaaagccgccaggaaaagcgctccctctaccggcggggtgaagaagcctcatcgctacagggtaatagaacttctaccctcagagga

SEQ ID NO: 449953 - DNA, 88 bp, Homo sapiens
gcaggagttgtggtcagtatgtctcctgcacagctgggaaccacgatctacaaggtatctttaggtggtgttgatcttacagtccggg

SEQ ID NO: 449954 - DNA, 82 bp, Homo sapiens
ggaaatgtgccagtgatattttccaggatctcgaggacctggaagaagcagaggagccagacatggaggaagacgatgatca

SEQ ID NO: 449955 - DNA, 98 bp, Homo sapiens
gccagctgtttttgaggatcctgctccacagagaatgctctgcacccgttgatgtgggcaccatgtccttgaagcttcaggcaagcaatgtaaccaac

SEQ ID NO: 449956 - DNA, 100 bp, Homo sapiens
ttggcatccagattatccactgcatcggcgtggcacaagcctaatggaagatgatgaagagccaattgtggaagatgttatgatgtcctcagaagggagg

SEQ ID NO: 449957 - DNA, 83 bp, Homo sapiens
ccctgtctttcagaagctgaaaggccagttcacgacgggtgacttaagagattaaaattaatttggttgctgttggttctgaa

SEQ ID NO: 449958 - DNA, 95 bp, Homo sapiens
accatccagaagtgtctcccactgaaggcatccgtggttgtttttaagaaactaatctggattcactccctctggttgatacccactcaaaaagg

SEQ ID NO: 449959 - DNA, 100 bp, Homo sapiens
agctgtgctgggagagaatgggcgggtgctggccgggcagaccctggatggaggagatgagacggcccgaagttctctctgacccccacctcgactcggc

SEQ ID NO: 449960 - DNA, 95 bp, Homo sapiens
caaatctctcattacaactcatcatttgatggtgtatggaaatgagcattgtcgtggaagttctccgaatcctggttttgattggtcagattctt

SEQ ID NO: 449961 - DNA, 95 bp, Homo sapiens
agctttgcctccagggtcatacgcatccttaggtgatggctgtggacacctagtgacttatcaggatagtggcacaatgacatctaagaattatc

SEQ ID NO: 449962 - DNA, 74 bp, Homo sapiens
tttgattgaatatcctatagaccctgttacacaagaatttaagaatgtactcaagactgatcttctaagttcac

SEQ ID NO: 449963 - DNA, 75 bp, Homo sapiens
cgaaactttcaccgcgagcggcatggaaataaccagcctgcaagaactggcacactgtcgagaacaaatcctcct

SEQ ID NO: 449964 - DNA, 80 bp, Homo sapiens
atcaaagagtgatgggaagaagtctctgaggtcttctaaatcagaatcaagatctttagcccaacgtgccatttagaccg

SEQ ID NO: 449965 - DNA, 83 bp, Homo sapiens
gcagaacggctgcctaatttacagcaaccatgagatttcctttgacctcgctgagtacactgcggacgttgacggagttggca

SEQ ID NO: 449966 - DNA, 96 bp, Homo sapiens
caacaggaaaaaaagaggatgagcacttggtggcgtctgatgctgaactggatgctaaacttgaggtattcttggcgttaccaactgagagaattt

SEQ ID NO: 449967 - DNA, 74 bp, Homo sapiens
gctgccctgaggcactcttccagccttccttcctgggcatgacccgggacgacctgttcaacaccaatgccacg

SEQ ID NO: 449968 - DNA, 50 bp, Homo sapiens
cacggagcactgcaggcgccgggtgaaatgacaatggatgctctgttggc

SEQ ID NO: 449969 - DNA, 87 bp, Homo sapiens
cagttttactacttgcaacttctgacaaaccccattccgctttgccagaagaggtttttcgttggaatatacgttgcacatttatgg

SEQ ID NO: 449970 - DNA, 75 bp, Homo sapiens
ttctggaggagatgaaagctttgtatgaacaaaaccagtctgatgtttttctgactcagaatgtgccaaaaaggc

SEQ ID NO: 449971 - DNA, 82 bp, Homo sapiens
agaagggcggccaatgtgattctgggcaaagtgtggtgacttgtggattttcactgaaaatttttactactggagatgtcaa

SEQ ID NO: 449972 - DNA, 83 bp, Homo sapiens
cgacaagccgctggcagccgcggatctcaccgccgctcaggatcatggaagggaagtggttgctgtgtatgttactggtgctt

SEQ ID NO: 449973 - DNA, 100 bp, Homo sapiens
caatctttgttggcgagatatcaagttcaaaaccagcaatttcaatgtaaggagaggatgaggcccgtgaaaaaggcactgaaacagctcgacaaacctg

SEQ ID NO: 449974 - DNA, 75 bp, Homo sapiens
caaactcgctactaatgctgcagtcactgtacttagagtggatcaggttctaaatgagaagaaacttcaagaggt

SEQ ID NO: 449975 - DNA, 100 bp, Homo sapiens
gggttgctgacccagaggagagttctccaaacatgatcgtttactgcaaaagtgaaccagaggaaatgcctccagaagcaaagatgaggatgaagaatat

SEQ ID NO: 449976 - DNA, 100 bp, Homo sapiens
acctgctgacagagcagatggcctggagattcatgacaaaatcatggaggcatcattcttaacaaagaagttaaatattggtgggaaaagagtaaacctt

SEQ ID NO: 449977 - DNA, 100 bp, Homo sapiens
gtcactagccgcgggaccatcaaagtcatcgacggcacctcgggggccacactgcaggcctccgcgctcagtgcggggatctgatgagcttctttcttct

SEQ ID NO: 449978 - DNA, 84 bp, Homo sapiens
ccttagctgtgctcgcgctactctctctttctggcctggaggctatccagcatagcctgggctggaagctcttctacgtcacag

SEQ ID NO: 449979 - DNA, 96 bp, Homo sapiens
cccacgcccaaccctcgtgcctccctgaaccactccactgcctttaaccctcagcctcagagtcagatgcagggtctctaattaacagaagatggc

SEQ ID NO: 449980 - DNA, 90 bp, Homo sapiens
agtcccattttcaactggcgcggctagttgaaagttccacatgtttccccaggacactgcccatctctaagataagaacctggaaagggg

SEQ ID NO: 449981 - DNA, 100 bp, Homo sapiens
tggcatttacagaaagagtcaacagcagtggcaacagatctggaaagcatgaagactgggctttttttcctatgtctcttgggaactgcagctgcaatcc

SEQ ID NO: 449982 - DNA, 100 bp, Homo sapiens
caacatgaagctaccggccagggttttctttactctggggtcccggctgccctgtggcctcgctcctcggaggatgatgattattccccaccttctaaga

SEQ ID NO: 449983 - DNA, 100 bp, Homo sapiens
caaagaaacaagccgtggaataggtgtatcaagtaatggtgcaaagcctgaagattttatggaagaccttgggttatggaacagagaaaagaactcttta

SEQ ID NO: 449984 - DNA, 100 bp, Homo sapiens
gaagacttgaacctagaaaatttcactgcaaagggccgcgatgggcctcttggaacattggtgtgttcatctgcattcgatgtgctggaatccacaggaa

SEQ ID NO: 449985 - DNA, 100 bp, Homo sapiens
cggcggagcaacgttcgcgtcatcacggacgagaactggagagaactgctggaaggagactggatgatagaattgaggttgtgcccagacatttccttct

SEQ ID NO: 449986 - DNA, 100 bp, Homo sapiens
ctggaccacaaaccgctgccagaaaaactgcgattcctactgcaaggcctccaaggggaagctgaagattaacatgaaaaagtactgcaagaaggactat

SEQ ID NO: 449987 - DNA, 100 bp, Homo sapiens
cccccctgctcctcggcgtcggaccccccgagaaaatgatccggacgctgcggctgaagatcttggcagacgcagcagctgagggggtcccggtgcgtgg

SEQ ID NO: 449988 - DNA, 100 bp, Homo sapiens
aatcctgaattttccttgatggtcaaaagattaaggattctcaaagttggattggtggaaacaatgaaccattgacaggctttacatggcgaggtggctg

SEQ ID NO: 449989 - DNA, 90 bp, Homo sapiens
gggccgtggctctagcaggctccactaactggggctacgactctgatgggcagattttgtgtgggagacaaattcttcctgaagaacaac

SEQ ID NO: 449990 - DNA, 86 bp, Homo sapiens
gagaaaggagctcggggactcccccaaagacaaggcagcctggcatcctcgctacaacctcattgttgtgggccgatacccagatc

SEQ ID NO: 449991 - DNA, 99 bp, Homo sapiens
caaattgaagggagagatgatggatctccaacatggcagccttttccttagaacaccaaagattgtctctggcaaagctttgtgtccctggtgatgttg

SEQ ID NO: 449992 - DNA, 100 bp, Homo sapiens
ccgcccgaaccaccatgacccacttcaacaagggcccttcctatgggctctcggccgaagtcaagaacaaggtaacggaaggccattggaaatggggcgg

SEQ ID NO: 449993 - DNA, 100 bp, Homo sapiens
ggaatgtggccctgagtgatggacacaacaccgcggaggaggacatggaggatggtcagccatgtcatctgagcctcccccaccaccacagccccccacc

SEQ ID NO: 449994 - DNA, 75 bp, Homo sapiens
agaaggtgccggtggtgcgagtcttcggagcgaccccggcagactgaaatcgccaagagattgaatacgatttgt

SEQ ID NO: 449995 - DNA, 101 bp, Homo sapiens
ctgctgtagtcacaggagctgtagagaggaccccggtacatctgaaagccgggaaatggtactccaaagattcaggtttactcacgtcatccagcagagaa

SEQ ID NO: 449996 - DNA, 100 bp, Homo sapiens
cagcaaactccgcggcccgcaagcccggctcggcccggccctgctctgttctgcccggaggagccgcccttatgcaatgccaaccaaaaccatagaagtg

SEQ ID NO: 449997 - DNA, 100 bp, Homo sapiens
cagcagtgcgttcgctgacgtggaaatcagcatgattcttcagaggctcttcaggttctcctctgtcattcggtcagccgtctcagtccatttgcggagg

SEQ ID NO: 449998 - DNA, 50 bp, Homo sapiens
caggaaacccacagccagcagctcccgtcgactgaagaaagaaggtgaca

SEQ ID NO: 449999 - DNA, 98 bp, Homo sapiens
tggtcagtgggatgcataatggccgagctgttgactggaagaacattgtttcctggtacagaccaatgtccctcttccagtggaaagcccaaccatgc

SEQ ID NO: 450000 - DNA, 98 bp, Homo sapiens
ttcctcgaggcggtgtcccacctgccgcccttcttcggttccagccgtcctcacctcaggaggacatagctttgtgcctttcaaagccctttctcatc

SEQ ID NO: 450001 - DNA, 82 bp, Homo sapiens
ccgggagacacagtgtcagaattacaagacatggagattaagtagcttgcccaagatcacccagccagtaaagtggcagagc

SEQ ID NO: 450002 - DNA, 51 bp, Homo sapiens
cctcaacaaacaccagcgctttggaattggttccttccattatgagcaact

SEQ ID NO: 450003 - DNA, 100 bp, Homo sapiens
gctcttcaggaaccttcatcctttagaggtacgaatgtgaagaatcttttacgaccctaaacgtagacattagaaatcaccaaaatcttcttgattcttt

SEQ ID NO: 450004 - DNA, 100 bp, Homo sapiens
cgtgcctcgtggtctaaagcttcggcacaagggcccaactggaattccacttacggatccctgtttattgggaaggatatgttcgattcttaaatacgcc

SEQ ID NO: 450005 - DNA, 82 bp, Homo sapiens
ccgacctcgacgtcttgcctgtgtcccacttgttcgcggcctatagatcagtcgcatcgaatacattcattcaaagaacttc

SEQ ID NO: 450006 - DNA, 100 bp, Homo sapiens
cttgaaagaagaagatggagaagaaatagttacctatgatcgtggccatggtgaagtccgatttgagcacgtgcgtgtgcccaaagagaacatggtcctg

SEQ ID NO: 450007 - DNA, 80 bp, Homo sapiens
attaggtcccctcaatggggacacaggaagtggtcatagtaagtgctacaagaacacccattggatcttttttaggcagc

SEQ ID NO: 450008 - DNA, 82 bp, Homo sapiens
cggaggggagggggcgttagccccgcgcagccgccggcgtcgccgccatggacctaggccagctgcgggccgtccagcggct

SEQ ID NO: 450009 - DNA, 123 bp, Homo sapiens
ccgcaaccattgacgccatgtcgggttattcgagtgaccgagaccgcggccgggaccgaggtgatgaacggcagcagccactcaccaacagccatcaatggtgcaccgtgcacacccaacggc

SEQ ID NO: 450010 - DNA, 100 bp, Homo sapiens
cggcgctggactggagcagaaccccaggactgcgcccccgggagcgggcgcccagaggaggtatatcgaattccaaagaaaagtcaaactgaaaaggaaa

SEQ ID NO: 450011 - DNA, 100 bp, Homo sapiens
tcccgcgagctgcctgtctcgtcgtggcaggtcaccgagccgtcaagcaagaatctgtgggagcagatctgcaaggaatgttcgtggcatcagagagaaa

SEQ ID NO: 450012 - DNA, 75 bp, Homo sapiens
gaggaccatgtgatgcacctgctccagaattctcttctggcctgtgagtttctcctccagaacggggcgaacgtg

SEQ ID NO: 450013 - DNA, 90 bp, Homo sapiens
tgcatccgcctggcgctcatccgcttccacgtcaaggttcttgggtgtctctggggagtccctgggccagaccttcctccagactccagc

SEQ ID NO: 450014 - DNA, 120 bp, Homo sapiens
gaagaccgcgcgcagggcctgcagcgggagctggacggcgagcgcgagcggcgcgagaaaacctgcctagagctggaacgttacctccagagcgagccctgctatgtttcagcctcagaa

SEQ ID NO: 450015 - DNA, 100 bp, Homo sapiens
tcaatggcaaagggctgggtgagatcagcgcggcctccgagttcaagacgcagccagtccagtcaagggtccagagaaggaggagaagttgagacaggcg

SEQ ID NO: 450016 - DNA, 100 bp, Homo sapiens
ggcggacgccgcagagcgccgaggaggctttcctgctggtggcaaccgcctacgagacactcaagggtggctgtgccagtgtcattgtgtcattaactac

SEQ ID NO: 450017 - DNA, 88 bp, Homo sapiens
ttctacaacaagtggctgacaaagaaaccagactgtgatgactgggagagcgggctgaatgcaatggagtgtgcattacatttggaaa

SEQ ID NO: 450018 - DNA, 100 bp, Homo sapiens
ctccagtcccgcgtcggtcgccgcagtcacggagcgcaccctcccttctgtctgccccaccatgccgggacatcgttatcgaaatggaagacaccaaacc

SEQ ID NO: 450019 - DNA, 96 bp, Homo sapiens
cttcgacattgccgtcgacggcgagcccttgggccgcgtctcctttgagctctacgaactcgacggggaccccaagaggaaggaattcctggatga

SEQ ID NO: 450020 - DNA, 74 bp, Homo sapiens
cggggctgtccaggcacgcgaggcccctcagattcatgatgttgctatcaaaagttgagaaattgtcagaagaa

SEQ ID NO: 450021 - DNA, 90 bp, Homo sapiens
cggagagagaggtggagtccggcccccgaaagaggttttcacctctgacagagcccagacaccatgaacgcaagtgaattccgaaggaga

SEQ ID NO: 450022 - DNA, 75 bp, Homo sapiens
ggggagcgcggggcgacgctggctgcagggacccggtgacagcgtgagaggaaaaatcagttgctgccgtctgac

SEQ ID NO: 450023 - DNA, 98 bp, Homo sapiens
acagagtcggttcagtctgtggattactactgtgataagacgagttgtactgctgtcacaggaaatggacgctggattacaagcatggcagctcaggc

SEQ ID NO: 450024 - DNA, 82 bp, Homo sapiens
tccgcaccgcagagccggcgcctcctcggcaggaagccatcttcgacaagagcacagggaaggttgttttgaagacgttcag

SEQ ID NO: 450025 - DNA, 100 bp, Homo sapiens
cggcagtgtgtggggtctcgctggacgttggaggaaagaaggaatatctcattgcagccaatgaatttccctgtttgccaaagcaagtggcttggatcct

SEQ ID NO: 450026 - DNA, 75 bp, Homo sapiens
ggggcttgcctgaagcgagggacgttggaacttgccaggaatccagcaatgatgcaggagatgatgaggaaccag

SEQ ID NO: 450027 - DNA, 83 bp, Homo sapiens
gtacctgctacctggcttcttacctcacgaacaaggtctcctctgagcctccggcctccataagacccaaaacagatgacacc

SEQ ID NO: 450028 - DNA, 100 bp, Homo sapiens
ctccgggcggccgcacctgccagatcccaattttgttcggacatttcttacaacatacagatccttttgcaaacctcaagaactactgagtcttataata

SEQ ID NO: 450029 - DNA, 101 bp, Homo sapiens
gaaattctatgatgctgatgattatcacccggaggaaaatcgaaggaagatgggaaaaggcataccgctcaatgaccagggggccgaaggccagagaccag

SEQ ID NO: 450030 - DNA, 100 bp, Homo sapiens
cacaaaccccaatctcagtggacaagggtctcctatggacagaagtgcgggcaaggagctttgttcctccccgatgtcaccctcccacagcccacttgct

SEQ ID NO: 450031 - DNA, 100 bp, Homo sapiens
actcccaagcgactgcaggcagaagctgagacggctaaggtacaaacccgtagtgctgatgaaccaatgacaacatttgttgtctgtaatgaatgtggaa

SEQ ID NO: 450032 - DNA, 100 bp, Homo sapiens
ctcgcgcgctcccgaggaagagtgagggcgcgacgcgcaccaacggtggagagttgcatgctgagaatttgaaaaatgaagatgatgtagacactggact

SEQ ID NO: 450033 - DNA, 83 bp, Homo sapiens
atggcatctatgttatcaaccagaaacgcttcgttaagggactcaggcagtacgggaagaacttcttcagaattagaaaggag

SEQ ID NO: 450034 - DNA, 100 bp, Homo sapiens
cacctttcggcttctgagacggcggcagcagcggcattcagaacgacctgcagcaataccattgacctgccgatgtccccccgcactttagattcattga

SEQ ID NO: 450035 - DNA, 100 bp, Homo sapiens
cgtttttccttgagctgaacgtcttgcaacagtggccgcacgcataggcaatggcgaactgagcaataaggaatttgtttccatcatgaagcaacggctg

SEQ ID NO: 450036 - DNA, 74 bp, Homo sapiens
tggtggtcgtgaaactgcttcccgaggagcattggaagaaccttcaacaactagtactgcttcaaattatccag

SEQ ID NO: 450037 - DNA, 83 bp, Homo sapiens
ccaaggtcctgggcaggaccggttctcagggacagtgcacgcagctgaaactagaggaccgttctgtggtgccccgagatgtg

SEQ ID NO: 450038 - DNA, 100 bp, Homo sapiens
cagaaggaagatggcggatctggaggagcagttgtctgatgaagagaagattactacaagggaagacataaattcaaagcaggttgctacagtgaaagca

SEQ ID NO: 450039 - DNA, 75 bp, Homo sapiens
tcagaaacaggccatggagggacaggatccggaggcgccagctcaaccaatggacagcaaattatggatgaacct

SEQ ID NO: 450040 - DNA, 76 bp, Homo sapiens
cccggccagccgccccgtccgggaggcgggagacactatattcaatcgtgctaagctcctcaatgttggctttcaa

SEQ ID NO: 450041 - DNA, 100 bp, Homo sapiens
gcggctactcggggccggacggacattgtgagcactgtgggctatgggatggatgaggtggagcaggaccagcatgaggcccgactcaaggagctgtttg

SEQ ID NO: 450042 - DNA, 97 bp, Homo sapiens
gggcgtaagcggactgcagccgcgagctcctggaggcggcgggatggaggcggcggccgcaagccttcaatgccacggctgtggtgcggcacatgag

SEQ ID NO: 450043 - DNA, 75 bp, Homo sapiens
gaaacgccgaggaacccggctgaggcggcaggtcagtactcctgcatttgtaccaacgaaaactcacgtgctgct

SEQ ID NO: 450044 - DNA, 75 bp, Homo sapiens
cgcggcggggctgaggcggccgcggggcccgagcgcagttccagggtctccctccactgctgtagtaacccgggt

SEQ ID NO: 450045 - DNA, 90 bp, Homo sapiens
cgcggttgtcctggagcaggggcgcagagcgcatcagcgaggaggtggggctgctgcagctccttggggaccccccgccccagcaggtca

SEQ ID NO: 450046 - DNA, 50 bp, Homo sapiens
ccgtccgacagccaggcccgggagaagtgctggagagtcatgcctgtgag

SEQ ID NO: 450047 - DNA, 100 bp, Homo sapiens
actggatcaacaccggggagtctgcgggccctgaagaggaaagtgaggatgactctcatctcgaaggcagggatcctgatatttggcatgttggttttaa

SEQ ID NO: 450048 - DNA, 75 bp, Homo sapiens
agaaaacaaatgataggacacagggtggtggaagatctcaaagagacattgcacttatcttaccaagctcttctg

SEQ ID NO: 450049 - DNA, 100 bp, Homo sapiens
cacggcggcgcagccccaaagcgagcgaagctagggtcgccgccactgccgcaggaggcgtgagaccttcacggcatggtgcaactcccacctgcggaag

SEQ ID NO: 450050 - DNA, 90 bp, Homo sapiens
ccaggggctctgggagtggctgccagcaggagcgagaacccgagcagcgccatgagcaacactaccgtcgtccccagcactgcaggtccg

SEQ ID NO: 450051 - DNA, 50 bp, Homo sapiens
cttggagacaaggaagcagttctcaacagtcataccctaatgatcccagc

SEQ ID NO: 450052 - DNA, 100 bp, Homo sapiens
tttgaaccactggaaagtgaggaattttgaagtacaccgtggtgacattgtatcattggtgtccctccttgtggtccatttctgggcaccatgggctcca

SEQ ID NO: 450053 - DNA, 82 bp, Homo sapiens
ccgcgaaccgcagtatcatgctggccaagaagatcatcattaaggacggaggcacgattgtagaaggcatgaaacaaaaaat

SEQ ID NO: 450054 - DNA, 96 bp, Homo sapiens
ctttcaggagtttacccaagaaccattggtggagatagaagttacatgggaataggactctcggctcaaggcgtcaacatgaacagacttcctggt

SEQ ID NO: 450055 - DNA, 82 bp, Homo sapiens
agagacgagagatctttctgctgtctatactcttggaaagcacatcctaagaaggaaggggagttcaccctgcacggccggg

SEQ ID NO: 450056 - DNA, 75 bp, Homo sapiens
accgtgccctgaggttggacgtggggaatttctcctggggctcagagtttgaagattcctgtctctggatccaaa

SEQ ID NO: 450057 - DNA, 82 bp, Homo sapiens
ggaaaattattttggaagagaagaacaaagtttctatggctccagcatctagcctgattccaactcaaacaacgataacagc

SEQ ID NO: 450058 - DNA, 101 bp, Homo sapiens
attagctatcaaatccggccagtttttccagaaaggaggagtcaaggaagcccttagtgaacgagaactcttcaatgctgtttcaggcttaaacatcacag

SEQ ID NO: 450059 - DNA, 82 bp, Homo sapiens
gatgggagctgcagcacagtcgggggtgtaggttatggggtgctttctcctgctcaagacagccacacgaacacggatctcc

SEQ ID NO: 450060 - DNA, 82 bp, Homo sapiens
tcctactgcttcgcgtccagacagtgagacggtttaagcggaagcatcttactgccattgactgccagcatttggctcggag

SEQ ID NO: 450061 - DNA, 90 bp, Homo sapiens
acaatgtcccggacctggagctcaaccccatccgatccaaaattgttcgtgccttcttcgacaacagaggaagaatacaagcgattgagt

SEQ ID NO: 450062 - DNA, 50 bp, Homo sapiens
caaatgcacgcgacaggaaccaggtcagccaccatccgcctatctctgcg

SEQ ID NO: 450063 - DNA, 75 bp, Homo sapiens
ttcgccgctggcgtcaggactattttcacgttttaatgccgagaggcatccaggctggagaagcagaacagcaca

SEQ ID NO: 450064 - DNA, 100 bp, Homo sapiens
gtcagtgcaacaggacagaatctagtcgctgcatacctccttccctgtcctcaatcagcattgcagtcacccattgagtaccagagacgggagagccaga

SEQ ID NO: 450065 - DNA, 80 bp, Homo sapiens
aatagagctgccagaggttccctccgagccccttcctgagaagatcccagctggatgctgacaaatatgagaatgatcca

SEQ ID NO: 450066 - DNA, 100 bp, Homo sapiens
tcctgcgggaggtggtgaagcacccctccgtggagtccgtggtccagtgtgagatcgacgagaagatgggtgtgaacctgacacgcagcaacaaggagac

SEQ ID NO: 450067 - DNA, 89 bp, Homo sapiens
cccgggacttcctctttcctcacctgcgggaggagatcctcagcggcgccttgcggagggaccccagctgaaaaagcttctgatcctgc

SEQ ID NO: 450068 - DNA, 74 bp, Homo sapiens
cccaggaggcggagcggacaaggctccggcctgcgaggagattctgaggttgggaccaagaaggaactatctat

SEQ ID NO: 450069 - DNA, 51 bp, Homo sapiens
tgaccttgttgacgatgacatcaccactggacatgaacaagctgagtggag

SEQ ID NO: 450070 - DNA, 98 bp, Homo sapiens
aggaggcggtggccctgctggaggagctctgggtttggtgcacctcgatttggaggaagtagggcagggcccttatctggaaagaagtttggaaaccc

SEQ ID NO: 450071 - DNA, 101 bp, Homo sapiens
cgtggtcaccacgctcgtgctcatctcctactgtcccacggccaccgaagaggaaacttggatttaactggccagaagcaggtattcaaagcagagaacaa

SEQ ID NO: 450072 - DNA, 74 bp, Homo sapiens
cacaccttcatccggcacaagcggaccatggtcaagtatgacgaggaagcgatggtggaggctgtggccctcta

SEQ ID NO: 450073 - DNA, 75 bp, Homo sapiens
aagacccgacacaaggcagcttcccacagcaggttggacagttcacaggttctccttactatgacaatgtccgcc

SEQ ID NO: 450074 - DNA, 100 bp, Homo sapiens
aattaaaagcttttcctgaagatcagctttctattcctgaatatgtatctatggatagtggctataatacgcagaattgtggaagcaatattatggatac

SEQ ID NO: 450075 - DNA, 98 bp, Homo sapiens
ctaagatcgacgtgtaccactacgaggtggacatcaagccggataagtgtccccgtagagtcaaccgtgcccttggtttctagaatatgcccaaatga

SEQ ID NO: 450076 - DNA, 100 bp, Homo sapiens
ccgcttcagttctcccggtgtggccacgagtcggatgtcatttgtcagagtgaaccgctgtggtccccgagttggtgtaagaaagacaccgaaagtaaag

SEQ ID NO: 450077 - DNA, 74 bp, Homo sapiens
tgggatgtgatgatggagaactacagcaacttactctcactgggattcagtccccgtgggggtggctttggcgg

SEQ ID NO: 450078 - DNA, 100 bp, Homo sapiens
acatttaattttagggtcctttatatagaagggagagtaggctctgtatgtggatgtgatccgtgtgaacagctactactcttggtatcgcaactacggg

SEQ ID NO: 450079 - DNA, 90 bp, Homo sapiens
aaaatctggcctgaaataaaaggtcccactctatgaccagtgggaggatgtgatgaaagggatgaaggtggaggtgctcaacagtgatgc

SEQ ID NO: 450080 - DNA, 101 bp, Homo sapiens
catcagtcggatacacacatattcatcatcatgggtgcatcggtgtcaagctagggatgcggtccattcccattgccactgcttgcaccatttaccataag

SEQ ID NO: 450081 - DNA, 100 bp, Homo sapiens
gatagatgtgtcctatgaataccgcttcctggagttcacgactctgagtgctgttgaggtactaaagaaaattgacattccatctgtctttattggtgaa

SEQ ID NO: 450082 - DNA, 100 bp, Homo sapiens
tcagatgcatctggttcttctaaaggagcaattctccaatacttacagtaatctcatattaacagtgccggtggtggtgtgcacattgagccccggtata

SEQ ID NO: 450083 - DNA, 75 bp, Homo sapiens
gcagaaccccaggactgcgcccccgggagcgggcgcccagaggtttgacatctacaggaaggtgcccaaggacct

SEQ ID NO: 450084 - DNA, 98 bp, Homo sapiens
tggaaccgttgattggagatatgcccttagttggagctttgtctatcttcttccttaggaaaccactgggctcaaaatgcagagaactcaaagatatt

SEQ ID NO: 450085 - DNA, 75 bp, Homo sapiens
acccgaaagccgctgggaaaagttgggcccgaaggcatcctgcagaacggggctgtggacgacagtgtagccaag

SEQ ID NO: 450086 - DNA, 50 bp, Homo sapiens
gaaaagctcagccttaaacatagcaagccttaggaaaatccaaaggtatg

SEQ ID NO: 450087 - DNA, 50 bp, Homo sapiens
aggcagaacttcttgttaggggacttggcctttaccctggaagagagaca

SEQ ID NO: 450088 - DNA, 82 bp, Homo sapiens
gagatgtgatgttggagaactatagcaatctggttttcttggccaaaccccctaaaggtctccacactgctgtttaacggca

SEQ ID NO: 450089 - DNA, 100 bp, Homo sapiens
acagatttgtggtttgtgtcagtcagcttgcattcagtcgtgatcttttagcaagtcagaatgaagatttgtgaacgagataattgggagagacatgtcc

SEQ ID NO: 450090 - DNA, 50 bp, Homo sapiens
ggcgggagtcctggcgctctgcagcatggcctgtatgagaagaaaaagac

SEQ ID NO: 450091 - DNA, 83 bp, Homo sapiens
atctgggaagcaccgagactctagaagaaatgccctccgggtcacaggataaggaatgggtaccacagaccatgtcatcgtcc

SEQ ID NO: 450092 - DNA, 100 bp, Homo sapiens
ccttgtgcctgacaggaccgtggccgaccggcagctggtgcaccttcgctctgccaggcgtctctgtgagctctgctgtgccaaccggggcaccttcatc

SEQ ID NO: 450093 - DNA, 101 bp, Homo sapiens
tcagactagtctgaaagggaaaacccccattcattctggattggtggatctgaagtacaaaatattttccaggtggccagcatcgaaatgttcagcctttt

SEQ ID NO: 450094 - DNA, 75 bp, Homo sapiens
ggcctctcagctttcctccctgccacagactgagaactatgagcagagaatacgtgaacaacaggaacagctgtc

SEQ ID NO: 450095 - DNA, 74 bp, Homo sapiens
tttatattaatgttgagagagagccgtcatggaaatgatgagtcagaagattcagcagctcacagccctggggg

SEQ ID NO: 450096 - DNA, 74 bp, Homo sapiens
ttcgaaggatggaagaagagacgaagagacagctggatgaagtaaacgcaaagcactgaagttgaattttgcaa

SEQ ID NO: 450097 - DNA, 102 bp, Homo sapiens
cttgctttgttacgaggtgctatgaagtggtgatgaacgtagtccaccagttggctgccctctatatcagtaacaagacaagtgagatagaaggggccaacc

SEQ ID NO: 450098 - DNA, 75 bp, Homo sapiens
ttcacacaaactggtcagcgtttccctggagaggaagaggcaagaaagggctattgcaagacacgaagtccgaga

SEQ ID NO: 450099 - DNA, 50 bp, Homo sapiens
gacagagttgcgaccgcgcggcagcaattctgtggtgttcttggtcacac

SEQ ID NO: 450100 - DNA, 75 bp, Homo sapiens
agagatccagcccccttataagccaaaagctgctgccctgatgatctcactcatttggaagtattattctgtccc

SEQ ID NO: 450101 - DNA, 82 bp, Homo sapiens
agccaatcagcgcgggcagcgaaccgggggagcgaggcacgctgccactggtgacatgccaacttaccagatccgagctcct

SEQ ID NO: 450102 - DNA, 100 bp, Homo sapiens
gcctgatcatgcagacatctccaactgtgggaactctttccagcttgtgtctgcgcaaatctgtccaaggctgcctggggagcattggagaagaatggca

SEQ ID NO: 450103 - DNA, 75 bp, Homo sapiens
cgtgtgattatgaatctaaatggcagatggcagggagtgataaggggcccatcctgatggagctgcagacttacc

SEQ ID NO: 450104 - DNA, 96 bp, Homo sapiens
tgggccgcgacctggttctcccggagtctacactgatggtgagaccattctaaaaggcctccagtccattttccaggagcaggggatggcggagtc

SEQ ID NO: 450105 - DNA, 118 bp, Homo sapiens
cggattcctctgccaatgaccgtggaggagtaccgcatcgcccagctgtacatgatacaggtttggaaacgatgtgcagcacttcaaggtgctccgagatggagccgggaagtacttc

SEQ ID NO: 450106 - DNA, 87 bp, Homo sapiens
acttcctgtacctgctgggagaagttctgaacaactatatctgggatacacagaaaaatggagtctcactctgttgcccaggctgga

SEQ ID NO: 450107 - DNA, 50 bp, Homo sapiens
ccagaacgaagaccctactaggcaagtgtcagagatggctttggattccc

SEQ ID NO: 450108 - DNA, 100 bp, Homo sapiens
agcatggtcatcctgctgccggatgacattgaggacgagtccacgggcctgaagaagatcattgctgccactgttgaaaatgctgggatcattttgcaca

SEQ ID NO: 450109 - DNA, 95 bp, Homo sapiens
cacagctggatgtttgcgacatcccagagagcttccagacttttggaaagaacaaacagtggatttgaagaatcagattctggtgctactaagag

SEQ ID NO: 450110 - DNA, 113 bp, Homo sapiens
aagttttctactgtaaagtcaccaacgagatcttccgccactacgagtttggtgcacctcgatttggaggaagtagggcagggcccttatctggaaagaagtttggaaaccct

SEQ ID NO: 450111 - DNA, 82 bp, Homo sapiens
cccggctttgcagcggggacttcggcggcggcgcctcaggcacctcggcccgggggaacgcccttttgcttgtgactggcag

SEQ ID NO: 450112 - DNA, 83 bp, Homo sapiens
gaacctcttccaactcagagaagccctgaaaaccagagacaggtgtgagcaaattgtagagacaatgcagatcttcgtgaaga

SEQ ID NO: 450113 - DNA, 74 bp, Homo sapiens
gaggagcagggcctgactgcgcagatctgtgactttggcctggcccgtgttgcagatccagaccatgatcacac

SEQ ID NO: 450114 - DNA, 90 bp, Homo sapiens
gcgggctggttttgtggcggctgctgctagagctggagcatttgccggattagtgatgatgaaccaggttatgaccttgatttattttgc

SEQ ID NO: 450115 - DNA, 90 bp, Homo sapiens
gaaggacctggaggaggaccacgcctgcatccccatcaaggaagatgagaatgtgcctactgctcctgatcctccaagtcaacatttacg

SEQ ID NO: 450116 - DNA, 98 bp, Homo sapiens
tcgttctgtgcgttctcctgtcccagactgtgccctgtccacggtgcctcctgcatgtcctgctgccctgagctgtcccgagctaggtgacagcgtac

SEQ ID NO: 450117 - DNA, 75 bp, Homo sapiens
gaaggagtacagggaagtctataagctttgcaacagaattacagagtatgatgacacattcagctaacgtatttt

SEQ ID NO: 450118 - DNA, 100 bp, Homo sapiens
ttccacacaactccagtgctaactcaacaggctttgatgaactaggtggacttctcaaaccaacagtggcctctcagaaccagaaccttcctgttgccaa

SEQ ID NO: 450119 - DNA, 100 bp, Homo sapiens
ggcgtcgcggactctccccgcgatgatgccgaatggatgatgaacttgttgttggacatagtgcaagatcagacatctccagcttcccttgtacatctgg

SEQ ID NO: 450120 - DNA, 75 bp, Homo sapiens
cggtgacagagtggagccatggctagagacatgtcatgctgcccaaggacatagccaagctggtccctaaaaccc

SEQ ID NO: 450121 - DNA, 83 bp, Homo sapiens
ggagcagctcacctgagagacggagccccggctcgcccgtgtgcagagtatgccaccacgggctgttccctgaccctgcacca

SEQ ID NO: 450122 - DNA, 75 bp, Homo sapiens
gagaccgtgaccgagagcgtgaccgagagcgcgaatatcgtcatcgttagaaggcgtcgaccagaagattatgat

SEQ ID NO: 450123 - DNA, 90 bp, Homo sapiens
agaggcgaaaggaagcaagcagttcagaagagccaaggaataaacatgcaatgaacccaaaaggaggagaaggcagagcccccccaggct

SEQ ID NO: 450124 - DNA, 74 bp, Homo sapiens
cttcatcaaaaatagtgatagctttgataagacttccttcgctgggcatctggctgggattcttgttggactaa

SEQ ID NO: 450125 - DNA, 100 bp, Homo sapiens
gtcaaatgagtctatttgcttctcccacaagttctgaagagcaaaagcacagaaatggactatcaaatgaagagtcaagtaccattggccaggatcaaac

SEQ ID NO: 450126 - DNA, 100 bp, Homo sapiens
accgaggcgtgggagtgcgatttgacaatggagtgatgaagaatgtcgtactctcaggaggctccaccatgttcagggatttcggacgccgactgcagag

SEQ ID NO: 450127 - DNA, 98 bp, Homo sapiens
tcatgcaaaaggaatcgtgctggaaaaagtgtgtgatccctcacatccacaaatctctgattggaaagaagggacagcagaaaactgcttagagggat

SEQ ID NO: 450128 - DNA, 75 bp, Homo sapiens
cggcgttggaggccaccgtttccaggtccaggtcaagacctcgtctccgttctcatagtcgtagcagtgaaaggt

SEQ ID NO: 450129 - DNA, 90 bp, Homo sapiens
cccagcacgcctgggccgggggctgcagcatggacccggctgcccagtccctcatgatcatgaacaagatgaagaactttaagcgccgtt

SEQ ID NO: 450130 - DNA, 83 bp, Homo sapiens
ctgtcttcggtggactccttcggcagtccacccaccgccgccgcctcccagctctgccttccagggacactgctcttccccag

SEQ ID NO: 450131 - DNA, 83 bp, Homo sapiens
cgaggagctccttttcgagcttttccaccaggaaacctcgacctgtctcccagttggttgcacagcaggttactcagcagttt

SEQ ID NO: 450132 - DNA, 100 bp, Homo sapiens
cccggacgagttcgatgacttcgtcacctatgagataacgaaggaggcccaacttcattcaataaggagcctgacggatttatcccagacggtagaacaa

SEQ ID NO: 450133 - DNA, 121 bp, Homo sapiens
gctcatctttggcaggaaggcgaggcttccgcccggcacaggggtaagactttgaccccgacgcaggcttcagtgattgccgcggatcagaagcctgagcactttggctcgagacaattaa

SEQ ID NO: 450134 - DNA, 83 bp, Homo sapiens
cccaccctccaactttgcgacggaaatgtgtcatcgaaagccaggtgtgttccagagaacaagccttcagacatttgctatat

SEQ ID NO: 450135 - DNA, 100 bp, Homo sapiens
tgctcagagtctcaatgaacttgaattagacctttacgagaagcacagttttgtcttcagtttcctctccccccacccggaatggcctgagccgaagcca

SEQ ID NO: 450136 - DNA, 50 bp, Homo sapiens
cgcagccggagtggggccgtgagggtccgaacacttgtacaacgaccacg

SEQ ID NO: 450137 - DNA, 101 bp, Homo sapiens
cggcgagggggcagaggaggcggccaaggacctggccgacatcgcggccttcttccgatccgattttaccaaatgttgcaagaactctggagttcttatgg

SEQ ID NO: 450138 - DNA, 100 bp, Homo sapiens
aaagcagaaattgcacacagatgatgagtgccatgggtgtatatggagccctcaccaaagccccagtgccagggactccagactcactctccagtgggag

SEQ ID NO: 450139 - DNA, 75 bp, Homo sapiens
cagacggcagacggtgcccggcgcccacggggtcgataagggagacctggtggccctgagcctccccgccggcca

SEQ ID NO: 450140 - DNA, 74 bp, Homo sapiens
gccgctcctaagcctgcacagccgcggcggcagcagcagtgagaggagctctgtgtgtcgtctgagcagtcgcg

SEQ ID NO: 450141 - DNA, 100 bp, Homo sapiens
ctgagcctgagtctgtctttgctctggatgttctgcgacagcgactgcatgagaagatccaggaggcccggggccaggttacgcccccagtgacttgccg

SEQ ID NO: 450142 - DNA, 82 bp, Homo sapiens
tatttgcttggaaaaacgtgtgggtacgaccttgcttggtgctaacagtggtttgcacatcatcatctttgatgaaattgat

SEQ ID NO: 450143 - DNA, 100 bp, Homo sapiens
ggatgatattaaagaagatggcattgttccacttcgttatgttaagtttcagaatgttaacagtgtaactgggccttggacaagttgttactgactatgt

SEQ ID NO: 450144 - DNA, 100 bp, Homo sapiens
gcagatttgtggtgcgttctgagccgtctgtcctgcgccaagatatgaggccccaggattcctggcgaggtcctcctccccttttccagcagcaaaggtt

SEQ ID NO: 450145 - DNA, 75 bp, Homo sapiens
gcacctcctcgccagcagccgtccggagccagccaacgagcgccgccgctcctcctcctcctcctcctcctcttc

SEQ ID NO: 450146 - DNA, 75 bp, Homo sapiens
cctatgggcacaggcagtgtctggaattgatcaatgaactgagccatgttcaaatccctgttatgttgatgccag

SEQ ID NO: 450147 - DNA, 101 bp, Homo sapiens
gtttcgtgagtttttactgactcgaggattgacttctaaggactcttggtacatgaggaagaaacccggaaggggaagaggaaagcaaaggcgtcaggaat

SEQ ID NO: 450148 - DNA, 51 bp, Homo sapiens
tgaccagctgagcatcaatacttttggtaatcagtggagttttattaacaa

SEQ ID NO: 450149 - DNA, 83 bp, Homo sapiens
cctgtgtacttgctgtagatgaaaatgggatacctcagacaatggcagcttttggattgaaatatttgctgaatgacactgga

SEQ ID NO: 450150 - DNA, 90 bp, Homo sapiens
cagaaggggtgaaagagactcggtgacagatacagatgtagaagacagaagtagctcagggtcctgggggaatggaggacatccaagccc

SEQ ID NO: 450151 - DNA, 100 bp, Homo sapiens
tcagctctgctcctatgtccgcttcaaggtgccccagcagatgaagtggccattctgcctgcccctcagaacctctctgtactctcaaccaacatgaagc

SEQ ID NO: 450152 - DNA, 88 bp, Homo sapiens
agcatcctctgcggctttcagtagttttgcagaagtgcaaagtcaagtctctcttgcacagtcctggagactacatcctcttaagtgc

SEQ ID NO: 450153 - DNA, 97 bp, Homo sapiens
ggcaggtgtagaagaagcaaaccaagggtttcctgctgttcagcttgctgatgcacaggttctcagaggcactgtgactgacttccctggatttgat

SEQ ID NO: 450154 - DNA, 75 bp, Homo sapiens
gaggcctggaatttgattaactcattcaaggttacccagttgatggcttacaaaatttaatcctgcttaatctga

SEQ ID NO: 450155 - DNA, 134 bp, Homo sapiens
cggagtccgactcgctacgcgggtcttgcgagatatctggccgcctctgccgcagctggagatccacagaccagcatggctgccactgctgctgtgagtcccagtgactacctgcagcctgccgcctccaccac

SEQ ID NO: 450156 - DNA, 90 bp, Homo sapiens
ggcgtttgtagaagaggagcatctgctccagatgccatggacaatattaccaggcagaaccaattctacgatacccaagtcatcaaacaa

SEQ ID NO: 450157 - DNA, 83 bp, Homo sapiens
atcggttcggtaaagtttctgttctctgttgattatggaagattcccacaagagtaccacgtcagagacagcacctcaacctg

SEQ ID NO: 450158 - DNA, 95 bp, Homo sapiens
agcaccccagcgacagcggccccgacatggaggatgacgacagcgtcctcagcacccccaagccgaagctgcgagaagtgtttccaatgctgcga

SEQ ID NO: 450159 - DNA, 97 bp, Homo sapiens
aataaaggagcaagatggctaggggcccaacacagagatactttcattgaagaacgctatggaaaatataacatcagtgatcctttaatggctctac

SEQ ID NO: 450160 - DNA, 97 bp, Homo sapiens
gcggaggcactcgcgcgggggcttcagctttagctgcagctgcctctgttcagccacttgcaacacaatgtttccaactctctaacatgtttaaccc

SEQ ID NO: 450161 - DNA, 109 bp, Homo sapiens
aacgcatttttgtttttggaaggagaaggatagacttggctttgaggtgaaatctattcttgaaagaagtaaagaggagctgtcccgaacagtgaagtgtcgtaatgcg

SEQ ID NO: 450162 - DNA, 75 bp, Homo sapiens
atttatcaccttctgtggaaaggaagctgcacaggaagccgtgaaactggccacctcaccgatcagcacctggcc

SEQ ID NO: 450163 - DNA, 75 bp, Homo sapiens
cccatcgactacaaacggaacttgccgcgtcgaggactgtcggatctggagaagggactcctgaaagccctgaag

SEQ ID NO: 450164 - DNA, 90 bp, Homo sapiens
agctactccctcagcggaacggggtatgggatgatgggatcattgatccagcagacaccagactggtcttgggtctcagttttagtgcag

SEQ ID NO: 450165 - DNA, 100 bp, Homo sapiens
agtcatacgctgtttacctgaatttaggactttaggaagatctactctggcccccagtggccaaataggttgcccccaagtttcctggcagtgtgtgata

SEQ ID NO: 450166 - DNA, 95 bp, Homo sapiens
attacttggagcaaagggcagtcggcggagcttcgccaaggctggcgcagtcggctcttgcagccaatgccggaacaggatttgctgttgctgag

SEQ ID NO: 450167 - DNA, 90 bp, Homo sapiens
agggggaaccgccgtcccaacatcacaaaaagactggtgtcgttcagtatttctacattgaagactggcaattcgttaatgattatcgac

SEQ ID NO: 450168 - DNA, 83 bp, Homo sapiens
ctgggcgctccggtggcggcggaggttggagcaaaacgtcccactcactggaggcacctgaggacgacgggggctggtcaagt

SEQ ID NO: 450169 - DNA, 98 bp, Homo sapiens
aaagagacctctacttagctcagcaattcttaccttgtggagccgccaccaaaatgcagattttcgtgaaaacccttacggggaagaccatcaccctc

SEQ ID NO: 450170 - DNA, 75 bp, Homo sapiens
gcgaaggcggctggagaccgagctagatgggctcagggctacagagttatagaagagaaacttccagttatcagg

SEQ ID NO: 450171 - DNA, 74 bp, Homo sapiens
tcatccgcaaggtgtccacgtcgggtcagatccgacagaaggtgtactttcggctccatgcttccatcctgaag

SEQ ID NO: 450172 - DNA, 82 bp, Homo sapiens
acgaccaagagggtgttcgactgctagagccgagcgaagcgttctgcggggagtgtctccagccctgcctgcaggtgccatc

SEQ ID NO: 450173 - DNA, 96 bp, Homo sapiens
ttcttcactgcctctggcatggatgaggaccagttacagaagtggatccgcggtaatgtgagtgcatgtgcgaactctgttttcatatttgacgag

SEQ ID NO: 450174 - DNA, 75 bp, Homo sapiens
gacagaccctcagaaacccagaggagatgtgttcagtgaccgggttattgatgtgggatctgaatggcgaacttt

SEQ ID NO: 450175 - DNA, 100 bp, Homo sapiens
aaatgaggaatgtctttcctaccatctaaaatacgaaggtttctggctggggctacttctacaagtccgaacagccagtccagcaaaatgaacagcattg

SEQ ID NO: 450176 - DNA, 99 bp, Homo sapiens
attagtggctaaatctgtgcagaacttagcaaatcttgtggaatttggagctaaggtggtttacatcttggagaaaaaacattctcgagcagcaaccgg

SEQ ID NO: 450177 - DNA, 100 bp, Homo sapiens
gatctggtgtaccaggcgaagctggccgagcaggctgagcgatacgacgacaaggcgcctctgtcgaagagccttctgctggtccccagtgccctctccc

SEQ ID NO: 450178 - DNA, 75 bp, Homo sapiens
cagctcttctcacagaaggaagataaactccacatatttctctgtgctgtcgtcatgcctcaaacccgatcccag

SEQ ID NO: 450179 - DNA, 75 bp, Homo sapiens
gttgtctcttagaagtgggagctgaacgactcagattgatggacaacttttcttaattaagcaccttttgatact

SEQ ID NO: 450180 - DNA, 75 bp, Homo sapiens
tcctgaaggaggggaagggacgtgggggcggccacggcaggtatttctggtggtcgcattcatatgtcagtttta

SEQ ID NO: 450181 - DNA, 135 bp, Homo sapiens
cgctggagatcctttcctgcttttggtttccctggcaggggttgaactgtggagtgtgtggatgctgcccagtacaagtatggcaagaaccgggtagaagcagatgccaagcggctacagaccaaagaggaggag

SEQ ID NO: 450182 - DNA, 96 bp, Homo sapiens
gccgtcaagatcctcaagaagaagaagttgcgaaggatccccaacggggaggccaacgtgaagaaaattaaacaaccaccatgtcgagcaaaaagg

SEQ ID NO: 450183 - DNA, 134 bp, Homo sapiens
ggagtcctgttccaccttcagagcgtcacggcgtacgccctcatggggaaaatctccccggtgactttcaggcatcagtgtttttctgaccgaagttctcatttcctgacaatggaaatggaacaagaaaaaat

SEQ ID NO: 450184 - DNA, 105 bp, Homo sapiens
gtttgaacaaaaaagtggtgcagtttttgatgaaattgtagagaactgtcggatcatgctaaaaggagataatattactctgctacaaagtgtctccaactagaa

SEQ ID NO: 450185 - DNA, 82 bp, Homo sapiens
cagcacaccagtggggcagtgcctcgtttccctgaaacctgggctcttgaagacgcatcactggagcagatggataatggag

SEQ ID NO: 450186 - DNA, 90 bp, Homo sapiens
ctgcatttcagtagccaaagaggacaggaacaagtctgtcttcatgaggtttgacggtgagaacatgtatatgagcatgacagagccgag

SEQ ID NO: 450187 - DNA, 82 bp, Homo sapiens
tgatgttggattctgttgcctgggtaccaccagagggaaagctggggcggtcttggtggatgtcagtgcttactccccatga

SEQ ID NO: 450188 - DNA, 90 bp, Homo sapiens
cggtggtgctcctaagggaccacaaatacgtgatttggagagaggtcaagtcatcagcccacaaagtagcagtagtggcacggatctgac

SEQ ID NO: 450189 - DNA, 83 bp, Homo sapiens
ctgctgaccgcgggccctgccctgggctggaacgaccctggacctccggctagcctgtttcagccacctcgtcgtcctggcct

SEQ ID NO: 450190 - DNA, 51 bp, Homo sapiens
gctccgtcatccatgccactttaaagattggtgcctggccagaaatgcctg

SEQ ID NO: 450191 - DNA, 90 bp, Homo sapiens
caagagagacagagaacactggatagacttcgaacatttaaacagtctctgctggatgaaccgaatcctaacagtccagccaatagccag

SEQ ID NO: 450192 - DNA, 83 bp, Homo sapiens
tgcctttggatttcctgttattcttgctcgtgtggctgtgatactctccattgcataatgtgaagttaccagaagcagatgac

SEQ ID NO: 450193 - DNA, 82 bp, Homo sapiens
tgtctcttctcgccctggcggggaagttgagaagctgatgtctcctcgacttccaactggaaccttgaacccccacatttct

SEQ ID NO: 450194 - DNA, 100 bp, Homo sapiens
tgggcagggcctggggaatgcttttttatctcatattagtgcctgtgatggcatctttcatctaacacggtcaactgtatttgttggtaacggaccaggg

SEQ ID NO: 450195 - DNA, 82 bp, Homo sapiens
aatcatgtatttgtttatggacagcagtggctggctgataatcggaagagatataaagaagaaaataatgatcatctcgatg

SEQ ID NO: 450196 - DNA, 74 bp, Homo sapiens
ccgtggtgaagcatgaagtcacagggctactgttttccaatcctcaggtgttggtaaatcatgcttattgctac

SEQ ID NO: 450197 - DNA, 73 bp, Homo sapiens
ccgcctcgccgaggaggccttcttccgtggggttagccaggcagcacagcattctcagaagcagtctactgag

SEQ ID NO: 450198 - DNA, 100 bp, Homo sapiens
agaaaatggagatgccaaaacagaccaggcacttaagtattcatcgaagagtcaccccagtagcggtgatcacagacatgaaaagatgcgagacgccgga

SEQ ID NO: 450199 - DNA, 75 bp, Homo sapiens
accagccctgtggagcctgtggtgaccaccgaaggcagttcgggtgcagcagggaaaaagtcgctggagtcgatc

SEQ ID NO: 450200 - DNA, 75 bp, Homo sapiens
gggacctttgctttttgatgatctcccacccgctagcagtggcgattcagaagaattcctcggcctgggagtgca

SEQ ID NO: 450201 - DNA, 100 bp, Homo sapiens
gaaggactcctcgctctatataggtcatggcaaaaccccaaaagatgccgcgtcagttcgagccacgcatccaataccagcagcctgtgggatttattat

SEQ ID NO: 450202 - DNA, 100 bp, Homo sapiens
tcaccaccacctacagcagcggcgtggccaccgacccccagatcatatgcacccaatgtccagggagcgtgcaaaatttgtcaaaagtggccttttattg

SEQ ID NO: 450203 - DNA, 100 bp, Homo sapiens
acatttggaagaggtggaaggtactatggcagaggttacaaaaaccaggcagcaattcagggctgtatgacaaatgttcttatatctcacgtgaccgagg

SEQ ID NO: 450204 - DNA, 100 bp, Homo sapiens
aacctggagaaagggagatagtgatcaccttgctagcaagattggatgggataccagagactgattttgcacgatttagcggaacaaatgtggaaactga

SEQ ID NO: 450205 - DNA, 114 bp, Homo sapiens
gtgccccctgcttctgccccagaaccggtcgaaaaccgtgtatgagggattcatctcggctcagtctattgcgtctgcagacatggatttcaaccagctggaggcattcttgac

SEQ ID NO: 450206 - DNA, 83 bp, Homo sapiens
ctgagcctgcagccggccctgccgcgtctgcttctgcgctttgcctgggagaggccctggtggcctcgttcctggcgcccgga

SEQ ID NO: 450207 - DNA, 82 bp, Homo sapiens
ctgaaggaagtacttaatgctgtgaaagaactggagcttgcacatagatcaacaacccctccccgtcgtaaacgctgaggaa

SEQ ID NO: 450208 - DNA, 83 bp, Homo sapiens
ggaatctgtctcctgatcatcattcagagatcctgaaggagctagacgagtgctacgagcgcttcagtcgcgagacagacggg

SEQ ID NO: 450209 - DNA, 74 bp, Homo sapiens
ggacgcggcgccatcgcagtcagccgagcccaggaagtgcgtcccctccgtggtcgtgggcgtcgtgggcatgg

SEQ ID NO: 450210 - DNA, 82 bp, Homo sapiens
aaatgaaccaaatatccaagacccagctcaagcagaggcctacacgatttactgatagagccacgaaccccctgaacaagga

SEQ ID NO: 450211 - DNA, 75 bp, Homo sapiens
ctttttgtacttacaaagtccatgctaacctactatgagggtcgagcagaggaatcctatgaggatggttgtgag

SEQ ID NO: 450212 - DNA, 87 bp, Homo sapiens
cagaggttcaccgccatcattggacccaatggctctgtctatccttcactggagtctgatgatgatgaccctgctttgaaatctcga

SEQ ID NO: 450213 - DNA, 50 bp, Homo sapiens
gcgattagttgatgtggcctgcaagtgctacaaggtgagctgcctggaaa

SEQ ID NO: 450214 - DNA, 98 bp, Homo sapiens
agcacgtagacagtgcctgtgtgttctggaatgccagcactcgcttttctgatggttaccgctttggactggtttaattggttggggtcagataagaa

SEQ ID NO: 450215 - DNA, 98 bp, Homo sapiens
cctctagtcactgtcgcagggacaggagtactccacagaggataaatttcaacctccggggccacaatagcgagctcagcgacatgtcctcacctaca

SEQ ID NO: 450216 - DNA, 75 bp, Homo sapiens
ccctgactgagctgctggctaagatcaccaacacagacgtgttctgcagaatcagaagatttggcagtacattta

SEQ ID NO: 450217 - DNA, 100 bp, Homo sapiens
gaaaagaagtgctacagctctgtgcctgtcatctttgcagtgtagcattttcaggacaaaatgtttcacttttgggtaaatacattcttcataccaggac

SEQ ID NO: 450218 - DNA, 100 bp, Homo sapiens
tatccaaaaggaccagcatggcttcggcttcacagtcagtggggatcgcattgttctggtgcagtctgtgcggcctggtatattgaaaagtctgattcag

SEQ ID NO: 450219 - DNA, 98 bp, Homo sapiens
ctgtgtggctgtaacttacgtgtactttaccaacgagctgaagcaggatccagtttatggaaaaggaaaacttggagaaatccagggacttatcttgg

SEQ ID NO: 450220 - DNA, 110 bp, Homo sapiens
aagtatggagtgacgactttggttcgagtttgtgatgctacatatgataaagctccagttgaaaaagaaggaatccacgttctagctggagtgcagtggcacagtcttgg

SEQ ID NO: 450221 - DNA, 98 bp, Homo sapiens
tggaagccaatgagatcgtgagcctcttgacgtgggtcttaaacacctacacaagtgctgccggaagatcaaagatacggtgcagaaactggcttcgg

SEQ ID NO: 450222 - DNA, 100 bp, Homo sapiens
gacgtacccgccgccgccgttggctggagaaatatggctacacacacctttctgcaggagagctgcttcgtgatgaaaggaagaacccagattcacagta

SEQ ID NO: 450223 - DNA, 82 bp, Homo sapiens
aggatccgcggggagaccttgggcatcatcggacttgtctctgctttctatccgtcaagatgataaagtcgtgtgcccgaga

SEQ ID NO: 450224 - DNA, 100 bp, Homo sapiens
cacgctgcagttggccttcatcgacttgagacaagagaaaagaaatgggtcgctccaattctagatcacattcttcaaggtcaaagtctagatcacagtc

SEQ ID NO: 450225 - DNA, 83 bp, Homo sapiens
gcactgctttccactcggctcctgtcgtccgttctctcaggctcccgttcagcatatcccagtagaatacgggcttttccagg

SEQ ID NO: 450226 - DNA, 135 bp, Homo sapiens
ggtctacaaaggtctggacactgaaaccaccgtggaagtcgcctggtgtgaactgcagagtccctgtcatccagactggagtgcagtggtacaatcccggctcactgcaacctccacctcctgggttcaagcgat

SEQ ID NO: 450227 - DNA, 50 bp, Homo sapiens
aatgaatgccaaatgggacacgggcattcgaaagttgttaccttaagcca

SEQ ID NO: 450228 - DNA, 75 bp, Homo sapiens
aagtcctattccaacagtcatgaggaattacatgaatgacagtcttcgaaccaatgtgtttgttcgatttcaacc

SEQ ID NO: 450229 - DNA, 100 bp, Homo sapiens
gcagtacctccgccagatccacgccaaccacgagagcaatgttgatcccagggatgatgtatttggatatcctcaacaatttgaagataaaccagcatta

SEQ ID NO: 450230 - DNA, 83 bp, Homo sapiens
gtggaagccacccgggagtttgaggaggttgtgggtgaagttgaacaaattgctatgatgaaaccaaaaggccagactgaaca

SEQ ID NO: 450231 - DNA, 90 bp, Homo sapiens
gccaactttgaatttcttctatcaacaggtggttgaagatggatatgaattttttgcaaagaggcagttggtcactctgttttctgcgcc

SEQ ID NO: 450232 - DNA, 100 bp, Homo sapiens
aagatgttctcatccactgaccgggccatgcgcatccgcctcctgcagcagatcgtagctggggtgaactacttcttggacgtggagctgggccgaacca

SEQ ID NO: 450233 - DNA, 74 bp, Homo sapiens
tctgctgtagtggacaaagatttccttgataaccccgtgctgatcccattccaatatgtagcttctgtttgggg

SEQ ID NO: 450234 - DNA, 82 bp, Homo sapiens
ggaaggaatatatcctgactgattatggcccactgcgtgaccttggttcagctgtccatttcctgtgaccatctcattgaca

SEQ ID NO: 450235 - DNA, 97 bp, Homo sapiens
ctttctggatgatgtaaaccttattctggccaacagtgttaagtataatgaaccaacgaaacgtatgctttccttccaagggttagctgagttggca

SEQ ID NO: 450236 - DNA, 75 bp, Homo sapiens
aagcagtgggctctggaacaacacggtgttcatcttttctacagggctggtgaattaccatatctccgtcaagtg

SEQ ID NO: 450237 - DNA, 102 bp, Homo sapiens
gccccatctacacctgcctcagggagacttgtcagcttgtgggaaagtgacatcagcgtccacccgctaaccctgccctctgcaacctgcttggagctgctg

SEQ ID NO: 450238 - DNA, 102 bp, Homo sapiens
ccgctgctggaccacaaaccgctgccagaaaagaacaagttccagttccagtctaccacccaacacctagccagactcggctagcaactcagctgactgaag

SEQ ID NO: 450239 - DNA, 80 bp, Homo sapiens
tgacgagtgagtctcgggctggggcggaaacggagctccggtctgctccatctggacacaagcatctgacggtagaagag

SEQ ID NO: 450240 - DNA, 98 bp, Homo sapiens
gcgattccttagaatacgcatggttaattgatgtgcaggctggaagtcttacagctaaggtcacagcaccacagatgttacaagaacgattccgggag

SEQ ID NO: 450241 - DNA, 98 bp, Homo sapiens
tggaaaatgtgtactccacccaaccacccttctacaagaacatgatgatataagtttgagaaggctggaagtgatggagagagtattggaaactgtcc

SEQ ID NO: 450242 - DNA, 75 bp, Homo sapiens
cctacatgtgtgtttttggcatccaaagtagagggaagcctatagcaaacttttgtctcaccttggacagatggg

SEQ ID NO: 450243 - DNA, 83 bp, Homo sapiens
aaccaagcaatcatcaagcacctcctcgggcctgtcctcccaaagccaactctaaggagaggagaggaagagcagttcttggg

SEQ ID NO: 450244 - DNA, 75 bp, Homo sapiens
cggactctcccgaggcggaacctccacgccgagcgaggtttacccaaggtccagcctagcccctaggcaccatgt

SEQ ID NO: 450245 - DNA, 90 bp, Homo sapiens
gaagggccttactccttcacagatcgggatgaccctgaaaatgataacagtgaattacccaccgcaaaggagtatttccgagatctctac

SEQ ID NO: 450246 - DNA, 100 bp, Homo sapiens
ccaaaagaggaagatagtcttgggacccttgcatggtgtttcaaagggtggtgaagaactaagttgaggagctcaagcttgggaaaatggtgtgcattcc

SEQ ID NO: 450247 - DNA, 129 bp, Homo sapiens
gaacttttggacgtaactgatcaattgaatatggacccaagagtcagcggtatattagttcagttaccactaccaggaaaacatttaaagttgatgatatgttatcaaaagtagagaaaatgaaaggag

SEQ ID NO: 450248 - DNA, 109 bp, Homo sapiens
gagcgcagtggcggcgcaaccagccttctagggcggcggaggtactccaaagattcaggtttactcacgtcatccagcagagaatggaaagtcaaatttcctgaattgc

SEQ ID NO: 450249 - DNA, 98 bp, Homo sapiens
tacaacttcaatatgaagtgtcctacaccaggctgtaactctctaggagagaagatgactgaggaggaggtggagaccgttctggcaggacacgagga

SEQ ID NO: 450250 - DNA, 50 bp, Homo sapiens
gtcaggcggagagacccgccgccagcttttgcagggcccccagatcctct

SEQ ID NO: 450251 - DNA, 100 bp, Homo sapiens
accaaaaacagaaaaatgcacaacagagggacaacaaaagcctcctacaagagtcctaccaaaaatggtcctggtgctgcccaggaacccacgtggctca

SEQ ID NO: 450252 - DNA, 75 bp, Homo sapiens
gcggagatgtgacccggcagtacggcaaatatggcggaggttgtttttcaccattcagaacattgcctgaagcag

SEQ ID NO: 450253 - DNA, 83 bp, Homo sapiens
atattttttgccatggtggattttgatgaaggctctgatgtatttcagatggaactgtggctgcaccatctgtcttcatcttc

SEQ ID NO: 450254 - DNA, 75 bp, Homo sapiens
gcctccacttacagatctggggaatacttcattgctccatcagtagatatacaagaacaggtttatcgtgtccaa

SEQ ID NO: 450255 - DNA, 74 bp, Homo sapiens
ctcaggccagtgcctgaagacgctcatcggttgtggcagcactgcctgaaggtatgagaccagattctaatctt

SEQ ID NO: 450256 - DNA, 76 bp, Homo sapiens
tttccggggccctctcagcaagaacgggaacaaaactctggtcctgagaagtatttctcgttttcattggagatca

SEQ ID NO: 450257 - DNA, 87 bp, Homo sapiens
acagaaacacctaggaagggagaactggccagaagcggactcctagaagaggggagcagcaaggatggaatgacagccgtgggccgg

SEQ ID NO: 450258 - DNA, 96 bp, Homo sapiens
ttcggtccttccgaggaagctaaggccgcgttggggtgagaccctcacttcatccgactcggaatccaagccggaccaggaggccgagccccagga

SEQ ID NO: 450259 - DNA, 98 bp, Homo sapiens
tgtagaggctgcagcacacgagagtgaacagcagaaagaggcttcttggaaacataaccagggcatcgcaggcacagatgtagcaaaggaggcttcag

SEQ ID NO: 450260 - DNA, 100 bp, Homo sapiens
gggaaataccatcgtttcttgggtcgtcatttcccccgcttctatgtcctgtacacaatcttcatgaaaggtttggatgcatctgctcagactacttctc

SEQ ID NO: 450261 - DNA, 101 bp, Homo sapiens
atcatggcggatggcccccggtgcaagaggcgcaaacaagccaatcccaggaggaaaaacggaagcccagaacctcatggccctcaccaatgtggacaccc

SEQ ID NO: 450262 - DNA, 50 bp, Homo sapiens
acgaggacgacacttacaagcccggcaagatcacaaggtttacatctggc

SEQ ID NO: 450263 - DNA, 98 bp, Homo sapiens
cctgcgaccgtcgcggaccatgggcgacaaagggacccgtgctggagggcagttatctcagggttccaatttatccattaataccaaccaaaacatca

SEQ ID NO: 450264 - DNA, 98 bp, Homo sapiens
cctagcgtcctggaattacttcaatcaaacatttctcttgggaagttgtgcatctgacaggaatatagtactgtacgatatgaggcaagctactcctt

SEQ ID NO: 450265 - DNA, 120 bp, Homo sapiens
cgctcaggaccgggcctcaaaatggccacacgcgtacccccgtagcggaaaaacgtaagtaaggaggtctctgtaccatggctcgtacaaagcagactgcccgcaaatcgaccggtggta

SEQ ID NO: 450266 - DNA, 111 bp, Homo sapiens
gtaacgacggcctcagcaggcggggaagatgaaaggctgatacgcctcctcctgcctatatgccacctgatgatcagatgggtcaagataattcccagcctatggatacaa

SEQ ID NO: 450267 - DNA, 100 bp, Homo sapiens
cccgcacgccgcgcccgcgcccccgctccgccgcggagtttctgcatgactgtcacaaaggtattcaggaaggaacacaatgtaccaaatgtaaaaataa

SEQ ID NO: 450268 - DNA, 80 bp, Homo sapiens
cttacagccgctcgtcagactccagcagccaagatggtgaagcagatcgagagcaagtccgtggtggatgactggattga

SEQ ID NO: 450269 - DNA, 100 bp, Homo sapiens
atgtccgagcccaaggcaattgatcccaagttgtcgacgaccgacagggtggtgaaagggcctattccactagaagcaagatggctgaactcaatactca

SEQ ID NO: 450270 - DNA, 89 bp, Homo sapiens
gcagcagcttgcgggacacggagccgcgaggagacagctgaggcccgcggagaccagggcgtccaatgcgaatttttgtgaatgatgac

SEQ ID NO: 450271 - DNA, 75 bp, Homo sapiens
atctaaagcaccagtaaaatatggtgaactcattgtcttaggtggagtcaaccagccccagtctgctaaccactg

SEQ ID NO: 450272 - DNA, 50 bp, Homo sapiens
ctttagaaaactgatcttaatacagatcatgagcgtcttgttgttcatcg

SEQ ID NO: 450273 - DNA, 100 bp, Homo sapiens
tttggagtatcgttctatttctctagctattgccttattttttctcatggatgttcttcttcgagtatttgtagaaggaaaaagcttgtggtgaaggggg

SEQ ID NO: 450274 - DNA, 90 bp, Homo sapiens
aatggcacggaggcctgcgtccacacccactcgcccgggtctatggccacggtcggagagtggtcctgtgtgcgctgcaccttcctgaac

SEQ ID NO: 450275 - DNA, 71 bp, Homo sapiens
ggaatggtggagaacttcaaccaggcactcaagcaataccaagaaggagggtgacctgatagctgctcagg

SEQ ID NO: 450276 - DNA, 75 bp, Homo sapiens
gcagagccgccgagacgccgaagagcccgccgcccgcgcgagtggcgggaccactggatgcagtgtgtgtacttc

SEQ ID NO: 450277 - DNA, 100 bp, Homo sapiens
ccgctgccgcagcctggctggggagggggccagccccccaggccccctacccctctgagggcacggccgagcagatgaggactgtgtggacgaccgggcc

SEQ ID NO: 450278 - DNA, 83 bp, Homo sapiens
gacgcgcgcagcccgcccgcccggcgaccagcaagtaagactttgaccccgacgcaggcttcagtgattgccgcggatcagaa

SEQ ID NO: 450279 - DNA, 97 bp, Homo sapiens
gtaggcatcagcaatatgcagctattgaacgtttgacatgtggcaagtttgaattgagatgtgcttccactatgatgacgcaggaacaaatccagaa

SEQ ID NO: 450280 - DNA, 100 bp, Homo sapiens
ttggtcttctgatagcaactttaatgtgaccattcctcaagaattttgtatccaaggcccaaaagtttgttacccaagatgatgaatgctgacatggatg

SEQ ID NO: 450281 - DNA, 87 bp, Homo sapiens
cttcctaaggccgccgcttaccccggggtctatggaagtaatggaaggacccctcaacctggttcagcagactgtacaggatctttt

SEQ ID NO: 450282 - DNA, 100 bp, Homo sapiens
gatgaagcccacagactgaagaataggaactgcaaacttctggagggtctaaagcttatggccctgaagaggcaattcggacataaagagaaacatcaag

SEQ ID NO: 450283 - DNA, 75 bp, Homo sapiens
tggctttggatcagattattcacgaagctctagaaaggaaaccagaatccgggcaatggataaggatgccaagaa

SEQ ID NO: 450284 - DNA, 101 bp, Homo sapiens
agaagagtgagagagagctattagagattgtgaagaagaatttcgatctccgccctggggtcattgtcagggtatcactgggatacatcagattggatgcc

SEQ ID NO: 450285 - DNA, 90 bp, Homo sapiens
gctacttaattgacttatgcttcctagttcgttgcccagccaccaccgtctctccaaaaacccgaggtataagatgatctctgaattcac

SEQ ID NO: 450286 - DNA, 100 bp, Homo sapiens
ctttcgcttttttacctgccaatcaaactgctacaagacaacaccctgatctggcatggacatctggaatgcttgctgattcctctgcacacttctaagg

SEQ ID NO: 450287 - DNA, 90 bp, Homo sapiens
ggagaattctgacgccaacatgcagcgaagtatcatgactgaagatggaggaggaaggcacagaagataatggcctggaagacgattcca

SEQ ID NO: 450288 - DNA, 75 bp, Homo sapiens
attgttttggcctaggatcatccaggtgaccaagaatatggcccaggtgaccaaagccctggacaaggccctgag

SEQ ID NO: 450289 - DNA, 60 bp, Homo sapiens
gcaacgtagtgttgccaatccagcatttttgaatcctggaatcaagatgtgagaccaaga

SEQ ID NO: 450290 - DNA, 90 bp, Homo sapiens
cctagccagactcagggatcaaagagcaaacagattcagtggcctgcattgataactgaactgcttaatgatgtggaaagattaaaacag

SEQ ID NO: 450291 - DNA, 75 bp, Homo sapiens
gttgcaaggatattcctcatgtatcatgcaaggatattcctcatatatcatacggtctggaaaatcccgaagcag

SEQ ID NO: 450292 - DNA, 49 bp, Homo sapiens
gctcaagagagacccgaccctgtacaggaaggtaaatactacagtgagg

SEQ ID NO: 450293 - DNA, 74 bp, Homo sapiens
ttgagaatttatcctcaagagtcagctggcaggagcagcgggaccccacggtgcatgatgatgtgctggagctg

SEQ ID NO: 450294 - DNA, 127 bp, Homo sapiens
ctgcgggctgagcggcgagtttccgatttaaagctgagctgcgaggaaaatggcggcgggagtactatactggcaattgctggagaagattttgcaattgttgcttctgatactcgattgagtgaag

SEQ ID NO: 450295 - DNA, 93 bp, Homo sapiens
cgggtgtggacgccactacagttcatcaacatcaactacgtccctctgaagctgctacaggagctgagagaccctaccctcactttccgtctg

SEQ ID NO: 450296 - DNA, 100 bp, Homo sapiens
gcttagagcgtctggccaagaatcagaggaagtggggcctgctttcttccccgggcgatgtgcagagatctttgccaggggtcaaagcgtcgggaagctt

SEQ ID NO: 450297 - DNA, 75 bp, Homo sapiens
acgagtcttctagcttcatgttcctggtgtttgacctaaatatcttcccttccaacctggtgtcagcagcctttc

SEQ ID NO: 450298 - DNA, 74 bp, Homo sapiens
catttttagttaatcacgatttctctcctcttgagactcaagtaggacgttttgctcctcaattttctggctac

SEQ ID NO: 450299 - DNA, 97 bp, Homo sapiens
cgtcatcctgctgctgaagatctggaagacgcgctcctgcgccgtcaggatctggtgattttgaagagaaaccacaacaacaaagatgaaaacccct

SEQ ID NO: 450300 - DNA, 105 bp, Homo sapiens
caaaatgtttgtaaattctccttttaccaaggaaaggcagcaacaggtggaagctgttgagttggaggctaaagaagttctcaaaaaattatttccaaaggtgtc

SEQ ID NO: 450301 - DNA, 90 bp, Homo sapiens
gccggaggagcccctcaggccatcacagttgaaaactttggtgcaacagaagtgaaagagctggttctaaatggtgcagacacagctgtt

SEQ ID NO: 450302 - DNA, 100 bp, Homo sapiens
ctggacgccgccgccgccaccgccacctgcgcggcagtcatcaagcggggatctgatgagcttctttcttctggcatcattaacggaccttttaccatga

SEQ ID NO: 450303 - DNA, 51 bp, Homo sapiens
gcgcggggactgcaaccctaatcagtatgaaaacccatggacaatcccgaa

SEQ ID NO: 450304 - DNA, 90 bp, Homo sapiens
caacaagcaagcatgcagcttactgcttgaaagcaacgctcagtatatcgtcagtggctctgacgatggctccttcttcatctgggaaaa

SEQ ID NO: 450305 - DNA, 95 bp, Homo sapiens
ccccggctcattgattacctctcctacaactgaattgcagtccttcagtgaatctacagacctattttctcaggagctcagcctggccttacttc

SEQ ID NO: 450306 - DNA, 83 bp, Homo sapiens
gaaaatgttagaagaactcgtgagccggattgatgttcctccgtgtcacaaagcagtacctgccccacgtggcgcgcctctgt

SEQ ID NO: 450307 - DNA, 93 bp, Homo sapiens
cagcaccagacacttaccagaaatgtctgtcttccaacaaatgttcagaaatgaatactgcattgagggacggacttctggtcttcttcttcc

SEQ ID NO: 450308 - DNA, 76 bp, Homo sapiens
taaaaacaagactggggctgctcccatcattgatgtggtgcgatcgattcatgttacatgtaaagctgtcctcatt

SEQ ID NO: 450309 - DNA, 76 bp, Homo sapiens
tgaataatctgcaccctcgagtcactgaggaggacattgttggtaacccagagaacacagccgaagtggaatgtgg

SEQ ID NO: 450310 - DNA, 138 bp, Homo sapiens
tgaagaggaaataaaaacagaacaggaggtggtagagggcatggatatctctactcgctccaaagttgctgatgtatattcaagatgagtggattaggagaaaacttggatccactggccagtgattcacgaaaacgc

SEQ ID NO: 450311 - DNA, 101 bp, Homo sapiens
tctcacatttccaagtacattctcaggtggagacctcgagatgaggttagtcttcataagaagctgaggactgaagtaattcagctagaagatacattggc

SEQ ID NO: 450312 - DNA, 100 bp, Homo sapiens
cactggcattggaacttcctgttctgatagcgtggaagcttggacgaaccttgacaggatgggtgcagcgaactttccagagcacccaggcagctacggc

SEQ ID NO: 450313 - DNA, 75 bp, Homo sapiens
cttgaaggtttacacttgtcaacttcctcttcagtcatcagtgaattgagtgatctacagcgcgatccacctgct

SEQ ID NO: 450314 - DNA, 100 bp, Homo sapiens
aagaacttaaacgaaaattgaacattctgactcgaccgagcccctgcagatcaagtcagtagtggcaccagagcatgtgaagggctacatctacgtggag

SEQ ID NO: 450315 - DNA, 88 bp, Homo sapiens
gctccggcttctgctgttgctcttctccgccgcggcactgatccccacaggtggaggcaatgcccagagctgtggcagccaccttgca

SEQ ID NO: 450316 - DNA, 75 bp, Homo sapiens
cttgctcagtctctgtcagaggaagatcccttggttattcagcttctcaaggctggaaaagcgaaggaagtttcc

SEQ ID NO: 450317 - DNA, 100 bp, Homo sapiens
ccagatccttcgggccattgggaagggcagctttggcaagaatcattgatcagcgattcgagaaggtttcctactttgtatttggtgatttcaacttccg

SEQ ID NO: 450318 - DNA, 100 bp, Homo sapiens
ctggacaacaccatggaaatatttgacattgagaaagatcaactgaaatcggcaaacttctgagttcctacttgcaaaagaaaagtgacgtggaggatca

SEQ ID NO: 450319 - DNA, 76 bp, Homo sapiens
tgatgagaacacagccacgcttacggaactcttggtgtaataacagaagctacaataaaaatcagaccagtccctg

SEQ ID NO: 450320 - DNA, 74 bp, Homo sapiens
gcggcggcgccggcctccggggagaaacgagaccttgtacacagacagacggctagtgcagtggtacagcacat

SEQ ID NO: 450321 - DNA, 113 bp, Homo sapiens
ggaagccagagccgcctgccatgccccagccagtccccacagcataacagcctacttctgcttcctcctggccgctctgggtgtgacagctggtgcccatcgcttgtggagcc

SEQ ID NO: 450322 - DNA, 100 bp, Homo sapiens
agccatcaacccgagtgcagtttcgatggaaaatgaaggtgaagcaaaaaatttattgccatatcttggaccccacaaaatgagagattgtttctgtacc

SEQ ID NO: 450323 - DNA, 75 bp, Homo sapiens
gtgacaaagctaaggatggagttgcaggtgtccagcgggtgtccgcaatgttgccagtgtctgtctgcagattgg

SEQ ID NO: 450324 - DNA, 76 bp, Homo sapiens
gaaattccatgctgccttcagcttcctttgccgctctgcatcatgttggtcccactctatgaccagtgggaggatg

SEQ ID NO: 450325 - DNA, 75 bp, Homo sapiens
cttgggtttagcaaaagttcatctccttctgcatccttaactgagaatgagggagtgcatccgccccaacccttt

SEQ ID NO: 450326 - DNA, 116 bp, Homo sapiens
gtgtcgcagccctgaagttgcctcttctggtgtcaaagcttttggacattcctggggtgctggagaatctggtaaaagcaccattgtgaagcagatgaggatcctgcatgttaatg

SEQ ID NO: 450327 - DNA, 100 bp, Homo sapiens
ataacccttctcctttctacaacccgttccagttcgagatcaccttcgagtgcatcgaggacctgtctgaagggttctgaagtaacggaagctaccttgt

SEQ ID NO: 450328 - DNA, 100 bp, Homo sapiens
caggaattctggtgctgattaacgatgccgactgggagctactggatgacgatgtcgataccaagaagcagaagaccgacgaggatgactagacagcaaa

SEQ ID NO: 450329 - DNA, 100 bp, Homo sapiens
cggcgcgagcgccccgccatcgtcccgcaccaaggatgacattgatcttgatgccttggctgcagaaatagaaggagctggtgctgccaaagaacaggag

SEQ ID NO: 450330 - DNA, 118 bp, Homo sapiens
gttcacgcacgggatccagagcgccgcgcacttcgtcatgttcttcgcgccctgggcgtgatggtgggcatgggtcagaaggattcctatgtgggcgacgaggcccagagcaagagag

SEQ ID NO: 450331 - DNA, 71 bp, Homo sapiens
ccaccagcgcagcgctgccatggagcccagcagcaaggcacgtctgagaatggtggatgtggtggagaaag

SEQ ID NO: 450332 - DNA, 90 bp, Homo sapiens
tccccggcggcagcacgaaagtaccatagccaaagccttggctggacagtcagtacgaatctgtaaaggccccagggctgtgttttcccg

SEQ ID NO: 450333 - DNA, 98 bp, Homo sapiens
ttacaatactacgtcggacagagttttgccaatggtccagcggactaggcaattggtaacttcaccgagtccaatgagttcttctgacggcaaagttc

SEQ ID NO: 450334 - DNA, 82 bp, Homo sapiens
ttctgccggatcagatgagcagattggttagtgaagggtttcccaaactctcgattgcctcttgcaagcagatgacctggga

SEQ ID NO: 450335 - DNA, 90 bp, Homo sapiens
tccaccatggacaagtttaatgtcaccaaacccatccatgcgctgaatgttgactacagacaaaaagctgctgcagcaggtagaattccc

SEQ ID NO: 450336 - DNA, 86 bp, Homo sapiens
gcatctattacctttgccttggaatacaggagaaagaaggtgcatttccagtcacccagaaccgggcgctgcagctgctttatgat

SEQ ID NO: 450337 - DNA, 89 bp, Homo sapiens
gaaaatcatttgtgatgggtcagctagtatgcaggctaggcaaactctgagtcagtgctgattctctcaaatagagcttgaaggataaa

SEQ ID NO: 450338 - DNA, 100 bp, Homo sapiens
gcagatcagaggtagtcggacctttcccgctggcgcgcagcctcagctaggaagcttattttcgatacatggcagaaaacccaactgctggtgtggttca

SEQ ID NO: 450339 - DNA, 80 bp, Homo sapiens
tctcgggagaagcagcgcctgttcccggggcagatccaggttcagcagaaaaatatggctcaggagactaaccagacccc

SEQ ID NO: 450340 - DNA, 89 bp, Homo sapiens
aaaacagactttttcattggaggagaagaagggatggcagagaagattgttctctggggccggactgagaaatgcctgaaggagacgac

SEQ ID NO: 450341 - DNA, 80 bp, Homo sapiens
ttctgcctgtgcgccttcctctcgctgtcctggtacgcggcactcagcggccagaaaggaaagaccacagcaagattctt

SEQ ID NO: 450342 - DNA, 97 bp, Homo sapiens
tggcaaagtatgagaaggctgagaacaatgagatggtggagctacagagaatacggatgaaggatgaaatccgagaatataagttccgggaggcacg

SEQ ID NO: 450343 - DNA, 103 bp, Homo sapiens
gaggcggcgcggccatggctcacctccggggatttgccaaccaggtatcgagaaccttccctgcgaacttcagaggaacttccagctgatgcgagagctggac

SEQ ID NO: 450344 - DNA, 73 bp, Homo sapiens
ttgtacagagatgtgatgttggagaactatagcaatctggttttcttgggtccttctatatgatccactcttt

SEQ ID NO: 450345 - DNA, 100 bp, Homo sapiens
cagatatccaagagcctcaggagactcaagagccagaaatcctgagttttacctacacaggaaggtgggagtcaatcattttgacaagtctcctgaaagg

SEQ ID NO: 450346 - DNA, 100 bp, Homo sapiens
ggcgccgaccaggcctggctcgcgcctctcccaggacccgcctggctgcgagatatgaagccccagagagattggtgagggtgatttcccaggaagacgc

SEQ ID NO: 450347 - DNA, 100 bp, Homo sapiens
ctggatctattaaagggagcattccgatcatctgaggaacagcagaatcggaagactttttgatggtacagagcccattgttttggacagtctcaaacag

SEQ ID NO: 450348 - DNA, 76 bp, Homo sapiens
aggctgtgctgtgaactgtgaacagaagcaagcaggctatggaactcagtcaactccccagggatatggctcgact

SEQ ID NO: 450349 - DNA, 75 bp, Homo sapiens
gaacagttggatcttgctcagtctctgtcagaggaagatcccttgtttcttcatgatctctccaaccgaccagca

SEQ ID NO: 450350 - DNA, 97 bp, Homo sapiens
gtctactctgtcgctcttgtgccctagcaccccgagaaccgtcagtttgagccagatggtaaaaagatggcctatcagaaggtccatgcagatcaaa

SEQ ID NO: 450351 - DNA, 50 bp, Homo sapiens
cagtccattgaagctgtgcaagctatattttgatacaaccaagtcggatg

SEQ ID NO: 450352 - DNA, 90 bp, Homo sapiens
cccaagatgggcatctattacattccagtggtcctgccatcatggctgtcctctgcaaaggtctcctcgctcattgagagaatctctgac

SEQ ID NO: 450353 - DNA, 74 bp, Homo sapiens
tcactcccgctgtctcagcagtctacagcacgggcttccgttacaagatgaggtctgtgtatgctcacttcccc

SEQ ID NO: 450354 - DNA, 74 bp, Homo sapiens
aatactacagagtgtgcacactggctatcattgatccagagctcccagctcctccagcagccgacaggaggccc

SEQ ID NO: 450355 - DNA, 90 bp, Homo sapiens
gcgaccccagtcggtgctccggggaggtcacctgacgaggaggtaatcattaccaaatgaggaggaaaggacgatgtcatcgaggctctg

SEQ ID NO: 450356 - DNA, 133 bp, Homo sapiens
tctccctgtccgggtacatcaactatctggacagaaacaaccccagcaagcccctgcacgtcatcaaggactggtcctgctcgctcctcgtggcctccctcgcgggcgccttcggctcctccttcctctacgg

SEQ ID NO: 450357 - DNA, 102 bp, Homo sapiens
cgacaagccgctggcagccgcggatctcaccgccgctcaggtgcatccgcggacgcaaggccaccctggaggagctacagacggtgcactcggaagcccaca

SEQ ID NO: 450358 - DNA, 50 bp, Homo sapiens
tggagatatggcgcaactgcggcgcttactaaaagatgtaactgaactgc

SEQ ID NO: 450359 - DNA, 103 bp, Homo sapiens
ccatgtcgggttattcgagtgaccgagaccgcggccgggaccgaggatgaagatctccttcaacgacaaaagcctgcagaccacatttgagtacccttccgag

SEQ ID NO: 450360 - DNA, 100 bp, Homo sapiens
ctttacttggtgcaggaaggcagtctttgctacgtacagcaaaaggtggaattttccttggtaccgttgctgcagcgggaatgctagctggatttattac

SEQ ID NO: 450361 - DNA, 100 bp, Homo sapiens
caagacgcggctgccgtacgtggccctcgatgtgctctgcgtgttgctggcctatttgatggctttgcagatggactaggagttgctgaagctatttcat

SEQ ID NO: 450362 - DNA, 88 bp, Homo sapiens
caggcggtgctgccgcgcgagctctacccagtcgagagtctgatgaataacagtaaagaagaaatgcgcgaactggcagcgttgtttt

SEQ ID NO: 450363 - DNA, 74 bp, Homo sapiens
gccactgcgcagaccagacttcgctcgtactcgtgcgcctcgcttcgggcatttttctggctggtctccctgct

SEQ ID NO: 450364 - DNA, 90 bp, Homo sapiens
aagggtattgccgctgttactgatatacctttaggagagaaggatattcctggactgactgatactacagtgcctcgccgcctgggcccc

SEQ ID NO: 450365 - DNA, 50 bp, Homo sapiens
atatggtgaactcattgtcttagggctaaagcagtagctgcagaatcgaa

SEQ ID NO: 450366 - DNA, 50 bp, Homo sapiens
ggtgatcaagtacatggggccggcaggttcaaaatcaaaggaagcccaga

SEQ ID NO: 450367 - DNA, 50 bp, Homo sapiens
ctcatactctgttatagataaacaagatattaaacaccgtcgaattccaa

SEQ ID NO: 450368 - DNA, 100 bp, Homo sapiens
tatcatgaaatcctccccacttatgtttgtaaatgtgagtggaagccatgaggccaaaggcagttgtattggtactggttttggattaggaattgttttc

SEQ ID NO: 450369 - DNA, 75 bp, Homo sapiens
tttgtctcctgtcctcctgaccctcacaaagggatcggagtccttcaataatgttaaacagtggctgcaggaaat

SEQ ID NO: 450370 - DNA, 96 bp, Homo sapiens
cctcaggtggcagcgcttgcagtcgggctacggaggccgggttgccagattacggcaagctgcggcacccctacttgctacagttgatggctgtgt

SEQ ID NO: 450371 - DNA, 50 bp, Homo sapiens
tgatccagaacttgcagcaacaatagctttcactctactcagttcctgag

SEQ ID NO: 450372 - DNA, 100 bp, Homo sapiens
acaaagccaggttactgcggcagtatgataatgagaaaaaatgggaactgatttgtgatcagaaatcaatgtggactgaacataaatcacctgatggaag

SEQ ID NO: 450373 - DNA, 100 bp, Homo sapiens
ggagccggcagccgacggcaaaggtgtcgtggtggtcattaagcggagatccggaatactttcaagtcatcccaaatatggttccatccctaaacttata

SEQ ID NO: 450374 - DNA, 100 bp, Homo sapiens
gccggatagagtggctcacttgcatgtatttggaacaaaaaaaggagatgcctggcagccccgctctctgcagtgtttcccattaaacactaccaggaca

SEQ ID NO: 450375 - DNA, 75 bp, Homo sapiens
aaactgtcccgggtgggaagaggaacagcctatgtgggcttccacggagatcccaagacaaaagcgtggttgaag

SEQ ID NO: 450376 - DNA, 100 bp, Homo sapiens
tgggccggagcagccgcgggcgcccgaggggccgagcgaggacagagcgggatgccaccagcttgtccaaagggaagttccaggagctcctggtgggcat

SEQ ID NO: 450377 - DNA, 82 bp, Homo sapiens
agggggtgaaagggacaggggtctcgcagccagggatttggacatttggtgccatcttcagaagatccaggagtcctgggaa

SEQ ID NO: 450378 - DNA, 95 bp, Homo sapiens
agcggcggtttaaaggaggtggcgggaagcctgtgtgtgcttcaaatcgtcaccctcatggtcgctccggctcagctggaagctcagaaagccac

SEQ ID NO: 450379 - DNA, 48 bp, Homo sapiens
ccaggtgttggaaaaacacaattatgtgaattagtgccatcttacgat

SEQ ID NO: 450380 - DNA, 100 bp, Homo sapiens
tctccgccactgcgcacattttgcagcctgcaccggccaacgggaactccagctttgttcttaattcaattaattttcaacaatttcttggaatgtggtg

SEQ ID NO: 450381 - DNA, 74 bp, Homo sapiens
ggacccgcccgccatggccaccaagatgaacgactttcgaagtaaaatgcaatcaatatttccaacaattccca

SEQ ID NO: 450382 - DNA, 75 bp, Homo sapiens
tgccaaccagcatggccctggacaggctcctgttctggatgtcagatatgcatctgcctcctgagaaactggtgg

SEQ ID NO: 450383 - DNA, 90 bp, Homo sapiens
ggctcttccagcatctcacattctttattggtgaaaacatgaatccagatggcatggttgctctattggactaccgtgaggatggtgtga

SEQ ID NO: 450384 - DNA, 100 bp, Homo sapiens
acatttctgggtgacactcaacaggattcccggaacaggagtacagctgtgtagtaaagatgccttctggtgaatttgcacgtatatgccgagatctcag

SEQ ID NO: 450385 - DNA, 80 bp, Homo sapiens
gaggaggtggactctgccgacaccggagagagatccggggatttctttcacggtttgataatgtccttcccgtcagcctg

SEQ ID NO: 450386 - DNA, 95 bp, Homo sapiens
atgatgaggatatgcaggacatggacgagatgaatgactacaatgagtcaccggatgatggagaggtcaatgagacagcacccaagaaaacctca

SEQ ID NO: 450387 - DNA, 82 bp, Homo sapiens
caaaatatgcaaagtgtgaccagtgtggaaacccaaagattgagtttgtgacgggcaccaaaaaaggcaccacgaccaacgc

SEQ ID NO: 450388 - DNA, 82 bp, Homo sapiens
ggccgggctggctgcggccgccctgggccgggccccaccggacgatgaagatctccttcaacgacaaaagcctgcagaccac

SEQ ID NO: 450389 - DNA, 90 bp, Homo sapiens
caatcagcagcagcagtagtaccagcagtgacagtgtctactcgggacaccaatcagtgctggtgcccccgctggagctggagagcaacg

SEQ ID NO: 450390 - DNA, 100 bp, Homo sapiens
ggtggtatagatttcagtagctcctcagataaaaagagatgataatgaagataattcaaatgatgggacccagccatccaaaaggaggcgaatgggctca

SEQ ID NO: 450391 - DNA, 82 bp, Homo sapiens
caaaagtgttaaatgtgatcagccttgaattttcagatacaaagaagctgcagtaaaggaagatgaagaagaagtttcagat

SEQ ID NO: 450392 - DNA, 75 bp, Homo sapiens
tatgtactgcgcctggatgtggccagatttatcagcaagactgttgaacgcataactgcccaagatgcctgtccc

SEQ ID NO: 450393 - DNA, 50 bp, Homo sapiens
aggagcccctcatccccatccagattgcagagggaatggcatacatcgag

SEQ ID NO: 450394 - DNA, 128 bp, Homo sapiens
gcgcccccactcgcgctgcgatgacgcgctcactgttcaagggaaacttttgggtttgagcgggagcagaacgacaccttcatcatggagatcctagacattgctccattcaccaagatgcggatccg

SEQ ID NO: 450395 - DNA, 50 bp, Homo sapiens
attttccttgatggtcaaaagattaagagatcctgaaggagctagacgag

SEQ ID NO: 450396 - DNA, 84 bp, Homo sapiens
ccgctgtctccctggagttcttgcaagtcggccaggatgtctcaggctgactgtgctgtcctgattgttgctgctggtgttggt

SEQ ID NO: 450397 - DNA, 75 bp, Homo sapiens
cccacccggcagttcgcagcggcgggtgaaagaacttgtcctggacaacagtcggtcgaatgaaggcaaactcga

SEQ ID NO: 450398 - DNA, 96 bp, Homo sapiens
acctcaacgatgacgtggtcaaggcctcaggagtgcaagtagctgatgaagtatgtcgcattttttatgacatgaaagttcgtaaatgctccacac

SEQ ID NO: 450399 - DNA, 99 bp, Homo sapiens
ttcaatcctcagatgacctagaagaagacagtagcgactacagcattccttccagctggagaacatcggcaacttcatcaaggccatcaccaagtatgg

SEQ ID NO: 450400 - DNA, 75 bp, Homo sapiens
gcggtgctgacggaccgggcccaggaggaagacaatgtgtgggacactggactacttgccgccagaaatgattga

SEQ ID NO: 450401 - DNA, 75 bp, Homo sapiens
gcagggatgaatgcaaaagaattcttcgaaaattgggatgacagtgatgggattccgtggtcagaagaacgggtg

SEQ ID NO: 450402 - DNA, 100 bp, Homo sapiens
tgtctatgatgtcatgtttgtcagcacaggtaccagttcttagaggatgcagtgaggaaccagcgcaagctcctggcctcactggtgaagcgccttgggg

SEQ ID NO: 450403 - DNA, 80 bp, Homo sapiens
cttcgagtgacccgggtgccgaggagcgggaagagttgctggggaaccaagagcggcggcgcgcgtggcaggcctcccgg

SEQ ID NO: 450404 - DNA, 75 bp, Homo sapiens
ttgaatttggagtagatcccagtgctgatcctgagctggccttggatgtgggctctcttgatgagaagatgaaga

SEQ ID NO: 450405 - DNA, 73 bp, Homo sapiens
tactacagtaatctgtggagttaaagcaagctacgaagtgaagagtgtcctcggaaaggaagtggggttgtta

SEQ ID NO: 450406 - DNA, 100 bp, Homo sapiens
tcaagatctcgttccagttccagagaacgttcgagatctcgtgggtcgaaatcaagtttgaaggaggagtttcctgcctggtatgagaagcttgttctgg

SEQ ID NO: 450407 - DNA, 50 bp, Homo sapiens
ttgtagcgtggtgcttctgttgctcacagtatttaggtcagttaacgtcc

SEQ ID NO: 450408 - DNA, 100 bp, Homo sapiens
gctgtggtacagagggagaagacagagaagatgggccagaatctcaaccgtattccatacaaggacacattctggaaggggaccacccgcactcggcccc

SEQ ID NO: 450409 - DNA, 98 bp, Homo sapiens
gggtccgctgagcggggcgacccgaggtcgggaaagaggttaaagaagacacgcaagtatgatatcatcaccactccagcagagcgagtggaaatggc

SEQ ID NO: 450410 - DNA, 100 bp, Homo sapiens
ggcgcctcaggaactgaaccctcgcggccgcaacgtgtgccgtgctcccggggtctgcggaagagggagctgctgaaggagctgctaccagtcatcgggc

SEQ ID NO: 450411 - DNA, 100 bp, Homo sapiens
agtcctgtgccggcagctgtggccaacagcaacagagagagtccaggtttgtccagaggggttgcgtttatccggtttgacaaacggtcggaggcagaag

SEQ ID NO: 450412 - DNA, 98 bp, Homo sapiens
aacatctgacagtgcttgcaggatctctcctggacaaatcaatcagggtggctttgtccactatggtgaagtgaccaatgactttgtcatgctgaaag

SEQ ID NO: 450413 - DNA, 83 bp, Homo sapiens
gggacccggtgacagcgtgagaggttcgcagagtttaagaatgttacatttgatatcatagctactgaagatgtaggcatttt

SEQ ID NO: 450414 - DNA, 75 bp, Homo sapiens
gtgatattgctactgtgtgtgattcagtgatgtcttggcattgcccattttcaagcaggaagattccagccttcc

SEQ ID NO: 450415 - DNA, 74 bp, Homo sapiens
ctggacaattcacctgcctcctatgtcttccatccagacaatgctgtagatgatgagctggagatcaaggccta

SEQ ID NO: 450416 - DNA, 83 bp, Homo sapiens
ccgggggcgccatggcgaccggagcgaacgccacgccgttgggtaactaggatttctacctcaaccgcgagacctatgcaagg

SEQ ID NO: 450417 - DNA, 100 bp, Homo sapiens
tgaaaacctttgggcttcatggagtcgtcttagatgttgattcagtgcccagtcccctggaaggcagtgaaggggacggagacactgactgaggcgatgg

SEQ ID NO: 450418 - DNA, 100 bp, Homo sapiens
aagatggtttgcgggggcttcgcgtgttccaagaactgcctgtgcgccctcaacctgctttacaccggatcatggcccaagttgcaatgtccaccctccc

SEQ ID NO: 450419 - DNA, 100 bp, Homo sapiens
gtgaactacagtcagggcagcctgaaggatgcagcctcccagtagcattggatgcaggaaaaaatacattgacggtgaaaaacaagccgaaccagttgta

SEQ ID NO: 450420 - DNA, 100 bp, Homo sapiens
cctgccgctcatcgtgtggctgctggtgaaaagcttctccgagagctaataatcacaagaagttgtcagaatttggaattagaaatggcagccggcttca

SEQ ID NO: 450421 - DNA, 100 bp, Homo sapiens
ctccgttgcctgctcccggagggagacgcgctgccgaggagaacccagcggcatcctgaggttagcattacacttctcccagtggagcccatgacttctg

SEQ ID NO: 450422 - DNA, 50 bp, Homo sapiens
gaagaacggcaggatacagacatggtaccccctgtaccggctgggtggcc

SEQ ID NO: 450423 - DNA, 50 bp, Homo sapiens
aggacatcctgcgcaaggccgtgcagaagacatgcaagaaagcacttcag

SEQ ID NO: 450424 - DNA, 74 bp, Homo sapiens
cggcgagatgcctttgttcaccgccaaccccttcgagcaagacgtggcagggaggagagagcgatggctttttt

SEQ ID NO: 450425 - DNA, 75 bp, Homo sapiens
ggaggcggaggcagaggtggaggcgctttgaaaggccagaacacaaagcgtgaatccggaagaaaagttcaatct

SEQ ID NO: 450426 - DNA, 75 bp, Homo sapiens
cggagaccccgcgccgacggctgctcaaacatcaggattcttctgatgtagagcgactggaaagattcttcgact

SEQ ID NO: 450427 - DNA, 75 bp, Homo sapiens
gcctgtgcagccctcccaggtggagtacacggcagactgtattgttgcagcatctggcagtgagactgaggatga

SEQ ID NO: 450428 - DNA, 99 bp, Homo sapiens
ggagctgtgatccggtgttctataggcaggtgttgggtgcagagagcgcccctcccggacagccaagaaggatcaagaaggtggagaagaaaagaaatc

SEQ ID NO: 450429 - DNA, 100 bp, Homo sapiens
cttcgttttgtgaaaggccaatttcatgaatttcaagagagtaccattggggatttcaccaaaagaattgtgagaggaaaaagaaacttacatctaacag

SEQ ID NO: 450430 - DNA, 75 bp, Homo sapiens
caagcaataacccaagcaaaacttcagatgcagatctcccattaaccagtcataatgaagtaagaacaagaagat

SEQ ID NO: 450431 - DNA, 99 bp, Homo sapiens
aggttcatgccagcccagaacagagaatcaggctgccagacaccctacttgaaggatcctgttggaacctgtggaaataatacttacaagaacgttgca

SEQ ID NO: 450432 - DNA, 75 bp, Homo sapiens
cccgaccccgacccggcccggtcaggccccatactcaggaagctcttcgtgggcggtcttgactggagcacgacc

SEQ ID NO: 450433 - DNA, 100 bp, Homo sapiens
actcaacttctagttccacctgaaaactgtagtggttgcttttgtaatgaagaagcacttaaatactcatctactaggcaagcatggagttggcacccca

SEQ ID NO: 450434 - DNA, 82 bp, Homo sapiens
cttggactgagtcctgcaggacacaggcacccaggcatgtggaatatgctcatagtggcgatgtgcttggcccttctgggct

SEQ ID NO: 450435 - DNA, 74 bp, Homo sapiens
catctattattccctttcctgatcataaccagtccccatgtgagagcagcagaggcggtcttcaacatcctgcc

SEQ ID NO: 450436 - DNA, 90 bp, Homo sapiens
ctacgccaaggaggtttacaaaatagacatgccgcccttcttcccctccgaaatcttcgagtgcttcgactgaccatgatcccctgggcc

SEQ ID NO: 450437 - DNA, 100 bp, Homo sapiens
atagtaaagaaaattccagtacccccaagagactttacttcagagccccggcttattgctattgagaagaatctacaaatgtgggaagaaatgaaaaaag

SEQ ID NO: 450438 - DNA, 74 bp, Homo sapiens
cacgcgcagaccttcgttgccctctgtgccacaggaaggtgctcgggtcttcggggcactgggtcccatcggtc

SEQ ID NO: 450439 - DNA, 90 bp, Homo sapiens
ccaaaacagtttacctcttatctaacaggtggaattctactaagtatcagtcggccctacaagacaaagcccacccacggcattggaaag

SEQ ID NO: 450440 - DNA, 97 bp, Homo sapiens
cactggcggccgaggtagaggcagtggcgcttgagttggtcgggggcagcggcaggagccttcacgtaaatgggtccagtcatgcctcccagtaaga

SEQ ID NO: 450441 - DNA, 100 bp, Homo sapiens
ggtcacagagaagctgcagctgacttacatggaggagacgtgtcgtcactatgtggcccatgtgaagatgccttcaattaagttgcagagttctgatgga

SEQ ID NO: 450442 - DNA, 97 bp, Homo sapiens
agattggggccagttcatgcacatctgtgacataattaacactacccaggatgggtgttggagcgggccggagagaagtagagtgggctgcgaggag

SEQ ID NO: 450443 - DNA, 98 bp, Homo sapiens
gccgcctgctgctggtgcgcgtgggggtgatcagcttcgcccagaagataatctcaggagacactgaagaagggaggctctgtggacagaggagcagt

SEQ ID NO: 450444 - DNA, 89 bp, Homo sapiens
tgggactctcagagcccacacgctcatggatacattccttccaaatcttactgtgccgagatcgctcacaatgtttcctccaagaaccg

SEQ ID NO: 450445 - DNA, 100 bp, Homo sapiens
ttgagaaggagaagttggccctggcccatgacactgccctgagcatgaaatccaagaaagtcagccccaacacactattacggaaagaagaaaaataaaa

SEQ ID NO: 450446 - DNA, 98 bp, Homo sapiens
cggaggagccgctggggctgccgccacggccgcccggagctgatgtagcccagcagttccagtatgctgtgcgggtgattggcagcaacttcgcccca

SEQ ID NO: 450447 - DNA, 83 bp, Homo sapiens
ctactttctgtctctatgaatgtgactaccctggttacctcatattttcaccagtgatcattaaagaatgggcagcttacaaa

SEQ ID NO: 450448 - DNA, 74 bp, Homo sapiens
ttattcactcaagactaaaaactaaaggcctgggcctgagaactgaatcaggtgtgggttgctgaccgaggaaa

SEQ ID NO: 450449 - DNA, 100 bp, Homo sapiens
ccaggatctcgggctcggaacgagactgcacgggttcatagtggcgtcatgcacgcagactcctgcaagttcccctaagttcttagaggactgctttgcc

SEQ ID NO: 450450 - DNA, 102 bp, Homo sapiens
cggaagttcctggtccacaacgtcaaggagctggaagtgctgctgatgtgcaacaatcactcagcctctgaagaagcttcgggttcagactcaggcagtcag

SEQ ID NO: 450451 - DNA, 75 bp, Homo sapiens
caggaagggaacgtggaaagcgcatacaggaccctaaacaggtttcaagtgccccatttgctccaagtctgtggc

SEQ ID NO: 450452 - DNA, 100 bp, Homo sapiens
aactgctgactcaggatgtcggggttcaggctgattttgcaggactgtccagaagagcctgaagctattaatgatgaggagcaatttgatgaaattgaag

SEQ ID NO: 450453 - DNA, 100 bp, Homo sapiens
aacaacagtgacaagaacagtgggccacaggggccccgaagaactcccacaatgccacaggaggaggcagcagtcaccgttacttcatccccaatccgag

SEQ ID NO: 450454 - DNA, 100 bp, Homo sapiens
agacaatcctgacttttggggtcctctggctgttgttcttttcttttccatgatatcattatatggacagtttagggctgaagggtatgtgattggcagc

SEQ ID NO: 450455 - DNA, 73 bp, Homo sapiens
cagaaagatggcatcatttttgccctcaaaagaaatggcaggctacattattggaattttgaagtcatgaaaa

SEQ ID NO: 450456 - DNA, 75 bp, Homo sapiens
gtggaggaaaacaacttcgagggcagatgttctcaggcgctgtggtctcaccttccactggggcaacaatgggcc

SEQ ID NO: 450457 - DNA, 107 bp, Homo sapiens
cgccatcgccagcatcgccaacccggactggatcaacaccggggagtctgcgggatggatgacatccagctctgcaaggacatcatggacttgaagcaggagctgca

SEQ ID NO: 450458 - DNA, 105 bp, Homo sapiens
aagagagcaaaatttaaggagttatatttggctaaagagggttgcagctgttgattttgaatccaacaacattcgtcagcttgatgattttttggaagattgtgc

SEQ ID NO: 450459 - DNA, 74 bp, Homo sapiens
cgagccatggggctggcggatgcgtcgggcttttcctccgcaaccatgtctgacaaacccgatatggctgagat

SEQ ID NO: 450460 - DNA, 87 bp, Homo sapiens
tctccatacagaggctgtggtacttctgttcttcaggagagaataccatgggtaccacctgaatgcattgaaaatcctaaaaattta

SEQ ID NO: 450461 - DNA, 97 bp, Homo sapiens
gctattgtgaaggagggttggctgcacaaacgaggatgagttccacccgttcatcgaggccctgctgcctcacgtccgcgccttcgcctacacctgg

SEQ ID NO: 450462 - DNA, 100 bp, Homo sapiens
ttggcacccggatcctggatgaggaggtgtttgaggtctcggcgcggaagatggccggcggcgtggacggccccatcgggatcccgttccccgaccacag

SEQ ID NO: 450463 - DNA, 51 bp, Homo sapiens
gtaatcagcttcttaccaaatacagaagactcacagatgaatgcttctcac

SEQ ID NO: 450464 - DNA, 75 bp, Homo sapiens
atcgagggcagaagatctgggtttgagtccagcagtgctttagcatctgtgggtcttgcagatatgatgtctcct

SEQ ID NO: 450465 - DNA, 51 bp, Homo sapiens
accaaagtgggaaacattgaaatcaagatagtgtgtgtaccatatcagtgg

SEQ ID NO: 450466 - DNA, 82 bp, Homo sapiens
aaacgccgcaccaggtcttgtagcagcgcctcctcggacagagcgggatgccaccagcttgtccaaagggaagttccaggag

SEQ ID NO: 450467 - DNA, 51 bp, Homo sapiens
catttcacgtgatactttgtgttcaggtttcaagtgccccatttgctccaa

SEQ ID NO: 450468 - DNA, 97 bp, Homo sapiens
tatgtcccactaaaggatcaacgtaacgtgagcatgaggttttccaatcagccctagaggtggtagatgctttctgcagtcgctacccccatgagac

SEQ ID NO: 450469 - DNA, 100 bp, Homo sapiens
ccagcagcagcagtagccagcatctcaaaccaggttggaggcatcaagcctgggtgctttaagattggcaacacaggtgggatgctggacaacatcctgg

SEQ ID NO: 450470 - DNA, 75 bp, Homo sapiens
gcaaatgtctttcgtggaagacataagtccaagccttatgcatttgatcgggtgttccagtcaagcacatctcaa

SEQ ID NO: 450471 - DNA, 76 bp, Homo sapiens
tgggagcccagcttccccgatattatgaggtcctcacagctcccattaccaaggttttgcacactagggaccaaga

SEQ ID NO: 450472 - DNA, 82 bp, Homo sapiens
cgcgggaggtgttcgagaacgaccccgagacgaggccacaagaggaagctgaatgaagaggacgccgccagcgagtccagca

SEQ ID NO: 450473 - DNA, 101 bp, Homo sapiens
ggggagcgtcggaccagaagagaatcacgccaggaaagcgacccggaggatgatgatgttaaaaaggtctctggggaacaagactcatggaggaaagcagc

SEQ ID NO: 450474 - DNA, 101 bp, Homo sapiens
ccgggggctacggaggagctggaggagcgtctgaccaaacacaccaagttcgtgcgggacatgattcgggaggtgtgtggctttgccccgtacgagcggcg

SEQ ID NO: 450475 - DNA, 95 bp, Homo sapiens
gctctcgaggctgctaagagactaaagcattagtttggatgaattcaagtcattttgccattttacaacccacttggaagactttgctattgcca

SEQ ID NO: 450476 - DNA, 75 bp, Homo sapiens
caaagcctactccactgagcacaagcagcagcaggaaggtgagactgtggagatgagaaggtggtggacactcgt

SEQ ID NO: 450477 - DNA, 82 bp, Homo sapiens
ccgaccagggacctgcccgcctgcggctgctccgggggctttgttatgcacctaaagccatattggaagctccagaagaaag

SEQ ID NO: 450478 - DNA, 75 bp, Homo sapiens
ccactagtaggaagctgctttgaagacttagcagaggtgagtgctccagttgtaacatctaccactcaggaaaag

SEQ ID NO: 450479 - DNA, 100 bp, Homo sapiens
gttctccctcaagccgcccaaacccaccttcaggtcctacctcctgccaccgccccagctgattgggcagaaagtggcccatgctctggcagagggactc

SEQ ID NO: 450480 - DNA, 115 bp, Homo sapiens
acggaatacctttgaggaacattggggaccgaaaggcgacctcggagaatgtggcctccagggggagcccagctgccttgaggtgcagtgttggggatccagagccatgtcggac

SEQ ID NO: 450481 - DNA, 75 bp, Homo sapiens
tgagcccaaccatgttatgctgaaccatctctatgcattgtccattaagaaactggcagacctttcacttcgtat

SEQ ID NO: 450482 - DNA, 74 bp, Homo sapiens
gatcgatgctgagcggcaggctgcagctgcagcctgccagctgttcaagcacatccgggcaacgtttgatcctg

SEQ ID NO: 450483 - DNA, 100 bp, Homo sapiens
gctatgtgccctctttgttcctaaaggtggtttgggaacattccatgcccttctaaatacagctgtacatgtagtcatgtattcctactatggactttct

SEQ ID NO: 450484 - DNA, 50 bp, Homo sapiens
agggcctgccaggtggcgctcggtcaaaatgcagatcttcgtgaaaaccc

SEQ ID NO: 450485 - DNA, 50 bp, Homo sapiens
gctcaccctcccgagttgaaaaagcaacacttccccagatcaaaaggagc

SEQ ID NO: 450486 - DNA, 75 bp, Homo sapiens
gccagcgagccacgggagcgagccaggccgccatggcatcagatgaaggcaaactttttgttggagggctgagtt

SEQ ID NO: 450487 - DNA, 75 bp, Homo sapiens
gacccgggacaccgcacagccgggaaatgtttctgtgtttgaagaacatacgcaccttcctgaaagtctgccacg

SEQ ID NO: 450488 - DNA, 76 bp, Homo sapiens
atggctactatttcaccaatctgtctcaggcctcaaggccggaacagtccgtgatgcaagctctcgagagtctcac

SEQ ID NO: 450489 - DNA, 90 bp, Homo sapiens
ggatggcatccaggagagcccatggcaggaccggcacggcgaaaccttcaccttcagcaagacactaagggcgactaccagaaagcgctg

SEQ ID NO: 450490 - DNA, 75 bp, Homo sapiens
cggagccgcgcagccctcggagcacgctggttttcccatgggctatgcagcagcagctcctgcctattctcctaa

SEQ ID NO: 450491 - DNA, 98 bp, Homo sapiens
cacccatcctggtagacggcaaggatgtgatgccagaggtcaacaaggttctggacaagatgaagtctttctgccagagacggggtttcatcatgttg

SEQ ID NO: 450492 - DNA, 100 bp, Homo sapiens
gcaggagatgccaaaggccagaaggattcctgtaaggaacaaaaggtcccaggtcattcttggggctcactcaataaccagggaagagccaacaaaacag

SEQ ID NO: 450493 - DNA, 74 bp, Homo sapiens
tggcattgacatttaattttagggtcctttatatagaagggagaagaagaagctggaggagttctccgtggaag

SEQ ID NO: 450494 - DNA, 88 bp, Homo sapiens
acctgcagagtgaagaaagctggtaatagatgtctgacaaactaaagaaagacttgtgttacctcagagagtggcaacagtgtgaaaa

SEQ ID NO: 450495 - DNA, 82 bp, Homo sapiens
cggagcctggaggagctgctgctggacgccaaccagctccgcgagctgcccgagcggagctggagtttgttcagatcatcat

SEQ ID NO: 450496 - DNA, 100 bp, Homo sapiens
ctccgggacctgcggggagggcccgcgagaggaatactcccccagttgcaagaggcgcaggaccgtggaagacttcaacaaattctgcacctttgtcttg

SEQ ID NO: 450497 - DNA, 60 bp, Homo sapiens
gcgagagcttcaaggacgcagccacagagattttgagaagtatgctttacagaggttccg

SEQ ID NO: 450498 - DNA, 98 bp, Homo sapiens
ccagaatgaaatccatgctcagagatgccaagaagaatctagacagacaggcctttctagaggctgacccgcggctgattgagtccctctcccagatg

SEQ ID NO: 450499 - DNA, 75 bp, Homo sapiens
cacaaattgcctccttatgtctccaacatggaccgcctgggggactcggaactccaaagacagcagcattcccaa

SEQ ID NO: 450500 - DNA, 75 bp, Homo sapiens
agcagtcgtatgtggagtcgctgcgcaccctgatgcagacacaacatttgcctgcaacaaggacagcggccagtg

SEQ ID NO: 450501 - DNA, 88 bp, Homo sapiens
gagattccttggttaaaattctgcaagactacaatttgcaagttgaattctcttacccgcccctgattccaggagatggacatgacag

SEQ ID NO: 450502 - DNA, 100 bp, Homo sapiens
cggccaatggcacggaggcctgcgtccgtagggtgtgtgctgtccgggctcacggggaccctgtctccgagtcgttcgtgcagcgtgtgtaccagccctt

SEQ ID NO: 450503 - DNA, 100 bp, Homo sapiens
cggcacacgcgcagccccggcctctcggcctctgccggagaaacagggccttattggaaggagaaagtaatccagagatagtgatctgggctgagcacgt

SEQ ID NO: 450504 - DNA, 83 bp, Homo sapiens
ggcgctctggctgtgctgcgcgacccccgcgcatgaaaccaaggtgtatgttggtaacctgggaactggcgctggcaaaggag

SEQ ID NO: 450505 - DNA, 89 bp, Homo sapiens
ggcccgttcccgcatcatcactctgtcctgaggaccagacagtgctgttggtgactgtccctgacttcagtgccacgcagaccgcctgc

SEQ ID NO: 450506 - DNA, 100 bp, Homo sapiens
aggattacctggacagaaaggcgacaaaggtgatcctggtatttcaagcattggtcttccaggtcttcctggtccaaagacttatgaaaatatgcatcag

SEQ ID NO: 450507 - DNA, 100 bp, Homo sapiens
gaagtaggagtcgcaggagcagccgcagtagatctcgaagtatctcaaaaagtcgctcccgatactgagccttcataagggttgactacctcagatttgc

SEQ ID NO: 450508 - DNA, 74 bp, Homo sapiens
ggctggggacgtgcgcccgcgccaccatcttcggctgaaggctggttggaaggaaaatcatgcaacattcatga

SEQ ID NO: 450509 - DNA, 75 bp, Homo sapiens
tgcagctcagccctgaagaaaagggaaaacttgctgcggttgctcaaggcttttgcagacatgctgaaagtaaac

SEQ ID NO: 450510 - DNA, 100 bp, Homo sapiens
taccaaccgggcagcagcacagtactatctggagtcacctaaggtcctgcgagtacaagggtcgacccccaaaggcaggggcagagccagcatctgagag

SEQ ID NO: 450511 - DNA, 88 bp, Homo sapiens
caggtgccaggatctgcccggatccggacagaagatgagcctgtcggtcctggagggtatggggttccgtgtgggccaggctctaggc

SEQ ID NO: 450512 - DNA, 60 bp, Homo sapiens
aggaacccatggtccggcctggagatagggatctatattggaaggcgtctgacaacctcc

SEQ ID NO: 450513 - DNA, 103 bp, Homo sapiens
ggcacgttgcacccccgcacctccatcaccgtggtgctgcaggttgtcagcgatgccggctctcaagaagaacggccaatccgacagattttgtacctcgggg

SEQ ID NO: 450514 - DNA, 74 bp, Homo sapiens
tgtctgatctgctgggatcctagagctggaacagtgctatacgtattggtcacgttggaatgcaaattgagcac

SEQ ID NO: 450515 - DNA, 95 bp, Homo sapiens
gtctccgcgtcccgctcgctgggagagaggtacctctccttttccctctccctttccctaagtgatggatgtaacagatataataaatggaaaag

SEQ ID NO: 450516 - DNA, 100 bp, Homo sapiens
taaagggacagggactgctgcaacctacggggtgtacttgggaacgaggggtgaagcggcccaggtgagggtcattgctccctggaggatgcctgaattc

SEQ ID NO: 450517 - DNA, 83 bp, Homo sapiens
ctacaaagcagtggagaagctgggggcctatgagctgatcaccgcagacctgctgtccaacggcatcgacgtgtacccccaga

SEQ ID NO: 450518 - DNA, 75 bp, Homo sapiens
ctgtgaacatgtgctatcgaaccctctacatcgggacagatcaacatcatgcaaagtgaaacagttcaggacgtg

SEQ ID NO: 450519 - DNA, 97 bp, Homo sapiens
ctcttcgcctcgcctcgggacccgcggtccccgctcttgctggcacgtctgagaatggtggatgtggtggagaaagaagatgtgaatgaagccatca

SEQ ID NO: 450520 - DNA, 98 bp, Homo sapiens
ctctaatgcacccaagagtcaaggaagttcgaactgacagtgggagtcttcgaagagatattgatgatgttaagaagttcaaaccgggttacctggaa

SEQ ID NO: 450521 - DNA, 74 bp, Homo sapiens
ccagcagcagtgaggattctgacgacaatggcagagtgtgctgaaaaacaaggccaaattgaacgagtcattaa

SEQ ID NO: 450522 - DNA, 75 bp, Homo sapiens
aggccgttcatgcagacttttttaacgatgagggttactaccagggtggaaaatttcagtttgaaactgaagttc

SEQ ID NO: 450523 - DNA, 83 bp, Homo sapiens
aaacaattgatttgctcttacgtatttgtgtgacttgactcttcaaacacaaaggtactaggttttgacaagcttgcatcatg

SEQ ID NO: 450524 - DNA, 100 bp, Homo sapiens
cggcgcccaggccccctgccgcggcgtccccgcggccccagcccagatttggtctttttgaagccatgtctgctattgaaatgatggatcccaagatgga

SEQ ID NO: 450525 - DNA, 101 bp, Homo sapiens
ctcgaaggccggccagcaagcttcagagttccgttctggaaaggcacccatccttattgctacagatgtagcctcccgtgggctaggtttgtatagatagg

SEQ ID NO: 450526 - DNA, 100 bp, Homo sapiens
cgcccgagtgccggcttctcccctacgcgctacacaagtggagctccttttcctccacctaccttcccgagctgcagaagatgtcaatgttactttcgaa

SEQ ID NO: 450527 - DNA, 74 bp, Homo sapiens
tgtgggcttctggtttcactaggagagagcattccagtgctgaagacggcactgccggaggggctggggcccta

SEQ ID NO: 450528 - DNA, 74 bp, Homo sapiens
ggagttcgagcagatcgacaagtccgggagctgggcggccatttaccaggtcaacgtattgaaacttactgttg

SEQ ID NO: 450529 - DNA, 100 bp, Homo sapiens
agtgtccctttccttcctggcgctttcctgggttgcttctggcggccatggtgttgctgctgtactccttctccgggaaacagtgcttcttagtcctacg

SEQ ID NO: 450530 - DNA, 90 bp, Homo sapiens
ttgcaactttgagtcagacctgtaggcctgatagactgattaaaccacaggtattagaaaactactcggatgctccaatgacaccaaaac

SEQ ID NO: 450531 - DNA, 82 bp, Homo sapiens
cctggagagcctgcaggacggcgcggcagagtccccgtacgcctacagtaacggatgaaacaggcgcctatttaatcgacag

SEQ ID NO: 450532 - DNA, 98 bp, Homo sapiens
tgtgtatgaccttcacgcagtcaagaacgacttccagggtgtgaagaagtttgatgtgccgtgtggaggaagagattgcagtgggggctgccagtgct

SEQ ID NO: 450533 - DNA, 100 bp, Homo sapiens
cagcatgttgccaccttgaaagaacatgataattctgtcaaagaagagaaatatcctgtattgccatacttggttttagtattgaaacaattcctattgc

SEQ ID NO: 450534 - DNA, 75 bp, Homo sapiens
agaacgactttccaagtttgaagttggagatgctgaaaatgttgcttcatatgaagcaattgtatgatggctatg

SEQ ID NO: 450535 - DNA, 75 bp, Homo sapiens
gtgatgagcatccgggatgggatccacggacccctgctgatcccaggatgctggtatcctgcatagatttcaggt

SEQ ID NO: 450536 - DNA, 75 bp, Homo sapiens
ggctcaatatctaatcaatgtcagatgccagtgtaggctatttatccttattggatgctgactatgacagaaaac

SEQ ID NO: 450537 - DNA, 90 bp, Homo sapiens
caggcgttttgcaatgcagatgtaggtgctggagaatctggtaaaagcaccattgtgaagcagatgaggatcctgcatgttaatgggttt

SEQ ID NO: 450538 - DNA, 100 bp, Homo sapiens
cgccaaccccttcgagcaagacgtgggagatatgtcagtattgaattctcccagacatcagagctgtataatgcatgttgatatggattgcttctttgta

SEQ ID NO: 450539 - DNA, 75 bp, Homo sapiens
tcccgagtagctaggattacaggaaattcgaaatgagtcccatgactatcctcatagagtggccaagtttccaga

SEQ ID NO: 450540 - DNA, 100 bp, Homo sapiens
cggagtcctgttccaccttcagagcgtcacggcgtacgccctcatggggaaaatctccccggtgactttcagggcggtgtccgtgtcctccatgtctgag

SEQ ID NO: 450541 - DNA, 98 bp, Homo sapiens
ggaaacaaggcttccagtgccaagttacagatgtagagctaaaacgactgaaggatgctttcaagaggacctgtggactctcatattacatgggccag

SEQ ID NO: 450542 - DNA, 75 bp, Homo sapiens
gcctgccgcgccgagggaccgccgggcggcggaaagcaggaagctgccacttttgctagagagcaaggctttgag

SEQ ID NO: 450543 - DNA, 100 bp, Homo sapiens
aaagtggagaggtaccataatctatgtcagaaacaagttaaagcacaactcccaagacttcctgggaatgaaaatggttggtgagctgctacgaatgtcg

SEQ ID NO: 450544 - DNA, 80 bp, Homo sapiens
gcttactgaatatcctcttgtaattaatgcagtaaaacgcttccatatttatccagagatggagtgaaggtacctgagcg

SEQ ID NO: 450545 - DNA, 100 bp, Homo sapiens
agctcccgggtcgtctttcgtgtggccgcgagaaacagaagcctatcagttgctgaagaaggccacccttcaggataatacaaatcaaactgaaaacagg

SEQ ID NO: 450546 - DNA, 83 bp, Homo sapiens
cgtgtcctccgtgggagcccgaggattttttatcaagcagaaatgcatcgaacaacgagaatcaagatcactgagctaaatcc

SEQ ID NO: 450547 - DNA, 100 bp, Homo sapiens
acagaacgacctagtatttgaatttgctagtaacgtcatggaggatgaacgacagcacctcttctgcctgtgagcgatttgtcacctcattctgtaagac

SEQ ID NO: 450548 - DNA, 75 bp, Homo sapiens
tgcccattcaaagactccggctgcaagcacagggcgggcagggctgggcagcggcctgagtctcagcggacttgt

SEQ ID NO: 450549 - DNA, 100 bp, Homo sapiens
gagtgaaccggagaccccgaaaacggaagcgcagggagaaggaagaggtgtttgaaaaggttgctgaaaagccaggagtcaaaatgactgagcgctttga

SEQ ID NO: 450550 - DNA, 75 bp, Homo sapiens
gttgatcgttactatgtgtcaaaggcatcgccgaatggaggctgtgcgactgcgaaaagagaaccagatctacag

SEQ ID NO: 450551 - DNA, 75 bp, Homo sapiens
gcggcctcggcctccccttggattcagacgccgattcgcccagtttcagacccaaagtttacgcctatcagacct

SEQ ID NO: 450552 - DNA, 96 bp, Homo sapiens
cggcgacccgggcttctgtgaaacatggcggtaggctgggaccataacacaaggtgctggagaatctggtaaaagcaccattgtgaagcagatgag

SEQ ID NO: 450553 - DNA, 100 bp, Homo sapiens
ggggaagcagcgtgagcagccggaggatcgcggagtcccaatgaaacgggcagccatggccctccacagcccgcaggttatcaatagtctggctgtctat

SEQ ID NO: 450554 - DNA, 97 bp, Homo sapiens
gcggttcagccctttgatgaccgcagcagtatcagaagtgactctgaccttggactccaagacctacatcaacagcctggctatattagatgatgag

SEQ ID NO: 450555 - DNA, 99 bp, Homo sapiens
tcatgtcgtcgcagaaggcgctggtgtcaggcaagccagcagagaggcctgcaggacaagctgaacaagagggacaaagaggtgacagccttgacctcc

SEQ ID NO: 450556 - DNA, 75 bp, Homo sapiens
acagagaggggaaaccccgtaaagtggttggttgcagttgtgtagtagttaagaaatgagccgtcagactgctac

SEQ ID NO: 450557 - DNA, 75 bp, Homo sapiens
ccactttagaaactcaattaaatagactgggagctccatgaggtccgagacaacctgaagacgcccagctcagca

SEQ ID NO: 450558 - DNA, 75 bp, Homo sapiens
cgttcggactatttgtagtcatgtacagaacatgatcaagggtgttacactggttactcactataaacaatatcc

SEQ ID NO: 450559 - DNA, 90 bp, Homo sapiens
gatgaccctgtcataaagaaaattgcccttcgggaaatccgaatgctcaagagtattgggaaagggtcgttgtggtgcatagacccagag

SEQ ID NO: 450560 - DNA, 74 bp, Homo sapiens
gagacgtgaaaaaaacaggcgtattctggtaatttcgaggaggacagagcgggatgccaccagcttgtccaaag

SEQ ID NO: 450561 - DNA, 50 bp, Homo sapiens
gttcaggcagcgggagcgaggaggggagttgaccacatttggccatttcc

SEQ ID NO: 450562 - DNA, 76 bp, Homo sapiens
gcctgactgacagaagttcttgcccccggggagctggtgtggacagaggaggggagtgtaacatgactgccgcccc

SEQ ID NO: 450563 - DNA, 129 bp, Homo sapiens
taagaagttatgtccagatcttctactggcacaagttcgtgagtcccgtgggaaagctaacctcaccaagatgaaaactcctcctctactaatctctgtgtggaagatcttcagaaaaataaagattcg

SEQ ID NO: 450564 - DNA, 75 bp, Homo sapiens
gggagcacgggcgccggcatagtacaatgaggcagccagcggatcttgggaggccagcaagcgcatctccagcca

SEQ ID NO: 450565 - DNA, 100 bp, Homo sapiens
gtcattaaagttctgaaccctcagaaggagactggaacctactgaacgacctcttcagatcgtttatgattacttatccaggctgggatttgatgatcct

SEQ ID NO: 450566 - DNA, 74 bp, Homo sapiens
gaaacgccgaatataatcccaaggttctgctccagacgagcccttaccacgttgactcactcctgcagctcagc

SEQ ID NO: 450567 - DNA, 75 bp, Homo sapiens
cccgaggagaaggcgctgaggaggaaactggctccacctccatccaggcagctgacagcacagccgtgaatggca

SEQ ID NO: 450568 - DNA, 100 bp, Homo sapiens
ccccaacacacggtccacagctcatcatgatggacttggagctgccgccgccgggactcccgtcccagcagattttggggtaagtgcgttcctagcaaca

SEQ ID NO: 450569 - DNA, 90 bp, Homo sapiens
tcctaatccacctcggctgacggcgcgggatccctggctccgcgaggcctatcatcctggatccggctgacccgacaggcaacctgggcc

SEQ ID NO: 450570 - DNA, 78 bp, Homo sapiens
caaactgcaataagccgccttccaagaactaagttcagaaaatcttagaacttgctttaagatcatcaatggttatat

SEQ ID NO: 450571 - DNA, 100 bp, Homo sapiens
tcatgggcagcaccatcgagccagaagcagtatttgtcctgatggtatacctcaagtttactatttcggcccttgtggtaaatacaatgctatggtgctg

SEQ ID NO: 450572 - DNA, 90 bp, Homo sapiens
cccgcgagcacagagcctcgcctttgccgatccgccgcccgtccacacccgccgccagatccagagacaatggccccgatgggatggagc

SEQ ID NO: 450573 - DNA, 75 bp, Homo sapiens
tcctaaggcactcaaggaaaggatacaggccataggaaaaggatacagagtagagtttcatgaacctgaaacttg

SEQ ID NO: 450574 - DNA, 80 bp, Homo sapiens
aattcagaaggagctggcggacatcactttagaccctccacctaattgcagtgatcaagacggtgcccttcacggcccgc

SEQ ID NO: 450575 - DNA, 100 bp, Homo sapiens
cttggcgttaccagttattacccaagatggaggactcggaagatggaagaacttattttgtcaagatccatgccccttgggaggtattagttacctatgc

SEQ ID NO: 450576 - DNA, 100 bp, Homo sapiens
acagtaaagacaggaagtctcagcccatgggactctggagacaggtgaaggccatggaggtggacatagaggagaggcctaaagagcttgtacggaagcc

SEQ ID NO: 450577 - DNA, 132 bp, Homo sapiens
ccctgttgcgatggcgcagaaaccccgttgacaaggcactgctttttcatgacgcaattctgtggtgttcttggtcacacatttatggagtttctgaagggcagtggagattactgccaggcacagcacgac

SEQ ID NO: 450578 - DNA, 101 bp, Homo sapiens
tgctttttaaagtgactctgggcttaattagaaagcatggaggagtgacggcaggaactttctgtgctctgacaacccttatgcaccaactagaaaaagaa

SEQ ID NO: 450579 - DNA, 73 bp, Homo sapiens
cggcgccagcgggaattaaatcgcagaaagtaccaggcaaacactacggggtttacagctgtgagggttgcaa

SEQ ID NO: 450580 - DNA, 75 bp, Homo sapiens
aggacgcacactggagaaaagccttttcagtgtgatgtggagtctttcattttggatcaggatgatttggaaaat

SEQ ID NO: 450581 - DNA, 101 bp, Homo sapiens
actaaacctttggctgtgactggaagtgatgatcgttcggtcagctcggaggatgatccattccttctgtatgccacactgcactccgggaatcactgcag

SEQ ID NO: 450582 - DNA, 97 bp, Homo sapiens
gccatcttggatccgcgggacaagaaaattcatgcggtgtgaaaatgaaaccaagttcaaaacagaagatatattttgggcttacaatttctgccct

SEQ ID NO: 450583 - DNA, 46 bp, Homo sapiens
atttctaaaagtggttcttgcagtgtgaaatggcctttccccgggt

SEQ ID NO: 450584 - DNA, 76 bp, Homo sapiens
aggtgaaggacaccccggggctgggcaaggtgctacaaagtacacagataaagacaatggagggatgcttgtatgg

SEQ ID NO: 450585 - DNA, 100 bp, Homo sapiens
gttctgccttctggacaatctttccggacctcagcaatggagaatatccccatcatcacaactgtcatcactctgccgcacgtgattgtggagaatatcc

SEQ ID NO: 450586 - DNA, 74 bp, Homo sapiens
gtgggacctgctggaagggaaggaaaaacctgtatgtggaaccacctctgaataccactagaaacatacctgta

SEQ ID NO: 450587 - DNA, 138 bp, Homo sapiens
ctgcttgctttgtggctatcatcaaaatcaccaaccaaaagattcacctttggatttcatcgcttaggaaaatatatgcagatgatgaacattcttaagccaattgcctttgatgttattcatttcatgtctcaacta

SEQ ID NO: 450588 - DNA, 100 bp, Homo sapiens
tgaaaaatccccctccgtgctaactgttccagaactcctgggacccttggacagaggggatatgctaaatgaagcatttattggcctgtctttagcacct

SEQ ID NO: 450589 - DNA, 90 bp, Homo sapiens
aagtcacaaaacagcagatttcccaagagcagcggaaaatgatccagtcacaggtggactttgatgctcccctgggctacaaagaacccg

SEQ ID NO: 450590 - DNA, 100 bp, Homo sapiens
agaacagctatctcgggagaaacaacaactgctacatctgttggaggagccaactagcatggaagtgcaggtttgctggttggctcccgagcagacagca

SEQ ID NO: 450591 - DNA, 75 bp, Homo sapiens
gtggtgggctatggccaccttggccaagactaaggggctgcagagcggggtggacattggcgtcaagtactcgga

SEQ ID NO: 450592 - DNA, 98 bp, Homo sapiens
ggacatcagcgccatccccgagcagcggtggaagctggtattgttgcagcatctggcagtgagactgaggatgaggacagcatggacattcccttgga

SEQ ID NO: 450593 - DNA, 82 bp, Homo sapiens
ccaagagggtgttcgactgctagagccgagcgaagcgactgaatgtgggcccagttggcgtcattctgctttgacctaaaca

SEQ ID NO: 450594 - DNA, 99 bp, Homo sapiens
ctgcaagttgttgctccgcttgttggactgctgctgcaaaacttttcttggcctggacaatgctggaaagacaaccatcctgaagaagttcaatgggga

SEQ ID NO: 450595 - DNA, 80 bp, Homo sapiens
gagcctcagttggaagcagccgatccagcctgcggagcctgtggggcaggctgaccccgcactacatctacccaccagcc

SEQ ID NO: 450596 - DNA, 75 bp, Homo sapiens
gaaagagacataggatggtggccgaacccccaggtcttcatcctccaggtccacctttagcaagacctattctcc

SEQ ID NO: 450597 - DNA, 144 bp, Homo sapiens
attggtgtagctgtagacacagttggaatcttgggatccaatgttgaaggaaaacaggttttacagaaaacagcagatggtgagctatatgtgtttggagaacctgagaatgggaagttaggtcttcccaatcagctcctgggc

SEQ ID NO: 450598 - DNA, 87 bp, Homo sapiens
aatattcagaattatggataccatctaagaatttcagagaattagagcgcactaaaacatcctgggtcagaaaaagtggacagggca

SEQ ID NO: 450599 - DNA, 100 bp, Homo sapiens
agagagaggtggacagatctgagagatactgaggtgtgatgaatgcagactctgctaccattttggctgtttggatcctcctttgaaaaagtctcctaaa

SEQ ID NO: 450600 - DNA, 82 bp, Homo sapiens
actgtcctttctggggcgtgtgatggagaggcatttgcaagtaaaatcactggcatgttgttggaattatccccagctcagc

SEQ ID NO: 450601 - DNA, 74 bp, Homo sapiens
tcagtgactttctttactccactggatccaggtccagagagcatcgcagacatcgatctcgctccatgtcacgt

SEQ ID NO: 450602 - DNA, 100 bp, Homo sapiens
cgcctaccaggcagagcctgaggaagctgaagcagaggtttcccaggaaatattctgctgtacgtagagatggctctttccattatgtccacagtactcc

SEQ ID NO: 450603 - DNA, 80 bp, Homo sapiens
atcttgtacctgatgccgatattcaacgctttcgctctggtagctgaagaacatctcacagtggacgccagggtctattc

SEQ ID NO: 450604 - DNA, 100 bp, Homo sapiens
gttcggggcaaagtgttcccaccggcagcaaatatggaatatatgatgagctcacagtgcctgcactttaccccagtagccctgaagtgtgggccccgta

SEQ ID NO: 450605 - DNA, 100 bp, Homo sapiens
caggagaagaaactgaggcctggaatttgattaactcattcaaggttacccagttgtttctttcaagatggcttgaaaacagctgataagttgaaacagt

SEQ ID NO: 450606 - DNA, 75 bp, Homo sapiens
ctggcgctctggctgtgctgcgcgacccccgcgcatggtacaccagaggatcgcttcctggcagaatttgggagc

SEQ ID NO: 450607 - DNA, 50 bp, Homo sapiens
gtgcaaccaatcagagtccagtggagaagtctccatctgctgctgcctct

SEQ ID NO: 450608 - DNA, 82 bp, Homo sapiens
atgcagatgcccctcctccaccagaggactgggaggagcatgtcaacagctcatgatggagcagtccaagaagtcctccctc

SEQ ID NO: 450609 - DNA, 75 bp, Homo sapiens
gcagtccctcccaagaccatagaggaatgtgaggggctgacgtttaccctacgtcctggtgaggtgacggcgctg

SEQ ID NO: 450610 - DNA, 111 bp, Homo sapiens
tctcagaatggcaaacagtatatcatttcagaggaggacattgccgagaatggctgcgcccccaccccagaagagcagctgccaaagactgcaccgtccccactggtggag

SEQ ID NO: 450611 - DNA, 125 bp, Homo sapiens
tgtttcacaagtagcaaatgagatgaaccatcttcctgcacacagccaaagtctgcaaagatttcaaggccagagaatggcaggggaacagaaaccctcaagtaatctcctggagcagtttattt

SEQ ID NO: 450612 - DNA, 100 bp, Homo sapiens
ggaaggaatgttttgctagctgctaaaaccacctttgtcaccagaatgaatgaagtgcttcagatttaaatagttgttgtggggattaagtgaaatacag

SEQ ID NO: 450613 - DNA, 74 bp, Homo sapiens
gtcccaatcccccactctttccgccctaatggaggtctccagtttcgcagccagactgccttccgggtcactgc

SEQ ID NO: 450614 - DNA, 87 bp, Homo sapiens
gacggcgagcgcgagcggcgcgagaaagttatgaaaactacaattactatggcgcccagaacaccagtgtcaccacaggcgcaacct

SEQ ID NO: 450615 - DNA, 75 bp, Homo sapiens
ggaacaccctggaagccgagaaatgaacaagcgggagcctgtgtcaggaaagcatgtcagagcagagctgccaga

SEQ ID NO: 450616 - DNA, 82 bp, Homo sapiens
gtattgtgaaagttccgtctggtatatttgatgtcaacagcaggaaaagtagcactgttcttcaggagagaataccatgggt

SEQ ID NO: 450617 - DNA, 97 bp, Homo sapiens
tcatttaaaaatgtgcaacatctggagcttcccaaggtggcacaagaatggctcaactctccaaatagagagaatttctatcagttgcaagtacgaa

SEQ ID NO: 450618 - DNA, 96 bp, Homo sapiens
caaggagttgaagtttgtgactttggcaaatcctgatcctaactgttgtcttggagtatttgggctgagcttgtacaccacagaaagagatctaag

SEQ ID NO: 450619 - DNA, 100 bp, Homo sapiens
gcggagccggagggcgggaggaacatgacatcgcggaggtttattacccagaactctttgtctgggtcagtcaagaaccatttccaaacaaggacatgga

SEQ ID NO: 450620 - DNA, 90 bp, Homo sapiens
caccgtcccagccgaccttgaggctgccgccgcgagtctgccatcgtccaaggaggtggcagccctcccaggcccaatacttcaaagcat

SEQ ID NO: 450621 - DNA, 74 bp, Homo sapiens
cggaacactgtggcggccatcgaggaggcgaggattaaatccaccacacagggtgaaatctatctccatgacaa

SEQ ID NO: 450622 - DNA, 100 bp, Homo sapiens
cagaagccatgcccctcaggctggaacttgccctgtctcctcgcagatgaggatgatccgttggtgctgaatgagatcagagaagaccttcgagtagagt

SEQ ID NO: 450623 - DNA, 101 bp, Homo sapiens
gactcagccacattcatggaatctgatgccacctccagttcgtactacagttgtctccgcagtacccgtcatgccccggcccccaatggcatctgtggtcc

SEQ ID NO: 450624 - DNA, 100 bp, Homo sapiens
cgactggattcctccatgactcaaggcacagactctccaggcatctccttggaaacaatgccatctttgaatgtgagagataaacctagtttcagcatgt

SEQ ID NO: 450625 - DNA, 100 bp, Homo sapiens
aactggacttagtgcagtcaatgatggactgtctgtatgccaagtccttatttagtgtctctgacaaaaccggccttgtggaatttgcaagaaacctgac

SEQ ID NO: 450626 - DNA, 82 bp, Homo sapiens
aatccaaaaagccgagtagagaagttatcagatgtggacgagtgctcactagcagaaaaaacctgtgtgaggaaaaacgaaa

SEQ ID NO: 450627 - DNA, 80 bp, Homo sapiens
cgttcttgcctcaggccagtcgcctccaggccaagagggatccttcacccgtgtctgctggcgttgcagacggggcgtga

SEQ ID NO: 450628 - DNA, 100 bp, Homo sapiens
ctcctcagagctgtccagcagccacggcccggggttttcaaggcttaatcgaagagatgtggcgagtaagaaaagaagctatgatgggtctggctcagct

SEQ ID NO: 450629 - DNA, 90 bp, Homo sapiens
ccaccgaatgccacctggtttataacaaaagccttggaccgcagttgccggccaggaatcccagtgtcacggtggacacgcctccctcgc

SEQ ID NO: 450630 - DNA, 96 bp, Homo sapiens
gttcaagacacaccggaggcgacggccatggccacaggttgaggaacaggttagcaccactgagagagtgtttcaggatagacaatatcagattga

SEQ ID NO: 450631 - DNA, 107 bp, Homo sapiens
caaagctacttccattccagaaagatggcatcatttttgccctcaaaagaaatggcaggtgatgatgaacagtctacacagatggctgcaagttgggaagatgataa

SEQ ID NO: 450632 - DNA, 100 bp, Homo sapiens
gcctgaaagtggtggcgctggccagactgacacccataccttttgggcttcagaatgcagtgttttcgatcgtactgagaagcactccacaatgccagac

SEQ ID NO: 450633 - DNA, 83 bp, Homo sapiens
cgcggctcacgctgagagggacacgcagtgacgagcggccgaagcagctttgcgggtgtacagcaagctgtgattcctgggaa

SEQ ID NO: 450634 - DNA, 90 bp, Homo sapiens
cttaacccagtttgaaacgtaactggttccctgaccagggagtgcatccgccccaacccttttccccctcgtctcctgtgagaattcccc

SEQ ID NO: 450635 - DNA, 90 bp, Homo sapiens
ccgagagccgccgacatgaagaaagacgtgcggatcctgctggtgggagaacggaaatgctccaaggctggaattttctacgacttcagt

SEQ ID NO: 450636 - DNA, 50 bp, Homo sapiens
cctgggacacaacgacgacattatcagggagtcgacgagttgaagatgaa

SEQ ID NO: 450637 - DNA, 74 bp, Homo sapiens
ggagcgccgttgccccccgccccgctgcagcttgatcatgatttaaaacatgctcacgaactccgccaggctgc

SEQ ID NO: 450638 - DNA, 74 bp, Homo sapiens
tggctgagtccaagcaggcgtttggaacttgtaatagctggcatcgttgagaatgaatggaaaagaacgtgctc

SEQ ID NO: 450639 - DNA, 88 bp, Homo sapiens
ccagagtctgctggacgcccaggcggacgaggccgtgttaggacctccctctgagattctgccactggtacaagctgtccccaaagcc

SEQ ID NO: 450640 - DNA, 100 bp, Homo sapiens
ccggggtccgccgtcctagccgctgctgtcttcgtgggaggcgccgtgagttcgccgctggtggctccgggtatttgaaatggacatcgctaaacagtta

SEQ ID NO: 450641 - DNA, 75 bp, Homo sapiens
ttgggaatcgacgtctcaagagtgacaaccatgagtggaaaaaactaattatggttcagcactggcctgagacag

SEQ ID NO: 450642 - DNA, 83 bp, Homo sapiens
gacagccctgcccttcccatgaggcaggctcttcagtatggtttaggaatgatttattacaagcaagaaaaattcagccttgc

SEQ ID NO: 450643 - DNA, 100 bp, Homo sapiens
ctcttccatccccatcttacagatgtattaagaagcctcaggctcaaactgtccaggttgctgaagttgaaccacagtcacagccacagccttccccaga

SEQ ID NO: 450644 - DNA, 100 bp, Homo sapiens
atccgcatctggggcacggaggaatctcctgctgtgtgtcctaactgtggtagtgaccacgtggttctcctcgctgtgtctcggggaacccccaacaggg

SEQ ID NO: 450645 - DNA, 82 bp, Homo sapiens
tggaattgaagaattcaaacctcctgagacttttgaatcagctgtgcaagagaatatcagcattaatgggcaagcatggcag

SEQ ID NO: 450646 - DNA, 82 bp, Homo sapiens
cacagtgtcagaattacaaggtgagatcagccgcccggccaagctatcttctcgctagcagaagctccaccatgaggcgagg

SEQ ID NO: 450647 - DNA, 75 bp, Homo sapiens
ctgtgaggagttcgccgagttccagccaagctagcctttatgggaagcgcagaagtcagaaagaggaagatgagc

SEQ ID NO: 450648 - DNA, 100 bp, Homo sapiens
ccaacgaattaggtggtctgactaccagtggctctgcagagcaaagctagagaagatttgctgaaaattcagaaagaacgtgattttcatcgaatgcatc

SEQ ID NO: 450649 - DNA, 130 bp, Homo sapiens
gatctgcacttcgcattttggcattgacatttaattttagggtcctttatatagaagggagagtagcggagtttaagagagctgtgaaagtagcaacaggacaagaactctcaaacaatattttggacac

SEQ ID NO: 450650 - DNA, 90 bp, Homo sapiens
agggagacaccgattataagaagagaaactcagcgctggggaagaagctggacacagagtatagaaaaaaatgggatgccctggtaatca

SEQ ID NO: 450651 - DNA, 94 bp, Homo sapiens
gattgaggttctgcatggcctgcagctcaagatgagcatcttgcaaggaaccagactagcatttctcagtgggttccagtatgcagccgattga

SEQ ID NO: 450652 - DNA, 90 bp, Homo sapiens
aaaaggcacatgtacggggattccaagcaatgaagaagatccatttggctcaaggtcctgacttgtcctgggcaagccaagtccattgct

SEQ ID NO: 450653 - DNA, 97 bp, Homo sapiens
ctggtaattcctctttagatgctgtcattttcagaagaagctgatgtaaatgcctctacaacctaaagcccaggtctgccatcatggatgttctcgc

SEQ ID NO: 450654 - DNA, 130 bp, Homo sapiens
gaaaatattcttattgttattttcccaatttttgctatactcctgttctggggacagtttggtattaaaagtacttcttgcaagggatatgcattagcacatactcaagaaggggaagaaaagaagcaaa

SEQ ID NO: 450655 - DNA, 96 bp, Homo sapiens
agtccctggatcaccgacagcacagacagaatccctgctaccaggttattcaaatgctcagaagactattcttctgcaggtggatcagaactgtgt

SEQ ID NO: 450656 - DNA, 83 bp, Homo sapiens
tggtttccctcccacctttgccattcctcaagctgcagagcgggaacagcttccacgtgttcgaccagggccagtttgccaag

SEQ ID NO: 450657 - DNA, 50 bp, Homo sapiens
cattctgcaagcaggcaacctgaatacagaattcagaaggagctggcgga

SEQ ID NO: 450658 - DNA, 100 bp, Homo sapiens
atgtcagacgcagccgtagacaccagctccgaaatcaccaccaagggcgaagctgtgctcaggcccgggctggacgcagagccagagctgtccccagagg

SEQ ID NO: 450659 - DNA, 98 bp, Homo sapiens
ggacacagagactttatcaaaaacatgattacagggacatctcaggctgagctgcgagagctgcggctgcggctcgatcaactcaccgccaacagcgc

SEQ ID NO: 450660 - DNA, 123 bp, Homo sapiens
cgggactcacggcagaagtgagctggaaggtcttggagcgaagagctcggaccaagcgctcagatcctgtctacctttcatgaccaactacagttttcattgcaacgtctgccatcacagtgg

SEQ ID NO: 450661 - DNA, 73 bp, Homo sapiens
ctcccaaagtgctgggatgacaggaaggcagttggtgggaagtccagcttgggtccctgagagctgtgagaag

SEQ ID NO: 450662 - DNA, 116 bp, Homo sapiens
caggcgagggcgccgcacccacaccgcgctgcgcagttttgttctgctccagctgttcgaaggtgatccaggagtccaatgtgctgattgctgctaacagtcagggtacaattaag

SEQ ID NO: 450663 - DNA, 76 bp, Homo sapiens
gtcctactatgcctacgtctttgaactctgcctggaataaatccaccagtaccccaacttctccggggccccggac

SEQ ID NO: 450664 - DNA, 83 bp, Homo sapiens
ccgcgcctggcctggccgggaccatgacgagccaaactcaggctgtaccttgagcagctcaagcaactggtgcccctgggccc

SEQ ID NO: 450665 - DNA, 73 bp, Homo sapiens
aaaatcagtgattctacatctcaagctcatattttgaagtgtttacgggtacaccagaggatcgcttcctggc

SEQ ID NO: 450666 - DNA, 75 bp, Homo sapiens
gaatattcccaagtccttcacccggggctgaagaagatgcagagcagcctgaagctggtggactgtatcatcgag

SEQ ID NO: 450667 - DNA, 90 bp, Homo sapiens
caccgggaccgagaaccgaacttaccaagcatcctctgcggctttcagttgtctgcattcaaaagagcattctattaaagctaccttaat

SEQ ID NO: 450668 - DNA, 82 bp, Homo sapiens
caggcgctcgggggccgaactggccctggactacctctgcaggaagctcttcgtgggcggtcttgactggagcacgacccaa

SEQ ID NO: 450669 - DNA, 83 bp, Homo sapiens
ccgcgaggaggcgcgggaggtgttcgagaacgaccccgagacggtccagcaccatgtgctaggtcactcccagcgcgaggcca

SEQ ID NO: 450670 - DNA, 74 bp, Homo sapiens
gaaaatggcggtgtctacagtgttctcgacttcgtcgctggtttttcgttggaatatacgttgcacatttatgg

SEQ ID NO: 450671 - DNA, 75 bp, Homo sapiens
tccgcggcgctccgggcccgggcggctggcctcaccgcccactgggagctgctgctcttcctccagaacctgccc

SEQ ID NO: 450672 - DNA, 104 bp, Homo sapiens
ctctcatctcgctcggctgcgggaaatcgggctgaagcgactgagtccgcgatggaggggctttgttatgcacctaaagccatattggaagctccagaagaaag

SEQ ID NO: 450673 - DNA, 100 bp, Homo sapiens
aaggggaagaggcccaccctggagtaaccctcactggagaatccagaggaaggatttgatgccctggatccctttattcccatcctggtttccaactata

SEQ ID NO: 450674 - DNA, 90 bp, Homo sapiens
gtaaaaggctgagaagcttaagaaagggctattgcaagacacgaagtccgagaaattgagcagcgacatacaatggatggccctcggcaa

SEQ ID NO: 450675 - DNA, 97 bp, Homo sapiens
gaaaagagccctggaatgtgaagagacaggaggcagcagacggacatccagctcttggtgctggacaggcatctttgtttgggaacaaccaacctaa

SEQ ID NO: 450676 - DNA, 90 bp, Homo sapiens
cggagattgtcttctgtgctgtcacctcgaatgagcaggtcaaggccaccaggaaaccctccccgaagaatgggtagaatcaatcatctg

SEQ ID NO: 450677 - DNA, 80 bp, Homo sapiens
atgaagttttaaaggatgatgaacgaaggcagagagtaaccagagagcacagagaaatgctggtgaaactggccaaacag

SEQ ID NO: 450678 - DNA, 90 bp, Homo sapiens
gcacagatgagtaacgtgaatttgtccgtctccgacttctggaggccgtgacttggcgagcacgaccctccccgggtaccctccacacgt

SEQ ID NO: 450679 - DNA, 83 bp, Homo sapiens
tgccgatgtgcatcggtacatgaagatataacgaaggaggcccaacttcattcaataaggagcctgacggatttatcccagac

SEQ ID NO: 450680 - DNA, 132 bp, Homo sapiens
ggacactttgcgttcgggctgggagcgtgctttccacgacggtgacacgcttccctggattggagtgcccacgaccctccggctgtccacctcagcaatggcccaggacaagagcctatcgctgtcatgacc

SEQ ID NO: 450681 - DNA, 82 bp, Homo sapiens
ttaaatatctacccatggaataaagagctgtatttgatcagaacatacatatgatagttgagaaagacacatattctgatca

SEQ ID NO: 450682 - DNA, 83 bp, Homo sapiens
cacctggtggactacttccccgagttcgatggattatatctgtccaagatgcgagtctggttttatcgaggagcttccggaag

SEQ ID NO: 450683 - DNA, 83 bp, Homo sapiens
cgaaggcaccgacgtcatcatgctgaccaccaatcagatccgtaaggatcagtttgacaacttagaaaaacacacacagtggg

SEQ ID NO: 450684 - DNA, 100 bp, Homo sapiens
cagaatcaccagcactggctgaaggatgcttggatattaattcatctgtgaaaggggctcgttttgtcagattctgtgatgcattcaatattccactcat

SEQ ID NO: 450685 - DNA, 98 bp, Homo sapiens
tgcgctctactattggggtcgacggttccgtctacaagaaacacccccacttcttggacacttaatgattgttggcaagaaatgtgctgctgatctgg

SEQ ID NO: 450686 - DNA, 83 bp, Homo sapiens
acgagcatggcatggccccgcaggtcttcacccaggccctggagtgcatgcgcagaggatgacggccgaggcgcaccggcgcg

SEQ ID NO: 450687 - DNA, 100 bp, Homo sapiens
cttttaccgatgctttaacatacagccactaggacctcgactggattttgatcctgacattgttgcagctcttgatgatgattttgactttgatgatcca

SEQ ID NO: 450688 - DNA, 98 bp, Homo sapiens
catatgccaactttgtgacaactcatcagttccaaaggatggcctcaaaagccaggctgcatttgaagaaatgaggacaaattacatcaaagaactga

SEQ ID NO: 450689 - DNA, 100 bp, Homo sapiens
cacggacggcgcgtcctgctgaccccagccggcgccgagggcttggaatctcgagcgggaaaagctgccagagaaactacgcataggctggaataacaag

SEQ ID NO: 450690 - DNA, 100 bp, Homo sapiens
tgaaattaggccacaagctatagagcaagtccaaacccagactcatgtagcatctgccccagggttattttggagctgttggagcactccttgagctgtt

SEQ ID NO: 450691 - DNA, 100 bp, Homo sapiens
gctgaggaggagccgaagcccaaaaagctgaaggtggaggcgccgcaagcgctgagaatgtctaatttaatagggatatagacagttggtttaaaccaac

SEQ ID NO: 450692 - DNA, 96 bp, Homo sapiens
cttgtaccttgcgactcgtgaccaacatgctgtgatgtgtgccgagggaggaattgtcaccaggtgtcaagatgctgcaagtacataggactggac

SEQ ID NO: 450693 - DNA, 51 bp, Homo sapiens
tatgcaggtggtggatgaaaaattggaaagaacatgaggttcccttggaaa

SEQ ID NO: 450694 - DNA, 50 bp, Homo sapiens
ccgatgaatgtgggaagactgaggaacggaaaacagttcttccttcaaag

SEQ ID NO: 450695 - DNA, 98 bp, Homo sapiens
cggcggcgccccagccagcctccaggcccagaacggagccgccttggcctcggggtctccctacaccaacgatgccttcaattaagttgcagagttct

SEQ ID NO: 450696 - DNA, 100 bp, Homo sapiens
ctcgcttttcccctggccttctgtatcttcatggtgcggctcatcttcgagagcaacagcttgcacaactacagaaagaaaaatcagagattctgaaaaa

SEQ ID NO: 450697 - DNA, 100 bp, Homo sapiens
tgtcagaccaacagaggggcaaatcagagtgaagaggaagccagaagatgggagagacatttttgaagcatcttattatagaaaactttatccctctgga

SEQ ID NO: 450698 - DNA, 74 bp, Homo sapiens
tcggcgtccgccagcgatggcacagatcttacagactctttcagcacctacgaaaaatttagaacagcaggtga

SEQ ID NO: 450699 - DNA, 75 bp, Homo sapiens
caaaaggcatcaagacgagtggggagagtgaaggcatgaagctttgctgtattatgttttagcagcagaaactgg

SEQ ID NO: 450700 - DNA, 75 bp, Homo sapiens
ttttctaagatgagaggagctggtaggaacaatttggcattcctgggagatggtcgggaagaagaagggagtctc

SEQ ID NO: 450701 - DNA, 73 bp, Homo sapiens
cggtcgagcatgttcaccagggcccaggtcactctgtgagactgctgggtcagaaaaaggataatggaaggcg

SEQ ID NO: 450702 - DNA, 75 bp, Homo sapiens
aaatagttctacgaggagtgaccaatgatcaggttgacccttcaatcaatgtccgagttaccaccatggatgcag

SEQ ID NO: 450703 - DNA, 88 bp, Homo sapiens
aaaagcagtcagtactcttattgattcacttaagaaaactcagcctgagaatgtgcttagatgagtacgaagatgatgaagcagggca

SEQ ID NO: 450704 - DNA, 98 bp, Homo sapiens
tttccctgtggctcagcccgttcgctggactgcaaaccgagctcccgtctgccttgcagtgatgatgatgatgattttgatgatgaggaagctgaaga

SEQ ID NO: 450705 - DNA, 75 bp, Homo sapiens
tcagtggataaaccatacctctagattccttgcttccattttcccagaaagttcttggagtctctgcggagtccc

SEQ ID NO: 450706 - DNA, 90 bp, Homo sapiens
gtcaacattggatcgattcataccatataaaggctggaagctttatttctctgaagacagcccacctgaggatattgaccataaggactc

SEQ ID NO: 450707 - DNA, 75 bp, Homo sapiens
cctcgctctgaccaccgtgatgagcccctgtggaggtgaagacattgtggtccatcctaaggtgactgtgtatcc

SEQ ID NO: 450708 - DNA, 83 bp, Homo sapiens
ctgcccgcgtccgaggctcgcgggcggcgggcccgggtggtacagaagttggtcctgccctttgggcgactgaactacctgcc

SEQ ID NO: 450709 - DNA, 82 bp, Homo sapiens
gccacttctgccctggcccccaagatcggccccctgggtctggcagaaaatctatttcaggaacttcaggaacattttcaag

SEQ ID NO: 450710 - DNA, 90 bp, Homo sapiens
ggtgcagaactgagcccaggccacagtaccctattcacgctctgtgcttgtgccaagaacctcaaccagaacccgcggacgctgctgccc

SEQ ID NO: 450711 - DNA, 100 bp, Homo sapiens
aggaacgacaaactcaaagtccaggaaacatgccctgaactgtcacagaatgaaaccagcgctcttcagcgtcctgtgtgagatcaaagagaaaacaggt

SEQ ID NO: 450712 - DNA, 100 bp, Homo sapiens
tggcttctgctcaccaacagatgaagacagatgcaccaacgaggtctgccatcatggatgttctcgcagaagcaaatggcacctttgccttaaacctttt

SEQ ID NO: 450713 - DNA, 50 bp, Homo sapiens
tatgaatttaacagtaatgctgatgtgcactgggaactacacctttgttc

SEQ ID NO: 450714 - DNA, 100 bp, Homo sapiens
cagcagcgaggccatcaccagcctcgtggccagctctgcgtctgcggtcaccaccaagatctccagtctatgtgctgaagaagcagcagcccaagagcag

SEQ ID NO: 450715 - DNA, 80 bp, Homo sapiens
agactgtctccagaattacttgggaagtaaaaatctgcgaggcttgggcaagttaaagtcttcagagccctgtatacgtt

SEQ ID NO: 450716 - DNA, 100 bp, Homo sapiens
ggaagaaatgtgaccgctgtgcccacggctatttcaacttccaagaaggaggctgcacagctcagatttcttttatccaagatattggaaggctccctct

SEQ ID NO: 450717 - DNA, 75 bp, Homo sapiens
atgggttctgtagccttggatgcagggactgccaaagatgtggaagatgtcaagtttgtgatcaactatgactat

SEQ ID NO: 450718 - DNA, 100 bp, Homo sapiens
ggacactttgttattggagaaacatgcagattatatcgcatcctatggctcaaagaaagatgattatgctggacgagtcattcacagtcaaggtggctga

SEQ ID NO: 450719 - DNA, 90 bp, Homo sapiens
cacagatcgacagacattgtttgaaaatgtccaaagtggctgaaagggaacctcagggcatcatagcttgctgcaacccagtaccgcccc

SEQ ID NO: 450720 - DNA, 100 bp, Homo sapiens
gcagaggaagaacaagaagagaaccttgaagcaagtgccgcggcgagtcctttgcacatgttggcaacacacgcatccgcatcggcctccctgcccacaa

SEQ ID NO: 450721 - DNA, 82 bp, Homo sapiens
agccgatccagcctgcggagcctgtggggcagaacatatgctgtcaggaggataagagatgccttcagagaaaataaaaatg

SEQ ID NO: 450722 - DNA, 74 bp, Homo sapiens
cccctgcgtggtcctctgtggcagccttctctcattcagagctaagataccatcccacgaacacagatagaaag

SEQ ID NO: 450723 - DNA, 83 bp, Homo sapiens
tgactttcagctatggaatcggctcccgagccagccgggaggacacttactacagctgctcagaagcaccactggaaactcag

SEQ ID NO: 450724 - DNA, 100 bp, Homo sapiens
gtgagatcgtcagcgctgactccatgcagaagcaatatccaaggcagtgtcatctgcaacaatgctgtgatcgagaagggtgcagacatcaaggactgct

SEQ ID NO: 450725 - DNA, 75 bp, Homo sapiens
gtaatcaggttgtcaaaccgcaggcatttcaatcacattatgattttggggtaagtgcgttcctagcaacagggg

SEQ ID NO: 450726 - DNA, 82 bp, Homo sapiens
cttcattgctctgtgtgccaccggtgtggacactgccagcggctgcagccgacttggaatgacctgggagacaaatacaaca

SEQ ID NO: 450727 - DNA, 82 bp, Homo sapiens
cgcgtcgcggaggcacgtgtggagccccggcagcaggagcgtcgcaggtcgcaatggaagaagagatcgccgcgctggtcat

SEQ ID NO: 450728 - DNA, 90 bp, Homo sapiens
tgctgaactagctattgctactgcctgtaaaacctttgttcctcatcgcagcagttgttttgggctgcgaataaaggagaccaaggaagt

SEQ ID NO: 450729 - DNA, 82 bp, Homo sapiens
ctgtactctgaggagcggaactacagccagatgcggatccgggccaagcagtgggccgaggcctgggttctgaggaaaacgc

SEQ ID NO: 450730 - DNA, 136 bp, Homo sapiens
ctcgcagagtgaccccagcgtcctcaccgactcctcggccacctcctccgcggacgccggggagaacccaggtgctggagaatctggtaaaagcaccattgtgaagcagatgaggatcctgcatgttaatgggttt

SEQ ID NO: 450731 - DNA, 100 bp, Homo sapiens
gggcgtctccgccggctactgccgcttcagttctcccggtgtggccacgagtcggatccctctctgggcgcattgttggaggtgtgtggtggttctttac

SEQ ID NO: 450732 - DNA, 100 bp, Homo sapiens
agacccaggggaagacccaaaggcagcaaaaacaagagtccctctaaagcagctcaaaagacctttctgcccgtgaagtggatggctcctgagagcatct

SEQ ID NO: 450733 - DNA, 75 bp, Homo sapiens
aagatgaagaggacttctatcaagatatcaatgatgtcaaacggctgaaacctggctacttagaagctactgtgg

SEQ ID NO: 450734 - DNA, 100 bp, Homo sapiens
tgggacgcgcactggtcggtgccggctcaggagccgggtatttcaagggaactttaggattacaacctggagattcagccctcttcatcaatggacttca

SEQ ID NO: 450735 - DNA, 74 bp, Homo sapiens
acagcctgtgatgctgtcctggagaaacaagtgttgaaaatgttaaaggctgtgctgaagaagagccgagaggg

SEQ ID NO: 450736 - DNA, 50 bp, Homo sapiens
tggttaaaacctgacacttttaacaggtacccgcaagatggagtacaagg

SEQ ID NO: 450737 - DNA, 74 bp, Homo sapiens
atggtccgagcatgcattgccattatctgtgaactaggtgtcatggagaaactccagctgggcccagagattct

SEQ ID NO: 450738 - DNA, 50 bp, Homo sapiens
cagcttctcctaccagctcgatttttgaatcagagccgacaggcacttga

SEQ ID NO: 450739 - DNA, 90 bp, Homo sapiens
acgagtaaatctgtctgcagcccagacactgagagccgctttcatcaagctaaacctattcgtcccgggcaacatccagcagcttctcca

SEQ ID NO: 450740 - DNA, 100 bp, Homo sapiens
aagaggaatgacaaacaaccagctcttcagggacttgcacttaggaatctgttacagtgagcacagaagcagacctgtgggctcatagtcttcacccccc

SEQ ID NO: 450741 - DNA, 80 bp, Homo sapiens
agtgcgacgtctccggaagggcaagtttaaagctgatggaacaggatacttgcaatcttgaagaggaagagcgaaaagca

SEQ ID NO: 450742 - DNA, 100 bp, Homo sapiens
ggtgacctacagccaaagccccaagattgccaccctgatgaagagtgtcagcaccaggggcaacgaagacaccccatacgaagcagtgcacaggcacccc

SEQ ID NO: 450743 - DNA, 90 bp, Homo sapiens
gagcggtgaagagtgaagatgtgggggaatgaggctgcccagagcctggcccaactagagaatctgtgcaaacagctgtatgaaaccaca

SEQ ID NO: 450744 - DNA, 90 bp, Homo sapiens
tttgcagggagaccggggagctggtcccccactggcagaaggacagaataacgggctcccagattcacaagccccaccaagaggatcacc

SEQ ID NO: 450745 - DNA, 100 bp, Homo sapiens
gtgagcggcactctgcccttccagagcaagcatggagcaacaggatcagagcatgaaggaagggtgaactttgaggcgctgatcatcaccatgtcggtag

SEQ ID NO: 450746 - DNA, 83 bp, Homo sapiens
gtttgcctacgccaagaggaccctgcttggggaccccaagtttgtggatgtgactgaggaagcgaaatgtggtgattttaaag

SEQ ID NO: 450747 - DNA, 100 bp, Homo sapiens
aagagacagcgattggacagaatttgtgaaggttgaaatcacaaagattagacacctttttagataggtgttcttcagcaccactgacaacacggttctg

SEQ ID NO: 450748 - DNA, 83 bp, Homo sapiens
cgtgagcaagcccaggcacagccgacgccgcgggcccagctcaacattggcaatgtgctccctgtgggcaccatgcctgaggg

SEQ ID NO: 450749 - DNA, 82 bp, Homo sapiens
cctaagcctgcacagccgcggcggcagcagcagtgagagaaatcaacgaccgggagcagaagttgcatgcccttaaggaggt

SEQ ID NO: 450750 - DNA, 100 bp, Homo sapiens
accctgttcttccgtgtctccctctgcctggcggcagtcacggccaaggtagcagtagctgatgtgcagtttggccccatgagatttcatcaagatcaac

SEQ ID NO: 450751 - DNA, 76 bp, Homo sapiens
cagctgagcgggcggtcattcgcatcgcaggcccgcgatgctcccagcccggtgagacctgcctgaatggcgggaa

SEQ ID NO: 450752 - DNA, 98 bp, Homo sapiens
ctcacatggtgtgggccgacatcaagagctgcgagatccaacagatttggaacatgcgttgaaatgtcttcagcgtgaagatcccagtttgaaagtga

SEQ ID NO: 450753 - DNA, 95 bp, Homo sapiens
gcagatcagcgcaaggcaaagttgggtgactcccacgacctgcagcgcttccttagcgatttccggtgatgatcctgcaggaagtgcaggagaga

SEQ ID NO: 450754 - DNA, 83 bp, Homo sapiens
atgttcctggggttactgtaaatgggaaggacaggcagagctaaacaagcttccatgaggcaggctgaacctgcagatatgcg

SEQ ID NO: 450755 - DNA, 74 bp, Homo sapiens
ccaagttgaaaatggacgagtaatcgcctgctttgattcattgaaaccgggggccattgagactgccatggaag

SEQ ID NO: 450756 - DNA, 111 bp, Homo sapiens
tccggacccactggctgctggagcttgtcaccaccagggccaattcctgtccccccagcagcatggcatcgtgtgctgaaccctctgagccctctgccccactgcccgccg

SEQ ID NO: 450757 - DNA, 90 bp, Homo sapiens
attttggaagtgtgccagaattggaggagcatattatttaatatctagaagtctagggccagaatttggtggtgcaattggtctaatctt

SEQ ID NO: 450758 - DNA, 96 bp, Homo sapiens
gtacctttaccacatagacaaaggaaaagaattccatggcaacatcattaaagtgtcctttgccactagaagacctgaattcatgagaggaggtgg

SEQ ID NO: 450759 - DNA, 82 bp, Homo sapiens
cggaaatgtccggcaagatcgagaaagcagaatgaaatgaatgatgtgcctttctttgatatccaactgccttacgaattgg

SEQ ID NO: 450760 - DNA, 75 bp, Homo sapiens
gctggctaagctcatcattgttactgccgacatcggcctggctgcctggggacgcaaggccctggacattgctga

SEQ ID NO: 450761 - DNA, 74 bp, Homo sapiens
gcataggcggaccatgataatttccccagagcgtcttgatccttttgcagatgaataaccatgtgcatggacag

SEQ ID NO: 450762 - DNA, 112 bp, Homo sapiens
gtttgatctgcgaccatttctgtacaacacaagctggccttggcagtttcggtgcatagaaaatcagaaacaccatctgattcagatcacaagaagaagaaaaagaaaaaag

SEQ ID NO: 450763 - DNA, 100 bp, Homo sapiens
aaaggaaaggcttggtaaaaaaggttcaggcgggagacactatattcaatcgtgctaagctcctcaatgttggctttcaagaagccttgaaggactatga

SEQ ID NO: 450764 - DNA, 100 bp, Homo sapiens
ctcaacatgagtatgttggtccaactactaacttcagacccaaggtcgtgataaactgtgccattcctaaagggttgaagtacaatcaagctacacagac

SEQ ID NO: 450765 - DNA, 82 bp, Homo sapiens
gaagcgcaggctgcggggcgcggagtcgggaggctccccatcaacccgggcagccgggatttaaattcacggtggctgagtc

SEQ ID NO: 450766 - DNA, 74 bp, Homo sapiens
gtcagtggaaaggagagctaccatcactaagttacagatgtagagctaaaacgactgaaggatgctttcaagag

SEQ ID NO: 450767 - DNA, 74 bp, Homo sapiens
cgcagtcggcaaggagagacgtcgctgaggggcttgcctgaagcgaggggtatttgtggaaacattagacaaat

SEQ ID NO: 450768 - DNA, 51 bp, Homo sapiens
cgctacatgatctagccaacaggttcgatacaagaggctgttttcctagcg

SEQ ID NO: 450769 - DNA, 82 bp, Homo sapiens
ggaagcagcacgggatcccagcctcaggcctgcacggacggtgttggttggggtaccgggtgtctggtccgagccgtggaga

SEQ ID NO: 450770 - DNA, 80 bp, Homo sapiens
cgatattctcgaaaggtgtttgtaggcggattgcctccagacattgatgaaggtcaccatccttgtcagcctggccctag

SEQ ID NO: 450771 - DNA, 145 bp, Homo sapiens
aaaagatttacctataaatttaacttcaacaagctggtgatgcccaactacccattcatcaacattcggtcaagtgagttgctggagaatgtaaccctaatccataaaccagtgtcgttgcaaccccgtgggctgatcaataaag

SEQ ID NO: 450772 - DNA, 90 bp, Homo sapiens
caccaacttcctcttcttcgggcccctgggattcagcttcttcttcaacatgctcttcgtattccagcacaagaaccctgaagatcctac

SEQ ID NO: 450773 - DNA, 87 bp, Homo sapiens
agttttcatggatgcccctgtttctggtggagcccagcagccggggccgccctattacaccgacccaggaggaccggggatgaaccc

SEQ ID NO: 450774 - DNA, 83 bp, Homo sapiens
gaaagaattaaaagccttttgtgctgatcaacttgatgtctttttacaaaaagctgccactgcagagccccgccatggaagac

SEQ ID NO: 450775 - DNA, 75 bp, Homo sapiens
cctcgggtggaagaagtggggccatacacctacagtttgggacccactctggaacctgaggaagtggtaaacagg

SEQ ID NO: 450776 - DNA, 75 bp, Homo sapiens
caagaatgtgcttaagaagttcatctgcatatctgaccttcgggcccaagaaaatgtttcaacgtgcgcaagagt

SEQ ID NO: 450777 - DNA, 100 bp, Homo sapiens
ctcaacttcttgaaacagttcatagatactacactgaatttcctacagttcttgatattacagccatcatcgtctacagactgccgtggacctggaaatg

SEQ ID NO: 450778 - DNA, 100 bp, Homo sapiens
attttgtggtgaacacgctggagccgcggaggaggcaggtggaagtcatcataaagtttctgtttcacccgtcgtccatgttcgaggactctgtgaatct

SEQ ID NO: 450779 - DNA, 111 bp, Homo sapiens
ggaagcccctatcgccgagctcgttggagcttgaacccattgtcacccctccggtttggtgcacctcgatttggaggaagtagggcagggcccttatctggaaagaagttt

SEQ ID NO: 450780 - DNA, 75 bp, Homo sapiens
gacagaaggcgtctcatggcgttggaataccggctctcagcggctgatcttatggttggtgatgaggcaagtgaa

SEQ ID NO: 450781 - DNA, 51 bp, Homo sapiens
cttgacgatggtcctcgggggcagggccatcactgtgcatgtccccatgcc

SEQ ID NO: 450782 - DNA, 75 bp, Homo sapiens
ttggaagcagaattccattttactcatctcataatgactttcaagcctcaaggaataggttctcctagtgtctat

SEQ ID NO: 450783 - DNA, 101 bp, Homo sapiens
gttcctggcaagcccatgtgtgttgagagcttctcagactatccacctttgggtacttcacatgactggaggttacggtgtggtgctgtggacttgtactt

SEQ ID NO: 450784 - DNA, 96 bp, Homo sapiens
gcacctatcacttgttccctccaagacaactgaatggtggcaggttcaagaaagagattgtcgttgatggacagagctatctgctgctgatcagag

SEQ ID NO: 450785 - DNA, 83 bp, Homo sapiens
gtgctgggacttcccgtccgcggcgtggaggaacaagttgaaatcatcgcagaaggataaagttcgtcagtttatgatcttca

SEQ ID NO: 450786 - DNA, 90 bp, Homo sapiens
gtgtgtcgcagtgtccaaccaaccagtgggccaggggctggtggcagcagcgtcgtcataggtaatattggtgccctgatgggctacgcc

SEQ ID NO: 450787 - DNA, 75 bp, Homo sapiens
cagaaattcaggaagctgctttcaaaagactgcggcatgaatgtgcaccataaatgccgggagaaggtggccaac

SEQ ID NO: 450788 - DNA, 115 bp, Homo sapiens
gtggctctatgtggaccctgcggaatccaccggcgcagtttcatctagcgactggtgctggagaatctggtaaaagcaccattgtgaagcagatgaggatcctgcatgttaatgg

SEQ ID NO: 450789 - DNA, 99 bp, Homo sapiens
aaggaatattcctgggtgatcaatggcgagacagtgcctggggaacatcaggttcagcagactgtacaggatctttttggcagagccccaagtaaagct

SEQ ID NO: 450790 - DNA, 100 bp, Homo sapiens
gcgaagacgccttcccacctagctctcctctctttgcagagccatacaaagttggaccgcagatgttcatggactgcagcccacaggccctgcccatcgc

SEQ ID NO: 450791 - DNA, 90 bp, Homo sapiens
acaaaaatattgtcaaattatttgctattgaagaggaggtatataaagaacaggttttagaacctatgctaaatggaacagataaaacac

SEQ ID NO: 450792 - DNA, 100 bp, Homo sapiens
aagcggaggagctaagccacctgccaaaatgtgcaaaggacttgcagctttgccccactcatgcctggaaagaagtgcctagctgccactccatttatat

SEQ ID NO: 450793 - DNA, 97 bp, Homo sapiens
gagccagcggctgaggaggggccccagcagcccccgaaggccctatcaggacatggagtatgaaagacgaaacacgaccctcctctgagtagcatcc

SEQ ID NO: 450794 - DNA, 82 bp, Homo sapiens
gctatgaaggcttctttggactgtatagaggtggattcaccaatgaacttgaagcatcctcatgacctagtcatattaatga

SEQ ID NO: 450795 - DNA, 98 bp, Homo sapiens
aagtctcctgaagaggaaggagcggtgtcctcttaagaaaatgttcgcacagctcgaggggagtgcgggggcagcaccgcgcgtggcacctggcaccc

SEQ ID NO: 450796 - DNA, 88 bp, Homo sapiens
tttctcagaaagcagaggctcagagcttggagacagacgacttaattcagtgcacaaatgagatgaatgtgaacatcccacagttggc

SEQ ID NO: 450797 - DNA, 98 bp, Homo sapiens
tattctcctgcccgcaccgcctgcgggagcacctggagaggggccgcggaaacctggagtggaaggtgtccctttctggaggttccttattactggtg

SEQ ID NO: 450798 - DNA, 98 bp, Homo sapiens
caggcaaggttgtgcggatatgagtgtccagtctccagcttcgtgggtgcctggaggcaggtgcggagacaggggcaagtgtccgagtggtgaatcag

SEQ ID NO: 450799 - DNA, 50 bp, Homo sapiens
gtttatgtctttatttgacgaaaacgccagctcctcagagacctggacag

SEQ ID NO: 450800 - DNA, 60 bp, Homo sapiens
tggaccagttgatgggcacctcccgggacgatcacccagctgaaaattgagaacaaccct

SEQ ID NO: 450801 - DNA, 100 bp, Homo sapiens
ggttgggccgggccggttgctaagacttggcgaagcgctgcgctcgcgcccggatccctcagggtttgccttcccggattgggcctacaagccagagtcg

SEQ ID NO: 450802 - DNA, 50 bp, Homo sapiens
ctgctgcacttgacttaattacctcaggtgatgaaaacataccatatgta

SEQ ID NO: 450803 - DNA, 75 bp, Homo sapiens
cggacttgcctccttcccgcagcgccgtagagatcgctcccactcaggtcacagttttgctgctgcagcccattg

SEQ ID NO: 450804 - DNA, 100 bp, Homo sapiens
aagacaaccaaaagttacaacagttcagagtacttcagctttagctgcagctgcctctgttcagccacttgcaacacaatgtttccaactctctaacatg

SEQ ID NO: 450805 - DNA, 100 bp, Homo sapiens
ggatggtgtggccagagcgttcctcaaggcccaggctgctttcttcggtagctaccgaaacgctctgaaaatcgagccgagcatgtgggtgagaagaatc

SEQ ID NO: 450806 - DNA, 100 bp, Homo sapiens
ggagaaggtgcaagactgtccgtgtggaccctgactcacaggccatcgaggagggcacgctggaggagatcgaagaggaggtccggcagaagaaatcatc

SEQ ID NO: 450807 - DNA, 83 bp, Homo sapiens
tggggccaagggacaatggtcaccgtctcttcagggcaccgcgtccgtgctgcagcgccggtcccccaatgaggagtacgtgg

SEQ ID NO: 450808 - DNA, 50 bp, Homo sapiens
gaagaaactcaatgatcgtgtcatgagaggtgtgtccgcagccggccagg

SEQ ID NO: 450809 - DNA, 97 bp, Homo sapiens
atatggctttgtctcctttttcaacaaatgggatgctcacaactgtattcctgagctggacagtgagacagccatgttttctgtctacgatggacat

SEQ ID NO: 450810 - DNA, 87 bp, Homo sapiens
gcgacggggccaggaagcaattctggaagcgcagcaacagcaagctcccgggcagatgccatggacaatattaccaggcagaaccaa

SEQ ID NO: 450811 - DNA, 73 bp, Homo sapiens
gcacattgaatttgagtacaataaatccaactattgcagatcccaaccccctgctagactaataagtggagag

SEQ ID NO: 450812 - DNA, 95 bp, Homo sapiens
tccgggtcttccagagcgtgaagatcaagatcgtgtcaacagcatctccaccctggagcctgtgagccggtgccagcgcctgagtgagctgtacc

SEQ ID NO: 450813 - DNA, 100 bp, Homo sapiens
cccagtgtgcagccagaaggtggtggtcaccacaccactgcaccgggacaagacacccctgcaccagaaacatgctgcagactttagaagacagctttcc

SEQ ID NO: 450814 - DNA, 100 bp, Homo sapiens
tgctcccaagagggcggcggcagcgggtcctacgaggagggctgtcagagcctcatggagtacggctggctcacagttggaccaacgcttacaaatagca

SEQ ID NO: 450815 - DNA, 74 bp, Homo sapiens
gcgcccctccgagctggggttggacgctgccagtttgcacagcagcaggaatcggaggcaacaagccagctctc

SEQ ID NO: 450816 - DNA, 82 bp, Homo sapiens
gaagacgtctgcgtgagaatagagaccaccgagtcttgctctgttgcccaggctggagtgcagtggtgccatcatgccaacc

SEQ ID NO: 450817 - DNA, 82 bp, Homo sapiens
cgagctccagccgaaggagaagggggatggtcatcatgggccagtgctactacaacgagaccatcggcttcttctataacaa

SEQ ID NO: 450818 - DNA, 100 bp, Homo sapiens
atgttagaacgactttccaagtttgaagttggagatgctgaaaatgttgcttcatatgattggttgaatctggcgatgtggaacccatggatatggaggg

SEQ ID NO: 450819 - DNA, 96 bp, Homo sapiens
agaggctggaaaagagggtggaaaaagcagggaggttatgaggcttaataaagaagtgaatctacagacctattttctcaggagctcagcctggcc

SEQ ID NO: 450820 - DNA, 100 bp, Homo sapiens
tgacctagccgccgcggtcctagaagggagaagtggagagagaccgctgtttgtactacagaaagtgccagttaatttccaaggaagatgttactcatga

SEQ ID NO: 450821 - DNA, 75 bp, Homo sapiens
agacaatgcgagagagtcagctgcaacaggaagacccaatggatagatacaagatccataatgatgatggtgtgt

SEQ ID NO: 450822 - DNA, 75 bp, Homo sapiens
tagcagagtacgatactcaggtcaaaggcaatctgaaagcaaatcctgtttagatgcaggcgaaggttcctggtg

SEQ ID NO: 450823 - DNA, 100 bp, Homo sapiens
catctcaacaggaaaaactggccaaagaatggtgcttcaagccgtgtgaaataagagaactgagccaccatgacagctggagtatcagccttggaagtat

SEQ ID NO: 450824 - DNA, 76 bp, Homo sapiens
cagctccagcaggcgctggctcctgctcaggcatgcatgtagggaataccggattcataaagagctggatcatccc

SEQ ID NO: 450825 - DNA, 98 bp, Homo sapiens
atgagcaaagctcaccctcccgagttgaaaaagcgccaagcccatctttgtgtgcttgcatccaactgtgatgagcctatgtatgtcaagttggtgga

SEQ ID NO: 450826 - DNA, 82 bp, Homo sapiens
ggccaccggccggcacgaaggcgtccccacgctggaagggtgtccctggccagtgtccttccacctgtccacaagcatgggg

SEQ ID NO: 450827 - DNA, 50 bp, Homo sapiens
ctcttggctgcagacacagactggaagtgcctccggagccagcgtggtgg

SEQ ID NO: 450828 - DNA, 100 bp, Homo sapiens
gggactccataatattggacaaggctggaaggcccatttggctcctgcagcctcttatgcaggagccctcccagcccctgaacctcacagccaagcccaa

SEQ ID NO: 450829 - DNA, 75 bp, Homo sapiens
agcagagagctattattccctgtattaaaggtacatatttcccgggataagatcaccaggccaggagcgaagcta

SEQ ID NO: 450830 - DNA, 123 bp, Homo sapiens
ctgcatttcaactctagaggaaaaaattgaaagagaaaaggaattagcagaagacattatgtcagggcagagcggcttgggtaaatccaccttaatcaacaccctcttcaaatccaaaatcag

SEQ ID NO: 450831 - DNA, 75 bp, Homo sapiens
aggtcctgtatgttaactggaacacctgaatctgtccagtaccccaagaagctagtgcagacttattcagtgttt

SEQ ID NO: 450832 - DNA, 98 bp, Homo sapiens
gcaagaacaagtaccgccccgacctgcgcatggtgtgatggtcggctcccacgcggacatggcgccggcctctactgcggagggggccggggagaagc

SEQ ID NO: 450833 - DNA, 75 bp, Homo sapiens
tgccatatgtgttaattccacccacatttttactgcagctgaaactgttcgtcaggtggcacaggagcagttctt

SEQ ID NO: 450834 - DNA, 98 bp, Homo sapiens
ggacactggctccaaggaaaaaggtctgaaaaagattttggaagtggggggctctctacaggaccctcctggggagctcgcagtgaccgcaaacagcc

SEQ ID NO: 450835 - DNA, 76 bp, Homo sapiens
cccacttcgttcaagacaggtgtttaagcgggtcactgtcattcggggacgtggctgtgggcttcacccggaaaga

SEQ ID NO: 450836 - DNA, 100 bp, Homo sapiens
gtgaaagcacctgctatgttcaatataagaaatattggaaagacgctcgtcaccaggacccaaggaaccagacctctggtcctcaatcgagttcctctac

SEQ ID NO: 450837 - DNA, 97 bp, Homo sapiens
caggaaattgcaaggcactgcatggttcaggccaggttattggcatatcgaactgtatttgtgtggaagtaatcgaaaagacaacatatttattgat

SEQ ID NO: 450838 - DNA, 75 bp, Homo sapiens
ttttattactggcagcatgtatatcttttgatctcaaagatttcatgagacaagctggggaagtaacgtttgcgg

SEQ ID NO: 450839 - DNA, 96 bp, Homo sapiens
acagaaggccgacaccctgcacctggggctttgttatgcacctaaagccatattggaagctccagaagaaagagcaccccccggaagtcagcaggg

SEQ ID NO: 450840 - DNA, 96 bp, Homo sapiens
cacttatctcttctttaacttatcgtggaaataaaacagctgttttgcagattggactacaagcacttttgtgtaatggaaaatttcacaaacact

SEQ ID NO: 450841 - DNA, 74 bp, Homo sapiens
aaaattgaaagtggactatttaatagctagaccccaagactgcttctgagacagaaacagatatctgtgctgaa

SEQ ID NO: 450842 - DNA, 74 bp, Homo sapiens
aaataatgggaaggaagaagtatccaagggagatcttgtgcgaaaactcaaagaagataaagcaccccaagtag

SEQ ID NO: 450843 - DNA, 89 bp, Homo sapiens
tcaagatggaagtggcacagtagaacatcatgagttgcgtcaagccattggtcttatggaatcagacacaagtttggcagaaggaagtg

SEQ ID NO: 450844 - DNA, 101 bp, Homo sapiens
ggaggttcgaagctgagtatgtgacagataaccaattcaggagaatttgtgttcccattagattctccacacaaaaagccctacgaaggtcttatactggg

SEQ ID NO: 450845 - DNA, 100 bp, Homo sapiens
atatatttgatgaagatgaaactgaaaggaattttttgttgtccaaacctgtttgctttgttgtatttgggaaaccacttttgcgagaattgaagcaccc

SEQ ID NO: 450846 - DNA, 51 bp, Homo sapiens
accagaaccttagtcccgggaaaggtggtgatgatgtccagcaactctgtg

SEQ ID NO: 450847 - DNA, 100 bp, Homo sapiens
ggacagagtttgatcgactgaatgagatcaaaggtcacctggaaattgccttattggaaaaacatttcttacctgccgcagcgggaaccgcaagagcttg

SEQ ID NO: 450848 - DNA, 75 bp, Homo sapiens
tgtcattttaagacgagtaggcgaagcaaggactgatcagttccatgacaagaccccttatacgattatgtttgg

SEQ ID NO: 450849 - DNA, 75 bp, Homo sapiens
ctaagagatatctgcaatgatgtactgctgctctgttaaaagcgaaaatgaaacaattgcctgcggcaacagttc

SEQ ID NO: 450850 - DNA, 75 bp, Homo sapiens
ttttgccggaggagcccctcaggccagggatttaaagatccagctctgtatacttcctggttgaagcctgttaat

SEQ ID NO: 450851 - DNA, 100 bp, Homo sapiens
gggaggagagctctcctgggaagttgactatattgtggagtatgactatgatgctgtacatgatgatgaattaactattcgagttggagaaatcatcagg

SEQ ID NO: 450852 - DNA, 98 bp, Homo sapiens
ggagacgagagagcgaacgccagggaccctgtgcaggcctgctcctccgtttgcaagtccacaggtcctggctaccctgggaagagacaagaagtaaa

SEQ ID NO: 450853 - DNA, 100 bp, Homo sapiens
aggagaccaagaaacttatgcagagggagatgtccatggatgtctctaattaacagaagatggcaaagcccagccacagcagctatgtccttcagcagct

SEQ ID NO: 450854 - DNA, 51 bp, Homo sapiens
acatgatggtactgaaagtagaggaactgtcaagttcatccgagaagtaac

SEQ ID NO: 450855 - DNA, 102 bp, Homo sapiens
aggagaagaaggaagttgtggaagagaaggaagactcgccagccagatgccaaagatggggattcatacgacccctatgacttcagtgacacagaggaggaa

SEQ ID NO: 450856 - DNA, 73 bp, Homo sapiens
ctttcttgcctgctgtgttgcgccaaccaacccaaggaaactggaccaggatcttaatgaagtcaaagctcga

SEQ ID NO: 450857 - DNA, 100 bp, Homo sapiens
cacagacttcaccggcaccatcaagtctccatcatcaccagttccagtagtgaaaaacagaacccaacaaactcaaaatacattacatttaccactaaaa

SEQ ID NO: 450858 - DNA, 100 bp, Homo sapiens
agccactttgcattgactggaaacaatggcatttacagaaagagtcaacagcagtggcaacaggatcctggagcttcagcagaatggtgacatggacatc

SEQ ID NO: 450859 - DNA, 50 bp, Homo sapiens
gagaccgcggccgggaccgagggtgatcttagacctgatcccgtatgaaa

SEQ ID NO: 450860 - DNA, 75 bp, Homo sapiens
cgacgtcgtgatccagaagtccagagctgaggactgcctgtttgcagatatgagatcctgactccaaactccatt

SEQ ID NO: 450861 - DNA, 100 bp, Homo sapiens
cagaccccaacttccagctcgccctaaacttcgcctggtccaacttcagttacgttatgatgatgaagtgaagcgggtggtggcagagccggtggagttg

SEQ ID NO: 450862 - DNA, 82 bp, Homo sapiens
agcctttacagtaaaaatgacccatctatggctgcttaattcagagcaccataacatggtgtgggaagtgaagacaaatcag

SEQ ID NO: 450863 - DNA, 88 bp, Homo sapiens
gagatggcctggtggaaagcctggcgtcagcctcgagtttgaccagcagcaggggtcggtgtgtccctctgaatctgagatctatgag

SEQ ID NO: 450864 - DNA, 71 bp, Homo sapiens
cagcccgggtccccgcgttcacagccccagcgcagctgttcgggggtcttgtctggattttggttgcctcc

SEQ ID NO: 450865 - DNA, 99 bp, Homo sapiens
aacagtttcattttcaagtatgctgatccagatcgggagtgccacccatgccatccaaactgcacccaaggaagagaatgaaccctctcaggcagaaac

SEQ ID NO: 450866 - DNA, 117 bp, Homo sapiens
tcaatatctgtcttcggtggactccttcggcagtccacccaccgccgccgcctcccaggtgctcttacagcctgttccaagtgtggcttaatccgtctccaccaccagatctttctc

SEQ ID NO: 450867 - DNA, 108 bp, Homo sapiens
tcagccgccgcatcgcgggggtggaggacatcgacatccaggcgaactcggcctatcgctaccctccgaagtccgtagagacggggtttcgccgtgttagccaggatg

SEQ ID NO: 450868 - DNA, 125 bp, Homo sapiens
gttccagcccttcaaccaacatcttctgccctgggtcaagtgtacaaccgtcttcagatctccttagaccatgctcagcctccaagcagccttgtcatcgacaaagaatctgaagtttacaagat

SEQ ID NO: 450869 - DNA, 75 bp, Homo sapiens
gccagctcctactcctccctcaactccctcatcgacaccatccggaagatgaagaacgatttccggaagatggag

SEQ ID NO: 450870 - DNA, 75 bp, Homo sapiens
attcttaatcctgtaaatacgaatctttccaaaggagatgcccgggattaatgaaaatcaagttccatcctcaga

SEQ ID NO: 450871 - DNA, 98 bp, Homo sapiens
aaaactccagagctcccagaaccttcagtgaaagtaaaagaaccttcagtacaagaggctacttctactagcaccaaatcagatgaaagccaaggaag

SEQ ID NO: 450872 - DNA, 99 bp, Homo sapiens
ctaggaaaagcctccagactactagtacgaggacgtagctgtttttcagagtgacggatgaccgggccaagcaatctgaactgtacttagttggaatga

SEQ ID NO: 450873 - DNA, 49 bp, Homo sapiens
ccagctttgacaatacaggaaatgtttgagtccaatgtgctgattgctg

SEQ ID NO: 450874 - DNA, 89 bp, Homo sapiens
gggccggttttatgagtgggaaccatttgcagaagaacttcctgaataatttccagacagccaaagagtctctgagtgctgccactgcc

SEQ ID NO: 450875 - DNA, 98 bp, Homo sapiens
gggaccgccctggacatcaagattaaaagagcgaataaagtttatcacgccggggcttatgatcaacatttaaatatgatcttgggagatgtggaaga

SEQ ID NO: 450876 - DNA, 90 bp, Homo sapiens
aggacatgtggttaaatgctattggggtaaagaatctcctgatatgactaaaaacttccaacaggacaagactgatacactggaacacga

SEQ ID NO: 450877 - DNA, 96 bp, Homo sapiens
tctgggagatcttttcccttgactgggactcttcaattaatctgacatttcacaaatccaaaattgccgtggatgaactctttacttcacttcggg

SEQ ID NO: 450878 - DNA, 50 bp, Homo sapiens
cagagttgtacaggaggaaaaccagaaatacaggtatcaggatgaagata

SEQ ID NO: 450879 - DNA, 90 bp, Homo sapiens
ccaagcgctttcccgagaccgtcctggcgcgatgcgtcaagtacactgaaattcatcctgagatgagccagagagatgacacgggggaaa

SEQ ID NO: 450880 - DNA, 83 bp, Homo sapiens
tgcaggctgaggatgggcactggacgggtgattatggtggcccacttttcctcctgccaggttatgaagacagtatggagttt

SEQ ID NO: 450881 - DNA, 75 bp, Homo sapiens
gacctgtcctttggccactctagggccagctccaatgaggactcagaagacaaagatgtgaagaccaagaaggat

SEQ ID NO: 450882 - DNA, 76 bp, Homo sapiens
ctggactccatcctcttcctttttgaagtgctggagaatctggtaaaagcaccattgtgaagcagatgaggatcct

SEQ ID NO: 450883 - DNA, 100 bp, Homo sapiens
catcgagtccgaggcaaaaccagcccagcctcagcccactggtgaaaaggaaagaccacagcaagattctttcattcgtctcctcctagcctgggggacc

SEQ ID NO: 450884 - DNA, 83 bp, Homo sapiens
cggctttgcagggacatgcagagcatcctctatcacgggcttatccgtgaccagacaatgcagatcttcgtgaagactctgac

SEQ ID NO: 450885 - DNA, 98 bp, Homo sapiens
gcagaaaatagcagccaggaaccaagaaaacttggtgactgctacattgagaaacttggttgattcatcattagtaagaagtaagttcctaaacatca

SEQ ID NO: 450886 - DNA, 100 bp, Homo sapiens
gatggggccctggatgagggggaagggcctcaaagccagaaggaaccagcacctatgacagaagatctgctagaagagcagtctgaagttttagctaaat

SEQ ID NO: 450887 - DNA, 74 bp, Homo sapiens
catctaaaggaggttttaaacagtataacagcctgagaaatgccagtggcctgacagcagcagacattgcacaa

SEQ ID NO: 450888 - DNA, 96 bp, Homo sapiens
cggctgcgcacggactgctggagatggtggagtccgtcaggaaatctgcttcgccactgaaggtactctgcaccccagaaggaatacgacttcagt

SEQ ID NO: 450889 - DNA, 88 bp, Homo sapiens
aggatgtgcggggtgcgccggcagaggatccagtgttcaccatcctggccccggaaggggccacttagaagatgtgtatgatatttgc

SEQ ID NO: 450890 - DNA, 100 bp, Homo sapiens
ggggctttacagggagctgttgataggtacatgtccagggccgccgggtccccttccccattgccagcccctgaccctgcacctaagtctgagccagctg

SEQ ID NO: 450891 - DNA, 75 bp, Homo sapiens
atttgttaaggattccaagtaactcttatttggttcccgaaggaaaagtagtcgttctcaatttccgattcatag

SEQ ID NO: 450892 - DNA, 75 bp, Homo sapiens
gatgtcttccagactcggtgctgtacccgccggcttatttcaaaacctttgtccctcagttccaggaggcagcat

SEQ ID NO: 450893 - DNA, 90 bp, Homo sapiens
cttggtgtgcattaacctgccgccgcccctcaccagacagatcgctgtcaaaaccctaggtcacagtaatgaaaggcagtaatagaaata

SEQ ID NO: 450894 - DNA, 97 bp, Homo sapiens
ttccccaagcgcggccagacctgcgtggtgcactacaccggtttttctatatgagtggagaagacagctgttaccagggaggtcatacaacattttt

SEQ ID NO: 450895 - DNA, 75 bp, Homo sapiens
agataatctctacttgagaaccattccatgtcgaatttacaagcactctcagcaacctttgattacctatgaaaa

SEQ ID NO: 450896 - DNA, 98 bp, Homo sapiens
cccacgcccggcccgcgcgggcgccccgagcccggctccgcgcgcctggcggctacatggagagtgtcaggggctgtggggtcaccttctcttcctct

SEQ ID NO: 450897 - DNA, 87 bp, Homo sapiens
gctccgggaccggccgaaaggcgaggaaccgctcgagatgctgctgtgcagaagattgagactattatcaaagaacagtttgctctt

SEQ ID NO: 450898 - DNA, 98 bp, Homo sapiens
atggcgatgaagaccaagacgtatcagtgatgttgcacctgtaaccatctttttatgggtggagcagagagtcaatccctgcagccaccctgcagcca

SEQ ID NO: 450899 - DNA, 100 bp, Homo sapiens
tagagaggaccccggtacatctgaaagccgggaaatgacagtgatgtgtgttctgaaattgtgaaccatgagtctagtacttaatgatctgcttatctgc

SEQ ID NO: 450900 - DNA, 100 bp, Homo sapiens
catctacgcagcgaaatcgagcctggccttgagggtccacaccgcgagggaagatgcgtgcgcccattatgggatggaggtggataccacaccaacagtt

SEQ ID NO: 450901 - DNA, 83 bp, Homo sapiens
cggccccgtaggtgctcggggacccaccttccacctagcacgggcccttcgccccaggcatcgttctctatggtggacaaagt

SEQ ID NO: 450902 - DNA, 100 bp, Homo sapiens
atgggtggcaagtaccgccttatggagtatacgggcaaccatggaatcaacaaggatttggagtagagttcgggatgagtatcggcaggactacgatgct

SEQ ID NO: 450903 - DNA, 50 bp, Homo sapiens
cgcagacctctgggcttcctgggaaaattttttctggaagatcctactgg

SEQ ID NO: 450904 - DNA, 75 bp, Homo sapiens
acctggatctcatcaaaaaggacaccagcaagctgttcaatgaggaggccggctgcgtgcacttttcctacaaag

SEQ ID NO: 450905 - DNA, 101 bp, Homo sapiens
tatgttgtctaattaacaaagaaccacagaattctggacaatcaaaacttaactcctggatacagcatgctgatcccattttcaatgaagaattgcttcca

SEQ ID NO: 450906 - DNA, 82 bp, Homo sapiens
cggacccaggcgcggatggcgaggccagcagccatgcgcacgctgagcgaggacaccatcaggctcttcctgcagcagatcg

SEQ ID NO: 450907 - DNA, 75 bp, Homo sapiens
aagtgaggcccaaagaagatttatgttcaggaccatttagtctgtctagatgttgatggaatatatcgagttagt

SEQ ID NO: 450908 - DNA, 126 bp, Homo sapiens
ccgcgggctgcggacgctcggtcccgcgctgcgcatccccgcggacgccacagcgctgaacaggcctttgagagcagccagaagtacaaagaggggaagtacatcattgaactcaaccacatgatc

SEQ ID NO: 450909 - DNA, 145 bp, Homo sapiens
gaaggagacctgcttccgggactggaccaggcgcctgcgactcttctcagacgccgacgtgcacgagtttcacgctatggatacattgtatagacacagctatgatttgagcagtgccattagtgtcttagtaccactcggagga

SEQ ID NO: 450910 - DNA, 75 bp, Homo sapiens
ggagccagtgcgggaaagaggagatgcttctggtttgtttgtaaaaacaatggtgtgttgtttgaaaaccagctg

SEQ ID NO: 450911 - DNA, 75 bp, Homo sapiens
tccgttgcgagctgcagctgcgatctctgtggtaggcccagatcctgaaggacacagccctgcagaaagtgaagc

SEQ ID NO: 450912 - DNA, 50 bp, Homo sapiens
cgcggccacttttgccttcccggagccccacagtcttcgttacaacctca

SEQ ID NO: 450913 - DNA, 82 bp, Homo sapiens
ctaaagcagcgtgcgttcagccctgggacaggtagagcaggtctctctgcagccatgtcggccaaggcaatttcagagcaga

SEQ ID NO: 450914 - DNA, 90 bp, Homo sapiens
gataattcatgacagaagggagtttgctaaatttgaaaaggagaaaatgaatgccaaatgggacacgctgccactggtgacatgccaact

SEQ ID NO: 450915 - DNA, 75 bp, Homo sapiens
cgccggagcctgaggacacttctctgtcgtcacagttagatgtaacctcgggtatggtgaaagacccaccggacg

SEQ ID NO: 450916 - DNA, 100 bp, Homo sapiens
ggggatctggcactgtggttcctgcatgaagacagtggctggcggtgcctggacgtacaaaggaagctggcgcgtatggcagccgaggagcacactctgc

SEQ ID NO: 450917 - DNA, 100 bp, Homo sapiens
cttggcccagacacccacctgacttagtggctcctctgcaggaaaggcaaggaaacagttactattcttccaggagcctcttttttctccagcgatgaat

SEQ ID NO: 450918 - DNA, 100 bp, Homo sapiens
tgcagcgagtgccaggaactcttctggggagaccccgacgtggagtgccgaggtttctaagcatgaattgaggaacagaagaagcagagcagatgatcgg

SEQ ID NO: 450919 - DNA, 97 bp, Homo sapiens
cctgcacccgctcagcgagctcctgggcatcccgctggaccagatgcctttgaagatgagaaacccccaaagaagagccttctctccaaagtttcac

SEQ ID NO: 450920 - DNA, 90 bp, Homo sapiens
ggagcgcaagcgccggcagaagcaccaggaacgacaagctgaagatccacatgcggaagcacacgggagagcgcccctactcatgcccgc

SEQ ID NO: 450921 - DNA, 82 bp, Homo sapiens
cgcacggctccggggtatccgtgtgcttgcagagtttgacactcctggccacactggtgtgtctcataagtgacttctaccc

SEQ ID NO: 450922 - DNA, 75 bp, Homo sapiens
aaatatatccgcagggttcggatgagaccagcaccttggaacatttcaagaggtggctccagccagataaagtag

SEQ ID NO: 450923 - DNA, 83 bp, Homo sapiens
ccgctgccataagagaagctggcttgatgaaaaggctctccagtttgggaaaaatgccagctgtgggacaaggagtgcaggcc

SEQ ID NO: 450924 - DNA, 50 bp, Homo sapiens
cggcgttggaggccaccgtttccagatgacagcacctggagtgttagctg

SEQ ID NO: 450925 - DNA, 73 bp, Homo sapiens
agttgttaaattctcaacagctcacaccaggaaaagaagatctcccggagcagtgccctgaaagtgctggacc

SEQ ID NO: 450926 - DNA, 100 bp, Homo sapiens
cggaagtagcagtccggtcctagggactagcagattcccgatacattcttctgcctgtcgtgttacatcacctccacattcacttgcaagaacagaagga

SEQ ID NO: 450927 - DNA, 100 bp, Homo sapiens
tgagaaacccaaacctgtaaaaccagtgacgttttccacaggcatcaaaatggatgagagaagctgcaagaaaaatagaagaaaggcatttttccaacca

SEQ ID NO: 450928 - DNA, 98 bp, Homo sapiens
cgggtccctgagctggaagccgaaatgcttcggttacccacagtctttcgccagatgagaccggtgtccagggtactggctcctcatctcactcgggc

SEQ ID NO: 450929 - DNA, 74 bp, Homo sapiens
cggtgctgcgagggcagaacctgggactataagacctacttggactttgtccttgcattagaaaacagaaagga

SEQ ID NO: 450930 - DNA, 100 bp, Homo sapiens
gatgatctttgcccaagccctggtgtgccggcacctaggccgaggcatgcttcgccgctgggatgacagccaaaagtacctgtcagacaacgtccacctg

SEQ ID NO: 450931 - DNA, 100 bp, Homo sapiens
catcttcatttacagagcaacttgatgaaggtacacccaatagagagtgatatcagtatcaagataaaagtttggaatgggagaaaaattctcaaagcct

SEQ ID NO: 450932 - DNA, 95 bp, Homo sapiens
cgcccagcacaagcagttttgaaaatttaagtgcaaaaagcatgacaaagcaatatgaggttgccgtgaaacccgcgctgaccgcagcaagaagc

SEQ ID NO: 450933 - DNA, 83 bp, Homo sapiens
gtagaagcaggcaatccccaggcaagacctctcagctattttgaagatgaggaagaagattctagcaacgttgatttacctta

SEQ ID NO: 450934 - DNA, 71 bp, Homo sapiens
gcaaaggctacaagctgtccccagaggactacacgctcaaggtgtgttaatttgggcgcttcttggattct

SEQ ID NO: 450935 - DNA, 83 bp, Homo sapiens
gacctgtttgacattctcattcagagcggagacaatgcagatcttcgtgaagactctgactggtaagaccatcaccctcgagg

SEQ ID NO: 450936 - DNA, 97 bp, Homo sapiens
gcccagcactggtccccggaaaggtgcctagaagaacaaggtgcaggaccccgtggctcgtttctggcgctggagacatcaaacttactaaagacgg

SEQ ID NO: 450937 - DNA, 100 bp, Homo sapiens
cagtccccagtgagggtgtacaaatacccctttgaattaattatggctgatgtaatccctgttcattactacttaatacctccaccaacaaagactaaga

SEQ ID NO: 450938 - DNA, 98 bp, Homo sapiens
gaattccccttcctagaaggaccaagatggcagcagtgactctgctggctttggcgtatacacaggttgatatgtcagatctctctccagaagagcaa

SEQ ID NO: 450939 - DNA, 82 bp, Homo sapiens
gacccaggcctatgccaatcagcatttcacattcctcatggttggttcaaagacctgcctagagctggaacgttacctccag

SEQ ID NO: 450940 - DNA, 100 bp, Homo sapiens
atgtggtttgtggtcactgccttggatgagattgcgtgtggatatggttatagaagaagtggccgagataaatatggccctcctactcgcacagagtaca

SEQ ID NO: 450941 - DNA, 100 bp, Homo sapiens
cttcacacagctgcttccattggccagtatgaagtggtgaaggagtgtgtgcagcggagtacttcttgcaagcagagctgacaagcaacgtcttaaaaac

SEQ ID NO: 450942 - DNA, 98 bp, Homo sapiens
caacctggaccccaaaattaccgaccaaagggaaaggacagtcccaaaccagagtgaatattaatgctgccttggttgaggatataatcaacttggaa

SEQ ID NO: 450943 - DNA, 90 bp, Homo sapiens
ccggggagtttgggcttttcctacaatcactgaccctcactgtgactaaaggagcagaattaggagcctcctcaacaagcccaagagtga

SEQ ID NO: 450944 - DNA, 96 bp, Homo sapiens
gaaaggatgacatatttttggacctgaaacagaaattctggaacacctatatggacactcatgaggaccatgatacttccactgagaatacagacg

SEQ ID NO: 450945 - DNA, 50 bp, Homo sapiens
tgacgaggttctgtgagagcatgccttttctgatgccattaaaaaatggc

SEQ ID NO: 450946 - DNA, 116 bp, Homo sapiens
gtgcctccattcccgggaggggggagcggcgttggaggccaccgtttccagtaatctatgccagcaattatgacaatgttagcagaccatgcagctcgtcagctgcttgatttcag

SEQ ID NO: 450947 - DNA, 100 bp, Homo sapiens
gacatcctggaagctgggaaatgacctgaaccggaccttccccgacaacgtgaagttccggaagaccacggacccctgcttacagaggaccctgtacaat

SEQ ID NO: 450948 - DNA, 75 bp, Homo sapiens
gcaccagggcatcaagatcgagttcatcgggcagatcgatgaggacggggacttggttgccttttccagtgacga

SEQ ID NO: 450949 - DNA, 90 bp, Homo sapiens
gtcctgcgcttggggatcctctgtacgcccgttcactgactaactggatcttctgggtttgtgacagatggacctggaaattataaatac

SEQ ID NO: 450950 - DNA, 152 bp, Homo sapiens
gctcagggcggtgttctgcccaacatccaggctgtactgctccccaagaagactgagagtcaccacaaggccaaggggaggaggacctggttgatagaagaatttatctcgtagtcttaacatccactgtaattccaaactttgaggacgat

SEQ ID NO: 450951 - DNA, 75 bp, Homo sapiens
aaccagtcacccaagtgcattgcctttggaaacgaggatgatgatgctgaagctatccttgctgcagacttcgaa

SEQ ID NO: 450952 - DNA, 101 bp, Homo sapiens
tgcaagaaccagcccacctgctcctaccagcagatcagctgcttggacagcgtcatcaggactgcctcaacttcagtggaacaagtcagagaaaggagtta

SEQ ID NO: 450953 - DNA, 101 bp, Homo sapiens
ccggtggacgccctccaccacaaaccaggccctttgctacccggggacagtgccttcagggcccagtcctatgcggagagactgcgtctgggtttggccgt

SEQ ID NO: 450954 - DNA, 100 bp, Homo sapiens
agaacggcgtcttcgtggacggggccttccagagacgcggcgcgcccgccctgcagctgcccaagcagacatggatttgattgacatactttggaggcaa

SEQ ID NO: 450955 - DNA, 90 bp, Homo sapiens
atactcctgttctggggacagtttggtattaaaactgtcacgggaagtctttttaggataaacgtaggcctgcgtggcctggtggctggt

SEQ ID NO: 450956 - DNA, 82 bp, Homo sapiens
ggagaacgccaagcgcttcgccatcgacataggtgagaagccctaccactgcaactgggacggctgcggctggaagtttgcg

SEQ ID NO: 450957 - DNA, 100 bp, Homo sapiens
caggacagctgttccttggccatcccaaagctattctgggggcaacagagtacaagttgtgcaaagtgaggaagattactgtgggagtgaagggaatccc

SEQ ID NO: 450958 - DNA, 73 bp, Homo sapiens
tttgagaaaaggcctaagaattttggcattggtctcctctgagcctccggcctccataagacccaaaacagat

SEQ ID NO: 450959 - DNA, 100 bp, Homo sapiens
gaagaactgttcttgactttcagtttttcgagcgggtttcaaggtggccttgggggacttgcaggtctgagtagcttgggtttgaatactaccaacttct

SEQ ID NO: 450960 - DNA, 75 bp, Homo sapiens
ctcgctgggagagaggtacctctccttttccctctccctttccctaagctgcgactgatagattggggtctggca

SEQ ID NO: 450961 - DNA, 100 bp, Homo sapiens
cccatactgagtcagatatatacagatggtccaggagaagctttgaaggctgtgaaggtcctgatgttcggcgagacaaacctgtaacaggagaacaaat

SEQ ID NO: 450962 - DNA, 76 bp, Homo sapiens
cgcgccgacggctgctcaaacatcagggttccagctggggtgagagcagctcagggagaataacaaattggcttgt

SEQ ID NO: 450963 - DNA, 89 bp, Homo sapiens
tcgatgctgagcggcaggctgcagctgcagcctgccagctgttcaaggaaccctaaggactctgcaatatgaataattccctagagaac

SEQ ID NO: 450964 - DNA, 90 bp, Homo sapiens
cattgtggagaagattgactttgacagtcctctccacccggatcctggccatgaaggcctcgctctgcaagctgtcgccctgcacggtga

SEQ ID NO: 450965 - DNA, 82 bp, Homo sapiens
cagatgtacgcccaagccgccctggatggagactcccagcccctgcagatcaagtcagtagtggcaccagagcatgtgaagg

SEQ ID NO: 450966 - DNA, 100 bp, Homo sapiens
ccgccgcgggcaggacgcgcgctgcagacctcgcgacctgtgtcagcagagccgccctgcaccaccatgtgcatcatcttctttaagtttgatcctcgcc

SEQ ID NO: 450967 - DNA, 90 bp, Homo sapiens
ggacctggaggggacgctggggccgaagcagcatgtgacaccgaccaggttggtcaaagaaaaagtgatgtatgaaaaagaggcaaaaca

SEQ ID NO: 450968 - DNA, 100 bp, Homo sapiens
cggaattaaaccttcaaaaagcttctcaggattttcaagggaatgacaaaacctatcactgcaaaggtccagggagtcggtagtaagggatggcgggacg

SEQ ID NO: 450969 - DNA, 101 bp, Homo sapiens
cggcgggtggatgctgagaacaggctgcagaccatgaaggaggaactggacttccagaagaacatctacagtgaggaaactggattttggtttatttttca

SEQ ID NO: 450970 - DNA, 75 bp, Homo sapiens
cacagcttccccacactcaagttctttcctgccagtgccgacaggacgctggaggagcagctgagccgccttcag

SEQ ID NO: 450971 - DNA, 75 bp, Homo sapiens
ggcctataaaatgcttcaagtagtcctgtgctcaacattgcttatcgaggtatgaaggttattgaaaaccgggcc

SEQ ID NO: 450972 - DNA, 51 bp, Homo sapiens
tccagtacacagacgagcatggggaagactcctcgtgaagtggcccagcag

SEQ ID NO: 450973 - DNA, 73 bp, Homo sapiens
gcttatgacaagactgccttggcattagagaatgtttctccatcccagagagatgaagtaattcaatggctgg

SEQ ID NO: 450974 - DNA, 100 bp, Homo sapiens
gggcacgctctttactccatgtgtgggacattcattgcggaataacatcggaggagaagactgggactcttcaattaatctgacatttcacaaatccaaa

SEQ ID NO: 450975 - DNA, 100 bp, Homo sapiens
gacaatgaccgtgtggtgtgcgcggtggccactgcgctgcggaacatggccttggacgtcagaaataaggagctcatcgatcccggagttgaagcaggac

SEQ ID NO: 450976 - DNA, 99 bp, Homo sapiens
aaatgtccaccaaagttcagtaataatcccaaggagcttactgtgatgtacagttacccagcacgtgtacctcctcctcctcctattgctcgggctgta

SEQ ID NO: 450977 - DNA, 100 bp, Homo sapiens
ataacaggacaagagttggaaagacagcatgctacaagtgaaaactgatgagaaactgaatgtgtctgatgagaatacagcaagttgccctttgagcccc

SEQ ID NO: 450978 - DNA, 93 bp, Homo sapiens
tctgaggatgagctggaggaggggaggagaaggcagagcccccccaggctatgaatgccctgatgcggttgaaccagctgaagccagggctgc

SEQ ID NO: 450979 - DNA, 49 bp, Homo sapiens
gcctcccaaagtgttgggattacagaaaggagaatcacttgaacccagg

SEQ ID NO: 450980 - DNA, 83 bp, Homo sapiens
ctgagctcgcggctcacgctgagagggacacgcagtgacgagcggccgaagcagctttgcgaagtcaatgaaaggattctatt

SEQ ID NO: 450981 - DNA, 100 bp, Homo sapiens
gtctccaactagtattatgagaggagtcaatcagagagctaagcttgtctgctggatccctgcagctggagcgcaaaaggagagatttcacctcttctgg

SEQ ID NO: 450982 - DNA, 102 bp, Homo sapiens
cacctccaccgactggaaggaggcgaaattaagactttgaccccgacgcaggcttcagtgattgccgcggatcagaagcctgagcactttggctcgagacaa

SEQ ID NO: 450983 - DNA, 123 bp, Homo sapiens
gaaatccaaaggcagacagtacgggctcccttcgccaaactcttcattttctctcagagagagatcatcattgcctgaatttagctttgtgactgcaagagcaagaccagttcctgtctggag

SEQ ID NO: 450984 - DNA, 96 bp, Homo sapiens
gaccgtgaccgagagcgtgaccgagagcgcgaatatcgtcatcgttagaagaaaattgcctttaaaggaagaagatgggaaagaagctctaaatcc

SEQ ID NO: 450985 - DNA, 51 bp, Homo sapiens
agataggcggccatggtccaaccttgaagggaactctaatgatccaggaca

SEQ ID NO: 450986 - DNA, 96 bp, Homo sapiens
attctttcccaaaattcagaaatcaaccaagttcatgattgagaatgccagcgaggtgctcatcactcccttggagaagtttcgaaaggaacagat

SEQ ID NO: 450987 - DNA, 120 bp, Homo sapiens
aggaggaaaggagcagaaggtcttggtgaagaaggcggcctgcaccaggacccacttcggcacagttcccagtgacctgacagcagaggagcgtcaagaactggagaacatccgacggag

SEQ ID NO: 450988 - DNA, 100 bp, Homo sapiens
atagaagaacataaaaaagaacatgcttcaggagctgcgtttgctttggttagctagaaagcaggcccatcatgcatctgtaagaaagtgactggagtgt

SEQ ID NO: 450989 - DNA, 100 bp, Homo sapiens
gtttaataatgatagaatgaagaccacaataaaagagacctctacttagctcagcaattcttaccttattcttgtagacactgtttgggctctgtcatac

SEQ ID NO: 450990 - DNA, 100 bp, Homo sapiens
tcttgcctcaggccagtcgcctccaggccaagagggatccttcacccgtgtctgctattgtggacgatgaaaggctctctgcagaggagatggatgagag

SEQ ID NO: 450991 - DNA, 100 bp, Homo sapiens
cgctggaagaactgcgatgcttttttcactgctaggaaaggatccaaacaggatgggaaggccattgtgactatgtggtgattacagttgtcttactact

SEQ ID NO: 450992 - DNA, 75 bp, Homo sapiens
cttgcttgggatcctttatcctggtcatcttctatttccaaaattactctcgtggctttggtggccggtacgggg

SEQ ID NO: 450993 - DNA, 100 bp, Homo sapiens
gtgcggactcggagaagccctcgagcatccccacaggcttgcttccggcgtcatggctcaaagggccttcccgaatccttatgctgattataacaaatcc

SEQ ID NO: 450994 - DNA, 83 bp, Homo sapiens
gacgtacacgctggacgtgctggaaaccaaggtgtatgttggtaacctgggaactggcgctggcaaaggagagttagaaaggg

SEQ ID NO: 450995 - DNA, 75 bp, Homo sapiens
caacgcgcaggtgctagcggccccttcgccctgcaggacacaactcagatgggaagttcatcgcccgggcacagc

SEQ ID NO: 450996 - DNA, 75 bp, Homo sapiens
acacctgtacccaatatagaagaagtagtacttcccaaaaatggaaaggcagactacaagttactgagcacctcc

SEQ ID NO: 450997 - DNA, 74 bp, Homo sapiens
catcatcccgtcagagctgaggtacttcgtgaaggaagaagaagcagacgttgaaggcattcagtataaaacac

SEQ ID NO: 450998 - DNA, 75 bp, Homo sapiens
gacgacaagcacacactatggcgctgaaacggattaataagactatgtcttcagcagtggtgcagttatatgcag

SEQ ID NO: 450999 - DNA, 98 bp, Homo sapiens
ctagtgcttcccgtctcagaggcaaactataagtcccctgcggccccagagaccgaagagccaggtgatgaacgtcattggaagcgaaaggcgcttct

SEQ ID NO: 451000 - DNA, 75 bp, Homo sapiens
cggctccaagccaagggccatcgtggtggatcctgttcatgggctctgtggatagcaactggatcgtgggtgcca

SEQ ID NO: 451001 - DNA, 73 bp, Homo sapiens
aaggattccaagtaactcttatttggcatgtactggcattgaaaacattgacgaagctattacattgcttgaa

SEQ ID NO: 451002 - DNA, 83 bp, Homo sapiens
ccgcgggaggtccggacactggcggccatggaactcaccggatcactactcttggaatcaaagataaatccaaatactgcata

SEQ ID NO: 451003 - DNA, 101 bp, Homo sapiens
tgaagactacagagaagcttcttcttgtgccgtgaacctcgttttgagattaagttagggcatctgccttaactttggcataaagatgttcactgatcctg

SEQ ID NO: 451004 - DNA, 83 bp, Homo sapiens
gcgacagcaacagctctgccggctggaaggcctgatcttttggccagaaggagattaaaaagatgcccctcaagatggctgtg

SEQ ID NO: 451005 - DNA, 98 bp, Homo sapiens
gacagagacaacaccgagtatgagaaatttctatattcagatgaagttcaaattggtccagaaacagttatgaccactctttatactgccaagaaata

SEQ ID NO: 451006 - DNA, 98 bp, Homo sapiens
atcggttaaaaactggcagctcacggaggaggattttgggaacacatcaggccgtctctgtttgaacaagtatgccgagcagacagctggaggatccc

SEQ ID NO: 451007 - DNA, 100 bp, Homo sapiens
gccgccgcccctcaccagacagatcgctgtcaaaaccctagtaatatttggtgaagatgttgcctttggtggagtctttagatgcactgttggcttgcga

SEQ ID NO: 451008 - DNA, 100 bp, Homo sapiens
acctggtagtggccgggacctcgcagctctacgtgtaccgcctcaaccgcgacgccgagatgctgagcacctgaagaccctgtccctgtcctacaacgcc

SEQ ID NO: 451009 - DNA, 82 bp, Homo sapiens
ctgatttgaacctcacacatgggaagtaggcaaacagggaaactgaggaccagagaggatgtggcaaaatctggcaaaggca

SEQ ID NO: 451010 - DNA, 101 bp, Homo sapiens
gcccttattgctatgggggaggagattggtgcagagatggcattacgaacctttggccacttgagggctgtgctgaagtttgctgctgccactggagccac

SEQ ID NO: 451011 - DNA, 100 bp, Homo sapiens
tcaaacaggaagatgggagcctctgccttgtacagttcccatcacctctggtagctgaagaacatctcacagtggacgccagggtctattcctacgctct

SEQ ID NO: 451012 - DNA, 50 bp, Homo sapiens
gccgggggctgccccctccccccaggtcttgaggaccggcccagctcagg

SEQ ID NO: 451013 - DNA, 100 bp, Homo sapiens
gcgcatggtgcccgaacaccgcgccttcggaagcccgttcggcctggaggagccgcagtgggtcccggacaaggaggcagcggaggaggagaaagagatg

SEQ ID NO: 451014 - DNA, 100 bp, Homo sapiens
tggacccgaggctgctcctggccttccagaagaagtagcagcactgtctggagatgcacgacggtgcctggacatctgcaggcgtgccacagagatctgt

SEQ ID NO: 451015 - DNA, 75 bp, Homo sapiens
aagcatcccattacagatagaagaggaggagataagcaaggacctcagagccacactgaacgccttcctgtacca

SEQ ID NO: 451016 - DNA, 83 bp, Homo sapiens
ggtggcggtggtgtgctcgagcaaccagaaccggagcatggaggcgcacaacatcctcaggtgcctggctgctacaaaccatg

SEQ ID NO: 451017 - DNA, 75 bp, Homo sapiens
cttctccgcgctatggctgcgttcggccgtcagaggagaaggcagagcccccccaggctatgaatgccctgatgc

SEQ ID NO: 451018 - DNA, 100 bp, Homo sapiens
agtccgacctctacaactgggaggtggccatcttcggaccccccaacaccctctacgaaggcggctacttcaaggttctacatgaaacattttctcaaca

SEQ ID NO: 451019 - DNA, 98 bp, Homo sapiens
tctggagaccatggagaccctcacggagctgggcgacgagctgaccctgggagacatcgacggaaatgacttaatcgtctttttggcagaccagaatg

SEQ ID NO: 451020 - DNA, 87 bp, Homo sapiens
agcggaagccgcggcggacagaccctccgaaggcctggcggccagcgattgctgatctgtgcatgatctcccttgagtttagaaatc

SEQ ID NO: 451021 - DNA, 90 bp, Homo sapiens
aatatttctgcttcctgcttccacttccgtgaccgttagggacaagacaggaagcaagatttccagatgtagcaaatgggtttattgagg

SEQ ID NO: 451022 - DNA, 89 bp, Homo sapiens
gttggttgtcgcccatgatctgatccggaagatgtcacctgtgaagctttgttctaagaatatttgtttcatctagtttatgagtccaa

SEQ ID NO: 451023 - DNA, 100 bp, Homo sapiens
aatgctccttctcctggagacgcaactcaagcaggtctctccttacggggccagggcaatttcttttcgttcttgcccgtgttgaactgggcaagcatgc

SEQ ID NO: 451024 - DNA, 100 bp, Homo sapiens
ggccgagcaggaggcgccatcatggaagtggacctctacagaatgaacagccaggacaagctgggcctcactgtgtgctaccggacggacgatgaagacg

SEQ ID NO: 451025 - DNA, 75 bp, Homo sapiens
gagatggcgtttgtgaagagtggctggttgctgcgacagatacgaatgtaaagttatcgcagaaaaatctcatca

SEQ ID NO: 451026 - DNA, 80 bp, Homo sapiens
attctcgtgcctcagcctcacaagtaactgggattatacaggacagtcattttgtttactcattcagccctgttgcaggt

SEQ ID NO: 451027 - DNA, 96 bp, Homo sapiens
tgacagagaagatctttttgcagctgctgccaatcgcaatgatcctgtgtttgaaaccctgcgcactggggtgatcatggcaaacaaggaacggaa

SEQ ID NO: 451028 - DNA, 90 bp, Homo sapiens
gtgttagatcagaaggaccatgctgtttttactcgagaatggcatcatttcctggtggtcaacatgaagggcaatgacatcagcagtggc

SEQ ID NO: 451029 - DNA, 89 bp, Homo sapiens
ggttcgtcctcttcttggtgctgtggctgatgcatttcatggctatcatctacacgcctctgtgtcctttgtcccaatagtaacaactc

SEQ ID NO: 451030 - DNA, 100 bp, Homo sapiens
ctttaatattcctgccatcacaaaagctggacaagcgaaggaggtaatacagattttcattgaagacaacttaaccttgagtttacctgtccagttccga

SEQ ID NO: 451031 - DNA, 100 bp, Homo sapiens
tctgagccccggggcatctatgccagtgagaggcccaagtccctaggaattgattatggattaagtttaccacttggagaagactatgaacggaagaaac

SEQ ID NO: 451032 - DNA, 148 bp, Homo sapiens
cggcgcttcccggcggtggcggcgtctctggccggccttggtgcggcgagccgagcgaggcagctctgagccgcgcgaactgtcagaccttcagcagcctcagctgcctgagcgcagggacagaggactgcggtccccagagcccctt

SEQ ID NO: 451033 - DNA, 74 bp, Homo sapiens
gaaagatctattcactgagctgcagaagaagatctatgtcattgagggtttttctattgggaaagctactgatc

SEQ ID NO: 451034 - DNA, 100 bp, Homo sapiens
atgccttcagacatcaccagccagcatctatattggaaagcgactgagcacaccctctgccagcacctactgagggaaaggaaaagcccctggaaatgcg

SEQ ID NO: 451035 - DNA, 88 bp, Homo sapiens
gcgacttctaggagcctggggttcggcgctatggaggagctcgatggcgagccaacagtcactgaagctcttcgtgggcggtcttgac

SEQ ID NO: 451036 - DNA, 75 bp, Homo sapiens
cggatggatgtgatgcctgctagccaaaaggaaagaagattggcccatgcacaagctggaatgttctcccatggt

SEQ ID NO: 451037 - DNA, 100 bp, Homo sapiens
ttctcaggaagagcttgaaaaagcagcccgacggccatggaggctgaagagacgatggaatgccttcaggagttccctgaacatcataaaatgatcctcg

SEQ ID NO: 451038 - DNA, 75 bp, Homo sapiens
gttccagaatgtcatgacctacctcaccagcatccccagcagtctgagctatcagctgaagaaagtccagaaaaa

SEQ ID NO: 451039 - DNA, 55 bp, Homo sapiens
gtggcccagaggctggagctgcgggagcttgaacaggaattggagctatctcgaa

SEQ ID NO: 451040 - DNA, 75 bp, Homo sapiens
gatagccaagacttatcgatgcggtatgaaaccaaatactgctattaaggccccagttgtgacagcgttgaggaa

SEQ ID NO: 451041 - DNA, 83 bp, Homo sapiens
ctgaggagcaccaggagacgcaactcatcgggttggcagtggcaatgacccctggtcagcctggagtgcctccaaatctggga

SEQ ID NO: 451042 - DNA, 82 bp, Homo sapiens
gagcattacaagccagcctctgggaccgagatgggaaactcttgtctagtgatgtgactcattacgtgatcccagactggaa

SEQ ID NO: 451043 - DNA, 100 bp, Homo sapiens
cttgggcatcttctggctcaatgctgcagagacctgggttgatatatcttccaacactgccgggaagcctttagaagaagccacactctctgaattaaaa

SEQ ID NO: 451044 - DNA, 90 bp, Homo sapiens
ccttgccggccggcacttcggctgcagagttttgcccacgcttcgagacttagggagcagatcaaggtgaacattctgggagaggtggtg

SEQ ID NO: 451045 - DNA, 96 bp, Homo sapiens
ggcaggaaggtgatgtccatcagcatccggctgaaagtgcagaaaggtgttggggatgtcctttgcactgaccctgaactgccagattgacaaaac

SEQ ID NO: 451046 - DNA, 80 bp, Homo sapiens
aggagaagccgcccaaagaactggggttccaatttcatctgctgttgcaggcgtagcaataggattggtcaccaaaaccg

SEQ ID NO: 451047 - DNA, 83 bp, Homo sapiens
ggtggaacagaagtacctcagacaatggtttattaagacaaccgcttatgcaaaggaggagtttgtttacgaggacatggagg

SEQ ID NO: 451048 - DNA, 75 bp, Homo sapiens
tcaaggcggcccggcgggcgactggacggccggacaggtgagaagccctaccactgcaactgggacggctgcggc

SEQ ID NO: 451049 - DNA, 83 bp, Homo sapiens
cgcctggctcggagcagcagcctctgaggagcatcagatccatgctgctgctgactcggagccccacagcttggcacaggctc

SEQ ID NO: 451050 - DNA, 75 bp, Homo sapiens
tcctggggcccgacaagaacttcacgcgggagcagggcggcactatcattggcagcgctcgctgcaaggccttta

SEQ ID NO: 451051 - DNA, 100 bp, Homo sapiens
gtgcgggccctctggaccctggagtacaccccgcagcacagccgcgacttcaaggttcctggtagagttacacagttgtgccgccagtatagcgacatgc

SEQ ID NO: 451052 - DNA, 96 bp, Homo sapiens
cagtcacacatgccagagattgctcaggaagcaatggaggaatactcccccagttgcaagaggcgcaggaccgtggaagacttcaacaaattctgc

SEQ ID NO: 451053 - DNA, 82 bp, Homo sapiens
tctaaaaaagtggctcagattcagaatgaaaaggcatatggaaggagcatttctctttgctgttctcctacatttcaagcat

SEQ ID NO: 451054 - DNA, 75 bp, Homo sapiens
caacgcacagctatcttgacccacccttgagtccgcttagtggaaagaggatcccctcatagtctgcccctgatg

SEQ ID NO: 451055 - DNA, 80 bp, Homo sapiens
agatcctgatgaagttcgagcactaatatttaagaaagaagatgttaactttcagattcgagtggtgaatgcatttcgta

SEQ ID NO: 451056 - DNA, 100 bp, Homo sapiens
ctggaaatcgtgcctgtgcggcgctcgctcaaggaactgatcccgaccaatctgaccttcgttggctgcgtgggcatgctggatcctccgagaatcgagg

SEQ ID NO: 451057 - DNA, 90 bp, Homo sapiens
gagaacaagcaagacaagacttgaagggtttggaagagacagtgatttatgaaggtacttcacaaattcaaagacttattgtagcccgtg

SEQ ID NO: 451058 - DNA, 101 bp, Homo sapiens
gcctcccaaactgctggaattacaggcttttggaaatgccaagacagcccacaacaacaactccagccggtttgggaaattcatccaagtcagctacctag

SEQ ID NO: 451059 - DNA, 100 bp, Homo sapiens
ctgagaatgccttggggcaggtgtcctgcagcgcctgggtcaccgtccatgactttttaaaactgtggacttaaatgttctgcaaagtcttacacaaaag

SEQ ID NO: 451060 - DNA, 91 bp, Homo sapiens
cttagctgtgctcgcgctactctctctttctggcctggaggctatccagcaaatgcttcggttacccacagtctttcgccagatgagaccg

SEQ ID NO: 451061 - DNA, 83 bp, Homo sapiens
gagagactattttcgttattacaaggatcagttcttaagagcagccccggtaactggaggaatgggagccgttttgatgagaa

SEQ ID NO: 451062 - DNA, 82 bp, Homo sapiens
caaagataaaaatttcaggatcaccattaacacttaaggggcactatgaacgaagaggagcagtttgtaaacattgatttga

SEQ ID NO: 451063 - DNA, 100 bp, Homo sapiens
tgtaggtattgggagatccacagctaagatgccaggaccccctgggaagcctagaaaaatggaatttaaactttgggataatgagctgcagtatgtggac

SEQ ID NO: 451064 - DNA, 83 bp, Homo sapiens
aattgatttgctcttacgtatttgtgtgacttgactcttcaaacacaaagtgggaagagattggtgaagtggatgaaaattat

SEQ ID NO: 451065 - DNA, 100 bp, Homo sapiens
taggaatgcagacctcctgaaaaccaagccgaggactgcggggtccggtgtccacgcagacctatttgatggctttgcagatggactaggagttgctgaa

SEQ ID NO: 451066 - DNA, 50 bp, Homo sapiens
ctggagacaatgaaaatcttgtcaggtctcctaaaaacccagaacagaag

SEQ ID NO: 451067 - DNA, 97 bp, Homo sapiens
gcgccgctggagatcctttcctgcttttggtttccctggcaggggttgaactgtggagtgtgtggtcatccgtccttggctcaggatttggagagct

SEQ ID NO: 451068 - DNA, 100 bp, Homo sapiens
gagacgaccctgggaaaaatggtctctaattaacagaagatggcaaagcccagccacagcagctatgtccttcagcagctaaacaaccaaagagaatggg

SEQ ID NO: 451069 - DNA, 51 bp, Homo sapiens
ccagaggagccacactctgacagaccggaacatgaacattttgcagtactg

SEQ ID NO: 451070 - DNA, 90 bp, Homo sapiens
gaaaaaggattttttatcagcgcctcaatctctactcgaagaagaaagagaagaaacgttttctcaggttcaaaccttgtactactcagc

SEQ ID NO: 451071 - DNA, 83 bp, Homo sapiens
ctggaaacaatggcatttacagaaagagtcaacagcagtggcaacaggctaactcaggtgagatggagccgctatagtcctga

SEQ ID NO: 451072 - DNA, 100 bp, Homo sapiens
gtaaaccacagactacgagggagtttgacagctattaaaaccagggctccacagttaggagggtcttgctacgtacgttgcccaggttggaatgcagtgg

SEQ ID NO: 451073 - DNA, 75 bp, Homo sapiens
tcagaagtgtggctgccatccaccccagcctggagatccccaattgcaacacctgctcggtataccgtgactttg

SEQ ID NO: 451074 - DNA, 100 bp, Homo sapiens
aggtgaataatgctacagcacgtgtaatgaccaataagaagatggtcacaccatatgcaaatgggatttcaaggatttggatttggagatggtggcttcc

SEQ ID NO: 451075 - DNA, 82 bp, Homo sapiens
cggaaaagggcactcgtctccgtgggtgtggcggagcgcgcggtgcatgggagtcgtcgcatggtggatgtcatggacgtga

SEQ ID NO: 451076 - DNA, 100 bp, Homo sapiens
ggaaatcaatggcacgcccatccgaaatgtgcccctggacgagaaatgtcctggccccgtacgcggtgccctcggagctggtgctggtggaggagatccc

SEQ ID NO: 451077 - DNA, 90 bp, Homo sapiens
aggtgaagaagatgaagatgatgatgaaggggaggaaggagaggttgtttacattcagagctctatcaataagaggaatacatattacag

SEQ ID NO: 451078 - DNA, 51 bp, Homo sapiens
ctcgcctcccggccgagctgacgagctccttaataagcatttatagtcagt

SEQ ID NO: 451079 - DNA, 50 bp, Homo sapiens
gcatcatccgctatgcaattggggttgatgctatgaaactgggagtaaag

SEQ ID NO: 451080 - DNA, 90 bp, Homo sapiens
cggacggggccctgacacggccaccctactgcctggaggccggggagccgacgcctgtaaaacgatgtttgcagaaatggaaatcattgg

SEQ ID NO: 451081 - DNA, 83 bp, Homo sapiens
tcctgccggcgctgctgagtttcttcatctacaacccgcgcttctggccgcgggaaggagagctagcttttgcacagcatcag

SEQ ID NO: 451082 - DNA, 83 bp, Homo sapiens
tggactccttcggcagtccacccaccgccgccgcctcccagatccagctatgggacacagcaggacaagaacgattcagaaag

SEQ ID NO: 451083 - DNA, 76 bp, Homo sapiens
ctccttcctgggagcctgggcgcagagtcactggaactggaggacccgtcttctgggctgggtgtgaccaagcagg

SEQ ID NO: 451084 - DNA, 75 bp, Homo sapiens
acgacatgtcaatctatctagccttgttcctagcctttgtcgtacacagactttactaaaagagtacaaagaaag

SEQ ID NO: 451085 - DNA, 82 bp, Homo sapiens
gtggcttcagcaactaccgtggcatcctgaactggtgtgtggtgatgctgctggtactcctggttaatcaacagcttcgtca

SEQ ID NO: 451086 - DNA, 100 bp, Homo sapiens
tcgcggtggcgatgctcttcttggaaaaccagatccagaaactggaggagtcccgctcgaagctagagcttagaaaccaagatagccaagtggaacctgc

SEQ ID NO: 451087 - DNA, 98 bp, Homo sapiens
agtcgccccctacccgcttctcgtagtcctgggagcacagcagaagtacaatgcagatcttcgtgaagactctgactggtaagaccatcaccctcgag

SEQ ID NO: 451088 - DNA, 90 bp, Homo sapiens
ggcgggccagggccgcactccggagactcgcggttgctacgcgcaccatggctggagatggaaaatctcaaatgggaggtggatcagaaa

SEQ ID NO: 451089 - DNA, 120 bp, Homo sapiens
actgctggcctataatacaacctcccacaccgaccaatcctcacgattgagtgtcaaagaaggtccgtaaaagccctgggctcagccagagcagggcagaggatgacgggatgaccagct

SEQ ID NO: 451090 - DNA, 95 bp, Homo sapiens
agaagaccaagtacctgcagatcctgacctctctgatgagatggatcggaaggagtcaagactgagaacaacgatcatattaatttgaaggtggc

SEQ ID NO: 451091 - DNA, 82 bp, Homo sapiens
cagagtggcatgcacctgactttgcctgatgcccatgatgcagactctggtttggtgcacctcgatttggaggaagtagggc

SEQ ID NO: 451092 - DNA, 100 bp, Homo sapiens
gtgagaagatgtatgaaaattcctactggacaagaatatgctgccaaaattatcaacaccaaaaagctttctgctagggttgttgacctcctgtactgga

SEQ ID NO: 451093 - DNA, 75 bp, Homo sapiens
cacatggagcacagaaatcaatgttagcagatagccagcccatacaagatcgtgagtttatattgtcagaagatt

SEQ ID NO: 451094 - DNA, 100 bp, Homo sapiens
gaacttcagcaccctggctgagaagatagcccggagaccatcggcaggcgagtggctgtgggactcgggtcctgcctcgccatcctcatcctggcaatct

SEQ ID NO: 451095 - DNA, 76 bp, Homo sapiens
acactatggcgctgaaacggattaataagtcagcagataagcagagagccctagaagaaaccaaagcctacaccac

SEQ ID NO: 451096 - DNA, 50 bp, Homo sapiens
tggcccggaaacaggaggacggtaacaagatgctcaactatagtgctccc

SEQ ID NO: 451097 - DNA, 99 bp, Homo sapiens
cactccccccctttattaccctttgtgtcatcctccacagctccagggaaggcactcaaaagtggggggcaggaaaggatttgaatttgttgaaatgag

SEQ ID NO: 451098 - DNA, 75 bp, Homo sapiens
cagggcaaggaaactggccacaatagccggatcgagctgggagatgtgacaccacacaatattaaacagttgaaa

SEQ ID NO: 451099 - DNA, 75 bp, Homo sapiens
caaactctggaaaaaaacttggaaatcctggctgacattgacttctccactgcaaccatcgagttcattgtctcc

SEQ ID NO: 451100 - DNA, 98 bp, Homo sapiens
tattaaccacttaacctctcagaactgaacaaagacaacattgttcctggaacgccctctttttaaaaaagtactatactggcaattgctggagaaga

SEQ ID NO: 451101 - DNA, 100 bp, Homo sapiens
tgaaaatcaagtagtgtttgccagagttgattgtgatcagcactatatcgtagtaaagtgttatcccgttggctggctggcttaccattgcaacttgctc

SEQ ID NO: 451102 - DNA, 98 bp, Homo sapiens
gaacggcggcgacaagggtgttcccgaactagagtgggtaactactccagacccccagcgtatagtggggtgcccagtgcaagctacagcggcccagg

SEQ ID NO: 451103 - DNA, 100 bp, Homo sapiens
agatccattggtaaattgatcaggatttttggcctaccctccaaagaaaagttggaagctgaaggtgttcctgaagtatctgaaaaatatgaaattagct

SEQ ID NO: 451104 - DNA, 96 bp, Homo sapiens
gcggaagccggcatgctggagaagctggagttcgaggacgaagaaagtcctatgagtttgaagatttactgcagtcttcctctgagagcagcaggg

SEQ ID NO: 451105 - DNA, 51 bp, Homo sapiens
tggagcaggcagcatcctcaaatggaagtgagtgatggattggaactgaga

SEQ ID NO: 451106 - DNA, 82 bp, Homo sapiens
ccctcacggagctgggcgacgagctgaccctgggagacatcgacgcctggagcattggtaagcgtcacactgccaaagtgag

SEQ ID NO: 451107 - DNA, 98 bp, Homo sapiens
tcgtttggaggcactggactacttacaaaaatggtttattcagtcaccatgaagctgctgctgctgcacccggccttccagagctgcctcctgctgac

SEQ ID NO: 451108 - DNA, 100 bp, Homo sapiens
acaggaccctacagaagatgctgaagctgaggacacacccaggaaaagactcaggacggacaagcacagtcttcggaagtgtggagacaatcaatgatgg

SEQ ID NO: 451109 - DNA, 100 bp, Homo sapiens
ctgaagaaacgagtggatgactatgtcagaagacatttggacagagctccggcagaaagcaggccatttgggacccttcctcccaggcccccagggcagg

SEQ ID NO: 451110 - DNA, 89 bp, Homo sapiens
tccagcatgactcatccccgggagtgttgaattcagaaacacgagttgatctgaaatttatgtacctggatcctccaagagatcatcac

SEQ ID NO: 451111 - DNA, 100 bp, Homo sapiens
cccacctcccacccagacctgggatggggaggcagtgggaggaaacagttcttccccaatggagaggccatctgcacgggctcggatgacgcttcctgcc

SEQ ID NO: 451112 - DNA, 83 bp, Homo sapiens
cgcgaatatcgtcatcgttagaaggaggctttcgagctacccttggatgattgtgaagtgattgaaactgcagcagcgtccga

SEQ ID NO: 451113 - DNA, 98 bp, Homo sapiens
actataagatcctggggctccagttcaagctgtttgcctgtgagctgtcccccgaggcagcctatgatgtgctgagcgtcgccgacatgtacctgctg

SEQ ID NO: 451114 - DNA, 75 bp, Homo sapiens
gcagctgatccaggaagcctgtcggagctgcctggagcagataaggagggttcctgcccccaggtgaacattaac

SEQ ID NO: 451115 - DNA, 75 bp, Homo sapiens
ccagcgacaggacccggcgccgggcactgagcaccgccaccatggggaagggggcctgggcagtttttaaaggga

SEQ ID NO: 451116 - DNA, 90 bp, Homo sapiens
gggccagggtcgtgccgccggcgggtcgggccgggcaatgcctcgcgggcgcaatgaatccgcggcaggaacctacaagcagcaattggc

SEQ ID NO: 451117 - DNA, 80 bp, Homo sapiens
aagctgagcttgccgcacaaaaagctagagaggtaatttcatctgtgccaaagcctccagaggacaagccagaagatgta

SEQ ID NO: 451118 - DNA, 99 bp, Homo sapiens
ctcagcctctcaatcccagtctcatgcttccagcctggataatgattgagccacctgtccaggtgttggagagcacaatggctgaacaagtccttcctc

SEQ ID NO: 451119 - DNA, 75 bp, Homo sapiens
ttggtgaagagacttacagatgcaggtattgttgcagcatctggcagtgagactgaggatgaggacagcatggac

SEQ ID NO: 451120 - DNA, 96 bp, Homo sapiens
ggctccgggctgagcttcctggagaagaggaaggacctcagcagccatgtcgaagccccatagtgaagccgggactgccttcattcagacccagca

SEQ ID NO: 451121 - DNA, 100 bp, Homo sapiens
ctttggatcctggtggctatttcattattaatggatcagaaaagggcattttgtcagtgatgctgatctttgccttcttccaggaacttgtaatagctgg

SEQ ID NO: 451122 - DNA, 96 bp, Homo sapiens
aattaaggatggcaaaatggttatgatatcagttttagagaatgtggcgtggagaaattctcaaggaaagagtaaaatgctggtgatgtgctgagg

SEQ ID NO: 451123 - DNA, 75 bp, Homo sapiens
acactggaaaactggatgctgcagacactgaacgaggagccagtgaccaagatcactccatggatgaaatgacag

SEQ ID NO: 451124 - DNA, 100 bp, Homo sapiens
ctgcacatcttgttttccctaacatcaagaatggaaggagaaaacattttctatttggcagttgaagatatagaaacagacacggagcttctgattggct

SEQ ID NO: 451125 - DNA, 87 bp, Homo sapiens
gcgccccgcgcctgccgctgccctacggcttctccgccatgcaaggctggcgcgtctccatggaggcataatcaccagcaacacccg

SEQ ID NO: 451126 - DNA, 101 bp, Homo sapiens
ggacaccaagatgcggatccgggcctttccggattgtgcagactggtgcttaaaatggaagtcgatattaatggagagtctagaagtaccctgaccacctt

SEQ ID NO: 451127 - DNA, 82 bp, Homo sapiens
agagaggctgcctcctgcagcccccatagcagcttccatgaggcaggctgaacctgcagatatgcgcccagagatatggatc

SEQ ID NO: 451128 - DNA, 98 bp, Homo sapiens
cgggtggatgagagttggccccgatatccgctcaggatgcctgctctgtgcctgtatctgagatcatcgccgttgaggaaacagacgttcacgggaaa

SEQ ID NO: 451129 - DNA, 83 bp, Homo sapiens
gaaggaggacgccggccagcagaagtggggctgaccctgtgaccagtgtggggaaaagggcgaccattgacgaggtggagacg

SEQ ID NO: 451130 - DNA, 87 bp, Homo sapiens
ctgcccacccaacgcgaagacgacctaatctgggagcctgcaagtgacaacagcctttgcggtccttagacagcttggcctggagga

SEQ ID NO: 451131 - DNA, 90 bp, Homo sapiens
atcgacttcggtttcagttggagttggaatttgtgcaatgtttagccaacccaaattaccttaatttttaagctatgaagaaggacatcc

SEQ ID NO: 451132 - DNA, 87 bp, Homo sapiens
atgtggagcctgctggggccacactgatccggtggacatcttcaataaggagctactgctaatccccatccacctggaggtgcattg

SEQ ID NO: 451133 - DNA, 100 bp, Homo sapiens
aatccccaatgttctgcgccgcattcgggagtctttctttcgcgtggtgccgcgttgtaggtggcctagatatccacaaaaagatggtggtagatgtgtg

SEQ ID NO: 451134 - DNA, 100 bp, Homo sapiens
ggatggaagaggctgatgctctcattgaatctctctgtcgtgacaagagatgagagtcctgccaaagcagaattttttcagcatttgattgaagaccgga

SEQ ID NO: 451135 - DNA, 75 bp, Homo sapiens
agcttgggagcaggaagatgtcgaatgaacttgagtcatcatcagatttgaaatatttaaagtggatacaaaact

SEQ ID NO: 451136 - DNA, 100 bp, Homo sapiens
cagcctgctaggggctgaattctgactcagccatttactaactgtgtgaccttagccctgcctgcacgattcactcaagatctgaagaccaaggaggcct

SEQ ID NO: 451137 - DNA, 83 bp, Homo sapiens
ctgaggagtccccgctgcttgtgacagcctcatcaagggtaagaaatgagcctagtcaccaagaactccacccccagaggaag

SEQ ID NO: 451138 - DNA, 100 bp, Homo sapiens
agtggcgaggaggctgtggccttgctggaggagctgcagagggaccttgatgggacatcctggaggctcaatgtacttctccagttcctacccttcctca

SEQ ID NO: 451139 - DNA, 98 bp, Homo sapiens
ctagacatcctctgcagccagaagaacaagaagtaggcattgaccccttgtccagttactctaacaagtctggaggctcccgtcttcgtcaggaagat

SEQ ID NO: 451140 - DNA, 52 bp, Homo sapiens
ccagaattttccagtgccctgaaaaataagcaaatttttcagaacataaaac

SEQ ID NO: 451141 - DNA, 75 bp, Homo sapiens
ggcaggagaattatgggagcgcatttccccaggacatccgggacagtggtgctaaacccgtcatggtctacatcc

SEQ ID NO: 451142 - DNA, 50 bp, Homo sapiens
cggagaggtgtttggtgcagaaggacaatcatatcctgattcagcccttc

SEQ ID NO: 451143 - DNA, 75 bp, Homo sapiens
ttcaccaaatactcaaggtcactacagaattagcccaagcagattcctcccaggagaaagccatgttcagttcga

SEQ ID NO: 451144 - DNA, 80 bp, Homo sapiens
gttctggacaagatgaagtctttctgccaggaaacccctcctggagtttccccaaagccatggacagccctagtcttcgt

SEQ ID NO: 451145 - DNA, 97 bp, Homo sapiens
ttccatttcaacatcttgaagccttatatgaagattttcaacaagagtgtgaacatcatgcacggacgacctggcccagttgcccttcctgaccatg

SEQ ID NO: 451146 - DNA, 50 bp, Homo sapiens
caagaagcgctttgaagtgaaaaaggatcccaagtatcctgtagagaact

SEQ ID NO: 451147 - DNA, 100 bp, Homo sapiens
cacgcgcagccccggcctctcggcctctgccggagaaacagagcggttctggtgaggttggaaggatgcagccacccggttgtcatgaaaggcctgtgtg

SEQ ID NO: 451148 - DNA, 82 bp, Homo sapiens
ttccttgtggagccggagctgggcgcggattcgccgaggcaccgaggcactcagaggagggtgcggggggcaatggcactgc

SEQ ID NO: 451149 - DNA, 100 bp, Homo sapiens
ctaaaaagaattaggaaggtccttcaggctaaaagagatgctaagagaatgcctgcaaaagaagtcaccattaatgtaacagatagcatccaacagatgg

SEQ ID NO: 451150 - DNA, 74 bp, Homo sapiens
ggagatctgagctacagaagtgcaggtacaggtttgcagattccgccagcagcacagcaagctctacagatgag

SEQ ID NO: 451151 - DNA, 80 bp, Homo sapiens
acacagagatggaagacatgattgctgaagcttcaaaagcagtggactgtcttttggattcaaagtgggcaaaggccaag

SEQ ID NO: 451152 - DNA, 90 bp, Homo sapiens
tatcggagaataatttctttctcgctgatcgcctaacttctactgacgaagcttggaagttgcagaagggaatcatcatccagggacgtg

SEQ ID NO: 451153 - DNA, 101 bp, Homo sapiens
atcgttcctggccagttcttagctgtggatcccaaagggcgagccgttatgattaccctcaatctgattggccctcgagctgtggatgtgctgtctgagtt

SEQ ID NO: 451154 - DNA, 100 bp, Homo sapiens
tacagtatttggagcagagaggaaaaaacggctatctataataggtggctttcctgggggaatgcctggtaattttcccggaggaatgcctggaatggga

SEQ ID NO: 451155 - DNA, 100 bp, Homo sapiens
atcaactcctacgaggacaaaagcaacgacttcgtatgtctataggatcgggtgaaccaccaaccggcaattgaaagctgcacagcctgaaattaccttt

SEQ ID NO: 451156 - DNA, 75 bp, Homo sapiens
gcttctccgaggacgccttcaactccacttttatctccaccatagatctgggcggaccccggcaaatacgccctg

SEQ ID NO: 451157 - DNA, 100 bp, Homo sapiens
ccaaaaatgtgcatactcacagagttagagagagggatggtggctgattcaccccaagagtggccgttcctaccacgaggagttcaaccctccaaaagag

SEQ ID NO: 451158 - DNA, 75 bp, Homo sapiens
gttggaagcagccgatccagcctgcggagcctgtggggcagtgccctgcaggagtcattaaatcaaaacttcatg

SEQ ID NO: 451159 - DNA, 95 bp, Homo sapiens
cctgcatgtactgggggattcgcagggaggatgtcgggacaccccggaagctgggaaatgctcaccatctgctacctggatatgctgatgaccag

SEQ ID NO: 451160 - DNA, 98 bp, Homo sapiens
cagagggacttccgcaacaaaccctatcctgtccgagcaaagattacctattaccagaacacactgacagaattgaatgatctggcacgggaccctcc

SEQ ID NO: 451161 - DNA, 129 bp, Homo sapiens
gccgagatgtctcgctccgtggccttagctgtgctcgcgctactctctctttctggcctggaggctatccagcgagaactacgatgacccgcacaaaacccctgcctccccagttgtccacatcagggg

SEQ ID NO: 451162 - DNA, 82 bp, Homo sapiens
atccttctagagacgtccacgggtgaatcctggttctttcgttggctacctggaaagaaaaagacagaagcttatttgccag

SEQ ID NO: 451163 - DNA, 82 bp, Homo sapiens
cgccaaccggctggacctgttcgagatcagccagccgaccgagggaacggcaggagcagctgatgggatatcggaagagagg

SEQ ID NO: 451164 - DNA, 75 bp, Homo sapiens
tccgtcaaggtcacaacagtgtctttctgatcaagagtcaagggtccagagaaggaggagaagttgagacaggcg

SEQ ID NO: 451165 - DNA, 90 bp, Homo sapiens
cccgccactccagaaatccaggagattgttgataaggaattactcaaggtgatgaggacaattgatgacagaatagtacatgaattaaac

SEQ ID NO: 451166 - DNA, 74 bp, Homo sapiens
cctagacctggaatcgcccaagtccctctactcgcgagccagagactgctgctactttgaaacgtacgatagag

SEQ ID NO: 451167 - DNA, 58 bp, Homo sapiens
cttggaatctcgagcgggaaaagtttcaccagtgatcattaaagaatgggcagcttac

SEQ ID NO: 451168 - DNA, 82 bp, Homo sapiens
tggaccactgctcttccatcctcaacaagtacgacggattttttatcaagcagaaatgcatcgaacaacgagaatcaagatc

SEQ ID NO: 451169 - DNA, 74 bp, Homo sapiens
cgctcgcatgagcacctcatacggctgcttctggagaagggtgatctggaccctctggcatctctcaaatcgct

SEQ ID NO: 451170 - DNA, 100 bp, Homo sapiens
tgaggtctgtcggagctgcccttcagtgtggcaggagctgtgaatccaactgtaaagttctttgttgtaaatacagactctctcagctcagtcaccaatg

SEQ ID NO: 451171 - DNA, 83 bp, Homo sapiens
gtccttgctggtgcatgcgtcgtcggcctctgggcagcaggccccttcacagatgtagtcactacaaatcttaaattgcgaaa

SEQ ID NO: 451172 - DNA, 75 bp, Homo sapiens
tgatctgcccatcttgttactccctagcagtgtggtaagtaaattcaagatggaggcgctttcctactgattatg

SEQ ID NO: 451173 - DNA, 100 bp, Homo sapiens
agatccggatgctcatccataaaactgaagatgtgaatactctgcttaatcttctccatacagagctggctaaacagttggcagacacaatggttctacc

SEQ ID NO: 451174 - DNA, 82 bp, Homo sapiens
tttgtgtatgaagctcaagatgtggggagtggcagagagtatgcattaaaggaccttctggaccctgcacggtggcggatgc

SEQ ID NO: 451175 - DNA, 100 bp, Homo sapiens
accagtcgtgcatgttcttggtgaagtcggccagcctgagcaagcggaggacctacgccggcctgggtgctggagaatctggtaaaagcaccattgtgaa

SEQ ID NO: 451176 - DNA, 100 bp, Homo sapiens
ctggcctataatacaacctcccacaccgaccaatcctcacgattgagtgtcaaagaaggtcttatatccagatggccaggctcagatgattcaccccaag

SEQ ID NO: 451177 - DNA, 90 bp, Homo sapiens
tgctgcaccgcggcgccgacatcaattacgccaatgtggacggactcactgccctgcaccagatgtgtatatctcatgattgatatggag

SEQ ID NO: 451178 - DNA, 82 bp, Homo sapiens
tttaaccgtgaccggaggcctgtgcacctggatcaggcagccttcaggactttgggagaggaacgaagggcatcctacgact

SEQ ID NO: 451179 - DNA, 75 bp, Homo sapiens
ctgggtgctatgggtgatcattccaagagcagttgtgaaaaacttcaggacaaaaatgtttcatttaaggacttg

SEQ ID NO: 451180 - DNA, 75 bp, Homo sapiens
cagaaattgccggtctgggagttgggggcaaggagaagatcctgtgccggtggtggtgtgcacattgagccccgg

SEQ ID NO: 451181 - DNA, 100 bp, Homo sapiens
tgagcctcaaaatgaagatggcacatggcccaggcagaccttgcagtcaaaaaatacatgctacaggatttaactatcagaatgaagatgaaaaagtcac

SEQ ID NO: 451182 - DNA, 88 bp, Homo sapiens
ctcactgaaaattggtattgttggattgccaaatgttgggagtccatagaggccactgtattctattgaagaacatgtctaacagtaa

SEQ ID NO: 451183 - DNA, 75 bp, Homo sapiens
ggcgccggcggccctgacagcccccacctcgcaagagcagccgcggcgccacttggtgggtacgggcacctcgct

SEQ ID NO: 451184 - DNA, 80 bp, Homo sapiens
gcgcgctggcgggcgaggagcggcggcggtggcggccgctggtgcctccggagccagcgtggtggccatagacaacaaga

SEQ ID NO: 451185 - DNA, 97 bp, Homo sapiens
gagcccctccccaccttttccggggaagccctggtcggagcgagccggaagaggaagtagtcccacctcgtcctccacttcctcggtcctatgactt

SEQ ID NO: 451186 - DNA, 100 bp, Homo sapiens
gattcgtggtgaaggtccggggcttgccctggtcttgctcggccgatgaagtgcagaggtttttttctgagcaaaatatgctgtgaattccatcaagaag

SEQ ID NO: 451187 - DNA, 100 bp, Homo sapiens
gaaatatggacagacttcttagacttggaggaggtatgcctggactgggccagaggtaccaatcttgggaaaaagaagcaacacatttgtcatataccag

SEQ ID NO: 451188 - DNA, 100 bp, Homo sapiens
ctggaccccagcaaagtggaagttaaggatgtagggtgggccaggagatagaagtaagacctggtattgtttccaaagatagtgaaggaaaactcatgtg

SEQ ID NO: 451189 - DNA, 100 bp, Homo sapiens
cttgatgtgcgcggagagcaatcgccgggacagctgcaagggaacactgactatgccaaatggagactacattgaaggttattttagtggagaatgggga

SEQ ID NO: 451190 - DNA, 83 bp, Homo sapiens
ctcgctcggagcttcgctcggaagggtctttgttccctgcagccctcccacgctgtttgcagacaaggtcccaaagacagcag

SEQ ID NO: 451191 - DNA, 90 bp, Homo sapiens
cagccttagactatttttcaaacattcgccgcaggttgctggtgtccctagattccggtttgggccacctgaagatatgccacaaacaag

SEQ ID NO: 451192 - DNA, 78 bp, Homo sapiens
ggccccaggtgtaagcgcagaaagcaggcgaacccgcggcgcaataacggtgaaagaacttgtcctggacaacagtcg

SEQ ID NO: 451193 - DNA, 95 bp, Homo sapiens
agcttgagatgctaggaagacttgggagcaatttctacgggagaaggttaaagtcaatggcaaaactggaaatctcgggaatgttgttcacattg

SEQ ID NO: 451194 - DNA, 75 bp, Homo sapiens
gtggtcttcaaatctctcattacaactcatcatttgatggtgtatggaaatgagttcacacaaaagatgttggac

SEQ ID NO: 451195 - DNA, 83 bp, Homo sapiens
acaacctctcctcttcgtctccgccatcagctcggcagtcgcgaagcagcaaccatggtggacgacatccttggagaaggcag

SEQ ID NO: 451196 - DNA, 82 bp, Homo sapiens
caccggctgcgccagcggcgccgggagcgcatcgagtccctgattggagcaaactctgcctcaagggctacgtcaaccacag

SEQ ID NO: 451197 - DNA, 100 bp, Homo sapiens
aacactaacggaaatgaactattccaaatatggtgccaagatttgcctgcaatggataacccagtgtttttggaattacttagattggatagaaatctgc

SEQ ID NO: 451198 - DNA, 75 bp, Homo sapiens
ggaggaagatcacacctacgagggcctgctatggtgtgctgcggttcatcatggagagtggggccaaaggctgcg

SEQ ID NO: 451199 - DNA, 100 bp, Homo sapiens
gtcaaagggtgatggaggaggaggggaacacccagccccagaaacagggggaagagacacggcaggcctgggtggcaaaggaggcccttaccggctggat

SEQ ID NO: 451200 - DNA, 98 bp, Homo sapiens
taccaccaatgggaacatgcacagtgaacagctctgcgctttttgttactgtggggaaaaaagttccttaggacaaggagacttaaaacaattcagaa

SEQ ID NO: 451201 - DNA, 82 bp, Homo sapiens
gtgacccgggtgccgaggagcgggaagagttgctgggtttggtgccctggttgtcagatgttggaaagcagtaggacggaac

SEQ ID NO: 451202 - DNA, 100 bp, Homo sapiens
ctgacaacgtggatcgttgttttgaaacgtgacttaagagattaaaattaatttggttgctgttggttctgaacaaataatgagttcttttatttgaggt

SEQ ID NO: 451203 - DNA, 100 bp, Homo sapiens
ggaccgggccgcgcacgccgcctcaggctgtgccttcctcacctactgtgccagggattccgccatcaaagctcagactgccctgcacgagcagaagacc

SEQ ID NO: 451204 - DNA, 82 bp, Homo sapiens
ttagctgtgctcgcgctactctctctttctggcctggaggctatccagcgttccccctaaaggactcaaaacgtctaatcca

SEQ ID NO: 451205 - DNA, 129 bp, Homo sapiens
cctgcattggacccagctattgctgcagcatttgccaaggagacatccctcttagaatacagattctgttcatcttgctctgaaattaaataattctgaactcatggggagaaaactcagagtcatgcg

SEQ ID NO: 451206 - DNA, 75 bp, Homo sapiens
ctcggagtgtactccgcctgcaagtaactctcgaagtgataaaagctgtttctttgtgaaatatgggcccgaaaa

SEQ ID NO: 451207 - DNA, 99 bp, Homo sapiens
gcaggaatgatcctgggatggaaattttttgatcatgcggcacatcttgggggagctctttttggaatgaattctgatgtgaaactaacagtctgtgag

SEQ ID NO: 451208 - DNA, 100 bp, Homo sapiens
ggaacaggaggaaaccattcagagtttcagaaacaactctccaagttccatttccaaggaaagtcttaaccatttgtcccttctggcgtaccctctttca

SEQ ID NO: 451209 - DNA, 97 bp, Homo sapiens
aatgtgccgtgatgtatgtgaacagttaattggccttggtcctcacagctccaaaaagaaacaggatctcgataagctctatgagctgaagtccaaa

SEQ ID NO: 451210 - DNA, 75 bp, Homo sapiens
ccactttcgccagcccgtgccgcgagcgcggcctgcaggaggttcctgcacttggccatcatccatgaagaaaag

SEQ ID NO: 451211 - DNA, 90 bp, Homo sapiens
gaaatttgtgctcaaaacccccaaggtggtgaagaaggtgaagtccatgcagatgttccacatgcccatcacttcagccatgcaaggaga

SEQ ID NO: 451212 - DNA, 75 bp, Homo sapiens
gcgcgaaggaaatctggccgccgccgccgcgagcgctcccggtactccaaagattcaggtttactcacgtcatcc

SEQ ID NO: 451213 - DNA, 99 bp, Homo sapiens
cttctaagtttttggcaccatatactactttttccagaattcatacaaagagtatgctgataggtcttgctggctacctgagtggatatgatggtacct

SEQ ID NO: 451214 - DNA, 90 bp, Homo sapiens
cagcggcctggggacccagcaaggatcagtacaagttctgctacgaggtggccctggaatacttgaattctggctgatggtgtaaacagc

SEQ ID NO: 451215 - DNA, 82 bp, Homo sapiens
caatgtccgcatcgcaaccaccgccctggccatctaccatgtggttggagcaaaacgtcccactcactggaggcacctgagg

SEQ ID NO: 451216 - DNA, 100 bp, Homo sapiens
gggtgtatcttgagaactggctgccagtctcctatgtcccctattatctcccctgcccagagatcttacacttgaatccagacacagaactgaaaaggta

SEQ ID NO: 451217 - DNA, 99 bp, Homo sapiens
actttaaacttatttacagatatgcgtttgactttgcacggagcattggggagtcagcaatgtccgttgtgttaaatcagctgctgcccatgattaagc

SEQ ID NO: 451218 - DNA, 100 bp, Homo sapiens
gtcttcagttcttacaagttcaaccaccttgtaccaaggtacaatgactcttcttgcttttcacctaagttgaataagcaccctgtgcactttaatctcc

SEQ ID NO: 451219 - DNA, 100 bp, Homo sapiens
agcatggccctcaccaccctgaaatggccaagaaacttagccagatggaccaggtgatccaggtgaggcattcactctttggggaagtgaggaagctcat

SEQ ID NO: 451220 - DNA, 100 bp, Homo sapiens
agccagcattaatgaacttgatgttctccataagtttacccctttacattgggcagcacattctggaagtttggagttgttgacctcctgtactggagag

SEQ ID NO: 451221 - DNA, 96 bp, Homo sapiens
catcatggtgttaaccagctaaagtttgctcgaagccttcagtccgttgcagaggagcaatatgtcttcattcatgatacactggttgaggccata

SEQ ID NO: 451222 - DNA, 100 bp, Homo sapiens
ggaagccgactgctgcctggtctgcaaagaagtcctttcaagtctctaggactggactcttcctaagcaagtccgactactcgaaatggcgtccgcctct

SEQ ID NO: 451223 - DNA, 100 bp, Homo sapiens
cccaagtgcattgcctttggaaacgagtgtgtagcccacaatgccctggagtgtgcacgagccatctacgcctacgccctgcaggtgttccccagcaaga

SEQ ID NO: 451224 - DNA, 74 bp, Homo sapiens
ccttggagagcccagagcgacccttcctggccatcctgggcggatattgtactccaagatacttggattacgaa

SEQ ID NO: 451225 - DNA, 75 bp, Homo sapiens
cggtgattgaggacaagaccatcgagctcatgaatggcttattcagaagagcataaaggtatgccctgtggtttc

SEQ ID NO: 451226 - DNA, 100 bp, Homo sapiens
agaagatctggcaaaagcaattcagatggcccaagaacaggctacagatactgaaattttggtatttaaaccatgtcagagctgcctcaccacaggacct

SEQ ID NO: 451227 - DNA, 75 bp, Homo sapiens
gtgatcgtgctggggaccggtctcaccgaatgggtaccacagaccatgtcatcgtcctggcgtccacgaaccgag

SEQ ID NO: 451228 - DNA, 98 bp, Homo sapiens
aacctgaaaaattcaagaagttgaaaaacgcttttcacgtcacctggagagatgcacaggcggcaaagatctgcaacaacatgctgttagctattagt

SEQ ID NO: 451229 - DNA, 100 bp, Homo sapiens
ctggaaacttcgaaaagttggagataaaattctcggagatctgagctacagaagtgcagaaatgtgtgttctgcgaatgactcgagctagacgttcccag

SEQ ID NO: 451230 - DNA, 100 bp, Homo sapiens
ccctagcaggaaacaaagtcaagcgaagagagttgcttgaatcattaaacagagaggctatgaaagaaggtctgcggtgccgctcagactccgaggatga

SEQ ID NO: 451231 - DNA, 76 bp, Homo sapiens
aacaaaggatttgacaagactaaaaacacttctctcagaaacagaggggccacctacagatgctcctgcagtggac

SEQ ID NO: 451232 - DNA, 100 bp, Homo sapiens
ccgccgaagaagcatcgttaaagtctctcttcaccctgccgtcatgtctaagtcagaggttcacagctggagcaaagctgttgtttcacctgaggcagct

SEQ ID NO: 451233 - DNA, 97 bp, Homo sapiens
gtatgatcccactttcaaaggacccatttacaatagatagtcgtgcaagcactgcagtgttcccattattcgattctttggcagttggtgaaaatta

SEQ ID NO: 451234 - DNA, 90 bp, Homo sapiens
ctacacacaagaagcatccttaggagctctgcagaacctcacggccggaagtggaccagggtggaagcagaagaatggggtaaatttctt

SEQ ID NO: 451235 - DNA, 100 bp, Homo sapiens
tttgagattgacgcggtgaactctgtccagttttcaaaccacacagatacttccgggtcatcctcctcctcctcctggccctgactctgctcctgctggc

SEQ ID NO: 451236 - DNA, 90 bp, Homo sapiens
cggtgaccacttttggaccaaaggcctgtgtgctgcagaacccccagaccatcatgtcagccatgtcatctgagcctcccccaccaccac

SEQ ID NO: 451237 - DNA, 90 bp, Homo sapiens
aagatcttcgagttcaaagagaccctcggaacgctggagtgcagtggcgagatctcgactcactgcaggctccgactccccagttcaagc

SEQ ID NO: 451238 - DNA, 83 bp, Homo sapiens
ctgcaatccgttcgggagaggctgctgccaaattgaaaaggcactctcagaactgtggtgcaggaacaggtattttccttttg

SEQ ID NO: 451239 - DNA, 107 bp, Homo sapiens
gaaggaacgaattgagctcagaaaagtcaaagcctctgtggacatgtttgatcagcttttgcaagcaggccttcccttcttcttggtggtgttcttgagtaagataa

SEQ ID NO: 451240 - DNA, 51 bp, Homo sapiens
ggctgttagaagaattcatgctcatccggaaaccaatagagccatggcgac

SEQ ID NO: 451241 - DNA, 74 bp, Homo sapiens
gcccgcccaaggtctctcgcgggcgggagaacggaaaactcccaacttcctggcccgatacttctccccacaag

SEQ ID NO: 451242 - DNA, 80 bp, Homo sapiens
ctgtgacgaagaacaagaagctccggaattctggtgagaagccctaccactgcaactgggacggctgcggctggaagttt

SEQ ID NO: 451243 - DNA, 100 bp, Homo sapiens
ccaggccgtggtcagccgcttcgacgagcaggacagaactgtaccgctctctttttggccagctccaccctcccgacgaaggccacggggattgacatcg

SEQ ID NO: 451244 - DNA, 50 bp, Homo sapiens
gccgacgccagccagagagcggcttattctgtgtatgatgaagagattgg

SEQ ID NO: 451245 - DNA, 100 bp, Homo sapiens
ttgatgatatgttatcaaaagtagagaaaatgaaaggagagcaagaatctcatagatttctctatgaatcatcatcaagaactctgggagaacttttgaa

SEQ ID NO: 451246 - DNA, 100 bp, Homo sapiens
catgagcagaggtgggcggggaggaggacgcggtggaatggggtcctggatgttctgaccaaagggaagcagcaggcattctttgtgccaccaagccgag

SEQ ID NO: 451247 - DNA, 98 bp, Homo sapiens
cagctggaagccgtggctgcgctctcttccctctgctgggcgtcctgttcttccagggttcgatacaagaggctgttttcctagcgtggcttgctgcc

SEQ ID NO: 451248 - DNA, 74 bp, Homo sapiens
gggaggccaaggcaggcagatcacgaggtacccctccacccagttcggcagcctcacgggactgcagtctctga

SEQ ID NO: 451249 - DNA, 75 bp, Homo sapiens
tggaggctggtgtcccggagcagtgcaaggttgtggcagcactgcctgaaggtatgagaccagattctaatcttt

SEQ ID NO: 451250 - DNA, 98 bp, Homo sapiens
gagccaatctactcctcctgggttatgctcaaggaagactagagatcattcaacaccagccagccagtctcctcattcctctaacccaagcagcctac

SEQ ID NO: 451251 - DNA, 82 bp, Homo sapiens
cacacagctgcttccattggccagtatgaagtggtgaaggagtgtgtgcagcgtgtgattctggagagtgacccccagcaag

SEQ ID NO: 451252 - DNA, 101 bp, Homo sapiens
ccccgagcaccgggccctctgcgacctggggccctgggtgaagtgctccgccgcccttgcctccagaatcatttgctgtttcaaatagagaactgtgcgat

SEQ ID NO: 451253 - DNA, 75 bp, Homo sapiens
gtccatggatttgtttctcattctcatatttcaccaataaaggtgtttaatgaacgctgccgaattcacttcaag

SEQ ID NO: 451254 - DNA, 76 bp, Homo sapiens
ggactgccataacattcccaaaggtaatgcgatggagataagcagcagccgctcttctaaaacattcaaaccaaag

SEQ ID NO: 451255 - DNA, 82 bp, Homo sapiens
aaggccagagtcacacacggtcctaagagctgggcaccaggaagcgaaggctgttccaggaccgtctgcagccctaacaaca

SEQ ID NO: 451256 - DNA, 89 bp, Homo sapiens
gctgccagtactgccggctacagaagtgcttcgaagtgggcatgtccaaggaaggctggaggacacacctaaacatgtggaatcccaat

SEQ ID NO: 451257 - DNA, 98 bp, Homo sapiens
ggaaatgaagggtattgccgctgttactgatatacctttagataagtatgctgtgcgcttcatccctcgggagaatggcgtttacctgattgacgtca

SEQ ID NO: 451258 - DNA, 50 bp, Homo sapiens
ctaaaatacgaaggtttctggctgggtatgatctcgtgaaaccttgagag

SEQ ID NO: 451259 - DNA, 82 bp, Homo sapiens
tttcgggggcacacgggggcggccttcacagttgttgatcacatagcatggtcatccactcacagcttaaaaaaatacaggg

SEQ ID NO: 451260 - DNA, 50 bp, Homo sapiens
gggggcttctaagctggttaacagtggacctgggtcccattaacctggac

SEQ ID NO: 451261 - DNA, 100 bp, Homo sapiens
acgagcccaagagcggcgaggaggcgctcatcatcccccccgacgccgtcgcggtggactgcaagctatctttcagatcattcagagcataaggatgggc

SEQ ID NO: 451262 - DNA, 50 bp, Homo sapiens
gaagaagattcgaaactggaggtgttttagagcactttgctgcaagggac

SEQ ID NO: 451263 - DNA, 83 bp, Homo sapiens
atctggtggtggatgtttccaatgagaaaatgtggtgacctggaagaagaactcaagaatgttactaacaatctgaaatctct

SEQ ID NO: 451264 - DNA, 97 bp, Homo sapiens
gccccggagaaccgcggggacagcagccggccagccggggggcactgcccgcccgggctctggcctcaggagtgcaagtagctgatgaagtatgtcg

SEQ ID NO: 451265 - DNA, 82 bp, Homo sapiens
tggtggattatggatcagatccaaatcagtgcttgaggaatccaaagccctcgtgcgctgcaacatgaagatggagctggag

SEQ ID NO: 451266 - DNA, 75 bp, Homo sapiens
ggagggcaatggccagagtgaaaatggctacagatgcacatgttgaatggagctcttctggcattgctgtttcct

SEQ ID NO: 451267 - DNA, 100 bp, Homo sapiens
ggcgtgagccaccgtgcctggctgaaggaactcgaatcatttatgacagaaagtttctgttggatcgtcgcaattctcccatggctcagaccccaccctg

SEQ ID NO: 451268 - DNA, 83 bp, Homo sapiens
gactctggtctaaaaagggtccagaaggatattcagtcggagctggtcattttcggagccagcatactaccgaagtagtcgga

SEQ ID NO: 451269 - DNA, 100 bp, Homo sapiens
acagtacactccagacatgcagaagcagtttgccgaagagcagcaagatgacctgatcagagccatcaagaaactaaaggcacttggcactggcttcggc

SEQ ID NO: 451270 - DNA, 100 bp, Homo sapiens
ttttttagcgtggcagagacgcttcacaggtttatgtagaagtttctaaaatgaaaatcaatgttactgaaattcctgacacattgcgtgaagatcaaat

SEQ ID NO: 451271 - DNA, 87 bp, Homo sapiens
tgggacttcccgtccgcggcgtggaggatgcacagtctctgacatcagctctcctgggaccctccaagagcactagtgtctagaagg

SEQ ID NO: 451272 - DNA, 83 bp, Homo sapiens
tcagcagatctattcagatggttctgatgaagtgaaacgtgccatgaacaaatcctttttgaggagctcaagcttgggaaaat

SEQ ID NO: 451273 - DNA, 100 bp, Homo sapiens
tatgccctgctgtagtcacaggagctgtagagaggaccccggtacatctgaaagccgggaaatggttgttcctactgaaggattggtctccatattaaag

SEQ ID NO: 451274 - DNA, 82 bp, Homo sapiens
agcgtgtcctccgtgggagcccgagatgcgacctaaagtcatgtggcacctccttcgaaggtacatggcatcccggctccat

SEQ ID NO: 451275 - DNA, 90 bp, Homo sapiens
tttttttctttacccatcactactgaatcaggtgtccaacacgctctcttgggctctgtatgagctctcccggcaccccgaagtccagac

SEQ ID NO: 451276 - DNA, 76 bp, Homo sapiens
caagaagactgatggagcaggcttgcaatattaaagtattgtcttctaagaactctgaagcaatgtcagacattga

SEQ ID NO: 451277 - DNA, 98 bp, Homo sapiens
atgcagattatatcgcatcctatggctcaaagaaagatgattattcgtcctcttgagttctggcgccttgactactgggaagatgacttgcggcgccg

SEQ ID NO: 451278 - DNA, 100 bp, Homo sapiens
aagcaatgtttgaacaaactcgaagaacagctgtggaaagaagttgcaaaacactggtgaagtaagaactctgctagagaggaaatggctgcttcatcat

SEQ ID NO: 451279 - DNA, 75 bp, Homo sapiens
agctggtcagaaatgattctctaagttcagttctgcaagcaagtatgctgctctctctgttgatggtgaagatga

SEQ ID NO: 451280 - DNA, 75 bp, Homo sapiens
ccgcctgctccaaactccaccagccccgtgtccttcattgccacgtacagtttacaccccgccactcctgagcac

SEQ ID NO: 451281 - DNA, 95 bp, Homo sapiens
gagtttccccggtgtgcctcggcagccttgcgctgctctaatggtccggacttccgtgtgtgaccagaagtcagcagcttcccagaagccccgaa

SEQ ID NO: 451282 - DNA, 100 bp, Homo sapiens
ccacactgcttcgatcctggacaggatgcaggcagatggcagcaggatgggtgtggaagcagtgatggcacttttggaggggaccccagataccccagcc

SEQ ID NO: 451283 - DNA, 98 bp, Homo sapiens
ctttgtgctggagaacatgctggggcttttgcggcaccgagggctcaggccagtggtctgtttttctggggggccaccaacacctcccgtgaatctac

SEQ ID NO: 451284 - DNA, 76 bp, Homo sapiens
tcctttactacagcagccaaaacgagaagaagaagaagtgttagaccagggcagaatggctaatgcggatctggtg

SEQ ID NO: 451285 - DNA, 74 bp, Homo sapiens
caacatgctagcacaggacagccacctgctgtcgggccagctgcccacgctgccactgcagagccccgccatgg

SEQ ID NO: 451286 - DNA, 100 bp, Homo sapiens
agcgcccggagcaagcggagctcccccaagagccggaaaggttaatttggagtggcccctggagtcagtttcctacaccatccgaggccccacccagcac

SEQ ID NO: 451287 - DNA, 75 bp, Homo sapiens
gaatatatcgcagtagttaaaaaactagatccaggttggaatcctcaggacatgaaagatcagatgtcaacttca

SEQ ID NO: 451288 - DNA, 75 bp, Homo sapiens
ggtctcacctgaggtgaaccttcgaccttggacttctcagcctccagaatggtttggacatatttgactcttttc

SEQ ID NO: 451289 - DNA, 58 bp, Homo sapiens
cagagactggcttcaggatgtagagggcctgcagcatccactcaaagctgagctcagg

SEQ ID NO: 451290 - DNA, 100 bp, Homo sapiens
tgtgcaagatgagcctcaagtgcttctgcattacagttttgaacgaagaatgtgatcagaactggtacaaggcagagcttaatggaaaagacggcttcat

SEQ ID NO: 451291 - DNA, 82 bp, Homo sapiens
gaaatagtaaccctgccaaatacatcagcttgtaggagacagaggctgcgctacatggtgaagcagttggagaatggggaga

SEQ ID NO: 451292 - DNA, 51 bp, Homo sapiens
ctcctgctcagtgtagcattaagtgagatggaagattttcgaggtatagca

SEQ ID NO: 451293 - DNA, 100 bp, Homo sapiens
ctgcccagcgttggcgaggagccccgggaggtgcttctgcggctgtacggagccatcttgcaggcttgcagggtggcccccgctccgacttcgacatggc

SEQ ID NO: 451294 - DNA, 89 bp, Homo sapiens
gttggatcaaccagctgacgccggagcagctcctaacccagggggggccctcagcctcttggccttgaacgggctgttcatcttgattc

SEQ ID NO: 451295 - DNA, 75 bp, Homo sapiens
gtctgcagcaccctccgcttcctctcctaggcgacgagacccagtggctaggtgtggatgaggtcaccattgtca

SEQ ID NO: 451296 - DNA, 104 bp, Homo sapiens
gtgttcggtccttccgaggaagctaaggccgcgttggggtgagaccctcacttcatccggaggaagagcaagcaggccctgagggactataagaaggttcagat

SEQ ID NO: 451297 - DNA, 50 bp, Homo sapiens
aacacagatgtccaagctgccaaggtggttatgctgcataccgctacgcc

SEQ ID NO: 451298 - DNA, 97 bp, Homo sapiens
agcacgccatgaaggcctcgggcacgtattgagcccaggcttctgtgggagagagtggagaagctggtgcccagacctggcagtggcagctcctcag

SEQ ID NO: 451299 - DNA, 100 bp, Homo sapiens
gtgatgatgaatctgcattggataatgataactacaagattctgcacaagtatgtggctttgtatgcaactcacttgatccgggagggtagctctgccca

SEQ ID NO: 451300 - DNA, 83 bp, Homo sapiens
gccgtgttgctgatcgcctgggtggttgttggcgtgtccctgcagcgaaggatcctggttggccatgacgctgatggagtacc

SEQ ID NO: 451301 - DNA, 100 bp, Homo sapiens
cgaggtcatccttggcatgggctacaaggaaaacgatattgatgatgttaagaagttcaaaccgggttacctggaagctactcttaattggtttagatta

SEQ ID NO: 451302 - DNA, 95 bp, Homo sapiens
ctgcggctgttgccatgtccgcaccgggacgatcatcctggggacctggtacatgatattgatgaccatgagatccctgctcagaacccccttcc

SEQ ID NO: 451303 - DNA, 101 bp, Homo sapiens
gagggctctcctgtctgccaccatcctgggttgacaattctacacaaggaggtgaatctggattgggaaagtcgacattaatcaactcattattcctcaca

SEQ ID NO: 451304 - DNA, 95 bp, Homo sapiens
ggcctccatgtcccacgtggacaagttcgtcaaagaccaagaagcgtcagtgtaaagttctttttgagtacattccacaaaatgaggatgaactg

SEQ ID NO: 451305 - DNA, 75 bp, Homo sapiens
tctgataggctacatcgcggcatgagatgaagctgtgacaggaattgaatgatctggcacgggaccctccagcac

SEQ ID NO: 451306 - DNA, 51 bp, Homo sapiens
agcaattgtcaccgcagactttgttaagttccaagatgagatgggattctc

SEQ ID NO: 451307 - DNA, 90 bp, Homo sapiens
gctgacccggagctggagcccgcgtcggggggagagcaggagccgcggccccagcaagcccagcccctggatgaaacactgaagaaagcc

SEQ ID NO: 451308 - DNA, 100 bp, Homo sapiens
ttctcaggactcattattttaacatttgggagaaacacagccagaagatttcagaacttatatttccacctcttccaatgtggcaccctttgcccagaaa

SEQ ID NO: 451309 - DNA, 100 bp, Homo sapiens
ttttggacaggaaagtgtaacatcagttacagagctggccagctaaactatgtggatccagctactggctatgtggtgctcacacagattgcccacttgc

SEQ ID NO: 451310 - DNA, 83 bp, Homo sapiens
gaaaaaggaagcagatccagaagatggaaaacctgtgatggataaagtcaagagctaatgtcaaaccccgaaattccacacca

SEQ ID NO: 451311 - DNA, 74 bp, Homo sapiens
gagcgatggcagcgaccgatatagctcgccaggtgttcagaatgaccgaagaagcatgccgaacacggagtcag

SEQ ID NO: 451312 - DNA, 90 bp, Homo sapiens
gcaagaaaaaccgacgaatctttacctacactgactctgatagatacaccaatttggaggagaaactggcgatggaatatgagaggagcc

SEQ ID NO: 451313 - DNA, 51 bp, Homo sapiens
aagcgagtccgcattgcccccaagaattggcagagggggtcgatttgggag

SEQ ID NO: 451314 - DNA, 50 bp, Homo sapiens
cttgtagatattttaacccaaaggtgtgggttgctgaccgaggaaataaa

SEQ ID NO: 451315 - DNA, 100 bp, Homo sapiens
ggcggatcatattccttcatctaccatggctcagccgggaactctgaacctcaataacgaggagtggagtcaacatatcaatggagcaagtcacagtcgt

SEQ ID NO: 451316 - DNA, 100 bp, Homo sapiens
cgctagatgggccgagctcctccctctgctccagcagtgccaagtggtcaggactgagcagggggaggaacatttaagctgatggaagtggaagtggaag

SEQ ID NO: 451317 - DNA, 74 bp, Homo sapiens
gaacaggaccccgtacgtcactaccactgtctctgctcacagtgccaagcgggaagagaggcagagcacttgtc

SEQ ID NO: 451318 - DNA, 98 bp, Homo sapiens
ggagaagagccaagagccgatccttagaaagaaaacgacgagaaccagagaggagacgactttcttctccaagagtattggaacagttgtgctgctgc

SEQ ID NO: 451319 - DNA, 75 bp, Homo sapiens
cggcacagagaaagggaccgctgtttgccctgcaattgtaactccaaaggcccattgctagaagactgggacata

SEQ ID NO: 451320 - DNA, 87 bp, Homo sapiens
aagctgcttatccaaattcttccctctttatgtttttcaagggacggatacaacgactagagttcacatgagagatcctaataatca

SEQ ID NO: 451321 - DNA, 100 bp, Homo sapiens
agtctctctccctgctctacaacgtgcctgcagtggccgaggagattcaggatgaagttgacgaagttatacggaagcgtctcctcattgatggagatgg

SEQ ID NO: 451322 - DNA, 85 bp, Homo sapiens
actacctgctgtacaccctcaacaaacaccagcgctttgggtgtcgtgaaaactacccctaaaagccaaaatgggaaaggaaaag

SEQ ID NO: 451323 - DNA, 95 bp, Homo sapiens
cgactccggagacagcccaaatatcctcggaagagcgctcccaggagaaacaagtgatctgtgaaaatggttcgctattcacttgacccggagaa

SEQ ID NO: 451324 - DNA, 100 bp, Homo sapiens
cgtttggagacacagattactgattcccagtcaatcacatcaggaattttcccaatgcttctgatgagcagaattcacagtcctcgatggaacattcgat

SEQ ID NO: 451325 - DNA, 101 bp, Homo sapiens
aatcatctttgacatcactttcttcttctttgttattgtcattctcttggccataatacaaggtctttgactttgaactgagcagccaggatatgaccacc

SEQ ID NO: 451326 - DNA, 74 bp, Homo sapiens
ccagacctagaactacccagagcaagaccacagctggtgaacagtccagggggaacttgaggttaagaacatgg

SEQ ID NO: 451327 - DNA, 82 bp, Homo sapiens
cagaaggacaaaaactctttgagtttcggagaggagtaaagaggttttaaaatcaaagatgggaaaatcggagaaaattgcc

SEQ ID NO: 451328 - DNA, 75 bp, Homo sapiens
gtgctgtggtgcagagctagttcctctccagctcagccgcgtagacacttgtgtaacaacaaggaatagcaccag

SEQ ID NO: 451329 - DNA, 75 bp, Homo sapiens
cggtcctgtttcgacagcgaacatgtcgcggcctgtcagatgctgtgtgctgtggacccacctggggttcatgga

SEQ ID NO: 451330 - DNA, 75 bp, Homo sapiens
gcggtcgcagtctccacggcgcaggcccacggtagcgcagccgctctgaggtgctggagaatctggtaaaagcac

SEQ ID NO: 451331 - DNA, 98 bp, Homo sapiens
tcagcgtgggccccgtatgctgccgtggatctgatcagctgaggcctgagacacaggaccaggcattcaactcagaaacagacagtttcaagctggcc

SEQ ID NO: 451332 - DNA, 83 bp, Homo sapiens
gactacatggatgccatggctgagaagtggaatgcagtagccctctgggcctgggatattgtggttgataactgtgccatctg

SEQ ID NO: 451333 - DNA, 75 bp, Homo sapiens
cagctgtacacactgcagcccaagcttcccatcacagacccaccgtgcggaggtcgtttgaattccaaagatgct

SEQ ID NO: 451334 - DNA, 75 bp, Homo sapiens
aagaaagttgctgaaaatgtcaaggcatgaaatccaagatgtgacatttgttgtgtcacctttcgaacacatcga

SEQ ID NO: 451335 - DNA, 75 bp, Homo sapiens
tagggaggacctcacttccccggggtgtaataatgttaactgagaaataagcgggttttgaaaacaaaaaaaaga

SEQ ID NO: 451336 - DNA, 83 bp, Homo sapiens
gtgacctgcttttcggttccgggtcttggccccgtccttacctcacaggatgatcacggacgtgcagctcgccatcttcgcca

SEQ ID NO: 451337 - DNA, 75 bp, Homo sapiens
caaccggttcctcccaggcggcaagggccggtcactccgcgcaagtttgggttcctgttttagaactgccaccta

SEQ ID NO: 451338 - DNA, 99 bp, Homo sapiens
gtaaagagtaccatattgatgaagaagtgggctttgctctgccaaatccacagatcctatagcaatggaactcagcgatgcaaatctgcaaacactaac

SEQ ID NO: 451339 - DNA, 90 bp, Homo sapiens
ctgacggtgaccaacttattagaaaagggcctttagatgttgttctggaaaaactttagtaatggatcaaaggaagaatgagagtattgt

SEQ ID NO: 451340 - DNA, 80 bp, Homo sapiens
ggcgagctcgcgatgagtggtctcggcaggctcttcgggaagggttcatctcagaagaagttgttggcacctgatatgtt

SEQ ID NO: 451341 - DNA, 100 bp, Homo sapiens
ctcaggacatcatctgcgacgtggggatgctacgtgtgccgcctggccattcaaactgtcaattttaggtccagaagtgtccaaaccacaagttctcaaa

SEQ ID NO: 451342 - DNA, 100 bp, Homo sapiens
ctgagccacagtgtgatcccagctttaaaggagatgcaggagaaaatacggcattgctagaatcaggaaacccaggcccaacggcaggtggatgcaagaa

SEQ ID NO: 451343 - DNA, 98 bp, Homo sapiens
tttcctccgcggggtaatggggggtcagagtgccggaccccagcacacagaagccgagacgcatgctcgaagacgaccttcagctcagtgacagtgag

SEQ ID NO: 451344 - DNA, 80 bp, Homo sapiens
tgctgctgtgtgcggtgctgctgagcttggcctcggcgtcctcgggcctatcactgtcccagcttctggatgaaatgcgg

SEQ ID NO: 451345 - DNA, 83 bp, Homo sapiens
cggttgctgagccgggagcgctgactggcccggctgggcagggtgagcgagtgctgtgctttcatgggcctcttctttatgaa

SEQ ID NO: 451346 - DNA, 100 bp, Homo sapiens
attcagatgtggtggaatatgccaaggaaaaactggagagcttcatcaaaaatagtgatagctttgataagtctcagaaatattccagtatatacaataa

SEQ ID NO: 451347 - DNA, 83 bp, Homo sapiens
ctggggttggacgctgccagtttgcacagcagcagttgatattcactgatggactccaaagaatcattaactcctggtagaga

SEQ ID NO: 451348 - DNA, 87 bp, Homo sapiens
tccgtgttcggtgaccgcagcactggggaaacgatccgctcccaaaacggctcccactccatgaggtatttcgacaccgccgtgtcc

SEQ ID NO: 451349 - DNA, 90 bp, Homo sapiens
aagcctttgaaagatgtcatagggttggcgtgcagtggtgtgatctcagctcattgcaacctctgcctcccggactcaagcaatcctccc

SEQ ID NO: 451350 - DNA, 75 bp, Homo sapiens
acgtttttatccatggatgacttgcttggttaaagctgatacattcctgtgggtcaactatgcaactaactcaga

SEQ ID NO: 451351 - DNA, 88 bp, Homo sapiens
ccgacttcgatgatcgtgtgtcggatgaggagaagagatcctgcagatcattcagctggacctagacctgaagtttaagaccaacatc

SEQ ID NO: 451352 - DNA, 100 bp, Homo sapiens
gattactctgcaacagctaaaggtcatgttctctttcgaggccggccgccgctgcccctcaggccctggaaccttcaccttccagacggcacagggaaat

SEQ ID NO: 451353 - DNA, 74 bp, Homo sapiens
aaagatgagatttacctgtgagatgtttcatcccaacagttgtgaactaaaggccgacaaagattatcacttta

SEQ ID NO: 451354 - DNA, 82 bp, Homo sapiens
ctttcacaataagagcagaggatggaacacttcagtgcattcaagttacccagcatgccacaatctgattgctgacctggat

SEQ ID NO: 451355 - DNA, 83 bp, Homo sapiens
ctcagactccatccgcgaatgcatctcctctcagagcagcgaccccaatgcctgaggaaacccagacccaagaccaaccgatg

SEQ ID NO: 451356 - DNA, 101 bp, Homo sapiens
ccgccgccgcctcggccgaccagggacctgcccgcctgcggctgctccgggtatcagtcagagccggatctctcattggctgttgcagcagggatcagacc

SEQ ID NO: 451357 - DNA, 90 bp, Homo sapiens
cacgcgtgacccgggccaagtacttcattcgagatgagtttctgagtgatcagcagctggactgtgccttggacctaatgaggcgcctgc

SEQ ID NO: 451358 - DNA, 74 bp, Homo sapiens
tcttcttggaaaaccagatccagaaactggaggagtcccgctcgaagctagattcattccacttaaaacctgaa

SEQ ID NO: 451359 - DNA, 75 bp, Homo sapiens
gacaagtgtcacagcctggttggaaaacccaagatatttatcattcagatccatccttttacaatccctgctatt

SEQ ID NO: 451360 - DNA, 98 bp, Homo sapiens
atgaccacaaacagccatcaagcctgtgggagctcggaggcctcagcctacctggatgagctgcgtttggctgtggcttggaaccgcgtggacattgc

SEQ ID NO: 451361 - DNA, 96 bp, Homo sapiens
cgggatcgtgaccgagaccgtgaccgagagcgtgaccgagagcgcgaatatcgtcatcgttagaaggaggaggtgcgccagtctgtaactcctgcc

SEQ ID NO: 451362 - DNA, 110 bp, Homo sapiens
cacggcacggcagccaccatggcgctcctgctgtgcttcgtgctcctgtgcggagtagtgggatccaactttactactgtcatggagggaattacagtaattctaccaac

SEQ ID NO: 451363 - DNA, 75 bp, Homo sapiens
cctgggcacagcaaatgctgaggactcagaccagtctctgcaagagagggcatcctggctgtttcacccgtggac

SEQ ID NO: 451364 - DNA, 82 bp, Homo sapiens
acggatcccaggaccctcttcgcgggcgattcgcgtagcctcagtaattgagctgaaagctgaggatcggagcaagtttctg

SEQ ID NO: 451365 - DNA, 82 bp, Homo sapiens
tctcgctcacacagcaaaactatgggcagaaaagaatctctgaccctctggtgggcagcatcgccacacagtacatgaccaa

SEQ ID NO: 451366 - DNA, 87 bp, Homo sapiens
agatctagaatcaactgagagagatgcttaaaaatcaccagttactttaatgagtttaccgacaagactgtgaaactttcgggatgg

SEQ ID NO: 451367 - DNA, 75 bp, Homo sapiens
gccaggctgtgtgagcaggagcccgctgctcttccccactcagagatcatgatgcagccgtccttttggatttct

SEQ ID NO: 451368 - DNA, 50 bp, Homo sapiens
tgcagctgcctcagttcttagcgcaggctattcaagatctctggcagtgg

SEQ ID NO: 451369 - DNA, 100 bp, Homo sapiens
gggcactggaagttgggacatacagtcaaaaatatcattattagccaggtattgttgcagcatctggcagtgagactgaggatgaggacagcatggacat

SEQ ID NO: 451370 - DNA, 83 bp, Homo sapiens
cgcccctcgcgtccggagtccccgtggccagatgaggacggggacttggttgccttttccagtgacgaggaattgacaatggc

SEQ ID NO: 451371 - DNA, 82 bp, Homo sapiens
aatgacaagagcttccgcggtgtcattctgacctcgctctggcaggctgccctgagcacgctcaaccccaaccccacggaca

SEQ ID NO: 451372 - DNA, 51 bp, Homo sapiens
gaaagtgtcattactgcagtggtccaagcatctcattttgaaggcctaatc

SEQ ID NO: 451373 - DNA, 75 bp, Homo sapiens
cgggcaaggatggtggaggcgagaacactgaggaggaagagttgggctgtggaaggacatcttcaccgtctccat

SEQ ID NO: 451374 - DNA, 83 bp, Homo sapiens
ggatcctgaccctaaaacctagtacccttactgttggagatctagtaatggtgaatggactgctttttcagctttcattaccc

SEQ ID NO: 451375 - DNA, 83 bp, Homo sapiens
gtgtggctcctcgagcaaaaatgaaccagcagcgtgggaggcgttttagaagcaaggtctcgctgtgttaccctggctggagt

SEQ ID NO: 451376 - DNA, 82 bp, Homo sapiens
gttcttgtttgtggatcgctgtgatcgtcacttggatttttagactctgaggagcagttggagctaatccacattatggaaa

SEQ ID NO: 451377 - DNA, 128 bp, Homo sapiens
cccacccagccccgccgtcgccccgccgcgccgcgctccaaccgcctcctcctcctcagtaacgcgggaaccagcacctatgacagaagatctgctagaagagcagtctgaagttttagctaaattag

SEQ ID NO: 451378 - DNA, 136 bp, Homo sapiens
ggacgggaaggcgggagacgagaagcctgaaaagtcgcagcgagctggagccgccggaggattttcctgttgaactggtcataattggaatagctttactacttctacagactccagcaagtcagcagaagccaat

SEQ ID NO: 451379 - DNA, 99 bp, Homo sapiens
cgtaagttggtgatcattgaaggagacttggaacgcacagaggaacgagctgagctggcagagtcgacacatgacggaagtgtgtatttttgggccact

SEQ ID NO: 451380 - DNA, 76 bp, Homo sapiens
aggagtggacattgctagcaatgagctcccaaagccatccaggagtacaagatcctcagcatgagagaattattac

SEQ ID NO: 451381 - DNA, 76 bp, Homo sapiens
ctgcacgacgatgaggtgacagtcacggtactccaaagattcaggtttactcacgtcatccagcagagaatggaaa

SEQ ID NO: 451382 - DNA, 74 bp, Homo sapiens
gagcgatggcatcggtcaaggtggccgtgagggtccggcccatgaatcgcaggagtcagagtcagaagcaaagg

SEQ ID NO: 451383 - DNA, 100 bp, Homo sapiens
cttgcttcctccctcaggtatgaagttaagatcgtaaaaaggaccttgtaaaactacaggcaggggaatatgtttctcttgggaaagtagaggcagcttt

SEQ ID NO: 451384 - DNA, 100 bp, Homo sapiens
gacagtggatgccgtacaagaaagaggaccgcagatgttcatggactgcagcccacaggccctgcccatcgcatcagaggacaccacggggcagcatgac

SEQ ID NO: 451385 - DNA, 100 bp, Homo sapiens
tggatttgcagcagctcatcagagactctgccgagaggacagctgggaagtggtggaaggactgaggggggagatgaattacacccaggagccaccagtt

SEQ ID NO: 451386 - DNA, 50 bp, Homo sapiens
gcctcctacgtttacctgtccatggggaggagccccagccccgcgacgag

SEQ ID NO: 451387 - DNA, 149 bp, Homo sapiens
cagcggatcgactaccatgtgggtgcccacaaaaattccacctctgagtcctcaactgctgaccccggggtcagaaagcataacccctactgtagaactaaatgcactgtgcatgaaacttggaaaaaaaccaatgtataagcctgttg

SEQ ID NO: 451388 - DNA, 100 bp, Homo sapiens
ttcaccctgccgtcatgtctaagtcagagtcagtcaagaacaatacccaagtgctcatcaactgccgcaacaataagaaactcctgggccgcgtgaaggc

SEQ ID NO: 451389 - DNA, 87 bp, Homo sapiens
aagacccaggagaagccgcccaaagaactggggcatggtctagtggcccagtcaggacgcggaaacactccctggaggttctgaccc

SEQ ID NO: 451390 - DNA, 100 bp, Homo sapiens
aaatactccagcctctctggggggaaagggtttcccgttaaccccaatactttaaaagaggtgatgcaggttctgaatgctgatgccattgttgtgaagc

SEQ ID NO: 451391 - DNA, 50 bp, Homo sapiens
gttgaagatgctgttgagcaaggccctgatccttcaccagctaggccgct

SEQ ID NO: 451392 - DNA, 74 bp, Homo sapiens
cggggcccgccatggctgcgtcggagctctacacaaaggtgaactactgagttcttcattatgtctgatggaga

SEQ ID NO: 451393 - DNA, 100 bp, Homo sapiens
cgacaagaagctcatgagcagcctgcccaacttctgcgggatcttcaaccacctcgagcggctgctggacgaaggtatggcccatctcctgtacgcttgg

SEQ ID NO: 451394 - DNA, 98 bp, Homo sapiens
cgtggaggtgctgaccgatgccggaggaccgactgtgattcctccaccacctcactctgctccttccctgttgccaatgtctcgctgactaagggtgg

SEQ ID NO: 451395 - DNA, 74 bp, Homo sapiens
cttctccaaaaagattcagcaggtggtgttcccactgatgaagagcaggcgactgggttggagagggagatcat

SEQ ID NO: 451396 - DNA, 102 bp, Homo sapiens
acgcccatgttttcagccagctgcacgatgaagacttcctcactagtctggtggccatcagcaagcccaggtctatgttactaaaagatgtaactgaactgc

SEQ ID NO: 451397 - DNA, 99 bp, Homo sapiens
aactagaaatgtgttcagaaattaaaggtccacagaaggagtctctagtgatccctgaaaagttccagcatattttgcgagtactcaacaccaacatcg

SEQ ID NO: 451398 - DNA, 83 bp, Homo sapiens
ccgctctctgaagaacctccgagtacgagacacatgcctcactcctgtcagcagttccaccttttcatggttgaggagcacat

SEQ ID NO: 451399 - DNA, 90 bp, Homo sapiens
ggacctttagcaaatacagtaatagatttttggaggatgatatgggagtataatgttgtgtgggctcgggatgagtttgaaggcctcttc

SEQ ID NO: 451400 - DNA, 75 bp, Homo sapiens
gagtttccccgcaagtctttcttgttataagtgagaaagatcagtctaaagaaaaggagaagaaagtgaaaaaaa

SEQ ID NO: 451401 - DNA, 100 bp, Homo sapiens
ccgggactatggccaccgactcgtgggccctggcggtggacgagcaggaagcggctgtcaagtcggttgctgatcagctctgtgccaagtatagcaagga

SEQ ID NO: 451402 - DNA, 98 bp, Homo sapiens
gcaggttcgcaagcgcataacccagaacgccaatctgaattgccaacgcaaagcaaagcgagcttccccagtattctcagtgacccagacccggattc

SEQ ID NO: 451403 - DNA, 75 bp, Homo sapiens
cgagaggtgttgaaagaggaagatgttcacattcttggtgccaccattgagaactccaggattgtcctgcagatc

SEQ ID NO: 451404 - DNA, 100 bp, Homo sapiens
ccgtattggcatggcagaggagatcaaacacatgttccacgtggcttgggtggacccagaagacccccacaaagaagtgagctcacaatgactcaagctg

SEQ ID NO: 451405 - DNA, 90 bp, Homo sapiens
caaagatacttcgttatttctaacaccactggctacaatgatcgtgctgtattggagagagaagtccatgagaaatgttttagatgaaga

SEQ ID NO: 451406 - DNA, 100 bp, Homo sapiens
cagccgctgttttgccggaggagcccctcaggcccattgtgttagtgccgggaggccactgtgtcagcaagctgagagggaaactgaagcaagatgtcgg

SEQ ID NO: 451407 - DNA, 100 bp, Homo sapiens
gccaaagatggggattcatacgacccctatgacttcagtgacacagaggaggaaatgcctcaaggcctgaagctgcccagcaggcattccaaggcctggg

SEQ ID NO: 451408 - DNA, 80 bp, Homo sapiens
acagaaccatcctgggctacaagacgctggccgcgggctccatcagcatggctgagtgtactaatggtcacttgatgtgc

SEQ ID NO: 451409 - DNA, 82 bp, Homo sapiens
ctgaggcagaagttcctagaagggtttgatgcctttttggaattactaaaatgtatgcaggctggagtggagtggcgcaatc

SEQ ID NO: 451410 - DNA, 100 bp, Homo sapiens
gtctgcttcaggaagaaagtgcctgccattcttatcatttctaagcaggttcatgccagcccagaacagagaatcagtccaagccttatgcatttgatcg

SEQ ID NO: 451411 - DNA, 85 bp, Homo sapiens
tggagcagaggaagctgaggaagttggagttgaacacttgttacgtcatgatgctatggactcctactacgactacatatgggat

SEQ ID NO: 451412 - DNA, 75 bp, Homo sapiens
accgtacagcaactatacgtctgtattggagtcattggaggcatctgtagaggcattgacatggagaagcggctg

SEQ ID NO: 451413 - DNA, 87 bp, Homo sapiens
gtggaacgaggacgcggactgcgaaggcaggcctccaccatggacagaggccaggccctgcccctcccaggcagcctggctccttct

SEQ ID NO: 451414 - DNA, 106 bp, Homo sapiens
gctgagagtgttaattctgctcctctcctgggcggcggggatgggaggattttttatcaagcagaaatgcatcgaacaacgagaatcaagatcactgagctaaatc

SEQ ID NO: 451415 - DNA, 83 bp, Homo sapiens
gaggaagctacacttttcaccaaggaactggtgctgcagcgagagttgatattcactgatggactccaaagaatcattaactc

SEQ ID NO: 451416 - DNA, 75 bp, Homo sapiens
cctgatgcccttcaggcagcactgcaggcagagcctggccagcagcttgaaatccatggcccaaaatgactctac

SEQ ID NO: 451417 - DNA, 100 bp, Homo sapiens
cagcccgtggtccttctccatattcgagcattcaacagaaggtgtcaaattgacagctctcaatgacagcagcctcgacttgtctatggacagtgataac

SEQ ID NO: 451418 - DNA, 90 bp, Homo sapiens
ggccggacatctactgggtcagcttcatcctcggcggcggtggccgctagctccaaggaagggaaatcctcattgacgattcaatttgtt

SEQ ID NO: 451419 - DNA, 76 bp, Homo sapiens
gttttacattggctgttttcctcacattcctcaagcagcatgttggcagataaattgaacatgactccagaagaag

SEQ ID NO: 451420 - DNA, 100 bp, Homo sapiens
tgatcacgcagctggctggcttcagtggaccacttaggcctgggggagcccatccaggaacatgcagtcccagcagaccaggctcctgagaagaactttc

SEQ ID NO: 451421 - DNA, 100 bp, Homo sapiens
ggggtgcatgttacgcagcggccagatgatgctggcacagggccttctgctgcatttcctgcccagaggtcggaagtctatgcgtcagtctacagctgag

SEQ ID NO: 451422 - DNA, 75 bp, Homo sapiens
gatcagaggcaaaaaattaaagcagcatttaagacctcctatggcaaggccacagagatgctggttcacaatgcc

SEQ ID NO: 451423 - DNA, 75 bp, Homo sapiens
gttgcggccagtcgccactgctgttcaagaagacgtggaagctgcgggctctgaaggaaggcaagacaagcatgc

SEQ ID NO: 451424 - DNA, 95 bp, Homo sapiens
tccccaccaccaccatctccatcacccaccaacaacaccacaataatccacagccaaggaaatttggtgagcggcctccacctaaacgacttact

SEQ ID NO: 451425 - DNA, 76 bp, Homo sapiens
gtatcatgctggccaagaagatcatcattaaggacggaggcacggtgatcataaggtccacagattattagatggc

SEQ ID NO: 451426 - DNA, 100 bp, Homo sapiens
gtggttgtgtggtcgcgtctcggaaaccggtagcgcttgcagcatgggccagacgggcccagccagcaccaagatgagtgccacgtcctggttcctggtg

SEQ ID NO: 451427 - DNA, 90 bp, Homo sapiens
ctgtgtggattcttcagaaagtgaacttggcattttagatctaattcaactctctatcaatatcagctcacatcattgaaaagataattt

SEQ ID NO: 451428 - DNA, 80 bp, Homo sapiens
caagaacccgggcctggtcctggacatcgttgagggtgactcgaaaagccctgtttcctggtgactctgagattgaccag

SEQ ID NO: 451429 - DNA, 90 bp, Homo sapiens
tcttggaaatgaatgatcctgaattgctgaaggaaacaactgaagcaaggaatgccttaattgaacaagattacaaggcagaggaagacc

SEQ ID NO: 451430 - DNA, 75 bp, Homo sapiens
tgctgccatctcctatgaagaatggaatgaccctcctgctgtgagtcctccctgctgctgtgtggacgacacgtg

SEQ ID NO: 451431 - DNA, 77 bp, Homo sapiens
gaatgacaaacaaccagctcttcaggacagtggtgattatcctcttaccatgcctggacctcagtggaaaaaatttc

SEQ ID NO: 451432 - DNA, 98 bp, Homo sapiens
ttgacagtgtcattttaaactgtcgaagtatacgagtaggaacactcttccggctgttaatagagcctgtaatttactgccaaatctgtcgaaaggga

SEQ ID NO: 451433 - DNA, 100 bp, Homo sapiens
gatggacataaccctctcctaggacatacatggcttatttcaaaacctttgtccctcagttccaggaggcagcatttgccaatggaaagctctaggaaac

SEQ ID NO: 451434 - DNA, 100 bp, Homo sapiens
cggctggaggcagccgaggagcggaggaaggtccagtggctcctggacaactatgagacggctgagggcgtgagtctgccacggagcaccctctactgcc

SEQ ID NO: 451435 - DNA, 99 bp, Homo sapiens
cggctgcgagctcctcaagaatctcgtgctcaccggtttctcccacatcgacctggtatcctccatgaaatgtgggatccttccaatttctcaagagtc

SEQ ID NO: 451436 - DNA, 75 bp, Homo sapiens
caccattgacatggtgatggctgctcagcctcgaaggtgttacagttcgagtgcctcaaacaaccacatatgttg

SEQ ID NO: 451437 - DNA, 82 bp, Homo sapiens
tcgccgagcgcacgccttgccgccgccccgcagggtgtttctgtggcctgggactggttagcaccaacaagtcctgctcgat

SEQ ID NO: 451438 - DNA, 101 bp, Homo sapiens
ggatgggctagtgttggacacactggcagtaatacggactcttgtagataagtacatcaggaacgtctctatcaagaatacaatttcagcaaggctgaggg

SEQ ID NO: 451439 - DNA, 75 bp, Homo sapiens
ctgcagccttctggtataccatcgtcaccatgacaacactaggcatgttggcagataaattgaacatgactccag

SEQ ID NO: 451440 - DNA, 101 bp, Homo sapiens
cccggacccgcggcgccggcctcttggagtcggagcttcgcgacggcagcggcaagaagatcatacctcactcctgttagggatgaagagtctgaatccca

SEQ ID NO: 451441 - DNA, 147 bp, Homo sapiens
ccggggcctgaggagcgggcacagggcaaggcggcggacggctgcgtcgcccgaggcgaggaggagcgctggcgagagaagaagaaggaggttcctgctgtgccagaaacccttaagaaaaagcgaaggaatttcgcagagctgaag

SEQ ID NO: 451442 - DNA, 95 bp, Homo sapiens
cgaagtggacatcacctgcagtcagtccagagctgcccacttaaagcttttcaagccaggccaagaagctgtgaagtaccagggtcctcgggact

SEQ ID NO: 451443 - DNA, 112 bp, Homo sapiens
cccgggaggaaggaacgaggcaaggagctaaagcagcgtgcgttcagccctggggcaagtgaaccggagcaaacgacttccgatccagtctgcgctgttgcggctcccgttt

SEQ ID NO: 451444 - DNA, 82 bp, Homo sapiens
cacctgggttctggtggacctctcggctttcctggtcagcagcgacttgattgctcatttagaaagtggatgtgtgggataa

SEQ ID NO: 451445 - DNA, 75 bp, Homo sapiens
tgcacccaccccttcgcctgcaccccagcagtacatcgtggtcactgtctctgaaatggaaaaggtgttctaaaa

SEQ ID NO: 451446 - DNA, 100 bp, Homo sapiens
ggacggagagagcacgagcccatcagatttctgcgccaggagatgaggggcggtagagccctggaatggagatgtccttgacgcctgggcagaggctgca

SEQ ID NO: 451447 - DNA, 100 bp, Homo sapiens
cgctgcctcctggagaccctgcgggggcgtgtaaaggtgatttgttcgccaagaaaagcacttttagtaaagcacagatgttaatctagatcatggaaaa

SEQ ID NO: 451448 - DNA, 90 bp, Homo sapiens
gagcgactaactcctgcgcccctgagggctctaatcaatcgtggggttaacctggatcccctgggcaagtggtcaaagactggactagtg

SEQ ID NO: 451449 - DNA, 83 bp, Homo sapiens
cgtcccggccttcatcgacatcagtgaagaagatcagtagaccaaattttggtacaattgaatcacactgcagcagaattcac

SEQ ID NO: 451450 - DNA, 75 bp, Homo sapiens
cagcttcgagcttgtgccaaataccacatggaaatgaattctaaggtatctctcctctttgtcacaacctctttg

SEQ ID NO: 451451 - DNA, 75 bp, Homo sapiens
gtgcagagtgtggagaagatcctgctgtcggtggtgagcatgctggcagacctgcgccccctggacatcctggcg

SEQ ID NO: 451452 - DNA, 96 bp, Homo sapiens
ggaagatggcgccgccggtggcagagagggggctaaagagcgtcgtgtggcagactgtcgcctggttgggcccggaaatgggacgtcgcgctttct

SEQ ID NO: 451453 - DNA, 73 bp, Homo sapiens
tacatctcaagctcatattttgaagtgtttacgggttcaccaggctggtttaacctgcgattattcagaactt

SEQ ID NO: 451454 - DNA, 80 bp, Homo sapiens
ggaaacgcccgcgatgggaactttctgcagatcatgacatgtattcctctgagaaaccttggacagcagattttggttta

SEQ ID NO: 451455 - DNA, 100 bp, Homo sapiens
ggaggccggtcggaaccgagcgggcaggaggccaccgctgcagcgcgggccccgcagaggaaggaagccggcgggcgggacatccacgacagcgatggca

SEQ ID NO: 451456 - DNA, 90 bp, Homo sapiens
caaagatggtacaaaagagtctttggaggatgcggctttgatgggtaagaattgtgacaaaggccagtcttttttcattgacgccccaga

SEQ ID NO: 451457 - DNA, 82 bp, Homo sapiens
tgacgataagatcaattcggaaccgaagattaaaaaactggagccagtccttttgccaggtcaaaatgcagatcttcgtgaa

SEQ ID NO: 451458 - DNA, 75 bp, Homo sapiens
aagcaagaaagaaacaaaagttcacctctgcgaaggctctctaggaaacaccagaattatcagtgaagaatatat

SEQ ID NO: 451459 - DNA, 98 bp, Homo sapiens
ctggctgtagctggccaaggagttctcgattaaagaggaaggggcagtgctcacatttctgggcagaagtcatcaatgggcagcatgttccggcaaca

SEQ ID NO: 451460 - DNA, 100 bp, Homo sapiens
cccggccgcccagcccagcctggggcccacccccgaggaggccttcctcagtgatacccagcgccgcaaccctcatcattgtggtgtgcgtgggcttcct

SEQ ID NO: 451461 - DNA, 75 bp, Homo sapiens
cagacagattctgtcttaactaataagattggaactgtattagcctgaagcgcggattgtagatgaagaaactca

SEQ ID NO: 451462 - DNA, 119 bp, Homo sapiens
cagctcccggatcctgttccttcgaagagggcccagggttgttcacctgcccaaaaattgtgtcttgagagacaaataccgatactttgcttgtttgatgagagcccggtttgaagaac

SEQ ID NO: 451463 - DNA, 100 bp, Homo sapiens
ctaaactagcagtttagggtgtcaggatgttgccttatggctgtttagcaacaggagatcgctctggcctcattgaagttgtgagcacctctgaaacaat

SEQ ID NO: 451464 - DNA, 100 bp, Homo sapiens
ctccaccaggactgaccgctgccgcccagcacgtccaggctgctttgtaccgcctcagtggagactggaatcccttacacattgatcctaactttgctag

SEQ ID NO: 451465 - DNA, 75 bp, Homo sapiens
tggaattcgcgaagctgccaaagccttagacaagattttgacattgctgggaactttgatcccatgatccctgat

SEQ ID NO: 451466 - DNA, 83 bp, Homo sapiens
tgcagaagcgtgtcgttctgcaccagcgccttgatcgagtacttgaggtattatcgggggacccacggggtcattgtggttta

SEQ ID NO: 451467 - DNA, 75 bp, Homo sapiens
tacatttccccctttcatgatattcctctgaaggtgaactctaaagaggaaaccacccctactcctaatcccccg

SEQ ID NO: 451468 - DNA, 98 bp, Homo sapiens
acgtttacaccaccacgagcctagagaacatctcaagcctgaaaggacacacagggaagtttggtcagatgatgactggttgaagaagttttctggga

SEQ ID NO: 451469 - DNA, 75 bp, Homo sapiens
tgacgcctcccagccgtgcttcctgttaagcctgtgaaactgtggctgagaacaacctgtgcagccagtatgagg

SEQ ID NO: 451470 - DNA, 100 bp, Homo sapiens
aatccataggatgaatcctcatggctaatgaaagcctggaagaacattagaaccaccatgaggaggagaagatggtataaactggtccatcagtgacaaa

SEQ ID NO: 451471 - DNA, 98 bp, Homo sapiens
aaagcacaaagcatggagaccctccctccagattgctgacagaactggaatctcctgcttggtggccctttagctccaagctttggaagacaccaccg

SEQ ID NO: 451472 - DNA, 100 bp, Homo sapiens
cgacgtgccccaggcggagatctcgggtgctgccttcacctgcctggagactgccttccgcctggacgccctgcaccggcagatgaagcttctgggagag

SEQ ID NO: 451473 - DNA, 82 bp, Homo sapiens
tggagagagaccagacctgcaagctctttgacacacagcagttcttgtcagtttgacaacttaaatgctgcgcatgaaacct

SEQ ID NO: 451474 - DNA, 90 bp, Homo sapiens
gttttccatgaggatcgtctgcctggtcctaagtgtggtgggcacagcatggctctcaaaggtctatggccctgtgttcactctgtattt

SEQ ID NO: 451475 - DNA, 100 bp, Homo sapiens
gatgtcgtcagtaatgcctggaatgatgatgtctcatatgtctcaggcttccatgcagcctgccttaccgaagtctgggccaacggtcacaaaagttgtc

SEQ ID NO: 451476 - DNA, 100 bp, Homo sapiens
aaaagctgtggaaggctctggataaggaccagtacctgcccaggaaactgcgaaggcttgtcaaatctcttgaagatctttgctcccagtatgatctgac

SEQ ID NO: 451477 - DNA, 83 bp, Homo sapiens
gcagaggcagccataatcctggagagccccggtttaagatctccagccttatgccagcctggaccatcttggaggcagtgtag

SEQ ID NO: 451478 - DNA, 100 bp, Homo sapiens
ggcagttgagagactgttggagcctcttgttacacagatagaagaggagttatgggaagaagaatttattgaacgctgtttccaagaaatgctggaagag

SEQ ID NO: 451479 - DNA, 50 bp, Homo sapiens
gcaacctccaccttgacggttccagaatgtccagaggaggtttatgaccc

SEQ ID NO: 451480 - DNA, 90 bp, Homo sapiens
ggagaaggagcagtccgtgctcaagatttctccagtgatgattctaagttagaatataacgtagatgctgcaaatggcatagttatggaa

SEQ ID NO: 451481 - DNA, 100 bp, Homo sapiens
aagaagaagaagaaaaagtttctcaaccagagataacaacgaacttgatgcaagtgataggtttgccaaggtcagacctctcatcatccggatgaactgc

SEQ ID NO: 451482 - DNA, 74 bp, Homo sapiens
gcacgggatcccagcctcaggcctgcacggacggtgttggttgggctttaccgatttgttacaactcaagcaag

SEQ ID NO: 451483 - DNA, 75 bp, Homo sapiens
tcccaagaagctgggattacaggttatttcttatgagggtcatggatatcccctatctaaacttggaaggaccag

SEQ ID NO: 451484 - DNA, 100 bp, Homo sapiens
cctgaaagtggtcacagccgcatctttgaaggtattgataacagaacatggcgacttgggaaatggaaagtttttggatccaaagaacagaatctgtttt

SEQ ID NO: 451485 - DNA, 74 bp, Homo sapiens
gagggaaggcggcaagagctgcggagcccctggaaggtctggagcccgagatccagaagctgattgcaaggcac

SEQ ID NO: 451486 - DNA, 98 bp, Homo sapiens
tcagcatcccccggctgccctaggggccaggaccggcgtgacagcctccagtcccaggtaaaccaccacagtgctgctagtaatgaaacctaccagga

SEQ ID NO: 451487 - DNA, 113 bp, Homo sapiens
ggccgagcaacagtgtagtggcgtattccacatagcaaacagggactttgaacatgtcggggatcgccctcagcagactcgcccaggagaggaaagcatggaggaaagaccac

SEQ ID NO: 451488 - DNA, 75 bp, Homo sapiens
aactacagagagctcaagaacaattaggcaagataagatctgtgaccagatcagtgatgcagtgctggatgccca

SEQ ID NO: 451489 - DNA, 100 bp, Homo sapiens
tcgtctatttcatcacaaaactgtcccgggtgggaagaggaacagcctatgtgggcttccacggaggctctgcagaaggctttaaccaagcagataaggc

SEQ ID NO: 451490 - DNA, 75 bp, Homo sapiens
aaaagtagccataagaaggaaggattcaccacctccaggaaaaggaactgtggctgcaccatctgtcttcatctt

SEQ ID NO: 451491 - DNA, 98 bp, Homo sapiens
cttcacccgcttccgcagcccgctcgtgcccggcttctggtcctggaccctttagatcctacaagatcagtgattgtgatccgctccctggtagcaga

SEQ ID NO: 451492 - DNA, 75 bp, Homo sapiens
gcgagctcgggatacgctcttcgaagtccgcagaccctgatcctgaaaatccagaacccacaactacgaatgaat

SEQ ID NO: 451493 - DNA, 74 bp, Homo sapiens
aaaggcaagaagttaattcctgaagtcgaggtggtatcgggcccccgagttactatttggagctaggatgtatg

SEQ ID NO: 451494 - DNA, 83 bp, Homo sapiens
tggtggtgcaggcgctgcgccgcaacgccgagcgcaccgacatctgcctgctcaaagaggttgacggatatattcagacgtta

SEQ ID NO: 451495 - DNA, 100 bp, Homo sapiens
caagccccgccgctccaagaaaggaggaagagcaagcaggccctgagggactataagaaggttcagatccagctggagaatctggagagcagtgtgcggg

SEQ ID NO: 451496 - DNA, 74 bp, Homo sapiens
ccccctaaagaaactggaggcccaaggattcgctaaatattgtaatggatcaaggagatacacctacactagag

SEQ ID NO: 451497 - DNA, 75 bp, Homo sapiens
gagcggctcagccagcggcagacagaacgggacctgtgtcagacaccaactctacaacattacctgtcatatact

SEQ ID NO: 451498 - DNA, 89 bp, Homo sapiens
agctggagacggcctgggtgctggcgaagcggaggccggaggtgtgttccagagaacaagccttcagacatttgctatattgacgctga

SEQ ID NO: 451499 - DNA, 74 bp, Homo sapiens
tctgcatacagagaattggttcagcttcttggacacttaatgattgttggcaagaaatgtgctgctgatctggg

SEQ ID NO: 451500 - DNA, 96 bp, Homo sapiens
tccgcatggtcagtgccatttcgcctttatcgtggtggagtccaccctggctgtgcttgacaaaagtaagctgaagccaggaacaagagttgcttt

SEQ ID NO: 451501 - DNA, 74 bp, Homo sapiens
gcccatcgtgcgggtcttgcaaagaatcatgtcaaccctgccatggacttcacgcagactccacctgggatgtt

SEQ ID NO: 451502 - DNA, 90 bp, Homo sapiens
cgggagagcgcgcctagccggctcgcgagtctccaagctggctggtgtcttggtcaagcatggcatcaagaaaggtgacactgtggttat

SEQ ID NO: 451503 - DNA, 75 bp, Homo sapiens
cagaaaatggtgcctgctgaccttctggagttattggctagtaagaaaggagttccgattctgaagaggcatttg

SEQ ID NO: 451504 - DNA, 82 bp, Homo sapiens
gggagccgggcgcggggagctgcgcgaagccggggcggagcacgcgagctatggtgtggacactgccagcggctgcagccga

SEQ ID NO: 451505 - DNA, 97 bp, Homo sapiens
ccccgcgctgcggcctggcggcttccaggcgcactaccgcgtgcctgaagacgtacactggccacaagaatgagaaatactgcatatttgccaattt

SEQ ID NO: 451506 - DNA, 88 bp, Homo sapiens
ctcgctccggaaaggggacacctggtgggagaatctccacaagtgtcttccagacttcagaatttgagactgaataatttaattccca

SEQ ID NO: 451507 - DNA, 100 bp, Homo sapiens
ctgatcccgagcagcgtcatgtaccccttgcctgatcaactttctagcgggagaacgatcatggaggtggtgccagctgaggtgaatagtttgcttccag

SEQ ID NO: 451508 - DNA, 90 bp, Homo sapiens
cgccgtgatggtccggcccgacaccaacatcttcaccgtgtatggactgctggacaaggcccagatgccagcacctgggactcgtcagga

SEQ ID NO: 451509 - DNA, 87 bp, Homo sapiens
gtttggtcactctcatcttgcaaaccagggaagctgccaaagaatgtcgacgtcgaaagaaagaatatgtaaaatgtctggagagcc

SEQ ID NO: 451510 - DNA, 75 bp, Homo sapiens
gttcgaggagatcatcctgcagtctccgctctgcattggataaaacagaagagctcgaggtgagcaacggccact

SEQ ID NO: 451511 - DNA, 75 bp, Homo sapiens
caaatgagagagatgctatatcgtggtaccaaaagaagagtctgatgtgaatgctacacagggagaaaatcagcc

SEQ ID NO: 451512 - DNA, 96 bp, Homo sapiens
aaacggagaaaagtggatggatcgttacgaaattgactccttgataggcaaaggttcctttggacaggagggcctgaggctatggcaggaggagca

SEQ ID NO: 451513 - DNA, 100 bp, Homo sapiens
tcttcctgtttgtggataagacagtcccacagtccagacattatgatctcaaccagctgctggagcctcgaagcataacagcagatcctttggactaccg

SEQ ID NO: 451514 - DNA, 50 bp, Homo sapiens
gcgggcgcccgaggggccgagcgagagacccaagaagccaccgcctccat

SEQ ID NO: 451515 - DNA, 129 bp, Homo sapiens
ccgccgggaggaccgagcctaagagggcagccgcctgaaggaacgcgacggcggcgcccgcaggtactccaaagattcaggtttactcacgtcatccagcagagaatggaaagtcaaatttcctgaatt

SEQ ID NO: 451516 - DNA, 83 bp, Homo sapiens
tagaagactacgaagagcagccagggttgcaaccccacataaactgtcttgtcgacggtctcactgatgcctcttctgcattc

SEQ ID NO: 451517 - DNA, 100 bp, Homo sapiens
ccgcagcagagacgacgcctgcagcaaggagaccaggaaggggtgagacaaggaagaggtttcacagatggcagtgttacattgaacaaaggagacatca

SEQ ID NO: 451518 - DNA, 100 bp, Homo sapiens
ggaaaggatgttggcggtccctgtgacctgtggagacacggccagatctgccctccagttgcacactgggccacagaggatccagcaaggatgaagaaat

SEQ ID NO: 451519 - DNA, 83 bp, Homo sapiens
ggatatcgggtggcggctcgggacggaggacgcgctagtacattatgatctcaaccagctgctggagcctcgaagcataacag

SEQ ID NO: 451520 - DNA, 101 bp, Homo sapiens
ggtgatggtggtcgccgcggcggcgtgtgcgcccctcagtgatcagggccaaagcggtcagtgagaaggaagtggactctggaaacgacatttatggcaac

SEQ ID NO: 451521 - DNA, 50 bp, Homo sapiens
gctgtcaggctacatcagcaaaggggaaatgaatggggtgctgaaaggaa

SEQ ID NO: 451522 - DNA, 80 bp, Homo sapiens
accaagaagccagtcaagcggccaggctgttttggagtcagcggaagatcaccaaggccagggagtggttccaccgcact

SEQ ID NO: 451523 - DNA, 90 bp, Homo sapiens
caaaggcaccgtgacaggccaagtgcaggggccagaagacaaagtcaattccataatgccgggtctaagttgtagattttatcaacacaa

SEQ ID NO: 451524 - DNA, 76 bp, Homo sapiens
cgctgccgctgctgctgctgctgctgcgcctgggccagcaataagagctaactgccatcaagagccatcagtatgt

SEQ ID NO: 451525 - DNA, 50 bp, Homo sapiens
tttggttaaacgaatcaaagagattctgcctgatcaatgcaggagtcctg

SEQ ID NO: 451526 - DNA, 75 bp, Homo sapiens
atggacgatgatgccaatggtgatgtggatgtggaagaaagtgatgagaaggacagaataacgggctcccagatt

SEQ ID NO: 451527 - DNA, 75 bp, Homo sapiens
caacttgctaatggcaggcattttacaaggtacttcacatgactggaggttacggtgtggtgctgtggacttgta

SEQ ID NO: 451528 - DNA, 75 bp, Homo sapiens
acggcctggctttctgcgccatcctgcaccgccaccggcccgacctcatgacagccagtacccatggagccagag

SEQ ID NO: 451529 - DNA, 50 bp, Homo sapiens
tcttgggtcctccgagagcagcagcgcggggatctgatgagcttctttct

SEQ ID NO: 451530 - DNA, 90 bp, Homo sapiens
aaagaactggtttctacagggattatgacattccatttactcagagtccctgtgaagcaggaagagtgagggcaggttcactgcagctca

SEQ ID NO: 451531 - DNA, 75 bp, Homo sapiens
tcgcttggcgctgggcagcttcgtggaggagtacaacaacaagagtgacgtcagaatcaagttcgagcacaacgg

SEQ ID NO: 451532 - DNA, 100 bp, Homo sapiens
gtcaatgtctatggtgttgtgaagttctttaagcccccatatctaagcaaaggaactggatggatgagggagatgctgcaatcatgcatcccggggtcgt

SEQ ID NO: 451533 - DNA, 100 bp, Homo sapiens
tataaggcttcattaagcttaactgagaagtatttctctgtagagctctcgtggcattatccttcagtggggctattggactgacttttcttatgctggg

SEQ ID NO: 451534 - DNA, 74 bp, Homo sapiens
ggcagaggcacttatgcttgtcagcggagctggagtttgttcagatcatcatcatcgtggtggtgatgatggtg

SEQ ID NO: 451535 - DNA, 89 bp, Homo sapiens
tacgacatcgccatgaccgcggggagcaactttcagccagaggcatggatgcttctctgtctcatcagtccttagtagcactatcagag

SEQ ID NO: 451536 - DNA, 100 bp, Homo sapiens
aggacaagcgcttctcgggcaccgtcagtatgaacggtgccttagcgtttgtggacacttcggactgcacggtcatgaacatcgcagagcactacatggc

SEQ ID NO: 451537 - DNA, 100 bp, Homo sapiens
tacatgaactcttttccagtgtccttcaggagatctgtgatgaggcgcacatggcacagcactcaagcctacggccccaccagtgtagccagtgcagctt

SEQ ID NO: 451538 - DNA, 75 bp, Homo sapiens
gcggccttcccatcaccatcacagagagcgattacgaattggagcaatgttggcttatacacctctggatgagaa

SEQ ID NO: 451539 - DNA, 100 bp, Homo sapiens
ggttggttcccgtcgtcgtacacgaagttgctggaagaaaatgagacagaagcagtgaccgtgcccacgccaagagattagtactgaagagcagctaagg

SEQ ID NO: 451540 - DNA, 98 bp, Homo sapiens
ctctgctctgcctgtgatgtcgagaacactggatttctctatgaatcatcatcaagaactctgggagaacttttgaattcataaccaagccaacatct

SEQ ID NO: 451541 - DNA, 100 bp, Homo sapiens
acatctcagccacagccagcatggccgtcccactgctggagttcctgtccagaattcctggtgactggaagggggagtgactcaggccctcaacctctag

SEQ ID NO: 451542 - DNA, 98 bp, Homo sapiens
gcgaggtcagactacataccgaataggagtccttccaaaaatttccaaagaactactggttcagattttagctcttcccaagttgtgaaaatagtgaa

SEQ ID NO: 451543 - DNA, 100 bp, Homo sapiens
ttgattcagtctgccttgtaacaggcaagataacccctgtgacagaaggctactgttgctgtaacaaagggcatacatacattttcaagaactgcaattt

SEQ ID NO: 451544 - DNA, 100 bp, Homo sapiens
tcatgaaagaaatcttagataagaaggttgagaagtggtggacttgctttgtgaagagacagttcatgaacaagagtctttcaggacctggacagtgaag

SEQ ID NO: 451545 - DNA, 82 bp, Homo sapiens
tgagattgcactgctgcagtccaggctgaagacagagggctctgatctgtgcgacagatttaagctatgaagaaggacatcc

SEQ ID NO: 451546 - DNA, 99 bp, Homo sapiens
ggctgaggcggcccagcggcggcagctcgccctcccctacctgcggaagagtcaagggaatgtcatcaacatctccagcctggtgggggcaatcggcca

SEQ ID NO: 451547 - DNA, 100 bp, Homo sapiens
ggactctcatattacatgggccagcactgcttcatccgggaagtgcttggggatggagtgcctccaaaggttgctgagaaatgcactcggtgatggaaag

SEQ ID NO: 451548 - DNA, 75 bp, Homo sapiens
ttccatgtgatggtggagtaggaggcaggtctccgcggttctccagcatttggctcaaggccccaagggcacatg

SEQ ID NO: 451549 - DNA, 100 bp, Homo sapiens
ttaattgaagagtcttgtccacagctggcaaattcagtgcagatcaggtgctgcgataagcggttgtggacccgcattgacctgaaccactgcaagtcta

SEQ ID NO: 451550 - DNA, 83 bp, Homo sapiens
ctaatatttaagaaagaagatgttaactttcaggttatggaaacaaaggacatgctttacatcgtcactgaatttgctaaaaa

SEQ ID NO: 451551 - DNA, 74 bp, Homo sapiens
cactgcctctggcatccccgacttcaggatgaccggaaagaagggatgaccgcgtttgtggaaaagagaaaggc

SEQ ID NO: 451552 - DNA, 107 bp, Homo sapiens
tttaacttccccgggacccgcaatgaggtcatccccatgtctcacccggaattaaatgtgagggagtctgacgtaagagtttgtgatgagtcatcatgtaaatatgg

SEQ ID NO: 451553 - DNA, 100 bp, Homo sapiens
cttccttctcatccttttccaccagctaaaggtggttcagaatctggggagccttatattccaggtgtctttttcagacagtttctacctgtatcaccca

SEQ ID NO: 451554 - DNA, 100 bp, Homo sapiens
tcctcccaccctgtgcccaactgcttcatgagcgtcaccatgggtgcctgcttaccatcatcctgctgatgcgggcactggaccccctgctgtatgagaa

SEQ ID NO: 451555 - DNA, 82 bp, Homo sapiens
attaacatgatgattgatctggctgaagtagcagatctgtggcgccctgctcaagccgtggctcttcacggagatcaaggag

SEQ ID NO: 451556 - DNA, 75 bp, Homo sapiens
tacaccatgacaacgccttacccttcgctcccagcccagctcctggggagtttgcttcacctacggcacctggtt

SEQ ID NO: 451557 - DNA, 101 bp, Homo sapiens
gggtcagtcgagagtagccttcgttaaccttaattgaaactgatggatagctcccagttgatccattgtcgggagcttgtggcacatcacctttctactct

SEQ ID NO: 451558 - DNA, 95 bp, Homo sapiens
gccccgcggggccgctccggcccgctccgaggtgctggagaatctggtaaaagcaccattgtgaagcagatgaggatcctgcatgttaatgggtt

SEQ ID NO: 451559 - DNA, 98 bp, Homo sapiens
gtgtcaaaagcgaaatgggcccctggatggatagctactccggaccttacggggacatgcgcacttttccagccattaactccaggctctcgagaatt

SEQ ID NO: 451560 - DNA, 83 bp, Homo sapiens
ggctgagaaaagcgagaccgcgtgcgaggaccgaggagcaggagcggcttcgcttggagcaggagcgagagcaggaacagaag

SEQ ID NO: 451561 - DNA, 88 bp, Homo sapiens
ctgggcgcggattcgccgaggcaccgaggcactcagaggagattcttcgctgctgctgccttaccgccgagaaccaccacccgccagg

SEQ ID NO: 451562 - DNA, 100 bp, Homo sapiens
ggagccgatcccggcctgagcaagcggccgcgcactgaggaggcggcggccgacggtggcggcgggatgcaggtctccacctctgggcaggagagttgcc

SEQ ID NO: 451563 - DNA, 75 bp, Homo sapiens
ctagataacagtctgcactttcacccgtttcagggaaggtctgtttctctaacaactttttatcgaacagcgagg

SEQ ID NO: 451564 - DNA, 74 bp, Homo sapiens
gagggaacaaacacttctggatgcatcctcaagtccatcatctccagaaccagctagtcttcctgcagaagata

SEQ ID NO: 451565 - DNA, 100 bp, Homo sapiens
cgttttccgcgccacagaccccagccagtttcttaaacaattaggtctacatcctaactggcaattcgttgatgtatatggaatggatcctgaactcctt

SEQ ID NO: 451566 - DNA, 100 bp, Homo sapiens
caaaagtggaagcgaagccgaaaaaggcagcagcgaaggagaactgcgacacatcaccaagctgaagccctggagcctctttgatgtacttgtggaaaag

SEQ ID NO: 451567 - DNA, 75 bp, Homo sapiens
gcctgacaaattatgctgcagcatattgtactggcctgctgctggcccgcaggggagaagagaagtttaccttta

SEQ ID NO: 451568 - DNA, 82 bp, Homo sapiens
gagattcagccagcacactcctcgcgagcaaggttatcctgaatacatgtctaacaattttccttgcaacgttagctgttgt

SEQ ID NO: 451569 - DNA, 95 bp, Homo sapiens
aaagtcagcatgagcaaaaactccaaactcctctccaccagcgccaagagatctgcgatttccttctggttggctgtcctgcgtgggtgccaagt

SEQ ID NO: 451570 - DNA, 88 bp, Homo sapiens
gacagctatgaaactcaagtcagactaactgcagatggttgctgtactttgccaacaagacttgtgtatgcggatacctgcttcagta

SEQ ID NO: 451571 - DNA, 83 bp, Homo sapiens
gggtgagttcatgcaaagcgctgagaacaggaccccccgccccctactatactggcaattgctggagaagattttgcaattgt

SEQ ID NO: 451572 - DNA, 90 bp, Homo sapiens
catggatcctgcagtctattctttaactaaactatgttccaacttcctgtcaacaatcttggcagtttaagaaaagcccggaaaactgtg

SEQ ID NO: 451573 - DNA, 100 bp, Homo sapiens
gaacttccctggtcgaacagttttttctaatggctattcaaggttgaccccctgtttacagtgccagcgccaccaccgccgatttccagcagtctcacgc

SEQ ID NO: 451574 - DNA, 75 bp, Homo sapiens
tgaagaccacaataaaagagacctctacttagctcagcaattcttaccttatgctgagatgaatcgtcacctgtg

SEQ ID NO: 451575 - DNA, 83 bp, Homo sapiens
agcaaggtgggcccggacggcacaccctacgttaccgtgctcaagagatgccctgtatccaagcccaatatgggacaccagca

SEQ ID NO: 451576 - DNA, 75 bp, Homo sapiens
aaagatcatgttagcacacccagaaacttcacacgatgcagaccccaggaactgtggaaggtgcatcagtgaaga

SEQ ID NO: 451577 - DNA, 106 bp, Homo sapiens
aaatcaactaaaaacaaaattgccagaaaatctttcctctaaagtcaaactgaaactggcagacctttcacttcgtatccaacaaattgaaacaactctcaatatt

SEQ ID NO: 451578 - DNA, 90 bp, Homo sapiens
ctgggctcaagcagtcctcctgcctcagtctcccaaagtgctggaattacagggctccaaagacaacaggccctccctctgccctcccgt

SEQ ID NO: 451579 - DNA, 90 bp, Homo sapiens
actatgaagttctaggcgtgcagagacatgcctcacccgaggatattaaaaaggccagcgtcaccctttacaccagaaagctggcgggca

SEQ ID NO: 451580 - DNA, 50 bp, Homo sapiens
tgagcacgctgctgtgtgagcagcaggtgctggagccacagtaacgagga

SEQ ID NO: 451581 - DNA, 123 bp, Homo sapiens
cagagaagtacctagaacagtgtgaacactcatttcttcctccaacatcacctggggttcctaagaagttgaatataccggcaattttgcgagcacccaaggagagaaaaccaagtaaaaaag

SEQ ID NO: 451582 - DNA, 101 bp, Homo sapiens
actccccatcgcgttttgccagcgataatacgcctcaggtaaaagagaacctgctttcatgcaagatgctgctgcactgcaaacgggatgagcttcggaaa

SEQ ID NO: 451583 - DNA, 100 bp, Homo sapiens
tttgtcgccgtctagattacatcacgcagagcctccagcagcagggcgtgcagtttttcagaagaagtgaagtcaagatgaagaaccatttgcttttctg

SEQ ID NO: 451584 - DNA, 100 bp, Homo sapiens
cgcgatgagtggtctcggcaggctcttcgggaaggaactgttgggaatcaaagagctttccaaacctgcctacggggatgccatggtgtgtcccccaggg

SEQ ID NO: 451585 - DNA, 50 bp, Homo sapiens
cggagattctcagggcaacccagatctgccataggaaaaggatacagagt

SEQ ID NO: 451586 - DNA, 88 bp, Homo sapiens
gtggaggaaaacaacttcgagggcagagcacggatgggcagaagcctttgcaggtatcagaagttcacatatcaaatatatctgcccg

SEQ ID NO: 451587 - DNA, 98 bp, Homo sapiens
tctggagaacctgaacaggctgcaggtgatgctcctccaccttacagcagcatttctgcagagagcgcagattgagaatgccagcgaggtgctcatca

SEQ ID NO: 451588 - DNA, 100 bp, Homo sapiens
gaagaagtggctgtagggagcatagctgctacactgaagatgaagcaaggcccaatgacccaggcgagcacaaagttatcattgttgggctggataatgc

SEQ ID NO: 451589 - DNA, 89 bp, Homo sapiens
cgggcatggtggtctggggcaacgcggaaggttcagccgtctgtatatctccccagatacctgaaactgaccacctgagtacgttttcc

SEQ ID NO: 451590 - DNA, 100 bp, Homo sapiens
agccgctggtcgtgttcgtcctcggcggccccggcgccggcaaggggacccagtgcgcccgcatcgtcgagattcatgatgttgctatcaaaagttgaga

SEQ ID NO: 451591 - DNA, 100 bp, Homo sapiens
gaagaagaagacttggaaatggagtccgtgtggcttctggcacagcagcttaattgaccggaacctcattgattattttgttcccttcctccccctggaa

SEQ ID NO: 451592 - DNA, 90 bp, Homo sapiens
taaatgtggcgacttgtgcacacatgtagagacctttgtatattgtgaatcggcacggtcctgaggcagacaggcatttattacgctgcc

SEQ ID NO: 451593 - DNA, 100 bp, Homo sapiens
gtggaaagagctgcccaactggccatcagagtcaccaaccccaatgccaggctgcgcagtgaagaaaatgaggcctgtcccagtcggctttaccctatcg

SEQ ID NO: 451594 - DNA, 101 bp, Homo sapiens
gaagaaggtgcccactggggagtgagacagggatttctggaaggttctttgtctctgactgtgtgagcctcccgcgacgatgcccctcaacgttagcttca

SEQ ID NO: 451595 - DNA, 51 bp, Homo sapiens
gaggcctgaattgctccagcctattgcagcgagaacattgggagatcttgt

SEQ ID NO: 451596 - DNA, 100 bp, Homo sapiens
caggaggggcaggaaattctttgaagtgtaaacaggaacatcgataagtagtgtaaaaacttgcacaatgaaatccgaagccaaggatggagaggaggag

SEQ ID NO: 451597 - DNA, 87 bp, Homo sapiens
gcaagtcccccccggagaaaaagttgaagcgttatgctctgaagggctccaagaagctggtgctgtctgtgtactcagcagggcgca

SEQ ID NO: 451598 - DNA, 123 bp, Homo sapiens
ttcagttcccacgccaaaccagaccccatggcctgctcagcctcagcggagaaacaattgcagcacttacagacataaccaacttgaaccatctggaatctgatgggcagatcacaattttta

SEQ ID NO: 451599 - DNA, 75 bp, Homo sapiens
ggacttggagctgccgccgccgggactcccgtcccagcagccgtactctgacagctgtgcacgatgccatccttg

SEQ ID NO: 451600 - DNA, 100 bp, Homo sapiens
cttcgctaacgcctcccggctctcgtcagcctcccgccggccgtctccttaacaccgaacacctactatactggcaattgctggagaagattttgcaatt

SEQ ID NO: 451601 - DNA, 74 bp, Homo sapiens
agttcaggggaaacacagcaaggaaatgtgagccccaggctgcagaaggtcaaaatgcagatcttcgtgaaaac

SEQ ID NO: 451602 - DNA, 100 bp, Homo sapiens
cggccactgcggccgccggccccgtggctgacctgtttcgggcatcgcagctgcccgccgagacgctgcaccagatttttaaagagcgagaagaagattt

SEQ ID NO: 451603 - DNA, 50 bp, Homo sapiens
gtggccctgacggaggggaggaacttcgagagctgtgcccaggagtgaac

SEQ ID NO: 451604 - DNA, 100 bp, Homo sapiens
cccggccggcccggagcaccgagctcgcggcacggtaggaggagccaaaaacctgtatatcatctccgtgaaggggatcaagggacggctgaacagactt

SEQ ID NO: 451605 - DNA, 80 bp, Homo sapiens
cttttgtggagaaatttgcccgctaacaggccatctgtgtgaggctgctgagaactagccctagacctctgcgtgagggt

SEQ ID NO: 451606 - DNA, 100 bp, Homo sapiens
cgccgcggggcagccgccgctcctccgggattgccacggcagtgaagtttctacagaattcccgggtccgccagagcccacttgcaaccaggagagcatt

SEQ ID NO: 451607 - DNA, 100 bp, Homo sapiens
ggagatcccaggcggtgacagagtggagccatggctagaggctgctgagcttcgtgcttatctgaaatctaaaggagctgagatttcagaagagaactcg

SEQ ID NO: 451608 - DNA, 136 bp, Homo sapiens
gcgactgcagagcccgaggccggggaccaggacagtcgcgaggttcgagtgttgcagagcctgcggggcaagatctgtgctggagaatctggtaaaagcaccattgtgaagcagatgaggatcctgcatgttaatg

SEQ ID NO: 451609 - DNA, 100 bp, Homo sapiens
tgagaagaattgccacaacaggccatcaagtgcccagaactctttgccccagagcagggcagcctggattgttctgacactcgtggagaattcaatgttg

SEQ ID NO: 451610 - DNA, 98 bp, Homo sapiens
agttcatgacaatgactttgagccctaccttactggacagtcaaatcaggttgatgccggcccaggatggatcagacctgtgaactacccagaagaaa

SEQ ID NO: 451611 - DNA, 90 bp, Homo sapiens
ccgggcagttgagaaggccaccccgcttcgtgcctgcagcccagacaggaattccaggcttggactggagtgaagccctcaagatccaca

SEQ ID NO: 451612 - DNA, 100 bp, Homo sapiens
tacggactatgggcgaatagctctgaccacccggcgaaggttcatcatgcctagtggcgtataagaagaccccgccaccggtccctccacgcaccacttc

SEQ ID NO: 451613 - DNA, 83 bp, Homo sapiens
ctgcagcatgtcctcctgcatctcctcctgctccccatcgccatcccctatgcagagtgaacctctgtatgtgcctgtgaaat

SEQ ID NO: 451614 - DNA, 75 bp, Homo sapiens
acctggccacgatcgcagactccaaccagaacatgcagtccctgcttcctgccgcagcctggcatcctcgctaca

SEQ ID NO: 451615 - DNA, 88 bp, Homo sapiens
cagcctcaagtttcacctatcctcactgatccgtggacttctgtatgatcagtagacgtcccgtcaaatattgcaaaaattatcatcg

SEQ ID NO: 451616 - DNA, 101 bp, Homo sapiens
aaaagattgattgacgtcccagtgggagattttgataagatctggcgagaacactgtgaggatgaagaaactctttgtgaatatgccgttgcaatgaaaaa

SEQ ID NO: 451617 - DNA, 90 bp, Homo sapiens
acagactccaactgtacaagaggagagtgaagaggaagagctctttgacaaaattgccatcctgagcttcggagagctgattttctgtgg

SEQ ID NO: 451618 - DNA, 100 bp, Homo sapiens
aacttcatccagaggttcatatcacccggaagttcaggctgaattctgaaggcaaacttgagcagacggtctccatggcaaccacgacacagccaatgac

SEQ ID NO: 451619 - DNA, 97 bp, Homo sapiens
tggagcgctgcggcgcccgcaacttctcccgttgctgctgctgctctgcgctgagctgactgctgcccactttggaggaggcggtgggctccttcac

SEQ ID NO: 451620 - DNA, 90 bp, Homo sapiens
gtctcacatgaagaccaatttttacgtctagatttccatgcccatggaaggacctcagcagccatgtcgaagccccatagtgaagccggg

SEQ ID NO: 451621 - DNA, 89 bp, Homo sapiens
agccgcctttcgggggctccgcgcccagcgagcgcttggagctgcacgtggacgaaaaagcttgtggtgaaggggggcaaaaaaaagaa

SEQ ID NO: 451622 - DNA, 75 bp, Homo sapiens
ggatataattcgcaacccatacagtgaatccatttaagttggtgttggtattaggagatctgcacatcccacacc

SEQ ID NO: 451623 - DNA, 100 bp, Homo sapiens
cggcagctgtccgcgcccacggtcctatggcggagctaacggactccgcgcgggacctgaaggagaagaaggagaaggtggaggagaaggcaagccggaa

SEQ ID NO: 451624 - DNA, 110 bp, Homo sapiens
tcctaggcgcgctgcacctggtgatgaccctcgtagtggctgcggcgcgggccgagaaggaagctcctccccccttcgttcccaccctcaagtctgacgatgacacctcc

SEQ ID NO: 451625 - DNA, 83 bp, Homo sapiens
caattgctaggcggagacagtgcagggaagagagaccttagaaaggatcaggactggcggacaacgactgaaagacctttcat

SEQ ID NO: 451626 - DNA, 51 bp, Homo sapiens
actctgtccagttttcaaaccacacaggagctcttgtccctggcaaagcga

SEQ ID NO: 451627 - DNA, 75 bp, Homo sapiens
agatggtccttaaaaccgaagaggaggacgttgactaagataacacgcacaggtccttcagcttgggaaaccaaa

SEQ ID NO: 451628 - DNA, 98 bp, Homo sapiens
atcaagaaagactaatggagtgactatcaaaaggaagtcaatggtctcctctgagcctccggcctccataagacccaaaacagatgacacctcttccc

SEQ ID NO: 451629 - DNA, 73 bp, Homo sapiens
gtgaaagtgcaaagccaggcacaaaatctgggtttaaagaacagtccactttggaaagtgaagaatggaatcc

SEQ ID NO: 451630 - DNA, 101 bp, Homo sapiens
aaggacaaaagccaagaggaggacagttcgctacacagcaatgcatcgaggtggtaagttttcttcatacagttcttttgtgtgacaaactggatttcagc

SEQ ID NO: 451631 - DNA, 60 bp, Homo sapiens
atctttgaactactgccggagcttctgccaggctgaccaactgactgaagagcagattgc

SEQ ID NO: 451632 - DNA, 98 bp, Homo sapiens
cagagcctggagtctgcgaaggccgggacccggttccccggcccacagtgggggtgtgcaaacccgagagaactgggctttacaggaagtatggtgct

SEQ ID NO: 451633 - DNA, 90 bp, Homo sapiens
gagaagtggagaagaaatcagtcagccgcagatttggacacctcccacactgagtccccaaccccccatgactcaaattcacaccgccct

SEQ ID NO: 451634 - DNA, 71 bp, Homo sapiens
cgtggcaatgttttgaaactggcaaaatcaggtaaggggcctggataccaagaagtgactgctcatctaat

SEQ ID NO: 451635 - DNA, 75 bp, Homo sapiens
ccccaaagttgcatttcctcgtcgagcgcaacccaaggtagctgcaatcaacccaaatcaccctcttgctcagat

SEQ ID NO: 451636 - DNA, 75 bp, Homo sapiens
ggagaccactggaaatggagcagcagcaggcctatcgtccaggcagctgaaaaagttggatgaagatagtttaac

SEQ ID NO: 451637 - DNA, 87 bp, Homo sapiens
cgggtgctgtgcaagcggtgcggtcatgccctgaccacagctgcccttcaggaggctggcacggagccacctggggccattgggctg

SEQ ID NO: 451638 - DNA, 96 bp, Homo sapiens
taccctggcttccttaatcggggaaggcttcctgaaggaggtgggctcagagcttttccagaagcctgttaaaagcaaggtctccccacaagcaac

SEQ ID NO: 451639 - DNA, 100 bp, Homo sapiens
attacacagaagcaaaagccttgatagcatggatttctgtgagctcactgataaaagaatcagagtgtctcaacccttgacaagaggaccaagtgccttt

SEQ ID NO: 451640 - DNA, 75 bp, Homo sapiens
atgctctccgctgtgtccacagcgttcaaggacaagtgttggacagccggagtcagtctccatggagattatctt

SEQ ID NO: 451641 - DNA, 89 bp, Homo sapiens
gttggcctcctgtatgttggaggttatgaaagaccctttgcacaaatcaaggttcaagaacatgaagactcgggtgactcagaagtgga

SEQ ID NO: 451642 - DNA, 97 bp, Homo sapiens
ctgcccaacttctgcgggatcttcaaccacctcgagcggctgctggacgaaggtgtcgtgaaaactacccctaaaagccaaaatgggaaaggaaaag

SEQ ID NO: 451643 - DNA, 71 bp, Homo sapiens
cgccgccgcttgtgctgcagccatggaatcattgtagtcaatcattttccagttctcagccgctcagttgt

SEQ ID NO: 451644 - DNA, 95 bp, Homo sapiens
acagggaccctacagtcttcgcccccatcctcaacttcctgcgcaccaaagagttggatcccagtctctgctggatgaaccgaatcctaacagtc

SEQ ID NO: 451645 - DNA, 98 bp, Homo sapiens
gtgaagctcaagttgctactcgggacgctgcacctcccgcgccgcacggtggacgagggagtgaaatattagggccaacactctcagaaacaagaccg

SEQ ID NO: 451646 - DNA, 80 bp, Homo sapiens
tgccagcaccttgggaagagaaagaaaatgccgaaggcactcagacaggcgataccagaaattgcagaagatcatgaagc

SEQ ID NO: 451647 - DNA, 100 bp, Homo sapiens
atccttacccgacctcagatgctcccttctgctcctgggtcatgtaggtacaacagcaaccaagaagatcgatgtctacctccctctgcactcgagccag

SEQ ID NO: 451648 - DNA, 100 bp, Homo sapiens
gcagagcctaagagaactatggcaacatcaggtgactgtcccagaagtgaatcgcagggggcagctggcattttatgctatgtgggagcctatgtcttca

SEQ ID NO: 451649 - DNA, 100 bp, Homo sapiens
gacgcagcaaaggcaaacttggaaagagcaagatcggcagccctaaagattcaagatggattcatcatttttcggtggtggaaaatgtataacccaaaac

SEQ ID NO: 451650 - DNA, 132 bp, Homo sapiens
ccgattttcccaggatgacagagctgaggcagagggtggcccatgagccggttgcgccacccgaggacaagctgtgtcagcgtgttatgatgccgtcccgtaccaacctggctactggaatccccagtagta

SEQ ID NO: 451651 - DNA, 118 bp, Homo sapiens
cgggccgaagcgcccggagcgggagcgagcggcgcggcccggttctgaaaatattgtgcacagggcaggctgaggacacagccacgtgatacccactgtagagagagggagagagaga

SEQ ID NO: 451652 - DNA, 50 bp, Homo sapiens
ggctcacctgtgcgggatggaacaaaagagtatgtattcccgtgtgccag

SEQ ID NO: 451653 - DNA, 95 bp, Homo sapiens
ccctggagcctcagttggaagcagccgatccagcctgcggagcctgtggggcagggggtcctgatgacaacttaattgaaggtggaggaacaaaa

SEQ ID NO: 451654 - DNA, 75 bp, Homo sapiens
gaccacactacagcctgtacacaacaagacagtttatcttgtccatgggacgaagttatacggaagcgtctcctc

SEQ ID NO: 451655 - DNA, 100 bp, Homo sapiens
tgaagaagcagttctacaaggcgagccagggacgatccgtaaggctcagaaccttctgaaacagtattcccagcatggtctagatgggaaaaaggggggc

SEQ ID NO: 451656 - DNA, 82 bp, Homo sapiens
cacaaacttaattcctaatggaagtagcataactgtcaaccagactaacaaacctagaggatcaagacataatgggagcatt

SEQ ID NO: 451657 - DNA, 75 bp, Homo sapiens
ccgtgggcgtaggaccctccgagccagactatgtgaaagggtttggaggaaaatttggtgtgcagacagacagac

SEQ ID NO: 451658 - DNA, 98 bp, Homo sapiens
ccgcctgagcgcaactagcggcgggtcgtgggcacctccaggtgctggagaatctggtaaaagcaccattgtgaagcagatgaggatcctgcatgtta

SEQ ID NO: 451659 - DNA, 100 bp, Homo sapiens
gtcagaatgtcaaacttctgttggtacattgttagccaaaatgaagacctgtgttgatacctataccaaccgtttaaggcagctgaaaaagttggatgaa

SEQ ID NO: 451660 - DNA, 100 bp, Homo sapiens
aacagtagtcgctgttggatcgggttctaaaggaaagattcaattagcagagcctcacagacaatggccaaatgtgtcaaagctgtcacagagggtgccc

SEQ ID NO: 451661 - DNA, 100 bp, Homo sapiens
caatcagatatttaaagatttggccatgatgatccatgaccagggtgatctgattggaaccagtgttatccaaggagcagcctgcgttccagtatagcag

SEQ ID NO: 451662 - DNA, 98 bp, Homo sapiens
ctatgtgggcgccgtccctcaccgcggcatcaagcaggtccggacccactggctgctggagcttgtcaccaccagatgtatcggcaagcagtgtaaac

SEQ ID NO: 451663 - DNA, 90 bp, Homo sapiens
aactgctccgcctggtggaatctgaggtttggaattacaagcttcggcgctgtcttttcacattgcttgggcacttagattatattcgca

SEQ ID NO: 451664 - DNA, 75 bp, Homo sapiens
taatggaatgatagacttaaaatatttcccatattatgggaaaaaactgcatggcaagtgtccagagaatggctg

SEQ ID NO: 451665 - DNA, 90 bp, Homo sapiens
gtggaccacagcattcctgaaatacatccaggaaagacatggagattctcttaaaaagtatctccagatgaaatggccactgcttgatgt

SEQ ID NO: 451666 - DNA, 100 bp, Homo sapiens
caagcagccaaccatgctcaacttcggtgcctctctccagcagactgcgggcttggtgaggtgactcgcggtcgcgggtgactcgccggcaggacactgc

SEQ ID NO: 451667 - DNA, 87 bp, Homo sapiens
aggtctgtcgatactgcatgcaccagcacctcaaggaggctaagaagtcccgcttgccaatcctaataaaaccatcccggtcattag

SEQ ID NO: 451668 - DNA, 75 bp, Homo sapiens
gtgattccctgcggtgtgcaagtccgactggaacagggttactggacctggaggacgatggggacttgatcaccg

SEQ ID NO: 451669 - DNA, 83 bp, Homo sapiens
tcctacctgaagtatgccattagttcccagaatccagggcctgaaaacccagaatgaacttgtgtccatcccagagatcactg

SEQ ID NO: 451670 - DNA, 99 bp, Homo sapiens
aacggcacggccatctgtgtgtctgggcagtgcaagattgcccgtgaggcagaggctgccatctaccacttgcaattatttgaggaactccgccgcctg

SEQ ID NO: 451671 - DNA, 100 bp, Homo sapiens
cgctgtggtgtgactggggcaggaccatcagacgttccatcctcagagcagcctgaactgttcctaaagaaacttcagcagtgctgtgtcatttttgact

SEQ ID NO: 451672 - DNA, 100 bp, Homo sapiens
ccgccatggccgagccggcttcgagcctggtatttcaacatcagatattctgtcttggattaaacaagaagaagagcctcaggttggggccccaccggag

SEQ ID NO: 451673 - DNA, 73 bp, Homo sapiens
gccgactcgcaagatggcgccggtggtcctgggcggtggtcaggaagccatggatgtaaccacaacctccacc

SEQ ID NO: 451674 - DNA, 100 bp, Homo sapiens
caaaggctcctaaacatttaaaagcaggttttctaaatagctttgaggagttacaggctgaggaatgcggcatcctcaatggatgtgaaaatggtcgctg

SEQ ID NO: 451675 - DNA, 83 bp, Homo sapiens
ctgagaggggctgcggccggagcgggcggctgagacaaaggcgacgctgccattcgatttcacatggaagatgctaaaggaca

SEQ ID NO: 451676 - DNA, 83 bp, Homo sapiens
caatgctgaagtaagattgtcttggaaatactaagttgggtattaatctctggagaagacacatccacagttagcactttctt

SEQ ID NO: 451677 - DNA, 100 bp, Homo sapiens
ccgaaggccaaggaatcactgaagatcggcgagggaggacagggggttcatcatgggagccgggtgtgggctgagccctgcctgattgatgctgccaagg

SEQ ID NO: 451678 - DNA, 100 bp, Homo sapiens
ggaaaacagagaaagaagtgataggagggctctgtaggatcgaggccatcaagctacagatggtcttacaaatggaaccccaaatgagctcaattcacaa

SEQ ID NO: 451679 - DNA, 83 bp, Homo sapiens
cttggggctctacctctttttcaaacttgaactcagtgaaaatagaatctttggaggtctggacatgttagctgaaaaacttc

SEQ ID NO: 451680 - DNA, 84 bp, Homo sapiens
tgcaggatgaaacattaaattcttccgttcagagtattagatattctatattgagcgcattataccaataatcagaaaacattg

SEQ ID NO: 451681 - DNA, 83 bp, Homo sapiens
catcttccagtgctgataattatggcattagccatcctggaatggaagttggatacactttgtgacttgtacgagacactgac

SEQ ID NO: 451682 - DNA, 90 bp, Homo sapiens
cccatgtgcattctactgacggacagtcattttgtttactcattcagccctgttgcaggtcccaataaactcttcataaggttgacagaa

SEQ ID NO: 451683 - DNA, 75 bp, Homo sapiens
ctcctggcgtggacacacaagcaccccaataacctcaagggctgggttacgacccctacaaccctgagctgccca

SEQ ID NO: 451684 - DNA, 98 bp, Homo sapiens
tccacacagctcagaacagttggatcttgctcagtctctgtcagaggaagatcccttgaatgtgattgatggagacctctgtgagcagttcaattcca

SEQ ID NO: 451685 - DNA, 100 bp, Homo sapiens
gcgcggtagcgtcccgggtcccctagcagggctctagagaccacgtgaagtctcctcgacaatctgatcaaagccatcttgtcagtcaccaaagagtacc

SEQ ID NO: 451686 - DNA, 83 bp, Homo sapiens
gcggagaccgcctctgctcccgcctgggggcaattcatgatgttaaagccacagatctgggattaggtaaagtaagatttaag

SEQ ID NO: 451687 - DNA, 75 bp, Homo sapiens
ccgcacccttgaaaggaggcccctgccgtgtggacccgtaaaataaaatgggttggtgggacaagtgatgttgaa

SEQ ID NO: 451688 - DNA, 102 bp, Homo sapiens
caaggaataaacatgcaatgaacccaaaagggttgctccttgagggcaggacagttcttatggctttatccgttgcgtaagcacagagaggtctgcgaggtc

SEQ ID NO: 451689 - DNA, 49 bp, Homo sapiens
tgttgatcagcttcgtgatatcaaagaggcttccgttacaagatgaggt

SEQ ID NO: 451690 - DNA, 51 bp, Homo sapiens
cccatccgaaaggatgatgaagttcaggcatgtggagaccccaaggcaaaa

SEQ ID NO: 451691 - DNA, 82 bp, Homo sapiens
ctgcaaggactggttccacggcagagcctggcagagagcaggtgtgtgatacacgtcgtcaggtgactgaccgaggaattca

SEQ ID NO: 451692 - DNA, 73 bp, Homo sapiens
tgcgtctgcagctggcgcggaagaggtcgacgtgttgatgcccaatgttggtgagattgtgggaggctcaatg

SEQ ID NO: 451693 - DNA, 51 bp, Homo sapiens
cctgagctgccgaatcattgagcaggtatttacatgaggaatttccagagt

SEQ ID NO: 451694 - DNA, 100 bp, Homo sapiens
aattgaacctgtgccggaagtactacctggttcctaaggacggtctgaagagccaagagctatttgatgaaattagaatgacctacatcaaagagctagg

SEQ ID NO: 451695 - DNA, 50 bp, Homo sapiens
caagaacttcaacatccatggaacggatctgctgtatatccttccaactc

SEQ ID NO: 451696 - DNA, 83 bp, Homo sapiens
caaacagatcatccgcaaacacgcgcagaccttcgttgccctctgtgccacagggtgcggggggcaatggcactgcagctctg

SEQ ID NO: 451697 - DNA, 99 bp, Homo sapiens
ctggtaggcacgggcggctccgcagtgaccggactcgggggagatcctatagcaatggaactcagcgatgcaaatctgcaaacactaacagaatattta

SEQ ID NO: 451698 - DNA, 75 bp, Homo sapiens
cttgagttggtcgggggcagcggcaggatggcactggatctttaaaacgcagtggttcctttagcaaactccggg

SEQ ID NO: 451699 - DNA, 97 bp, Homo sapiens
aactggattttttaactgaagatagtgcctttcagccctaccagcttaaccagctcgaaaaagcagtggaagcagctcacacatttttcgtggctaa

SEQ ID NO: 451700 - DNA, 73 bp, Homo sapiens
gtcgagtcagtgcgttcgcgcgagatgcagcagcttttttatgagaattacgagcagaacaaaaaggggtaca

SEQ ID NO: 451701 - DNA, 90 bp, Homo sapiens
cccaggaccgccggccgggggacgagctcggagcagcagccaggttcttgggtgtctctggggagtccctgggccagaccttcctccaga

SEQ ID NO: 451702 - DNA, 100 bp, Homo sapiens
ggaggatgagcctgcagagcgcgcagtacctccgcaatgtctcaggctgtgcagacaaacggaactcaaccattaagcaaaacatgggaactcagtttat

SEQ ID NO: 451703 - DNA, 97 bp, Homo sapiens
gcggggcctccgtgttctgctgtcttcatcagcgtgggccgcgggcccagctcatcgcccaggccattggccaggccttcgccgccgcctacagcca

SEQ ID NO: 451704 - DNA, 100 bp, Homo sapiens
atccactgccaaaatgcagctcttacagaaatgtgtcttgttgcatttggtaatttagcagaacttgacacaagatggtgaaggagacccagtactatga

SEQ ID NO: 451705 - DNA, 100 bp, Homo sapiens
gaaactttcctcctccaccacctcttgatgaagaggctttcaaagtacaggcacattgcaagcaacccgtgccttgatggtggttggcatcctcctggga

SEQ ID NO: 451706 - DNA, 74 bp, Homo sapiens
catccccatttctatggtcctcctcacctatggccgctggcaggcagtagcaggtttgttggcagatgctcgtt

SEQ ID NO: 451707 - DNA, 74 bp, Homo sapiens
ttccgtatctgcctaggcattttgctgtctcctcctaatacggtttcagtgttgactggtgggctcttggagtg

SEQ ID NO: 451708 - DNA, 83 bp, Homo sapiens
ccgtgttctgctgtcttcatcagcgtgggccgcgggggccaaaccagtgctcctgccacctctctggctgccccctagagcct

SEQ ID NO: 451709 - DNA, 87 bp, Homo sapiens
gggacatcagtggagccttctcagacccacagggcgccctgcgtccggcagaggaggcgagcatcccgctcaggtgatgaggaaccc

SEQ ID NO: 451710 - DNA, 100 bp, Homo sapiens
ggcgatgtggtggcccaggaggcggcaggacggccaagaccagcgcgagggccctgggcaaggcccgacagctatcagttgagggatttgcagttgataa

SEQ ID NO: 451711 - DNA, 100 bp, Homo sapiens
aaataagcggcataaagcaattgagaattcagactgaaggagcattaggttatgcgtattgggtctgcacaacattgcaagataaaagcaacagagaaac

SEQ ID NO: 451712 - DNA, 97 bp, Homo sapiens
ctcaagtcctggctcagcaagactctcgagcccataaagtatgctgaggccttggattaccaccgtcaggcactggtgttgattcctcagaacgcat

SEQ ID NO: 451713 - DNA, 100 bp, Homo sapiens
ctcgatggcagcgacacaattgtctgtgacagtaacagtacttgggatcccccagttccaaagtgtcttaaagggggattcccgaagtcttccgttttct

SEQ ID NO: 451714 - DNA, 96 bp, Homo sapiens
ggcgtcgggcgtgagcggaaatgaggaggagatggtggaggaggctgaagtggctccggaagcctggttggcattgacaacaaaatcgagcaagcc

SEQ ID NO: 451715 - DNA, 140 bp, Homo sapiens
agcaccatggcggagctaggagctggcggcgacggccacaggggcggcgacggcgcagtgcgaagcgaaacaggacatccaggcagaaattgatgcccacaatgacatatttaaaagcattgacggaaacaggcagaaga

SEQ ID NO: 451716 - DNA, 100 bp, Homo sapiens
atgaaaaccgaagaagaggcccggactcatacagagattgaaatgttccttagaaaggagcagcaggtggaaccgtcccaaaatgtcccttgctcagaag

SEQ ID NO: 451717 - DNA, 110 bp, Homo sapiens
gtaaatgccctccaggacccgttcgccttgtcatcggccggcaccctaatccaaagggctggtgaattaccatatctccgtcaagtgcagtaaccagttcaagttggaag

SEQ ID NO: 451718 - DNA, 100 bp, Homo sapiens
gacaggcaccttttaccatcactcctgtgttttcagaagactgtgcagtctttgtaactgatgaagagcaaggctttgtctctaattctgcccagttaaa

SEQ ID NO: 451719 - DNA, 83 bp, Homo sapiens
atggcgaccaccgtcagcactcagcgcgggccgacaatgcagatcttcgtgaagactctgactggtaagaccatcaccctcga

SEQ ID NO: 451720 - DNA, 100 bp, Homo sapiens
attatattgcacctgaagtgttgctacgaacagagggtgacattgacattttgctggacaaatttcaccaggaaaatcaaggccatatttcttcctcact

SEQ ID NO: 451721 - DNA, 83 bp, Homo sapiens
caaggatttccgggactacctcatgagcttctgcgcaacgtctgagcacaggagcccatccttggctctaggattccgccgct

SEQ ID NO: 451722 - DNA, 74 bp, Homo sapiens
agagcccggggacggcgaggccctcatgtaccacacgtgccggtggtggtgtgcacattgagccccggtataga

SEQ ID NO: 451723 - DNA, 50 bp, Homo sapiens
attatctctggtgctgcagctctgtcccgttcaagaagttcttccagttc

SEQ ID NO: 451724 - DNA, 121 bp, Homo sapiens
gtgagcggcggcgtcttatccaaccttgcgctgcatccgctcgacctcgtgaagatccgcttcgccgggcgaactttctgaccaagtatacaactacccagagggcctaggagaagtgctg

SEQ ID NO: 451725 - DNA, 74 bp, Homo sapiens
agcctacggagatgagacaggcgtgcagtgtgcgctgaggctttatcctgtggataaacgcagagtgaacgagt

SEQ ID NO: 451726 - DNA, 101 bp, Homo sapiens
attttggaaagcagtttttaagacaatgtcaacctaagaaaaagtctacgccactgaagtatgaagttggagatctcatctgggcaaaattcaagagacgc

SEQ ID NO: 451727 - DNA, 87 bp, Homo sapiens
caaaccagagaaagctttccagcagtcagttgaacaagacaacttatttgatctgagatctgtatctgtggacctgaatgttgatcc

SEQ ID NO: 451728 - DNA, 75 bp, Homo sapiens
tgcagcatggaccagcgagagcccctgcctcccgctcctgcagatcaggatcctcatgaccagccaaagagaaga

SEQ ID NO: 451729 - DNA, 74 bp, Homo sapiens
ctatgacagaactaaagcgggcaaagttagaccttccagaacctgcatctgtgggtcttgcagatatgatgtct

SEQ ID NO: 451730 - DNA, 75 bp, Homo sapiens
ctccccacagccgggaagattgtcaaaatgagtctgcaggtcttaaacgacaaaaatgtcagcaatgaaaaaaat

SEQ ID NO: 451731 - DNA, 74 bp, Homo sapiens
tggcagagttagctaaagaactccctcaagtttcatttgtgaagattacagcaacctgcaggattccatccagg

SEQ ID NO: 451732 - DNA, 75 bp, Homo sapiens
gaagaaggccttgactacggaggggttgccagcccctgaagaagatggccgaccggatcaggaagtatcagatct

SEQ ID NO: 451733 - DNA, 82 bp, Homo sapiens
ctggaatttccttactgtctataacacacagaccttctctttgttgcatccaagaattgatgcccggagagctgatgaaaac

SEQ ID NO: 451734 - DNA, 100 bp, Homo sapiens
cagcgctgaagcagaagtccccggagctgcggtctccccgccgcggctgggttttgggctctgttggggtccctaccccgcttgtgtcctgtgaccggcc

SEQ ID NO: 451735 - DNA, 95 bp, Homo sapiens
aaaaacaagagtatcaagaatgggtaataaaacttcaccaagacctaaaaaaccccaacaacagctcccttagaattgcagaatatgtatagagt

SEQ ID NO: 451736 - DNA, 75 bp, Homo sapiens
ggctccaagacctcatcaacaattaagggactggtttggctgaaagacaaagaagcaacacattgtaaactttgt

SEQ ID NO: 451737 - DNA, 100 bp, Homo sapiens
actcatccccgggagtgttgaaatgacctggatgaccctgaaagaggaatgatttttgtctgctctgcaacccataaaaccaaatcgatgttcttctttt

SEQ ID NO: 451738 - DNA, 100 bp, Homo sapiens
cgtccagcacctacgtcccgctgccgtcgccgccgccaccatgcccaagagaaagcaaaagcgaaagcttcggatctacatttccaatacgttcagtccc

SEQ ID NO: 451739 - DNA, 98 bp, Homo sapiens
gccgcaaccacagacgcagcaacaacagcagccggcccttgttaactacaacagaccatctgaggtactcaagacaattgacgagggagatgccgatg

SEQ ID NO: 451740 - DNA, 100 bp, Homo sapiens
tgtacggtctcgtgtggctgctgacagtcctcctggaggggatctctggccaaggagtgtacggtttggaattcacccagttgcaggccgaatgcctggt

SEQ ID NO: 451741 - DNA, 74 bp, Homo sapiens
gctgcacccgctgccccagctcaaaggttaatccctatatcctgaagaagaacatgatcctcatgacaaatcat

SEQ ID NO: 451742 - DNA, 96 bp, Homo sapiens
ctggcagccggggagctgcaggaaccagactgggggcgagctgagcacctgtagtcaatcacacgcaggttctcccatgggcaggtggtctctctg

SEQ ID NO: 451743 - DNA, 100 bp, Homo sapiens
gaagctgcggcgagtcctgagcggccaggacgacgaggagcagggcctgactgcgcagggcacctcgatttaaagatttccagcaacaggacagtcagga

SEQ ID NO: 451744 - DNA, 75 bp, Homo sapiens
agaattaaaaggaagaacaacttaagagcttcttcaaagaattatccatgaagctggttattcagaagaggagtg

SEQ ID NO: 451745 - DNA, 90 bp, Homo sapiens
atggaatgatgccgcagatgatgccccctatgggagggccaccaatgggacaaggttcagcggattcctacacaagcaggccgtctgact

SEQ ID NO: 451746 - DNA, 76 bp, Homo sapiens
ccatcattgatgtggtgcgatcgtccaagtggtaagaagttcagaagcaagcctcagttggcaaggtacctgggaa

SEQ ID NO: 451747 - DNA, 111 bp, Homo sapiens
cccatcctgccgtccttctccactttcgccagcccgtgccgcgagcgcggcctgcaggagggtttccaggcctgaggtgcccgccctggccccaggagaatgaaccagccg

SEQ ID NO: 451748 - DNA, 83 bp, Homo sapiens
cctctggtgagaaggtggtgaggcttcccgtcatattccagctattgtggacgatgaaaggctctctgcagaggagatggatg

SEQ ID NO: 451749 - DNA, 95 bp, Homo sapiens
cgcggcccctcctccccggcgcctcccaggagcttgaggagcagctggaggaggaggagagcgcccggcagaagctgcagctggagaaggtgacc

SEQ ID NO: 451750 - DNA, 101 bp, Homo sapiens
ctagcaacaggagataaaggtggtagagttgtcatctttcaacaggagcaggagacgcaaaatcgaatgaagctaatggccgacaactacgaggatgacca

SEQ ID NO: 451751 - DNA, 100 bp, Homo sapiens
agcacacactcctgcttccttccttccctgcagttgggcatacatcacagaaggaagccatggaagtaagccttgatataacagcactcagcattctcca

SEQ ID NO: 451752 - DNA, 50 bp, Homo sapiens
catcgcagttggaagcccatggggcaggttggtgctttgggcccttctag

SEQ ID NO: 451753 - DNA, 48 bp, Homo sapiens
gacaagaacctgaccgagagggagagagtaatgccttctagctttttc

SEQ ID NO: 451754 - DNA, 51 bp, Homo sapiens
aaagaacatgaccaccttcgaaagaaaacatttaaagttgatgatatgtta

SEQ ID NO: 451755 - DNA, 100 bp, Homo sapiens
ggacaagtgtttccggaagtgtatagggaaacctgggggctccctggacaactccgagcaggatgataatgaagataattcaaatgatgggacccagcca

SEQ ID NO: 451756 - DNA, 82 bp, Homo sapiens
caagcctctacaggggcctcccgcgccccccgggacccccacgccgccgccagttaccggtattgtaagaacaagccgtacc

SEQ ID NO: 451757 - DNA, 100 bp, Homo sapiens
caaattgtcgccattaagaaaagcatttgtgcagaatgtcatcagatgaggagaaatactcacttccagttgtgcaaaatgactccagtcgaggcagttc

SEQ ID NO: 451758 - DNA, 75 bp, Homo sapiens
cagagatccaagtgcgcgccctggcgggtccggaccaagcccttgccctgttggatgaataggcacctctggaag

SEQ ID NO: 451759 - DNA, 99 bp, Homo sapiens
ccctggtgtcacctatcagtaaaagattagtcagaagaagttgaaaaaatacgagaaagaatatcacaccatgagggaacagcaggcccagcaagaaga

SEQ ID NO: 451760 - DNA, 101 bp, Homo sapiens
ctgtcctttcaggaaggagccattatttatgtcatcaagaagaatgacgatgtttcggagcaacatcccctgtcacctggttgatatctcttgcggattac

SEQ ID NO: 451761 - DNA, 75 bp, Homo sapiens
ccccaagctctgccacgaaggtgccaccgactactccagtggttttggcggcaagtatggcgtgcaggccgaccg

SEQ ID NO: 451762 - DNA, 100 bp, Homo sapiens
ctctgccatattgtgtcttccccggccggtccctcgcctcccggccgagctgacgcagcaagatgaagagcgacgtcggcagctgagagagagagctcgt

SEQ ID NO: 451763 - DNA, 74 bp, Homo sapiens
caaaatgtgggactgcgggaagctgcccttcacattttctgcaaaccagtccagctacgggggcccagccagcc

SEQ ID NO: 451764 - DNA, 75 bp, Homo sapiens
gtggcagagaaaaccagctgagacagggcgccacttactagcgctcctggttgcagccagaatgcatgacttcag

SEQ ID NO: 451765 - DNA, 100 bp, Homo sapiens
agattcccaggatgtgagcaacacgggaccggtgaagctggtgttcgtggaggaccaggctgtggtggagacggtgttcttcctgacgtcgcgcaccagg

SEQ ID NO: 451766 - DNA, 51 bp, Homo sapiens
acaccctacgttaccgtgctcaaggttcagtgtatctttgcctgcctacat

SEQ ID NO: 451767 - DNA, 83 bp, Homo sapiens
gttgaaaatggaagagtaattgcctgctttgattccctaaaggactgaaaactggatatttggtccccatggactttctggtc

SEQ ID NO: 451768 - DNA, 74 bp, Homo sapiens
gggagggtccgagccagccgctgttttgccggaggagcccctcaggccgtatgttgaagaaagtacgcacatct

SEQ ID NO: 451769 - DNA, 75 bp, Homo sapiens
tggagatcgtcccgcgcctgccgagaaacagcacccaggactatcttccaaagagttctggatatcctaaagaaa

SEQ ID NO: 451770 - DNA, 101 bp, Homo sapiens
cgagcagcggtttccgcgggggcggaacaaacaggcagagccaagtgcgtcctggaggcttcccccgttgcgaaggacagagcgggatgccaccagcttgt

SEQ ID NO: 451771 - DNA, 71 bp, Homo sapiens
tgccctcctggcgggcccggcggctctcactatccagaattggtagggtgcccccctttttcacagagaac

SEQ ID NO: 451772 - DNA, 100 bp, Homo sapiens
cgggcggagagaactcagcgaggattctgagaactgataaatttcaaacggaagagagtggcagcatttagaaagaatctaattgaaatgtctgaactgg

SEQ ID NO: 451773 - DNA, 50 bp, Homo sapiens
tcgggaagcagggattccagtgccaagttgtcgagatgtccacagaagga

SEQ ID NO: 451774 - DNA, 100 bp, Homo sapiens
ctacccccaagtctaagcagtctcccatctctacgcccaccagtcctggcagcctccggaagcacaaggcatagttcaacactatgggtcctcctctgaa

SEQ ID NO: 451775 - DNA, 50 bp, Homo sapiens
ttcaaagacctgttcttaaaaaaagctgtgagccgtgagctttgaggcgg

SEQ ID NO: 451776 - DNA, 133 bp, Homo sapiens
tggggacctgtttgctgccatgctcctggcgtggacacacaagcaccccaataacctcaaggtggttttacgcacgacgagctgctgaaggtgtggaaaggactgttttattgcatgtggatgcaggacaagc

SEQ ID NO: 451777 - DNA, 100 bp, Homo sapiens
taatgatgctcggttcatcagaagatcatgtacaccaaatgcagaggaaccactcgttttgactattattttatcactctttgtgaaacttcacaatgtt

SEQ ID NO: 451778 - DNA, 74 bp, Homo sapiens
cccagcacgcctgggccgggggctgcagcatggccagcagccggatgcccgggcccactgggcgggccagtggc

SEQ ID NO: 451779 - DNA, 75 bp, Homo sapiens
agactcagagccgtggaatggaaggcactgcagctcgagtgaagcacaaacatttcactgaagatattcaaacaa

SEQ ID NO: 451780 - DNA, 83 bp, Homo sapiens
ctgtagggtatggtccagctgtgccgcaccgaggcgagcaggagcagggaacagacctcctgccccccgaggtctgcagtctc

SEQ ID NO: 451781 - DNA, 90 bp, Homo sapiens
ggacctgttagaaggagcacagttattgaccagattccttttctggcagtagcaagagcacttgatgaatatcaacaagttgtgtccggg

SEQ ID NO: 451782 - DNA, 100 bp, Homo sapiens
gggatggcgacgtctacactgagtcggaggcgaaggcgcagaatccgcatttgctgtgatgagttgaatctcttagtgccgttctgcaatgccgagactg

SEQ ID NO: 451783 - DNA, 100 bp, Homo sapiens
acgcagctgtctgtgagggtccatgcctgcatcgggagagtcccgtattctcagagtaaaagttgtttctggaattgatctcgccaaaaaggacatcttt

SEQ ID NO: 451784 - DNA, 75 bp, Homo sapiens
aaggaactgaaagagattgagccaccacacgagcaattcacaaaggagggtatacaaggaaaggttaggacttcc

SEQ ID NO: 451785 - DNA, 98 bp, Homo sapiens
tctccatcacccaccaacaacaccacaataatccacagccaagattttaccaaatgttgcaagaactctggagttcttatggtagtaaaatgccggaa

SEQ ID NO: 451786 - DNA, 100 bp, Homo sapiens
agcccttctcccgcctcacttccgaggcactattcctgatcagagaactccagttgcttcaacacacagtatcagtagtgcagccaccccagatcgaatc

SEQ ID NO: 451787 - DNA, 82 bp, Homo sapiens
gcgagagcacggacagactcatggggaagggccaggtccaggtctggtgtggcagatgtggatagctggaccctcctgggtg

SEQ ID NO: 451788 - DNA, 50 bp, Homo sapiens
cccacctgtcctcaggcatatcaaagttaaagaagagtgtaagagtccta

SEQ ID NO: 451789 - DNA, 101 bp, Homo sapiens
agatgaggtgatggcaacggccaacttcggcaagatccagatcgggatttacgtggagatcaagcgcagcgatgacatatgtagagtgtgtcggtcagaag

SEQ ID NO: 451790 - DNA, 75 bp, Homo sapiens
ttcaccattaagaggaaagcgatggaggagctgagcgctgatgagactggattatggacagaacttggaaatatt

SEQ ID NO: 451791 - DNA, 100 bp, Homo sapiens
gtccgatgaaaggaatgggtctgggaccttaacagggagccatgggtgtccgcaatgttgccagtgtctgtctgcagattggctacccaactgttgcatc

SEQ ID NO: 451792 - DNA, 100 bp, Homo sapiens
cccgtccccggcacacgcgcagccccggcctctcggcctctgccggagaaacaggctagatgaactgcagaagcaactacaagaagacataaggcaaggc

SEQ ID NO: 451793 - DNA, 80 bp, Homo sapiens
ttgcctgtgcgcgcgtgcgcggacatggcctcaaacgtgtatggcagactcctgacatgttagtggagattgagacggcg

SEQ ID NO: 451794 - DNA, 100 bp, Homo sapiens
ctgatggaattatgcagtttattaagacacgatgaggcgagtggtacgacagagcaagtttcggcatgtatttgggcaagcggtgaaaaatgaccagtgc

SEQ ID NO: 451795 - DNA, 75 bp, Homo sapiens
caccaacatcgatgggcggcggaaaatagcctttgccatcactgccattaagatcccacccctggggaagcacta

SEQ ID NO: 451796 - DNA, 75 bp, Homo sapiens
cttggccagaactacgacattacaatggaattggcagctcggaatgctgaaagaaacctcaatgatttaaggaaa

SEQ ID NO: 451797 - DNA, 98 bp, Homo sapiens
gaacctcacgcatctaaatttaagtggcaacaaaattaaagacctcagcacaatagagccactggtacactgaggaggggacggctccgtcttcacat

SEQ ID NO: 451798 - DNA, 98 bp, Homo sapiens
gagatcatattgtacttgcgagtgagacccggctggaggaatgttttaattcttcggaaataccaagtggtctctcctgaaagaatagacccaagcgc

SEQ ID NO: 451799 - DNA, 100 bp, Homo sapiens
aggacgcactgactcgcctcaagcacctgcgcatcgtcatcgactggtcgaattgacaaatcttaccctacagtatgtggccacacaggaccagtgctgg

SEQ ID NO: 451800 - DNA, 75 bp, Homo sapiens
cgacatcttcctgcacatctctgaggaacccagtttggccagtgggatactgctggttttgagaacgaggaccaa

SEQ ID NO: 451801 - DNA, 100 bp, Homo sapiens
agcatctgaagagagttttcctgatagatctcaacagtacatccgcacttccactaatagccaagtagacaagctgaccctgtcagggagtgacagcgtc

SEQ ID NO: 451802 - DNA, 120 bp, Homo sapiens
cgcaaagcaggctcctttgagatgatcatgctgggaagactgctcgtgggagtcaatgcagagaagttgatgacgcctgagatgttttcagaaatcctctgtgacgatctggatttgaac

SEQ ID NO: 451803 - DNA, 100 bp, Homo sapiens
cgcctcccgcctccctccagctgcgagtgcggcctcggctggcggcggcaccagagtttatatcccctgtatctatgtgttaaataagattgaccaaatc

SEQ ID NO: 451804 - DNA, 82 bp, Homo sapiens
ctcggccggcgcggcgcagaagaaacccgcggcgaccacagccaaagcgggcgtgagaagccctaccactgcaactgggacg

SEQ ID NO: 451805 - DNA, 98 bp, Homo sapiens
cagaggacgccggaacaccctggaagccgagaaatggcttgcttccggcgtcatggctcaaagggccttcccgaatccttatgctgattataacaaat

SEQ ID NO: 451806 - DNA, 101 bp, Homo sapiens
atttccatcaaaaagtgattaagcagagaatggagaagaaggttgattccaggcatttggtacaatagctattcagttagcacatcatagaggagccaaag

SEQ ID NO: 451807 - DNA, 100 bp, Homo sapiens
tagcccttgaacagctatgcatgctgcttttgatgtctgacaacgtggatcgttgttttgaaacatactattcgttacttgtccttgcatgacaacaaat

SEQ ID NO: 451808 - DNA, 100 bp, Homo sapiens
atgtggacagtctcagggacaccatgtagagaattttggtctcgattcaggcaagatgtatccaatgactttgaaataaatattgaagtttacagcttgg

SEQ ID NO: 451809 - DNA, 98 bp, Homo sapiens
gggacgcgggcgccaggaccggccgaacgcagaggagacgcaggtcagaatggaaatgggctgcagaccgggcagctattgtcagccgctggaactgg

SEQ ID NO: 451810 - DNA, 97 bp, Homo sapiens
ctgtgcctcgagaggtattaggcagtgctacaagggatcaagatcagctccaggcctgggaaagtgaagttttgagtatccgaggagcccaggagga

SEQ ID NO: 451811 - DNA, 100 bp, Homo sapiens
cgacgagcgctgcactaacgcaggatccggctgccgaaggtcctcgccaggtgaccccaaaggagccatgataacccatcaaaatattgtttcaaatgct

SEQ ID NO: 451812 - DNA, 83 bp, Homo sapiens
ggagatcgtctctctcatcgaggcccaaaccgccaagccatggaccagctggccaagaccacccaggaaaccatcgacaagac

SEQ ID NO: 451813 - DNA, 90 bp, Homo sapiens
tcctaggggaccaggacttcttccagtggtaggagcaacggtgggaatgccctctgaggaatgcagtgatgtccatcagtcacctctcac

SEQ ID NO: 451814 - DNA, 88 bp, Homo sapiens
ggactcgagcctagggaggcgaggttcccgcaccggatagccttagattgtaagcaaaagaaatcaaggtcaagatctggaagcaaga

SEQ ID NO: 451815 - DNA, 49 bp, Homo sapiens
gacagagtaagaagactcccgaggcaccttctaaaaatgaacaagagca

SEQ ID NO: 451816 - DNA, 100 bp, Homo sapiens
tactactttgagttgctgcacaagcaggacgaccgcggctcggaccacgtggaagtgggcgagggccctcctggacccgggagcggaccctggtggcggt

SEQ ID NO: 451817 - DNA, 100 bp, Homo sapiens
tacatggatccaacacctgatccccaagattgaagatggaaatgattttggggtagcaatccaggaaaagctgctacctgcccaactccctgctgaaaag

SEQ ID NO: 451818 - DNA, 104 bp, Homo sapiens
agcatcagccatatccatcaaacttggatcaagtaacctgcacttgttgccaagtcttccatcttactagatgtgaaaccttgggatgatgagacagatatggc

SEQ ID NO: 451819 - DNA, 100 bp, Homo sapiens
cagatattgggagatccacagctaagacgccgggactccctggaaacctagaaatgattcctggtcgggtggcttccagtggtcttcagtctgtcgtgca

SEQ ID NO: 451820 - DNA, 96 bp, Homo sapiens
ccagatcttgccctggtgcagacaagacttaaatgcggccactccaaggaggccgggaggattgtgggaggccaagacacccaggaaggacgctgg

SEQ ID NO: 451821 - DNA, 110 bp, Homo sapiens
tcttggcccttgttcccccaaatgtctgactctgactctcggactgagaaacgcaaggcttgggcactgtttaaaggaaagttccgagaaggcatcgacaagccggaccc

SEQ ID NO: 451822 - DNA, 97 bp, Homo sapiens
accagctgaacaggccaaagccagactacagctggttcttgaagctgctgatgtatggtctgctggctgtgtgttggctgagctgttactaggacaa

SEQ ID NO: 451823 - DNA, 83 bp, Homo sapiens
tttttgttcctggggctgagtgccctcgaaatgaagctgttgtcatttctggaaggaaactggcccagcagatcaagcaggaa

SEQ ID NO: 451824 - DNA, 75 bp, Homo sapiens
ccgcagagacttctactggctgcgctcctttctggccggaggatgaccggaaagaagggatgaccgcgtttgtgg

SEQ ID NO: 451825 - DNA, 76 bp, Homo sapiens
gaacaaggattttggatgaagaagtttttgagacatctcgtggggaatttgactccagtgaatttgaagttaggag

SEQ ID NO: 451826 - DNA, 83 bp, Homo sapiens
gctcaggctgctcttggctctcaacttattcccttcaattcaagtaacaggatttggagtggatcagttacgagatgacaatc

SEQ ID NO: 451827 - DNA, 90 bp, Homo sapiens
caagtcagaaaaaggaaaatgtactttcatcagaagcagtaaagctggagaatgctggaggagaccttaaggatggccaccaccactatg

SEQ ID NO: 451828 - DNA, 100 bp, Homo sapiens
gtggaatattaccagtcagaggcggaaggactcctggaatgccacaaatgcaaatacttgtgcactgggagagctgaaactatttgattcaaataatgat

SEQ ID NO: 451829 - DNA, 75 bp, Homo sapiens
ttcaagatcctggctggggacaagggtaacaagatgctcaactatagtgctcccagtgcagggggttgcctgctg

SEQ ID NO: 451830 - DNA, 101 bp, Homo sapiens
cacttaatgaccctaaaaatggcgattctgcaaccaagcacctgaaacagcagtctctagtgatccctgaaaagttccagcatattttgcgagtactcaac

SEQ ID NO: 451831 - DNA, 97 bp, Homo sapiens
ccgctgccgctgccgccatcgtgccagcccctcggttgggacccctgattttagcaggatggcccaatggaatcagctacagcagcttgacacacgg

SEQ ID NO: 451832 - DNA, 74 bp, Homo sapiens
aagagctcggtgctggagaacttcgtgggccggtgattcctggggctgccagctaaggtcccttatgatttctg

SEQ ID NO: 451833 - DNA, 118 bp, Homo sapiens
aagtggactgcacggcccactccgacgtgtgctccgcccagggggtgcgaggataccccacaaggacagaataacgggctcccagattcacaagccccaccaagaggatcaccccagg

SEQ ID NO: 451834 - DNA, 100 bp, Homo sapiens
ttgaagatatcaatggatgtcctagaagtcagtctcagatggaacccaagacagaccaggatgaggagcattgccggaaagtcaacgagtatctgaacaa

SEQ ID NO: 451835 - DNA, 98 bp, Homo sapiens
gcttgtatcagatatctgcactatctacttaaatcttgggataaatcatacggtgattttagatgatccatttgatgaccctcctgatttattaatcc

SEQ ID NO: 451836 - DNA, 82 bp, Homo sapiens
gtctagttgcaggaaaacaagctcagggcttccactgattctacattatgatgatgtctttctacctaaagatattgaccta

SEQ ID NO: 451837 - DNA, 82 bp, Homo sapiens
cctggccgccccgagcggagcctggagcgatgccctcctagctagccgtcacgggatggagggcttcatggactcagggaca

SEQ ID NO: 451838 - DNA, 83 bp, Homo sapiens
cagctgcagccccggccgcccactcgcctcacttgagcctgtttccagtctcatcagattttccatgtcctggtggtggcagc

SEQ ID NO: 451839 - DNA, 100 bp, Homo sapiens
ttctttgtcatgtagccaagactggagaaacaataatgacagcccatatcaaggcggtgtattctttttgacaattcattttcctacagactaccccttc

SEQ ID NO: 451840 - DNA, 88 bp, Homo sapiens
tttaaagtctttagtatgttgaactggaaatataggacatgcgtttgagatctactgtgagctgcttctgatgcttggaagatatcct

SEQ ID NO: 451841 - DNA, 100 bp, Homo sapiens
cacttgtcctcaccagtcgggacttcagctgaacctctgagtgccaaggacaccactggaactcacaaaggtggccaccagactttctctgcttgtatcc

SEQ ID NO: 451842 - DNA, 89 bp, Homo sapiens
cggcggcggcacgatgccctttgacttcaggaggtagttcgaggacactacaaaggtcagcaaattggcaaggtagtccaggtgtacag

SEQ ID NO: 451843 - DNA, 97 bp, Homo sapiens
gagccagcgagcgcgccttcggcattggccgccgcgatgtcagctcagtgctgtgcgggccaggctgtggaaaatctctgttctcacaaagtctccc

SEQ ID NO: 451844 - DNA, 100 bp, Homo sapiens
gctcaggcgttgctgtttcttgtcttccaagtcaagtggttactctggtaatggattgcctctctccgagaattggcagagggggtcgatttgggaggaa

SEQ ID NO: 451845 - DNA, 85 bp, Homo sapiens
gacaagtttgcagatcgggagcgcaaggtcgccctcaaggccatgatcaaaacagtctctggtaagaagagtgaaagcaaagaag

SEQ ID NO: 451846 - DNA, 98 bp, Homo sapiens
tgttagtgatgcaaacgaacctggagagagccaaagtaccatagggaataaccagcaagtacctgtcaagaatgaagtagatcattgtgaaaatttga

SEQ ID NO: 451847 - DNA, 150 bp, Homo sapiens
tgcaataccaacatgtctgtacctactgatggtgctgtaaccacctcacagattccagcttcggaacaagagaccctgccatgaaccagagaatcagtcagagtgctccagtgaaacagccaccacccctggctccccagagcccacagg

SEQ ID NO: 451848 - DNA, 100 bp, Homo sapiens
atccacaagatccggcccatagccgagcagactggcatctgtaaggtgcggccgccgccggttatggccacaccgtgcccttgtcagatggaggtaaggc

SEQ ID NO: 451849 - DNA, 100 bp, Homo sapiens
tggaagggcaggacgaggtgtcggcgcgggagcagcacttccacagccaagtgcgggagtccacgattgagtctgaaacagcagcttctgaggaaacctt

SEQ ID NO: 451850 - DNA, 100 bp, Homo sapiens
tgtgaagtttcctataaggttagaaggccttgtgctcacccaccaacaatttagtaggtgctcgagtttggcttttcattggtttcatgttgatgtttgg

SEQ ID NO: 451851 - DNA, 75 bp, Homo sapiens
tttgggtacagaccccccagctactcgacagcctacctgcctggcagctatggcaagacactaagggcgactacc

SEQ ID NO: 451852 - DNA, 113 bp, Homo sapiens
catcaatgacttcctgaaaggatgtgcaaccctccaagtggaagaaaaggccaaagttgttgagcccctggactatgagaatgttattgcccaaagaaaaacccagatttaca

SEQ ID NO: 451853 - DNA, 82 bp, Homo sapiens
gccgctcgcaggcgccgcacggagttgcgtcccggggacttggggccgcagggagtatgaagtgtaacagaacagactttac

SEQ ID NO: 451854 - DNA, 98 bp, Homo sapiens
aacaaaatgtcaacaaattgatggaggactcaagttcaaaccatgttgatgagtttgaagataatctgctgattgaatcagatgtgatagatataact

SEQ ID NO: 451855 - DNA, 75 bp, Homo sapiens
tccccacatcaaaactgcattgtccttgaatgggcaagagggcacatgaagtacggcgtcctccacattcacggc

SEQ ID NO: 451856 - DNA, 100 bp, Homo sapiens
cctggctgcacttgaggttcccgcccaggaaggaatagccaggtctggctgggtcggcacaacctgtttgagcctgaagacacaggccagagggtccctg

SEQ ID NO: 451857 - DNA, 101 bp, Homo sapiens
cgaacagagcgtcagcatattttagactgaaaaacaaagaagtttgtcatcctgatattggtggcaagatcataatgtgtcctcagtgtgataggctttgt

SEQ ID NO: 451858 - DNA, 126 bp, Homo sapiens
ccgctgtgcccgggcctgcaccatgagcgtcccggccttcatcgacatcagtgaagaagatcaggcagctgagtatgtcccagagaaggtgaagaaagcggaaaagaaattagaagagaatccata

SEQ ID NO: 451859 - DNA, 100 bp, Homo sapiens
cgccgtgtgccttgaggtgttacaccagcctgtccggacccgctgtggccacgtatatggcaatgacccttggccagtctctgggaactaaactcctggg

SEQ ID NO: 451860 - DNA, 74 bp, Homo sapiens
cctctctgtggttgtcagtcttctcatccctaagctcaaagattagaacgactccgaaaagagagacaaaacca

SEQ ID NO: 451861 - DNA, 50 bp, Homo sapiens
cgtctgtgtcccttcatacttggaattcacggatgataccatcggggacc

SEQ ID NO: 451862 - DNA, 139 bp, Homo sapiens
cgggacagagcggtcggtgacagcctcaagggcttcagcaccgcgcccatggcagagccagaccgcaagaagaagaccccatcatccccatctctgggcagcttgcagcagcgtgacggggccaaggctgaggttggag

SEQ ID NO: 451863 - DNA, 89 bp, Homo sapiens
gagattccaaccttccagccccttttgaaaggcaccatggctgaggaaacagctccagcagttcttgagcggcaccagggggccctgta

SEQ ID NO: 451864 - DNA, 110 bp, Homo sapiens
gcctgcgaccacacggccggggcgctagcgttcgccttcagccaccatggggaatgggatgaacaaggttagcatggcctcattgaaagaactagatcaaagactctttg

SEQ ID NO: 451865 - DNA, 83 bp, Homo sapiens
ccaagcaagaagaaagacgtggcagcaagcgggagtcggggatagtgtcatcggttcgccttatgccagcctggaccatcttg

SEQ ID NO: 451866 - DNA, 100 bp, Homo sapiens
ccgggatccggcccctcccctcgcctcctctcctaggtgccggccgggagggcggccgcagcagacttcccaagtaagaagcggaagaggagccgctgga

SEQ ID NO: 451867 - DNA, 75 bp, Homo sapiens
tggtggtccactgcacaggctacatcaaggcctggcccccagcaggacatcggtgggatcaagtgaaaaaggagg

SEQ ID NO: 451868 - DNA, 75 bp, Homo sapiens
gcgcgagtgggcgcgggcccggtgggccagtcgtccctcatggaccttgctgacgtcttcacggccccagctcct

SEQ ID NO: 451869 - DNA, 99 bp, Homo sapiens
ccacgtccaagcaaaccgggaaaggagaggatcccggagccgggttttcgaaagaggagttgacttggcttcagagccttcgaggagttcctcatgtca

SEQ ID NO: 451870 - DNA, 50 bp, Homo sapiens
ggaagaaactcttagcgcaatgggctattgagtggccagacttccccaac

SEQ ID NO: 451871 - DNA, 98 bp, Homo sapiens
aaaaaaattcatctgggcggtatctggaacttgggatctggacaactctcctctgtccccaccttcaccaaggaccaaaagcagaacgcatactcggg

SEQ ID NO: 451872 - DNA, 98 bp, Homo sapiens
gaattatgccctgttggttccaatgctgggattggctgcttttccctgattacatcaaccccagagccgtgcagctgggctcccttctcgtccgcggc

SEQ ID NO: 451873 - DNA, 75 bp, Homo sapiens
aacctgcagaagaactggcttcgggaattttaccagagtctgtagaagaggcgacaccagggcttccaaatgaac

SEQ ID NO: 451874 - DNA, 74 bp, Homo sapiens
tgtggcagaagcagcaggaaagacaaaagagggtgttctctatgtaggttcttgatagtccacaatgggtgaac

SEQ ID NO: 451875 - DNA, 83 bp, Homo sapiens
tgcctcgtggtctaaagcttcggcacaagggcccaactggaattccacttacgggcactgtaagaagattcctagagattcat

SEQ ID NO: 451876 - DNA, 115 bp, Homo sapiens
cctgctccgcagcgacatcaccaagctggaggtggacgccatcgtcaacgccggtggttctaactttgatggtttgagaccaaatgggaagggagtgcctatggaccaaagctcc

SEQ ID NO: 451877 - DNA, 74 bp, Homo sapiens
ttctctttatctctgcagttggccaacagctgccctagccctgaaggcttggagaaccccctgcctgagcgtcc

SEQ ID NO: 451878 - DNA, 90 bp, Homo sapiens
agagcacgtggccagagtcctccttcagcacatagaagtgaatggcatcaatctggtggatgatgactttacagcccaagattacaggct

SEQ ID NO: 451879 - DNA, 100 bp, Homo sapiens
caggtggctgccaggggcgtgccagtggctgaatttaacacggagaccaccccagctacgaacagattcagaaaccccgagactcttcagttgaagttcg

SEQ ID NO: 451880 - DNA, 75 bp, Homo sapiens
tggaagacctattatcagatcaaccaccaaagtgggaaacattgaaatcaagagcaaacatgaacgttggagttg

SEQ ID NO: 451881 - DNA, 51 bp, Homo sapiens
cccatctcctgcctcctaatagctttgaggctcggacctcaggcacatgcg

SEQ ID NO: 451882 - DNA, 74 bp, Homo sapiens
aaacgtggagatcaactcctctctgttaatggagtggtgtatgtgctcaagaggccttatgtggatgagttcct

SEQ ID NO: 451883 - DNA, 80 bp, Homo sapiens
cagcctcttcgagcgccgcggacgcgtcatcgagtgtgacgtggtgaaaggattttttatcaagcagaaatgcatcgaac

SEQ ID NO: 451884 - DNA, 82 bp, Homo sapiens
caacttgaccgtctactggaaatctgaatgctgttatcacgggaaagcaagatagtttcatttggatttggaagtagcacag

SEQ ID NO: 451885 - DNA, 75 bp, Homo sapiens
cggagagacgcacagctaagatgtcaggacatcctggaagctgggaaagggaatgggtaccacagaccatgtcat

SEQ ID NO: 451886 - DNA, 75 bp, Homo sapiens
ggggaccctgactgccctgatgattcagacgagtctttagatacctataaacttctgcactggaggggcctctcc

SEQ ID NO: 451887 - DNA, 100 bp, Homo sapiens
tctgaagatgattacacggcattaatctcccaaaatattctagaaggggaaaagctacttcaaggaacccaagacagaccaggatgaggagcattgccgg

SEQ ID NO: 451888 - DNA, 89 bp, Homo sapiens
tgtgtcaacctcatcaatggcacctgcttctacaccaagaatggccacagccttggtgtagacggggcactgccttcagagcaggtcct

SEQ ID NO: 451889 - DNA, 100 bp, Homo sapiens
ccgggatccggagggtcacttccctcgctgcatccccattgtgcaactgccagtctaaaaattgatataggaatgtgttccagaagatctagaactgaag

SEQ ID NO: 451890 - DNA, 96 bp, Homo sapiens
ggaaaatatctgttaacagactgcttttacacctacgccgctggcccaacaggcaaaaatgaagaaaaaattcaggttctaacagacaaaattgat

SEQ ID NO: 451891 - DNA, 90 bp, Homo sapiens
aaaagaagagttaaatgccctcaagtcgacaggggatgggaccctagatgaagaagatgactttatgtgtaagaaggcggcctctaaatc

SEQ ID NO: 451892 - DNA, 83 bp, Homo sapiens
ccaacgtcatgacaagagctacagaagcactgtggcagcccctgtcaaagggaacaggaagcagtccacggagggtgacgccc

SEQ ID NO: 451893 - DNA, 73 bp, Homo sapiens
ccctgggccaattatactttgagcatctacagattcttcacaaacaaagattggctcgacatcgaaaaatagt

SEQ ID NO: 451894 - DNA, 75 bp, Homo sapiens
aatattcagaactggatgaaaagcatcaaggagctggccaccacggcactttacttcacatactcagccctcgag

SEQ ID NO: 451895 - DNA, 51 bp, Homo sapiens
tgtctgcgagccaggattcccggtcgcctgcgaggccgctggccaggcctg

SEQ ID NO: 451896 - DNA, 82 bp, Homo sapiens
cttcgatgttcttctaatactcctcctctaacatgtcagcgttattgtaatgcaagaaataatgcaaaaggtgtcccaaggc

SEQ ID NO: 451897 - DNA, 83 bp, Homo sapiens
aggcaggccctgagcacgctgctgtgtgagcagcagatgagcagcaccagcagtaagagggctccgaccacggcaacccagag

SEQ ID NO: 451898 - DNA, 100 bp, Homo sapiens
tgatcagatccccaaatactgctttccaaactaggctcacccctccagctacccctccccaccagttatggaagcccctggctgctgtctcactgctggc

SEQ ID NO: 451899 - DNA, 51 bp, Homo sapiens
tgcaaatccaccttatggaagccggataagttgtcatttacgtgctgaagc

SEQ ID NO: 451900 - DNA, 97 bp, Homo sapiens
accaatttgtggtgcacactgtacagttcctcaaccgcttttctacagtttgtgaggagagcatttttctcagcatttgagaagttggcagccatcc

SEQ ID NO: 451901 - DNA, 51 bp, Homo sapiens
tcatcagagtgtgggggttgtgaaaggccaggctaccaacgtctttgtgaa

SEQ ID NO: 451902 - DNA, 100 bp, Homo sapiens
agagatctgcctggaaccctgactctatcactaggacaggcgacactaacaggtgaagatctcgggagaccatgactaagaaaagaattgctgtgattgg

SEQ ID NO: 451903 - DNA, 98 bp, Homo sapiens
tgggatccggctcctccagctaccggcccaaggccatctacctggacatcgatggacgcattcagaaggtcagcaaagtggaacgcgagaagaaccag

SEQ ID NO: 451904 - DNA, 59 bp, Homo sapiens
attctcaaagcctcctggccccagagacaggaagttcagaaaaaagtgtcacgttttaa

SEQ ID NO: 451905 - DNA, 100 bp, Homo sapiens
gagagcgacctggagcggggatacacgtcaagtccatcatctccagaaccagctagtcttcctgcagaagatattagtgcaaactccaatggcccaaaac

SEQ ID NO: 451906 - DNA, 74 bp, Homo sapiens
atgagcctcaagtgcttctgcattacatggtggatctgaaccttctaacagaggaggtaagattatacagctgc

SEQ ID NO: 451907 - DNA, 100 bp, Homo sapiens
gcgaacgcttcgctggccatttaggagctctgctcaaagccagacgctctccagggcacaccgtattcagctctgagcggtctttgctagtgaggccaag

SEQ ID NO: 451908 - DNA, 100 bp, Homo sapiens
ggcgttccttctgctgctattggatcctttcctaatgctctttccaacaactgatcctgtgggtactttgctccaagttccagaacagatctctgctcat

SEQ ID NO: 451909 - DNA, 75 bp, Homo sapiens
atcctgtatgtggggtccatgcctcttaagaactcttttcgaggaactatccggatttgttaaggattccaagta

SEQ ID NO: 451910 - DNA, 100 bp, Homo sapiens
gaaaagtggtgctctcctagaaagtgggacttatgaagggcaaagtgcaattgctggggaagaacatcccagaggttcaattctgcgggaagtgcacctc

SEQ ID NO: 451911 - DNA, 101 bp, Homo sapiens
agcgagttctggagcgccctgctggagaaggcatacgccaaatgccatcccgcccactttctacagaccctacttcagaattgttcgatttgacgtctcag

SEQ ID NO: 451912 - DNA, 82 bp, Homo sapiens
gggagagctgtttgtgggccagctgccctctgaggagatggtcatgacaggcatggaaagctcacctgatgggcccagccgg

SEQ ID NO: 451913 - DNA, 101 bp, Homo sapiens
agttcctcttgctcacagagctctgtaaaggagcatcagatccatgctgctgctgactcggagccccacagcttggcacaggctctctcagctcaagcctc

SEQ ID NO: 451914 - DNA, 100 bp, Homo sapiens
cacgccggcactcgcggctgctggagccccggctggctcaccccggggccgggcagaattgggctccagaaaaagttggtgattcaaggaaagcacattg

SEQ ID NO: 451915 - DNA, 75 bp, Homo sapiens
gccgagatgccgggggagcggggccttccacaccccctccgtgggtgtgtggaacatgcttgccaactcagccag

SEQ ID NO: 451916 - DNA, 75 bp, Homo sapiens
ccgaaggccctatcaggacatggagtatgaaagacgatgttctcagtgcagctgagtcttggtgagcagacatgg

SEQ ID NO: 451917 - DNA, 82 bp, Homo sapiens
ctttggtcttgcacggatcatggatcctcattattcccataagatgttgctgacaaaaatgcttctaacagaaattctgctg

SEQ ID NO: 451918 - DNA, 75 bp, Homo sapiens
cgccgtcaacgccttcaaccaggagatgtccagggtgctgcagaaggacgcggagcaggagtcacagatgagagc

SEQ ID NO: 451919 - DNA, 100 bp, Homo sapiens
gcacttaagcaaacgggaattctcgcgtactccaaagattcaggtttactcacgtcatccagcagagaatggaaagtcaaatttcctgaattgctatgtg

SEQ ID NO: 451920 - DNA, 107 bp, Homo sapiens
cgtctaccagatcaacgtcctccgggaccggagtcagaaccctccgcagagtaaaggtgctggagaatctggtaaaagcaccattgtgaagcagatgaggatcctgc

SEQ ID NO: 451921 - DNA, 100 bp, Homo sapiens
gctttgttcgccaccccaattacttgggtgatctcatcatggccttggcgtggtccctcccatgtgagatgaagcactacccagtcttacccaagttcga

SEQ ID NO: 451922 - DNA, 100 bp, Homo sapiens
ctagctttctccttctggtgtggggcccgagcctgattacatcaaccccagagccgtgcagctgggctcccttctcgtccgcggcctcaccactctggtt

SEQ ID NO: 451923 - DNA, 99 bp, Homo sapiens
ctgggatagattgcaccctggagagatctatcctcaggagagacacagcataagagttcctgaatcgggagaacattatgaactgcatcttttgcacta

SEQ ID NO: 451924 - DNA, 90 bp, Homo sapiens
ggaggcagaggtaaacttggagaggtgctctcgccaacaaagtgaagaggaaagacacactggcaatgaagttgaaccacagacccagtg

SEQ ID NO: 451925 - DNA, 96 bp, Homo sapiens
ttcaggacctttttaattaaatatggcctgttacatgagttaaagctcctctggtgcaagtgtggtagctattgacaacaaaatcgagcaagctat

SEQ ID NO: 451926 - DNA, 83 bp, Homo sapiens
aggagctgatagcggagctgcagcccagaagaatcagtgcggtttctgtggcagagcgagttgcatttgaaagaggagaagag

SEQ ID NO: 451927 - DNA, 50 bp, Homo sapiens
ctcctggaggagctacgcagggctgatcagctgaccgaagaacagattgc

SEQ ID NO: 451928 - DNA, 100 bp, Homo sapiens
ataacccagagccctggaacaaactgggtcccaatgatcaatacaagaactttacttcatatcaacttcttggcacctttatttatggttctgctctggg

SEQ ID NO: 451929 - DNA, 100 bp, Homo sapiens
cgcacctggtgcgggccctctggaccctggagtacaccccgcagcacagccgcgacttcaagaaggccccctggtaaggccagccagccggaggaccacc

SEQ ID NO: 451930 - DNA, 88 bp, Homo sapiens
tgtgtatgatggcctggcgacccattcaggcacttatggccatttcagccaaacattatgctatggaagataaacaacatggagaatt

SEQ ID NO: 451931 - DNA, 51 bp, Homo sapiens
aaacaccgcaacccagatggcccaggaatccctgggccactggagtcaagg

SEQ ID NO: 451932 - DNA, 80 bp, Homo sapiens
tgagcgacagcggcgagcagaactacggcgagcggttcctacaacagcagccagtacccctgatgccgttgacaagtatc

SEQ ID NO: 451933 - DNA, 97 bp, Homo sapiens
ctgatctgtacccagaaagagtcatacctggagcagcaggctcaagtggtcctgtcgaagtatttatcactgagactccgagtcagcccaactccca

SEQ ID NO: 451934 - DNA, 97 bp, Homo sapiens
gtcgaggatcgtggtgccggaaatcaagatgaagacttccggggcaggcgtcaggaggcacccaaggtggaggaaggcctgcgagaaggacagtaag

SEQ ID NO: 451935 - DNA, 50 bp, Homo sapiens
ggaagttagaggccagactttctggttaagttcagtgaactaactgttga

SEQ ID NO: 451936 - DNA, 99 bp, Homo sapiens
gggaaagagagcgccaggtgcttagcagttgtatcacggactgattcaccgagcccaaccgtactcaactcacatatttctaccccaaatgtgaatgct

SEQ ID NO: 451937 - DNA, 100 bp, Homo sapiens
ccgcctccccggccacgcgagcgggaacagtctcctccactcggagcggtagaagaaggctggtggagtggaaccctgaataacaagttgggactgtttc

SEQ ID NO: 451938 - DNA, 98 bp, Homo sapiens
tgtatcaaaactgaagatggtttgaaacagcttcacaagtgaatgagttcacggtgatcaggaagaagttcaagtgtccgtactgcagcttctcggcc

SEQ ID NO: 451939 - DNA, 82 bp, Homo sapiens
cgttcggccaagggaccaaggtggaaatcaaacgaagtgggaaaactcttgcctttgccatcccaatgattcatgcggtgtt

SEQ ID NO: 451940 - DNA, 100 bp, Homo sapiens
ggacgatactctgaccgttttagtagtcgcagacctcgaaatgatagacgggccatgtttatgagtggactaagtgaaagcaaacaaacccatgtacacc

SEQ ID NO: 451941 - DNA, 110 bp, Homo sapiens
ggctgactggatccacagcagtgggggctgggtgtctgacttccagcaactgctggcctgtgccagggtgcaagctgagcactggagtggagttttcctgtggagaggag

SEQ ID NO: 451942 - DNA, 100 bp, Homo sapiens
tgaggcggcgacgggctccgggccatactggagatgttactattcaaacacagatgcagtcatttatgtagtagacagttgtgaccgagaccgaattggc

SEQ ID NO: 451943 - DNA, 99 bp, Homo sapiens
aaaataccacctttgatacttttaaggcttctctcgtcaaaaatggtgcagaatttacgatctttggatggattatatgaaagaagaattgaaccaccc

SEQ ID NO: 451944 - DNA, 76 bp, Homo sapiens
gtagctggaactacaggcgcccactaccacgcccaggaccctgatgctcccataagacagaaaatgccccttgatg

SEQ ID NO: 451945 - DNA, 98 bp, Homo sapiens
gcagtaataatactaccacctctggtttcggctttggagccacaaccacatctagctctgcagggatgaactcttccgacaaagcctggcaaaactgc

SEQ ID NO: 451946 - DNA, 74 bp, Homo sapiens
ggttccatgtgatggtggagtaggaggcaggtctccgcggctggagcattggatttgctaaaggagcttaagaa

SEQ ID NO: 451947 - DNA, 75 bp, Homo sapiens
tgaattacaacacgcatggggagctgggcgagggcgccagaattcagaaggagctggcggacatcactttagacc

SEQ ID NO: 451948 - DNA, 90 bp, Homo sapiens
ccgactcgggcttggcgcggcggccagaggaaccccgagatcttaatatttgccagtgatgcctgcaaaaatgtgacattacatgttccc

SEQ ID NO: 451949 - DNA, 83 bp, Homo sapiens
cgcccgtccccctgccccgttcacaatgtgagaagccctaccactgcaactgggacggctgcggctggaagtttgcgcgctca

SEQ ID NO: 451950 - DNA, 113 bp, Homo sapiens
ttccagtattgcctctccaagatctgccgagatgtacagaaaacactaggactaactcagcatgttcagggtggggaagaaaacatgacagaaacagatgccttctataaaag

SEQ ID NO: 451951 - DNA, 90 bp, Homo sapiens
ggccgggcaatgcctcgcgggcgcaatgaatccgcggcagggaccaaagcagtatccttacaataatctgtacctggaacgaggcggtga

SEQ ID NO: 451952 - DNA, 90 bp, Homo sapiens
tagccaatcggaccaaaaattcactcactttgcaatggaaggatgtctccccgttcaatgttgtggcctggcacgggaattatacaccct

SEQ ID NO: 451953 - DNA, 82 bp, Homo sapiens
ggcgctgaaggggttaattcaacagttcaccaccattaccgtgggcatccccaccatcagatggtgcggggcagagggggac

SEQ ID NO: 451954 - DNA, 80 bp, Homo sapiens
gaagaagggtgtttggggtgtgttttacaaagactgtacccgctgccctgcagggactgaacctgctgtgggatttgaat

SEQ ID NO: 451955 - DNA, 50 bp, Homo sapiens
ggacccactggaagcctagaaatggtggacactatatagcctactgccga

SEQ ID NO: 451956 - DNA, 83 bp, Homo sapiens
atgggtaccgatccctctgtgaacagatgatagtatttctgctgcaagtacttctgatgttcaagatcgcctgtcagctcttg

SEQ ID NO: 451957 - DNA, 100 bp, Homo sapiens
ctggaaggaaaaagatctaaagtcacccggcggccaaaggccagtgactaccaacgtttggaccagaagtattgtccttgtgaacttccttgaagatggc

SEQ ID NO: 451958 - DNA, 50 bp, Homo sapiens
cgcggctaccgtggccgagctagaactcatctaaagccgcccaagcccca

SEQ ID NO: 451959 - DNA, 74 bp, Homo sapiens
gatgataatgtagatggcctccttgttcagttgcctcttccagtacataccgagcatcaaatattaaggcaccc

SEQ ID NO: 451960 - DNA, 100 bp, Homo sapiens
ctgcccagagcaccgctcacactcccagagtacctgaagtcggcatttcaatgacaggttgtggtatgagaaccctggggtgttctccccggcccagctg

SEQ ID NO: 451961 - DNA, 83 bp, Homo sapiens
ttcctggcaagcccatgtgtgttgagagcttctcagactatccacctttggttccagggtctccctccactgctgtagtaacc

SEQ ID NO: 451962 - DNA, 74 bp, Homo sapiens
gcagggcagacgccgtgtgtctgtttcacgtgtactaatggtcacttgatgtgcgctggctgttttatccacct

SEQ ID NO: 451963 - DNA, 78 bp, Homo sapiens
gggatccttcacccgtgtctggtcagcgccaacggcaatgtcctgcgcagcgagatcgtgggctccatcaagatgcga

SEQ ID NO: 451964 - DNA, 82 bp, Homo sapiens
gctgttatttttagatacttttaaacacccgagcgctgaggtggtcttcaagctgacagagaagctgacggaacagaaggag

SEQ ID NO: 451965 - DNA, 83 bp, Homo sapiens
tgccgtccttctccactttcgccagcccgtgccgcgagcgcggcctgcaggaggtcttgggcgtctttggtactggctttttt

SEQ ID NO: 451966 - DNA, 100 bp, Homo sapiens
ctgcacgctcccctcaaggcctgggtgcttctactgcagaaatatcagctagaaccatgcagtcaatatcaccttttgccatgatagcatttctttcatt

SEQ ID NO: 451967 - DNA, 75 bp, Homo sapiens
cggcacccagacaggtggcgaaggcagaggaaaattgcaggtgctgcagtgtctgaaatttccgggcctttctca

SEQ ID NO: 451968 - DNA, 88 bp, Homo sapiens
tgaggaggaaaacacccccattagtgaagatagtccaagtcctaagagacagcgcctctctcattcagtctttgattatacatcagca

SEQ ID NO: 451969 - DNA, 101 bp, Homo sapiens
gtcctggatttgaagtaaacagatgagaattctagaatatcctccgaatcctaaatctagagctccaaggatgctggtcattaagaaaggtaatacaaaag

SEQ ID NO: 451970 - DNA, 85 bp, Homo sapiens
tgctgaccgagagagctcactcagccagaattaaacaaccaccatgtcgagcaaaaaggcaaagaccaagaccaccaagaagcgc

SEQ ID NO: 451971 - DNA, 139 bp, Homo sapiens
gccggcctgagccccagagtcagctcccctttctcgcccagcgcccccaggccgctcccggggctcacgatggacctccagttgtagctcattatgatatgtctgacaccaactctgacccagaagtggtaaatgtgga

SEQ ID NO: 451972 - DNA, 101 bp, Homo sapiens
cacctaggagaactaaatgggcagctgaaatattaccaggatcctcggttcaatgcagaagttgaccaaattacaggctacaagacacaaagcattctttg

SEQ ID NO: 451973 - DNA, 90 bp, Homo sapiens
gtttttgggaaagccaaatggagctcagaaagctgtatggacctctgtgtggataacagacgagtacctttggaaaggtcacgctctcgc

SEQ ID NO: 451974 - DNA, 90 bp, Homo sapiens
ggtgaccctgccgctggcgagcgccaccgcatggacagccagctaaaggtgtggatgagcaaatacggctggagtgccgacgagtcgggg

SEQ ID NO: 451975 - DNA, 98 bp, Homo sapiens
acaggcacaaatacatttacaagagccctgagctgccacggatactgaggagagaaaggccttgggaaaacaactgggaagaagttatgttataaagg

SEQ ID NO: 451976 - DNA, 100 bp, Homo sapiens
gtcgtgatccagaagtccagagctgaggactgcctgtttgcagaaatctgcagggacctgtgcctgggcttagggcctctggcagcactaccgtcacctg

SEQ ID NO: 451977 - DNA, 101 bp, Homo sapiens
ctgctgctcctgctcctggtggccgccagccggcgcgcagcagtcactcaagactgcttgcaactgattgcagacagtgaaacaccaactatacaaaaagg

SEQ ID NO: 451978 - DNA, 100 bp, Homo sapiens
tgatgatggcaagaaggcccttgtgttggactgtcattatccagaggatgaggtggtggacatcatgagggtgaacgtggacaaggtcctggagcgagac

SEQ ID NO: 451979 - DNA, 100 bp, Homo sapiens
cgccgccgccgccttgctgctgctcaaagctgctgccgccccttgggctaaaagggttcccatgtgaccaggtggccgggcttctacatcctgcagtgga

SEQ ID NO: 451980 - DNA, 100 bp, Homo sapiens
cccgcccggagcggcccaggagcacgccgcggggagcgcgggcgtccggggctggagtcgcgcagaattcagagttcaagagctccttaaaggatacaca

SEQ ID NO: 451981 - DNA, 74 bp, Homo sapiens
tgaagatctggacttcggagcacgtctttgagtgtcgtgaaaactacccctaaaagccaaaatgggaaaggaaa

SEQ ID NO: 451982 - DNA, 97 bp, Homo sapiens
gggctgaaggaggaggacaaagagcccctcatcgagctcttcgtcaaggcctgcactgcccaaagtcttggaaacttgctggatatgatgtaccggg

SEQ ID NO: 451983 - DNA, 86 bp, Homo sapiens
tgctcttcctcccttcgctcgcaccatggtgtggacactgccagcggctgcagccgacttggaatgacctgggagacaaatacaac

SEQ ID NO: 451984 - DNA, 101 bp, Homo sapiens
tgggttaatgacatagtatctttaaactacacaaaagtggaacagctttgttcaggttaaatggaagctgatcggcgttcacatggaatcctcctcacgta

SEQ ID NO: 451985 - DNA, 100 bp, Homo sapiens
gaaaggttcggaatttgcctctgcgccgtctttttttgcctgttacctgtgacgtccttgatatttcagcagttgaatcagttgaattcacttcatcaag

SEQ ID NO: 451986 - DNA, 95 bp, Homo sapiens
agcggctgcaggactgggcacagcatgagatccaaaggcagggcaaggaaactggccacaaaaatcatgaccaccccaggaaaagagaactttcg

SEQ ID NO: 451987 - DNA, 100 bp, Homo sapiens
ttgcaatccaggcaggaagattgctggctcagaggctctatgcaggttccactgtcaaggttcctaaaagtaaagctttagaggccaccaaattggcaat

SEQ ID NO: 451988 - DNA, 50 bp, Homo sapiens
cctttccacctcgcggcagttcgctccagtgatccacaagctcagaaata

SEQ ID NO: 451989 - DNA, 98 bp, Homo sapiens
aatggattcccagtcaagaaatgctcagccttccaattttttaagaagcggggctcaaaatttgggcggggaactggactcactcagccttctcaacg

SEQ ID NO: 451990 - DNA, 73 bp, Homo sapiens
acagctggatgaatggaaagcaaagaagaaagcttctaatgggacaagttggatggcttgaggactggtacta

SEQ ID NO: 451991 - DNA, 87 bp, Homo sapiens
acattgaacatgccttcatcctctataacaagtatatcacgctccactttgaggctctgatgaacattccagtgctggtgttggatg

SEQ ID NO: 451992 - DNA, 74 bp, Homo sapiens
tagtagctgccttctgctctccagcgctctcagcaccaagtggctgcaatattaaaggtgaagatgagagctgg

SEQ ID NO: 451993 - DNA, 75 bp, Homo sapiens
aggacttgcttttgttgaactggctgctttgtaccgcctcagtggagactggaatcccttacacattgatcctaa

SEQ ID NO: 451994 - DNA, 50 bp, Homo sapiens
gatgtgtaggaggaagagctcagcaggttcaggagaagtggcacctggtg

SEQ ID NO: 451995 - DNA, 100 bp, Homo sapiens
cgtcgctagaactcagttgtgcgttgcggccagtcgccactgctatgagctcacagtgcctgcactttaccccagtagccctgaagtgtgggccccgtac

SEQ ID NO: 451996 - DNA, 102 bp, Homo sapiens
gagcagacctcggagatcatcacgtttgccgagtcagcaatcaatgggaaactctatgccaaccttaggggtcttaccatgtaccaaggagaacgagtggcc

SEQ ID NO: 451997 - DNA, 83 bp, Homo sapiens
cgcctctgtgtttgaaacaaacattcgagctttagcgtcacctccctcactgggcagcatgggggagaagtcagagaactgtg

SEQ ID NO: 451998 - DNA, 90 bp, Homo sapiens
gccttccttgcagaggccatggaggacgaggagagacagaagaagctggaggccggcaaagccaagaaaggacaactgggcagaccaatt

SEQ ID NO: 451999 - DNA, 100 bp, Homo sapiens
ggtccctcgcctcccggccgagctgacgattgaatttagtggaagcttttgtagaagatgcagaattgaggcagactttacaagaagatttacttcgtcg

SEQ ID NO: 452000 - DNA, 100 bp, Homo sapiens
gaaaagtctggcctcggcgccaagatcccagtcacaattatcaccgggtatttaggtttctggtcctcataccgtgtggttgagtgaaatcaaaacttcc

SEQ ID NO: 452001 - DNA, 100 bp, Homo sapiens
aacctcatcgactcccttcagaaagctgggtatagaacaggctatgcttacaggcatcctctcattcgagagaagcctaggcacaagagtgatgtggaaa

SEQ ID NO: 452002 - DNA, 51 bp, Homo sapiens
gccttggtgaccaaggacagtgtagcaggctgctggtcttggtcgtatgaa

SEQ ID NO: 452003 - DNA, 73 bp, Homo sapiens
agttcgtctcttacgtctgcggaagtgcagctgcctcagttcttagcgcaggcgttacatagccatgtgccgc

SEQ ID NO: 452004 - DNA, 100 bp, Homo sapiens
cacaccacaaccaggcgaagcaggtagtggcgctgaatcgctcctgccgcggggcgaggattaaatccaccacacagggtgaaatctatctccatgacaa

SEQ ID NO: 452005 - DNA, 82 bp, Homo sapiens
ccaagacacccagagagggacaggtgagaagccctaccactgcaactgggacggctgcggctggaagtttgcgcgctcagac

SEQ ID NO: 452006 - DNA, 73 bp, Homo sapiens
aggcggcgttttctccttcggaacgggagcgtctaggttgggggccgtcccgctcctaaggcaggaagatggt

SEQ ID NO: 452007 - DNA, 75 bp, Homo sapiens
ctgcattcagctggtataattcatagagttttagcatcttcttcagcaaatgaatgcatttcggttaaaggaaga

SEQ ID NO: 452008 - DNA, 75 bp, Homo sapiens
acccaaagtgccatgtctttaattattggtaaaggttttcaaggtgtcatgaaaagatggggatttaaaggccag

SEQ ID NO: 452009 - DNA, 111 bp, Homo sapiens
aggagttctaccagtccctggggattccttaccacattgtgaatattgtctcaggggatgttcgtctaaccccagaagactttgctagagctcagaagtactgcaaatatg

SEQ ID NO: 452010 - DNA, 75 bp, Homo sapiens
gtggtggaagtgagaccgaaatagactctgaagtaatatctggactttgaaattattacccagtctcaggcagtt

SEQ ID NO: 452011 - DNA, 74 bp, Homo sapiens
cattcatggtgtctcaagagaaaaaatccaccgaatgaaagaacgtgcaagaaatcagccagcgtggtggcgtg

SEQ ID NO: 452012 - DNA, 75 bp, Homo sapiens
tttgggatatcaagagtataatgtctatggtgaagtcttttgtacagtggttagccgaggcctgcctggagcccc

SEQ ID NO: 452013 - DNA, 49 bp, Homo sapiens
agtcactcaggacaagcttgaagacaactcgagagatgatcgctcgttc

SEQ ID NO: 452014 - DNA, 75 bp, Homo sapiens
tgaagagggacgggtcccgcggcgagcgagctcctgaggcattaccacaggagtcttggttcgagaacacagcaa

SEQ ID NO: 452015 - DNA, 75 bp, Homo sapiens
cagaagattgatcatcatatgggttgaaaatgtttataggaggccttagctgggacactacaaagaaagatctga

SEQ ID NO: 452016 - DNA, 82 bp, Homo sapiens
gccgccaaagaccccgtccggtagcattttgaaagcgaagcagaagccgtagaatcagcggcgagcctgttgaaagaaccca

SEQ ID NO: 452017 - DNA, 82 bp, Homo sapiens
ccaaattgtagctgacgaagcattttgcaacgcagttcggagttattatgagataaaaatctggataatgccgcagaagcag

SEQ ID NO: 452018 - DNA, 96 bp, Homo sapiens
catccatctgttcttaagtatgagaagattaaggacacagagtctgggatctaataattcagtcattttggatggactaaaaagaagacagaattt

SEQ ID NO: 452019 - DNA, 75 bp, Homo sapiens
ttccctgaccattttctactgtccctgcgcgaggttttagctaaagaagatactgaggcagctattcaatcaata

SEQ ID NO: 452020 - DNA, 122 bp, Homo sapiens
gcaggatgggatccggctcctccagctaccggcccaaggccatctacctggacatcgatggacgcattcagaaggaaacatgccctgaactgtcacagaatgaaaccagcgctcttcagcgt

SEQ ID NO: 452021 - DNA, 94 bp, Homo sapiens
gggatttgggtcgcagttcttgtttgtggatcgctgtgatcgtcacttgggagtgcatccgccccaacccttttccccctcgtctcctgtgaga

SEQ ID NO: 452022 - DNA, 74 bp, Homo sapiens
ctgctgtgcagtctgatgaaagacttcagcctctgctcaatcacctcagaacatatgctgtcaggaggataaga

SEQ ID NO: 452023 - DNA, 50 bp, Homo sapiens
cactcctgggccgtccctgaaggagattgtgaagacctttgagatttcag

SEQ ID NO: 452024 - DNA, 101 bp, Homo sapiens
gcagaaagcaggcgaacccgcggcgcaataacggtccagtggtttacgtcttggatcttgcagatagactgatctcaaaagcctgtccatttgctgcagca

SEQ ID NO: 452025 - DNA, 75 bp, Homo sapiens
cttcatgatattactgtaccgttagaagtttttgatgattcgcctttgccagtctcatctcgtgtctgctttgtt

SEQ ID NO: 452026 - DNA, 87 bp, Homo sapiens
ccaaggtgcagggcaacacctctacaaggatctgcagccatttatattgcttaggctactggcgatcagtgggtgaccgcggctgcg

SEQ ID NO: 452027 - DNA, 100 bp, Homo sapiens
cttgtccaacacagtgatgcggctcatcgagaagcgggctttccaggacaagtactttatgatagcaagagtgagccatggagctacgtgtggggaacaa

SEQ ID NO: 452028 - DNA, 98 bp, Homo sapiens
cctcactctcgctcgccgtttccaggagcacagacttttggaaaagaatttgataaacattttgggaaaggaggttctaaactactgagaatgaagct

SEQ ID NO: 452029 - DNA, 90 bp, Homo sapiens
gaatactattgttgccacaggggctgttgataatcaggtgtatgtggccacagcctctcctgcccgggatgacaaagcctcctatgttgc

SEQ ID NO: 452030 - DNA, 100 bp, Homo sapiens
cgggaactccccatcgcgttttgccagcgataatacgcctcaggcatacccagagtatcttatcacttaccagatcatgaagccagaagccccttcccag

SEQ ID NO: 452031 - DNA, 100 bp, Homo sapiens
tttagaagaagagaagcgtgcttttgaagaagcaaggcggcaaatgtgggagaagttgcagatgacgtccagcgagcgcaggaagatcatgtgctcagtg

SEQ ID NO: 452032 - DNA, 100 bp, Homo sapiens
cggacgggaaggcgggagacgagaagcctgaaaagtcgcagcgagctggagccgccggagatacattccaccgttgatctgggggaaaagtggacacatc

SEQ ID NO: 452033 - DNA, 100 bp, Homo sapiens
gaggccttcaccgcctacctgctccaccgggggacggctacgtgcaggcggacgcccggggccccccggaccacgaggagcacctgtatgtcaacaccca

SEQ ID NO: 452034 - DNA, 75 bp, Homo sapiens
gagaatggagtcttccatcaatcatatctcacagggacatccaacgggctcatagagtggtagctgagcttcagg

SEQ ID NO: 452035 - DNA, 75 bp, Homo sapiens
tgctgcatccaaatcttctccctggacctcgtgcatacgaatcctcactatggatgggctcattgaggacattaa

SEQ ID NO: 452036 - DNA, 100 bp, Homo sapiens
ggaagggtctttgttccctgcagccctcccacggaagaggatgaaatggattctggcacgatggttcgagcagtgggtgatgagatgggcactgtccgag

SEQ ID NO: 452037 - DNA, 87 bp, Homo sapiens
aatttgaagattctacagataaatcagctctgtcagattcagggagttttgtatcttctcgagcccggcgagaaaaaaaatcaaaga

SEQ ID NO: 452038 - DNA, 83 bp, Homo sapiens
ctccagcccggcccggcagcgacatggaaggcactgacccttgacctccggtggctcccccatctctcaggcgcgatggctac

SEQ ID NO: 452039 - DNA, 100 bp, Homo sapiens
ggaaatggtaatccagctcctggcgataatgtgtgtctcctgtatttgttggagcccatttctggccaaacgtaccaagaaagtcgggatcgtcggtaaa

SEQ ID NO: 452040 - DNA, 83 bp, Homo sapiens
aagaaattcagcaaccaggagacctgacaatgcagatcttcgtgaagactctgactggtaagaccatcaccctcgaggttgag

SEQ ID NO: 452041 - DNA, 80 bp, Homo sapiens
gttggaaccaacatcttccaaactcctgtgctcaaagatccagacagcaatccatacagcttacttgataatacagaatc

SEQ ID NO: 452042 - DNA, 96 bp, Homo sapiens
gggaggagacaggacctttttcaacttgacaaataggtgtcatggagaaactccagctgggcccagagattctgcagcgggaaaatccaaggctta

SEQ ID NO: 452043 - DNA, 105 bp, Homo sapiens
cggctcatgttctgggacttaggagggcaggaagagctgcagtctttgtgggacaagaatagcctaacatggcagaccagagacagcgctcactgtctacctctg

SEQ ID NO: 452044 - DNA, 100 bp, Homo sapiens
gaatccatcacttgaagatcaagcttgtgaccgaatttaccgagtagggcagcagaaagatgttgtcatacacaggttatcaatagtctggctgtctatc

SEQ ID NO: 452045 - DNA, 75 bp, Homo sapiens
cgagctcttggatgttcttggacttgacgaaatggcttcagacatacctggatctgtgacgttgcccgttgcccc

SEQ ID NO: 452046 - DNA, 99 bp, Homo sapiens
aaggggcacctcagtatcccagtgcattcccatcctcgctcccacctgtcagccttctaccccatgagaaagaccaggaggcaaaaccttcaactgagg

SEQ ID NO: 452047 - DNA, 129 bp, Homo sapiens
gggtggagacgtggtactcagcaagctcgagttaaagttggatgtgctggaacaggatgaagatgagctggattcccacaccatggtgaagactagtgtggagagtgtgggcaccatgcgggccacaag

SEQ ID NO: 452048 - DNA, 51 bp, Homo sapiens
cttcaatgccagaatggtgtttgaaaagaggatctctgggaaagtttagaa

SEQ ID NO: 452049 - DNA, 51 bp, Homo sapiens
ccaatgtcaaacagtttattgcaccagattatgccgacaagcccctggaga

SEQ ID NO: 452050 - DNA, 75 bp, Homo sapiens
tatggaagcagaagaagctgaggatgaagaagatgcaatgtttttggaacagtgccagtggttgcttctgcacag

SEQ ID NO: 452051 - DNA, 75 bp, Homo sapiens
aaacttcttgccaccagtgtgaccctgacaaatactcaggcatccgtgtcattctggaccttactcccaactacc

SEQ ID NO: 452052 - DNA, 74 bp, Homo sapiens
ggaactcctgctgcaaaaatggaacaagttccagcacaagtgacagctcagcagctcctcctcctatagtgggg

SEQ ID NO: 452053 - DNA, 83 bp, Homo sapiens
cctgtcttcagatcttcacagcacagttcctgggaaggtggagccaccagcctctccctggtaactaggatttctacctcaac

SEQ ID NO: 452054 - DNA, 100 bp, Homo sapiens
gtgaaggggaggtgccagcccgcgaatccggccggagatgaagtggccattctgcctgcccctcagaacctctctgtactctcaaccaacatgaagcatc

SEQ ID NO: 452055 - DNA, 109 bp, Homo sapiens
cgaggcgctagggaagatcgcaccgcggacgcccgctgagcttggcgcacgggccgaccaggcctccggtgtggctgtctctgatggtgtcatcaaggtgttcaacgac

SEQ ID NO: 452056 - DNA, 74 bp, Homo sapiens
ggggatggcgcatcacacaccaaagcagaatggggaaatggagagagaacctgaaagagccccaaactcgagga

SEQ ID NO: 452057 - DNA, 75 bp, Homo sapiens
ggatgtgtacgagctgtgcgaggtgatcggaaagtttaagaattgtttaagctgcatcaatggagcacatacagg

SEQ ID NO: 452058 - DNA, 98 bp, Homo sapiens
gttggtgaattactacaggggtgctgacaaactgtgtcgcaaagcttctttagtgaaggcaagtgtccagagaatggctgggatgaaagtacacttga

SEQ ID NO: 452059 - DNA, 98 bp, Homo sapiens
aaggcatcacatccagagcgctctgctggtcacaggaaaacagttcctcctgaggatttcagagaagagctggacttcctggctgactctcacattct

SEQ ID NO: 452060 - DNA, 117 bp, Homo sapiens
gccagtggaaggagccaccgcccccgcccgaccatggccgaggatggcagaaacggtggacacaagcgaaatggtcaacggcgctacagaacaaaggacgagctctaaagagtccag

SEQ ID NO: 452061 - DNA, 100 bp, Homo sapiens
aaatttcagagctgcaaaattatcaggtacaaagtgaaatcacttcagcaaacacagaagatgatgatgacgacgatgatgaggatgatgatgatgaaga

SEQ ID NO: 452062 - DNA, 87 bp, Homo sapiens
tttgcgtgtgttgaaagtacaattctattgcacatcaatgatatcatcccaggtctcttttattcaaaaccttgtattttgtgtgga

SEQ ID NO: 452063 - DNA, 100 bp, Homo sapiens
tcagcccacccgaaggagcagggctcaaatactgctcctgggatgcttgaagatggaaagaaatttgattcctcccgggacagaaacaagccctttaagt

SEQ ID NO: 452064 - DNA, 128 bp, Homo sapiens
tctcgaggaggccggagcccccggagacgatgcgccccgcgcagccgcctgcgcctgcgggagccttccctgtattgaacactgatatacaaggaatgaatagaagtcaagaaaaacagacctggtgg

SEQ ID NO: 452065 - DNA, 87 bp, Homo sapiens
cgactggagccatggcggagtcggcgcctgctcggtacagagcaactgattttgttgttcctgggcctggaaaagtagagataacct

SEQ ID NO: 452066 - DNA, 90 bp, Homo sapiens
tggggaggaggttcttcagtgtatgcctgatgccatccggcagagcaaccagattctgcgggagcgctgcgaggagcttctgcatttcca

SEQ ID NO: 452067 - DNA, 87 bp, Homo sapiens
atgagcttgagaaagccatcaccactcaaaactgtaatactaaatgtgttaccataccaagaaaactgaatatcctgatgttgcttg

SEQ ID NO: 452068 - DNA, 87 bp, Homo sapiens
ctacccagaattcaattaaagtggctcaggaggaggtgcgccagtctgtaactcctgccgagccagtccagtactatttcacgctgg

SEQ ID NO: 452069 - DNA, 74 bp, Homo sapiens
ccagggctctatcaaggggctggtgtactccagcaacttccaggctaatctagacgaaatccagatgagttcac

SEQ ID NO: 452070 - DNA, 112 bp, Homo sapiens
atgacaccggagtttgacgaagaggtggtttttgagatttgtcccatcagatgaaaagaagaaacaaggttgtcaacgagaaaatgaaactctaatacaaagaagaaaagac

SEQ ID NO: 452071 - DNA, 97 bp, Homo sapiens
gcctctaccgcctgcgggcgctgggcgagcggcacaccatggacctcactgtggggttccgagtctgaggaagacataaccttgtgcctgcctgccc

SEQ ID NO: 452072 - DNA, 90 bp, Homo sapiens
taaaaaagctgcggagcccactgtggatcttttaggacttgctttggctagatcagagtctaagagagatggaggttttaaaaataattg

SEQ ID NO: 452073 - DNA, 75 bp, Homo sapiens
cagaatggacaagcttaataaaataaccgtccccgccagtcagaagttgagttctggagagtcttggcttctggg

SEQ ID NO: 452074 - DNA, 100 bp, Homo sapiens
ggcggggccggggtccgcaaggccggagaaggccgccgggcccgggcatggtggtctggggcaacgcggaaggtgtgaaaatcacaaatgtcaaatgatg

SEQ ID NO: 452075 - DNA, 101 bp, Homo sapiens
ggaagatttaacgaatggggttgtgatggcccaggttcttcaaaagataggtggactagcagaaagactaaatggactgcagaatcgagagagatctgcta

SEQ ID NO: 452076 - DNA, 96 bp, Homo sapiens
gattatagcacaatatcaacctgaaggatgagctgacaactaccaagaggagttacgaggatcagttaagtatgatgagtgaccacctgtgcagca

SEQ ID NO: 452077 - DNA, 51 bp, Homo sapiens
agaaattctggaacacctatatggcaagatgatgatgaatgaagtcctggc

SEQ ID NO: 452078 - DNA, 100 bp, Homo sapiens
gctgaaactcagtgagagcccagagcctggcaggagtccagaaagccagatggctgaacatcagaaaatatttacaccagcagctccagttcataccaat

SEQ ID NO: 452079 - DNA, 90 bp, Homo sapiens
ctttccgcgcgggactccggggcgccacgggggccatgtaagcagactcagcccatctacctggccaagctgatctttcagatgccacag

SEQ ID NO: 452080 - DNA, 100 bp, Homo sapiens
aatttccaaggggattcaaacttcaacagaatgtggcaaccagcatttgatgaatacagaaatatcagccaaaaggacattgtggacagcataaaaggag

SEQ ID NO: 452081 - DNA, 75 bp, Homo sapiens
ggagaacgcagtgctcttcgaagtggcctgggaggtggctaacaagggccccgccagcaggcgaagcagggagat

SEQ ID NO: 452082 - DNA, 98 bp, Homo sapiens
agcaggcggcccagctgcggaacctggtcaatggcatgcagctttatggaaaatctcgccgagaagcagtctcctttcttaaagaagtgccaccccct

SEQ ID NO: 452083 - DNA, 75 bp, Homo sapiens
gcggttgtggactctctccaaggggagctctttgctcaggcaccagtagaacaatatcctggtattgctgtggag

SEQ ID NO: 452084 - DNA, 100 bp, Homo sapiens
aggcgagagcctcggcgagccctctgcagcggagccccctgcccatttggttttggaattcctcagagagagaagactgtaataatggcgaaccccctag

SEQ ID NO: 452085 - DNA, 88 bp, Homo sapiens
tgccctggagacgttagagggccaccagagggccatcatggcccacatgactgtggagttgcagatcaaattcctatcctagggcccc

SEQ ID NO: 452086 - DNA, 74 bp, Homo sapiens
tgcaccctgttgtggctctataagcaggtcctagccaatggtctggacaacaagctccgtgaagacctggagcg

SEQ ID NO: 452087 - DNA, 80 bp, Homo sapiens
cctcggagtccttggggacggagcagcgcgtcgtggggcgagcggcagggaaattcaactactgaggaggttacggcaca

SEQ ID NO: 452088 - DNA, 95 bp, Homo sapiens
tggtggcccatctcagtgacagacactcctgcaacccagttttccagccaccagtgggatgatgacgcagccgtagacaccagctccgaaatcac

SEQ ID NO: 452089 - DNA, 100 bp, Homo sapiens
tgacagtgtggagagccgtgatatgttccagttgcacatttcctgcaaggactccaaagtggtgagagctcactctactctggatgaggacctggaaaga

SEQ ID NO: 452090 - DNA, 101 bp, Homo sapiens
attggaatatagagatcaaatcagcaaatatgcaaggagattcttccatcacttgctcagttttctggatatgccgcagaaggatccgtgccagaagcaag

SEQ ID NO: 452091 - DNA, 89 bp, Homo sapiens
cgcacctcggggacattattgcgcgtggaacggctgcttttggaagtggatagtctgctgaaatacactggctatgggaatgctgcagg

SEQ ID NO: 452092 - DNA, 100 bp, Homo sapiens
agtttcatgaagagcccaaaacctattacgaactcaaaagtcaaccgctgaagagcagagataatcattcaggtcttcgtgagctaaggccaaacaaaca

SEQ ID NO: 452093 - DNA, 74 bp, Homo sapiens
cgcgctgcgcagttttgttctgctccagctgttcgaaggtgatccagactggaatcagccattttaccaagaaa

SEQ ID NO: 452094 - DNA, 100 bp, Homo sapiens
cccggcccggattatagtctctcgccacagcggcctcggcctccccttggattcagacgccgattcgcccaggctatggagttactagtagagaaagcaa

SEQ ID NO: 452095 - DNA, 74 bp, Homo sapiens
tagtcccattccttgtcagtgttctctctaaggccccacaccccaccaaactccgtaccagctggacccggcca

SEQ ID NO: 452096 - DNA, 76 bp, Homo sapiens
actttggtagacattgccaaatcccaagatgctgagggctctacggtatttaatggggcccagaatggtgtgtctc

SEQ ID NO: 452097 - DNA, 74 bp, Homo sapiens
accctacacctcggagcatgtgcccagatggaacaagaggctgagaggcgcaggcagccacaaataaagcaaga

SEQ ID NO: 452098 - DNA, 90 bp, Homo sapiens
ccccgatttgggatcactggaaagtcagcatgattttcgaaccccggagtttgaaactctttatacagtgaaacaggaggaaagaaaaat

SEQ ID NO: 452099 - DNA, 74 bp, Homo sapiens
gccgcccctggtgcacacaccctcgtattctcctgcccttccccagttcaaagtgtcaagaacaagcctctctt

SEQ ID NO: 452100 - DNA, 90 bp, Homo sapiens
gaatgactccaggatggcccggctggaagtgatattaaaaatgtgttacactcagccaggctgctgggggatgcttcagtttcctttaca

SEQ ID NO: 452101 - DNA, 100 bp, Homo sapiens
caatgtcaacattgcccagcaagtgcatgccaatgaagatgtggaaagaatgttactaggaaacaagtgtgatatggacgacaaaagagttgtacctaaa

SEQ ID NO: 452102 - DNA, 75 bp, Homo sapiens
cagatctcacctaccaggtgtcggagtctgacagcagtggggagaccaagggaaatcctcattgacgattcaatt

SEQ ID NO: 452103 - DNA, 85 bp, Homo sapiens
gagctggacccggaccggttttggaatgcggattgtggatgatgatgtgagctggacagctatctccacaaccaaactagaaaag

SEQ ID NO: 452104 - DNA, 97 bp, Homo sapiens
catcctttcattggttggtggacagggaggtggggaagacagggctccagctaccacaggacgggctctgggtatagccgttccagtcagggacagc

SEQ ID NO: 452105 - DNA, 100 bp, Homo sapiens
accattttaaacaaagccgtctgtagaggatcctttccccattgcccgccaagctgccccctgtgtgctattctttgatgagctggattcgattgccaag

SEQ ID NO: 452106 - DNA, 98 bp, Homo sapiens
aatttttgagttgttggattacatagtcaacgagggcacaagagactatagtccccggcagatggcagttcgcgagaaggtgtttgacgtaatcatcc

SEQ ID NO: 452107 - DNA, 90 bp, Homo sapiens
agaagaaaggattcgttacagccagagattggattggttgccgtggtctttactgcttttctccctgatgtgtgaaacaagcgccttcta

SEQ ID NO: 452108 - DNA, 82 bp, Homo sapiens
aaccgccgggccgaacagcatgacgtccgctttggagaactacatcaaccatagccttagagactattttagcaaatttgga

SEQ ID NO: 452109 - DNA, 141 bp, Homo sapiens
gtggatccgggccaagtacgagcgacaggagttcatctacccggagaagcaggagccctactcggcagatgggcccaaaagcacaagaactggaggtttcagaagacgaggcagacgtggctcctgctgcacatgtatgac

SEQ ID NO: 452110 - DNA, 50 bp, Homo sapiens
gccatgtctgccaggtggtcattgtttgatgaaatcctggaggccagtga

SEQ ID NO: 452111 - DNA, 100 bp, Homo sapiens
gagatgtgatgttggagaactacagaaacctggtctccctagcatgctacaagtgaaaactgatgagaaactgaatgtgtctgatgagaatacagcaagt

SEQ ID NO: 452112 - DNA, 95 bp, Homo sapiens
tgatagaccggcgacgggacaaatggacctccgtgaaggcgtccgtcctgcgcatcgcagagctcattttgcagctctcaagcttttatagcatg

SEQ ID NO: 452113 - DNA, 74 bp, Homo sapiens
ctctctcagcagcttccaagagaaccaatggaatggagaagacactaccccaagcagtccttcaccatggtggc

SEQ ID NO: 452114 - DNA, 96 bp, Homo sapiens
ccactgctggagttcctgtccaggaaagaatatggcaaagctgatgcaagatgggtttattttgatccaaccattgtgtctgtggaaattctgacc

SEQ ID NO: 452115 - DNA, 101 bp, Homo sapiens
cagaaggagaacaagccaggaaaaccccgaaaacgcaagaagcgtagtggaacagatgtgcattcagattaaagaagttggagatcgtgtcaactacataa

SEQ ID NO: 452116 - DNA, 101 bp, Homo sapiens
ctctggaggtgggcagcaatctgtcaatcaccttgttaaagaggctcttaatgatgtagatggtgaagaagaaggaactgttaatagccagtcaggagaaa

SEQ ID NO: 452117 - DNA, 100 bp, Homo sapiens
tttatatcctgacactatgaatgctacttggatgcctcttaaggttcgtgagccacacatctccccacaccaagctcctccatacaagacctcggactgc

SEQ ID NO: 452118 - DNA, 81 bp, Homo sapiens
ttcattgtttgtcaccacaaaaaggacaggttcatccacataaaacttatttcacagtagctgaaaaagggagttttccag

SEQ ID NO: 452119 - DNA, 100 bp, Homo sapiens
ttgaagtttcttgcaaaccacactaacatattactggcatcttcaatctggactatgatttaatctccaaagaaccaaagccttttgtatttgagggaaa

SEQ ID NO: 452120 - DNA, 50 bp, Homo sapiens
cgacgcgctcaaccagatcgcgcgggaggctgaccaactgactgaagagc

SEQ ID NO: 452121 - DNA, 50 bp, Homo sapiens
tggcagctgctgagttctcggtgaaggtccaggtcctcctctactacctg

SEQ ID NO: 452122 - DNA, 50 bp, Homo sapiens
gaactgatgaagccaactgcctggagacctttggcgacttggcctttggc

SEQ ID NO: 452123 - DNA, 80 bp, Homo sapiens
ggttatttaggaggattcgatggcaattttttgtggaacagaattggagcagaggacgtcggtgatgaaggagaagaaga

SEQ ID NO: 452124 - DNA, 98 bp, Homo sapiens
tcattcttctctacagaagagcttctcctcatcaactggggatgattacagttcttcctaaaaaaggttgcactgctgtgatccatcctcatctccta

SEQ ID NO: 452125 - DNA, 104 bp, Homo sapiens
ggtggtggacctgctggcgcaggacgccgacatcgtgtgccgctgccagctcaccatctgctacctggatatgctgatgaccagtgaggagcgccggaagcagc

SEQ ID NO: 452126 - DNA, 90 bp, Homo sapiens
ctccaccacctcactctgctccttccctgttgccaatgtctcgctgactaagggtggacgtgatcggtagagacggggtttgaccgtgtt

SEQ ID NO: 452127 - DNA, 140 bp, Homo sapiens
tactaagacttcttgctcatttctgagtattgtctttatatcctgacactatgaatgctacttggatgcctcttaagctccatgatgcgttatctgggtctggaaacccaaaccctcaaggatggcctggcgcatggggg

SEQ ID NO: 452128 - DNA, 88 bp, Homo sapiens
ggaggaggaggagccgagaggagctgagcgagcgcggaaggtatattactcgaggggtttttaaatattgtcaggaaaaagaaggaag

SEQ ID NO: 452129 - DNA, 50 bp, Homo sapiens
aggcgtgcgcggacggtgtgcggatgtatcctccactcctcgctggccac

SEQ ID NO: 452130 - DNA, 83 bp, Homo sapiens
ctggaacctgccgattgccagtaggaggatttgctgatctcatggttgttgacctcctgtactggagagacattaagaagact

SEQ ID NO: 452131 - DNA, 83 bp, Homo sapiens
gtggtttccgttaagctggacaacagatctctggaaacatggctacagaacatgttaatggaaatggtactgaagagcccatg

SEQ ID NO: 452132 - DNA, 100 bp, Homo sapiens
cgaaatcttccagatccgcgtagtgaggaatcgtctccaccgtcatggggggcggagacctgtacatccagcagtggtcattcgacaacgaaagtcatac

SEQ ID NO: 452133 - DNA, 83 bp, Homo sapiens
ccggaggctgggagccgcggcggcctgggacaatgcagatcttcgtgaagactctgactggtaagaccatcaccctcgaggtt

SEQ ID NO: 452134 - DNA, 97 bp, Homo sapiens
ggcgttcctcaaactccgtgaccagggccgttgctccagggagaactgcaaatatcttcatccacccccacatttaaaaacgcagttggagataaat

SEQ ID NO: 452135 - DNA, 74 bp, Homo sapiens
tctcgggccacgccaacgagtttgatggcagtaacagaggtccagagcgccatggatgagagtcatatcctgga

SEQ ID NO: 452136 - DNA, 100 bp, Homo sapiens
ggactcggtccgtggcttcggaggcaagtttggtgtccagatggacagagttgatcagatcctgtgcttgatgctggaatacaacatcatcgacaacaac

SEQ ID NO: 452137 - DNA, 87 bp, Homo sapiens
tttctctagctattgccttattttttctcatggatgttcttcttcgagtatttgtagaagggtcttgtggatgagcagcagaaagtt

SEQ ID NO: 452138 - DNA, 100 bp, Homo sapiens
agtttatattcaaccagctggaagtgaagatcatgaatcggttcagtggtgttatgacaacttcattaactacaggtccctgatgtccgcagacaatgta

SEQ ID NO: 452139 - DNA, 93 bp, Homo sapiens
tgaagagcgacaagccgctggcagccgcggatctcaccgccgctcagggagcatcagatccatgctgctgctgactcggagccccacagcttg

SEQ ID NO: 452140 - DNA, 75 bp, Homo sapiens
tattccaacaaggagattttccttcgggagttgatctctaatgcttctgattctgtagatcttttaccaccaatg

SEQ ID NO: 452141 - DNA, 50 bp, Homo sapiens
ggcagacctcagctgcctggtgtcaaagattctaaactgcctgcatataa

SEQ ID NO: 452142 - DNA, 82 bp, Homo sapiens
gtttcctgttttaatgttagcgttgttaatactacctgcttttggatagaatgtaaaggttgcaaaagcttctcatttcaga

SEQ ID NO: 452143 - DNA, 74 bp, Homo sapiens
ctggtggcatccagtggtggccagtagaggaggaggtgaacaaggaggaggaggctactcacagtcgaactaca

SEQ ID NO: 452144 - DNA, 90 bp, Homo sapiens
ggaaactgctgtcgtctttcaagaaaagcaagacttcaaggactgcattcgtaggcaaaggttgacccaatcaaagataaaagaaaatcg

SEQ ID NO: 452145 - DNA, 98 bp, Homo sapiens
cggaaatccttgggtttgaagatgatgttgtgattgagtttatattcaaccagctggaagtgaagctggagtttatccagaaattttccccaaaagaa

SEQ ID NO: 452146 - DNA, 51 bp, Homo sapiens
agccgcccggggcagggctcgggagagcggactaatagggatgccaaagga

SEQ ID NO: 452147 - DNA, 100 bp, Homo sapiens
gaccatctggagtgcaggctgggaggcgggatggagtgatagggaaggtccaggtgcaggtacagcagtctccgcaacaggtctcggctcagctctcccc

SEQ ID NO: 452148 - DNA, 100 bp, Homo sapiens
gacttctccactggttcctgggcaccgaaagatgtatttatttgtgggggctataatggagaggtgatcctgggagatatctggaagttgaatctgcaga

SEQ ID NO: 452149 - DNA, 100 bp, Homo sapiens
cgactcggaagattcgaggcggcgggggacaagtcggcgccccagagcggacgagaacctggagctggttgaaaaaggcttcagtaacttgaagaaacaa

SEQ ID NO: 452150 - DNA, 97 bp, Homo sapiens
aaatcagaggcaactaacactgcggcttcctgagcctcaacaaagtgcttctggaaacaatgagagctctcaagttgagtcaacaaaggaaggaaat

SEQ ID NO: 452151 - DNA, 90 bp, Homo sapiens
gactcacccggcacattgccgggccgcggcgtggagccgggcaggagccgcgagccagctgcgcgaaggctgccaccgtgtcggaggcga

SEQ ID NO: 452152 - DNA, 75 bp, Homo sapiens
tcatcaccaaggccagcatcaaggacgtcctggacagcgaagggcctttggacaagcacacacaaaccacaagaa

SEQ ID NO: 452153 - DNA, 51 bp, Homo sapiens
gcaacgtaaaatccttggaaaagggagccaagaccaaggagaatgttgtac

SEQ ID NO: 452154 - DNA, 100 bp, Homo sapiens
atagatgaaaatcaggatcgctacattaagggatttgtcttggctgttactatgacacgggaagcaattgatgaatttcggcgttttcagcgtgacaagg

SEQ ID NO: 452155 - DNA, 100 bp, Homo sapiens
gagtaccctttcgacctggagaacatcatcttccgagacgagttgtactgctgtcacaggaaatggacgctggattacaagcatggcagctcaggcagca

SEQ ID NO: 452156 - DNA, 100 bp, Homo sapiens
aactaaaaacaaaattgccagaaaatctttcctctaaagtcaaactgttcctctgtgacgagggtgcaggtatctctggggactacatcgatcgcgtgga

SEQ ID NO: 452157 - DNA, 80 bp, Homo sapiens
cctacttggaggaagagctggtgtcaacagcatctccaccctggagcctgtgagccggtgccagcgcctgagtgagctgt

SEQ ID NO: 452158 - DNA, 74 bp, Homo sapiens
caggaagagaggccgtgcccctcagaatgaggaaaatggggagcaggaggctgacaatgaggtagacgaagaag

SEQ ID NO: 452159 - DNA, 75 bp, Homo sapiens
aaaaagctgaaggtggaggcgccgcaagcgctgaggaaacctggacaagcatgaagaactagaggagcttgtagc

SEQ ID NO: 452160 - DNA, 99 bp, Homo sapiens
ggatttgttaaggattccaagtaactcttatttggggtcaccagtcgttggcacaccaagaagctgccccgcaagacccaccgaggcctgcgcaaggtg

SEQ ID NO: 452161 - DNA, 75 bp, Homo sapiens
ctgaccacatccctgctcatctcacctatgggaagctgctagctctaacaatgctggcatcaccatctacatcag

SEQ ID NO: 452162 - DNA, 100 bp, Homo sapiens
gtgaaaaattgcaaacagcgagtgatgagtcgtacaaggatcccaccaacatccagaaaagttgccagacggccagcattgccactgccagtgcatccgc

SEQ ID NO: 452163 - DNA, 90 bp, Homo sapiens
ggaccagctgcaaaagtttgctcagtacctcatcagtgagctccctcagcagggagcgcatgaacctgaaggtgcccatctacttctcca

SEQ ID NO: 452164 - DNA, 85 bp, Homo sapiens
tcacaagaatatcccttcagtgaatgcaaaattgaaagtagttaagcatttgataaggtggtgaaggcatttgtgatcctggcct

SEQ ID NO: 452165 - DNA, 100 bp, Homo sapiens
ttcagtggcccagtcttaccgttcagtggcttcctgaagtgactaactggaggagagcaggagtgttcagaagcaaatgaagatcctgcagaagaagcaa

SEQ ID NO: 452166 - DNA, 50 bp, Homo sapiens
agcatggagttggcaccccaaaagaaagatcctggctctgcagagagaac

SEQ ID NO: 452167 - DNA, 74 bp, Homo sapiens
gcggagggcgactgccgagggtctcagcgggatctggagtcagggtgcctacaccaactaatgttacaattgaa

SEQ ID NO: 452168 - DNA, 80 bp, Homo sapiens
ctcctactacttccctgtgaagggcaattgaaggaacagactaaaaatcgtgtcctggaaggaaactacaggtactacca

SEQ ID NO: 452169 - DNA, 75 bp, Homo sapiens
attcaaaagatgtttgaaaagctgggtaacaactccaagtttcctttggataatacacctgttcgaaatcggggc

SEQ ID NO: 452170 - DNA, 75 bp, Homo sapiens
aagaacttaactatagaagatccagcttcttggacacttaatgattgttggcaagaaatgtgctgctgatctggg

SEQ ID NO: 452171 - DNA, 75 bp, Homo sapiens
gcccggccctgtgactgcagccatggccacaggcttagctgttaacgggaaagctctactgagatgaagaaagaa

SEQ ID NO: 452172 - DNA, 132 bp, Homo sapiens
gctaaggaatgaaacccttccagctcgatctgctcttcgtctgcttcttcctcttcagtcaagcaaccatgtccaagggacctgcagttggtattgatcttggcaccacctactcttgtgtgggtgttttcc

SEQ ID NO: 452173 - DNA, 100 bp, Homo sapiens
tgaggacccggggctgcgtgagcgagcagaggcttaaggtcttcagcggggcgctccaggaggcactcacaggtgcatcacctggatcatgaggtcaccc

SEQ ID NO: 452174 - DNA, 100 bp, Homo sapiens
tggtctaatgaactttctcctgtcctcaatctctggaagaaactaaaccagttctttgtttcaacaccagttttcagctatgatgccatttcgtactaca

SEQ ID NO: 452175 - DNA, 95 bp, Homo sapiens
ctgcaacattctggcttgggttccatccttatatgaaccagttcctgatgatgatgagatacttaggaacttcaagcagtcgtcccagatataaa

SEQ ID NO: 452176 - DNA, 80 bp, Homo sapiens
tgctaagttttgaaaaacttgaccgtgcctcaccagatctttggccagaacaatgtataagtgtgctagcggagtgtcta

SEQ ID NO: 452177 - DNA, 83 bp, Homo sapiens
gggggcgggccggggtcaccacgcctgccccagggaaccgcacagacaatgcagatcttcgtgaagactctgactggtaagac

SEQ ID NO: 452178 - DNA, 100 bp, Homo sapiens
aaagtctcagcagacccttcctgagggccgagcaacagtgtagtggcgtattccacatagcaaacaggttggagttgctgtgggtgagctgctgtggtct

SEQ ID NO: 452179 - DNA, 120 bp, Homo sapiens
caggaatacatggaagtccgggagagaatacacagagccaatcttgattttgccagccttgctcgaggttttgccctgctgaggatgcccaagatgccagaattgagaggaaagcagttt

SEQ ID NO: 452180 - DNA, 87 bp, Homo sapiens
agaaacggcgtttagagcaacagatcgtggatctgaaagtgacaagcattttagaaagcacttttccagccattaactccaggctct

SEQ ID NO: 452181 - DNA, 83 bp, Homo sapiens
cgggagccgggatctgagcgagcgccggggccagcggagccggagccgccgggacatgggtgtcgtgaaaactacccctaaaa

SEQ ID NO: 452182 - DNA, 75 bp, Homo sapiens
ccgaagttggaagtgtctcttagcagcgcgcggagaagaacggggagccagggacctgaagttggacaatttgct

SEQ ID NO: 452183 - DNA, 98 bp, Homo sapiens
gagaaaccaggtcggcccagcaacgaggaaagctgagtgaagtaattgggaaactgttcatttgaggataaaaaaggcattgtattatattttgccaa

SEQ ID NO: 452184 - DNA, 97 bp, Homo sapiens
gactcggagacgtcggccagcaccgagagcctgctggaggagcgggccgggcggggggcctcggaaggcatcttcaaaattgaggactcagcccagg

SEQ ID NO: 452185 - DNA, 100 bp, Homo sapiens
aatcacaagccgtcccgatccttctctaggtctcgtagtttcatccaggatcgagcagggcgaatggggggggaggcacccgagctggccctggacccgg

SEQ ID NO: 452186 - DNA, 96 bp, Homo sapiens
tccaaatgttctcagatggctgataatggagaaagatcacagcagtgttccaagttctaaagagcttgcaaaccatactgggtacatcaaagttga

SEQ ID NO: 452187 - DNA, 90 bp, Homo sapiens
cagagagcagactgtatactatgccaaagcattctctaaagacttgccaagagcccacttcgatgtgttgttcttgtcgcacttagggac

SEQ ID NO: 452188 - DNA, 82 bp, Homo sapiens
gaaagtgcgtcatcctaaggaacatcgacacctgaccctgcagctgctggctgtgcggaggaagagcagactgcgggacccc

SEQ ID NO: 452189 - DNA, 100 bp, Homo sapiens
ccacaactctgcagtggaccacagcattcctgaaatacatccaggaaagacatggagattctcttaaaaagcatgttcagctcttgacacaaatccacct

SEQ ID NO: 452190 - DNA, 59 bp, Homo sapiens
ttcaatgtgacacaaggaaagtattctacagcagaacaggataattcagacaacaacac

SEQ ID NO: 452191 - DNA, 50 bp, Homo sapiens
caccgacgctgacagggatggtgcctgcgctaagctgcaacgaaaacgac

SEQ ID NO: 452192 - DNA, 83 bp, Homo sapiens
gtatatcaaacggcaagatgtccagtaatgtcccggcggatatggaactgtggctgcaccatctgtcttcatcttcccgccat

SEQ ID NO: 452193 - DNA, 100 bp, Homo sapiens
gtacgcctacttctataaagtcatccaggtgggcctcatgagagatgtggagtcctcatcacggggttgcctggtgattatggaataagcagcggactta

SEQ ID NO: 452194 - DNA, 82 bp, Homo sapiens
ggatggaggaccgttgccggggcgagtacgagcgctccttcctgcgtgagttccacaagaaatctcccaagcctaagaagaa

SEQ ID NO: 452195 - DNA, 74 bp, Homo sapiens
gttctggaccagaatacctcaaacgtctaccattacagtgtgcttcttcgggcggaggaggaagtaggggtgca

SEQ ID NO: 452196 - DNA, 60 bp, Homo sapiens
cacaaatgctccttctcctggagacgcaactcaagggcaacacacaagtttgctgattgc

SEQ ID NO: 452197 - DNA, 100 bp, Homo sapiens
aaaggctctcttcaacccggaatgtgggaaagtacatggcagaagaatatagagtgttttagagcactttgctgcaagggaccaccacctgcacgaccag

SEQ ID NO: 452198 - DNA, 97 bp, Homo sapiens
ttgactggggaggatcaaataatataatcatgtcgatacggccaatccaactgagtaccgagtcgaatatgtcagtaccaaagaaaatgtgtaaaag

SEQ ID NO: 452199 - DNA, 87 bp, Homo sapiens
agcagcgagggcgagagcttcgcgggctcggtgcaaagctacgcccaggaggaacagctgaaagaagaggaggaaataaaagaagag

SEQ ID NO: 452200 - DNA, 100 bp, Homo sapiens
ctggaacatcgaaaggaccaagtaacacagctttcacaagagtttttcactaaagatgtcatcgtaccctctccttggactgatcatgaagggaaacagc

SEQ ID NO: 452201 - DNA, 127 bp, Homo sapiens
atcctgaactcatggacctcagatctcggacaacccccattgcaatgagctttgcacagtttgaaaatctactgggtgcatttctcacctgcactgtggtccaggaaactcaagtcaccgtccccac

SEQ ID NO: 452202 - DNA, 82 bp, Homo sapiens
tcgagcactaatatttaagaaagaagatgttaactttcagctttgaccgccattgaaggcacagcacatggggagccctgcc

SEQ ID NO: 452203 - DNA, 100 bp, Homo sapiens
ggacgcacgctcagctgaggaggacccccaaaggagtatgctgctgctgttccgctttgcgtcctcgctacaaacgcctggtggacaacatattccctga

SEQ ID NO: 452204 - DNA, 76 bp, Homo sapiens
ctggctcttgccctcatcctggttctggaatcctcagttcaagtccgggaccatgtctggagaactaccaccaaac

SEQ ID NO: 452205 - DNA, 50 bp, Homo sapiens
gcggcggcaccgggaggccgggccgagcgatgcgtttagcccagcccctg

SEQ ID NO: 452206 - DNA, 82 bp, Homo sapiens
ccagcccggccactgcggatccctgaaaccaacagcctcccgcgacgatgcccctcaacgttagcttcaccaacaggaacta

SEQ ID NO: 452207 - DNA, 100 bp, Homo sapiens
gaccgagagcgcgaatatcgtcatcgttagaagaagttttcatgggctgagctgctgagttcagcctgggaactgaggccaacaagggagtctcctcggc

SEQ ID NO: 452208 - DNA, 100 bp, Homo sapiens
ccgactccaccctggctggaggaactgggtgctcctgcccgctggcccctcgcgcgtgaggatctatctcagggaggagattggacaggctggactcccc

SEQ ID NO: 452209 - DNA, 75 bp, Homo sapiens
cccgcttgccggggtggtcctcttccctttgtcgccaaaacagagtggagtacgagaaaagggtccgagcacaag

SEQ ID NO: 452210 - DNA, 100 bp, Homo sapiens
tcagtgccaaccagtgatgaggaggatgaaggtacttcaactcccgcccccacctgtgtcccgctggctcctaagctgcccccctacgtgtgggttgcgt

SEQ ID NO: 452211 - DNA, 74 bp, Homo sapiens
agcctgcccagacggctcacctgtgcgggatggaacaaaagtatggctgtgacccgatccaaagacgctcctcc

SEQ ID NO: 452212 - DNA, 100 bp, Homo sapiens
ccatttgtgccatagattatacgtggaatttactaaaagctgggataaatcccggcaccaaactgttgcctttgaaggagctctgcttacaagaaccaag

SEQ ID NO: 452213 - DNA, 101 bp, Homo sapiens
gattatgcaaagaaaaatgaacccaaacatagacttgcaagaatagaagagtgatggatgtcatttctcgttcacagctttacttggatgatcttttttct

SEQ ID NO: 452214 - DNA, 98 bp, Homo sapiens
aggtgcagctggacatggaaccccagggctgcctggtggctgagggtgatgttgggctcgctatggggaaactatatggaaatgacttcagccaaact

SEQ ID NO: 452215 - DNA, 75 bp, Homo sapiens
ttcatgcagtgacatgttgataaaaaatgatgactgattcttgctattccaaatcctcttccacgttgacagccc

SEQ ID NO: 452216 - DNA, 100 bp, Homo sapiens
ctggggactctgcctcgtgccgctgagcctggcgcagatcgaagaggcaattcggacataaagagaaacatcaagggcatgagtgcacagaggaaagacc

SEQ ID NO: 452217 - DNA, 101 bp, Homo sapiens
ctgcagtaaaaatcattaaattggagcctgagccagctctcccaggcgctgaacggactgtcagacagggccaaagaagccaaggagtttctggtacagct

SEQ ID NO: 452218 - DNA, 83 bp, Homo sapiens
cttcgttgccctctgtgccacagactgcttttggcttctggatgccctcctccagtacacatcgtatggggtgacaccgccta

SEQ ID NO: 452219 - DNA, 74 bp, Homo sapiens
gcactttgatactatctacagcattttgcagctaaaacactgtcttatgaaccattatcttcagcaactgtttc

SEQ ID NO: 452220 - DNA, 83 bp, Homo sapiens
ctggaaactggatgcagcaaggaaataggatttaaccgctctctgcctcccagaaccttttgatggaacaaatacagccagag

SEQ ID NO: 452221 - DNA, 100 bp, Homo sapiens
agacgcaaggcccatctgcggcgcctggatcgccggtggaccctgggcgggatggtcaacaggcagcacagccgagaaatgcttcggttacccacagtct

SEQ ID NO: 452222 - DNA, 75 bp, Homo sapiens
cttaccttgatgagcagctacagatgttgatatatcactacttgtgtcttttaacaaaatgaaaaaattgactac

SEQ ID NO: 452223 - DNA, 75 bp, Homo sapiens
ccttggacctcagccccaacggcaagcaacttggtgatcttcttccagctgacggcatacttattcaaggcaacg

SEQ ID NO: 452224 - DNA, 75 bp, Homo sapiens
tctaaatcatgttgaagatggtttgaaggaccattatgatattaaggaccctgatgctcccataagacagaaaat

SEQ ID NO: 452225 - DNA, 50 bp, Homo sapiens
cgggatctcggctgtccttcctcccgaatttaagggacgctgtgaagcaa

SEQ ID NO: 452226 - DNA, 101 bp, Homo sapiens
gagacaagtaaactctcagagtaactgtcccctctgactaccatttctaagctgtgtcagcgtgttatgatgccgtcccgtaccaacctggctactggaat

SEQ ID NO: 452227 - DNA, 75 bp, Homo sapiens
tcgcccagcggccgcgacgctatggcgcactggagtaccctgttcctggcactgaggaggatgaggacaaggaag

SEQ ID NO: 452228 - DNA, 51 bp, Homo sapiens
agaagctggagttcgaggacgaagattcatgatgttgctatcaaaagttga

SEQ ID NO: 452229 - DNA, 74 bp, Homo sapiens
tatgcatgctgcttttgatgtctgacaacgtggatcgttgttttgaaacatgccacttcaaatgaacaacaaga

SEQ ID NO: 452230 - DNA, 100 bp, Homo sapiens
cagggaggtaactcacaggagagagagcttgttggtctgaggtaacaacattgactcaggaagtttctcagttgggtaaagacatgagaaatgtgatcca

SEQ ID NO: 452231 - DNA, 100 bp, Homo sapiens
cctcaccgtgcaccagcagcttcgacaaagggaccatgcggaggatggcgctgtccatgatcgagtaagaatgattgatgttggctgatattggagtgct

SEQ ID NO: 452232 - DNA, 100 bp, Homo sapiens
tctcaccccccaagcggatactggtcttctcgtcggattgcccatgcacttgttgcagaaacagccaagatttccaaatctgaagtctgtccgagaactc

SEQ ID NO: 452233 - DNA, 90 bp, Homo sapiens
agcccaactaaagccccacatttgcagctcattgaaggaaagactgacaatcacctgaaacattatttacatatcattgaaaacaaaccc

SEQ ID NO: 452234 - DNA, 60 bp, Homo sapiens
ctttgtttgactgatgaggaaatcaaggctgatgtaagctgtgctagaacaaaaatgcaa

SEQ ID NO: 452235 - DNA, 100 bp, Homo sapiens
aaaacattccaccattcaacaaaagtatttgactacagtcattccttatgagaaaaaaaacggaccaccgtctgttgaagatcttcaaatattaacaaaa

SEQ ID NO: 452236 - DNA, 82 bp, Homo sapiens
ctggctgcggccgccctgggccgggccccaccggacgattttgcaagaacgaggctcaaggatgtgagggacacagtattga

SEQ ID NO: 452237 - DNA, 75 bp, Homo sapiens
tagtgaacgtggacaaagctgttgtctcagggagcacagaattatctggaagtattttggatgtgtatagcggtg

SEQ ID NO: 452238 - DNA, 83 bp, Homo sapiens
ctcatcactccagcagccctccacccaggagtacgtgctgcatgtctacggtgtgatgaatgcagactctgctaccattttgg

SEQ ID NO: 452239 - DNA, 100 bp, Homo sapiens
ggctcctactgttcttagagatgtacctttctcagccttgttagatgacttggataaagaactaaacaactacattatgcgatgtagagaatggtatggc

SEQ ID NO: 452240 - DNA, 105 bp, Homo sapiens
aaaagacaaaataaaaatgaaacctaaacccagaattctttcaattaaaagcacatcttcagttgaaaatgaagatgaggctgaaagggttcttttttcctacgg

SEQ ID NO: 452241 - DNA, 75 bp, Homo sapiens
atggttattagagaaagagaaaggatttctaagcaggaactccccagacattgcctaagatactgagccatatcg

SEQ ID NO: 452242 - DNA, 100 bp, Homo sapiens
tggaagatgctcagaacagagcagaaatcaaattgaagagagcagttgaagaagtgaagaaattattggtacctgcaggctgttataaaatacagaattt

SEQ ID NO: 452243 - DNA, 90 bp, Homo sapiens
tccagattatgaagaaaatggaacagatttatccggggctggtgatccctgggacgatgccggagtgtgaaggagtttgagaagctgaac

SEQ ID NO: 452244 - DNA, 97 bp, Homo sapiens
atatgccaacccacctaactacggaaaacctgatcccaaaattattgaaaacactcgaagggctcagctatgtgaaccatgcagaggacctggcctc

SEQ ID NO: 452245 - DNA, 98 bp, Homo sapiens
gttacatcaaccagcggaaccgggagtggaacattgtagagtctgagaaggcccttgtgaccaccgctgaaacttcacttctacacagaggctttctt

SEQ ID NO: 452246 - DNA, 50 bp, Homo sapiens
gaaggcattctgaagtacactcaacaggtgaaaagaatggaaaactgtgg

SEQ ID NO: 452247 - DNA, 74 bp, Homo sapiens
actatgtggacagaggctatttcagtatagaggaagaaaaaatgctgggcatcttggtgcagcacaaagtccgg

SEQ ID NO: 452248 - DNA, 82 bp, Homo sapiens
caaacatcgatggcctactggggataacattcatgcagaacatcaggttcttctgtgtggcagttcagaatgatggatcaag

SEQ ID NO: 452249 - DNA, 97 bp, Homo sapiens
tgcagacgcctgccgctacctgcagacatacggcgagtggaatcgggctgcatggctggcaaaagtcagaatggcggcagtggagcatcgtcattct

SEQ ID NO: 452250 - DNA, 136 bp, Homo sapiens
tcacgttcagtgtgctgggatgaggttacgagtagccatgtgccatatgatttatcggaaggatcttacacatttgttccatggcttctcagctttaaaaggggaagtgccctagaagaaaaagagaataaaatat

SEQ ID NO: 452251 - DNA, 75 bp, Homo sapiens
gccaggtgaggaagtggagatagctgagctcactacaggtggcgacatgtctaagaatgtgagccagtcacagat

SEQ ID NO: 452252 - DNA, 107 bp, Homo sapiens
aagcaggcagcgagacagtattctccatccagccacatcaacctcctcacccaacaggctgacaaacgggctcatcataatgcactggaacgaaaacgtagggacca

SEQ ID NO: 452253 - DNA, 95 bp, Homo sapiens
ctatgacgccgagaagcagaggccccgagagtacagttgtgaatttggctccgcgaagtattatgcactgtgtggctttggtggggtcttaagtt

SEQ ID NO: 452254 - DNA, 131 bp, Homo sapiens
atccctgaagctcactaatggcatttggattttggccgaactacgtatccagccaggaaaccccaattacacggtgtgaagacccccttgtggaagaaggaaacggaagagctccgggccgaggacgcgga

SEQ ID NO: 452255 - DNA, 89 bp, Homo sapiens
ccccggggagtcagttcctccccgggcccctgagccatgcccatcgcagccgccccgaaggagccaggaagactatgaccgtctgaggc

SEQ ID NO: 452256 - DNA, 50 bp, Homo sapiens
taaagaactacattactattaaggtgtcgtgaaaactacccctaaaagcc

SEQ ID NO: 452257 - DNA, 95 bp, Homo sapiens
cagaagaacttgtacagagatgtgatgttggagaactatagcaatctggttttcttggattcaccagaccagagcacttgggcagcagcgccaag

SEQ ID NO: 452258 - DNA, 100 bp, Homo sapiens
gtgcagctccagagagacgtgaaacatgtgaacactcaagtgaagcaaaagccttccatgattactggtgatttacaagtcaagttaaaatgtccccaga

SEQ ID NO: 452259 - DNA, 100 bp, Homo sapiens
tgagctatttttgaaagaacatgaccaccttcgaaagtgtttctcctgagaaagaaaaaaaccacctgtccctgacattcagaagctgacaacactgttc

SEQ ID NO: 452260 - DNA, 86 bp, Homo sapiens
ctccgtcgtggaagcaggactgcgccgcgtcttcctcaaggtgcccgtggttgacacgagctgtgtccccagctgttcccgtctac

SEQ ID NO: 452261 - DNA, 98 bp, Homo sapiens
gatttccattccttcccccgtcatggaaaacaactttgtggatttgacagaagcggatttcggcctggcccgggcctatggtgtcccagtaaagccaa

SEQ ID NO: 452262 - DNA, 100 bp, Homo sapiens
tgtgacctgcaggtactgggagatccatagggaagaaggcggaacatccggaggctgggaaatgatccggagttaggtgttggcacgctaccagaacatg

SEQ ID NO: 452263 - DNA, 98 bp, Homo sapiens
agccacactctgcaccgctaggccgtccccgaccttgcctgaacaagagtgtaggtcttcctgaaactctcaagcctctcatctctgcccagccccct

SEQ ID NO: 452264 - DNA, 74 bp, Homo sapiens
cggtggactccttcggcagtccacccaccgccgccgcctcccaggccaccttgaacaaagaatcctgcaggtgc

SEQ ID NO: 452265 - DNA, 90 bp, Homo sapiens
ctacttaataatgacaatctcctcagggaaggggcagcacagtttttcgttggaatatacgttgcacatttatggcgattctgagtgtga

SEQ ID NO: 452266 - DNA, 99 bp, Homo sapiens
cgcgcagcgctgcgggggaggcgcccgcgccgacgcggggcccatggccaggaccaccagccagctgtattctaccttgtaaatactgttatttgtata

SEQ ID NO: 452267 - DNA, 98 bp, Homo sapiens
agcaagtctcctcgcagtaagagaaaccgaagtcctcaccactcaacagtcaaagtgaagcagtgattcgcctttgccagtctcatctcgtgtctgct

SEQ ID NO: 452268 - DNA, 75 bp, Homo sapiens
tggccagcgagagccagggctccaaagaactcgactgaacccggtgcctggctcctaccccacacagagctgcca

SEQ ID NO: 452269 - DNA, 101 bp, Homo sapiens
actgcccctcaagtttcctgatgctgagacagaccagattatgatgatttcctacatgatcgatggccaggtccaaacactgcagtttcatccatttgaag

SEQ ID NO: 452270 - DNA, 90 bp, Homo sapiens
ccatggtccagcggtggctgctgctgtcctgctgcggagccctgctcagcgctggcctatgttgtccttggccagtttctggtgctaaag

SEQ ID NO: 452271 - DNA, 90 bp, Homo sapiens
atgaagatgaagattttaaagagcagactagacttctcaagaccgtcaacaaagatgtggacgcacaggctgaaggagaagggagccgcc

SEQ ID NO: 452272 - DNA, 50 bp, Homo sapiens
gatcaacctcgtcatgtcctacgcggagtgtggccatctggggccgtgtg

SEQ ID NO: 452273 - DNA, 98 bp, Homo sapiens
tcaccatgacggagctgaacgccatcatcgggctattcctgttcccaggggagagtgcacaaaatgaagccacctcgtaccaccagaagcacatgatc

SEQ ID NO: 452274 - DNA, 100 bp, Homo sapiens
gagtttgggaaaaaccgcgaagtcatggggctctgtcgggaaggtgtacaagggagaagaagccacattccaaatctcaggcctccagaccaacacagac

SEQ ID NO: 452275 - DNA, 100 bp, Homo sapiens
cggcgtcactgagccgcgccagctgagccagcgccactggcttcaccacgcggtcagacattgggcccgcccgtgatgcaaatgaccctgtggatgatcg

SEQ ID NO: 452276 - DNA, 75 bp, Homo sapiens
agagagggagcggctgcaagaggtaatgagtgcctacaccaactaatgttacaattgaatcctataacatgaacc

SEQ ID NO: 452277 - DNA, 90 bp, Homo sapiens
agctataaaaaatgatcacctcaggcaaatggaacgtgaaaggcaggtatgtttattcctaaaacgaggtgccaatcaacatgccactga

SEQ ID NO: 452278 - DNA, 97 bp, Homo sapiens
atttcaaaggatcagtttgaaaagaagaaaaatgataccttagaccccgaaccgtattcccggcgtttccacaagactctaaggcgcttggtgccag

SEQ ID NO: 452279 - DNA, 90 bp, Homo sapiens
ggggaaatgcgtgcactgcgtccctctagagccacaggtggaattaagaaatctggcaaaaagtaagctgttccttgtgcctgaggagat

SEQ ID NO: 452280 - DNA, 122 bp, Homo sapiens
cggagacgcgcaggatgccacacgaagagctgccgtcgctgcagagaccccgctatggctacaatgcagatcttcgtgaagactctgactggtaagaccatcaccctcgaggttgagcccag

SEQ ID NO: 452281 - DNA, 98 bp, Homo sapiens
ctggattccccctggggctgcagaggtggtgcggttgtgtcagaacccaaagctggcgctaaagaatagcccaccttatatcttagacctgctaccag

SEQ ID NO: 452282 - DNA, 82 bp, Homo sapiens
tcaaaggtcacctggaaattgccttattggaaaaacatttcttacgtgcatctgcagacgcagcaggaggtgaagctgcgca

SEQ ID NO: 452283 - DNA, 51 bp, Homo sapiens
ccgaagtgatttccagaggatttacactatatctcccggggccaattcagc

SEQ ID NO: 452284 - DNA, 90 bp, Homo sapiens
ctcccgaggagtgcaggcgcttcaccacagacggctttatcctgtggataaacgcagagtgaacgagtttggggagtcctacgaggagaa

SEQ ID NO: 452285 - DNA, 87 bp, Homo sapiens
aaaatatcccaggagagaatactactttgcaataacaatggaaaggtcatttcaagaaggaaccatgcctctagaagatttactggc

SEQ ID NO: 452286 - DNA, 100 bp, Homo sapiens
ttccggaaggactttggcgaggagctcaggccccggggcctccagcggcaccagcggagaccacggtgagctcgtcgtccggattgccagtctggaagtg

SEQ ID NO: 452287 - DNA, 88 bp, Homo sapiens
tgcagccgcagctggactggcaggcccgagggcgaggtaactgcatcctgcccagcatgacggccccctgcccgccgccacctccaga

SEQ ID NO: 452288 - DNA, 88 bp, Homo sapiens
ggaggaccccagacaccggagactgggaaatgattcagtgctcaagagtgaagaaaattctactgtctttagccacttaatgaagtac

SEQ ID NO: 452289 - DNA, 75 bp, Homo sapiens
aaagcatctgtgtggtatggcaacagttgcaggaccagctctgccccctaattataaaagcagtagttcagattc

SEQ ID NO: 452290 - DNA, 74 bp, Homo sapiens
gcaaggtcaaatggacccatgaggaggaggatcccttttcccccagaaattactcaatgctgaaacctctcaaa

SEQ ID NO: 452291 - DNA, 90 bp, Homo sapiens
gtccccgctggcgggcttccctgtcgccgttcgctgcgctgccggcttgaaatccatggcccaaaatgactctaccagtggagactctct

SEQ ID NO: 452292 - DNA, 50 bp, Homo sapiens
agtacaagggctgctgcgaggaccaaggagtggaggcagcacagacagtg

SEQ ID NO: 452293 - DNA, 76 bp, Homo sapiens
tgtttctcttctgcagaaaaagaggctcttcctcctcctcccgcgacgatgctgagggttggaaaagcaaaagcag

SEQ ID NO: 452294 - DNA, 97 bp, Homo sapiens
agtgatatcactgcctctgtggacaagacacctccaggagcccagctcacagccaccggtaccttcttccaggtcacggtctagatcacattctcga

SEQ ID NO: 452295 - DNA, 75 bp, Homo sapiens
cctgcagaccctggccggctgctggggccggggaggagagccagaatggcattgtgcccatcgtggagcctgaga

SEQ ID NO: 452296 - DNA, 92 bp, Homo sapiens
ctggagaattacaggaatcttctctcattggttagcagacttgaagaaagagaagcagaactgaagaaggaatataatgcattacatcaaag

SEQ ID NO: 452297 - DNA, 100 bp, Homo sapiens
tgcttgatggcttagaactctccacagccatcactcatgtccataaggagaaccaccgggaggaactgggccattctaacacccgttgctaccatgctgg

SEQ ID NO: 452298 - DNA, 100 bp, Homo sapiens
agaagataatgaagaggaagttgtatattccaataaacagtcactactaggaaaactcaaatctttggcaaccaagctccattcaacccaaataaagatg

SEQ ID NO: 452299 - DNA, 100 bp, Homo sapiens
agaggctgggcggctgccggtgacagagctcccagctcctccagcagccgacaggaggcccgtcaagatgcaggcaggcattgccaccccagggatgaag

SEQ ID NO: 452300 - DNA, 100 bp, Homo sapiens
cgtccccgaaacgcgagtccggagaggagttccgcatggagaagttgaaccagctgtgggagaaggcccagcgagagtacgagagggcctccaaagtgga

SEQ ID NO: 452301 - DNA, 98 bp, Homo sapiens
ctggataatgattgagccacctgtccaggtcatgtttactggtgaaaatattcctgttcatcctcatgtttatagcaatggtcatatctgtttatcca

SEQ ID NO: 452302 - DNA, 100 bp, Homo sapiens
ttcagatgtatctcatgcccgcttttattgtctgctgcacagagctttacatccccgggagcctctacccccaattcagcagcatatttggaatatgctg

SEQ ID NO: 452303 - DNA, 74 bp, Homo sapiens
tccgatttaaagctgagctgcgaggaaaatggcggcgggaggtacatgtcccagagcaagcacacggaggcccg

SEQ ID NO: 452304 - DNA, 75 bp, Homo sapiens
ccagaagcgggcggcgcgggggagatgagctcccagctcctccagcagccgacaggaggcccgtcaagatgcagg

SEQ ID NO: 452305 - DNA, 100 bp, Homo sapiens
caactacaaagccttcagccagttcatgagccatcccaacatcctgcgtctctacaactatttttatgaccggaggaggatctacttgattctagagtat

SEQ ID NO: 452306 - DNA, 75 bp, Homo sapiens
gaaagatctaccttctggaagctactactacgtggtgcttggaaagggtggcccagttgaaatccttcccttcct

SEQ ID NO: 452307 - DNA, 82 bp, Homo sapiens
cgggagacacagtgtcagaattacaagacaatgcagatcttcgtgaagactctgactggtaagaccatcaccctcgaggttg

SEQ ID NO: 452308 - DNA, 50 bp, Homo sapiens
ctgagactgtctggggagctctccgagataccccacctggtggcccgtcc

SEQ ID NO: 452309 - DNA, 89 bp, Homo sapiens
gacgagcaggacttcatccaggcctacgaggaggtgcgcgagaagtacaaaggtgagaagccctaccactgcaactgggacggctgcgg

SEQ ID NO: 452310 - DNA, 75 bp, Homo sapiens
agaatctagacagacaggcctttctaggttaaacccatccagagtaatggctgcggccttacccaggaccctggg

SEQ ID NO: 452311 - DNA, 100 bp, Homo sapiens
tcctcgtccagaccggccaccggagcttgacctcctgcatcgaccccatgaaccagagaatcagtcagagtgctccagtgaaacagccaccacccctggc

SEQ ID NO: 452312 - DNA, 100 bp, Homo sapiens
accttgtgaaaaagtacatcctggccctttggaacgaaggccctagggtggtcccaaccatgtgatgtctggagcataggatgcattcttattgaatact

SEQ ID NO: 452313 - DNA, 75 bp, Homo sapiens
cggcaacttcaacaacagctctctagctactgcagcactggggtgtcagttgttggtccgacccagaacgcttca

SEQ ID NO: 452314 - DNA, 100 bp, Homo sapiens
gtcccattcttccaatagttctcccataggaaaaagtgttaaaacttctcctactacacaatctaaggaggagatgttaaagtaacccatcttgcaggac

SEQ ID NO: 452315 - DNA, 98 bp, Homo sapiens
gtcttcggtggactccttcggcagtccacccaccgccgccgcctcccagtacctggagtagaacagaaaaattattatgtctgtgttcccttgggact

SEQ ID NO: 452316 - DNA, 71 bp, Homo sapiens
ttcacctcagagtcggtcggggaaggccacccagtgtatcgcattaagttcaaggagagctttgctgagat

SEQ ID NO: 452317 - DNA, 76 bp, Homo sapiens
aaggagaaggcctcctggagcagcctctccatggatgagaaagtcgagtgaagcgtcagcccccgtagcacctctg

SEQ ID NO: 452318 - DNA, 100 bp, Homo sapiens
gcagattgaaattaataaaatgcacatatcccagtccattgagcccatgcagaatgccaccaagtatggcaacatgacagaggaccatgtgatgcacctg

SEQ ID NO: 452319 - DNA, 88 bp, Homo sapiens
ggccggtgccagcacctttcggcttctgagacggcggcagcagcggcattcaggacctgaaggagaagaaggagaaggtggaggagaa

SEQ ID NO: 452320 - DNA, 90 bp, Homo sapiens
gtcatgcagatggtaccatcgttaggtatttctttgatgatgaaggctctggagagtcacagttcctgagactggcccagacgctgcggc

SEQ ID NO: 452321 - DNA, 50 bp, Homo sapiens
cctactcctccctcaactccctcatcgtacatcgacgccatcagcaacaa

SEQ ID NO: 452322 - DNA, 101 bp, Homo sapiens
tgaagcatgtctttcagagcccggcaccacccatcttgagtatctggattcagcaccatggcggaagacatggagaccaaaatcaagaactacaagaccgc

SEQ ID NO: 452323 - DNA, 74 bp, Homo sapiens
cctgactgagctgctggctaagatcaccaacacagacgtgatgctattaactgagtacttggatatgaaaaata

SEQ ID NO: 452324 - DNA, 100 bp, Homo sapiens
ctcgttcctttccctttaccggagtcgattgcctcactgcatgtgtattcagttgatctctctaatgtattagatcttcatgcctttgatagtctctctg

SEQ ID NO: 452325 - DNA, 100 bp, Homo sapiens
ccagaggctgtcatggtaatcgggaaaggtctgctagggactggagctcggatgccctgcatcaagactcgattgcagaggaacttcctgaagtgctccg

SEQ ID NO: 452326 - DNA, 82 bp, Homo sapiens
acaaggagcagtaccatgaggagcagaagcagtacatcgtgagtgcatctccatccacgttggccaggctggtgtccagatt

SEQ ID NO: 452327 - DNA, 87 bp, Homo sapiens
agcagctgccggagcccgagtggatcggggacggagagaacacgagcccatcagctgaataccactagaaacatacctgtaaccaga

SEQ ID NO: 452328 - DNA, 100 bp, Homo sapiens
gtccaacctggtatttcttgggggcaatgaggttgggaaaacctactggaataggatcttcatacaagcaacagggagctgccaccaccgtgtactgtgc

SEQ ID NO: 452329 - DNA, 100 bp, Homo sapiens
cggcggcggcggcggtgccggagcgcgagcagagcggagacccccaggtcctgcgggcgcgtgtatttgcatgcccgagtctttgagccgtgctatacca

SEQ ID NO: 452330 - DNA, 88 bp, Homo sapiens
ttaaggacattccaggcagaggcaagagactctccaacatgtgccttctgaccatacaaatgaaacttccaacagtactgtgaaacca

SEQ ID NO: 452331 - DNA, 74 bp, Homo sapiens
gttggacttaacgtatttcttgaggtcaaaatgcagatcttcgtgaaaacccttaccggcaagaccatcaccct

SEQ ID NO: 452332 - DNA, 96 bp, Homo sapiens
cgaccacgtctccaaaatgagtcgcatcttcaacccccatctgttatgaagacagtatggagtttccagaccatagtagacatttgctacagtgtc

SEQ ID NO: 452333 - DNA, 83 bp, Homo sapiens
cttggacagcccccacacgagcacgagatgcttcgccacccagttttcggaaattcacagtatggccaacagcaagatgcata

SEQ ID NO: 452334 - DNA, 83 bp, Homo sapiens
gaacagcgagctgtttgacccctttgacctcttcgatgtgcgagactttggaaaggtgagcgagtgctgtgctttcatgggcc

SEQ ID NO: 452335 - DNA, 100 bp, Homo sapiens
ccgaggccagagagaaaagactgcgaggtggccgcagctgtggccggagaggtgctggagaatctggtaaaagcaccattgtgaagcagatgaggatcct

SEQ ID NO: 452336 - DNA, 50 bp, Homo sapiens
tggcagccagtcagtggtggaggtgtggcagtgtggcgggagtgtggagg

SEQ ID NO: 452337 - DNA, 101 bp, Homo sapiens
tgatgagaagctgtcggagcttcccaaggcgaaggaggtggaggagaccatcgagggcatgctcctcaggctggaagagttttgcagcctggctgacctgg

SEQ ID NO: 452338 - DNA, 90 bp, Homo sapiens
gggaaatcgggctgaagcgactgagtccgcgatggagcagggttaggcttgctgaggggcaggcacaggagtcctggctgagctcatggc

SEQ ID NO: 452339 - DNA, 83 bp, Homo sapiens
ttgacacttttgggatccgatggcctgaggagcttgaatgtgacaggtttctaagcatgaattgaggaacagaagaagcagag

SEQ ID NO: 452340 - DNA, 100 bp, Homo sapiens
tggaagatcaacctgtttatgcagtttcgggaccacctggaggaggtgttgaaagggagagaactcgatgccaccgcaacggtattggcgaaccggcagg

SEQ ID NO: 452341 - DNA, 97 bp, Homo sapiens
gatcagtacaaaaattcttcaagaaatctaaggaaagaccacagcaagattctttcattcgtctcctcctagcctgggggaccaggctcgaactgac

SEQ ID NO: 452342 - DNA, 98 bp, Homo sapiens
tcgaaccttttatggtctgcatcaggtggtgaagcagtattttccaatttgaagattcatttgaaggtggctcctgccacctgctaatagcagttcaa

SEQ ID NO: 452343 - DNA, 100 bp, Homo sapiens
gctgctgactcttttcagagctggccacgaccaggcctcttcgagcactactgctactcccggggcggcatgcgccacagctcctacacctgcatctgcg

SEQ ID NO: 452344 - DNA, 73 bp, Homo sapiens
gcagaggagacagtgataccttgggagcgctacatgatctagccaacagataagaaaggaggtattcgaactt

SEQ ID NO: 452345 - DNA, 83 bp, Homo sapiens
atggacatgttccacacgcgcttcaagcaggagggtgtcctgaacagcaaggaggctactcacagtcgaactacaactccccg

SEQ ID NO: 452346 - DNA, 83 bp, Homo sapiens
gcagtacggccagatgtacatcaaggcctccggcagctatgcaggaccaagaatcgccttcagccctgtctggtgcatccttg

SEQ ID NO: 452347 - DNA, 75 bp, Homo sapiens
ctatgtcctggacagggatagcctcttcatcaatggtcctggatggtcgccggcccacaggggggcgactggagg

SEQ ID NO: 452348 - DNA, 75 bp, Homo sapiens
cgccgaggcgattcccgcccaggtgctggagaatctggtaaaagcaccattgtgaagcagatgaggatcctgcat

SEQ ID NO: 452349 - DNA, 98 bp, Homo sapiens
aagttacagtcatagcagtacccgagatggaagacgcgacagattcatgttacatgtaaagctgtcctcatttgtgactatggacctatggagttggg

SEQ ID NO: 452350 - DNA, 75 bp, Homo sapiens
tccaggccttccagtacacagacgagcatggggaagggtttttaatgaccacaacaagcaagcatgcagcttact

SEQ ID NO: 452351 - DNA, 80 bp, Homo sapiens
gttaaggaaactcagcctccagaaacggtccagaactggattgaattacttagtgttgctctaggtcgtaaccagccttt

SEQ ID NO: 452352 - DNA, 90 bp, Homo sapiens
gaagtttgtctggattttcctgtagaactgagggcagagagactagcttgcaaaattttcctcatattgaggtggttcggaaaaaagagg

SEQ ID NO: 452353 - DNA, 96 bp, Homo sapiens
gagtgagggagagcttccactagtccctataggttccaccacccagggcatccgcaggaacctctagtgcctcaacagacgaagacatggagacag

SEQ ID NO: 452354 - DNA, 100 bp, Homo sapiens
ctggggtgtctgtctgggtgcaggctgtggagatggatcggacgctgcacaagatcaagtgtttcgccgtgcgctccctaggctgggtagagatgaccga

SEQ ID NO: 452355 - DNA, 100 bp, Homo sapiens
caggacatcagtgagttggtatatggagccaagctccagcccctggacttcaagggggttggcactgatgaagcctgcctgattgagatcctcgcttccc

SEQ ID NO: 452356 - DNA, 74 bp, Homo sapiens
cccttatttaattcagctgtcaaccaagaaggccataaaattttgagtagaaaaatccagaaatttgaaaatca

SEQ ID NO: 452357 - DNA, 97 bp, Homo sapiens
atgagtcgcatcttcaacccccatctatccggggatttctttcacggtttgataatgtccttcccgtcagcctggcatttgacaaatgtacagcttg

SEQ ID NO: 452358 - DNA, 97 bp, Homo sapiens
gctgtgcagccgcgaggaggcgcgggaggtgttcgagaacgaccccgagacgatatggctcgtggacagcagaaaattcagtctcagcagaaaaatg

SEQ ID NO: 452359 - DNA, 100 bp, Homo sapiens
gaactttatattgctgttggaatatctggagccatccaacatttagctgggatgaaagacagcaagtgggatgaagctctcttgactatgagtaaaggag

SEQ ID NO: 452360 - DNA, 101 bp, Homo sapiens
ctgcgcccttcggccgcctacttcggaacgacaaatcctccacccctgggctcaagtccaacacaccaaccccaaggaacgacgccccaactccaggcacc

SEQ ID NO: 452361 - DNA, 100 bp, Homo sapiens
gaactgggttccggcgccgccccaagaccatcacttacaccccggggacctgcgagctgctcagaggcatttggctttatgtcccgagttgccctacaag

SEQ ID NO: 452362 - DNA, 97 bp, Homo sapiens
gctcaagagtttagccttgcgactggcccagtatccaggtcgaggttctgcagaaggttgtgactttagtatacaaggtcctgctgtactagccacc

SEQ ID NO: 452363 - DNA, 100 bp, Homo sapiens
agatgatccagcttctcaggagccacaggatcaagacaggccggctgcctaccctccagactgtccgctatggctccaaggctgttacccgccaccgtcg

SEQ ID NO: 452364 - DNA, 83 bp, Homo sapiens
cggcgctggagagggggcgctgagctgttggggcccagctgagagccagcctggaggttacccagcagcaggccacccaggcc

SEQ ID NO: 452365 - DNA, 75 bp, Homo sapiens
aggagaagctgagcctttctggacagaccaacctgtcagtgctgcaacaaagccttctagacaagctcagtggaa

SEQ ID NO: 452366 - DNA, 100 bp, Homo sapiens
gaagaacctcatcgctgcgacgaaaagttgttcctcaaagtcattcaagctgtactcgccgaaggagcccccgaacggcaacgcctttccccccttccat

SEQ ID NO: 452367 - DNA, 119 bp, Homo sapiens
gatgataccatgaagagaagtttacaggccctctattgccaactgttaagttgcacgttttcaaaaaatacctaatggtgaaaatgagacaatgattcctgtattgacatcaaaaaaag

SEQ ID NO: 452368 - DNA, 83 bp, Homo sapiens
caaataccaggctaccatggtctacaagactctcttcgctctttgcatcttaactgcagaaaaccatcttctcagctcttgag

SEQ ID NO: 452369 - DNA, 83 bp, Homo sapiens
tgaagattcaccaaataagctatatactttggttacctatgtacctgttaccactttcaaaaagaatagtgacagtggtacag

SEQ ID NO: 452370 - DNA, 75 bp, Homo sapiens
ttttggggattccactctccagtgtaatgattattgacaacagcattggcatcaacaaaagtcagaattcccggg

SEQ ID NO: 452371 - DNA, 75 bp, Homo sapiens
cgaaccttgatttcaaggtggcacccagcatcctgaagccaagaaagaagccagctgaagatgagtggggtaaaa

SEQ ID NO: 452372 - DNA, 80 bp, Homo sapiens
caggaaccaccagtgacagagcctctcttcagcttctggagacctcactatcctattatgtctttgtgtgaagacatgct

SEQ ID NO: 452373 - DNA, 83 bp, Homo sapiens
tgctttgatctgggagcgcgatgagcctggaacggaagtgaggatcacctacaggtatctcaaatctgtgaagtattgtagag

SEQ ID NO: 452374 - DNA, 75 bp, Homo sapiens
acagccttgaggcccagcgctagcacccagtttaattggttggggtcagataagaagaggagtgacaatcaagcc

SEQ ID NO: 452375 - DNA, 83 bp, Homo sapiens
ttacaacaagaaaaagaagcgtatggactactatgactctgaacaaggactactgagcccagccaggctgtatgccattgctg

SEQ ID NO: 452376 - DNA, 75 bp, Homo sapiens
ctgcagagcttcagccgattcacacggaaagaagatgctgatatgctacaacacggatgaacctggaggacgtgg

SEQ ID NO: 452377 - DNA, 83 bp, Homo sapiens
aagaagagcatgatcggcatgtccaccaaggcagcaaattgtggctactaatttgccccctgaagatcaagatggctctgggg

SEQ ID NO: 452378 - DNA, 99 bp, Homo sapiens
cattttgataaatccaagaaatatcctctactattagatgtatgaatgcatgatatctcttggtaaaatggcccagaagaaacacaggaaggagttatg

SEQ ID NO: 452379 - DNA, 96 bp, Homo sapiens
tttagcccgggactctttcacaggctggatgaagattgggccatatcagcgggaacaagattggctgggagaagacgggaagccactcagagcctc

SEQ ID NO: 452380 - DNA, 82 bp, Homo sapiens
cggacgcgagcccgctcccctgagttcgagaacttgtcttggacaattgcaaatcaaatgatggaaaaattgagggcttaac

SEQ ID NO: 452381 - DNA, 100 bp, Homo sapiens
ggggagagtttcgagaagcagccgcgctgcgccttccacactgtgcgctgtcctgggaactccaacaagggagcaaatcagagaaatgaacccaaactac

SEQ ID NO: 452382 - DNA, 100 bp, Homo sapiens
cagcagcccccgaaggccctatcaggacatggagtatgaaagacggggatcatcgtcttgctcttcttttatctcagtttgtgggtagccagtcagtccg

SEQ ID NO: 452383 - DNA, 90 bp, Homo sapiens
gtgccggagtcctgtgtctcccaaggcctctgtatatggtgaatcacaagcctttgagaacagcctgagccttcagccctcacagatgcc

SEQ ID NO: 452384 - DNA, 122 bp, Homo sapiens
ggaaaaactccaaccagataaagattctgggaaatcagggctccttcttaactaaaggacacagagtctgggatctaataattcagtcattttggatggactaaaaagaagacagaattttc

SEQ ID NO: 452385 - DNA, 75 bp, Homo sapiens
ggctatttgtttggatatcctgaaagatcaatggtgctactgcaattacaccacagatgtggttgccagcgtcgc

SEQ ID NO: 452386 - DNA, 82 bp, Homo sapiens
cgggttattcgagtgaccgagaccgcggccgggaccgaggcggaatagaagatgaactcaactgaattcaccgaagatgtag

SEQ ID NO: 452387 - DNA, 100 bp, Homo sapiens
ctgtcacgtctaatgtggctgctgcctcgtgtcacatctgaaactcatctgtacctcacttagaaagatttctgagagagcagacaccatcttatttctg

SEQ ID NO: 452388 - DNA, 100 bp, Homo sapiens
gggctcctgcttggtgtaccagaattcggccatgagccgctacatactcatcatggggctcctgtacaaggattttttatcaagcagaaatgcatcgaac

SEQ ID NO: 452389 - DNA, 74 bp, Homo sapiens
ccgaccttctgaacaaggccaacacctatgcagaaaatgtgccagaggaacttcaagaaccattttacacagat

SEQ ID NO: 452390 - DNA, 100 bp, Homo sapiens
caggaggcggagggagagcaggagccactgagatgaggaggcgtcgcgcgcgcctgtagctcgcgggcctcgcagcaatgtctcaggctgtgcagacaaa

SEQ ID NO: 452391 - DNA, 100 bp, Homo sapiens
gaagattcgaggctccctggccagggcagcccttcaggagctccttagtaaaggccctggccaacgtcaacattgggagcctcatctgcaatgtaggggc

SEQ ID NO: 452392 - DNA, 119 bp, Homo sapiens
cctaggccaaccagagattcatctttcatgcagtgacatgttgataaaaaatgatgatccagacatttaatgtggatgcaccatgccagaccgtggaagatttaacgaatggggttgtg

SEQ ID NO: 452393 - DNA, 98 bp, Homo sapiens
tggagggcactaccagatgggctgagtcagtgctgattctctcaaatagagcttgaaggataaatcttcatttttgtttcaacaaaacttcgaaacaa

SEQ ID NO: 452394 - DNA, 107 bp, Homo sapiens
gagcttcatctgcgatggacagaataactgtcaagacaacagtgatgaggaaagctgtgaaagttctcaaggtaacatctgccggcacctgctgccccgggtccagt

SEQ ID NO: 452395 - DNA, 83 bp, Homo sapiens
ctcgcgaggagggttgctagtggagaagttattgccttgtctgtcaagatccgcagttatgaagaacacttggagaaacatcg

SEQ ID NO: 452396 - DNA, 88 bp, Homo sapiens
gatgaactttactatgagattatccgcatgcaccagagctttgacaacctctactccatgggaatggtggaaagcagcagacataatt

SEQ ID NO: 452397 - DNA, 52 bp, Homo sapiens
tactttgacaagccaggctaacattgaagtgattctgccccacattggcagt

SEQ ID NO: 452398 - DNA, 96 bp, Homo sapiens
tggagccgcttttcctctgcaatactggaccagctgcaggcccaggactttagcaagttccagccgctgaagagcaagctgctggaggtagtggac

SEQ ID NO: 452399 - DNA, 75 bp, Homo sapiens
cctgcatcgagcagctggagaaggcccccccggcctgccacttcagtcaactccactgaggagactgccactaca

SEQ ID NO: 452400 - DNA, 90 bp, Homo sapiens
agcgagctgagtggttgtgtggtcgcgtctcggaaaccggtagcgcttgcagcatggctgaccagtgcaccggtcttcagggcttcttgg

SEQ ID NO: 452401 - DNA, 82 bp, Homo sapiens
catccaggagagaatgctgacagtcctgcaggaggaatgccagctcctgagcaggcctcattggtggaggaggggcaaccac

SEQ ID NO: 452402 - DNA, 83 bp, Homo sapiens
gttggctggaggggctgctgctgggaacacctggagtctccgcgggcaggtatagtcgtctccccctccaccacggcaagtcc

SEQ ID NO: 452403 - DNA, 87 bp, Homo sapiens
tgcagcccccagagctgactgccaggccccagaggagcgtaagcaaggaccagaccccaccaacaactgaacgctttggtcaggctg

SEQ ID NO: 452404 - DNA, 100 bp, Homo sapiens
acccaccccaaactggatcctacagccaagctccaagtcaatatagccaacagagcagcagctacgggcagcagaagacgagttgtactgctgtcacagg

SEQ ID NO: 452405 - DNA, 100 bp, Homo sapiens
caggtgtacaagtaccccttcgagcaggtggtcgccagctttctccgaaaggcatttggctttatgtcccgagttgccctacaagcagagaagatgaatc

SEQ ID NO: 452406 - DNA, 101 bp, Homo sapiens
gcggtgcctgagctgagtgaggccgaggccgggaggccgtgcccggagggtccagattttggctatgtaactcgagggccccaaacagggggtatcagtgg

SEQ ID NO: 452407 - DNA, 114 bp, Homo sapiens
ccatcttgggcattcatgggggcgcatctatgatcatggctgacaagggagagtcccgtattctcagagtaaaagttgtttctggaattgatctcgccaaaaaggacatctttg

SEQ ID NO: 452408 - DNA, 100 bp, Homo sapiens
tgaaggagcagaggtgtggacgcctcatactgcgtactctgtggatatccccttggacaaaactgtcgtcaataaggatgtcttcagagatcctgctctt

SEQ ID NO: 452409 - DNA, 83 bp, Homo sapiens
ggtgcccgaggagtagtcgctggagtccgcgcctccctggcatccctctctacctgccaacatcctgtattagagaacttgtg

SEQ ID NO: 452410 - DNA, 100 bp, Homo sapiens
atggaaggggtggaggatggagaggaaggagacctgaagacaaggtatctcaggagattacatttcagcttgaaaaagggtcggtggaatttaaaagaag

SEQ ID NO: 452411 - DNA, 75 bp, Homo sapiens
tgccttccatggatctataggagagcaagtcctccagaatgagctgaaagccagtggtggcgaaatcaaaattca

SEQ ID NO: 452412 - DNA, 98 bp, Homo sapiens
aggaaagcaggaggaggtggcggcggcgggaagatgtccagccctgctgggagttttctgccacacagatttgcggaagaacctgaccgtggacgagg

SEQ ID NO: 452413 - DNA, 100 bp, Homo sapiens
tgatggaccgtgctagtgacctgactgatgccttcgtggagtcgctgctgttcctggggctggtggccgccgtctgcctgggcctgaacctcatcttcct

SEQ ID NO: 452414 - DNA, 97 bp, Homo sapiens
gctagcgcggcctgggatgcgcttgggctccctggtatgatctcgtgaaatcttgagagaaactgaatgacgaatgaaactattgttcctgtttcac

SEQ ID NO: 452415 - DNA, 82 bp, Homo sapiens
ctgggcgctccggtggcggcggaggctccccatcaacccgggcagccgggatttaaattcacggtggctgagtcttgtgaca

SEQ ID NO: 452416 - DNA, 101 bp, Homo sapiens
gcgccttctcctacgactctcccctgcttttctaacccaaactgtatgtcttgatgacactacagtaaagtttgaaatatgggatacagctggtcaagaac

SEQ ID NO: 452417 - DNA, 106 bp, Homo sapiens
cggatcgaagacagtcaagtgtagactctcgccaaagccgctctgggcaagatgcacatagtacatgagaaagagaaggggacatcgaggaatgtgaaagaggccc

SEQ ID NO: 452418 - DNA, 50 bp, Homo sapiens
gaagccttgcggcagtacagcccagagtctcgctccgttgcccaggctgg

SEQ ID NO: 452419 - DNA, 87 bp, Homo sapiens
cattctatagtcattcaggatggaggtatgcagaatctgtgggagcaaaacattatcatacttcagccaaacagaacaaaggaattg

SEQ ID NO: 452420 - DNA, 90 bp, Homo sapiens
tactgggggaacaagatcggcaagccccacactgtcccttgcaaggttgactatagtcaatggggccaatggagccaagtgtatggaaac

SEQ ID NO: 452421 - DNA, 83 bp, Homo sapiens
ctatattgttacaattttttttcaagaactgccgtcttctttgcctgcactaatgaccggaacatgaacattttgcagtactg

SEQ ID NO: 452422 - DNA, 74 bp, Homo sapiens
aggaagtaggggtgcacctcagcactatcccaagactgctggcaacagcgtacacagactttactaaaagagta

SEQ ID NO: 452423 - DNA, 100 bp, Homo sapiens
cccgggcagccgcgctttcccattgcaggaccagctctgccccctaattataaaagcagtagttcagattcatcagacagcgatgaagacagtagttctt

SEQ ID NO: 452424 - DNA, 98 bp, Homo sapiens
cctcctgccgtcgcccacgcccaatctcgaaattaagtacaccaagggccggtgcataaacttctcccgagttccatctcagtaaaagggaagcagga

SEQ ID NO: 452425 - DNA, 139 bp, Homo sapiens
gctgttccagcaacagcagcaactgccgcacccttgaaaggaggcccctgccgtgtggacccgtaaaataaaatgggtggtcataatgtcacaatctccttgcagtccaggactgggcatactcatatgccttctgtgg

SEQ ID NO: 452426 - DNA, 96 bp, Homo sapiens
gatggagagactgtggagtttgatgttgttgaaggagaaaaggtaagcggaagggtacagccaatgcccgaatgccagagaaggtcacatggatga

SEQ ID NO: 452427 - DNA, 75 bp, Homo sapiens
tctcagtaccaacaaccccacgagggtatggctctctcggcatgatgaccagcgtgctggtttgtccagatggca

SEQ ID NO: 452428 - DNA, 100 bp, Homo sapiens
gcggagtagagcggagcctggcgggcgtgggaacccaggccccgccgaggcggccagaggcaaggtcttgctatgttgctcagactgatcttgaactcct

SEQ ID NO: 452429 - DNA, 100 bp, Homo sapiens
cacgatttggtgcagccggggtttggtaccgagcggagaggagatgcacacggcactcgagtgtgagttacagaatgtctgaaggggacagtgtgggaga

SEQ ID NO: 452430 - DNA, 75 bp, Homo sapiens
cctttacacagagcagttgcatcttgtagtgaggatgctcgtcagaagttccgctctgttctggttgaagcaacg

SEQ ID NO: 452431 - DNA, 75 bp, Homo sapiens
ctcccaaattccaaactgtgatatgtcacatggacaaggcagaactcacagtttggagatgaaaaaacatttagt

SEQ ID NO: 452432 - DNA, 100 bp, Homo sapiens
ctagcgtcctggaattacttcaatcaagtcaaaatgcagatcttcgtgaaaacccttaccggcaagaccatcacccttgaggtggagcccagtgacacca

SEQ ID NO: 452433 - DNA, 82 bp, Homo sapiens
ctaaagggtggcctggagcacggagaaccattaatcatctctaaggggctatctgatgggttagagtgcctttgagaagaaa

SEQ ID NO: 452434 - DNA, 74 bp, Homo sapiens
ccgccatggctttacttactgcggccgcccggctcttgggaaccaagggtttgccttcccggattgggcctaca

SEQ ID NO: 452435 - DNA, 100 bp, Homo sapiens
aaaagaggctccattgtctctaaattgctggcttccatgatgtgcaaagctgctcatctttgggtgaaaaattgtcgggatcttctgcagtccagctaca

SEQ ID NO: 452436 - DNA, 104 bp, Homo sapiens
ggctgttcttttgctgcaaatgaagttgatggaattacactgtgatacgactgactgctgacgtgatggcagacagggttccccgctgcccggtctgcaccggc

SEQ ID NO: 452437 - DNA, 83 bp, Homo sapiens
aggaaatgcctatactgccctcctcactcacttccggtggcagaggagaaggcagagcccccccaggctatgaatgccctgat

SEQ ID NO: 452438 - DNA, 96 bp, Homo sapiens
gtgagaaggcgctgcgcaggcaggcggaggagatcttggaaggagaccaagccatcctgcagagaataaagaaggctgtgcgggcaatccatagct

SEQ ID NO: 452439 - DNA, 99 bp, Homo sapiens
gtcgagacattttacgagtacaactggtacgaatatttgaactgctggcagatgctggtgtcattagtcacagtcgagtaatcctgcctgtgtctgtag

SEQ ID NO: 452440 - DNA, 76 bp, Homo sapiens
ggattccaagtaactcttatttggattttttatcaagcagaaatgcatcgaacaacgagaatcaagatcactgagc

SEQ ID NO: 452441 - DNA, 100 bp, Homo sapiens
gcctgcaccatgagcgtcccggccttcatcgacatcagtgaagaagatcagcatttgacattgtgcagcaaagaaatggttatggagaagcccagtccgc

SEQ ID NO: 452442 - DNA, 95 bp, Homo sapiens
ggactaatgccgaggtcatgcctgcccagcgggaacttcattgcaggccgtgtgtcaccctgaccacgtctatctctgggggtcgcacgttgcgg

SEQ ID NO: 452443 - DNA, 81 bp, Homo sapiens
gaaggatgaaggagccagtttggctgaaaataaaagtggagaacatgcagctgaccctgaacctgcagacggagaacaaag

SEQ ID NO: 452444 - DNA, 97 bp, Homo sapiens
agctgctgtgcggcctgctggccgagcgcctgcgcatcagcccggacaggtcaccatcagaaaagctaagtttgctgtatagtgaggatcaggagat

SEQ ID NO: 452445 - DNA, 82 bp, Homo sapiens
caccgccatcctgggccccacgtgttgcctgaccattcctgagcccagctcttgcaatctcaggatgtgaaggaagatgctg

SEQ ID NO: 452446 - DNA, 90 bp, Homo sapiens
atccagaaaccgccccagcgatggaagaggatcaggagctggagagaaccgagattaagcgtagctcctgaaatggatatcatggactac

SEQ ID NO: 452447 - DNA, 97 bp, Homo sapiens
agaaaaagaaggccctgagtcaaagaagatgcctcgaactaaacaaattcatcccagaaatctaagagaaaaggtatagtttggcagtggggcctcc

SEQ ID NO: 452448 - DNA, 99 bp, Homo sapiens
cgtggaggggcgcgcagagggcaccgggcgccgggagcaggcggcgcagcaccaggatgtgaagttaccccagatgtaaacatttcaggccaaaaattt

SEQ ID NO: 452449 - DNA, 51 bp, Homo sapiens
ggctgcccactcgcctcacctgagcctggaattctaccaaatatctggctg

SEQ ID NO: 452450 - DNA, 90 bp, Homo sapiens
atcaagagggctgtggtccacactcacctcctcaatcccgagggacttctggagccccgtcctggacaggagacagaggaagaaccctgg

SEQ ID NO: 452451 - DNA, 86 bp, Homo sapiens
tactctttgccgtacccaccggagcctggcgcagcctccctctattaccagtgtaaacaggaacatcgataagtagtgtaaaaact

SEQ ID NO: 452452 - DNA, 98 bp, Homo sapiens
cggagtctgggggttcgcgcccgccgacccgcgccctgctccctctcagcacctgggcggacggcctggtctccaagtcctctcctaagaagcctcgt

SEQ ID NO: 452453 - DNA, 75 bp, Homo sapiens
cggaaatgtgtcatcgaaagccaggcttattgtgtaacagaacctggagcaggctctgatgtagctggtataaag

SEQ ID NO: 452454 - DNA, 75 bp, Homo sapiens
gtgttggaccttccggagcttctcagaagacagagggttttcttttgagccaccagctgaacaggccaaagccag

SEQ ID NO: 452455 - DNA, 51 bp, Homo sapiens
ggcagcagctgcctcaagaggagcagggacccagacatggagctgcgggaa

SEQ ID NO: 452456 - DNA, 110 bp, Homo sapiens
ctaagagccttgaggcagaggcagctggaccgagctgcggctgctgtggtcaccaggagactaaagtccatcaaaaacatccagaaaattaccaagtctatgaaaatggt

SEQ ID NO: 452457 - DNA, 97 bp, Homo sapiens
ggattccaagtaactcttatttggactcatctgatgatgtgagaagagttcagaggagggagaaaaatcgtattgccgcccagaagagccgacagag

SEQ ID NO: 452458 - DNA, 100 bp, Homo sapiens
cggcagacgaggcgtgttccccgataacttcgtgaagttacttccaccggactttgaaaaggaagggaattttaattggttggggtcagataagaagagg

SEQ ID NO: 452459 - DNA, 75 bp, Homo sapiens
gcggagaagccgcgcgcgcctcagaagctcccggacgcccaggagacaaagcttttgttgatttcctgagtgatg

SEQ ID NO: 452460 - DNA, 50 bp, Homo sapiens
acaacaagttcatctcagccacaggaccactccgagaatgccattggcgt

SEQ ID NO: 452461 - DNA, 75 bp, Homo sapiens
gcccctcatcgagctcttcgtcaaggattctcaaagttggattggtggaaacaatgaaccattgacaggctttac

SEQ ID NO: 452462 - DNA, 100 bp, Homo sapiens
ctgagaaggatcaaccggacagtgattgggatgaaccggcagtctccccacatcgctttccttaaagtttcccatgtctcaatggactcctgaatataac

SEQ ID NO: 452463 - DNA, 85 bp, Homo sapiens
tcctcctgctcttacttgtcctgctcctgctgctcgaggacgctggagcccagcaaggaagatgtctcaggagccatatcacatc

SEQ ID NO: 452464 - DNA, 74 bp, Homo sapiens
acagcacctagtcgtggccggaggagtctcagagctgtcagaaaggtggatgaagacctgatcattgaagttca

SEQ ID NO: 452465 - DNA, 80 bp, Homo sapiens
tattccactggattgggaaagaccatggcaggtgaatcaaaaactctggttttaagcaacctctcctacagtgcaacaga

SEQ ID NO: 452466 - DNA, 100 bp, Homo sapiens
ctgtgcgtagctgctcctttggttgaatccccaggcccttgttggggcacaaggtggcagactaagaaaaatggctttgtcagcccaacagatacccaga

SEQ ID NO: 452467 - DNA, 75 bp, Homo sapiens
ccgcatcctactgaccccacctgagcacctggaggaggagatgttaaagtaacccatcttgcaggacgacattga

SEQ ID NO: 452468 - DNA, 74 bp, Homo sapiens
cctcatcgagctcttcgtcaaggcttctcgtcagtgcctcgcaggatggtaaacttatcatctgggacagctac

SEQ ID NO: 452469 - DNA, 100 bp, Homo sapiens
ctggtcttgtggaactgaacttagctcgacggggctgaccgctctggcccagggtggtctcctctgagcctccggcctccataagacccaaaacagatga

SEQ ID NO: 452470 - DNA, 50 bp, Homo sapiens
ttttgcatgggttgatgagtggtatggtggtaataagctgcagtcaacag

SEQ ID NO: 452471 - DNA, 75 bp, Homo sapiens
cttcaagttggtggcgctgaagctggtgcagggtttcagaagctgccagaggaggagccagaaacagatctcagc

SEQ ID NO: 452472 - DNA, 82 bp, Homo sapiens
tcacagactggcaacaagaagatggtaccgtgcatcgcacctatttaagagaggagaaggcagagcccccccaggctatgaa

SEQ ID NO: 452473 - DNA, 83 bp, Homo sapiens
ctggccgctatcatcccagcagtggagttcagcccactactctgaaccagctgtggcggggccttcgtgggcccgcgatgcca

SEQ ID NO: 452474 - DNA, 82 bp, Homo sapiens
ggacactcagctcaccaagcggctctattaccaggttttaaacttcgccatgatcgtgtcttctgcactcatgatatggaaa

SEQ ID NO: 452475 - DNA, 99 bp, Homo sapiens
cagaacctggactgaagaaccacctagaaataactcagcagaattctgaaaatgaggtcacgctggaactacagtctttggaacagcaattagaagaag

SEQ ID NO: 452476 - DNA, 100 bp, Homo sapiens
acagaagtttttcttccaaacagagctgcagcatgcagcagattggaataaatatgatgaccgattgatgaaagcagcagaaaggggggatgtagaaaaa

SEQ ID NO: 452477 - DNA, 74 bp, Homo sapiens
tccccgcggacgccacagcgctttggaatcgaagcctcttaaaatggcagatgacttggacttcgagacaggag

SEQ ID NO: 452478 - DNA, 98 bp, Homo sapiens
tgtctcatatgtctcaggcttccatgcagcctgccttaccggctattgagggcacctacattgacaagaaatgccccttcactggtaatgtgtccatt

SEQ ID NO: 452479 - DNA, 75 bp, Homo sapiens
agactcaaaagtggagaagattcgcaggaactccgaggcgtttgcctgagaatacagatcaacccacagaacaaa

SEQ ID NO: 452480 - DNA, 82 bp, Homo sapiens
cgactccgtaggagcgcgggggcggctcctgctcttcctggactcctgagcagaggctgattcaccccaagagtggccgttc

SEQ ID NO: 452481 - DNA, 75 bp, Homo sapiens
gagttaaggaacagatccccggaggaggaaatcatcgagttccccatcctaaagctaaatggccggaccatggag

SEQ ID NO: 452482 - DNA, 97 bp, Homo sapiens
gactgccagctgccgaggcgttcggtcctgctgttgcggccgctgccccagggctgcggggacggaactcctgcagacccaggacttcagcaagttc

SEQ ID NO: 452483 - DNA, 74 bp, Homo sapiens
ggggctcgcggtgttcatctccgacatccggaactacaaagatcattccactcagcctgggacgatggggagga

SEQ ID NO: 452484 - DNA, 82 bp, Homo sapiens
tcacgagtcgaggtcctgcaggtggagctccggcagccgccctgatgccgctcctacgaggactgctgtggctccaggtgct

SEQ ID NO: 452485 - DNA, 90 bp, Homo sapiens
gatgtcgggacaccccggaagctgggaaatggtgacctcaaagcagaagctctgaattcacctctcatctgacgactgacagctgctgcc

SEQ ID NO: 452486 - DNA, 73 bp, Homo sapiens
gagtgacagagacgctcaggctgtgttctcaggatgccccaggtgaggatgaggaggaagatggtgtcagtga

SEQ ID NO: 452487 - DNA, 137 bp, Homo sapiens
ggtgaatgctgctaaaaacaagactggggctgctcccatcattgatgtggtgcgatcggcacctgaatggacagaagaggacctcagccaactgacaagaagtatggttaagttcccaggagggactccaggtcgat

SEQ ID NO: 452488 - DNA, 76 bp, Homo sapiens
agttcaacatgatagagcagagtggaccaccccatgaacctcggtgctggagccacagtaacgaggagtccttcag

SEQ ID NO: 452489 - DNA, 80 bp, Homo sapiens
atctccttttccttggctacccgtggacccaagtggagagattgtggaactggcgaaaggtgcatgtccctggaaggagc

SEQ ID NO: 452490 - DNA, 127 bp, Homo sapiens
gcggaggagggcgagccgcacgtcctcctgaggaagcgggagtggaccatcgggcggagacgaggtgcagtggcttatgcctgttatcccagaactttgggaggctgagtcaggaggatcacttgag

SEQ ID NO: 452491 - DNA, 98 bp, Homo sapiens
tcagctggaagactctctcctgggttacagctggcggatgctgccaagcggggagcgtttggccatgagcgctatgagaacggggctttccaggagcg

SEQ ID NO: 452492 - DNA, 51 bp, Homo sapiens
ttggtatactacatggcaaaatgggaaagcagatcagccagtagacatgat

SEQ ID NO: 452493 - DNA, 98 bp, Homo sapiens
cagacatgcaagttgcagctggaaagctataacaacgaacttgatgcaagtgataggtttgccaaggtcagacctctcatcatccggatgaactgcaa

SEQ ID NO: 452494 - DNA, 75 bp, Homo sapiens
agaggtcgtggaggtggccgtggaggcagaggtggcatgggccttgctatacatcctgacaaaattaggattgca

SEQ ID NO: 452495 - DNA, 83 bp, Homo sapiens
caggtattttaatggtggtcctcctgctgagacggacttcgggggagacgtgagaagccctaccactgcaactgggacggctg

SEQ ID NO: 452496 - DNA, 98 bp, Homo sapiens
tggcacctgcgcgaagctggccaaagcctgcccagacggctcacctgtgcgggatggaacaaaagactttgaaatactcgtgggatatgaagtggagg

SEQ ID NO: 452497 - DNA, 100 bp, Homo sapiens
actttcaacggcagaccgtctcctgagcgccccaggtagaatttcaaaatagaatgagtccatttaagtcccaggacggtggaaactagctagtagattg

SEQ ID NO: 452498 - DNA, 50 bp, Homo sapiens
ggaagaagcggctttaagacaaagtgtactagccctctcttggtacccac

SEQ ID NO: 452499 - DNA, 90 bp, Homo sapiens
tggtgtcagaaaccacaggcgaatccataactctgataagccgtacaggatgcgtattggatagcaatgaatagttctctgaaatgtaaa

SEQ ID NO: 452500 - DNA, 100 bp, Homo sapiens
cgccgccgcggtttgtcgccagaaggaagatggcggatctggaggagcagttgtctgatgaagagaaggatgaaacaggcgcctatttaatcgacagaga

SEQ ID NO: 452501 - DNA, 73 bp, Homo sapiens
attaaacacagaaggaaatacccagactgttactacaacctcgggcgtctggagctatgaagacatgattggt

SEQ ID NO: 452502 - DNA, 100 bp, Homo sapiens
atgatgggtgcccttgtggccagtaggcaatcacctgaaggatctgacttccagaagctacttccaggcctggtgtgaggttgtaagagacacgggggtg

SEQ ID NO: 452503 - DNA, 74 bp, Homo sapiens
tgagcagagccctgcgatactattatgacaaggctctctatgagaacatgctggtggagctgccctttgcaggc

SEQ ID NO: 452504 - DNA, 100 bp, Homo sapiens
gttgaagagtgaacttggatcattcattacagactattttcagccaaggctaagtcgaaatgtggcccaaccttcttcccctgtgccagcggcatccatt

SEQ ID NO: 452505 - DNA, 50 bp, Homo sapiens
gttcctgttcagagcaaccagctaattgcaatgtgccaccccaagccctc

SEQ ID NO: 452506 - DNA, 73 bp, Homo sapiens
aagattataattcagtggataaaactaccacagagtcatcctttttgaacttccatgactcagactgcgaacc

SEQ ID NO: 452507 - DNA, 107 bp, Homo sapiens
aactggcagaaggattgctttctcattatttgccagatctgcagagatcaaaacaagccctccaggaactcacgctggattctagtgacatttataacgaattgaaa

SEQ ID NO: 452508 - DNA, 74 bp, Homo sapiens
tttggcatctgttaatttgaacagtgttggaagtgtgcatagttatacaccgcctacacaatggaaaagccaaa

SEQ ID NO: 452509 - DNA, 100 bp, Homo sapiens
cggggcccctcctgggtccgcttcgtgttcctcgctcgccccacagttgtggaagaaggactctgggaaaatggcctttcctatgaatgtaggacgctgc

SEQ ID NO: 452510 - DNA, 98 bp, Homo sapiens
tgggagaccagagaaaatggatgatgaagaccccattatgggtaccatcacctcgataaccatctcttagagaaggctgagctgctggacaagttctc

SEQ ID NO: 452511 - DNA, 99 bp, Homo sapiens
ggatttttggcctaccctccaaagaaaagcatttattgcagcgctgtacattgataaggatttggaatatgttcatactttcatgaatgtctgcttctt

SEQ ID NO: 452512 - DNA, 74 bp, Homo sapiens
ccgctggacaagcacgagggcgcgctcgagacgctcctgaggtacatgtcccagagcaagcacacggaggcccg

SEQ ID NO: 452513 - DNA, 98 bp, Homo sapiens
ggagggagaagctcctcatgttccagccacttaccagctaggtcttacgaagtcgaaaagaggtatggtgctgggtgcagatgcagtgtggctctgga

SEQ ID NO: 452514 - DNA, 100 bp, Homo sapiens
tgttcatggacctgcaggcggtgctgccgcgcgagctctacccagtcgaggccactggagaatgcacggcaaccgtggggaagaggagcagtacgaaatt

SEQ ID NO: 452515 - DNA, 88 bp, Homo sapiens
cgcctggacggctcgggcgctggagagctagagccggtgcaggccacgcagaacaagacagggaagtatgtgccgccgagcctgcgcg

SEQ ID NO: 452516 - DNA, 75 bp, Homo sapiens
gggaagtttggatcctggttccgtccgctaggagtctgcgtgcgaggttcaatttcagaagcttcagcaactgcg

SEQ ID NO: 452517 - DNA, 100 bp, Homo sapiens
gatgctctatcacagtttgatctcaacaattatgcaagtggaagtttagctgatgctataagtgaaaactacagaatcatgagttactttaaagaagcag

SEQ ID NO: 452518 - DNA, 75 bp, Homo sapiens
ctcaagaaaccagtaacagattgtgttatttcaaactaaagatgactcagagccatctggagaagaaacagtaga

SEQ ID NO: 452519 - DNA, 96 bp, Homo sapiens
atgctggtgacggacagtgcagggaagcaactgcagagttttttacaggctggtggataatgattgatgcagctgtggtgtatcctaagccagaac

SEQ ID NO: 452520 - DNA, 73 bp, Homo sapiens
tccaaagaactcggagatgcctggaatacagtaaggaaaaagtctcacggctggaaacagagttagatgagga

SEQ ID NO: 452521 - DNA, 100 bp, Homo sapiens
tacaccgagagagtgaggagccagacgacaagcacacactatggcgctgaaacggattaataagacctgaaggaaaagattatgcccttcattggctagt

SEQ ID NO: 452522 - DNA, 100 bp, Homo sapiens
cgccgcggccatggaggacgagcggaaaaacggagcctacgattttcagttcacccactagaggcaaagacgtaagagagctaccagcgtattgagagga

SEQ ID NO: 452523 - DNA, 76 bp, Homo sapiens
ttaaagtcaaccaatatgaaatgcctgactccagaaaagttctttccaaatggcaatgcatttgccactggctcag

SEQ ID NO: 452524 - DNA, 96 bp, Homo sapiens
cgctcgacccgtccttcactcacgccatgcagctgctgacggcagaaaaagaaggggagcgttcaattccaaacagctgctttatttggagaaata

SEQ ID NO: 452525 - DNA, 75 bp, Homo sapiens
agagagccagcaatgcctccatgaacaatctcacccaattactctgctcagacatgccaccactgctctttgagg

SEQ ID NO: 452526 - DNA, 75 bp, Homo sapiens
catccacgcacctgcagctctgctgagagagtgcaagccgtgggttgcagaggaaagtggtcgcttatggtcaga

SEQ ID NO: 452527 - DNA, 100 bp, Homo sapiens
atgtcctcatcatcccgtcagagctgaggtacttcgtgaagctcctgttggaacaccaggatgcaattgcccctgagaaaaatgacttactgagtgaatt

SEQ ID NO: 452528 - DNA, 82 bp, Homo sapiens
gccttcgtcaccttccaggagaagtccatggccacctaacacatgcctcactcctgtcagcagttccaccttttcatggttg

SEQ ID NO: 452529 - DNA, 122 bp, Homo sapiens
ggcgtccgctcctcagcggatgtggcagccccgagccatggctctcgccgtccgagtcgtttattggtctgtgcagacttttgcagacaaatcaaaacaagaagctctgaagaatgacctgg

SEQ ID NO: 452530 - DNA, 82 bp, Homo sapiens
cccacatgcccgctcacctgcgctgtgatgcctgcagagctgtggcttaccagggccacgactgcttcccggtgctgttcac

SEQ ID NO: 452531 - DNA, 90 bp, Homo sapiens
ggatttctgtgcctggaaaatatctgttaacagactgcttttacacctactatgctattgcggcagcacctcccgagatgtgttatgtgg

SEQ ID NO: 452532 - DNA, 83 bp, Homo sapiens
atctgaagaggcagaaggagcaggctctgcgggaggtggagcacctgaagagatgccagcagtaagactttgaccccgacgca

SEQ ID NO: 452533 - DNA, 50 bp, Homo sapiens
gacccggtgcagctagaagtccatatcgctgatgactatcagccagttcg

SEQ ID NO: 452534 - DNA, 82 bp, Homo sapiens
gtcgcagcgccatgaagtccctgtctctgctcctcgctgtggctttgggcccccccaggatgcaatggcgcagcccccccgg

SEQ ID NO: 452535 - DNA, 83 bp, Homo sapiens
gggcacagagagatggagagagacctagttaggtgctggagaatgccgaaggtgccagaaccaccccttcagttgtggccttt

SEQ ID NO: 452536 - DNA, 90 bp, Homo sapiens
cagtcctcggggagagcgcgccaagaccgctgcagccgctggctgacccttcagatatttcaacactcctctcagcatcctccacttccc

SEQ ID NO: 452537 - DNA, 100 bp, Homo sapiens
tgtctttatatcctgacactatgaatgctacttggatgcctcttaagttgcagaatgaagaagagtctggagaacctgaacaggctgcaggtgatgctcc

SEQ ID NO: 452538 - DNA, 95 bp, Homo sapiens
ccggccgaaaggcgaggaaccggtccctgtgcgttttattgcgacctgccggtgggaactttgtctccgagtcggagcagcatggagcggcggag

SEQ ID NO: 452539 - DNA, 100 bp, Homo sapiens
ctcgggcggctgcttggccaccgccaccgccgtccgaagggctcgagcccgttatttggaaatagcggtgcttgcagcgcttgcggacagtcgattcctg

SEQ ID NO: 452540 - DNA, 75 bp, Homo sapiens
ctactatcacgacgggaagctgtgggttcctcaagccaggacctacgcacctgttgtgagtggtgttatagttct

SEQ ID NO: 452541 - DNA, 112 bp, Homo sapiens
gtgcagtgctcgctgccatggatgccaccaagctggtcgcaatggaagaagagatcgccgcgctggtcattgacaatggctccggcatgtgcaaagctggttttgctgggga

SEQ ID NO: 452542 - DNA, 82 bp, Homo sapiens
ctcccaccagcagcgcctatgagtttgtcacctggctcgatggcattaaaaatggaatctatttggaatttgcagaagcaag

SEQ ID NO: 452543 - DNA, 75 bp, Homo sapiens
gtggtatgagagtggataatataatcaactcctctgcctgcagctggatccgcctcagaaggagcagctggggag

SEQ ID NO: 452544 - DNA, 100 bp, Homo sapiens
cttatatgtgatgccattccagcactggactcatggaggctgagcatttattcagtgtgctggaattgatgttcgtctgtgtgatgttggtgaggccatc

SEQ ID NO: 452545 - DNA, 127 bp, Homo sapiens
tcccggactgaggagctgtcgccggcggagggtgcatgtttgcgaggaagccgccgggcgccgcgcctttgggtgctagactggatcgagaaccacggagaagcatttctgagcaaacatacaggtg

SEQ ID NO: 452546 - DNA, 75 bp, Homo sapiens
gacaaactgccctacaaagtcggagtgggaatagctttgcgaaaaatgggcgcaatggccaagccagattgtatc

SEQ ID NO: 452547 - DNA, 75 bp, Homo sapiens
ggatggccccaggtgtaagcgcagaaagcaggcgaacccgcggcgcaataacggccttggtatgttcctgcttca

SEQ ID NO: 452548 - DNA, 49 bp, Homo sapiens
aaagacctcagagtgttctcatagtattattgattccacagaatacagc

SEQ ID NO: 452549 - DNA, 100 bp, Homo sapiens
gatatcagacaccgagcttcagcaagctctctccaacgagatgggatctcgctgtgttgtcctggctggtctcaaactcctaggctcaagcaatcctcct

SEQ ID NO: 452550 - DNA, 100 bp, Homo sapiens
aggcgccccgcgcagctggctggcggagcatgagcgccccaggagctgacatggacccaaatcctcgggccgccctggagcgccagcagctccgccttcg

SEQ ID NO: 452551 - DNA, 100 bp, Homo sapiens
gccacttcgctgcttgcctcatcagcctcacagttccccacagtccaacgtggagcacctgacggagaaaatgaagaccaccatccagagaggccttgtg

SEQ ID NO: 452552 - DNA, 50 bp, Homo sapiens
agacattgaccccgaggagacggaattgaaagatgttggccatcgtgatc

SEQ ID NO: 452553 - DNA, 100 bp, Homo sapiens
ccggccagaagcgggcggcgcgggggagatgggaggcgccacatccaccacctggggaaccagctgcagctgaaccagcactgcctggacaccgccttca

SEQ ID NO: 452554 - DNA, 100 bp, Homo sapiens
tcctctccaagatgcagttttttgatgctgaggagctcctggtcgatgaagaggatgatgtttttggtgaaggtccagcaagactatgaatctctgttcc

SEQ ID NO: 452555 - DNA, 90 bp, Homo sapiens
gcgttacaagctttgtctccttcgacttggagtctttgtccaggacgagatctggttggagttggagggtgagagaaaatgaattctaat

SEQ ID NO: 452556 - DNA, 75 bp, Homo sapiens
agagttcatattctccaagcaatagggaagccatggatcctatagctggcaatgtctacttcgatctgaagtcta

SEQ ID NO: 452557 - DNA, 75 bp, Homo sapiens
caaagagtcaactaatccagagaaggcccatgagcccattgcagatgcaaaggctcctgagaagcgggcctcacc

SEQ ID NO: 452558 - DNA, 75 bp, Homo sapiens
caagcgggagttcaaggaggtgctgaagagcgaggagctgtctcatgcatctctgatgacaaccggtcagcagaa

SEQ ID NO: 452559 - DNA, 98 bp, Homo sapiens
agcccccagagctgactgccaggccccagaggagcgtaagcaaggaccaggtcattgattacaacggggaacgcacgctggatggttttaagaaattc

SEQ ID NO: 452560 - DNA, 73 bp, Homo sapiens
aggatatgtagcgaggaggaacgcgctaaggcaaagcacctgcgagtgctaacattcagggatgtggctgtag

SEQ ID NO: 452561 - DNA, 75 bp, Homo sapiens
gtgccaagatccggacctaatatatatgaactcaggtcttaccaactccgagttggatggcaagcatgtggtgtt

SEQ ID NO: 452562 - DNA, 90 bp, Homo sapiens
gaagtgcagctgcctcagttcttagcgcagatgttccatttaagcagacctcttccatagctgtagctggagcggtaattggagctgttc

SEQ ID NO: 452563 - DNA, 100 bp, Homo sapiens
ttttttaggagagttagagaagtgccttgaagatccagaaaaactaggatccctttttgttaaacacaatgtttctccatcccagagagatgaagtaatt

SEQ ID NO: 452564 - DNA, 96 bp, Homo sapiens
gcaagttgttgctccgcttgttggactgctgctgcaaaacttttctatcgttttcctgctgtaaacagcctgatccagaggatcaacctgaggaag

SEQ ID NO: 452565 - DNA, 100 bp, Homo sapiens
cttcgctgtctgggatgttggcagccacttcaaaatcagacctctgtggcagcattttttccagaacacaaaagtggtatgtgtgcaacagagagaaatt

SEQ ID NO: 452566 - DNA, 83 bp, Homo sapiens
caggaactggatgccaactctgcccttatggaattggacaaaggttatggaaacaaaggacatgctttacatcgtcactgaat

SEQ ID NO: 452567 - DNA, 100 bp, Homo sapiens
ctgtgattgtggaaaataactccacggatgtcttggtagaggtcacagtaatgaaaggcagtaatagaaataaggatcattcagcagaaggagaaggggt

SEQ ID NO: 452568 - DNA, 95 bp, Homo sapiens
aggaacaataccatttttaagcaagccttttctctcttaagcccacagaacttaattgcccaatctcagtctggtactggtaaaacagctgcctt

SEQ ID NO: 452569 - DNA, 83 bp, Homo sapiens
cgtcctggagccctcctcaggtgagctggagctgcccggctcggcagcgggaaggacatggatttgattgacatactttggag

SEQ ID NO: 452570 - DNA, 100 bp, Homo sapiens
ggccacgacccacgagatcatggggcccaagaaaaagcacctggacttggacggctgcattcatcgggccgccggccccctgcttaccgacgagtgccgg

SEQ ID NO: 452571 - DNA, 155 bp, Homo sapiens
caactgtagaaccactattgtaatttgctgctctccatcatcatacaatgagtctgaaacaaaatctacactcttatttggccaaagctcataatgaagtaccaaatgaaaggcttgtagttgagcatcaagaatcattgtcaaaaaccaaatta

SEQ ID NO: 452572 - DNA, 98 bp, Homo sapiens
tggtgtgggtttcccaagcaaggttccttggaagaagatgtctgcagaggagctcttgtccctggcaaagcgaaagcgcagtgactctgaggagaagg

SEQ ID NO: 452573 - DNA, 100 bp, Homo sapiens
ctccccgggcccctgagccatgcccatcgcagccgccccgaaggagccaggtccgaggaggcaaacaaagccttctctgcagctgtgcagatgcacgatg

SEQ ID NO: 452574 - DNA, 75 bp, Homo sapiens
atggatccatttctcctattgaggagtcaacatgacccagcagatggctgggatgaacttctatggagccaatgg

SEQ ID NO: 452575 - DNA, 82 bp, Homo sapiens
atcttcgagttcaaagagaccctcggaacacccaacatgagtgaagtttcctgcaagaaacgggacgactatttggaatggc

SEQ ID NO: 452576 - DNA, 48 bp, Homo sapiens
ctcccaaagtgctgggattgcagttggtaattccattaactactcaag

SEQ ID NO: 452577 - DNA, 100 bp, Homo sapiens
tgaaaccatatcaagttaatggagtcaacccagcctatccagaatcccgctatacctcggattacttcattaacgcagtaaaacgcaggactcttcccgc

SEQ ID NO: 452578 - DNA, 100 bp, Homo sapiens
agtgatcttcccgcctagcctcccaaaatgttggaattacagttatgtagtaacgagttctggattattgcttcctgtgctgctacctcggctctaccca

SEQ ID NO: 452579 - DNA, 99 bp, Homo sapiens
ggatggtttgcttatttcaaggaggcccttacctggaaggaccacctggatggtaccttgccagcaagacgaaacaggcgggccttcggggacaagcag

SEQ ID NO: 452580 - DNA, 98 bp, Homo sapiens
ctggtgggagggccggcacaacggcgtggatggactcatcccccatcagtacatagttgtacaggacatatgaccttgaatgatgccatgaggaacaa

SEQ ID NO: 452581 - DNA, 51 bp, Homo sapiens
cggggacggagagagcacgagcccatcaggactctgatatgttggcttgtc

SEQ ID NO: 452582 - DNA, 99 bp, Homo sapiens
ggctcgctccctgcgccccggagcaggccaagttcggggccaggacgtcgggaggacctggccacatttaaaggctggatggatattatgtatgcagct

SEQ ID NO: 452583 - DNA, 50 bp, Homo sapiens
ctgggggccggggcgcgtcgcaggaaattcgaaatgagtcccatgactat

SEQ ID NO: 452584 - DNA, 88 bp, Homo sapiens
gaagagtatgataacgaaccacaaatacctggctatattgtcgatgattcagtcagaggggccctcctcgccaaagacagcctagaga

SEQ ID NO: 452585 - DNA, 98 bp, Homo sapiens
ggattcagggaataggagctggggagcccttctgcgccacagtgatcttccattgtttgaagcactggacctttaatccactgtaggtatggacaggg

SEQ ID NO: 452586 - DNA, 100 bp, Homo sapiens
ctcagaggggagtcatcatgagcgatgttaccattgtgaaagaaggttgggttcagaagagggctgcatatccccaccgtttgaatctcttttaccttgc

SEQ ID NO: 452587 - DNA, 114 bp, Homo sapiens
tggaggcggcggcgatgcactaggcctcgctcagggcggctgccccgggacccgcaggtggaaattgaaaccaatcagttacaagatggctcgttaattgacctctgtggtgca

SEQ ID NO: 452588 - DNA, 90 bp, Homo sapiens
attccaatggctgagccgttttgccccaaaacgagagagtctccagagaatacagagggcaaagatggatccaaagtaactaaacaggag

SEQ ID NO: 452589 - DNA, 82 bp, Homo sapiens
taccctgggttatccttggattcaactatatcatcggaggctcccgcttacaaacacgcagatggcaagaagattgatggca

SEQ ID NO: 452590 - DNA, 98 bp, Homo sapiens
ctcgactggcagcgcgggaaacgtcaaactcgaggttcttgcatacactgagggacttcacggaaaatggatgttcagcgagatacgagctgtatttt

SEQ ID NO: 452591 - DNA, 50 bp, Homo sapiens
gtcctgtacagcatcgccgagaaggttcattttccagacactgaaagagc

SEQ ID NO: 452592 - DNA, 97 bp, Homo sapiens
ccgtggcgaagtggagagtgacatgcagttggatggcggtgactgcgtggtgctccatacttgcttgcagtgcctacgtggctctggctttgggtga

SEQ ID NO: 452593 - DNA, 75 bp, Homo sapiens
ctctatcccaggaatacagctttgcattagagattatgcatgatgtgataaagaaggtcaagaagaagggggaat

SEQ ID NO: 452594 - DNA, 90 bp, Homo sapiens
catgatttaaatatcggcgttaagagactctacaggggcaggtaattcactggtccacaagcggtctcctttacgtcgaaaccaaaagac

SEQ ID NO: 452595 - DNA, 50 bp, Homo sapiens
ccattatgtgcccgaattccgaaaagggctcacctgcttgaggaaacagg

SEQ ID NO: 452596 - DNA, 51 bp, Homo sapiens
gcagtttttgatgaaattgtagagaactatcagctggacatcatctccatg

SEQ ID NO: 452597 - DNA, 108 bp, Homo sapiens
cccagaccctggagcctcagttggaagcagccgatccagcctgcggagcctgtggggcagatatgatgcttcctggtgtgtttagtggttggtgccattccaattttc

SEQ ID NO: 452598 - DNA, 88 bp, Homo sapiens
cattgctaagtgcaatgggaaatacctctcatcaaattactcagaggctccctgaaacaacagtaacctacccctgtgggtcatcatc

SEQ ID NO: 452599 - DNA, 75 bp, Homo sapiens
aatggaattagcctgcaacatgaaggaactgtggctgcaccatctgtcttcatcttcccgccatctgatgagcag

SEQ ID NO: 452600 - DNA, 75 bp, Homo sapiens
tccttctccactttcgccagcccgtgccgcgagcgcggcctgcaggaggttacgggcaggacttgagtggcttcg

SEQ ID NO: 452601 - DNA, 100 bp, Homo sapiens
tgaatgcagaccccgcctcccacgagatctggaggtcagaaactctgctccagtgtaatggagagagggctaaagaagaagcaattacacattttgaaaa

SEQ ID NO: 452602 - DNA, 50 bp, Homo sapiens
agaggactcaggagcaaatcagtaatgtctctgttctaggatgtcccgac

SEQ ID NO: 452603 - DNA, 82 bp, Homo sapiens
cgctgccctcagctccgagtccagggcgaggtcacttggtacatatgaccgtggtctccggcagcaacgtgactctgaacat

SEQ ID NO: 452604 - DNA, 90 bp, Homo sapiens
tccagctccaggccggtccgctgccagggaactctaatgatccaggacaaagaagttaccctggagtatgtatcaagcctggatttttgg

SEQ ID NO: 452605 - DNA, 58 bp, Homo sapiens
caggcgtgcgcggacggtgtgcggaaatacactttcgggaaatggcctctaaatcctg

SEQ ID NO: 452606 - DNA, 82 bp, Homo sapiens
cgaagctctagaaatgaatgtttccatctcttcagagatgaaccaggtggagtctcactcttgttgcccaggctggagtgca

SEQ ID NO: 452607 - DNA, 74 bp, Homo sapiens
tcgggccgggcgccacctcccccctgcctccctctccgctgtgggcagatgattctggaccagatgaagcctga

SEQ ID NO: 452608 - DNA, 74 bp, Homo sapiens
cgctggctgctgagcccaaggccaaggaccccttcgctcacctgcccaagagatgaggcctgcctgtgttaata

SEQ ID NO: 452609 - DNA, 110 bp, Homo sapiens
cgaaaatgagcctcgcgaggccgacaagagccacccggagcaggagaatggggtactaagagaaaagcacgaagctgtggatcatagttcccagcatgaggaaaatgaag

SEQ ID NO: 452610 - DNA, 100 bp, Homo sapiens
gcaggtcggggagcgctcggactacgcgggatttcgcgcgtgtgtgtgtcagttttgatgaagcaagaacacagagaagagattgatttgtcttcagttc

SEQ ID NO: 452611 - DNA, 74 bp, Homo sapiens
ccttgggggagaagcactgctgcctatgcactccatttacaggtgaggcggaaccaaccctcctggccatggga

SEQ ID NO: 452612 - DNA, 100 bp, Homo sapiens
tttgaaggtgatacttacctcacctctaattagggacgaattggagaagaaggatggagataaagtcctgtttatgaccacagctgtagatttggtaata

SEQ ID NO: 452613 - DNA, 75 bp, Homo sapiens
gttacttcatggcagctatcccacagcctgggttactaggtgtctttcagaagctgattgcatccaaagcaaatg

SEQ ID NO: 452614 - DNA, 82 bp, Homo sapiens
accctcccgcagcctgcctttccttccccctcggaaaatggttcccactgccgggcgaggatgaccgagtgggagacagcag

SEQ ID NO: 452615 - DNA, 100 bp, Homo sapiens
cttcgtcgtgaggtgcatcgcgtaccccttcaacgccaagcagcccaccgacatggcccggaggcagcagaagatcgaaaagtatcctccttgcacacct

SEQ ID NO: 452616 - DNA, 100 bp, Homo sapiens
aaccaagatagatgtgtcctatgaataccgcttcctggagttcacgactctgagtgctgtgatgtcttggcattgcccattttcaagcaggaagattcca

SEQ ID NO: 452617 - DNA, 75 bp, Homo sapiens
cacggagtcgccgcggagcgcagcagcctcccgcgacgatgcccctcaacgttagcttcaccaacaggaactatg

SEQ ID NO: 452618 - DNA, 75 bp, Homo sapiens
ctgtggttttgatcatgttgttaccctcggacgtagcccggcttgtattggacaaagaaacagccttggtataat

SEQ ID NO: 452619 - DNA, 100 bp, Homo sapiens
cgcttcgcgcactacttcgtgctgtgcgggatcgacgcggacagcgggctggagcctgacgagctggcgggaacgccacagaagtatgatcccactttca

SEQ ID NO: 452620 - DNA, 100 bp, Homo sapiens
cgaaacgccgcgcactcggagccggcacggctcggcgaatcctcactatggatgggctcattgaggacattaagcatcggcggtattatgagaagccatg

SEQ ID NO: 452621 - DNA, 75 bp, Homo sapiens
ccccgaagaagactcccccacatctgggtggtggagattgtgaagaagctggagtctcgccagcggggctgggag

SEQ ID NO: 452622 - DNA, 82 bp, Homo sapiens
aggtgaggagagaagatggcatacaggcggaagcatcagcaaatggtaaccttttaaggtggagaccggtggcctgtttggg

SEQ ID NO: 452623 - DNA, 75 bp, Homo sapiens
ggagaatcctattgtaaaatcacttgctaaggtgtgagatcaaccatgagttccgttgcagttttgacccaagag

SEQ ID NO: 452624 - DNA, 75 bp, Homo sapiens
catgggctggccagagcacacaccaggcactgataatatcgtctactgcattatttttggctgcaaaagtggaag

SEQ ID NO: 452625 - DNA, 100 bp, Homo sapiens
caacggcaaaaatctcaagaaagaggtgggcaagatcctgtgcactgactgcggctggacgtaaagaaagaagtgatgcactcaattctgcaatagataa

SEQ ID NO: 452626 - DNA, 73 bp, Homo sapiens
gcacatgtaaagccccttctgcaaaagaaaccatttctccaccgaaggaggagagtccgaaagcgcaaacacc

SEQ ID NO: 452627 - DNA, 100 bp, Homo sapiens
ccccagcaaacctccgggcccccaggcatggctagctcgctgaacatctccttcccagccactggctgccagaaactcattgaagtggacgatgaacgca

SEQ ID NO: 452628 - DNA, 48 bp, Homo sapiens
cctcccaagtaactgggattacaggagacgtggttgtaccagttgcaa

SEQ ID NO: 452629 - DNA, 98 bp, Homo sapiens
ttcgatgatcgtgtgtcggatgaggagaagcgccagcagccctgtggtggcgacgacgatggaccaggagccagtgggcggtgtggaacgaggagaag

SEQ ID NO: 452630 - DNA, 100 bp, Homo sapiens
tatcaggatccggagacggaaatgtccgaaggccgcagtacttgaccctgtattttgggagtcgaacggagtttcagtgtagctcagaagccatttggag

SEQ ID NO: 452631 - DNA, 83 bp, Homo sapiens
ggtgctggcagctgagcccgaggctgacaaggctcctgggcccccagatctgattaccttcacggaaggaagcggacgctcac

SEQ ID NO: 452632 - DNA, 100 bp, Homo sapiens
ttggagctgaaaatagcgtgaacttgaagatttggagtccaggaatgagactaagcatttatctgtaggaaaagatattattcaaaacactggttctcag

SEQ ID NO: 452633 - DNA, 75 bp, Homo sapiens
acggttgtggatcttgaagctttggaaaggcaactcatgcagcaattccagaaccccgacttcccacccgaagta

SEQ ID NO: 452634 - DNA, 74 bp, Homo sapiens
cggctgacagtcgggaggagaaaggaacttacaatgtctcagaaaaatggtgggaatgttcttcagatgatgta

SEQ ID NO: 452635 - DNA, 106 bp, Homo sapiens
ggcaaaccgtgcattattataaagctcaaccgagttctaggcttcaaacctaaggttcaatacttcttcaagatcttggataattagtggtgtggaaagtaaagaa

SEQ ID NO: 452636 - DNA, 100 bp, Homo sapiens
atatgaaaatggcccccaaatggaattccaaaaggcaaatttagcgatcaacccagcggccttgctgcccacagcggcttcccagatctctgaagtaaag

SEQ ID NO: 452637 - DNA, 82 bp, Homo sapiens
tatcctcctggccgtcctcctcacggtcctcctggctgtgctcatatacacctggagcaggccgggctctcgccatgggtca

SEQ ID NO: 452638 - DNA, 98 bp, Homo sapiens
ccacctgcagggaagaacccgagtcgaagcgggaagatggctgcagacaagcctgcaggttacctgtcctgctgccgattcctggatgacaatcagat

SEQ ID NO: 452639 - DNA, 101 bp, Homo sapiens
cggacccgcaagcatgcccaccactgccacaaacgccgcaccaggtcttgtagcagcgcctcctcggacctgaaggagaagaaggagaaggtggaggagaa

SEQ ID NO: 452640 - DNA, 100 bp, Homo sapiens
tcagaagcatgtgtcttccccagctctgcagccacatactatccgtttgttcaggaaccaccagtgacagattctgttgagttggaagaattggcaaaat

SEQ ID NO: 452641 - DNA, 98 bp, Homo sapiens
gtgccaggcgccggccggctgcgaagacgcggtgggccgcccctccgttacatggtgatgaattttgtcctgttttggatgcaacatttgtaatggtg

SEQ ID NO: 452642 - DNA, 83 bp, Homo sapiens
gacagctgctcctggctacatagctccagcaaaatgatgcttcaacacccaggccaggtctctgcctcggaagtgagtgcttc

SEQ ID NO: 452643 - DNA, 83 bp, Homo sapiens
gccttcctgaagagatcctcagcaagcttgctgatgtccttgaagagggggatatgagactttctactcggaatatcctgagt

SEQ ID NO: 452644 - DNA, 75 bp, Homo sapiens
aattccgaagcaatcttcctgctaaggccattggacacagaatccgagtggcatagatcaagatcccgatcccgg

SEQ ID NO: 452645 - DNA, 75 bp, Homo sapiens
agctacatttggaatacagattctataagcagttaggatctggagtaacagcaacaagtgggaatggagactttg

SEQ ID NO: 452646 - DNA, 100 bp, Homo sapiens
agcttgccgcacaaaaagctagagaggagctgcgggcgtctttggagacacagcgtgctcagagcagtcgactctgcgtggcactgaaacacgagcagac

SEQ ID NO: 452647 - DNA, 82 bp, Homo sapiens
gcgccgagcgcggcccgggcgccatcgagccttggcggcggacgtgcaggctgaaggggatgctaagggagataaagcaaag

SEQ ID NO: 452648 - DNA, 83 bp, Homo sapiens
ggtgcggcctcgctagcgggagagggagcgggatcaccggcccggagagaggaccatcagcacgtgcccatcgacatccagac

SEQ ID NO: 452649 - DNA, 75 bp, Homo sapiens
ctactgtatcctcctttcatgatagctttagagaatggatcttggagaatgtctgaaagtccatgacctggcttt

SEQ ID NO: 452650 - DNA, 50 bp, Homo sapiens
gcagtctgccagacaatagagcatatggttgttgacctcctgtactggag

SEQ ID NO: 452651 - DNA, 73 bp, Homo sapiens
tgttaaggattccaagtaactcttatttggccatctggctgctgtgcacaggcgctcgtgaggctgccttccg

SEQ ID NO: 452652 - DNA, 75 bp, Homo sapiens
ggatcccggactcgcgcgggatgccccacgtcatccggatcggaatactcccccagttgcaagaggcgcaggacc

SEQ ID NO: 452653 - DNA, 74 bp, Homo sapiens
caaaggtgtcgtggtggtcattaagcggagatccggaacttgtaatagctggcatcgttgagaatgaatggaaa

SEQ ID NO: 452654 - DNA, 75 bp, Homo sapiens
ggactacagattagaggataataaagaacattcatttgaggagtggagtcaacatatcaatggagcaagtcacag

SEQ ID NO: 452655 - DNA, 100 bp, Homo sapiens
tttcctcagaactactatattcagtggctaaatggctccctgattcatgatgtggtgaagctgtagagaaaaacaagcgtctcatcacggcagaccagag

SEQ ID NO: 452656 - DNA, 90 bp, Homo sapiens
gaagaatctccggagcgaggaacagaagaagaagaaccggaagaaactgtccgagaagcccaaagtgaatcttggaagcaaccagtacct

SEQ ID NO: 452657 - DNA, 80 bp, Homo sapiens
ggaacccgaagaagaaaggattcgttacagccagagattggcagcccagctggaggcaccccggcctccccggctccgct

SEQ ID NO: 452658 - DNA, 142 bp, Homo sapiens
agcgcggctgctgtcgcccagcgccgccccgtcgtcgtctgccttcgcttcacggcgccgagccgcggtccgagctgggtagttgggtctctggatattcttggcagccctgcaagcctggtgagaagcatcgggaacgggg

SEQ ID NO: 452659 - DNA, 88 bp, Homo sapiens
ttttcttatgcttataagagtggaacaggaatttgaagcctacattaatgcttctggagaacatggaattgtggttttctctttggga

SEQ ID NO: 452660 - DNA, 100 bp, Homo sapiens
tcgtgattagaggtcttttgctggaggttgactgtgctgtctgcctgccacagtgactcaggtcactcaaggaactatccgaccagctgccaacttcgat

SEQ ID NO: 452661 - DNA, 90 bp, Homo sapiens
acgcaagaaccagttaactgtacaaactacacagctcatggaactgccgtatgaggctctgcggtacatgactggcgaatgcaattacgg

SEQ ID NO: 452662 - DNA, 75 bp, Homo sapiens
agaagatccagaaactttcactcaagaagatattgacgctgacttatccttgtataatgaattccgattgtggaa

SEQ ID NO: 452663 - DNA, 88 bp, Homo sapiens
gcgcccactggggatggcaaagacgacatccggtgcgccgaggctgctcacaaaaaatgctgtccagtttcaacgagtggttttggca

SEQ ID NO: 452664 - DNA, 50 bp, Homo sapiens
tctccccagaagaggaagtttaatgttggctcaattaagaaacatcaggg

SEQ ID NO: 452665 - DNA, 74 bp, Homo sapiens
ggaggaggcgctgcgtcagtaccagcaggatggagcgctacgtctccatgcccagggaagaggctgcggaacac

SEQ ID NO: 452666 - DNA, 90 bp, Homo sapiens
catggatcggcgctggacgtgctcctctccatggggttccccagagcccgcgcacaccattcgcttttcacccaagatgatttgatgtct

SEQ ID NO: 452667 - DNA, 103 bp, Homo sapiens
tttcaggaagcataataagattcctagccgtttccctggggagatggtaaccatactctattccataaccctcatgtgaatccacttccaactggctacgaag

SEQ ID NO: 452668 - DNA, 100 bp, Homo sapiens
caggcagtcattaccactcacactgtacttccagggagacaccgattataagaagagaaactcagcgctggggaagaagctgaacaggaagacacccaga

SEQ ID NO: 452669 - DNA, 90 bp, Homo sapiens
aactctcagttcgagagtaaagaatgttgtaccatctttgggtaggcagacttccctgacgacatcagtgatacccaaagctgagcagag

SEQ ID NO: 452670 - DNA, 100 bp, Homo sapiens
ctgggtcagtccgccgctcaccccgcggccgcaccttcccgccttctcagcaacatggctgacaaggccaagcctgccaaagctgccaacaggacgcccc

SEQ ID NO: 452671 - DNA, 100 bp, Homo sapiens
cagagttgtcgctactggagaagtccctgggactgagtaaggggaataaatacagtgctcagggcgagcgacaggtggataatattaatgcagctgtgat

SEQ ID NO: 452672 - DNA, 82 bp, Homo sapiens
atgagaaaaagcttggagataaagttgctttttactgaaatggcttcagacatacctggatctgtgacgttgcccgttgccc

SEQ ID NO: 452673 - DNA, 83 bp, Homo sapiens
ctgccacaaaaaaatataataaggctgagtgcggagccaagggaccttgctgcaagaaactgcctggtaggtgaaaataatgt

SEQ ID NO: 452674 - DNA, 50 bp, Homo sapiens
gtgctcacgccgcccatgaagatggcaaagtgtgaggatcttgagacaca

SEQ ID NO: 452675 - DNA, 51 bp, Homo sapiens
tctggaggctgtgcgcatgcagcacctgattgcccgggaggcagaggccgc

SEQ ID NO: 452676 - DNA, 100 bp, Homo sapiens
gctgctgccgccccttgggctaaaagagtgaattactggaactgaaacggcagcagcaagagcaagaaagagccaaaatccaccagactgaacacaggag

SEQ ID NO: 452677 - DNA, 98 bp, Homo sapiens
gctgtttccagtcatgaggctgtggtggatctttctggaagaagttcataaatatgtacaaatgatgggcggacgagtatacagagaccttaatgtat

SEQ ID NO: 452678 - DNA, 80 bp, Homo sapiens
gccgtggtgaagcatgaagtcacagggctactgttttccaatcctcaggggttgcagatggtgtaggaggctggagagac

SEQ ID NO: 452679 - DNA, 100 bp, Homo sapiens
ctcttctccttcacagtaaagtggctggagtacaagcgcaagctagccagagtttccctggtgcgcaaagaactcaggtcccggatccagagcctgccag

SEQ ID NO: 452680 - DNA, 51 bp, Homo sapiens
tggcacttatgtcctccctggattttgactaaaggagaagttcaagtatca

SEQ ID NO: 452681 - DNA, 74 bp, Homo sapiens
tttcaacctccggggccacaatagcgaggtatctcattcagttgctaaacttatattagttaatttccactggc

SEQ ID NO: 452682 - DNA, 82 bp, Homo sapiens
agtccttcacctgaagtcagtgggtcactcagctgccgcaaggagcaaggcaagttctatgaccatctcctgagggactgca

SEQ ID NO: 452683 - DNA, 98 bp, Homo sapiens
gaacatcagcgccgtcccttcctggtccaaagtgaaccagggtctcatccgcatgtataaggccgaggagaactacgatgacccgcacaaaacccctg

SEQ ID NO: 452684 - DNA, 75 bp, Homo sapiens
agaagcatacgttattcaatgtcaggctgaagctcaagaaggacagtcattttgtttactcattcagccctgttg

SEQ ID NO: 452685 - DNA, 75 bp, Homo sapiens
gagaaactatatttgtcgtacaaagctggcagacagataccctcagggccgttgctccagggagaactgcaaata

SEQ ID NO: 452686 - DNA, 98 bp, Homo sapiens
ctggccacttgcttgggatcctttatcctggtcatcttctatttccaaacggagctggagtttgttcagatcatcatcatcgtggtggtgatgatggt

SEQ ID NO: 452687 - DNA, 82 bp, Homo sapiens
agcggaagcggcctggcaggggaaggatcgaggaatcccagtcagaagttccagcctgccactgttctctgatgccatgcca

SEQ ID NO: 452688 - DNA, 90 bp, Homo sapiens
gaagaagcatatagaatattaatctttggagagacatcctatattcctttcagtgttctggacttggtgcctctttctgttatatgcttt

SEQ ID NO: 452689 - DNA, 106 bp, Homo sapiens
ccaacctggatggagagaccaacctgaagcggcggcaggtggtccgcggcttctcggagcttggagttctgggaaatcgttcattcatttacagatgaacagaaaa

SEQ ID NO: 452690 - DNA, 100 bp, Homo sapiens
ctgacgacgtgaaggagcagatttacaaactggccaagaagggccttactccttcacagatcgaaactggcgatggaatatgagaggagccctctggaaa

SEQ ID NO: 452691 - DNA, 74 bp, Homo sapiens
cacctgacagcatctattacctttgccttggaatacaggagggtaaagttctttacaaagttcgctggaaaggc

SEQ ID NO: 452692 - DNA, 78 bp, Homo sapiens
ttattatctcattgaagcttggaattacatagctggaaaggatcttacaggtaaaccgtcctattggcagggtacaga

SEQ ID NO: 452693 - DNA, 73 bp, Homo sapiens
cgcaggaggcggtgcacagcgccaaggattggcacagctgcactggccgttcaggttgtgggcagtaactggc

SEQ ID NO: 452694 - DNA, 51 bp, Homo sapiens
agtgaaagaaacttcctcagtaaagcgtcctactgctctgttggctcatga

SEQ ID NO: 452695 - DNA, 100 bp, Homo sapiens
acctggacttctacgacttcgagccgctgcccaccctccccgaggacgagtctcggaagggtgctgacctggaccgggagaagaaggctgccgagtgcaa

SEQ ID NO: 452696 - DNA, 80 bp, Homo sapiens
agcaacccatagtctacccatggatgaaaaaaattcacgttagcacggttagagatgtttatgattacttccgagctgtc

SEQ ID NO: 452697 - DNA, 75 bp, Homo sapiens
cctaaatgcactctttcgaaagaaaggttgggataattcttcactattccacccttgccacagtactatgggtag

SEQ ID NO: 452698 - DNA, 75 bp, Homo sapiens
ctttcagagcccggcaccacccatcttgagtatctggtttgagacgggccaactcagtccaggcctccagacctg

SEQ ID NO: 452699 - DNA, 75 bp, Homo sapiens
cgaccacatttgtcatgatgacagtgacaaggtggtgaagaaggtgaagtccatgcagatgttccacatgcccat

SEQ ID NO: 452700 - DNA, 88 bp, Homo sapiens
tctgcagctgcagaagtgaaccggcaaatgctgcaggaactggtgaacgcaggatgcgaccagatagtggccagaactatagtgccag

SEQ ID NO: 452701 - DNA, 76 bp, Homo sapiens
gttactgcacacagatggggcgcatgaacgtcccggaggtgaaaaatggacatttctgatactgcccagccactac

SEQ ID NO: 452702 - DNA, 75 bp, Homo sapiens
ggggcacctggccaagatctacgccatgcactggggcacagactccaggctaaagaattacctccaaagccattg

SEQ ID NO: 452703 - DNA, 88 bp, Homo sapiens
cttctcctcgccttcaggatgaaagctcagggggaaaccgagggtccggaactctgaccgtaaccagggtcttcagggtcctctgaca

SEQ ID NO: 452704 - DNA, 83 bp, Homo sapiens
ggcgcgggagcagcacttccacagccaagtgcgggagtccacgataagtgccatagagttcatttccatttgccgtatcgatg

SEQ ID NO: 452705 - DNA, 74 bp, Homo sapiens
caaatattacacttctctcctttcaagctgtattagtcgacaggaccatttacatttcaggacagataggcatg

SEQ ID NO: 452706 - DNA, 73 bp, Homo sapiens
ctcacagaggcagaccctgcagccagtagaagaccatgatggagaaggtgatgtggctggagatgatgatgat

SEQ ID NO: 452707 - DNA, 74 bp, Homo sapiens
aatcaaacaaggcctgggcttgaaatttgctgagctggtgtataccgatgtgtggagttggctgttacgacatc

SEQ ID NO: 452708 - DNA, 99 bp, Homo sapiens
cacaatctcaatcgttgctgaatcctttcatatcctaataggaattaacctccaaataaaacatgactggactcacggcagctgtgttctgatttcgta

SEQ ID NO: 452709 - DNA, 75 bp, Homo sapiens
cgaagtcgcacgtgaaggatagcagtggcctgagaaagtggactgtggccaggctcccctggaccctgtctacct

SEQ ID NO: 452710 - DNA, 80 bp, Homo sapiens
tacatcagaaatgcctgggaaagaagattccattatggaggaagagaggggaatctctccctaggtcaggttggagtgca

SEQ ID NO: 452711 - DNA, 97 bp, Homo sapiens
tctgcccccgccggccggcctcaacatactgccaaatctgtcgaaagggagataatgaagaactgcttcttctttgtgatggctgtgacaaaggctg

SEQ ID NO: 452712 - DNA, 100 bp, Homo sapiens
cggggaggacatggccgcgcacaggccggtggaatgggtccaggccgtggtcagccgcttcgacgagcaggatgatgacctggaagaaggtgaagtgaag

SEQ ID NO: 452713 - DNA, 100 bp, Homo sapiens
agaccctggtctatgagaactacaacaagttcatctcagccacagtctgcagatctccaggggagcccaccagcctagtcaacatggcctcggaagacat

SEQ ID NO: 452714 - DNA, 78 bp, Homo sapiens
ttttcccctgaccacgttcgcgatggaatgtatcctgtcaggtataatgtcagtgaatggcaagaaagttcttcatat

SEQ ID NO: 452715 - DNA, 100 bp, Homo sapiens
gtgcttcagaagtttcatactttcaggcaactgatcgagagggagactcaataacatatgccattgagaatggagatcctcagagagtttttaatctttc

SEQ ID NO: 452716 - DNA, 100 bp, Homo sapiens
tgaccgagagcgtgaccgagagcgcgaatatcgtcatcgttagaagaattttgattcagctaaagttccatcagatgagtattgccctgcttgtagagag

SEQ ID NO: 452717 - DNA, 88 bp, Homo sapiens
ccttaatagatgattctgatgatgaaattgaggaattcatggtaacttctgaaaatttaagtcctcttcctgatggatgggaacaagc

SEQ ID NO: 452718 - DNA, 50 bp, Homo sapiens
ctgtggctgggacaagctggtcaagtactcgcagaaggaagacagatatg

SEQ ID NO: 452719 - DNA, 100 bp, Homo sapiens
ggtcatcctgctgccggatgacattgaggacgagtccacgggcctgaagaaggcatccgagatgtttccaaatggagtgagagaacaagaaagcctctag

SEQ ID NO: 452720 - DNA, 100 bp, Homo sapiens
accttggagaggctgtgagccacaatgcatcgctggaagtagccaggactgcgaggactgcaaggtgatgttggacctcctggagaaatgggcatggagg

SEQ ID NO: 452721 - DNA, 74 bp, Homo sapiens
agagcctttgcctgactcagggcagctcagagtgtgggatgcttcctgaaacttggagagtggcagctgaatct

SEQ ID NO: 452722 - DNA, 100 bp, Homo sapiens
ctcttctgaaggaaaagacagtgtagtcctgcaaaacattttgaggctgggctgcggccttcttgactaccgggagcaggctcagcagatagaattgaag

SEQ ID NO: 452723 - DNA, 100 bp, Homo sapiens
aggagaaggacgtacggtcctgctagtagaggaatatgtcgagtttctctagggcgccccagaattattttccagtaccactctccatggaataaaagga

SEQ ID NO: 452724 - DNA, 100 bp, Homo sapiens
gggaatgcttttttatctcatattagtgcctgtgatggcatctttcatctaacacgcccagaggcagagctacacaaccatggaatccaaattaattcct

SEQ ID NO: 452725 - DNA, 96 bp, Homo sapiens
cagacggcgacagtggcggcggcgccatggcagggcttgcagcaaacggggattcagcgtccgatcctttggaacagggactcacgtgaagcttcc

SEQ ID NO: 452726 - DNA, 100 bp, Homo sapiens
atgggttgtccgactgggagcagaggaagccttgaggacctactcacagataggaattgaaggttatgatgtgattgctcaagcccaatctgggactggg

SEQ ID NO: 452727 - DNA, 74 bp, Homo sapiens
tgactgtattgactcactgcatgagagttttaaagaatggtcttcagcagagaagccgtcaggagacttctcgc

SEQ ID NO: 452728 - DNA, 83 bp, Homo sapiens
caaagatgctctgcggtttttgggctgtgttgacatcaaggatctaccaggtggataatattaatgcagctgtgatggatttg

SEQ ID NO: 452729 - DNA, 100 bp, Homo sapiens
gaaaattataactttttgctccagcttcaagaggagctgctgaaggaattaagacatggacagtcattttgtttactcattcagccctgttgcaggtccc

SEQ ID NO: 452730 - DNA, 73 bp, Homo sapiens
tagcttcccatcactgtcatctcggcaaactgaaaccgtgtcagttcagtcttcggtattggggaagggtgta

SEQ ID NO: 452731 - DNA, 83 bp, Homo sapiens
ctccgcaccgcggcttaaatgatgtattttgtgatcgcagcgatgaaagatgggggctccggaggtggcgcccaggctctgag

SEQ ID NO: 452732 - DNA, 97 bp, Homo sapiens
tcggaatcctataattgaaaaacagtaaagatggaaaaccagttattgaatatcaagaggaggagttgttgttccactcttgtcctggggacccagc

SEQ ID NO: 452733 - DNA, 83 bp, Homo sapiens
gcactgtgtgtctccccggacgcgagcccgctcccctgacagcctcccgcgacgatgcccctcaacgttagcttcaccaacag

SEQ ID NO: 452734 - DNA, 100 bp, Homo sapiens
aagatacgaatctcttaagggggccaagatcaaggctcgagatcttcgcgggaagaagaaggaggagctgctgaaacagctggacgacctgaaggtggag

SEQ ID NO: 452735 - DNA, 110 bp, Homo sapiens
ccgagaccactgtggcctgaggaggagcttcagcagccacttggtaggagggccttcgacggcccttttgtgcagaagagagcgcctgctcgctgtgcccccgggttatg

SEQ ID NO: 452736 - DNA, 50 bp, Homo sapiens
cttgtccaagatcacaaagctgccatgaccatgcagttcatcagccaccg

SEQ ID NO: 452737 - DNA, 129 bp, Homo sapiens
tgcttgctgctttttctaactatttcaagatgatatttattcaccaaacaagatggctggcatggaagtcgggaaaaagatttttgctattaatggtgacctagtttttatgagacctttcaatgaagt

SEQ ID NO: 452738 - DNA, 80 bp, Homo sapiens
ctgctggcagttttgccaggtgtttgttaccttggatggaggtttgcttctgaataacccttcggcattagctatgcatg

SEQ ID NO: 452739 - DNA, 83 bp, Homo sapiens
ctgaggtggcagcggcaggagagtccggccgcgacaggacgatttaatccagagactgacttcactatagaacccacagttgt

SEQ ID NO: 452740 - DNA, 140 bp, Homo sapiens
ggagcacggcgcagccagctcctgtaagtgactggaaccaggaacagaggacagtgagtcgctctcgtccctccaggagtcagaaataccatcagaggaggggtactgtgactttaatagtaggccaaatgagaactctt

SEQ ID NO: 452741 - DNA, 83 bp, Homo sapiens
ctccacgcagttcaacaagggcccctcgtacgggctgtcggccgaggtcaagaaccggcaaacggggattcagcgtccgatcc

SEQ ID NO: 452742 - DNA, 100 bp, Homo sapiens
acctatagtgacacagcattctaaagtgaatgactccaacgaattaggtggtctgactaccagtggctctgcagaggaggagatgaccgccgggttctgc

SEQ ID NO: 452743 - DNA, 100 bp, Homo sapiens
cagagaacttgccacggtgtttcatgttgtggccggtggtgccagactgcacgctccattctagggaagggtgtctcgtgcctctgctggaccctgactc

SEQ ID NO: 452744 - DNA, 98 bp, Homo sapiens
cctgagcaacatccgcgagttcctgcgcggctgcggggcttccctgcggctggagggccagatattcgaagcttacaacatggcagctttgtggaaat

SEQ ID NO: 452745 - DNA, 100 bp, Homo sapiens
cccggccggcctgcacgatgcacacgccggacttcgcaggcccagacgacgcgcgcgcagtgtggtcactgtcaaagattaacaccagaatggaagaaag

SEQ ID NO: 452746 - DNA, 75 bp, Homo sapiens
gctgaatctgccgcagctagaaatgctcaagaaccagctggaccagcctacgaggacaagcagaaactcaagcgg

SEQ ID NO: 452747 - DNA, 74 bp, Homo sapiens
aggccctacacagttgcctgcagatcctgatcgcgcagcaatgcagagtccctggacaggctcctgccacctgt

SEQ ID NO: 452748 - DNA, 98 bp, Homo sapiens
ctcagtcctaactgtagggaaggaagccttgacaacatctggggaagatgtacgagacttcacaaaggtacttaagaacaagttcaggtcgaagaagt

SEQ ID NO: 452749 - DNA, 102 bp, Homo sapiens
tcacacagaccaaggccacttcttgcaaaccacatacacagcacaaagaatgtcagacagatcgtcagtatttaaacagatcacatcatgcgtgagtacaag

SEQ ID NO: 452750 - DNA, 76 bp, Homo sapiens
ctttcccacaacagcaaggaagaaccatggcccagacccagacacttttgaaccccaaaaattcttccagacatca

SEQ ID NO: 452751 - DNA, 98 bp, Homo sapiens
gaagtgtcagagactgaggacttaaatgaagccactgattagcaatttaaagatcctctccaagatgtcaagccctccaacatcctagtcaactcccg

SEQ ID NO: 452752 - DNA, 75 bp, Homo sapiens
aacactaatatacaagcttgggaaatgaagccatatgtggaagtggcattgccccaaatacaatgttagcaaaag

SEQ ID NO: 452753 - DNA, 83 bp, Homo sapiens
ccaaagaggaggaggcaccccttctgttcttcgtagccggggagagacagggcagggcattgttcatgcactgaccgacctca

SEQ ID NO: 452754 - DNA, 80 bp, Homo sapiens
caacaagagcgtcctgatggagcggctcaagaagcgctggcgggaggagctctcccacatgaagcgacttcccccagtgc

SEQ ID NO: 452755 - DNA, 101 bp, Homo sapiens
atctacttcacaggaattgccatttgagcttgtgcagtggaggggtcaaagaaaactgatgttgaggagagaccaagaacaacactgatcatctgtccgct

SEQ ID NO: 452756 - DNA, 50 bp, Homo sapiens
gtccagacgcccagccccacagccgtcaaaatgcagatcttcgtgaaaac

SEQ ID NO: 452757 - DNA, 50 bp, Homo sapiens
tgcacccccagcagccaccagcagagtgacagagctgggcctggcagtga

SEQ ID NO: 452758 - DNA, 100 bp, Homo sapiens
gcggaggcggaagcaggactcggggcacttgggcatggtttataaggcgagagcattttgggggggccatggtgtggacattggacatggatgacgtcag

SEQ ID NO: 452759 - DNA, 50 bp, Homo sapiens
aggatggcggagtcggggctcctgacgccaacaaatggaattttcttgag

SEQ ID NO: 452760 - DNA, 85 bp, Homo sapiens
atccagcaaggtcggcagagcaaggggcttacgcagaaggacctggccacgtgtcaacagcatctccaccctggagcctgtgagc

SEQ ID NO: 452761 - DNA, 50 bp, Homo sapiens
tgctgaatttcagatgaccagtggatggagagagaaagaaaaagccagag

SEQ ID NO: 452762 - DNA, 75 bp, Homo sapiens
gggctgcgttgctggtcacattcctggcaggcatctctgacacgctgtgggccatcgagatgtgggaccctgcgg

SEQ ID NO: 452763 - DNA, 98 bp, Homo sapiens
gcttgaggactcaggagggtgtttgctgcgttgacaacagacaggcttggccaagtgggacccagcagatcctgcttcccccagcatggcagcaactg

SEQ ID NO: 452764 - DNA, 100 bp, Homo sapiens
tctaggggagcgaaggctgaggtggcagcggcaggagagtccggccgcgacaggacgtttcagatacaccacctccaccgccacctgtggaagaaccagt

SEQ ID NO: 452765 - DNA, 100 bp, Homo sapiens
aatgcactgacttatgaccctaccaactacaaggtgatggaggacgaggagaaggcagtggagatcttgggcaacacggaagctgctcatcctccatccc

SEQ ID NO: 452766 - DNA, 74 bp, Homo sapiens
ggaaaagatgcctcctgattgcgtccctgagggcctccatcctcgctcgggactgtgcggctgcggcggctatt

SEQ ID NO: 452767 - DNA, 141 bp, Homo sapiens
tgatgcagagttgaatgtcttctatgaggaaagtgtgcattttgacagagatcttccagaatttgggaactaagcgtcttgtagaaggaactattaatccaggagaaacctgtttaatcattgaagatgttgtcaccagtg

SEQ ID NO: 452768 - DNA, 80 bp, Homo sapiens
gggtgacatggaaggggcagtacaagcttacgtctctgctcttcagtacaatccttatgtggagggatcttttgagaaat

SEQ ID NO: 452769 - DNA, 90 bp, Homo sapiens
gcgagaggaccaacggagcgctgaggcgggcgttttcttggatgaattgcttgctttggagtgacatcctataccccaaggactcgtcca

SEQ ID NO: 452770 - DNA, 104 bp, Homo sapiens
ggggccacgggtccagcccagcaaatgggactcggccagctggacacagggaagccagttgagggaagttctccatgaatgtacgtcacaatgatgatgaccga

SEQ ID NO: 452771 - DNA, 100 bp, Homo sapiens
ccaagccctgaatgccaatgtgtggtccaatgtagtgatgaagaatgatgtcaagccctccaacatcctagtcaactcccgtggggagatcaagctctgt

SEQ ID NO: 452772 - DNA, 100 bp, Homo sapiens
attggattggcatctttagaagatcctacagtaaggaattgtttgaagaagttatttcaaagatgcggaaggcagggatcaaatccacaatagcaataga

SEQ ID NO: 452773 - DNA, 96 bp, Homo sapiens
ctgtactccagacacaacccggccatcgaggccctgctgcacgacctcagctcccagaggatcaccagcgtgggttaacacagaaatctgcctcct

SEQ ID NO: 452774 - DNA, 75 bp, Homo sapiens
cccgttagaactcgcgtttccacttcagagatctggtttcagtctgaaagagaaagtggagatcgaaattttgca

SEQ ID NO: 452775 - DNA, 101 bp, Homo sapiens
gtggagggggtccaatgtcaccccaggatgatgaagcagaagaggaactgataaatttcaaacggaagagagtggcagcatttagaaagaatctaattgaa

SEQ ID NO: 452776 - DNA, 90 bp, Homo sapiens
gagccctgccctcctggttcggcctccccgcgcactagaacggcaactatcgtacccagatgtgggataagcagaaggaggtcttcctgc

SEQ ID NO: 452777 - DNA, 101 bp, Homo sapiens
tgaaaaccccttccatctcgaaaaagaaccgcgcgggaagccccagcccgcagccctcgggggctatgaagagaccctgacccgcctggctgccattctcg

SEQ ID NO: 452778 - DNA, 74 bp, Homo sapiens
agaccctcctggatattcctgcaaacccaacagagaagttgatgacgcctgagatgttttcagaaatcctctgt

SEQ ID NO: 452779 - DNA, 89 bp, Homo sapiens
agaattagaaagccgacggggtgctgtggtcaggaggcgcgtgggcggcaggttctgtggacaatcacaatgggaatccaaggagggtc

SEQ ID NO: 452780 - DNA, 75 bp, Homo sapiens
aaaatcattgccctgcagagtggtttacaagctgccattaagaagcctgtgggaaagacaaaggaggaactggct

SEQ ID NO: 452781 - DNA, 75 bp, Homo sapiens
cttgatatcacagaggaaactctgcattctcgcttcctggagcaggtgagctcaggagataagatggaagatgca

SEQ ID NO: 452782 - DNA, 114 bp, Homo sapiens
cagcgatagctctgaagatgaggttgactggcaggatactcgtgatgatccctacagaccagtctggcttcagccttgtcatgaaccacccagcctgtgtcaatgagattgctc

SEQ ID NO: 452783 - DNA, 80 bp, Homo sapiens
gtctgggggcgctggcggcctgcgcagccacctcaagtggtgatcgccgctcgggaatgcgggcgtgaagggtccgagtt

SEQ ID NO: 452784 - DNA, 49 bp, Homo sapiens
gcggcggccacgccaaggacggatgctgtctttgcatttcaactacgca

SEQ ID NO: 452785 - DNA, 100 bp, Homo sapiens
ctgctgttctgggtgcctgtgcctcaggggatttcgcttctgtacaggccacagacctccaccagcacgaagtggacatcgttgtgtggcagataatacc

SEQ ID NO: 452786 - DNA, 88 bp, Homo sapiens
tctgggctgtgctggccgccatcctgcagctgggcaacatctgcttctcctcctcagaggcttgcagggtggcccccgctccgacttc

SEQ ID NO: 452787 - DNA, 90 bp, Homo sapiens
gccgggcagtttgaggagctgctgcgcctcaaagccaagtacttggaaaaatggacaaggattgtgaaatgaaacgcaccacactggaca

SEQ ID NO: 452788 - DNA, 90 bp, Homo sapiens
ggcagtatctcgctcacagagagctgggctacagtcctcctccatcaaagaaaatgaagttatttggatttaaagaagatccatttgtat

SEQ ID NO: 452789 - DNA, 51 bp, Homo sapiens
gcctttgtgagcctcagcctgcagttctgacagaagttgttatttatgttg

SEQ ID NO: 452790 - DNA, 74 bp, Homo sapiens
gactcgcaggctatcctggaccagctattgaaaaggctgtggtgtctcagcgcctgacagaatctccgtgtgct

SEQ ID NO: 452791 - DNA, 101 bp, Homo sapiens
gcttccatacgtgtctcagacagggttatcaatgccgggaagagcacacacaatgaagaccaagccagctgtgaggtgctcactgtgaagaagaaggcagg

SEQ ID NO: 452792 - DNA, 100 bp, Homo sapiens
ccagcagcaggccaaggctgtgctcaagcatttcaacgtgcgtgtcacccacgcagacatcttcagccgctgccaggattgtcagtggcttcgccccgag

SEQ ID NO: 452793 - DNA, 96 bp, Homo sapiens
ctccacaaatatttacagtcggaggagtactcggtgaaatcctgtcctgaagactgtaagttcaactttgtggggaaacttttgggtccacgtggc

SEQ ID NO: 452794 - DNA, 100 bp, Homo sapiens
cagaagatctgggtgcccgtggaccacaggccctcgttgcccagatgttttaaaatcaaagatgggaaaatcggagaaaattgcccttccccatggccag

SEQ ID NO: 452795 - DNA, 80 bp, Homo sapiens
gcatctgtgtggtatggcaacagacaatgcagatcttcgtgaagactctgactggtaagaccatcaccctcgaggttgag

SEQ ID NO: 452796 - DNA, 100 bp, Homo sapiens
ttattccatttgcaacttatccccaacaggaaggtgaagcagatgcaccttaacttcatggatgaaaaggatcggatcatcacagccttctacaacgaag

SEQ ID NO: 452797 - DNA, 97 bp, Homo sapiens
agatcatcgagcatttcaaacgctattgacctgaaaagtggttctggaaaagtgtaccaaggccctgcaaaaggtgctgctgatacaacaatcatac

SEQ ID NO: 452798 - DNA, 101 bp, Homo sapiens
tgacctgggagagtgggcaggtcctgggggaccagacggtctcagacaatgagctccagggtaagaatgattgatgttggctgatattggagtgctcattc

SEQ ID NO: 452799 - DNA, 75 bp, Homo sapiens
cgcttgcattcagctcctctgtgtttgccgcctggcttaacaaacaacagttgcagttactgaaagaacggttcc

SEQ ID NO: 452800 - DNA, 75 bp, Homo sapiens
ggcatatgaagtgctgtctgacactcgggttcatgacgctctcgatattcctgtgcagaaacctggaccacgtct

SEQ ID NO: 452801 - DNA, 75 bp, Homo sapiens
aagagtgtcagaggagtttggttgttgcttaggccaagaggtggcctgtttgtaccggaagcaaagtcagattca

SEQ ID NO: 452802 - DNA, 98 bp, Homo sapiens
cggcgggatggaggcggcggccggaagggaacctgattggattaccccttctgattgacaactatgtgccccctttggagggactgcctatcttcatt

SEQ ID NO: 452803 - DNA, 83 bp, Homo sapiens
gtttgaacaaactcgaagaacagctgtggaaagaagttgcaaaacactgggccatgaccacaatgtttcttcagtagccatca

SEQ ID NO: 452804 - DNA, 100 bp, Homo sapiens
agagatcaacggggtgactggtctctttccttcaaactacgttaagatgacgacagactcagatccaagtcaacagtgttcatgaactggaatgtaagag

SEQ ID NO: 452805 - DNA, 98 bp, Homo sapiens
aaaaacttcaaactggtcaaatgcactgtccagacggagatccggggagtggtacgggtatcactttccggagctggtgaagatcatcaacgacaatg

SEQ ID NO: 452806 - DNA, 75 bp, Homo sapiens
ttcaagtagatttcctggatcatgttcccctcacaacacacaactttatgctgcacaacaaacatgtcatggtcc

SEQ ID NO: 452807 - DNA, 100 bp, Homo sapiens
tcgtcttggccatcctggaactgctaaagcaatgaggaaaggtctactagatgtgcttccaaaaaattcattagaagatttaacggcagaagattttagg

SEQ ID NO: 452808 - DNA, 90 bp, Homo sapiens
atccagtgcttgacctacacaccacctctagccaactacctgctctccaaggagcatgctcgcagctgtagctgcaatcaacccaaatca

SEQ ID NO: 452809 - DNA, 94 bp, Homo sapiens
tgcctcttttggacaaagtaagaccggctcctgagaatcaacccaactgaagcatttcaattcacttgaatgagaaacgtgtttagtatcaaaa

SEQ ID NO: 452810 - DNA, 82 bp, Homo sapiens
gaaatcgggctgaagcgactgagtccgcgatggaggtgtggacactgccagcggctgcagccgacttggaatgacctgggag

SEQ ID NO: 452811 - DNA, 100 bp, Homo sapiens
gctcgcggactacttcgtgctggtggcgttcgggccgcacccgcgcgggcactgtgtttagtcttgagtcagaggaggaggaataccctggaatcactgc

SEQ ID NO: 452812 - DNA, 98 bp, Homo sapiens
cctggaacgcctggagcgcctcccactgcagacgtctgtccgcctccagccgctctcctctgacggagttgtaagacgttcatcgccgtgttatcctt

SEQ ID NO: 452813 - DNA, 73 bp, Homo sapiens
gaaggcttcgagaagattagcaaaggtgctaatccagtggaaatcaggagagatactcctgggcatggaagtg

SEQ ID NO: 452814 - DNA, 76 bp, Homo sapiens
actgaataaaaaatatccaaagctttctcgaagaagaggatcacctagcccgggtagaagaggcaatcacccgtat

SEQ ID NO: 452815 - DNA, 100 bp, Homo sapiens
gaccgagagcgcgaatatcgtcatcgttagaagcctgactggctcatggagaaagcctacctaagaatgaagccgggacccggcagaatggctcctgtga

SEQ ID NO: 452816 - DNA, 96 bp, Homo sapiens
gtgaagattccaagttcaggagaactcgaccgacatcaactagtcaggcagtcttccgtctccagtctggcatctgccatctcttccgagaaactt

SEQ ID NO: 452817 - DNA, 97 bp, Homo sapiens
cagtccgaaggaggaagggaaccaacccactttctcggcgccgcggctcttttctaaaagtttggttgaatctggcgatgtggaacccatggatatg

SEQ ID NO: 452818 - DNA, 98 bp, Homo sapiens
tggggccgtgtctcagtccacccaaggtctcctcggatcgcctggagaggcactcggacctggtttttggattcaaagcataaaaaccattacaagat

SEQ ID NO: 452819 - DNA, 82 bp, Homo sapiens
cggtgagcgcgtttcccgcctgagcgcaactagcggcgggtcgtgggcacctccagagtccggcagcgtcttctcttgaggg

SEQ ID NO: 452820 - DNA, 82 bp, Homo sapiens
gcaccactgcagccagaaagcgagggcctgttgcagcaggttcagggtcctcggctgccctggacgcggctcctcctgttgc

SEQ ID NO: 452821 - DNA, 83 bp, Homo sapiens
cagagacttgctcctttgctcttggtccctgtcccaccaattttgggtttttatcaaatgaaggaggaagaagtacaactaag

SEQ ID NO: 452822 - DNA, 88 bp, Homo sapiens
gaagactatgacactatggggccagaagccacgatccagaccgcaattaacaatggtacaggatctttcgaagatggtttggctgcct

SEQ ID NO: 452823 - DNA, 74 bp, Homo sapiens
tacctcgaggctccgcccccacctgctggaccccagggctgaactccagtgcacccagttagacttggagcgga

SEQ ID NO: 452824 - DNA, 82 bp, Homo sapiens
ccaaggagggcaaagcgtcctgcgacctgcctagagctggaacgttacctccagagcgagccctgctatgtttcagcctcag

SEQ ID NO: 452825 - DNA, 102 bp, Homo sapiens
ccctgcagcggaaccggacccagtccctgagccgcccctacacccacagacaatgcagatcttcgtgaagactctgactggtaagaccatcaccctcgaggt

SEQ ID NO: 452826 - DNA, 83 bp, Homo sapiens
gtcggcggcgcccggatgggcagctgaggttttcctcctccaccaggcgctccacctccatctcttataccaacaatagaaag

SEQ ID NO: 452827 - DNA, 82 bp, Homo sapiens
cctaagaaggtctgcccaggactcagatctctgttgaggagctggcgcggaatctggtcatcaaggtcaacagggatgctgt

SEQ ID NO: 452828 - DNA, 107 bp, Homo sapiens
ggatcatgtctgcgagccaggattcccggtactccaaagattcaggtttactcacgtcatccagcagagaatggaaagtcaaatttcctgaattgctatgtgtctgg

SEQ ID NO: 452829 - DNA, 100 bp, Homo sapiens
tcaggaatctggtctcattgggttcatcatgcctagtggcgtataagaagaccccgccaccggtccctccacgcaccacttcaaagccgttcatctcagt

SEQ ID NO: 452830 - DNA, 90 bp, Homo sapiens
ggagacaccaggtccgcgccaggcgtctcgggggtcttccccagggaggtcctgaactacacagctgagaacatctgtaagtgggcctta

SEQ ID NO: 452831 - DNA, 83 bp, Homo sapiens
agcaggccagccggcctctcgcccacactgaccccgggggagcggcagcaggtcttcagaactactagcagataatttggggg

SEQ ID NO: 452832 - DNA, 100 bp, Homo sapiens
aaagactcctgtcatccagcttgtgctcttcatgtatattttcctggagtacgcgtcccctgcccacgctgtggatgctgtgaagaacgccgacggctac

SEQ ID NO: 452833 - DNA, 100 bp, Homo sapiens
tgcttctgcccaacgacatcgatggcctggagaaggtgtttctcctgagaaagaaaaaaaccacctgtccctgacattcagaagctgacaacactgttcg

SEQ ID NO: 452834 - DNA, 83 bp, Homo sapiens
cgcccagagccccgcgtttcagccctagggaagaaatgcttcggttacccacagtctttcgccagatgagaccggtgtccagg

SEQ ID NO: 452835 - DNA, 100 bp, Homo sapiens
tcggttctacctgggagaatccaccgccatccgccaccatggtttacccaaggtccagcctagcccctaggcaccatgtcggacagtgatctaggtgagg

SEQ ID NO: 452836 - DNA, 83 bp, Homo sapiens
gaattttctacagaagtcaaggcagtcaagctgcggcgagatagtgtcaacagcatctccaccctggagcctgtgagccggtg

SEQ ID NO: 452837 - DNA, 115 bp, Homo sapiens
cggcccgagacacaccaggccggcaggctgagaaaagcgagaccgcgtgcgaggaccggaatactcccccagttgcaagaggcgcaggaccgtggaagacttcaacaaattctgc

SEQ ID NO: 452838 - DNA, 100 bp, Homo sapiens
ccagagcctgctggtggaggaggcccgccaagctgccccctgtgtgctattctttgatgagctggattcgattgccaaggctcgtggaggtaacattgga

SEQ ID NO: 452839 - DNA, 100 bp, Homo sapiens
cgggcccaggcccggccccagccgccgctgcggagcccgccgggaccccccggagcgcggccacggcgcaggtacatgtcccagagcaagcacacggagg

SEQ ID NO: 452840 - DNA, 100 bp, Homo sapiens
ttagacatggtggtctgctgggaataaaatatgctttggcagtccgtcaggctgttgtacagtggcctgattatagctcactgtagcctcgaaattctgg

SEQ ID NO: 452841 - DNA, 82 bp, Homo sapiens
ccagctccgaaatcaccaccaagaatctccggcctgtgaaactgtgaggggattcggccaagacgtcctcttccctctgcct

SEQ ID NO: 452842 - DNA, 82 bp, Homo sapiens
agtcaactatgaacctcttggtcttgaggcagatatgtgacattgatgagtgcaaggacccagatgcctgcagccagatctg

SEQ ID NO: 452843 - DNA, 95 bp, Homo sapiens
cccggcttctcccgcgcggggggcgagtaagccagcggcaggaccagcgggcgggggcccacgagttttggaaaggaactctttgagtctgatct

SEQ ID NO: 452844 - DNA, 90 bp, Homo sapiens
ttatgggccagagaaaattcaagtgaaatcaaatacattgcccatctcgctgcagtctataagaagtagcctactgctaggcttcaggag

SEQ ID NO: 452845 - DNA, 100 bp, Homo sapiens
attcaggcgttacagtcgttttcgagaaatgcataaaacattgaagttaaagtatgcagagcgactgcatttgcctccagacttgtcagacacagtgagc

SEQ ID NO: 452846 - DNA, 100 bp, Homo sapiens
agctggcagcagcatctcagcccaagagaaggcagatcgggagcggtgccgagaaaaatttccttactagatgacatttcatcgcaatgtccgatcgttt

SEQ ID NO: 452847 - DNA, 46 bp, Homo sapiens
cctcttccagaatgcctttgcgcagccctccagaatacccatcata

SEQ ID NO: 452848 - DNA, 100 bp, Homo sapiens
caatgctgggattggctgcttttcgtactggaggcgcaaagaaggcatcagaaggagaaatctggcatcatacctacctcaccgacgccctacacttaca

SEQ ID NO: 452849 - DNA, 96 bp, Homo sapiens
cgccagcggagcgaacccgagagcgtggagcgggctgggccagtgctacagttgaaactccagcagcgccggacccgggaagaactggtgagccaa

SEQ ID NO: 452850 - DNA, 98 bp, Homo sapiens
ttcggccacgactgggatcctacgtgcatgaagatggacgaggtcctgtacagcatcgccgagaagatggagttttaacattgaatgcggagaacact

SEQ ID NO: 452851 - DNA, 71 bp, Homo sapiens
gtgccagcctacaggaggaaaggccagactcacagaaggcgttgacccggacgacacctataatgagaccc

SEQ ID NO: 452852 - DNA, 100 bp, Homo sapiens
cctatccatcaaagaagacaggactcaccttgctggctgctgccagcattgcttacatcagccgaacacacgaggagatgccacagagcatcgtggaggc

SEQ ID NO: 452853 - DNA, 98 bp, Homo sapiens
ctggacccgacctcctcgccttggaggaagaatataagaaactcactgtcagagcactcccctcaaaaaacaccaaggtgtttcaaaaactcagtcac

SEQ ID NO: 452854 - DNA, 75 bp, Homo sapiens
gtccttggaagcaagtggctgttcttgtagttttctgcatagataactccagtgatccacaagctcagaaataca

SEQ ID NO: 452855 - DNA, 99 bp, Homo sapiens
ccggagcttctcagaagacagagggttttcttttgagttttgtcagcctggcgggtggcagctgtccagagagaggaagcagccaacgttctttgtggt

SEQ ID NO: 452856 - DNA, 100 bp, Homo sapiens
catgttcaccagcaccggctccagtgggctctggagcgtaaccacgctgaaagcactgaacctaagacactgccctctggaattccctcctcagctcgtt

SEQ ID NO: 452857 - DNA, 100 bp, Homo sapiens
ccatcatgcccaatggagatcatatagtgtctgcctcaagggataaaactataaaaatgtgggaagtgcaaactggtgaacagcagagaatttcaaagga

SEQ ID NO: 452858 - DNA, 90 bp, Homo sapiens
gactgttgagtatgctccatgtagatcacgaaaatatgagagccacacccgtgttcacacaggtgagaagccctttgagtgtgatatttg

SEQ ID NO: 452859 - DNA, 100 bp, Homo sapiens
caatgaagtggccgcacagtatagtgaagataaagccaggcaaggggttcaaaatggaaagtatttattgaccaaattaacaggtctttggagaattacg

SEQ ID NO: 452860 - DNA, 98 bp, Homo sapiens
gggtgtcctggtgcacccccagtgggtgctcacagctgcccattgcctaaagaagggttatggttttgtgaaattcacagatgaactggaacagaagc

SEQ ID NO: 452861 - DNA, 144 bp, Homo sapiens
tcatattacatgggccagcactgcttcatccgggaagtgcttggggatggagtgcctccaaaggttgctgagcggaatggccaaagactatgacgggtcttcctagcacatcagggacaactgccagtgtggtcatcattcggg

SEQ ID NO: 452862 - DNA, 82 bp, Homo sapiens
ggcagctcccggcggagagcggcagacggcagcctagatctctgttgaggagctggcgcggaatctggtcatcaaggtcaac

SEQ ID NO: 452863 - DNA, 100 bp, Homo sapiens
aaaaagtgagaacaaaattagaaacacagccacaagaagaatatgaaatcatcaatgtggaagaaagtgactattttaccccacagggagaattccgtgt

SEQ ID NO: 452864 - DNA, 98 bp, Homo sapiens
tgaggctttcgttgagaatgtgaggtctcctctgagcctccggcctccataagacccaaaacagatgacacctcttcccagtcccccgcgccttccga

SEQ ID NO: 452865 - DNA, 110 bp, Homo sapiens
ccagggactgcagctgggagtggagtcacaggaaccagacataagttcagaggaatctgtctccactgtagaagaacaagagaatgaaactccacctgctacttcgagtg

SEQ ID NO: 452866 - DNA, 83 bp, Homo sapiens
gcaatgccttcacccgggatacgctgcaagagattttccagagccatcactggtgcaagctatatttaacggagatcctgatg

SEQ ID NO: 452867 - DNA, 82 bp, Homo sapiens
agaaactgcaccggaaatgtgcctaccaggtttggtgcacctcgatttggaggaagtagggcagggcccttatctggaaaga

SEQ ID NO: 452868 - DNA, 75 bp, Homo sapiens
aaggagctaaagcagcgtgcgttcagccctgggggagtgcctgcagggcaccatccgcaacagccaggaggcgga

SEQ ID NO: 452869 - DNA, 75 bp, Homo sapiens
acgatgctttggatgttgccaacaaagccatgggtgccttcttctccggcatcttttggagcagctttgtcggtg

SEQ ID NO: 452870 - DNA, 73 bp, Homo sapiens
tagggcctgggccgcggttcggccgcgccggccggtggtgaaattgcctctacctttgatcacccagaactgg

SEQ ID NO: 452871 - DNA, 90 bp, Homo sapiens
ctaaatgttattaggaatgacaatgacagttgggactacactaaaccatatttgggaagacgaggaaaattgcctaagaattatgaccca

SEQ ID NO: 452872 - DNA, 100 bp, Homo sapiens
agtcattccagagatctgagagactccataccaatatccttggaacagaagatcttattgtggaagtgacttccaatgatgctgtgagattttatccctg

SEQ ID NO: 452873 - DNA, 101 bp, Homo sapiens
tttcccttttgcaaggagaaaattttggtggagaattatccaacaagaaaaagacctgtggctattaagatagttggtggcagtaaaccttttcggtccta

SEQ ID NO: 452874 - DNA, 82 bp, Homo sapiens
aacctgtccggggatcccagggaggtgatgtgtccaatctagatcccaacttctcatttgaaggcaccaaactggatgtggg

SEQ ID NO: 452875 - DNA, 90 bp, Homo sapiens
ggagaatctcctggaggagcaaggcagcatagcactgcggcaggagcagattgacaatcaacttcacagagaatgcagttgtcttgactt

SEQ ID NO: 452876 - DNA, 75 bp, Homo sapiens
gcgggccggcgtgcgctggtcactgaggcccaggtcgccgccgcggcgcggtgatgatgaacagtctacacagat

SEQ ID NO: 452877 - DNA, 112 bp, Homo sapiens
caacatgtgcgtggctacggtcctcacggccggcgcttacctctgctacagggcacccgtgcctcccctctgccaggaaccttggggccttgtgtgtgaccaggacctggtg

SEQ ID NO: 452878 - DNA, 96 bp, Homo sapiens
tcctgcatcctgcgttcccctccatccttctggatctggccaacaccaccggcacagtgacggcttcagaggcttcaggatgagttagagaaaggt

SEQ ID NO: 452879 - DNA, 100 bp, Homo sapiens
cggtgggaaggcgatggcggatttagataaactcaacatcgacagcattatccaacggctgctggaagtaccaaatatgccccaacagcggcaagaccag

SEQ ID NO: 452880 - DNA, 100 bp, Homo sapiens
cccagacaagactgaagccaccatcggcgtggacttcagggagaagaccgtggaaatcgagggcgagaagatcaaggatgagacttctgtgagcagcgag

SEQ ID NO: 452881 - DNA, 82 bp, Homo sapiens
agtggaagctcgtgcctgaggaacatggaggccacgctaatgtggcgccctgctcaagccgtggctcttcacggagatcaag

SEQ ID NO: 452882 - DNA, 97 bp, Homo sapiens
ggaggccgaggtggatgagtttcccaccgatgggggtccagtgtccatcaaagtccaggtgcccaacatgcaggataagacggaatggaaactgaat

SEQ ID NO: 452883 - DNA, 100 bp, Homo sapiens
aaacggtgcatcccccgggtctgggtctgcgaccgggacaatgactgtgtggatggcagtgatgagcccgccaactgcactacctggaccagccctgcct

SEQ ID NO: 452884 - DNA, 98 bp, Homo sapiens
ttcagtccgaaggaggaagggaaccaacccactttctcggcgccgcggctcttttctaaaagtaccatcatcaaagaggggatgctgaccaaacagaa

SEQ ID NO: 452885 - DNA, 82 bp, Homo sapiens
aaaatccatagatggaaaagatgaatcctgctgcatcacagaagctggaagttctgatgttccactgaaatcacaatggaaa

SEQ ID NO: 452886 - DNA, 51 bp, Homo sapiens
ggcgtccgcttttctgacaagggaagagacttacagattccagtctgctgt

SEQ ID NO: 452887 - DNA, 75 bp, Homo sapiens
ccgtatctgcctaggcattttgctgtctcctcctaatacggctcttgatggaaatgtgtatgatcatctcaagga

SEQ ID NO: 452888 - DNA, 92 bp, Homo sapiens
aaccccaccacggagttccggtacaagctcctgcgggccggcgggcaaattgtggctactaatttgccccctgaagatcaagatggctctgg

SEQ ID NO: 452889 - DNA, 100 bp, Homo sapiens
gacctacgtggcagctgtgaaaaaagccatttccgaaggtcagcccaaggccaaccccactgtcactctgttcccgccctcctctgaggagctccaagcc

SEQ ID NO: 452890 - DNA, 50 bp, Homo sapiens
ttgcagcgaccgtcattaccaccattggaagcggctcagccccagggcag

SEQ ID NO: 452891 - DNA, 101 bp, Homo sapiens
aagaagcaggaatgaaagtggcgctttctccgccccagaataactgaagtgaagtgatggactccgatttggagagtagtaagacgtgaaaggaatacact

SEQ ID NO: 452892 - DNA, 82 bp, Homo sapiens
atttttacagttctccagtccttctctttcggccttcctggatgctctgcagaaccaggctgaggccagcagcaagatcatc

SEQ ID NO: 452893 - DNA, 100 bp, Homo sapiens
gagatgttatcatgagggaattccggtcagggtcaagtcgtgttctgatcactactgacttgttggcttaccgctgcgggcaccggcgccagtgctaccc

SEQ ID NO: 452894 - DNA, 90 bp, Homo sapiens
gccaagcgcccgtcggacggggaggaggagcaggagctggaggaggagccgccgccgccaggtatccgcccccagatcatgaacggcccc

SEQ ID NO: 452895 - DNA, 74 bp, Homo sapiens
cgggcctatggtgtcccagtaaagccaatgacccccaaggtggtcactctctgctctggaatgatgaagtggac

SEQ ID NO: 452896 - DNA, 98 bp, Homo sapiens
gagatgcacagctaagatgccaggaccacctggaagcctagaaatgggactttgaacatgtcggggatcgccctcagcagactcgcccaggagaggaa

SEQ ID NO: 452897 - DNA, 75 bp, Homo sapiens
cctgacgcccaccctcaatggcggatctgactgcagccatgagcagcaatgagtgcttcaagtgtggacgatctg

SEQ ID NO: 452898 - DNA, 82 bp, Homo sapiens
gcggattcgccgaggcaccgaggcactcagaggagatgtccagctcgccgctgtccaagaaacgtcgcgtgtccgggcctga

SEQ ID NO: 452899 - DNA, 87 bp, Homo sapiens
aaacacagttctctctactccattcagttcgtctgacaaaagtgtaaaagtttgggatgttggaacgaggacttgtgttcacacctt

SEQ ID NO: 452900 - DNA, 75 bp, Homo sapiens
agaaattgaggccgttgtacaaccatccagcaggatacacacctgctaaaactgcttaaaacattagaaggacat

SEQ ID NO: 452901 - DNA, 82 bp, Homo sapiens
gggtcactggtgtatgtcatggaaggaaacttggatttaactggccagaagcaggtattcaaagcagagaacaatccctggg

SEQ ID NO: 452902 - DNA, 88 bp, Homo sapiens
gaggctgaggagaaggaggagcgggccgtggaggcttcgccgcctaggctgaccggttccctgatgtgttacctgcttctgctactga

SEQ ID NO: 452903 - DNA, 100 bp, Homo sapiens
ggcatggcacagggcctcgcctcactatggcagcagcacggcacagcacgctcgacttcatgctcggcgccaaaggtttaagggaaaccacaggctccga

SEQ ID NO: 452904 - DNA, 83 bp, Homo sapiens
aaggtttcctggcctgttgcagccatggtgcattgcagttgcgtgttgttcagaaagcctgattcagaagtagccaatgctgg

SEQ ID NO: 452905 - DNA, 90 bp, Homo sapiens
ctcatagattgtgtaggcgttggtcttctgatagcaactttaatgtgctcaatgtcaattgctgcaagcttagtgagtgaagatacaaag

SEQ ID NO: 452906 - DNA, 100 bp, Homo sapiens
gaagaaggcgtcagcagaggggccactgctgggccctgaggctgcaccaagtggcgaaggagccggctccaagctcattgctatggacagtgctatcacc

SEQ ID NO: 452907 - DNA, 90 bp, Homo sapiens
actcgtccagagggtcggcagcggcacctacggggacgtctataagtgaaaatgcctcgtgtaaaagcagctcaagctggaagacagagc

SEQ ID NO: 452908 - DNA, 101 bp, Homo sapiens
tgcacaacgtgaagttggagccacatgcctccatggagtctggacttcaggatccagtgaacaccaaactggatctcaagcgcaatgtccctgctcttctc

SEQ ID NO: 452909 - DNA, 100 bp, Homo sapiens
cagcaccctccaggatgaggccgagagcttcatgcatgtgcagctggaggtcatgggcatccggtcttgggatgtcgatcctggcgtctgcaaccttgat

SEQ ID NO: 452910 - DNA, 98 bp, Homo sapiens
tttgcccagaccatctttaagctcatcactgggaccctcagcaaagacttaattcagtgcacaaatgagatgaatgtgaacatcccacagttggcaga

SEQ ID NO: 452911 - DNA, 87 bp, Homo sapiens
gagcttctaactcattgtattcctcctgagataataatgaagtcctggaggctggaagtgcaaaaggaaggtgtcggcaagatcgtt

SEQ ID NO: 452912 - DNA, 100 bp, Homo sapiens
agctccagagcctgccggaaggctccctcggtcgcgagtatctccgtttcctggatgtgaacggcttgtaagctgagcctggtggcctcctacccttggt

SEQ ID NO: 452913 - DNA, 82 bp, Homo sapiens
gggacgtcggtttgctatcgggactcggcgaggacgggacaaactctgcctgggcgagtccttttcctgcgttatgtcgttc

SEQ ID NO: 452914 - DNA, 90 bp, Homo sapiens
cgccagttgggatcaaatgtgagcctatggatcaagtatccagcgagcagcattggtggtcctagaaaattactacaaagatttcaccat

SEQ ID NO: 452915 - DNA, 100 bp, Homo sapiens
gtgagatgctctggggattggtacgtcaaggactgaaatgtgaaggagaaataaagtgtagtccttctgaaagccccttaatggaaaaaaagaatagctt

SEQ ID NO: 452916 - DNA, 75 bp, Homo sapiens
gggagggccgccggaggaaacgctgtcactgtggaaacgataaacctctcataatgaaggcccccgctgtgcttg

SEQ ID NO: 452917 - DNA, 98 bp, Homo sapiens
aagcaagcagttcagaagagccaaggaataaacatgcaatgaacccaaaagggtcaccttccgcaaccctgtcattgagaggattcctcggctccgac

SEQ ID NO: 452918 - DNA, 83 bp, Homo sapiens
gtcgcagtctttagcccatcctgtctgctagtgccatctgaaatccttcctggaacttgactaatagggatgccaaaggaaaa

SEQ ID NO: 452919 - DNA, 50 bp, Homo sapiens
ctatctcagtgccactgacatgttggtcctctcagggtgcgccatcattg

SEQ ID NO: 452920 - DNA, 75 bp, Homo sapiens
aagctgagctgcgaggaaaatggcggcgggaggacttggatgttgtgggtgatggtatgcagtgtcctccttcac

SEQ ID NO: 452921 - DNA, 100 bp, Homo sapiens
ctgccaatcaaactgctacaagacaacaccctgatctggcatggacattataaggatgcatttatgaaagcaaatcctggctacaaatggtgtcctacca

SEQ ID NO: 452922 - DNA, 83 bp, Homo sapiens
gggaccaggacagtcgcgaggttcgagtgttgcagagcctgcggggcaagatctgcaggtgacagcagggacatgtctcggga

SEQ ID NO: 452923 - DNA, 90 bp, Homo sapiens
gtggcttcgtcaagtcggacgtggagatcaactactcgctcatcgaggcttggtggagccagtgaacgtggtggacaatggagatggcac

SEQ ID NO: 452924 - DNA, 51 bp, Homo sapiens
acaaggaggatctaagcagcaagtaccacaaagcctgctccacacctggat

SEQ ID NO: 452925 - DNA, 89 bp, Homo sapiens
tccaggaggactggatgaagatgaaggtctgtttctgtcgactgtggaccacttatgtgcgatccgtggaccacttgcgtgcgatctgt

SEQ ID NO: 452926 - DNA, 82 bp, Homo sapiens
ctggatgggaagttaatgtttacggcgaagtctactcaacgtttccaagggaagatcagttttcctgccatccaggctgctc

SEQ ID NO: 452927 - DNA, 96 bp, Homo sapiens
ttggccttcgtacccgtcttgattgaggtattgttgcagcatctggcagtgagactgaggatgaggacagcatggacattcccttggacctttctt

SEQ ID NO: 452928 - DNA, 97 bp, Homo sapiens
gcaaggatgagtgctgccagagagtctcacccgcatggggtgaagcgttcagcctccccagacgacgatgccctttctggttactgtggctttatgg

SEQ ID NO: 452929 - DNA, 101 bp, Homo sapiens
tagtggaccagctggtgaaggcagacagcgagtggcgacgatgattctgaaaccttccttgtatccctcctgagacatctttgctgcaagatcgaggctgt

SEQ ID NO: 452930 - DNA, 98 bp, Homo sapiens
ctttttgaggggtcagacatccattgggatacaattggttgctccttgagggcaggacagttcttatggctttatccgttgcgtaagcacagagaggt

SEQ ID NO: 452931 - DNA, 50 bp, Homo sapiens
ccgggacatctgaaagccaggaaatgatcatggaagggaagtggttgctg

SEQ ID NO: 452932 - DNA, 106 bp, Homo sapiens
taacttcagcggtggcaccgggatcggttgccttgagcctggtggtcctgccatcatggctgtcctctgcaaaggtctcctcgctcattgagagaatctctgaccc

SEQ ID NO: 452933 - DNA, 82 bp, Homo sapiens
gcccacggtagcgcagccgctctgagagtcgtccttgtctactccactaccaaatgttgaagttcttcaagaatcagtcctt

SEQ ID NO: 452934 - DNA, 75 bp, Homo sapiens
ttctacatgagggataatgaagatggccctcagcacacggaaacttttgagaagaactttgaaagagaaacccat

SEQ ID NO: 452935 - DNA, 97 bp, Homo sapiens
ccgggatgctgtactccttgtctttgcaaacaaacagtcctggtacctgggataaaagttgcagcgtcccaccatccaccagacagaccacctgacc

SEQ ID NO: 452936 - DNA, 50 bp, Homo sapiens
ctacaatcacctaatgcccacaaggtgtgatccctcacatccacaaatct

SEQ ID NO: 452937 - DNA, 50 bp, Homo sapiens
cgaggaactcaaagtggatgaggaaaataccggggagaccacgacgctgc

SEQ ID NO: 452938 - DNA, 73 bp, Homo sapiens
tggggatcaggtgttcaaactgattggaaatgaccctgatgctcccataagacagaaaatgccccttgatgat

SEQ ID NO: 452939 - DNA, 98 bp, Homo sapiens
gctgatcgtcactccttccttaaggctctttattaccaagtatgaagtgtaacagaacagactttaccacctgaaactgctgcttcaagttcagatca

SEQ ID NO: 452940 - DNA, 75 bp, Homo sapiens
tgaatggtgggccgcagcattggcatgatgggccaggggtcccacagaacaagttgaaatcatcgcagaaggata

SEQ ID NO: 452941 - DNA, 98 bp, Homo sapiens
cagccccagcagagcaggaatgtatcagggacagtggcggatgtgcactgctacaggactctactatggagaactgcctttttgttgagcacagaaaa

SEQ ID NO: 452942 - DNA, 90 bp, Homo sapiens
gccagaggaagacgtgaccattggagtctggtacatgatgatgagggactgttggcatgcagtgccctcccagagaccaacgttcaagca

SEQ ID NO: 452943 - DNA, 100 bp, Homo sapiens
ttcaactatggcagcagcgtggcctccgccaccgtgcacatccgaatgggtgtaaagggtcaagtttttgatcagaatggaaatccattacccaatgtaa

SEQ ID NO: 452944 - DNA, 74 bp, Homo sapiens
ggatggatatgtcaggaatgtgattcttcatcttccaaggtagcagaaggtcaagaaatttgtgtgattgaagc

SEQ ID NO: 452945 - DNA, 80 bp, Homo sapiens
cgcggattcgccgaggcaccgaggcactcagaggaggatcaatatggaaattatgtaatccaacatgtactggagcacgg

SEQ ID NO: 452946 - DNA, 96 bp, Homo sapiens
cttgagatcaggagttcgagaccagcctgttcgttcccacatgcagggcagcacaaggagaatgggcgtcatgactgatgtccaccggcgcttcct

SEQ ID NO: 452947 - DNA, 113 bp, Homo sapiens
ccagtggcgggctccgttctccctcgaagcactccccccagctccatgaatggaaatcggctccgcaggtaagaatgattgatgttggctgatattggagtgctcattcacat

SEQ ID NO: 452948 - DNA, 74 bp, Homo sapiens
gtggggaacaagctggtccgagcacggcagtacccctggggagtggtgcaggctacaacagatgaggatgagga

SEQ ID NO: 452949 - DNA, 74 bp, Homo sapiens
gacctagtggtgtgtgacggggctcctgatggtcaacccccagaatcagctcttgtggccttgaagtggctgaa

SEQ ID NO: 452950 - DNA, 74 bp, Homo sapiens
gggctggcgacgtagaggaggacgcctcacagctcatctttcctaaagggcaagcgacttggtaatgaaggtgg

SEQ ID NO: 452951 - DNA, 101 bp, Homo sapiens
ctgcaagttgttgctccgcttgttggactgctgctgcaaaacttttctcacggatgataccatcggggaccttaagaagctgattgcagcccaaactggta

SEQ ID NO: 452952 - DNA, 95 bp, Homo sapiens
cctgccggggccgccctactctggggcttcctgctccagctgttactccacaggatccgctgaacataggatgttgccacaaaatctacctcgtg

SEQ ID NO: 452953 - DNA, 75 bp, Homo sapiens
taacaccttaataaccagcggagctgacacagccaagatgaatttcatcctttcatcgaagcacttctgccccac

SEQ ID NO: 452954 - DNA, 90 bp, Homo sapiens
cagtaaagaaagaaatccagagaggaaggaagttggcaattactaaagatatgtttgaagaagcactgcgtgccctggcagatgatgatt

SEQ ID NO: 452955 - DNA, 100 bp, Homo sapiens
cccggccccccaactctgcccagagtgagcctcgcagctggtccctgctagagcagctgggcctggccggggcagacctggcggcccccggggtacagca

SEQ ID NO: 452956 - DNA, 90 bp, Homo sapiens
gctgcgggacggctagcggccctgcgtggtacagcctgtacacccgcacctggctcgggtacctcttctaccgacagcagctgcgcaggg

SEQ ID NO: 452957 - DNA, 82 bp, Homo sapiens
ccgctggggtcccttttgcctcagatactattttgaaggtcgggtcacaaatcttcgaagagtgacatatgttgttttagat

SEQ ID NO: 452958 - DNA, 100 bp, Homo sapiens
gagtcggaccagcttttcaaacaatacagaatacagtcgctttgaatcgaagatacatgacttacgagaacaaatgatgaacagcagcatgagctctggg

SEQ ID NO: 452959 - DNA, 76 bp, Homo sapiens
cttggggctgtggcgaatatgtgtgcagcaaacaacttcctccttgtaacctgagtaaagaggacctgttacagaa

SEQ ID NO: 452960 - DNA, 100 bp, Homo sapiens
ccgtgaccgagagcgtgaccgagagcgcgaatatcgtcatcgttagaaggaaaatctacaaacacttggaacagaaatagaacgtcttattaaacaccag

SEQ ID NO: 452961 - DNA, 87 bp, Homo sapiens
agaattcagaagaaacaaaagtgccaccgaagaggattgccagcagtgagtatccctgttgcactctcaaaccaagggttgccaata

SEQ ID NO: 452962 - DNA, 82 bp, Homo sapiens
gctggcgcggcccctagctttctccttctggtgtggggcccgagcctcccaaagtgaaatgcctgaccaagatctggcaccc

SEQ ID NO: 452963 - DNA, 100 bp, Homo sapiens
cctgcacctgtatatagggccaagtcaattctggagacctgggtgtgggtcaagcaaccaggcaattgaaaagctgcaggccggtgctcttgcaactgac

SEQ ID NO: 452964 - DNA, 51 bp, Homo sapiens
ggtgagaaacattaagacctactaccagggaagaatttcgcacgatgtggg

SEQ ID NO: 452965 - DNA, 100 bp, Homo sapiens
agagtagatccgagatatatgcatcttctaaagtactaaagagcatgtgtgagaatttctacaaatattcaaagcctaagaaaattcgagtatgtgtcgg

SEQ ID NO: 452966 - DNA, 80 bp, Homo sapiens
gttgttcttttcttttccatgatatcattatatggacagtttagggaagctgaatatggtgggcatgatcagatagattt

SEQ ID NO: 452967 - DNA, 80 bp, Homo sapiens
ccttcggcagtccacccaccgccgccgcctcccaggtatcgtccttggagaagatggaagcggagaggcggccggcgccg

SEQ ID NO: 452968 - DNA, 82 bp, Homo sapiens
cactccctgaaatctggagtgaagaacgccgccatccagccaccattccaagttatattccctgctcagagaggatacacgt

SEQ ID NO: 452969 - DNA, 82 bp, Homo sapiens
gcggcggcggcagcgacagcagcagcagcagccagtattcgggaaaggcagacagtatgagcccagaggacctggtcggccc

SEQ ID NO: 452970 - DNA, 88 bp, Homo sapiens
agagcccagcgccctcgagcgagcggaggagatggctggcacctgggaacgctatggtaatctatgccagcaattatgacaatgttag

SEQ ID NO: 452971 - DNA, 87 bp, Homo sapiens
ccaataaccacggagccggcagcggcgcgggaggccgtgcgggtgaagtggatcctaaagagaggatagcacgccaacgaaaattat

SEQ ID NO: 452972 - DNA, 100 bp, Homo sapiens
gagggacacgtgctccgcagcgatgggaagacgtgtgcaaatggcagtggcagcaccatgatgcaaaccaagaccttctcctcttcctcctcatccaaga

SEQ ID NO: 452973 - DNA, 75 bp, Homo sapiens
cagcagctgatgaggtgacagctcatctggcagctgcaggtcctggtgaacgccatcatcaacagtggtccccgg

SEQ ID NO: 452974 - DNA, 88 bp, Homo sapiens
gttacctagttttcagatagctttgcttacctctgaagatcacattaatcgcaaatatgcttttaagctcgatgcattctatttctca

SEQ ID NO: 452975 - DNA, 100 bp, Homo sapiens
aagaaccattgaaaaatttgagaaggaggctgctgaggattcactggcaaaatttgctggcagaaaactgaaagactgtggagaagatcttcttgtagag

SEQ ID NO: 452976 - DNA, 95 bp, Homo sapiens
acatcttctggacctttgtccaggtgatggaagctgttttattgtccagcaagacttagactatgtcactgagctcactggggctgactgtgacc

SEQ ID NO: 452977 - DNA, 128 bp, Homo sapiens
aaaaatctgcccttttatgatgtccttgatgttctcatcaagcccacgagtttagtactggagaaaatgaaactgggattgacccatcaagatgcttggctcaataagaaaaccacgttaggagcaac

SEQ ID NO: 452978 - DNA, 75 bp, Homo sapiens
ggagacgtgggcgccctccccgccaaggcccgtgcgaggtttcattgaaaacagatcctgcaaaagttccaggtg

SEQ ID NO: 452979 - DNA, 75 bp, Homo sapiens
agacgacttcctgggccaggtggacgtgccccttagtcaccttccgactatcttgctaatcatggccggttaaat

SEQ ID NO: 452980 - DNA, 80 bp, Homo sapiens
gggaagacattcagcgagaggaacaccatggagacccacaagctcatccacacaggttgctgttgaagaaatctggttgc

SEQ ID NO: 452981 - DNA, 75 bp, Homo sapiens
cccattggtcctcctggccctgctggtgcccctggtgacaagggtgaaagtgggaaaccaggagctaacggtctc

SEQ ID NO: 452982 - DNA, 98 bp, Homo sapiens
cacaacctcaaggagcgttactactcagggctcatctacgtacgttcttcagatgtgtcatggtctgatactcgtaggaccctccgaaaagatcaccg

SEQ ID NO: 452983 - DNA, 100 bp, Homo sapiens
gagcgagagcgagtgcctgagcaacatccgcgagttcctgcgcggctgcggggcttccctgcggctggagcgcttttcctgtattatcgggccaaatggc

SEQ ID NO: 452984 - DNA, 97 bp, Homo sapiens
ctcattctgtgaaaatgatgctggcttacagcttcgccatgggctgctggcccaagaatggacttctagacatgaacaagggcctcagcctgcaaca

SEQ ID NO: 452985 - DNA, 90 bp, Homo sapiens
cccccggaaaacctaaccatgaagacttgaacttaatacagcaagaaagaccatcaagtttaccagcctatggcatgtctgcgttacctt

SEQ ID NO: 452986 - DNA, 100 bp, Homo sapiens
atgcccatgatctggctggacctgaaggaggccggtgactttcacttccagccagctgtgaagaaggatagcagtgagattcacttcaaagtgaaaatga

SEQ ID NO: 452987 - DNA, 75 bp, Homo sapiens
ctctgagactggagtgagagggtcttctgatctgcaaagcccctgagcccaaaacagtctcctactgcagcccgt

SEQ ID NO: 452988 - DNA, 98 bp, Homo sapiens
ccctaaaacaccagagtaacaagggttattcacttgcttcacttttggctaaagttgcagcaggcaaggttatttccagaaagaagagaatggcaaag

SEQ ID NO: 452989 - DNA, 98 bp, Homo sapiens
tggcactcagcagcaagcacagagtatgaccaccactattaagttaccaaagtgacccaggtagatggaaacagccccgtcaggttttccacagagac

SEQ ID NO: 452990 - DNA, 75 bp, Homo sapiens
gggatttcgagcatttcgctcgcgagatcttctctgtggcggagacagccaggtgtttcagtcacctccagtaac

SEQ ID NO: 452991 - DNA, 100 bp, Homo sapiens
aaaggctgatagcttttacatcatagagtctggcgaagtgagcatcttgattagaagcagggtgtttggagaagagggattgaccctgaatcttgaagac

SEQ ID NO: 452992 - DNA, 75 bp, Homo sapiens
ggcagacaagcagtctgtgcacagccggctgcctaccctccagactgtccgctatggctccaaggctgttacccg

SEQ ID NO: 452993 - DNA, 83 bp, Homo sapiens
cgcggattcgccgaggcaccgaggcactcagaggaggttactcaaatgagtcgtccagacttgattctctttctgatgaaata

SEQ ID NO: 452994 - DNA, 87 bp, Homo sapiens
attacatattccagtaatggtggatgaagttgttcattgtttgtcaccacaaaaaggacaggtagttttggatgttgggtgtggaac

SEQ ID NO: 452995 - DNA, 51 bp, Homo sapiens
caatccgtgctctgacagtgtctgttatagatttcagaagaaagtggtagc

SEQ ID NO: 452996 - DNA, 101 bp, Homo sapiens
gatccccaagcccgccacgccgcccagcccggccccgcccgcgccggaagagccacgccggaacaagcctggcttgaggatgctcaggtcttcatccaaaa

SEQ ID NO: 452997 - DNA, 100 bp, Homo sapiens
agaactgggcgacggagcctttgggaaagtgtacaaggttgatgctatgaaactgggagtaaaggaaatgaagaaggcatacaagcaagtgaagatcgac

SEQ ID NO: 452998 - DNA, 80 bp, Homo sapiens
agcgtcgccgccgccgccgccatgaacaactcgggcgccgacgagatcgggtgtccggctttgctggcccagcaagcctg

SEQ ID NO: 452999 - DNA, 50 bp, Homo sapiens
cttttggcagcatgaaagttagcagttttaaatgcacagagagcaggata

SEQ ID NO: 453000 - DNA, 101 bp, Homo sapiens
agagcaccccttttaccactgcctggttgcagaagtgccgaaagagcactggactccggaagatatcaatgatgtcaaacggctgaaacctggctacttag

SEQ ID NO: 453001 - DNA, 75 bp, Homo sapiens
tgggcaccaggaagcgaaggctggaaatgaaggaccatatggtcagcccaacagccgtagcatttttggagagga

SEQ ID NO: 453002 - DNA, 96 bp, Homo sapiens
agagactgcagtctcgcacagagggaggagtgagatgtggatgttgcttttgcacctacgggggcatctgagtccagctccccccaagatgagctg

SEQ ID NO: 453003 - DNA, 140 bp, Homo sapiens
ccgcagccgagcggccgtgggcccgggcggcgggcggagacgtgggcgccctccccgccaaggcccgtgcgaggtgacagtgctggctacaatgctatccagccggtggtggccaagttcctgggggatcctagggctgg

SEQ ID NO: 453004 - DNA, 80 bp, Homo sapiens
ttccccctccctcagcttccgccccaaaagattttaggtgatgggcaagtcagaaagtcagatggatataactgatatca

SEQ ID NO: 453005 - DNA, 101 bp, Homo sapiens
gtcccgcacgtctgccgctgccaccggcgcgcccgaagcgtttcccaaagtgtattctgcggaactagcacctactgtgttctcaacaccgtgccacctat

SEQ ID NO: 453006 - DNA, 74 bp, Homo sapiens
cctccagagcaggagaccttctacgagcagcccccactggtgctgacatccatgctgaaaacgaggagcccctg

SEQ ID NO: 453007 - DNA, 100 bp, Homo sapiens
cgggaagaacaaagacttagactcggaatggatgtatatggctacctactggcacgagaagggcggctagaggatgttgagaaccttggatgccgccttt

SEQ ID NO: 453008 - DNA, 100 bp, Homo sapiens
gctgcccgtctttctcagccagctctgaggggacccgcatcaagaaaatctccatcgaagggaacatcgggccggtgcataaacttctcccgagttccat

SEQ ID NO: 453009 - DNA, 75 bp, Homo sapiens
cgcaggttccctacacggtctcctgggtcaagaaggacagaataacgggctcccagattcacaagccccaccaag

SEQ ID NO: 453010 - DNA, 100 bp, Homo sapiens
taaactcttggcttcaggttctgatgatgcaaaaggcagtcgatgatgtgaagaaaggttacatcaaagcagaagaaaagtcctatcaattacagaagct

SEQ ID NO: 453011 - DNA, 82 bp, Homo sapiens
ctctatgccgacatcgacgccgcctggcaggccctgcgcaccagggtttccaggcctgaggtgcccgccctggccccaggag

SEQ ID NO: 453012 - DNA, 80 bp, Homo sapiens
cacttgcttgggatcctttatcctggtcatcttctatttccaaagtgtgtgcagtggcctcagggatccggaaagtctag

SEQ ID NO: 453013 - DNA, 82 bp, Homo sapiens
gggatggcttggcaatctggtacacaaaggatcggatgcagccaggtcacgcatgaagggagcaccgtggagaagacagtgg

SEQ ID NO: 453014 - DNA, 75 bp, Homo sapiens
agcctccaatccatgtggcaacattcagcgctcactctatgagaggtctgcggggtttccgagaggctcgccggg

SEQ ID NO: 453015 - DNA, 90 bp, Homo sapiens
ctaatcttgtacttcaagaggaggaatcacgctcggaaacaatggggctgccacacttgtgtatcccttcttccttgaatttaaccagga

SEQ ID NO: 453016 - DNA, 90 bp, Homo sapiens
gggaacacattttctcatcacagtatggtctcctctgagcctccggcctccataagacccaaaacagatgacacctcttcccagtccccc

SEQ ID NO: 453017 - DNA, 96 bp, Homo sapiens
ttaacattgctccacgttcaaacagcagtgttagcaagacctgggggagagaactccatccggcacaacctgtcactgcatagtcgattcatgcgg

SEQ ID NO: 453018 - DNA, 100 bp, Homo sapiens
gaggcgggcggcgcgcggcggcggcgctcggcgatggtaggcgtccctggagcggccgccttccagcgagaataaaggcagccccgttgatgactgaaaa

SEQ ID NO: 453019 - DNA, 83 bp, Homo sapiens
agcagaagaaatttggagaagaaattgcaaggttacagtgttctggacttggtgcctctttctgttatatgctttcctattta

SEQ ID NO: 453020 - DNA, 100 bp, Homo sapiens
atcatcattgttggagatgagatccttaaggccatgggaacttcccttacctctgtgggaacctgaatgacgtcgtggtcagccccctcttgtacacgtg

SEQ ID NO: 453021 - DNA, 100 bp, Homo sapiens
caagtccaaggatgaatcccagtccctgttacggtgcttagatgagtacgaagatgatgaagcagggcagaaagagcggaaacgagaagatgcaattaca

SEQ ID NO: 453022 - DNA, 50 bp, Homo sapiens
aggcactgctttttcatgacgaaggtcagtgcaccagatattctgaaacc

SEQ ID NO: 453023 - DNA, 100 bp, Homo sapiens
ggggcagttcgggccggctgtcctggcgcgcccccaaatacatcaagatgtttgtactggatgaagctgacgaaatgttaagccgtggattcaaggacca

SEQ ID NO: 453024 - DNA, 82 bp, Homo sapiens
gtccagcagagcgaggaggccatgcagtctctaggtgtgaagcttacactctctgctctggtagatgggaagagcattaatg

SEQ ID NO: 453025 - DNA, 51 bp, Homo sapiens
cagctccactgaacagataagggtggttggaggcaaagtaaagaagcccgg

SEQ ID NO: 453026 - DNA, 76 bp, Homo sapiens
ctgggcatgaggagcggagcggagaatgccaagcaaaccagtccagctacgggggcccagccagccagcagctgag

SEQ ID NO: 453027 - DNA, 50 bp, Homo sapiens
caggccgatccgctccgctcacggtggttttggaatgtatgcttaaaaaa

SEQ ID NO: 453028 - DNA, 74 bp, Homo sapiens
ccaataaaaataaactgcttgaacatcctttgactggttagccagacaaatgtttatgggtcagcccagagacg

SEQ ID NO: 453029 - DNA, 75 bp, Homo sapiens
ccatggtgcattgcagttgcgtgttgttcagaaagggggtcctgatgacaacttaattgaaggtggaggaacaaa

SEQ ID NO: 453030 - DNA, 75 bp, Homo sapiens
ccggatctcctggaagtgttggcggaggaaggtgatgcaggttctgaatgctgatgccattgttgtgaagctgaa

SEQ ID NO: 453031 - DNA, 94 bp, Homo sapiens
cgacccgcgaacccctctgggatccccgccgctctgtctacaacccgaggtcaaaatgcagatcttcgtgaaaacccttaccggcaagaccatc

SEQ ID NO: 453032 - DNA, 100 bp, Homo sapiens
agaaaaagatcccaagaatctcgagaatggagctcttcagccatcggacttggacagaaataaggcaaagccaaagctaattgagccactcgactatgaa

SEQ ID NO: 453033 - DNA, 96 bp, Homo sapiens
cgctggggcccccagaagtgatcgctcagctggagaacgcggctaaagttctgatggttcgatacaagaggctgttttcctagcgtggcttgctgc

SEQ ID NO: 453034 - DNA, 100 bp, Homo sapiens
ccccaaactcatggaaattgatcaggttgttatggagttgatggagagagtgactctattatgagttcagcttctgaaaactccactgaaccttggtttt

SEQ ID NO: 453035 - DNA, 100 bp, Homo sapiens
atttcggacaagaaaagaagcagcttgggccatcacaaatgcaacttctggaggatcagctgaacagatcaatttttgcctgtatacatgcacattcgag

SEQ ID NO: 453036 - DNA, 75 bp, Homo sapiens
cctggacgaagccacccccaccctcaccaacagcagagacagtggtggatccagaaatgacaccgtacttagaca

SEQ ID NO: 453037 - DNA, 75 bp, Homo sapiens
agcacttccacagccaagtgcgggagtccacgggctccagcaagagcttcccatgtggctcggagcacctgccct

SEQ ID NO: 453038 - DNA, 100 bp, Homo sapiens
tggcaagcagtctacagagacagcagctaatgtgaaagagctcgtgcagaatttactgggtgagtcagatgattccattctccgattggccaaggccgat

SEQ ID NO: 453039 - DNA, 51 bp, Homo sapiens
agtgttataccatgagtcttggtatgccgagattttgctgtcctggaggac

SEQ ID NO: 453040 - DNA, 75 bp, Homo sapiens
ttggaagcagccgatccagcctgcggagcctgtggggcagaacgtgcgcatcgaccccagtagcctgtccttcaa

SEQ ID NO: 453041 - DNA, 90 bp, Homo sapiens
gatgagatttacctgtgagatgtttcatcccaacaagcctgtgtggtgcccctatctccttgttccaagggcctctcttgccttgaaagc

SEQ ID NO: 453042 - DNA, 82 bp, Homo sapiens
ctggggataacattcatgcagaacatcaggtcagcccaaggccaaccccactgtcactctgttcccgccctcctctgaggag

SEQ ID NO: 453043 - DNA, 100 bp, Homo sapiens
tggaagtgggcagcaagatctacgtggatgatgggcttatttctctccaggtgaagcagaaaggtatcctgtggtctgaggccatcttcctcgaggcaag

SEQ ID NO: 453044 - DNA, 90 bp, Homo sapiens
gcactcagtataccttcagcagcattgagagggaggaggaggcgagaagatggcggacgaccccagtgctgccgacaggaacgtggagat

SEQ ID NO: 453045 - DNA, 75 bp, Homo sapiens
cctctccagccatgtggaactgacacagacagcagacacagaggcctccagcacagtgaagcctgtggagcagtc

SEQ ID NO: 453046 - DNA, 82 bp, Homo sapiens
tgtatttgactgagagaaacccactgaagacgtctgcgtgagaatagagaccaccgaggaaggatgcctgtggccctcggag

SEQ ID NO: 453047 - DNA, 80 bp, Homo sapiens
ggagaggctgagctgctccaggacttgggatattgatgatgttaagaagttcaaaccgggttacctggaagctactctta

SEQ ID NO: 453048 - DNA, 98 bp, Homo sapiens
tttttcttacaaaaaagattgcagttatctgtccagaaaccagagcaagttatcaaagaggtcattcccaaaagcaagttcgtcttggtgaagttcga

SEQ ID NO: 453049 - DNA, 97 bp, Homo sapiens
caggagttcatctacccggagaagcaggagccctactcggcaggccctgctgctcctgggggccgccgccctggcctgcctcgccctggacctcctc

SEQ ID NO: 453050 - DNA, 83 bp, Homo sapiens
ccgcggccgagagtgcagcgagtgagaagccctaccactgcaactgggacggctgcggctggaagtttgcgcgctcagacgag

SEQ ID NO: 453051 - DNA, 75 bp, Homo sapiens
gcccgccccgcggggggtgggcgcagctcgtcgcgctccgcacaaaagaggtggagaagagcgagtacttgagaa

SEQ ID NO: 453052 - DNA, 100 bp, Homo sapiens
tatttgaggtggtgaaactggggaaaagtgcaatgcagctttcatagtaaccgtccaagcaaaaggttttgtatttttaagaagcattcagaaaatctcc

SEQ ID NO: 453053 - DNA, 80 bp, Homo sapiens
gaaactgattggaaactctttgggaaagccactcgaaaaggaggcaagatccaacctgagatgaagacttttccagaagc

SEQ ID NO: 453054 - DNA, 50 bp, Homo sapiens
ggcctccaaaagtgctgggattacagattgacttgatgcacaacatcaca

SEQ ID NO: 453055 - DNA, 148 bp, Homo sapiens
cgttgatattgaacacatgtcttcaggcctcactgatctccttaaaactggatttagcatgttcatgaaggatttttgtccctgagtcatggaagacagaagagctgaaaagtcatgtgaacaagcatgtgaatcacttaagaggcag

SEQ ID NO: 453056 - DNA, 100 bp, Homo sapiens
gcaggagtgctgccagaaatttgaacaactttccgaatctgcaaaagaagtctggctcttgctgattgaattcctttggtgcagtttagcatgttcctct

SEQ ID NO: 453057 - DNA, 100 bp, Homo sapiens
ggaaattcactggggtgtcactttcactggcctccagccccctcctaggaaggacacctagctcccctgtttgacaaccctaagttggataaggagctgc

SEQ ID NO: 453058 - DNA, 101 bp, Homo sapiens
tgagttcctgcatgagtatgacatgaccaagatgcccgagtgctacttctactccaagttcggcctctactacgtggacagtgaagggaaccggatttcag

SEQ ID NO: 453059 - DNA, 83 bp, Homo sapiens
cttccgcttcctggcctaaatctgacacgcacgactccccccgcggcaactgcacaggggaccgggccgagtactgcaaggca

SEQ ID NO: 453060 - DNA, 89 bp, Homo sapiens
gcagctcactgatttcatcctcaagtttccgcacagagttggaagagactcaggtccccctcctccctcccttgctataggccttcatg

SEQ ID NO: 453061 - DNA, 88 bp, Homo sapiens
caacatctgcgccatcgaggacatcggctacctgccgtccgagggcacgaaaaacacaccttgactttagtcagatacatcactgtct

SEQ ID NO: 453062 - DNA, 148 bp, Homo sapiens
ctgtctttgtgtcctgagatcaaatggcacttcattggccacctacagaaacaaaatgtcaacaaattgatgggtattattctcactaaggttggttactatactattccatctatggatgaccttgctaaaattaccaatgaaaaag

SEQ ID NO: 453063 - DNA, 75 bp, Homo sapiens
tgcctgaaggagtacatgccctttatgaagatattcttgaggtcgcagcgccgtgttacgtttcatctccctgat

SEQ ID NO: 453064 - DNA, 75 bp, Homo sapiens
tgtgccctacatcatcgacctgcagtccatgcaccagtttcgccaggacacagggcagctcagttctggcaccaa

SEQ ID NO: 453065 - DNA, 100 bp, Homo sapiens
cagcatggccccaaaggagagaagggctacccggggattccaccagaacttcagggctggtgaattaccatatctccgtcaagtgcagtaaccagttcaa

SEQ ID NO: 453066 - DNA, 100 bp, Homo sapiens
cgcggggttagccactgctggctgcttccagtgttcgccgagaggcacacattctggcagttccgccatgagaacccccagacccgggttgggggcccgc

SEQ ID NO: 453067 - DNA, 123 bp, Homo sapiens
atcaaaaagtgattaagcagagaatggagaagaaggttgattccagtggaatgcagtagccctctgggcctgggatattgtggttgataactgtgccatctgcaggaaccacattatggatct

SEQ ID NO: 453068 - DNA, 100 bp, Homo sapiens
aggccgtggcccctcagccgtgtggctgctgagctctgtggagccagccggctcagttcggggaagctgcaggagttcggcgtgggtgatggcagcaagc

SEQ ID NO: 453069 - DNA, 100 bp, Homo sapiens
gcccagaagctgcagttggatagccccgaagatgcagagttcattgttgccaaggagggtttctcttcccctcccagttcgctgacctcgccctccacgc

SEQ ID NO: 453070 - DNA, 74 bp, Homo sapiens
gtgtgtcttggcttcggagcattcagcaggtgttacaggtctccaattgagaaacatggcactgtttttcctgc

SEQ ID NO: 453071 - DNA, 101 bp, Homo sapiens
gggatgcggcgccctctgaatcttttgtagtattagacaatgaacaaaaagtttatcagcgaatacatcatgagaacattactactggatggaaatccatt

SEQ ID NO: 453072 - DNA, 100 bp, Homo sapiens
aggaattcttcttccattaataaatcaactcagtgatcctgattatattaatcagtatgtcatatggatgtatcgtcgtcctccccgcagtcaggctgcc

SEQ ID NO: 453073 - DNA, 83 bp, Homo sapiens
cagagcattggcaggaggggcaaggtggaacagtttgacaagtatgcgcccaagctggacagcccctacttccgacattccag

SEQ ID NO: 453074 - DNA, 88 bp, Homo sapiens
gtcagaaagtatcttcatgcttgcagggcctgatttgaaggaagatctccagaaacttaaaggagtacttgattcttcagaaaacctc

SEQ ID NO: 453075 - DNA, 100 bp, Homo sapiens
tggaagttagagaaaagggctatgaacgattaaaagaagaactcgcaaaagctcagaggacctgaaggctgaaattgacaagttggccactgagtatatg

SEQ ID NO: 453076 - DNA, 89 bp, Homo sapiens
ggaagaggcattgaggactttccttacctgtttttccagctcacccactgccagcagagtgctgatgggcccgtgcaacagttgctggt

SEQ ID NO: 453077 - DNA, 100 bp, Homo sapiens
agctgcttatggctataaaattacaggccactcgaccggatatgatcaggatcttgtcagcagcccttcatgtagtgctaaggagggatatgtctctgaa

SEQ ID NO: 453078 - DNA, 90 bp, Homo sapiens
ggatcatggccgcagccgctctggggcaggatttacaaaaggtgcaggtatgagcaggtctgaagactaacattttgtgaagttgtaaaa

SEQ ID NO: 453079 - DNA, 78 bp, Homo sapiens
ggaagtgcagctgcctcagttcttagcgcaggctgtggaaaatctctgttctcacaaagtctccccaatgctctacaa

SEQ ID NO: 453080 - DNA, 101 bp, Homo sapiens
gtacaaatacccctttgaattaattatggctgaagccacaagcagcccagccctccttaatcaacttcaaggagcaccttcattagtacagcttgcatatt

SEQ ID NO: 453081 - DNA, 100 bp, Homo sapiens
ccgtagtagctgcagcttcgagtcacagcagatggtcagtaggacagaaggtaacattgatgactcgctcattggtggaaatgcctccgctgaaggcccc

SEQ ID NO: 453082 - DNA, 82 bp, Homo sapiens
accaaccacactaacgagattcaagattatttgcaacagctcacgggagcaagaacgaaagtggatctcttcagcctgggaa

SEQ ID NO: 453083 - DNA, 75 bp, Homo sapiens
gatgactttccatgctattggaagctccattgaagccagccatgatcagaccactaaggcttttcttcctacgat

SEQ ID NO: 453084 - DNA, 100 bp, Homo sapiens
aacctcatagcagctgcctgccagaatggaagcatacagatctgggaccgaaatttgactacctcaaaggaagaccttctgcaggctgattttgaaggtg

SEQ ID NO: 453085 - DNA, 74 bp, Homo sapiens
aactggatgacaccaaattccgctctcatgaggtgtgatccctcacatccacaaatctctgattggaaagaagg

SEQ ID NO: 453086 - DNA, 100 bp, Homo sapiens
ctaccgtgtcagcgggaataaaactgaccaagacaatattcaaaagcagtttgatcaagctcttgaatgtcgtctctcaactagccaaacggaatctgcg

SEQ ID NO: 453087 - DNA, 75 bp, Homo sapiens
cactacagggaagtgcatcacatgtcaggactaccgaccagactcccggaaatcatgttggtaggatcccagtct

SEQ ID NO: 453088 - DNA, 90 bp, Homo sapiens
atcacctccatgaagtgcatcatggggcaggatggcaccagccttggtggacgtctgatttatgaagctccccatccacctatctgagta

SEQ ID NO: 453089 - DNA, 75 bp, Homo sapiens
ctacaggacacggtgctggccgccggttgcaagcagatactggtgcctattgacttgatgcacaacatcacaaag

SEQ ID NO: 453090 - DNA, 50 bp, Homo sapiens
cttgtgaaatcatgcctctgcaaagcatccagtcctggatgagccaatag

SEQ ID NO: 453091 - DNA, 100 bp, Homo sapiens
ccggccggggatagcctctcttactaccactcacccgcagactccttctccagcatgggctcgcctgtcaacgcgcagcctgtcctgggagctggagagg

SEQ ID NO: 453092 - DNA, 83 bp, Homo sapiens
cgttagctaattaaaacatttttcagggacgtagccatccagagatggtgagaacaagaccaagattggaaagccagcttcag

SEQ ID NO: 453093 - DNA, 50 bp, Homo sapiens
tttccatgtcaacatagtccagatgaagatgacgccaacagactcgggga

SEQ ID NO: 453094 - DNA, 83 bp, Homo sapiens
aataagcctggaagaaaaagatacaacgaactagcacaacgagggctgcccccaagtgtaactccagcactgtgaggtttcag

SEQ ID NO: 453095 - DNA, 100 bp, Homo sapiens
gaaaacaaggatacctctttattggcttctgccaccgatccagaaccctgctcctcaccccacagcttgtagaccctggagttaaggcatggacacccac

SEQ ID NO: 453096 - DNA, 83 bp, Homo sapiens
gtttgcagatcgggagcgcaaggtcgccctcaaggccatgatcaaaacacccctctgccatgaaccagtccatcccagtggct

SEQ ID NO: 453097 - DNA, 74 bp, Homo sapiens
tctacctatggaaatccaggcagccaaggctatggacaagcatcacaagaaactctgatgaggaagaaagtgct

SEQ ID NO: 453098 - DNA, 100 bp, Homo sapiens
gtttatgatgatgagacttatatgatgcaagatgtggcagaagaacaagaagttgagaccgagaatgtggaaacaggatgtacagttacccagcacgtgt

SEQ ID NO: 453099 - DNA, 89 bp, Homo sapiens
gcgccgcgggctccgcgcccggccggacccgggcccgaggagccaagccgccatggcctaccacagcttcctggtggagcccatcagct

SEQ ID NO: 453100 - DNA, 75 bp, Homo sapiens
tgaaatctcgaaggggacctcatgtccctgtgggacacaatgcccccaagctcattgctatggacagtgctatca

SEQ ID NO: 453101 - DNA, 83 bp, Homo sapiens
aagagacagataaatccaagtcaaataccaagcaaaatagtgtgcctccttcacagagaagatgcccaggatatggatgccta

SEQ ID NO: 453102 - DNA, 75 bp, Homo sapiens
gccactagcagccagttccggcccgaggacaccgactaccagcagatgccggtgcagctgacgacagccctgcgt

SEQ ID NO: 453103 - DNA, 100 bp, Homo sapiens
cggcgggagcatgaacgcccctccagccttcgagtcgttcttgctcttcgagggcgagaagtaccttgtgggtcaacgactcgtgaactacgaacggaaa

SEQ ID NO: 453104 - DNA, 82 bp, Homo sapiens
ctccactttcgccagcccgtgccgcgagcgcggcctgcaggagatgcctgaggaaacccagacccaagaccaaccgatggag

SEQ ID NO: 453105 - DNA, 83 bp, Homo sapiens
cccattatggctgtaactggagatgacacagaaagcacacctgagctgctcttaatatcatctcttgaagatacaaatgaaac

SEQ ID NO: 453106 - DNA, 100 bp, Homo sapiens
ggttccaatgagacagggcacaccaaactccatctggtcgccactgggacactgtgaaccaggagtgagtcggagctgccgcgctgcccaggccatggac

SEQ ID NO: 453107 - DNA, 100 bp, Homo sapiens
cggagctgccgcgctgcccaggccatggactgtgagatctggaaggtagaaaagggaccagatggaaaagccatcgtggaatttttgtccaatcttgctc

SEQ ID NO: 453108 - DNA, 98 bp, Homo sapiens
agctgcctgctaacatagctgtttgcagttctaaggaaagaccacagcaagattctttcattcgtctcctcctagcctgggggaccaggctcgaactg
